United States Patent Application Publication US 2007/0150978 A1 - sequence listing, part 6

SEQ ID NO: 33741 - DNA, 441 bp, Oryza sativa
  unsure (1)..(441): unsure at all n locations
cagcttgtaagataagactcaaatttttttactctatgttgtctagggagaaagaacctctagtttcatccataagacgtgagaaatatccctttagttgtatggttcaacactaactgcaaggttgtgtgcgcaaaagaaacacactttagatttggtaaagtacaaacatgtcattgttagaaggacaataggggaacttcattctctggaagaatagtggatattcaccagtgataaagcataactcacaggaagtatcgtaggaggaagttcctcgcaaacaggcgataatgaaggatgttcaattcgggcacaggatattnttcgtgacaaagtgcacccttcatattagaaagactcctggcctcttattctacgtaaataaaataacagatgtctaagtactatgaaccaataccattagagatacttaaatat

SEQ ID NO: 33742 - DNA, 423 bp, Oryza sativa
  unsure (1)..(423): unsure at all n locations
gagctgaattataagaggctctgatgtactatcttgtattctataattacgaagagagtagagtataagaagtctgaggaatttcggagatgtcggtaatcctctcatgtttattttattctgttaattactctgttttcaatagaaatatctttctgagtaatttagatttacttgtgagtacttgtgagaattacctcttataagaattattgttcactataatcgactaaaatatagtgattgctttagtgagttagaaacactaaagtagatattaattgctcagacgtggtgtttaggtaatntatatccagtaattgttgtgtatcccacagtacgtttgacgtgggtgtagaggtggtgacagccctcaagagcacttaagttctccctgtcagggtatgtagtagagcgacatct

SEQ ID NO: 33743 - DNA, 377 bp, Oryza sativa
aaacctacctataaacgaattagccagctcttgctgcctaagcccatctacagacggacgcagaccaacgagtaaatgtgctcggtcataaaccaatattcttccattgacattgactccatcggatatcaagaccatcaagtggcattataaagatgctggagcatggatcaccgctccattgccaacaactcacagcggtccttcatgagagaatcccacatcgaacacgatgaacagcagaatttcttccctctcgacaagcaaatggtgcgtccagcattcgctcgcgcctgatgataaacaaaatcgagaatacgattaacgcctccatgcttaagactatcagacaactggaacacctcggcatactatat

SEQ ID NO: 33744 - DNA, 481 bp, Oryza sativa
cataaaactaagcttgtaatcagatggcccgtggtggtcgacttgccggagtcttagtgtctctatgaccacgatgttgacgtgcgtcttctacttacccatggttgaataaggaggtagctaactgcggcatataatgaaacaaagattataaacaaataaatattacaggtaagctcacagatcaggttacttaatctaacaaagcgctaacatagttaatgggcatcaaaatcagtgaaggaattacacagacggacagtaataaacccaattgaaacaggtagagacgataacagcatctactcagcagcagtagtagaataaagaacagaacagaaactaagctctaggtctatgacaacggattatagacacaactcttccaacaattcaaccgatatttatcaacttgtctagaatatgcaacagatcaagttaatcatccaattctaccgattgccaacaaatcaagttatct

SEQ ID NO: 33745 - DNA, 406 bp, Oryza sativa
  unsure (1)..(406): unsure at all n locations
acacataaaactaagcttcgctggctaatcaattacatattccgtaaatattgttacatgcccaatccagctattcttgaattaagaaaaatccaactattcttcttctattttatttcaccatgactttatgttacgacttacaaaaaatacctaagtagaatgggcttatatatagtagcaaaattccttacacgcacctacaacctacggacctcacgttcactttaggaccagtactgtattanaaaggagttgattcagcttgtccatatcccgattaatcgcttggtgccttctacaaaaaaaaatatttctctcaaaaatcgcttgggccttggtggaccataagattgacagccccatagcttcctttccaacatggctggtgaataatactatgcat

SEQ ID NO: 33746 - DNA, 477 bp, Oryza sativa
  unsure (1)..(477): unsure at all n locations
agcttgtatatgattactcacccctttcgcgcctgtcttatanagcatccgcacaaacatactactagcaggtctattctggttctctgccatagaacggacttcagccacgtatgcgtatatattaagctgcctcttcttaaacacatagacatgggtggtgctcatcttctcctgggcaataaggactttttcactaccattgattataaaataccctccttggtcataagggcactctccaagttctgtaagatccttttcggactgttgaaacagtgtgcaataactagaacgcaacatgataggaacctgcaggagaagaaacagttagaaagaaaactacataaaagggcaaagtatccagatatgttaattacaacctttccaataaagactttggggtactccatagtttctgtaacctcttcacagacatgtccttntttcataactctgtatgatacatcaacatat

SEQ ID NO: 33747 - DNA, 255 bp, Oryza sativa
  unsure (1)..(255): unsure at all n locations
ngngaagaggatgctggagaacccacttgggaagagttcactactgtatttcgcgagaacttcgtgcctgctgcggtaatgcgtatgaagaagaacgagtttagaaggctacgacaagggaacgcaacggtgcatgaatatctgaaccaattcactcagttggcccgctatgcaattggagacctcgcagatgaagaggaaaagatcgacaagttcatagaagggctgaatgatgaattgcgtggacctatgatt

SEQ ID NO: 33748 - DNA, 477 bp, Oryza sativa
tagaactctcgcagcatgcaagctttgataggttccctctaattcaaacacttagttgtatatatacacagttgctttggtgaaactaaccggcgggtgaaatacttgtcagtcctaacccccgccgagatagaccgttcttgcttcattgtgcagaatgaggaggcgactgtcacgtctgatcaaggggtctggctctttatcaagtctccatgacgagtctagtactcattcatcaacagatgtctcgatggaagacgccgaagcttcgggatgacttctgaacgacaccgacctcgaccttgttagtgatcgggagagacaagcctactacatgctgaacgaccgggagtatgctcacacgcgagaatactcaccggagctgctaaataaagataggtatggatgctgaatttcgtactatattggaagctgttggttggcagagaatttgatgtgtgagatgagcctggttct

SEQ ID NO: 33749 - DNA, 456 bp, Oryza sativa
  unsure (1)..(456): unsure at all n locations
ntaatanaataattaaaacatagttggctcaattagctactttatttcctgcaaatgagtctgggtggattccggtgcaacccgaaccctccgttgaaaatgttaaggcgatcacaatgaggggaggtaagtccactcatgatccgccaaatcctaaccctgcagggactagcagtatcacccaggaagcatcatctggtaacaaggctgatgaataagtttagctagagaagacagtgtcgcaagaatactgtgacacacgactgttgctattccctcanagaagcaggaaactgtcactagacgagcagcttgcccattttgttgaggtgattcaaaagatccatatcaatgtgccattgttggatgccatgcaattgccaacatacgcacattatcttanggatattctcaacaacaaaaggccgctgccaacaactgaggtggtcaaactga

SEQ ID NO: 33750 - DNA, 281 bp, Oryza sativa
tctcctgtgaatgatagcaatatgcagtcctatcacatcatcttatatccaatcaaggatgatgcagtcactagaacaatgccagctatatctctccagaatcaaaatgagcagccacgctcgtggttttcagttcgctacttatcattgtgtaatcgaaagtttgcagcaatcatgtaataaataaatatattcatgtctataaacaatgagcttgctatgtttatggatgattcatgttgaggatacaatgtaccgatgataagcaccttccctttttg

SEQ ID NO: 33751 - DNA, 144 bp, Oryza sativa
aacgagctgcagctaccagactaatttgaacgatttgtattttctgcaacagggtaagttcgcaacatggactattcgaagcctcaaacacggcgacacgcaatgcatccgtataacacctcgaacgaataatgggcaaagctt

SEQ ID NO: 33752 - DNA, 470 bp, Oryza sativa
actgagctgcagcttactccatacataagtggcaatagtggcatactttatgtctttggctctaaaacaataacactgctcgctgttacccctttaagttagctaactagtcactatatcgcccatgtttgcagaagaaagacatatgattagtagatattgatgtctcacctcattcatttcatgataggagaaaatctaacaacctctagagattatattggtcattcgacgtccctctagtgaatattttggtcaactatatcctataggtggtttcttggagagtaattctacattccttaaggaggtatttaggaggtataataaggtaccactttttctattgaatttagtactaggaaaatgatgactatatttacataaattttggtacctatgtccttctaagaacataaatactcttcttggacctgggtctgcactacctcttttctacattcacactg

SEQ ID NO: 33753 - DNA, 387 bp, Oryza sativa
cagtgtggcttcctctgcttttgttggtgagccaacaagaaacaaatacatggccacactttggagaagttgggagggtggtctctcacggcataaagtcctaaaaaaggagggaataagaggtgatacggatgggtttgacaccggctgggcagccaagaagcagccactagttcttccagacctggccaggagggtcttcatcaagagggtgaccctgccacttggatgatgacacaatcagtttcaacatttcgttcatagttgattataaactaaaatgcttattagacatataaattaattataggtaaaacttttatatatgtgggttcttcacgatctaatagcaaacgctcgaaaaattatgatacaaaatataaaaga

SEQ ID NO: 33754 - DNA, 236 bp, Oryza sativa
  unsure (1)..(236): unsure at all n locations
gggaagcggcaccgncgcaccttcacctgctcgcagtcgtgttgggttccctgcacgcgctgtcctagagcacccctccaccgtcctttgccgaagacnggaagcgtcngcttggcgtcgccctaccgccgacgaggtccaggccgctcggcgctcgtcacccgttgcacgcccacctagctcgaccgtcgacgtcgtggcacggctttgcgccggcctcgggtgcgcccacccag

SEQ ID NO: 33755 - DNA, 192 bp, Oryza sativa
acactattaagactcaagcttgagaagatctcctgatgtgagcgtgtgcatttatatattttatgtaatgcttcctgaattacgaagatgactgtctaacttactgatacacctgttgtagatgctatacttggacgaaagttcatgttgttgtccaaagttgtctgaaacgcgctgattggctgataactt

SEQ ID NO: 33756 - DNA, 473 bp, Oryza sativa
  unsure (1)..(473): unsure at all n locations
tgtcgtcgatggcgagccgaattcgctctccctggctagcgtgctttatctcgctgcttcgggttagcttgcctgcatgagctangaaattttgatagttccaaatggctggcctcaccaagttaagctagctgttccaagccttagatataaacataccgtaactagcctagctcagttcacaagcttaggtttctaatcctaaagcatcgctaaatatctatctatctattatatactaaaagcctatgaaacatccttaaaacgccctangtcgacacatggcaccccntaaaacgctcctaagctgccaagtggcgctctaataaattagataaacatctaaccattgattntcccttaactcggtggacccatcagttntgaccattagataaatttccatctcttcaccctaatatacgaatgcttgcatgcttggnnnccaccaaataatagttaagagtaacaaa

SEQ ID NO: 33757 - DNA, 420 bp, Oryza sativa
  unsure (1)..(420): unsure at all n locations
agagatgcatgcatgcattttattcatctagatccggccattaacgtgacatgcatactaccctgagacccaccgtcactcgtgccgccgttgtcattgatttcggtaaccacagatcacgataagactaccattatcttcgcaaagaacccctctttcttttctcttttggtttcatgccgagatctgacaccgatcaccgtcagaaagctcgagaacgagctcagccatggctagctctgtttcagctcgaaccagggacctctgtggagaagatacanaactgtaggtactactttggaaaaactgccacacaatgcaacagtcatatgactgtcgattgactgcctgaaaaccagagatctttttgcatattggatctcactgaccgtggaccccatgacttaaaatctgaaatct

SEQ ID NO: 33758 - DNA, 420 bp, Oryza sativa
ctttacacatagcagattgcagtataccatgttgtttcatattgttcttttaacaacaatgggaattccttttctccctgtatttgtaccttttctagctaatattcaatgaactaaatagttcaacatgcaggaaatatctatgtcaatctactataaattatgcctagaaggctagaacccactatttttttcaagggaaatataagcaaataatgtgacaaggggagcagaccttgcatttttttttctggacatcgagtccaacaattaatcggcaggaaaatccgacagagtagacaatataactgaaggctaataaaaatctgaagttatatatgcacaatacaactacagtgggcaggtataatagtattatgaatggtgtataagaaatattgtaagagagaactctgacac

SEQ ID NO: 33759 - DNA, 400 bp, Oryza sativa
  unsure (1)..(400): unsure at all n locations
ctgctgcatgcacttatnggtcatgtcaggctgtgcttttactattaattgcatactcagaacaagantattagtagccactagaacatagacagtctcgaattcacatgtttgatcgttaccttctctactcacttctacacaaatattaacaatctaactgcatgaaagcatttttcacgactaatctactaatgtcatgttcagatattaaatcttaatgttgcatgtactaatgttataaaataaggtttggttgtgcatattccacaatgtcatactattagatattccagaaacaccaacatgtaacaaactataatggattcaatgctctgtggctgcataaccaaaactggctgttctgcatggttgataaaacgatgtaatactaaagtat

SEQ ID NO: 33760 - DNA, 374 bp, Oryza sativa
ttcatcgatattaattagatattatatataatgtcctgatgtgtttgcattcgcattctacttattatatgtgtatcttgtttttagatgcaagaatcaatatgtatctctgctgtcagaaccaagaagcaatcaagtataccaatgaagtagttgcgcatgacgtcgaaggtggcgttctcgcgctcgatctgcgacatctggccgatcttctccgccagcgtcatccgccggagtaggtcgtcgatcctcttgttcagcggctgcttcgagtccttgtacttgggacacttaccttcttcttcgacgtacgccggctgctgtcgcattgtcgttggcgcaatgcaggctacacacaccagcaacacgagcac

SEQ ID NO: 33761 - DNA, 320 bp, Oryza sativa
  unsure (1)..(320): unsure at all n locations
tatagatactaagcttgccgccgtacaccaacacgcacttatcggtgtttatttttatgcgggcggagcggaggttctcacaagtttccgctagatctgacagtaaggtctcttggttgcgcgttnttacaaccaagtcatcgacatacgcctcaacattacgtcctatttgactacccaaagaaattcgagtagtacgcttganagtaggacctgcattctttaacccgaaaggcattgatgtataacaataggctcctacggcgggtatgaacgccaggtttttctcatcctccttagccatgcagatctgatggtaa

SEQ ID NO: 33762 - DNA, 403 bp, Oryza sativa
  unsure (1)..(403): unsure at all n locations
tggtcgatggcgccggcgaagctgcggatgaccggattggcattcggcggcggtctcctctcttttctcttccatcccaaggagcagcagcgaagctggagagagaaaaatgacaaaatgggccaagaaatctgctctgcaataccgcctggtgagtagtgacaaggcccatagaagcacacttcacggcccatttcatagaccaacagacaagtcaggcatgcactcacaggcaaatccctatttgctctgctgggagaatacaaaatctgatgattttgtccccagctgagctcaccaagtntatctttacccatacntttggcaaaaaagacgttccctgacctatttccagtttatcacaactctagctcacagctatgcagttagctatctgatatac

SEQ ID NO: 33763 - DNA, 391 bp, Oryza sativa
  unsure (1)..(391): unsure at all n locations
agcttaagcatagaaacggcgaagatgttcaatattccaagagttgtcgacgagagtaccgtctttgcgcttgagtcgataggaacctggccgggtgacttcagagatgataaacggccccttccataaaggagataacttgtgccgatctcgtgtagttgaatttcctcaaaccaggtcgccgactagaaaggcacgggatcgaacattgcgattatgataacgccgcaacccttgtagtatcgagccgaccgaatcanagctgcttcgcggacttcttccaatcggggcaagtcattcactcggtcctcttcgtagcgttcttcacggaaatttcgaaagcgcaaagattcacaattcacttcactcggncacattgcttctgccccat

SEQ ID NO: 33764 - DNA, 371 bp, Oryza sativa
  unsure (1)..(371): unsure at all n locations
attcgatttactcaccgcgttcggattaccacccgattcgatagcgataatcgccgtgatcaattgtggatcgacgccccangctgcaccggctttctggcttattggcatccactgcatcgcacgttgcaccggaactttcgcgttccacggcgggttcgtatagtcatgctttgatgaacaacccgctaataacacaatcaaaaagggcaaccatctcaatttcacttcttctatccttatagcctggaatcgccgttgaggtgacaacggcacacctaagcggcatgatatacatttcagttctgtcgtcagcaaggaatngccatgtctctgtttcacttaattgccccatcgggttactgcattaa

SEQ ID NO: 33765 - DNA, 439 bp, Oryza sativa
agcttgaacatcctagctggaaatctggaatgtgctcaacatactcttatttttcacatgtgaagagctcatgaaatgtgaaaaagaagttgacaacatgcaacttttatgttttaggacacaaacagatgtttgttatcaaattatatctgacacctgagaagggcataatcaaagttgcatgaaaattataaaatgtttaaaagctgataaagaatttaggtgcccacacaaacaatcatttagaatatgcacaaacatgactgaaaactgaaatagacatacttgttcccttgtcgaaaattgtcacagaaggataggcctgtattaaacttggttccttaagttgacatttccaaagtataattacagcttgtggattagaagcctgattgatcgtatacagagatgtcacacatacaatcaatctacaccatat

SEQ ID NO: 33766 - DNA, 495 bp, Oryza sativa
  unsure (1)..(495): unsure at all n locations
tatacaacactcaagcttggcaacagccacattcctgagctcgccccatagtgttgccattacttgcattatatgttgctgccgctagcctcatgctcactttcgcatgcacatgcgcgggcatattaattatgtttcatagattttattatgttaagatgtactggtgattttactttattatttgttaaaaattaaattatatgatcttcatcgaaaaatgtttggtattgctgatccttcactggttgtatatatttacaaaaaccacaaaggtatttatatagataactgtgcgggcatcttgttaatatattacaaaattatacaaccatgtttttttttcttttgaatatgagtgcttgatattttaaaaacaaaatgttgaacatatttggtcactanaatatttgaatcaaattaaattatattctatatgacggcttagtccagcatcgtaccattatatcttttcctcacgcgtgcattattact

SEQ ID NO: 33767 - DNA, 412 bp, Oryza sativa
agcttggggtcgtagccgcgcgcggcgagctctctgtactcctggatgagcgcgcatggctcgcaccaccagtggatgcagcaatcgccgcagggctcgcccgagaggccgtactgggcgcgcatcttgccgcggtaagtgcatgtacatccactggaacccggtgatcacggccagaaacacgtagagcgcgccgctgtggccgcacgacaaccaccccctgtccacgatcttcgacaccctcccgaacgtgatgcacggacaccaccatgtcatgcaacctgcagatcaaaatacatgttttgttaggattaattgattaattctctggaatccatacactacttgagaactgatctttactgcttggtcgaccgaaaaccacaatagtcccaacactgaaaatggtttt

SEQ ID NO: 33768 - DNA, 471 bp, Oryza sativa
tctgaatagttccaccggcaactttgcgcatctggtttggtatttgtaatggtacggcatcagatagctttcatgcataatggtaagcccgaatgcttagttagcgcagtgctcttcaagttctattatacatattttacatcggaattttgttattctcaccactcctttatatcactgcaggtcaacttatgttggacagaccacttgcaaacagtgctcatcattactgcaagattttatgtgtgagaccaattgctgctcctttctcaacaaaagtgaatttcacggtagaaggcttgaacctagtcagtgattcctcaaggtactttgccagtttgcatctacagtttacatatgtttgttcttgatggagacatacgttgatgtttgcttaagcttacttgtcatctaaagattgatcatctcatgttctcaggctaatttgctcatttgaagggagttgtatat

SEQ ID NO: 33769 - DNA, 441 bp, Oryza sativa
  unsure (1)..(441): unsure at all n locations
agcttactaaagacctacgagtatgacttatacgctccacccgaggggtaanctacagacggtctaataccagataagaacttgagtgaaacttgcttgcacaagacttgcaattcaaggcgtagtccattggtcaaggtgggagtaaatgtagcttggagttctacggggatgttcaaccttaatcggtctccatcgaaccgctggtatataaacagtacattggaaaaggcaaatctcagtgggattttgagatttggtgggggattgttggaattaatgtatgggccttagtccactcgaagattaattctttggaaaatcacaaaagcccacctcctgtgatggcatgcatgtggagtttagtaccaccttgcttattctaggagagggggacctccttaaagagaggatgccctcctagccacttgaagtatgtgt

SEQ ID NO: 33770 - DNA, 392 bp, Oryza sativa
tgtgctgagcgacgacgaaggcgatgacaatactaaacttgttgtataatggatcacccaaaaaactgccgaagcacattgctccgaagaagaaaacatctagccgccccatgccaaaggttaggaagtcctccacgtataagtcgttcaatactttttcgctttgacgtgcctctcatataaaaagcagtattgagagctaaaaaatcttgcagaaagccatccgacatagatccattcagaaaggatttcaatccagcttacacggagacaagctcatctaaagaagctgggccgactactgaggaccacccgactggcgctcaggcttcaactgataatatgtcaaccgaagcgaccagctcccgactggaaacgagtcggcagaagca

SEQ ID NO: 33771 - DNA, 346 bp, Oryza sativa
  unsure (1)..(346): unsure at all n locations
atcttaagtcactgagcatgcacttagtgtggcgagattgagctgttttacctattagntgataagagcgcgtatattcttgtgtatgtttcttgtttgctgctaaccatggcaggattgcgcaaggggaaacaagatggtcatgctcaacgtcaacatctacaccttcgacgagatatgacgacttcttcacgtgatgcatatgaggtacatgactataattttgcacaagatgcatgtgagttaccagtctatgatggaaagtatgattccgctgcatacattaattgtgagctagcagtagaacaacactttgatgagtatgattattctaatgctcaaatga

SEQ ID NO: 33772 - DNA, 328 bp, Oryza sativa
  unsure (1)..(328): unsure at all n locations
gaaatgcttggtggtaattcttacgaccacagataaatccgcangcgcacggaataccgctgtagcacttcacctttcggtgaccccaaaggatatcgatctcangacacgtgtgtaatctaccttaaggctaagatgatccaagaacaacaactgatgataggtaggctaggctagagaggtttttttatgggtttaattatctaagataagttaacgtaattccctatctgttgcttcgggcaccgacccctgctggtctgctagcatggnttcggctatagctctatgatgtatccgaatgtggaggattacttggatgggattc

SEQ ID NO: 33773 - DNA, 428 bp, Oryza sativa
  unsure (1)..(428): unsure at all n locations
tgcaagcttcatttcaggcttgatacgttggtactccaatatttttaggactaaagaatgacaagggctcatcataatgacaaagctgggcatcctttaagatcttacaagacaccatgttttgtacgtagaacttctagtttgcacttaattatgtctgctagttcattatagacgcaagccaacagaaataccggcatactcccatataacctatctgtattttgtttaaagcaatgtacatggtatggntactttctatcaatttatttcatcccaacaaanatataagagcagggtcacttgtcataaacaggaaagcttcatctcagacttgatcgccagatgatataatgtttnttttttcaacagttaacatgatgacaagactgggtgtcattcagtttcttaaatattatgtttactga

SEQ ID NO: 33774 - DNA, 477 bp, Oryza sativa
tggagcccgggccgggtaatcacatgccatggctggcttgttcttgtctcatctcgtcgctgcccatggattatgttggaaatgtggtcacaattcagcatattttaatccaaaatattaggacaataagcatgactttttcacggagtaaactagtgatcaaagagagtaaactacagatcatgcttaatatagaataaacataagcatttgtcacaacagaatgcaatgaaaccattgcagaaatatagaagataagaacatgaacacaatcaaaaacgagttataccctaagaatggccctccgctagtgtttgatgcagtattgcccgccgtggtgatgtctctaggtgcaccgccagtgtgtcatctgcacgggtggagctagagtattgaacgcggtgcccacgaactctggtacgaaacaatatagctatacctgacctattttcaccatgtgtgcacccgtctcaatac

SEQ ID NO: 33775 - DNA, 437 bp, Oryza sativa
  unsure (1)..(437): unsure at all n locations
agctnttcactccaagttattcctataatgcatgaagggcgatagcagagttttgtcaatccgcctactccttgaaaaaaagtttccgaaaaaccgatgaacatacataaaaacggagaaaacaaccatgggaaaaagttgaaacacactaaaaaaactgaaaacatactataaaagagtggaatggaacatttaacccctcctactagatcccattgcaacgcacgggcatatttgctagtcacataaaaagaggaaaccaaacaaaataaaaacgggagaaataaaagaggaagcagaaataaatggttatgaacttgccttanagcgatttcttgagcgtttgatcatccactcaaatacttgttccatttaaaaatgtaagacgtgttaggtttatacaccgttctccaatattgtattttnttttaccatta

SEQ ID NO: 33776 - DNA, 489 bp, Oryza sativa
  unsure (1)..(489): unsure at all n locations
ntcataatagtataacactatatgtcgaagttatatcttatctattattatatattaaaagtctattaaatttcctacaaacgctctcaagccgccacgtgtaaatcctacaaacgctcctaagtcgccacatggtgttttaataaatttaaggaatatctaataattcttaaaaggtaaaccatagattttattttaaatacggtggacccactttaaatccgtatcgtgtacgtgcactggtgcacgtactgtgtgcacgtacgtacgccatatatcctttctctcctnctcttcatgctatattatgtagaaaatacataatacatcattagaacattagaatatttaccaaaaaaattatcagtgaagacccaaactaactatatntagtaagtaaaagaaataaaacacatttatagggaaaatcgtatagatattctaacaatctatntagcaacacatatattctatatagaacaatatgca

SEQ ID NO: 33777 - DNA, 435 bp, Oryza sativa
agcttctccatacgtttctcatttatatgacccaagcgacaatggaaaataaaagtgggatttaaatctttaggacattgcctttttgcattaatgttatagactgaacattcatcaagattcacaatgtataaacgattcatcatgggtgcatggaaatagtaaatatcattataatagactgaacaaccattgtccaacgatctaaaaccataaccctctgcttgcaatcaagaagcagagataacgttcttacacaaagttggaatgaaataacaattatttaactccaaaactaatcctgatggtaaagataatggcatagtgccgaccgcaacagcagcaactcttgctccattgcccacgcaaatgtccactttgcctcttgctaagctcctacttcttttcagccactgcaacgatttgcatatgtga

SEQ ID NO: 33778 - DNA, 483 bp, Oryza sativa
  unsure (1)..(483): unsure at all n locations
ggacctataaaactcagctaccggcgnggtttttctggcctactgcagtgtccgacgccgacaaaattgtgcgcacatgtgaaggttggccaattttcgccagacaaattcatctaccagctcaagagttgcagactatcccgctgtcttggcccgttgcggtttgggggctcgacatggttggcccgtttaaaaaggcagttggcggttacacgcatctctttgtggccattgacaaattctccaagtggattgaagctaaaccggttgtcacaatcacagcagataatgctcgagacttcttcatcaacattgtgcatagatttggagtgcccaatcggatcattaccgataatggcacacaattcaccggtggagtttttaaagacttttgtgaagactntgtgaataagatttgctatgcctcagtggcacaccccatgagcaatggacaggtggagcgagccaatggcatgatacttc

SEQ ID NO: 33779 - DNA, 342 bp, Oryza sativa
tagctagcatgttaccctgatgagcattctctttcccctaaggttcaagtaacgcaacgcgcaagctgagccagacatattttgctagctgtctcgacttgatgtgtaaacacatctatatcatctttttaaacaatcggttgacggaacctgggatccattcaaaattatttactactgcactatcttaatattttctttattgaaaaaatgacacttgtaatgttaccacagctttctatggggaactctatttctacatgtggaactagttgaataaggttacgtgcccttggtcacacgcaagtaaactgttggtccactcccattccaaaaaaaact

SEQ ID NO: 33780 - DNA, 478 bp, Oryza sativa
  unsure (1)..(478): unsure at all n locations
gcgattctagggtaggctgcactgtcaagctgtgttggacacctgactgtaccacggtcagccttaacttctccaattctctgcacaggtgatcttggtcaggccatatttgagctacattgcaataggtcttgcgacttagcgcatcagcgaccacattagctttaccggggtggtaatgaattccaagatcgtaatccttgattagttccaaccatcttctctgcctcatatttaactcggtctgagtgaagatgtacttaagacttttgtgatctgtgtatacttcacatctactcccgattaaatagtgccttcagatcttaagagcatgaaccacggctgccaactcgagatcatgggtgggatagttgacttcatgaggcctgagctgcctggatgcatangccacaaccttttcgtcttgcattangacacatcctaagccttgtcttgatgcatcacagaagatctcgaa

SEQ ID NO: 33781 - DNA, 478 bp, Oryza sativa
  unsure (1)..(478): unsure at all n locations
ctcgacccgngacctctgagtcacctgcngcatgcaagctnttgatgttaagggctctggatttgagtaatactgacatggagggcctgccaaactctattgnggaactgatacaccttangtacctcagtcttgagaacaccaaaatcaagtgcctgccagagtcaataagttctctattcaagttgcacacgatgaacctcaagtgttgcaactatcttagtgagctgccacaagggataaaattccttgctaacttaaggcatcttgaactaccacgcatagataactggaatgtgtacatgccatgtggaatttctgaattaactaatctccaaacaatgcacacgatcaagttcacaagtgattcatgaagttgtgggattgctgacttggttaacttggacaatcttagaggtgagctgtgcatatcangcatagagaacgtaagcaaagaacaaattgctacagaagctat

SEQ ID NO: 33782 - DNA, 462 bp, Oryza sativa
  unsure (1)..(462): unsure at all n locations
ctgctattctttttcaaagatcaaaatctgttgttaataattttcctgaaangattccaagggagacactgtagagggcattaaagtgaatgggatttaattgagagcactaaatccaactctatgtcattatagttattaatggcatatttgctaaggatgatgtctttctttggcatatcaattaagcggatggattttgcttctgttttttcctgcatatgtctgagaccaatttggcggcatggtgcataattttgcatgctctaatagactaatacaaccccttggtttcctcactcagtcgttccctttctctcacccattcaacgtgcgcgcgcacacacaaacatgaatgtncggctgaaaataattcccctcacatgattaacttgcaatttccctctctttcaatgcaattcatggttacttctatatgcttctcattctataattatttat

SEQ ID NO: 33783 - DNA, 426 bp, Oryza sativa
agcttatgatcgcgtggcgtcgtcattcgggctgtggcgacgatatcgtcgatgcgcggcgggccgccggtgccggataatgaggacgatgaagagagggtgttgagattatacacatataatgatttaatctattccataaataaatcatgacattacagaagaaaactagcatgaacgcatcattagatctatacatgtaaactacacagtataacatgaacaaatcaaatatgcgcaacatattgaacacgtaccgaggtgacggaaagaccggctgcttggtcgaaactcttcgcaggtgtctacgaaggcacgaaacacgcgagcgaagaggaatgcgagccgtctcgaacaaacaaggagcagtcgcgcgaagcgcttcccaaaaaccttattggcgccttctcccggtgcacgacgtcg

SEQ ID NO: 33784 - DNA, 454 bp, Oryza sativa
  unsure (1)..(454): unsure at all n locations
tagaaactaattntagatctgtgacaggtatgaccagaccttctctttgaaacaagtcttaatgaagtaaacaggcaacattgaactggtcaaaattcatgagacaaatttctatgtatgtatgtattaactccgtggaagttatattctatacaaatgtgcacatcattttcatgttccaaatcttttttagaaaataattacttaaactttgaaaactttgacataatgttataatgtattctcaaaactaaatgtgtttcctaaacaggacagagcacatgatttacaaacttcacaagtagacgtacctgtgcttatccgtgtgtgccatagagttgcaaacggatcgacccagccaatctccaacatgtcctcctccatgagagttgctctcctagccatgctacccatcctcctcgtggatacccaatccatggctgcgccaattcag

SEQ ID NO: 33785 - DNA, 448 bp, Oryza sativa
agctctccacgtcaacctctcaaagatcagccacaaccccaagtcatggctaatcagactcagacagtggaagagttgttacagcagatgcgacatcggtaccagatctatctgatgcagcagatgcaacggcaatgtcaggagccgcgtcatgtccaccagccacaaatgcaagtccaggtgccagcccggaacctgaatcagagtcagagtcaggagttcccaatatcggcacctaagacccctgtcaaagtgctgtccagatccccgaagataacttcagccaactcaccgtccgaccaaaggaaaataagtgctacctgttatgactgtggtgagcaaggtcattatgtaaggaacggtccatggaagatgttcgccaggtcacctgaaaaatacaagaagcagtgcccagaaagtaaccaagctccaagtcagtctaccgacc

SEQ ID NO: 33786 - DNA, 471 bp, Oryza sativa
  unsure (1)..(471): unsure at all n locations
atctcatgtttctctggtattacatgattgacttngaacaactantaaacaaaagtatttgaacactgatataagagtattatggttgctcctgactagcgctaggcttatcaggtactgcatttgctccagtgaccacttggcgattggcatgtctgcttccttaacaggtactacagtttgtaacagacaatagctntcttacgctcgggttcttcatcttgtacttgatttctttggctgctgtgctggaacattcaaaggtacaatgccgatactggcctctgtcttgtcaactgatggcggnggctgaaattgagcattgacaccttgtggtaatgcactcgctggagttggagttgttgcaacgtggtctatangactgcttcgggatgcatggatgacaattcgctgaggagcaagcttctgattgcaaggagttgcgtggactgacgtgctggcagctatgtt

SEQ ID NO: 33787 - DNA, 418 bp, Oryza sativa
  unsure (1)..(418): unsure at all n locations
gtcaactgcagcatgcaagctctattgtaaatcatggatcggacatggattttctacactaaaagagctcatccaacgttcttgatagaagcatccaaatttgatgagctcactaaggcacatgctgcgagggagaattcgaggagcattttttgcccatgtaaaggttgtaagaacgagatcttgctgcaagatccgaatgaagtattgtctgacattgataaactacgattctgtatagggtaccagatctggactgttcatggggaagccggtggtcgtaacgaagagttacatgatatatgttttgatgatgcagaaaattctataatcgaagacatgtcttagggaaacatcccggaataccgtggctcangtatagagaatgaacgtattgattatgaactggaagatatgt

SEQ ID NO: 33788 - DNA, 291 bp, Oryza sativa
  unsure (1)..(291): unsure at all n locations
gtggtaatattgatgctaattggaaatggttttaacttctggcttctgcctacttatttncatcatgataattgaattaaacaactgcactacaggatcccatataatatatcttggcagtggcgagctcttgaagaggaggacgatatactgatgatgaaggactatgtacaaattgcangatagtgtccccaaaccccatggcattatgaatttttgcgctagatatttctgttgctttgatccaatccagtgacatctggtataggtggaactgaccttatggattaa

SEQ ID NO: 33789 - DNA, 310 bp, Oryza sativa
catgcaagcttgctgatcatatggatatatggcacgtcgatctgccacctcgtcgtgatggaatgatccgtcgaccatacatgggatcgatacgacgatacgtgacgataacaacaacgaacatgtgcccagagaaagctgtaactttagaccacatatatacttcatcaaagaaaatgttttttttttctctggcggtccctggtaatcccatgcatgccaaaactcctctacaagaaccctacatatagcagggttatcaaatacctccctccagtttatttttatatgaagactagttcaaaattag

SEQ ID NO: 33790 - DNA, 495 bp, Oryza sativa
  unsure (1)..(495): unsure at all n locations
ntctcataaggaaaagcacacaacagatccttcatccatctgcgtgccataaatactaatgcatatattagatagcatgtctcgacatgaagtcacgaaccttgcagtaagctcccaacctttccaaaattacacttcctggtctcaccaagtacatccagaacatgccaactagtcagcaaaagcatcgaggcaaaacgaagggctgggactgaactttgtcgcagccgaatggggtgcaaaagaacacagataaataaggcgatcctaggattgacaaaaggattttttggatattcaagaaacgcctacgcttgaaccggtgtttgcctgggtccattgaagcgagcaggccgcccatttccattcccattgtggaagatgcggtcctgacgatagccattcccattctgatgatagtatccagacccattctgccgatgtccattggcatttgccgtctgatagtactcatctncgttctgatggtatctg

SEQ ID NO: 33791 - DNA, 430 bp, Oryza sativa
  unsure (1)..(430): unsure at all n locations
agctntttatcctagctgttatcttgtggtaacttatagtgggtgcttgcactgtgagaggcattaagactacaatatgaacgatatctagctatggtatttagataagaatttacaaagttttctaaagtctattactgatgtaatgatgtacgagtgtaggacgatatgtaaacacatatttatgctggttaattaatttgcttaccgccccaacaataacctccaacttcaacaatagatttccgttctctttttagagcaacaaagatcagtttagcatcttcagctgccttcacctgagatctcaattgaatatactgatcaatatcaactaattgactcctcgataatcgtcatcgaataagctatggaattggtgaaaacaattactggagagtgagccatgatccattgtgtaatgttatac

SEQ ID NO: 33792 - DNA, 497 bp, Oryza sativa
ctcagcttaatttaatcctaatgaggtacttcaggcattggccagctcgctactcccagatatcgctctactgagcacccggacaggtaggactttagtgtcttgagggctgtcaccacctctacacccacctcacacctactgtgggatgtgaagcaaacaccggaaatcaactacctagacaccgcgtctaagaaattaataactactctattgtttataactcactaaagcaatcactatattttagttgattatagtgaacgatgatcccatactctgaataggaactaactaagagataattctcaccaagcaaaactaaattactcaaaagatatttcgattataatcagagtaattagagtaataaacagagaagaatgaaataggaagtgcattaccgacaacttcggaattcctttgacttcttctactctactctcttcctattctaatatacaataaagtagactagagcctattataattcagct

SEQ ID NO: 33793 - DNA, 437 bp, Oryza sativa
  unsure (1)..(437): unsure at all n locations
agcttgtgaagnctgcatatcataatctcgagacgacagttatgctttttttttgacaattttggatggagattcacaaatggtattcattaattgtatattgtttatcttgtgttggcgtttatgagtttgtgttcgcttcatgtttggaagaattttgatttttaagtttctttgagttgcactcattctgagtgatttggtgtaataattggttgtagctcgcttgagcaaaggcgggatggttttctattctattatataaaaatacaacacaaaaggagatggttaatcagatggaaaatcaacatcggttgtgtgggctagcttaggccatgtnnttttcagcttgagattattataatctagaattattaagtcagattactataagctagaatgtataatatgtagtataataagtcggtagttctttc

SEQ ID NO: 33794 - DNA, 378 bp, Oryza sativa
attcctgtcatgtgtccaattaacgcttcgttcatcgtcacgatcgatgacacaccctctttatcttatcagcttgcgatatgtactagtactaacctcggcttatggggcccactgctctaatggagtatgccagtagcagtaatggaccatctagccgaatgccaacgccaaactacaacacgtatctgtgtgctatgggctaatcacgagtgctgaaactgataaaactttcttcattaccacctcaccctggcaaaggcccacgcagcgctaaccaatgtactaatacgctggcacgacccatactgaagtactactaccactaggattgtacacactgccatgacctgcgcactctatatgcgaccattactc

SEQ ID NO: 33795 - DNA, 407 bp, Oryza sativa
ctatatatagcgcagttatgacggctgtgagaaggggaaatgtccgaactgcctcgctaacgtcataatggagtgacctggagcgtccatgccaatacctgggatcaacggtgattactatggttccgtcaaactatgacgttcaaccgaacctgagttgggccctcctggcctggccttcggcctgtggactccacctattctcctctacccattcctcggagttatgggccgattctctggtatttaaacgaagatcacaacccatccttgcatggatatatacttctcctcacttctacctgaatttccctcccaacgtcggcgattaacacctgcatacaaatatataccaacaccttgggaatatgaagataaacatctttcagtatgcggatgtttattat

SEQ ID NO: 33796 - DNA, 405 bp, Oryza sativa
catacaaattgataatagagtacaattattactcttattaatagcgtgtaaaatgtcattacagaggtagatagtttctctcaatcaataaagatctaagcagcggaaaaataaattaaacggcgcagacggctccactccacaggcagcttgaccaaggctacacctactccttcacaccatcagcctcattgaagaactcttcctctgatgaatgattgcaaggtgagtatatgacatactcagcaagccacgcagcatatatgcaagtgcacaggataacaaaggatggcataatagggttccatttgcaaaagcagcatttagcagacatttcagaatttaataaaacagttaagtaataattaaacaatattaatccaacactatacaacataccctggt

SEQ ID NO: 33797 - DNA, 449 bp, Oryza sativa
  unsure (1)..(449): unsure at all n locations
agcttgaagagttcttatgcgtacgaatagatgctgaaatgtgtttaactggtgaattttcgtctgttggtttgccgtgtaaaaaccgtttgatcaaggcacttgtctgcagggtgcctgttttagtctaagacgatgaactgactggtttttgtttgctcgtttctaagttgttagtgacacataagttaagtttgcagttcattcgccagtgtgtattgtaactntgcaataaggcacctgcttgatagctttcttttcatattgttcttcgacaaatataagtgatgattattacctgtactttctcagtttcacaatgtaagtcattctagcatttcccacatttatatttatgctaatgaatctagatagatatatatgtctagatttattggtatcaaaatacatatgggaaatgctagaatgacttacattatgaaacggac

SEQ ID NO: 33798 - DNA, 490 bp, Oryza sativa
  unsure (1)..(490): unsure at all n locations
tggaactatattgngtaagtattagcaagtttaacctttatatgttttctgtgtgtagaactacagatcatgagatcaacaatggcaaggacagagggcaggtaaataaaatggtaacaacagctcccactcctccattttcttaatttctctataaaacattggatgccctgatataggatgagcaccatacccaatgatgagtaatttctatagaattaactgcacacctgattaatcacttgacacactcagggagttgtgaaagtgattggcaaatattttattcgtacacggtatcaggtcacaaatatctatcaacttaagtctcgacctcaaggagttcctctaagagtcacgtaactatgcatttgctctctgtcaattcttgtgaattgttgctctatccaaagtatgtgtatgccatcgtcaatagcagtgatctttaagtggttgactaacttatattgatattgatctagcagtgtgt

SEQ ID NO: 33799 - DNA, 402 bp, Oryza sativa
  unsure (1)..(402): unsure at all n locations
agcttccatgttatgttgtcatcctcttgctcttctagttgcagcggctgagtggcggtccagattgtgacatgttggtcaattaagtctgtcctccatcctgcatttgacggcaggtccaaatcatgaatccattggtcggattgcaaggcttgctggatcgtcttgttctttttcttggatgctgcatagactagaggagctacatctttcattctccttccttcccaccaggccgaatcccagaagcttgtcttctcaccgtttccaattgttatgaaggtggccgccgcaaaacggagtttgtcggtgtcgtcacatggtgtgccggttcccacccaggctttttccgatgatttccattcatgccanagccaatgcagacgcaaagctctcgcgaac

SEQ ID NO: 33800 - DNA, 405 bp, Oryza sativa
  unsure (1)..(405): unsure at all n locations
ttatgatntgtttaacaaagattaaggttgatgagaaatattctttntattcgtctcattactcaaaatttaaattatgaatggctttggttctcttcctaagcttctgattggttgaaaatacatggattttcatatactaaaatcaatgtcccaaaaatatttatattatggtataattttgaatcctagaaaaaaaaatgctaatatcttgaaatggagggaataaacaattgaaacctgtttgtccatgattatcggactctgtcaaatcttgtaacggccgtttaccggattttacatgatacgaaattaaattcagttttttttatttggacaaaatacttcttaattcaattntaaaaacaaccatattcttttggtcacttgctcgaactgatcgtc

SEQ ID NO: 33801 - DNA, 334 bp, Oryza sativa
agcttctcgggttcttggtctctgcccgatgtttctatgtcaaccccgagaagatacgagctatagagcggatgcgccccccagcaagcttagggatgtcaatgcgtcacggctgcatggcgccctaatcggtcatatcgaggctgggagagaacgcactacccctatttaagctcctcaaacgctccgggccgtttatctggacggaggaggctgagcgggccttcactcaattgaaagcgcacctaaggtcttccccagtcctggtcgccccggagccagatgagccgctgctactttacctgggggaaccctcgaagtggtcagcgcggcg

SEQ ID NO: 33802 - DNA, 491 bp, Oryza sativa
  unsure (1)..(491): unsure at all n locations
ttgtanggggttggtattgtggctgcgtcggtgtttgtatgcttgcatcacgattcgtccaagcagtcaaacatgcccttaatatatacaaggccttcgagtttactcaagagaggattaacatgttaaacgagaaaacattgacctcattttattttttttttcaaatttgaagaatagatttatctaatattttaaaacaacttctatatagaaagttttcgcacaaaacacgtcgtttagcaattttaaaaacatgctaataaaaaccgatgtagaatcctcgattgtattttgttcttaagaacaaacttactacatggacagacgaattaactgtttctcttaggaccaatgaaggctcacaagtgtcaaacacagctaanatcaagaatgaattttacatgatggcataaacaacacacggccggtggatgcagaaacgtagcaatgtactcaggcagcccctgctctccagttaattatatttg

SEQ ID NO: 33803 - DNA, 432 bp, Oryza sativa
ttaagcgactgtagctgcaacttgctcgggagaggaggctgtattatcgatgtctgccctgctaaaccaacggaaggcgcttctttgacatatacccatggacaattcagggcatagtgtccttgctctctacaatcatgacaaaaggggacctgctcttctggcattggaagctcattgacttgggtggcaaaggctcgatcaaacacatactgattttggtcttgacttccaaccaatggtagctgtgaactaaacagcatgcttggaatggaccaagggtgtgcccttgttactctctggggccagtggggattgatcgaaacttgagtacttgggttacccgtgcattctttctttttctgtaacattgtacaggatctggtgaaaggaacagcccgaaagataaccagacttggattgacttaaaga

SEQ ID NO: 33804 - DNA, 486 bp, Oryza sativa
  unsure (1)..(486): unsure at all n locations
cggtggctattccgatccggattatgccgggtgcaaagtgtatatatagagcacatccagtagttgccaaatgcttggtagatcccttgtgtcatggtcatccaagaaacaaaactccgtagccctctctactgccgagacagaatatgtttccgcgggtagatgttgtgcccaattgctttggatgaaacaaacattgttggactatggcatatccttcaccacaaccccactcctatgtgacaatgatggtgccataaagatagccaataacccggtccaacattctagaaccaagcatattgacatacgccatcacttcctaagagaccatgttgccaagtgtgacatagtcattagccacataagaaccgaggatcaactagccgacatctttaccaagcctcttgatgaaacccgctttngcaagttgaggaatgagttaaatatcatagacttctctaatgtggcttgagatggtgcacc

SEQ ID NO: 33805 - DNA, 443 bp, Oryza sativa
  unsure (1)..(443): unsure at all n locations
agcttgctactgaacagatatgcatcaaaagaacaaatcacattccaaactgaatgcgcctatgcgtttctgaaacaagatgcctgacacccacaagaacactactgtcagtatagcaccaagcagtgcaactcaagtactcaaccgtagcttttgcccagatcaggctcagcaacctttgctgctagccaatagccactgcccactggtcacttcacttgtatcagtagcatcttcctgtacagcgaagcacatgcttgccttccatgcacggacgagccaaagctgcccatgcatggacgagtgcatcagttcgggaagcagaattcaaagatcatgacaaagcgtagctaggcctagctaagacggtcttttccttcttcctttcgatcctttccttggcgttttntccccttcttcctttcgatctttttcctcacgct

SEQ ID NO: 33806 - DNA, 482 bp, Oryza sativa
  unsure (1)..(482): unsure at all n locations
tctgattctagaagaacttgcaactagtagaagcttctcatacagatcccattntctgaattctaccgctatagtttctcaaaatataaacgaaaagctaaactgtctggatgagttcctgattctgagagaagttacagctgtcaaaaactcctcctaacatgcccagtatagcttttcgtccagatcaaatcagttgcaactgatttataagaagtggcacgccaacctactcaaatcagtaacgattcttacaaataagctagcgacatgacctcatgattcattccctttcagttgcatccctttaatcttggcaagccctacatagacaattctgctggtctttaggcccatgatttacagtagcactgctactggatcntcttaatttatttccctccaacaagtagagtttgatttccttgatggaaattaaccaagttagccatccatcatgaaatattgaaatgccaatcata

SEQ ID NO: 33807 - DNA, 461 bp, Oryza sativa
  unsure (1)..(461): unsure at all n locations
ctggagaagatgtcttacgtggagtcctggcttataccccatttgagcgcctgnggagatggagccgtaggcccgctagtccgctgctgtttatttttgattgtacggccttaagtgcctttgtaataatgtaaatattatcgatataataaagatgtgccttttgtattatgtttgattggcgtaccccggcatttcctgagatggggattaatacactagcgttcgggaaaaggcaattatctcggtcgcgacacaaagggccggtgtcctgctgctaggggctcagtcctgcctacctgtcccgggggttccggccgtaggtggagatgggtcggtactcttgtctatggctaggatgggttggaaactatgtcatgtcttccgtccgtatgccgtggtggtatgtggcacgtggttacacgtgagaaagatgtgtcttgtgggaaagatgacacctc

SEQ ID NO: 33808 - DNA, 450 bp, Oryza sativa
agctcggaagagaggcaaggttgttatgcaaatccttcgtttaaaatcatttatgaaatcactaagtgatctatttctttataagtttgggtcgacaaggagacttgcgtctcgattcgacttaagagatgcttttcaacaactcaaatggtaatgtaccgaccccccgagtcagatcattacttatcggctcccagagccatttcacttgattaatcagctcccagagcctttttcattttctcggactcccagagtctagctgcccagcagcacaacaatccgcttccactcaggaagcctagtctatgatgcccgcagacatcccgaatcacacagattcgtttccgaccactcaggtcatccatctgccattcaggctgattctggtaacgattcccacaccacaacaacttttcacaaagcacaggctatcaaatctacgcaacg

SEQ ID NO: 33809 - DNA, 387 bp, Oryza sativa
  unsure (1)..(387): unsure at all n locations
tccgacgtggctgatctncatgggctgggtgatccggtttagtaatgtcgtgtgggtaaagtgtaccccctctgcagagttaacaaactgttcgaacagccgtgcccacggtcatgggcggatgtgaggtgattcctagcgtagttttgtttgactactgcttgtgaaattgctggtgtggaaaggggttcgatgtttgaaaaatcagcagctgacgggatcagctaggcccgggtggccgtttgaaaagttgttggcccgggtggccgtttgaaaagctattagccgggtgccaaccttgattcaattctaaagactgatacattgcacatactccgaccggacgagacgcactgtctcatccgcgtcgtttgagaagcactcact

SEQ ID NO: 33810 - DNA, 445 bp, Oryza sativa
cttaacattgcggccgatctaagttgataaacatctctgaattatgcgttgataagttgctcatgcgttcttcaatccacagggcatggtgatgtaacaataagccccaaagggcgtaataaacgaggtcttcaagcaatcggattcttttagtcggatctgaatgatatcccgagtagcaatccaaaaagctgagtagctcgcagccggcccgtgagtcaactacctggtcaatgcgaggtaacccaaaaggatctttgggacaagacttgttgacgtcggtataatcgacacacatgcgccattgccccgtctttttccaaaccagggctgggttagccagccagtcgggatgagggacttctataatgaagcccgctgctaacagcttggttaattcctccttgattgcatccttcttgtcctgtgcaaaacggcggagtcg

SEQ ID NO: 33811 - DNA, 445 bp, Oryza sativa
  unsure (1)..(445): unsure at all n locations
tcgtggtgcctactacaatntgacatccactacactgatccatctgtggagcgcttacctgtgcatctcccactttcatctgtggaacatccactacactgatccatctgtggagcgcttaatccatctgtggagcgcttacctgtgcatctcccactttcatctgtggaacatgatccatctgtggagcgcttaatccatctgtggagcagccactacactgatccatctgtggagcgcttaatccatctgtggagcgcttacctgtacatctcccactttcatctgtggagcagccaagcatgtgcgcacccgggaagaattcccggtcggtcacccatcccaaaattctacaggccaagcacgcttaacctcagagttctttcaagatcagcttccggaaaggaaagtgcaaccttgtggtatgagtattctattaatccta

SEQ ID NO: 33812 - DNA, 423 bp, Oryza sativa
  unsure (1)..(423): unsure at all n locations
taatttcagaaagaaaaggagtgatgcatanggaggaaaaccttttgttcaaaacaaaattatatcattagatttctcaagaccttgctgttttgtgttttgctattcattggcattttagcttaaggcctaatttttataacccaactatgaccgactttgcaattttgcattagttntattggtgcaactatattggatttgggtaagtaatcgccattatgttacacttttgcttggattggttctcatgaccggtggcaaagcanggtgaagatgcggcaattatgagaccaacacgggcgagactggtggtgggcatcgtatattatcggacatgcactttatataccacatatatatagttgtacacagcaggttctttatgagtatagataatgcaatgaatngtcagtctatata

SEQ ID NO: 33813 - DNA, 428 bp, Oryza sativa
gcttctcccgctcagcccaatggccgaacgggcagtggcgcacaacctctctccgagcgctagcggcgacgacagcgagcaaaacccgcgtcgtcgagctcgtactccaccgcccccctctcgccgaagtcttaagcgggaagaggcgctcgaaggggtcgaaagaatccgcgacttcgccgcacgcgggcgatggagaaggacggcgagacggggagcgtcgtctcctcgtctacggtgatggcagcacgccccagggcgcgctccaggctgcgggcgcgctcttgcgtcacccgcccgtcgtccctgatccagagactccaacccgccgttggctagatgacgtggccaacttggtcatgacggcgcagcagcgcctaggcgccggcgggcggtcctccgccaccaaggccactggcgttgctact

SEQ ID NO: 33814 - DNA, 443 bp, Oryza sativa
  unsure (1)..(443): unsure at all n locations
acctgcngcatgaagcttgtcgagaaagctactataatatggctcggtacgttcggttgttctgtctcatagtgattgattgggattcctgttacattggagttcgattcaccacatttttgcagaagtgcaaaactagttggtcaaatgcgttttcatgttcttaaagaaaacctaaagtagtatacctgtacttctggagccattttgatttgagttactgaacaccagcctgtcatctggttgaagtgcaagtgcaatgcacatcaacatcaagatctttttataactgggaggcatcccaatattaaattttagctgtgatatacaatgtcttgaactcatgactaaatatattgggttttcatctgagctagcaacttacatttatgcatgtgcatgtaggtgtgggcgagaatatggtctgtcttgcacagcatttt

SEQ ID NO: 33815 - DNA, 443 bp, Oryza sativa
  unsure (1)..(443): unsure at all n locations
actagctgatacacatcgcctttgaaagagaccatattctttatctgggttgtcttctaatttttcatcagcaaatggcccataagaccatatcagaattggaccaactcagcagcagcagcaaatggcttcctcctcattgcagaaacaattctattcccatagtgtgattgataacgattttcaagcgcaattgcgcaatggaaggcctagaatggatgcaaaggcgagatctcagttgcttccacgctattggcctagaataacagatcaagagctacagcacctatctggagagtatccaaaaaattctatgtatcttcatcagcaatttcctctagataatatagatttactagtaaatactgtcatttttttcacgtgtgtttntctggttaaactcttgcctgttcttaagtgtttccttaaccctccaacagctc

SEQ ID NO: 33816 - DNA, 449 bp, Oryza sativa
tagcttgctggcgcactaactggtactgttttttcatagtctgctatcgcgaataatgatttcactgttggtgtgctcccatgtttcttatgttcatgaattggttgtttatttgcacaattagaatataacctagaagaaagctagctgtaatggtcagaattctgtcactgaccttggagctgtactgctgttgcatttgtgatgataatgctactggtatacttgatgggaacaccagttaagaagtttgagagagagttgatcttccgttgagtgactcagaaatcataattttgcagcaactgatgtagaatcgttcctattgagtattaacaacaatcatggagtattaacatcaatcatggatcacacgttgggcactctccagaagttatcgtagcagctaattccagatgatccacacttgcctgatcatatttataccc

SEQ ID NO: 33817 - DNA, 420 bp, Oryza sativa
  unsure (1)..(420): unsure at all n locations
ctataaaactcagctttatcattatgataaaccaagtagaaattaatattatttttataagatgaatgtttgagtaacggatcatctgtaaaaaccaaagaagtattaatatctttaataccaaaaaatgtaccatcacgacatattntaatgggattttataaaataatttgatgnataaatattgcatatttttctgtttagttatgttaaagaagttgtctagaaaaaaataaaatgtttacaatatgaaatgggggagtactcccttatactagtaaaggaagtcgttaggatatgttaagtcaaaccctggaatataaatatgaataacttaacttgtaagtttaatatgaaaaatatatacaagattatcttaaatacttcatacagtatacatatatactttaataatatttt

SEQ ID NO: 33818 - DNA, 437 bp, Oryza sativa
  unsure (1)..(437): unsure at all n locations
agcttccttctgattgctggatgaagctgattaccgtcttctgcatggtatcgccctccggaggttgattgctcttggctcggcctggagtangtcggggagagacacaacttcttccatctacgacaattctttgctgaagctgtcgatgcaaagagtggttgctatgatttgtngcagagtcaggtgcaacaagaggagcactggtgcattggttctgctatgggttctgattaacacgaggccttacgggtacggcgtttctccagtgaccacaatacgattggaatgtctgcttcgtgtaaattggcggtaatgtggaggtcgattttgccttggttggggacagtttttggagtaatgccctttttcactgcagatgtaacacacaataactatcttacactctgggtcttcatcttggacttgatatcttg

SEQ ID NO: 33819 - DNA, 485 bp, Oryza sativa
  unsure (1)..(485): unsure at all n locations
taattcctctctctgctcagactgttcagtgcagaagctactaacgatcttgtctccttgagcgggcgagagcttgcttgtgctaagctcgaagggagagtcgaacgaatccatggcggagacggtgctgagcatggcgaggtcgctggtgggcagtgccatcagcaaggccgcctctgccgctgccaatgagacgagcctcctgctcggcgtcgagaaggacatctggtacgtactgcactgctctcgtttatcctagcaagttcttaggctcttaatctcgaaattgaggaacaccatgaaacactaaaagagagctcgaagactacgaaagacaactagaagactaagctntgaaagtcttctatatccaagcatctcgacattgatcatccttgtgcaacatcattccttcctattgcttcaccagaatcggtgtcccttgtggagatctctgtcgtatcgtcaaggggagaatccgagaa

SEQ ID NO: 33820 - DNA, 426 bp, Oryza sativa
  unsure (1)..(426): unsure at all n locations
agcttatctctgagatcagagtgtgttggtntttatcattacatacattttattgaattggcccttttatattgtagacccctatgaaatgctttgagaaggctgcaaagaaatgtcattccgattcattgggatgtgttgtttcatcatgttcttggggcaagcatgctgcaagtggtactggatcatcttttcaaattctgtggaatgaaagtcaagtaagctgggtttttctgcccactggagcttattgattatataagaagtggcgccttactctatttaattggggctaatctgcttaaagatctttgcaccgtgcgccacatcaatgaattaccgtttagtgaagaagtacccttgctaatgttggattgattttttcacctgaaaacaatagagatatgggatggccgttaaatactt

SEQ ID NO: 33821 - DNA, 415 bp, Oryza sativa
gtacctgctggattcgactgaagagaagcctacctgcatgattctgaatgttactggccggccttcgcgatatgtctggggccacatctcctgtggtgtgggaggtacaaaggcgacttctcttggaagacacactggagagcgactgacactaactgaaccgcattagctttctctggtaagctatttatctcgaggatggaagtcaagtgctgatcatgctctcaccttcattgcagtgatgatgaatacacatagacactatcgtttcattcgaccgaacactggacattctcactgcgaagccacacacaatcccactgacatgccactgcaagagactatgcacttcgagggtagtatggactggtgcacaatatatgactatctcagaaatagatcactatctggtact

SEQ ID NO: 33822 - DNA, 431 bp, Oryza sativa
  unsure (1)..(431): unsure at all n locations
agcttggaggcagagaagctcgcctcgtctgccgcatctcctcaaaatgggaaaagcaaaaccccccctttccactgcctcgtcctccctttttccttcccgagctcgaccgctctccccctgtcctcgtctctttgcacgcagaggcagagcgccgctgatgatgccgcagcagcttgcgcccccactttggccacactgcgcaaatcctcccgccctcgcgatttgattctcgccgtccaacccaccgcctccaccgcgccctttgcatctacgccgtcgctcgttctcgcgccgctcgtgactgcagccgagcgctcgaccaccaagtcggtttccccctccctaaaccgacctcgcctccgctataaaaacccgagcccctcccatcgccctctctcngtgtctcgcctcctctgcatgccgcacca

SEQ ID NO: 33823 - DNA, 446 bp, Oryza sativa
  unsure (1)..(446): unsure at all n locations
ttactcanatttcgaactgaagttggcatctgtcttgtaaagtttttattttacctacattgaactgagactgcattgaacattgatgacattatttctgctacaccaacaatgatggcatcaaaggtcgaatttgctggcaaagaggcacctaattttctgcaacactaactagaattttctcctagacaattgctgtcagtaaaggactcatgatttgcaacattccatctgcatacaggttatctgttacggatgttatgggatcaaataccataggtgcaggaaacattggcatggtgcgttagatatgttcataattctagtcctagcttgatttatgtattctatttgatattcctagnttgtgtcagattccctaattattagatgccacctagtacatagaggttgtatacactttggaaacttaaacaataaggata

SEQ ID NO: 33824 - DNA, 440 bp, Oryza sativa
  unsure (1)..(440): unsure at all n locations
agcttcttccaaaaatatgaggtanactgactgcctcgattagacactattttcttagggacgccatgcaaacacacaatccttgccatatacaattccgccaaccgacttccggaataggttgtctttactgggatgaaatgagccactttggtaagtctgtcgactatcacccaaatagagtcatggcctgatgacgttctgggtagaccagtgatgaaatccataccgatttcctcccatttccattcaggaatcttcaaaggctgcaacaaaccggcaggtttctgatgttctgccttgactcgctgacaaacatcacatactgctacgtactctgcgatttcacgcttcatacttgcccaccaaaatctttccttgagatcctggtacattntggtactaccagggtgaatggaatataaagtatcatgagcttc

SEQ ID NO: 33825 - DNA, 487 bp, Oryza sativa
  unsure (1)..(487): unsure at all n locations
taaacaagtaacagcatttcgttctcaaagtcctgatgcagtgtaacatatatatggnttcactgtaacacaagtgcttcatcctatgagaatgggacatgtcagcacacatcgcggagggcagtanggagcaatggaaggacaccaatttctattcctgtctgtgccaataaaaatgatgctgtgcgaatcagaggaaatagtgcgttgtttggtcgctgagcagttagactttgagactacaacactgtccatagtataggatcaaaaggttccataggagcacattagcatgtaaatacataacagtaggaaaaatctagaattatcaaaattttgtaatggaggtaagatttggcaatgttaacaattaccanaacttagtangggtaattntggcaagaaagtgaacaattaccacatggtctgtccgggttggatttgggaatgtntggtagttcatattctgtttttgtggtacaaaata

SEQ ID NO: 33826 - DNA, 437 bp, Oryza sativa
  unsure (1)..(437): unsure at all n locations
agcttggatacaattgatgttcccgcaactttcccaacaccagacggagatgctgntgatgatcttcctctgattgtgagtataccaggatgtcgtcgatgaagaccacaacaaacttatccaagtattccatgaacactttgttcattaagttcatgaagaaggcaggagcattggtcagcccgaacgacatcaccgtgaattcatacagtccataacgcgtggcgaatgcggtcttcgggatatcttcttcacggatacgcaattggtgatatctggagcgaagatcaatcttggagaatactgtggcacctttaagctgatcgaacagatcatcgatccagggaagagggtacttggttttgatagtaacttcattgagagctctgtagtcaatgcacatcctctttgtcttgtctttcttctccacaaaaatc

SEQ ID NO: 33827 - DNA, 480 bp, Oryza sativa
  unsure (1)..(480): unsure at all n locations
actcagcttaacattgcggccgatctgagttgaaaaacatctttgaattatgcgttgataggttgctcctgcgcttttcaatccaaagggcatggtgatgtagcagtaggccccaaagggcataataaacgaggtcttcaagcagtcggattcttttagtcggatctgatgatatcccaagtagcagtccaagaaactgagtaactcgcagccggctgttgagtcaaccacctggtcaatgcgaggtaacccaaaaggatctttgggacaagacttgttgaggtcggtgtaatcaacacacatgcgccactgtccggtcttcttccgaaccaagactgggttagccagccagtcgggatggaggacctctntgatgaagcctgctgctaacagcttggttagttcttccttgatcgcatccttcctggtcctgtgcaaacggcggagtcgttgcttgatgggtttggcgtcttccttaac

SEQ ID NO: 33828 - DNA, 428 bp, Oryza sativa
  unsure (1)..(428): unsure at all n locations
agctagagcggctctgctggctctgcgcttatgtcgatttgaggcggtcatctcgacagtttatggtcgacgatgagtaggcctatgtccatccttcctccgctcattataggttaatagcactagcagggacatggcttgttcatgagctcattaattagaggtggtgagtgtggatatggaagtattgagtttcaacttgaggacatggagaagatctcatcaagtggctgatgtatcaatcacgtccaatgtgcaacaaaaagtaagtccatccgattcacagtcaaaatataagatgagacctagtccattatgccattntggtaaagaaatctagtcccaactgtaattaactcaagttttttttttaaaacgttaatatctgctaaacaaataaaacaacaatcttttaaatcttttactgt

SEQ ID NO: 33829 - DNA, 400 bp, Oryza sativa
  unsure (1)..(400): unsure at all n locations
gagaatcatatgtcaaatgattgttgagtctccctacatataagccaaactggcaacagttagctgctcattgagagtgttacatcacgatacattgttccaacacacaaatattcttcctaccacaaagtttagtttcaagggttctaaggctgcatggtaaactaatgatacaacattgttttagctgtagcttctacagaggttcagggttcagcggacagaatcaatgtactagttgccggatgcgatgcaatgcaaagcatcaaagaacacgtctgatgccgctggttcaacacggtgaatgtaatgttccaactntctcaaagcagaaaatgggaataatgtaaaggtatagaattattatcagttctaanaaaccacaatgatcttatgctca

SEQ ID NO: 33830 - DNA, 436 bp, Oryza sativa
agcttaagccatttacacatttgccgctgggtttatcaaccccctacttgggatcatgagacatgttaccccctgtgagcttattgattctggagtctctcctacgatcagtgttcaccattgccacaattttagctttagttctttctggatttcttcacagatggcaggcaagaagaggcactttgctggaatggatcctgaggtaaaacttgttgttcacggagcacacatgatatgggctcaaccatttcagcatcatctatatgggcctcattcatatactcatgtcccaaatcttcctcagcctgttcaacctcagtttcattcccaaccaccagcagaacagctgctaagagggcaaactgaataatatgggtaacagggaaagagtacgatataatttgaagctctcgagatggacccactgtccttg

SEQ ID NO: 33831 - DNA, 425 bp, Oryza sativa
  unsure (1)..(425): unsure at all n locations
cttataaaatggtagtacacgttaataacaacacatcttcacaagagacagatgcttttcgaatgtgtatccatcaatcaaatagcaatatacgtaacattttgatccccgttgaacatttacaaaggtcagtgtttcttaaacagttgagctacattcagtaggaaaaataacaagagttgtaaagaatgngtgagtaaaanaagtgcagacacgaagacaaagacaaagacaaagacaaagcagtgagtgataagtactaccttcgtcccacaatacttgtcactttgagtttttgtttgtaatgtttaatcatccgtcttattcaaaaaattatnggaatattacttattnntgttatgaacttgtttattatcaaaagtactntaagtgtgacttatcattntttttatatttacactaat

SEQ ID NO: 33832 - DNA, 346 bp, Oryza sativa
cctgagctgcaactttgattgcaggagtgcgggaccgattttctgaatatggtactcggtatggcacttgttgcgaaagcccatccttgacattgaacaacaatgtcttccggacccgcatttctttctcatttcattctctgtctggactggagtaagctaaactggaacttgcgggatttggttgcttgagctctctcgcggaactgggggtggaggcatttcttcgcgcgaaaactgatgacatcttggacatgacagtcttacaaagaacaggacctgtcgtggacacctgcggggaggcttctacaagaacctgaaggccacactggacatgtcattctcc

SEQ ID NO: 33833 - DNA, 397 bp, Oryza sativa
  unsure (1)..(397): unsure at all n locations
agtaccacgggatcatcatataaagttaagttttgcagtaaacagcatttcaaagccacttacttgcccaaagtcattatgtgaagacgatcctagagctacacagtattattaatcaaggccgtgaaccctcacgaacctgccttaacccaaggcctacgatgattcggaccgaactggcaacccgaccctgggtcccagctcgttccaagccaacccaggccaaccattccattatttagttgttgagcaaattntaagaaataaaacactgacttgngtacattgctaggcttgcccatattcgacggctcggctattccaatagatttactctgatcagaggtgtacatctttacccacaagacacatctttactccgcattccattggcttg

SEQ ID NO: 33834 - DNA, 402 bp, Oryza sativa
  unsure (1)..(402): unsure at all n locations
aatacaccctctttgcgcagccgtacgcccgtacatacactggcgcaaatactattgcacccaaacctccaggcgttaagccgtgaaggagcgttattcacagttcaaaccgcaggaaggccaagggacagcgtattgcggaagccggactgctgcatgtggtgggctttccttagtgagcctacattggcctctacctcgagcctcggcgcaatttaatgggctatttcgcgtgtattcctctactggcttccctcgttggaataagtcactttgactcctttaactactggactaatctgaatcgtattgaatcatagtaccggatatctccactcccccaacgaatttcattcttaatcagaanaacccgatacaacatatcctcaactacaaaccaac

SEQ ID NO: 33835 - DNA, 441 bp, Oryza sativa
  unsure (1)..(441): unsure at all n locations
agcttcaacaatattntaatatacttagtagaagtgtgcttgttaattagcatcaaaagagaccaccgtctggatgcaacataaacatgaatcctcatggaaatatattttagatagttttgatacaaagctattgaatctaataactgccttatgttatgttgggttggtgctactatatcaagtcagtaaattggaggccatctaaaaaatggagtagaaaattaaaacagagcagcaaaaggaaaataaattactctaaatctaacccaccccacttcgtagctagcaaaggtttcatttcataccaaaccctctggttttggagtaatctctatattatgtctaattgcattgacagtttttgaaacgaaccaaacgttcatcggttctggcccattttcttttaaccaggtctacagtcccacattttgtcctacc

SEQ ID NO: 33836 - DNA, 406 bp, Oryza sativa
  unsure (1)..(406): unsure at all n locations
ggccaaccgctactggggttcgcctttttcttaggacgagatgactttgcttagctccgtgggtcgaactnttttgttgtaagttgccgaagtgcttgtggcgtacttgtgcatgtgcttgagcgcttcgacccttacaccttccaagagttcgagcgatacctcacgcccctcttcgcccccagagaacataacccttggtgagttagcccctagctctgctggggtcattgccttatcgccataaagaagcataaatgggctaaacttggttggtcttgtgggggttgttcgaagggcccaaagaaccgataacaattcttctggccatttgcctttcgccgccccctcaagtcttttctttagtgcttctaggatcttgccatttgcacgttcgggcacccca

SEQ ID NO: 33837 - DNA, 395 bp, Oryza sativa
tgattagggatcatctgtgatcatttatctgccgccgccttctttctctcttatattaagataacgccgtattcctgtcggtactttgatttaatcgtactatttgatacataacgactaattgtgcagctatgaacatatcctgatgcgaggcacctagcctgtgccgtagaccatcttctctttaagatgcttacttacacgatcgaaagagacttcatctctatgcataccacatatagactcttgaagctatacgctatcttagacgcacttcatatattgctctatcagtgaataatggagaaggctgttatgacaaaatggctaaagcagttgtgcctgctatcgatgtgatgatggagcactcaagtaaagtcctacttcctaactgg

SEQ ID NO: 33838 - DNA, 413 bp, Oryza sativa
  unsure (1)..(413): unsure at all n locations
agctngcattaaacacctaaggtcctggacttgctgagtacgaaagtactcacccttgctctatataaatatatatatagttcctccgccctgaagagaagataaagtgaagtgaagattagggtttcgtcctggttcccagccgtcgcctgtggtgttgggtgttagaccgtaggttccgctgctgctgctgctgttggtgtttcctcgtccgcgtcgacggttgtattctcgggctgtctgagctgcaacctaagttaaggtaaataagtcctctatttattttaaggattgctatgattcatatttgtcaccgtgggtaccagcactatgtcctgngactggtaccgagatcgcggtttcgtaggaagcggttcgcgctgttttccctacgacacgctcctatcaggtgc

SEQ ID NO: 33839 - DNA, 217 bp, Oryza sativa
  unsure (1)..(217): unsure at all n locations
ttggtcgctcgntatggctcagctgctcgggcctggatcaagaaatctagcaggctaaagaatggacacatttactacatagaagttaataagtgaattttctttatacgtctccacacataatagatatatggaacaaaatatcatttcaacaaaaatgttgaaagggtaaacttgcatatgacatatgactgaccaacagctcacacggtcggac

SEQ ID NO: 33840 - DNA, 449 bp, Oryza sativa
  unsure (1)..(449): unsure at all n locations
gcaagcttttgcctcagaagagaatatctgatgaacacccttactatattatcagncaatataagaaaatggaggagctaggtgaaactgcaacacctccaaggcatgcaagtgttgtagagcctccctccatagcaacagaagctggacatagcagcaagcagaccatgccgttgaatgttcagcaagatatccaggaaactccggagcttaatgcttcacgtgcttttggaaggatgaagaagattactccttcagatgttgatgtaagttatgttctaaaacatttttatgcaatttaaattagaattatatggattctgcgttttataaaaataaattcctgtgcagggtggcagaactcatgatcatgtcattgagctaanaacagcatcccaattcacacatttgaaaattttgatgctgcactagctgcataattttgaact

SEQ ID NO: 33841 - DNA, 488 bp, Oryza sativa
  unsure (1)..(488): unsure at all n locations
ngaagtccattccacaacttctgtgatgatgatctcttttatatagcttgcccatagtttagtcgccataatccctgttatatgcttggtagcttggcagctctggaataaaacagaactgaacattttcattctgagcacatgttgcccctgaaagattttaagaatatgttctgttgatatcattaccatggattgtagatgtggtatccttgaatgttgatgacataattctagtaagaacatgggaaataagtgtttttcttggatgtgaaataggcatcttcttagaacatagctctggacttctatccaatgaatattgctatgcaattgtagagcagcctaaacattgtctatgatttctaagttatcgaaatttcttgacatactatntaccctgcactgcttcctcaaattntgtgtttcttcagagaaggcctggcactagttgtcgcttgtggacgagataccatatcatatgcaag

SEQ ID NO: 33842 - DNA, 420 bp, Oryza sativa
agcttgctccaagatgtgaagtcttccgacagtttagatgatatctcctggaattggaatgagtcatggtcttactcatccaagagtgcatatctcttccaattcgaaggatccttcacaccaattgacttctcctcgctatggaagacgccggctgagccgaaaattcagttctttggatggcttgtccttcatcagaaaaccttaaccgcacaaagcttacttcacagacattggccgtgtaattggatatgccgtctatgcacatgtgccttcgaagacaccaatcatttgttcagcgtttgcagcttcgtcagagaagtatggaactttgttcgctcctggcaagctttgccacctgttattgctgattccacggccggaacctccgtgtggtgggctgcaatcaactgcgttctc

SEQ ID NO: 33843 - DNA, 483 bp, Oryza sativa
  unsure (1)..(483): unsure at all n locations
tatataagttaacgtggcttacgagaatttaactagcatgattatccttatataaaanataagatggtgtgtctttatgagagagaaaaagattcggaccatagattaattatttaaaggccaaaaataattaaggtgatatggcttgatgagataagaaagaaataacattaattaagtgatgatgaactatatacgtatgatattgtaaaaaaaatgatgaagatatatattgaaatcactactacataaacacaaatagatgctggttggaaaccccacataggtgtcggttggagaaggcgacactgctgagagaaatcaaaggggccagttctagaaccggcacctttgaggtctcaagaatccataaagagagtggctcgtgcatcaactcgaatcgagctgatgcatcgagcatctccccttcatcccgaccagatcatagaacacatgaacatcaacaacatctcagaacacatc

SEQ ID NO: 33844 - DNA, 427 bp, Oryza sativa
ctcgacccggaccctgagcacctgggctgcagctgctgaagggaagggatccgccggccggctgcattcatcccatcccctcccggccaattggggaactggaatcccgatttcatccaggtgagtgagtatcccactgcatctgcatctgcatccgcatctctccgtcgccgcctgctcatctgctcatctggatctgcagctaaattacctgccaccgcagatggccgccgcccacaagctatggttcagggaggaggacgccctcaggttcctcttcggcgaggatctcctcgccatgcaccactccgccgcagcctcctccttcgacaggtcgcaacccgaggtccaggtcttcagggacgtcttctctccgtctccacctcttcttcatgtggccgagacttcatccctgctccccactgct

SEQ ID NO: 33845 - DNA, 391 bp, Oryza sativa
tggaactataaaactccgcttaataagggaacgccctctcttccagcctcgatatgaattgagttattgtgggcatgcaaccaacgacgcattggacattcctaagtttgctgggggggcgcaaccgctctatagtccgtatcttctcgggggtggcctcaatgcctctggcagagaacaacaaccctagaagcttgcccgcatgtacaccgaacacacacttattggggcttagttttatgcgggcggagcggagactctcataagattgcgctagatctgagagaacaattactcggtgcgcgtcttacaaccaagtcatcgacataagcctcaacattacgtcctaattggctatccacagaaattcgagttatacgttgataagtac

SEQ ID NO: 33846 - DNA, 312 bp, Oryza sativa
agctttacacttaaaacttatttgctttcttttcttttgctgctttctcacaggttttgaatggaaggaagacaaagtgggccacattaacatgcatgaagtattgatgagcctagctgtagagttggacattagtcatttctatggagatctgcattcaggaagcaagtatactctggtttctgcggtatgtgctgagacaatcctttgctatctatgttcctgaggttaacatgtgctttgcttttcttctacgttttagcacatttagtgtgctatcaaccgaggcttgtggtggggtgggtggggggg

SEQ ID NO: 33847 - DNA, 478 bp, Oryza sativa
  unsure (1)..(478): unsure at all n locations
gcttctctaactcgcctgaactatttggcacttgtggtgaatatagcacctgctgttgctgcaaaaattgtgaggaagacaacaaaagcggctacatcgagctagaagaataagatgctccctccggacagaatnttctgtcgtttcagagactgaaaatgacctcgaaaacgtcaaattgtcctaaccggagggagtagctgtgaatgcaagatctatcgtctctataaacgatttcgtttttgcatcgacctgacacgatcttggagcaggtcgtagtggccatcactgctggaaatgcacataaaggaagtaaattaggagaaatgccttccttgcaacaagaagagactgtcaaacttaagttgaacagatcaaacaggtgacaatttctcagggtatttgtctacttgcacgaaagcatctaatgttacagattattatacatcagaagttcatacctgcatgtctcatctat

SEQ ID NO: 33848 - DNA, 364 bp, Oryza sativa
agcttatgttgatgatgtagtcgtccagacctatcagaaggatgatctgattgcggacttagaagaaatttttgcgagcattcgcgctttcaggatgaaactaaaccctgaaagggcatcttcggagtaccgtcagggaagctgcttggatttatggtgtctcgtagaggcatacaggccaacccggagaaaatcaacgccatcctcaacatgaaaccgcccagcttccagaaagacgtccaaaagctgatttggtgcatggcggcgctcaaccggttcgtctcacgactcggcgagcgggggatgccctttttcaagctgcttgaaaaaaccgacaattttcagtggggaccccgaacacaaa

SEQ ID NO: 33849 - DNA, 309 bp, Oryza sativa
tatgccaacgacattctttagtgtcctaaagttgaaaatatccatcaccaatctctgcaaaaccgccaacttctgcaagtagccaaatcatatgagcaacatttacagttccgcttacgtaagtgatgactaatgaccacacgatattgcttcatatttaaattcaaccactcatatttaagctacaagtctataaattttcttacaaatactcatattgtgaaagcctgctgtacgcttaataacatgataattctaaaactacttatggttaaaattaaaaattactcatcggggaccagtacacgg

SEQ ID NO: 33850 - DNA, 446 bp, Oryza sativa
  unsure (1)..(446): unsure at all n locations
agctngcaagagtagtcgccacttcctttgatgcgcattgtaccatagnggncacaataaattntgcctattatgatattgtatatggaagtagttactttactccattgaaacgtttccccatcatcaaactggagagttagaacaccaataggatcaagttgaattgatcgaccccagaacttccctttcagatttgaatccccccaaaacttccaacctcttccttcacagtgacatgcaacaaccattgggtgatgactgacctgaaagacacgttaacacacaataagaacatgtttctcanaaaaattacacaacactaagaaaagcattcagaattaggaaataatttagtaaggaataattctncatgctctcaaataactacacaaccttttcagagaanaatcgaagtcctttatctggataatcagcttcatatg

SEQ ID NO: 33851 - DNA, 408 bp, Oryza sativa
actggagtatagtggatgtcaccatctgattatatcacaaatactgaaaagtaacttatgccgagatttagaagtaggtgcttaacagcataatcaatccatggaccttgtattaaacctctgtaattcatgtaaaagataattgaacccagaaacataaacacaaaattcataaacctaatccttatgtctcaacactcaaaagcccaaagcagccactttgcattgtacatctggaaattattttataatcagaataagaacacaaagaagcatacttcgatgccaacatactgaacactggaaatacatcctaaggagcacaacctgagtatgtgtattgatcaaaagacattgataatgctcagcagctaagtagtgtagcaaagaagaacatcccaaataact

SEQ ID NO: 33852 - DNA, 220 bp, Oryza sativa
gcatgcaacttgtgatgttgttacaagatgaaatctttattttactcttcactgggcccactcgtaaatagataggattatcatcttatcattatccaacaggctatgaaaagcaagttataccaataccagagtaccacgccaattgatcttgacatgaacattaaaagatagtgtactttcacgcataaaatacgggggggaagatattatattaact

SEQ ID NO: 33853 - DNA, 310 bp, Oryza sativa
gcctgaagacacgcggacgaggacatttcccgcccagccgcaccagagaccgaaagaggcaagcacaaaaaaagccaagccgatccactcacccccaacacagctctccgacctcgtgcctccagggccactcaggaggagacaccgaggcctggcgcactaggacaggacggcgacacaggcggagacacacaaccaacaaagagcggacactgggagagacggaggaaaagggcaggcgcggccaaacgggcgggtaccggagcgagcaagcagagacgggggcacgacggcacgggggcaccgcaca

SEQ ID NO: 33854 - DNA, 359 bp, Oryza sativa
  unsure (1)..(359): unsure at all n locations
agctctcctcacacctttcttataccggcagttttttattaatattgcatacaccacttgagcatattaattacccgcttactggatgcataatctgaagaattggtttacgtagatgaacactgctgctctngatagaacaagtgcttcatgaaatttgtaaatcaacttatgcttaaggttgctcaattcaaaacatgttcgactctttggatggcaaatcatactctattaccctatttttactatcttttgagcagttgaaatgcgatatattaatattaaaatcatggacataaaataattaaccttgtgccaccatactggaaacacttgatggaagtaccttggatcacttt

SEQ ID NO: 33855 - DNA, 476 bp, Oryza sativa
  unsure (1)..(476): unsure at all n locations
tagacattcatcacagtattgctatccccatgttgttccttgctatggatttgccaagcaattttgaatcaaaagctctgaccaaacttatttataggacaaatgtgcaatcaaatgccacttttgcaacaatatacactgctcaagcacatgcagtgtacccaatgaaggttcagaatgagatagattntgtagagctaatcagagtcatggcttcaggtgatccgtttcttatggaattgatctgatgtaggaattcactaaaactgtatacttcggactgggaagggaaaacaaaacaaagtttattcagtatattgttntgttcttctttgccatccacttcagctgtaagttcaatntaacaccctttttgttgagcaagatatgctgctttctcttggtgtcatttacatgtggaatcagatgccagaaacttactttgtcaagatcggaatgctcacaattaaactact

SEQ ID NO: 33856 - DNA, 439 bp, Oryza sativa
  unsure (1)..(439): unsure at all n locations
agctttaccccaaatattttcaccaatcatgacttattagcatcangntaaaagttaaaacccttgttggccttgattggatcctctatgctattaaatatccctctggaatcttgctatttagaattattaaacatagattaacgacaaaatcgattccataacccctaggctattttgctagatgaatctaattatgtatattaatccatgattagcggctaattactgtagcatcactgtagcaaatcatggattaatatacctcgttagattcgtctcacaaaatagcctaggggttatggaatgggttttgtcagtaatctacgtataatactactaaatagcaagattccggatccaaacagagcctttgtttaggtttactagcttttaagccaactcttttgaatggaggatgtttttgtagacagtgact

SEQ ID NO: 33857 - DNA, 492 bp, Oryza sativa
  unsure (1)..(492): unsure at all n locations
tacctgtgaccagtaggaagtattntgtgtttattgatgttcctganttctttttcacataatgctgtagttcgagtaattgaagaggaagagtcgtgtgcttatggaaatctttactgccatcagctataatttcttttctctttctgcaataaaataatgacttagcaggagatgatttagcatgttttgtagtcctgtgcttgctactcccaccgggttaataatacttgtcgttttggacaagggcacggtctccaaaaaacaactttgactattatttttcattataatatgtatataagtgttaacaaatatatgattttattaaagtactttntaagactaatctatacatgtagtcaccatatttgaaagacaaatacattaaaaatgattcatacaaagattctaaagttggacctcacccttgtctaanacgacaagtattatcaccncggagggaatatgtagtagaacacgaacatgtgg

SEQ ID NO: 33858 - DNA, 442 bp, Oryza sativa
  unsure (1)..(442): unsure at all n locations
agcttaattttctctcatctttcatggactcgtttgtgaggccgattaatatctattgatggcccaactttctctgatgtcatcaacagtctcagtgtctcaccttctcatcctactttgcttacgaagatcacttatccacacatgacagagtaccatataattaatcactaaagttttcctaatcttgcctacaatgcatgcacttgtttaatttgtcaggtttttattttgttaggtttcaagagcttcctgctttttgggaaatgtctaatcctggtgatggcataaaatggacatacatgccgatcattagtagtattgaatttagcaaaacatcttctattntaattttcattagtagtatggacaagatgctcacaaaggacagcactatacaaagcgagggctgccaaataactgtgagtcttgtgcagttacc

SEQ ID NO: 33859 - DNA, 424 bp, Oryza sativa
cgtttggctaattaagtgcacatcggatcaagctatacattatttattcagcgtgctcatttttttacagaattgcctgtttctgttggctctgtgtatatacatacagatctactaccatcgcctgttatgacagataactgcgatatctatatgaaattaggtgcacgcacaaaatgatctatatttggaagttcggttacaagagtgattgaaaattagatctttatcactcggacaaaacataattgcagctatctaaaagataatgatagcacatacaagttcaatgccacctaccaagttattggtgccatagaaatgtaactagctcatcttgcatggagtggcatctacatctgcacaattttgctctagctagatcacccacaaccatctaagcaatggccacatcaataaaacg

SEQ ID NO: 33860 - DNA, 379 bp, Oryza sativa
  unsure (1)..(379): unsure at all n locations
agctntccttgatcaagtgagccaatctctcttctttctangcactaccccttctgcccacccataggataatacaggtcaagttgcacctcattggatgccgtctaatcagacaggtatgggggctcctccttggagtaaccgaccacatcctgacttcataaatgctgctcaggcaccatccgttcggtcgggtgctccaacgccaggcttcggagcaaaccatgcaccaaaccatgtctgcatggtatggtaccaaccaacgatccacccatccatggtggctcatcaagcatcaccaatcggagctgcgcagccgaatgccatgtgccaaccttatgcgaaaaccgagatttcctctttactacgacgtacccgc

SEQ ID NO: 33861 - DNA, 383 bp, Oryza sativa
catatcacatggctcacaactgggaatagctcccaccaacaaacaactcacatgcactttgtttatgatcacgttactctccgctattcacttcatgacgccatcatttagcattcaacgtattcctgtgcacctttcggcttgatgagtccttactccatggatcgaacgctacgaaggcgctgtgagcgatactagtgcacgtgcttttattctagtaacatctgatacaaagcccacagtcgaaccgatctatatacaccactgtgcacgctatacttcttgacttcttgatcatgacacataagtatccatccttcgctacatagaagtacttataccagcggtcatctcttactcgtgaattcaccctactttatgac

SEQ ID NO: 33862 - DNA, 478 bp, Oryza sativa
  unsure (1)..(478): unsure at all n locations
gataatccccgcatggcagtacccgctgcatgaacttattttcttatgcactctaggcgnccatgtttctagcagcgagaggagttctggcgctcccgggaaagagaagcctcacacgcatattaaattatggctcaagttaagctctctctctcacacactcatggcagtcctaccaatggcgacaccgatgtaggcgacgcttatcggccctacctcaacgggtgtccgaatcgagcgcacctgcctcactcacgggcgaaccatctatgcagggatactgccttcactcggctatctaatccgctaggtgtatacccattcgagaagtacggttgtacggggcgcgtttcatgctgaacttcatggctcgatccttaattgactgaggacgcgactagcgctcttcagaaccacccaaatgctccgtccgacccagccgaaacagctggttaaatctagtcctccttcacacatc

SEQ ID NO: 33863 - DNA, 337 bp, Oryza sativa
atttatttgagcccccaataatataaaccccacatctatttatattcttaaaaagaggaataatttttttatgtgtatggatctcatattattcgaatattacccgccaacgcacaagataataagcaaaatattacgcatgtgcatatatattgatttgcagcgcaacatgtggggttcaagaagagcccgccggcgtacctctaccttaccacgccgggaagagacggcgaactccggcgaggcctcgtcggcgccaactacaccttcagcggatccggcatcctctacttcattgtatagaataccgctcccagaataagaaccgctggaattt

SEQ ID NO: 33864 - DNA, 470 bp, Oryza sativa
  unsure (1)..(470): unsure at all n locations
agtctcagnttaatctttagtcttaaccgcgaggttgttatcttgcttagctcagntttcgtaaaagtgagctaaccttgaaccgagtagaaaaatcagcgagaaaaaaaaaaagcacttacaaagtctgaacagtaactgtagattgaccggtttggacttggaatcagtcatttccgtcatgaggcctgagggtagtggtttcttcttctcaagctcaagtttcagatcaatgccaagtttccactgatattgcttggtgtgatgtgatgcttttgcatcgtgcatcacttctctagatgcccaggcttgatcaaagggttcttggtcaccgttttggccatttgtcgttgttttggtgcgcgatgtngcgtcctcctaactcttttactaatccatgagaaatattgtcttgtgaagtgcgttgctgcttaattgacagtgtatcagtcccaattctgtcaatactg

SEQ ID NO: 33865 - DNA, 299 bp, Oryza sativa
  unsure (1)..(299): unsure at all n locations
tagcttggatgaacagaatactgcggtgattgttacctcatactttagattcatatatgtgaatttattntggcctcatagtccatctcctgtctgccccaaagaatgatatcttgaactcataattataatcagtaatccatgtgtgaaagaaaaaacattagcagtaaataggaggaccatagaaattcaacagaagggagagggggagatcaggtaaataattacccgtgcttgccaacaatgattgattaaacagagttgaacaacgaaattataccaatagggttgaactgtag

SEQ ID NO: 33866 - DNA, 483 bp, Oryza sativa
  unsure (1)..(483): unsure at all n locations
tcgggagttcctaaaagataagaggtattaaaactgaactttattgtttcataattgcaagataataataaaattattgaaaaaaaactgcaattcttaaaagtatcaggtgttaacattctgtaaaaaagtccaagtcaagacaaacagagagagatattaaatgtgaactatacacaatacacatatgtgtatacatcccttacatggtagaagagtccttaaaatcttcatttgtgccttaatctttggacatgtctgagacatattagatctgtctggtctatgtaatttcaccttatcaatacttaattttccttcttttttaaatgacctattggattagtgttaaccatgccattntgtagtttcgtatttntatactcttgtttcttctttcgatctttaaaattntttttccgtagattcaactggattgtacgttttatttataagcaagtgacattgtgacatggtgatact

SEQ ID NO: 33867 - DNA, 409 bp, Oryza sativa
taatcacctgagctgcaactttgtgcttgccccagttattgctatctgctttaacctccaataagagtaaaaggttctcaacctttcacataaatcatagataaaccttctaaccaaatttatcttggccagcatatcttggagctctaacttattttcagggggcttaattttcttgaatgcattaacccttcttctggatacctcaatccctctttcatgaacaaaaaaactcaaaaactgtctaacccatacaccacaaacacattttggcggatttattttcaaccatacttactggtttttccaaaactttcttaatcggctatgtgaactaaacttcttggaataacaacccatcgttatattaacttcaccaacgagcgattaaatatgatatatatagtat

SEQ ID NO: 33868 - DNA, 471 bp, Oryza sativa
  unsure (1)..(471): unsure at all n locations
tcacaccgttgcaccaagtcgcaagcatctttgagggtggttgtgcggaaaaaccttgtcgaaaggcctttccgaccaaggtgcgcccgccggcgtgtggtctgcatatttcttcatggatgtcgagtagcaatgctttgccgtcctctgaagagacgcatttgcagagaactccattcggggctttcttgtagagatcattatcgatcatacaatacggttttgcctgatgggatagtttctctgcctctgtgccgtcgtcaggtaatttgtttgcacccaagaagtcaataagcagtgtgcgccagccttcggtcatctagatgtcggccacgacgttcttgacctctgtagcccctgagctcgtgtcngcattagatgtgatactttcgtcatgcgactccattaccgactctctacgttctntacagacgtggtgtcattattttgtggctaaaagaatttgcattc

SEQ ID NO: 33869 - DNA, 431 bp, Oryza sativa
agcttagaaatggtttgtacgaagtccaaaatccatcgatgaagctacgatctttaatctaaaaaagatgcatgaatcaattgcaaactccccacctttaagttttatttaaaaggactctttgttgttttattttttttccttctaaatattaatgaagttcaacaaaaaggatgcacgagtcccctgcaaattcctctcttttatttcaaagcacctgtctactcttttgttttgcttctgaataatactcgactgcaacaattgcttaactaccagaatgaataagatcttcgatgctcatcaaattgtaaatggatgaagaggggagaaaaatgatcttatcaccttgaatcgtcaaagattgtacaaatttgatgtgagaacagaaatggtagagtgaactcacaattgcatgtgaagaatatcca

SEQ ID NO: 33870 - DNA, 481 bp, Oryza sativa
tccccggggacagctttccgtgcagaggtcgcacgaccactctgttggtatcgtcgtcggcgatggtgctgagcgtgagggtgtgccacgggtgggcgaagaatgagactgtctcctcgaagtaatcggcgcaggcgtcgtggatgtcgatgtcgcaggtgttgcagcggtagccgaccatgccggcgacgttggttcggcagatgtcgcagaaatggctcgaggtggtgctgtagtgcgtccggagaagcaggtgttgcggatgggcgaagtgccttcgctgcctagtcgccatgtttcagttgaaatttttcgctttgtgcttctatatgcttcgtgtatagaaacgctccagacggagagtttcacagtttacggggtgtttgcggacaccccgtagtctggctttggcatgcctctgaggagttcattacacatttatactacacgcagaatctacaagcacgatggaccagttcac

SEQ ID NO: 33871 - DNA, 298 bp, Oryza sativa
agcttgctgaaccaagatatcgatcgcacctttctttcgatgctgtccgggggaatctccagtgtcgaaaagctttcgttgtggacacatactccacattttttatgcctcccaatcctacatgatactgtaacaatatcatgcatgcacctgtttttttcgaatgcgcgaaaaagattaattgcacgtcagtatattagaagttgcttgcatctaaaagaaaaaaaaaagccatacatacatatatatatatatatgtatgtatatatatatgtatatatatgtatgtatgtgtatg

SEQ ID NO: 33872 - DNA, 469 bp, Oryza sativa
  unsure (1)..(469): unsure at all n locations
tttaagccgagtttgaagtgaagatggcatatgatattngctattgatttacttctggngatgacaaatttagagttgcataatttctaaatgtttactctaacaccatgtttaaagcatgtgttcatagggacattcttgtctttcttaagaatttgtttctccgattgagctgaaagtatcctccagcaaattaccacctttttaggatgtctttcagctatgacacgtgtttttgatgtctattagcaaatttcacaagttttggatgtcctgtagcaaaattacctattttttaaacttggagaaattatatatgttcatgcctcatgttgaactcaaacgataacttcatccctagttntcttactttatgtttcctcttaattttaaatctaaatcttgtgtttgcccatattccatctgaaggagtacttaacaatgttaanaacatcgatgtatggtcttg

SEQ ID NO: 33873 - DNA, 431 bp, Oryza sativa
  unsure (1)..(431): unsure at all n locations
agcttaacttcatgtcttatgagccctcatatgccttttgtttggttatggaagaccaagtgtattatgaaagtcaaggtttttgcgtggcttttattttgtgacaggctgaacacacgagatatgcttgataaaaggcattgtgcaaaggaggatgatgatttcacctgccccttatgtcctggaggacaaagggaaactcggctacatctcttttttacctgccctttcaatatgagatgttggcaatttttgggaattggttggaatcataatttggagttctttcacatggtaactcttgcaagatggatgttcggtagaaatggcaganagggattcttggaaattttctttttagcatcatggcacatatgtaagcagagtaatagggctaattttgataatattattccatcatttcaatcttg

SEQ ID NO: 33874 - DNA, 399 bp, Oryza sativa
  unsure (1)..(399): unsure at all n locations
atttcatccatctgagtttaatttttctatggttgggtcttgagtgctcctaactctgaaaaaactcttaaccaagaacacaccacaatgtcgagacgaaaaaccaaatttggtgggcaggcacaccgccctcctaccccccccccccacgccactcctccccccccccctcctcccccctccacccccacccccctccccccctccctctanccaccccccgctctcctcctccgcctccccccccccctccccccaccccccctccccccccccacccaccccacctcccccccccctcctcccccccccccctcaccccccccccccctcccccccccccccccccccctccccccccccccccccctccccccccccccccccccctcccccccc

SEQ ID NO: 33875 - DNA, 426 bp, Oryza sativa
  unsure (1)..(426): unsure at all n locations
tggctgcgatcgagctcatcttctgatgtgggcacaaaagcttcagcatggcaatcatcaggttcttcgcctggcgcacggagcctanaaacattaggttggcagccatcacctcgcgagagctcgaaatctaagcctaattccacatggggtgcccgtcaaagccgcaactctgttttgcaccaatcaacaacaccaacagctaaatactcatcagaaaccccaaggagacaaggaaacaacaacacaaattctgctggctggggagactctctcggaaacaagagctggcattcaccctcacgcaatgcgagcagccgaagcaaccattctagccaccaccatgaccggcacaatcagagcatcgaatcatggcgtggtggctcaaatcactccaagagatcagatcatcgtccagaacatggc

SEQ ID NO: 33876 - DNA, 377 bp, Oryza sativa
gatcgtcccttcaaaaccctcgagcacaaagaatcatgatcagtaagcagcctccagcactgtcgttctaacattgcttggttgaaagtagtgaactccctaaagcccattcccccgagaaatttaggagtagaaagccagctccaagatttccagtgcatttttatcttaccatcctcaaagccccaccaatgatcggcaatacaagtcttcatcttttcacagattgagacaaggatgcggaaacaactcataacataatttggaattgcttgggccactgctttcagcattgtctccataccaggccttgacagcggccaggcagtccatccattaacccttttccaaattctatctggcagaaacttgaagaa

SEQ ID NO: 33877 - DNA, 302 bp, Oryza sativa
tggggccggggctaaacacaaagggccggcgccctaaggcaaccctaggaacgctctaatcatatttaatcaagttacagttggggtttgggtaaaatatatctgccatcgcagcctcaccactaagtcgggttgtagaaccccccaacctcgagtgcttaattattcgtctgcaatagagtcgtcaactaccttgctcttgcttgcgctattcgattcagatgtagggattagccttctcagtaaggtcaatcgggtagcacacggttgataactagacgagacgtggtgctgcaattgca

SEQ ID NO: 33878 - DNA, 486 bp, Oryza sativa
  unsure (1)..(486): unsure at all n locations
tggcctgccatggtgactgctcaataatgatggttaccaagcatctgtgtcttcttttgcatcatgagaagagaatttccttcaattttccataaattgtccatgcctgtcctattcaggtgaattgttattgatgcctcatctccaggactgcaagtttctacaaccattagatgagaataagagtttgattttgactttgagcattaaaaatttacagagtagttgaatggtaattctacaggtttttttaaagtggaagcggcaaaagaattgccgaatatattagaaggatagcaattctacagattttgattttgactgttagaattctacaacaccagtaaatattgcgcatatccctgaccacaagctatctataacaattaanaaaaaatctaccaaccaaagaaaaaaagcacacaaaataaagatcccatccatacaatatattccacatccacttgtccatgtggacaggaatta

SEQ ID NO: 33879 - DNA, 415 bp, Oryza sativa
agctttccagcgccttatcaagatccgaagattgcgttataacagcccgcatcttaacttgccacagcgagaatctcgtcttgtagtctagcagcggtagatcatactttatcgatgccatcacgaaaccctaatatgataacaagctctgataccacttgtgaggaaacaataggcaaacaaacgataatggacaataggtcaatcacagaagacacgagatttaacaaagaaaaccctcccaaagcagaagagaaaaaaaccacggtgacagccagcaaaattctatatcgagggtgaggttacaacgccgcacggtggcttataagaggtatatatattggggaaccctaaaagggatgacgaccggcccaagcctaccggcgacgggccttcgcttcactacggcagaagc

SEQ ID NO: 33880 - DNA, 418 bp, Oryza sativa
  unsure (1)..(418): unsure at all n locations
actaagcttcgcggtccctcatcgattgcggcagcgcactcaacatcctcttcgccaagaccctggacgacatgtagatccctcgcacagaattgaaaccgagtaatgcgccctttcacggagtcattccagggttatccgctacgccactcggccagatcactcttccggtcaccttcggtactcgggagaactttcgcacagaaaacgtctgcttcgaagttgctgatttcgagacagcgtatcatgccatactcgggcgcccggcgttagccaaatttatggctgtcttgcactatacctacatgatgatgaagatgcctggtcctcgagaagtcatatccctgcggagtgacatcaaacaagccgtcacatgcgataaggaaagctgcgagatggccanactcgcgaatcacga

SEQ ID NO: 33881 - DNA, 458 bp, Oryza sativa
gtgcagcttaattacactgacagtgaccagagtgctttttttgtacagtgtatagtgcctttgttaatacagtggtttttctgaaggttgcagcaggaggactgcttctacaagtaccgtgttaaaaaaaaaaaggggcgataacagttgacagtctgaataaattttcatgtaaatatctatccatctttaccagagcttgtctgaaactgaaagggagccagcctccatgatcctactttgcttgaaggctgcgaaataccttttctgtgcagcaagagaaatctgttaagtaaagcacccatatatccattccaacgccccttttattctgaggttaattcacatgcaaggcaccagagttcagaagcaatgaagatgcttttcttttattttagagacagtttctaacctgcatattcagctcaccatgtcaggatgggcctaaactgatcatt

SEQ ID NO: 33882 - DNA, 473 bp, Oryza sativa
  unsure (1)..(473): unsure at all n locations
tagatggggtataccttgaagaaataacccatcttcttgtcaggctcacaattaagagtttaggctggccctcacagacatggcatcggatctttgtaatttatatacgcgatttctgtactgcaacattatttatgtctattgagtgactaaaccaaataccaattgtcaaggaaaatcatggctaattaatacttgtcaatatatgcagctggcaacagaagcaggctaacgatgaatatctctgcctctcttatatttatggatatagatgccgaatttctatccattatctcaaaaaaagcaagcctattcaagctttcaacataaattcactgatagattggaaactctagataaaagaacacataaaanatcctacttactaaatcacatggtaattatctctatctctcaacgctacacttcatcatctgttggaatgctacatgagtatcccatggaacatgata

SEQ ID NO: 33883 - DNA, 397 bp, Oryza sativa
agctttctgcgggcctttttggattctccgccgatgctctagttcgacgcatccttttctgtgtagtattttcgttgcagatggagccatggaggtggcagatctgtctcgtgaccccccggagttttttgtgtcatgcgttcctgcgcacgggtttccgcgcgatgagggttttctcggcgttcaatacgccgcccccgccggcgttcgccgccgctgcgtgggccgtggagctgcttcgcattctccgcttcgaacgtgccctcggccgccgccgaattcttcaacgacgacacaggtgacgcaccattccaaaaccaacccgcttcatcctgtgcgctgctgcatgaatctaccacacatgaatcgccagatttttttgtctgcacctatattt

SEQ ID NO: 33884 - DNA, 454 bp, Oryza sativa
  unsure (1)..(454): unsure at all n locations
taattgtaaaatctttgattcatggttatactttaatgcatgtatgttatattatagatgggttcatcttctttttattgcaacacatgacttgatatgctatatatatgctaagctcttgaacattaatgaacataatttctatgcatgatgaaatcattgtcaaaagggggataagtaatatgaaaatttttggattgttggagaagcaaggtgaattntangagagttgttgagaagagcatgtttttggttcaattgagaatttctttcttttgaaaagggggagaagttttcttttggatttttcgagcacgatgtatacgtttgtacgaagtgtgctttntaccactnttgtttttatttttccgaacaccaaaacatttttgatgggttngccaatgtgttcatcaaggaggagaatgtaaatcaaaggtgtttttattattattct

SEQ ID NO: 33885 - DNA, 442 bp, Oryza sativa
  unsure (1)..(442): unsure at all n locations
agcttgctagctgcatcctactctaattctagtgctagtccagccttcttcttcctcctcctcctttccctttctcacccactcttcctctccccttcggagcgacacatccatctacaggtgaggaccgtctcacacccagcggaaagcttcgccgccacctcctccatgagccctccaacttcactcgcggcgtagggaaagtacaggggtgagcagcatggcacgcgtcggcgaaggtggtggcatgctccagtgtaagcggcaatgcgggcagcatgctccaacgaaggcagcgaagccagcgacatgggaaagaagcagctatgaagggagtcgagctcgaggcggncctgccgacctgccttctccactctcggcaagggggtgctggatccgaggaggtccacccgagttcccccaccgaagccaggcacgtggg

SEQ ID NO: 33886 - DNA, 486 bp, Oryza sativa
  unsure (1)..(486): unsure at all n locations
ntacaactaataagtggttactactatctttagttctatggtttgtttgattttataaaaaacatattctaactattgtactgttatcttgtccggatataatgataggaattcgatagtgttcctagcagcttgacaaatgatatgcggtatccagcattagtgatgttagtcagcaatgctcacatcacacctcgacctaccttaacctaacaatagtgtccttaacgtggcaatgtaaacaataaatcagaaactcatgtatcctaatattagaagtttggtcaattattagtatatgtattatcatttatcataaacttcaaaatgtctatgcatcgatagtatttcaaacgataatcagattcttgcaaatgttcaaattaatttatgttcatgatgataagcgttacatgcagacgattactaaatgtcaccatagcattagcacggacagaatactagttattgaattcaaacgaaaga

SEQ ID NO: 33887 - DNA, 439 bp, Oryza sativa
  unsure (1)..(439): unsure at all n locations
agctntgcacttaccgctcaccatatcaattattctgtcgaaccagaggccacgatggcaaggaagttagcgccactcgctggtgctgaaacgttggatattaccatcattgctgttcaattttttaaaataagtttttagtgtggactattcttgaaataaattttcccaaagggccaaactgtcaaaattttcggagctcacaaagtcgcaactcacaagtgaaaaaggtcaccccgcatgcagccgtggccccaatcgatcgatcgattctgcgatgggaggaaagagaggaaatgggcgaanagggaagccttgggatcagaggagggcatcgtcctctagcgcccactcaccccggtgactcggtgagtgcgtggctctgcctcgcctttntctgcaacaagtgcgtgcccagccgttgcttcattgctcgctc

SEQ ID NO: 33888 - DNA, 491 bp, Oryza sativa
  unsure (1)..(491): unsure at all n locations
ntgtgtctctaagagcaagtatagtatgtcctagtcagcatgcggaaccgcttcccacgtcatcaaaatcctaggtggcggagtgagaagagaagagagagaacggagcgggcttccaggcgctaagccgccgcttcgttcctccccttgatcccgtgcgtctctgccgccggccccaacctctcttcctccacgcgccaaatcccgctccctcccgctaaaatcgagtcctcccgctccaatccgtcatgtaaccctcccaaatccactcccatgccaccaaattcgtccccaaatcgcctcctctcaaaccctagaccccaaattcgtcctcgaatcacatcaagatgaggcggcagtccaaaaggatgtttgcgccggcatcattggaggtcccgccgccggcactaacaccacattccatggtgacctcctcctcaccatgcttctcgacgggttacagcaaccaggcatggtgagtatcccatcta

SEQ ID NO: 33889 - DNA, 430 bp, Oryza sativa
  unsure (1)..(430): unsure at all n locations
agcttgacaattgcttatttctttagagtgtatctatttctaacatttcatattactaaaccatataagtttgattcatgacgtaaagcttgtaatatatatgaagttcctacgccatcttacttatttacctcttggaagtataattgcttccgcacattgatgttagatttgccatataaggaaacaatatgtttgattataggcaatatatatttnttaatttctcatgccgctacgtgcatgattactagtctatttaaacatgttactagttattaaacaagcgattcattaatatttgtatttctcgatgtctatatagccaattttgtgtggaccaatggagatttacgcattaaatccgagaaagtcattaagagaatatattgttggattgaaatatgcctatataaataaattctccagt

SEQ ID NO: 33890 - DNA, 389 bp, Oryza sativa
  unsure (1)..(389): unsure at all n locations
agctntgtacctcaatttccttgaagccgattgagaatgtatttttaagtaattataaacatcatacctccaatcatcgactgtaattgtggcaacctctatatcaacatccttgaccatcggcttataacccgatgctccttgagccaaatcattagcctcaatattttgttctcgagaaacatgtttcaatgtcaccagccgaaaaccacccatcaactctcggcatttctcattgtagatcatcaatgtatcactcttgcactcatattctccagctaattgactaatgactagcanagaatcttccatgatttcaatagcattggcttcaactctcttcaaaagttgcaatcccttgagcactgcctcatactcaacttgattat

SEQ ID NO: 33891 - DNA, 359 bp, Oryza sativa
tgtgatatgaaagaaagcgaagctcctgaatcaaacacaactattgttggtacggagctgacaaagaacatacccatcacaacgtctggagcatcctgagctgtctcagcttgaatgtggttcacccggcctcgaccaaagttgttggaagcacgagaaccttgtccacttgcctgagagctatgtcgagactgagctgccgctggagtacgagttctggcagtgctgccattagcatgccctgagttggtgttggtaggattctgagggcactgtctggcatagtgacccatctggttgcaccggaaacactgaactgctgacagtcctagcggtgacttgaaagaggtaacactgtt

SEQ ID NO: 33892 - DNA, 429 bp, Oryza sativa
  unsure (1)..(429): unsure at all n locations
agcttgttcttntttcttattacatatgtttgtttgcgagaatttattctatgccattcagtttatcatgggagaatccattgtatgccgtacaaagagataaatgctatcgcaaatcaacaattaaaatgatggtatctgtagagtatggggatcgttggaacaagcgtatatgcgatattggatgaagaagacaaggggcatagatttatactggtctaggccctcaagatgagtaataaccctactctagtttatatgtattatgggtgggaaagtcactttacaatgaggaataggatgactagactaatccgccgacttgtagttgtcgagaacaacccgacaagatctattggcgaatagggcgttggcttcctttggattacttctgggtatggctatggctatggctatgtaactngatgc

SEQ ID NO: 33893 - DNA, 460 bp, Oryza sativa
  unsure (1)..(460): unsure at all n locations
tgatcgaaatcggccatgtcgtagatgctctattctcttgcttctataaaggaaattagaaggtgaaacaagcaagaatcagtaggtatattgcatacacattagaaagcaagtaggaggagtacaacttcttgtttaatggagcagatagaagagtccgtatgtgaagaccattaaaaaccatctctgatctagctacttgctgcttgttgaaagatacaaagaaaagaaatatatcctagtatttggtgatttgttgtctagcttctctccttatcttagcccatggctaaacaattgtcatgatccctaactaaccaataaactatcttatatggtgatccctgatggngcttgtgcgtgtctttctctaattatccccatatgtccatggttgaattttggaaaacaattaattaaaaattcaaactcgacgcgagatgcangatacatgatgaga

SEQ ID NO: 33894 - DNA, 368 bp, Oryza sativa
agcttgatggatcatcttatcttttaagattgccggaaaatatctttctttttgttgcgagttccctgcttcacgcaactaggaaagatttttctagtttctcctcccattctaaagatttcttgttgagcggcaagaaggtgtttcttgatcatttccgtcattttggccccgcgagaaaaaaatcatttatgtccttttgttcatggagcaattatggatagatcacgtcaggaggaagtatcaaggtgaagaaatatattaccaaaagataaaatctgtagagtttaccgctcactgtgtggtagcataacagaagttgggcaataaattaatcatggatgcaggctgcctctcaagtcccaagt

SEQ ID NO: 33895 - DNA, 484 bp, Oryza sativa
  unsure (1)..(484): unsure at all n locations
tatagaannactaagcttaggtattagttggagggggtaaatcgaactactgtaaaaatttaatagcttagacgagtaattcagatcttttccatctaaataaagattaatactactttagtattacgtactactctctatgtcttataaaaatccaatcaacattctaataatataaatatggataaaggtttatctttaggatgtatcaatataatgtactatatagattgagtttttgttttacttttctcagtttgggtcctctcttctcttgtttgatgtgttcaacttgtcttgaactacattttttttctggagttgatctttgtaataattggctgtagttctttttagcaaaggccgggatattatatttcattattaaaaaaatagtgtactacataagtactttgttatactcgtcaattcatggatgagtcagccaatcgcgttgctcgttgggctatcggtcgatggaact

SEQ ID NO: 33896 - DNA, 444 bp, Oryza sativa
  unsure (1)..(444): unsure at all n locations
agcttgacatgaccacattngaaaatattaccttacaatgcagnttctcttcaactgaaaatttcaatgaacctttctcactcagatatgcagctttgaacctatactcaacacaaaatatgcatttaagtatgatgtatntaaaggcagtggattaagatgatatgtggaaataattggggaaaatagaaggaaataagatattaagaacagatcagttaagattttttttggggggaaagaattacatatgccattgtacgaccagaagtttcaaacatcatatcaagcagtgtgaaaatacttacacagctccaataaacagagttttcgcatagcatgtgtttggtttgatggccacgtgagatgggttgggtccatccctgtcatntattttctgtttggtgtgagggatgggaatgaaccctatatttttgtttggtt

SEQ ID NO: 33897 - DNA, 428 bp, Oryza sativa
  unsure (1)..(428): unsure at all n locations
agcttaaataagcaaaagagattatgaaagcctgagagaacatcacaagtataggtttttatgcagtaatcacgactttaactttagttaaatctgagtcagtgtcagccttgctattgtgcaatagtatttcctgtaatattcagcttctggctaactgcggctccttgagaaactattcatgaactgattttaagcttagctatttatccagctatcagtcgttggaaccattaacaaaccacctctgaacattacaggaaatacttgatcaggtcatggataacagcctggatatagaacttcaccttttccactctcacaaactcacaaatacatctttacttgacagaagagtacgatcaaaaccatctaaatacataattacatcanagcattaggcttaccaagaatagagaagaaaatca

SEQ ID NO: 33898 - DNA, 464 bp, Oryza sativa
  unsure (1)..(464): unsure at all n locations
gtgtgagttacagcgactgttctttctccattttccatttatccattttgattagtgctattattttgtcctaaatttctgcttctcactaacatatttcaatcaacttatatgtaggccaactcttactgctggttctgtaaaacttaacgttgggcaatttgggtcagcactacagaaatcatcaatgtcaagggaggactataagaaagctgtttgtcaagcaaaagagcacattctagctggtgacatttttcaagtagtcttaagccagcgttttgagaggcggacatttgctgacccctttgaggtgtaccgtgcattgcgtattgtcaatcctagtccttatatggcctatctacaggtgacgaatattttcagtactcctgtngacatttcttatgtaacatatgtgtcatgctgaacaacatgctttatatcctataatatcgtcacacgctcgc

SEQ ID NO: 33899 - DNA, 414 bp, Oryza sativa
agcctaagtagttcaatagaacatacaaaatatttgtaaaaggaatgttgtgtctctgttatatactttgtccaaagctttgtcacgatttctagagctttgtgcatccgggggtgagtaatatggccctgaacctatccctccaacaaatgataatcactaatattccataatagaataattaaaacttatcacctaaagctacatttttccaaatatattgtcaccttatgcttcactagaagataaaatcaaaatttacacctacttgctcacaactaaattaactgtaattgaaacacactttcctccccagatccccctccagattaattgcctcatccattgagcacactttcctaccgaagcactccagattaattgcatgtttgtaattaaacttcattcattaat

SEQ ID NO: 33900 - DNA, 491 bp, Oryza sativa
  unsure (1)..(491): unsure at all n locations
agctttaaaatcagttgatggtttaaatctttgtaaaaagattacttgttatgtgaaaaaaaggaagtaccgtgattatcggatctaattacgtagaagtgcagctgatcacaattttctcccgattatcggatctaatcacggcttcgcgacggngaaaaaagaaaaggaagactattgccacgcgaaaaaggaaaaaaccaatcggatgggctgctagtgagtacgtggaccgcatacggagccttggggaaaaaaaatgcacgcgacttaagctaatggcgcgtaatcgccaactagcaattctatacttgttttctcttcctagcgatggagaagaatggttggactccaaaagaaacaagatataagccccgtaaaatggaaaactgtgtggataatcaccgcatgattatttacctattaactaacatanaatttanaaaaatctactttttttntacaaacacaccgattatcccgtcgagaag

SEQ ID NO: 33901 - DNA, 381 bp, Oryza sativa
  unsure (1)..(381): unsure at all n locations
ccgaatgaagaagtttaaacaacaataggacgcgtggggtgatctgctacagtattgactttggaagggtctaagccaaagcacagcagcatcctttatcagagattcagattccggggtccaaagagccatatcacagggaaattcgcaataatgcaatctgttccttttcagcagcttacaagtcacaccacacagccccaaatccttatgtcagaggatccccaattccgcgagaaaaatgacgttgtattntaacgaattcccatttcgatgatggcagaatgacaatttttttctcaatttcgtggtagacacaagttaaacgtctaatattcatgcgtgaaccaggcatcgccaagtggcagctgtggaggtgac

SEQ ID NO: 33902 - DNA, 491 bp, Oryza sativa
  unsure (1)..(491): unsure at all n locations
tgaggatgccagagggggaggaagtacaagagaatacggggtttatgtattttgacaatgttgatcaattntaaccaaaatatttcacatatgtttacctactatttggacccaccgaaagacatgaagtatagggagtgagatataaagagtatgttagagtgcataggaaatatggagagccatatagacatttagagagctagacttagctcggtcatctattagaaatgttctaaggggttatttggttgttggctaaacatgccacaccacacgtttgcctaaagtgtggcaatgtggcaaagtttggcaataaattgattatctaatgtgtggtcctaagtactaatatagtattgcatgtcacaattgtggaactcatccagacacaatgccaataaaatgtagcacgcacaagatttaacgtgaaaatctttggcaatcaactaaataggtcaccgctccacacactctcatagtggacaaac

SEQ ID NO: 33903 - DNA, 434 bp, Oryza sativa
  unsure (1)..(434): unsure at all n locations
agcttgaatantttgactataagtaaggataagacatcttataacctgcaatagaggtagttggtcttcacatgatgaaaaatttaaaagtaatccatagttacagtttagagtgttggttcggtccttctttatggaccacgtggtactagtaccatgagatactaaaatcctgaccgttgttggtcattggtgtggttagcgcgagagagccacggtggaagggtataatcgtaaatggagggatttttggatcggtgcaaggtttggctgagttggggaagcgcggcataatatcagaaccctatgtggcggcggtggtatcccgttcgcggcggcggcggcggcggcggcgcatccttgtgtctctgggaagagctgcagaacgcaaaccatcggtttgccattctccccttcgcgggggcgccttatcc

SEQ ID NO: 33904 - DNA, 350 bp, Oryza sativa
  unsure (1)..(350): unsure at all n locations
agcccgtggagtatcagcatcatccgagaacagacatgaataatcccgattctgacggagtgcatggacctttcttttctcctgcanatgccaaacgaccaatgcagaatcacaggtcataactaatgcatcggaatccttctttaagggctgcaagcaacataacctggtgatatttaatcctaaatgatccatacctctttaacaaacttccgtttctgctgctgcccgcttgggattggttggttttttgaagcacaagaaacacttgctttctgtcaataattacgtcggaattcaattatcaaagctgcacgtttgctggatctttaagaagaataaaaatgaac

SEQ ID NO: 33905 - DNA, 434 bp, Oryza sativa
agcttggcttttgctgacctatggtttctttcttcatatgctcttgcaggacgggtgagtttatgtattgcatacaccagaatatgatagatcaatggcgattgaagtggtggtgttgtagtgctaaagaactaattcacatatgcaggcactttgttcctaatcttactattggagctccagtgattcagagcttgaggaagcacaccaagtatggtggtgctcttttactcaccttgttaactcttgctcctatatgtacctataatgctcaccattctgaaattttctagggcatatttggactgccatcttatggcgaccaatccttcggattatgtagaaccattagcaaaagctggtgcctcaggtttcacattccatatagaagtatccagagggtaatatataatcgttgagaagcagttaatggt

SEQ ID NO: 33906 - DNA, 491 bp, Oryza sativa
  unsure (1)..(491): unsure at all n locations
ntgaatggttatgatacaaatctccctaacttggaatgtnntttggttgaatgatgcttagaattataaataggttgcatatttgaatgcatctcacattgataagtttgtagttnttggcctcctgcagttcacttgtcaattgtcatgcatgtattcattatttttttataccaagcttctttaagtctactattcaatacatataatattaaaaagactcaatgcttcaaaaaccaaataataagtcaagatagcaattagcaagcaacacagcagaaacacggtgacgagtggaaaaatgggtcaacaatggacaaagaaccagtactaaccagcatgtacagaagattgaattcaaaaaaaggaaaaaaaatctagtgaatcactgcacatacctnctggtgcttngcttggcttgctagaaggtngaatcaacataagggactacaagtattcagcaattaacatctactgaggcagcacctatg

SEQ ID NO: 33907 - DNA, 425 bp, Oryza sativa
  unsure (1)..(425): unsure at all n locations
gcttcatatctcatttgcgcgccactttatgatgtgtattcttgcaggcctcttttggtttcactccggtaggccccttgtcagaggactgtcttctcttccatgtttttgtgcttaacacaagcatgccattctaaatatcaatgtgcatgcttaatgtaatgttttgcaagtgaattgatttttcaataagatggtgctccatgcagccttttttttttggcaggcagatttgtggctcatgtacagttattatgagatattgggaacagtggtttactttaaatgtccttgtgacctggcaaaaggtcgggacatccatgttctcaactctcaatcgaatgtgtttttgtttgcactatgtattattcatattttttatgggtcctaactggtngtatttcctgtgtaagtactggttggtt

SEQ ID NO: 33908 - DNA, 477 bp, Oryza sativa
  unsure (1)..(477): unsure at all n locations
tgcctctagcaatcaatcagtgatgttgatcatgtgctatgtgttatgatgttgatcatgtgctatggctagcaagatcgttctgttgcacagaanaggttataaacacgatttctcagagtgccatgcgtccatcatgaagatgcttattgagtgacaactgcaaacttggtgataagatggcttctgttgtgcacggagtaggccgctttgacttgtctaanatgctctagcagctgccgacgctgtagttggatagtgtacttggataggaccaccataagcccaccgagatcgaagtgcgcagactntgatgagagctctgccgaccaaagcaaccggatggcaatatggcatactccggcacatgtggagtacactttacagtacattcacatnttaggagtacctatccttacaattcataacggcatgtcgtagaccaataagactaaatgaataatcttaacatatact

SEQ ID NO: 33909 - DNA, 436 bp, Oryza sativa
agcttgcttggaaaacctgtctctctgtactgctcggtcaagcaggctccgtacgtacgtacatgctccagccagtacatgaggctgtactcctacatggaaggcgtcttcttttggcacatctatcgttgatcgatcggtcgaatccgtcgttcgacgccatggtgatgcacaagacgacgacgcgtgtgtgtgtttttgtgttgctatgtgatgtgatgggcctcgctgagactgagtgcgtctgtgtagtactacgtgtgtgcatgtgtggagcgagagctcgagcttcctgcccgagacgacgagatatggatcggaatcggattcatgcgccgcgcggcgagcgatcatccatcgacgcgacccaagaccgaagcgtgtgtgcgggtgtgtagccgcgtcctggtttttcggctacctcttgtatgacatc

SEQ ID NO: 33910 - DNA, 459 bp, Oryza sativa
  unsure (1)..(459): unsure at all n locations
acctataaaactcagcttgcgccttgnaggactggacgcaaggctcanggagatcctttggttcttagatcttgtaattgaagggaagctcccactgaatcatgagattctgtaccacttgcaggttcgccttctactcattgctttctgtatggtattcttaggagttacatatacctccaattctcttgcatttgctatattattgaggtcagcacttgaaagctatctcatgctaccgccgtttggttttatggaatatttgtgcctttgagatatacacctccattattgtggttgttcggaattcagtatcactaaatatcactcccaaatcaaataaaaaaagtgcttanaagttgcttacaaagtggaatatgctgccactggtaattccctgtgatgctactggtagttttcacaatacattggacgcgagatataannggatctttggat

SEQ ID NO: 33911 - DNA, 348 bp, Oryza sativa
  unsure (1)..(348): unsure at all n locations
agcttgctctcaacacatatgggttanagaaaatatatccatgtcccctncacaatcatgccagagaaccaatttgtgagaaaggtaaaaaaggggatcatttttatttataattcacaaaaattataacttctaatttcacacataataaaacccttgatctaggagtatgattgatgatcttcttgaggccatatttttggctttgcaatacatatgatgtaggtatgtcaccaagttatccctaccaagctccacatatcagccaataaataggggtaaattctggcacactttgtcttggtgaggatccaatagaaaatataattctttgagagacacgagagg

SEQ ID NO: 33912 - DNA, 348 bp, Oryza sativa
agcttggagacctgcaactcgataacaactatctttataacgaactcacggaaaccatgagcatctgtgacagctctggttcaaaaatcggcgctgggagaaggcgtactatgcgaagagacacaaagctattgaaatctggcaggaagagccagcaagagagcacggtgaacatcgaacagcgcaaagagatcgaccacgctggccttgagaaatcgaatgagttgttgagggagaagctccacaagctgcagagcgaggtgcatgcactcagaagcaaaaacagccggtgatcgatgtcaagtcctgcgatgccgagatcacaaaactgcttaccaacatgcagat

SEQ ID NO: 33913 - DNA, 482 bp, Oryza sativa
  unsure (1)..(482): unsure at all n locations
tcttcgctgcacctcggtgcccgcgtgccctcttctgtccaacggatgggtgactaccactagcctcctcctcctggttcccctccacatccctttccacgtgcccctgctggttcccctccgcatccctctccacgttcccttcctcgttcaagtactggtttggatcctcgttcccctcttcttcattccagtactggctgcttccctccgcgattgtatcgtacaatatctgttcctcatcgcggtcagccatctgttgatacaagaaacatctgctaagtcatgagacatttatgttttaattatctaagtcatgtatgctaagtgtaaatgtcgtacattagaaccctacacaaccttacgtgctaagtctaattacaaatcgtgatataagctaagtctaggtgacgtatattatacaaccctagctagtaaataattatatactaagtctaattacaaataanataatcttatat

SEQ ID NO: 33914 - DNA, 431 bp, Oryza sativa
  unsure (1)..(431): unsure at all n locations
agctntgactgaaagtctatctatgttagcttttacgatggaccgngggatcttgacccccggtggcataatagtttttagcaaattttgactaaatttcgctcaaatttactaatttaaatttgaatatatcaagaaccatttgaaagttgcctcaaaatttgctcttgttccacgtcgaaacctaacttaattttttgtggttcccccctgtccatataacactattccctgaaatttggaaccagacatccaacaccttaaatatacaatatcgttcatataagcccctaaagtagtgtctaattttgcaggtacaatggaaaatttttgcaacatggcatgcatattgaagatatatgtcaaaatcttcacttgaatgtatctcttttattacctttctctcactgataattaatcagaccaatata

SEQ ID NO: 33915 - DNA, 334 bp, Oryza sativa
agccgaacccacgccgtcgagcccgtactccaccgtcccctccacgccaaagtcctatgcgggaggaggcgctcgagagggtcgaaagatccgcgacttcgacatccacgggtgatggggaagggcggcgagatggggagcgtcgcctcctcgtctactgtgacggcagcacgccccaaggcgcgctccaagctgcgggcgcgctcctacgtcacccgcccgttgtccctgacccggagtctccagcccaacgttggctggacgacgtggccaacttggtcatgaccgcaccgcatcgcctatgtgctggtgggcggtcctccgtcaccaagac

SEQ ID NO: 33916 - DNA, 383 bp, Oryza sativa
agctttcaagagtctcactcttgaagttccatatgcccagctcccgccaagtatgtttatttacacatatttcttcgtaagcatcatccgcaagatacgcacaacctgccttcaagtttggaaaatccttatctgaaaggcaaacactggaattgaaacccatgaaaagaacataatcttccagtgaatccatcttgacaagtttccgaccatcgatatcgaccttgaacagcagtatttcatccgtgtacagctcctgacatggatcataaacatcatcacaatcctccggagggaagcgtacgggcgtatcaacccaacgcggatccctacactctcagacctgcaccatatcgccgcggggcgtcacggcgatcgatttg

SEQ ID NO: 33917 - DNA, 437 bp, Oryza sativa
cactttgcagaaaacagcatttagaagtcactttattgtccaaagtctatttataacgacgaccctagagctacacaaaattattaaacaaggccgtgaaccctcacgaacctgccttaacccaatgcctacgatgattcagaccgaactggcaaccctaccctgggtcccagcttatcccaagccaacccatgccaaccattccacattctactcgttgagcaaatattaagaattaaaacactaacttgggtacattgctcggcttgcccataaccgagggcgcggctattcgaatagataatactctgatcagaggcgtacatctttacccacaagacacatctttctcacgtgaaaccacgtgccacataactccacggtatacgggatgaagacgagacataaataccaatccatcctactcatagactaca

SEQ ID NO: 33918 - DNA, 379 bp, Oryza sativa
  unsure (1)..(379): unsure at all n locations
cgcagctttgccaacaccagactgatatgctgctgatggttttcctctgatcgcgagtacaccaggatgtcgtcgatgaagaccacaacaaacttatccaagtattccatgaacactttgttcattaagntcatgaagaaggaaggagcattagtcagaccgaacgacatcaccgtgaattcatacagcccatatcgcgtggtgaatgcggtcttcgggatatcttcttcacgaatacgcaattggtgatatccggagcgaaggtcgattctagaaaagacggtggcacttttgagttggtcgaacagatcatcgatccgaggaagacggtactctgttttgatagtgacttcattgagagctctgtagtcaacacaca

SEQ ID NO: 33919 - DNA, 425 bp, Oryza sativa
  unsure (1)..(425): unsure at all n locations
agcttctgatcatgcttctccttgtgacgactattgtcttcctgtcctgtgtagaccaaaatgtcagtgtcatcatcggcattctcatagcctccagatgaaatgatgcagacagccagagtctcatctttgttcttagaagagatgtaatcaatgccacccatggctggtgcatgcaaaccaatgatgcacatttcaatcctaaagaagaagatatcgccgacttcaacaccaggcacatgccctatcatcttatgattgttgattctgaggttgttctgcatcatgagggtgccagctttcaggtcagcccgcctgcttgcatcctccttttcatccaactgcagtacacggcgccgaagggaatcaaacatcatcaggattccttccaccgattcctttgngttgtctgatgaggatgaaca

SEQ ID NO: 33920 - DNA, 467 bp, Oryza sativa
  unsure (1)..(467): unsure at all n locations
agaccgattgatacttcatcggtcacgtgtgaaactatttcggttacacctatgcctaagaccggaattggtagtaattctctccttattaatcctattgatgttgacaaaaagaaagggaaaagtgttattattggggatccttggcccaagaataggatcaataatgcaaaggccggagatcataaagttgcaaaggatgagttatctagtatccaaaggaccaaaaagccgaagctcacttttgagatgcttatggctaaatacaagaaaggattagccggtcaacgatttgataaccaaactagtgattcgaanagaccaagatcatctcgtacgaagagatttggcaaacatcaaagcaatcggagccatcaaccataccaactccatataaacctccggttgtgatgccatggtatccatatccaatgtcactatatggntatccttttatgtattacatg

SEQ ID NO: 33921 - DNA, 432 bp, Oryza sativa
agcttgagaaaaattttccacctttgttttgatgtcatggtacacttttccattcatttaatcgaggacgcaatccttaggggtccggttcagtatggatggatgtacccagttgagcgtaagttgcttactttgaagcgttttgtgaggaacatggcaagacccgaggggtccattgcaaaagcatatgtcgcaaacgagtgcttgaatgcttgctctaggtattttgatgatgttgacacacgacacaattgtgaaggcaggaatagagagcgtgtaattttgagaaaggtggcttatctatttccagcagggattacttttctggtgcatcgaggatacctacaatgagaaggatatgacaagatgttctgtatatcctcaatatactccgaggcgagccattatagagatgtctttattggagcaata

SEQ ID NO: 33922 - DNA, 477 bp, Oryza sativa
  unsure (1)..(477): unsure at all n locations
tcatgacatanaagggcttcaactctctctaataaatccaatatcttggatatattattgatactatcaactgaaaagcacttcctacgaaggtgaatcaacaaattcattatgcatttctttaaagctgtggctgtcatatcaaattgcttctttagaaagtccagaaagcacataggttcacttgttccatcatcctcaagaagcatatcatactgagaaccacaatcttcaaaaaaggatatcatggaagctattttgtatctccagccagtcaatgatgaanagcactcagcaagttcatcggcacgacaatctaagacaacatcttgaagctcctcagtgatgtccatattatacttgtttccaaataataagacatctccaagagaaaatggtangcagttttcagtgacattctttctataatccctaaaaatatgaaggaatcgtgtacacacaccaacaatggcaaca

SEQ ID NO: 33923 - DNA, 434 bp, Oryza sativa
agcttgatcgcttcattgatatcatgacgggacctgatccaaaccagaaccaaaaccatgatgctctggtcatcgaggatccacagattgaagaagtggaagccatggcacatcacccaacgcaaacccatgatgttcagcgatggtcgacgtcaagcgttcgccctcgattccttaacattcctattgcctctgctccacttcccaccacattgaaagactatcatgacatggttgaagacctggtgaacaagcggctgaagcaaatctccatcgagcaaacaccccgaccaatggagagtgagcttgagaagccatatgaagcttggcatgatttagtacctttcctggcagggtggcacccacccaagttccgtcaattcaatggaaccggagatgcaagagaacatcttgcgtactttgaagctgcatgc

SEQ ID NO: 33924 - DNA, 443 bp, Oryza sativa
  unsure (1)..(443): unsure at all n locations
taccanactgctgccgtcctgtntgatgtcctcacagccgtttatgtctcccagaanattgaagttgatcaagcggtaatcttcttaactataacttgattatgcatttcttcattttcttcttctactaacttgtaataaataacctctcttgcagattttggagacacacaaccaagtcgaggaaaagaaaaaactttatctcccttacaacatcctcccgcttgaccctgacagcgctaatcaggctatcatgcgatatcctgaggttcccattcttctcaaaccctacctatcttaatcttacgtatcttttccaactcattctgcatnttttattctcctcattttacagattccagctgcttttcacgctcttcgtaatacaagaggactaccgtggcccaaggatcatgaanaaaagcctgatgctgatcttcttg

SEQ ID NO: 33925 - DNA, 343 bp, Oryza sativa
caagcatttatcgtttggagtcggactgtttctttatctcttggaggcagacattgatggtctttttaacagaccatggagacttaagcagcccagatagcatataacacggatcacgtacaaaggacccataaaaacatctcaaattagagggtaaaactatttgatcccccatcaaagacggccgaatctttctcgatcacccaaaattgggtggcggttattttatccactcaatactctatttccttttttccaatatcagaatgcataactctggaaaaaaatggccaagatgatcgccgcacggacattaaatctgacaaattataagccggatcta

SEQ ID NO: 33926 - DNA, 245 bp, Oryza sativa
gggcatatatctgatcaggactaacgtgccatctctgggaggtaacacgctagctccagctggggacgagcgcctagaagccctcgtcctgacgggatggggcgaggcgtgcgtcagaccgcctgtcgccacctaacccgcgatctgaccggtctgtgactggtcacagaccggataaatgagtgcactgcactgcgttacatgcggcgtgacacgctcagccaaaccgcaataaatgtggttag

SEQ ID NO: 33927 - DNA, 432 bp, Oryza sativa
  unsure (1)..(432): unsure at all n locations
agctttctgatcttccttagcagagtctcctttgttatgttctgnngncatacgtctaggacaggttcacaatctgcgtgttaatacgctttgaggttgcttatgaccttcttcaaccacgcacacgcacacattgagaatcttatattcttatatatgtgaatggtacaggctcaatcaatttgcaatttagtatggtgatgtggtatttctgcttccctgcgcatttcatttacaaatctcacgagtggcctttttgaatctaagtgcaaagatcagcatcttttgctgctggtcattggtttatatatttcacatcacttgcataaactgatgtgccatttccccttatttcttctcactttcagttgttaatggtggcacccatattgaaaacaatggcaatggctcgggtggtcggttccagcaaga

SEQ ID NO: 33928 - DNA, 90 bp, Oryza sativa
gcaagacacaagaaggccggcccgacccacaacgagagaggcgcagccgaaggaaaagggccaaaagagaaaccggcgagacgacgagca

SEQ ID NO: 33929 - DNA, 443 bp, Oryza sativa
  unsure (1)..(443): unsure at all n locations
agcttacacttgctttctcgagatcttctgttgtcatctcattcncacgantggctgggtgcatggccacacatacacatgtcaacttctcatatcagggagtttttatatcatagaagtttgtcaaaactgaacaccaggactagttcttgtagtgaaagaaaatcagattggagtaacttaaacaactctctatgaatcagtgaacttgcatttgcattttgcaggaagataaataaaagatcagtttcttgttggaaattctgaagttactttttttctcttttgaaaaaaaggcaggagtgcaagaaacaaggatccaagttcagaaaccaaggtgtcaaagcatcagtgaacttaactagatttaagttccgcatggtccaacaagaatttacagatattgccaatatctgttaacatttcaatccagattcatggac

SEQ ID NO: 33930 - DNA, 485 bp, Oryza sativa
  unsure (1)..(485): unsure at all n locations
tggtggtgtgtggtgtngcagctggccggtgttgntgcttgttggtgtgtggaggtgctgcggctggccgaggtgaggattttttttgctggtgctgcttgagtaggtgaaaataaggaatatagctgctatgagtgtcccatggctgccgcctcaccctgtggtattgttaatgatatgccctagaggtaatcatagagatgattgtatcacatactatgtttacatatttatccgacattgttccttgaaatagataactccttattggttaatgaatatgtgattctttcatgagactctntatgttgtttgttactatttctaaaggatccctgatcaaatatcatatgtggaacaaatatgtttatatgatcaacacatgtattaattgatgatcatgtctcttggattatgctatagagatatcanattaataatgtggacacatgttagtgaacatngtgttggatatacccaacatg

SEQ ID NO: 33931 - DNA, 372 bp, Oryza sativa
  unsure (1)..(372): unsure at all n locations
gcattgtcatgcggctctttttctcagtttcaaacaaggctttgaaaaaagaagatagccccagatataataaggatggctggagatacttggattgcataaagaaaaacacttagggcgggggaagattgttgcacaagcatgcatgcaccatctgtttccagcctacactacagtataaagaaaagaggccacaagttttggaaaagatgaaagataggctcctctcccaatccatcatcattccacttatcagttttgagaacaacaatcggctagtagcaactgctcctgaacccacaggaggaagcanaagcatgtccatgcatcagcaaccaaagagtaaaaatcaaaacatagcaaagcatgctc

SEQ ID NO: 33932 - DNA, 91 bp, Oryza sativa
gtgttttgggttttctataaaaaagactagacatgctaaactattttcaattccatcaatgatggggaagtctgatttgtttagttaagga

SEQ ID NO: 33933 - DNA, 446 bp, Oryza sativa
  unsure (1)..(446): unsure at all n locations
tagacttgctagtcataggtaccaatatatgctctgatgctttggatctattaaacctagtatttctatgaaactgacaaatttaaaggttatatgttntggggctagctctattatcccatttgtggcatctaatatctcatgggtacctacactcaaagactcagcaaaatcataacctatgcttcggttgtttatggacactctggattggtctaggatcatgttcagctttttctttctttaagcaagcctctctaaggactgttgtagataggagttctctcattttaagttcacaatggattcctcacacttggcaaactctctnttagcataatcgagatcaatcctaagagaaatgcaagatgcacatgaatcataagctttaaaagagtcggtggcaatcttatgcatctttagttcttgtctcagaatggcacaat

SEQ ID NO: 33934 - DNA, 391 bp, Oryza sativa
  unsure (1)..(391): unsure at all n locations
agctntctaataaagaatgattcttatcgtatagagaatanagaactagcttagtagttggagaggcaagcatttatcggttgggggtagatcggtgttgattaattcagttctttcaagtttagccatgtttatgatatcttttttgaggtgccgaaaggggttcttcataaaattgatttttatagatcgcgattctttcggcgaggagatgatcataagaaaaaatacaggctcactaagtgggatgttgtctgtcaacccacagaccacgggggtcttgtgattcataatctggaggtacacaataaatgtcttttaagtaaatggtgtttaagttaataatgaggaaggactaggcctacttattgaaaggaaatatcttataata

SEQ ID NO: 33935 - DNA, 485 bp, Oryza sativa
  unsure (1)..(485): unsure at all n locations
tggaggtctcccgacgtggctgatccccacggtctgtgttattcaggttagtaatgtcgtgtgggtaaagtgtaccccctctgcagaggttaacaaactgttcgaacagccgtgcccacggtcatgggcggatgtgaggtgattcctagcgtagttttgtttgactactgccttgtgaaattgctggtgtgaaaaggggatcgatgtttggaaaatctgcagctgatgggatcagctaggcccgggtggccgtttgaaagttgttggcccgggtggccgtttgaaagttgttggctgggtgccaatcttgaacaattcacaagactgatacattgtacatactccgaccggacgagacgcactgtctcatccgtgtcgtttgagaagcactcacttaggttgttacagaatagagttcanataatatcaattgcataaacaacagtctttccttgaagcctgcattaaacacttatttcccatgg

SEQ ID NO: 33936 - DNA, 394 bp, Oryza sativa
gctgctgcggaaactctactgggctgcagccgcaagcacgaacttaagtatggaactaactgatcagccaaaaccactcaagaacagacgatttacagagatgatattgtcggtgatcgatcgtgtcatgcacggtgaatatctcatcaagatgtgtaattcaacacatatatacctggcagcgtacccgcacatgaagccgctgttggcgcccgtggcgttggcgtttgtgtagccatggatccagctgctgctattcatgactatatatgatcaccagatcagctgctctggctagctcgattgatcaaactatatctgggtaaattagtctcagctcactatgagttgcacaattgatgcgctgcttatcactatacattcatactagtag

SEQ ID NO: 33937 - DNA, 376 bp, Oryza sativa
atgcaagcttacatacgaatcaatctagagtacgtgatatatatgatcacttggcggggccgcgcggacaagattagagtgtcacgaagatgtaagcactaatcccgagaacgtaagccgtcatgacaagatttacctcttcgtcggagatcgaacttgatgcatcccaactcgaaagcaaaaactcgtcgaaacaatgaaagttgaaataatggtggcgatgcgccgaagagtattaaactgtcgccccttgattacatggggatgggtcatatttatacacggagtacatgatacgtccttgctagacatgactcttatctctaacgcagactataatgcgaatgagtccttcatgtggaccctctaccaaata

SEQ ID NO: 33938 - DNA, 331 bp, Oryza sativa
tacatagaaaccagtaccaaacaaaatgtgtcgaatcacaaatcttgggctctgctcttgcaatgaacagtgcaatataaaataaactggaacatacacagcgaatccgtcggactatatgatatgcatattgagataactcctactttgaacgaagttatccgcaccgacaaagtcctcaaattatcggatacacaaataacgtctagttgggacaccaggctatcaatatcaggaacctgtgatcaaacacaaatctcaggtatgtgaccaagaactggtatttgattgaacattctctcatgagcagcatgtacaaacatagatatgt

SEQ ID NO: 33939 - DNA, 375 bp, Oryza sativa
gaacccaagtcctacagtgatggatatatgcgcattttttattctggggagctatacatctgcgtatggataagaccgttcacaacttcctgaagctcgatctctcctccacatgaaccatgtagccaagagaaatcatgaaccagaatataagagcttgccccacccatgtagaaatattctatagtagcctcactagaccgcagaactctcttggtatatccagacaataggtaggaacataaactgaaacattctggagctacgaagatagctattaaatggttagcatcacataaaaacattccccctagaggagctgctaatacgaataacagacactctgtgtagccatttctggcattcaatgtactc

SEQ ID NO: 33940 - DNA, 478 bp, Oryza sativa
  unsure (1)..(478): unsure at all n locations
agcttagcctattctacaatgtctcaattgtgttatattatgctagctctaggtataggttcttatcaagctgctntattccatntgatcactcatgcttattcgaaagctttattattcttgggatccggatctgttattcattcaatggaacctctcgttggatattcaccagataaaagtcagaatatggttcttatgggtggtttaagaaaatacattccaattacaagaacttgttttttatggggtaccctctctctttgtggtattccacctcttgcttgcttctggtccanagatgacatccttagtaatagttggttatattcacccttttttggaataatagcttcttttactgcangattaactgcgttttatatgtctcggatatatttacttactcttgatgggtatttgcgtgttcattntcaaaactacagtagtactaaagaggatncgttgtattcaatat

SEQ ID NO: 33941 - DNA, 363 bp, Oryza sativa
  unsure (1)..(363): unsure at all n locations
ccgatatgcccttaggcacggccatacataacatagaaatcacacgtggaaggggtgggcaattagctagagcagcaggtgctgtagcgaaactgattgcaaaagaatgtaaatcggccactttaagattaccatctggggaggtccgtttggtatcccaaaactgcttagcaacagtcggacaagtgggtaatgttggggtgaaccaaaataagttgggtagagccgggtctaagtgttggctaggtaaacgccccgtactaagaggggtagttatgaaccctgtggaccacccccatggnggcggtgaagggaaagcccccattggtagataaaaacccacaacccctttggggtatcctg

SEQ ID NO: 33942 - DNA, 356 bp, Oryza sativa
  unsure (1)..(356): unsure at all n locations
cagcttagagaagttcatccttcacacgcatagttttgtatagccttttcctttcttctcctaggggggttgtacatttctctcgctatatctaatgaaatagcataatctcgtgctgattccattcaagaaaaaaaacatgataacatcacaaaaagggtcttgctggatgtaagcttcctgaggattatagatgttatcttattgcaatgattcaaatggtaaaattataggtgcattcgcacttgggagcacattagtactgcgacgattctgaattactgatgccatgttttgctcagtaacactgctgaaatgtgaccttcaaacttngtttatcctgtggatactttgga

SEQ ID NO: 33943 - DNA, 374 bp, Oryza sativa
agcttgaggtagttatgaggagtgttggtaattcttaccgtcacagatagaaatctgcaagtgcacggatataccgatgtagcgtattagaaaagaggaatcaagcaaattatgacagaaagactaaccatttccagtaagatttgactactcgagcaccacgggcacatccacctccaccttctgagcgccaccatatgcccccaccggatccaaccaccacgaggtcaggagcggtcagatcgagtgaccaccgaccacgtggaggccggatctcgaggtgaaggtgcggatagtgctggattgagacattgacagacgggagcagtcatatccggcattcccccacctcgggaggagacgctgaccggtgc

SEQ ID NO: 33944 - DNA, 396 bp, Oryza sativa
  unsure (1)..(396): unsure at all n locations
ctagacatattcagaccctctcagtagcgataataccctacttctgtttagngattatattngcttggtggtgtattgatatgacaatcttggtgtgtttcactatatcctcttgaagggctccccacccttatatatgttaggaggtaagggtacatcattatctaaaaaaagaagcttagggtacaagtagaaaacccgaccgaactcggcataaactttctttaatattacaaaatattacctggttagaacctatggtcatatcctaaccggcaaggaaactctagccactaanatgtatataaatacaaataccacagccatggtccatcttctaatagcagtcatatatattgaccttgtagacatctcgtgtctataatctccacacat

SEQ ID NO: 33945 - DNA, 368 bp, Oryza sativa
cgacaacttctgcatctggtacgcgccggaggtgctcatgtccgacggcgtctcggacgccgcggcggcggggaggtgcaccgagaaggccgacgtgtacagcttcgccatgatctgcttcgagctgctgaccggcaaggtgccgttcgaggacaaccacctgcagggcgacaagacgagcaagaacatctgcgccggcgagcgggcgctgttcccgttccaggcgcccaagtacctcaccgcgctgacgaagcggtgctggcacgccgacccggcgcagcggctggcgttcgccttcatctgccgcgtccttcggtacgtcaagcggttcctgatcctgaacccggagcagcagcagcagcagcagc

SEQ ID NO: 33946 - DNA, 382 bp, Oryza sativa
  unsure (1)..(382): unsure at all n locations
tgtgatgagaataaagtcttgacaaaggatggacatgacctttgtttttcatggttcaaccggatggtcacaagtgttgatctcngctcaagcttgaccccaacatggatggcgcaaggcaaaggtataatgtagcttagaatggtttcttagtcttttcccggtcttggtggttggtgtagaccggatttgctagataggggccgtactatcaagaggggtctatgaagcgagcttgtggatgatcttgtgccatattagttcatatgcatgtanngtgcatttgtgggcttgtctaaccaagtgtgatgaagtttctcaagtcctacacccaagagagatgtgggcatgttcaatatgagtgagtgacatcttgtgggta

SEQ ID NO: 33947 - DNA, 467 bp, Oryza sativa
cagcttgttgatagtacaaaacaagataatgacttttgctcccaaatcatttgcagagataacagctgatggtaggattcatgcttgaatcaggtttctggaaatattgaatatgcattgctcccaatttatccctttttgactaacaatgcatcttcattcaataatgcaggttatcaatcttcaaagtagtgcaccctatcccacgtaattctgctattggtcaacattcttaggcattttatcttaagcaacatatcctatgcacataggccctcacgtgtacacacgtgcacaccaactaaaaaatgtcaccaaaaaatctagaaaaaatcatacacataccttcaattgattacacctagggttaaaatcttaacgtcaattcattatatttagccgtaacaaaaaaaacaaaaatctgacagtttaaggttcaattttgcagaatttatctttttgtattc

SEQ ID NO: 33948 - DNA, 356 bp, Oryza sativa
  unsure (1)..(356): unsure at all n locations
atgagaagatacacacaaaggtatttggttgggtggattgggttagcatgactagtatgggatgttgtttggttgcttgcataanagatattgtttgaaagaaattttgtttggttggatgtatggattgggtgcagatacctctttatttagttgggtgagggtacctcttccatgttatatgaaaaaaaaattacctctccaatgttatatgaaatattctgagtaaatggtactacctctatcctcttatataaaggatattcactattttcatataacggttgaccactcgtcttattcgaagaatttatgcgaatataaaaaacgaacaagtatgcttaaaatactttgga

SEQ ID NO: 33949 - DNA, 355 bp, Oryza sativa
gcgaagatcatgaagaggttttccgaagttgacctaaacccaatctgtcccagaagagtagtttcgttagcttctagatcgtgtgttgtttgcttgtgtgtaggggtatggtttgcgtcattggtggggatgcgaccatactatgttgtttgcttaaacaacttgaatcataaaatccattcacaacagatcaataggcaagtggtttagtacctcatctctagtaacccctcccgtttccccctctctctggtgcctgcagcagatggtctgcaagagggacaatttctccggatcaagaacccgtcagtttcatggggcaactcagtgcaattctaataatattccacgttag

SEQ ID NO: 33950 - DNA, 446 bp, Oryza sativa
  unsure (1)..(446): unsure at all n locations
tgactgcttcaggctgtgctgtgcatgggcgagatattattattattactgcatagcgtactgttggtggaagcttctgccaggatcgggtctgagaaatgacaggattggaagccaatcggttgtggtgggcatgcacacggcaatctgtgtcccggtttgcagcttcgactcattcagagagaaattcatggatgtatgagtactgcgtatgcgtggtttggttaccgctctcgcaaagatcgtttatgaacgactgccaagaagcagaagaaccagtttcactgcatccagtgtcaaatactggagtacacggagtattactcctactgcaccccacaagctgcagatcagaacctccttcctctactacagtaggagtatgctgtacacnaatactcctactctacacacacatcatatactactgtacatgtaagcctgac

SEQ ID NO: 33951 - DNA, 388 bp, Oryza sativa
  unsure (1)..(388): unsure at all n locations
agttcaagtagaggtaaactccttatttttgggcactcagattatctcatcctcaatggtgcaattgaacttgtatgctgccacctgtctgggaatttgtcactgatatatggtatgtgtatttagatgggcttgaaagatctagctcttaatcatnctcgtatgttctgaatgtactgatggtttggttctgtctggcatagcatccacctgccatgcatgatcatgctctggcaaccaggcaaatagatgacaccaatattcctttacgatatatcactcatccattctctgctgggggatancttgctcccactttaacaataactagagactgaatattgtgatccagaaatgcgtagtatacctgcattatgtctgaggactg

SEQ ID NO: 33952 - DNA, 265 bp, Oryza sativa
  unsure (1)..(265): unsure at all n locations
tagngcagctccagcacatggattatgctacagcanaactaccattgtttatgctgttggtccgaaaccctctgaaatatttgagactcttgaggangaacctgcaacttctggaaggatcgcacaantacatcgagctacattaagagatccacatactgaaaagcatagtgctgttaaggtgacgcatcctggtgtgggtgaatcaatcaagaaagactttctactcatcaatcctcttgccaaagcttccaatggtggccct

SEQ ID NO: 33953 - DNA, 347 bp, Oryza sativa
gcttgcaacaagtattcatgggcctcgagatttcttctatatcagcgagctaggctgtcacgcccggaaattcactagtaatttccgaacttatttgcgcataaaatccttgtctaagaatcatccgagatacacaaactggccatctaatatacaaatccatcataattataacgttacatacttaccaaagaaaagaatacaacagcggaataacggtctagcgatggcttcagctccactcccacaggcagcttaactggggtataagcctaacgtcttcttcttctggatcctttatcttcaactgaggttgattgagtattgccagaatgaacatatgacat

SEQ ID NO: 33954 - DNA, 151 bp, Oryza sativa
ggatggcaaccgattcaccttacgcttcattgccacattattcactgtgggtggaatgatcaccaaattattctgaatatgtggaccccaccacaatggtcacaatcttccaagtgccaagctgacacaaggaaacattacagcatgaaca

SEQ ID NO: 33955 - DNA, 382 bp, Oryza sativa
ccacgagtgaatcaaactatactaatcaatctgccttggactcttggaggtctcgtagaggatggcggccgctaaaacgaaagtcaaggcacactggtgggtttcctttccccggatcccgggtggacaattcaaccgcagcgcgtgcagcctctgggcatcgagacagactcacagacgtcgttctcgcgtaccgggcatgttggtgaacagaccacacccaacgtgaggtggatggcggcgatgtctcccgatcgagacgccactgcgccttgatcgcttcgcagtttcaatatattggaacggcccatgcagtaactagcctagacgccgttttgcacagcgtccacaactggacgctgttcgtctcaatggccacatc

SEQ ID NO: 33956 - DNA, 458 bp, Oryza sativa
agcttacgctacataatacaaatataagttcagtcttgccactagatttcctctgtaaaaatgcctaaaaaggagagggtgaggatggatgggcctcttttatcacctgaaaaactcaggcatcgctgcatgagcatgacactctgtttcaggatagcagcatctcttgcattgaccaatggagggtcaagttttacgaagggatctgatgttcccttgttattgttggttggcctatgcgcaggtttcacagtccagcaaagtatcactgaccagcatttgactatcgcaaattcgcagtacaaggtgacaaatggtagcaccattaactcaaaggaaataatcgggcgtcctccgtgtcacgtcaggctcacctctcctaggagctggttcgaactgcaacaataggaaaccaacatgattagccaactacaggatatgcaattgagctaactatc

SEQ ID NO: 33957 - DNA, 469 bp, Oryza sativa
  unsure (1)..(469): unsure at all n locations
ctgaactcgctcatctgtgagacctaaataatgtctttaatctatccttgacagcccaaacaatatattggatatctttttggtggttcaccgcaacggtagcacgggcatgtaactagtcctataaatatacacacactcaggtacgttggctatcactaaaataatagttagccgtaaatgagagcacccgtgtcaagtctaggacttgaacccggatgagttggttctactacagaaacataaccaggtgagatacgtttactctgcttcctgtcaagttaaatcatagtaccctcaacttgcataaactgggttaaattacggtgccacgtcagagaaccccagctatttcatagatcgagttttgtaattcagtatgtgattcanggatacgatctatactcgatgaanatatgagagatgacaaagtggatctatccacccactgcttcgtatggggtgggat

SEQ ID NO: 33958 - DNA, 453 bp, Oryza sativa
  unsure (1)..(453): unsure at all n locations
agcttgagttgtagtgggctgncacctcatgaactgccaattactcttggccaaaggagtgcaagaatttgatatgcgcgtctgccttggagcctcccaggagtgtggatctgtggagttcttggttgatgcgtcattcttaaatttgagtgttttgggatgcctggtttggtcccttgtaccactagcagtagttgtacattgttgaacttgaactgaacaattacaggagtaaacaagctactgctagaacagcagaaagggaatgtgtatttgcaaatagagccactgaatccttgatcaatctattttgcattacacggagtgatgtgttgattctattgtgtcttttgtttccattaatcttcggaattttacacatacatcttgtttaaataagaaaaacaacaagttattcgacatatattttccaaacaattctatgcaggacac

SEQ ID NO: 33959 - DNA, 333 bp, Oryza sativa
  unsure (1)..(333): unsure at all n locations
gtacaaggatatgtgaatgtgtctgcaagacaaatgtacaaaggggtcaatcaatatatatgtcaagaaacnnagtgttaagctacactacaagtatgcaactaacagaaaactagggatgcaaaagtaaaggcactgcatttgcatatcagtaccagtagttatgccatttaataacttgtacaatcatcaccattatttacttgatccacaaccagatataaaacagacaaactacctaaagnncnngactcatataaaaatcaaatcatataatccatatttcctatgtagacaatggttgnnnccgccnnattatgtcatgtgtcaatg

SEQ ID NO: 33960 - DNA, 436 bp, Oryza sativa
gctgcaacttggagcaagtcgcttacgcatatatgaatgcccatcctttctgatctttagcttcaacgaaggtgtgctcagcttctagcgaagagaggtttcttaacccttcaacctcccgaggaatgattccaccgaaagacgtgaaaccaatctgtatccgccacaaagcggacacgttacctattgatacacgtgatgtgccatgaaactggttgtcgtttatgtacaactgctgccgatgacgaagatagcttaacacatcaggaggcatcgtcccatgcaacatgttctgctggagattaagctctgtcagacaggaaacattccacatggaagaggggatcagcccggttagactggtgaagcctatctcaagccatgacaatccacagagcatgccaatggatgatgggatggctcctgatagcatgtt

SEQ ID NO: 33961 - DNA, 415 bp, Oryza sativa
  unsure (1)..(415): unsure at all n locations
aacgcgcatatttntgtgtatgtgtcttgtgttctactaacaatggcagggatacgcaagataattggggatagctgtgctcaacatcgacatcttcgtcgagacatgaggagggatcaacatgaccattatgaggtaagtgatgatgttctaagtaagatcaaatctgcactgccttatttcgagggaaactatgatcctcgtgcttacattaattgggagctagcggttgatagtgaatttcaaaagcatgtcttgtctgagaaacaaaaggttatgtgtgcctctagtgttttaattaaacatgcttctaatgattggaaacatctttgtaggcataacaaaataccacaatcttggaaagacctgaaacgatattttagagatgtttatgctctcatgtattatgctgata

SEQ ID NO: 33962 - DNA, 227 bp, Oryza sativa
  unsure (1)..(227): unsure at all n locations
atatagcaataagccccaaaaggcgtaataaacgatgtcttcaagcagncggattcttttaatcggatctgatgataatccgagtagcaattcaagaaactgagtaactcgcaaccggccggtgagtcaaccacctggtccatgcgaggtaacccgaaaggatctttanggcaagatttgttgaggtccgtgttatcgacacacatgcgccacttgccggtcttctt

SEQ ID NO: 33963 - DNA, 406 bp, Oryza sativa
  unsure (1)..(406): unsure at all n locations
tttggcagtcatcacaaggtggcactgtgctaccattctaatatagaccgcgcgaattctctccccttttaatcctctcaatcattctaaggaaaacaagagtgcacgccgtttctgttaaaaaatatgaacctgaactccagaataaactcacctggatagtgaattgacgtgcacgaacacgtggtataggaccatgagaatgtacttgtggagacttatgttagacgtgtacatggaggagacggataacatgtccaagtggtggatgttatagctcttggaattaagtggcctttgtggccgtagtgagaacctactttagntttcagatataaactgatggttttcattaaatttatttcatgtgtaactgattttctaaaaatgattataacagcgacga

SEQ ID NO: 33964 - DNA, 396 bp, Oryza sativa
  unsure (1)..(396): unsure at all n locations
agcacatagtcctaccagcgatcatatattttcaattaccatctgaatgccatggaagacatagaataacttcaattgttacgttcagtctcaattatttacaggaaacaattgattgtatatacaactaatcaaataaaccaaattagtactaataaaaaacaccaagcctggattaccaaagcaatcgcttgtcagagaatgcgacacctaagctgactctaggccacatgtgcacatctacagatcatcctagttcttctagtggtatcagaagctaagaacaagcctgcatgcatgaatcatcacatatacacttatagcaccaatcgaagccatccaccatacaactttctaatgtgtttancgttggatgtgtccactcaatacaccgat

SEQ ID NO: 33965 - DNA, 244 bp, Oryza sativa
tatatatggtttccggattagagatatcacaaatatcttctgatgtatgaccaataatgcggaaaacgggtggtgggttggcacactggtggcgacgccggatccattatgatattctatggcgaacagtggggtggcgttagctgatcttgtcaccagagccaccggatacataagatggaggcatggtgtgggaacaacactaaacttggatacagttgcgtgatggccttctgggagggga

SEQ ID NO: 33966 - DNA, 266 bp, Oryza sativa
  unsure (1)..(266): unsure at all n locations
tgagttgatgtcttttcctttcaaagatgcgagaatatgtatatgaatcgcaaaagaggaacttgaaaactacacatacctggctaagccctttaacattgaatggcgactgaccaacaattctgtgtgtccctttctncccagatagatacccataagcatatcttccttctaattcaatggtagctgaatttattccagcttctcaccaagggatttctaaccactcttggctggaccgctgctctctcccacctaacatacat

SEQ ID NO: 33967 - DNA, 461 bp, Oryza sativa
  unsure (1)..(461): unsure at all n locations
atttctcttagtgtaaacatgtggatattttatttctcaaccttgagggatctccatatagctaactattttggtcagttaatttatggaaattaatacaaatactaattaatatactatacaatttgatatgtccataagttatgccaactccaaattagtgattactattttgttagagaagggatgtaactatgcaaaactttcgaataaacttgaagcaaattcttttgcacccatgtgccatgtggtgtgtaaacccatgtggtgtgtaaatattaataactatttacaaataaacaccctttttcactaatttacagggaattttttctcatanaattaatttggtgattgggtagtgctaatgcacccaaacgttaatatattaatcactaatgaaagtgttggataaatataaattgtacctttatctgaaagtgtttcttctaatgctctat

SEQ ID NO: 33968 - DNA, 353 bp, Oryza sativa
  unsure (1)..(353): unsure at all n locations
actaagcttcgattggtacgatagaacccccataatccctggagagctaattattgggattggatgcctggatctgagcgaaaggcacttccatgatgcgaattgagtacttctcgggcagtcgttcctggccccaaaactggagtgaattgacgagatcacgtacctgcatactatgccggccgaacagtgctatcttgtacttcctgaaaaaaaaaaaagataaactcttcattttcgtggtccatggttgactattcggcttatatgaaatatttttattaataagatattcaattggggtagaagataaaacatgaataatactttatgcgtgacttggttnttttaat

SEQ ID NO: 33969 - DNA, 290 bp, Oryza sativa
  unsure (1)..(290): unsure at all n locations
gcttggcggaggcgcctggagttgggggatgctgttgaacangcggagcacggtaaagccgtggccaaatcgacggagccgcgcgtatgcgactgagccgcgcgtgggccgtcngagactgtggagccctgcgcaaccggtcgtggagccaacggagccagtggagcatcacggggccacgaaggggagccgcgtggaggccgctagcccgcggaatggcggcctccgaccctgtaacgacagcggtgttgcgcacggcgcggacgaacgtgacagcagtggcgcgaacc

SEQ ID NO: 33970 - DNA, 423 bp, Oryza sativa
tgatggtgatgccggcggtatggtcacggatgattgtgtcgcgtatactaatgctgataccaagctcatttctgtgttcagaccatttagagatgtgagtttgattttgtgccgaagcaattacattgctgtcgccaaccttccggctgtctcttctgaatgtgaggtctgctacgatgattttgtcttaagggcagatttcacagctagactgctagtagtacctttctggagaccggcatgtccactggattatcgattcttgccatagctggatataattaatcaaggcaacgaacgcgtggtggtgaagctcttacaaccctggccaccacctactcaagcagaagttaaagctgaaaagaaagtactgacattatatggtcaaaaaccggaggctcagattatcgtaacagtgtgttc

SEQ ID NO: 33971 - DNA, 376 bp, Oryza sativa
ataaacaccagatatacgctgctgtcttaagctataaaaaagttatcggttgatgaggatcaactccttaattcaattgatgattgatgaagccatgctaaaatgctgaccaaagatgacatgtcctattcaccacataattgatcgagattgttcacgcacacccagctttccattgactgtaggaaagcaaacgagttccaggcatctgcaacatggttccagggattgcaggatacactacaagtatggccaaatgatcatcacagatgagaatggattcttgtgtctttgcattgcaacttgcaagctctctgtaatagcgaccacttctgtaaattttagattctgtctgccccacttcttggagctagcg

SEQ ID NO: 33972 - DNA, 437 bp, Oryza sativa
  unsure (1)..(437): unsure at all n locations
gatcagtttggtcttgttgtcttgttgcaatgcacagctctagatatgaacggttcatatacttcatatcataattgacacagtgggttgttctaatcattcccatctgattcttgggagtagccaaatcactgcatggtcagatattatgaacgaagagcagtataatatctatgtgcagnttagntctaatttaccggctattctcacacgttggctttcttattgactgagatatcatttttcttctgttttcactgcagtccaaatgtgctggtcaattcataatngatcagcaggcctggaaattgtctcaaggtatatacatggaatagtgctccaatatgagtagtgactaaagcagattaatttgaattgtgaactcttttaccaagtgaacagagactctgtcaaataatcaggtcagtactaaaatc

SEQ ID NO: 33973 - DNA, 198 bp, Oryza sativa
  unsure (1)..(198): unsure at all n locations
tcagcttgagcttaccggcggcaatggcgatcattattggcggtgcggcggtgctgaagcagatactgaagcggtgctcgagcctgnggcggcggcagcatgagcagaagcatgtcatcgagtgggaggaggatgaggaggcgtccggcttgccgtccgacgtgccgaggggccacttcgcggtgtacgtcggcgagc

SEQ ID NO: 33974 - DNA, 328 bp, Oryza sativa
  unsure (1)..(328): unsure at all n locations
gaatgatgcccgggataatgcttgcagcggtgcttgttctttgccaggtgatcaaaaatgcaagcaagatcactgatgctgcgtgcatctccagtgagagggacgctctgcttgctttcaaagccgggttcgctgatcctgctggaggggcgctgcgtttctggcaaaggccagactgctgcgcatggagcggngtgtcctgcagcaaaaagatcggcagtggtgtcagcctggatatcggccattatgatctcactttcagaggtgaaatcaactcatctctggctgttctgacacatctagtgtaccttaacctgagtggaaatga

SEQ ID NO: 33975 - DNA, 471 bp, Oryza sativa
ttaagcacctgcagctgcaactatacacataaacatagattatatttttttatccatgtacacaagctagagattttattgaagagtcattcaatctataagctgagggttaagtatagacatgtcctataatatctacatatttagaatacggtcattaccatattataagaaaccgtcatttccgcgagaataccgtagataccgaaaccatcggtataacagcaaaaccatttccgcgttcattaccatatttattaccatttacatttgtgttacggccgattaccatttgcatatggctcggccggtagaaagtcaaaaacgaacgccggtcggtcggtaattaccgttaccgatttcacccctaatctaaggccccgttcgatacatttacaactcctaaatttaactaccggagataagatctgaagtgaattgtatagtaccataacccaattcacctatcta

SEQ ID NO: 33976 - DNA, 328 bp, Oryza sativa
tcatgcacctgtcatagacctttacacgtcacagcctaagcgccaaaaggttgatctcccatgcttgttgatagggcgctggcgggtatgctttgagagggaccatgctcttgatgctatgccttcctttagagagggcaaattcgcaatcgccacactttacaaatataaaaggcatctgtgtgcaagctatagcttgcgatgagatcaacaaaagtacatcatacaagtttaataaaagcgaaagtactatgactattttgctagtcttggttgagttccaaactctttccgtacctatcagactaacttgatgtctaggtgaaca

SEQ ID NO: 33977 - DNA, 451 bp, Oryza sativa
tgacgcttactccgactaccatctatattttcatgtgcataagggacgacgagaagacaacatttatcacgccgttcggtgtattctgctacgttaagatgctgtttggactgataactgagggaaacactttccagcgtatatttcaaggggcacttaatgaccagctcggacacaatgtcgaggcctacgtcgacgacattgttgtcaaaaaaaagacaagcgactcattgatcgatgacctccgggaaacgttcgacaacctccgacgatatcgcctcatgctcaacccaaagaagtgcacgttctgagtaccatctggcaagctcctcggatccctcgtcttcgaaagagggatcgaagtaaattccgagaagattgttggtacttaataacaatattactagaaatataatcttcagcaatggtgcagaaatacttctggtatatt

SEQ ID NO: 33978 - DNA, 415 bp, Oryza sativa
  unsure (1)..(415): unsure at all n locations
agctgctggataaaagtatcacgctcttcaaattggctaacgccaccgttcgcgcgggaatttcctatatgaaagttattctaaaatattatattaattaatttttcaagtttgtaataattaacactcaattaatcacatgttatcactacatcgttttacttgaaacacttaatatttattttcatctgtatcttcagaagattcaaacactagctaaatgtgagagaatatatcatctgatggaaattaatcgctagctgggtaatttgactggtcgagccattggaatttgatcgcggaaagatttgacttggcgccagcccgccagtggaatagttggatgaagcgctcgaaatctgtggctgtgaacttgtgatatcatgggtgctgcangtgagatgtcccactttcc

SEQ ID NO: 33979 - DNA, 407 bp, Oryza sativa
  unsure (1)..(407): unsure at all n locations
gagtgatgcttcaaattgacagctcagatatcacttttgcatttaaggtatggataaagtggttctgactattgtaaattcttcgcatcattgtatgttttgtttccagatgtactcattaacctaattcatactacagggtaaccggttctttcaaaaatgtttggagcaacaaaaattttagttagtcactcaattcaacaacgacgtctatacacagtntgcattgtatcttataccaagtgccagcaaatcaaaagcaataatgcccaaaagttcaggtgaaattctatctctattactgtaccagtcactttcatactgcagcatgttatccaaaanaacatttcatactgtaccagtcactttctcaagcatcgagactactancactttatgaactatac

SEQ ID NO: 33980 - DNA, 252 bp, Oryza sativa
  unsure (1)..(252): unsure at all n locations
ccccccacgaggcaagaacatcaatttttccacaaggaagaacagaggaacggnacgatcaaagcgattcggggaagctttctggaaaaacttcagtgctggacatgggccgtttcagcgtgaagcctctcattgacccctgtgcctgtaacgaagtgttctcgttataaatactttcttaacatctttatatccttaactaacccatatataaattaactagcagctagacgatgtttaagcgaggctgcc

SEQ ID NO: 33981 - DNA, 427 bp, Oryza sativa
  unsure (1)..(427): unsure at all n locations
cgaccaccgccccattctcctaattgaaggaggttgtatgtttgctttaagtttgggggatgaaatgtagacttgcccctatagttgagggaggcaaatggacttttccctctcaaaaaagatataatggttttaatacgctctgtcccaaagtcccgatttgaagcccatgtatatattaaagatcaaacaacgattgcctgtttggcacatagcattctagagctggagctcaactaaacaatttcaactcaacctataagggagatgaaatgggttggagtgatgtgaaaaaataaactagagtggtgcacaagagttcggaccgctccgtagctctactgactccactcgtggagttatttangagttgaaatcctgccaaacaaatcccatatagtctagtanaacatattgaaaggaaaca

SEQ ID NO: 33982 - DNA, 163 bp, Oryza sativa
  unsure (1)..(163): unsure at all n locations
taataatttttcgatgatatatgacatgattcagatattnatttgtctcagganccaagaaagatagagagagatatccatgccaagctatgatgctgatgtccatggaagaagacngcgaccgcccttcaaccgtcgcatgtgaaagaatgacatctatatg

SEQ ID NO: 33983 - DNA, 458 bp, Oryza sativa
tttataacgatagagaataaatgaaatagaggaataattgcattagccattagaatttgataaagtagggatattttagttttttttatgtgctggatgggtgaaaaatgaaactattttgagacgagaatatagtagattggttgggaacttgggattctgaatttgagcagtgatgtggagtagtagcaactgaaatttccaagagtgagacctgctctgaattgatgtgctgtttacagtacaggagggaggagatcgatcaggggaggtcgggatcggtgggagagaggctcggggaacgcttggagtgggacggacgcatgctgcactggttacagctgagctgagcttagcatgagtgtgcatggctggatgcttctcaaccttctttgactcatgttcttcacctggagtgggtggttgactagactactagtacttcagtattatcataa

SEQ ID NO: 33984 - DNA, 360 bp, Oryza sativa
agcttattattgatttcaccatcaggttcccattttttttgttatagcataaacaaaaatacaaaattgtatttgtgaaagttgttatagcatcaggttaaaacagagcatgataaaaccagcaaaggaaacgtggacaaacagtattggtaaaaatggtagcagaataggacacggatgcgtacaatgtcttttttggtacccaacacaattttccattggttactgattttactaatctgatatgtgttctgataaagtacatggcaacaaaaacaaggacaaattagtagattgagcagaaatgaataagtaattacccattactgaagtatgatggagaaatagatgatcctcgac

SEQ ID NO: 33985 - DNA, 248 bp, Oryza sativa
taaacccttgtcttctcattacctttgggcccttcatcataaacataacattgcggatccactgcaatttgggacgatgagtaccacactgcccgatgtatagacataccgcatccacttaacaatgatttgcagccacataatattcattatggaccaccatgaagcacggaatggaagtaatgacttgggatttatggaagaaaccttggtttgacttaatttaattttatgatttgaacaacatg

SEQ ID NO: 33986 - DNA, 482 bp, Oryza sativa
  unsure (1)..(482): unsure at all n locations
tatgtncttcacgaattgtgatgagccaatgcgctatgtctgttggcatactaacaaccatcagagctgaataaccttgggtcagatatggcagcttgagtccaacacttctttttgtagtaacctcgattcatccctaactgatgggataggtcagatcaccacctaacaagattcttctgagtatatattttctggtgattctcagtgctaactgctcacacaaatttggggtatcaaacggctagagcatgactgctaccttcttctgctgggaatttcatatgcttcaaattttcatttaaaattcttgatgtgtgctctcggaatgtgtgtcaccgtgtggcaaagatgagggattggtacatataatggccatcactgctatatgatgcgtccatcttatgacattcatttataatctgctcctgacgcacttattaaataaaacaggacaccacatgctcttgatttcaggaatt

SEQ ID NO: 33987 - DNA, 409 bp, Oryza sativa
  unsure (1)..(409): unsure at all n locations
cagagctgnctctgtagctactacattgtcatcctcttggtgaacttcagtactgaaaacaagatctgaatttgtatttgtttcccacgctagattcttctgtgtttctgaagctgttttgtttttgcatgtggcttcactttttcttgtgttgatgccagcaatgcctttctccattntgttttaggttccatctatcactctatgcagtgaaaagttgtaactacaggaaattaagggcgtggtttgtataanatgggctgtgtatcatcaaagcagttcataagagctgcacaacatgaggatcctgctattctggccaaagagactacatgtaggagttgattcactggatacaccatggaaaaatatttacaggttctctttttggaaaaccctgaataataat

SEQ ID NO: 33988 - DNA, 422 bp, Oryza sativa
cttggaggctgtatttaggctcatgcacgctctcttcttcatttagagaggaaaaataggggaatgcattgtttgccatagtttgtggctacgatggctatgttttattaagaaaatctgtatcgtcctggccattttatgagattcatgaatatatagtgttgactttgatggctcgtcttgtttagatgtgtgggtaaaggctcaagatcattttgaagatgtcttaggctggatagcatatttgtgtgggaacaatgggggtagaaagtgatcgatgtgttggttactaccccttgaactcgatactgtttatgaatatacaaatatgtaagcgtcctttcattctgttattttgagtataccaattgcgggtatgttggccatagtacctgtcccagttggcaactggttcatctttg

SEQ ID NO: 33989 - DNA, 383 bp, Oryza sativa
catcttttatttatacaattctttcatcacgtcacaatctgatgtttgaatacttatacaagtgggagtgaattcactacaattagatggatcaaactggacaaatgttatcttcaacattgtgccttatccaaagaatttgactttatcgtcaacaaggctgaacattcttaggtcttattttatgtcctttgtcgtgcggcagtcgacactccaattaaccgagtccttatttggaaattcatcgtcctttgaagtgcttaaattcccaggaggaaatacaatcatttcgccacaaacttgtttcctttctcagaaacctcatgcaacttttaacttcactcttaatattccaatctacaaagtgcaagacagaatcgatg

SEQ ID NO: 33990 - DNA, 454 bp, Oryza sativa
  unsure (1)..(454): unsure at all n locations
gcaagcttttaatatttgctgctgctgcacatattttattgtcaatgatggccattattattcaatctagaataagacagagatgtgcacggagacaaggtgttaaatatggcccaatggatgaaagggatcgaatgagatttgaatacctaaacacaaaaatttggaggaatgatacaacttgtatcgacatgcttagacttagaaaagattctttctttcgattttgtaagctgtttagagatcgggggttgcttgaggataccatccacatgcgtgttgaggagcaggttgctatgtttctaaatacagtgggacacaaccttatanataggttagttcgcactaattttgataggtgcggagaaacagatagtcgttatttcaacagagtacttcatgctattggtgagctacgagatgaactaatcaggccctcctcattggacacccc

SEQ ID NO: 33991 - DNA, 349 bp, Oryza sativa
  unsure (1)..(349): unsure at all n locations
tgatgtgcaaagcgcacattgaagatatgtagattctctagatggctgctgaanaacaaaacagaagaagtagcgattattgcgcttgcaaggggaaataaaagcatattaactgagatggtttcatatgaacagctgtcagggtgtagaaactaaagccacccatagctggattattttattttgaagagaaattaaacataacagacctgtccaatgcactgcccaacccaaggacagnggtgatcaaaacgctcgacacaggtatcacaattggaacaatgagagcagcgcggaggtcgatatatcatgcaagtgtcacaatattntactttcacnggtacaccat

SEQ ID NO: 33992 - DNA, 436 bp, Oryza sativa
  unsure (1)..(436): unsure at all n locations
agcttcctgagggagaaaatgcgtcaaggttcttattttcccattcacagnctcttggtcctaaatatggccctaactgtgatacaacaaacaacatttccatagcagattttttggatacacttaatagtgggcagagcatatcaaagtttttgtatttctacgggttcttatcagcgatatttctggcggaggtattatttgttttattaggatggcttattttgaggagggaggccaaacaactcataggagtatggccagctgaggccggatatgaaatgatagctaaccattttcgcaggtacacctacatagagtgggtgttggccactacaataattaaggatgagcttggaaggggagcatcatgcgtcttatacaaaggagtcatgaaagacaatatggtagtggccgcgaaaatattggtagacgt

SEQ ID NO: 33993 - DNA, 347 bp, Oryza sativa
tacattaaccaccacctaaggtcccctggctggctgagtacgtatgtactcacccttgctctatatatacatatatatatagctcacatgccgcttagtacatagcaccctaaggtgccatatagtgtgtgtgtgcacactcacaccaaaaaatgcccgtgcgttgcaacgggtaagatgtgtttgaatcaatataccttatactcatttacagtctgctacctgctctgctcaaactgcctttctttggcctgacgtttacatcttcaacctccagaagatggtgcgtcttcaactttcacaagatggcgccatgcgcgtacaatgctggagctgattctccccat

SEQ ID NO: 33994 - DNA, 390 bp, Oryza sativa
  unsure (1)..(390): unsure at all n locations
agcaagtcggttttgttcaattgtcgnaagccacgacattgtttcagtgattgtcctcttccaagagcagcaaaggcagttcatcgtgattcacaagttaccagcactgcccacgacaccaatcgacacctgaatgtgcaacctccgcctcaacggattatcgtcaagggcaccgtcagaggccgcattgttccaccggccatcgtttcaagcctacagcaccagcgccagcagggtaagcaatgccaggagaacaacagctcgctacagttacaaaggtgaggtacgctccttcgtcagcacccgcagcaagtgtcgccagcaccaggtcgctcgactattgtcagttctagcaatgcacctcgtattgcttcattcggaggtccatcg

SEQ ID NO: 33995 - DNA, 488 bp, Oryza sativa
  unsure (1)..(488): unsure at all n locations
tctnttatagctatttgctcatatcactcatcatatttacaattcagttggtatatcactcggatcatgttatttggaggattcacaccgcatatgctatatattgatatcaagtcacttggttgattacgattatcaaaaccactcgggtggttggattatttattccttgactatatgcttggtttgttcaattaaccacattgtcgggggctacacctattaggtgcatctagtcggtgcacctgactntattttccagccctccacagtcttcagaattggtaaaagtactcgggagatcatggcaaagatgattgaagcactcggctttggaataatctagttcgggagaagattatctnnttgactgtgaaggtctcangggctactgtggagattatgggtaccccatacccacacggcatggttatccgactagtaatatgggataacatatatgtatggaaatatgtacagatcatgac

SEQ ID NO: 33996 - DNA, 442 bp, Oryza sativa
  unsure (1)..(442): unsure at all n locations
tgcaagcttcgcagaaccctcattgaccgtggcagtgcactcaatatcctcttcgccaagaccttggatgatatgcagattcctcgctccgagctaaaaccaagcaatgcgccttttcacggagtaattccaggattatccgcaactccactcggccagatcaccctcccggtcacttttggcactcgggaaaacttccgcaccgagaatatcagctttgaagtcgccgatttcgagacagcataccatgccatactcggacgcccggcgttagccaagttcatggccgtcccgcactacacttacatgatgatgaagatgcctggtccccgaggagtcctatccctacggagcgacatcaagcaagccgtcacatgcgacaaggagaagtgcgacatggctcanacccgcgagatggcgtctgcccgagaggatatccgac

SEQ ID NO: 33997 - DNA, 207 bp, Oryza sativa
tctcttaatgaaaggggaaagattgaacaacaatgagtacattcatcgttctctacaaggtacatcaggagatgcacgattaatgtaagggggtgcatggagtaataatatggggttaggttttgcagtaaaataacatttcaaatcatttaattgctccaggatgttttgcttaatccgaacctcagtctacacaatattatttat

SEQ ID NO: 33998 - DNA, 400 bp, Oryza sativa
  unsure (1)..(400): unsure at all n locations
acaagctacaaaatgaattacgacaacataagcactgggaaatagaaatccatcaattacacaatgtttactaaaactagggcccaggtagattactgatggatatcatggacaggtcagtttcttgcatacgtataagctaatagatgttggtcggttttctaaaaacatgaaatagttttaaatttaaatacatgacatagctgtgcacaagtcgaaaacaagaatctgatgattgagattgcaaactcgaagcccctttctcccttcctaagagtaaataaaaaatgagatacagaacttcctctgcctctgcatactctctcttatttaacatgtacagataattggaatgccatattatttanganaacagtatactgcatcataagtaaaaagt

SEQ ID NO: 33999 - DNA, 298 bp, Oryza sativa
cgatgtcatagtagtagaaccttgagcaccaaagtcccctatctggcgcgccactgtcgacggtgggtacccgtagaccggatatagatggtattgtggtacgctggtaccaagatctacttagtacaacaccaaggaaacaagagacaaagattatactggttcaggccccttaataggtaatagccctaatccagttgatatgggattatatggagagaaccacaaagtacaaagggaataacagaactcgacgataccgacgagatcgtaatcgagttgattcgactagatcacc

SEQ ID NO: 34000 - DNA, 286 bp, Oryza sativa
  unsure (1)..(286): unsure at all n locations
aatgcactctgtgcacttgctggtattattatcttgtaatgttcccaagccagaaaatatggcgagtgttgtgtngtgtacgaccttcttgttcttacctgcttggccacatactccatgacatgcgtacaagaaagagtgcttccagaatttctcaccacaaaagctacaggtatctctccagcttcttcatcttcatcactaagtaacgagagaatcaatgtcaaaaaaaaaaagtaacgagagaatcaaagaaacacgttgaaggacatgataacagatcaaa

SEQ ID NO: 34001 - DNA, 279 bp, Oryza sativa
attatttccatattgtcacttcaatggcatggttgaagcatattgccccaggggtattcttatgtatttgaataatttctcttttcaattaagctgaaagtggccttcaacaaattaacaatttcctacggcgtcttttatccataacacggttttgcgatgtctactatctaattacacaacatttagatgtcctatagcaaaatatgccttttattggttagtccctcatttcctaattttcatcctctaattttagccttggactctggagatatt

SEQ ID NO: 34002 - DNA, 320 bp, Oryza sativa
  unsure (1)..(320): unsure at all n locations
ataatcttgcacgatgtaattggaatggggatttaacatgttgttgttgtatgaaaaatgaaaccatccaacaattgtttatggattgtcattatgcaaagtttatttggagagctggtcaattctcttttggattatatcttcctagaagcataccatcgatgtttgatggctgacttcacggtgtggacaaagtgtgatgaagatggagttntactgaatgtcgcatgtcatactcttgagtcaacggntatgcaactttttaccaaccatggatggagattctctaataggctggaataactgtttccttggcatgt

SEQ ID NO: 34003 - DNA, 118 bp, Oryza sativa
cccttccggtgggggccgatccattaatgagataccactctggaagaacttggattctaaccttgtgtaaacccgctggcccacggacagtcttatggatacagtttctatgagggcg

SEQ ID NO: 34004 - DNA, 322 bp, Oryza sativa
ctaagcttcgcacctcttctgctgcgtcactggaacgatgggctgctccaacacctatctttatgtattccgcgaaagggacctagtattgattgcgctggccaatgccacgggtttcctgcctcgctggagcaacaccccccgaactatctgtcggaatgcaacccagatgtttatgaaatcaaaagaagcacactgagttcatggacatggagatgattaatgtggaggaaccactgtgcacgaaaagatttgctagaagagtgagataatgggtaatgaaaactatcagcaggggaacttttgtatcaacatcagcgag

SEQ ID NO: 34005 - DNA, 419 bp, Oryza sativa
agcttgacattacagaccactgtgtctatttctcattgttgtcacggcccggtggaccactccgtcaagatgatccgagcggtcaaacttgattgcaatctctgaccatcgaagatattggggcgtgtccggctgaacagcattgatctcccgctcggtcaacttttgcttccgcttagactcataagccagggggccgccgaagatatggttgagctccttgcggtggtcttgaaaacctgccggtgtgtcgccgtcgatcttcttcctcgacgagctttgttcttcgtcggagatcttccgtgtagacttggtgtattgatccgcgcaatgcttgtataccaaacaatctttggccacctggttggagttatgatggggcgggcattgggagttcatgatcttgtacaacgtgttga

SEQ ID NO: 34006 - DNA, 383 bp, Oryza sativa
tagtccgtaagaactactgtatcaccctatgttacaagccatttgattcatgaagaaagagatagacttgaagttcgaacatattacacgtaaccccacattggattggcaacaggtctcgatggaaattgtagagttactgaaagatcattgaatgatgtatcaccatcggagtttctaatactttggactagtaactactagaaatgcgaatgatataacaagagggatctctcatctttcatgcgcttgcatgcacattggtaccatgtactaaacatcatcataaagcaactttgcacaagaaattcataacctgattagacacttgagatcagattacttgtcacaaacctttctttgaaatagcaatcggagcgagc

SEQ ID NO: 34007 - DNA, 478 bp, Oryza sativa
  unsure (1)..(478): unsure at all n locations
agcttgtatgtataagttacttcttataanataagcgaatatacgtatgtacgccttatcttcattcaattcatttctccactttttcacctattccttctcctattttcatgccttattagttagataagcaataatatcatgttaaacaattaagcttcttaatcatacaactaatttctgatccgcaaaatctttaaattatttataactaaatttacagttgaagaccatatttcactacaatttagctctgaaaaaaaaagtcattttgggttatatttctggcttttgcgtgccattcaagcaattataaaaaacatataaaataatgataataattaaattaggtctacaatcatgaaaataaaatgaatatactatgagtaatgtttacagaatatgttagttagaaagcaaaacttatgcaacataataagcaactataacatctaactcacactactaatatttgatg

SEQ ID NO: 34008 - DNA, 475 bp, Oryza sativa
  unsure (1)..(475): unsure at all n locations
ggattatgaccaaaatcgattattttaatgaggaatatgtttctatggaatttaatacgtggcatattatatgtagtgaccaaagtacacatgaatgttaacttcataagttgctactgcgtgcacaatataatgggacttgattaagccgaagaaagcaacatatcaacatccaaacagtggctaacaacatacaaatagtggaattaaattacaaattttcccctccttttattgtgcaccttattctttattgtcgtgacatctactcaaatgggttcaattatttatttatttatttattangtgccttccaatatttacggtaaatgattatcgtcatactatatattggacctggagtggtgagtcaattttgaccaagttttggtcgcagtgactgaggagaacaagaattccgttcgtcttttgttggaccaactccacgaaaataggagataattaatcaccgata

SEQ ID NO: 34009 - DNA, 457 bp, Oryza sativa
agctctcaccaatgtgggaacgaccgtacatagtgatcggcgtccaccggccgggcttggttcgattggccacggaagacggcacagagctgcttaacccttggaacatcgagcaccttcgccgcttctacccgtgatgttgattgtttttccgtttttggtatcaggccaaccccgcacgcccctcgggccatgcgggcttggccgggggctgcctttgtcaatatttgtatcttaccatttctccccagcaagaaatccttttgtttaatcaaagatgttgtgtactttttcgttcccttcctcaagtctcgttccggcttatgggtggttcgtgcttaccgtggcccctaggtggtgtcgggcaacctgaacagtgccaaagggaagcccggacgtgggccgcgcctcgaactgcggtgaaccctgtgggctcggacggacctacacacggtca

SEQ ID NO: 34010 - DNA, 395 bp, Oryza sativa
  unsure (1)..(395): unsure at all n locations
ctcagcttaagcctgaatccctatatgcattgtatatctagatcctgcagaataaacaaacatataggatgggtagtatctgatgtaaatacagtacttgatgaaagttcaagtattttaagatgtttataaatatgtatatctcctcttgtcaattttgatttccctgagaagatgactctttacgtttaaacactctgcccgactagtcatagtccccaagcaccggcagtcggccaatgcacttcccaaacatgcatatgagtgacatgagttcgtcattaatggaactgagtttcatggatcagaatttactacccgggtacttttgcaattggtaagagcagaanataaattatcttatctctatgctttngatttcttccaagtaatac

SEQ ID NO: 34011 - DNA, 460 bp, Oryza sativa
  unsure (1)..(460): unsure at all n locations
acctgcggcagcaagcttcacactccaaatttaaagtcttgtatgcggcgcatgagggcttcttccacgtattgctccagctcagatattgagggctggctcgtcgcaatttctgaaagatagatatcgaagtctaagagttcatcgccattgggtggagtcactgcagcactattgtccgttacatgggcatctctgttagcttccccctgcgtggcatactcgctgtaaagctcatggatagcatcatccaccaccttgacatacttcgcggcctcgacactatgaatttttgagtagctgaactcaacaagcttcatcttgaagcgtggatccatgacaacagcaatggctagcacgaggttgcagtccttccagtacttgtcgaacctttcatgcatgattntggcagtgctcctgaaaattgcgtcttcatgggcaatggcatttgaaagctctg

SEQ ID NO: 34012 - DNA, 468 bp, Oryza sativa
ctttccaaccaatgtacgactggcggcatgtgatccacagaccccttcgtgtatgtcgaggacgaggtgtttgccgtcgtcggacgagacgcatttgagaagtaccccgtttggcgcctctttgtatagatcgttgccgatcatacagtagatttttgcttgacgggttattttctcggcttctgcgtcgtcctcgggcaactcgtcgctgcttatgaatttaatgagtggggttcaccagtcgtccgtggtctcgatgtcggcaacggcgtgctctgcctctgtagccccctgagctgatgtcggaggtgactgggctatcttcgtcgtttgcctctttcaccgatggcgttttcaagatgtccacacaggtgccgggttcgagtggctctcgtctggatgcacgccgtgctatatcgtctggctcgatagtgtccttgcgatatacgtgtcagacctcgatcccat

SEQ ID NO: 34013 - DNA, 357 bp, Oryza sativa
gcttgatgcccaagaatatatgttaataactacatacgtcatttgctttttattacgatactagttatttgacaacgggagagtaatgcatatggatgacagtcgacaaaagacacacgggatgctacgctaccaaccatacatggtggaactgtacaaggattaataaagacattaactaaatctcatcaaaaggcaaagatagtcactgtatttatgacaccggagaaatctaaaagaaattgaaaaccgaccgcagattatacgaagtatattataacagagtgatccctattagcttgtccttgcaaaacaactgattccatatcctatccatccaaacttggtcccatcgat

SEQ ID NO: 34014 - DNA, 414 bp, Oryza sativa
  unsure (1)..(414): unsure at all n locations
accaacataacatatttgcatatcatcaatgtgaggcatcaatttatacttgtgcagtgataccatgcgattattgtattggtagatgtttgctagtcagagctaaccagtgatataacaaagaaagatttaagtggagattttaatatatgtatatgtccaatgcgtatgtcacatggntaaactcatctaagttatatacgaattatataaaacccattatacaaaaccaccttatgagataatatgagtggttntgcacagctcaaggggggttgaatgtccggttctataagacatgctgctatacggacttctatctaagatttagagggatattttgattntttttcctattttgaaatgganggaatagagggagtacattataacgtgttccaacataacaatact

SEQ ID NO: 34015 - DNA, 445 bp, Oryza sativa
  unsure (1)..(445): unsure at all n locations
agcttgctcctcaacgaatggtcattcatgcattccgaagcagncctatagcccgcgttgcaacagctccaattccaatgagtgcactaccacaaggtgtcaatgctcaatttcagccccagccaccagctgacaagacagatgccagtatctgcgttgtacctttagaagctccaatacagcagctgagaaatcaagtacaagatgaagaacccgagtgtaagaaagttattgtttgtcacaactgcagtggagaagggcattactccaaaaactgtccccgacctccacattttcgccaatttacacgaagcagacattccaatcgtattgtggtcactggagcaaacgccgtacccgtaaggcctcgtgttaatcagaacccatagcagaaacaatgcaccaatgctccacctgctgcacctgactcggcaataatcttaac

SEQ ID NO: 34016 - DNA, 343 bp, Oryza sativa
  unsure (1)..(343): unsure at all n locations
taggtgcaagcaatgcaatggcagntaaataagatatgatatgttgttctagtgtagaagaagcaccacctgaaagataccggagaagctattctggcggccaatctcgagaccgggcatcccaatgaggccatcccctggacccatccctccagcgccgccgccgncgcgggctccacctccacctctgggcttcctcccgtcgccgatcccacccaagccggggcgaaggcgctgcgcggagcgccagtcctccttggacagcancggcggcgggaggcgagggttgatgttgccgttggagtagtagtaggagtggtaggccgggtcggcccggagctcg

SEQ ID NO: 34017 - DNA, 402 bp, Oryza sativa
  unsure (1)..(402): unsure at all n locations
ctacacacaggccatttaaatctagagctacctctctggacgaaccacttggtaattaatgtctgcaagaatatatatgtagctagtcaacacttgaacagagatattcagctgctagctggtccttttgaacagtttcttataattaacaacataattaatcattggttacttataatttggcctaatattggctgtcggttcctcgtacggcagccttatatatttacggtcactcatcgatcgtactgtgtacacttgacaaatcacattgatcgtatacttatctcctccgtgataaaaataatcaacttctcctcaaatantaagctttctaggataanatttgatcacaacataaacgtttctaaaatattgattataatgcacaaaaatcatgct

SEQ ID NO: 34018 - DNA, 389 bp, Oryza sativa
  unsure (1)..(389): unsure at all n locations
aactaagcttcggcttcatacaactgcaaggacatctaccattcgccttcaagacacatttctgctcggcttgcttgcgatagataccacgcctgctcctatcaacacacattattttataccgatgcacttgtgtgccttgagcaacaactcgatgtctccgtgcctttttgattttatcttccatgtactttggcactacgttgccaaacactatgttgatatcggccatggaccgaccaattntcttgtatcgatccctatagtacgcttgcgtgccgtgaaggatgaattcaacaatagcaaccaatggaagtacccgaactcctcgcattacccaggtgtacacctctgccaaattgtgtgtcattatgccataccgagatcca

SEQ ID NO: 34019 - DNA, 338 bp, Oryza sativa
tcctggtaaaaaactttatgagattcttagtctggaaacaaaacggccagtatgaactataggcttataataaacgggctaaatgtatatgcttgcctccatatgaattggagaagcaaaacatgaggcccaaaatgcatattccaatctttttggtccatctaattataaagctagacgcactaacccatgccctatcaaatccagcagagttgtactggacttgccatgccaccctcttttctcctactttcatttggcttaatcagctaattaatctcacttaattatcttgggttgattagtaacataaatattattacttatgtcaaaccatg

SEQ ID NO: 34020 - DNA, 288 bp, Oryza sativa
  unsure (1)..(288): unsure at all n locations
ctcagcttccgattcttgactgatcgcgaatttcaccgtggcttgttcaatctccttctcangtcttattntttacaagctaaattattattcgattaaaaaccagtgttagaagatggctgcagttaaccaatatgattaaacacggtcagaggttgtgaagaaaaatttattgtttaacgatcacaaacctttgacctttccaacctttactggcatttgctttgattaaactttggtcatagttcattcgattcataacatatctatctcgctttcggatcatga

SEQ ID NO: 34021 - DNA, 448 bp, Oryza sativa
  unsure (1)..(448): unsure at all n locations
agcttgcactataattaagaatactgtaaagagggctntcatatttatctcatacaattcatatagcgtgataacctcagaaaaagcaatcaaaaccgtactaaattacgcaccaaacaaaagcattgaacatgattgccgagattgtcttaaaccacgtttctcagcaaacagagacttaaaaaataataattaatgtggtgagacattttagaagcataaccaccagattactgttatctcccacgttaaactcaccagaaatcgatttttgcctccatgactgggcaaccatgagaaagaacaatctcaaggagccaaaggtgaggagaggcacgcacatggcaaatactacctcaagaattcattcgattnttgcacatcctctatagctataataataaacaaattaatcaagagtcttacccatcatgaatcggtcttctct

SEQ ID NO: 34022 - DNA, 313 bp, Oryza sativa
aactattggcatgcgagaggtgcctgaaccgactaagtacttaaccagagtgtgccattccaccctgtggttgcacttgattatgttccaagagattcccacaagaatcggtccttatatgcgaataccggacagtgccacataagcacaacccccgcatcgcgaggtttcacaattcattttatttttcaacacaccgacaccacatgtcgggttttgaaggcttcacaaacccatttcccatgttttgacaagcacgcgtatgtgggatattggatacgcctcataaacacaatacccagaccacaaggtg

SEQ ID NO: 34023 - DNA, 459 bp, Oryza sativa
  unsure (1)..(459): unsure at all n locations
agcttctntatagctgttctgctatgtgaatattcaatgatgtatcccactntacggtacactcatcatattttacaaagcagtcggtatatcacttggatcatattattcacggattcacaccgcatatgctacatattaatattaagtcgcttggttgactacaattatcgaaaccactcggtgtggtagattatttattccttgaatatatgtttggcttgttcaattaaccacatagtcggtggttacacctattaggtgcatctagtcgatgcatctgactttattctttcacgcctcacagtcttctgatttgaaaaagactcgggagatatggcgaagatgatcgaacactccgcttggagtatctattcgagaaagatatctttcgactggaacgctcacggctactgcgagatatgggacccataccacacgatgatatccactagtata

SEQ ID NO: 34024 - DNA, 510 bp, Oryza sativa
  unsure (1)..(510): unsure at all n locations
ctatgaaactaagctggttacttgctgttctgtttcatagctgcttcatttggtagctgcatttgtggaatatggagggctctggtcctggtgaatggagagtattcacaatctaagaggtattggacacctggctgcatcaatagttatatcttatgtgcagaaagatcatttgtgcaattttgatgtcatgctaatatgcatgctgctgcctagtcaccgactagtcatctgacttattacccaaactgaccttttgtgagttgactcgacttgatggcttaatgctgtgagcaactgagcattacaccttgtgacttcatcttttggagcagacactgaatgtgttcatctgttatggacactaattcatggatgggttaagggtctaaagactgggatagaagtgagatcactctcatcggtactaggcttgtnctcattgccagtagaccctgatcaagctacacctactctatgaatctnntattgctacttacatggngtaca

SEQ ID NO: 34025 - DNA, 390 bp, Oryza sativa
cacaagcctggtactgaaggtagggacctgccatgttgtttcaagtatgttaatacgtcacattctttgtgtgcttgggcgcacaattgctcatgcttgtatagaaagcacatccatcgactgaaatagtatggtgcacattatagttgcattatcttttaagtttgctaaagctatcaggttttgcttgataatggggagagatcatactttgattgtctcgcatttaaaggattaaatacgtcaatatcccaccagtcacccattctctttcctgactcctgtcgataccctaccctcattgagctcccccacccatccacccaccatgtgacacctggatgtatcagactaacaaacactgcaccttgtgattctaatcaggtacta

SEQ ID NO: 34026 - DNA, 499 bp, Oryza sativa
  unsure (1)..(499): unsure at all n locations
cctanaatactcagcctaganattaatgaccctgtaatatcacaaagaaatatctatttgtatctaactaagactgcgattcgttcttgagctgaacatctgagatggaaattggagccagctattaacatatgattaattaattaattattactataaatttgaaaaataaatttatttgattattagtaacttttatatgagtcttttatgaaatatattggttagcagttcgggaattatgctaattaagaatgagatattaccttaagcctagatgccggaacagaaacaacctaagtgtgtgttaaaggcgtgcacttatatggatgcgcatgctaataatagtgcacacacatattgtgcatgtaataaaattaggattcacccaataaaacacattatattcgcagtctgcgcttaccttgagggagccatatataagatgtcgttnttttttatcaaagtggcaatctgaagaaatcgtagctcaactatc

SEQ ID NO: 34027 - DNA, 346 bp, Oryza sativa
attactcaatggccatctttatacttatcggtgcgggtcaatatctatacggatgtaggatatatgaaactttcttttacttgctagggcgtgagttagaatccccactgaaaatcccagaccattaatattaaggttcacccggttccagattttcttgtagttgcccatgattgcccaatgggtcttaactaccaaagtactgaatggggatgataaccacctacccctatgttatctaacttcactgactcagcttcttagatgtctgtctttttagcacataaatgacatgagcttgaggccttgagctggccttttcttttgggctatgtcataattatca

SEQ ID NO: 34028 - DNA, 490 bp, Oryza sativa
  unsure (1)..(490): unsure at all n locations
gcttgcgagagcgaagcatatccgactttaccacaaacttgtgtttttttttctaactcatcacaaaaactaccaagcaggtgcgaattcccatgacagacatcaaccaaaggcaccgtatcggcgcttcctgcttatgggtgggacctatacacctagaaagcgactgcgacggggtatcggtgccaagctacattgcaccccaacaacaaagcagctctgactgccccttacaaaatcaactaagaacatcggccgcctactgcgaagcaagaaacgaatccaataaggcgaagggctcgccgaacattccggcctattgagtgttggtgtggaagcanaaagcccgcagctaacgtcgatttgacgatcagacatatacatgaaaaggttcttcaaaactacacccttaacagaataacgacatgaatctctgatgtctctcgcgccgtaacttgtgcaagtgctttctctctgagcacaatgatgg

SEQ ID NO: 34029 - DNA, 441 bp, Oryza sativa
  unsure (1)..(441): unsure at all n locations
ctgcngcatgcaagctcgtaggtcttaatatagaatatgaaatggcatctnnttgctcccaacaaagattatacaaagaacaggtgactacttatatgaactaaacactggaagatgatcatttttgcattcaatccacaaaatgtctacactgtaaatctcttctgaatttaaatcgaaccccttgatgttatttgttagtgtcagaatggattccagctctgaaattcctcctgtatcacaacaacccattaacagaaccatgatcatacggttgcgccatccgcacacgatgttctccacaaaagaaagctttctttctnttccacagctatcccttcattgcacgctctcaagaaatcaatatcaatatttcttctatgaagattaacatagctaagtctccacccaacattcacaagctagggcacacagaaccac

SEQ ID NO: 34030 - DNA, 424 bp, Oryza sativa
cacaaatcctaaaaaaaaaaggcgaaatcataatcgcatttcgaaacaagacatgaacacaattacccctttgggaacccatgtttgccatagtattatagcggcatatttgcaaaatataataatttgtgaataaaaaatttatatatgtgtttttaacgatttaaaagcgaaggctgaataataaactacgattgaaaaactcaaaatcaattctaaatcaagattaaaaattcaaatattagcttataagtataggcataagcacaagcataaaggaaacaatttgttaggatctggccaaacctggattcttgtgatgaaattaaatgtagtgtgcttcttttccgtactccctctcactgtgtcatcacagaaattattctttgtcttatattttaccagcgaaggatatgttcgctac

SEQ ID NO: 34031 - DNA, 479 bp, Oryza sativa
  unsure (1)..(479): unsure at all n locations
agcttctcaaattaaattagatttttgtgatcttaatactatgaatattntaaatatgctctttatctatatttgcggtattaggacatcacatccaactaaaatcacttatactttatactttaagataaaggaaagtacagagacgtacgtagcgcataagggcaacaccgcaacatctacgggctacgcggcctaattaaaagttaaaaccgattcatggctatgtgcctatgcaataattcaaagatactccagtatcctactactgtgcatattcatgtgtctaacctaatccctccgttggaaaataaataaatcgctcanattcggtgaagaattatatatatatatatttaatagtgggacgtgactacacagctaactagctaccactccatttatgagatatcctatccaccaatacttcaaataaagttntcttttaaactactcatccgatctacgatctgattaca

SEQ ID NO: 34032 - DNA, 303 bp, Oryza sativa
  unsure (1)..(303): unsure at all n locations
ctcagcttgtggtggctggcggagaagttggatacaagctcagcctagacactaagatggtcataagtgggctgtgtaccaaatatgacaaaatgtggtgtggaggattgaanggttttggtgggtaggatgttgagaacatgtgttgcaacgtgtaaagcttcaacccaataccgaaggggcatgccagcctggaagagcagagagcgaaccacattgttaatggtgcggatcatgcgctcagccccgccattctgagatgaagtatatgggcaagacatgtggngatgtatgccgttggtg

SEQ ID NO: 34033 - DNA, 362 bp, Oryza sativa
gcttactaatcagtgactaaagaatgcacagtttatcatccctgaacagagaccagtgcatcttaaacagcagatgcgcacgtatcatcgagctaagatcctgcctatgtcaaaattaaccaaaatccacaccgcctagtttcgaactaagcaatagggaagattttgtagactgatgcaagcaaatcccaattcacaagtaaataacagtaaacttcaattttttgatcatgcactcaacatttgctacaggtggctacatcgatcttaaagtaacatcatgaagaatttaattattgtgctaacaagtagcatcttatttgggatgtaattgcacttctcgcggatcccatgcacgacgt

SEQ ID NO: 34034 - DNA, 489 bp, Oryza sativa
  unsure (1)..(489): unsure at all n locations
tatgcgccctggatttgaaaggcgcaaggaaggatatgtctattatttacatctccattgaaggctgngaagtgagaaagatcagtgtatcaaccaacgttgcatttgtcaatgtcggcactcgtagtaggttagcaaatcattaccgtcatgtgccttatttagagcatggaatttgaatacttggcaggtttgtctacaaaaatgttnttggggatattcttgcgtgttattctcatttatgggtggataaacctgcaaaagaaaaagaaaagaaaccgccttgctaagtctttgaggcatttagcactaaattttgcacagagtaaatcgttaatattaatggtgctttagtggctgccctttttttgtgttccagtgggtaagactgatgtatcggtatatctatntccattatgaatgctttgtacagacctttataggttggatttctgttaccactttcttcactggtagctaaattactgg

SEQ ID NO: 34035 - DNA, 404 bp, Oryza sativa
  unsure (1)..(404): unsure at all n locations
gcttatgganctactttcggttggtttttgtttcctaccgagctgctgggaatcttgcaaacaagccacataccttatccagtccgaatctgatttgtgttttgggccttgtaattgtgtcgtgggcttagcccaagggggtgtgcgccctaaggcaaccctagaacgtccctaatcatatttattaagtagctgtcatcgtttagagctgggttttacttagattaatctgtcaagaacagtttcgccgctagatcggtttgtggaaccccaaattcgagtgcttaatcattcatatgcaattgtgttgccatctatcttgttcttgcttgtgttcttcgattcacatgcagggattagccttctcagtgaggtcaaccgggtttcggcacggttgataacca

SEQ ID NO: 34036 - DNA, 403 bp, Oryza sativa
  unsure (1)..(403): unsure at all n locations
tctgattatgcagttctgttcatggatgtgggctgatcgagtttgtgtctccggcaggttatcagtgccttgaagtgtctcttgttgtctttgctttgggggatcatctgcattcctaattgcattcggnctttcctcttggctatttgctgtgctgagaatgggatcctgcctctcctcttgttcatcgtctacctgcagaagtggatttccctttntaagtttgccatcggtgtccagaagggcagacacaagctgcattgccctatgaacagcgataacttggaggtccttcgcaagctcagcagttactttcgcggcatataatctgaccatcatataatttgggctagtccagcccaacatacttattatccctaccatggtctttgtagaagtgatg

SEQ ID NO: 34037 - DNA, 462 bp, Oryza sativa
  unsure (1)..(462): unsure at all n locations
tgtgacctgtgactgattnntgttcacaagtcanaatcagntagttgtgatggatcaaaggggaatgggtagggtaggcagacaagaagtccaaagagcaagatggctacaccaatgctgatgtaattgttctcaggttctgttatttcttcagagagaggggaaatcggtcctctctgcaagaagaagatcagcaccacccagtagaacgcgacgtcgttgaagagagctgaaattccaagaagtccaatggccaagctgctgattcgagacgatatctgttacaaagtcaggttgagattcattacaattgtctcaagtcaaggatgagagattgcagttctttccagcttcaggtagccagccagtagtcacatctatagatacaaacttacaatagcaacatgatttctttacctttcttccncacatggcanatgctatgcggccgccatcaagctc

SEQ ID NO: 34038 - DNA, 485 bp, Oryza sativa
  unsure (1)..(485): unsure at all n locations
gcaagcttgtgagagcataactntattatattctcttttcatttccattctctttccctccttctctttctttgtttttctttnttcaaaggacttttctttntatgagaagaaagcacatgaaagcctggagaatntattttggcggtaaaatggaaatagaatggaatattgctgtgctcccagtgtaggagtttagcatgtgcatatatgtgggtgtatgatcttgatcatagaacatgagaagtatctacacaagtcacaagagtttgacaaagttcaaatgaaatggcaagtaaccaaaatgtatatgggttaatcatgatggcacattnttggctctggtaggaatttatatcacatgaggaactttcaattttatcattnttgaaaacaaaacattcggaattcaagtcaaactagtatctgggtcatagctactcttatttaccatctcatatcttacaacaacttagactcagatc

SEQ ID NO: 34039 - DNA, 473 bp, Oryza sativa
  unsure (1)..(473): unsure at all n locations
actcaagcttggaagtggtgtgtgaagtgagtgagatgatgaccatatataggggtatgtatgactgntggcgaacgggaaatgtccgaagtgccccccaaccgccatcaaggagtgatctgggacgtccatgccaaaacctgtgatcaacggtgatcaccagggctcggccaaactatggggttcagccgaacctgtgctatgcccccctggcctggcctttggccttgctcctcctttgatcctcctctatccattctttggtgttttgggctaattctccagcggttctatgaagttcacaacccatccttgtatggatacatatttctcctcactctagtctagatctcctcccaacatcggggtttatcacctgcatatanatatacaccaacactgtggaatatgtaagattaagcacctatcactactgtggatgttgtattatctgaacattatgcagatgttgg

SEQ ID NO: 34040 - DNA, 470 bp, Oryza sativa
  unsure (1)..(470): unsure at all n locations
agcttgtaaaagcagattaccaattaatcacagcaccaacaaaattacagaatacaaagactataaaaaggatggatactttcggctgtatctcaacatgagctaatgagcagcacttccatcttcaaattatcagagattgcaattgaagcttgtaaaagcagattaccaattaatcacagcaccaacaaaattacagaatacaaaggctataaaaaggatggatactntcggctatatctgaaattacaatgcagtgcatctacattgataccctctgatttatggaaagaataatgacgtgccactccacaaactttggcactacaaaggtcgggcaactgatctactgcataacaatataaatgtaatagttggctcgaaacactaagactgcactagcagatcaaaatctaacattcgttntacactggacataagtaacagatgtgtattaactgtacaaaaat

SEQ ID NO: 34041 - DNA, 464 bp, Oryza sativa
  unsure (1)..(464): unsure at all n locations
tgaatctattgacaatgaccagaatctgttgcaaacactcgtcttatattctcaaatccagatagctagccctctgatgtgttaggtggagttagatgcgtgtactacgcggtaaactatttgaatccctcgagggatatcccctctttctttgcatgccactgaaatggttatgaacaaatgtgaaaaaaatagaaacggagtattaacatgcgatataacactccgcacacatgccagttcagattcaacttgcacatttcgcaacagaaacaaacatatctaacacgagctacgtaacatatattcagagtcaaattagatatattcgtagcgagatgtacaagttgaatgtttctcgcaccattcgagtgttatgcaaacatgaaggatatatactcatgagggatcanaaggctcttcctgttctaggcagcgactatcctacagcattgcactaccga

SEQ ID NO: 34042 - DNA, 469 bp, Oryza sativa
agcttatctcttacgctccaggaatggatcagtcagaacaccaccaccggctcgcctcgaccgccgccgactggtgttcccgcctgcacggctggcctattatgccgccgttgttgggcgtctacgtcttcaccgaccggcttgccttcgccgctgccgactggtgtttccgcctgcacggctggcctattatgccgccgttgttgggcgtctacgtcttcaccgaccggcttgcattcgccgccgccgactggtgtttccgcctgcacggctggcctattatgccgccgttgttgggcgtctacgtcttcaccgaccggcttgccttcgccgtcgccgactggtgtttccgcctgcacggctagcctattatgccgccgttgttgggcgtctacgtcttcactgaccggcttgccttcgccgccgccgactggtgttctcgctgacggctggccttatgcagctgtgt

SEQ ID NO: 34043 - DNA, 408 bp, Oryza sativa
  unsure (1)..(408): unsure at all n locations
tcgcagccatcatcgttcaagcaaatctggttgcagactggctatgcgactgatggtgtgtagntgaagtcatacccatagaagtcagtcttggggatctccacgaatatgaatttttgctctgtattggtgtttgcgttatgatcccctttgactgtgatgttttccttgtgcctgcacccttggctccagtaactaggttcagtcatctcgaaaccttcgaggcaagaacactgaaggcttggcatgtatgtgcagaagctgtttatgccacacagaccatgtatctcacagagtcgagggaatgccagccaagagactgaccatttaccattcgttggcgttaagctatatagccttatgttaccatcataatcgagtgtcaaccttctcatgacatccttatca

SEQ ID NO: 34044 - DNA, 398 bp, Oryza sativa
  unsure (1)..(398): unsure at all n locations
ctgcagcttgatcatccaccaacactctgctcccgatgcattctgttacagccaccgcanagctggtatcaactgatccctcacacccaacaagatactacactttacggtttgatgatcggtacgttttatcacttgcttatgatggaccagacatctttaacctctactggcctaaccctgaccagagtagctggacaaactataggatatcttacaaccgtatcaggagtggagatcttgataagcgtgggaaatttatggcgagcgagaacacaacattgtatgcctcatattgaggtttggagattaagaggagactcacgttcgactatgatggagatcttctgctttacagcctgaatgagtcagagtggaactggtacaattcttggatg

SEQ ID NO: 34045 - DNA, 414 bp, Oryza sativa
  unsure (1)..(414): unsure at all n locations
gcttgccttcatctcctcccacttcgganctctacttcttagccgcctgaccccaagtggtgatggtacttcttcttggcggcattttctttgtttctttccatcatcgcctgcccttgttgacctgtcttatatgcaatgaactcgtcccagtgatcccttagctttgggaatgtgtcgaagttcggtgtctgccccttcatgatatatttctggtacagatctcccttgaagctctgaaactgttctgccattttctttagagtccaccttttcactttgtcctctgtacccgcgggaagggtgaatgtctcgagcattgtggtccacaacatctctttcttcgaatctgggacaatgctctcatgatctccgcgtgccctttgtttgccagtacaccgtactgacaggcat

SEQ ID NO: 34046 - DNA, 270 bp, Oryza sativa
attacaggaacagacacactaatctccagcgacgctggcaacaccataacttgtgcactagcagaaacagagctcaaattccgcaacgatggtccaagcctcaagtttctcgcatcaccagccaagccaacccgaacatcggaacggacagcggaaacccccacagtgccagacgaactggcaccaagatgtgtccccaacacctcaccaagcacctcaactgaggaattgagatacaactctgcaccagactgcgtgcactccctccac

SEQ ID NO: 34047 - DNA, 349 bp, Oryza sativa
  unsure (1)..(349): unsure at all n locations
caatggagaataccggtacagcttctttgatctgacgtgaaccgcggtaaccatntacttctaaatggcgcagnggacctgctntgatagaactatccgcgaatctgaccaaaattaacctctttttttaaaacaaaaaatgacaggaaaacaacggatgtatcatgaatggtgatgatagctagcttggaaactggaataacgtttggttgtcgggttcaaagaatggctacgtattgtggctagtgggggtatttctacttctctatccaagctgagaatgcgacaatacagcgcatcatgcgcgatatttgctgcaatttctggccctgcgcggttgccctaaaca

SEQ ID NO: 34048 - DNA, 313 bp, Oryza sativa
  unsure (1)..(313): unsure at all n locations
tcaccggcggtgtggtgggtggttgcttgtgggggcgcctgtgatgatgaacccagcactcgctagctagtgcggcgtcacgtacagttgacccgcgctccaagacgcaaccgcgcgtactagtgcgtaaccctctcggttcgacatccgcttccgctattctgcgcgcctcgatcgggccgagggtggatcgcggttctgcgtgcgttatggctgactgcgccggtggacggccgtgccccccggcttgcgtntgcgagcggtgaccgagccagacctcttggctgccgggcacaccacgctgactgtcgat

SEQ ID NO: 34049 - DNA, 408 bp, Oryza sativa
cactgctttcctcatccgaagttgattgatgcaatctgtatcactcccattgtacaaatcatctaatcttgtgtttttaccagatccctatctaccaatggaccatatttccttagacgtcgtcttttttttacatggcgccgccaccgaataattgctaacacaacagctaaaacacccaatgttctagtctgttgctggacaatatactgatgagttggatctagatccattgttctgaccatatatgacaaataaacaagaaatacgtgaaagaaaatacacatcatatacatatataaagttatattacagtacacgctcacattgatttattctaacaatcacgctttttccagatctggtgaaaaaagaaataacatgctaacaagagagggataatgttct

SEQ ID NO: 34050 - DNA, 445 bp, Oryza sativa
  unsure (1)..(445): unsure at all n locations
atcttccgctcccgctcctgactgtacgcaataacacgcctcctttccgcctcagccttgtgctctttttctgcggcctcctccttgcgtctatgctctatcttctccttgcgctctgcatcccattgccgcatgtactccacacgctccttgatttgcggcttgatctcggcgtcgatccactgctcaaaatcacatagcggtggaggggtctacaacacatgcaatgtntactaaccaaataagttgttgaagactacttcatacaccacataatcattacaaaacatcagctcctcaccattaagctaatgcggcgtatctcacgtgctggctcacactcacaattggcacacatacagtatctctgcatgtacgtctctctcttatcggacttggctaccttgcaaggatcaacgcaccagcacatgggcactgatacacc

SEQ ID NO: 34051 - DNA, 304 bp, Oryza sativa
  unsure (1)..(304): unsure at all n locations
cctacctgcctggaaaactaataatccagctcattaacattaacagagctgatactaagagcttagcttggctcagctcgtgagctggttcattaataagcatatgctcattatctaaaaanaataatgagcatatgccatattagatgctagacatctggccaaatcatgtctgtgccataagagatcggggcttgtgaaataatttgttggaacacattgactgctctgacggcatagaacgtcttagcacattatcatgagactcgaattatctccatcgttataatgaaaaaacatttat

SEQ ID NO: 34052 - DNA, 410 bp, Oryza sativa
  unsure (1)..(410): unsure at all n locations
tgcaagcttattggcattcttatctttattatataccatgacgactccggcacctttcaccgagaccaaggatgttggggctggcatggacaacgatgtgttgaaatcaaagaaaaccactcaggacttgaacactaagatgatggccatgatcaataaaatgttggagacatgccgtaacaccaaggaggattataccgtgagtgtggattgcaatggagatgtcacggcactaagcgttaacattgatccagtacccattttatcagacgtcagtaatgaggctaactcaactcatcttgtcaacactaacaagcttactatggtgacagtgaaaccaaccaacggtttgactaaaagcaacaaggacaacgttgatggtgatgcnggtggtatggtcactgataatt

SEQ ID NO: 34053 - DNA, 320 bp, Oryza sativa
acttcttcgagggaccttactgacatcctccttaatgacatgttcatgtgtatggtcaatttggtctggtggtgtgattgaactgggaattatttcagagggttggctccaactactgtgtgtatcctacattgggaaaaagcacttaaaaaaggtatcatcctgagacttcataattgtaccatcatgcatgtcagggacctcagatttaactattaaaaatctatacgcaatgctgtgatgagcatattccagaaagacacaggccatacttttaggtctcaggttgcgcctcttccgtattggtacattgacctttc

SEQ ID NO: 34054 - DNA, 301 bp, Oryza sativa
  unsure (1)..(301): unsure at all n locations
gagaacttctgtgagactggtgtatgtctnctgctggcatgtctgggtggcgcgctccatagtgcatcttttntaagaactgttgtttggaatagtaactcagcaatagttaccacctgattctaccgaaaaacagacgaaatacataatgatcgagggaacctaaactaaaatatttaaggtctattaacatacctacgggtgcgagaacactaaactccacgcaaacactatcactaacatacaagagaatactgaggctcacactgcaattcttggtctcactagtatagcgatggat

SEQ ID NO: 34055 - DNA, 490 bp, Oryza sativa
  unsure (1)..(490): unsure at all n locations
tataaaactcagctggtattctaccccatgatacaaggaaaaaaaaggaagttggtaatcaatacactgaaggctcaagactcaagagcatagatattgtatatgacaagcaatctctgaatctcataaccgtgcagatgaagcagtaataggatctaagttgcatttagctattcatgtgaaatctaggatgcaactaaggaagtacggccatacttattaatgctatgcactactccagtgccaatgccataaagacaacgacttgcttgctagatccacactaactcgtacaacaattttatattatataaaataaatcttcgcgctaagagatgaagtcctctctctctctctnttnttntgtggaaaaacacaatctttattctggttgaaattagtccaaatcactttggttcgtggagttggaataagttggtgtgccatgaatccaccattctaaaccctagtggatagtcccattacccac

SEQ ID NO: 34056 - DNA, 157 bp, Oryza sativa
attcctcagtatatggtgatacctctgatatgcattcagaaatgaactgaacttaacacaagggtgatcacaatcttttgaatttacatagaattggttgtatgcgctgatcctaatcggatcggactggtcgctgccgcgtgcctatatataaact

SEQ ID NO: 34057 - DNA, 345 bp, Oryza sativa
  unsure (1)..(345): unsure at all n locations
gcttgcacttcgatgaaagcaagcacatttgtgcggttggtcttaatgattgcctggcgncagcttctgttgacaattcccactgattggcttctcgaaatcattttatgtggtctgagttctgaggctggaagcagagagaaacacggaacaacttgctagcacgtcaattatggacgtcggtatgattatcttgtaatatcctgcaacggaatctctcgtgggtcgtggctcgtggctcgtctgctaccttctgtttcttttgagcaattccttttttttttcggttggacactgagatgggacttcctgaatacctgatactccgagtataggtttaaactt

SEQ ID NO: 34058 - DNA, 473 bp, Oryza sativa
  unsure (1)..(473): unsure at all n locations
tgacattngngacatcatcctgcaagattagtgccacaacatattcgagattatcagtatttatgataaatgaaagcatccacaaccaaacttctaatcatgctagaattgaagaatgtaaggtggttgtgattctcgtacaaggatgtggtactaattggacaggactctaaggattctttatgtgagcaggattcctgaggaattttgagagtgaaactttcatgctcattagtggagttttcatccgccagagatgatgtctcaaacttgtccatggcttgcaggttctccttctcaagagatgcatcgtgcaagaacaaggttgtttcttgacaaatgtcaaaaacaatattcttatggccagagggacaaggttcangctcgataggaagttgtgatggtggttctttggagtgcaattcaagggtctcgccagaatcttnttgaatgaaacgaagatcatcatgctc

SEQ ID NO: 34059 - DNA, 482 bp, Oryza sativa
  unsure (1)..(482): unsure at all n locations
agcttaccttttctatattatggacttcatactatgattattcattattccgtcatacaaaggaaggcccccaacactatgttcttttttccattccccataccctaaactattatcggctttgcccacaaatttgatcctctattacacttgcactatcaacaaacttcttcaccatctatcgntaatacatccatgattttagtccatttttctggaatgttctaatttgctcaaaatccaccaagcactaccgcttacccccgctgtaagagaaaccctgtctacatgtatcacaatagaaacacaaaatatttcgtttatctcagttctaggaaaaaaggaacatgtgatatctcgaatcttccgtaagtacgcacagctaatgtctatgtaacagattatatattgcagcttcgaataagctctgaatgcgtcatacagaaggangtgtaaacatcacaaatagcaggatacatata

SEQ ID NO: 34060 - DNA, 199 bp, Oryza sativa
ataaggttggcaccatacataatgcatttacagatttactttttagtaaacttaggactaattatacttaaaaaatgatgtctaatgatactgataacgagtttcttatttggtttgtattttggcgcccgctaagtattttagagacttacccgttgttgatgccataggcgctgcttgtggtggcagggcaccacgt

SEQ ID NO: 34061 - DNA, 466 bp, Oryza sativa
  unsure (1)..(466): unsure at all n locations
agcttcagtctttcgattctgcacctctcttttatgttcggtatgatatgaaaaatccagcaaagaacatatgctgctgctgctgttccactcagatttctgctggcatatcgagtgaagaacattcgagctgcagcagaatggaggaattctaccggactttctgcgtggtcattgtctgaatcttgtactgcctctctctcaaaatgagttattttactgttcttaatgagatattgagatgtactatatttttcagtgtaaaatttggtatatatacctagggagtacggaaatttgcaataaattntggtacattttcatacctctcaaaaatgggaaaatttatctcttacaatatagaattctagtagtagatgtgatatatcataataccttcaatctgaacataatgtctgtttcaacttatagtattataatgtatcgcatctcgtactattntact

SEQ ID NO: 34062 - DNA, 383 bp, Oryza sativa
gattgcccttggctcggcctggagtatgtcggcgagagacacaacttcttccatctacgacaattctttgctgatgctgtcgatgcacagagtggctgctatgatttattgccgagtcacgtgcagcaggaggagcattggtgcattgttctgctgggggtctgattacacgaggccttactggacggcgtttgcttcataacacaatacgattggaatgtctgcttcgagaaattggcggaatgtggaggtcgattttgctcggtgtggacagtttggagtatgccttcttactgctgtgaacaacaatactttcttacactcggtctcatctgtcttgatgttagggctgattgaacttcaaggtcaaccaatctggcttg

SEQ ID NO: 34063 - DNA, 387 bp, Oryza sativa
  unsure (1)..(387): unsure at all n locations
cacttttcactgacgtgctagngacagaaccaattcgaaaccagaatcacttcgcagtgccaaaagctggggcttttcttgcggggaaaaatatatgggtgttggcatccatctgatggctatgctagtgaataaacgtacttcatcatcttcctgatcgtgatatggagtaattatgtttagctctaatattagtctacgcgtccgaaaaactgagtattattattattcctttntttttgggttgctagccgcctgagacaattgccatgacggcattgcattctttgaagatggatatgtgttccgcgcagatattaagacgagataatcagatcagcataggacttaaccattgaatatatcgtcttgcagacaaatacatga

SEQ ID NO: 34064 - DNA, 324 bp, Oryza sativa
catgcaagctcgtgatttcgtagactgctactcggttatttggattgctcaccaagcactagtatctcttattacaaggtggcatggggccattgctaaccacagattcatgcaaccctaatgagtactgacttttattttttgagggaaatgagtactgacttttaaatttgtgactaccactactggaaaaatgatctttgctcggtcgccccaaaatcacaataatcccgggttaaaaccccatagccattctacgatcttctttagtcccgggttgtaataccaaccgggactaaagatgatcttggttcatcccctgtc

SEQ ID NO: 34065 - DNA, 336 bp, Oryza sativa
acccaagatcagcgctgatcttcaccatcgccaacatccatgccgagttgtcataagacatgcttatacaatgcagagtgaacttggaatcactgggagaggtcaacggaaataagaatcagagccagttaaaatcctgtgcatgtcagttggtaatttatctgatcatcttgcgtgcataaagaagagatttacctgatctcgaagtggcggagagaataattgtatatagcagaagcgtccagtggcggctgcccctgcttatggcaatggcattcatatcacttgtcgacatatgcctatggctcatgggagctgcgaagtagtacatgttgc

SEQ ID NO: 34066 - DNA, 363 bp, Oryza sativa
  unsure (1)..(363): unsure at all n locations
agcttttatatttgtaataatgtatttcattattttctttcttcatncaacggtataatagtcatttttatagagaatacacggtcaactgacgggaagggtatgtcaaggatcaaaatcaaatcttatgggtacacaaggaagttagccaaactcaacggtatataatggattaagtcaaatttcacgggtatataaaggatattctctttccagtaaccacactcaaaccatacaactatgacattgtttacatacgcgtattaaaactatagaaagtgcgaaaccatattttggcctattgtgtgcacaaattaccatgagctttaacattgaaaaattgtgaactaagcaaatctatta

SEQ ID NO: 34067 - DNA, 408 bp, Oryza sativa
taatgatgcttttcttcaagctgtcatcaacatgattatggctttggagaccatgctttcttctgaaacagccaatagtgacgacattgagaagatgtcaaagaatgccatggacgcgtggaaggaattcaagaccaagtatgagcatgccaaggggtcaactgattccagcacctgactgaccagtattatgcttgctttcagacaaatctttctgttgagtgctgacaactcttgtgatgaatctgtcttacccacttagttgcttgtgaagattgccccaatctttgtgacgtaaaagttctcgattctcattatgcatacctatcttacaacctacaattatgtaccaacatttctagttgtggttatccctttggtatatttacaccaatgccatcttctgaa

SEQ ID NO: 34068 - DNA, 423 bp, Oryza sativa
agcttcaacaacttcagtgacagtttgtggataatgagcaagtgtacaaaatacaggtactttaaaagaaatctacttatgccacatggaattcaaactccatatgcctattatttcgaatagagagaaattcaatatgcctatgaaaaactatatatgtatcatcctaatttggaatacagatcacacaaaacccatatttaattaaggtgctagagatattaaccaaattaaataatctaatatctcaatcgcgtaatgcttatcattcatggatatgatgtgttctgaaaggaagctatatgactacggtctatttggtgaatattagaaatgtaccaaatagttcagcaatatgcggtctgaaagttcacagattctgatatatttgttcatgtgtcagaaacactgacaactgatctg

SEQ ID NO: 34069 - DNA, 423 bp, Oryza sativa
acatacaaactcggacgtgcctgaaaagtctgcaacttcatcctccactgcgtttttgacatattacattagcagctatgtttcgcacactattttgtctccaaaatttaggttgatgctgatgagggacaaaacttgtgtggcgaagaaagacaacatagaaatttagttgatctgctaaagacggttttattcaatagttgagaaggaaaattacagtgagagttaatcttgaatactcagaaacaaactcaaatgaatattaatagaagtcaaacacattataattagttcagaactttataaatagtaaataagaattatttggtgtagcattttatgattctctgatgaataaagatatgccactattgtatgactgttgaaacagtctgtaattatcttattactattgtatgactg

SEQ ID NO: 34070 - DNA, 456 bp, Oryza sativa
  unsure (1)..(456): unsure at all n locations
agctttgcaaatggactggaaattattctgaacaactggaaaggaatatctgtctagttgatgaatagtcttgtgttggcttggcatgtccaccactcaccccatccacgggctcaccaagtcaccaatcagtttgttcaccttgctgctctttttttgcatcttcctttgcatctgcgtttcagcacatgacaaagttagaataaatattcatgtgttttctagtttcattntgaaactatccaaaatattataattntaaaccacccagaggttatcgctgtcaaactgggaatttccagtaaataagccatactggatgaaaataacaaaataaaaagaaagtgcatgggaatatgagaaagcaggcaattgagtgagaaatgaataatttcttatagcccacaatcatgatagactcatgtaaattcanatgaaaccagacacatcgaatga

SEQ ID NO: 34071 - DNA, 452 bp, Oryza sativa
  unsure (1)..(452): unsure at all n locations
tatntgctctgtgaacgccaatatatgcctgataaaaaatgccaatatatatatcaaccatgtaatcaagtggttctgttgggagaatcttggtccgtatatatgtacagttgcagggaagaatcaatcagcagacagaatgccattgattntttttcctgtctgcactctgaatttcttgatcagtgcccctgtcgatgcaaattgcatatccatccatctgttcgtcaggatcagactgcagacagttttctgcccnncaaattgatgctgcacactgatcatctcctcaaaaaaaaaaatgcaacttgcaatggcgtgttccggtatgcatgcatacatggccattggtggactgtgaaagctcaagaaatggtgctgtcttccatgtgaagtagtggggtatatatactttcttcttctgcatctcagcatctgaatgcanaatatat

SEQ ID NO: 34072 - DNA, 468 bp, Oryza sativa
agcttgggatatctagctagcttatcctctgtattcgtactagcgcaatgcaagttggcctcacttcaatgcttgtgaccaccggtttatatctattgccgatttatttctctttgttttttctaattttgcaaaagtaatttatctggtcgtatctagttgcacgtacgtacactagtacacaatttttctttcttgtgcacatgcactaggactgtacttttgcgctttcacggataattaaactataactaactgaagaagcaaacagatacaagtacaaacgagcctgtaaaacaacctgtgacgagggctctgtgttgggttattgcctaggatcttgctaacatctccagaataattaaccacaaaaaagatccatatacaaatcgccagaggccctcaatgatgccgcttaatcatgcatgtgtggtcctgaacccaattctggagatttatgcctttgca

SEQ ID NO: 34073 - DNA, 245 bp, Oryza sativa
ctttttttcgatgtttcataatattaagcatgcatatgcatgcatgcatgccattaactaacacatccctctcctccttatttcttcttttttaaaaaaaaaatcacccacccttaaaatctctaatcccattgggtgcatgcattgtatttattggagtgatcccattgggtttatgcgttagtggtaagtgtgccttatattttgggatggagggagtattgttgagtgagaaaaaacaaatc

SEQ ID NO: 34074 - DNA, 459 bp, Oryza sativa
  unsure (1)..(459): unsure at all n locations
agcttncagctaccttgtataccagtacaaggtgatggaaggcatggagcagcagcgtaaggctctggagcgcatgcttccacttatccttagcgtcatccaagatacggaggagaagagaagtaagaaacccgaactaagcgcttggctcgatgaactcaagaaggtgtcctacgaggcaatcgatgtctttgacgagttcaagtatgaggcgctccgacgtgaagccaagaagaaggggcacgacgctacccttggcaaaggcattgtaagcctcttccctcatcgtaacccaattgtgtttcgttataggatgggtaagaaattgcaaaagattgtatatcagagatggactactctggactcataanacagcagcatgaaacaccaaagcagtggaggcaaactgattccatcatnggtgatactgagaagggtattattagccgatctagagat

SEQ ID NO: 34075 - DNA, 478 bp, Oryza sativa
  unsure (1)..(478): unsure at all n locations
tgcatattcttgtgtcattccgttatggagaatagcacactctattatcttctgncttcagaaggtcggaagctcaaaggtgaaatacatgaaacgactagcagagtgcatgcatgtgttagcaaatttatggaataaatgatgaaagaaacgaagctntatcgaccttacaactaaaccaaaataagtataatgccacactataaaacacttcttacctagcttgcttagattgataaatgtgtcctttgttgagccttccattgctgcacctaatatttacgcggaatgtgtatactatgacgagagaacaaatataacgtactggagcagcaacaatatatataatagcatatatatgatcatagaatgattaaantggtctaacatccagattaatgttctacttctcacttggcttgttctgtacacgtttatggatggaaccccacaaagacctcaacaattatacaatatc

SEQ ID NO: 34076 - DNA, 392 bp, Oryza sativa
ccatatgccgacgagaggggtcccagaccaacaataagttaagtcccaaaccatactgtgccaagaagcccacgggtcctccccgcaccaccccgacgaatccacatgtctctcggcatcaaggcctccctgataagctagttactcaaccaggggtgtcccattccacccatgtggtcgcacttgtcttatgtttggatgatattccaaggaaacgtgccttaagtgcaagagcgggataccgtacacccggtacgttccccggccgcggttttggaaatacatttagttcgcaagcaccgacccaagtgtcgggttgccaagacttttgtaaacccaattttacccaagttgttttagatattaatttgaggcggccgtcgtactccact

SEQ ID NO: 34077 - DNA, 428 bp, Oryza sativa
  unsure (1)..(428): unsure at all n locations
ctgcgcgcggcgatgtcgtccgcctagtcgacgatgtcgcgcccatccgggcactccggcgtgctgccggtgaacgctactgccggatgcggcgactgctgtgtgcctctcgccgacaagatgaagatcttcaagaccgacaacttcgaccccgacgcgtacgtgcagtccaagtgccacgccatgaacgagaaggtaaatggattggtccactcgtgatacggtgaggaaactggagtggagaattntggtcggaagtcacacgcgctttgctgtctgtgtcagaagtgganggatcagtgccgagtttccatgcattgaacagcgaagtggaatgagcgtatatgatgttccttaatggaaacgggtgctgaactgaatgttatcggttgatttttatgtcaatacagtatgaacggtttttactc

SEQ ID NO: 34078 - DNA, 240 bp, Oryza sativa
  unsure (1)..(240): unsure at all n locations
agtccgcgagtcctncattccacgctcacagtcttctggttgttaatatggacctaattgtagcgcagagaaccaatattccatttgcaaattctcagatatctcaagaagtggcaaagtgaatcaagaattttctacttctacggattcttatcagcaatatttctcatcgagggcaatttgattgcattacgatggcggactatcttgagaatggatggcaagcaattaacaggagta

SEQ ID NO: 34079 - DNA, 435 bp, Oryza sativa
  unsure (1)..(435): unsure at all n locations
agctntaaggatatntgacatattgtgataacttatatctaatatacgtccaacatcgccctcctttatcatgatttcccagtctacactagcaaccattttctcccatgtatgaatattgtggtttcgcgaaaggaagcaacctanaaccactagagcaagtggcaagccattgcatttcttggagagttttttccccaccacctcaagttctgcgaattgcacatcatgtggaaatgccttcttctggaaaagttcccagctcttgtcttcgtctaataggtcaggggtatgaatttgcactttagttttaggatgttgtccaacttccatatcacgggtagtcagaattattctacttccatctcctttgtcaggatatactgatttgatcttgtcccaggtatctgctgtccagatgtcatccacaacaat

SEQ ID NO: 34080 - DNA, 435 bp, Oryza sativa
  unsure (1)..(435): unsure at all n locations
ctaaccaagggaggaagatggagaatcttatgaaggcttttcaacatgtttgcgccgccttcgagccactaagtgatgtatatggtgacagtggagatgaagataagggaaaagagtctccgatgtttgcttcatggcgtgtggtgaatctgacacagagtatgacaataatgatgtgagtgcgtctgaggaagctattaatattttgagtgcagataatacaaagtgtgagaagatgtataacaaatatgaatttatcattgaatctcttaagtctgaaatcgatanggtaacatctcttattcctatgatgatgatnggaaaatgtgaggtctaatgaatgagattcatanatagagatgtaatgctgacaagattgagaatcatctttcttgttgagtttgattgccacacgtctttgatgaatgtttacta

SEQ ID NO: 34081 - DNA, 465 bp, Oryza sativa
  unsure (1)..(465): unsure at all n locations
agctntatttgtttgtgaattaatccgggcgtcggctgctgctgtcgacgggccggccgggttggattgaaagcgacgactgcgacggcaaccggattggccatggaaatggatggatcatgcatggatgctcatgctcctgcaggtacagcagtagcaatccccagcatgcagatgatccaaaacggtcgtcgatcggtccatgcactcagacgcagcacacagcactgttgcatgcatcatattaacaattgagctggtgaagaatgaatggatgaagagatttgctcatgtccagcaaaaagtatctcgaggtaccgatatctgacggtaccaaatcgtttccgatcgttggacctaactgggtaggatgtgtattgttagatccaacgatcatatcctangatgtatatttgtagatccaacgatcatatcctgcccagatagattcaacaatcggaaatg

SEQ ID NO: 34082 - DNA, 243 bp, Oryza sativa
  unsure (1)..(243): unsure at all n locations
taattctgtgaatttttccntgtgatccatgtccgtgccttcgatgatggatggatctatcgattcaagcagcatttgtaattagttcgtggagtacagtatcagcaggtgtagtatggtactganatttatctcgatgatatgatatgatcatacattatgatgatatatggtgcggttagtttctcacaaaatttttccaaatacatcacatcgaattgttggagacatgcatgaagcatt

SEQ ID NO: 34083 - DNA, 410 bp, Oryza sativa
agcttatatttcagctgaattaagctcctagctgacgagttcttgaaacttgcagcagccatggctaaagagtatcctgcctgcaccaaagctcagcatctgcaagaatccatgaagcagctgctcacctacatactctgggtgagcgcgctctgcgtcgccttctacgtcctcggtgcgtggcaaaacaccacaatgcccaatccggctgcgagctcggcgatcaccaaggttggctgctacccggcggacggggggcagtactccgccgtgccgtcaatcaggtcggcctcgcaagagtcactcgacttcgaggcgcaccaccagctcagcctcgacgacacgggcaccgatgcggcagtgcagtcgttaccggcgtgcccgctcaacttcatctagtacacgccgtg

SEQ ID NO: 34084 - DNA, 396 bp, Oryza sativa
agcttgccttgctaatgacagcacctttctttctcgttcagtagttaatgcattgctgttgtcacaaccagtccatggattctaaccccaaggtagggatgaccgcatgctgagctttgatcccatccgatgacccaaggcaagaccctaagcttgtgtcttgacctttgtccagagggagggccccaagctcacccccacctaaagctggcaaaatgggtcatgctctatcgggctgagccaggcacgttgctacagtacccgccctaactcggcatatgcccacgagctactatgtcgtgccagcaccgtgttaacaccaaaatttggtaagattctattgacgaaaaattcaagctcggccgatagtgccagatctatgttagcaccaactaa

SEQ ID NO: 34085 - DNA, 461 bp, Oryza sativa
  unsure (1)..(461): unsure at all n locations
agctgctnggaaaagctccctccgtcttcttttcgaccaccgccccatcctcctaattgaaggaggttgtatgtntgctttcaagttgggggatgaaatgtagacttgcccctatagttgagggaggcaaatggacttttccctctcaaaaaagatataatggttttaatacgctctgtcccaaagtcccgatttgaagcccatgtatatattaaagatcaaacaacgattgcctgtttggcacatagcattctagagctggagctcaactaaacaatttcaactcaacctataagggagatgaaatgggttggagtgatgtgaaaaaataaactagagtggtgcacaagagttcggaccgctccgtagctctactgactccactcgtggagttatntaggagttgaaatcctgccaaacaaatcccatatagtctagtaaaacatattgaaaggaaacat

SEQ ID NO: 34086 - DNA, 362 bp, Oryza sativa
atgacatgattcagatatattatttgtctcatgatcaaagaaagatgagagagatatcatgcaagctagagctgatgtcatgagagacgcgacgcctcaacgcgatggaaaatgacattattgctatataatacaaagataaggtcgtagtctgttgcaatatgaattcttcaaaatctatttgtgtgtgtgtgtactaatatacaagatcccctaatactaggtctactgataccactatatggaaataatatatgtgtgtgttcttataagtattgtattgagggatataatgttcagcttatcatgcttgtctctctacccataaatttgtttataagactgttattactatctattac

SEQ ID NO: 34087 - DNA, 449 bp, Oryza sativa
  unsure (1)..(449): unsure at all n locations
agcttataatgtgccccttcaaacttttaatgatcttcttcctatcctgaagttcaacacaaagttaacggaatcttacatggaagccgaatacattntaattatgaggataatctccacactaagaaaaaaacagaggaaggactatgtaatgggtagtcatttggcatgctacttcagtgtcccataagaaaaggtatggagtcaacataaaataatagtctcagagaaaaaaaaatataacctacctttgcacttccatgcttgaggcaactaactcctatttttaatccttctctggtgttcataatccgaacaagaagtggctctgtcaacctttttttcttagctntcagtttcttttgtaattcaggggcaaccgatggctcatctccatcaatggcagatgatccttgtgtaagaaggggataaattgtcgaatcacatca

SEQ ID NO: 34088 - DNA, 350 bp, Oryza sativa
  unsure (1)..(350): unsure at all n locations
tggtaagcccgaatgcttagttagcgcagtgctcttcaagntctattatacatattgtacatcggaatttgtttattctcaccactcctttatatcactgcaggtcaacttatgttggacagaccacttgcaaacagtgctcatcattactgcaagaatttatgtgtgagaccaattgctgctcctttntcaacaaaagtgaatttcacggtagaaggcttgaacctattcagtgaatcctcaatgtactttgccagtttgcatctacagtttacatatgtgtgttcttgatggagacatatgctggatgttgcttaaacttacttggcatctaaagattgatcatctca

SEQ ID NO: 34089 - DNA, 375 bp, Oryza sativa
  unsure (1)..(375): unsure at all n locations
gagcttccggcggtggagtggaggaggatgacttggtggttatattaagagagagaggttggtaagcttacgggattgggtccgggaggcggtggaggagggcggcggaaggagaggaagaagcgcttggtggagtcggcggnnnccttgtntctatcctccccgcttgttcttccgcctgtttccccatcccgctcaatttcttccacacttctgctctctttgtctcgttctttgttcacgtaaccttcactccagaatagtctctgcgtgggtcttttgctctttgttttcctttcgtactggtgtgttgtcgtcttctatatcctattctacttctctgcttacttccgtctgtttgtgttaatttttcgc

SEQ ID NO: 34090 - DNA, 407 bp, Oryza sativa
agcttgctcggctgccacgctccggttctattcctcagtccaaggacctggacgttgtgcttccgctggccaccgcatttctcgccgctgcagagctagctgccgtcttcttccccgtgcggcggatgctccggttcaccaaggcgcaggaagattgtgaggatgaatttggaccgcaccggttcgcatactaggatttgttccgagcgacggatgggttcatggacagaaatatactgggtgtcggaggggttgggagagttcacagaggggtgctaccggaccccaatctggagattgcggtgaagagggtctcacatgattcaaggcgatgtatcatggatatcatctcggaagtagttagcattggccgacttcgacatcgcaacctcgtgctattactatgc

SEQ ID NO: 34091 - DNA, 455 bp, Oryza sativa
  unsure (1)..(455): unsure at all n locations
agctntcattcaacaatttagctctccccacagcatttcaggtatagccccttcggcccagccggaggggagtacaggtcatggtgcgcctagttggttgtcgtcgaatcagccgggtctgggggctttgccttggagtcaaggaccgtagttcgacttcaacaatattgctcaggcaccaaccgttccgccgcaagcaccaacactaggcttcgtggcaaaccaagcaccaaaccagtccgccatggcatggccccagccaacattcgacccatccatggcagctcaccaagcatcaccaatcggagctgggcagccgaacaccgtggcccaacctcacgcgcaggccgtgacttcgcctttcgccacaccgtatccgtagcaaggtgccgtgaacagggcagggggcgaaaaggtgctactgctgagtggggaaatcaagacccgtccatccc

SEQ ID NO: 34092 - DNA, 367 bp, Oryza sativa
  unsure (1)..(367): unsure at all n locations
gtcgtgacgcgtctcatgtgtngngacgatgctcatgtngtgngcagtcaccgagcatgggtaaagtgtacatccactacagtgtgagtaaaccaaatctattcaaatagccgtgctcacggttattgagcaccgggacgtgtattacacttggctagactctaaattcttaacttgtgtgggatgggatattgcatgatgatntttatgcttgtggagctacttnctgagagganggaaggtggacgacctcataataccatgacgactcaatggcgggaagatatccttgggatcacaatggatggtggacagaaccgtcgttgtttaatgtgaacactggtattaanaattgatcagtctatgc

SEQ ID NO: 34093 - DNA, 441 bp, Oryza sativa
  unsure (1)..(441): unsure at all n locations
agctntattgctatctctagaggtaacccactttgatgtaatgaaagtgaaggacccacagcaatgacagaacgccccgagtaatcgacccgtttcccaagcagagtttcgcgaaacctcccctctttaccttcaattacatctganagtgatttgtatactttattgtgaccatccctcgttggttgcccgcgggacccactatcaagaagtgtatccacggcttcttgtaccaatttttcctggcacattactaaatctgctggcgctaattcacttctttttaatagataggcaagattgttgttccgacggataactctcttataaagttcattaatatccgaagtcactactttatccccagacctataaacaatgggtcttaattcgggaggaagaactggtaataagcacaaaaccatccattctggttctaca

SEQ ID NO: 34094 - DNA, 384 bp, Oryza sativa
aaagtatgccgttcgcggtacataaaatactcagccagggctgctcccgtataatgagcgaggtattgtaatgtagcatgggaatccgccatttcagctactacaatagtgtattccatggccccctcttcatggaaagtagttactacttgagctacggaggatgctctttgaccgatagctacataaacacatattacatcttgccctttttgattgagaattgtatctgtagctactgctgttttgccggtttgtctgtccccaataattaactctcgctgaccgcgcccaatatgaatcatcgaatcgatagcaataagccccgtttgaaggtgttcatatacagaacgcctggaaatatacccggagcatgagattaat

SEQ ID NO: 34095 - DNA, 339 bp, Oryza sativa
  unsure (1)..(339): unsure at all n locations
atcctaagcgactgngctgcagcttgagggtggcgggcatcggagcattttttttgttttcaggggcaatctcgacggtgccctttgttggtctagtggcggtccgtcacgcttagcggcggtcgatccggtgctaaccttctcctggtcgagtgtgttggcgatgtcggcgtgtgggtggtggtatattttttcctttacctggttacgactcttcacggttgtaatcttgtatttttttcctgctctatcaatagaacttcgcactgtctcatgcgagtcgatcaaaataaaataagaaatgtgtacccctaaactctcacaaaccgtgcactggag

SEQ ID NO: 34096 - DNA, 469 bp, Oryza sativa
  unsure (1)..(469): unsure at all n locations
acccgaactcttctgtatactttctgactcctgattcctattctaattctattccaccagctagatactactaaactaaacctgagaggaatgagagagctcttgcttgaggtgtgtgagtgaaatgagaatgtgaagtccttttatatgcatgtatgacggttgtaactactgcgaaatgtctgaagtaccccgcaaccgccatcatgagaggatctggagtgtccctgccaaaccccacattcaacggtggagagggagttntgaccgaaccattggccggtccaaccttgcccaaaatcggcaggtggccctcttcatttgttcttctcgcagacttgtgaaatttggccaagtttgtcgtgtcaattctgagttcttggacattcatacataagtctatctcttgacatcgtctgattgattatcagttgtgngacgtcgattctcttaacttattgtattctct

SEQ ID NO: 34097 - DNA, 269 bp, Oryza sativa
cctcaatccctcctcgttcttgctgagaacgaggaaaattctgcgatgctgggggacgaagagctccagatgggaggggaaaggcgaagagctccgcccccgctgacgccggtggagacgccggtggcggcggcatgctcttgtcgacgggaaccgatatccaagactacgatccggcacggatgaatcggtggtgcattgaccccgaaatgatatgaaaaacaggcttacgtttctcttttaccgaatggcgtgggcatgctgctgac

SEQ ID NO: 34098 - DNA, 315 bp, Oryza sativa
  unsure (1)..(315): unsure at all n locations
ctcttgagccataggattatttgcatgtcttcggatggacgntagatcgacattcaacaatattgtgccaggccagaccagcccatcctactcagcctctgttacgtgaaacgttgttccgttggcccagcccataacgatgccacagccacgactcatcgtcttctattaactgcgccatgttctggtttctctttgaagtaaatcagtgacaagatactgcaaccacctacgcgaagatgatgtgccgtaattaacccaactaatactcttcataacctctgtcaaatcatcctataccaaccatcagtcacc

SEQ ID NO: 34099 - DNA, 463 bp, Oryza sativa
  unsure (1)..(463): unsure at all n locations
agcttgacggctnttcatcagttgcattgcactgctgcagcctgtgctgtccacatcgcgatcttgaccgggtgcagataagttactacaatcgccgtcttgccgaaagggagaaacgatgccatccaagcgaattcttcatgagataagcgggtgtgtttagttcgcgaaaagaagaattctgtaagtgtcacattggatgtttaactggatgttggaaatggttttccgacatgaatgaaaaaactaatttcataactcgtatggaaaccgcgagacaaatttattaagcataattaatctatcattagcacacgtgggttactgtagcactcatgggtaatcatggactaattagactcaaaagattcatctcgtgatttccatgcagaactgtgtaattagttttctttttatctatatttaatgctctatacatatgtctaanaattcgatgtgatgt

SEQ ID NO: 34100 - DNA, 310 bp, Oryza sativa
  unsure (1)..(310): unsure at all n locations
ctaagcttagcatgtgatgctgcagtctgcctcaacttaagtttactgtcgatacaatgattaggacangttcaaatttgacaaagattatgtggcaagtcatcttcaaacaaaactatggtcatcacagaattgccggaagctaaacttctaaaattatgctcgaaactgaaagatatcatggatctacttgatttataaaaaacaatggatgccactaaaaaggcccaagctaaatgtctaaattatggtgcaactgggaaccatctacatctattgatatgataaatggttaccatcataattgcca

SEQ ID NO: 34101 - DNA, 463 bp, Oryza sativa
  unsure (1)..(463): unsure at all n locations
agcttctggattntctttgaagttctccggctagttgtaaccagtcatgcactacccagttttcacaacaaaagtaaaaacaatcaaggttagcctgcaaaggaaaatgattatacagaggtaaatataaaatattagttcaggtaatctctattatgaatcttccccggcaacggtgccagaaatgcttgttggtatttcttaacgacattactagaaatataattcccagcaatggcgcagaaatactcctggtatattatggctacagagtttatccgcaagcgcacagatataccattgtagcatttcacccgagagtattccaagggtatcgtatttattttatcccgtgggaagatcatgtagagagaacttgactaataatttatatgctacttgtgataattatattattaagcaggggttaagataatctaagggtagagtgacacacaagcat

SEQ ID NO: 34102 - DNA, 426 bp, Oryza sativa
  unsure (1)..(426): unsure at all n locations
agctngattcacttggcacgaagtcaagatgtgtctttttggtctaatgcgccagtttcaagtactggtccgaataggcatgggttcgaatcccattcttgacaatatcttttttgaccttgggttgggttcgaatcccattcttgacattgatttttttcctttgcttaaatttaaccatttaaccgcggccaaaaattttaattttttttgctttgttttaaccacaccacggccaaaaattataaaatttttttgctttgttttaaccacggtcaaaattaacacggacaaaatttttttgctttgttttaaccacacccaattctcttcctttgtttaaatttaaccacaccatacaatattttntaataaattaaccatggataatttcttttgctctgttcaaatgtaaccacacccaat

SEQ ID NO: 34103 - DNA, 182 bp, Oryza sativa
cgcgtatctggcgcgcacggtgatcgcgggcatgtcgacgcctgagaggggccgcccgagcatggacacggtgagcaagaagtatatctgccccggccggagtatctcgccagcgccgatggccgtgacgtcaacgtctaagtatagcgcgtcggacctgcacaggaagagccggccggatt

SEQ ID NO: 34104 - DNA, 462 bp, Oryza sativa
  unsure (1)..(462): unsure at all n locations
agcttccctggatctgngaagtttctcttctctgtattgngatcgtttgatcgatttccttgatcgctacttatgggcgtgcgctcaaaggatacaaacagggattcgcaaacaaaaaggggaattcgtagtcactttttcctgtcgcgtaaaaaaaaggctttacgcgagagcaatagaggttgggatacatctatctcttctgagcaacctcttttggattcttaagaccacccttgcagtangataccgtctgctttgggttctttattatattatctccttcgagggatttttaggatcgttcangctatatttagtctattttggctnttactgtctccttttctcaaggaagtggttaaggacctcagaagatagaggagagcgccaggcgcagatttccggaatacttctacggggaatgctcattgaatgcgcattctccgtattatgccttga

SEQ ID NO: 34105 - DNA, 487 bp, Oryza sativa
  unsure (1)..(487): unsure at all n locations
gctgctgagtattgganacaagctatagcgcttactccgtgaaattatattgaagcacagaactggttgaagattacgaagcgccttgaatntgaataagaccactctcctttntcagaanatggnggtttggttggtgatccattaatcaaataaattaggtcggaagatcgaatcaagaatttcattatatctctttcctctgccttctattntatattatatttcataaggataaacgatagggtctagaatagaagtaataaagcgaataanaaggggcaatataaatattgctaatatatcaggaccatcttattaataattctaatgagttatcttggaatttggaatcgaataananaatctatattatgctcaaggaaagtagatatagatagggacttatactcttanaaaaaatagactagctntntgaaataaaaaaagggtttttggtacgtggagaaatcaagataaaaaagtc

SEQ ID NO: 34106 - DNA, 459 bp, Oryza sativa
  unsure (1)..(459): unsure at all n locations
agcttgggcgcaatgcaatatactatgcatgttgcaggttgctagctagggttagtgtgaatgagtgatctgaatgaggagacctcgcctgcaaccatcttatatggactcgctctctgctacgtgattccttgtgttggtgggcattcaagtctgcctgccaaatgagcaagacaggctgcagcattaatagaaactaaacacccctctcttacacacacacatacacagatgattggtgcacatatgtaggtgcagagatcgattaaaggcataatgcgtgcatcagatcgaccagaaaataaaagccagcataaactcttctcctctntactattttgattnttcttttctaactctaccaaataatccatcagcatgagtagttcagtacagcattattgttacaattcgcaagcaacgatgataatcagacgatagctatggtagccggagtat

SEQ ID NO: 34107 - DNA, 432 bp, Oryza sativa
  unsure (1)..(432): unsure at all n locations
gtggctggctgcagcatgtgcagctgatccggctgtgggaccatcgccacgcaccatatgaatggtatgatctggttcaacacctacaaaatataaggagtgtgagaagcaagaatagaattatgctcgataagtcagaaatntgaacagcgggccatcatatctacataaacaaagaatattccaatatctgatgtaatcatatacaagagaattacaaatgaatacttctaaagaattcacatgtgagagactaatgaagatagtgcatcggatgactatgccatanatcctcatgtatggcatgttaacatacttatcgtgcacaatatttcgtattacatgagaattacttggtactctctcataaaagggtacaattttcccagaagatgtttctcttgtctgttaacgcatcattgattcaacgca

SEQ ID NO: 34108 - DNA, 447 bp, Oryza sativa
  unsure (1)..(447): unsure at all n locations
agcttgtatatgcttatttgttattatttcccacttcagttggggctgtatacatggctcttagaaaacaccaaccttctggtaatgcggcctccattagtatggtgcccctggattttccaagtcaagaacttgagaaggttaattctgtcaatccagtggtagcaacagatgttccacctgaggctgatgttgatgttgatatgagggaagtttactttctcatcatgcantttttatcacatggtccatttaagcggactgttggagaactctgcaatgagctccttgaacatcagctgctacctagaagatatcatgcttggtattcacgaggtggttttcatagcggtgaagataatgatgatggcatatcactccctttgggaatacctaaagtagttgagaggtaactatntatccgttcattccaatggtggttctgaa

SEQ ID NO: 34109 - DNA, 273 bp, Oryza sativa
  unsure (1)..(273): unsure at all n locations
ctgcacattgcccgatttcgcacatcagatttatagatgaatgtgatgaatccagaaattaattcaaggtgttagtaatggtgaacgtttatacctccattgggtgtccgtgttgggattcttggagaggctggcgagaacgcggcgcttgagctccgagatgtcgaatcatcggaatgagcgggcgactgcggcgcctggttcagacgccgcgtctgatcggtggcggtcangcgagaagagtttggcccgggatatcgtgccgatgtcacc

SEQ ID NO: 34110 - DNA, 447 bp, Oryza sativa
agcttcctagctcgtttccgaaacgagccattaccgatctagctcacgagccattagcgagctcgtttggctcagtatattagggtcatatacaaaaattttgcaagttttctaactatttatttattgaaaaaacaattttgattatcatattatctatttatgtgttgtgatgatatattaaagaaaaatattactttattacacattctatgtagaaaattgttgatcgatttctcttacacctacttgagatttacttgataccaggctcgcgagccagctcgagcccattaacgagccgagccaagctgcatttttagctcattgtttgtagtgagccaagccaagccgagctttcttttcaccaagctttcacaagtcgagccaagtcggcttgtttccacccctaatgccacttaatatattacaaaaagtgatcttgga

SEQ ID NO: 34111 - DNA, 450 bp, Oryza sativa
  unsure (1)..(450): unsure at all n locations
tggcgctcattatgtcttatttacggtcgttgcctgtggcaatggcgtgccgctgccttaactctgcttccttatctacttctgcttttggaatgtattccggaccgctcggtccgatgatctaagactatgcctgcgggcttatgatgtaataattcgcactagactctcgtgtatgtgcattcgatatttcagcatgaactcgtgtgtaccagactacttgatccatggaattggtactggttacacgattgattcctattataaatacgttggtccacacctatgatttgtggtttctcatctaaaatctttagacatgacatgtggtggttaagtttnttctataanagaaagtgatctatagtaaaataatcgcatcaataagtgaaaccgtggatgattaacttattctttttgattcaatttttcaagtgtaaatatatatgt

SEQ ID NO: 34112 - DNA, 433 bp, Oryza sativa
  unsure (1)..(433): unsure at all n locations
tctcgtacccgngatcctcttagtcacctgctgcatgcaagcttttcagctatttgtaattcgcgatttaatcacgaaacgtgctacttctaatgttaggattgctaaaaggaaaatttgggaaaaggaacccattgtatgggaaatacttcaagaagttatgaggggacatcctgtactgttgaatagagcacctaccctgcatagattangcatacaggctttccaacccactttagtagatgggcgtactatttgtttacacccattagtgtgtaaaggtttcaatgcagactttgatggggatcaaatggctgttcatctacctttatccttggaagctcangcggaagctcgtttacttatgttttctcatatgaatctcctatctcccgctattggggatcctatttgcgtaccaacccaagacatg

SEQ ID NO: 34113 - DNA, 488 bp, Oryza sativa
  unsure (1)..(488): unsure at all n locations
tatggctatctctagaggtaacccacattgatgtaatgatagtgaatgacccacaacaatgacagaacgccccgagttatcgacccgtttcccaagcagagtttcgcgaaacctcccctctttaccttcaattacatctganagtgatntgtatactttattgtgaccatccctcgttggttgcccgcgggacccactatcaagaagtgtatccacggcttcttgtaccaatttttcctggcacattactaaatctgctggcgctaattcacttctttgtaatagataggcaagaatgttgttccgacggataactctcttataaagttcattaatatccgaagtcactactttatccgcagacctataaacaatgggtcttaattctggaggaagaactggtataagcacaaaccatcattctggtctacattgttgaataaatgttcgcaattgatgcgttataaaaaactttctatcgcttttta

SEQ ID NO: 34114 - DNA, 432 bp, Oryza sativa
  unsure (1)..(432): unsure at all n locations
agctngattagctaactattatacactgtatattcagaagcttggttntgaagacactcagcatcaatgccattcctcctctttgaaggcaagaatatagttaatagttcctaagcactaacctgataaattattatcttcaggttgctgcgaaggtcattggtgaagttcaggcactaattattttcccagttgtgccatactttatcctcgctatcttttatatgttctggttttctgccacactccatctcttcagctctggtcaagttctccgaaatgactgcaatacagattgttgctcatatgatctgaagttgggcaaagtaaactgtgacaactgctgtgggtacagcatccattacacccctcatattggtattgccattcttttccactntattggctgttactgggcaacccaattcttta

SEQ ID NO: 34115 - DNA, 430 bp, Oryza sativa
  unsure (1)..(430): unsure at all n locations
ctcagcttgtcagaagatatggctagcactgatatctctgtgcacaatcggtgacgcaatctcttcatgcatgtatgcaagtcctttggcgattcctatgcatatagcagatcttatgctccaagtaaaatttgcaggttcgctattagaacctacagaacacatgataataggttaagcaacaaacgaaatcaatgcacttatatagaaaaatagtcattgtaacatatcaatattcatacccaacaatgcacggtcaaggctgctgtttctaaatactcgtataccaaaattcgattggttccttcaacacaacagccaattaattcaacaaggttgggatgcttcacattggtaataacatcaatttctgtcananattctcgaacgccctgcctggatcagcatatagaactttcaccgcaacatc

SEQ ID NO: 34116 - DNA, 439 bp, Oryza sativa
  unsure (1)..(439): unsure at all n locations
agcttgcccgcaggtacaccaaactcacacttatcggngttcagctntatgcgggcggagcggaggttctcaaaagtttccgccagatctgaaagtaaagtttcttggttgcgcgtttttacaaccaaatcatcaacataagcctcaacattacgtcctatttggctacccaaagaaattcgagtagtacgttgaaaagtaggacctgcattctttaacccgaagggcattgatgtataacaataggttcctacggnggtaatgaacgcagttttttcctcatcctccctagccacgcgaatctgatggtaaccagagtatgcgtctagaaaacacaaaaggtcgcaccccgcagtggagtcgacgatctgatctatgcgaggcaaggggtaaggatccttangacatgcctttgtaatgtcggtgtagtcgatgcaca

SEQ ID NO: 34117 - DNA, 243 bp, Oryza sativa
atcagcgcatcggctatagcattatctccactccattcgagaatacgacgacgcatcatatgagtaacagaatttgtatccacgtaaaataatctcggaagctagtctaacaaacagatattacgagcagtaataatattaataagtgaagtgatctactaacaaaattacatttgatgagcgactggccagtgaggaatatggtcacgtgccacatgttcttctcccatcccatcatcccat

SEQ ID NO: 34118 - DNA, 474 bp, Oryza sativa
  unsure (1)..(474): unsure at all n locations
agcttattgccagatgacttagactagacaggtgatcccactntntaatcaaatntgtttctgcaggcttctttggttggagccaattnttcccctaccaaaatcttggtagtgctaaaacattggaaaaattggacactaccaaattgggtagtattcaatttgaactattatggataaaaattggtagcaaatcaaacatacacttgctactattgaagttaccaaaatttttgtagggtaataaattggtatcaaaccaaacaagccatattttcttaggacattagtaaaaaggtacttcctccgtccacaaaacatgacactntaaggtttcaaaagcaaattagcttgaagaanaaatataatcaagttgtccttacttattaataatcagttgtcacttcactgagtgcaaggcattcaataagaataatacctatatatctctacacactaaagctatggccataa

SEQ ID NO: 34119 - DNA, 348 bp, Oryza sativa
  unsure (1)..(348): unsure at all n locations
tctatagcgtgattatangcttcgccctgttgcaattgagatnntcagtatggacgggtgtaacgagcttttagttttccacataaaggagaaggaggatgttttcaaaaatctgaccgccatgaaccttccacgaaatagcatgtttgtattcttaactctttgcaaatacatacactcagtaattaccatgcatgttcagtcatttctttagtataagatctgaatgtcaggtcctactatcaaggctatgtagttttcagagtngaaaccatctagatatgatcccttggcatatgttcacaacanggttatgtgtttctttgtctatcctgatanggttatcac

SEQ ID NO: 34120 - DNA, 428 bp, Oryza sativa
  unsure (1)..(428): unsure at all n locations
cacctgcggcatgcaagctcactgcagaagacacagagaaatgtcatttttttttctcgaggcatccttggtggacaggaaatctctaggttggttatgacttctatgatacatatgttntgtcacagaattttgtcatcgatagcttatcctttcatacaacagtactactagaatttacattgacacagagactgttcatggaattatactttgttaacccatccaattcttgcctgcgaattttcgctattagatagcatcagacagatacttgtgttacctcacataatacgtagataatcacgcgatcaaagcagctactagtacatggtagaatacaatgtcacgtagtacttgaaattacaagcattttcatgaagctgagaagcagcataatctgcaaggccaaactgtttggaatggac

SEQ ID NO: 34121 - DNA, 193 bp, Oryza sativa
  unsure (1)..(193): unsure at all n locations
cttgacagaacctaatgactactntaggaccacgangtttatatctgaaaaatagcatataactggttcatcatggggacactggcacactagtcaactaatggtttggaaccttccctcctatcacgcattattggattgacgacttatcgcacgattaattaaatattagcttaataaacttgaaaatgga

SEQ ID NO: 34122 - DNA, 460 bp, Oryza sativa
agcttgcgtgcatggcttgcaaggtgttggtgtacgtcctatgatcatagatgttcggcgcgtggtcacgtgcatatgcgtgcatctatctcttgtgttctggatgtgcatgattctcttgatagaaggataacttgcaccatgtttactcggataggaagtatatataagaaccggcacctatgactttgggaaccattggtgtcggtttttacaataaactggtacggaagagtggttataggtattgattctaattttacactggaaaaatgtgaaaaaagcttcatagccatggtgttttgtggtagtgatagtttggcgacagattccctatatatacttcctgtccgagtaaacatggtgcaagttaggagtataactttattatcaattagcctatggttctaggtatgatctatgtggctatgtagtgctggaatctggatttactgacagc

SEQ ID NO: 34123 - DNA, 400 bp, Oryza sativa
  unsure (1)..(400): unsure at all n locations
tgtcgagctcttctcgtatggctnggttctgatctggtgcaaatctacgtagttnttgttttactagcttancatcgggtcgcaccatgagtttatgctcgatcacctccctgttgactccttgcatgtcggacggctgccaagcatacacgtctgcattgtcgcggatgaatgtgatgagcacgagttcctatttctcatctagtgatgccccgatcttgacagtcttgtcggggttggtattggagagcggaacgatactgattgcgccatctggcttcagcgtcttggtgagtttgctcactttcttgggcngctcatctgtggcgggtgggtggtgagtgtgctcgaccatgttgatgcttcacttgtcgcacttgcaccgcagcttcgcgttccc

SEQ ID NO: 34124 - DNA, 486 bp, Oryza sativa
  unsure (1)..(486): unsure at all n locations
gatccttaagtcacctgangcatgcaagcttgaaacagcggtcgtcacagttgtctgttccttgcaacaattggacaggcacgggataacatagtcatcggtattactttctgcgcaatcaatgaacaatgaccatcggtagcaaagttcttctgaaactaaccatcggtagcaaatgggcattgcaggctgtggctattattcacctctaaagtatctttactcaatataatactactgcatagtgatctatccaaactgtacccattctgagaagaaaaaaaaatccaccatgagaccttcccagtttccatgcagcagaagcagcagcaaatttcccatggatttacttgggtttgctgttgtgctattactgagtttagcctcttccaccagctcctgcanagatcatgagaagagcttcttcctccagttccttgccggcctctcggaggacggtggcctcgccgtgtcatggcagaatga

SEQ ID NO: 34125 - DNA, 425 bp, Oryza sativa
  unsure (1)..(425): unsure at all n locations
acaccacaatatgtgtggaataaaatccttcaatctctccctcatggggatcaactgaacattgccctatatcggatatttcctcttacagttaccaattgactactatttggtaaatgnttgccaggttactatttggtaaattctccattcgtttagtcctaaagcagagtcatagtccaggtctatgccctctaatgaattacttattctctttttcctagatggaggtatggcgtacatgcgtacagtcgatcaccgtgcttctaatctcagtaattccagcagctgcatttgagtaccttgtcacaatggatttgtgactgtgactggtactggcttgcgatatctttacagaatcaaagattgactcagtggtacattactctctttcttttatctgaacggttgctacctactaacag

SEQ ID NO: 34126 - DNA, 446 bp, Oryza sativa
agcttgcatacaattgatgataccgcaactttcgctacacctttctgagatggagctgatggccgtcctctgattgcgagtatatcacaacgtcatcgaagaataccacctcaaacttatgctagtgttccatgaacactctgttcattgagttcatgaagaaggcatgtgcattggttaaaccgaacgacatcaccgtgaattcatacagcccgtatcgcgcggtgaatgcgcgcttcggaatatcttcttcacgaatacgtaattggcgatatccggaacgacaatcaatcttggagaatacagtggcacctttaagctgatcgaacagatcatggatccggggaagacggtacttgattatgatggaaacttcatcgagagctctgtagtcgacgcacattctcttcgtcttcgctttcttctctacaaaaatgacaagagca

SEQ ID NO: 34127 - DNA, 445 bp, Oryza sativa
taagcttatactgctgatgtgtttctaactgacacctcctagcttgttctattacacgacttatgaaaccttaacaagacttttcaaaaacttctcctaagtgaatgcatgatatgagacttgtacttactcctcaacatggagctaatttctaccttgcatccattcttacactataccagcgggtatgatggcctattgtagataacactgtcatgatgtcagtgcttcttatttctcgacttcttggatctcttcatatataacctttagacacctgcaatgacagcgtggagcttatctgctacacgttgcaaccttgtgacagatagacactgctcaccatttgtctgaagaacccaccatatgtacaaagaaacacagtggctgcattctagctcaattactattataagaaatttattatgagcttatatatatttct

SEQ ID NO: 34128 - DNA, 468 bp, Oryza sativa
  unsure (1)..(468): unsure at all n locations
agcttgctcacccatgcgtgttgtggtattgtctacaaccactagtccagcaaaaatgtcagatcaattcacatgaatcaactgatgattatcaggagcaatggctgcagcggccatgcagacacggtgacgccatgcaaacagaaattattttcagttgagaacacgacgcaggcgccgttgtggaaacacagatatggcgatgagaattttactggaccgataaagatagattgagatatagcaaattctatggctatttggatggactttaaggataaaaaggtgggtgctaaccaccttaagtgaataaaaggcacacatttactntaatgaaatctaagggtcataatgatatgatttaatcaatcaacgctcggatttttctaattaacgtgagacctcctangaagtgcccaattagtagaaaatatagagtataaatagatagatggattgatagattga

SEQ ID NO: 34129 - DNA, 395 bp, Oryza sativa
  unsure (1)..(395): unsure at all n locations
ccctatcttgactgtcaacatcaagttttcttcttgccgttgtcagtcgngggctatcatcataataatggagtgtgattttttatcaattcaatttgcttacttggtttatcattgccttgtttggttnttctactcagtttgcgaggactgaaagtttttaatagcttctttgggttttaggctcaacaaagcttaacaaaaacttttaagaaatcaaaaacttggcatgactcatcaagcacagcatatatacaccagtattgtacaaattgagcctccatgcattacattcatgatcagtcagaatcagtcatttcatcatcagagtcatttgtactcggttggaggtcgttgttgcggaattgctctacgacatcactttgcaatttgtc

SEQ ID NO: 34130 - DNA, 464 bp, Oryza sativa
  unsure (1)..(464): unsure at all n locations
agcttgtgttagctntcattntgacatgaattctcgtttatntatacacatataggcaggagcagagggactgtactaattcgaaatggacaccaggagtactttaaacaagttggtgtgctaactagcctagctaactcctctcgaataaggcactcgcactgcctatgcttggctctgtgatgatctccttacattttaagcttggaaggcaccgggaatacgtcatgtgagggaactcgtggttgccgatctggctcctgctgagccgcggttggacgtggacgccgatgcgacccgccatccgtggataatgtctaacttgcaagtaccatttccagcaatccattcttcttcatcagcaaatcccagcgtttcgatcgtgttcctgagcatgcgctgcgttattgcagctttgtccacagtgcagccgcgtcaaagcccacactatacgtgcatccgga

SEQ ID NO: 34131 - DNA, 420 bp, Oryza sativa
  unsure (1)..(420): unsure at all n locations
catgcagttctgcacgctgctgaccttgtccaactacgaccaactgcatatcatgaaacttccncaatgcacttagtacgtgggaatcctccaagtatttcccatttgcgtaagttcggttgtgttgtatacataccgatctcaccaccacagcgtactgctatgggcccacacangaaagtggggatctatgtgggattcanatctccgttgatcataaagtatntagaacccttaacaggtgatctatntactgcccggttcgctgactctatctttgatgaagaacatttaccggcattatggggagacttcaagtaccagatagaatgccacgatattaattgggatgcccatggtattncagccacaaactcacgtactactgatactgatcttcaagttcagaaaaaatataca

SEQ ID NO: 34132 - DNA, 457 bp, Oryza sativa
  unsure (1)..(457): unsure at all n locations
agctntgaagaactgcactttatgttttctttatacattatttcattctattcgattccaatttggccaattcatatgatcgacatttttgtcaggaaataaacagcaagcaatgtatagttacttaccaaagtgatacatgtttgagagattctttccatatgttgggttcaagatatagaaaaatattgttcttatgtggcttaattattttgtatgagatactgccattttctttgaaaaaaccatggttttccggtcgatcgctcctaaaatatagcggaacggtttattttgtacaaataaaaaattaaatccgtgactaggtcaattttaaaaaaaccattgtttttttgtcgatcgcttctagaatatagcggaacggtttattntggacaaataaaanattaagtccgcgactatgtcgatttaaaaaaccatagttttccggtcgatc

SEQ ID NO: 34133 - DNA, 257 bp, Oryza sativa
tatgtacaaaaaacttcgttaatatttctttcgcaatatcacaactgttatttgtgtgtttacttgggcgcaatctgtttacgtaacatggcagttaattaataatcgtaatcaaggctcatttccaggtttactgaaaatggttttaacttgctgtatggtgtgattagcaaagagaagttcgacacattccacatacctatctatgcacctatggaatatgaattatatgggataattgaagatgaaggctcatt

SEQ ID NO: 34134 - DNA, 461 bp, Oryza sativa
  unsure (1)..(461): unsure at all n locations
agctntattttagccattgcttttagttcttctaagaacacatctataaaagttgtatttacaaattacttttcatttgcagatatgaagtttcgcttattccgcgaataagcgaaataatggctccgatagatgacaccattatcaaagttcaaaaattttcatgactttctgcttgaactttaaaacctctatgttaaattagtcttagtgcttccaccctagtaaacaacgattcacaaatttcaaaaaatgttgagatataagttataatgcataaatatatcccaccatttatcattgcaaaatatgacatatagaaagagaaatgaataagaaaaatactcttagagaataagacgaaccatttttaataattcgaggtgtaaaatgagtcaagaaattggttagactccagcgaatagggttaacccggaagtgatatnggtggagtcgcttcg

SEQ ID NO: 34135 - DNA, 449 bp, Oryza sativa
  unsure (1)..(449): unsure at all n locations
ctattcctgatgatgctatgtggtgaaaganaaatgtgccatgggcgtggttgttaattccatgatagcaggatgctatttatataagttacatgtgcatatgcttatcctcctttttctgtgtagcctttcttttcttcaacaaaattaattcaaatttgatgtagcaaatcgtaaatttagcatctacgtcggtctaatatctgcttgaattaaagaatggtcattttcattccccaaaattatttcattgcattacttaaccccttaaatcattgttagcttattgtacaccagaccattaataatgcttaaccccttataccattgttggcttattgtaccctcaactattgaaaatggtccactcgacttnctaataatatgtatctgtctttntctctcctcatataagataggatactgtaagtcgtaacatttacaactat

SEQ ID NO: 34136 - DNA, 444 bp, Oryza sativa
agcttactactataccagtgttaatcttgccatacatccataaggattttgagatctattgtgatgcctctcgacaaggattaggatgtgttcttatgcaagaaggtaaagtagtagcttatgcttcaagacaactaagaccccatgaagataattacccaactcatgatttagagttagcagcagtcgtacatgcgttgaagatttggcgacactacttaattgggaatcattgtaagatctataccgatcataagagtttgaaatatacatttacccacacagatcttaatcttcagcaaagaagatggttagaattaattaaggattataatttggaaattctataccatcccagaaaagctaacgttgttgctgatgctttaagtcaaaaagcttattgcaatttacaacaagatataatatcagaacaattaccagcgg

SEQ ID NO: 34137 - DNA, 368 bp, Oryza sativa
atatttgtctgtctaatatcttagttgtatggtgtcatagtattagcacgaatatcttagatttacctcattggctaagctataaatatatataatacttgtcttacagtacttgtaaacataagtgatttatactgtctcggctcactgtccgatctatcccaatcgcttagtttagacatatttttagaaaaagattatatatcattgatatctgcagccaatcaagtagatctaattctatcttggttaagtatttattgccgatctggttcacatcacatcggcctgatatcaaatgaaacatcatcggctacacagccgatcggctatcatttgcggacctgaatagtcttcttttatttctt

SEQ ID NO: 34138 - DNA, 446 bp, Oryza sativa
agcttatgacagatctatgtgtttcttattttacttacccaacaactatgatgctaactccatgtaaataactaataagccgtgggtctaattatatttggacatagatgaattaatggcactaatattctcatatatatccatggatttcaaacatcgattatacttaattgatgtggttgctatactgacagaatatattaaagataagtattctactgtacaatatctatttttatttattggcacactatataggttaactattatctaatcatttgatattaattaactgataattataaatatattgcgttaaatagcgaattatatattattggaaagctcatgaatctagtagacattatgttcatgtttcacttagatccgagtataagtcgaatgcgaatagcgattgcattttattaactgtactatctgcgaac

SEQ ID NO: 34139 - DNA, 337 bp, Oryza sativa
  unsure (1)..(337): unsure at all n locations
atggatgtatgtattattatactgaataaccagctggtgatagtgcagatacacatccatatgatgagtattatgtccatgcacggcactgttatatatatatttactatctactttgttacagattaaaataaattatacatgtgctaatattgcttanaagaaaattaatttgtactttgtatgaataatntcattcctttagatgtctttgcataatatcaaataagatagaatcatactacgactatgtttcgtatattaaaacanatgaagtagttaataataaagtatctatacaacaaaattaatgtggtggcagatactattgctttct

SEQ ID NO: 34140 - DNA, 449 bp, Oryza sativa
  unsure (1)..(449): unsure at all n locations
agcttctcatcagtgtttctcttcatcactttctcctagnccataccttaacgcgctcaacatttcttcgcttttaacatgatgtgacggcggtgtgtttttctgccatttttcgccttaggtcttcgcaattccaacatcaacagccagcttacggtaacttctctcacgggcaagaaagattagcatatagcatcataaagaactaataacatcgcatttcttccaacagatttgatgactcctttttaccctttccactttgcagttgcagcgctgaaacaagcaactgcgacggcttagctgaacgtaataacttaatcacatttccacacacactgttaacttgaactgactcagacaaggtgcacctcaccgctcaccgatctttatcgtttcgacgaataccaatcgaaaaccatataattntaatggtccattatgggatg

SEQ ID NO: 34141 - DNA, 402 bp, Oryza sativa
actactagtccattaatccgatatagttggattatcccgtagataagaaacacgggtggataaacatcaaactcatagctgataggcctatggattatggagctccatgtacaaattattttggtgatggctacatggatctactattcagtatgccaacagccgaccaaaatatctgatagcatccttatgagtctcgagatatttactccctctctccaataaaaaaaatcaaagtatttggtgatgtctggattcatatctagaatttattctttctatgacacagaataagtatgttccaacatcatctatagtactcatgtttcatacaaatgttccatcaaatgaaactgagtgtataaatgcaaaattgatattactgttggacctttgatatgc

SEQ ID NO: 34142 - DNA, 465 bp, Oryza sativa
  unsure (1)..(465): unsure at all n locations
agcttacaatcaatccctttcacttctaatgatgctttttntattgagaaagatgctgcccgtatatttacacctgcagtttttaagaagttgaagttggttattgctaagtcgatggattgggaggtgatagattgtatagaagaggacaacttggttaagtatgttatttccatgaaaggtgattctgagatgctacaaatcttgaattgtacatatgtggaatcaacaatgaagagcataaattgcacatgcagaaaaatggatcgtgaatgcctcccatgtgagcatatggttgcaattatgcatcatttgaagctcgatgccattcctgaagcatgcatagtgcgtaggtggacaattaaagcgaaacacatgtttccttctgataggtatggcgaagtatatacatggtcaaaccagatggagagatatcacaggttgcgtagcatgggcacggaagtg

SEQ ID NO: 34143 - DNA, 448 bp, Oryza sativa
  unsure (1)..(448): unsure at all n locations
atgtactctgcatattgcgctacataagttcactcccttttcctttgtggaaaaaagagtgggacatcgttgtacccattgtcttcatagttgcaatgtcttgaaaaatctagtttcgtttgttggacaagcaaacaatgaattatgtaatcagtgttccttcttaactgcagacttgatgatgaattggaagcaccaaatgtatggagggcgtcactttatccccatcgtaatagtgagtcgagtagcgagtctagtgactgtttccagttcctcagtactggcagttgtgctaacgtgtggcgttcctcaaaagtgatatatcaacttatgatnngtctttacacatnnctactgcacagaagtaatcaaagattatttctagcatatagtgtgcgatgaagctgtattatctgttcaaataccagtcatatgtcagtgctgttta

SEQ ID NO: 34144 - DNA, 470 bp, Oryza sativa
  unsure (1)..(470): unsure at all n locations
agcttcacatattnntgttgcgttatcagagatatgttcttatcataaggtcattactgcgcgatgtagagtttgatgttgcaatttcatagcatgaatttctctgattcttcctggtatatgtagccattaggttataaattcaatataagtggagaagagctggtgagatgcaccatgttaaatgtatggtgcaaggtggggccaaattggttcctccttcagctcttttctttacataattgctgcctgcctgagttttaagggggcagaaaaaatctggttgtagttggtagtaaggtactaagtttccaaccgttttttcctgcaatctggactaatgaactgtaatgttgaccttctacttcataatgaagcaggggggtactttggaagtcatatcaacaataggcagaagattcattgagatttgtagaattaggcgactaacagaatattctggatccact

SEQ ID NO: 34145 - DNA, 462 bp, Oryza sativa
  unsure (1)..(462): unsure at all n locations
agcttgtgcatatggctacaagntaatgcatcttctgtcagcaatgggtatcagcaacataagttctataccattgttatgctaagtttcgctgtatggtttacagtaagtgattatttgttagatgcctcanaagggtgaaagattgagtaaagtacattagcatgccatattgccatgaatactatattcttctgttaagatttcaatgaatcagcaaaaaccgcgtcaggcaggccaaataacttttattgaaatgttctctacagcacttcaatcaatgataagacatataaggtcattgtaaaataaaaacatgcttacctcataagtgacagcccacttcccagtgcgcaatggcttgtggtgataattcatgtttcccacatagagacttttacctcttggtattntcttaagttcatccttcactgattcaagtctaacanaattatcgtcatc

SEQ ID NO: 34146 - DNA, 349 bp, Oryza sativa
  unsure (1)..(349): unsure at all n locations
acatacctatcacaacgtctggagcatnctaagcggtctcagcttgaatgtggttcacccggcctcgaccaaagtttgtggacgcacgagataccttgccacttgcctgacagctatgacgagactgagctgccgctggagtatgagttctggcagtgctgccattagcatgccctaagctggtgttggtatgattctgatggcactgtctggcatagtgacccatctggttgaccggaaacactgaactgctgacggtccctgtggtgacttgaaagatgtaacactagctcggcgcagtattggcactatgggcacgctgctgtggctgacgtgcctgacgggtcat

SEQ ID NO: 34147 - DNA, 465 bp, Oryza sativa
  unsure (1)..(465): unsure at all n locations
agcttgaagtggcgaatggttgctgggatctgagaggagagcgagcaaacgcggtatatgttgaacgcacgcggccaaagaaagaaaatcgaggacgaaggcgaccgcacagcttattagtaccattatgcaggcagattagcgccaattattactctattattattattattattattattattattattattattattattattattattagtgatttcattatctggtgtttaatgctcttgtttcttagtctaatcacaatgtatggaatcacaggctcacagccaaccaacccaccctccccctggaggcttgtggacagatttacaccaacctttgtacttccgcccatcttctctttattctttnttattcgtctccggttgctggcatctcanaataatactcctcctcctactgctactgtgcatactactatgcataacatcgtttcattccaag

SEQ ID NO: 34148 - DNA, 284 bp, Oryza sativa
ttacttatgcagcaagctcttaaaagatactgggctgaaagatgacaccacctgtgtggtggttgatatcatcctatccgattattgcttgacatcgcggcagttgtcccaatatagaaaccagtgcaagttcaagtgatcaagtttcttcgttcttgtataaggtgacactgttcaattggaaagcctgcctctttcggctctgtgggagaaatatttgaaggatctgggatatgctgcaagaataggtatgctctagttactgtcgctatgatcgatcatgt

SEQ ID NO: 34149 - DNA, 471 bp, Oryza sativa
  unsure (1)..(471): unsure at all n locations
agcttgtacaaaatgaaacacctnctgaactgatgatgctttggacaagctcggatccagacgccaagcatttccgtgataacaatagatacttcaacggccacttctcattcactacccttggtgtaagccttgacaaagcctttgcaaacatgagttcgggcgtgtacactnttcgggctcatggtcagatatatcataatatacattctttcagtcctagagattctggtccagagcatctcgagttgtatttctacgatgacgatccaacattgagtcatagattccaacgttcccctagccttgaccaggatgtgattaggactgttgcagacgtccttcggaacaacccgtactcggagacatttagaagtctatggcaggctgaagacctcgcgaattatcgcgtgacactaaatctggatcataggttgcaccananggcgtacaatgtgccggtgacaactg

SEQ ID NO: 34150 - DNA, 328 bp, Oryza sativa
tcgctcatcgctgggttagatggataatagtttgtataaccacggtgagatactctgttaaattcaatggaactctgctctctacttttgctacatcacgcggtctttgtcatggagtcccgttatccccctttctgtttctgttcatagccgatggactaccattgctgttggaagacaaagtggctcatggagctctctcgccagtgaagaattgtatgcatgccccggtgatttcacaccttgcttttgctgatgacacgctttttgttttcatagctgataacgttcaagcccaggctgtcaaagaagtcattactgattatgc

SEQ ID NO: 34151 - DNA, 461 bp, Oryza sativa
  unsure (1)..(461): unsure at all n locations
agctntgagtntaaggtaatcagcatattgttgatttatcataccacanaaaagattcatgaaaagcatgcaaccatgtggtccacaaataagttatttataactccaaagcatgtcactttaaatatcaagcaacaagacaaggatcagcatgtaaaggaactgtacattcaaaaatatattaaaaatgaaaaaaattacaaaaacgtacctctgacaggagcaccatccatcaactcaaactttgcaagagtttcagtctcaacatatgcactagagcctgctcctgttgattccctacgacgtacttctagttccatgttttttatctttattctgacaagaagaaagtagatcttcccaataatcacatccttgagatggtacctgaataagaataagaatgtttcaatgtaagcaaacgctgtggatgccacattgangaacatgtcagaacagac

SEQ ID NO: 34152 - DNA, 325 bp, Oryza sativa
  unsure (1)..(325): unsure at all n locations
tctgcagaaagttangtcataatgagagcctgtggtaaccttacttctgtggttgttggctttgatgcatcattctcacagctacacattgtcacctaatgctgataaacaagccattcagtcgatacatgtggaaagatgccattaattatcagaaggtactactatatattcaagtgaacgtactacaggtanagaaaattagcagttatctctgataagtgaaaacaaatcccagaaccctgtatgatcatgaatgactatatatatgaacccactgatgacatatgcatgattatcactactagctagtatacagtatatc

SEQ ID NO: 34153 - DNA, 480 bp, Oryza sativa
  unsure (1)..(480): unsure at all n locations
gatccttaagcaccgcggctgcagctgaataatagggaaaaatttatgtgntttcaaatattncaaccaaacaaaataatttatattaaaggagaaatcaaaatctttgctgcttctcaccttatccaccgagcagtggttgtcaggtataaactttgttgtcatgaatttttccttagtagttccagagggaacatgaacttgattgatgccaatgcttgtgatgagttcattcacccatgcgaccagtaataactccacaaggtattctcgatgcattatgaaattacgtttcactggagctacttcagctgtaaattacataaatatagtttggatgcaaacactcaaattgtaattntgtgagagtaaacagttcagaccaacttcagtgaagtctgtctaatttacaagcaaactgagcaagacattaactactgagttccactaagatatgccactgaaacacccatatcgctc

SEQ ID NO: 34154 - DNA, 387 bp, Oryza sativa
  unsure (1)..(387): unsure at all n locations
gtggtctttggaacgaccaccgggttcgctagccactccggatggatgacctctcggatgaagccgggcctgcaggagatgcgttaccttctcgcggatgaatgcttgccgctccatggcctggcgccgtaccttctaccggatgggtcgggcgttcggccgcacggtgatgcggtgctcaatcacctccctgtggaccccgggcatgttcgactgcttctgtcacgcgctgaagttcccctcccttgctttatattaataaaataaatcgcctcangtagttggtaaaaattaacctacagttgaatccttaattaataaatgcatttaataatcgaattcggcgcggtggaattttctttagttcccatgctctaatatttaata

SEQ ID NO: 34155 - DNA, 441 bp, Oryza sativa
  unsure (1)..(441): unsure at all n locations
agcttccaagtccctccttacctccctcccgctcctccccgcacgtccctccttgctccacgctgctccaccaggctcccacatctccctgccaagctccccgtccaactagttgcttccactcatatgcggcggnggagggttatgagcagttagatccgatgccagagacggctggggtggaagtgtttggcttgatagcggcgtttatggaagcggcggaaaattttagggttntgattcaagagacacgagccaaggcggaggaggcgtgtcggcttgcggttgtgatccaaaaggcggtggcggcggcgactgcggcggtggcggaggtttgcaagaaggcggtgggtggaggaagttgggatgcggcagcggcggtggaggtttgcaagaatggggcggcggtgggtggatggcattgggatgcggcggcggcgt

SEQ ID NO: 34156 - DNA, 210 bp, Oryza sativa
aaacacatgtttgatcattcgtcttatttaacaattttatgcaaatgtataagatacaaatcatgcttaaattacgttgagtgataaaacaactcacaacaaaataaattattattacgaatggtcaaacgtctgacaaaatgtcaacggcgtcatctattaaaaaacataatgtagtactccctccgtcccataatataagggattttg

SEQ ID NO: 34157 - DNA, 454 bp, Oryza sativa
  unsure (1)..(454): unsure at all n locations
agctnntganaaatgaggttcataagattgctctcccatcagagggaagacattggcagactttattggataactcattaatccgacagaataaattgtactgttcagagccacgcaatgaagaatcaactgaacaatcatggagctctacagacagtgagtctgagaatgctgtgtgcttttcctccagtggcagcattgctgatttgcatgcatcggnttcaactgacaccagtgactcaagtgaccactctatgtcatcttcgtgcctatcagtaaatgatcgatggaagatgactcttaagaaggtaaatattggaaaatgttcttttagaagaactcttcaattgtgataacattcttgacaggaaaagtgtagctagtattagtatgtgtcttctctattcaaatagccatatctatttagcttttattattgctttccttcaaatct

SEQ ID NO: 34158 - DNA, 378 bp, Oryza sativa
catttacgtgagatgacactgtcacaaatagatcgtcacgtaacaacccaaccacacattcgacgcctgcctcgatcgaatgacggctaaccgcgttgctcacttgctctgcagctcacatgttatggcatactaattaaatttctcaacacctaattttcccaacgaatgcgatggattataacatattaaccctgcaatcgtatgctgaataatggattaacgaatccatcatccgtaccacgcgatatgcgaatatattcatatcattgtgccaagaacaacactaatatgtcttgtccatttccattccatttccattgaagacaacatatgtatcattgctctccatctctactaactcctaatattcattga

SEQ ID NO: 34159 - DNA, 203 bp, Oryza sativa
  unsure (1)..(203): unsure at all n locations
cgtgtcgacttatgagcacatcagccgattccttgctcaatgcggtgaagcatcggctgtagacgctttgaaagttaggttattcacggtatctctgtctggatcagctnttacttggttttcttctttgccatatgggtcgatcaatagttgggtcgatttggagaagcaatttcacagctatttctacagtggggttcatg

SEQ ID NO: 34160 - DNA, 430 bp, Oryza sativa
  unsure (1)..(430): unsure at all n locations
agcttagatttcgngagtgtacattgtgtgtgagtggntgattctagnttgtttgagtgcttgttgttaactttgtaaatatttgttgagatttatccccaagaaatcttttttgcatttgttactcttggtggtggaggacacctatagacggctagagtcaacctcgagacaccgatttgtttgtagtgtgccgagggagtttgtgaaggtcggatcgcacctccgaaaggaaagagatacccttagtggaaggcgaagtgcatttgtgcaacctcatgaggatagaactggaaaagacctggctcattgtgggctcctcaacggagagtagaacccccctcagggatttgaacttcgggaacacaacatcttataagaaccccggtgatatctctctctcgctcatctangctttgtatttggtgcc

SEQ ID NO: 34161 - DNA, 245 bp, Oryza sativa
tctttctacataacatgtagtcatttggaggttatcagtgtcatcaagtaaactgaagtcccttttctatcacaagtttcagaaaagctataatgcctgctggataggaaggaacataagattacatgttgactctacacatttggtgattatctatgtgagaagcttcaactactactaatccctagctgataactccaaatctttcctcgcctcacagggaataagaacaccgtatcatgatc

SEQ ID NO: 34162 - DNA, 458 bp, Oryza sativa
  unsure (1)..(458): unsure at all n locations
agctntagacaatntanaaacatggttgggaaaatcaggaattttaaaacctggtggttctttggcataaacttcctcctgtataaaacaatntagaaaagcacttttaacatccatttgatacaatttaaaaccttttgaagcagcaagagccaacaaaagtctaattgcctcaattctagcaataggagcaaaagtttcatcaaaatccaaaccctccacctgagtaaaaccttgagcaacaagtctagctttatttctcacaatcaaaccatcctcattntgtttatttttgaaaacccacttggttccaataatattatgtccagaaggtggttcaactaaagtccaaactttgtttctctcanaattttcaagttcttcatgcatggcattaatccacgattcatcagttaatgcatgtgaaacatctttgggttcaaaagaagcaacaaatg

SEQ ID NO: 34163 - DNA, 350 bp, Oryza sativa
gatgtacatatgtccagtgttatcaagttggagagcttctcaatagaatctgtgaggagcttcacattggaatcccgcaagccaagatgtctgatgttgaatagatcacctatggcatctggaacattgtcgatgggtagcccgcttaactcaagtactgacatatatctacacttctcggatagcagaagtagcagagtggatgatggcatggctttatccaatgcgatgaaagatcgaatgcggcattcacttgaaattacttgattaatatacttgtctaatctgtgtattaccatccgtcgttcatcattctcctcaagaaactcgaaacgcttattctcacaact

SEQ ID NO: 34164 - DNA, 486 bp, Oryza sativa
  unsure (1)..(486): unsure at all n locations
ttaagtcacctgcggcatgcaagcttgtccagatttgaatagcatatgcttatttttctatatcagaattntgggaagtcaatgaaaatatactaggttcagatcataagatatgttcaagaggaccaacaaaagttaacttagtttgacaagaacattggaatttccctacacaaatgtactagcaactagtaactacaatgtttcatatttttaattacataagacctgtccatgtggntaacaatctttgtttatttggaaaaactgatttagatatcatatctagttagtacagtaacataactgaaaaactgaagttgcacaagtaactccggcatacatttctgaaggactgaaacattcctttccactcaatcccatgttnttctaactcggtacagatggaatctgacggcgagtggaccaaggccgaaccctcagggctcataccattatggccttgtcaacactacaagaaccatc

SEQ ID NO: 34165 - DNA, 409 bp, Oryza sativa
  unsure (1)..(409): unsure at all n locations
gcttgcccgcatgcacgccgaacacgcacttatctgttgttatctntatgcgggcggagcggagactttcgaaagtttccgctagatccgagagtaaggtctcttggttgcgcgtcttcacaaccaagtcatcaacatatgcctcaacattgcgtcctatctggctacccaaagaaattcgagtagtacgttgaaaagtaggacctgtattctttaacccgaaaggcattgtcagataacaataagttcctatgggggtaatgaatgcagttttttcctcatcctccctagccatgcgaatctgatgataaccagagtatgcatctagaaaacacataaggtcgcaccccgcggtggagtcgacaatctgatctatgcgtggcanggggtaacggtccttatgacatgc

SEQ ID NO: 34166 - DNA, 240 bp, Oryza sativa
catatcaagcacatggtcaactttctcagtcccgcatagaacgcctatgagaccatggtataactttgcagtcggaagcaccccactttcttgcatgtcatctacaagcctgttccctctaataattctccctgttaaatacatgaccctgaccacaagatagtaactaacccattcaggggagcacccttgctttccttctctcatcaagtagaagattctgtatgattctttcactct

SEQ ID NO: 34167 - DNA, 463 bp, Oryza sativa
  unsure (1)..(463): unsure at all n locations
agcttctagatgtntggtctgatggaagacatctcttatggcctgatgagtttctggtcaagaaatcaaatcaattttgttattttccagtgcatgcatgattgagtagttggttagggatgagcaagcttatgaaatatgtggttgttttatcttgttcagcattatactaattgtgtatatatatgtaattaacttattgtcatatgcacaagaatacgtaacagttagacaggataagatttcttcttcccactgccttaatattattgtttttggttcactaataaaagtttttttttctagtcttcctttggtttctttccaattntaatgttntatgttgggtgtaggtatgcattcctcattgtatcctacaagccacacctganagcaataggtgcaaaatctgataacgttacaggagtacatcatatgacaacgcaatctaactaccattgtg

SEQ ID NO: 34168 - DNA, 345 bp, Oryza sativa
taagctattagtgacgctgatgatctcccattgacaaacattcacatcaactgctggtggagttgcagaccataaaaggtcattcagacaactttctatgtactatcagacaacttcaataacaatgatgatgttagcgaatcacattcttttgggtactaacccacacttctgcacaaaattgtgcgtgcacctcgtaagccttatgcctccaatccctgccaatggtggtatacagcacatgatcatttgcagtagaaagaaatcactggacccaacggcacgaggaatacaagggttatatctagctatattatcaattatacgcaatcttatatgtgatta

SEQ ID NO: 34169 - DNA, 463 bp, Oryza sativa
  unsure (1)..(463): unsure at all n locations
agcttcctctgactctcgatctctgtcgatgttttttctttacgccggcaattaaactcgccgtccgtccggccggcaggcatgcggcggcgacggcgaccgaactccaaatttcaattccggcacggtttcaatatttccatcggatttgaatcgcattccccctcgttttccttttcctacacagtagcatcttagtacattttgtactctagcccctctcgtttgactcgattcccctgttctacggtgacgcaccattgtcgcacacgtagggggtagtactaagcactagtttttgacgaggacggtggttaacaagtcagggtccgtctaatagagccgaggccgtacttgctattcctttgcatgattnttgggttaacaagtcanggtctaatagtctttaggctatgttcttcccctcttttttcaactcacttctctcgttntccttgtacac

SEQ ID NO: 34170 - DNA, 179 bp, Oryza sativa
ttgcactttttcgcatggttgatactccgtcgtgcgccctgctcgctgcgccttcccgcttcatgtaccctctctggtacgccgctacagctccaccactgttatgtttcaatgtggccacatttattgccactactcactgaattctgaagtgtgttctacatattgactgaattctg

SEQ ID NO: 34171 - DNA, 475 bp, Oryza sativa
  unsure (1)..(475): unsure at all n locations
agcttgtgcaagttggttcgcatgcaaagcttgttatcaattagcattcaatccgntagtttcatgcttattaatatcaacactgagaagtttctagtgcaaggtttggcaatatatgattgctgttttcgatgtcactgctaaatgctatgtaatgaaatgctgtgatattttgctagttgtagaatggtgttatagttttttaataattggatgttcagattgttctgctggatgaagatggtggagtgcttggcaacagatatctcaagtcaagtgaatctgttgaaagcgggatgaaataccagttgcctaattatcttatcgaagtttgtgagataagaaaacaaaagaatggttagttttcatttgtgtccactctgtagcttacgatactctgaaaatattcaaatggtagttttaaacatatattccttttttttctatatcacatcttattttactgcattaattg

SEQ ID NO: 34172 - DNA, 341 bp, Oryza sativa
  unsure (1)..(341): unsure at all n locations
ccacggcgagcgtcgagtctgtggaatgaggtacgacgacgacgaccttaccagcaacgacgtcttcctgattagcgtggagactgtgggatgaggcgtcgtccccatccaccaatgatctcaccgagcttggccaccatgtcctcttgatagcttcgccatcgtctcctcctatgcatgtgttgttgctccgtgctcanggctcaactctcggattgttgcagtttggtgtgtatgtntgttgcactttgaattattgggtgtttcattatcttttggttagatgttgcataagatgtgcaatggtttttctttgatgttccacacaacatgctctcgat

SEQ ID NO: 34173 - DNA, 461 bp, Oryza sativa
  unsure (1)..(461): unsure at all n locations
agcttggttcccatttcccgatcttttaccttctatttcgcggaaagcgccttttgaccaacccattcgtccggcacccgtcccggcccggcccggcccgcatccgaaacccagggaggacctatacatatatatgcggttggtcaggcactccggtcgtcttcctcgtgacctcgtcaagtcctcagctctcgtttggcatccaaagaagaattaggtgttattactagggtttagagaggtgttgattactanggtttagagagggaaaggaagggaagggctatggcggcgccgtggtgggactcggagtacaaggaccgctcctcgctggagtaccgcgtgtacgtcggcaacctgccctactccgtcgacgagcaaaccctcatggactacttcgccgactacggcgccatcagtgccgaggtgccttgctcttgctcctgcttacctttccgttc

SEQ ID NO: 34174 - DNA, 290 bp, Oryza sativa
atcaagccgaagatgcgcgatgcggaacgatgaagtcgaagcatagtcgatgcctatgtctgatacgtgccgatgtctacgatgcggctggcgacgcaaacccgttcactgatcgggattaaagaaagatatacacggatacaagcagcatcagcaatgcaagtgcaattaatatatagcccaactagcaacacatgggccaagttcattaatgcaccacatgtcacacgggcaagtcaaccagcctaccaatcatctgccatcgtccattaccacaacgagagagacaa

SEQ ID NO: 34175 - DNA, 460 bp, Oryza sativa
agcttcagtttcatgtgttagagtattttctattttaagaactttagagggtaaccaaaggagagataatgaatgaatgcaatagagttaaatagggcactatgtatgcatatgaccagataacaacgaatgaaataccacaaatgcgtaatgcttttagttttaggaggactaaacagcaactatggacagacctgaacattttcctaacagaagtgaaggaatttgtttgaacagtacatataccatggcaattttctatattaagttattaacaactaattaacgccaaaggttttactcctaattgtagataagctatatagaaaatatcagtgtaaagtaagcatataccatttgtcatactacagcaagtgaaatagcaaaattagcaaatcaagtccgctccatgttaactgctctaagcgtaacttactttgtatttggcagccaatacatc

SEQ ID NO: 34176 - DNA, 420 bp, Oryza sativa
  unsure (1)..(420): unsure at all n locations
atatgaactgcccgattcttctgctcccgcatctcccactttcttatggtcccgaatcacgaaaccccaagcacttgttgtatcagtttcaaaaaaggcaccatcaacgcttcatctcacccaaaggaggatgttcccaggaactttgcacatcggggatctccggttcgtttcatcanggaaatttctgcaaccatcctttatactctgaatattacttcctccggcgctcttctttcctcctcagcattcaccttatgtcaagcattccaccaagtccagagtaagaacactttagtctgtctggtttctccccactttaggatgtgtttgcaacttcgagctgacccactgataattctaccggggtctcaaattacattctcaacatgctacatatgcattaaaacatgactatct

SEQ ID NO: 34177 - DNA, 453 bp, Oryza sativa
  unsure (1)..(453): unsure at all n locations
agcttcctatatcttgaaaagaattttgttttntgtttatgtaaaactttggctctaccatgtgccaatcacggtgcatagtttctggggaagaaaacgtatcattaaactgatgttttggccggtcatagactaaatgaatattgtaatctcttcattgtcggtgcatgattcaatattgctcgatgatgaaaaacgtgtgatccggtgattccttctgcacaattgtcggcttaagccaatatgtcctaattttcatataattattaagagaaaatttcagctgtcggtccttagattatttctttccagtttgactttcagcatctggtgttctactgttttctgaactttagagaagatgccattaactaccaattgcatacctagaggaggtgtcttacagccagaatttatctcattntgtngatacaagttagtntcatatacact

SEQ ID NO: 34178 - DNA, 353 bp, Oryza sativa
tttctgtgcgctcactcgctgctcgtgctgtctgtcgcctgaatgcaaatgtcaaaggtatgggggaacgaattgaaggaaaagcctctttctacgcctcgtggtctcgaatatatttgtctatcaataatacaaccagcagactgattccggccacaatttggagaatttaaagtacaaatattggagtgattaagtaattaggcaaaaggcttgttttggagaaaacttttactcaccggcgaagaaagtttcattacagagtagaatattgttagcttatgggaaagcgtatgatgatgaagcttcattacagctggtaggaaacatagacaaatgaaatctggattaac

SEQ ID NO: 34179 - DNA, 456 bp, Oryza sativa
  unsure (1)..(456): unsure at all n locations
agcttcttcctccttgctggttccattcctatctactgctaattctccattgcctacctcagctaaccttctacaatctagcatatagcacttgtgctgaagattttagtactacgctatctagtagaaacgaaaacctgtgtagcatatgaaattcacatatggattctaaaggagaaaaccccttttatacccctaaaatctctattaaaggcactattactgctgcagtagcttgttgttcttctatggttaacactaccaccactatgcaataaatatttatatgtcgcttgaggcatcacttgtccactatgatgcatggatacgcgatactggtacggcgatacgagattttttaaaaaacatcaatacgtcgatacggcgagtatatataaaaatatgtttaanaataaaatatagggaactacaaaagggtaaagcaataagattatc

SEQ ID NO: 34180 - DNA, 330 bp, Oryza sativa
  unsure (1)..(330): unsure at all n locations
atggcataattgtcggcgtttaccttgatgatctcattgtcaccggagaaaatacctctgaattgaaggttttcaaggaacaaatgatggnggagtttgagatgaatgatctcggttcgctcacatattatctcgggatagaggttgatcaagatgagagtgctaccacattgaaacagactgcatatgccaagaaattactgtctcagtttgggatgatggagtgcaactcaatttcaattccaatcgatccgatatcgcagctgatctatgatccataatgtcacccggtggatgcaactgagtatcggcggatcatcagtagtcttc

SEQ ID NO: 34181 - DNA, 438 bp, Oryza sativa
  unsure (1)..(438): unsure at all n locations
agcttcgnggcacgaatcttggcgcacaagccacatgcgtcttcttcctcccgcctctcgagcgcgcgccgccgccgtcgccgccgccttcgacgcgtgcgaagctaggagagttcgagcacgggcatggcgtcctcggggggagcggcgatctcagcggggcccacgccgccgtctgcggcggcggcgtcgtcttcggtggactggcatctgcggccgccgaacccgaagaacccggcggtgttcttcgacgtgaccatcgggtccatccccgccgggcgcatcaagatggagctcttcgccgacatcgtgcccaagacggtggagaacttccggtactgacccagagccctcgctcgccttaaaccctagagtccatcatgataatcctgcttccgatgtgttcgcttcgatggatctcactgattagttcatctg

SEQ ID NO: 34182 - DNA, 455 bp, Oryza sativa
  unsure (1)..(455): unsure at all n locations
agctttcgaacaaacaaacataacattcacgatcccaaacaaaaaggtaggcaaatacctcgcttttagtagcaacagaatggtgaagacctccagactgttgaagccgcggtctacaaaatcaccctgcacgtgaagcacagctgaattcaagaacacagcatcatccagaaccatctcaaccaacaagctcacacacacagaaacacataaacacaaaatgctccagaagccacaccatgaaaatataattcgtctcgggcacatgccccccagtcgcgaagagcttcatcaggtcatggaactgcccatggatgtctccgcacacggtcaccgggctgttcactggctgcacgttggactcctcgatgaggatctccttcacctggaaggatcagcggaaaatcagccgcggntacacgcgaccccatatacataacaaaactcaagttcag

SEQ ID NO: 34183 - DNA, 462 bp, Oryza sativa
  unsure (1)..(462): unsure at all n locations
agcttgcttgtatctgcattggtatgaaaggtagtatacctgtcttcgcctccggtgttgaaaagcataacaagaacgggctataacataacatggaagaaagaatcctgcgaactgaagagttgcctgaaaaggaaggaaagatttagtgcgagatgaaagataatacatatttcagttcttcacatcctaaacagactgaacaaaacaaacaaagagataaaaagacaatgctggaaaaacagttaggtcaaattgagcttcattaactcaagtttagagagagagagagagagagagagagagagagattcctgaacaaatttgaaaaataatgtgaaccagggttntgctctgtatttctaaattctgaacggagaanatccatttcaagtttttggtgtgcctttggcaaccaatgatgaacatggctttntcagcaattaattattntgagcattg

SEQ ID NO: 34184 - DNA, 332 bp, Oryza sativa
  unsure (1)..(332): unsure at all n locations
atggagatcaacgctgattacaacattatttccatctccttataccaaatttaatacgtgtctgtttcattgcatgcatattgaagggtgactagtatacgaactgaaccatgtaatttgtaaaataaaataaatacgtgcatgttaacccacttcttacttataagatcactcaaacctacataagtgtatgtagcatgtaagagccatcgagcaatgtaatgttccatgccatatatgcatgagttatatattgaagaaggaaaagaaatcatgtttngttcgcatatgagaataatgcaagctgtcgttgtcttctcatttcgttctta

SEQ ID NO: 34185 - DNA, 463 bp, Oryza sativa
  unsure (1)..(463): unsure at all n locations
agcttgagctgaattataagaggctctattgttctatattgaatactagaataggaagagagtagagtagaagatgtcggatgaattccagagttgtcagtaatcttctatcatttttttattctgtttattactctgatttcaatataatattcttcccgagtaatttagatttatcttgtgagaattatctctttgttagttcctaaatagcttacgggattattgttcactataatcaactaaaatatagtgattgatttggtgagttataaacactaaagtagatattaattgcttagacatggtgtttaggtaattgttatcaaataattgttgcgtatcccatagtacgtttgaggtagatgtagaggtgatgatagccctcgagatcacttaagtcctccttgtccgggtatgcagtagagcgacattngggaacagcatgttgccagtgcctgaa

SEQ ID NO: 34186 - DNA, 260 bp, Oryza sativa
  unsure (1)..(260): unsure at all n locations
gaaaccccgctctactaagcaatcaattcatcttatgggccgattgatgaattccacatattccttcatgcacatctcatctagcaactttagattgatcattgtctaaacacatcaatagcactccatctatatttgaattctcgccgccgaatcttccgatcaaccttaagactanggtctttcaaatattcaatcaaagggattcacccgctttcttctaactcttgtgcacaaatgtccgatattacaacaaattc

SEQ ID NO: 34187 - DNA, 442 bp, Oryza sativa
  unsure (1)..(442): unsure at all n locations
agctntgngctcagctgcatttggcttanatctgtctttacccaccatatcctgcttgcatgttcatatggttaatttctgcttgctgcgaatctaatgtttggttataatggtgtacttttatattgaaaccacttggatcaaatacttgaattcaactggaaatatgaattttagcacacttgcagtgtgaaaaatcaggatgctggtagccttttagagctagatgtgctttccttttctttaattctagtcgaaagatgaaaagttgcttataccagttctggctaatttctattaacacatgtttcagtgttcgactgctgcttctcaactgattccatgggtgaggatgagtacagggattacttgagcggcattgttgcgcagctgcaggactactttccggatgcatctttcatggtgtccaatttctggtctg

SEQ ID NO: 34188 - DNA, 179 bp, Oryza sativa
cgacagatgatatatagaaatgggagcacgagaataggaccgggatacaagggacaactgatttcacaagacaaatgccatgagcctcatagcctattgcctgcatgctgatgcactggcatggccattttggacctgcaatgacttgcagattcttttttctcaacttgtaccgaacc

SEQ ID NO: 34189 - DNA, 420 bp, Oryza sativa
  unsure (1)..(420): unsure at all n locations
agcttaatatatgttaaataacttagaattacatttattttgttatgaaggtagtactaaataatacacgtaaagcgtcttgcactacgccatatcctcaacctttgacgacatacctgtgatgggcataagtgttggtcagtgatgaggatcacctttgacaggttctacgggatgccgccatcggtaaggcatccggctacggcccgtcacaggtgactagatacctgtaacgggccatacagatccagcccgtcaaagatgttatgaaaccatttctaacgggtcctctntttttttccgtcacaggtggaaaccacccaacccaatccttatctatcacccaccgacagtccgagaccactcatctctcgtttcttagttcttccttatccatccccctctctctctctctctctc

SEQ ID NO: 34190 - DNA, 416 bp, Oryza sativa
  unsure (1)..(416): unsure at all n locations
ctcagcttaagcttcgatatcatgctagactatgcggtgtatctaaaatcttgaatgtggtttcatcgacttgattatatcttactgtgtcttccacgcctaatgctacatcgttatgtttctttccacgcttaatgctacatcagttatgttcgatcttgtaagtactgccttgaanacgtttatctatttccattcttgactgctaatagagatagcatcggagtgttagacgaccttacctgatatagtcgtcttgcttccatatctggttctggatagtctaaatatgcctctcatatcaagatctcatctatttgaagaataataagcttcctattaatctgctaagtgcatcctgctcgctataatggtttcagtnttacatatttcatctgtgctgatatctcgcgata

SEQ ID NO: 34191 - DNA, 437 bp, Oryza sativa
  unsure (1)..(437): unsure at all n locations
agcttgcacgataccatgtcagttnttgaaacttcctttatttttgggtgtaacttctcttttttttcacatgtggttgccacggtaaccgttacacgaagtagcagtaaccccactccaaatgtttagggaaaccctcaattgagaccacactaaaggaaacttcagacagatgtaacactgcgtgaacagaatggacaaagaacaagaaacaagcaacaagtcaaaacaataaaatatcatacaaactcctcaaatatgaaagacatggaattacataataaattgtaggaaccaaattggcgcaaccagatgttgtccgttatgaaagcatgaatgatggaaatatgtgaagagaaaacaaaatgaggtctcaatgagaaaatttataggtaaatctctggtgtagctggtcaaagtaaaaaaaaaatgtcatc

SEQ ID NO: 34192 - DNA, 390 bp, Oryza sativa
  unsure (1)..(390): unsure at all n locations
catatacgtctattcacaatttcagatgtattcctggtaagcttggccctttttggagtacctgatgtatgtattccccctcnttttgtccctctgttctatcatgatcgattctattacgaatgagaggtgatgaattatagattccaaaatntgcatgggaattcctttttgtttgagatttggcagtgcaatggtgggtagtggtcgctanggcctgtgcataagatcaactgctatttggtaacagtgaataggtacatgcataaggatcaacataagcagatagtatctcgatatattatgccctcatatntacagctactatattcttcataacgcagaagagagaaacaaatctcgagttatatcatcaccatgtcatatcat

SEQ ID NO: 34193 - DNA, 481 bp, Oryza sativa
  unsure (1)..(481): unsure at all n locations
tcaactgcaggcatgcgagctcggcgtcgacgaggacgagagtgttgctgtgactctggtcgacatgtacgccaagtgtggtcgcgtgggctcgtcatggcgggcgtttgtgctcacgccgcaaaggatcgttctgagctggacaagcatgatcgcttgcctcgtcaaccatggngattcagggtaccgtgacacagctattgtcctattcaagaagatgctggttttgaaggtttggccaacaaatgctacgttttcttgcatcctgaaggtgtttgatgtgcctgagttgctccccagcggaaagcaggttcacggctgcttggtgaagatggggactgaggtagatcctgcgttaggaactgctcttttggcaatgtatggtagatgtggtggaatggatgagataactangctggcttgccggataaggcatgatgcgttctccaggacttcgctgcttacagcctatgcacgtaat

SEQ ID NO: 34194 - DNA, 318 bp, Oryza sativa
  unsure (1)..(318): unsure at all n locations
gatatggccatccatggtttaatggatatggtggtccaatcttttgtttggttangtggatatggccatacattttacttgtttgggtgggtggatgagaatggattgaatgaacacaacaacatattaattaataattaaatatgttaactatcattaatatagccataaattatactaattaataataagatagaagtactatatctaatcaacactaattttgacaagttaattactaattaacattaatatacgttaattattgctaatcaagaactaatgatcaagattatgcaaagttgatatcctcatccg

SEQ ID NO: 34195 - DNA, 461 bp, Oryza sativa
  unsure (1)..(461): unsure at all n locations
agcttctttgcatctgcaccatatgctttcttttatttgcatagntggccatgaaaaatagttgttgctgtgaaatgcagtactactacttctacgtgctaattgtggtgatttggtgaaagcttcctttaaactgagataaaaatagatacgttttcacaaataattttgtaatattacgaatatatacactatgtaataataaaggaaaaagaaaatgactgtagtagacgataaactagagatacattatccttacatgccaccagtcattaccttttcaaaaagaaaacctaaaaagtgtaatatgaagtttcatggaacaattctcttgtcaccgtaccttgtcttatagtaaaattcgattaagagggtgtttagatataggggtgtaaagttntggcgtgttacatcagatatacggacacacatttaaagtattatacgtagtctaataacaa

SEQ ID NO: 34196 - DNA, 432 bp, Oryza sativa
  unsure (1)..(432): unsure at all n locations
atgtgtacggtttatcggaaaagcgaacgcgcgcgtgcgcgttggcggcgagagtntccgatagtttatcttaattaactaagtgattagcagataatgacggtaattaagatatgatgttcttttgtccggaagaattttttactaaccgattgagaactgttgaagcatattttaataactgtcgaaactcatattgacaatgtttaactcgaaattaaatgtgtaagataaatgttgaaaacttcaacccagattgataactttatctcaagatgtgaaactctcaagacagattgaatatttgtagttaagatttgaaaatatgaaacttcgatctgattcaaaacttcgactaattcaatactttgactcnatcgaaactttgatggattgaaacttcactcgattcaaacttcgctcagataaaac

SEQ ID NO: 34197 - DNA, 457 bp, Oryza sativa
  unsure (1)..(457): unsure at all n locations
agcttgctntaatccataaatggatctctttatactacatcccatattttcgtttcctttcatgacaaaacctttcggttgcgccatgtatactttttcctccaaatctccatttagaaatgccgtttttacatccatctgatgtaattccaaatcataatgtgccactagtgccattataatcctgaaggaatctttacaagagactggagaaaatgtctcattgtaatcaatcccttctcgttgcgtgaagccttttgccacaagtcgcgctttaaacttttctatattccctctggagtcatatttggttttgtagacccatttacagcctactgttttggctcctttaggaatttcttctaaatcccaaacatncgttagtttcattgatttcatttcatctttcatggcttccaaccattcagatgagcgagcgcttctcatggcctcttca

SEQ ID NO: 34198 - DNA, 344 bp, Oryza sativa
  unsure (1)..(344): unsure at all n locations
accactcggtcatgatgatccgagcggtcaaacttaattgcgatttctgaccatcgaagatacttgggcgtgtcgggttgaacagcattgatctctcgttcagtcaacttctgcttccgtttagactcataagctaatgggccgccgaagatatggttgagctccttgcggtggtcttgaaatcctgccggggcgtcgccgtcgtctttcttcctcgacgtgacttgttcttcgtcagaattcttccgtgcagtcttggtgtattgatccgcgatatgcttgagacgaaacaatctttggccacgtggttggagttatgatggtgcgngcattgggagttcatg

SEQ ID NO: 34199 - DNA, 454 bp, Oryza sativa
  unsure (1)..(454): unsure at all n locations
agcttgtgataatttcgtgtctggttaatgtcttgttctccaagatttctttcgtgatgattgtaaattgattagtcttgatgattggatcatgtttctgcaatcaagtgtatcaaactagagcaaattgttgccgggaggttaagtgcccattaactggaactgcttgaaatgatttgatatgcactactgattaggctataagtgtgtgtaaactatggcgcgagagtggcatattcagttgaaggcttgtagtagctactggggtattctctataacatcatgaccttcttgttgttttcaaagcaaaacatcgtctgctcttcttgtatganatcaacgtactgtactacagtagcttagtctgcatatcattgtcatctgatgtgcactagtttacgtanatntagtatcccctgttttatgtcagtattgtgatatggtggatcacat

SEQ ID NO: 34200 - DNA, 426 bp, Oryza sativa
  unsure (1)..(426): unsure at all n locations
agcttgaagcagcaaggagcacagcagaatctatctctctctctangccaccagagtgctggctgtggtcgactcactgcagaaaacaaggaatttgtcagccacatataaatattacactatgactgaatcaaaattgttaatataacaaaacaaacacaatcattcaggcattcggcattaacacctaccagcgtgtatatacggaaaaaaaaactactaaatcagcaagagtagaatgcatgtatatctatatgtaagttgaacaagtcattagactgcgagcatcagcatactcacccataagcaaagaaacataactacaaagaaaatgttgagcttaagaaaacaaagcatactatgacaataccaccaacacaagtgcagctacaaagcacttttaattaagcatattctcatcttcat

SEQ ID NO: 34201 - DNA, 466 bp, Oryza sativa
  unsure (1)..(466): unsure at all n locations
tgaaaatatgacaattataatggtgacggtctatgcgaacacggtgagctggccaaccacatctgtatcaacgtcggcggcgagcacgggagttctcctccggcgatgggtcggtgaacgccaaatattcagaccggaaggagtatatgtaaatatttaataaatagcatattaaatttctcatatcaacatcactatagctgctggagtaacatactcactctgtccttataactcctatctatgcatctagacatgacgcatgtgcaaatacatagctagttggttgttttatgacggagggagtatggagtctaagaataatttcctccatnttgagattattntatatgataatatgggaataaatacaataatagttccatggaattatataatcaaacttgatcatgtaatcagctgaaaattctgtgtacactgtgcttattacagttcatcacattta

SEQ ID NO: 34202 - DNA, 452 bp, Oryza sativa
agcttggcgtgctaagcaagttgctatgaatgtcatttgtggagattgggacgaggcgtatgttcgcttgcctacactgatgcgtgccatcaaagcaaggaaccctaccatgagtttccgtgttgaggctcaccccgagaagtcaaggatggtggagggagtacagaggcgagtatttggacgtgcatattggatatttggccagtccatagaagcattcaagcacttgaggccggtgctagcaattgatggcactttcttaaccggtaaataccaaggtacattgctcatggcaataggggtcgacgcatggttacatcttgttcccttggcgtttgctctggtagagaaggagaatacatccaactgggagtggttcatcaacatgttgagacacaagctgatcggtcctaatagagaagtgtgtataaattctgatagacaccctggca

SEQ ID NO: 34203 - DNA, 398 bp, Oryza sativa
  unsure (1)..(398): unsure at all n locations
tggtgtgtcacgcttgacagctgtggcacatatatggcaaagatatcggccgattagccttatatcaatgcagatgcataaacttgcccatcaatggtgcagatatggtgtcaacgtgagcagctgcgtgtctgatgtaccgatccaacatcgatactaacacctggagatgcttgtcctcactgatctctacccatgccgtttactctgcggtgtggatcatctgtttattctccaaaggaatgtgcctcagtgagtgtaacctgacactactacaagccactgattgcacctaccctctcctccatgataggatgcctactacatggacttgtgaggccattncgcaacatagtgcatngtaaattaatatatataatttgagtggttaaaaagta

SEQ ID NO: 34204 - DNA, 244 bp, Oryza sativa
atacgcggtggatcgatctgcattatcacttctacaaggcaagccagatgcatatgacatgcatatgaccatcgatgttctgtacaccacacgtgaatagtcaatgtattcatgaccacttaccagctctactgccactgctatgttaattagtgttgcaccttaagattattatcatatgtactgcagcaccttacaaatatcatacatatgtatgttgttagcgctgcaatctacttatcta

SEQ ID NO: 34205 - DNA, 293 bp, Oryza sativa
acgtgctatgaactacatacatttacatcggatgatgatcgaacaaatagtgtgctgtaaagagaccctttctcattgtgcgcttgcatcaatgctttagtgcattgactacctgttctatgcatagatggaactttatgactggtaaatacccacgacaaatattgacagcattagtgtgcgatgggaacaaccatgttctatcctatggctttggcattagtagagagagagaacactgaaagctggcactgtttcctatagagaagcacactgcagtggtgcgtatgatg

SEQ ID NO: 34206 - DNA, 305 bp, Oryza sativa
atcacctcgcgagagctcgaaatcttatcctaattccacatggggtgccggccatatccgcaactcgtcttctcaccaatcaacatcaccaacagctaaatactcatcataaaccccattgagacatggatacaacaacacaaattctgctggctgtggagactctctcggaaacaagagctggcattcaccctcatgcaatgcgagcattcgatgcagccattctagccaccaccatgaccggcacaatcagagcagcgaaccatggcgtggtggctcaaatcattccacgagatcagatcatc

SEQ ID NO: 34207 - DNA, 451 bp, Oryza sativa
  unsure (1)..(451): unsure at all n locations
gcttatgttgatgatgtagtcgtcaagacctttcttaaggatgacctgattgcggatntagaagaaacttttacaagcatttgtgctttcaagatgaaactaaacccggaaaagtgcatcttcggagtaccgttagggaatatgctcggatttatggtatctcaaagaggcatacaggccaacccggagaaaatcaacgccatcctcaacatgaaaccgccaagctcccaaaaaggcgtccaaaagctgactggatgcatggcggcgcttagccggttcgtctcacgacttggcgagcggtggatgcctttcttcaagctgctgaagaaaactgacaatttccagtggggacccgaagcacagaaagcctttgaagacttcaagaaacttctcaccactccaccagttntggccttgccacatccgcaagagccgctactggtatatgtgt

SEQ ID NO: 34208 - DNA, 401 bp, Oryza sativa
ctagttacctaatctcaagcacagttaccgagtttatctcagtaagttcgttggtaacaacagttgctttctaatttgatcacaggtacaatattacctatatgaccatctaactttttacttaatacctgtgcacatattttagtaccttcatgtaactatctttggttatatatcgttggattaccagctatcaacggctataatgtctcccaagcatcttatatagccttcacctgtagttaaccatcggcccttttggtgtcaaacagaatattatactcccaagtctctcatccaatatgcgtgatcatctccaactgatcaaacatatttacttgatctgctacacattgtcaatctgtgatgttcaacataacatatgggctcgtagtactctc

SEQ ID NO: 34209 - DNA, 437 bp, Oryza sativa
  unsure (1)..(437): unsure at all n locations
agctntgaagaagaagtcttaggtggagtcttttcttacaccccagntgagcgcctgtgaagatggagccgtatgcccgctagtctgctgctgtttatttttgattgtcaggccttaagtgcctttgtaataatgtaaatattatcgatataataaagatgtgtcttttatatcatgtttgtatggtgtaccctggctttttctatgacggngattaatacactagcgttcgggaaaatgcaattttctcggtcgcgacaagatggtatcagagccatctcgactgtaggataagccaagtggataaaacctaaggacatattttataaataaaactatttgcgaaagtntccttttttctccttccnctaatggctattgcaaaatgtttactcccttcttccttcttcggatttcaattagtactagttggtcag

SEQ ID NO: 34210 - DNA, 391 bp, Oryza sativa
  unsure (1)..(391): unsure at all n locations
cattctccatgntgcctcatgatattgtgtatgatatgtatgggaggctcaatatcattataaatgatctcaaagggctcggtgcaacctacactgatcttgatggtgtccataagatacttatggctctaccagacaagcatgataccctagtcaccatacttatcaactccgacatgtctagaatgacccccacaagcctcttgtggaagatcaacactaatgatatgtacaagttgaagaagaacgagatggatgaagcatctgcatccatgatgtgcgttgctcttcaagccgaagtggaagataatagcaagagccaggtgaatgaagcatatgataactcggaagaagagatgcccttcttgatagatggtcaatgatctattgg

SEQ ID NO: 34211 - DNA, 467 bp, Oryza sativa
  unsure (1)..(467): unsure at all n locations
agcttaattacggcttagccagtgatcagatattgtttatgcgtcacagtacagatcaaacaactagcggtatctgtatgccacaccttaattaatttgctgagatgcaccgtacgtggccgggcgtccacgtaagtgtacatttcctaaccatctggtaacaaattaattaaggattcttggaggggatttaatcctatgcatttttcttctatacggttatttagatcaaaggaatatctataaaaattactataaaattcatttggattattgactcaaaacatgaaaattttgaagagattctaacatgagcttcaacctcttaattagggaaaaaaatcctttgtatatatctctcttatgtttcctgctntctcctggcactccatcaaaatgatcattcatgcagttttcctatgtttntnttatccgcgggatttgagatgctangacattaccatcct

SEQ ID NO: 34212 - DNA, 523 bp, Oryza sativa
  unsure (1)..(523): unsure at all n locations
ctatcccgaagtgaccgagtnntaagatgatgcgacatggcagcttatctattaattatgaatagtctgctagtttccttttatctttatgaaagtgtgtttaatgtccgataaggactctatgatttccttgtatctgtaggttagattactttcttgtccgacaatgacttgtatcaacccatggatataaatatgtacaacccaagtctatgtaatctatctccacgatcaatacaattcggcgtatcgccaccttttaacatttctactttattntatcgtacggagtgacttggcacttgacgcggagctgcatcggtgttcgatcttctgcgaagggatatagtcaatgttccgtcggtctaagcaattgtatcgtctacgtcggcgtcggtcaagactgcatcagtacattcgacctctgaatactctggtgtgataatatatatgcctggtatttatcatatgtctatgtaatctagtcctncatctcaatcaactctatcggtgtcttcgttta

SEQ ID NO: 34213 - DNA, 433 bp, Oryza sativa
  unsure (1)..(433): unsure at all n locations
agctntggtttggtgtgtccgccaagaacatctatgtctcatgtgcttccgatctctcacctgttgtcagagctgagccaccaaaacctggctgcatttgggaggatctcaaccttcctgaggattggcgtccgtgcaggatgtctgacctcgtcaatcttggctcaggaaggttttgcatcattaggttcttccaaccatcgggtaacagggactacatgaaagaccaaattgatcagaccattgctgtctttagtggtgtggaagtgctgcctgatgacaacaaggctgcgggcaatggcaaagggaaaggcaaacagaatgccaaggggctccgtatgatcaaacacaagtccagataatgcacattcatcgaacaaatcaacaacgtcgagtcggtgctctaaagcttgggtgattagctcttgaaatc

SEQ ID NO: 34214 - DNA, 469 bp, Oryza sativa
ctctaactgagcatgcgcgctcaagcgtctgacctcatgagagtatctttgatttatcacttggagcataactggaagtagctgccacgaactgtcgcgaccgggaaaattgccttttcccgaacgctagtgtattaatccccgtgccaggaaaagccggggtacaccacacgaacatgatatacaagacacatctttattacatcgataatatttacattattacaaatgcacttattgcctgacaatcaaaaataaacagcagcggactagcgggcctacggctgcatcttcacaggcgctcaactggggtataagccaggactccacctaagacatcttctccaaagcttctcttactgaagaggggaaggattgagcaagaatgagtactaccacatgtactctgcaagccacaccggcagatgcatgattaatgcaagggagtacaaggcggtaataatagggg

SEQ ID NO: 34215 - DNA, 433 bp, Oryza sativa
agcttgccataaacttattactgtctatgtataccattattaaataaagctaagtacattaatctaacagagaactagccattctgatgataattccatctaaaacaatcaaaagaatcatgcaactggatatgagcaatagaagcacataaatcataccaaagggttaggttctgtccaactaaagctcttataaaagaaacatttagcggaaccaaagccataacactggcaatagtagcactcttccttctgacaatagcatataaagaaggatacttatctgtgaaggccatgtttcctacccatttatcctcccaaaatcttatatgttgactataattcacaatccaagagcccatacttaaaaaggtgttctttattttcatgagccctgaccagaaatgagaatcaccttgtttcctatccactt

SEQ ID NO: 34216 - DNA, 230 bp, Oryza sativa
  unsure (1)..(230): unsure at all n locations
tcatcatacacatatgagtatggtattacgcttcatagcggaccgtacctgtataaatccctcgtgtctcttttgtctcgaggaacctcggatctcactcgcttgcccggccgaactcacaaagggggggtctcatgacctcccgctagagaggatcactcctcgacacatangatattgattacatcagcatagtagcataaggcacctgatactattagatatattca

SEQ ID NO: 34217 - DNA, 447 bp, Oryza sativa
  unsure (1)..(447): unsure at all n locations
agcttgtgattngagcaccatattgtcttgttttggttacctatggctgtccaatgatgcactctcacactactataagagcttgtctgtcattctttgacacgtgttagtggagctgaaaacttgctgtgtccagcaagttatgcagattcgcgttaaattctcgtgctattgttgtggagcactacaactcaactgggtgaaaataaactggagttcatgttcatgtcacgtgccttggttctcaagcccctcatgttgaagatggcaacacctgccttcttctagttagggtgtagcatacatgcaaatgctgctatcacaattatattatgcatagcatttcagagaattcatatcactgcagcttgcttagacagatgatcatcctctgcccatactagcaacagatagaatgagataacgctagtttacgctaacagccac

SEQ ID NO: 34218 - DNA, 363 bp, Oryza sativa
tgctgcaactgctctatctgagatattccttgtattaatggcactggtatcacaaagaataacatagtatccattgatccaatgagcgtaactattcggcgaatacaaagctgcttataatgttaacaaagattgtaccaatacacatcatctgtgttctggagctagatcatcaacccatttcatatggttagatgtgtggagcatttctgaagcaacatgagcaccatacccagttctgacatatacttagcagctgacattactggtcaattatcagttaagctctggttttactgctattgacaactaccgataagactatattgtgaatacagtcacctgtctacattaaccgaattt

SEQ ID NO: 34219 - DNA, 465 bp, Oryza sativa
  unsure (1)..(465): unsure at all n locations
agcttggggggctagcctctacgcctctctttttcattnaaacagcaaatctcttctgaatccttgtgcagcagtcatcatcgagattccactgactaagaagagcacgccggtaagaagcgagcgcctcttgataggctccagcttgcttccaaagttctgggagaagctcgacagatttactaacggtttcctgaagcttttgttcaaccatgacatcgggtatgccacgttggaaaatactttcaacagcatcaaggacacttctacactgttgagcagcctctgcaagtaaatggtttcaaaagttatgatatgcatggagagaaatgattatgtagtgaaatttagcacttcatacccactgctttccctaacttctgaagagacattgacttcaagtaaatggcttcaagaacaagactggcagcatgctgcgatcctgaattcgatgaatctgaacgt

SEQ ID NO: 34220 - DNA, 285 bp, Oryza sativa
  unsure (1)..(285): unsure at all n locations
ttatatactcaacttacctcatanttcgtattgggagactactatagctcgctccactcctattatggatggagtngaaactgtctggctaggcccgaaggagctggagctggaactctgcccacgatcctatgggtttgtttgaaactccatatcggactagcatattatcagcatgtgaaactcattgacatatgattaatcaagtatatccacgataacatcggaaaaatatttgttggatgtctcttttaaaaacaactctatatatgaaaattcttacac

SEQ ID NO: 34221 - DNA, 454 bp, Oryza sativa
agcttgaacttcacaatactattccggtagtatgttcaatttaatgacttgtgtagtctagtagtgtacatccagcaatttaatccccttccattctctccttctctctcgaacagataaggcagcagcactatttattcccctcctattctcctcccttgctgctgttgctaaagcttttgttcctcccctaactcaccatccactccatggctaccgatctgctgcttctaggtgtggatcagctctactgcagctaaggcggtgacggctgctgctatggctatggcgacggcggctactgcagctgcggctgtggctgctctttctctccctctttcctttcctctctggctctagcatttgtgtgatggatacaaattgttggtggttctcatagtgatgtgcaagtgcaagaaaaattgatgctcatgccatgctgcactatatgctc

SEQ ID NO: 34222 - DNA, 395 bp, Oryza sativa
cacgatgggagcactactcaacagccatcatgtgatccagtttcttcccttgatccatctctaatgccaactctattgattcccggtgaattggtacctcatagcatgttgcagtagcagtggaatcgatcaactcgaattggtcgaatcgatgggtgaatgttgaatcgccaataatctcgtgtgcatcaagcatgtccttgtccgtttcgtgtacagacaatgtgccaatcgattctatgattaagaagatgcaggatgcaagggtaatgtatgggtatggatctatttgtgggttggttaattatggtaaacctgagtacgctttggttgaaatagattgattcgtgtgtatctgggtggctaagcaatggaatttcgtccatattgagtgc

SEQ ID NO: 34223 - DNA, 447 bp, Oryza sativa
  unsure (1)..(447): unsure at all n locations
agcttcgaccagcttcacactctgtttcagtctatatggnatccagccgatgtgcagtcagacttcaagttcggttcgattcaacaccaaatccgcttcgatttctttccttattttccgaatctgatgccaaattatgttgttaacacttaggtatgtttgtaggagtgccacgtggcaggttacaagatgtttaatgtttaatgaagttttaagaatatactccctccgtcccaaaatataacaacttttagtccttaggatttgtcccanaatataacaacttttagccctcaggatttgtcccanaatataacaacttctcctccaacattctcttacctactaatcacaactctccaccattcacttgttccacctacctccactactcatccaatcacaaccctgcaccattcacttctaaacttcttatattatgggacg

SEQ ID NO: 34224 - DNA, 278 bp, Oryza sativa
ctacgatcgatgtgatatttaagggattcgataatttcttttttctttagtaatgacacctccataacaatacatgtggagtggtcacataagaaataaaagagccacctttgctttgccacgtgaaaatgaagccgttgtacattatcacactgtgttgtccccatgcggcgatggacgttcgcatggacagggtgtacgtatgaacgaatgcataagtcgatggcaccatgattgatcggatgcagtggcatatagaggccggacgtgacggatcg

SEQ ID NO: 34225 - DNA, 465 bp, Oryza sativa
  unsure (1)..(465): unsure at all n locations
agcttcanaagttcttcatttaagatgtgatgtcatgctaaaatatatagggaatctactttggtgattatatacaaatcggaggtgcctaaaaggttagcaactccatcatccaatgttttttcggtcatattacatttggagctatgttttgcacacttttttgtctccaaaattttgctgtaataagttgatgagagagaaaatttgtgtgggaaaagaaagaatatatagaaattttgtttatttgctaaataaggttttataaaatagttgagtaggaaaatatagtgaaagttaatcttaaataaaagaaaacaaactaaattgaatattaaaagaatntaaaacttcaaaaataatatataagaactttttggtggaatattttatacattttgcatgaataatgatgtcattcattgatgactgttgaaagagtctgtgattattctatcattatcg

SEQ ID NO: 34226 - DNA, 451 bp, Oryza sativa
agcttctattgatcaacctgtcgacgtcggactgtgtcttgttagttgtatgaggcagttttcttttctcttcatcaagaaattctctgcaacaattggatacattaaacaatatatatatgactgtaaaaaaaaagatagaatatgcttatgttacgcacttgcgaaagtcttcaagttcatcacaatgtcgcaagacatatcgatgtgcttgcactagaagctggttgtcaaaccgtcctatggtgatggccttgccaattggttcaccagcactctcaaacatataaatgtcttttatattatctgaaggttcagggtttctaggtgctcttgtaaagcgtgtacttccttctaaaaatcttgaacagtatgtcaggcactcttctgcaatataaccttcagcaattgaaccttctgggtaagctctgtttcgcacaagtgcctttat

SEQ ID NO: 34227 - DNA, 435 bp, Oryza sativa
  unsure (1)..(435): unsure at all n locations
tgtggtctaatcgcgtctcgatatacgatcgaacactacgacgaactcgtgtttctggtgttcctttacagatgacagtgatcgaagtgtttctggctatgaactgcttcatgccaaaattcctgcctctgtttagctgtaatttgaactgtgtgtgtaaccctagcagtctagccccctagaactcattcattcattcattcatgctgttaccttttcagtaagagctaaagctaatgtctaaattngtccggtgaccaagctagtcctgtttatgtagcagctctatattatagcttcagctgatcctgctagataaactataattatatataatatccatggatgctattgggctggtgtttctctgccaagattgtgctactgttgcttctttctccgtgtttcatgtcatgtatatggaacagtagctac

SEQ ID NO: 34228 - DNA, 485 bp, Oryza sativa
  unsure (1)..(485): unsure at all n locations
tctgagtcacctgcggcatgcaagcttctgatgctaaattgcagaactgtaaactgtcttatgatgatttgcaggtactatccaatatacaggatttcgacaggaccaacactgcgtgatctggacggctgcangctgcttcctcacacatcatcctctctccacgcagctcgcacgtgcacaaaaacttcagaaaatctctgaagaagctacacttgctttcttcagttgctttcctgctgatgcttgagccgtgacgcgtgacgtgacgttgaaactgatctttctcaggcggcgaaacccaggagccaaaaaggcaacagcggcgatccgcgatagcgcggcgtccccgtgacgacggcgatgtgcctcccatcgtacaggctcaaggttgccgcgtcgtgtacagaagatgactcaacggtgatcacctgcttcagtttagtgatctccattgagacccggtttagttcccataatctttt

SEQ ID NO: 34229 - DNA, 273 bp, Oryza sativa
taataggcagtgttgaatcttgtgaacattgaatcctaatgatcacctcttgcaagctgggccgatatagacttgcgctcaaaccgattaataatgcttttaacactcatggtatgaccgacctccggcagacattcctctcggtccaagcctttaattgttaatggtccgaagcttctcatttttgactccatagtcactgccactgacacattcgttcactcggaagctatctatgatgcccatactctgatacacaatcgtttgacacta

SEQ ID NO: 34230 - DNA, 471 bp, Oryza sativa
  unsure (1)..(471): unsure at all n locations
agcttcaacaccttggattccaaggatccaatgctgatacttctctattcttttataataaagggggtctaataatttttgtgcttgtttatgttgatgacataattgttgctagctcgagacaggatgcagttccagctctgctaaaggacctacaaaaggattttgccttataggatctaggtgacttacactactttcttggcatagaggtaaacaaggcatctagtggcattgttctaacccaggaaaaatatgttactgatctactaagacgagttggtatgactgattgtaaacctgttagtacacctttgtcaactagtgagaaactcactttgcatgaaggagatttattaggtcccaatgatgcatctaattacagaagtgtagtaggagcactccagtacttaactctgactagaccagacatttactntccagtanataaggtatgtcagtttctacatg

SEQ ID NO: 34231 - DNA, 180 bp, Oryza sativa
gagccaatttctgaaaaggttctgtacacttcaatatctctacactcaaatcattgcagggtgactgcaaagccatgacaaatattattcagatatcacctaatgcgacaatgtctaaagagaacattctcaaaacactgttgctacattgatccaaacatatcattatactataacaat

SEQ ID NO: 34232 - DNA, 413 bp, Oryza sativa
agcttgctcagaattgcactacatagtcgctgtctatcttgtctcacgagtatggaatgattgggacgtagccgatactttgctgccttaactaagctcagctatcgggcgcatgggatcgtgctttcttgagatgattatacatctgcccccttcaagtttagccattcctcagatacactcgagttttacttatcacatggaatagcgcgtgattctgacacccactccatatactgttactattgtgtcaatagatcgatggctgagcgctatgttgctgctcgatcagagcattccgtccttactaggatgctgttcgaactgttcagcggacctgaactggcgcactatagacacgaaacgcgagcgatgatgaactcatgatcactcatcacgctactattactaat

SEQ ID NO: 34233 - DNA, 379 bp, Oryza sativa
agcttgtacaaaatgaaacacctcctgaactgatgaagctttggacaagctcggatccagacgccaagcatttccgtgataacaatagatacttcaacggccacttctcattcactacccttggtgtaagccttgacaaggcctttgcaaacatgagttcgggcgtgtacacttttcgggctcatggtcagatatatcataatatacattctttcagtcctagagattctggtccagagcatctcgagttgtatttctacgatgacgatccaacattgagtcatagattccaacgttcccctatccttgaccaggatgtgattaggactgttgcagacgtccttcggaacaacccgtactcggagacatttagaagtct

SEQ ID NO: 34234 - DNA, 203 bp, Oryza sativa
tttcgctcatcgctgggttagatagataataacttgtataaccaccgtgagatactctgttgaattcaatggaactctgctctctacttttgctccatcacgcggtctttgtcaaggagatccgttatccccctttctgtttctgttcatagacgatggactaccattgctggtggaagacaaagtggctcaaggagctctct

SEQ ID NO: 34235 - DNA, 456 bp, Oryza sativa
  unsure (1)..(456): unsure at all n locations
agcttggccagcataacttgaagacggaagatcattcgatctcattgtgttacccacatagccagacgatccagctccgttagctggatcactcctaggatgcataaataacttttggcctggcataataaggcacgagtgaagtaaatttaccatacttgagataatgagaggattatgaacacttaggaagtaattcagtttagtccatgtaccaaaaggtggaggttcattgtttagcctgtccatatgatccatccgggacatctgggaattattatactgatgtccagccataacacgtgaacaatctgatcaaacttggcttaatctgggaaaacaagttgctctattagttntccagcaaatctattgcagctgcaaatggactgtaaacatgaagttntaaactagaanaagaagggcaagataatatatgcataatcacaaattcat

SEQ ID NO: 34236 - DNA, 446 bp, Oryza sativa
  unsure (1)..(446): unsure at all n locations
actcaacttaactactaatgataagtgatgttattactaatttgcagctcatctagcttatgaaatgtattggtgccttcattaattgatgagattgaatgtgtctcggctaatttctcacggaattgtatacactgaaacaagaatctatatagtagtgagtcagctaaattatttgctgaggattgcagttttaatttcaactcttcgaatccaaaaccacgaactagaacttgtcacattgtatacctaattccacggaatggattctaatccagagatgtccgctctgtacatctttcttttagaaattaatttgcggngatctctctttagaattaatgtannatggtgtgtaaaaaaatctggctttctacaatgtagagtatataatatgaaatatctatcaccccaacanagatcatattgaaactcgatctatactt

SEQ ID NO: 34237 - DNA, 448 bp, Oryza sativa
  unsure (1)..(448): unsure at all n locations
agctntgacactatgtaccangtnttctgttttgtgtttaatgggacgtcctgaagattgatcgccaacctgtcgtaccatacgtgctctccatgcatccagctatatctcatcctgcacgaaattgtgcttacaaaaagaattgcgcgatgatagaaaaatatatacgccgaataccttttggacgtttcttcatcattcgattgtctgccagccgccagagctgaaagattgcgctgtgaacacaagggaatatatcacggtttcttgacaaacgaatatcacggagagggatttccttttcgttttataagcatgaaccgtatgtcatcagtttatgatagaccgactgaagatcaattataaatgaacatcattataaccggtgacttttagtatacgtctgacatcaaccgtgtgatacaggtctgcttccacacacgcgata

SEQ ID NO: 34238 - DNA, 452 bp, Oryza sativa
  unsure (1)..(452): unsure at all n locations
agcttatctggagtgagatctatgagacagtgtgtgagccaaagagaggcttcatctatgctccttatatcatgaagatgattgaggccaagactgggatttgttatttcaaagacaatcaacacaagcctttccgtcctcatgctcccactacttcagctactcctaccaccagagtgactcgtgcttccacctcagctgctccttctttctctgctgcacctcagcgttctgagtcttcttctcccataaagaaggctctcagggctatcttttgcatgtgtgccaagacagctaagaggtaaagaagatagagaggcgtcaaaaggaagattggattgcaacaggcaaggatgtctctgacatttctgatgatgagtntgttgatccttttgctgcttatgagactgctcgagacattgctagtgatgaaggtccctctggcacttctc

SEQ ID NO: 34239 - DNA, 433 bp, Oryza sativa
  unsure (1)..(433): unsure at all n locations
ccctggctggtcngcaagcatgtctttgccctgttgaccttgcatttccccccggtgatatccccctgactgagctcgtggctcctcaccgggagaccgcgcatgcccccctctgccagttcggcccggggcttatggtgaaatctcaagctctcgctctctctgtatgtggaaatatcgtatgccagccagaatacacgagacaccgtcgatctatacatgttcgggccgctgagaagcgtaataccctactcctgtgttntggtggatctgtgtatgagtgagctacaaatgtcagctgacttcntccccgttctaagctcataatctgtgaaagaatcaaccaaccacctttctatgggcaatgtcctccttttatacttcaatgtgataccacatgcacactttctctttcatactggactgttctttt

SEQ ID NO: 34240 - DNA, 249 bp, Oryza sativa
  unsure (1)..(249): unsure at all n locations
agcttccaactgtagagcattcttcttggaatgnctgctatananaagntacagaaggtactacaaattcctacatcatgccggatatgatggaggagacataatataatttgcagcaccaaacaaattctttatcgcatatggcatgttcccatggagatcactggcaggtaatccgcgttaatcagtttaaaggtcatggtcaacattgcactgtatgcatgggcggagccacgtgtgtttctctat

SEQ ID NO: 34241 - DNA, 267 bp, Oryza sativa
gatcgatcgatgtcaatgcaagtgtgtaacagcgataggtatccgcgccgacggcaagagagaatcagatcacatggatgggtgcgtggcgtcaggagtggatgatgaatcggtcaatcgacaccgcgacacagctatctatctatctcgatcggcctcgatcggtaactatctcacggcaagctagctactccatataggagtatgttcatctcacaaacctgtctctctctggctgatgctgaagcatctctcttttctctcttc

SEQ ID NO: 34242 - DNA, 441 bp, Oryza sativa
  unsure (1)..(441): unsure at all n locations
agcttactaccgagagcatctcacagtttctcgtccagcgttcgctctatattagcagttctgttatgctcaaccacatgctctctgctgaaggtttcgttgttccagagtttctctctcttgaaagctgcaaggagccatccgtttcattcgaagaatctgcaaacttcacatccgtcaagtgcctgaggttatgtaattgtgaaatgaggtcaccaccaggaaatatgaagtgcctatccagtctaacgaaactcgatatctatgattgccccaacatatcatctataccagatctgccgtcctccctccagcatatatgtatatggggttgtgagctcttgaaggagagctgcagagcacctgaaggagaaagctggccanagattgcgcatatccgctggaaggaattcagatgaattgtgcttcagaatcacaact

SEQ ID NO: 34243 - DNA, 138 bp, Oryza sativa
ggacgacagaccgtctgtgatctccaaggttgccgcatccttatcgttgtgtgctctgtgatcaacacgacgaaagcatcgatcacattctggtcgctcgcccggaatcttgccaactatggtggggtcgttctcttc

SEQ ID NO: 34244 - DNA, 501 bp, Oryza sativa
  unsure (1)..(501): unsure at all n locations
tatgacctaattgagccttanagtggtgaacaganactattattagtagtctgtagaacccttcttttctggccaccaaacggccccgcccacagattaattagtcatgtctacttcctttacaacatcctggtgaacttaatctacgggcagagaataaagcagccatgacaagacaccgattaggagatatctcggaggattttgatgggaacgtgtaaaaatatcgccacaccgtcaagaggcaagagcccacaatcttgtgctgtacacaaaatcaatattttgactgcagattgccccattttttgaactcaaaataaaaaaacagcttggaaggtgatcgcaaacatgcctcgatgtgacgccatctgccggaccatgacgaaatggagtggacaattggcaaattggcaaagaaactagctttcctggagacgaanatgaaatgtaattcggtgggcatagttgatcaaagtatatagtacgtcgtcttatcag

SEQ ID NO: 34245 - DNA, 439 bp, Oryza sativa
agcttcatcaacgtttaattcaagtgtacatgcatttacctcacctgaacaaaattatgttaaaggtggctggagtcaagttgtatcattcagatctccagtgtccgaaacctgtgtcacaaatcagcgagcagcggcagcaattctaatttgatgctatatatcaaacctctggttcgaaatttactagctgaattctgatcaggagacgccgttctgcatttgaaattactgaatctgcttctgctggaaagacaatttcctttcgcttcagacttatatatggatactgaccaaatacaatatcagaatttctcaaccggtgatcggactttgctgaacaacatttcatttattcaccagctcgtcgaaacgtatcacaacaccgaattcagcagaggtctttgcttggagcccacttaattttcttccttttcac

SEQ ID NO: 34246 - DNA, 481 bp, Oryza sativa
  unsure (1)..(481): unsure at all n locations
tcgagttctatagctcctaagaagactaaggagacctatgatatgctcttggataagtatgagaagcaaggaggtgagaaggctcgcaataaagggaaaagaccaagatcacctcctatggagcgatttggtcattcaccaagacggtcagaatcacctacatatcatcgtcctcaagatatgtcatgggggccttacccaatgtcgccggcgggttatccttttccttactacatgccatggggggcaacaccgccaatgttcaatcatatgcctccaatgcaattcaaccaaggatggggaggaccaagcaggccagctcgtgagcgttnttcttcaccaaataatggccggttntatgttaagaacagggccaatgaggagaaaagggaacgaaagcgcgataaagtgaagactacgacttcggaggtgattactatcanagtggnggctcatgatgtgccaataacctctagagatg

SEQ ID NO: 34247 - DNA, 446 bp, Oryza sativa
  unsure (1)..(446): unsure at all n locations
agcttcaaagttatttagccctctggccgactttatcagcacctcgggttctgcattacgtaacattttctctaggtcgattttgtcctcaacagaaccatcgtcatgcaccatgtcttcaacttgtgtcggaactacattttcaggctcgtccacttgttcttcgccatgacgtgtccatatttcgtacttgtccataaatccgtgagttaccaagtgctccttcactttaaaagcatcgtcaaagtcccaggctatttcattcttacagtcagcacacggacaaattatcttcctcatattgttcttctcagcgtgaaccttggcaataccaataaatttagccacttcgtttctatatggagacaaaaacctcggccaatgatacatccattcccgactttctatatctctaanaaatacacgtaaaatatttgcacaattaa

SEQ ID NO: 34248 - DNA, 478 bp, Oryza sativa
ttgcaacattcacatgtaaatcgccaatattatatcttattcatgatgtggaagatgtatatattcattacaggcagcaaaaaggtgtgatacatatatttttgtaaaccgatcaaaactacgaggattctctgttgggccaacaaaacaaaataagataaaagtttgactaattttgttttattcgagatgatgtgtaattctgaattacttctgttatattgcctgctatttcttgtctacttgtgtcttttgtctcctgctgttttcctacaacttgcttcttgttccttgtgaataaatagagattagatgtggatccatattttttgctcttggagtaaaaaaagctaaaggtgtgtgctccatttttcattttttttatattataccatggagattggattgttgatctcgtcagaagtgtacagaaccaattatcaattaactggctacagttcgtcatatataacaagag

SEQ ID NO: 34249 - DNA, 301 bp, Oryza sativa
atctaagtaatacagtactcccacattggattctttgtacaacttaattaagtgatgtcatagttatacccctttcaatattctttctaagtgcggctctgactatatccatgatggcattcaaaaatattagtattgctgcacttcgacattgtcttagcgaagctactttgacttatcatatctgttgcaattaggctgctttcgacagcatgtgaaagatagaaagtttgtcacgttagcggagtgtatgtttacactactaaacggggagatttacactactaaaaaagtcaatact

SEQ ID NO: 34250 - DNA, 367 bp, Oryza sativa
  unsure (1)..(367): unsure at all n locations
agcttaatgttgtgtcaatactaccataaaattattgtgctgcaagatgacataatcaattactactgtcaatttttaagctgctaaatactgttaatttgcacaagaaagatttttaaagctcanatgcaacccgtacatatttagcaagtcatccacggctgcatctcattaaaacaatcctgtgtgctctttgaagcaagaaagtagtttgtattcatacaagacatcatgctatgccaaggaatttaatttcgtgtgaattaaggcaagtatatatgagtaaaggtcgaatcgtgtaaattaaaattcttacaacatacacataaatagttgaaaatgatgtgaacagaaactgatgccacat

SEQ ID NO: 34251 - DNA, 481 bp, Oryza sativa
  unsure (1)..(481): unsure at all n locations
atccacaatcttttgagtacttgttctanggtactactactatctttngtatactctctctctacactttctctctctagtttctctctctatctcaagagaagaagggagacattatggagggatggatgaattggaaggaatggaaccggtttcatgtgttgtctggggttaggtactggtcttaaagggccttggtgattgatgagagagaagaagaagggggaggagggtagtagtagaactagtacgtatagctagtatctgtacacatacgcggagaaagcgagagaattatttcggaaaaaaaaggtggtaagtgtaaatacatataaacgggatttattcggttagggttctgatttccggataagatgagaggccaaagttggttgatggcatccacgcgataacgacatacataaaaggaccaaaaatgagtcacaagcaaacacttaatgcctttcgcatctacactacc

SEQ ID NO: 34252 - DNA, 374 bp, Oryza sativa
agctctacttatttttttatgtagatatacatattaattattttgatatgacacacccttctcacaaaattaatctcaagattttttggatttcaaacatgttttttttgtgacaccaatcatttttatattaatatagtaaattcaataaaactacctttatattttagtaaagttatgaaagccaatatataaatttaacttggtatatgacaaaacaatatgttcaaggctaaacttatcacaaaattacatatttagaacatcatcatcaatagaaaaataacaaaagacataacatgcaataatatgcctcaatgtcttatacatagtgaagctaggtcacaacacattaaatgctaaagtttgctata

SEQ ID NO: 34253 - DNA, 352 bp, Oryza sativa
cctggaagtcagaagaattcatgcatgtccgaatgactgcattttgtattacaaggaatacgctgacttggatgtctgccctatctgtggggcatcaagatacaaacgagcaaagagtgaaggtgaaggaagtaagtcaaagaggggaggcccagcataggtggtgtggtatctcccaattgcggagcgcatgaagagaatgtttgctaacaaggaacaagctaatctagtgcgctggcatgccgaagaacggaaagtcgatactatgctgaggcacccagcagattcagtacagtggaggacaatcgatatgatttaccaggaattctcaaatgacccaagatacatgcgt

SEQ ID NO: 34254 - DNA, 294 bp, Oryza sativa
taaatattaagcacagccttaatacaccggttttggacaagttatgccttcatttgctacatttatactcagacagaatcagtcttttcatcatcagatttattactactcggctgaagggtggtgttgcggaattgatccacatagtcacttgcaatcttgtcagccgcattttgagcattgctgataagatcaagagcaagctctacgcttgttccgactgcaagccatcaatggggtaatttaaatctcgggtacaaagattggtcatcgtcaaggcgactaactccatac

SEQ ID NO: 34255 - DNA, 445 bp, Oryza sativa
acaagagtttacacaacttcttgagctgtttaatgatctgtggccagacgggaacatattacctcatacgacatatgaaccgaagcagggattatgtccgctgggcccggaggtcacaagaattcatgcatgttcgaatgactgcaatatgtattacaaggaatacgctgacatggatgtctgacctatctgtggtgcatacagagacaatgcgagcaaagagtgaaggtgaaagaagtaagccacagacgggaggcccaccagaagtggtgaggtatctcccaatagctgagcgcatgaagagaatgttcgcgaacaaggaacaagctaggcttgagcgctggcatgccgaagaacggaaatggaatactatgctgatgcacccaacagacttcagacggaggacgaccatcgatgggatctaccaggaagtctcaaacgaccc

SEQ ID NO: 34256 - DNA, 412 bp, Oryza sativa
  unsure (1)..(412): unsure at all n locations
agctttngtttttgtttcggtatgcgcttttatcatgtccctaatttattcttatttcatttcatatatagacgtgccaatattaccaactgtcataatgcgtgggcagtatgaatctatggctctatgtcgttgcataagatgttacttcagtttttgacatctgaagcaccatcctctggtgttaacagtcctagttttctttcaagatcatcttgcagcagctcgtggttcaaaaaagtaacccgagagcgatgggtatgttcagaatgtagcaacaatgcatttgtttggcttcacgcaaacttcactcgtactccatcgattagctggatcaatctcaagacaagttctgcatgttgtgctgcaacagatgacccaagaaagaaaaatagaattcacgacggggatt

SEQ ID NO: 34257 - DNA, 485 bp, Oryza sativa
  unsure (1)..(485): unsure at all n locations
tgacagaatcgaatgggtctaatagcactctatataatatgatacatgacagngaaaaggaagtgatgccgactctagcccaaccggactctgagttcttgactttgcaggataaaattcagcaactagaggaatggctgagggaatctaagtctggattgccattgacaattgcatcaacaggagaaaatgaagtctgcgaagatgagatgagcacattcgaaaatattgttaatgatattaaagatgctgttttcagagcagaaagtagaacacagaatgctgaagcaaagtgcaaacaactttctcacgctaatatacaactcgatgaggagctaaaatccctcaaaagtcacgggtcagatagggctggcttactggaggagaagcttaaggagtcagaaactcagttactgcatgcaaaagcatcgattgaggctattgtcgaacggcacagtatatttaagtcttcaatgtctgatatg

SEQ ID NO: 34258 - DNA, 284 bp, Oryza sativa
  unsure (1)..(284): unsure at all n locations
ctatttgcattttcatgtaattatgcaccaattggagcaagctgatgatgatcatgttcttgtcatacgtgaccttagaactaaccctcattacactggcagaggattgccatgtngacaagacaaatccttgtaccatgaattcatattatggttcacatgaatgatgattcataattcatggagttgatttgatctcgtttatcatgatggtagaagtttagttatcgaaaataatagaaagaactcgatcccttgaactagtagaatgatcttaataaatt

SEQ ID NO: 34259 - DNA, 396 bp, Oryza sativa
tttaagcaattgattggatacaatatcgttgctttttgccacgtaagtgtgcattgttattgaccaatattatggcttacgctgattatatattgtggtcatttttcaggcgggtggtaaatcctttatgagtttatttactcggattttataccacatatgccatatatttccaggtatggtggaaccatgtgtcttctacggacttaagcacatctgttaaagcagtgtgcgcatggcgtatgcccaatacttaggaaatgtctttattcacaatatacaagcttctttatagctatttctctatatcactcatcatattttacaaagcagttggtatatcactcggatcatgttatttggaggattcacaccgcatatgctatatatcgatat

SEQ ID NO: 34260 - DNA, 435 bp, Oryza sativa
  unsure (1)..(435): unsure at all n locations
tactcagcttcgatgtgcatcgactacaccgaccttaacaaggcatgttcttatgatccttacccnctgcctcgcatagatcagattgtcgactccactgcggggtgcgaccttttgtgttttctagatgcatactctggttaccatcagattcgcatggctagggaggatgaggaaaaaactgcgttcattacccccgtaggaacctattggtatacatcaatgccttttgggttaaagaatgcaggtcctacttttcagcgtactactcgaatttctttgggtagccaaataggacgtaatgttgaggcgtatgtcgatgacttggttgtaaaaacgcgcaaccaagagaccttactctcagatctagcggaaacttttgaaaatctccgctccgcccgcatgaaactgaaccccgataagtgcgtgtttggt

SEQ ID NO: 34261 - DNA, 435 bp, Oryza sativa
  unsure (1)..(435): unsure at all n locations
aacacatgtccgtgcattctctggatgcctcttctaattatcacatccatatgatccactccaaccttccaacctttctacacagcattattgctacttttgcctgtaatgttacctttacaagcatatcatttaacacatcacatgctccacaacagtagcgaagaagacacggctattaaaaaagaaactcctaactcaaatttatagtaatacatatatatgtcccaaaaatatatatataataacctcgatatagattagacttttcatattactcatgaattgaataaggcttctgtctaaattattggactagaatgtctacgtataagagattttaggtggatgaaacgtatactaatacaattaatctggatagggagcatattcataatcatattattagagtacgtcacatccacacanatataa

SEQ ID NO: 34262 - DNA, 446 bp, Oryza sativa
  unsure (1)..(446): unsure at all n locations
ctctgnacacatcttcaatgttcctgcccactgtctgagcaagtatgttgggcagtgagtatatttcatcctctgggcaatcaagggaagctatgttcaaccaggtggccacagcctcaatggcacttggtggctcacctatcacatgcaaaccgcatggcangaggcgtgattctatttccatgatcttggcatacacctttccaacaataaggtcacgcttcattggtggaagctccatacgttcctcgggcaaagggaacatccttgtcaagattaacttgtttgcagtgctaatgattgagctcacaatctgtggaccacgtnctgtgtccttgagagaatggtaagaagagatgagctctgaaagctgcttgagccctttgtagagaccaacattntcagctggtggtgtcaggtagcttaatggtgttgcatagcttcta

SEQ ID NO: 34263 - DNA, 371 bp, Oryza sativa
  unsure (1)..(371): unsure at all n locations
agcttaatttgactattaaataatttcgattttatatatgttgaaagatctttattanaatttaaatttgttgaaagttcctggtttcgtttaagaagaagagaggtggcctattttttagggaaaaccgggcccgaaaaccttacaagccgtggttaattaagggaaacctggtcaagacccacatgaggaactactgaagttcgaaacaaaagtcatcgttgccaagctcagaggagcagctccgacttcttaagaacaaactacgaactagctaggcgaccacaatgacaacgtaaggcagggtcttccaaacgaaacctccaaagaaaagcgttagagaacacaaacaacgttcgttcaagaattgg

SEQ ID NO: 34264 - DNA, 501 bp, Oryza sativa
  unsure (1)..(501): unsure at all n locations
ctcaagcttcctttgcttcctccactcaaatccagagcctatcatgtgttatttgtttattatatgagagtgtcagagtgttttggagatggcttgaagattacgcttgattgagcactttggataccttgtgggctgtcacttgggcttattactctcggagatattcttctatacggctaggtgtcgcccctgagctctcaaatatcttgtggctgtcccgggaaagtttgtgaaggttttccacacctccgcaaggaaacgaggtaagtgagtaaagattcttgtgctgagttntcacaggttgtcctacgtagagcaacttgcacttgtggtcttttctagaagagattatgagttggatcttggtgcgcactcaattctagaaaatgacctataagtgtcgagatgatggatgtggacctcttctgggatctttgcataagtgacgcaagggtgtaatcgagacccggctctctggagcacctcaacagagagtat

SEQ ID NO: 34265 - DNA, 217 bp, Oryza sativa
agggtgttgtgaaccgagtggcctgggctgtaataaaggcatttgaggcgccactcacaatacactaagcgagttgatttctttaaaattgtcatataaaaaatggttgttaataattggaagcatcattgatagctcctggtaggggattgaaataaccaaagtggggtgatgtggtataattaattatgcatattttggttatactatccaatta

SEQ ID NO: 34266 - DNA, 413 bp, Oryza sativa
  unsure (1)..(413): unsure at all n locations
agaaataaaagacagtcatacaagcaacatgcgtaaattattncattacagcaagattaaagaatacaatgctgcaaaacatttgctggtaaaagagccatttgctacagaatagatgtacagtactaataacactggaataaagtctgaatgagaaccactaaaagagattatgaagtgcatgtgccattagtttggtttaattaaaagagaaagggaggagaacagttctacttttccaatatttttagagggcttctatgggtaaccatctggcataacctaaggtcaaagaggctctgataccaactngtcacgcccggaatttctatccaaaatttcaaacgcttacatgtgtgtgaaccctcgtccaagaatcagtcgaggaacacantaactacatgataatagag

SEQ ID NO: 34267 - DNA, 431 bp, Oryza sativa
agcttatagaacaatatataagtcattttaacatataacaaacatattattttttatattaaatattagttttaacaaaactaatttgatattataaatattgctaatttttatatatatatatagactaattaaaataacttatatgtaaaaaattataacggaggtggtactacactagtactcctatgttgcttgctcctgagctagctttcgacttgtcggccgctctgatcgatgctgccctttatccctctcctttctgcctcgatccgggccatcgcatgatttgcgtttgatgcaccggtgatgaccgtccaacagcaaattctggcgggcatgcatcacaccaatcgtccatggatcacttcccctctcttgcatgtcttgactgctgttcgccggtcaaaagagcttccatgctggccctg

SEQ ID NO: 34268 - DNA, 489 bp, Oryza sativa
  unsure (1)..(489): unsure at all n locations
ntaagaatatagggtcaaataagcaagggcacaaacgtcatttttttatctaagttaacaccgttatgttgacctcacgaataagggtcagacctgatcttcggttttgaaaatgagggtcaactgagtaaacttcaacaagtaggggcaaactggtagttaggtttcaaaacagaataaaaaagagaattgcccctatatttaatgtaaatatcttgaagtgtgtgtagatctatctcttgtatgcgagtcaacactaatcattcttcattctcttatagcccactattatcctcactctaatttgaacgcagcctgtcttaaaaagacaaaatcaaatcggtgtaactctatctagttgtaaggtactatacacaacaatntattggccaaataatccaaaagctatttattaagaatatataggactctagctaccagatattatacatatacaacaatttattacccataaccaagtaatttatt

SEQ ID NO: 34269 - DNA, 444 bp, Oryza sativa
  unsure (1)..(444): unsure at all n locations
agcttnctattggcaatgaaggagaataatcttgttgccatgctagatagcctaattaaaggtcatgagagcatggaactgctcagtggacttgctgagctagcgaagcaatgcttggacatgtgcagtgagaataggccatcaatgaagacgtcgctgaggagattagcagactaagaaaactttcgaaacatccttggatacagcgtgatagtgagacagagggctatctcagtggaccatcaaccagtaactttgaaattgagcaaagcactgagtacacaaggaaggacgaacaaatgcccataaacccaagcacttcgtattttatccggtgataacaatctgttacaagagctttcctgttttccttattgattcttaacattattctttccaattcactggtggttctatattgcaactgcacaatactttctgttg

SEQ ID NO: 34270 - DNA, 294 bp, Oryza sativa
  unsure (1)..(294): unsure at all n locations
cgcggagggagaggaggangnggtagaggaccgccggatccactcgccggaaatgcctccgccaccgcctncaccggatgcacccgccagaaacgccaccgcagccgcctctgttagacccgccagcgggagctgctgacgcctccaccgaatcagcccgccgaatacaccactgccatcggcggatccgcgggagggggttgaggaccaccggattcttgctgcaggagccgttgccgcctcctctactgccagtaagggagagataagagggggagggggcagggacaagag

SEQ ID NO: 34271 - DNA, 316 bp, Oryza sativa
ttaatatattctctcgtaggaccctgattatatattgcataatattgtattattagactatatttaatattttaaatgtgtgtctatatatccgataagacgattcaccaagaaaaaattctcccaggtccgacgcggccaaatgcgatatcctgcgtgatgcgccagattcagcaagcctgtttgaatgtctgatgctgccggtctccttcagtctctgaacaatccatatgtttacaacaatcgaccaagttgattagtaattattaccttctatagattaattacttgatcgatctgtatctccatcgatgaa

SEQ ID NO: 34272 - DNA, 466 bp, Oryza sativa
tactcagcttcactgcttaccaccagttgaatggttttttttttgtgaagctatgtgacatatgtatcccatgagttaaaacaagttccccaacaatttctgggatgctaccatcgaatgcattattggagaaatcaatgaatacaagggttcttagtatttgagcaagtgtggtgtcatgacctttgatgtgagtgaggctttatatctatatactagtcctacacttggcacagcatgatccatgaccaatgatgtatttgtgtctatatgtagcatcgactacaacttcttaaaccacttgtctttgggcaacggaccagagaagttatttgaggatatgtcaataattattgcatttggaaatgcacatgtgctttcttcatccttgagagattgaacgacatgtccaaatagcttattggatttcagtacaagcacttggagtctacgaggttactcattc

SEQ ID NO: 34273 - DNA, 454 bp, Oryza sativa
  unsure (1)..(454): unsure at all n locations
attccacaaagcagtcatgcactccttcagctcctgctgtagcaccacacacacgcatcccgctcctcccncacctcccaccacaactcgccatcgtcgatgggatcactatataaaaagcacatatagattggtgttataggtgtcggaatagttaaaaccggcacctatattatttttcccaccttcacatgttgaagaaaaaatcaacacctttaaatgattgtatgtgttgtttctcgaggaaaatagatacctatactataggtacctttttgaaaaaaaaacaacatatttactatattataggtgtcggttaattaaaaacccggttttatattgagcgaagtgatcgggctcgctagttgaaacagacccctgtctttcttccaaactctatcttgggctgagctggctgtgctggctaagctggagccattagcgggcatggagc

SEQ ID NO: 34274 - DNA, 257 bp, Oryza sativa
  unsure (1)..(257): unsure at all n locations
agaaaatatatgtggtcgatattgaactatatttacatattatatcatttagaatttgtagcactgggtttaaagaatccgccgcacgctgtacatatatatatatgtgcgaatgtccagtagatgatcgaccagattattatgtaaacgtatggtgtatttatacatcctcttcttaatctaatattcatactngtttggtaaactaggacagtagctngcgcacatgcgccggcctgttgtttatttgtttaaat

SEQ ID NO: 34275 - DNA, 310 bp, Oryza sativa
gagcttcatattatggtgaagtgacttctggttttttgtagatgattatgtcaattgatcctgtttgaacctcatgcatgttatctatatttgaacttgacgctatgtttttcaactggcacaaagtctttctgttccacatatgcataatggtcttgtagatgatgctgctgctattgaatgtctcgacctccatcttcaagaaatagtggtgagaaactacagaagccagaaatctcatgctgcttttgcacaattctttgttctaaatgccagcgtgctcaaggtgatgacatttcgagcctgtgtg

SEQ ID NO: 34276 - DNA, 460 bp, Oryza sativa
  unsure (1)..(460): unsure at all n locations
tctgctggctggttcctcacatagtcacatcctagagagcattctacaactcgcaactgctgcatgctgtcaatgaatgcatttgcaatcatcacatgcatgtttctttttgtctgtactgcatgaatgtgtaagtaaatgatgactgaataggaggaacattttatttttctggtgtatccttttgtgactaataacaactacaggctatgtgaggaaataagtaatattttactctttcctgtggatatatcatttggagtggtacagctatgcagctagaagtagtcgagtatctgaaaacccatggcatgcaagtaactagcaatttgaatgatgaccaanatacccagaatatacattcaccatcggtgtggagaaatgtttctttgacactttacattntcataccatccctcctccatagcataaagcgcacacacattntaagattcaactt

SEQ ID NO: 34277 - DNA, 441 bp, Oryza sativa
  unsure (1)..(441): unsure at all n locations
gcttactataaagtattaacactntatggtgggtcccatctattctttttaattatggcatgactcatgtttgaagtttttttagatgggtctcaccttattatccactctacacatatatacattgtggtgcatatccaacctactactaccagcagggttcacaattccgacgaanaccagtcgaattccgcaaaattttaagatttcaacgaggcttgaaagtagaagccgtctgagatttcgatgagtttcatctaaattcaaatttgaattgataaaaaaggaaaaaatcaaataaaatattataaatagtatgatattcatataacctattgggatataaattntcaaaacagtattctgtgtatttattgaaatttgcagtacgaaagaaaagaataacgaattataaaaaagaccaaagactgtagttaccga

SEQ ID NO: 34278 - DNA, 434 bp, Oryza sativa
atgtcaccaagtatgtttggtttattgttcaaactaaccctagcaaaaatcggtgatgtcaaattttctatatgtgatgagatggatttggtttataccatcatcaattttttttgagggtttaagagtgaaaacttccgaaactacataaactttagtaggatagcaatgttggctattgtcataccaaaggttaaaagtgttagtacaaactaaacaagctgtgtatatatgcagggcactgtagatctgtgaagcttattgcaaccaagacttttaaaggcaagcaatcctacatggcatattggattctactggtaattaattactgaagccacacagtcagtcggactggagtgctcgatgtggtctccgccagtagaaccacccgaacccttcacgcacacagagcacacagacctttcgtcttcatg

SEQ ID NO: 34279 - DNA, 451 bp, Oryza sativa
agcttatgaagccatactagttgagcagtgcttatgatattatccgcaagcctgcttgaaaagtattgctaatgaccaccacaaactatgaaaaattcaccagttaatgaagaagaaaaatgattatgcctgatgagagtttcacatatgacaaccaagtctttcattccttcaatagccaaagtaacaggtttacagcgaattgcatatatttgccattctaaatagtgtagaaaatctggctctgctcattctaaatagaccatgaagaaagttatgatgaagctcttattattaaaagaagacaatctgaataaagagaggtcgaaatcttgaaaacacacgcaccaatatagacttagtccaaaaggaacagagagagcaaaataaccaattatcaaaggcaggaacttcactacagctcgagcaccttgttgctaagatcattgtc

SEQ ID NO: 34280 - DNA, 465 bp, Oryza sativa
gatagctccacatcacttgtctatggccagaagcgtgaacgcggcaaggggaatgtcggggagttggcgccggagccaaaaatgggcaaggctgcgacgtcgatgccggtgagcatatcggagaatgtcgtgagggcgccagcccaatttgagctaggcatgccattggtggaagacaatgtgttagctgtgatgggtattgcttgccgagagctacataagcaatacatggagctaagcaatgccaagcggaaaatgagggagtcatccatagctggacatcacgaccaccagccattcctatcatcgcctgcctatataactataggttttgatgacctcttcgaccttttcatgatccggaagttagacactggtcttctagaatgctactccttgtaagtgcataccttctatacttgtgatatgactggactatatctgctaattaaattagttctaata

SEQ ID NO: 34281 - DNA, 442 bp, Oryza sativa
gctcgcataatcacacaattggagttgctatgactaaagtcacaatccttatatggcattcctcataatcagcattaccacttgtacaactataccaatccccagatcgatcgtgtactctgacaaatgcatccactattaacggataacctcaaagacaggagtccggtgccaataattttctagccgcaatgaaatgagattaggggcagaaatacgagtgcgggatatttggctgaaagtgcaatgtctgatattgaggcatttcatggactgtgaagtgatcttcttggcatctgacaagtcacagaagaagatatctagatgttccagcaccggacagcatgagaaatcgggaaaactgtgcatcatatggacaccagaaaggtttagcttcgccaagcaccgggaggctagaggcatgtcgtctagctagagctga

SEQ ID NO: 34282 - DNA, 460 bp, Oryza sativa
  unsure (1)..(460): unsure at all n locations
taccagattctatcgattcgatctagcttcaataggtcgatgggagcatctatcgattttttctacagacgaaaattttgcaagggactagctaaggagttgtcgacagtttttgaggtccaaaactttcaaattttttgactacaggatttgtcatcaatggttataggggaacaatccacactagtacaaaccatgaattttagtgtccaagctgattgaacaacaagaaattggcctacatgtagaagggaaaaaaactttcaaattcaaaagtaatatgcgctcctaataaaatngcaaatcagtaatttatacaatgtaactaccctataactatcatgtaactactctgtaattagggtgtaagtgctatgtaactagggtgtaagtgttatgtaactactctataactaagatgtaagtgatatataactacggtgtaagtgatatataataa

SEQ ID NO: 34283 - DNA, 441 bp, Oryza sativa
  unsure (1)..(441): unsure at all n locations
ctgcagctgatggagtaaaaattaaagcctatcttgtttcacctatgaactttgttgaataaatctatgactgatatcttcagataatatagaactaattattctttgaattttgatatcactatttttcttaatgactcaaagatttatcatgttttataatggtttcaaattgatcgttcataattttaaatctaactaaatgtgttggcactgattaatatgatatctatagattggttaatcttttagcgtgactccctagcgtgttaacagcctatagaagtggtgcaattgaggccatatatgctagatctttttttataattggtggtttaattgaagccatatagtatctatgggttaattattttacatgaaataagatgaatggcttggtactgtaaaatatcaacaattagtttaagctaatntctttcg

SEQ ID NO: 34284 - DNA, 488 bp, Oryza sativa
  unsure (1)..(488): unsure at all n locations
tgagaacccacanattcttatgttctggtttacccttgtaagcaggctgttggcagtcggaacatatagacgggcagcctatttttcccagccgagccacaggagtggctactacacagcagcgagggacaatggattgtcggcaaagcgaaagattccaactgtcttctctagaatgttctcacattacaaggtaattgtcaggaagaacaaagctggngatcacaagtgcagaaataggatttcaaggggattccgtaccttctctgggacagtcgcgaattcatcggcaacacagcacgcccaattggcatggaagcggctcagtcatacatacatgtacagcggaccccggtttccattgatcagccgagcagcctgtgctctaagcttttccttcacgaggttccatgttgtccctggggtcatggctctagcatttggcaagtttgcattgtcacggcctgtcctggcagattcaccacacc

SEQ ID NO: 34285 - DNA, 443 bp, Oryza sativa
agcttgactactttcgctccaggttttaatggtatagtgatggtcaaaaaaaagtatcgtcttgctaaatggaacatactgtgccgccccaaggaacaagggggattatgaattcatgatttggaaattaagaatatggctctacttagaagtggctattcaagttgctctccacggaaggggtttagcaacagttgatgcgtaataagtatctcggtgataaacctcttcctcaagctcaatggaaggcaggggactcacacttttggtctagcctcatgaaggtgaaatgggactttctccgttttggatcctttataattaaagatggctcccaaattatgttttgggaagacaaatggttgggcaattcaaccttgaaagaacattatccttgcctttacaacatagttaggcataagcacgctacagttgcacaagtc

SEQ ID NO: 34286 - DNA, 477 bp, Oryza sativa
  unsure (1)..(477): unsure at all n locations
tggtatccgggtatcggtgtggagagacgccattgagaggtgtttatacaggttgccattcagtaaccaaagtgagagtggatcatagtagctgcattgccaatagcctcttttcaattcttgtcgtatttcttggcgagatgaagatgaagatgaagatgatgatggccagaactagtcagtggatgtatatgcacagtttgtttaggcgtgcgtncctgcatggntggttcaccatctccctgagcttcgttgcagattgaattgggttctggagaggaaaggctaatggaaggagagaatgataggcgacgtcattctgtgtaattntaagtgtacactagcgacagcatcacgggatgccattgtaatctgaggttgatttgtttntcttcttttttttttcctccccttttacccatgtataagtcgatcgcatgtcacgctatgatgcatatatatgatcatactattgat

SEQ ID NO: 34287 - DNA, 417 bp, Oryza sativa
  unsure (1)..(417): unsure at all n locations
gcaactaggactgtacacagtatctcgctcacgctgatgggacgataatggaatcaaatttctccggagcaaggtcacatgaattctcttccccagaccttcaatgcgctagctgcgatctccgcatttttatcacccacgccccgccccgccgtcaacgctctactncctgcgtactaccaaaatttcatttcattcggatacaacgtttatggccggagttagtatcaaacttataacttttccatcgcatcacagatttgctacaacacaaattatcaacgttttcgtcacatcgttctaaattcaaccaaacttttaattttgaagccgattaaacacaaacgctttagaatttttcttctaactttcaacattatcataacataaaaacttttctacacacgaactttcaac

SEQ ID NO: 34288 - DNA, 446 bp, Oryza sativa
  unsure (1)..(446): unsure at all n locations
actcagcttattgaatgaatgaacagttggagcaaagattgcagttatgttgcaacagggaggagatgttgaagattgaaatactgggaatatgcaaggagctatcaggcttgagacagtcctaccagacttctcatagtgaaatttgcaacctaactaacaaatacgattccttgctgcaggagtacaaagttntagttgagaagtacaatgctttggatgatgagaatgctgctgttattgcagaatgcataaagctcgacctcctgtcttcattctttcatgaccttactgttgagtctgcatctgttttggtttctcttgacaatgatatggctatgttgagttcggctaggcatgaacttgatcatgaggttaccatgctgaacagaagagctaagattcttgaaatggactntcagcacctcaagtgcactctagagaac

SEQ ID NO: 34289 - DNA, 408 bp, Oryza sativa
agctagctccatattaatccacgttatcagtttctttaaatcgttcaatctaatcccatggttttttctgacggcacgttacatcggcttaatactgaacgatacgtcatcggcaacccagccgatcggtgttgtttatagatttaactttgtttcatctttggtttcttgttggttgcaggatcaaaccaaatagcacgctcaaaactcgaaagcaattctttggacctgcactggagctaagcagaactcccagtgcttgtttttttccatcgacactaggataattaggtactactatgtcctaaaaatagacaaaccctacctatatatccgatggattagggtttttttttacattacatgtgcatacttcagagcatatcatgtatgagtattttctaaata

SEQ ID NO: 34290 - DNA, 479 bp, Oryza sativa
  unsure (1)..(479): unsure at all n locations
cctgcatttggacctatgatactcagcttactagacaganaaatgtatctcctagaatacattgcacagaacaagcgagcctacacgctgtgatcagactgtcaataccaatatactcactccattccatatggatgattatatgagtttttcatcgagataaaggtagacttaactaccatatatttcatttaatacgagtatgtgggggttgattttttatttaatgtgagtatgtggtggtgaaaaataaagaaacatgcatactttaactttccacatgcacaagaaacgaacctttaactatccctaaatgcctgcatgcatgaatgcagactcaatttacatgcatagatgcaataatgctacatatcanatgaaggggtcatggttatgatcaatttggaagtttttatcttggttatatgaataaataatttggaatgaagggagtaccaatatactataanactaccatc

SEQ ID NO: 34291 - DNA, 428 bp, Oryza sativa
  unsure (1)..(428): unsure at all n locations
ggattcttaagtcacctgcagcatgcagcttctcgctggaaatgccgggtcattattgaattcaaacaggcaatataatttcaaacaaaaaagatgggagtagctatatttatggcgccatatttttcaccaaaaaatagtcggtatgttttacattgtaagtacattgtaagtccttaaattacatatgntaatttagtgtatctacaatgtaagtctcaaaattacatatgtaagtcctaaaattacatactaattacatatctaagtggtgtgtaactaccgtgtaaaattttataaaatatgaaaagtgacatattcgttgcaagaaaactgtcgattaagatatagcaattcagtatataaaaccaaccggaagatcgggtggatacagttgccttttcatgcgaacgaatcctacagacatg

SEQ ID NO: 34292 - DNA, 411 bp, Oryza sativa
ccaatgcttaacggctggagcatgcacatactggcacaccttatttactgaaaatgataaatctggtctacacaaagtcaaatactgcaatgctccaaccagacttctgtacctggtactggatattgtgccaagaggactaccttcatgagcacttaatctttctgatatagacaaaagagtattgactgctttacaatcactcatattctctctctttaacacatccatagcatatctctattgtgtcaaaactatgccatcatttactgttttaacttcaatgcctaagagagaatgcagtctatctagatccttgagtgcaaattcttgagtaagattcttaagcaaagcattaatggcatcaatagatgagctcgctactataatggcatccacatataccaacat

SEQ ID NO: 34293 - DNA, 397 bp, Oryza sativa
gcaagctggcatgcgaacaaccattgagtgttctatgaagagtgagaactagttggctgatgatgaagatggcaaatacatggccaacaaagaatggatggagctcatggaagtggataccaagttcaccgctatgtatttatgcttcagagatccaatgttagtcctcaatgcaattcctcccacaaattggagttggtgcttgatccgtgactttggagtggtcagcctctctttcgtttcatcgaaattggaagtaatctatggttgctttgaccggagctcagaatacacagttagatctccaccactaccaccttggagagcagtaatttcatggaacaaagctaagatgacctctagttctcgggccttaccatggcctgatccacagctt

SEQ ID NO: 34294 - DNA, 354 bp, Oryza sativa
  unsure (1)..(354): unsure at all n locations
tgggcatgcaatactgccaccttttactgaaagataatctggcagtcgagcatatctgcatgctccaccagaatctgacctggactgtctatggccagaggataccttatgacactaattttctganaagacaaggagtattgactgctttacagcactcatatcactctctttaacacatcctagcattttctcttgtgcaaactatgccatcatacttctttacttcatgccaggaagtatgcatcttctatatcttgaggcaattctgataagattttatcaaacattagtggatcataatgagctgctctatatgcatcacatatccacataacatgtacatctcctact

SEQ ID NO: 34295 - DNA, 464 bp, Oryza sativa
  unsure (1)..(464): unsure at all n locations
tcatgaagtttgacataatctttagacccctgtgtcatggtcaaacaatctaattaggtagcataactacgttctgaaatctgtagacagctgcattcatctttctgtgtagcccaaagcatgcatgataaaatatgcaccttttcacagtagcttatcaacatacctagtagtctccacgaattttggctaaagttttgagtctttgcatcatggcataaaaattcatatggcactgcatagtcccaatctgaaaacagtagtcaacctgagtgtttaatttgtgtagtctaaactataaatgataaaatcttggttccttcaaggtagttcacaacctaactcacccatctctctgatttttgcctggattgttgcacctttagaacttgacctanaagttcaacaaagacagtaaactgacaaaatccagcactgcactacttggcatgatcattntctct

SEQ ID NO: 34296 - DNA, 278 bp, Oryza sativa
ctggatcggtgatttctcttttctgtactgggaccgcttgatcgatttccttgatcgctacttatgggcgtgcgctcaaaagataccaacagggattcgcacaccaaaacgcgaattcgtagtcacttcttcctgtcgcgtaagaaacaggctttacgcgagagcaatacaggttgggatacatctatctcttctgagcaacctcttttggattcttaagaccacccttgcagtaagatcccccgctgctttgagttctttattatattatctccttc

SEQ ID NO: 34297 - DNA, 412 bp, Oryza sativa
  unsure (1)..(412): unsure at all n locations
gctgctgagtattggaaacaagctatatctcttactccgggaaattatattgaagcacagaactggttgaagattacgaagcgcnttgaatttgaataagaccactctcctttttcagaaaatgggggtttggttgttgatccattaatcaaataaattaggtcggaagatcgaatcaagagattcattatatctctttcctctgccttctattttatattatatttcataaggataaacgatagggtctagaatagaagtaataaagcgaataaaaaggggcaatataaatattgctaatatatcacgaccatcttattaataattctaatgagttatcttggaattcggaatcgaataaaanaatctatattatgctcaacgaaagtagatatagatagggacctatact

SEQ ID NO: 34298 - DNA, 408 bp, Oryza sativa
  unsure (1)..(408): unsure at all n locations
agcatcctcactagggaaatttcagatcatacacctttgctatacaattcaggcggtgcgtccgcagcttaccaacctcaatttaaattngaattgggctggttgcggagggacggtttcagtgatattgtaaaggaggtgtggcaaggggtgtccattgagggtacacctttagagagatggcagaggaaaattagacgattacgccaatttcttcgaggttgggcgaanaatattactggtgcttacaaaaaagaaaagaaagagttattggataaattagatacacttgataagaaagctgaacatactatactcaatgagtntgaattaaatgttaagcatgttctaaatgatagactggctgagttattgagggaggaagaaaataaatggtaccaacgtgct

SEQ ID NO: 34299 - DNA, 304 bp, Oryza sativa
cgcaactctcgcacagtagctggttgtcgtccgacctcactgtttttaccgtcattgtcaccgagccattctccgctagatctagaggaggtcgttagccctctctgttgctaccgacgctggtggtcttctcccctccgcccacatctaagaaagggattggagtggggaacccgacccgtttcttactactgtactgccactggtaacggccatgatcccctctcacccgatctaggataggaaaaggacgctcctagccggatcggcctcaatccgtgtcccgacaaatagtgcaacccag

SEQ ID NO: 34300 - DNA, 481 bp, Oryza sativa
  unsure (1)..(481): unsure at all n locations
ttaagctngactctgcnggnttatatctatatcagaaagctataatgcatggctttatattgtcaaacttataagtcataactgatattttaatatgaaatatagttacagaaaatggcaacaactggagtgcaagtcagcgccagctcgtttgtttgggaagggtagttctaaagaagccaaagatcttggctttggatgaagcaacttcttcagaggatccaataactgacaatntgattcacaaaaccctgaagcaacaatttttcgaatgcacagtgattacaatagcacatatgatcgcatctgttcttgatagtgagaatgtcattcttctggacaatggctagtcatgtgctttgtgtttaattagtaaccaacggttaatagcttggctctcccgttataattccatgttgttgtaaacaggtaaaatcgcagacgatgactctgcagacaaacttctggaagacatatcatc

SEQ ID NO: 34301 - DNA, 448 bp, Oryza sativa
  unsure (1)..(448): unsure at all n locations
gcttggacaaaggtntacatcggccgatctattgtaggaagtagacatattttatggaactaagccaatgccgacttttgtaaacaaaaatatgagtgccgattataaggttaaaataatcgagctactaaaggagtatgtggattgctcgcatgggaatatcatgagatgccgggtcttagccgtgagcttgttgagcatcggcttccaatcaaactgggttttaagccttataaataaccacctcgtcggtttaatcctttattatatgaccgagtcaaagaggaaattgatcggttgttgaaggcggagtttattangccatgtcgttatgcagagaggagttctagcatagtcccggtggagaagaaggggagtggtaagattagagtttgcatagactctatagaattgaataaagctactcccaaagatgaatatcctatgc

SEQ ID NO: 34302 - DNA, 499 bp, Oryza sativa
  unsure (1)..(499): unsure at all n locations
gcttgaagccacaagaacctctaagcattaaacatgaagtaccttgagcacatttcctgttccagcatatgctagtgacataagtgntacatcacagtactttcttatcttctcatcaaatgttttagaaacttctgccgtagcctctacactctcctgaaatggaaattgccaaacaatcataataggtacatttatctaaaagggctgcatagagccataaacaacagttagaaacaaaggcagctatagtatatgcatacagtacatttaggaatagaaatacaatatataaacaatacggacaacattacaatgcgaaaggtcagacatcatgtgggaaccatgacatggcatttacagcaggtaatgcgcttgacaaaaccaacagaaacaagcacttgcttaaaatagaataaagggaggacacactaggtaaatcctcgaatccacaggtattgaacagtatctcacatgtataaaagcacggaatactgga

SEQ ID NO: 34303 - DNA, 457 bp, Oryza sativa
ttacagtcattgccgctgcagcttgaggaatccttaccagacaaatatttcggcgataatggatcgccttgcctcagcccccgagccggtttgaaggggttcgatgctactccgttgatcaagatgctcgtcttctctgtaacgaagatcatagaaagccccgcctccagctcggcccaaaaccccgaaattttaacatggacagtaggaagcaccaagataccgtgtcgaaggccttggaaatgtcgagcttcaagagaatcatctcctccttccgtttgtgaaactgttgcactaaacccttgacaaagacataattctcatgtatacttctacccttaatgaatgcaagttgcgagaagggaaccaattcatccagtcttggggccagcctcctagccatgacttttgttgctagctagctgaagctgtgcacaaagcttatcggccgatagtc

SEQ ID NO: 34304 - DNA, 453 bp, Oryza sativa
  unsure (1)..(453): unsure at all n locations
catgatcagttataanaattcaacaaatattattgttacaggtccgacatttccaatcagctaaatccactgaataacaacctggattatcaactttgcagctggaaaacgcgtaatccaatctgagtttgattatagcgtaatggattacgtaagaaaaggtcaagtttcatctagttctccactcctagcttcttgcatcttgaatacaggttccctcagtaagacatccctataaaggcacagacttagtgacttatcgcaagttcacgtaaaggcacagactgcagcaatcaactggaatattgaactgccaggaaaatgtaacttctagtgcctactaaattattcatgagtattattctttgacagacagagtgtattctattggaacaattcaattcatttgtctctgcaagaatcatacagaagttggcgcactactcctatgcc

SEQ ID NO: 34305 - DNA, 419 bp, Oryza sativa
  unsure (1)..(419): unsure at all n locations
gcataccactatgtactcttttctgcagctttcatgatttttggagtattctttacttatcttgatgccctccacgttaaatagagtttcttcatcagttttgctcctctcctcaatagaaatcttatanaatgctcctcccaagaatcgatttcgtcgactgtntttttcacatcagcctaaaattaaatgtacacccaaataacaaaacacggtgagttaattcacagggtcataaattagtggaacacaaaaacgttgcgtttgtctcgaaattaaaggttctgaaaattgtatatttctcttaccgataaggctgaagagaaccagtaatctttctgacggttcaaggaacatatcgtctctgcacaaatggggcatgaacatatataaatttctcttctactctaagtatcaaa

SEQ ID NO: 34306 - DNA, 498 bp, Oryza sativa
  unsure (1)..(498): unsure at all n locations
aactcaagctnttggggcctcatttcncacatatcacaatgggccttatatgaagtcttatgtgccttgaaagcacctccagtgtactaaaacctctagactccatcgatcggccacggaataagttcacttgacgtccctcaatggaaataacatntaataaatgtgtatcccttaactatataaaaccggaaaaaacaaatcctgagaaagtatagattgttcgctaacatgtccttctagtcgcagaacataaagaaaaaaagtggtgttaacaatcctaggccgttgttaggtcctaaaacaaagacttttcattcatcacatcgaatgttttgacacacgcatgcatgattaaatgtggatgaaaaaaccaattacacacgttatgtataaattatgagacacatctcttaagcataattgcgccatgaattgacaatattggtggtacaatatacatntactaataactgattaattagtcgtaataaattc

SEQ ID NO: 34307 - DNA, 437 bp, Oryza sativa
  unsure (1)..(437): unsure at all n locations
ccagccatggtggagtgcactggctcatacacatatgaaggtagtggttncaaggccactgctgctcagcagtacgacagctctcctttcctcagagggtagaagtcgatttcttctaagcccttccatcaagtctgctctctttcatccgaacagtagccgggttccaggtaagcattttgaataatctgtgtcacttgaatcatgttaccatcctctttaatctttcatatacataactatcaaaattcttgggttataactcaattgatctcctacagttatgttatgccgcgaagacatggtttggtgggtttgtgggcatgatgatctttggcgcaagcgaggtcagccggaatgttgatcttggcgatgacacggccacaatgatctgcatattcgtcgtgcgtgcctccgatgaattcatcacaagagag

SEQ ID NO: 34308 - DNA, 380 bp, Oryza sativa
  unsure (1)..(380): unsure at all n locations
tcggtgagctatatagctttctttgtaatatagaatcgtacagcgccattggtggacttgaaggcggcggcgatgtcatactgcgaccggtcagcgaacaacgacaggggaaagaacccggcagcgccgccgctgtcatcgccggcggcgatgccgtgatgaccgtggacgtccctgagttggagcatgatgggcttgtcgcctccaccgtcgatctggtgctggcggatgcgggaagcgaggagcgcggagtcgtcgaacgccgcggcggagtggtcatcggagggctctnctccttctnctacggcgccggccgtgaagtccangcgggctgccggagccgagctcggaccacaccgcggcagcgtggacagcatctg

SEQ ID NO: 34309 - DNA, 335 bp, Oryza sativa
gtacataccagccgctctggtgaaactaaccaacgggtgaaatttcttgctattctaacccccgccgagctaggccggtcttactccattgtcacaatgaggaggcgattgtctcgtctgttcaaaggatccggctctttatcaagtcatcaagacgagtctagtgctcgatcatcaaccgatgtgttgatggaagatgccaacgctccgtgatgtatcctgaacgacgccgacctcgaccttgtcgacgatcgggataagcaagcctactacctgctgaatgatgaggacccaactaagctcggatatacccatgactacctttatgtattaat

SEQ ID NO: 34310 - DNA, 482 bp, Oryza sativa
  unsure (1)..(482): unsure at all n locations
tgcatacttctctctcccttatgtgtatataattntgggttttacttgcgagtacaatcttgtatttaacccggtgtctgcaatttcaggagaggattccggttatgagttatgcttcttgtgtggtcattgctctgccgagggcggcgagggcaatgagtgatctcttgcagcttggctcttgcccggttggtttgccctagtggggttgtggcaccaccggttttatcttttacttatgaactctatttgagacttccgctgctatatttatgtgttgtatgttgggacctcggaccctattatgtgtcatgtacctcgctgcactttaaccctattatggtacttgctatgtttattaatggctcgcgatgaaagtgtgacgctagtcgcattcctggggactagctaagcatgagtaacggcgtttgatcgctcgagataattggcgatagcgcttnggatcgagtcactgtgtatgc

SEQ ID NO: 34311 - DNA, 380 bp, Oryza sativa
gcaatatccacccgatcttcgtactccatccaatcttgatttatctgtacggtctcatcacgctgcactaacggcccgccacttgaagtaactctgactgtgtcaatccattgtacgaattgacagttccttacatcctcctatgcacatccatattgtgacactcaatttcatgatagctctgacgagtgacgaaaagaatagttgtaattaccacgatatcatcgtcgacaatgttaggacacacgaaacacctttgtcctcgagttctgtgccttacagaccttatgacctgacaactgtagcgcccgttccgtcgtggcgcctatcgggaaaattatctcttaataaccctaattgcgaaagctgtttctttgctt

SEQ ID NO: 34312 - DNA, 357 bp, Oryza sativa
  unsure (1)..(357): unsure at all n locations
ctatttatataatattttagtgaaaaacttttagaagtaactatttatataataatcataaagtaattgtattggaaatatattataattacaatataagttctacaaaactccatattattaaacaaaaaccaaaccatgcgtagccggttggctagcgaggcacatttttacctatgaggttgctggtttgacactcttagcctcacaagtgacatgggaatttttcttcccttccctccatgaatctcaacacgatccaatgatttaaagaatatttacaagtcgaaactttaanaaaaatcatacccggcattgtatagccatgtgacccgtttcctttttgatgaagataaa

SEQ ID NO: 34313 - DNA, 419 bp, Oryza sativa
tctcgaagaagctgtagaattagcaaagcaatgcttggcaatgtgtggtgaggatacaccatccatgaagaaagctgcggagaagctccataggctggttaaagtaatgcaacacccatggacgcaacataatcctgaagagctggagagcttgcttggagaatcttcttacattataagctcacgagcctcgagtacaggaaatatcagcatggagaagaaagttgtcaaggacctatcatcatggccgtaagctggaatctctttgctacccagcatacatcatatcaccatatcataccgcgtcatattgcatcatagtgttcacttaccctagaaattcagactcagttatgttcattattacaaaaaatttgtgtaaaaataaaaatattgttcgttacaccttcagctttatg

SEQ ID NO: 34314 - DNA, 367 bp, Oryza sativa
atgggtgggacacttttatagagaggatgatatcccgttgaccggccgcttggtgaactccgcggcgttgaagatgatggtaaggacagggtccgtggcaaccgaggcgggaagccacggccggcggcaataacagacggtggtcatggcatcccaacgccggatttttgccgcatcccggagtttccccgcccaaactcacgcgtgatgtttcgccgtcgctgtcgcttcgacccttacccccgtgttgcctcgaccactccacttcgcgcatcagacgtttgaatgaggggatagagagagagacatgagagaaatgagagctgactttgggcccaaagacattttgatatttacgcgattcttc

SEQ ID NO: 34315 - DNA, 395 bp, Oryza sativa
ctcgatgaacctgcagattatcaaagcaatgcttggccatgtgtggtgaggatataccatccatgaataaagttgcggagaaactcgttaggctgggtaaagtaatgctacactcatggacgccatcaaatactgataagttggagagcttgctcggagaatcttcttacattataagctcaggagcctcgagtacaggaaatttcagcatccataagacagttgtcaaagacctagcatcaaggcgttaagctggaatctttttgctacccagcatacatcatatcaccatatcataccgagtcatattgtatcatagttatcacttaccctagaaattcagactcagttatgttcattattaaaaaaattttgtgtagaatacaaaatattgt

SEQ ID NO: 34316 - DNA, 451 bp, Oryza sativa
  unsure (1)..(451): unsure at all n locations
ctgttccggatggcaacagattctagagaatatctattcgacatcaatccaatcttttcccaatttcagacgaaactggcgatgattaacagtaatcacggagaatgaatctctatatgagggagctcgaaaccatcaatctttcttaaaaggatagctatgcatattcatattccctagtgcatcctagttataaaagaaacaattttctgaacatgaattaaacaagtacttttcaaattcttcctcatagcgaaagggtatgtaacctagtggctacaagagcctcagtagcatctgaggtcctgggttcgactccccataagatcgaaattttcgtgttttaacgaacttgngctttcaatggtaagcgacgtacccgtcgacagcgaggcgcctgtggtgacttcgtcaatcttgggcctagtcctcgaatatgctcataatgata

SEQ ID NO: 34317 - DNA, 266 bp, Oryza sativa
attcgatgttctgcgttagaacatcagtaaagaacaactgtgagcagagtcaaccgtgaacaaattgctcgctgatggagtttcaatttttgtactatccacagccgagactgtggttctggtaaccaaaattaaactataagactgaaagtttcatttggtatattcaatgaaatttcctgctaaattcagtgaaattggcacactctaatggcctgtttgggagagctaaaattctgataatagctggttggaaccaccttttg

SEQ ID NO: 34318 - DNA, 471 bp, Oryza sativa
  unsure (1)..(471): unsure at all n locations
cggcaacgataacacgttgcagttntcgagggaggttggtgttagctatctacaagtagtagtgctcaagtggcttgngctgatgttcatagtggacattcggtgtcttgctcgttttcttcgatgcctttggcaacgatgatgtgatagctctggagtcgaagctgttgtgtcgctaggcgacaagctcggcaacgataacacttgcctcgcgaagtcgaagcctttgtgtcgctttcaacaagctctttatcgatggctgttttgggctccgccattttttcttttttcgcggtgttggtagcttacgtttgagtgttgaggttttcacccagtttccctaattaaccatgcattgtaagggttggtctcattntctccttanaatgagacaccttcttctttatataaaacgtcggcaacggcctgaccgttcgaaaataaagataatccaccacaattcaatgaaat

SEQ ID NO: 34319 - DNA, 379 bp, Oryza sativa
  unsure (1)..(379): unsure at all n locations
cacgcctgctcctatcaacacacattatttcataccgatgcacttgtgtgccttgagcaacaactcgatgtctccgtgcctttttgattntatcttccatgtactttgtcactacgttgccaaacactatgttgtcatcggccatggacggaccaattntcttgtatcgatccctaaagtacgcttgcgtgccgtgaaggatgaattcaacaatagcaaccaatggaagtacccgaactcctcgcattacccagttgtacacctctgccaaattggttgtcattatgccataccgagatccatcggtgtcgaacaatagagaccacttctccttaggctcattctcaatccactgaagtgaaattctgatggacgaccc

SEQ ID NO: 34320 - DNA, 490 bp, Oryza sativa
  unsure (1)..(490): unsure at all n locations
tatgacctaattgagccttaaagtggggaacagaaactattattagtagccggtagaacccttcttttctggccaccaaacggccccgcccacagattaattagtcatgtctacttcctttacaacatcctggtgaacttaatctacgggcagagaaaaaagcagccatgaaaagacaccgattaggagatatctcggaggattttgattggaacgtgtaaaaatatcgccacaccgtcaagaggcaagagcccacaatcttgtgctgtacacaaaatcaatattttgactgcagattgccccattntttgaactcaaaataaaaaaacagcttggaaggtgatcgcaaacatgcctcgatgtgacgccatctgccggaccatgacgaaatggagtggacaattggcaaattggcaaagaaactagctttcctggagacganaatgaaatgtaattcggtgggcaaagttgatcatagtatatagtacgt

SEQ ID NO: 34321 - DNA, 445 bp, Oryza sativa
  unsure (1)..(445): unsure at all n locations
gcttgattgcatatctgatctntttccattgttctagcagatggcacatttcatattggtccacctgaccagcacaacagccgtaactgactgcccaagacctaaggcatagttaaaggtccttgtgttgtaatttgtggatcagccactggcccaagagccaccgagaggagtcgcgcttccgccgctcgtgacctgcgcaactgttgcgccgtctcccacgcctncgcgccttgctccgctctccaaaatcgcgtcgccgtaactcctgcttctggaaatctcctcgcccggaaagcgtgccgcaacagcgcctctttcctcgggaagttgctgggacagctgaagtcgcctattccgctgagaacggcaatagcgcgagattgctacttagcgcatacgcgcgagttgtacacgtgtctcgtggagcgaacgatagaactgc

SEQ ID NO: 34322 - DNA, 489 bp, Oryza sativa
  unsure (1)..(489): unsure at all n locations
acatgcatagatgccacatcatcatctactaacaagatactatatcattattcactaattaacaagatgacacatcatcatccactaacaatcatcatatttaaacatcatgcaaacatactatatctttatagtttttataatttaagagttttttaaatacaaacatattaaattatcatccaatataattcacataatgtttcaatgtatatctttattatgttntatgatatcctatatacttatatagttcatccttagtttgtgcttaaataattaatctatggtccaaattatttttctccttttttttctctaattaagtcatatcacatcaattattnttagcctttagataattaatctacggtccaaactatctccctactactagcttactttntacatttgaatcaccattctacatactatatgaaattaaattatcataaactacattaatttaattaatctgatgttatctaa

SEQ ID NO: 34323 - DNA, 493 bp, Oryza sativa
gaattacaaactaagcttggagattttgctgacaattgcgtaaaggtaaatgtattgttgtagttgttattgagctctctcttacgccaataaataaaatattgaactctcatgagctccgctgagaaatggaacatctattgcttgattcttctgcatggattcctacctttggcagtggggcatcaccgcttaaatctgcgcacagaacattccgttatgctacgaatgcaagctgaggtgcacgatgcgataagtcgacaatgctgtcgtggaatgcaacattttacggaagcattgcgcctcgaatgccgaagcactgacgcagtctgagcaagccgctacacggctgttcataacccggacagaacgtaccccagacaactcgaaggctgccaacgaatgaacgatactcggtaccaacttgcctcaccataccacttccgctgcgcgcgcgcctgagctagtatacgtgcgcgttggcgtatgacat

SEQ ID NO: 34324 - DNA, 438 bp, Oryza sativa
  unsure (1)..(438): unsure at all n locations
cttctctttgaatgtgcatgcangttggtttgtggaagaggcaccgggttagctcacttccatgcccaaatgcagcttacattccaaagttattctttaaactttcaactntttcatcacatcaaaactttgctatacacacaactttacaactttttcatcacatcgtttcaatttcaaccgcactatcaattttgatgtgaactaaacacggccttaattggtagccaggcagtagcacaggtacgnttcggccgcctcatttcgatcgctctcaccgccggtcacgaactcaaaagcgtgaggtgatctccggcgctttcccggccactcatcgccggcgatcaagcccaagatcaggcggtcactgtcaccacgcggcacacgctccagcgttttttttcttcttttttttttcaaccagttntaattaagcca

SEQ ID NO: 34325 - DNA, 374 bp, Oryza sativa
aataaatcatccaaagccacatcttcttgtagatctgcattgccctttctgcttagacgcgtaggaacttgaagaaggcagcaagacactaatgactggctggtgagctggaactttcttgagttgttcctgtacgcataggactggttgaactgaaacagcaatacatggagctcgttcatgcgatctgatgcttgccactgtgatctaaatgtacgattctgtagccgtgcgactgagctctgcgagattatctaggaatcctcctatccaactgcgaactgcatagatcgcaggcatatgcatactgacttgtgatgagagactgtctgtgcctgggcgagcctgactacaaagaaaaggcgaacagcaac

SEQ ID NO: 34326 - DNA, 407 bp, Oryza sativa
  unsure (1)..(407): unsure at all n locations
tcaagctcactcgtgatgtgattggttgtttcggagtcaatgtacctatttgtgtcaatggcgtaagaagaagcttgggcagcagcagctacatgtctgtcatccggcacatagttntcatcaaaacggtgccaacactcagccgcgacatgcccccgcttatagcaaacttggcatatcggccgaaggtctgtgcggttgctgctgctgtccgcggccgcgcggcatattgccacggccacgggcaccattgttggctggcggtgcactacgaccacgcccagaggcgccgctgccaccaccattgccgccgctgcgtgagataaacccaccgccgccgcgactcgctggatggcagcagcgatccttcttgttgagctgaagtctgtctcnaaattaacagctga

SEQ ID NO: 34327 - DNA, 468 bp, Oryza sativa
  unsure (1)..(468): unsure at all n locations
tggctggtccgacaagagttttacagaactccttgatctgttaaaggatctgttgccagaggggaacaatttacctcagacgacatatgaagcgaagcaagtattatgtccgttgggcctggaggtcagaagaattcatgcatgtccgaacgactggcatttatattacaaggaatacgctgacttggatgtctgccctatctgtggngcatcaagatacatacgagcaaagagtgaaggtgaaggaagtaagtcaaagaggggaggcccagcaaaggtggtgtggtatctcccaattgcggagcgcatgaagagaatgtttgcgaacaaggaacaagctaagcttgtgcgctggcatgccgaagaactgaaagtcgatactatgctgaggcacccagcagattcagtacagtggaggacaatcgataggatttaccaggaattctcaaatgacccaagaaacatgcg

SEQ ID NO: 34328 - DNA, 297 bp, Oryza sativa
agagatcacaacaatatataatttatatgaaagttgaaaccatcctggagcaacaaattgtactgcttgttatccttgacacgcttgagctcaacaatacactgtaagatgcgattcctaacagcctcaataacagaacgggcttgccactgtaactcatggttgcgcatacacatgcttaaaaaacatttcatatttttagagaagggatcatatttaaatatgtgtattaaaatctgtagaaattttactgggagaaatattctactgtttgacacacaataatcacccccatac

SEQ ID NO: 34329 - DNA, 468 bp, Oryza sativa
  unsure (1)..(468): unsure at all n locations
tataaatactcagcttgcattnacacctaaggtcacgtgactgctgtatcgatttgtctccccttgctctatataaacatatatatagctcctccgccctgaagagaagataaagtgaagtgaagaatacggttccgtcctacttcccatccgtcgcctgtggagatgggtgttcgttcgatggttccgctgctattgctgttgttggtgtgtactcgtcagcgtcgtctgttgcattctcgggctgttctgagctgcaacctaaggtaaggtaaataagtcctctatttatgttaacgatttgcaatgattcaaatttgtcaccgtgggtaccagcgctatgtcctgtgactggtactgagatcgcacgttcgtacgaagcggttcgcgccgattttcctacgacacgctccagtcaagtgccgtactacggcggtaccagattgtggtgtgacactgatggcggta

SEQ ID NO: 34330 - DNA, 368 bp, Oryza sativa
agcttattgtattaattgctatgtgcatgtgtttctatattcctgctaaaaccatgcttgcaaaaaggcccagggaaaccgaaacatctctatgagctctctctctctctctcttgtagagctgtgaggactgagccatcagcgccgccatcgatcacacacctgccgcttttctatgtctcgtgtgagagtcgagatatacttgatagtacagtggtaagagatgtgtggttttaacaccaaggtcctgtgttcaattcctaacacgctcacaatttcttcttacaaaatgttttgaagtacatctgtccctccaatcctcttttttttccttggggaaaagtaccacaccgctggactttttcggt

SEQ ID NO: 34331 - DNA, 472 bp, Oryza sativa
  unsure (1)..(472): unsure at all n locations
tgcatggtccataacacanagggtagcatttttctcatttattatacattctagtggtttggcttcacctctataaagccaaagataaaataatttccttctggtggtgaaatcccatcttttttttgggctctaagtgaataaatgcttcttgaaatcatgaaaattgaacaatgaactaatggttattgttattttatttatttacccgttgcaacgcacgggcaccctactagtacagtaaagagtgcatatatgacatgtacatccgaaaagaaggacctggatgacatgtgctcaaaactatccataaagcaactgtccgacagttgacaagtaacaacctacctcaagtgacggggcaggtccgaaacagatgcccgaaagttgacatgtgcctgcgcaagcagcacagatctattcacagtacggcttctcgatgactaatncttggttgacttagagcatccat

SEQ ID NO: 34332 - DNA, 357 bp, Oryza sativa
  unsure (1)..(357): unsure at all n locations
ttaaaaattctaaaataaataaattcacacaataattaaaaaatggctaaacatgagcacattaatctttaaaaaaggaaaccatgaccgtcaatttgatttaatgttttcatctacaccctacatgcaatagataataagtatcagagtagtagtagtttttaaagtaatagtcaaaactcagaagcatgcgttccatgcattgcacacaatatgaagataagaaccagaaggcatccatgaatctgtttcctgagcgcacatggcctggaaaaacanatcaaagttcagttcatagtaactctatgtatacaaggtctgaacatantaatatacacagaataattagaattattt

SEQ ID NO: 34333 - DNA, 446 bp, Oryza sativa
  unsure (1)..(446): unsure at all n locations
tactctattttattgttcaaacatccgatatgacatggactcagccccatagaaacacaagcaatntacacatttgaaacgaaaaagatgtgatatggggggggccatactcgcacagataataaaaggtaccagngaccgatcgatcaaatagccccattgaaacacaagcaaattacacgcttgaaacgaaaaaaatgtgatatgtggcgtgccatactcgcacagaanatgaaaggtaccagggaccgatcgatcaaacagccccatagaaacacaagcaatttacacgtcngaaacgaataagatgtgatatgtggggtgccatactcgcacagaaaatgaaaggtaccaaggaccgatcgatcaaacagcctcatagaaacacaagcaatttacacgtttgaacgataaagatgtgatatgtgtggtgccatactctcaca

SEQ ID NO: 34334 - DNA, 419 bp, Oryza sativa
  unsure (1)..(419): unsure at all n locations
agctnggtttattttatctacttacctcgattttctgatttctaactctatacaaaataatccaaaaacttgtgctattaattggataaatgtcttaactccctcctttcacttgtctttagatgccgcctacaagcctgagtacttgtttggtgttgaaggatttgaccagtagttgcgtacgatgtcctttgtcataagatatgggactgccccttgttacgctcagattcctcatgatcgtcacgaagaacagtgccgagtcatagtcaccttgaacaggaatatgtgaagatatcccctcattgatggtcgaagctagaggaagaaactacatccatgcttgtcttgaggtggcaaggatcgtcatatgagagctccgtgatcgctacagtgatcagttggccgacactgaatat

SEQ ID NO: 34335 - DNA, 374 bp, Oryza sativa
tccgatatgacacggacgtcaccccatagaaacacacacaatttacacatttgaaaccaagaagatgtgatatgtggggtgccatactcgcacagaaaataaaagggaccagcgaccgagcgatcaaatagccccatagacacacaagccatttacacgcttgaaacgaaaaagatgtgatatgtggggtgccatactcgcacagaatatgaaaggtaccagggaccgatcgatcaaacagccgcatagaaacacaagcaatttacaccgttgaaacgaaaaagatgtgatatgtggggtgccatactcgcacagacaatgaaaggtaccatggaccgatcgacaaacagcccatagaaaacaagcaattacac

SEQ ID NO: 34336 - DNA, 202 bp, Oryza sativa
agcttattattgtggatgaagtgcatatagttagtttgtggaccggattctctactaatgtggattatagtaccctgcacgccaatgaagtattgttcttatatgttggtcacaatatatacagaagtgttcgttagtgctagttatgcagaaactgaaagtttgcctgtgcatgaatgggtgtggacaataaaaaaactaa

SEQ ID NO: 34337 - DNA, 467 bp, Oryza sativa
  unsure (1)..(467): unsure at all n locations
acataacgactatcaacaataccaccacacttatcctttactcgtccctgagtaagctcctggatccactataacaatgacttcacgttcaatgatatgtggcatatgagctattccaaggcatacctatgttcgtcaaacctcgatgtgtctaccatgttatcttgngtgattgaagagtggaacggttcttgactcaagtcacccttactctttctcccaaagaaccttggggttttctttgttgctcataaaaatataacatttactatactcctctggtgtatctctcgaatcactcaatgtgtgtattcgtcaccaacgcattgatgttgccttttcttatcctacctttctactgagccttatgtggaggtcatggtanggaataagaactagcatacttgtatcatatatattgtaaagtcaaatagaggatccaagaagataaccaatcctataaccat

SEQ ID NO: 34338 - DNA, 437 bp, Oryza sativa
tatgtaaagatggcattattctatttcatgacatctcgggacaagatactaccaatagatattcacgtggcttcaccaggaccacttaagagtccctagactgataagctgaaatgatttaagctgtatgacatacttcgcagtacaatcttcaccgtgtaccactattgtagggtcttagccatacttcatatattgccgcataaattcaaatgcactgaaactgaacaaatggagtatggacacatcaaatatttcgtaaggaacgaaacagtaaaacactgatggcttcttaataacgtaaaaaacatacttacatgaaacaccttcttccatcacatctgccatcttgcaagataatgacataatcttcaccgtaagtttgtccatgataagaacctaggagttacaaaacaattttatgcgtatcacattct

SEQ ID NO: 34339 - DNA, 352 bp, Oryza sativa
  unsure (1)..(352): unsure at all n locations
atctaaagaataacaaaaaaagaattccattgaattgtatttttattgatcaattagaactgccttctagaacgtataattgtctcaaaagggccaatatccatacactattggaccttttgagtaagacggaagaagatctgatgagaattgacaagtttcgtatgcaagatggaaaacagatatgggacactctagagaagcatctcccaatggatttacctaaaaataagttctagttntaaatccatttgcaatttttcctcttcttctttttcgagnntagntaaaaagaaaaaattaaacaattttgcatctttgggaccatctatattttcgcgaaatggatcat

SEQ ID NO: 34340 - DNA, 434 bp, Oryza sativa
  unsure (1)..(434): unsure at all n locations
atagattaaattaaataaataggctttccacggccggttcccgtcgtcaagttggttattaagtaacccgtggattaattcataggttgcccactaattttgtttaagtgggtacactaattttgtttaagtaattntgtttagtgggttcacggtcaactcacttcacagattcatcttgacttcaaagtaagacttcaaagtaagaggaaccgtcacatatcatgaaaaatttgcctcacagcagctactgtacatatctgcttcgatctaaactgctcatcgactcatagagtcataatgcagtcgtcctactgctacaccagggcctcaaaagaagaacaagatagtgatccactgcatttgcaaaacagttttcaagtaactgctgtactgattntacacgcgagaagattcangccatgatgcatctt

SEQ ID NO: 34341 - DNA, 489 bp, Oryza sativa
  unsure (1)..(489): unsure at all n locations
tatcactgtacttncctatcttgactgtcaacatcaagttttcttcttgaagttgtcagtcggnggctatcatcataataacggagtgtgattntttatcaattcaatttgcttccttggtctatcattgccttgtttgatttttctacttagtctgcgaggactgaaagtttttaatagcttctttgggttttaggctcaacaaagcttgataaaagcttttaagaaatcaaagacttggctagaattatcaagcacagcataaatacaccagtattgtacaagttatgcctccatttgctacatttatgctcagtcagaatcagtcctttcatcatcagagttattactactcggctgaaggtcggtgttgcggaattgatctacgacgtcacttgcaatcttgtcagccgcatttngagcattgctgataagatcaagagcagcctctacgcttgtcccgtctgcaaagccatcaatggcgtcaat

SEQ ID NO: 34342 - DNA, 396 bp, Oryza sativa
gctgctagcttctttcctttgaagatgtctataggttatcttcctccctcccctcgatgttacatatgtgcacgtggtgcaccttgataattatagaacttaagagtaccacaacacttctatttgtagtcaaagttcatttcaatttctgctccagttcgttctttttggtgaagatctcatttgggcattagatgtgaataaaaaattagtgcaataaaacgtttcattcattatatcattatgtcagaaacttaataagtattgtcatagcattgacggctgcagcatgacaccgagtatatttgtttcatgctctttacttggttttcctaggaacacagaaagtatgctcatatttgaaacataaacatttgtataccaatgcttgtgaat

SEQ ID NO: 34343 - DNA, 483 bp, Oryza sativa
actaagcttcggcacgagcgagaagatctgctcagagtcgccgttctgcgaagatctattgtgagtttctcggagatgacctaatcccaatcttttccagaagagtagctccgttagcttactagatcgtgtgatgttcgcttgtgtgtatgggtatggtttgcatcattggtggggatgccaccatactacgttgtttgcttaagcaacttgaagaataatagtctactcacaacatatcagtacgcaagtggtttagtaccttatctttagcaacccctctcttccacctctcttccgtcctgtcagcggatggtcagtgtcagagataagatcaattaaagtcaccattcaatggttcagttgaaagctacaatgtatcccagtgccataagaaccctgctcgtgatcaacaattggtgtccaagattagatgatggatgtattgatgcgggagatgcaaagctcgatgcatggcctagt

SEQ ID NO: 34344 - DNA, 435 bp, Oryza sativa
  unsure (1)..(435): unsure at all n locations
cttgagaaggaaaatggtagggacgggctctttttttatatccacgagcaacttgntctaacaataattnagtattctgttaaatgatcttttgtgctataacatggcactgtaccaactaacatgtgactttcgatggagatcccatggctcacaatatgagccaatgctaaataatgtagatcatctgcattgaacaatcattcaatgtccaattcctttctctgcacgagaccatgacgtatcttttaaatcgttgagtttaactcctttttggaggtcaattgttttccttgacacataagtgtggattgctccaatgtgttgtgttccggtgtccggtcaattttacacatacactggagctgctcttacttctactaaataaattactgttagaacactgctgctaaataaatatactactgttccgat

SEQ ID NO: 34345 - DNA, 427 bp, Oryza sativa
  unsure (1)..(427): unsure at all n locations
gaatttgtagtatttagccgaagttctaaagtcatcgtgatatgttgcgattacccctgttgagaaagccaaaatacgaagggatgatagaaatcttaccttactctttgggcttctcggttaatcgactcaatccattcccgaaggtaaggaatgttctttngatcattgtagtcggcgaccaactgcagaaacaagaatgtttactcgtcatagaaacaagatggataaccacaaacagaaactgcatcaccaccacacaagatattgagcaatcatgcatgtgtggttatttgatgactctgcttcttgaagaaaaaaaaggaaacagtgctaagatgcatggcatccttgtttttcacacaagaactgatagagtggtattttgcaggaggtcagcaaanatcacaggcatatttgcaacatt

SEQ ID NO: 34346 - DNA, 352 bp, Oryza sativa
gcagagagcatttatgcaatatgccttctaccctgaacgtgaaactgataaagacaggaatcaacagggagtgttgggttatctatgtccttcacatggaaatagatgtgtttggtctaattgcaggaaactttttcaatagtggctttttcagtggatgagaatcaacacaggaagccagtgatatgcagactggtgacaataggcttacctgagcagcaagacgagtccgtactaagttcaagggatatgtcatcgaagctgctgttattccagacaaaccaccacctatcaatctaacaccaacatctgcaccaaatccaccattcctgtcaagaccaggtatcatttg

SEQ ID NO: 34347 - DNA, 491 bp, Oryza sativa
  unsure (1)..(491): unsure at all n locations
ntttattngcacgtgacagttgaatgacaggcctaccacaagtcctgcttctaatgttctcacagtggctgtgccatttcgccatccaattatgcagctatggaaggtatcctatactgcaagcaccatttcttccaacttttcaaggagaaagggagctacaaccatctgatcaaatgcgcatcagtcaagcgcgccgaagcacagccggcaccaccaccggccgctgcagattcctcctgaatgtaccatatctccagtgaagcttgagggcgaaaattctgaagccctctgttttacaacctgcttgtatgccatgttccagttctgaggataccgggacctatcaatttcgtgtcctctgctgtgctagactcgatcacattggtgaaccatgaatatcatgtccctttcaaagaaatcgttgtgcaagtactgatataccgcactctaatttgntgattgctttttgagcgtgtgtatatctgttc

SEQ ID NO: 34348 - DNA, 480 bp, Oryza sativa
  unsure (1)..(480): unsure at all n locations
ntatntctagacttccagatggcccacattatagcatcctttcctaccataactaaggctatcatgttcttatacaagtttttcaaccaatctccaaacatgttttgactatcaagggctgcgttcagattcangacacaaattgcagtgttccacattaatcttgccaggggacagtcaaaaaacaagtgctgcatagtctcctctctatcacagaactgacattttttatccccttttctccaacctctcttgtataaattgtcttttgttaagatcttatttttggtgaagagccaaaaaaaaccttaatcttcaaaggagttctgaacttccatatttttttctgtgggaaatgcactctgtgtagcttcaaagctntgtagaaagagttcacacttgaaattccatccttagttaaattccatcgtagtatgtcattgcaagtatcatttaactccagatcactccaactagtat

SEQ ID NO: 34349 - DNA, 377 bp, Oryza sativa
  unsure (1)..(377): unsure at all n locations
ccccctgttagatagatatcatgctcttattctattggctccatgcttatgagataccaaaagaaaataataatctacagatggtcatcccagattagagaatacaatgaagttaaagcaggttacaagatagattggacagctggccattcttgcatgtaataaagttaggggagatgcatgaatgcantttgtttaatccctccaggaaatgggcctctaatctcgataagatctctgcnncnngtgcaagaatggatgacacttccaggaaggctgtaatatgtgtgattgacggtgcgtgaatatagagagcaatatctatgccatgcctttttgatttactaaattaattgggttaacgctatgctgggata

SEQ ID NO: 34350 - DNA, 439 bp, Oryza sativa
  unsure (1)..(439): unsure at all n locations
actggcttctcaagttggccctcttcttgtctagctcatggccaatgtattggctcagatcaatgatctcgatcatcttcctcatggcaacggcatcaactcaaatcttctcctcaagccccaccagctcgaagagatatatggccacacgacagagtgttgcctctttgtgactcacaacagcgtttcatcatccattgttctcctaggctcccatcgcgtgctccttctttacttgggtgttttggaatggaatcaaggatggatgatgaaccattgtctggctaaatcatgatgtttacagatgaataaaccattgggaacattccttcactcgggaacgatggtgatcaatggcgcctcctcaactctcgagaatatcaacgtcgttttagatgagataaccacacncggctttatgatgcagtcattggacaaa

SEQ ID NO: 34351 - DNA, 406 bp, Oryza sativa
  unsure (1)..(406): unsure at all n locations
agcttaagtttttattgacctcatttatatgagngaatcttatgcccaaaaagatatgttcaatagtaatgtaagtattccaatgaaatactcatctacaaataggattactatagtggtgattaccatttcatgtggataggttgtccttttaaatcggttttacctctatatgaatcattatattttaatacttgacctataaattaaattagtaattaaccttctctttgtatggctttgttggggagcgtaattatttatagagttcataataaatatcttatttttataattagtacttaagttgatagctttacttaattttcagtgggacaatttatagttcggaagcataaccaccataacttcagcatgatgcacaatgttataaagttataattta

SEQ ID NO: 34352 - DNA, 456 bp, Oryza sativa
tatgccaaatctgctgatagcgaagactatgactgctatcggcgaacaaatctagaatatggtgcatcgaatatatgcacctaattaggtgtagcccccaactatgtgactacgtaataaactaaacatatagttgagaacaaaataatagcacagttatgcatcatatgacaaaagcatacgcggagcctaaagaggcattctaaccgactgctctgtatccgtaataaaaggaatccgagtggtttacactctaaaaggttcacgaatgaacatacttgacaggcatccgaataaaaaactctaaaaattacccaccaagtattataaaaattatggtaatgaataagtccaatagcctaggctatgactatttaccataatgaaaacacgtatataacataccaaggaaatgactatgatgaaaacaagtcattccaaattaaccctgacagc

SEQ ID NO: 34353 - DNA, 378 bp, Oryza sativa
aaactgtgattatttgtttgtctaaaagagttccagaagtgctctatcacttgaaattttgcaaatgaggctaatgatgattaccataccccttatctaatttaattgcagttggtactagctatagtattgtagccttcatagatatctcatgtgatgttaagatgataaaatgatttaatttttagatataatttctcctgcagttcactattaccacatgctggtagtgttgtaacgctcataactgagtacttcagaagagcaaagctgtctgcagtaagaagacaactctacactattgtgcgattattgatgagctcgatgggtgttggtaggtcattcacacttttataaaaaatatacttaacacaccac

SEQ ID NO: 34354 - DNA, 460 bp, Oryza sativa
atctgctgaatagcgaagacatatactgtatacggcgaaaatatatagaatatggtgcatggaatatatgctcctaattatgtgtagcccccaactatgtgattagttaataaactaaacatactagtgagaacaaaataatagcacagttatgcatcatatgacaaaagcatacgcggcgcctaaagaggcattctagtcgactgctttttagccgtaataaaaggaatccgagtggtttacactctagtaggttcacgaatgaacatacttgacaggcatccgaataaaaaactctaaaaatgacccaccaagtattataacaattatggtaatgaataagtccaatagcctaggctatgactatttaccataatgaatacaggtatataacataccaaggagatgactatgataaaaacaagtcattccatattaaccctgacagcttttgtatcct

SEQ ID NO: 34355 - DNA, 484 bp, Oryza sativa
  unsure (1)..(484): unsure at all n locations
tgtacagnttgngaaggagtgttttgagagacataataaatctacttcaaccgatatgcccttaagcacggccatacataacatagaaatcacacgtggaaggggtgggcaattagctagagcagcatgtgctgtagcgaaactgattgcaaaagaaggtaaatcggccactttaagattaccatctggggaggtccgtttggtatcccaaaactgcttatcaacagtcggacaagtgggtaatgttggggtgaaccaaaaaagtttgggtagagccgggtctaagtgttggctatgtaaacgccccgtagtaagaggggtagttatgaaccctgtggaccaccaccatgggggcggtgaagggaaagcccccattggtagaaaaaaacccacaaccccttcgggttatactgcgcttggaagaagaactangaaaagggaaaaatatagtgatagttctattcttcgtcgccgtaagtaaata

SEQ ID NO: 34356 - DNA, 79 bp, Oryza sativa
tcgttgaagtcgccatcgagatcatctacagtaacgtttgtgtagaaaattgacccctccacgacgccctcagagcaac

SEQ ID NO: 34357 - DNA, 429 bp, Oryza sativa
gctgggagaagattatctgagataatagctttaaagaaatcattgagtcactaccttggtattatcatcatctctttcaataatctgctgtagcaattgttggttttgtgcctgtatgtcctcatatgcttgcccgatacactggatacgttagtaaaagtttcaaactcaggatgacaatgtttaatatatgtttaaagccatacttgaactgcatgcataaaagatggcacacacctcgacctccactctgtaagcttcacattcttcctgtttagacttcagcatatgggataaactgactagatccctgaacacagtgaacattcagcagtaagcatcaatttcctttagtaaccctaaaagagaagtgacccctacttcaacagttctaagagaaacaatgttcagaagcataattctgtactt

SEQ ID NO: 34358 - DNA, 472 bp, Oryza sativa
  unsure (1)..(472): unsure at all n locations
gcttgcatcgctctagtctgtgggtaaattatttccgtcactttatgctgccatggaatgctgacaaggacctcagtcctctcctcactcagccatggntccatggaccagggcatccgcgttgccagaaatcagatcctgcacctgcacagaaccctttcccgtaccgtatgggccgccgcgtacgtacgctgncgtgggggcggccgagttgctgcagcttgcaagctgtgctgcgtcgagtaattcattaaaaataactcttattatccgaaaagtttttaatgtgcaccgacaacgcattcgcatatcgcaacagagaaaattntgcgtgctatgttcgcccattggcatggaccatgagttaaggtaaagtgttaattggtagtcatatttggtccctactggagttgatttgatgtaatctcgctaccttgtcgctatcgattccgttagcgttntaaagacttga

SEQ ID NO: 34359 - DNA, 442 bp, Oryza sativa
gctttgcccatctttggtaatgccttccgcttgtacctatcctttgcttctgctggaaatgtgaaccatttctccattggcgtccaagctcgctctttctcggcttctgtgaccttcccgatatctttatggaggatcccgaaggctcacgtgccgctatcccgcagcaattagaccatcttccaatgacagtcctgggcgccgtgggcctaccactagcagcaacctctcttataacttgcactgaggtcggccatataattagtgaccgcggatttctactatacctaactgcacttgtctcgcccgacatcgacgtatagtggtcctgcagcaattctgcagcacaaacagaaggcaatatttgctaaagggtgctagctaacacttatgcggtcatgaggtgcaatattatcctataaattaccatgaattctgggtt

SEQ ID NO: 34360 - DNA, 438 bp, Oryza sativa
  unsure (1)..(438): unsure at all n locations
ctcagcttgcaccggtgttcagaggtttcggcagggggctgcctatacaacgcctccaaggagataaatgacgaaagcaccgccgccgctgtctgtcaaggtctcaaagagaaccgagactggtttttcacccggcagcctcactaaagggcatgggatggcacgacaatgcccaaaaaaaggagtgatgctctgaaagccatcgttgccggcctggctaaggccgggctaggtttttacctgccgttcgcagcctgcttatccatcgctaacgcaccaatgctccaaccgccgtctaacctccgccggcggatgggcacccgcgccttctcgcacacaccacaccggccttcgccgtcgccccgcacttnctcgcgtgccgttctctgcctcggcagtgccgccgctgacctcgacgctgccattgtcgtagccatg

SEQ ID NO: 34361 - DNA, 366 bp, Oryza sativa
ctgcagcttgttacagagattttatatagttttatctcaaattctcaatattcagctcaattgctcaatccagtttggtcagcaccaaaatccctctggataatatattttaataagagagttctgcatagatacgaggggaagaatcaataaactgttaagaaatcaaccaaaaaaagcaatcaattggagaaatggaactttgagccattcttaatccatgaattgaaggaattatttcttttggatcataaagtttcttgaatccatatgtttcaattaactaagtactggtattcgttaaacaagaccttctgatattgagtacatgtaagcctttgtgagtcatttgttcttttgagcctg

SEQ ID NO: 34362 - DNA, 489 bp, Oryza sativa
  unsure (1)..(489): unsure at all n locations
gctcgctatgtctatgcgacgaccttggtcaagtagtagctgtggattctgaccatacaaggagattttttntttcagtcagtgtaatgcacattcttaatctgcctagccagaaattgacatccaaattccctctcaatgcatctgcagtagcatttgctgcggcaagtgtccctatgaactgcatctgcatggcaattctcttcagatatttgtactaatcgtggatggtccttatggttcgcacttccaaatgcgagtcatttgaagaggtagctcaattcttcatctgaatggttgttaagaaacattggctttacagttccaagnttctctgatttactaagtctgcttatggttaccaccttgcttccctcattcatttgtgccacggatttatagaattcctcccaattcatctcattcacatctgagacaaactccacaaccatcaatatggtccctgccaagagagtatgattgtgtgct

SEQ ID NO: 34363 - DNA, 430 bp, Oryza sativa
  unsure (1)..(430): unsure at all n locations
tactgaagaggggaaagattgttttatattgagtacaaccatttttctcagcaagccacaccggcagatgcatgattaatgcaagggggtacaaggggtaataatataggggttaagttttgcagaaagcagcatttaaaagtcacttagttgcccaaagccattttataaagacgatcctagagctacacagtattattaaacaaggccgtgaaccctcacgaacctgccttaacccaaggcctacgatgattcagaccgaactggcaacccgaccctgngtcccagctcgtcccaagccaacccaggccaaccattccacatattagttgttgagcaaattttaagaattaaaacactgacttgggtacattgctcggcttgcccataaccgaaggcgcggctattcgaatagattatactctgatca

SEQ ID NO: 34364 - DNA, 432 bp, Oryza sativa
  unsure (1)..(432): unsure at all n locations
ctgatggtcttcctctgattgtgagtatatcagaatgtcatcaatgaaaaccacaacccacttatcccagtattccatgaacactcttgtcattaagttcatgaagaaggcaggtgcattggttagaccgaatgacatcaccgtgaattcatacagccccgatcgcgtggtgaatgcggtcttcggaatatcttcttcacgaatacgttaattggtgatatccggaacgaagatcaatcttggagaatacagtggcacctttaagctgatcgaacagatcttcgatccggggaagagggtacttgtttntgatggtgacttcattgagagctctgtagtcaacgcacatcctcttcgtcttgtctttcttctccacanaaatcacaggagcaccccagggggaagtactcggacgtatatacccctttcttc

SEQ ID NO: 34365 - DNA, 445 bp, Oryza sativa
  unsure (1)..(445): unsure at all n locations
agctnttagacctggttgggagcccttaatatctattntaactctgacagactcctcatgggcttgcatctttattgaaacactaaggctcctttcttgcttctgttcatggtcaatttcatccatagaaccttcacttaggtcctcacacttatcactatctacattaaaagaagtcccaaggattgagcactggaagtggttcagcttctcaacaaggcttgggtggatagccaatggaagcgaaatgaagtgagagtaatctagtattggacttttcacggcctgaaataaaaaggaggagctcagccgtccagggtgataaccatgattagctgacataaataggatttcaaacatgactttatcaaatcaggtggcagtagattatatttgtgagtagctcactggtgatgggagacacaactntacaccttttgacaac

SEQ ID NO: 34366 - DNA, 425 bp, Oryza sativa
  unsure (1)..(425): unsure at all n locations
tgggggagtgaggacgggatccatctcgtatgcgttgggcacgacgagcccacgaacggcccgccacggtcggtcgcccgccggacggccgaccacgtcttcgccgagatgaacccctccgccgccgtcgccatcatcgtcgtcgncaccagcaccggtcaccacctcatcgccatggctctgtgcctagctagctcgatatatctcttactcgatcttactcctctagctgggtctaagctaattaagcgcgcgtaactcacaacaagcttagttaactttntattctgatctgtgatattttgatggatcacttctgcgtgtgtgcgtgtgtatatatgtgggtgtgctggtctgctactctggtgtgtatatatatagatatagagctgagccccactcgccacaccacgtataagttaatc

SEQ ID NO: 34367 - DNA, 425 bp, Oryza sativa
  unsure (1)..(425): unsure at all n locations
agctttaatagatatatctcttcaagacatatcctanacttgattctctaagataaaaaagtgaatggcctccaatgctccctcctcgataccacatgatatagcagccctccctcctcgctatctaggatagggagcaagaacacttcctcagaagtggagaacaaagaaagttcagcattggggatttcagttttgggtatgcaactgttagatccattctttttttacgaaatccaaagatatangattgcgatctgcttcgggcttctgttagccatactcttatcaatacataaaaacttgaattgttaaaaaaaaaaagccacctttgatctcttagtgatgggtttacgtgctaagacgctcaaactgttccaatataagattccttttgcaatcgccaaaatatacaaaatcctacg

SEQ ID NO: 34368 - DNA, 454 bp, Oryza sativa
tagaggctattattttaatacagcccggcggagaggatgaactccgggtagatgtcgagtttgtcgacggctcgatctacacatcatactggcatgcatgtggtcacacgctgctagcgaggtcttagggacgcttcctatgcagaaagtcgcagcgggggcgacgatacaagatctcggcaatactaaaagcggtggctatcaagctgaaaaagtggatgggtcgagacactacgactcttatacaagctcaggccttctttaacactagtaatatgcccgtactaacgctacggagctataaaaatatttcgattcacgtcattgagctcccattgagcacaggagtaagcgccgatggcaggatggactactctcaatcagtccaattgagctgtatctctattcacattatatatcacatatatgtaaagcaactataaaaatcatattg

SEQ ID NO: 34369 - DNA, 424 bp, Oryza sativa
  unsure (1)..(424): unsure at all n locations
agctagattattatttggggatcagagaatttataaagcggtgatcaaaagacagcaacaggcacaaagcaaggtactttgaagcgtatatcatggggagagggctcactaaggactaagaggaatgtgacttgatggaggttgaagtaaacacaaggttgttaaagaaagcaagagatgatggtgaggatgaaaaaagaagaaaacaccactgtataaattgtaaagtctgggctgcagtgacaggccactaagccacaacgaggattaacatcttggaactgctgggaaatgtggaatgtcctagcagttgaaggcttctggacctccataagcaagaagaccctcacattntatattaccagatactacactactatatatgagaagaggacgagttggttcaagtacgttgtgggaatgt

SEQ ID NO: 34370 - DNA, 479 bp, Oryza sativa
  unsure (1)..(479): unsure at all n locations
taatgctcgagacgcacgcacgatattcaatcttatagactnatctaccattaatcctgttgttgaacttatcaattgctgcctgtttcctagacaatactgcacgatattcaacacgttcatatgattctgggccaaatctgtgatgcataagatcttccaaaatatttcccattgtgtttccacctgctttatcagactgccatattgcaataaaagaatgctcaagatatgctgaagtaagacaatacgaaatgctatcaaagtcacaggctccaaagataatcaagggaaaattgtaaaagtataagagaaggggacactaactgacacttgaggaaacaagtttgaaccaacatgaaattatcacatattgttccttttttgctaatacttgctatgnganactacatttagcatgccatagcaacaccatatgctgccatgacttgctgactctgtagatactacttatatag

SEQ ID NO: 34371 - DNA, 479 bp, Oryza sativa
  unsure (1)..(479): unsure at all n locations
taatgcttgggaggcacgcacgatattcaatcatttagacttatctaccattagtcttggtggtgaacctatcaattgctgcctgttaccttgacaatactgcacgatattcaacacgttcatatgattctgggccaaatctgtgatgcataagatcttgcaaaatatttcccattttgtttccacctgctctatcagactggcatagtgcataaaaagaaggttcaagatatgctgaagtaagaaaataggatatgctatcaaagtcacaggctccaaagattatcaagggaaaattggaacagtataatagaaggggacactaactgacacttgatgaaacaagtttgaaccaagatgaaattatcacatattgttccttttctgctagtacttggtatgtganaaacaattcagcatgccatatcaacaccatatgcttgcatgacttggtgactctgtagatactacttatatag

SEQ ID NO: 34372 - DNA, 367 bp, Oryza sativa
agcttaacatagtactgtagtcttgagacttgtgagcagtctcatcttagattacatcatatgttatgcagctctgcaagctctcttctactttcagatgcactctgaaactgagaaccgagtttgagctgacatttctgccagcttcatgtgcgtcagccgcactgacaacagcgaaaccgttggcgccgtggtatcatcgtcgcgatggacccccgaagaacctgaggctatcgatcctcgccgtcgtcggaaaacaagaccgtcactgccacaattcggctgtcgtcatcctctaagccggtgacaagaactccttgaaggttaccaaccagtggtagcccgaactctttcttgccatggaact

SEQ ID NO: 34373 - DNA, 368 bp, Oryza sativa
  unsure (1)..(368): unsure at all n locations
tccgacgtggctgatccccacgggctgggtgttcctggttagtaatgtcgngtgggtaaagtgtaccccctctgcagaggtcaacaaactgtttgaacagccgtgcccacggtcatgggcggatgtgaggtgattcctatcgtagttttgtttgactactgccttgtgaaattgctgttgtgaaaaggggatcgttgtttggaaaatctgcagctgatgggatcagctaggcccgggtggccgtttgaaagttgttggcccgggtggccgtttgaaagttgttggccgggtgccaatcttgatcaattntaaagactgatacattgcacatactccgaccggacgagacgcactgtctcatccgtgtc

SEQ ID NO: 34374 - DNA, 343 bp, Oryza sativa
  unsure (1)..(343): unsure at all n locations
ctctattctgtgctcattccgcattgcattgaagaatctccatccctcatctcttaagcctgaatggctacaagcatacagaatggcactgaaagaaccggcatcaggctgaatgccacttcccttcatctgctcaaagagggcaatggcatctctaccgcgaccatgcatgccatatccagctatcatgatggtccatgagataaggttcttgttggttaacatgtcaaacaaacggcgtgctagcagtaatgcaccacatntaacatacatgtcgacgagtgcattggctacaaaattatcttccaagtaccctcttcgtactgcgtangcatgcatctcc

SEQ ID NO: 34375 - DNA, 424 bp, Oryza sativa
acacatagcgattcacttctacttaataaacagttcttatcaacggatcaatgtccgtgtaatcaaatcaaatgcgactcaacaatgatctgtagtatgtgtacctgtagcacatgcagagagttaagacaaggatgagcgcgacggccgggaagtcgagcgcgtcgtatcccttggcgatgccgtcgacctggatcctccacgcgtccggctccgtgatcccgcacgtcgaggccaggtagtccgtgaagctcctcgccaccgccgcgttcgacagcacgtactccatcaggatgttggctcccccgaagaactccaccagctcacctgatgagagcaacagatggagtcaattaaccgcgctcgattgaattgatccatcgatcgttgaagagtgcgttggattaattcaacaatgtccctg

SEQ ID NO: 34376 - DNA, 367 bp, Oryza sativa
cttgaaccgcaatggccatgctaacaggtttccaccatcatagaggtgattgtccaagctcctgtttggcataaactcgtagactaacaagaactctccatgctcatgacaccagcccacatgttgcacaagattccgatgccttagtctgctgatgatcttgacctcagagatgtactccttcctcccctgtgttgacccttttgcaactcgctttatggcaatctcaatgttttgatccttcaagaaaccctggtatactgcaccgaaacccccttctccaagctttctctctgcagcagaattatccgtcgccactacgagttcatagattggatctccttggcccttgccttctctactcact

SEQ ID NO: 34377 - DNA, 402 bp, Oryza sativa
  unsure (1)..(402): unsure at all n locations
agcttatggttgggatgcaccctcancaatgcttgaagccgcatttcaagctatagtgtattatccacctcacacgccagggatggatgtgttcttttactattttccaactcgcacaaatcaagcaactaccaattactatgcaggctcgccggaaacatgagagagattgaaattgcacagctgttcttagctggcctagctcgagctatggatagatatcttgcgaatactatagctgagttgtgtagatcgcaagccagagtcgtatgcttgataaataatcaacaactgggcctcaaggactgtgatgtgtcattatttatgggaacattaactaaacctttactgaactatgcctctcaaatggccgtattaaacatgacactaagcctcataaga

SEQ ID NO: 34378 - DNA, 489 bp, Oryza sativa
  unsure (1)..(489): unsure at all n locations
tggcgcccttctttgnaatcaggtacctaanacgattcatgatgtaacatatatagtagaagttggacaaactaaaattcacgagcaatatgagttctataccctttgatacgctcattgtgtgtctcgagtgcatcaatttcctgctggaattccctttttctttctgccagctgatgatacttctgatcaagcttttccttcaaagcttcatgctcttgcaacaagctntctctctcttttgacaacggaccaagagactcctctaaatgctgcataattgagcaataaccgattatacacatgttgcatcatagtgcataagcccaagtgtaagcatgtcattgataaaaaaagcacccccaacatttccgggactcgaaacaatagcaagccaagtgaaccacaagcgtttcctggaaagaggctgatgcaagtgctgactaaattgtggtacaatgataaccagccagtaaaattctcagttac

SEQ ID NO: 34379 - DNA, 383 bp, Oryza sativa
  unsure (1)..(383): unsure at all n locations
tttggtgattacatacaaatccgaggtgcctaacaggcattgcaacttcatcatccaatgttttttttggcatattacatttgcagctatcctcgcacacttttatggctccaaaattatgtgtaagttgatgagagagaaaatttgtgtcgggaagaaagaatatatagaaattcaggtcatttgctaaagaatgttntataaaatactcgagaatgaaaactctagtgaaagttaatcttaaataatagacaacaaactaaaatgaaaattaaaagaagtaaaacacagttaacattagtttaaaactttacaaatagttattaagaattatctggtgaatactttatgattgtcgtatgaataaagatatcttataatta

SEQ ID NO: 34380 - DNA, 450 bp, Oryza sativa
tgagctgagtcgagccgcacctgaatcaactctgagacgagctcctctctttcttctcatgagtctcaagctcctttgactgacctactgcatccccactaactgcttcgttcaaccctgaagcacttgttcattgtactgatgcctattaatatttttgttggcaaagtggcgtcataacaaaatgtaattacaacctctttcttgctaatcaaatcctctgccaaaccaccgcatgttgaccatgattatccgcgcggagaaaataaccaatatgttagacaaaatccatgcggtgaagaacaacaatcatggaggatattaccacccgaacacggccatcttcaatgcggcatcatctcaaccacccatggcatcgcctactatagaacccaccatgtgctcggcttgccccattaacaacgttacatatgagacggcgagttcaag

SEQ ID NO: 34381 - DNA, 249 bp, Oryza sativa
  unsure (1)..(249): unsure at all n locations
aatacttttacgacacttactcacctgatagtcgaatgaccacaattggagtgctacggtgcctaacgagntacatggtcttatcgatcatgaaatggacactgacacatctttacttagtagacatgtggatgaagatatctatatgaatcagcctagacgaattcgattgtgaacgtcaagaacgcaaaccgagcataatgttgaagactttgtatggtctgaaacaagcttctaaccaatggtatg

SEQ ID NO: 34382 - DNA, 375 bp, Oryza sativa
  unsure (1)..(375): unsure at all n locations
tacaatatttttctgaatatgtactacttnttgaacattgaactactgacctagtttgccatgaatttttcttttgggatgtcacactgctgagcattcaagtatatcttatcgttgctctaacaagaatttgtagagtgtgctcaaagcaacaacattaagatgactttgttgattttctaccaccaatattgtttttattccagattcattcctagtggcaatttattggaccttcatggtaatttagaaaccaggagaaccagccaaccgatttatgtttatttagtcccagtctgtgtactatctgaactttttcaatcatttatcacgacatatgtgttggacacaacacattatatgttatttcttgtt

SEQ ID NO: 34383 - DNA, 459 bp, Oryza sativa
  unsure (1)..(459): unsure at all n locations
taatctganacatgctactttatttttcatgttaacttaatctgttctttaattattctacaaaggtagggggaaactggttttatcatttaaatgaaccaagcaattctcctgtttctgttacctgcctgaatatattaaagttcctgtagaagtatgcacaaattattttgactttttccaaatagaactcatgccaaagtataaccaccctttgacaggaaaacatgttatcgntctagagtatcaatttttctgataactcacattcaaacaacaaaaaacgttaatatagcatatagactgtccaaagcacaataatacatagctagaaattctgtatttgtgtctagaatgtgaatccaacacaatccatgcacagtacaagaattctgagaactaatccatagctccacacaaattccattagtatatatgtttctcacattntatgttctc

SEQ ID NO: 34384 - DNA, 385 bp, Oryza sativa
agcttgaatttgtgatgtcgtagaccgatgtttatatataacagaaggccacttggctggccgaaagagaaaaacttggttgtctatatctctgcaagttggaaggcactggttgtatttgtgcctctgctcgcgaactcacttggttcttctatcacggtatatggaacatgcagggtgtaaaggagatcctgatggctctcatacctaacacgcattgttagtttcataaccaaattgtaggcgtctgcttgccaggttattccttgccttctgctatgcatgagctgctctcgttctcgtacttgagtagttgtgctgcgcgcgcgctctctctctctcttacacacatatatatatatatatgcttgtatagcgtcgtgaa

SEQ ID NO: 34385 - DNA, 324 bp, Oryza sativa
tggctggtcggacaatagttttacagaactccttgagctgttaaagggatctgtgccagaggggaacaatttacctcagacgacatatgaagcgaagcaagtattatgtccgtgggcctggaggtcagaagaattcatgcatgtccgaacgactgcattttatattacaaggaatacgctgacttggatgtctgccctatctgtggggcatcaagatacaaacgagcaaagagtgaaggtgaaggaagtaagtcaaagaggggaggcccagcaaaggtggtgtggtatctcccaattgcggagcgcatgaagagaatgtttgcg

SEQ ID NO: 34386 - DNA, 132 bp, Oryza sativa
agttgactgtcccgttcactattaaagaactgcttacttactgcagatcatcagagcacaccggttactctgactggcagcttggactatacagatggagagcaatgcaaatgcactacctgggaattaagc

SEQ ID NO: 34387 - DNA, 477 bp, Oryza sativa
  unsure (1)..(477): unsure at all n locations
actggtacaatctcttgagcttgagcaactcagagcatttgacgtttcttacacgataacccaatagtattcagcatatacccaaggtactcacaaaaccaaacacactcaccattctccctagcaacggccacaagagttaattgtagctgacgtgcaaaacaatgaacataataagcagaatgagattcattcataatcatcttctatagaccattaacctcacccttcatgttactagccccatcatatccttgaccacgaactctagacaagctcaatgattgttgcattagtaaattcttgatagcatctctaagaatcaaagctgcattattctcaacatgcacaataccatgatagcgctcaaccaccctccctgtcttgtcaacttaacgcaagcaaagtgccaactgctcatattgatacacattgctagactcatcagcaagaattgaangaaaactcattcccaag

SEQ ID NO: 34388 - DNA, 469 bp, Oryza sativa
  unsure (1)..(469): unsure at all n locations
ctcttgagctggagcaactnagagcatttgatgtttcttacacgaaatcccaatagcatactgcaaatacccaaggtactctaataaccaaacacaatcaccattctccctagcaacggccacaagaggtaattgtagttgatgtgcataacaatgaacataataagcagaaagagatgcattcattatcagcttctttagaccattaacctcacccttcatgttactagccccatcatatccttgaccacgaactttagacaagctcaatgattgttgcattagtaaattcttgatagcatctctaagtatcaaagctgtagtattctcaacatgcacaataccaagagagcgctcaaccacccttcctttcttgtcaacataacgcaagcaaagtgccaactgctcactttgatacacatcgctagactcatcagcaagaattgaaagaaaactcatcctcaagatc

SEQ ID NO: 34389 - DNA, 325 bp, Oryza sativa
  unsure (1)..(325): unsure at all n locations
agcttcgcagaaccctcattgatggtggcagtgcactcaatatcctcttcgctaagaccctggatgatatgcagattcctcgctctgagctaaaaccaagcaatgcgccttttacggataattccaggattattcgcaactccactcggtcagatcaccctcccagtcacttttggcactcgggaaaatntccgcacagagaacatcagctttgaagtcgccgatgtcgagacagcataccatgccatactcggacgcccggcgttagcaagttcatggccgtcccgcactacacttacatgatgatgaaatgcctggcccccgg

SEQ ID NO: 34390 - DNA, 406 bp, Oryza sativa
cctggtgcatcaatggagactcaaatgaccgaatcctgtattctggtctgagtcgagtggccggcgcaagactatctcctaaggatctaagatagctactcctaatacacatagaaagtgtgagtcttcttatcttcttcccacagcacatgccagcttaagtaagtatacagcagctctcattatcacagtgaatggtatgagcaaaacgacaagctttgatagcgacagagtgattctcatgacgttaacaccgtctgatccctctctccaacacgtggctttagctcatctcttagatcttcattgcccaggatgaaacgttctctccttcttcgcatcttcagctaccgaaactctgaactatcgtaaatctcctacattcttcttacgagtctgacattac

SEQ ID NO: 34391 - DNA, 383 bp, Oryza sativa
cttatcatgcaagtaaacgtctgctgcttctcatagtaaaagcatctctgcaagatatttcttatccattttcatgtcaatactcataaggtgcaattgaaccatgatgcataaatctctttacaactatatctgagaaggaattgttgataatttgtttctgtttcagtagccaaattgctgaaaagtagaaacattggtattcacgcgaaggtattccaactttacttttgggtaatttgtgaatatgggttcatttatgcaaaccagaagtggaagtgggactcataagatattaatgtataatctgcgatacatgtacttgaaatggaagtgaatggcataatggcttttcttaaaattacgttcaatatggcatgata

SEQ ID NO: 34392 - DNA, 396 bp, Oryza sativa
  unsure (1)..(396): unsure at all n locations
ccagattccgatctgtactctattcctattccactagcttaagaacactaaactaactcgagagaatatgagagagctcttgcttgatgtgtgtggaagaaagtacgagatgaagcccttttatagcttaactatgacggntctgacagttggaatggtcggaattaccctccaaccgtcataggggcttcatctcatccgtccagccaanacctggatccaacagccaaaccaggggcaggcccatccagccaacaacttcgctggtggcctactctactgctcctctccgcagacttgtgaattntggcccaattcgcgtgtcattctgagttctggggcctntatacatnagtctgattacgacatcgtccgattgattatcgtctgattgat

SEQ ID NO: 34393 - DNA, 368 bp, Oryza sativa
  unsure (1)..(368): unsure at all n locations
gccgacaagaggggtccaaaccaacaacaggtaaggtccagaccatactgtgccaagaagcccaagggtcctccccgacaccacccncgcgaatccacatttctctcggcatcaaagcttccctgataagctagttactcaaccaggggtgtcctattccacccatgtggtcggacttgtcttatgttcggatgaaattccaaggaanacggtccttaagtgcaagagcgggaaaccgtacaccctgtatgttccccggtccgcgggtttggaaattcatttagttcgcaagcaccgacccaggtgtcgggttttccaaatttttgtaagaccaagtcttacccaagatgttttcagatctaaagttg

SEQ ID NO: 34394 - DNA, 429 bp, Oryza sativa
  unsure (1)..(429): unsure at all n locations
agcttggtggaaatgctgaagagggtaaggtgggttcttggattaaaacctgaccagcccatggatgatttctncaacagagctcacggcagtggcccaagagggatggaaaaactttctggatggcatataaggagattgatgttttctattggcatataagaaaccaagcgaattttcagtgccatataggtaattctctcaatataaaataacaagagtccatataaaaccataagttataaatatttgaaatttggaataataaaacaagtattcaaagaagagtccaaatacaacacgatacgagattaggtataatttataattcctaanaagaacaatttgaataaaaccaataattgatttgaatacaaattcgaaataagaatcactcaatcactaaattcaaaatacaatatatatttt

SEQ ID NO: 34395 - DNA, 484 bp, Oryza sativa
  unsure (1)..(484): unsure at all n locations
gaccttgatactaagctcggggtctgacatcataaccgaagtggaagaagatggacgttctattgccccggccgaagccgccaagagctatgtacgtcacagcggttgggttgtgcgggataacgtgcctgtcaatacggtgtacttggcgaaaacaaaggcacgcggagatcatgagagctttgtccaagattccgagaaagagatgctgtggaccacaatgctcgagacattcaccctttctgcgggtacagaggacaaagtgaanaggtggactctgaagaaaatggcagaacagtntcagagcttcaagggagatctgtaccagaagtatatactgaaggggcagacaccgaactttgacacattcccaaagctaaaggatcactgggacgagttcgttgcatataagacaggtgaacaagggaaggcgatgatggaaagaaacatagaatatgccgncaagaagaagtaccatcaccac

SEQ ID NO: 34396 - DNA, 399 bp, Oryza sativa
ctaatcttgttataagctttcttttgtcgccataactcccttttagaccatgtgtctaccatgaatcccgctattttgaacatacataaattttgaaaagaaaggattgatttgctcggccctatgcattaatactccatctatcttacactattatgtcattcttacactggtgccgataatgaaaaagaaacgccaacgatcgatcagatattttttttttggtattgacgcaagctgagatcactctcctcctatcatagaaattaaattactaatccatcgatctcttccgtctagtcagcaagaacataatatatttaaccatagcaattagctagtcaaaacgatcaataagacgataacaaattcgaccacatgatcctcactatataacac

SEQ ID NO: 34397 - DNA, 359 bp, Oryza sativa
aaatatgtcacgctactctcatatattaagcctcatgtacatatgcttatcaacttagggaattggtgagcattagttgcagttgttatttttctaaatataggttatagtgctagcttcagtcaagaaaattaaattttaaagatactttgacgaggtaccacacctctcggtacctcttcaatcaagaaagtttctaggtatttgaggaggtaactacagatgcatgtgaaccattttattttagataggacgtgtgaaaagtttttagaatacaaacaacgtgtaaactaccttagtattagtgtaataactctcgattaaactacacatgcatgagagtttttcccctaaaattg

SEQ ID NO: 34398 - DNA, 397 bp, Oryza sativa
  unsure (1)..(397): unsure at all n locations
tgcactgtagcgctgaatagncaaaagattttttttcctagcaagaagcgctgttcgcgtctatggtcattgctccttaacttttttccatgctcaatctttggggacttacagatttacacaagtctggtgctaatcctcattctcaattggattatgggagtgcagcgtgtcactggattattagtggttatggcatccgtgctacagctgcacgtgcaaacctatgtctctatctgttagtcctaaacattttccctaccgaatgaaaatagagccataagaggtgcagaaatagtcgattgctcttatttactgcgtctagtaaagtgcatatattccagcgttcaattttttatcggatgtggtcatgggtctggccattccttaatttttc

SEQ ID NO: 34399 - DNA, 361 bp, Oryza sativa
cccctggtactgacccaattcatctaaggaccatcagtgaaatctgtttctggtccctcaaccctccctgcacagaaaaagtctaatttccctccttcctctcttcttttctctccttttctttcccctctttttgaggctggcttggaagccctaactcagccgagccgagccgacaccacaagaggacggggctcgatccccttctccgcgcaacgccttgccacgcggtcacacatggcgccacgctcccagccccaccatcccttccgacgcctaccacgcccatctcgccggcgggctctgccttgcccttccccaagctcttcttggctttgcgacgccgtgacacccagctctg

SEQ ID NO: 34400 - DNA, 398 bp, Oryza sativa
  unsure (1)..(398): unsure at all n locations
tgtgatatganagaatgggaagctcctgaatcaaacagaactattgctggtaccgagttgacagagaacatacccatcacaacgtctggaacatcctgagcggtctcagcttgaatgtggttcatccggcctcgaccatagttgttggaggcactagaaccttgtcctcttgcctgagagttatgacgagacagagctgctgctggagtaggagttctggcagtgctgccattagcatgccctgagttggtgttggtaggattctgatggcactatctagcatagtgacccatctggttacaccggatacactgaactgctgacagtcctagcggtgacttgaaagaggtaaccctgttgggcgcagtattgccacttggggcatgctgctgtggctg

SEQ ID NO: 34401 - DNA, 436 bp, Oryza sativa
ataattagagccagccgccgcttgcagcttataatatgtttataggtcactttttttctttcctctgaccggacaagacatgtggcacgatcttaccatatgtaaaattgcttccagtttagctacatggtccaattagctctatgggatcggacccatttggataagatattgctgtgttgcaatgcactggcactccactagtctcatataattatttacagactacttcctccgtcctaaaaaaaagacaaaccatgggttttcgtgtccaacgtttgattgtctgtcttatatgaaattattttataattagtattttcattattgttagatgataaaacatgattaatactttatatgtgacttatctttttaattcttttcataattttttcaaataagacggatggttaaacgttgctcacagaaacct

SEQ ID NO: 34402 - DNA, 321 bp, Oryza sativa
accattaaactaactgaggctgacatctacgaatgagagatgcttttttctcgcccccccaggggtgacttttcggggggggtgcggttacggacatccgccgtggtactgttactggcaagaaccggaagctgaaacatagactttttccaattcgaaaaataatctgtgaccccatgctttaacatcaccttctgcgggacaaggacaaaggagatgtgactctaagatatggctacagtttgagctttaggaactgtccaaattatctgaaggcaacaccgactgaccattccaagtaaggatcactggacagtcttg

SEQ ID NO: 34403 - DNA, 424 bp, Oryza sativa
  unsure (1)..(424): unsure at all n locations
agnctgaaatagttaccttgaatngagcaggattaccaagcttctggataatacgagcgtactggtgataaaaactagtgttaagacttcagagagacagatatagcaaaataaaataaaaactaccgctcatacctttcttgctgcaagcttggattgttgttcactctttgccccagtacagacctggtataggacacaaaagatttataaacagacctctaatttaaccatagatgccagacatcacggtggacactgagaaattttggttaacagccatatttgttttttttatacaaaggaaaaaagagaagataagatgcaacaaattggtgcgtcaaacccatggcaaccctttctttaagttcactgcctaacagacaggccccatacgacatactagtaagcctaaggcttcaac

SEQ ID NO: 34404 - DNA, 380 bp, Oryza sativa
  unsure (1)..(380): unsure at all n locations
atgtgtcctatgaaaatattagatggccacatttgttctgatcaaaacaactgaagctgtgcgaaataattgtttgcactgaaattaataaatactaagggtatgcatgtgtttcatgacagatgtaaaggtatgcatgatcaacgaggtattcattatcatgtttgaacattgataatgcaagtaaatacgtcaggtttaacttaacccatcgataaagaattgtctcatgaatttcatgaacatataaccaggtccagagatcatgttcaagctatttggntagatatttcaagctatttggcttgcagtagctaaatcatgtttgctacttcagtcttcagccatatggaaactagaacaagatacaacgatatgct

SEQ ID NO: 34405 - DNA, 418 bp, Oryza sativa
  unsure (1)..(418): unsure at all n locations
agcttgttaatgagataatatctgtattcaatataaaaaaaatccatgataaaaaggaggaaaaccacaatttaaatnttaaaattagcaaacaagaaaaatgctatgaaagatattttacactcctacatactattttattatgcagataaatactagttttgtacctaatcttatagtttatttgcatcacacaaccaagctcatgaacttttgcatatatatgctcatcctagctcatttggagccttagccacgcccacatgagctaagctcgaggacatcacgactcacgagccttaaactattatacatgtaacaagcaaaccgacgactaatctagatatatcataagaatccagctgtcccaacttatatataaaaataagccgaccaagagtaaacataatgtttccat

SEQ ID NO: 34406 - DNA, 466 bp, Oryza sativa
  unsure (1)..(466): unsure at all n locations
tgacatactgtctctagtttacttccattgcttatcatgtgtattttatgtttagggtggcgcccgttatctcacaagttatctgagatagcaactgttgaggaatttttgtctctaatttcagatgtgcaagatattcttatctataatttttagatgtgtccacatgacattttcatttttttggtctattggtctctgtgtgatattgactgggttatatgtgtactttttagcaactttgttttggcttttgttgctcttgcatgtgttgattctgggagcaagggccttggagctgcttggattgtgggatgacagcaatggtcagtaaatgaaatatttgttccttatattctgttttgtgttccttttttgaattgtcttctgctgtgcttgctatctangaaatcaatcatttgtttnttatgaactgttgtacaggaaattgatgtcaacgtgggtg

SEQ ID NO: 34407 - DNA, 422 bp, Oryza sativa
  unsure (1)..(422): unsure at all n locations
agcttccncgcaaagganaatcttataaataatctgttagtccctagtttgatgattggtgacaccggtttattatggatgcaagtgaaatggacaagtggagtttttttttcgcttatcgaaattttagtttctctctttctttattccttaaagaaaagttttttctttcaagttttatactaggtaggaaattaactataaagaggatatttacgtgggtagcgggattggcgcttaccggtgcgcaccaagtacatcaagaagaggagagaggacactgaaatgctgtaaaagtgtaaaatttgcatctactaactataattagattttatgaaaataacaacaataattagatggatgaccttgaggagaggaacaactaaacctttgaagataaaatcagattattcactcacctc

SEQ ID NO: 34408 - DNA, 448 bp, Oryza sativa
  unsure (1)..(448): unsure at all n locations
tgtggcatncttaggcatcatccaaacatccgcttatgtgcctgtgttaacactcantttttggagattataccttctataaatgtgcctgngtattaactcgtgctttttaagtaagtgaattggtcatgcattacatctaacacactaatctttgtttcagcctttcagattatactgcatgatacctttttctatgttgtaggaactacacagaattttttcatggatttgttcaattatattatcaatattgatatatcatttattggtcaatattttgttttgctctctgaactaatggttttcctctctaattagatgccagacttctagatgctgtttcgcgtaacgatcctgatattgtcaaattctcatggtgatggctctttgcaatacagttggtcctatcataagggtaagtgcatcttcttcatgtacagtactg

SEQ ID NO: 34409 - DNA, 372 bp, Oryza sativa
agcttcaccttttgccttcttcatttgccccacaaagacttcatctttgaagcagtcagtgcattttggagtttgagaaaaaaagagggacatatgccttgaagtttgacaaagtgcggaacgaatacattatagttctgagaaagtgaagggtattatggtctttttggttttatattgggatgtgtgaaataggctaaaaatgaattctttttgggacggaggtagtactgcttagtatgtttttatcaagtaagttagacttctgctgctcttatgttatatatatttattggtgatgcaacagcatatatgatagcttcaaatgtttctcttggcaggtatgattggtacctctgcattgatcatatg

SEQ ID NO: 34410 - DNA, 485 bp, Oryza sativa
  unsure (1)..(485): unsure at all n locations
tattaaaagacagaattaggttagcaaggctggttaaattggccaggtattttgggatggtaccagaaatgttgttatgggatatatccaaaatttgcaagccagataggttactgaaagagtctggaatggaatcatggaattcattgacagataagttcaagtatcctaacatctgaagatgtccaattgaatcatggaggctaccgacaaagcggttcatatagatatccatgtagttaatttgttttatattgcctatatcaactggcaattcaccactgaagaaaatttgagatagatctagcaggatgagcctatcaagatgaaataagctcggtggtactggtgatgataattggttatgacctaatgctangtgctctaacttggtcaaattactggngtccaattgtaagccagagaacttgttggttccaatgtatattaattcaatattatttaacatgcccagtgttaatggg

SEQ ID NO: 34411 - DNA, 417 bp, Oryza sativa
  unsure (1)..(417): unsure at all n locations
agcttgtgctcacagcgatccaatgagctgtctattgtcggtctcggncaacagtgattgaaatttctgaacgaaatttggtactttcacccccttccaccggcaagtacacatctcgcctgaaaatttcagttttttcctttttttgaatttgatcaaagtttattcaaaatcgttcaaaattcaacaaattttcaaaaaaaaattcggccaaaaaataccaaaattttggagatttcggttccctctagaaaaaaaatcacagtttcgagattactaaccagggttagtcaattcagtggtgttgagagatggcatgatgactggtggcatgtgcccgggatggtaaggttgaactagtggtgcatgaatatagcattgtgatcatnagtaagacctgtatatatatatttaatg

SEQ ID NO: 34412 - DNA, 452 bp, Oryza sativa
  unsure (1)..(452): unsure at all n locations
gctcatgcacatgtctaattcacaatntacgaagctgctgagagaaagaattcaatatgttcatggttccttgcaagcaacaaccaacttanaaaatgatcggaaatgatgctatatgttatttctaacattaattttgaacacataaaaaatatgctaattatgtattcgtggacgtagcattctcatcagtctttatatcaattgacatgtgtacctttctctatgtttacggtacttccaaagcaagtgtatgcttgcacgtatatatctaaactttgtgggttcaagacttatctgtggtctgttcataaataaagatgtgtttctcttatacagtgtctttcctattagttgaagattactctnttgtacacagtgtatttatatttttttttaanaaaaacttagtcgcctatgtgcagtgagaatcaacgaatagtatacattat

SEQ ID NO: 34413 - DNA, 414 bp, Oryza sativa
agcttgtgcttttgtctgaacccctcctctaatttgctcttcaatcttctgcacagagagttgctgcacaaatttacgccactgtggctgcatttccatcatcgtcgtcggattatgtatgcttagatcgtaccaaactagctctgttttttcggctacttcaccgaattattgtctctgattatttgcttatatcgtctctgaaagtatgttccctcacaaaattttcatttattatatcgttcggactatttgttaaattcatttcttaaaacatttaatttatctctataataaagtatataatctgtgacaaaatccatataaggccgagtttagttccaaacttcttctttaaacttctaacttttccatcacattaaaactttcttacacacacaaacttccaacttt

SEQ ID NO: 34414 - DNA, 454 bp, Oryza sativa
  unsure (1)..(454): unsure at all n locations
tggtggtgtcagcttgcactctcaccctcttcccaatgaccctgcgaaagacgaacacaaaaccaatctcacaaattcacaacacaaatcagatcaaagccgggtcaatgaaagttgatctgatttcaaaaaaaaaaaaaaaaaagaatctcacaaattcagttactacatactgtattcaacaacaactaactaatcaagataaatacgtaatgaatactacctcatatatacattaaaggaaggaggtagcatatcaagagttggattggtgacacatactctttgagcctgatctcgatgtcggggaacttggcggcgaagtggtcgacgcagtccttcatattgnggtacccggcggcgcaaaggaatcgtccggcgatggacggctgatccatacagaagacgtgcgcgtcgcaggcgtcctcgacgtgcaccagcggcacggacccca

SEQ ID NO: 34415 - DNA, 279 bp, Oryza sativa
ccggttttaattggagcattctacaagagaactacccacgtgactacattcattggagaaacaaaatcaacatgctattaaagcaacacaaatactgaaaatgatagacctattcctctcgggagcaaattgtgaatactcatgaatttgcccacggaagggtaaaatgtgatcgaatatatagaaaaagttatttgaaattaacgatgccatattttttcataaaaaaataagagtaaattccatcaccggtacctaaacttgtaccgttgtgtcatt

SEQ ID NO: 34416 - DNA, 415 bp, Oryza sativa
tatgggcaatggtggtatttcaataaccaggaaatgttcatcagtagtctacacatgtgcagacatgtacgtatggatcaatctaatttagttccctgttgaaatggaaaggaggataaaagataataaacgagttgccagcacatgatgctgagttagccccggtggttgtggtggcgtgtgttcaattgaagtgattggttgatcggtgaattggaatcgcggaacactgtgtaatctgagaattaagattatgtctgcaataatttgaataggggcaggtctgatggcctccttacctggatgcagtcccatcatgctgaattcctatagagaagatgagaaaacttgttgcatatacacctgcattttcaagtctggactcgtaggtagttgtgatggacatgattcaatc

SEQ ID NO: 34417 - DNA, 430 bp, Oryza sativa
  unsure (1)..(430): unsure at all n locations
gctgggtaacgtatttatatcacctttataattagttatttatttgtttacaacatataaacttaataataaacactaaggaagaattcacaaaatacaaatagttttgatgtaactaatggactagtcactactcgctagttaagaaacactaagtatatatgaagatgtggtgatcttttgtagtaatgagcaactcacaagctagttcattaagctcaagagttaaatttctagcttggctcaactcattaagaccatgggtttgagtcaatcagagtcgagctcagtagctcaccatgagccaatccaaaccacgagcttcgagcttttttccacatctacatcaaggtacttaagccctgtttagatcccactctaaattttttttaccatatcacatcgaacattngaacacctacatgaagta

SEQ ID NO: 34418 - DNA, 448 bp, Oryza sativa
  unsure (1)..(448): unsure at all n locations
ctcagcttgtcgcctatgtccaccacatcatggagtctgccaggaactgctcctctttagttagctctagcgttggcacttggtacacaaagtggacaccgtggacaaagtgtgtgtgcctgtcagaagcctcgacaatcattccctcttcatcatatagatttggaatttctctatcgaagccaacaacttgcccaccatcgaggcttgccgcatctacttcgtgaagccgaatctagcaacctatgagtatctttgtctcatcaatagatgactggaggaggccatgcgcattgtgaagcagaaggctgcatcctcccctctcaccctggtgcaagtcatggtgaattattatatcaataatgaaaaattaacaatgctcacattattagacagtgatgggtacccaaatattacttatccagtgctatagaaaanacctcatcga

SEQ ID NO: 34419 - DNA, 397 bp, Oryza sativa
  unsure (1)..(397): unsure at all n locations
ttataatgctattccaagagatagatataatactcgccttctgtcccagtatgacgttgttgactttcacgtaatgtttaaccattcattttatttaaaaagttatataaatattatttattttattatgacttattttatcaccaaaaaaactaaaatcctagcctgtacttttacatatttatactacatttataataaaacgaatagtcaaatgctatgcgaaaagtgaacgatgtgatctantttagctgggttttcgcaacagaacaaggacaatcctccaacataaggattctgacatattcacgtgtaaaaatatctagatatttatccaccctaagcttgngtatgttattattgcatatttattaattagagatgcatactactactc

SEQ ID NO: 34420 - DNA, 373 bp, Oryza sativa
taatatggtaaggttgaaagccacaacaaactgaataggctcttggaagtttccactgattcatctcgttggagaaaaaaagtggaattgcaaatctcttctctactatttataaacgtactgtttggcaagagaatggagatggggagtttagaagagggaattgggggagggattggtcatgagagttacaattttactccttgtctcttgtttggtaagtaagatgaaaagtataggaagttcaggtggaattaaattttaagtgatgatatatggtcgacatttatcttgtgtacttagaaaaggaattccatcccaattatctgcccctatctagatattaaaaatgtgggagtttgatcttaaattt

SEQ ID NO: 34421 - DNA, 481 bp, Oryza sativa
  unsure (1)..(481): unsure at all n locations
ggctggtaactactgatgcgtagtgctcaagccactaatttatctgacataccagcaaggagcttgtgacactgacatgcggcaatggttctctgcgtatgtcgagaagaaagacttgtagatggagtatgatttgtgaaccacttgcagctcaagtgtgcgctacatgacctacatcacaatgcaactcggctcaagtttacgtggtacatttgcaagatggagtatgccaaggaaaggcatcgccggacagggggctgcctccgattnttcttggctagaatttgaatggagacacaggcacacagctctcgtttgaaatgtatgcgcgcgcgcgcggcagcaagttggcttcgctgcaggattcctccagaatgagacttggaaatgtgggatgatngtctgtttacggcacaagttgttaatttggttattttagtcccctgttaattgtccatttagcacgcgtgtcttttacaag

SEQ ID NO: 34422 - DNA, 429 bp, Oryza sativa
  unsure (1)..(429): unsure at all n locations
cacccttcgtcgaactcattcagctcggtttatatgctcggtgtgccgacaggtgagacaaggttgcttacccccacgacaaatggaataagttccacccaagtctcgaaatcgccacgggtgaagtggggcgccgcgagagaatactccgaggcagatgtttcgacggccgcccccttccccttcgacttgactagaggcgaaacaaccggctgacgcaaggggcttcagaaaaccctagccgcaaccttcatgacacgatcagtggaggctgaggccccggcggcggcactgtcacccgctccgccagcgtcgatcgatagaacggtggcggtcgaaagatctaagctgcgactagcnggcgaagttggtgtttcgtcagaagactcatcgtcgctgaaacactagcaacatcaacgagttctttct

SEQ ID NO: 34423 - DNA, 423 bp, Oryza sativa
  unsure (1)..(423): unsure at all n locations
agcttcccggnttagctcgtttttattctttttcgctgcatttgtaatcttttctatttttgtaagacgtggatctgtatgtcaacaattgtcgtttgtgtaccctggctggtcctggacagggatttaatgcacattcagcttanaaattctggtttaagaatttctgggcgtgacaagttggtatcagagccgaccttgaccgtaagacaagccaactggaaaccctaagagccctctgaacccctttttcatctgcatatgcctttttgcacctggaattgttttgggaaaatttggagttttgcctctttggtttgcgggaaaaatcttggtcgttcattcggatcggantttttttaaaaaaaacattagctcagtctatggctttagannaaatttagctggagtttattcgacagt

SEQ ID NO: 34424 - DNA, 355 bp, Oryza sativa
  unsure (1)..(355): unsure at all n locations
tctcgtcagntacatccgcatgagaagaactaccctagtcatgaccttgagttagccgcagtggttcatgcgttgaagatttggcgtcactacctctttggtactcgtacggaggtgtacacgaatcacaagggtttaaagtatatctttactcagccggatctgaacatgagacagcggagatggttggaactgattaaggattatgacatgggaattcattatcacccgggaaaggctaatgttgtagcagatgctctcagcangaaaggctattgcaatgctacngaaggacggcggttgccgtgggaattatgcaaggaatttgaaagattgaatttgggaattgtcagta

SEQ ID NO: 34425 - DNA, 420 bp, Oryza sativa
  unsure (1)..(420): unsure at all n locations
aagcntgacatggcctaggtgagtcgccaactgtgctgcaaagaggtttggggggagaaatggtatcaagagaggcattcgctgaagacagttatcagacaagcacgggagataatgccttggtaattgggtggaaaagagaatttttacccttcaaacaccagtcgcttcttctcttgcagctgcagtatacgctcctcaacggtgtccttgatcacaaacctcatgcttctgtatagcggagttcaaatgtaggcaatgtcagacaaagagcggcatggttcataaaaaaaacagctactcccggtttcattttaattgacgttttggacaatgagacggtctacaaaatatatctttgaccttatttttttattagaatatatacaataaataaatgtgtgtttgcttttattataa

SEQ ID NO: 34426 - DNA, 466 bp, Oryza sativa
  unsure (1)..(466): unsure at all n locations
tgcaatntccacccgacgtaaagctgcaatttccacccgacgttcgtactccatccaagcatgaatgaactgtatggtcggntcaggttgcgttatcggcccgccacttgaagtaactctgactgtgtcaatccattgtacgaattgacatttccttacatcctcctatgtacatccattttgggatagttaagttaatgatagtactgaggagtgatgaaaagaatagttgtaattaccacgaaatcatcgtcgacaatgtttggacacacgaaacacctttgtcctcgagttcggtgccttacggaccttatgacctgacaacggtcaccacaacgacactccggatgctcacgccacgtggggagtcctatgggattacgtgtcattctaaagcctcagcagcaattcgacgttcatggctcatccttcgccttatgtagtccgatctttgttcactacgtgg

SEQ ID NO: 34427 - DNA, 422 bp, Oryza sativa
agcttatgttgatgatgtagttgtcaagaccaagcagaaggatgatctgatcgccgatctagaagagacctttgctagcatccgtttcttcgggataaagatgaatcttgaaaagtgcaccttcggagtactgtcagggaagctgcttggctttatggtatcccgtaggggtttacaagccaacccggagaaaataaatgccatccttaacatgaaaccgccaagttctcagaaagattttcagaaaccgactggatgtatggcggcgctcagccggtttgtctcacgactcggcgagcgggggatgccctttttcaagcttttgaagaagaccgacaatttccagtggggacccgaggcccagcaagcctttgaagatttcaagaaacttctcacaactccgccggtcctagcatcaccac

SEQ ID NO: 34428 - DNA, 425 bp, Oryza sativa
  unsure (1)..(425): unsure at all n locations
taaagccatgaatccctcttatgcatatctggatctggatcctgtagaacaaacatataggatgagtagtatctgatataaatataatactcgagaaaaaaatcaagtattttaaaatatttataaatatgtatttctcctcttgtcaattntgatttccccgagcagatgtttcattacgtttaaacgctctgcccaactagtcatagccaccaagcactgggagtcggcctaagcacttcccaagcatgcatatgagtgacatgagttcgtcattaatggaacaaagtttcacggatcggagtttactactcgggtacttttgcaattattaagagcagaanataaatttatctcatctctatgctnttgatttattccgaataatacttagcaccttgcgttactcggtccatccaacgagc

SEQ ID NO: 34429 - DNA, 430 bp, Oryza sativa
  unsure (1)..(430): unsure at all n locations
agcttagctcacagataattagagaaaagattctctaccatcttatcggggctgctcaaatttttttagtggaaacagcgagaccaagttgatacgagttgtcaagttgtaatatacatgttcaatataaacattaattataagttagttaaataacctataaattggtattacatgtcaatcaatcacaaggtagcggtcgctagcttggacgacctcatgtatatattaattttacttcctccggcctattntaattaagtacagttatgattttccgtacacaactttaaccggctgtcttaattaanaatttctaanaaaaattaaaaacataagtcatgtataaattactattcatattttatcatctcataataacaaaaatactaattataaaaaaattaaataaaataaacgattaaaattg

SEQ ID NO: 34430 - DNA, 219 bp, Oryza sativa
taaaagcgcggagtacacccagactactgattaacgtgcaaccttcaaatcggtgttcgcacttcacagagcaattatatctcgtcggctatgaagtgattccgcgattatcgttgggctagacaacaaagtataaatgaagcaacttctgtctatttataccaattccatgaagagctcgacaactcacacccatggccaaggtgcaatacgtcaccg

SEQ ID NO: 34431 - DNA, 416 bp, Oryza sativa
agcttacgcatgatcgccatcaaataatagtttctttttcctctttggcatgcatctcatgaggcgtggaattattccctgtctgttgctaatgtgtgcaatcacctctgcatattcagagatcgtagctgaagattacacattgggaaactggtgtactgcctgcctctgcgatcgatcgatcgatcgatcgccatggctgacgcgaagggcgacgaggtgttggcggagggacagatgcctctgggacggtggccgatcctgtcctacggtgtcggccacatgctgaatgacatcacgtctgcctgctggttcacttacctgctcctcttcttgcaagaaatcgggcttgctccaaggtaatcattgctaattaattaattaaacccacgtagacaacagctcacaatcacact

SEQ ID NO: 34432 - DNA, 470 bp, Oryza sativa
  unsure (1)..(470): unsure at all n locations
acagctcgctcactgtattgtgttatcatgtctaacttgagcaacagaacaggaatggctaagtggaggtgtcaagactcaagaagttcaaaataggaaatacttttcatgccacatgtaagaatttacttacaatcagacaattccctagtctaactccaatatacatacccgaacagtgaagcagtgcagggacctgatgcatctgccctgatatcggttctcgttctccctgatagtttgagtaataacacctacagtgtgacccatgcctgtattgattatcaggcgccacaagacatgggctgtggatgccagatgattggagaagagaccagccagcatcgtgacactgctgagtctgatacacatcatgaggtaatcagcactttaaaattacttgatccggttacttaatgtagtcatcaactggatggttcatcancaagcatagtacttctatatgacac

SEQ ID NO: 34433 - DNA, 416 bp, Oryza sativa
  unsure (1)..(416): unsure at all n locations
agcttactcgatcgatcgatcgatctgtgtcttaattctagctagggtgggggcctcgctgatctcataagctagcactatatatatagtggagatcgatcaagatatatctagcagagcagaacagtagcgttgcgactttatgaagagcccatcgatcgcgagccggttgcaggttcgcacccaaattaataatttactccacacaacaacaacaacaaaatacgtacctcacttatattaccagctaatctgctaattcatgcatcaaagtaaagtttgacaacaaccatgcagcgtctactaattaacctcgcttcaatccttcccccccatacatgcactnttcttatctcaacagtcaacacccaacacttggccacatagctctatcaatcgatttaatttcttcatga

SEQ ID NO: 34434 - DNA, 455 bp, Oryza sativa
  unsure (1)..(455): unsure at all n locations
actcagcttatgagtgttacctttggaaaaaattaatgggcatcattctccttcatagagnttcatgagtgttattcttggcccttgggatcattgggcattaaagttactaatactaacttttgtgactaaaatttcatgattttcccgtcgacctataatttcatgagttatagccttcggcataaatttatgagtattaactttcattgggaaagcacatgaatatttntctcccacccaaaatatcatgagtgttagacttgggatccttgggcatgaaattcagaaatactaaccccttaggacaaaananatcaggaattntcccctttgtcctataatttcgtatactttcgtgagtaggcttcggccaaaattcatgagtattaaccttttggggggaatgcacgaataattntccctggttaatctntcatgagtgctagccttgg

SEQ ID NO: 34435 - DNA, 300 bp, Oryza sativa
tcaaattgcgtttgcttacttatttttgcgaacgcccaataaaattgcacgtcaatatattatcaagaaaaagagtttttgttgcacaaagcaatcaaccagactggcttatgcctaaagggggtggggaacttgaagctaggaactactacgacggttaaaaacgcaactccaaatagcgggacggggcagagccacgctacactcccaagaaatcccaataaaagtaacgccggctaaagaccacagctggccctccgagcggatggactccagaaccactgcgaacaaagcgagcgc

SEQ ID NO: 34436 - DNA, 431 bp, Oryza sativa
  unsure (1)..(431): unsure at all n locations
agctntctgaagacctgngtgctgcccctatttgggtgttcaatgttggnaatacattattcttatttatatttttcttgttttaccatatgttttcttatcgctagcatgcccattaactgcttacagtttttatcttgaaatttagggatcagccaccatgatgaagtcgataccaccataattgaaccttttgttaaggtacgttaaatgcccaagtaagaatagtcatccaaatataactgggtagagggttactacggttccatttttccttattgcagatgccatcattgcaaaacaaaatgttgttctatgcatatgccattgtttcaagtttttttttcttattataggatgtattggatagtcttgaatttgcaagggggagagcagaatcgacatggngttctgttagagctgcaatgggg

SEQ ID NO: 34437 - DNA, 479 bp, Oryza sativa
  unsure (1)..(479): unsure at all n locations
actaagcttgggggtcggcacatcataacggaagtggaagaagatggacgttctattgtcccagncgaagccgncaagaactatgtacgtcacagcggttgggttgtgcgggataacgtgcctgttagtacggtgtactggcgaagaacaagggcacgcggagatcatgagagctttgtcccagattcggagaaagagatgctgtggaccacaatgctcgagacattcacccttcctgcgggtacagaggacaaagtgaaaaggtggactctgaagaaaatggcaagaacagttcagagcttcaagggagatctgtaccagaagtatatactgaaggggcagacaccgaacttcgacacattcccaaagctaagggatcactgggacgagttcgttgcatataagatanggtgaacagggaaggcgatgatggaaagaaacaaagaanatgccgccaagaagaagtaccatcaccactt

SEQ ID NO: 34438 - DNA, 384 bp, Oryza sativa
  unsure (1)..(384): unsure at all n locations
acccttctaccccaaaatggcacatgtccctctgaaccgcttcttttatgacctggtctaacatcatttaccttggccaattcttctaacagctcttcagttgtgaatgtacctggcttctctttgctttcatgtagagaggcatattcattattcgtgcgcagacgatgacgcctaggaaggaaccgacagtgaccaatataacaaagcttggtccttatggaatatgatagaggaattttgtcacaatggagacaagcaaagaaaccttgtgtggtccgaccagacaaagtactaagtgctggatagtcatgaatgcaccacaacacggcagcacgaagcttgannatctttcctgtcagagcatcaactgtatcaacacca

SEQ ID NO: 34439 - DNA, 241 bp, Oryza sativa
aaaatcctcttatttaaaatggaaggttcacatatggagttgaagttttaaattttgaggtgaaaggtttaaaaattgagtctaaagttttcaaatatcaggtaaaccttttcaaaattgagatgaaaggttttgaaaattgactttaaaattataattcgagttgagagttacaaaatttgagctcgaagttaaatattgaggtgaagtgttcaaagttaacatgaaagtcatatttgac

SEQ ID NO: 34440 - DNA, 414 bp, Oryza sativa
gcctaatccctatagtacccgagtacgactttctttttctttcacgcacctacaacccagccttaaccattttgggggttttgaatacaggggaagtgtgtgtccaatttcaacattagctaaccattccataatgtccaaaagatattagaattcccaaagtcttaagttgtaaaaccacctaatgttacctaattaaacaacgaagcatctacctaaaattaaactaatggtgccatgaatagaagtgccactagttgaggttatgtttaatctagggtgaacaatgaataattataccataacaataataaggtcataacaaaggtaaataggcatggctaaattaaacagtgaccacgcgggattttaataaagcgatatgcaaaatttaagtcaaataatttataaact

SEQ ID NO: 34441 - DNA, 473 bp, Oryza sativa
tgatcttcatttcaagtctgcctgcatcatttgatcactcaaacaatcgccgattatgtagcaagtagcaatagaaggcttcaataaacccacggtgatggaaataactagtagcgaaagtgtgcaacaataattatttctacatgaggaactcgggtttggccctttccctgcacaacataatagatcataataatgccttgccacagttgaattgattattttaggcttgtcattctgcgaattgtggtaatcccaccatttatgtaatgtggcattccccaattagaatgtagactttaaaatgatatcaaaatatcagttttggtatacctatctcttttgttcttatcattaaagtacatgttaccaaccttatagtttctccaggtacaaaaagatgccccaactgacatgaaatggccaagtcacaaagaaccatacggaaaccagagtcaccagattcagatgga

SEQ ID NO: 34442 - DNA, 435 bp, Oryza sativa
  unsure (1)..(435): unsure at all n locations
cttagatggtagtgggcatgaactntatagtatcatatgaatttagctggcaatgatactagtatactatatacttatcagaggctccacaaaattttcaatacaaagtcatcttcatccaagagacactacatcaagttcaataaccaagcttcactccactcaacttatcaatttttcctctgcatttcttgatggaaacattcgaaccttttcttggaggttgatctctgctagctctccatggacattaagctaaatggtaaaaattttcaagaatgggaactttcggtttatatgcttcgaatgttaattggccaagcatgtcaactcgcagatgatcctcctgatgatcgaacagatgcaactaaggttaaggcatggagaacatgcagctgatcctgttatggaataaatattcatgagtgtataggg

SEQ ID NO: 34443 - DNA, 384 bp, Oryza sativa
  unsure (1)..(384): unsure at all n locations
tcacttgtccgcgcattcgctntcgtgaaagccctgcaccgtggtcagctttgtggtggtttgcccgaagaggcaattcgccgttgtaaacccggttcgcccgcccagccgcttgtcgtgttagcaactggctatactcgaggaccgacacatcgccgatcatcctgcgggcctcgtttttagcctggtcgagggtcaacgctgcaaaagtaaagtgtgtagctatgttaacagtcagagaaggcaagataacaaagcacatcagtgtatagcaagagaacagtcttactgttcgtcccctcaggaagaaccaggttctgcaaaccgtcaacctcttcgccttgatcaactctgacttgccatgactgggagaggagaaagatg

SEQ ID NO: 34444 - DNA, 421 bp, Oryza sativa
agcttctcttccttgcttaccaggaactttgtttgtctccaacagaccccgctccggcgttcccaactattggcatgcgaaggttccctgaaccgactagttacttagccagggtgtcccattccaccttgtggttgcactttgattatgctcgaagagtatcccacaggaatcggtccttatatgcgaatacgggacagtgccacataggcacaacccccgcatcgcgagttttcataattcattttatttttaaacacaccgacaccacatgtcgggttttcaaggcttctcatacccatttcccaaattttcgacaatcaacggtgtatgtgggatatttggtatacgcactcagagagtacaaataccgaagtaccacacaggtggagcgacaaggaatcacggtagtacaacctac

SEQ ID NO: 34445 - DNA, 466 bp, Oryza sativa
  unsure (1)..(466): unsure at all n locations
taatccctttgaagtgtcatagagaagaagaaggttataggtcttgctggggagctatggccacatgtctctgtggcttgtgattggcattgtcaaatagaaagttatgaagataaaaagaaaaaaggttcatcatgcattcacgaggccttctagtgtcaatgatcttgcattgctagctatttagtcatctagatcagacaaagctttcaactctggattctgataaaagatcaattgagaattatgaatcatctacatctttagtatntcatatatgtttccagatgcataagcttcactatattctgttgaaggtacttctgatatcggaagcaatggtctaaatcctccctttgtagatgaagacacgataaaagacacaatctcatacaagaatatgttgtgtcactgcacccattaggatactatgcttgaacctaactctctttcttcaaactctcac

SEQ ID NO: 34446 - DNA, 421 bp, Oryza sativa
agctttgttgagcctaaaacccaaagatgctattaaaaactttcagtcctcgcagactaagtagaaaaaatcaaacaaggcaatgatagaccaagtaagcaaattaaattgataaaaaatcacactccattattatgatgatagcccccgactgacaacttcaagaagaaaacttgatgttgacagtcaagatagggaagtacaatgataaacttaagcgtagaaacgacgaagatgttcaatgttccaagagttgtcgacaagagtaccgtcttcgcgcttgagtcgataagaacctggccgggtgacttcagagataataaatggcccttcccatagaggagataacttgtgccgatctcgtgtagtttgaattttccgcaaaaccaggtcaccgactaaaaaggcacgagatcgaaca

SEQ ID NO: 34447 - DNA, 444 bp, Oryza sativa
tcacaaaccggtgaatggaataaaagcctctgattttatgcttttgacaacaatatttcaggatttaggactattgatctatgagatcagacattcatgtttcaatttttttttcaatccaatctataactggcaacataatatcatatttggttatgatgaatcgatatcatgagaaccagtagattatttcactatgaaacatcatggttgacagcagcgcatcacttcattgacccagcaccgaaatacaccgccaccaccacgggatcaacatttagcagcacatcacttcattgacccagcaccgaaatacaccgccaccacgacaggatcaacattggtacaaacagagagcatcaattcaattcaacaatgcagaggatggaacagcaatagagcgctcttcttaccaatctccgtgctgctagtaacagcagcagc

SEQ ID NO: 34448 - DNA, 416 bp, Oryza sativa
  unsure (1)..(416): unsure at all n locations
agcttggccctgcttggtggcagcttggttgtaatgatatgagcatttctgtttccaggaagcagtgatggttggaatggtgggaaaaagtatgcatcagctaatgccacaacattcttttctggttccaggagcgcaacttcaacaaaacgcatgccatctcggacctatatatatgttgtaagttacttgtaaattatttattcaaagaatatatagcatatttgtataaaattaaggggtagtactagccaacagtagaagtaggtggacagacctcaggagtacttgcagcagctttgacagttgttacagccacagcaatttcagcagccgatagtgggtctaaggggtggcttctctgtgtcctcgcgatgatctcgacgcctgaaattgtttctcccnctatgtagaac

SEQ ID NO: 34449 - DNA, 430 bp, Oryza sativa
  unsure (1)..(430): unsure at all n locations
ctgtttagcatanaactaaaagagattgaagcatgtnttgctatgattctagcagggtctataagctgattatagtatcaaacacaaaacattttataggatttctgttgatttcctatcttgttggcaggccaagtataaaatgcaagttgacgaagtagctagctaattaaagattagttattgctagctagaaaagaacaaaagttgtagatccatgtntggtccattgcgttgtataatgtgaccaattatcctatcattgctaggtcggcaaacaattatatcatcattgtcagtcaagttttggggagtagtaatggattgcataaggggaaaatatagctaaaatttgctacaggacaccgaaaaattacggcatttgctgtgggacactccacaatcgtgttgttgctcctggacactctga

SEQ ID NO: 34450 - DNA, 414 bp, Oryza sativa
agcttgtatgaactgtccatcatgctgattgttgatctccttgatgaacccgacgagccgctcgaactccgccgccgacgagccgccatcggcgacgttctgcctcacctcgcgcgccagcgcctgcgccgacgccctgatctcgccggactccatcggcttcctcaccatcctctccacgacggcggcgtcgcacacgttcttcatgttcagccccgtcccccacacggcgccgacgaaccggctggtgatctgctggtcggcgaagaacggccagcacaccgtctgcacgccctcgccggcggtctacagcgtcgagttccacccggcgtgcgtcaggaagcaccccacggcgcggtggcgcagcacgtcccgctgcggcgcccaccccacgacgcgcgccttgttgtcttc

SEQ ID NO: 34451 - DNA, 420 bp, Oryza sativa
  unsure (1)..(420): unsure at all n locations
tggcgcacacngaagagtgcgagagctcagaagacacacgctgagccctctacctggcgcgccagatgacggagcttgtggctcctcaccgggagaccgcgcatgcccccctttgccggttcggccggggactctgggtgaaattctaagctcttgatgtgtggaaggattgcgacaatcgaaagagcacaagacacgggcgatgtatacaggttcgggccgctgagaagcgtaataccctactcctgtgtttttggtggatctgtgtctgaaggagctacaaagtatgagccagcctctcccttgttctgggttccgaatcccggaaagtccagtccagtccagtccagtcccccctctaagtggcaaggtcctccttttatatcttaatgggataccacatgcaccatctccctcttt

SEQ ID NO: 34452 - DNA, 327 bp, Oryza sativa
  unsure (1)..(327): unsure at all n locations
agctntggagaagatgtcttaagtggagtcctgtcttttaccccacatgagcgcctgtgaagatggagccgtaagcccgctagtccgctgctgttaatttttgattgtcaagcctgaagcgcctttgtaataatgtaaatattatcgatataataaagatgtgtcttttatatcatgtttgtgtggtggaccccggcttttcctgggacggggattaatacactagcgttcgggaaaaggcaatttttccggtcgcgacaagagagagggaaagagatgggccgagccaccccaagagggggaggggggggaaatacacttttatgg

SEQ ID NO: 34453 - DNA, 462 bp, Oryza sativa
  unsure (1)..(462): unsure at all n locations
taatttctggatgctgctctgccttctttaggcatggaaattgaatctgaagaagcaatcgagggtgcatcaaattttcagcttgagctaaagagaaaggggatgttctccagcgctctcctctacgcaagaaggagattgccctccgagtcccaattgccttgttcatcaccatcacttatgcaccaagcaagcgtacgcaacanaggctgtttgttttcaggcagcgctcttcaaaagaatttccatttatggattgcacgaggtctcaggttgctacgctgatctgactgcgcgataactttcatatgccgggaattcatgcttaaatagccaattaagcctgatcagaatgtaacaaaattcttgtggcaagttgacaacttgctatcctgctgaacaaatattatcctcagtattgtcgtcctgacttgtgggtgaactcnagagcattgatatgat

SEQ ID NO: 34454 - DNA, 372 bp, Oryza sativa
gcatggtgcacaacaccaacgtacataccatgttaatagaacataaatagatcttctaaaacttactagctgttcagagggctaacatgtggaccccatagctcactatatttcatatgaaactttctatataaaaattgctttaaaatattagataaatctatctatcgagtttgtaatgaataaaattcaattaatcatgcactagtggctttttccgacttaactttatcttcatatttagtagaaataaataccacctaagtttactatagttgtctactatagtcttttgatatccgcaacattgcgcgggtatttcaactaacaacgccttatttttctataccttttactatgtcctacactata

SEQ ID NO: 34455 - DNA, 433 bp, Oryza sativa
  unsure (1)..(433): unsure at all n locations
ggttgtcatagttgaaattggtcgtctttgactgtagctccttcagcgagaagatccgccatgtcgtctccttcttcttcttcctccggccaggtagaaccctgagtatagaacaagcaaacagatcaacaaacgagcttcatttgctcttcaaactctcaagtacggactcttcttcccaaataaaagaatnggcacatttttaacggattaattagatataagtttccactatgtcattctatttcagcttgctgaccaacaactgcaatccgagagcgaacagaaaaattccccaatacaagcagagaaaattccacgcatcatttggttcatccatccaatgaaaacaggtgaatggtgcggtgttgtatgctcgcatgattaatcagcaaatcacacacaanaaccacaaactggatcagcaactcaa

SEQ ID NO: 34456 - DNA, 397 bp, Oryza sativa
  unsure (1)..(397): unsure at all n locations
agcttctcttactgaagatgggaaagattgttcttgaatgagtacaaccacagttctcagcaagtcacaccggcagatgcatgatttatgcaagggggtacaaggggtaataatataagggttaagttttgcagtaaacagcatttaaaaagtacttagttgctccaagccattttataaagacgatcctagagctacacaagattattaactaaggccgtgaaccctcacgaacctgccttaacccaaggcctacgatgattcaaaccgaactggctacccgaccctgggtcccagctcgtcccaagccaacccaagccaaccattccacattttagttgttgagcaaattntaagaattataacactgacttgggtacatttgctcgcttgccca

SEQ ID NO: 34457 - DNA, 443 bp, Oryza sativa
  unsure (1)..(443): unsure at all n locations
ttcgaactttagtccgactccaattttgcgaaactgctagtttaacgcagacgccgagggaagccacatggngattcttttttccggttttttagggaatggttttccacgggtttcttttttcgggttttatcttttctttttttctttttaattcggaaccgtaggatatcatcaaactatcggtgcgacggtggattcggcgagacgtgctggactcgcaggttgtcgaactccctcttccgctccgccgcaaccactcccgtctccatccttcccaaaccgcgccgcctctccccgtccctcctcctgcgccccangtgcagccgcaacggcgacgaacgttaacgcggccgccggcggtggnggtatccgccgagactcagtgaccgcggcgccgcagcttcaggtcagaatagttctctctttctcacttctcctct

SEQ ID NO: 34458 - DNA, 426 bp, Oryza sativa
  unsure (1)..(426): unsure at all n locations
gcttcangagatgtaacgcaaaaacgagcatctttattttagctatncggcacactgcttaggttatttaagacgcactgagcaagctggtgcagttaagaaggatagctaataaatgtgcatccagcagtagtattgatttgtttaaatgtgaatgacggttaataaaaacagtaacttatcgtgcatgacagatgataaatcatggtaaataaatatgtgagtctagcattgctcacatatatgtatagattcattaatatctatataaatgtggataatactaaaaagntttataaactgatcacatatatgtatagattcattaatatctatataaatatggataatactaacaaagtttataaactgatacggaggaagtatattttttaataatataaagaggtcccttgcgaaaaaaag

SEQ ID NO: 34459 - DNA, 346 bp, Oryza sativa
tcaacactactccacgtctccatactttatttctccctcctttctctgtcaactcaacctctgtcgactcattgctgctttctcttttcgatccccttataattccctttttttttgtggcaaaagtaggatgcaaaagcaactatacgatgattatacatgcagatctacaagcattgacgacagatcataaaacggatcacgcactgccacaaatataagagcttgaagaaacgttcaagaatcgaattcaggtataattaacttgccagactttgcagctgtattttgtttcattcccgcgttcgtctttgagattctgtcaaagcatcatctaaccttagca

SEQ ID NO: 34460 - DNA, 409 bp, Oryza sativa
  unsure (1)..(409): unsure at all n locations
cacagtatgccaccaaaaagatgcataaccggttcacttattactagcagccttaatcatttgagcattaaaaaaatcaaactcatcaaattgtttttctactgctagctcccaattaacgtatgcagcggaatcatactttccatcaaaagatggcaaaacagactctactcttgcaatattatgaacatgtaccttatctgcttcatgttggtcacttgccatgtgttgtcgaaggtgaaaatgtccacattgagcacgaacaactccaaactctttgtgtaaccctaccatagttagtagcaaacaagaaacatatacaagaatatatacgttcctatcaactactangtagtggaagctcacaaatcacacacactcaagctttatatcgagctcttacaagttc

SEQ ID NO: 34461 - DNA, 313 bp, Oryza sativa
  unsure (1)..(313): unsure at all n locations
tctttcatacatggagtgaggagatatatgggttcgggatctcangatcttacacaacgctgagtgcccaagttttttatattccagatccatctaagtttanggtgaaaaagggtcgacgccaaactagacgcatcaaaaatgatatggatgagtcagaaacatgtgggaggactntacgctgcagcaagtgtgatctgcgcggccatacttacaagacatgcccgaagaatgcagaagttccaagcggcgcagatgctagtccatctggacaggcaagtgatggtaggcgaccacctggtgaatgaacaac

SEQ ID NO: 34462 - DNA, 403 bp, Oryza sativa
ctgcagctgctcaagcctcataggcgtagctatatttccatttcaatgtatcttaatttcgccccttgcaaagctttggagacgaaatacacgggtttctggcctgactctctcttggacgagggctgcactgactgccaccggcgaagctgctagacagaacaacagttcacttcccggtgctgggctgaccaaagcgggtgggctttgcatatattgcttcagctcgtcgaacggtgcttggcattcaggtgtccagctaaactttcccgcgccccggagggtcttgaagaagggcaaacctcattcggctgcctttgagaggaattgactgagcgccgcaattcggcctgcgagcttttgtacttcgcgtacgctcgacgggggcttcatttgctgaatg

SEQ ID NO: 34463 - DNA, 381 bp, Oryza sativa
  unsure (1)..(381): unsure at all n locations
tatacttgcatatggccttggtgggtataaaatgaagtccattggaagaatgagcttttgtaaacaattttattttgaaaataaattcccaagagtcataacaagaggtacaagaatttctttcatcttgaatcatctctcatatagcaatcacttagatgtataaggttccctaaacatgaaagggtgttcacaagcacaagttcagttgagaataaagaatatacaagatcaatcatatggaagaatttattagttggaaattntatctttcactttatgcttgaaccaattgtttcctgaatgtccagctctagtactatacaatggtggagatagagataatggacgtgcttacctgcttacctgtgaaaactggga

SEQ ID NO: 34464 - DNA, 428 bp, Oryza sativa
  unsure (1)..(428): unsure at all n locations
acaaaataagcaagcacacgcgataacaaaatgatccaatccaattacttagaatcaactcaactcaatagtgcagtagtagcaaatcagaaaacaacttcaactcggactggcagctgctgacgcangacgaggcgcgcggccacgtccgcgagtacgccgacaacgccgccctctgggaccacgacttcgccgcctcgctgctcaagctcagcaagctgcccatgccggtggggagcaagggggagatcaggaacaagtgcggcgccatcaaccacagcaagagctaattcggccacttatgcagggggttacgtacatgcatgcagacgatgtggtcgtagccatatgttttcttgttatatctcatcgntctaaaatacagaaaaccttgtactcgaaaaanacatcatatagtactatcaaat

SEQ ID NO: 34465 - DNA, 492 bp, Oryza sativa
  unsure (1)..(492): unsure at all n locations
taagtgaaggcatgaaaagtgacagcacataagataaaaactaatgcaaaagatgatcattgagagggtcgacatgcacgtgaatgtgtgtgttcggttgtttctgaatggctgcgtaaatcgagcagaactaagcactattgtgtcctatactactatgtgtacgtaattaattaaaaattaaatcagctggctagctctcttgttcttggagatgtgtctctaagataagagcatgtacaataacaggctataagccagctataaccacatatcgatatcgagaagaaaaaataagagagagaagaaaacgggctacaaatctatagccggctgcaacacagactccaatacgttatgagtgtatgagaggtangaccggatattaatgatgtagaatatttntataggtaactattgtatgaatgggctatagatgatttgggagccagcggtggctatactattgaactntgctaatcagctgggatc

SEQ ID NO: 34466 - DNA, 417 bp, Oryza sativa
  unsure (1)..(417): unsure at all n locations
agcttagctgtaaccatcaactcctatttatcttgagtagnagtattctctaccttacctattgcttacgtattctacctagctagtagtagcatttctagcttagcactggtgtacggctcctggattttcttatgttttgtttccttctttgtgaacattgggccagaggtttctcaaattgtcattcctggcaaaatttcttgtttatctaagctaattaagccatatgtgatatactacctccgttctaaaatatttgtccagtacatagctacaatttcttatattttagggtgaattggaggtggtaattaagaacttaaatttttgttgtgcatgacctcctcgaaaaattccattagccgcaacaaatggtattttatgtaaattaatggtgatgcatcacntgtgatg

SEQ ID NO: 34467 - DNA, 485 bp, Oryza sativa
  unsure (1)..(485): unsure at all n locations
ctaagcttctcaagagtggctctggcatcgaaatctttatttatctggttcgaactgggccaggacagttccacttaatgatatactccctccgtctcactgtaagtgcagccataagttttcgtacccaacgtttgaccgtccatcttatttaaagaatttatgaaaataaattaaaagttaagtcacgcataaagtattatttatattgtatcatctaataaatagtaatcataaaaatatttcaaataagacggatggtcaaaattgaacgctgaaactcacaattgtacttattatgggacggagggagtactatgtacgataaagatggtgtaatgtaacaacctattaaatganaaaaaaacggatgttgcataagtcctatatatatgtatatantgtagcttctaatntatcatgaaagattagtgctaattaaattagcgtacgtattaaaattgtactatgtgcttatatatata

SEQ ID NO: 34468 - DNA, 420 bp, Oryza sativa
aagcttctccataacccaggcaatcctcgagttcggaacaagctcaatcctaaaagaactcaccatctgaaccaatcttttgcttccacgggagaagggggggataaagcaagactgagtaccaatcaccgtactcaacaagtcatatcaacggaaaggtacgatgcaaggatattcacaaaggaatggaaccataggatagtttgtagtaaaagcagcgtttataaatcataatttgaaatagtagaaacaatatataattaagctgtattaaatcatcactgtccaacgctaaattcacgttgcaacaagcccaaccaaaaccatctgaactacaccaattctataagtcaaatcattatagtgggactaatcatggtgagctggatgaccgcctaataaccgcgggcacggctattc

SEQ ID NO: 34469 - DNA, 396 bp, Oryza sativa
  unsure (1)..(396): unsure at all n locations
agtcttggcttataccccagttgagcgcctgtgaagatggagccgtangcccgctagtccgctgctgtttatttttgattgtcaggccttaagtgcctttgtaataatgtaaatattatcgatataataaagatgtgtcttttatatcatgtttgtatggtgtaccccggcttttcctatgacggngattaatacactagcgttcgggaaaatgcaattttctcggtcgcgacagagggcaaagtgtttgtcgcccgacacggtgttttcttagaaaaagagtttatttcaagaaaggatagtgggagcatggtgcgacttgaagaaattcaggaaacaccagaaaatgcttcaacgtccacacaaccacaacaagctgagcaagatgttgtcaac

SEQ ID NO: 34470 - DNA, 381 bp, Oryza sativa
agcttgttgacgtcaccgagtgcctagcatgtatttttcgttctctttgactaaatatgatagtgtagttgattaaaaatacatttgggtgggatttgtatttattattattttttattaaagggaggatcatgaccaagagagcgcaatcttccaagctcttattttatgatctttatggtggtggtgagaaagttcaagtttttgctgatgccaagtaaaactttgtctgttcaactgtattgcttaccttttatgccatttagctggtttgttcccagacactttcagcatttcactaaaatctcactatgtgcagatatgcctgactaaaatgcatcctttggttaattttcatatcagttaaatctattttttaat

SEQ ID NO: 34471 - DNA, 442 bp, Oryza sativa
  unsure (1)..(442): unsure at all n locations
ctgcanaccgaataatagagcatctactcggtctaaagtgcaagaatactctaaacggactgatagggaccaatgtgtcataaacaatattacttagtgaaattaaaacagtaccagctccttgccaactcacacaaactatatacgaccgaaataatttctaaagagttataaaaaatcacggttatttctagcacctaaatgtttcggtctctaaaagtgataacaacacctacaactaatagtcaatatgcaagacaatacggtaacatccctccataatataaagattgatgaaccctgagttccactcgtcactcaaggctgttgttggcccgatctttcggtgagttgagataactacgatttgtggaaaaacgttgacgatccgactacaaccgtacgagacgttgtgttgcgccttagcgatcgatacacctct

SEQ ID NO: 34472 - DNA, 418 bp, Oryza sativa
  unsure (1)..(418): unsure at all n locations
agcttagctggtgtgtagtgctcaaatgggatggattcaagggtggtatttaaatgggtcttggagagagaggtcactgtggatgaaatggcagacaggggtggcatgcatgcactgcacttgtgttaactaaacctatagctgcatcatatcaaagttagtttgtaagtattcatcttgttttccaatgtgaggtttggaattgtgtgccctaatttaaccttacgaccagtagaagggaatgttgtgtgctactaatgtttgtgtgtgagtgtgttgcttcaaaattaagaatggttggaatgttcttcccttagttttcatacacttcatttatgatgacaatgcatgctagctctctaccacacatgtatgcanagttatcatcctatangtataatatggnggtatggcatac

SEQ ID NO: 34473 - DNA, 417 bp, Oryza sativa
  unsure (1)..(417): unsure at all n locations
gctatcaaaacctgaacgatatctaccatggacaatccatttcatacgtccaggcctggcagctccaacatggtatgagtaaacaaacaaaggagaggcatcacattgagcaagaaaactcatacgcgtgcttctccctctcactctgcggccagacgtcacgactccgtacgtggccacagtacgcagctattcacacgcgccttccgtacaaatgctgcaccacacaacaccagcactgcaacgatccgtgtgcaccgcgaacgtgcaaaactnccaacgatcgaacgttcgacgtcgacagcatggcgcaggcggagcgcgagcgccttcgcgtgctcatgttcccgtggctcgcgcatggccacatcaacccttacctcgagctgtgcacccgcctcaccaccacctacttct

SEQ ID NO: 34474 - DNA, 216 bp, Oryza sativa
tgccagcttcttcttggttggctcgatgctgtgatttaaccatcttgctgggggaatttgtttggcttcttcttgtacagaagacagtttcgctctaaggtattattggttggaactttggatggatataaatttcccctggtttctgcgatctttggaagataaaaaagggggtctttgatctaaggcttttccttattggtcttgtagaaattt

SEQ ID NO: 34475 - DNA, 468 bp, Oryza sativa
  unsure (1)..(468): unsure at all n locations
tcccagtatgaacgaacacactctcttggtgacccgggttgctaaaggcatgtataatggtagccacaagtaattgtggtctcgagacgccacgtatgatagaatcacagaaaggtcacactacccacagtggaaaccactctaaaactttttttatgtcagcccttgtattatcaaacctatngaaactttatattttgaaccctatagtaaaaaaaagtatatgtacacccctaaataacttgggacccactgtcagcctcttcccatccaattctctttttattcccctctctctctcttcgatttcttctccaacgaggcaccaacaacgtcgctcaggtctcttctcctctcccctccctcctcgtcagcttctcccctcccctcgctgatctcttctcctctccccttcctctgactccggcggcagatcggcgcagatcgacctctggcggcgatggatct

SEQ ID NO: 34476 - DNA, 417 bp, Oryza sativa
  unsure (1)..(417): unsure at all n locations
agcttggatgtaatctcgttagcatgagctgctttgagatataaactttagttgcagcctatttatatcaaggtgactaaaaaaacatttgtgagcacaattgggttgtgtgtggatacaaataccttaataattgtctaaaaaataatgatgtacatatagatatatatatattagtattggttgttaaaattattattcatatgggtgcaatgtgttttgttgttattcttctatatgtttactgcaatgatattttactttgcatatatataatggccaattatattgtaatatgtttgaactatatgactaaagcattgaatgcatcataatttcaagcacatagagggtgagctaaggtggtgtangtagtttaaagtttaatcgcatgctcgggaaaaaaattgtgagtgt

SEQ ID NO: 34477 - DNA, 56 bp, Oryza sativa
cagccctctcggtcctcctccttcaggcctgtggtcctcgatctctccgtcttctg

SEQ ID NO: 34478 - DNA, 415 bp, Oryza sativa
agcttgccatttctcagttagatggcaatgtatataaatggtgtacaaaccttcaaatgtgccgatgccttttcagttgttgtaaaaacacctgaagattcaacaacatactcagctccaaagttaccccaaggaatatctgctggatctctggaaaagaagggggcaaattcttaggtgcaaatgcaagaactaacagaaattaatgtagtcacagaaacataattgtgtatcgagagcaagggcacggtgaagaaaggattgtgaagtaccccaaatgtacaacgtacacaacaatactgagttactttaggagctaggactaaaaggtactcaattataaatccgtatagcatgttcagtcaatcactccatactccagatatggttagagtcgtaaagacactctactttt

SEQ ID NO: 34479 - DNA, 449 bp, Oryza sativa
  unsure (1)..(449): unsure at all n locations
tatcgctaggccattgctactgcatagcaacctaccaactacatgttgnggacacgctgttntgcatgcagcggcgttacttcaaatcagacctactgcatacaatgctgtatcccctatgcagcttacacgtggatatgcaccaaatatttcccatctgcgcaaatttggatgcgctgtatacgcccctataccgccacctaagcgtacgtcaatgggtcctcatagaaaattgggaatctatgtaggatttgaatctccgtctatcattaaatttttagaaccattgacaggagacctacatatgggtcgatacgctgattgtatatttaaggaagatcatttcccggcattagggggaggaaagtacctacagaaggtcgaatggccgcgaaatgagtgggaaactaanaatctcctacatttagatccacgtactaaggaatctg

SEQ ID NO: 34480 - DNA, 404 bp, Oryza sativa
  unsure (1)..(404): unsure at all n locations
cacttgtgaccatcccgttgaaccatgtttatgccgaggtctttgccatcctttgtcaagactntattctcattacaagcttgacttcattcttgccaacatgacgatgtccttggcttggtgaccactaacccatggtgtcattcattagcctcatcataatgggacctattccttttcacacctcanaggagaacattagtctcaacaaatcggttgtcatccttcacttgatgaccaaccggttgcatatgaaagatatagatatgtttgttgagtattcattaacatcacaagtgtcatatactcgtatgcaagctcaagtgcaaagatccgatataaataataggtgaacaacatggatctagaacatgcacaataaatgtataggaattgctccccct

SEQ ID NO: 34481 - DNA, 424 bp, Oryza sativa
cttaataaaagcagccgcaacttaaacgcagaaaacggcgattttatttaaaaatgccggaccaccctatcggtaccacagagcccgctgagagatcaaacgctgtctttgaactccccgggcacgaacatcaaaaggaacacgaccctggatgaaaatagaagccagaacatatgaccaccatgtcgacaacaaatagataggctaccccaaatattgcactggtgtgattatgatgaataagagcaaccaccgtctttggctaacaggatgtaaggttattaactgacaattcatgggcccgaacctatataaaaatcctcgtctccgtctcttatacctcagtctcgcatataccctagtaccaacgatccatatactatgcaaataccgggagcgcgaaatcaacgtcaacaatacccca

SEQ ID NO: 34482 - DNA, 477 bp, Oryza sativa
  unsure (1)..(477): unsure at all n locations
ctcagcttagcccatccaaagcttgtgaaggatgactcaagggaactatatggtttgttttctaaaatatgtcaaccaccacaagtatgcaattgaaagtggcagaccggggaagtccctcaatgaaatctaaagagacaatctgccatgcattgtgcaggacaaggagtagttggagcataccagggtatttaacatgttcaggcttggcttgttgacaaactgtgcaggactgaacatattgagtaatggaagcacgaagtcgatgccaagcaaacaaatgtngaacacgctggtangttacctgaataccagaatggccacccactgccgaggagtgtaaattgggcataaatttgtgctgtaaagaagtgttattgccaatccatatgcgattcttatattacaggaccccatctttgagagaaaaatcgagcaccgctccagaattgatacacagggtctgaattntacaac

SEQ ID NO: 34483 - DNA, 398 bp, Oryza sativa
  unsure (1)..(398): unsure at all n locations
ttccacgtttcatgaaccttctcttctttatgaaaatgaatctattgtaatcaacccttcccctagaaagaattattcattgaatttggaatcgagtacagaaactcaaattgtcatcaactggtcaatttacagagaactatatagaccagtaataattcattaacaaaacaactctgaacctgtagtatgggtatgagcataaatcccttcattgcaatgttgtcagcgttcatcgatttgacaaaagaggagtgcttcaagaaggatcaaagaaaactcacatttccactaactagcgaatttgtcgtcaaaagtgggtaaaatnttgatgcttctacagctcctcatgcctcatccatccatgaagtgaatccacactcatccatccatgaagt

SEQ ID NO: 34484 - DNA, 429 bp, Oryza sativa
  unsure (1)..(429): unsure at all n locations
ntctcatgagcgatgatgtattcatgctcacacctgacgaactacaagttctattaagtcaactgatagcagcctcttttcacgtgtatatatataataaaacaataaaacaaataccattaatttctgaaccataaaggtactagtaatacactaatacctgatcaagtaaagaacactggtaaaaaaaaaacactagtagatttgtactgttgtacttacagcctcgatccagtgctggaatgccagcttccgagccttggcgtctcttgataaaccctgacccacctgcatcaaagctcagattttttacagcaatttcgacacaaacagaagattaatcaaggagatgcagaccagacaaaccaaaagaatgcctcctttttttcttaaccaaaagaatagccttcttttttcttgtggaaattt

SEQ ID NO: 34485 - DNA, 422 bp, Oryza sativa
gacagaactggaattgccatgtatcttaatcaggcctggagaaggcggtattatcttgggtatgcaaccttaagcagctgactgctttggagcttgtatcgtacgatttctctgaatcggcacccttctggatagggcaattgacgaatttgaaagtttttggggaatctgggaactgcaattttctctgggtcaataataccatatcagattggcaatcttgcaaaattggagaccttggactttagagggtgcgagttctttggacagcaaataccaccgtggatcggtaattttacgaagttggcaaatttagagatggatagttgtggcttctctgggtcgataccctcaacaataaggaatctgacccaactggaaagtctgctgatcacatctaatccccaactcaacggtaagtc

SEQ ID NO: 34486 - DNA, 431 bp, Oryza sativa
  unsure (1)..(431): unsure at all n locations
ctcagcttaggttgcagatatttgaagtatcccctagcagctagaatgaaatattcctattgacccgcagcatgactactactctaataggagaaaaggctaaacccatcatctccctcttggtactcttcatgtacttccgatttctgatcagcacttaattcaacaattatcatctcaacaacttcatggacattgaaataatcataacttatgttcacttctttgtgtaaaacgatcccttctgattcacatacctccatattcttccgctcctgacaaacacgtttcaagccattgctcccttctgttttaacatcctgcacctcanggactacacgttccaacacatccttcttatcatgctgatacaacacagcttgcccattatccacgatgaaaggaggagattccagctcatccttctcatc

SEQ ID NO: 34487 - DNA, 417 bp, Oryza sativa
  unsure (1)..(417): unsure at all n locations
gcttttatccttgaatgatctctcgatctgtgccagccatgcgtctatntgtcacctgctggagaagattatggcattntatcactactcattatgcagtggccgtactgtctggatatatagctganagttcttctactatctatagttacaacccagctagttatatatatagataactgacgtcattgatctatctaactgtacgatctgagatatatagatcttttcgggtcactcttggtaattacagcgacagtactagctagctagttactatcacataaatagatatacatatagttgtactagatttatcaaatgtactacacattatatcaaccattcgttatacgacgatttaggtttcaactttaattaatcgctttcgcttgtttttcttttttcttgaccaat

SEQ ID NO: 34488 - DNA, 478 bp, Oryza sativa
  unsure (1)..(478): unsure at all n locations
cttagcattatattattatagcatcatgcatgtgatatctgtttcattngnatgagtacattgggtgtgttcaactctctatcgacatcgatggacggtgcatgtatggtaccagacgtatatgctactatctcttcagaaggctggtccaatcgtccccttatctttaatactcatcgtgtctcgtctaagttgtcatttgctatgccgacatactccctctattacctgcattagtagttaaaagtgcttaaattttaatatggagaaagtactgcatattccataaaattttatagcattaaatatattttaataatatgttagttttgcgtcggaaatattattatacctttatataaggttgattaaacgtataagaaagtcaaaacgatttataatataaaacagacgaagtgtctatcttacaagcctatataaaattgcttataatggattaaaacccgccctctatata

SEQ ID NO: 34489 - DNA, 422 bp, Oryza sativa
  unsure (1)..(422): unsure at all n locations
agcttgcaggcaccttgtaacaccccaggtaaccacatacctatagtgccgcaccaaaatacactcaaaccactaactccctgttaacgaccaaatttggtaatatcagcatcggaaaggaagattagatcgaagcggaatcaaagatgaagattgtcgcggaaacagagtaagaatcggctggagtccggatcggctacgattggatcggctaagtccgagttagactaggtcaggtgatacagccgattccgacaatacgacttggtatacgacatcgggttgagttgatatgcttcaaggtgattgccacgcatggatagagtcctgngaaggcaattgtatctattaattaggatattttatgtaattttcttagatatatgtttgggcaaaagtctgccgtaaagacttatggtatc

SEQ ID NO: 34490 - DNA, 362 bp, Oryza sativa
agcttggaatcgagttcgattcggatctggttctctctctccaagccgcgagtttccttcgccgttgccgtcgccgtgggcctccgccgtcgcctctgagcccctttaaaaggatccccgtgcccttctctacccgccgacaccctcgccttcgcctctcgtcgccggaatcgtcctagcgccgtgcgccctagtttagtcgtcgccgccgccgctccagccaagctccgtcgtcgctccagccgtcgccgtcgctcgggaagaccgccatcgtgttcgccgtcgcgtcgccgtcctcgtccgccccttcgccgccgtcggagaccaccggagcatcttcgccgtcgtcaacccgaagagcc

SEQ ID NO: 34491 - DNA, 423 bp, Oryza sativa
  unsure (1)..(423): unsure at all n locations
gtgacaggaggganatatagaatcaactagacatgctggtttgctttgcatnctaaaccttgaaaaaggttgcaagagcattacatctcagatgggtctggcatgagtggaggtcaccataaacagcatgggtgggatcaggaacaccataagacgacaccgataaattcctcttcgcagcggcgatgaccttaacaattggagaggagccaaaataagggttttctgggattggcttggtaccattggcgacgcctaaaggatataacacccctggtctacgcgactactaagaaaaagagcgcaagtctacaacaggcgtcgcaatccgaccaatggttggttgacctcatcctactgacaatctcaggttggacgactgatcttattagccaactccgtcatgtctggggtgtgtccaca

SEQ ID NO: 34492 - DNA, 405 bp, Oryza sativa
  unsure (1)..(405): unsure at all n locations
agctgggactgaattcttttacttaagctccatatgaagtatgaangaaatagtttgaaactgcgtatatatgcccacatgcagcactggtaggacagtgattcatttgttttattaggtttgatgaattccttgatagatgctacactacttatttcattttgctgctaaaagtcagggtcattcgaatatcctgttcaacctcattttctattcgctcagttgtttgtacgtactaactctgaaagaatatgcatggtgggatggtttaagtttgaacacttcctttcattcaggacttcatatatcgatcgcttatattttactaacctatgttgaaatggacatatggtgagtctctccgacgaccaagctgaaaggtcactactcatctactatcttatc

SEQ ID NO: 34493 - DNA, 450 bp, Oryza sativa
  unsure (1)..(450): unsure at all n locations
tgggctatcccatactagcacatgtggttgcactgtatactatatgaactgacattgagtgaagtccttatgtcggtttgggcacactctccccctatcggtacacaactaatcaccatatgtgcaccacttgaggcccaaacctaaaatccatgttttccatcattttatttatcaaaatcacaagtattaaagttctgtccagattatttcaaaatcaatttttcatatttgtaatgagcccataatgacaaggaagaccattctaagcatggctaagcattatagtaacctagtgactccaaaattcatatataaagtggtatagtcatattgttcctaacgttaggaatgagggatatggatatatgtggggtcaaggtgaatgcanacaatangagtttgtctaacaagtttaacaaaaatttatttattaatgacaatcgacat

SEQ ID NO: 34494 - DNA, 349 bp, Oryza sativa
  unsure (1)..(349): unsure at all n locations
agcttgtggctggtagtaaaacatcgattnttctttngagatagagttcgatcctcaactatttctcgcgatatcttcttacgaagttttgttagggcatctataacaacctctggtttaagtgggcaacccggcaagtagacgtccacaggaattaacttatcaactccccgaacagtactataagaatccgtactgaacattccaccagtaatagtacaagctcccatagcaatgacgtattttggttcaagcatttgctcatataatctcactaaagagggagccattttcattgttactgtaccggctgttaaaaatatgtccgcttgcctatgacttgatcttg

SEQ ID NO: 34495 - DNA, 461 bp, Oryza sativa
  unsure (1)..(461): unsure at all n locations
ntatgttcggcgcagtactaatactggaacttatgagcaagatatgctctatcaatcaccatctactttagacatatcttctgaaacttttttcaaatccaaaagtccagtatcttcctacaaattagtgaattaggaggagctctttgtgccgaaaaagaaagagcagggcaatatttcaaacttgcattcgaactgcgaaatatttatacaaaggaggagagatcaagataatgcagcagggttggttatctaattggctagtcaaacatgagggtgttcatagatctttgggcttcgatcatcgaggaatagagactttgcaaataaaagcagaggattgggattccattgctgtcatcttatatgtatatggttacaattatttacgttcccaatgtgcttatgacgttgcacccggtggatctttagctagcgtgtatcatcttacgagaatacag

SEQ ID NO: 34496 - DNA, 325 bp, Oryza sativa
gaaactaactcttcttaatctatacaccactcgcctttattatcttctatatatataataccttacatttttcactttgccgatcctaatttcaaacgcaaactgcacttttaagatatatggattatatattaagcccggtgaatgtttatgaagcgtggcactatagtggtggaaatgaataaattaaatacaactgaggttctcactttttgctgaaaaaaatgggagtacaaacttccctggtttgttccaacatctggtcataagtatggacatgactggcgacttggtgtaactacaacgatataaatatgcaaaaagt

SEQ ID NO: 34497 - DNA, 454 bp, Oryza sativa
  unsure (1)..(454): unsure at all n locations
ctcaccagtaaatcctcactatcctgcctatcatttgcttggtgtcttggatgaaccggaagaagatctgaccacacacgttcccttggattcgataccctttggaatactccgtagaggaagtgctacatcggtatatccgtgcgcttgcggattttatctgtggccgtaagaattaccaacactaggcacgaggggggctgcccgctgcctgttggggagcaggggctaaacatgaggtgtggcattgcttggttagggggagttatgcgaagggtcttgtcacaatcactcgacatggtgacgttctgcacaggcatggtcacatgccgatggattgtgtcttgtgggtacagttgtgcacctctagccagagtaaaactatntgaatagccatgctcgcggntatgggcgatcgaccagaatcaccgtgattagtttcacctttaataaa

SEQ ID NO: 34498 - DNA, 372 bp, Oryza sativa
  unsure (1)..(372): unsure at all n locations
agcttgatgatccagnggatacagataagttattccaacctcaggctcttaccaaattctgctttttcctaatggacgcactgagagagcgaggagcaaggatgaagccacttatctgcgcttgcttaacaagggagcctgaaaaagtgcttgttgtgggggtatgtgggaagccaaggctgggggctgttaaggggaatgcatttggtaatgcatttaagtcaactgccgaggagattggtgcagactatttccatgacatgtttgagtcatcatggattgttctcgatgttgttgctgtcagctttttcatgattcgggtaacagagaagctatgatgacatgtgcttgtctagcgcttatgaatctttc

SEQ ID NO: 34499 - DNA, 424 bp, Oryza sativa
  unsure (1)..(424): unsure at all n locations
cttngctatatcgatatcactggttaccctgatcatcacatctccatatttatgcactggacaagataccaaatagtatgaatcaaggtgataatatgtttggaaaccgattagccatgtgtttccttgattgaatatattcgtatccaaacagagcaaaagcttctttnttctaacaaaatctcagaattccatcccccgcatttgttttgacaagatatacaggctatccttctccttctcttcctcgatcatgaatctttgatcttcttttccctaattattacgtgttagctctgctccttgttaatgatgacatanatttcttgcagatgtattgtagcttgaacaggtgccctttggatttggatgacatcgtggatcagcctcactatcatctcaagatggtgtgcatatttggatt

SEQ ID NO: 34500 - DNA, 379 bp, Oryza sativa
  unsure (1)..(379): unsure at all n locations
acagtgaaataaactccaattaaatttctttgagtcaagctttgggccatggcccaagtggcctaaggcctatctagttccaccttcttgtcgcacatgacttaataaagaagtaatttcacaaaactacatgtattttacacaatttatcaaaaaaaactacatgtttaagagcttgtttcacaaaactacagatttagtgttttcttgtatcacaaaactacaggtattttatacaatctatcacaaaactaaagatttaacaacttgtttcacataactatatatttagtggtattcgttatcatagaactacacatttagtgtcttcatttatcacaaaactatagatntagtgtctccattatcacaaaactac

SEQ ID NO: 34501 - DNA, 374 bp, Oryza sativa
tggaatagaacggctaatactgaagatttccactacaggaaagcacgaatactggttggaaatgcaatttccaaggggcactcctgctaattattaaagggaagtactgctcaccaaaaggcagtctttctgaacctatattcaataggaaaaatgagaaattattgggaaaactgtacaggcatatctaaattcacgtgacagtatataccatagaagtgcattaaggtccctgcacaaactaaagaaaaagaaatgcctcaaggaacttccgggaaacagaagaagaggatggtccatgagcacctatgatttgaaaacaaaaccagtagcatgtcttatttctgggaaccatatagcattgctttctacat

SEQ ID NO: 34502 - DNA, 421 bp, Oryza sativa
  unsure (1)..(421): unsure at all n locations
ttcgttcctttttttttctactagtngataagaatgtatcacttgtagggagggagattccatttccaagcctgaaaccgcaatcttgatttatcatctggacggcgacctttcaagaaaaacacccgatcagatcctaaatacctctgaactacaaagtttatccaattcattacatatcaaacagcagagagaacgaatctacatccctcgtacagctcggttacatgtggatccgatgaagatttacataaaaaatattacccatggtccgggtatccatggatacccgacccgatgagcacgggcgtgggagtgactttttacctatgggctcatccgcccaagacccgaagacgtcatgggcaataggcgggtttcattttttacccatgggtaacccatgtccgacccgatacat

SEQ ID NO: 34503 - DNA, 414 bp, Oryza sativa
  unsure (1)..(414): unsure at all n locations
attccaaaaagttattatctgtgagatttggcctgtttctttctactaatgccattactctatctaaattgtcgatataagcatcaactgagccatattgcttcaaattcctgaattgatcagtaatttcaattgtggacttggccccaaacctctggcacatcttacnaaactccggccaggataaatgttctgttgggatatcgtaactagatatccattggtcagcttagcctgtaatgtatgcctctgccattaagaccttctcatcttcaagagnttgtgtgagaaagaagtattttctactttgcgaatcgaagccttaggataatcaccatctgaaataggaaaatcgacatgtttcctattggaggtggagtgtgtgttcacaatgacaatatggttcaccaaatg

SEQ ID NO: 34504 - DNA, 308 bp, Oryza sativa
ccctcaggatatagacgggatcccgatgaggacactgaagggctactctaaaacgagctccatgagttgtggaaattgttccgaaacaatcgtacaggcgaggatacaatgccaaaaggcatgctgaatgcaaccacagtcgtgtcggtgaaaccggtgattactgcagatccatccaattgtaatgggtgtatcagcagagagagcagacattagcaaggatgcgactaactctaaatgcatccgctaagccctggtaaaattgatacctaatatacggctgggatgtttgtgaatgacttgattat

SEQ ID NO: 34505 - DNA, 399 bp, Oryza sativa
  unsure (1)..(399): unsure at all n locations
ctataaatactcaacttgggttatatacangggaagatctacagagagttgcatatgtgatgcttataatctaatggatcttcggatgccagttatttaagaggatattattctggcctaagcctcccaaagacaacatgagtgagctcttctctgccataaaggatacgtggcttgctcagcttcgcagactcatgatcngatgcatctttttctgcctctgcttcagaatctctgggtcctcgatgacatggatcttgcgccgcttcttcgcctactctgcttcttggtagccttcacggagcttccgcttttgcagcggcgatcttctcgtcttcgttgcagaactctatgccctctctgcggccggcgctggcaactacagccggcgacttcttc

SEQ ID NO: 34506 - DNA, 415 bp, Oryza sativa
  unsure (1)..(415): unsure at all n locations
agctttaagacaagctagcgtggctactctactaatttagacaggcatgtgacatctcaacagatgaagcagctgcatatatttcatcttaatatatctatcagccgaccaaagcaacaaattctttcatagatcaataattcaatatcgaatcagtcaagatgatggggggctgctggttgtcaccttgaggtgatacatgagtggagatccttgcaattgttagatactggtaaggagacaagatagcaacacatgtgtaaaaccactgtgcgattggagaaacagaatggatatngaaatctaagattgacatatgtttccaataattgggaaataagaaagcttactgagcagtgctgaaagaaaaataatctagcacaagataaagctccatgggcataccgtttacttt

SEQ ID NO: 34507 - DNA, 461 bp, Oryza sativa
  unsure (1)..(461): unsure at all n locations
tatacgttaagggagtagcaatgactattcaagtagatcttatctaatggtgtaaaataatggggctaccaatttaagtgatactcgactgttagattgaaaatagccatgtggcgatttatgagcgtttgtaggaacgtcacatgatggcttatgagcgtttgtatggagattaatggacttttagtatataatagatagatatgcttctatgtattcatactagtttgtatattttaaaaaaaattgaataagacgaacggttaaacgtgtttaaaaagtcaacaacgtcgaatatttatggacagagagagtacctcgcagaggtcgcgaccaacaccatcctcaagttcttcaagtagcatcactaataagctcattccatactaagcnggccattgtgattgtgctacaggtgcggttaattgaagcgggttgtcgtttggttgctgctgatatac

SEQ ID NO: 34508 - DNA, 437 bp, Oryza sativa
gctgggatatcatatcagtgaccaacatattactatcttgaataaccaggaaaacacacgaggcaggaccaagattcacttgcacgactccaatatcaaccagatacacattatactacaggtggcagaaaaatatagatcccaacccatgaacagaccaaacacacaatgtggattaagaataaaaaaaaacgcctatgtgtcgagctcgagcacacaggtgctcttccctattctgtgagagtcaaaatcaacgtcgaacaaatgggcattgttcccatgcaatcgtttcaagtgttcaagtgcctctgaatgaaaataccaactatgccgcaaactctaatctctgcttgccaaggaatacatataagatgacggctccctcacagccgatcacatgaaatcgtactcatccggatcatcacaattaccctttc

SEQ ID NO: 34509 - DNA, 466 bp, Oryza sativa
  unsure (1)..(466): unsure at all n locations
ctttatatttntaataatgtaattcatgaatatctttgttcatccacaggtaaaatggtcatttttatagaaaatacacggtcaactaacggtcaactgacgggaggcgtatgcaatggatcaaaatcaaattttggtggtatataaggaagtcagtcaaattcaagggtataaaagggattatgaataaattcaggggtatataagggaatttctcttatatattttataagacaccatatattttattacggtaaactaaatcattaatctcatgcatgcatttataaaaataacattttaaattaaattgcatgctcgatgggtgggggtatatatgtaaaacattaattagcactctctacgttatatattataagtcaagttagatttatcttaagttaaaccactgtataattaacccattctatctaactataacatcaagatagtatcatgaatatat

SEQ ID NO: 34510 - DNA, 400 bp, Oryza sativa
  unsure (1)..(400): unsure at all n locations
taaacacctaaattctcgtgacttgctgagtacgaaagtaatcacccttactctatataaatatatatgtagctcctctgccttgaagtgaagatgaagtgaagtgaagattaaggtttcgtcctggtccccaaccgtcgcctgtggtgttgggtgttagtccgttggttccgccgctgctgctgttgttggtgtttccccgtcagcgtcgtcggttgcatttctcaggctgttctgagctgcaacctaagttaaggtaaataagtcctctatttattntaaggatttgcaatgattcatatttgtcaccgtgggtaccaacactatgtcctgagactggtactgagatcgcggtttcgtatgaagcggttcgcgccgttattactacgacacgctcctg

SEQ ID NO: 34511 - DNA, 429 bp, Oryza sativa
  unsure (1)..(429): unsure at all n locations
tcctgtgccaggattgtgtgttgtttgtctacagaggaatctgtactggaaaacatgtcagggcagtgtggcgttgtgctgtatgtgaatacatgtttctttgagagggaggagcatgagagagtacgccacgtttctcttggcattctcaactagaatgagaaatatgaatacactgctcgaattttggaagatgtgaatctgccaagatgtngccaagctctacatacaccatttgcttgctaaagtgttttcagtaaaattcctttgggctactgtgacaatggttaatcaagaaaatgatggttatttaccaagtgcttttctaccagattacatcaaacgttgtatatattttcatgggccatattggaaatgtcgtcttatggctaatattagcaatcttatctttcagatccgaataatttc

SEQ ID NO: 34512 - DNA, 402 bp, Oryza sativa
  unsure (1)..(402): unsure at all n locations
agctttagcattaacgacaaggtttgactggtcgtatccattgagtgactgtgttggtggtcagtgacggacaactgtcaacctttctgggaacggtcaaggctcactccctgcctcgtgcgaagaggaggttcactgtatccttatcctattcttctctgcgttctcggcggcttcgcaccgatccggtaagagcaacggtaattaatgtcgttactcctccgctttagttatttgactaaatctataggtaaatataataataaatttataaaatgatactatttttttctacaaatntaaccaaatttaaaacagtttgacttttgaccaaagtaaaaacgtcttaaaacctgaaacggatggaagtaattttataggtatgtataactgtctacctta

SEQ ID NO: 34513 - DNA, 472 bp, Oryza sativa
  unsure (1)..(472): unsure at all n locations
tcggattataggatagaaataacagtatgcaattngaattctttattgattcatcactgtattatcctttggtttccacaaatatgtcatagcaattctgaaggaaaaaaaatcattttctacctataccatgcaagaaacacgcaaaaaaaaattaagtacattaaacatcatgctgaatgctcctaaaccgctacatggaactttaataaataagaaaaaaaatcatatagaaattataagaaaaatacttagctatccattctaatttaaatcggtagacccattatttctaaccattaaatcaatccttcaaaacacaaattccttgcacctcccactcccttccgtacataatcactcctccctctccaaaattcatatgtacatagcacatatcttatgtacaacagaaatttaaataattcaattatgttanaangtaaaaaatgacatataagttctccccacg

SEQ ID NO: 34514 - DNA, 359 bp, Oryza sativa
gcttctgatcgcgccagattgtaagccgaacgcacagagtataaacccagtttgtcatgtggccaagaagcgaagtcagcatcaccatgtctactaataggaatctgttgaatctccttagcaatgtccacagggaaaaaggatcttatcaaatcttcatcccaacatctggcatcctcgttcatcaagcagctaacagtggcatctgttgggaagggagaaagcgttgtcaccaattgatgtcgaaacccaggtatccaattatctgaaaagattttgatggtttttccatcaccgactccccacctcactccttttgccagcagttctctcccaaacagcaagcttcgccaagtgaa

SEQ ID NO: 34515 - DNA, 477 bp, Oryza sativa
  unsure (1)..(477): unsure at all n locations
tgacctgctatngcggaccatggaggagaatgagaagaagatggaggaggttgatgggcgcacgcgcacggacttcgccgatctcaagaaatctctcgaagttcgtcttccagcagtggagaaaaaggtagagatcctcagctctgatctcgccactttgaatcataaagtccagcagttggagagtagcatccagcgacagccgagtggggatgagtttgcatgaaatgtgactacagcggttttgcccaaggaagagctgaactaccatagcaccccgttcatcaaggggcaacgcgatcctgagtttgcatcccctgaccaacagaatcaagatgggttgaccttccagtctggaaatagtggtctgggaggaggtattgcatgtagcattcctcccatgtcctgtcctcagttcaatggcgacaatcctcaactgtggaaatctaactgtgaagtgtatnttgatatctatcg

SEQ ID NO: 34516 - DNA, 361 bp, Oryza sativa
agcttgtgcaaatattcctgacccatatgcttgttttgtttttctttcgaaagcttctaacaacatggggttgacgattgaacaccttacttgatgcttacaacatggagtcttccggatatacaattattaatgcgaacccgtgcatgcatggtatggcaagcagtgtgggggccaaccaattgaaaccttattattggagcagctctatggacaaaaatgcctcaccaaccgatgatttattggatggtcaactaccctaattattaagactgatccctaaatcgacccatacgtgccagccttaatttgggacttctgaaagcattccatgtgagaactaatataaagaaataatttc

SEQ ID NO: 34517 - DNA, 477 bp, Oryza sativa
  unsure (1)..(477): unsure at all n locations
tgcgatgtganattgttcgcgcgaatcgttccattttggtctgcgtcgctgcttcatccttgatcatttcgttgtctgcaatctttnttgttgggttatttatttttcctttttttgttctaagaaatgcaaaatactttgaaactagtgagtgatctcacgtgtacgaatggaaatggaaatggtaaccacgtatcataatcgttgatagttagaatctcgcagttcaattgattccaggtaccatagaatggatgttaatntcgtttcctttgatttattacagctaaccgcttcgcttggttataccaaaagcaaaagaggcaagatccagattatgcgtgcaagcatattggtttggtctaaagagatgaatggttcgatatttgaaggcaatcatgctctcagaaattgtgtttcaaagctaagtggaaggacatcattngcggtccgtgttaatcaagtttgtgcttatca

SEQ ID NO: 34518 - DNA, 414 bp, Oryza sativa
agcttaaccttttgctcaatgaataaatctgaatatgataaatatgactcggttaattagtagcatgagaccgtttactacttagtactcatagaccctcgttaaaagaaacagataagcaaaaaagtgaatactaggttaaactttgtatattttcttaatgtataggcgggatatattcacacagccactgtaactattgagaaaaaaaaaaaatttttctaatagaggtagaactcgataatcagtagcttacataagttgtactaataataatattggtgttactgttctatcgacggagatcactagaaaaccactctgctatcgtcaagagcaatgtgagctaacataaaagagagtcacctaagggtggacctaggccttcgggtcacccagaatcaacatccacta

SEQ ID NO: 34519 - DNA, 392 bp, Oryza sativa
  unsure (1)..(392): unsure at all n locations
agctttaaagaaaagtntaattggacccatatcattacaaatatgccatattaaaattcatgcaaaattaaaaccatgccatcgccatcacgttttccgtcatcatatataccaaaatacatctagaagtgggaccaacaaagtcagctctatctttttcctccaccaacctatcctctttattccccatctctcttcaccttgtttttaaatgcggtgcccaacgaagagggtgtgcctctatgtcatcgtcagcgaccaaacacttgtcagtccagatccaattgccccaccacccaagccaagccaagtaaaagctgcagaaacacacaaacatggtacatggtacaccggagacaggtgcacgaatggtggtcgcagctgctattcgt

SEQ ID NO: 34520 - DNA, 407 bp, Oryza sativa
ggaccttaagactcagctagacgacccatatggtgcctgctgaggccaacaatatgtatctagtgtcatatccgatctcgatgaagttcgactcgaggaggaagactaacctgtcggcgactacgtgttggttatctatgccgtcaagtcgacggacaactaaatagggtatttcaaatattgtacttgtgcgattctgatgaatatagagcgaaaccggctgtagccaacatgagtagggctattacctatcagataatgagcccgaatctgtataaaaatccttatctgcatctcttgacctcaatctcgaatataccctagtaccaacgatctccataccatgcaaataccgttgttgcgacctcagacgtcgacaatgcctttgtgacgagatattggacatt

SEQ ID NO: 34521 - DNA, 362 bp, Oryza sativa
  unsure (1)..(362): unsure at all n locations
gcgaatatataggaccagttgaatacccgtggattttctcatcaacttttgatgaactaacttgagtttggttaattaacttaattaagtaaatggaactcagggcgcaatttgctaggccctgtgccgagccagtacttgatgtgccatgggatactctcttagtcttaaaatatagaaacttactactgtactatatataatctggtaccacgaatcatcatctagtatttgatagagatatatncaaaaagagtacttaattactgatcgcactacagtgagtagatgaaatcgtaccagagattaaagaagggcagttgcctacttcaacccaacacatcatactcctacatactact

SEQ ID NO: 34522 - DNA, 463 bp, Oryza sativa
  unsure (1)..(463): unsure at all n locations
gcaatcatgttatcatctccacaggtatgtcagagtcagtgaagttcaatacaaatgtaaccagttgagtcatttggcccaaaaatttcaccataccactcatagaacttttgaagtcactgaacgatgttctgtccaaatgaaacgtccaaagctctttttgtatgccattacttgctggataaaatcctctactaagaatttaagataaacattctntagagaaccgatattccaccgggactnttgtacaattggcttcaaaagtggatctgttgcctccaccctcagctgccgtcggaggagcgggtgaagaaaggccgacctccactttgccgtcaccgcaggatctggcttccctagcactgtcgctgtcggatccacacctctcgaggcaagccagcggctaatcctcgagggaggcgtcgatcagccacctccgcgcttgtcaccatcggagggg

SEQ ID NO: 34523 - DNA, 438 bp, Oryza sativa
gaccttaatcactgagctgcagctgcatggcccacggtaacgggttttttgtgtgctgccaacaacaggatttgtagagtgggggtttcttgaagggccgccaaagaggatttgtaaagtggatgattgctaagcttatggtggtgggctcgtgtcaatgataaccgaaatcagtgtccgcggtgagctttggcatgctagtgcatggcgaactctatccccgtttagtgccaacccgtgcatgcatatgtgggtatatggtgcttggatactcacccgctgtagtgcgcgggctggcgaagattggacaacatcggcgacgggagaaatagctccggcgccggcggaaatgacaggacgatgtcgatatttatcatttataatgaaaagagtatgttgtttgcatctttcctccaacgtactactattacaggttga

SEQ ID NO: 34524 - DNA, 485 bp, Oryza sativa
  unsure (1)..(485): unsure at all n locations
actcagcttaattagatagatttcctttctattgcacaagtacattntactattccataaaaatcccaaaatatattacacatttgtcctaataatattgtcacacgacacagagacttacaggaatgccaacgccagtccatggactggaaaaccttctccgccaacggcgccatcgacttcaccaggccatctatctacgtangagttcttcgagaacgactaaacccttcgcggaggaactcgaggtgcagcaacggacgatgatcttgaatgcaagccaacacatgccccccggcatatcggcttgatcgacgacactcctgcttcaaggcctcgtcgatacgttgaccgatgccttcgagctgtgcgcatgccccattcagccacgagatgtatcctgccgtcgattcctctggatccccacggggtactctgagctctctacagactcttgacatggacgtgcatcaactcttcagata

SEQ ID NO: 34525 - DNA, 387 bp, Oryza sativa
  unsure (1)..(387): unsure at all n locations
atgtgttgggcaantgccgagtgcgggtaatgtgtatattcactacagtgtgagtaaaccaaattttattcgaaatagcccgtgcttcgccgggtaattgatccacccgggacaatggattaacactntggctaagactcaaaaatcttaacttggtaggatgggatattgcatgatgattttatgctgntggatgccacttctaagaagcgggaagatggacatcctctaaaaaccatgacgactcaatggcgggaagctatccttgggatcaccatggatggtggacagaaaccgcgttgtttaatgtgaacactagtactaaaatttgattagactatgttaggtcttaggcttgtganaagaaattacaaacttgctttacgt

SEQ ID NO: 34526 - DNA, 474 bp, Oryza sativa
  unsure (1)..(474): unsure at all n locations
ntaattntgctattctatatattaattagaagaacaattttgattcacactggaatctactgagcaacagagttgctctgaatgaaacgaaatatatagcctcagttcatgacaattctaggagaaataccttcaccttatttgttttttgggcacatacaggtgaaacttggatcccagtactatttctacatggagacacaaacggctttagctgtccctgatgaagataactgtataaccgtctactgctcagcgcaaatgcctgaggttactcaagatattgttgcaaggtgcctcggcgttccatttcataatgtccgtattatcacgagaagagttggaggaggtttcggtggaaaggcaatgaaagcaacacatgtaagaacctgactgaccatagctttgcattgcaggaanatatattattgactagtggaattaattcccgacgtctagctaggtcgtgctata

SEQ ID NO: 34527 - DNA, 384 bp, Oryza sativa
  unsure (1)..(384): unsure at all n locations
atatggttcttttggccactgacagtttttggtgggccccggaacacgtcaactaaagtttatctatctaccaataactatctgcgtattaacaccctatttaaagaaggcttaagtgaatgaataaatgccaaagaacttggtttgtgccagcggcgatcaaccgttctaaccgttcgaacgagcaggatttgcatttgagcccgttaaacccttccgtttcttgctttcaaaatcctcactcccgaatcctagtgggcttacgatctcggtntggattgaaattgagtactagggctccatcgtttggaataaaccataaggcatatttgcatacgaataagaatttatgaataatttatatatatgttttcttagtgatct

SEQ ID NO: 34528 - DNA, 476 bp, Oryza sativa
  unsure (1)..(476): unsure at all n locations
tgccgttgatgtcatatagccggctgacccacaattcacatcaatgcattcaagactgangaaccgtangttctctccctacttcaaggattgcatatgggctatagatgggactcatgtaccttgcgtggtgccaagtaacaagtttgtgcagcacttgtgccgcaagggcatgacaacacaaaatgtgatggctgtctgtgaacttgacatgaggtttacatttgtactagctggatggccaggttcggtacatgacatgagagtatttgatgatgcccacacaacatacacccatgtgtttctacatccacctacaggtatatgcttgaatggtacttgttccttctttgttatttgaaatatgtcatactaactcatagttgatgctgtanggaaatattaccttgtcgactctgggtaccctaaccggccaggttgccttgcttcttacaagggaaccaagtatcatcttt

SEQ ID NO: 34529 - DNA, 418 bp, Oryza sativa
attgacagaagtacagaatctatgttcatgtattacaccactctgaaactggaaggttcggtctcctatatttaactgaatactaaaaagtgtggaaatgtgaagaacaaggaggataaaaaaaagaaactgctgtaatacttacagaaatctaaggatgtggcttgttgttgcgtcagcatcagtgaaggagctgagaattcctttgaactttttgtcattgaaaatgctctgaagtgtatatgataacataaaccttgggggggattagttccttatattgcattgaactctataatccctcattgtcgttatgacaaaggtggatcccagcccatgtcactgagacaatgagtggcatgagaatgtgaactttcagcagcatacaaggaaatcccaagcttttaatggcaatttc

SEQ ID NO: 34530 - DNA, 437 bp, Oryza sativa
  unsure (1)..(437): unsure at all n locations
tgcatcgaaagagagaangaaaggganatccttaattaatcctcttttgatgcatgacaccgggaacggagagatcgaagggtcacgttacctggatgctgcataagcgcgggtggcgcgcgagggtggcctcgatgccggcgcggacggcgggcaggtcgaccggctcggcgacgcccaacgtgcacacgatgtagcagctgaagtgcggctcccggaacaggcgccccgccgggctcaccggctcctncagcaacttcttctactgcttcgccaccgncgccgncttcttgttcgtctcgctcatccccgtctcccccgcgggctccgcgttgtcaatcgacagcaccggcctccgcagcctgatgccgccgagatgatccatatcgcttcagacttcttttcagctaagcgcaagcgcgcgtgcgcgcgccctt

SEQ ID NO: 34531 - DNA, 419 bp, Oryza sativa
agcttgagcagccggatatctctctactaattgtaattttgggggatagcatatatgcatgcttcattggactactagctagctatttctttcttcatccctttgagattattattcatccatgaaacagataaaacatcaagtttggcacaaactaagcaaaatgcagaggatggtaattaacgaggagttgttaatatgacctcccttttataacatgagattttttcacaattcatacacataaagtgattattaatttcatgaataggtgataaaaggggccgtgtaaatatgctaccttctttttgtttagcatccttatctattcttaccacaggaagacgtgatttatgggtagtcgtttatttattgcatgtagcagagttcaatcttataaagggttcaaaagtgacagc

SEQ ID NO: 34532 - DNA, 402 bp, Oryza sativa
  unsure (1)..(402): unsure at all n locations
gctttgtaaagattatacatgaaatttaggttgttggcccagatttatatcacaagaaacaaaagatatggaaaaaagaaataaaaagcaaggatttattagtagtaaacatgtaacaaactaaataatatctctgctctgatacgggatatatggatgaatgtatgttaactattataaaaatgatggatatatttgttgaaatattgcggaaatgatgagagaggtgatgattggatctatttgcattttgatttgtagaattaaataaattatggatgatattgcatgtttgcatgagctcttntgataagtagttattgctcgtggatgacgaagtggcatatttgcatattgagctttagacttagtgagctctaactntatagaanatatagatat

SEQ ID NO: 34533 - DNA, 420 bp, Oryza sativa
  unsure (1)..(420): unsure at all n locations
agcttgccttccgagccggccaccattgatgatgtcatcgctgacgtcatcatcgctttttttttctttttcctgtttttctaataaattaaatcttcggaaattcataactaaatcatcgtaactcggttttgagttgttcaagttgctaaattcatctaaaatcatgatctacatgtttgtttactttatatgtactgtttatttggtttttattagtctttttcttcgttttgcgtgttagcttgtcgttttcgtcgttgtgaaggttcgtgagtgcgtcgggagtgttcagaagattaattgaagaccgattattgcaaggcaagtcacacagatcctaaacacaatcctttgagcatgttgatcctatatttaaattctctatttatntcaactgtgcattntatttcgaatgtc

SEQ ID NO: 34534 - DNA, 384 bp, Oryza sativa
tcgagtgctgcagggacagagtaaaagggtaaaatcgcctcctggtcgaatctaatcattctttgttatccagaaaaattaagcaaccaaccaacgatacaatcaacattatgacaccccaactgtacaaagagaaaatatgacagtccaatgcgcaagcaaacctggcgaaatgatcgaattaccaactacaatatcaaaataaagggcaccatgtccggatgcaaactactaccatacaagaattagcattcagaggtaaatgtcgcacactcttacagccttacccccctataacataatttttccccccaatcgtttacccttatgatgaaatcgagagaaatttgcagattcgtaagcaaacatcctcaccggattctt

SEQ ID NO: 34535 - DNA, 411 bp, Oryza sativa
acttaagttgaccaattttaaaaaaattatattttcaacacaaaataaatgtattataaaaatatattgtattattaatttaataaaactaatttggtaatgtaaatattattatatttgtctataaacttaagttaaacttaaggcagtttgactttaaccatagtcaaaacatcttataacctagaacgatggaaatattagtaaaaaattatcaagtttaaattagatgaaaaattctagtgcgttgcaccgggataaggtggtacaaccgctattaggaacgagcaatgtgaccactattcattataattgtacctctctccgcttctccccaaaatttattttatctcttaaaattgcgtgagaaattttgatccactcgatcttctctttcagttatcccgaaat

SEQ ID NO: 34536 - DNA, 421 bp, Oryza sativa
  unsure (1)..(421): unsure at all n locations
tcatcaccttccttgctcacacgttctagctgctgtcggttattgcggcatatccaccaatgtgtacgtctcatattatttcaggaaagaagcaatctttcatacatggagtgacgagatatatgggttctggatctcaagatcctacacaacgctgagtgcccaaggtttttatattccagatccatctaagttaatggtgaaaaagggtcgaccccaaactatacgcatcacaaatgatatggatgagtcagaagcaggtgggaggactatacgctgcagcaagtgtgatctgcgcggtcatacttactagaaatgcccgaaatatgcagatagtccaagcggcgcagatgctantacatctggacaggcaattgatagtatgcgaccacctggtgaatgaactacaatcaggcgcgca

SEQ ID NO: 34537 - DNA, 423 bp, Oryza sativa
agcttggaacccatgccgacatagattctgatatagccttgcctaacagtgccttgcatggatctcgatcaagactcaagacgctatgatagtcatgacttttgattatcgacagatcagaacgcttatataggaaggatgctgacttggtggaaaactataggttccacgatgactcctattcctggcattatttttcataacatacgcgtctggtgcatggagaatccttttacaaatagtgactctgtgagttgctcccacttcaaccgcagttctacatgtagcccttatatttttcataacatataggagctgttgcggatagcgactcctttgtataggtatcactcaagagataagttcatttaaccctcaactaccacgtctgtccaaaatgcacaccttactgtaaccatatat

SEQ ID NO: 34538 - DNA, 320 bp, Oryza sativa
actcagcttagcggagggatctggtgtccaaacacatgtcgtatggctcgtcataccagccctaggagaagttggggagacctaacatctgacagcggttccgcatggaagcaagtcactacacgtactctggtggcgagcttgatcagcatggcacgatacctgtggatatctattgagagcgtcttcgacctcgctcgttccatgagcacctagtgatgatttatgagattggtcgtgtggaccccggcgacgccatataggagttcacactcttagtgaacagcagtattcctaacaagagctcatgtttacagata

SEQ ID NO: 34539 - DNA, 395 bp, Oryza sativa
agcttgaactttgggatgcttaactccatacagttgggagtaattactcccaagatgctgaaagccatgccatggatactatgttatgtaattatagttggaaatgactgaaatctgatagctaactagccaagatcagcaatcagtatcttgtgtacttggacagctaaggaaactcctacatgattaatattcaccgatcaatttgcaataactgccacattcgtaaatgaacatatgttcaaatatctaagattattttccatgcaaagttacatcaactagtgttgaagtctaaacacttaccacgcacataatatgagtacgttagctattttgttcttctctacatcactttattggttggtagaaagattgatttgtcttcttgtgag

SEQ ID NO: 34540 - DNA, 447 bp, Oryza sativa
  unsure (1)..(447): unsure at all n locations
tatagattctgaagcctaaaccaccacatctttttggttttattaaacagttntcttaataagccgttctggcttattagaaaatataggcaaccaataaggctcttatgctgtgttccggagtgagggttgggaacctcactcctggcatataaaacggagcagcatttaatgcgcgattaattaagtattaactaatttttttaaaaaatagatctatatgatttttttaagcaactttcgtgtagaaactttttgcaaaataacacaccatttaatagtttgaaaagtgcgcgcgcagaatacgaggaagaggggttgggaacttcctataccgaacgcagccttaaactacaacccaaccaaatagagatcctctaacttacttttctctaacttgtgtcactgatatgtgtgccctctatccagttggcccatgtcagtgac

SEQ ID NO: 34541 - DNA, 419 bp, Oryza sativa
  unsure (1)..(419): unsure at all n locations
ncaagctttgttgccgntcataacaaattgtcttattatcatgctctggagtgtggtattattattctaattgatactagaagaagccccgcgcgttgccgcgggcacattagaaaacatgaaatgtgcattgaagtatgaacaatcagattgtattgtttgaacatgaaaaaaatatgattggcaaaatatgtactcaagtaagaaatacttgaaactgcatcaagctcataaaccaataatgtggagctctggtttattgcttgaaagacatgaaaaatcaaacaggaatatagtgtagtatacaatttcaaaaacctgcaaatatcagacacaacaaaaactcctttagatttagctatatgcacacaatattaaaatgtataaaaaatatagatggaagaatcgagatataagtg

SEQ ID NO: 34542 - DNA, 410 bp, Oryza sativa
  unsure (1)..(410): unsure at all n locations
agcttaaaaccaccatatggcatgagcctatattctctataagactctaacgggtagattgtgaggtttgntagagaggcttaagcccctatagtactggccagctgaagtccgtccccaccagcttattccagaaaagcatcttcaggaagaagctaggccctccaacacaatatgcactggtgcttcgaggcatccactgaactgacatgtcaatgtgcctactaccatgcattcttagtagactctacaatgtttttacctgcctaagcaagtaacccacttacccttatcatgtgttgaacaacaaaacaaagaacagatgntattccaataatttcttgatcttaatagttctatgtggggaggtgggggaggannatatgattggtgatcctgcccatgatgct

SEQ ID NO: 34543 - DNA, 426 bp, Oryza sativa
  unsure (1)..(426): unsure at all n locations
ctgccagaggagtgactttacccatgcacctgataatttgtggataaaccattcagttatgttatatttacttgagtgtccaaaaaatccctcttattatgtagaaggaatccactgtattatctccaaccaatgcttatagatttgttgctgccataaactgcctggatttgactccacatctggtttataaattttgctgatgtgaatatttccttctagatctgctcacacttganaggtgttgtttgcttttaagttttaataactctgcaatttatccatctttgtatattgcctgcactaacattcagcatgctccattacttcagaagcttggtagctttatggagatggcatttggtgggcgttatgttatccttctgatggcattgttctcaatatactgtgggcttatatacaatg

SEQ ID NO: 34544 - DNA, 407 bp, Oryza sativa
attcacaattaaacgagcgcccgatctagtaatgtgttgctcagtggctttactattcaaaatttatttcatggtgaaacttattattcttaatatgtgcctttttttgttaatgtaatgcgtggtataactaccccatgaatatgccgagttggctgctccttcatatattaaaactgcctgtcaaatgttctttcaccatagtggtctctatagcattactatttcagctagtgcagaatttgctcttttggtgttctggttgttcttctgtttcttgcaatggttgatatcttcattgctaacactactacgttactactgtagtataatagctctactcttaagaaccacttaagcagtgtcttgaattggtgattccaataatatgttggttgttgataaca

SEQ ID NO: 34545 - DNA, 416 bp, Oryza sativa
cacctattatactaatggattatttggtccagccttaagacaatgttgtctagaaactttattccattgatattatgtctatttattaaagattaaatttatgaatatagtcaagtcgatagtcgtaataataatttgctcaataatctaaatctaagtccaaattaaaggaggttgggaagaatagaatagacactattaattgtatgtagccaacctcccatatatacaatcaatctcctattttattgtttgcgaaaaaaaatcctcctatcttatgactatatatcatactatctggttttgtgcaattaatacaaaacgccgagaaagaggctaagaataaaatagtgatcagaacagctagacataatccaaattagaaaatatccggccaagccaataatcgaaccgta

SEQ ID NO: 34546 - DNA, 441 bp, Oryza sativa
  unsure (1)..(441): unsure at all n locations
tggaattttcatatataccatggtggaatgagtggaccggtgtaattatggagatttccccttgatggaaacactgtcactcaaaacggtctataaactgcgagctcttccattggatcgatttccttctttgggcacactgacattggatgaatgtgatggtatcgataccattcctgcaggtggaaccattaagaagctatgcattggagggtgctatggcctatatactctccctacccaatcctcactcctaaagctgcagctaaaggattgccccatactgagtgtagtcagttccatgcctgaactggacacattagagatatttaaatgtccaaagctgactgcagtgggtttcatgcctaaacttcanacttctaatatacaacattgtcgaaacctgattaccatagattccatgcatgactgaactcttca

SEQ ID NO: 34547 - DNA, 458 bp, Oryza sativa
  unsure (1)..(458): unsure at all n locations
tattgttatgcaagaacatacctactgggaaccatctattgttgcaccctctaaaaatgtttccagattagcactacagtagttacttgtctatctaaactcctcactcttttggtactgtcacatgacaaaatgtactttatgtgaacacagaaatggaaactgcttcccataatgaggcaccgatttcaacagagaacattagaaagccaataatctatcttaatatgcctcaccttttgccctcaaggaataatcctgttgattgtactgaaccaatgtatctcaccctatctcctgtaaaaaccatcataagcattgacgttgtggttntattatcatcatacatattctgaaaaaaagaactacaatcttctgcaaactttaactgacggacccaattaaggtcaccatactcaactcaatgaattgctacttaaactaggcatacatatcga

SEQ ID NO: 34548 - DNA, 317 bp, Oryza sativa
agcttgtgggcttcgacctgcatactgctatgtaaattatatcaggcctatttcttggtctctgttctctgcagatcctgctttgggaaaataagttgaaactggaaagatacttgattgctgaacttatcttgtaacattgaaatactagctaattgaacttgtgggtatatattttctggtaatcctcacaaaaaatatatatttaaattctgcctatgatcatgagtgtgctgccttatatataatactaatgtccttcaactatcttgtgctgtactccctccgtcccataaaatacgaatctaggaccggat

SEQ ID NO: 34549 - DNA, 310 bp, Oryza sativa
ttagccaatcttcaattcagaacataactggtataactaatttataactcttcgtagaatttcttcattcgcgattaatttggggagtgtcagaggaatggaaacaaggtccccattcttccgggtcatctgggcatgagttatacaagcagaacaattcaaggctatatattcagagaatccaaatctacatctttgagattaccaaaatctaggaaccatatccagatgaagacatgaccagtgggacgtgccctgtcgtgttcctcactgaccacgtgggccccaccccacgcgccgacttgatggc

SEQ ID NO: 34550 - DNA, 387 bp, Oryza sativa
gcaacaaaatggaccgaaaaagaaaggcagctcatatcagctttcctcaggggaacaatcaaaagcctcgcttcatgacgggacagctaagtgggccttccaccccgatcgtctgtcagcaccgtccctatcacccgagtaacttcaacaacgattacaacggtggcagtcacaacaacagtaagcaacacaaccacaactcgactccacccccactaatggcaccagctcagtcagatccgccagctgtgtcagctcagtcagaacaacccaagaagggggctgtaggaaagccaggaccctgcttcaactgtggcaagcacgaccactttgctggcaagtgtccgaagctgaatcgcactggacccaggttcatccaggcccgcg

SEQ ID NO: 34551 - DNA, 432 bp, Oryza sativa
  unsure (1)..(432): unsure at all n locations
tcacctaaagtcaaaccgaggcagcgaactctgtcttcactgtgacagcggcttccggccggatttggcgcaaaggaacaggtggccgaagtggagctcttcactgcgaagccgatggaagtgacggcgcagatcatggacgaccggtgaggcagcacggggcggctggagcggcggtcggcaaaggagagagaagccgaacgtggggaggcggctagggctatggaaaaactccggaaacagagggaaacggaagaggaggtcttgggactgctatttatagccggaagagggagagatcggctaaggaacggatggaattggcgacggattangtacggttcgccggataaaggaaggattcgatccgcgaaattggaaagaatctccatataaactcttggggatttcttgggggaaaggaagaggata

SEQ ID NO: 34552 - DNA, 421 bp, Oryza sativa
  unsure (1)..(421): unsure at all n locations
agcttatctagaagagtccgagttcaaggaggatgtgacatggcagnttatctattaattaggcagtattcgtaagtttccttttatctttaggaatgtgtgtttagtgtccgataaggactttatgttttccttttatctctaggaaagattctttcttgttctacaaggactagtatttacccatgggtataaatatgtacacccggggttattgtaaattatctcttgatcaataatactactttcggcgcatcgccaccctctttcccgaggtttttacatatcaaccggcagaatttggcacttgacgcggggctgcatcggttcagttcgatctccagcgaaggggtaagtcctacgttccaccagccctggtgaatctgccggctacgttggtgttgttcaaggctgcatcgct

SEQ ID NO: 34553 - DNA, 448 bp, Oryza sativa
tcgcgggggcgaacttgccatggcgaagtcgtcttccttcggcagatagtcttcgccttgcacccttcgcctgagacgcctctggcctggcaagacactcgtacgactcttcgcctcacgccgttcttgctccatagccttcgccacgggtttcggcagatttggtcgaagggcctcatgccatccgtcaacacaatgccatccgccaacacaatgaatggtccaacaacaatatagttgctttatattaaaaaagaattccatatgactatataaccttggaagagggttcaaatatttatgaaacttatgcacatacggaccatgtcacgtagctgtccactcagctatgtcattcaaacaaatagcgtgcagctataacatcagaagaagaaagttattattttccttctctgttgtttttttgcaacatcgagagaagaatatc

SEQ ID NO: 34554 - DNA, 426 bp, Oryza sativa
  unsure (1)..(426): unsure at all n locations
agcttgtaatttaaagctctaaaatatatattttattatacgatatagcatgtttgtataaggactaaaatgtaataattgctaatggacgatgatgtgtcatctttacatggtgagtgttaggatgtantgagttgtaactttatagtatagattgagcaacagcataacaatgtacgattggtttttaattgcttagttctcgcctaaatcatagagaaaattaccaatgtccctccaacaatatactcggcccaatccttacgcattcctaccctcaaagtttaatttggatcatttccatacatttcaattagacattagttgactgataaaattctattaaacattctaatttgccttctgcatgaagaatatatggtttattaattgttggagtgtaaaaatttgttatataagactatt

SEQ ID NO: 34555 - DNA, 356 bp, Oryza sativa
  unsure (1)..(356): unsure at all n locations
tgncatactcacattttcatgacttgctgagtacatacgaactcaaccttatttntcctctccctagaaagaagtgaagttgaagagttgggtttcatatctaatcccaaccagttgcttgtaactgggttctagctacactaagntccgttgctacttctctacttactgtttaacttttcgaagttattctgaaggtgtgacctcctatatgatatcaactatttatattatatgatgtacctcaattaaccacaggtactagcatgttcttcctgtgactagtaccagcatcgcacaagttcctaggaatcggtcacgttcattttctgctgcatacttcctttggtgtcact

SEQ ID NO: 34556 - DNA, 396 bp, Oryza sativa
agcttttggacagaaaggccttgacctcctctatcacattgaggctgggcccaaagatcaatatgtcatcgacatataaacacaagatcactccctctaccccaccatagcgatagtacacaatttgtcagcttcgttcacaacaaagccagcagatgtaagtgtattgtcaaactctcatgccattgcttaggcgcttgtttgagaccatacaaggacttcaacagcttacacaccattcccttctgaccttctagtacatacccatctgggtgatccatatagatctcctcctccaactcttcattgaggaaagctgtcttaacatccatctgatggccgagtagaccatgagaggctgccagagcgagtagtactcgaatcatggtcaagcga

SEQ ID NO: 34557 - DNA, 418 bp, Oryza sativa
  unsure (1)..(418): unsure at all n locations
tctgaatctaatgatgttcttcacgaagaaagatggacacatggcactgtaaggagcagaactgatagctattntgcatgtggttggtgcaaattntttggtgcaccatggaccaaggcccttgccagatctcacccataatattgtggcagcctgtaatgtctggattgagatatatgaattgagaaattggttttcatcttctgtcagtgactggaagaaaagcttcaattntttaacagactgtttcagcatgtggttttccaattggacagaatcccagataagaacagttagaatgagaaccaccagaacctggaactgcaagaacaatgtctgggacatcattgtgcagacgattaatcaagaatattgtatatatgatacaggaagatgaaacacttcattgtgcactact

SEQ ID NO: 34558 - DNA, 408 bp, Oryza sativa
agcttaatatcttaaaacttctatgtggtgagtggcaaacttttagcctcccaaccgagcaggtagatttatgcatatgtttggcacggctcgagttctatccccaactctactggagttaaagtcctaccaaacagtgagttgaccctaaaaaagagtaaagcgggctgaaacagtgagttgaccctaaaagagagtagagcgggttgaagtaatctggaaaaaatactgaagaggagcgcattttatgcaccctattgtgtgacactcataaattaaagaaacatccattcattgattttcacttaaatcgatagacacattattttacatcgatagacacattattttacatcggtattggatctttttttctaaaaaaaaacatcccataccataatcccttcc

SEQ ID NO: 34559 - DNA, 425 bp, Oryza sativa
  unsure (1)..(425): unsure at all n locations
ngcacgcanacaaaggacttgaggtattaaacctctcagctcttgcttggtcctcaaacatgttacgtagtcccgtgattatcgtatgagcatccaatgcctcatattgcctttgaagctcangggacatagtagcaagcatgagacagcttatatcaaggtattcattgcatcgcgtttcaagctccctacgttgagcagcaggagcattgttgggcaagtcagctggaaaaggctgtgtaagcataaactctttgtgctcttgcctgagaacaattctcaggttgcgataccaatccatgaagtttgttccagtcaacttctatttctcaagaatagaccgcaagttaaaattggatggtgcangagctgncatgatctacaatagaaatatatgtatgccaaatcagcacccatgttacata

SEQ ID NO: 34560 - DNA, 405 bp, Oryza sativa
agcttacttcttcgattctgcaggtgagtgttatttcctgttttcttcttatatcatactccgtaccatgttttctgtggtagactatgttgattcattctactttcagataatatgctgggttttgggagaatatggaacagcacatgggaaatattcagcttcatatattattgggaagctgtatgatgtggcagaggcccacccaactgatgacactgtcaaggtatgctcttgtagcttagcttttgttccactgttattacatgtggcccattgctactgtgcatgctctgtgttgaaatattataatatacatcctagttgatcattactcgacattttcttgcgcaattactatgatcaattgccatgaaaatcacaacttgtactatgaaatgtctc

SEQ ID NO: 34561 - DNA, 400 bp, Oryza sativa
attgacctctatgatgatggaagattgtttgaggcagacaatttgtttaatgagatgggcaagaaggggttcaagccaacaatatacatgtatgaggcgaagatcacttctttatgcacggaaggcaggttggatgatgctgtgaaggtgttggaggaggaattacccaagaatgatctcattccgaccgtcacaacatataacttgctaatgaggggactttgcaactcgatgcaatcaatgagggcactcagataccttggaaggatggataaacagcttggttgtgttactcggaaagagacattttcaatcttgatcagcggcttgtgttcagaaagccggttcatcgacgcagcacagattatggagaggatggttaagggtcatcatagacctg

SEQ ID NO: 34562 - DNA, 385 bp, Oryza sativa
  unsure (1)..(385): unsure at all n locations
agcttggcaagctcaacacagagatcacttggtataagatcacgtcgtgttgcagcccactgaccccacttgataaatgctggcccaactatttcaagggtacggcgcacaaaacgaagccatcttcttctaaatccaacactgaaagtatcagcaaatggagacaatgcagttgcagggaagaacaagattgccaaatgcacagctctaataagcaaagtgacaccctcccaaattgaccaaactatggatgacaaaaactggcgagtatcccgcgcatttgtgacaataccttccattgtgggcaagtgtggtgaatctgccangacaggccgtgacaatgcatacttgcaaatgctagagccatgaccccagngacaacatg

SEQ ID NO: 34563 - DNA, 441 bp, Oryza sativa
  unsure (1)..(441): unsure at all n locations
tcggacaagatcattcagcatgacggatgtgagccgagatatcagctgcccaacctctttaaacttttatcacatcgcttctgacattatagtggtagagtgatggacaaatgaagcaaagatacatggcatatttgtgtagccaagactcttttttttcttcttttttgactgtggttagtttgttcgttggtcatcagtcagatgagctaccttttcaagcagataacacaaagcgcgctacctttnttntatgcagccattactaagcaaaacaaagaggtttagtgtagtaacaatgggaacatccttggtgaatgctaatggtaaactagactgtctngtacttttccattgcctcgtcagttgcattgtggctctggtcctgatgataagcaagatgtctcccaaagaagttgcatttgaagggccgttttctga

SEQ ID NO: 34564 - DNA, 451 bp, Oryza sativa
  unsure (1)..(451): unsure at all n locations
ctgatttcatgtttagctttatctattgtagntcgtctctgatccgggacggatcgacgcaaagccgttgttgcaattctcgtcaggttgtagtggcgaggaaatcaaacatgggaaaaaaaccgggattcttgtgaacatctataaatgccagagccgccattagtgccaaaacacatccggcataatcctgatcggttacaggaagaagaaaacagttgtacccaagcacatcatttgaccacccgcacagcaccatgacgattactggcctcgcccacttctgtacacccggaacctatgccctgaactgatacgatcagccgtggtgtagctgcagctgcagcagccgcgagtaggcgccgtcgggccgcgacacgagctcgccgtggctgccctgctcgacgacgcgcccgtcctgcaccacggcgatcgagtcgacgccgcggat

SEQ ID NO: 34565 - DNA, 328 bp, Oryza sativa
  unsure (1)..(328): unsure at all n locations
tttaatcccaccctctctaacccattttccaaacattccaatccaatgggtttcagcatcaacgctgcagcaatattggtctttagacccgaaatttgacctaggtcactcagcccaagtaaaaacctactccctctggcataaatatgtggcatttataacaagattngatagcactggtgatactttgtattgatacttagactggaagtaacttttgaaatgcttanggtaaaacgaataaaatatatagntggtgtggctttgctagaannagtactataatatatatcataagcttatanggtnnntacaacttctctatatc

SEQ ID NO: 34566 - DNA, 215 bp, Oryza sativa
tggataaccaaccggattagacggccagtgactaactgcctattatagacacaggctaggccggttaacatttacaagctctcaatacacatgcctctaatcaaccggaatatgctaatcgagacgtctgtcaaatgcgactgttttgaagaacggggccagtgtttgataactcaattgacgcttgaggaacggctaaaataccccgacatttg

SEQ ID NO: 34567 - DNA, 477 bp, Oryza sativa
  unsure (1)..(477): unsure at all n locations
agctntttgtttagccgtgtgaagcatcatattccatttatgaacattaccaaaggtttgttataatgaatattacaaaggtttggtccaaggggatagtattgtaaatgaaacttacgccctatttaaagtttgtgcgtgtcacatcgaatatacggacacatatttaaagtattaaacgtagtctaataataaaacaaattacatattctgcatgtaaactgcgagacaaattttttaagtctaattaattcgtcattagcaaatatttactgcagcaccacattattaaatcatggcgcaattagacttaaaagatttgtctcgtaatttacacataatctatataatctattttttttctatatataatactccgaactaaacacggccttagcttatanggatgttcggtagcaatggttgtctgacagctgcggctgtacaactagtagcacggtagaatatagctcttat

SEQ ID NO: 34568 - DNA, 479 bp, Oryza sativa
  unsure (1)..(479): unsure at all n locations
actcaactggcagactagatcatcgcacatctgatccttcagtctttatgtggctccccttcttctcgaacagcatagcccnaacagacttaagcacaaaaatcacaaagaaattcatcatgcatagattcagagcctgggggtcttcacgccttgtatgcattgtttctcttaagcagaacatcattcataatgaaacaaggctacgaataaataagatgctatgcagtatccctttaactgtaccttgcacaggctggttaaagaggctgatgcagtaataggcaaatttgcatacttaaagatgtatgctgtatcaataacccgagagtagtcaaacttaagagctgccaacgaatcaataaaatgataaaagctagttacatactgagtaacacaatacagccctgctataaacatgatggatgcatagaatgactatatccaatagaatggaccgcattaatcacagaatacca

SEQ ID NO: 34569 - DNA, 408 bp, Oryza sativa
  unsure (1)..(408): unsure at all n locations
cttctagaatgccttccacttgagtctatcctttgcttcagccggaaatgtgaaccatttctccaatgccgtccaagctcgctctttcttggcttctgtgaccttgccgatatctttatggaggatcccaaagttctcacgtgccgccagcccgtagcagttagaccatcttccaatgacagtcctgggcgccgtgggcctaccactagcgtcaacctctcttataacttgcattgtggtcggccatatattntgtgaccgaggatttctacccgacctacttgcacttgtcccacccgacatcgatgtatgttgttcatgcggcnattctttagtacaaacagaaggcaacatatgctaaggagtgctagctaaaatttatgtggtcatgtggtgaaaaatatccta

SEQ ID NO: 34570 - DNA, 369 bp, Oryza sativa
  unsure (1)..(369): unsure at all n locations
ctggagcagtctgatgaccaccagcattgtaatatgtgttactcgtgggaccaacgtaagactctgaattctgaaatgaagtaagaggctgatgagctgcacctgaatggtgattatgtccttcttgctggacagaagaaccatttgtagtttgtgggtaactataataatagtttgcatattctgcagcagtgtacccatgttgaagtgaacttgagtaacgcatgtgagaatgagtcgcattntctgtgcccatagttggctgagcattatgaggtgcactgcttgccacactctgattgtctccnaaaccgaaacatccctttgtggatcatagtaaactgtatctcggctttgattgtcactggg

SEQ ID NO: 34571 - DNA, 474 bp, Oryza sativa
agcttataggtggcgcccatagatgggtcctgataacaactgtatcgacgacgatgcaccacgcactgacccgccgcgtgtataaatatcctcatgcatgcatgtgtgctgcataataaacaggaaacgaacgatatttggttagtctttaccttgggcagccattgatctaattctcgggcttgttgattggtcaaagacaagttgctcttcttcctacaacgtacttcagcttgacaccggcgccgagcgctaccggcggagtgctctactgcttcggcgaagtatctgaggatgaatcttgatgggagaccgatggatctctatgcatggatgtcgatcgcctatcgccgtgtattgagtggctgtctgtacccatcccggcgtacccttacagcgaggcctatgtgtgttccctcatgtgatctatgtatgagtggatggatcgaactcttcttgtggttctacattcat

SEQ ID NO: 34572 - DNA, 382 bp, Oryza sativa
  unsure (1)..(382): unsure at all n locations
tctcacatatacgcctacaaaccttagctggcatgactccacgaatagatagtggatggtatctgtcgtaaaatacatgacaatcatgacacttcatccctgatattatagctgttggtgcatcacatagtgtgaaatttttgaagagtatccatctggcacttctatttctctaaggaactcacaanatgctttcttctcagctagtgtcattgtatagcatgcaggacgaaatatgaacttnccatcacccagtggaggtgcatgaagttcatgtcgtatcttcatgagtttcagatcagaccgggatttaatattgttcttttgcttcccattcagatttaacaaggtacccacaatactatcgcaacattctttcaat

SEQ ID NO: 34573 - DNA, 408 bp, Oryza sativa
  unsure (1)..(408): unsure at all n locations
aaaatcttagttctgaacatgatacctctgttttagtgctctgtttccttaagatttctctagtagcatccgcattcacttgtccattttattctgattagctcctgcatgatctgtctaacaagatgttaagaaataagaagttaagatagttcaactgctgttgcaggaactggatatggttctgttgtacctgattctcctgatgtggattcccatgctctgactcagtcattggctgagactgttggtaaattgattgatcagtacatcgatgcaatggacaaggtaatgcattgattntaagttgtattaactgtactactcaataaatctgaatttgaattgcctctacggatctgaagaatcgtgctaacaaccatttccattaacaggtcaaaataaaac

SEQ ID NO: 34574 - DNA, 450 bp, Oryza sativa
  unsure (1)..(450): unsure at all n locations
agctttggaccaaattaagtctgcatttggtgaggagtcaattatgtggctaaatcactcttacggtcctaaagaaggtcctgtcatatctactggatcctttgcattggacatggctttatgaattggtgggctcccgaacgtgagttaagggtattaattcttttgtttaataattgttatattctagtatccaggatcactgatgcatgctctatttaggacgagtaaatgactttctactattgaaagtttaatgaaacttattttctattaaaaagagtaaattgaatcagagctccctgaatttgtagacttgtctcacctagctccctgagctgactattgttttctaggctctttgaacttaaacccatntgcatcactggtcatctattccccgtttgctaacagaataatccgagcctaacagcaaatggatgcaagttt

SEQ ID NO: 34575 - DNA, 371 bp, Oryza sativa
  unsure (1)..(371): unsure at all n locations
tcgtatgagtgcccccgaggataaaagaataactacatatatatatttcattggtaaaaaagaaaaaaaaacaactttgaagtatctctggatgagtcactatgctcactatttctttaagattgctagcatctctggcttgtaaaaaanaatgtcatcagctagtatctcattttctcatttgcagaattgcattacaaagagtaattactatagcccatgattagtaatcccacggcggttaaaaggaaatagtgtcaatcgagttctagttaanagcaacatttagggtttagtacaaatcatacatgcggactgatactatttntctttcatgggaaaatgcaagtatagatacagattaacaattt

SEQ ID NO: 34576 - DNA, 461 bp, Oryza sativa
agcttcatgctgacggctcactcgacatgtacaatgcacgttgggtggttcgcgggtttaaccagcgcccgggcgtcgactatggcgagacattctcgcccgtcgtcaaaccagcgaccattcgcaccgtgctgacgctgatttcctccaagcaatggccggcgcatcaactggatgtttcaaacgcgttcctgcacggccatcttcaggaacgtgtcctgtgccagcagcccacaggctatgaggatgctgctcgcccggcggacgtgtgcctcctctcccgttcgctgtacggtcttcgtcaagccccgcgcgcttggttcaagcgcttcgccgatcatgcaaccagcctcggcttcgtccagtcccgcgccgacccctccctgttcgtgctgcgccgtggctccgacacggcctacctcctcctctacgtcgacgacatgatcctctccgcgtcctcg

SEQ ID NO: 34577 - DNA, 444 bp, Oryza sativa
ctcagcttgggcaatcgtggacataccagcagaccaaaattcttgaatcactggctagataaactgaagcagacactactgatgccatgtcctgtatcaaacgtacccgccctttctgaccaaacaatgtcaagagcagttgacgcttcggagtggataatgctagcaattgtactttgtctacggaaactgaaatcagagatattgatcgtgaagatcttcagtgtctgggaggagatgtgatgatcgtgaatatggcagtctcgcaagaagagacatttcatttccgggcagcgcatcttgagttgattgaagaaacctttggacaaaacaaccgaggagaggggcaactctcttaagtactgcgaggtaaatactgcctgattgagacggctgatgcccactgcgcgaacatccatacccggggcttgtactgttacacat

SEQ ID NO: 34578 - DNA, 475 bp, Oryza sativa
  unsure (1)..(475): unsure at all n locations
agctttggatagagaagagaaaaggaatggattatatctaanacgttatccagtcgtttaatttattccgtgactatccgcacagccatgggacaccatacgatagattttctgtaattaaatcatgattgtaaagtacatttccatcgagtgtggagggctgcaagatcagttcaatccgttcaatccggtgtgccgtctgctggagagtccttaattcttgggagggcagcactggctacgctctaactttttagcctacaaaatttgagggcgaggtttaaagtggggtgagttcaatttctatatatgtttggcctaaaaatatataaggattaggtagggttgtgaaaattcaaatttttgaatgttgaaacgatatgggatagagatatgctctatataaaagttgtagatctcgacgatatcaataattntataactaacaatattttcattacagaccgttcacata

SEQ ID NO: 34579 - DNA, 293 bp, Oryza sativa
  unsure (1)..(293): unsure at all n locations
ctatgacgtacgtctcccagagccaaccttatgattggttcgatagggtcctccacttcacctaacacatgtgagtcaacttgctctacttgagagccgctgatttcatcagatgtcacatcacgcgcgatctcaacaataccggaggttntgttgaaacacggtatgtcactcatttgcctatacccagcaagacccctcatcactgtacgncanactttaggattagcttttattagagtgtacactactacgacacacagagtagaacattggttgtaccgtaaactata

SEQ ID NO: 34580 - DNA, 395 bp, Oryza sativa
  unsure (1)..(395): unsure at all n locations
gaccccgtaccatagcaatcaactacagctttctacaggaacagagccatgacctaactgaccttgaggaccctttcatagaagatgaaataaaataagcaatctttcacgcaagatcagataacgccccaggtcctgatggcttcacaggtgcttttttcaaaanatgttgggagattatacaggaagacgttgttctggcgataaatcaggtggctaaccacgacactcgaagcctttggtactaaactcggcctacattgccctcttgcctaagaggagtgaagcacttcgagtaggtgattatagactgatcagcctcattcatgcctttgggaagctcttctcanaattattagcannacagatggcccctangctccaacagatgatct

SEQ ID NO: 34581 - DNA, 469 bp, Oryza sativa
  unsure (1)..(469): unsure at all n locations
gcttgtgcaatggatgggtcattacgctagtctttgtttgatatgtttacagatggtcaaaataattatttatatctttacggatggtcattatgtatgtttcagtttcaagacataaaattcacattgtaattggggtgattattaatgctatgtgcgacactagtaaatgagcatgctctcaattagcaaactgtgcaaatttggggacctagttgaagcttgaactaaagtttgggtaccaatagttagacttgctcattggatgattctcaatatggttggtgaatgcatagatgctactcttccagcaaaaagcatatggtgtttgacttctttcaagttaaacttttgaaactttacttncacttaatntaagatacttcaatacttggtttgaaaacataaaagatggtgtgtgtagatntgccttgganagtactttcatgatattataaacttattagag

SEQ ID NO: 34582 - DNA, 395 bp, Oryza sativa
  unsure (1)..(395): unsure at all n locations
cagaccttgnttatgagtttagtncaacactcataatagcacatgagttcataanaatgtcacagggtatgtgttcttctctacttttgattctttgacaatgcanaatgaaacaatattttccacagtgattttgatgtccttttttttcaattntaggtccttgaaaacactccagacaatgaagcttaataccgccatagatcaaaaggttcgtggacactatcaacagcagataatggatggtgtgtatctgattgtactgctgaagcacttaacgtanatgtatattagttggtacatttattttctttagacatttgagaaactttatttcctaaatgaaaatagactatataatggaagtaaaactctctgatcttttggtaaaaaat

SEQ ID NO: 34583 - DNA, 470 bp, Oryza sativa
  unsure (1)..(470): unsure at all n locations
agctngggacatcattaaagtctgcaactatatatgcccgagcattatcgacctataactgtgattcacagttttgttcgaattgtgacagagctacttgccagtcatttcgccccaatattgaacgaattgatctcgtataaccaaagtgcttttattcgtaaaagataaattcatgataattttctttatgtgcggaatttactgtatggcttttatgctcactactagagaaataactattaacgatagaaaatgtggtccataaaagtataaatatggtccaactntggttctataattaaagtatagtaaaaacgggtattgtttggctaaggctctatttgttttaccctaacattattgtaatctatattattgagtcagattactataaactggattataataagctatagtagaattgtttggttctctagattatagtagattaagggtagtgaatcttt

SEQ ID NO: 34584 - DNA, 336 bp, Oryza sativa
  unsure (1)..(336): unsure at all n locations
cgactggaaagcaagaccaggcgactcccactatgggtgtctaggatgtagtggtgaccatgcatcactatttgtggtggcggcgacgatgcaccaagcaatgctctagccgatgatgtggtagccatatctggcaaaggccaccaggttaaccctccccaccggtagcatgtaaggacgcagttgctccgcctcaacaccttcgttcacgcgcttcaaccagtcttcacccttcatgcaggacggatccaagaggtangcttcatcaggctcgagcctaccatctgatttttgcanaanaataattaattatatagcatctattccatgggagta

SEQ ID NO: 34585 - DNA, 274 bp, Oryza sativa
  unsure (1)..(274): unsure at all n locations
ctatgaattatctattagattatatagagtaattacatattttaacaataaacttgacatagcttaaaataaattggtctaagtaatactaaaggggatcttctttcaagaagcatattttatacgtgtggtgtgaagcaaataatctgctataataatttaacctactcccatcatgaaatatagtaagtttaactatatatctggataattatccaaattataagtaaacttgaacttgctatatttaaacganggagtacattacagtgga

SEQ ID NO: 34586 - DNA, 284 bp, Oryza sativa
ccccgccccccccccccccacgggaacaataaaaaggaggatgataactcaaccaacacggctcacggcaaaacctccggacttttcccggcagaacagtctggcatgcacggacaatactgataattatttggttacagtcccccccccccccccccggccctgaatgaaaacaggtgggaggggttgatggcataagctgcacgggcagaacgcgtgcagaccccgggcggacatgatactctcggcaggaatccgcagaaacacggctcgtgtcaacagcc

SEQ ID NO: 34587 - DNA, 407 bp, Oryza sativa
  unsure (1)..(407): unsure at all n locations
gacggctatccctacggcctcggcgatatcgcaggtctgcgttatctttttctcaatgcttacaacctttccggcgaacttccgctatctatgtacaatgtgtcgacgctgatgatgctccaggttggcaataacatgctgcatggcagcatcccttctgacattggtcgcatgcttcccggtatacaagtgtgtggatcggatgttaaccggtttacaggagtcatccctcattctctctccaatctttcaacactcacggatctgtacctctcagacaacaaattcaccggagttgtgccgtccaacttgaggaggttgcaatatcttcagtattgtgatttggtaggaaatcactngaggcacataacaccaagggctgngaattttcacttcactggtcaact

SEQ ID NO: 34588 - DNA, 423 bp, Oryza sativa
  unsure (1)..(423): unsure at all n locations
agcttgggcaatctctgtaagcaatgccatacaattgttctgacagatgatccaatccanacagattgatctagaaacttaananaacagaatattctctgttatagggcttgatattgcaacaatctggttntagaatcaaaaggatctgaattcaagatccctgcaaggatcaaagttttatttgggtgggttatcctttgtgaggtccttttgcattctgtgaatcatctttctctcttctttttaactcatataatctgcctgccatacctaacagacatccaaactaggagtaatcctgagcttcagttttgaagaagtgagggtaaaatcgtacgggtaaaatcacaattgcaatcaaaactaggggtaagaacacaattgcctcattattatttctatccggcatcgtcctgtact

SEQ ID NO: 34589 - DNA, 402 bp, Oryza sativa
  unsure (1)..(402): unsure at all n locations
tatctttcctcttgtgctgtaactatacaatattttttgaaggcgatttggttagtttaaaatacacacatggaagctttactaactcaccatttcaagaacgaattaatgaaaggtgaagcagctagggcataaagcacgcacatattcttcagatccacgctctcaagttaatccaacaaaaccacatcctaagctcagaaactgaataagcctataagcctataccatggtggaatctgaaaatcgggaatattaaaaaagagagtagcgcacgagatttaacagtagatagatgtaaagacaaggattagggtcagaccttctcgattagaagaagtaccgttcacctgtttgaggattatatctgtcacgtgtagtatnaatctaacgatctggata

SEQ ID NO: 34590 - DNA, 439 bp, Oryza sativa
  unsure (1)..(439): unsure at all n locations
taagctggaaccggcgttaggcataatgggttgtggtatctggatagaagagggacggacaaagcactatgtaatgctttgttagctagcacaagtgaagaggaggctaaattgattctaaaacattgtcaattgggacatatgtcctttgatactatgtctaagggatttcctgatgagatgagtaaggtggacaaaagcaaattaatgtgtgatgcatgcgagtatggaaaacatacacgaaccacatacataagcagaggacttcgaagcattttgccatttgtgttgttcactctgatgtatggacttctcctattgcttcngtaagtggagcaaagtactttgtcacctttattgattgccactcacgaatgacttggatatatctcatgagacacaagagtgaagtattgaaatgtttcaagaatttctatgc

SEQ ID NO: 34591 - DNA, 348 bp, Oryza sativa
  unsure (1)..(348): unsure at all n locations
aacaacataatactgaatgcggcacatcctaatactacgaatctgaacatacatatgttcagatttattgtactggaatatgtcacatcanaatttagattctgtnttttaggaccgagtgaatactatttaagttttactaccacanactccttttgtttactaaaagacggatagcattcctaactttgcgntacataaatatgaatttgacccatctagactcttaataaatttntattagttaaactcaactcggccacaatagctagtgacagatgatattctatatagcgcttaatcataataccattagcatatatcataattatattgtattcataaaca

SEQ ID NO: 34592 - DNA, 486 bp, Oryza sativa
  unsure (1)..(486): unsure at all n locations
agcttaattatccaatgatcgtcaactaagtatggcacttatggttgtgaattttcatacgggtatttccaaccaagatctggtgccggagatctttctgatggtagagtcattggcatgttcctccattggaaatgcagtggaccacttaagaattcctgatctctttcagacatcaatcacattgttatattctggagacctaacctgatgttacagagttggcaaatgggttcgctagacccagattntgtgcagccgcatgtgctcagtcctcgtagcccttnttgtaagaaccctaacgccaaatagctcgctactggctatggtacgtatgatgcactggcttactcatttgctctaagacaagatccanaagtacagnggctttgtctttctcttcaactntttgcaggatgatctatnntagtagcaccgcggcctagaaatcatgttaagggatgaattcttgtcccattgagaata

SEQ ID NO: 34593 - DNA, 318 bp, Oryza sativa
  unsure (1)..(318): unsure at all n locations
ctcttggagcctatgttctattctataatntcataaactggaaaattgcaacatgtattggatcatgatgttagcttcccttaaaatgtgcaattagatagctctcgcaagtcgcaaccacaacaaatgaaaataaaaacatacagtaacttccaatcaatctcttgcccaatcaggcaattaatcttatctcacacgatgaggaactatttggtatgactcccagaagttagctnttgccagtaaatactaaattctcatattggccaaatagagcacaatgcangctgaagaattacctctataggtacatgaata

SEQ ID NO: 34594 - DNA, 176 bp, Oryza sativa
agcatacttagggatgtgcaatgcgtcaccggttgcatggccgccctaagtctgttcatatcgatgctgggacagaaagcgttacccttatttaagcttcttagacgctacggactgtttacctggacggaggaagccgaaaatgccctcacccagatgaaggcgtatctaagctc

SEQ ID NO: 34595 - DNA, 399 bp, Oryza sativa
  unsure (1)..(399): unsure at all n locations
agcttcatcaccttccttgctcacacgttcttgctgctgccggtgattgtggcatatctcccaatgtgtacgtctcaaattatttcaggaaagaagcaatctttcatacatggagtgaggaaatatatgggttcgggatctcaggatcttacacaacgctgagtgcccaagttttttatattcctgatccatctaagttaaggatgaaaaagggtcgacgccaaactagacgcatcaganatgatatggatgagtcagaagcaggtgggaggactttacgttgcagcaagtgtgatctgcgcggccatacttacaagaaatgcccgaaaaatgcagaagttccaagcggcgcagatgctagtccatctggacaggcaagtgatggtaggcgaccacctg

SEQ ID NO: 34596 - DNA, 411 bp, Oryza sativa
  unsure (1)..(411): unsure at all n locations
tgataggattgacccctgtatgcggagtaagcttggagattagcgtgctattgctgcatcagattggtgatgttggtaaactgtgcatcagcatttcactgccattcttgcggttgagctatgtgtccttccagggtgtgctagatttttcctgcttgcggntcaagggtgtccatccttctagtgatctcacccaagtcccatcgagaggaagtcgaacgctaccagttggagaatggaggcatgccgcttgaactanaagaacaggagttcatgtttccccactacacatcctgaggtgcttgccactggttttctgtcacaatcttgatttcgtttacggattataaattatttaatacattattaatagaattatattaaatgatccttaaatttcagtgagtaaaa

SEQ ID NO: 34597 - DNA, 499 bp, Oryza sativa
  unsure (1)..(499): unsure at all n locations
gacccggatcttaagcacctgggctgcagctaggggttgattgattntcgagatctaaacaaggctacccctaaggatgaatacccgataccgatttccaatcaattggttgatgctactttagggcataagattatggcagaagaggatattcataagacagcttttagatgtcctagtgcaatcggcttgtacgagtgggttgtgatgacttttggtttgaagagcgctggggccacatatcaaagagctatgaattatatctttcatgatccaatcagcttgttggttgaaatttacattgatggtgtggtatttaagtcaaaagagattgataaccatatagccaatttgaggaaagttttttaaaggacaagtaaatacggtttgaagatgaatcccacgaactatgctttcggtgtatcggctgggcagttnttgngttttctttttcatgaggngggaatngaggtgacccagagaagcaataatgtaatca

SEQ ID NO: 34598 - DNA, 456 bp, Oryza sativa
ttcagaagagatgggttctaagctgaactttatttctgcttattattcgcagacagacggacaaaccgatagggtgaattaaaatttggaagacatgttgagagcttgtgctttagatttccggcgaagttgggattagaatctaccttatgcagaattctcgtacaacaacagttatcaagctagtcttcagatggcttcttacgaagcactgtatggtcggaagtgccgcactccgcttttgtgggatcaaacgggagaacgtcaggttttcgggacggatatcctaagggaagcagaagaaaaggtgaaaatcattcaagatagattgcgtgtggtccagtcgcgtcataagagttatgccgacaatcgccgcacagatttgagttttgaagaccgggattatgtgtatcgtcgtgcacgcctcttcaggagtcatcgttccacacaaggaaa

SEQ ID NO: 34599 - DNA, 414 bp, Oryza sativa
  unsure (1)..(414): unsure at all n locations
agcttgttnttcgacagattcttatctgatttattttattataccgcaacttcctatgaatatgaggttcatagacactggagacaaattatcactcggtatgatgctcctctctatatggggaggctcacttgactctcatactagggctgttggctgagaaggatatggataaattgcgctacgtagcgagacttaccatgacggactaccgccccgtgtacatgtaaacgcatccacattttggccgtgagaggcacccaacctaccgctctagcatgatggggacagatttgaacaaacttcaaccccgttgatgctccgtcaccacattgacttgtttgcctgacttagatgagcacactgatcgacatccagcgcccgcgcccatctagcaaggtaatccatcttctg

SEQ ID NO: 34600 - DNA, 223 bp, Oryza sativa
ctgtgcgcagaagagaattatttattcgagagtccggtttcgcgcgaagagcacaagcccccagctcaatgaagacagttcaccggctctgcctgcagaacgtccctttccgacctcagctacaacttgcgtgctataagaccccgccggggatgctattgcatcaaccgcgctgcgagcatcatggtttacttgactattgtcgtcttaaggaaatattttt

SEQ ID NO: 34601 - DNA, 464 bp, Oryza sativa
  unsure (1)..(464): unsure at all n locations
agcttgtaaagacttgacaaaggttggttattaccttggcgtaaatatggtccgatcagatggtcacaactgttgatccaagctcaacatttgaccccgagttggatagaacaaggcaaaggtataatgtaactaagaatggttttttttgtcttttcctgatattggagtttggtgcatccgggttgctagatagacgtcgtactattggcttgatttgaaccatgtgcaaatcactcaatctcaaatgtatgatcattttccctacgcatgcaatgtaaagatattgttctagttgtagtgnggaatctgagttgaatcttggtaactttgagactcaactagaactcttgacatgcatgtagttagaagtggttagatgngtatcatgtatgggcttgatatctttgttaccccgaattctcgttgaagttggtttcgtggacaaagaaataaatagtcat

SEQ ID NO: 34602 - DNA, 262 bp, Oryza sativa
tgtctcgctctcataccttctgttagtggcaagttttacataattctaaaccgcgcctccattgcctcttagacagtactatggatggaaatcttttaactattgagacaatatatatgctttgtgcaagactcgatatgatatcttaaggctgtactattttgggtgcattctgctttactcaatcaatatgcatgatgcattgtattaactaagtgcacaattctctactgacagctgcttgcatagtactcgaacctgc

SEQ ID NO: 34603 - DNA, 472 bp, Oryza sativa
  unsure (1)..(472): unsure at all n locations
agcttgaagtatcatcggaggcatcaaaatcttgtagagctcaggcatatgcatatccacttagcatgtatttggtttaagggttgagatggatcggattgggttgaacttatgtttcagcatatttgactagagaacatgtgggatgggatggtctctgatagggaatattcctctggtgaaccaatccaacccattattttttcttgctgacatgttgaccatctcttagcatgtgtttggtttaagggttgggatggatcggattgtgttgaacctatttttcagtgtgtttggttggaggacagatggaacatgatgattgctaaaagggaatattccactaagatctgagttcatcttgttcctcnaaaccggcaaaccaatccaaacctttnttttctcttgctgacatgcgggccatctcttaanaagtacgatcacnctatcccatatgccaaacgaatagata

SEQ ID NO: 34604 - DNA, 350 bp, Oryza sativa
  unsure (1)..(350): unsure at all n locations
atttatgccgacaatgatgttattatggcagaaagagctgacctttccaaagcaggtccaaccacaataaaaccatatttaatccttcttgtaggatatctatatctcatgaatangaacttttaacaaaagtcatgttgaccatttgatgtgagttgcgtctgtggattcatccaaatcatggcatagacatgtttctcctctcccttcttttttgggattttcactgatcttcatcttggtgatcagacattttgttgttacattactattttctgagtcttgttagaataccctggagaattgctgatgaatatgtctattactatttacataactgaattttagtc

SEQ ID NO: 34605 - DNA, 416 bp, Oryza sativa
  unsure (1)..(416): unsure at all n locations
ccatccctacatacgaagccacgagcacgcaaacagaggtgacgacaatgacggagaatgagaagcagcacatgatggcacacttgtgtccctcccgccacctccctacaccacagctgatgccacagcacccgctgcctcttccgctggtggccaccccagtagctccgtgtgatgcgaatgaacgaaggagcgacgcccgacgtccctcagacgttgcacgcgtaacgtcagacgatccactttcaaatatcatatgcatcacatgtctatatcctccattctaaanagaattaacttctaaagttgaattggataggcatcactccacgttcattcttaggctgagattgtttgttgtatttctcaactcaccccctaattttcacgcgcacgcttttagactactattttta

SEQ ID NO: 34606 - DNA, 290 bp, Oryza sativa
  unsure (1)..(290): unsure at all n locations
agctttcgagagcttagaaattcccaggtcacatatttcgtgcattngaatttattttttctatggatgctacttctgtgctcctgagcttgaaaaatatatcaataaataaaataagaattaaaaaggtgcacatctctctcctctctctcctctacactggagaggagagagataaaaaaatttacaattcacatatttcgtccatttgaagttatctcttttatgggtggntcttgtgtgctcctaagcattaaaaaatatccacaaataaaagaataatataaaaa

SEQ ID NO: 34607 - DNA, 501 bp, Oryza sativa
  unsure (1)..(501): unsure at all n locations
ggaccctaagtcacctgcngcatgcaagctnggaaagaagggaaatattggttcatttctgacttgtatacttcttgccttacaggaggtaattgattgtatattnttctgatcctttaatgtagataggaagctaaaatgtatactgccgacagcacactcctaattagactcttgtgtgttattccctttgaaacgttactgtagcattatgattatttcctgtggtaagtggtaatgtgcagctgtccttacattttctggaagcagaagtatatctactcaagtaactttttatgttctgaattatagacttggatgtattgaattattgttgtgtgccacaataatgacaatatcatgcaagtttcagaccgtcagttctacggcatagttctggtttaagatgtgtgattttttttggatagctagactagacagattctgaaagtatgtgtatgtgacataaatgccagctgcgagatgaacaatcatgacttg

SEQ ID NO: 34608 - DNA, 443 bp, Oryza sativa
  unsure (1)..(443): unsure at all n locations
actgaagcactctcctgtgcatcacaagaattgctgagattggatttattcaactgtgggcttacaactcctgatttctcacaactctagaaatctttctaaaattaatattattgacttgaaccttggaggaaattcttttaccctagaggtttccttcctattctcgaatgccttgatatacttatacaaattctggtaaccccaatggtttgacttacgccgtacggtgcanggatgtgaagctattgnggtattgctttcgaatccccaatgcagtctcagatctctcacccttgatagatgcaatcttgggcttgctggcatcgtgggcattattcaagcactagcaggtgaggaacgaccactacataaatattaacaaatatgaaatgtttctgcctcaacctcanagtctcgtgctactttcacgaaatgaccga

SEQ ID NO: 34609 - DNA, 421 bp, Oryza sativa
  unsure (1)..(421): unsure at all n locations
agcttatgccattttcaatccaatcgaggattntatgcctgtcatacctgtactcttttttctattagcctttgtttggcaagctgctgtaagttttcgatgaaatctttactactctgtctgccaaattgaatcatgtattcattctaaaaaaattcgaaaaatggataagagccgagaagtcttatattatgaaccttcgattctaaaattcaaattcttctacattgaatgtatagctgcagcaataaatttggatcagcctttctactccctgcatctacgttgagcaggtatctttaggtaaccgcacaatacctaacctaatttattgataagagtgcttattataaatcaattcttgcagattttttcaaaaattgatttttgcattattaggtgtcaaaataaacaaaaccca

SEQ ID NO: 34610 - DNA, 488 bp, Oryza sativa
  unsure (1)..(488): unsure at all n locations
cgcaagcttacagaaccagtaaccatgaagcgtggttaccctaattaccctcgatcaccatgaaaaaaatattctaacacaaagttagtttcgacacagaagtaccaatccactgagattaatccaaggtgatcgtaagtgtggcaagaggctatggatgcatgcctttgtagcctcaagtgaatttttgcatcaaaaatactaaatactcacacacatcttaggatgcaccaatcaactacattttagccgattccacttcggtggaaaataggtactcatcatttatactgtactattgaatttcttccaacaattaanagaaatagaaataaataccttntgagttgcataggctatactctaatcgactctttctttacctcagaactgacaataatcgaatccagtatccactaagcagcatagggtgggtgaagccgtgaaggaaaataatttcttccacctatatcaattcaacactcacg

SEQ ID NO: 34611 - DNA, 393 bp, Oryza sativa
  unsure (1)..(393): unsure at all n locations
atctgatccttggcgatgtgccctttctcaacgatgtgctcagccgcgtcgtgtacggtgagggtgggctcacacacacccagatcgtcgtcctatttggtgggtttggaggtgcagagttagctgaatttgtgaagcaagtcgtgcttgctgattccttccatgcgagcatcaagaacattgtctcgaccgacagcatctccatcaatttgctgctgtgcctaaatcagttatccaagcagtagcacaagtcatgggccagcaaggagcacgccatgaatccnctgcatcatacanngcaccaacaagctacactacatagcaaagctggtcccggcaattctgtgcatgctggctacganngtctcttctcaaatctacccatgggataca

SEQ ID NO: 34612 - DNA, 471 bp, Oryza sativa
  unsure (1)..(471): unsure at all n locations
agctngcacgcagtcggattatacaggttcgggccgctatggagcgtaacaccctactcctgtgtttgggattatggatgagttttacaaagatttcttcactctagaaagcgcactcgcttcctctcttctggagttcaggttttctaggcgtcctcctctgtctcagtgggcagggtcctccttttatagctcaaggggataccatatgcgccgcctctacctaccctctatcggagggggatcccactccacttttcctgggctntaaaccgtgccttctcccggaagctaagcaacaaccggttctcgagtggaaccaggcgccgccctcgcctgacacggnggacagccctgtcattccctcataaatgaacgatgacctgtgacagcccttcctcgagtgacgcttggacgtgacnggtcatacccaccctcactccgccgggtacaagggcgacgtgaggacat

SEQ ID NO: 34613 - DNA, 229 bp, Oryza sativa
  unsure (1)..(229): unsure at all n locations
cacaccatcatcagtctatacacatgcactggctntctatttataggcttgataaactgatatgtaggaagcttcatgacctagctagagacttgtagtactactacattggcaaacttcactgggactagtactactgtaaatcacatcatgcatgtctacacactacactggtctagaaaaattatagagcaaggacttcaaccttgactttagtttcacgagtagt

SEQ ID NO: 34614 - DNA, 418 bp, Oryza sativa
agcttcaccatctacttatagatgtctggcgttttgtgaagtcagcgagtagcaaaataagttgcctggaacatctacagactctgagaagcatagaagccaatagctacatagtgaaaaaccttggatgcttgacaaggatgagaagtgtcggtatcatgaaggtgctggagtcccacaacactgatctatggacctcaatcagcaagatgacatctctgaattcattgtctgttctcgcagaagatcgtgatcgatacgcccttgatctcggcaacttaaaacctttatctcacctggagaagctgatgataagtggcaggctacacaaaggagcaattcctcccgtttttgccagcttcaccaaactgagaagcttgagcctctgcttctctggtcttcatgaagatccgctcgc

SEQ ID NO: 34615 - DNA, 186 bp, Oryza sativa
ctctatgaaatacgaacgaatacttacaccagatgagctgaatttcatggatgtgtcctcatgatacccactactagaattcacaagtatccctagagcctaaaactctatggaacagccaataaactctagggatcgggtttccctagagtgaaccctacggaatggcccctaggaagcattcta

SEQ ID NO: 34616 - DNA, 471 bp, Oryza sativa
  unsure (1)..(471): unsure at all n locations
agcttaacgctctntatctctctaaataaattatatgatcataaccagatactatgaatcaaggcactggagagaaatgacgacataaacatcggagcttcgaatcattgtcggcatctcatccaacggagcaaaagatgctgcccgaattactcatgatcatgacgaattgatgatcatgatctagacaaaaaccgcaccaaatgccatcatccagaacggggaaatgccaatcaacctaaacccatttcctccctccctaaaactagaactaaaccatacacatacttggaccccgttatccatccaacccagacattgtgatcccgtagatcccgcatgctaaatcctccccgcanaatcaaccccaaaaacccgcatgggaaccctcctcaaccacaatccccacaaccaaccgcaccatattccaccgccgaggaccgaaatccacgccgccagcagcactagcga

SEQ ID NO: 34617 - DNA, 197 bp, Oryza sativa
ccatttttgattaggagagcaactaaggatcgcgaatagttcctctatggtggtcctaaaacctgtacttttctgtgacatggagaaagctatctttattctcgcgtgacctagttcgacgccagaacactatgctgattgggacgttggttctcacgacccaagcactatgaaacacaaacttctgtgctataccc

SEQ ID NO: 34618 - DNA, 468 bp, Oryza sativa
  unsure (1)..(468): unsure at all n locations
agcttcaaactntgggaagaatagttgtggtttggagttnggaccatgcggggtgctgattctcttgggaagataaaatccttgttgaatagataatagcctttcttgaactcctttgcagaagacatgttccatgattcgtgcctgccttttcaatattcatagattcaggaggtaaaaaggtttttgtgaaggttctgtagtcgtcctcttgtgtttaatcttgttttctgaaatcatgaagtcttccgcgtcttgttctgatccatgagtatgtactgaggtttatgggtggagtgagggcgattcgtactatttctaatatgtgcatcaaactgtaggcgctagagtagtcgattgctatggttttctgttcctagttgatcattgttccaagtatagaacgtttgatgttaaatggatgttgcaaatacagtgcttattgattggattgccaatttatcatcg

SEQ ID NO: 34619 - DNA, 431 bp, Oryza sativa
  unsure (1)..(431): unsure at all n locations
ctcacaccatattattgaggcaactttcatagcatttgctagagcccttcgacaagcaacagaatatgacttgcgccgacgcggcactgtccccaggttcgttttagcttattgcaaatagccgttaggaaattctatggtgtgcccaactacactgttgatgcctgattcaaaaacttcacacctgctaagcatantggttatctctgacctttgctgatattgaaacattaacgtatctttcttgacttgatcgcagctcaaaaggtgtgttgtcaaggtcatagtgttgcaggattggaaaacaaggggtgcatgctactgttccttgtagattgcaatattcaaaggaaacaaatggaatggcctctacagcatctcgagtcctacttaaccctgggaatcnntcgtggttgccataacagaacatg

SEQ ID NO: 34620 - DNA, 429 bp, Oryza sativa
gcaagcttgcctccattcaagaactctctttctgttgtctttgacagtataaaatactacatacactttgacgctaatgttgctgattggtgttggtttgcagggatggatcgtgtgcaacgactgcagggacacgacgcaggtgtacgcgagggtggcagggcacaagtgctgccattgccagtctcacaacacctgcagggtggctgccccggtgctccctgcttaattaaattgagtaaatttcatataaaattcagctgcagatgctgtcagcaccgcagcatcatattattgatttatacttagtattcagtagtattggctgggttattttaagtagccaattaagtgtattttcagtccaacatgaactgcatgggtcacatcttgtatgcgaattatacacgttttattgtaacaaagcag

SEQ ID NO: 34621 - DNA, 265 bp, Oryza sativa
actcagctacgagcgactaaggcgagctctctgtttatttataggacggatatccttacagtaggctatttttggaccactgtcaggatctgcttttacgcagaaagcctttccgtattaaaagtgtagtacacaagccatagtgattctcgtgattcccaaataatactcgtaaatcgaagacaacaatgtcatggctttattgatggaacagacaggttactgtccataacgaagcccgactactgaatgcgaacggtccaat

SEQ ID NO: 34622 - DNA, 431 bp, Oryza sativa
  unsure (1)..(431): unsure at all n locations
cgctgatctggcgacacatacttatcagaatcatcagtagtaggtaaccaggttctttgctccctgacacccatgcatcatctgctgctgagcattgcacctaaatcacatccctttacaatagtgttctgtaaattttggccacaagcagctcaaacttgcatcactctctctacatatattttactgaagagttcattccaaactgcagtgctggccacttgtatatggtcccaaataccaatcgttcacttcacttgaaccaaaaaaacgccaaagatatatgctacttngcagtgtcatttcagagtgcaagcctactggctaccagtaaccaggacccaaaagatggcgaaaatgattttaatnttgggctgganaacaacaacctagctacctgattggtgctgactcggacaagctcacacttg

SEQ ID NO: 34623 - DNA, 436 bp, Oryza sativa
  unsure (1)..(436): unsure at all n locations
agctcgcagatcattangtcatgattgctatttatgtagcatanacgtataagcctaagatacttatgtgtgttgctaccacctagcactaccagttataactacaataatcaaggacagttcactcagttcatcaccccaatagttcgttaactcttcaggcactcaacccattgtgccaagataaataagaatgcttaattttttagtttaattatgacaacattatgttcagtagtaaagaaaatgagcaaggaaaacctgtcatgctgaaacaaggccaaatgattataatttcaagggaagcaccagtaaagtaaccacaacttagaaattgttaaatgtatattaagcaacatatgaacacaaacgtactggcagacaaaatcaatgtatacctccaccataagaacaccaggcattatatgtctctccg

SEQ ID NO: 34624 - DNA, 288 bp, Oryza sativa
  unsure (1)..(288): unsure at all n locations
tctatcgagacatattaaattgtttgacgctgatctgatcacagaagcgattgatgcatgccaggtgtggcgacgtggagagcccaacacggaaccaccaatgatggtgggcgcacgcagagcttgctgtgctgcgtgctgctgctgcgtatgcgtgccttctgngatacaccgtgtgatagatctggcagccccatccgacctctcgccctataaatngngctaccggccggcgtcttttgttcatcacctccacctcgcagacagaaccagtacttttaattcacc

SEQ ID NO: 34625 - DNA, 463 bp, Oryza sativa
  unsure (1)..(463): unsure at all n locations
agcttcttaattgccccagcttctggtgtatttgacaccgccgtcggcttcagcatcctcttcatggcggccatctccgacgcctgcgagatgcacatcttcctcagggcctgtttcaggctcacagactcaacaatctccgagctcgatatcggcgacttcccgagcgcgataagcctcctatccgtgctcgtctgcccagaagcccgtgcggatgtgcgcacattaatcgatctaatgagcctatcgagatcatcctcgacggagcacgaccgcgctccatgctcctgacccaccggcttcactctcaccctcaggtgggtgacaccaccaggacgggcatccttcgactcatccaccaattcgactatctctgagcaacctgaagaacccatctttctcanaagccctctgctgccttcggagctgcgcctagtagagcattaactcatgctggctcaca

SEQ ID NO: 34626 - DNA, 475 bp, Oryza sativa
  unsure (1)..(475): unsure at all n locations
agctntagatgactattntgcaccatntaactatagtttgtgcaatcttcgatttattgatgagtcttttgatattaacaattcttaatttgaaattgctcaatatcttttgaaaagtgttgatatgtaaatttgggagatgaaagtcactttgattcaaaagtctggtgatatgtcttatttgagttttgaattctctttacactaaactgaaaactcataaaatgaatattagttacctcaagactgatttgaaatctactcctttggttccttcttcgagctctcattgatgcttcttcttcatcggtttttacgagttttgagtgccatgtatgatgatcaatttgagcaactaggtgaggaaaccttggtttgattactaacaagttctcttgagctctgaaaaattcgaagaacatgaagcgaggttgactagttcggtgctttgagtgtggagttcaaccacatcaag

SEQ ID NO: 34627 - DNA, 363 bp, Oryza sativa
  unsure (1)..(363): unsure at all n locations
tctgcaatgtggaaccgaagaaatgaacacccttgacagaactaacattgngatctttatattctttctgtggtgaattcagctttggactttaaacaaaatctaaacgcccaatacctatttgatgaaatattgtgcgtccagttctatggcatgtcctccttccaaactgcactcatttatgtcactcataaatntattcctgtttcttaatagtgacgtattccctcctttcctaaataatttgacgccgtgaaattttaaaacatgttttgaccgtcgtcttatacaaattttcttcgaaatgtgtaatactatatgtatacctaacagtatatttaacaattaattcaatgatatgaa

SEQ ID NO: 34628 - DNA, 411 bp, Oryza sativa
  unsure (1)..(411): unsure at all n locations
agcttcttatgataattagcctcggtgttatctcttttgtccagaggaataataatacttactatgacctacatacatttacatcggttgatgatcgaacaaagagtgtgctgcaaagagcctttntctcattgggtgcttgcatcaatgcttttgtgcattgtcgacctgttctatgcatagatggaacttttatgacaggtaaataccgaggtcagatattgacagcaattgggtgtgatgggaacaaccaggttctacctatggcttttgcatttgtagagagtgagaacactgatagctggtactggttcctagagagagtgcacattgcagcggtgcgtatgaggcccaacgattgccttatacatgatcgatatgcgggtatgttaccggctatatactacttgc

SEQ ID NO: 34629 - DNA, 431 bp, Oryza sativa
tgtcggaatggttgctgcttcactatagagttttaaggaactaatgtccagagctcacgtgttataggtgcagtaaagtcggatgaaatcatgaatatctgtttcggtctagacacttttcttttaagaatggtcaccgggggcgaaatgcccacctgaatatgttacttcaaacaatcttacacagggcaggcttagcttatgcaagcgtaggtggccctggaggataatatggaagaatacacgggatatacaaagaagagaatacaaacgtatcacaacctccctcacctaacacagagaggcacaatagatagaagacagaagctttgacgtttgccacctgcaaaatcacccaacaaaattccaaatcaagcaaatgctataacccttgttcgacatcatccacttcacatgcagtctggaaacac

SEQ ID NO: 34630 - DNA, 479 bp, Oryza sativa
  unsure (1)..(479): unsure at all n locations
agctntgtaaccttgcagctaccatggtgaacattatgaagacgagacaaaatttataaaaataatacatttttaaacttaaaattcttttcggacccctcccattacaatacatcgacggtaagctcaattacatctatcaaaatttgttcaaaaaacattaggatattttttttgtttatgcagttgccatcataaatattaggaaaacatattggacaaaatttataaaaaaaaaatttctgtataaatttcttataaacgtatcggacacctaccattaattacagcacaagcccgattatcgtgataaccagtagtaagagaagcagggcttgcttgctagctgcacatctgcatgcccttagagcaagtttaatattatagcccactggctaggtctaattatctatagtctatctaatagctaattcataaaatagttgcttactatactattaacatatggtcccacctat

SEQ ID NO: 34631 - DNA, 442 bp, Oryza sativa
  unsure (1)..(442): unsure at all n locations
gacctataaaactcagcttcatgcctaagctgtggtagttcgtgtgctaaatcttttttattatatggataaacattcgaagtattaaaaggtaattaataaccaaacaaattacagattccgcctataaattgagaaacgaatctattaagcctaattaatccgctattaccaaatatttactgtagcaccacattgtcaaatcatggcgtaattaggctcaaaaaattcgtctcgcgaattacatgtaaactgtgcaattggttntttttccgtccacatttaatgcttcgtgcatatgtccaaacatttgatgtgacgaaaaagttagaagtttgaagaataaaatgtttaaatctaaagacggtcttagnttgtgtgtgtgtgtgtgtgaagggaatgccttanatgtgtctagcattaatttcaacctcaagcctga

SEQ ID NO: 34632 - DNA, 479 bp, Oryza sativa
agctggctgatggtctgatggaacaattgctatgtgcagctcatatttagatcatgcgtaagttgtaatatattatctgtattgcaggtatgaaccaaacacgattgatctcgacctgaatgagtacaagtattatttctgcttcccctatttctagatatcttgtaggaattgaatcatttgatgatatctgagatgtacaatgccaggtactggttcaagattttgtcagaccatttgcctgaccttgtggacaaggtatggtgtacttcttgcaataaccttgtataacttacgagataagacaccagagttttctttgacaatatggcttagtgataattatttttttcatgctcccctccctccatatgagtgtgcatgtgtgctgctacctatctcatcctgttcctaaaacaatgtcccattgggtcctcataagttatagctaaatacaagccccaataacatgccaccag

SEQ ID NO: 34633 - DNA, 466 bp, Oryza sativa
  unsure (1)..(466): unsure at all n locations
agctntgacgaatcttaggacgaattgtgtttgctcacagcatgattagaaccattcgtgtttagggcaaagttttgaccttgctctgtcgctggcgtttgtctttttgtgattcttttagtaacctttaactcaagtctgattctaaactagcaggggagaaacctactgggttgttgttgttgctgcaatcatattcttcatctcaacgaattgcaactgattgttgctgccaaatcattttttagctgatccacccaaggctgaggaagctgttagatggttttatccagctgcggctgctggcaatgctcgtgctcaatacaacctgngcctttgcttgcagaatgggaaaggaatcaagcgtaaccagcgggaagctgtaagatgcctcctcttgttacatttacatctgcatatcgcanattttccccgaaacagaaatacgcagttactatagatgtat

SEQ ID NO: 34634 - DNA, 356 bp, Oryza sativa
cttctcagttgtggaaacgctgcaaatgaagaaactacacatgggatgtgcaatacatgatgctcgtgccgatctgtcatccattatgccagatcttgaaactcttgtcattgaatcagggaatgaggtatattttctctaagagatgacgtgttgtaatatagcaatatatacggattactttagtacagcgatatatacagattacattagtataaccatatatatggatgacattatggaatgttatatacagattacattaatgatacctggtgtataatcaatctgatacctgccatattcagtgtgcaagtggttgatgcacacatgctatctaccagattcatgtacct

SEQ ID NO: 34635 - DNA, 464 bp, Oryza sativa
agcttcatactctattatgcaggtatgttctcttctgtaagcacactaattgaggacaatgttcaacccaaagtgcctaccaagtcattcatcaagaaacaactgaccaaatagtaagcctttattttctcaatgatattcatgagaacactatcaacccaggaaggaaaactaagaacattatctccagaattcatttcttgtggagaactatgttcaaatgaactcatattctttacttgtgcctactctagttctaaaaagggagctattttccgagactagtcttgtgctgaaatcccacgcttaactatttccaagatgggaggtctatagctcattcattttgctcttctgtttgcaaccactaagaaaggtactcttatttcccgtgaatgatgaatattatttgataatacatgctctgatagcctacatgtatatgctcataatcctacaatatt

SEQ ID NO: 34636 - DNA, 318 bp, Oryza sativa
gaacgcacattttttgtgatgttcttgtgtgctactaaccatggcaggattgcgcacggagaaacgagatgatcatgctcaacatcaacatcatcaccatcaacgagatatagcgacttcttcacgcatcacatatgaggtacatggtaatgatcttgcaagggtagaatctaaattgccagcttttgatggtgagtatgattctgccgcttacgataattgggagctagcagtagacaaacaatgtgatgagtatgattttactaatgctcaaatgattaatgctgctagaaacaagtgtaccggttctgcatcttt

SEQ ID NO: 34637 - DNA, 464 bp, Oryza sativa
  unsure (1)..(464): unsure at all n locations
agcttccaccanactgcagcggggctgaaacattgaacatggcgcgctcccttgccactgcccgccatgcaggagagaggcttctgagatgctggggcggtgggacaggatgggttgtggaggacacaaaggacaagatagcaaagcttctggaggagtacgagagcggaggcgatgtangagaagcttgcaactgcatccgcgagctgcacatgccgttcttcaatcatgaggtggtcaagaaggcgcttgtcatggcaatggaaaagaagaacgacaggatcctcggtctgctgcaggagtgctttggtgaagggatcatcaccatcaaccagatgaccaaggggttctcaagggtgagggatgggcttgatgatctggctctcgatattcctgatgccagggagaagttcctgtcctatgtggagcatgccaagaagagcggatggcttctaccctcattc

SEQ ID NO: 34638 - DNA, 327 bp, Oryza sativa
tctcggggttttggtctctggccgaagcatctatgtctacctttagaagataccagctatagagcggatgcgcccccccagcaagcttagggatgtgcaatgcgtcaccggttgcatggccgccctaagtcggttcatatcgaggctgggagagaaggcgctacccttatttaagctcctcaaacgcttcgggccgtttacttggacggaggaagctgaacgtgccctcactcagttgaaggcgtatctcagctctcccccagttctggtcgccccggagccaaatgaacccttgctactctacttagcggcgaccccgcaagtggt

SEQ ID NO: 34639 - DNA, 450 bp, Oryza sativa
gcaagcttgagctgaattattacaggctctattgtattatattgtatactcaaataggaagagagttgagtacaaggagttggaagaatttccgagttgtcgggaaacttctcctatttcttttattctggttattaccctgaattccatataatattcttcttgagtaatttagaattatcttgtgagaattaccttttggttagttcctaattagcataccggaatattgttcgctatactcaacttaaatatagtgattgctttggtgagttattaattctaaagcagatattaattgcatagacgtgatgtttacgtaatattattcaataatggctgcgtatcccacaatacgttgaggtgggtgtagaggtggtgacagtcctcgagagcacttaagtgctccctgtccgggtacgtagtagagcgacatctatgaacaacggg

SEQ ID NO: 34640 - DNA, 466 bp, Oryza sativa
  unsure (1)..(466): unsure at all n locations
agcttgtaaagaagctatntagcttagaggtttgtacactgagctttgtggagttacgtcttacattaatatattntgtgatagtcaaagtgcaatatgccttacaaaggatcaaatgttccatgagagaacaaagcacattgatgtgagatatcactttattcgaggtgtgattgctgaagatgatgtcaaggtatgcaagataagtactcatgataacccagctgatatgatgacaaagacaattcctgctactaagtttgagttttgctcaagcttggttggtgttacagtatagtcctagagactatttggcgcgcggtgattntacctacatgaggtatttttggtgattgatgtttttatgctacaagaggaaattcgtctcaaggtggagatggtaaatatgtgatccaaattttgggcccacaatatattcggattagtttcatagtaggagtttcta

SEQ ID NO: 34641 - DNA, 437 bp, Oryza sativa
  unsure (1)..(437): unsure at all n locations
tatttaaagttggcatctcttcagctgccacttcaaactcagcaatgaattgttccactataagaccaatatcagcacgaggtcgatcgttctttttcttcttcttcccacccttaaagagccgctcaatttcatcatcctcttccccttcctctgcctatgataaagagaattagtttgcaatgtagaatggtagccacaagacaaaaaataaagcaggacagacaaaatattatgcaattctagtgtaaaccgactattntgaatnggaaatctatgagacnagcaggcattagagcttcatcaacaaggatattataccctatgattcctgcagggtaattatgctatgtaaaacttctggaagatgcanatatcagcatgtgtgtaactaaatactagttgagaaagtcataaccttacctactatgatatgg

SEQ ID NO: 34642 - DNA, 452 bp, Oryza sativa
  unsure (1)..(452): unsure at all n locations
agcttattcacattaaaattctgaatgttatgggtttatgagcctaagatcctggaagggtgtcatgcggggcacagtggttactgatgatgtgagtgtcagtttcttttctttttcccccctctaatatataggtgtacataaccagttcaagcttacaaatattacataagacatgccacaaccgatctaaaaccatgaccaagaagaaacctgatctcctaacgcaagccaacagcctaagctccttagctccggctgtgctccacagggcagcctcctctgatatagccctaataatagtactgacactaggggactctccatcagaaacacacccattgcggggtcttctgatcagttagaggcccttcgtttggtgcttgcaaccaacttcaatgaatgtcgccaccaggtanggaacccactggtaccgtagtgacctctcttca

SEQ ID NO: 34643 - DNA, 298 bp, Oryza sativa
ctatgatatcagaaacaccaattatggaatcttggtgtaagaacggactaactatgtgctaatcatgttcgatagacataaataattagtcttggacatttagagtcccactaatctcgtagtttcacaacattagtatccttaaaatgaagattgagatgttagtagcacagcagcatcatgttgatttatgtagtgcttgattacaatgtttatcaatatgatctatcgatttctacgtttgataatttggatcacataaaatactcttggtatctagcctttgttattatggatg

SEQ ID NO: 34644 - DNA, 383 bp, Oryza sativa
  unsure (1)..(383): unsure at all n locations
agcttccgcgagtttcagcacaaactacaatttctatcgtgttgnatagctcaacggagcgcgtcgtgagctcaatgcactattggaaatcacacctttcttttatttcttttatttatttgatctttttctctaatcagaacacgaaaataggcacacctccaagttacagctcaattggagtagatatgtggcctatggattttctgaaccactataacaagtgcacgaacttggagctcaacagacaatttgcaagccaaatttccggattttggattcccaaaccctccgaagtgggagaaatggatgtaaaaatttttctttaacccaaagttaaaattgcctgatccaatccgatgcacaagtatgctgctgatgtt

SEQ ID NO: 34645 - DNA, 339 bp, Oryza sativa
  unsure (1)..(339): unsure at all n locations
atgtgcactcttgagattgcatactttattttacatgtcatcactcaaagcacataataaagcattagtagcttgagcatcgagatgtacgcatttctcttgcccacttgttggagcacggtcattcaaagcatgataaaagcccacatctacaatccaccatatttttgggctcatggccttaaaacaagaaaacatgtggattatccattgtgcataatatgtgccatcaaacataggaggggcaccaaccgngtgtactatatctctagatgccatccttatctctcggaacggttaattccacagaatgagagaccaagctctaataccacttgt

SEQ ID NO: 34646 - DNA, 357 bp, Oryza sativa
  unsure (1)..(357): unsure at all n locations
ttgaactagctgacgntggaaggttttgaaaaaaaaatttttattctttgcctagcacgcatactacataaaacaacgggaaggggggcattactaacacaggtctgttcaaactgatgcaaagaagtaatcgcactttaataccattgggagtcgttggatccaactgttacacagtcgacagtggtatgtgggtaaccaaaaagttggtaagccggctagtgtgctagaaacgccccgagaaagggagtataacctgggacacccatgggcgtgaaggaagcccatgtaaaaaaccacaccctgggtacctcgctgaaaaaatagaaagaaaaataggaagttatctcgcgcgag

SEQ ID NO: 34647 - DNA, 340 bp, Oryza sativa
  unsure (1)..(340): unsure at all n locations
agcttgattcccaccgaacacctcgctcgcactaaaatacttttctaagcattggacccagtcccctggctgaactcaaaaaggggggccttacagccttccgctagagaggatcaccccttgacagttgggcctcggccaacctcacctgggccggatccgtatcattaatgatgaggacatccttcactattacccgctggcatatacacaacaaggggccaagtggtccagttgtagtctggcggctaccgtgtgaacctatgaataatcccaccttgcttagcttacactattggactaatcatttanggagagtgggcctttccctgagtgggtg

SEQ ID NO: 34648 - DNA, 340 bp, Oryza sativa
  unsure (1)..(340): unsure at all n locations
ctcagcttgacttacagcggcactcactcccagcaacctttacttgtttgacgaaaccaacctctctgagatagctccaactgagaagaacttcaactctggtgtgggggacaagagagcaagactgagtactacccactgtactcagcaagtcatatcggaagaggaggtatgatgcangatataaccaaaggaagctacgggttcttttgcataaagcaggcatttcaaagcagtagttgaaagcagtaaaactgctgtagtaattaatcaatattaaccaatcactgtccaacgctacaccacgtttcaaaaggcatgcggcggcgctagtggcgag

SEQ ID NO: 34649 - DNA, 380 bp, Oryza sativa
  unsure (1)..(380): unsure at all n locations
agcttncgcctgcagcttgacatcgccgtcgtcgtcgtcttcgtcggcggcgtcgacgctttcttctttcagctccggcatctgctcgtcatcttcgtcatcgcttctcctcctcctctcttcgtcatcttcaacgccatagctcacgtattggtggtgatcctgatggagcgaggagaaagggtcccaagagacgaagtcccatgtctttgtcggctgcggcggcggcggcgaagccggcatggcattcaccggagcgtacgacgaagggtggaagagctggccgggatccgcgccgaaaaacccgtccaccgtgacggtctcggcgggaacatcattctcctcccaccgctgctccacctccaccaccgggtgcaccg

SEQ ID NO: 34650 - DNA, 387 bp, Oryza sativa
  unsure (1)..(387): unsure at all n locations
tactgctacatggcatatataactcccagtattcaatatcttcttgttttctggaattaattgcacaatcacataggccaaagagctggtgttggcacatgattaatattattttatacacacaaaatataatattttttccatgtaattatttcaaagcctagttgtgcataaaatggcacataaaatcggacattttccataaatttagcaaatgtttttttctaaaaagttatatattcctatgcgcatggcacagattaacaccacacgacatatgtccggttgatcccagtcactgtggcagtctgccagcaggaaataacttatntacaatgtggtttactctgcccaatcataagtaaataaggcagcacccgtacaaaa

SEQ ID NO: 34651 - DNA, 463 bp, Oryza sativa
  unsure (1)..(463): unsure at all n locations
agcttaactnnttgtatatctacaaatatcatcttttgtcaatataattattacacattgggaaccaatacatatacgcagcaccacgtaatattcataaagaatgaaattaacagtgaattttaaattagaacagagttgacttccatttcgtaagtaaactatcctatatccaacaaaaagaatagtgtcccacattccatagatacatatttcataggaacataggatgatatatacttgcatacattctaatatttcttaaaatataatggtctgcaatgttttttgtgagattcagatataatacaatccgactcaacacatcagtaatagcagtgctaaggctccttacatgctgctgaacctcacatagataaaaataggcaaaactgaaggtagaaacaatggattgtcatgtgtgacagcaataattgtaaatcattaatgctttctaaagtct

SEQ ID NO: 34652 - DNA, 368 bp, Oryza sativa
  unsure (1)..(368): unsure at all n locations
ctcaatagagtcatgccaacatgggctaacctcctatgcccaagccaacccaatgaagttattgccacttaacaagctgttcaatttgcttcactagaaatgtaancaccaaattaagatttcatatctaaaacctttgacacaccagacntgtcaagaaggctagaaacaataacttcttatgggaagaaagcacatgacaagccaagatcactaaattgagcaaccgaaagcacattgaatttagagatttaacagagagacttatccattgcaaatcattggagatagcatttacctaactcactaccctttctttgctattggctccaaatgcactttctcttgtctttccttctactcaaatg

SEQ ID NO: 34653 - DNA, 472 bp, Oryza sativa
  unsure (1)..(472): unsure at all n locations
agcttgtggtgggtcaaattgaccgtctctatatcngtgcagggctggccagaggaaagggaggtggtggcgccggaggagaggggagtagtggcacgtcagtcagattcggatcatagagaggtgagggcactcaggacgctaggtataggacatagagaggacagagaagaaagaatagaggagagagcggtgtcatgttggcttaaaattttctagtctcggcctccacctcgtcttgttcttacttaaagtgacgactatacttgctttctttgcagcaatggcctagtttcactctcagttcaatccttgaactggaaatgatattgagtaacattgtcagttcatattggtttggaaaaaaaaaccagacaaccaatagtaatactcttacatcaccgtactagtacggaacaagacatctgtgtcgggaaccttcatctgtatcggagggaggctgcgtcacgga

SEQ ID NO: 34654 - DNA, 315 bp, Oryza sativa
  unsure (1)..(315): unsure at all n locations
tgtacaccttaccagctacacctttcaatccgtctgcaacacacaatattggtggctccatcctaccgtcctctacaataagaggtctgcggcaatttggacgagtcattcttgcaataagaagtctgcngcaccagcccaatagctgacgcccgatccattaattaagggaaatactttctcctttcgtcctanaatataagaatctaggatngaatatgatgttcatagtacaacgcatctggatagactccctgtcatgatacattataatangaaacatctcattgcatcgtacgttattatcattgagac

SEQ ID NO: 34655 - DNA, 454 bp, Oryza sativa
  unsure (1)..(454): unsure at all n locations
agcttcctcagatcaggtcaggtcttaacatcttctgaggaatcgcttgttttttttttcagaatcttctgtcttgaagctgctgattgagttaattgacaccaataatttggcaaggcaaatccattgcaattggtcaaatattcaggcaagttaatgtactcaggttactgaactgtattattatatatgctagcaaacaaggaaaaacatacatgattgcctctaggatttaattgaaagaagaatgcaatgataagtggaagtgcagcaaccaaagcctttcaaatgctgtagtattcgagtttctctaaaccgaaactaatagatgaaaaagttcagaatatcttctgttatgcatatgttcccatagataagttgtttctgaacatagaaggtggttnttctttgctttggtatctcaagaggaagcatagcangaagtagatttaca

SEQ ID NO: 34656 - DNA, 380 bp, Oryza sativa
acgagctcttcacgctgatgatggcttttgtcctccatcacgaacacgtggcgtgttccgcgtatctctattgagctacagccaggcattttcttgcttccagaatctttcattagctttctaacttgtctgacttttgcccatttcttttgagcagcatagagatttgagaccaacgcaagaacgccaacatcgtcaggttgcaattcaaggatattgtctgctatactttctccaaagctccagcttctggtattcagacagcctgaaagtagagcaacccacatggcaacggttggctcagctatcattgatgtgagcaggtcactggcttcttccacaagaccggaacgtgctaatagatcaactagacagacata

SEQ ID NO: 34657 - DNA, 471 bp, Oryza sativa
  unsure (1)..(471): unsure at all n locations
agcttgcaaagttcactgctcagtgtggttatttacattgnttctgaagaacagttgctgcttgaaatttgaagttgattgtcttctttaagctagggaccttttctatctgcttcatggcattgtaccagtcctctgcaagcaggttttttgttctcagaagggaaaaaagaaaatcaaaatcacgtgtgtagtagatatatagaagtacgagaaaatacatataaaggttcgaatcttttaattccattgtcgattggaataattttgttggacattagtggaggagggtctgtttatttgagctgtgaagcttttggcttcagcaccagtaattgaaaacataaaagtattaccgtaaaataattntntggtaaattttatgtaaattaacccgggtattatggttcttactgcgtagaaccacagtatcgcgtgcctgngcttaaggcaataccctannattacctt

SEQ ID NO: 34658 - DNA, 288 bp, Oryza sativa
  unsure (1)..(288): unsure at all n locations
cagctgcgtcttgcatctccgctgcttcaaggtctagaggttcagtatccatgttgggatccggaacaccgtgaaattcaacttgttctgtgccatccttggaacccatcctggtctctaaacacatggcatgtgctgcttgttcttctgctacgccaactatatcttttctgggcctgaacacacccacaggtagtgttttccttganaggctgagacanataccaagaaacctactaaatgattgagatcatgagaaaaatactgcaacgtgtattagtaatcacg

SEQ ID NO: 34659 - DNA, 461 bp, Oryza sativa
  unsure (1)..(461): unsure at all n locations
cttgactcattagtatcttattttagtattacatacgtatagtatccatctagaagtcataatcatgaaataatcacggatatccaaacaaacaacctgaaaccgaaactgacacaaagttagccggtcagaccgcgggctgcgtcggtccgaccgcttgatcaccgctggtctgtccggcatacacagcccggtctgaccggtcacataaaatgatagaatcctgcgatcacctgtggatccaatcatcttcaaaaccacttcgtgaataaattctaaataacanaaccaataatctccgatgcccaattgttcatcacagaataataatcaaaaacaccttngattntacaccttccaccttccctcntcccccatcctcttctccaaggcagcggtgctgagtccaacgtgctattgtcttagccgtctccaccactactagagatgtcgcctctaac

SEQ ID NO: 34660 - DNA, 380 bp, Oryza sativa
  unsure (1)..(380): unsure at all n locations
aagtgtatgggtttggagacaaaagatttatacaggttcaggccttcttataaaagaagtaataccctactcctgtccggggatgaatccgccgagtgtattattgattgtgtgattcgggaaaaaatcagcatatgcccctagaggcgcccgggacccccttatatatgggaaggagtccgggatacaaaagataatctatattcctaacggaatatgaagatacaggtaaaatacagtcgtaaccgactaaatctcagggtgtttccttgatacacaagttaagaaacanacccgagatacnagatagatattctatctacattaagtattccgtacccantccanataccgtcgccgtgtagatatgggatacccat

SEQ ID NO: 34661 - DNA, 171 bp, Oryza sativa
ccacccgggtgggagaatattatacctcgactacatgatgggtggacaaaaaacacatagtagcgggcgacaccataagtgcctcactcaagccccgactttttattccccctccacccacctaaaatgggaaaataccccaagcatggcacaaagatgaccactccgctt

SEQ ID NO: 34662 - DNA, 282 bp, Oryza sativa
  unsure (1)..(282): unsure at all n locations
attaaattgacgatatttggataaatcattttgtgtcattctagatgaaattcaaaattntaaatcactataccttagcatacaaatttcaaatctatcgtgaatatgagatctgaaactgtgccgaacatgaccatcaaatatctatatgagaaagctcccacatctatcaaaagatctctgctaggtgattagaaaaataatattattgtgactattagaatatattaaaaatccaacatgggtcttgggttccttgtngtggttgaaatataattctta

SEQ ID NO: 34663 - DNA, 472 bp, Oryza sativa
  unsure (1)..(472): unsure at all n locations
agctngaggataacgtatggatgtcaaatctatataggttgaagaanaagtgggctattgtctttcgtgactcttttacagctgatatgacctcgactcaaaggagcgaaggtatgaataatgtcttcaagaaaagatttcgtaggaaacttggtctttctgagctccttgtagaatgtgataaggttgctgccagtcttcgtgaaaatgagttggatgcagattttaagtcaagaaactcgagccccgttacttgcatcccaaatttacctatgttgaagaccgcagctgactcatatacaaggaagatgtattcagagtttgaagaggagtttacaaaacaattttcattatcatgtaagttgttgcaaactgaagggtcaatattgacattcatggttatgcccatggaatcagatcangaagcaacagttgtgtataacactgcggatatgaccattacatgttcttg

SEQ ID NO: 34664 - DNA, 453 bp, Oryza sativa
  unsure (1)..(453): unsure at all n locations
ggatgcagtatcaatctcttgctttcaccggcccgtgaatacgcactgagtttcggaagagagagagatttaagtgtcgcataattgggtttcagatagcagtacaagttactacttgacagattggatttaacgtggatacctctctcggtcctacacgggtgcgtggtaaatatgcacaggaacagcccctggcgtggcacgattacagcggagagagtacaacggatcttatcatgattgagagagtaactcaggagactaactaccatgatctatccctcgaagttaggaagctaatcctatcactaaccgtgactagatagaacataatttaacacccccacacaattacaacacacgctacactgtgagatagcgcctgagagcatncatatgatgagcagtgatgactttggtgaaagcatcaacaagtagatcccttgtagagat

SEQ ID NO: 34665 - DNA, 399 bp, Oryza sativa
  unsure (1)..(399): unsure at all n locations
agctnggccggctgaggaaggtcatgcagcatccattggttcatcatgacccggaggagatggagagcttactctgggagtcgtcggtggctggtttggagatggntagcaccgggaatttcagcatggagggtggagctgtgcaaggcattctggagtctgggcgttgatcatcatagcgatcatcttgtgtatacataaagctctgctatttgcaaccattgcttccgcaggaaaggtggctaaaaatgtttcggattttttgttctttttgagaacttattttacaaatgcatccctgacaaaagatattccattaatggacttttttttntttttggagaaaggctgacgcccacctttcattaaaaagcataagagttcatacatcgaacgaca

SEQ ID NO: 34666 - DNA, 200 bp, Oryza sativa
gcttgtttcctggcgtacagtttagaggacccgccacttttttcctttggaccgaaggcaccccctgacctatacagatagacagtattatggctttatatcggaagcactacccactactcggaccagtttactgtgagttgaaggataacctcctggccgatgacagcctgtgccagtcttaccggctatgttttgcg

SEQ ID NO: 34667 - DNA, 321 bp, Oryza sativa
  unsure (1)..(321): unsure at all n locations
tagcagcagaaattgataggatacttagacctggaaaatggttcgtgttgcaagatactgagcaagtgattagaacaatggatccagctcttcgctctgtgcactacacgactgcaattgtgaagcaacaatttcttgtcgctacaaagggcttctggcgcccatacagtgcaggttctgagtcaagatgattcatgcttcgtcttctgttgctggtagtaaaaatcacacaactgatntgattctttaaattctaattacatggattcttcgcatagcatagatgacacannatagccccatatcaacggtgagttcatt

SEQ ID NO: 34668 - DNA, 409 bp, Oryza sativa
  unsure (1)..(409): unsure at all n locations
tctccattanatgggaaaaactcctggccgggtgggtgattgtgtgttttatatgtcacaaagctgaccgcaatgagcatgtttagtgagtctagctatatgggctttgccatgcgttattatactccggacctcatcttaatttcgttttgggaaaatctcaatttccaatttggaacacctgatgatcttttagatctagtactcctactccacaccgaacttgctatggtcgtctcggaggcacggctctcttccgtgacaaagaatagtctatgaacacattgaacagtcaagtctgtcaggcccagctcgccagcgagaacccggacgcgcgcaacgtcgttgtacggaccgaccgcgtcgcgtcgccgtgaagagaatgccatgtgacattcccgcctgtgta

SEQ ID NO: 34669 - DNA, 423 bp, Oryza sativa
  unsure (1)..(423): unsure at all n locations
agctttgacanatagaagttgggttgctgatatccaaggtgggcttttggtccaacttcttgctgagtacctggccatttgggatctagtagaagaggtggtgctgctacaagatgtccaggatcagcatgtttggaagcttactgcagatggcgtttacacttgcaaatcaacttatgaagcctatttcttgggttcgattcattntgctccctggaaacgtatatggaagtgttgggctcccctccggtgcaaattcttcatttggctggccatcaataataggtggtggacagccgatcgtctagctaagcgtgggctgcagcacacagtgatctgccccctttgtgatcaaagggaagaatccatccaacacantttgatctcttgtgtttttctcgccaagttggacggaatcttttg

SEQ ID NO: 34670 - DNA, 343 bp, Oryza sativa
  unsure (1)..(343): unsure at all n locations
agcttnccgggttaactcacttttatctttcccgctgtatattgaancttttatatttttgtaagacgtgggtctgtatgtcaacaattgtcatttgtgtaccctggctggtcctggacagggatttaatgcacattcagcttagaaattctggttcgagaatttctgggtgtgacagccatcgctgccgagtcggtgcctatggcgcttgcgcgtgagccgtcgccacgcccaggcagtacgggcgcctcacagcatctcagcccgcgcgccgcgcccacagacggcggaggtcccctaagatctgtcatgggcggccgcaccatcctccgagcccctcacc

SEQ ID NO: 34671 - DNA, 354 bp, Oryza sativa
  unsure (1)..(354): unsure at all n locations
ttataatgttttcttaancttttcccgggcttggtgtttggtgtatactggatttgctatataggcgccgtactatcaagaggggtctatgaagcgagcttgtggatgatcttgtgccatattaagtcatatgcatgtaggtgccatttgtgggcttgtctaaccaagtgtgatgagctttctcaagtcctaaaccaagagaagtgggcatgtccaataggagtgagtgacatcttgtgggtatgtccggtggatatcctttggagtgtgaccctntatccttgacttaaagtgtgtttcttggatggatttttcatgggttgaatggccctttaataagcttccatagagtca

SEQ ID NO: 34672 - DNA, 399 bp, Oryza sativa
  unsure (1)..(399): unsure at all n locations
agcttgaggagtgctctttatgcttagaaatatgttctcttgaatgcttgatggacatgcttctgtaagcttgtgatgaggagagtgttccctcccattttggctagcttacactatatatgccatgtaatgtccactatctatctataatggcactcttttttgaaattcagtactatttaagtaagatggattctgtttagctttatctctgggtgcttctgtggattagatgtttaaacatgtctttttgntggattaatctgctaccgctggagcgtgctgctctttcttgtgggtaacattcacttgaagttgtcgatggatgatctgttgtaatgttttgtgtgcatctttccagacacactcagttcaggcgtcatgaatttttaatgtgtc

SEQ ID NO: 34673 - DNA, 306 bp, Oryza sativa
  unsure (1)..(306): unsure at all n locations
tcatcanggaaacgtaaccctattttgatcggaatgaccgtgagaacaatagaaggtcagaaatccaaaagtcaccgtctatggtgaaatctgacattgaaacctgctaaagtattggtacaagaatgcctgatggtgttgaaggctcatcggtttcactcacagaatcaaaaagcctgaggaaatctggaaccactatcaaatcgtttaaagttattcgttaaaagattaaagctgcttgtaaggagaaccgganagagcttgctcngataccaaggatggagttttcatagactgcatatggac

SEQ ID NO: 34674 - DNA, 463 bp, Oryza sativa
gccgcatgcactgagctccgagcgccttctcaatcgatctccagacgagccgagcttgatcttccaactagcttagtaatatatgatttttgctgttatttaataaattacaacgtcaaatatgttatttgtatatcttatattgacatcatatattgattctattcttctttcctcttctattaatatgatgaactagaaattaattatttctttaaagattatctctgaaatatatattgttttacttaagattcaagctcggtagccgagctcaagcctatgcagacgagctcgctcgagctcggctcgttgacagccctacacacaatcaatgagtgagtcggagaaagatatataacaagactcacaactttttagatactagaaatgttctacatcttatattgcggctgcatggatatagtataacgatacaatgcttttcgcgaatgcacagaat

SEQ ID NO: 34675 - DNA, 440 bp, Oryza sativa
tcttgacttggatccattcgatgattcagcttatgttcttttgtttaacttatatgctacaaacgcaagatgggcggatgatgacaaattaccaactcacatgaaaaccatcaatataaaccaaagaccagcttgcagttggcttaagcttaagaatgaagttagcacctttggtattggtgaccggggtcataagcatgccgagaagatctacgcacagctagatgaaatgttgctgaaactcacggaagtaggttatattgctgacacatcatctgcactgcatgatacagatgaagagcagaaggagcataacctttggaaccatagcgagacacttgcgttcgcatatggccttatcgttgtccagaaggatctacagaagaatattcagagttcagagctggcagactgcatctgtattaactggtagcatggtt

SEQ ID NO: 34676 - DNA, 476 bp, Oryza sativa
  unsure (1)..(476): unsure at all n locations
agctntgactatcaataattntccaaatgttttatttagatttgccttggcatcataatatcattagatntgatggtcaaaattctacaaatttgattgaatattgctccaaacgtcagatgaagtacgtactagtatgtacgagaagatgcatatcatacatggtatcactcatggaacaattaattgcaaaggccagacatgtccttcccacctatccatatttttgtttacgtagtatgtatacgcaatcaaattaagttgatcacgacatgtaagcaaagattttctccccccaaggtaaccaatggatcaacaacaacaaactgtaccatatgaacatatatccacagccattaatttgtattacaattggagagggtgcatatatatgtctatcttcatcacacctcaagccgaaaatttgtaaacaaaagaaaaaaaaagatatggataatatacacaagctccttatg

SEQ ID NO: 34677 - DNA, 467 bp, Oryza sativa
  unsure (1)..(467): unsure at all n locations
agcttcatcaatacgcggacgagctgttgatatataagccatttggtcgctaacgacccctagcccttttgctatccgagtaatcagagaagtgcactcaacaggagcacagaacttgatactttctaaccatggcaaacatgataattaattcatctccccttatgggtctcagatcacctctaggaaatagagtcatagcaatccatttgtgcatgagcctaagtgtaggattatggatatcattcatcctaggtttcttgcaaattggagcaccagaaatatcttcgcaaaacctattnttctcgaacccagaaattcctttctggagatcgattntacaggaatcgtgaaaaccaagaagtgtgcttaagcctttccatgtaagtgtaaactcctcacggaanaagcgaaaggagatcccatcttctatttctttcaaagtgcacagaaattgcaaagtaagc

SEQ ID NO: 34678 - DNA, 452 bp, Oryza sativa
  unsure (1)..(452): unsure at all n locations
ctgctcgaataactccctctgattactgcttgcgtgcgtggtttagtcaatccgggtcaaagagaacggcaaacgacagaaaagtgacgaaagtgttaaaagaggaatgaagggaactttcggtgctattaaagtgaaccggtaactttcggtgctagagaaaccaaaacgtgaactttcgatgctttgaaaccaatntttcctaagtttggccacatcagaagtgattgatcagaccattttattacatgcatgacaaatacagaaccatatagtctggctctatagcatccagtccacatgctcaatcttggtagcgtcttatgggttttgctctattggtaatggcctatcagttaaagcaagtaacttttgacacccactgtggagccatgcttaaattgttgtattcttcttttttatggataaggcctatccacagataatctata

SEQ ID NO: 34679 - DNA, 478 bp, Oryza sativa
  unsure (1)..(478): unsure at all n locations
agctntaggtcaagatgaagcaatcaatcaatttatgagtcaactccaggagtcattatcttcgtctttgcttcggagcagacgttctacttcagcaacttcaattatttcactgacaattttagatgccccatgctgccataatctacttcaagtatcaagtgtgagatttaatctaaatattcgggagattagagttatcaaccaattaactcagattcaacaagttggacaacagcatctactttctttcaagtgaagcatctgcaacgctataacactaagttctgcagtcatcttcataaatcaaggggcattgcatcatcttcgttatgcacatgctcgcatcaaggaaattactcgagctttgatatcttctcaacagttggatggattattgtcactgacatcatcaccagcacctctatttcatcggtcctgacgtctctaccgttgctaatgggtgactacgtcttcc

SEQ ID NO: 34680 - DNA, 310 bp, Oryza sativa
ctcaatcatctggttgattctttgcatccaggtgtcaccccaaccacttccacaaggctctaagtggcaatgaggtactatatagggggttgttcagggcgatcttgacccaagcgcgtgtctttcttggactttcttcttttagaatccataactagcacatgatgtcttcgtctgccccatcattcatgggagtctaaaaccacttgttcatactgacaggtgtacgtgtatctgatcatcgacgtgtaattgaagcagcgtgaaactgtgtcttcaatcattgtatgcatctcatactacaatctac

SEQ ID NO: 34681 - DNA, 83 bp, Oryza sativa
ctaaaacaccgcgtgccaccgccgacaagatataccttataacccacaacccggcacggggaacagagacagaacgcgggcaa

SEQ ID NO: 34682 - DNA, 463 bp, Oryza sativa
  unsure (1)..(463): unsure at all n locations
agcttatctagaagagttcgagttcaatattgatacgacatgacagttatctattaattaggtatagtttgttagtttccttttatctttaggaaagtatgtttagtgtctgataaagactttatcttttcctttttagtttctttcttgtccgacaaggactagtatctccctataggtataaatatgtatacccggggtcattgtaatctatcaatctacgatcaatacaattcggcgcatcgccaccctttntacttctacttttggtttttacgtttctgtggaacttggcacccgacgcggggctgcatcgtcttcgatctccggcgaagggataagtccaatggtccgtcggcccaggcaattgtctcatctacatcagcgtcattcanagctgcatcagtacattcgacctcttggatngtctggntggatgatatattgctaccattatatatgc

SEQ ID NO: 34683 - DNA, 213 bp, Oryza sativa
  unsure (1)..(213): unsure at all n locations
catcttgaccaaatctgtcaagaatccagaaacaattggatttgtctaacatatgcatggtgatggtgatttcattaatcaaggaatgaatctctactatactgataatngacatagatggtgcatcatcttaaatattctgtcattgccagtgaaaatcgaaatttaagggttgacttctgaaatgtgtaaaatcttanataaccagatact

SEQ ID NO: 34684 - DNA, 396 bp, Oryza sativa
  unsure (1)..(396): unsure at all n locations
agctngtaggtggggctnntataaacactttgttctctatcttgagtntcatgaaacanattgaanacactgagggtttgagttatagatgcctaacattctggatttatggaatntgctctttagaaaaccacacgtattatcactactacagaaagcgtttttgcatacgggcggaatcgatcttcacnatgcggtggccggcccgcatgcgcgaaatggtctgcaaagatcaccatttgcgcatgcggccgtcgcagccgcatgcgaagattgatcttcgcatgcggctgcgacggccgcatgcgcaaatggtgatctttgcagaccatttcgcgcatgcgggccggccaaccgcatgtgaagatcgattccgcccgtatgccaaaacgcttt

SEQ ID NO: 34685 - DNA, 466 bp, Oryza sativa
  unsure (1)..(466): unsure at all n locations
tatttcaacctaatcatcagggcattaaagaaattgttttctactatcggtgaattgaatganaatgtgaccgcaggggcatggaagggattaagttaaaatttcaagggtacaagaaggatggggtaaatttcatgggtttaaaaggatcgactgagttttcaagggtgtacatgacatttactcttgaatatgacatacgtctctacactcttctttagaataaaggagagatacacatagatagaagtggagccaggtcttgtgacaagccagtccccaagtctatcctaatcatctttaagatcgtattcttgaaacttcactgagatctgctcaacttacaaggattcgatggccctagatcccgaaccgggccatgattcaggctctcctcagtttaataatttaagatgtagatcttataggtctncacgatcctctccaggaacactgagttacctac

SEQ ID NO: 34686 - DNA, 454 bp, Oryza sativa
  unsure (1)..(454): unsure at all n locations
agcttgttcggctcttcacgtgcagggcactttatctatcattcgttatggaaggaggaggagaggtgatattgatgctggttgtccgtactcggtactagagttcggcaatatgaatctttggttctgaataatcattctcacgattcgattggtgtagagctgcgctcactagcttgccgacgaacaatctaaccacaccgttcagatcaagctttggtttagtatgcattgcaggggattgtcttttctgtttggatttactanaatctacagacaacagacaacgaacactaccgcgtagaccaccaaaaaacgcctgattgactaacagcgtggaaaanaaaaagtatcatggcattgcgtaaagcagacactttatcgaccggatcaagtgaacagcaatcatataacaagctgaggaaactggaaaggcgtacctttgctgatctgg

SEQ ID NO: 34687 - DNA, 485 bp, Oryza sativa
  unsure (1)..(485): unsure at all n locations
agcttcgggatanatttcacccgactaacagttttnttttttcacaggactgattattcagagatattgtactgcacgtcgcgacgacagctagaacccacttccacaatcttcatccgtaaaaaatgatagaaactcgtccatgctcaatgcacatatataattcaattactttaagaaagaaaggtttatttcatcttccttttttgcatggactaataactagcttgtctatatatacaaaaggaaaacaacttgcatgatgaaaccagctagttgaaataattaaaagaaaatcagtggacaggattggactgaatttaaaacgtgccatttgagacaaggaatagttacgatatacagtccagtaaaaaacatacgacattgttaattatgtactccctccgtttcaaaatgtttgacacagttgactttntattacgtgttcgaccattcgtcttattttaaaanattaagtaatattt

SEQ ID NO: 34688 - DNA, 159 bp, Oryza sativa
  unsure (1)..(159): unsure at all n locations
ctctctctctctctctctntctctctctctctctctatctatctatctatctatctatctatctatctatctatctatctatactcctgatctntagtgtngcagcaatngacatgtgtactacgttatttatatcttcgaaagcatatatttcgcagt

SEQ ID NO: 34689 - DNA, 480 bp, Oryza sativa
  unsure (1)..(480): unsure at all n locations
agctttaacacaacttttcgcgttttatatttgcacatctttttgaataaaaagagtgatctaacagtacatgccaaatattaaaatcccttatattaagagacggagggagttatctagaggagaacttatgttatattaccatcattttttacaaaaactttggccatacacattccgntagacatagatgttatgcttttttataaaaaagatatatttaatttaaactattcgctatttctaaaattttttatataaatagacaaacataatgtgctattaaaagtactctttatctataacatatctacggtgcgttcggcactgcctttttatatcttcttctatttctcggtttatacgngcatanttttcaaatggttaaaagtgtattttgttaaataattatatgaaaattgcttgaaaanatatattaatctaatttttaagtgttgtagtcaatacttaatcaatata

SEQ ID NO: 34690 - DNA, 77 bp, Oryza sativa
agtgttgctcaatatgcagttaatcttcaacattaccttgtttttgtgccttcagtaatttattctcacttgcatcc

SEQ ID NO: 34691 - DNA, 195 bp, Oryza sativa
gtcatcttataatacagggactatttgattaccattatgaaagcaatttcactacactacaagccatccactaattgtgaaccaatgtatgtattatgacaaattattttaatgtggcttgcatgccaaagaggactggtcctaattacttgctaaccatgcttgctactgctggtggctaatgatgcctcagct

SEQ ID NO: 34692 - DNA, 447 bp, Oryza sativa
  unsure (1)..(447): unsure at all n locations
agcttccagctaacgatggatgagtctattcttctagcatgggaatgactaccggagtatgtggccgcttgtctgcaccatgggatggacaaccggcttatcatgcatagtttctacagatggactcactccctcgtcccaggatcaccttgatgcagctgctggaggagcattcttctctaaaacggttagaggggcacattggtctaatagagaagatggtgtccaatatatgggctggagcgaataatgactcctgacccatcaacgtggcatgcacactgttgatatctcttaacgacattactatacatataattcctagcaatggagccacacatattcatggcatattatggttacagatcatatctgcanacgcacagatataccattgtatcatttcacctgagagtataccaagggtatcatatatgcttaatccag

SEQ ID NO: 34693 - DNA, 347 bp, Oryza sativa
gtggccaatggtcatacccaaaaagaaagccatgattcttttctacacctactcaccacatgaccgtttgatcactattcgagtactacttgctctgtgagcctctcatggatttctcgtccatcagatggacgttaacacagttttcctacacggagagctatacgaggagatctatatggatcaaccacacgggtatgtactagaaggtcacgacggaatcgtgtgtacactgtcaaatccttgagcgccttaattaagcacctatcaacggcatgagaagtttgacacacgacttacatttattcggctttgttgtgacgaagctgacaatgtgtgctctatcc

SEQ ID NO: 34694 - DNA, 474 bp, Oryza sativa
  unsure (1)..(474): unsure at all n locations
agctnttcacacccactactattattatgttttttgaatctggaaatctaaagcactaataggaggatccttttcttctttttcacaaatggcatcaccatacatgagaagcaaataccttttgatcatctccttagtataaagattacaccccttgccttctaaagtgccgcctcctttctacatccccaaagtctttttaagcataccagtaagataataattgttcatacgaacctctgtatttactagagtcaattatatatgtttatccctggttaatacagtggtcagtagtttatcactttccttttctaaaagaaaattagctttaagtagttttctataagagccattgagtcaagtttgagtgcaactaacgtaacttgagcttgcttggtcagctagctaaccttctactgtagatgatacatatatagaggcaagagatggataacgctcagaataaaactg

SEQ ID NO: 34695 - DNA, 379 bp, Oryza sativa
tacacttaagcgatgatgatcttccgacacatataatgaatcacgtgacctacggtgagtgtacattatttaagagtatgttcttaatcattaccgtacgaacgtaagatagcacaagtatacgctagtaaaatttgcttgcgatacacaccgctagagaaagttctaataaaaaatcgagtgagatttcaaacctagaccggctagcccatcatcttgtggaactagtcgaaagaaccctaagcatttctcaagttctggacatgcatacttacgacaatgtcacattaattaatgactctctttaattccttgctcgcacaatcatcagcttcattataatttagatctcaatttatttatctataccataacttaa

SEQ ID NO: 34696 - DNA, 479 bp, Oryza sativa
  unsure (1)..(479): unsure at all n locations
agcttcttccanagcatacggctttctatatgtatatgacgatctctagacagatggatcttatatgaatcgtatgatgaagtaccacatgagtggatatataggaaaggaatccaaatctgccgaatcgctcatgttatgatcttctacatcctaggtctccgcgttccgtcatctggcttatgttcttcatgtagcattcagatcgaatgactctatgaaattacgtcgatacttctacatattatgggtaacgtaggagacatccctattttcccccgggggtcttaattaccactgcttagctntcaattcgcctctgaccatcaaattaaatgtgaataacccgtcctcctctctatgaaacaaggggcgcttccggttctgtgcgtgcttcanacaatattgtcttctccatattaccatatctctagagtncaataatttctatgaggaactactgaactcaatcacttgct

SEQ ID NO: 34697 - DNA, 188 bp, Oryza sativa
  unsure (1)..(188): unsure at all n locations
ggcgtaatatacgaggtcttcaagcagtccgattcttttagtcggatcctgatgatatccccgagtaacagtccaagaagctgagtaactcgcagccggctgttgagtcaaccacctggtcaatgcgaggtaacccaaaagggtctttgggacaagatttgttganggtcggataatcaacacacatg

SEQ ID NO: 34698 - DNA, 422 bp, Oryza sativa
  unsure (1)..(422): unsure at all n locations
agcttgctgagaaagagtatgtgaaactgatataacatattaatttagtctattttctagctagatgcctggtcaaaattcctgaataaaccattgacaaaaggtggcatgcaaaactttgttctaataagtggtttaacataaatgacacactggttgggctctttcctgacaccctcagtaagcttgttgcttaagttggcagggtgcttgaatgcattagctgctagcagagctgcgtaactccacttaactcaattgttggacatgccaagcaagaattatgatctattaaacccaccaaattaatggtttatagattaagtattatttgcttcccctgttaatttgtatctaatggtntggaatctacctggtcaaacattgctaatatgtntaaatttatcaagctggagaaagct

SEQ ID NO: 34699 - DNA, 363 bp, Oryza sativa
  unsure (1)..(363): unsure at all n locations
agcatagagcaatagttagctcggtttgtatgccttcatccaattctgatgatactgacctagctaatctcactcagatttgattctgaatgattaaatccccacctaattccattcacgatttgtgtttggtcttttgaggtgataaaatatgttccctgtattttttccctttcctattacacttgcactatgttccctgtatntgtttcctttttattccacttaaaaacattctgtggagattaatcatataatatcgtctcatttaccttaccttctagcatgctaaggcatggcatatatatgctcttcgcattatgtctatatgacaagataaggctattatcacactctatcatg

SEQ ID NO: 34700 - DNA, 472 bp, Oryza sativa
  unsure (1)..(472): unsure at all n locations
agcttaagcattgtgcttaacacttatcggttgaaggtgtggagatatatntgctcttctttntagtgctcattggggntgttggtcacacgagttacttgaacattctgatttacactaatgctgtttctgcagaatccagtaattccagaagttgttcccacgccatttaagaacctcaaaagtctcacgcttggtgcgataatgcactgtaacgatgacattggttgggtaactatgctgctggaggtggcacctgtccttgaaagttttcagatagaagtatgatgaanacttcgcttttactagtgatgcatttattagtttgaattactatctattttcattgacagtcgattagttcgataagagttataaatntacatgcatgtgtactcccttttgcttatatttaaatatttcttggacattnntactanggtcttgattcatgatacataatgcctgaaac

SEQ ID NO: 34701 - DNA, 424 bp, Oryza sativa
  unsure (1)..(424): unsure at all n locations
agctngctcaatccagcacgcgtttggacgctttgttgtataggtcgtcnacgcaaagtgatcgggcccggacatggcgctgatggtagcgccgcaggctctgctggtagcgcgcggctcggagggccgcgcgccgccttcgctcttccaagtagtcgaggtcatctctgcgaagctgattttgatcagcctcgcaatacatggtagcccgaggagacctcacggtgagctcggatgggagaaccgcttccgcgccgtatacgaggaagaaaggcgtctccccggctgctcggcttgtggtagttcggtttgcccacagcaccgctggcaacttctcgatccatgaatcaccgcgcttcttgagtatgttgaaggtcttggttctaatgcctttgaggagttccgctatggcgcgctccacttg

SEQ ID NO: 34702 - DNA, 306 bp, Oryza sativa
  unsure (1)..(306): unsure at all n locations
tacttnttcaggctatagactgccgccccttgttcagatccgggatcatggcttcctactaccttcacaggcaagtaggagtatctactaatttacaaactggagtactgattaaacacttcggcctcaaaataacttgtgcattaatgatgatctcacgcaaaagagaacgagctcatctatctgcttgcattagcgacatggacactggagacttacgtgagatgagaaatcataagcttccgacatgcagatgatcgaagaagaaacctaaaggatgtatgtgctacacttgcaacaacctac

SEQ ID NO: 34703 - DNA, 476 bp, Oryza sativa
  unsure (1)..(476): unsure at all n locations
agcttgatttcattcttgccaacatggcgatgttctttgcttggtgaccattaacccatggtatcatccattagcctcatcatagtgggacctattccttttcacatctcaaaggagaacattagtctcaacaaatcggttgtcatccttcacttgatgaccaaccggctgcatatgaaagatatggatatgtttgttgagtattcattaacatcacaagtgtcatatactcgtatgcaaccttaagtgcaaagatccgatataaataatatgtgaacaacatggatctagaacatgcacaataaatgtataagaattgcctcccctaaatatatgcatacaaataaatatacatgagatacaagtgtatgcataattagagaatgaccaatgggagnttatcctatacacatagagaaggcatatgtagtaatgatgtagaccaacatanaacatatacattcatgatcttcatg

SEQ ID NO: 34704 - DNA, 438 bp, Oryza sativa
  unsure (1)..(438): unsure at all n locations
acacatncataaaatccatgaccatgtaaacaactatatatactattatatatataaatcaataatacacacagacctacatatggagcatggctaatccatcgatcgatcaacactaaacacgattattaactggcccctgcctggtctgtaccctctactaatgatggaatcaatgaaacaattattaataataaacgattaatcaaggggaccaaatcaacaccaattagctagctaggaggctagctaggacgccgtgagctcctcttccttcgcaagagaagacttggtggtggtcgacgtcgtcgcaccgaccgcagcgggcccacccacctggtacngacccaaactggtcaacctgcacgtttcaatatcaattagtaatgaaaacaaagaaaagataaaggctatgccaaatatatatatatatttcgt

SEQ ID NO: 34705 - DNA, 445 bp, Oryza sativa
agactatcgacagtcacgacgcggccaggcccacgtcgcacaggtggaagaggaagagccggctctgctcctggctcacgcaagcatcgagctacctccagcggcaccggccgcagcggctttcctccaccttgatgagccgaaggtactcgtctccctctgcaacggctccagcaacgacaaggctgatgagtggtacctcgacaccggcgccacccatcacatgaccagccgacgggagttcttcaccgagttcgactccggcgtccgaggctccgtcaagttcggggacgcctccggcgtggagatcaagggtgttggctccgtcaccttcaccgccaagtccggtgagcacaggctgctcaccggaatctactacatccccgcattgaggaattctatcatcagcgtgggacagctggatgagaacggctcacgcgtgttg

SEQ ID NO: 34706 - DNA, 231 bp, Oryza sativa
  unsure (1)..(231): unsure at all n locations
ttggataacttcgatttgatgtatgctttaaggaacataatcataaaacaattcatggtaaggaaaaggaccccttgatggaacaaacgttgactaanactcaacatgaaactatcgtatttctaaccaccatggtttggtacgaacctagtaaaagactaactggcttcacgtgctataagccaaccttaaaaaggctccacactccttttcgagactgttctgacaaat

SEQ ID NO: 34707 - DNA, 477 bp, Oryza sativa
  unsure (1)..(477): unsure at all n locations
agcttatgtggatgatgtagtcgtcaagaccaagcatatatatcattngatcacggacctagaagaaacctttgcgagcatccgcgctntcaggataaaattaaaccctgaaaaatgcaccttcggagtaccgtcagggaagctgcttggatttatggtgtctcatagaggcatacaagccaacctggagaaaatcaacgccatcctcaacatgaaaccgccgagctcccagaaagatgtccaaaagctgactgggtgcatggcggcgctcagccggttcgtttcatgactcggcgagcggnggatgcccttcttcaagctgttaaagaaaacagacaatttccagtggggacccgaagcgcagaaagcctttgaagacttcaagaaacttctcaccactccacctgttntggccttaccacattcgcaagagccgctattggtgtatgtatcggcaacttctcaggttgtgagcac

SEQ ID NO: 34708 - DNA, 236 bp, Oryza sativa
gtaactctgaccgatccatcattgacaattgcatttctacttctctgttgaaaatgtgtaatagacgtagtgcatgaaagagtgatagtgtacccacaaaaagatactacgacaaatcatcgtctcaatgtaggaccacgagcatcttgtctcgagttcgtgcttaggacctatcacctacacggcaccaaacacactctggcgctccgcatgtgggagtccaaggattacctgca

SEQ ID NO: 34709 - DNA, 82 bp, Oryza sativa
  unsure (1)..(82): unsure at all n locations
agctntggcgcacacgacaaattgtgatagtttatatctgcacacacagagcctcctacctggcgcgccggatgaccgtacg

SEQ ID NO: 34710 - DNA, 462 bp, Oryza sativa
  unsure (1)..(462): unsure at all n locations
agcttggcacatcgaggtgcctcttctgtttatcgtgcangtgcccacgctgatgctgcacctggacaatgaagcctgtggcgccgacgccgacgagttccggccggaccggttcgcgaacggcgtggcggcggcgtgcacggcggcgcacatgtacgtgccgttcgggcacgggcccaggacgtgcatcgggcataacctggcaatggcggagctgaaggtggtgttggccatgctgctgacaaagttcgccttctcgccgtcgccgaggtaccgtcactcgccggcgttcacgctgaccattgaacccgggttcggcttgccactcatggtgacaaagctgtcatgagctagcagccctgttactcacacccacccagtcgattcatgacagctccagttataattgctggccacagacagcaatgcttgttataataaagcttcttttatgagatgaag

SEQ ID NO: 34711 - DNA, 408 bp, Oryza sativa
taaatactcagcttagagacgaccttaccagtgctagcacattatcttcgattcctaattatcaggatcacgaatcatcatttaatgcgcgatccacacagcgagtaagctaaggggggctgttctgataacatgttgtcgattgcggccatcgtagccacttggatgctcttctctcgtggccaaccgcctgctctaccaatcgcaaaccctcgagagagacctcgcacgcgctgcggtggtctgcttccatggctgtcgcgagcccagacgcacatcccatcttgtgccactgccgcccaggcgcccatcccatccggatgcaatggcgaattggcgatggctgaacaggctacactcgatggtcatgacatacgatgagtgcgtgtcagcttcttcttgctcttg

SEQ ID NO: 34712 - DNA, 449 bp, Oryza sativa
  unsure (1)..(449): unsure at all n locations
agcttctttaatcatgaaacagcgtaacatattttattcatgaaacagcgtaacatatnttatcctatattttattagtcgcgtgtgtgcaaatgaattcctgatcatgaccctagacagagaacatatgtgtatatgtgccacaaaaatttacacgatggaaactaagtactccacatccccaaatcagcttgagagatggccgtacgtatcatatcatgctgaagagattggccgtggagatgagagagttggtggcgagtccgatgaacgcgatgaaggaaaaccacaccgcgctgttgatcttcttgttgaacggatccttgccgaagctcgacatccacagatcgttgcgggacgctgccgccgacgaggccgacatgaggagatacgccaacacctgcagcgagaccaggaagatcagatggtcagacaccgcaaacacctct

SEQ ID NO: 34713 - DNA, 419 bp, Oryza sativa
  unsure (1)..(419): unsure at all n locations
ntgatcacgaccgagtcaaaactcgacgcccccatctcgtgtgtatcagttcgaaggtgatgcctcttttgctaaatttcaaaagatgaaccaaacaaaatgtgtaccttctgcggggatcgaatctcgcaaagaaagcagctaggcttttcccctctcctccctgcgctactactggccaagcatgaggaccaagaaaaacacatcaaatcgatcctgattcccggccggccagcgagagagactcagggcaccggnggaatttcgccgggcggttgggcggctgttccaggatgcctccgcgcggttccgccggccaaagggcacgcacggacgctgtggtcgcaaagcccagcgccccgcgcgcggctggcgtctcgacagctcacgatctcacgctgcctttccatccaaccatc

SEQ ID NO: 34714 - DNA, 367 bp, Oryza sativa
  unsure (1)..(367): unsure at all n locations
gctttaacggagtgcaagaaatctcttagattctagaccatctacatcgccagtctatggacttgggcttgcattgtgcagcaccaagcatttactgaactgctacgccctacacaagttcttttcttctcagacagatttttggacggcctgatgaacagaaaatggtgtttgagctgttgagagtaccatatccatcttatgctggctacaaacgcaagcgaaccaataaagcggaggtcttgcctgttgttggactgggatgtgcttgaaagactactttggcctcccacatatgcatgaatcanatggtgaaagctcactctgatatgatcctttgggcatgtgtatcagatgacattaacgc

SEQ ID NO: 34715 - DNA, 460 bp, Oryza sativa
  unsure (1)..(460): unsure at all n locations
ttaaaactcagcttaaccgananatannaattgtaacccttattaatcaaataatcctttctaccacctataaaagatatcctttcaaccaccgagagaattaaatgatgcttcaggagaggataactntgcaatgacaacgttgattntatcatgattccagaaactagtcgaagcagacatatctcatcatatccatgtaatgatcaataatacttctccccgtcccacaatacttcctattctaaatagtttagcatacattaagatntaagaaaaaaactataatgtctcttatttaataatgtacgggtagaagtgaaataataattgacgggtataatcagaagacatttgaactgacaacaagtattttacgacaaaatgtgaaattagtaaagacaactattttcgaaagcaatgtagtatanagttaagagtacatcattcatggtatcat

SEQ ID NO: 34716 - DNA, 341 bp, Oryza sativa
  unsure (1)..(341): unsure at all n locations
acctaagaaatgtgcatcatncttagcatcatttcaatagtggcctcattaagagagcttcgtttacttagtcctatattagtgagtcgtacaacagttgttgtttatgtttctaactataatacttatgatatatcatggacttacgtatgtaanatcatattcatcaacatccactagtatttggccagacattgtacgccttattagttgagtagcgtctttaacatatctattcatttgagaagaatggtgagtctggatatatcgaacttgatgagtgctttcattcattggcatttctgcattttatctgacacattgacaagacactactgtat

SEQ ID NO: 34717 - DNA, 433 bp, Oryza sativa
  unsure (1)..(433): unsure at all n locations
gctngactgcttaacttagatagctcatcttatctttatgcgagttcaaatctcacaaagattagggatcgaaatctcgcgtgctaacggcatgggactgatggatggtattgaaacaaatcggctcatacgactcaaacttctaattaccaagatttcacatttgaatgacttgtgatattatttgaggttacaagctgatgaattaaatgctatacagttgataaatggattcaaacaaatttataagaactttatatattgtatgtctttaataactgaatgtctacaagctcagcaaacaagtgtatctggccatcattccattccatgagaaagaacagggtctcacatacacttggtaaccctttctcttacgtgacgactttttggatggatctccactctactactatctcattatgctacgctc

SEQ ID NO: 34718 - DNA, 444 bp, Oryza sativa
  unsure (1)..(444): unsure at all n locations
agcttgccttgactcagtccatcacttnctctactgttccagccgagagaggaagagattgagcgagccgacgcgtggccgcaacgtgtcgtcgatctcgggttcccttttctcgctctctactcctcccagacgcgtcgccattctccattcatcactctggagctgaagaagccgagggaggaggttctctgcctctccatcgccccaaaccttgccgccggtcgtagtgacgacgaccttcgccatctccgtttgagtcaaggtcacctccatctctttcgcgttcccatctctccacacaatgccgagcatttcctcttttgacctaaacccctctcgtgcagtgcatcgccgggaacgcgaccacgccgacaacgtcctggagcacgcaccggaagcgccgcgcttcaaccatcgtcgtcgtccggccattctcatcca

SEQ ID NO: 34719 - DNA, 154 bp, Oryza sativa
tgagatcaggacattgaattgctaaactacaacaatgtgcctagatcaggtgtgcgctttgaccattcccttaccatgcggcagttgctacgcgctgcgctctgacttgtggaaccacataccattgatcctgcttgcatggcaagcgctcgcg

SEQ ID NO: 34720 - DNA, 316 bp, Oryza sativa
  unsure (1)..(316): unsure at all n locations
ctagcaatggatgtgccgctacacatatttagggagcagtgcaacacgccagtgcggccagtgttgaattgtgaaacccttcaactcattcagctgacatncatggaattttaacgatcgtgtgtgggttgataaaattctctccggacacggcacgtttggttcgccatgttaagcatctaggcccccggtggttaatttggtaattaatgacaagcactaattgtggactaaccgttgtctttgagctatacattttaagttaggtccacgtcatatgtacgcatggatgactatcgatggattaaaatttgat

SEQ ID NO: 34721 - DNA, 416 bp, Oryza sativa
tcttattgcagctggttcagagtgtctacgtgtcggtgattattcttcttgatcgacaccagattaaagaagggtatgaatgaaactttggaaggagggggacatcgtctattggtttcaacccgaagcttggtggaggaggcagtacagacttataaggaggagtaagggggaagcagcatagagttatctagaaagatagagggaagtagtacagacttatctggggaatgcacaatatttgttgggcttggcctgaacgagggaagggagctagtgcagacttatgggaattggtccttcgggttgggctgagaaaatagaggaagtaactacagacttccttgtattggagagggttcttgggcctttgtgtaaggaagtaaagggaagtagagggacgatgataatgggct

SEQ ID NO: 34722 - DNA, 363 bp, Oryza sativa
  unsure (1)..(363): unsure at all n locations
tgctatattcttattagacactctccatgcccattcttgaatgattctatggaaatggaagcttctatatggcctttatgcgtacatgaagaatattctggataagtcttttcaagtcttacttcaataccttagttatcttctatagctaggtataattatgatcaataattattttgatacatcagttatcttctatagttaagtataattatgatcaataattatttctaaagtctatgaatgatatcgttcattcaaatatatgatccagatgactacaantattctaaaccacaacagaaataacgatgtggatggtttttaatttaccaattntcgtggttcgtgtgctggaacaca

SEQ ID NO: 34723 - DNA, 380 bp, Oryza sativa
  unsure (1)..(380): unsure at all n locations
atttcaaagaagtaaatgtgcacttcatagacacatcattataagtgtgctagtttatatataagggtggtgcttaatcgctaaacttcatggatgcaaaaccagaaactaactcacttcattgacttttgataaataacttcatatcttcctctctacctgctgttctagtgaccactatgatgatggctntaagcanattnctagagcgaactgtggtttaaacaaatcctaagacgaagtgtangccttgttgtgaatctgatccagatgtatcctgtangatggaccaccaaacanggcttcactctgagcatgtactaatatgtcaaatcagagagaaggtactttttttatagattactattcagacctcaaac

SEQ ID NO: 34724 - DNA, 457 bp, Oryza sativa
  unsure (1)..(457): unsure at all n locations
taaacatntcagagaagatccataccataataactgccggataatttatatttcttctatttctgtgcacatgattctgagaagggagtcaagggacagcaagggccaacgaattttatcacataaaatcaatctgatcaagatttcactaagcctaaggtagaatttcttcaagactggatcccaaaaggcaatggcagctctttcccttcctggtggtttcagagagggtgttttccccacacctcagcttcatcatgttttaaaattttggccaggagctctggcattcactgaaggagatattaatgtactccctccgtttcatattataagactctctatcattgcccacattcacatagatgttaatgaatctaaacgcatatatatgtctagattcattaacatatatatgaatgtgggcaatgcacacatacatctagaaagggaaaaa

SEQ ID NO: 34725 - DNA, 371 bp, Oryza sativa
  unsure (1)..(371): unsure at all n locations
tttttttccattatatagataagatgcgcaccgtcaccacatgcacacacatcatactcacacactcatgactatgttcttttttaacataccggtaaagagacggagacaaacaacaacaatttacttaaacttctgcaggctactatttctgcaaataatntgttatatatttatcgataaaatntttaaaaaaatntgacatatgtaattggtatgtagtgtagttacattgtaactngtatgtaattacaatgtaacttttacatcattttaaatngttagattcgtttcaagattcgtgcaagcgaanaaattacagtgcatgcacatgtgagagggatcactcctatgatgtccattttatggaa

SEQ ID NO: 34726 - DNA, 381 bp, Oryza sativa
ttgaataacatatacacctattatggattatcgccacaagttctgtgcttattggtacagctttcaatgatcagctgggtacaactattaatctatttttcagacgaacatacactggattttctacgtagaggaaggggcatctggttgtctgtctgggagtgctgcttgaaatgctggatgtatcatatactactcatggagcctcgcgagagtgggataatttaactgccaagaaaacatatttcattagatgtaacaaaatagataaaggcatatgcatggatagagtaagaagcgcaagaacagtaccatgttaattcgaaaacgagtcactgctgcataaatctgacgtgcgatgaatacgtctgtctgcatgtg

SEQ ID NO: 34727 - DNA, 293 bp, Oryza sativa
  unsure (1)..(293): unsure at all n locations
tggatcgatcgaagttctggtactatgctcacggtggaacgctcaacccagttgatggctccctggtcttcagcgatcagatacgcgaggctacgcatcgactaacagacgcagtggaagcctcttctcagggcacgttccgacccgacagagagaaggacgagctgtcacttgccctgcagactccagagcatctangacgaacacgagggaaaggggtgattccttggaagaatggactcaaggaggacatccacacgtacaggagtcggatgaggagcaagagagatacc

SEQ ID NO: 34728 - DNA, 462 bp, Oryza sativa
  unsure (1)..(462): unsure at all n locations
gacctatgaaactcagcttggtagccgatgatgccgaccccctgatgggtcgatatgggggaagccagcgtctttaggcctgacatcataaaagtagccgaagagaaggtacgactaataaaagatcgactaaaagcagcccaagccagacagaagagctatgctgacaccagacgacgagagctgaccttcgacattggagatcatgtctacctaaaggtatcacccttgagggggaccaaaagattcaaagtaaaaggcaaattagccccgcgctatgtgggaccctttcccattataagtcggtgaggccaggttgcttacgagctggatctgccagagacccagtccgacatccaccccgtattccacatttgccaactaaggaagtgcgcgcctncgagtaccgaaagacctcacccctgtagacgcccgagaagtgagccaagacctgacttaccc

SEQ ID NO: 34729 - DNA, 299 bp, Oryza sativa
  unsure (1)..(299): unsure at all n locations
tgcaagcttgctatctactaacatgaacatgtcttgtaaacatatggtctanttgntgctcatttcaaaatattgaattggtttgtaatttcacaccatgggtacttntatgctntatgaacataaatggatgatcaggtggcatttcgagatatgtctttatgtattcatctttgtcatttgatggcttgcanatcacttcatgtgcagaanatgatgctaacttataggtcacaccagtttgaaggcagctaacttctttacattgtcttttaatggctattaagttctatttatta

SEQ ID NO: 34730 - DNA, 406 bp, Oryza sativa
tatctcttacgctccaggaatggatcagtcagaacatcaccaccggctcgcctcgaccgccgccgactggtgtttccgcctgcacggctggcctattatgccgccgttgttgggcgtctacgtcttcaccgaccggcttgccttcgccgccgccgactggtgtttccgcctgcacggctggcctttatgccgccgttgttgggcgtctacgtcttcaccgaccggccgcctcgaccgccgccgactggtgtttccgcctgcacggctggcctattatgccgccgttgttgggcgtctacctcttcaccgaccggattgccttcgccgccgccggctggtgtttccgcctgcacagctggcctttatgccgccgctgttgggcgtctacgtcttcaccgaacggccg

SEQ ID NO: 34731 - DNA, 279 bp, Oryza sativa
  unsure (1)..(279): unsure at all n locations
catagagacttctagaaccactcaaatgaggatcatagtttaaaatacgtccagctaaagtatctagatccaaatttatatatctagattatagccctttgcagcaacatcactcctagatgcattccaatatccgatagaagagaacttagagttattaaanaaggaaaataaaaaagaagagctacatgctcctcggctaccgtatcactgtgtagcaccaagccaatcgaccatttcaattcctccggtnttctggttcctggtatcatcatatct

SEQ ID NO: 34732 - DNA, 416 bp, Oryza sativa
actcagcttgtagttgaacatataccaacgtaactcgtgtgatacatattcggaacgatcaaaagaaaagtaaattctgctgtgtatatgttctaaatcataattattatgtctggtatgataggatttaaatggtgaagaaatttacctgtattatattatatgactggattgctatcatatcacagaaacagcgctccaagtaggaaacataaataagtgattacaatagcgaggtcagtgaccttgagttcgctcacgctccctcacctaacgggattgtggtgcggaattgatccgctccaatcctgtcccttgctcatatggattagatgaacaagtaacagggagagagatggatggatttagattggcgtgcgtctcttaaccgcacgaatgcgccattcttccttcct

SEQ ID NO: 34733 - DNA, 355 bp, Oryza sativa
  unsure (1)..(355): unsure at all n locations
tgccgcatgaagcttccccgggatgtagtttacgcagtcctatcttcatatcacagaaccaatcaaggatgcagtcactaggacaatgccagctatatctccctcgaatcatagtgagcagccccgtttgtggatttcagttcgctacttatcattgtgtaatagaaagtgtgagcaatcatgtaatanataaatatattcatgattataaacaatgagttcgttatgtttatggaagatatcatgtgaggatgcaatgtaccattgctaagcacctttccttttagacaatgcttagtattcatgtaatgacggagaaatgtgtaatacagacangttctatgaggactctctc

SEQ ID NO: 34734 - DNA, 456 bp, Oryza sativa
  unsure (1)..(456): unsure at all n locations
ggctgctagaaagaatgctncagttgatccagattattttcatgttcgttgtgctgcccacatagttaatttggttgttaatgatggcctgcaacaaattcaatctttgataaccaatgttaggaacactgtgaagtactttaagaagtctccagcccgtatgtataagtttgtgggtgtgtgcaacacttattcaattaaagttggtagagggttgtctattgatgttaaaacaaggtggagttcgacctatcggatgctagagacatgcattgagtatagaaatggttttgattattatgctgaatcagacaccaaatatgaatggctacctttacaatctgaatgggagttgttngagaaaattcagccaatcttgggaacaatgtctggtgcaaccactgcattntcanggtcaacctaccccactgccaatgttntctatccatacatagc

SEQ ID NO: 34735 - DNA, 469 bp, Oryza sativa
ctcagcttaacccagtgtagggtttatattcggggacgtggttcagtgaaagattctgttaaggtatctaaatgcacactgtagttccctgtaattcccctgttctaacatgaatgtttggttaaaaacacttttttggcagtaacttgtttttgttattaattattatatacgttttattaaaaaaagaggacattctcactttcatggtcatcattatgtcgcctaatctgtttcggtacaatatcataagcaattaatcttaacttgcagctggtccatattgatatacaaccattacttaattaaatacaattaattgcatggttaaaggcttagaattagattacaatctccagacaacaatagttacatagaaggagctgtgcatcatgctagttaaggtaaaaacccatgctctattttcaatgtcaatagcatagatattctagtattatgagctgcaacg

SEQ ID NO: 34736 - DNA, 250 bp, Oryza sativa
  unsure (1)..(250): unsure at all n locations
tcataacgacgaatggctgctttataagaatggtcagcacttcttatgtgtaagggtagctctttgaaaactaattctagatagctcaactgaaccacatagtttttgctcttcattgttaagacttaaaacaagctacagaagatgattatatatttttttacannatatcttattacaccataacctctngataagccacaaatgagcactttgaactttacaaaaatatgcattaannacatgtatt

SEQ ID NO: 34737 - DNA, 419 bp, Oryza sativa
actaagcttcccgctcgtaatcttccctgccaccatctggtcttctcttttattatccaaaattaaggaagattgattttctccccctcattgaaaaaatatgggaaaggctctccacttggaaaggtcgattcttcacttcttcagggcgcgagacgttggtaaaaacagtccttagcttcatgccaattcaacacctttcatctctgcacatgcccaaatgggttttcaagaagatcgaccgctttcgaacgtcctttctttggaaaggtagagagccagatcacactaatcctggcaactgcttggtcaattggaaaacagtttgcataccgaacagaataggaggacttggggtccctgatcttgaaagattttcaggattcttctctacgctaggtcgggtccagtggaagatg

SEQ ID NO: 34738 - DNA, 213 bp, Oryza sativa
  unsure (1)..(213): unsure at all n locations
gttaagtatctttgtaagaaattagtcaactctatctttgaaataatctgagtcaatcaagttcgaanaacgattgctcctcgaggtcggagaccaggaaaatcaaacagagatgaccaattaaccctttaaaatatctctacacttctcaatttggaaatggctatggaattccttgagtatatactgganggtcctatactggatttggga

SEQ ID NO: 34739 - DNA, 378 bp, Oryza sativa
  unsure (1)..(378): unsure at all n locations
gagatgagcttcgaattcttcgcttttattttttatacatgcttcgtttttccttttttatgtgctttactatattctcgatatgtgacgccgcgacggtnataatattattttgtatttataactatttatattaaactattattattattgttttttttttcatattaattttataaaaaaaaagaaatattttcactatttttaattatattatatctttataatattttatttatttttatataatatattatttttttattattatttttttatattatttattttataatttattatttttattttcttttatgttgatttatttaaaattcttgttcttattatattttattttaattattattattattt

SEQ ID NO: 34740 - DNA, 418 bp, Oryza sativa
  unsure (1)..(418): unsure at all n locations
tgtcttgcaactgcatagatatgtcgtcgctgtccgctattcgtctttttcgcaacaaagagagagggggggccaaaaaggagctcacggttgccccaacaggaggagaagaatatggggagaaagaagaagaagaatatgggtagtaaaggctggcatatangtcctaatgtcatacactccaaattgagagaataaatggagaatttgttggagtactgaccaaccagtttgacttgctaaattaattggagagttggctatatgaatatttagagagtctgatttgggtagtctggtgaaaatgcttctataatctgaaacgggtggtgaaacggatgaagtagtatattatggagcttgctgacggaatgacaagtgcatatgggcctactttgngctaaaaactacccgaata

SEQ ID NO: 34741 - DNA, 268 bp, Oryza sativa
  unsure (1)..(268): unsure at all n locations
aaatctgcattcttgggatttgtctaaataataatgaaatttttgcagtccattgatgagagtattcatgttacaagcaatgcanaggtagaagtatttgatcttttcctcttcttgctttctaatactagaatcttcaagttaggtctgtgagactgaacaagttcttcccttctttactgcatgccatattgacatgttcctaccctagattaaacttgaaatctaatgtgactgacttgctgaacaaatttcttgaatcaacact

SEQ ID NO: 34742 - DNA, 392 bp, Oryza sativa
  unsure (1)..(392): unsure at all n locations
gaaggagcgagaaacgaagtcaccaatgtcgctacaccacttgttcaagctatgtttcttaataacagnggtccgagtgcacttgacgcaaccgagatctttgacaagctaagagttgcaccggatgtgtacttcaagaacatcaagaaagctggaagtatgggagctagcatggcattggcaatgaccaaatccttgtacccgagaattgaaattgataccattgatggctttgcagacgggacaagtgaagaagctgctcttgatcttatcagtaatgctcaaagtgcggctgacaagattgcaagtgatgttgtagagcaattccgcaacaacgaccttcagccgagcaataataactctgatgatgaaaggactgattctgactgagt

SEQ ID NO: 34743 - DNA, 416 bp, Oryza sativa
  unsure (1)..(416): unsure at all n locations
nntcgttaattggaaaaagcctggcacctgttgagtcagctatacttgtatccagtgttttggtttagtagtcacacattgggtgtgatatgattattatgatatggaattttcctttattgttgatttgcataaaaaaaatgaatcatgttgttgattaacaaactgaatgacagtggcatctcgagattaaatagtaaacaattttatctatagtgtaatgttatgagaaatgtatctttccaaacaatcaacacaatggtcggaagaagggtcacaacttcactattctataattttgttaggttaccaccagggtatgtcatactatagcaatgttcagtttcaatccgagctgtggttcctcgccatagtgaactatnttatgtntgagacatgcagtactattagaatgc

SEQ ID NO: 34744 - DNA, 403 bp, Oryza sativa
  unsure (1)..(403): unsure at all n locations
ntccctgcatagactngctcatacacactcttctggaaagctgtgtgaaaacggngatccggngtgtcccgaggcctcaaaaactgatcatggtgcctcaagatggtatactgtgatggattccgcatgttcacaacaaactggatggagggatcaatgttcatctcatcacttccttcatcctcatcctctccacttccactgtcatcatctccactttcctcctcgctagccccctcaacattggcctcaacctcttcatcactttgagcgtaatcctctctgctcgattcctcangctcactcacgggatcaggcgcacgacgaccatgacgagtgcggngaggcatcactgaanaaataggagcaaaggatatataagcaataattttagaaaccacat

SEQ ID NO: 34745 - DNA, 371 bp, Oryza sativa
  unsure (1)..(371): unsure at all n locations
tcgattggagctccgttaagatgctgaagccgttggctgccctgttaattgcatcgataagaggaggcaaatcttcagcatccattaagtttcgtgtcatcgtcacaatcagagataaaactgccgccagcatttgtctgtccacagattctgcacgaagtgttctcacaagcacctgcaacattatgtttatcttcagtatgacaagcgtaacgatccaacacanagactaattatcaccctatatatgatgctgataaaaatanagcaagtgtttcttttcttgcctcanacagactatacctctggactcttaaccttaanggcttcttgggctctggatatatcatcatcatcagtgtgatgaacac

SEQ ID NO: 34746 - DNA, 450 bp, Oryza sativa
  unsure (1)..(450): unsure at all n locations
taaccactacactgcgaagatctttcatgctatcggtgtcttatttctagctntttttttcacaattcttgaacgcatgaatgattgaatgttttatgcggacgacctatgacctgcatcacctgctcgtggggttcatcataaagtgtggcttatctttttaatctctggctaaaacttgtaggtagtttttctccctatactaacttcaaatttgattattcctttttctaaatttttctaaattcatgatctatcaatttattgtgttattacaactattatttttgtcataccttaagggacttttttttcaccctgcgagacgctccagttaattcacttggagttcatatgaatcagccagaagcaagcatatggtagtatgttttcaaatatgatattcctgcatcttcagacgccatgaaatatgcataaatataatattcg

SEQ ID NO: 34747 - DNA, 420 bp, Oryza sativa
  unsure (1)..(420): unsure at all n locations
agatacaagacattatcacagcatggctgttaaatgataatattttcttctgaagatgtctgtagcaggctcccaacaatgtcatcaagtatgtcccgcagtaaataggaacttgatagttgtccctgcagattcatgaatctcagtaatgtcatcagaataaaaggaaacatacttccaagttggtcatatagagaaagagaaagagagaaagccaacaaacgaactattatccaacctggccaaattttaaaagaaaatagttaactgtatcttcaagctgatgccagccaccttttacagcactcaggtagtatgcaaggaccaatgcatacaatntcctcacaagaatacttcaatcaatctcacattgcaagctcacctttagaaactaaactggtactctttcatacatcaagc

SEQ ID NO: 34748 - DNA, 296 bp, Oryza sativa
  unsure (1)..(296): unsure at all n locations
tgtatctatgagaacttggatatgagaatcgtatactctactactacctaaagcagngtcatgttacaagaaagaagagattggaaattggagattgaactcttgaactgtgatgcatcaaagagaaaaatatatattgttcgcaacacatggctaaagggtaattatcatactaccctagctagacacacacttatccttagagaaaatcccctatgtacccataaaagttcacctaatcccttctatatccctgaattttgttcaatcccctacatacccctgaattttagttt

SEQ ID NO: 34749 - DNA, 328 bp, Oryza sativa
  unsure (1)..(328): unsure at all n locations
agcttctggctacattgaagaggccatcacgaccagtcttaattctaaatgaatggctgcaacctgcanacatacaaaccagtaaaccacacagcagctcgtcaggcattacgccgaaggaggaatggattccctggcattttcgttggaggaatcgcggctctctgaagcagactgccggagctcctcgatcatcctgatcacctccgccatcgtcgggcgcccgtcangggatcgcgacgtgcacgccattgcgagctgaagcatctgcaccagctcgtcttctatgttcaggtacttcatcagctcaacgtcgaacacctcagcg

SEQ ID NO: 34750 - DNA, 366 bp, Oryza sativa
  unsure (1)..(366): unsure at all n locations
ggcatcaaacacctaagttcccgtgacttgctgagttttatttactcacccttgctctatataaatatatatatatatagttcctccgccctgaagagaagataaagtgaatagaagattatggtttcgtcctggttcccagccgtcgcctgtggtgttgggtgttagttcgttggttccgctgctgctgctgttgttggtgtttcctcgtccgtgtcgtcggttgcattctcggattgttctgagctgcaacctaagttaaggtaaataagtcctctatttattttaaggattgctatgattcatatttgtcaccgtgggtaccagcactatgtcctgngactggtaccgagatcgcgggttcgt

SEQ ID NO: 34751 - DNA, 362 bp, Oryza sativa
  unsure (1)..(362): unsure at all n locations
ngcttgcaggagaatggagagagctacttcagcgagctcatcaatcgaagcttgatccagccgatgagtgtctattnatctgtggatgaatggtaggtgcatcaatgcaaagtacatgacatggtgcttgagctaataaatcagctgtcagtagaagaagattntgtacaacgtatttatcagatggtcaacaaacaggtaaacatacatgtacagcacaaaagaagaagattcgccgattatctctccataacagcaataagtcctatgcctcaccagaagcaagagaacaattgtccaaagtaaggtccattactatcttcggcaaggtcgactcgataccacccttgtcgagctttcat

SEQ ID NO: 34752 - DNA, 380 bp, Oryza sativa
tatcaccgagatattcatgctaatggttcgacatggaagctgttacaccaaagaagagactgacagcttgatggaatcgctgtccgaggctgcagttgaaatgtctgatcttgagaacttcatgcttatatctcgtaataacagagacggcacaaagactcttgatttcattgtgaaagaagcaaaggaggaactcatgcagagagagagagagctccagaaacgggagaggtctaactctgttaacggaaacccgatttattattgataaaatcataaccattcagcctgtattatggtaacttgcatccttattgtaaaatgtcagcagcctgaagaacatgtaaggcgcgcagttgtcggataatgaacataacact

SEQ ID NO: 34753 - DNA, 422 bp, Oryza sativa
  unsure (1)..(422): unsure at all n locations
agcttagtattagtttcagcgagtctcacaactgaggctatttatttttggaaaaccataaatgtgtgaaaacctagaaacattaatttttagtattcacattctgtgaagatctagaaacttatttctttgaccctcatattcttggtaaaaatccttttagtaagtttcttttgaagaattaagtaatgtcaaaatcatttgcatgccgtctttgtttgttggcctcctttcaggtgattaccctctggcatctactacttctcgtgtggtgcatcctgctcccncctcccnctaactggttcttatttgcanggatcttatcgtgacagcagaagtaaagatgagaagactntcngctgtaataatgatatattaattgattggtattaatgaaggatggactaagacaggatgatatt

SEQ ID NO: 34754 - DNA, 434 bp, Oryza sativa
  unsure (1)..(434): unsure at all n locations
ttggatgacaatcattctatgttcaacaagattttgagtgatcttagatctgtagattctgcttatgatattaactactcacaatctaagatttctcgacactttttgattggtcttgacatgtatatttgggagatgaaagttacatctattcatgagtctattgatatgtccactctgactttggattcgctttacacaaaactcaaaactcatgagataaacattctttctcataaagttgattctaaatctagtgctttgatttcttcctcatcttctttggatgttggtgcttcttcatcaaattctactactcttactttgattaatgccatgtccgatgagcaacttgaacggttcgaggaggagaacttggttntagctgctaacaagatttctcgagctatgaacaatgtcaggaacaggaaaag

SEQ ID NO: 34755 - DNA, 286 bp, Oryza sativa
ctggataacttacagcatcatatcctaaaagcagcaaccttacttagaaaatatcttgcaattataaacctgatggctaggatcttagtttcaacattaacgtaagaaaatctcaatgggcctaaaaataaaacgtgaaaatactatatgcatcacggcacctttccacagaagcatagactataaacgtcatcctacgactttcacatacaggacatttagcatctgaccagtgattgcaaccaacttgagatctgtaactaaatgtacacactgatgaagtact

SEQ ID NO: 34756 - DNA, 447 bp, Oryza sativa
  unsure (1)..(447): unsure at all n locations
tcgtgcactaacaactgcactcatttgtcagggaaaccagaaatgctgacctttcttgttaagtttgcatttctggcttccagttgcagaaccctctaaggctctaccgttgaacttcaaggtgagcagaattcagatataaaataggtttgcataaatgttcttaatgtgattgaaggaatgaaattcagctgaaaatcacaaaagtttgtactcattcgtgagaaagaagtcgatcgaagccagacaagaagaccatggtgcacttggccaggtgaccaaaattatactgaacaaaaaggaaaatttacagacgtagctcangtgaaacatccactgtacattgtaatcatacttaatttgtgtttatccatgagatagtcacataataatcggcanatcaaagacaattatgagatagatagatagatagatagataacataat

SEQ ID NO: 34757 - DNA, 280 bp, Oryza sativa
  unsure (1)..(280): unsure at all n locations
tgatgcgaccatcctatggtcattgacatgaactcgcagcaattgattgtgctacctgtgngggcttcgatgcgatctacatgcatccgggcgatgacacacaggaacgcgtgcatgctgattaattactcattcgatgctacatctttgggtctcagcctaaatgttgtgattaaaatggtcctgttcaatctttttcttgacgaagaatcagaccaaatgggtgatgttctgctttgtacctacatgccaatctgcaacacgaaaagccatgcctatc

SEQ ID NO: 34758 - DNA, 413 bp, Oryza sativa
  unsure (1)..(413): unsure at all n locations
attacatattttcagaattaatttattctttattctaaatttaattattctttaggtggggtctatatggagtcttattatcattcagaattgacttaatttcgggaattattggattacttattttgaaatttgattattacttatttaaatattcccaactgctgatattatttcaaaatngcttagaaactacaattcagggccaacgcactgtggagcctggtagcacggcttcaagtgctaatatgccanatanngatctcaatatgtcattgcgaacaacacangtctttggatatgtgcaatgaanatcaattactccttgcattgtgagaattaatactacgtacattctctctatctcttattataagncatttctactttgtcttactaanattctttgattt

SEQ ID NO: 34759 - DNA, 433 bp, Oryza sativa
  unsure (1)..(433): unsure at all n locations
ttggtgagcctaaaacccaaagaagctattaaaaactttcagttcttgcttactaagtagaaaaaccaaaccagggaatgatagaccaagttagccaattaaattaataaaaaatcacactccattattatgatgatagcccccgactgacaatgtcaagaagaaaacttgatgttgacaggcaagatagggaagtacaatgataagcttaagcgtagaaacgacgaagatgttcaatgttccaagaggtgtcgacaagtgtaccgtcttcgcgcttgagtcgataagaacctggccgggtgacttcagagatgataaatggcccttcccatagaggagataacttgtgctgatctcgtgtagtatgaaatttccgcanaaccaggtcgccgactaanaaggcacgggatcgaacattgcgattatgataacg

SEQ ID NO: 34760 - DNA, 366 bp, Oryza sativa
  unsure (1)..(366): unsure at all n locations
aaaagttgtatcttgaaaagcaccgaccagagttgaatgaaaggaaaagtaccaacgggagaagtaaccaaacaataccaacaaaagctttagaatatccaccagaatacaaaaaaaaagtgaaactggccaaaaaatagtgaaatcgccggttgcggggatcngaacccgggtcacctcgcgtgacaggcgggaatactcaccactatactacaacgacttttgttgctgacatcgatngcacccccataaaattgggacatttctttgacggtcaaacaactgcagaatatgactgagcangccataatatgntttcaatggacacggtaatcacatacaanaccatgaccaacataacatgac

SEQ ID NO: 34761 - DNA, 452 bp, Oryza sativa
ttattaaactcaacgtgatacgagttggatgaaatagaccgtgcttcttctagcttgaagagatacgtaatatatccatgtgtggccatgtaaatggagtcgttgctacatacaaattaattgagctagatacatatggagagcaaaaccatggttaatcagttttgcatttcgatcactggaattgatggactgtgttgttattaagctaaggtacaagaaaagccggcgataaattagatggatcgaaaccaaaccacaagagtccaaagaagaaagtacaaaggatctctggacatgctcacgatgaataatcccatcgatcgagctactatacatacaaaactcactactagtaattaagtgttgagggttcgagaacaaattaattaatcgccaaataatgcatcacaaacatcatcaacctagttatcggtttctttttttaaatc

SEQ ID NO: 34762 - DNA, 65 bp, Oryza sativa
taccacgagctcagctgatcagtggagactcctatcactcagtcggacggatctttgctacgacc

SEQ ID NO: 34763 - DNA, 334 bp, Oryza sativa
gctgaagagctatgggcatggacgcggatggatctctattttattatgtttccttaagatggccagaacccattgatgtgctgggattctgctcgcatggagagatatatattgttgaagcctttatctgttccgccggtcgagcagacgctgcaacttcggaagatacgctcttcgtggaagatgaagccagagcgtgtgaaaacgagcaggcgggacacatcatcttgatcatactgactcccaatttactacaaaaagctgatttcaagcattgcagcatagggttatctaagtaaccgcgtcaggactgatgtactgaaccctgcctatt

SEQ ID NO: 34764 - DNA, 267 bp, Oryza sativa
  unsure (1)..(267): unsure at all n locations
gtcacaagcggtgggttgtgcgggataacgtgcctgtcagtacggtgtactggcgaagaacaagggcacgtggagatcatgagagctttgtcccagattcggagaaagagatgctgtggaccacaatgctcgagacattcacccttcctgcgggtacagaggacaaagtgaaaatgtggactctgaagaanatggcagaacagtttcagagcttcaagggagatctgtccagaagttatactgtaagggatacaccgacttcacaca

SEQ ID NO: 34765 - DNA, 424 bp, Oryza sativa
  unsure (1)..(424): unsure at all n locations
taaagccatgaatccctnttatgcatatctggatctggatcttacataacaaacagataggatgagtagtacctgatgtaaatataatactcgagaaaaattcaagcattttaaaatgtgtataaatatgtatttctcctcttgtcaattgtgatttccccgagcagatgactccttacgttttaacactctgcccgactagtcatagtccccaagcatcgggagtcggcctaggcacttcccaaacatgcatatgagtgacatgagttcgtcattaatggaacatagtttcacggagcagaatntactactcgggtacgtgtgccattctttagagcagaaaataaatctatctcatctctatgctcttgatttattccgaataatacttagcaccttgcgttatttgtccatccaacgagcc

SEQ ID NO: 34766 - DNA, 356 bp, Oryza sativa
  unsure (1)..(356): unsure at all n locations
agcttcgttgaatgaatatgcaagggaataatattcttattgcgtaacgataagaacagagcatgcagttctaatgcatgcatgtatgtntatttctatgtgtatgaagtatacatggcattgatttaagttggctgtgcaaaaattattggtagttgatctggaaaatatatctactgaatgaatggtagtnttnttctcttctatttagtacacgtagtntagttaaaaaatgcagtctagaaaagtatacgagtgatttcttcaactctaaaaggatattgtctgcatatgaagatatttatatgtctaacanagcatgcaagatctcttgatagaatgtctatttctctggt

SEQ ID NO: 34767 - DNA, 419 bp, Oryza sativa
  unsure (1)..(419): unsure at all n locations
tgtgctggtggtggtggtgctgatgcatgtctccagcgtgctggcggcggcggcgaggagtctgagcggtgaggagtggctgctgaccgatggcggtggcgttgtacggacggtggtggagatgctcgtcggctccaagtccggcggaaatggaagaggcacctgctgctagctagctagctcctctagctagagctaagcttaattaccatccgttccgaaatataacaatttggagcattcaagatttgttctaaaatatatataacttctctaccaatattttcttctcaaccaaacacaactcttcaccattcaattntattaccaaacttctcgaccaatcataatcttcttccttttaattntacctatttttttaatacccatatttcaaccgtatgtatatattttagaat

SEQ ID NO: 34768 - DNA, 271 bp, Oryza sativa
  unsure (1)..(271): unsure at all n locations
gcttggcataaggcatggtggagaggaaggcatcaaaatggggcttggtngcatggatgagtanggtgtggaagtggtggagaagatggttgtccagcatgttatggaaggcaatgccaatgcagagaaggagctggtgcggtggtggacctggtggtggtggtggtgggtgtttggttcggcggaagcatgccctagttgtgaaggggggggatctgtggatgaaatgagctactccaactccaagaagatggaggtcatcagagtagtg

SEQ ID NO: 34769 - DNA, 441 bp, Oryza sativa
  unsure (1)..(441): unsure at all n locations
tatttctaccatcgactctntattagttctgttgctgtaatttattaatgagtaaattacactagcgatacttaaatttataacgaggtttcacttatgtccaccaacttgcaaaacgcgcgtcgagatccctaaacttggtttaacgtatcatcccggtccaaagcctcgtttgatcatggtcttttgccaatatggtatgccacatagacgatgatataaacttcaaaaaactattagtagtataaattaaatatcatcttcttaaacaaaccttcttctatctattctatttatctattaagtatgtaatattatataaaaacgtgtgactactaacgcgttgctagcttaatcattctgatatactctggcattaagtcataatgtcatactagtatcttgcaaatgactgtctaatacctggccgtctgatcagat

SEQ ID NO: 34770 - DNA, 516 bp, Oryza sativa
  unsure (1)..(516): unsure at all n locations
tgcaagctttagattgcagaatcacagatgttcanggcttagttggtggtgctgaatacaactaacacatgttttctgatgtatatagtgcagctaaacatattattctaaaagaagggtagtccaatattgaaatcaaagaatgattcgaaatctggagcatcggaacacatctttaggagcccagcagaatgagcatatatacctcagaaatgaattccatgtcaaaatcaattaatatttttggtacattacatgacagctctcattagtgtatactgtanaaaaactctcattagtgtgcanagcccttttttttaattaaatccatatataagagtaagagaaaaaacagntcattaagctttgttagagcatttctggttttagcatttcgttttggtaaacttgatatccacacagcacactagatccacatncgtgaccctattcacttgaaactgtgtattcttagatcnaatatattacttctatgtagangaaccttacagatac

SEQ ID NO: 34771 - DNA, 439 bp, Oryza sativa
  unsure (1)..(439): unsure at all n locations
tcgagaccagcgcataatcgggcctaatgaccgcacagtgtttgttagtacagcgcatgggcttaagttcacacaatcgaagatagactaccatgacaggaacatcaaggacatgctgtgccagtacgctaatccaccaatcaatgtgaaggctgactttgcttctgtgatggatgttctccagaacaagctgaatggtaagatctgagctttagttaaccccccatggccgctatcttgcttattgtcaccatgaactcctttttctgcatcttattcaactgcagttgatgaacttggtgtgtcacagtaatctttaatttgtagtactaggttttgaggctcttctaactatacacataagtggatagagctgttccttgtactntatatatgtatcatataatatgacaataagtggttatgccctagcacttaa

SEQ ID NO: 34772 - DNA, 313 bp, Oryza sativa
  unsure (1)..(313): unsure at all n locations
agcttatgtccagattcatagtattaggatatgttactttccacctaaatctgtaggacggtgggagttctattgttgaaaaacagagtacaggttggtgacaacatcatatatcaggatatgaatgaaacatttacatgctggtagtttgctgacagtaaccatctttgacatggccgttgaatatgacccagttcatcagattaatcccaatcggacaaaacggatttaattactgttctacacacatagtaagtncagttaacagacaaactcacacttatctttagatcagtcatatgcagagtcagct

SEQ ID NO: 34773 - DNA, 351 bp, Oryza sativa
  unsure (1)..(351): unsure at all n locations
ntctcanaactacttacttctatntgctaatgagttgagggtcgtgcattgtacacacgtttaccctaaaaatagtttaagctgaatgggatgtaacttcattagaaatattgaatttgcacccatatacagcctttcctcatgttattcctctcccttatcctttgtcacctccaaatctcgccagtagttgtcgataatgcctctacgctcgatctccatcatgtgcccacgggtactctagcaactaatctattgcaccaacaccttgcttacttagatggcagctagaattcaacaagctaggggcaacagctacaagctaatgccactgcagaatggactcgcatg

SEQ ID NO: 34774 - DNA, 457 bp, Oryza sativa
  unsure (1)..(457): unsure at all n locations
agcttaacacctcttatttgactntnntcactatttgaaatacgaaaaagatccaaatccaaaatgcanaggtcgtcttattcaaaacctcaatcatcacatnctctctcttccacttcacacctcggaacgcactgttcttatagagagaaaggggctntcccatcttcttaacccgaaatgaaatggctgaggagagggaggttccttttggggggtacccccgggaagagatccagtggagacggngtgggcctgtagctcagaggaatagagcacgtggctacgaaccacggtgtcggnggttcgaatccctcctcgcccacagccttccaaaggggaagggcctntactttccncctganggtaggaaaaccatgatcgggatagcggacgtaaagctattgaacttgggtatgctctttccttttgtcgaagtggaatcgtagaacagaat

SEQ ID NO: 34775 - DNA, 455 bp, Oryza sativa
  unsure (1)..(455): unsure at all n locations
tgtacagtntgggaaggggttntttgagagaaaagaagaatctacttcaaccgatatgcccttaggcacggccatacataacatagaaatcacacgtggaaggggtgggcaattagctagagcagcaggtgctgtagcgaaactgattgcaaaagaaggtaaatcggccactttaagattaccatctggggaggtccgtttggtatcccaaaactgcttatcaacagtcggacaagtgggtaatgttggggtgaaccaaaaaagtttgggtagagccgggtctaagtgttggctaggtaaacgccccgtagtaagaggggtagttatgaaccctgtggaccacccncatgggggcggtgaagggaaagccctcattggtagaaaaaaacccacaaccccttngngttatcctgcgcttggaagaagaactanganaaggaaaaaatatagtgata

SEQ ID NO: 34776 - DNA, 376 bp, Oryza sativa
  unsure (1)..(376): unsure at all n locations
gatctaccccgtctaccggttcccctccgccaagtctcgctggaagtcgctgtcaccgtgaaggccgagtttgcctcctcgngttgatctccggccgagccttcttgctgntgcagtcgtcgccggttcaccccgaggccgtcgtcggcatcgcagcaccaagccgaagggccgccacccctcccgtgtcgcgaaggcngcgaaacaccgtcgcaccgtggacagatctcaccgcgtccgatctcgcgcgccatcttcgtactgtcgtcgccgtagtgtggaagatcgtgtgctctcttctccgggcctcgttgatcgttgcttatggcgggtcccgcaccgcgtctatagtaccgataatttttctaggctatca

SEQ ID NO: 34777 - DNA, 445 bp, Oryza sativa
  unsure (1)..(445): unsure at all n locations
tatctctaaganaattacataaaatatcctaattaatagatataattgcctttttaggactcagtccgtgtgtagcaatccatatgaagtacattaactcaacccgacaacgtgtatcgagtcacattgtcggaatcggcttaaccggctaccttgtccgactcgaactctgccgatgctggtcgcagccgattcggacttcagccgattcttgctctgtttccgaaacgatctctgtcttggattccgcttcaatttgatcttcatctctgatacctagattaccaattttggtcattaacagaagctacaatacaaaagtcatcctataatttctccatagatntaaatcttaataaaggcatggaatttaacgagaaaagtattggaaacaacagaataagcaataccaacaatgaagtaacagctcgggtctacaggaatg

SEQ ID NO: 34778 - DNA, 417 bp, Oryza sativa
  unsure (1)..(417): unsure at all n locations
tgtggtgctgntctgtacantattagaataataatgtcttctgcatgcatgtgaagggttaagaatgtcttacgatgttattggttcgttaagttaagtaggctagattngcaagttaagttaatattttgtagcactttatgttgtgtattntattaccccatggatcattgcaattgaaagaaagttctggtatagaacatcttcaaacagattttgatgatatactggtattttgcagcaggctttccttcttgatatgctagaaagctatgaatcagcactcggtgaatcaaataccaaaacaccatgtcgcattgcacgattcccaccttcattccaatcagttccgtgtaatcctattgttcttgatatggcctacaatgcgatcgagttcccanacattgagaacagaat

SEQ ID NO: 34779 - DNA, 477 bp, Oryza sativa
  unsure (1)..(477): unsure at all n locations
gacactaagatactcagcttaattgtgctgggatggtactctggatnntgcttaattgtcttctgttactgcaactccatgcctagcttgaccgtcgctgaacgccggcactggatccagtgtgactgattccgctgatcctcccctttgccgtcggggctgccttggggaactcttgctcattgggcacctgctgcgcccgatcatcccgccgccattgatcgattgcctgaacggatccccacggcggtacccacgccacctccgttcgttttagtatccgtcagagcagtcctcgcagcaggttcatttccttttactgacacagtttcatactccatcattgcactggttatttcgaataacatattatcaatgaccctatattcttgcttagtggagtacatacatatgtgattagtagcatgcatctgtgatcagtttccttggttcagatccattgtgttcttgatcatt

SEQ ID NO: 34780 - DNA, 226 bp, Oryza sativa
tatgagaacatctatagctggatacatgtcttgtaacaatcttaattgagcagctgtcattctaacaagatgagaacagaatctttgatgcaacaagaaagaatcacatcaacaaaattcatgactaataagccaggtataatagaagcagccgtgcatcatgctgtcacactgtttcattgtgctactactttatatacatactggtcaggttattgatcagtaa

SEQ ID NO: 34781 - DNA, 472 bp, Oryza sativa
aatctaagctaccggcagggtttttctggcctactgcagtgtccgacgcctacttatttgtgcgcacatgtgaagggtgccaatttttcgccagacaaattcatctaccagctcaagcgttgcaaacaatcccgctgtcttggccgtttgcggtttgggggctcgacatggttggcccgtttaaaaaggcagtcggcggttacacgcatctctttgtggccattgataaattttccaagtggattgaagctaaaccggttgtcacaatcacagcagataatgctcgcgatttcttcatcaacattgtgcacagattcggagtacccaatcggatcatcactgataatggcacacaattcaccggcggagttttcaaagacttttgtgaagactttggaatcaagaattgctatgcctcagtagcacacccaatgagcaatggacaggtggagagggccaacggcatgatact

SEQ ID NO: 34782 - DNA, 384 bp, Oryza sativa
tcgcagttcgtgtgaactgtgcatacaacatcgtgtagcctgtgtgtttctctcctaagaacattgatttgatacccagctcttacaagaaatacctcttttatatttaggactgagttctaacggtgaggaaataggacaagcctggaatgaaatgtatgattctcacaactggagaagacgagtgacatcttttccacttgaacacatactccctcgtagaactccaaagctgcatcatatgctggagcatatgcactatgcttgaccgtctaatatatataacaggccttggcttgttatatggagaagctatgtcatgtacatatcatgttatgacttgccttgcaaatattatcagcattgacacgctgcatacagagc

SEQ ID NO: 34783 - DNA, 495 bp, Oryza sativa
  unsure (1)..(495): unsure at all n locations
cttcatttcacccactacatatgcacaaatgtcttcttcttctgtgtttcagcttctctactgcatagtcagaacaaagaatgataaaagacatcttttagacattcactaacacagcttatccttcagtaacttctacccacagttacgcgaatattagtgaaagacctaatatcaaataattagaaggggtgagggttcacangtacgcgaatattagtgaaagacctaatatcaaataattagaaggggtgagacttcgaacccaggtcgtctagcccaccaccttgtggagctagccggannacccctanngcgttctcctatcccacagtaccaactccaattttggtcccaacctcttggttaatttccaactatgttacagcaccactagcagtgtagaaagatcanagattacatttacattcattcagtttgatctgccccactgaagatctcacatgtcaccacctgaaggagaaagctgactgg

SEQ ID NO: 34784 - DNA, 381 bp, Oryza sativa
atgaactccacgaccgacggtcgagaatttatcctgctctagcacttgatacaacaggtacaactggatgaagacagggaggacgatctaatgtggaaatggaatgcgaatggaatctactcagcccactcggcctacaaaattcaattcactggaagcattcaggacaatcgtgctaacttcatttggtgagcaaaaacagaaaataaatgcaagttctttggatggctcatggtccaaaagaaaattctgacgtctgacaaactccaaatccgaggttgggacaacagtccaacttgctccctctgtgggacagaaccagaaacagcgacacatctcttcatggattgccccttcgcgaaacaggtatagacaaacatt

SEQ ID NO: 34785 - DNA, 275 bp, Oryza sativa
  unsure (1)..(275): unsure at all n locations
gaagatctcatgactaccgtgccaagttgtcactttgttctttatactttatctcatcgctaatggtcccaaatgctggagtatanttttggttgccatttngactttttgtaccggggtcctatttcttctttacagacatatngcatggaaactgtctggaatcttcgagctgattagtggcatggtaaactcaataatactctgctcgaatctcggcactgataccagcttttagctggactaanactgattctggtaaataaaacaactat

SEQ ID NO: 34786 - DNA, 433 bp, Oryza sativa
  unsure (1)..(433): unsure at all n locations
gcttagccgatggaggtcactagagaggtggtgctcctcgagctttaatgctactactacaaggatgaaccggtcgtgtcngctgctggaggagaactgccgcatgctcgaggtggcaattatcacgaccacaggatggtgacagcagcgtgacgccctaatgccatacttcctccccctgatactgaaggagatgatgccggacctgcaggtcactggcgactagntctcctgcgaggcggaggcgatcagggagtggttgcgcagcgggcacgtcacttcatcgatggctaacctaaagtttccctaccacaagttcatcctcaaccatcccctctgcgacaccatccacgagtgtcgcctgcaccgcgccatgcgaaacaaagtggcccactagtggtcgcccttcttcctatcactcattcccctcctt

SEQ ID NO: 34787 - DNA, 440 bp, Oryza sativa
  unsure (1)..(440): unsure at all n locations
aactaagcttacgttcaggtgtgattcgaggcgacgtngaacctattctaatttacatatanttcctaaatttattgtataaacataccttgttgctgccaattttaaataccttgtgcctcccattctttcatttcccaagcttgctaccaattcttcatcatatctatctaccattctctcttccctaagcagtagagagtgtaaaaagcatagcagaacatatgaagaagagcaaatgagcgaaagagcacaacaaacagagagcctgcaggatgactcttanaaggaagggtgctggcagggagatggagggcacaaataaatttatttgtgccctacccaagaaggaagtgtggatacatcgaagaagagggggtaagaccaagacgaatgttgccatcgtcactaaggtctagcctctaggtgcttatcttcta

SEQ ID NO: 34788 - DNA, 318 bp, Oryza sativa
cccttggtcatatcctagccggccggcgcgtacgtgacgtactgacgacgcgattaccttggtgctcgtggatggatcgatggatgttggtaaggatgcaagtgagactagtaagtagcattttcttacatttttctttcaaattctatacaagtattggaaacaaactattaataatggctttattttatagtttatttaatagtttacatgcatacagattgattctttactcgctggataacaaagtcatcatctataatcaacgtgatgtttttccgaaataatcatcctctactaaactgtctctatttttat

SEQ ID NO: 34789 - DNA, 449 bp, Oryza sativa
  unsure (1)..(449): unsure at all n locations
tgttcctcanaccatcctgaagcagatcatagagcaactggttgcaccatcatcaccaaacagctcagaaatcacgatgttgggggacgacctggagctgttggctcgcaacatatcagaacgcctcaaggataagaggtaaacaacatttactgcttgcttaattcagctgctataattatatagcactacttatttacgacttctcttacagtacagcatcagagctcgaattctgttaatattttctcttcgtattgtccctccagatacttcgctttgatcgataatatattcaacgaatcagatttggaattgatcaagggtgcatttcctaataataactgtggtagcagaatattgtttacggctggcgatgagcggatagcanggtggtgtttgtcaaattataatgggattgtgcataagatgaagcctctgagtcactc

SEQ ID NO: 34790 - DNA, 292 bp, Oryza sativa
gacagcagcacaattcaccatgcgaaagctaccatatctcgaaacaataatagggctagaaacaatgtacttacgactatcccacaatcgtagcaaggcaccaattattcttaagcaatcatcgactcctatatacagggactggggacccagaaatggtctctgaatatttcaatcaaaacatacaattcgaattgcccccataaactcacataatctctgacaaatagccagcacacaccacaataaccactacattaaagagctgatcacattaaccaatctggcacta

SEQ ID NO: 34791 - DNA, 451 bp, Oryza sativa
  unsure (1)..(451): unsure at all n locations
tcctagaagattcacccaanatctccatagactgcgatctttattttagcctacaatggtgagttctttcaagaatgctctgcaggacagcatcttcgttaattaaagccaacagaactcattaaggcatagccaacctgccttgcagctcacgacagtacatgcatcttcacttagagagggtataaattggtactctcctctagtttactaatggtttgttcttcccagattctaattcacgggatctccgatcacatagattgggttaccaccatagtaaaactcacatgggtctcaaacccatctccttcgatgcattgtctatcacatttcgtgatagtcccttcgtgaagggatccgccaggtttctagctgtttggatgtaatccaacgttataactccggagtttctcaatttcctgacagacttcaatcgtcctttcacatg

SEQ ID NO: 34792 - DNA, 450 bp, Oryza sativa
  unsure (1)..(450): unsure at all n locations
tatcataaagggcttcgacaaggggttttattcgttctttgttcttaaagataaagatcggatagattcgaaccgcaattgcaaaggtaatcactactatgccagcccaaatcatgatcttcaccaacttggatttggttctctcgcgaaaatcgcgagttgcagagatgagaaccatgaaaagcaagatcccgaataagaaaacagaaaccgaggaaaccacaagagtgaagactagtagagtctcgtcttttgtcattctttgctcctttttcactcaatgattcattcgaatttcccgaccaaaaattctatatgtctattcatagggcctcgttgctaagtgctacaagatctagtgcactggaactcgtggttatggacccgaatcctttagtatggaacattgtcttttccaagtaaaaacccncagtatatgaaagaatgaaa

SEQ ID NO: 34793 - DNA, 301 bp, Oryza sativa
  unsure (1)..(301): unsure at all n locations
agattgagctgtaaattctaaaggtaccaatgatttccatctctgtttctttagaactgcttctcgctattagccgatcatgctttattcttccaagctgcttgtagatagtccttttggtgaaaagcatgaatgataaaattagtgccctccaattgcttaatacctttgacacagttatttatataggtcatgaaccactacacttggaagggggtatttatataanttgaaatattcaaaataanaatacccaaccattaacttgaacataacttgccaattaattatactataaata

SEQ ID NO: 34794 - DNA, 414 bp, Oryza sativa
  unsure (1)..(414): unsure at all n locations
tctggaaataataatgatttattaacttgatgtctccagacaaaccaatggatggaacatgcctgcctacatgtatccagcaagcagttcaagtactaactttgaaacgtgttgtaagttctcccaagaaaaaaaacaaagaaacttttcaatgtgttgtaacaaaattgtgttcttcagttgagataaagctacatctacctcaataggaccttcagatctcttgcgttggttttcttaaagtcaatatttgtgcaatataagaagggataggttacctcanaatgtaccatccttcaggtgcaatcttcagttactgggtggaataagcagccactgatgcaggaattgacaaaagctctgaaatcagtctcttcagatctgctggaccgantcatcgactccgtgtacaag

SEQ ID NO: 34795 - DNA, 369 bp, Oryza sativa
  unsure (1)..(369): unsure at all n locations
acctataaaactcagcttccagtttagctcgcttttatcttttccgctgcatttgtaatcttttctatttttggaagacgtggatctgtatgtcaacaattgtcgtttgtgtaccctagctggtcctggacagggatttaatgcacattcagcttagaaattctggttcgagaatttctgggcgtgacagccgcccagcctggactcccctttcacacttccccccgagggggggcctcggggtaaaacgacgggagagccctaggntttgtcctccaaatactttnctttgatcgataatatattccacgaatcacatttggaattgatccacggtgcatttcctaataataactgtggtagcagaat

SEQ ID NO: 34796 - DNA, 72 bp, Oryza sativa
  unsure (1)..(72): unsure at all n locations
agcttattctccaaaataccatcaccgcaacccacaccgtacaancgtattttnttataagaccatctttgc

SEQ ID NO: 34797 - DNA, 277 bp, Oryza sativa
  unsure (1)..(277): unsure at all n locations
actagtaaagaanaccaacacatcatttgatatagaaaaaaaaagaatctagcaaagagaagtctaaataccccccctaaactttgtcttgaagtccaatgttcatctagcaccctgaactttaaaaccagacatcaacccccccccccccggaactttacaatactatgcatacgactcactatgccggcacagcacacggggtatcctctacttggagtatcgcagcctaagattatcagggtccctatgccctgcacattacggaaaactccac

SEQ ID NO: 34798 - DNA, 398 bp, Oryza sativa
  unsure (1)..(398): unsure at all n locations
tctttgcacatgtcacaccattaaattgtacttgtagaacaccctggatggtaacagcaccattgtgaaatatgatgttgtcgctattgaaagcgccattgtagctcaggttttcccagtgcattgcagtgatgtggttcaaaaccttttggatgttgtatgatgcanagtccgagaagtatcttactgataaccatggtagaaccggcnggattgtacgagtttgacgttgaagtgcaggtactaaatcaaccgtgtagaaccatgtgttcgcatggatatcatcaaacttctcatcaaatgtcatgggcctacaaaaaagacacacaatgttacaatggtagagacatgtataaatataggaaagtaacattacttaaaaacaaaanacactcact

SEQ ID NO: 34799 - DNA, 254 bp, Oryza sativa
cactcgcatcgaccccgcctacaaaagaacacacgagctgcactggtcaatagactggcctctgctcgcatctaatgatgcaggactcatgtgtcgaccatgcccactgtccatgatagcctgatcattggcacattatagacgcgactgtcacacaaatagtgctgctatgcaacacgactccaaacctgactatcctagatcgtgaatgagacctcctggcattaggctgtaaggactgcttcactgcgtct

SEQ ID NO: 34800 - DNA, 259 bp, Oryza sativa
  unsure (1)..(259): unsure at all n locations
aacacacgccttagcaaacaggaagaatctctatgatatccattttaacaaaattaaaacaataaacatgtggatgtactaacttgggtaaacaagatcgagaagcgaactgcagagtacataatcacattttgaaagaaacaatcaaacaagcaagtacaagtgattacctgaagaaggaatctggcatgatccaagccacggcggggagcagcanggtgtcagccagttgagttggctaacagagtggccccagtca

SEQ ID NO: 34801 - DNA, 423 bp, Oryza sativa
  unsure (1)..(423): unsure at all n locations
cttttgttcatgtgatggaaaaaggggaacagctagtagatgagaaattggtacagatcattcctaactcgtatgtcgatggtgtttggcccaaatttcagccatttcaactggttaagcagccagccttctcctgccatccatgcatacatgtttgcagcacttctttgataaagtatacataatcattcctattcacaattttattttaaccaaaaacggaggaaagaaaattggaaaatttaagaggatataattggtcgaccacgggttgcacaaagttcagactttggcccccccaaatataactcggagacaatacttaccacgtagcaagaataggatatacttcctcccgttcataatgtaagaactntcatcatttgccacattcatatagaatgtaatgaatctagacatatt

SEQ ID NO: 34802 - DNA, 414 bp, Oryza sativa
cctatggaatggcatattgcatgtatatttttgaggaaatttaacaagagctcccacctcttggaaaaattcctttgagtctatctctcttatccgaatcctgcgttttcctacgctccaatcaaactatcattcctggggttttcctggggtttgcaatcctctggtttacacttcaattcctgtcagaatcctgtggtttttctattcctccggtttttctaccctacgaatcaaaagggcccctaaaccggcaatattcaagttcaagctcttgtgccacggaatgacttggcgtgcagatgaattattcctcccaaattttcacagcaataccaacttttccaatctttcgtgcactgagaagagaagatacatcagaaatgttgtgcgttgtgctgtgcctatatatgt

SEQ ID NO: 34803 - DNA, 216 bp, Oryza sativa
aagccaacgccgtcgggtcaccgtcgtccatgagctcctccgcggagagcgcacggggatccattgatcgtgacgtgagcagcaacggcacgcctgctccggcgaccttctcggtcaccttcggcgctgcgacgacgaccaccgcgcccgagctgcgcgccactgtggccacctcctcaaccgtggagcccgggtcggcggtgaccaccacgccac

SEQ ID NO: 34804 - DNA, 392 bp, Oryza sativa
agatgaattaagctgacataagaacttatttttccgccttaaagtgggcttgcacgttttatgcctaatccgattacatttgggccttaatggtctttcacttcttggaccaaagcctattacatttttgcttacaccacggcaaggcattctcttttttatggcttaaacgttttatacaacacttcagtaaagtactccgtactccaatattatttgcagtcaataaaactattattccaattaacaacatagcaagctcttcaagtggagttaaattaatttttaaaaaagattgaactgaaatgatggagaggcgccacaagcacaatttccaaggcatctgcttgatcagattccatttcattcctctcttttacaaactttttttt

SEQ ID NO: 34805 - DNA, 396 bp, Oryza sativa
tctacagggttcatctcaaatttaatgtactcctttttgaaaatatcacatcgaaggtctttaatggtatttggtccttgatgaaaggtactcaaagcattccaaatttcatgagcagttcgaaagtgcgccacacaatcataatcagaacgagaaataccactcaaaagaatgttgcgagctttgcaattttgttcaaaagcagttttttcagcagcagtattaatagcttcagcaatcacataaagatgagaaacttttctccaaatatcataatcttcagccataatgtaagaatgcatcctactacaccaatgagaaaaatccgttccatcgaaaacatgaggcttagttgaaaacctagcaagagtagccatggcaaaaactctagatcga

SEQ ID NO: 34806 - DNA, 280 bp, Oryza sativa
  unsure (1)..(280): unsure at all n locations
acgatgctgaactcgatttcccagcaaatatgccacgatctacgctcagtatccaaaataaaatctagtttgaaaggtacttcatgattcaacatactaataaagctgctgattaagctctaaccctaagttcaccagactgttaatgcatcaaccgtagcctcaaacgtaggaaccaaatacaatgtgcaatcagtcacctaaccagcggaacagaagtccgctccaacaaatatcagatcgcaatggccccttccacccnncaacacacacacaacaa

SEQ ID NO: 34807 - DNA, 289 bp, Oryza sativa
ttttttttacggcaaatacttgattaaaaacataacttccctttggagtcgctaattcctaatacaacatcttttgactcagcacaagggaaaagatgaatggacccttgtgaccgccaacaaacttagctattctttactgatgattgtcctaatagaatacgtcattccatactgctactctatgcagggacagaaccggaaattacgggctgtgagcttccaagaacccggtcggcgctcgaacattcagccaacctgggatctggcattcaactgtgtgacttat

SEQ ID NO: 34808 - DNA, 495 bp, Oryza sativa
  unsure (1)..(495): unsure at all n locations
agttactcagcctgtggtgtcccacttcacctatgcggncgcacttgttatatgcttagatgtaatcccaaaggaatcggtccttaaaagcgtgatcacttacccctacttggactatggttntaataatcatattatgatcgtgaatataatggcccattggttaaaccgctgccttcctagtggtatccgtgcattngcatatttatctatgatcgtaacanataccaacaatattagcttgtcgttntgtgtaccttggctttgatcatgggaaggggattaaatnntaatacataaaatagtttgaaaatggctaattnttgggcgtacaaattttctaaagatgtgntttacgtacacttttctaccttacatcttcgtntccaacacatgctcccgaagggctgacagtgtntttaaaaaatatgacaaagtgctaaaaatatataatctagttcaaatatttactataataatagtatgtctatctgc

SEQ ID NO: 34809 - DNA, 421 bp, Oryza sativa
  unsure (1)..(421): unsure at all n locations
tgctatagaacctccaattaagctggggtaggggncatatattttggtctttttttcatgcgctctcccaaaatgtagtgagtgggaggagtagatgtttatagggtgctagcattgtctactgtctcgctggtctgtgcatggtgtagccttcgtgtcagctccatcttcccttgccctcctgccttgttagactcgaatgatgtgtatgtgtagattgctgattgttacacaaatactcttgttatacagatttttttagaggtgttatacatatatcagaagtaaatattagtttcgtgttgcttaaggtgatagctatagtaatacttttttcctttgtatgtctgttggtttatattaaggtgttcactcctaatgattacatctaacagagatgcaccatccatgggatgagttg

SEQ ID NO: 34810 - DNA, 517 bp, Oryza sativa
  unsure (1)..(517): unsure at all n locations
gagcttatgttatttgaagtgattatacttgacanatggaaccacctangtgcccagctcctatcangctacacagttttttcgattagttntgtcggttcagtctgcatttaatttaccttttcgtctaatctttgggagtattaggccattcccaacccaatgattaggatggtgtccatagcattaaataaggtgccacctagaatgaaaaatgatgtggcaagtgaataaatgaggaaagagaaggaaaccatgtcttgcatgagacatggtttctacacaacatccaagacatcatgtgagataaggagcattgaatntaagtatggaataatagtgtttgcattggaagagtggtgtctagtactagtttcttgatgaatgtggagttatgaaaatcatgtctagntgtttgggttgggaatgcctantactatcaagtanggattgcattatttgtagtgngtaacgcgtataacaagcaagcattggaaacaagtaattttgatcttac

SEQ ID NO: 34811 - DNA, 449 bp, Oryza sativa
  unsure (1)..(449): unsure at all n locations
nggtgattntattttatatgcagtattgctgctgggtattttttctgtacttttgagaaccttgatggttacctgcatgctgctctaaacaagggtttcttctgaagatatgtatcttaaccctcatatcatttcaggtcagagatgaaatagaacatcttctggatgataatgaagacatggcacatctgtatctaacaaggaagcaattacaaaaccagcaagttgaggctttaatatcatcggctgcttccaatagcattgttcctggaggaacaagtctgtccaggttgaacaatagttttcggcgcagcgtgagcatcgctacaagcatgcatttggataatgacgtggaagacctagaaatgttgcttgaggcttacttcatgcaactggatggaattcgcaacagaattntgtcggttagtccttttacccatattgaaatg

SEQ ID NO: 34812 - DNA, 261 bp, Oryza sativa
  unsure (1)..(261): unsure at all n locations
gcatctcctgtgaatgatagcattatgcagtcctatcttatcatcacagaacccatcaaggatgcagtcactagaacaatgccagctatatctctccagaatcaaaatgagcagccatgtttgtggcttccagttcgctacttatcatggtgtaatcgaaaagttgcagcaatcatgtaatacagaaatatattcatgtctattaacagngagcttgctatgcttatggatgattcatgttgaggatacaatgtaccgatg

SEQ ID NO: 34813 - DNA, 446 bp, Oryza sativa
  unsure (1)..(446): unsure at all n locations
tgtgagaatagtaagtgttccaaatcaaactcacccaatgtattgtctgtttattaaaaaattntgcaagatgcttaagaagcagggctctattttgtattcttaagtcaatgaccctagaccccctttcttcttaggcctacagacctttccccaagcagccaaagatttcttggttgaattaagatcctttcctctccacaaatattgtctaattaatagataaactaacatgccacatcctccttgaactcggtcagttttggattagcttccattaatagattagtttccttaaccgaatttagcaggaatccgactattggcgacgtgataattctcttaggagcttaccaaatttcactgttaacacactcctcacgaanatttcaactaaactcgaaaattaaccaaactattctctcaactcaatgctatctaaagcg

SEQ ID NO: 34814 - DNA, 482 bp, Oryza sativa
  unsure (1)..(482): unsure at all n locations
ctgcggcatgcaagcttctcgtgcttgcattaccaggaacctattttggttccaactgatcccgccccggcgttcccaactattggcatgcgagggttccctgaaccgactagttacttaaccagggtgtcccattccaccttgtgggtgcacttcgattatgttcgatgagtttcccacaggaatcggtccttatatgcgaatacgggacagtgccacataggcacaacccccgcatcgcgagttntcacaattcattntattttcaaacacaccgacaccacatgtcgggttttaaggcttacaaacccattcccatgtttcgacaacaacggtgatgtggatatttggatacgcgctaagagcacaataccagtccacagggggagcacaggatanggattactctacagataagcacactggangtcgtcgtggaccaacgagcaacagtagtgggattatatgagtgcacaatatat

SEQ ID NO: 34815 - DNA, 327 bp, Oryza sativa
  unsure (1)..(327): unsure at all n locations
tcggcgaggtatcatatgcaccttggaatctctggtaatttccttatataacctatcatccgctggtttggactggttggaagaaatccataaaagtatggttcggtattaatctaaaaggatcgcggatctaccatctcttaaaaggtttcatcatcttgtctagatcttacacttatctttacgcttaatgctgcaacggttgagttcgatctattaagaatatttataattatggtatatggcttggtttatgatcatcgagagagatangcatngggtttcagccgatcttacctaattagctacttatatctatacgctgat

SEQ ID NO: 34816 - DNA, 466 bp, Oryza sativa
  unsure (1)..(466): unsure at all n locations
atgatatgtgtattgcaaagaatgaggaggctcttgctattgatccaaactttgcagagtgctatggtaacatggccaatgcatggaaggtagtttggcgatataaatcatgaanaataataatcttatttgccaatgagtatatntgtttgaaagtcaatacttatcattctaaaatagatgcgatatantttgctattcangagaagggtgatgttgatcttgcaatccgttactatctaaccgccattcangtttgcttctgctgtgcatttacatttccttgtnntgttntgtcacttatttncgttttcaacctaangttaattttggaaatttgtcatttgaattggtcaagttattgataaattgctttggtccctcatgcttgcacattntgtcannatgtgngctctggcatggcttcaatgcatacttannaatgagtggacctttatcatatgat

SEQ ID NO: 34817 - DNA, 433 bp, Oryza sativa
tgagggtcggcacatcataacggaagtggaagaagatggacgttctattgccccggccgaagccgccaagaactatgtacgtcatatcggttgggttgtgcgggataacgtgcctgtcagtacggtgtactggcgaagaacaagggcacacggagatcatgagagctttgtcccacattcggagaaagagatgctgtggaccacaatgctcgagacattcacccttcctgcgggtacagaggacaaagtgaaaaggtggactctgaagaaaatggcagaacagtttcagagcttcaagggagatctgtaccagaagtatatactgaatgggcagacactgaacttcgacacattcccaaagctaagggatcactgggacgagttcgttgcatataagacacgtgaacaacggtatgcgatgatggaaagaaac

SEQ ID NO: 34818 - DNA, 403 bp, Oryza sativa
  unsure (1)..(403): unsure at all n locations
tgccacagntgcggcaggcgtcgactcgcgccggcttgttgttgttgtggcaacgccctgtgcacctttgcgggcgccaccctcggcacgtcttcgcgcccaccgtaactggacacctccccgcgccttgcgcggcttacgggcgcctggcggggaagatgactccccctttctcctgtcaccttgagaggcctcccactggctccgagtgagatggagcttcccgccgatggtgatgggccccgagagaggctgtggctcatcaccatcgacgaccttgaggcgacctaacgcctcctcgatcgacatcgtggagagggtcaacagagattcgatcgagcgagcgatctggctgtacttttacggacgcagcggaagagcttctcgacagctctcttctcgt

SEQ ID NO: 34819 - DNA, 374 bp, Oryza sativa
  unsure (1)..(374): unsure at all n locations
actgactgtgtgtgggcattgtctgagtagtctactgccaactctaccaagcatgtgcccattcttacgtgtactggatattcagtggtgtgacaaagntgagaatcaacattgtaaggatatctgcaagttgtttcaccttaggtatttgcggctatatggtacaagtataagcgagctcccaaaagagattgcanatctgcagttnttacaggtcctggacatatctatcactaatatcaaagagctgccaccgacctttattcaactaaaacagctggtggtacctgcattccncaatatgatgagattgcagacggtcttgggagtctaaacaggctgcaggaaaatnctaatggtatcactatcgattc

SEQ ID NO: 34820 - DNA, 98 bp, Oryza sativa
gctcgggcctggaggagcatatatggccgatcatcgcatgccggcccttaagccagccgcatgcgaagatccattatctcatgcggctacttaggaca

SEQ ID NO: 34821 - DNA, 150 bp, Oryza sativa
tatcttagaatccttttcacgggcactaagtgacactccttaggagcggcttaaaatcgtgcacacatgcaaacactaaacatgatatccggcctagatgccggtagggtaagcaagataccaatcatagaacgataaagctttaaatct

SEQ ID NO: 34822 - DNA, 458 bp, Oryza sativa
  unsure (1)..(458): unsure at all n locations
tgtgcagtacagtgcagtgctttggcgttgtagtgtcctctttgtgttttattggtgggatatttattggggcgaaacggcgagtcaccaaacgaggccgaaccgaaccaaatcgggggcggttgcaacggtgaaacacgtcgatatcaatcagtagtggtacggttctcaaaaaaaaatcagtagtggtacgtcgtatcatccggtagatgccctgcacgctactgtttggtttgtctcatcaacggatctcggatgattcgagggccangcgtgccgcattgtgcgtgagatatcattagcataagtgataccctgtgactgcaaaaattactaagaattctcgatatatttaaaaagaaaaaaaaataaaacgtcagggtttacagtacttatcgtgaaataaaaaatacctatgttttaatgtaaacatattaataagtacatattaaatatta

SEQ ID NO: 34823 - DNA, 320 bp, Oryza sativa
  unsure (1)..(320): unsure at all n locations
tactctcgctaattaatcaaccagaacacatctggngaatggggatttgcagctgcaggctgcatcacgtgtggagagggattctatacgcgaaattcacacgcgcgagcgtgcgggtgcgttcgttgcgtgtgtgactcctatgaattctgacgaaagtctgaatacactgctcccttcaatcacaatgatccgttcttttctccaacaaaagttagacgaagaataatattnttatggcacgaatttcaaactgctaaacggtgcaattcgtgcgaaaattttatatgaaaagtgcttanatatatactaatctattt

SEQ ID NO: 34824 - DNA, 449 bp, Oryza sativa
  unsure (1)..(449): unsure at all n locations
acccgacgttcgtactccatccaagcatgaatgaactgtgttgtctgttcacggtgcgttatcgggccgccacttgaagtaactctgactgggtcaatgcattggacgaattgacattttcttacatccttctatgtacattcattttgggatagttaagttaatgataatactgaggagtgatgaaaagaatagctgtaattaccaacaaatcattggcgaccatgtttggacacaccaaacacctttgttcttgagatcggagccttacagaccttatcacctaacaacagtcaccacaacgacactccggacgctcacgccacgtggggagtgctaggggatttacgtgccattctaaagcctcagcagcaattcgacgttcatgctcatccttncgccttatgtagtccgatcttgtttcactacgtgggtaagcacgggttccg

SEQ ID NO: 34825 - DNA, 519 bp, Oryza sativa
  unsure (1)..(519): unsure at all n locations
gcttattctatgtcggcttattataattcagcttacagtaatctgtcttaataatatatattacaataattntaagctgaaacaaacagaggcttagtttatttattgagagaatacggtagtgcagaaggtggagaacggctccgcttttacactagtagacacaaggaagacatacgtgttaccgtttgcgcataataccatatatttcaacagctgaaacacacttgtgtttacgtaaatgcagtggcggagctagaaacaataaattttatctgccatgaaggtgactatcagtaaattatttgaattttgcttaaattcaaattaatctaatttttttttgcanatggagggaggtatggtggtattcttcttatgtactcagtngaaataaacaataatgctgactaaaatgacaatatgaattgtggacagtggcagtgtaatgatgtctaccggaaattgattactataattatgagtatgattatttcttatggactgtctctcgataaa

SEQ ID NO: 34826 - DNA, 379 bp, Oryza sativa
  unsure (1)..(379): unsure at all n locations
ttcagttaactttttatgttttcgtctgaattcagatccgcgcgacggaatcagaatttctcggtcaccccgcatgtgtatcatatgggtgggcgacgcgagcacgccgatctaatgacattctctgttgcattatcttattcgttcaaagagacattgcaagactgacactatttaagaaagagagaaaagaatatgaggaaatggaaaaggaggaagaggtggagagtaactaaatgttaaccatatatcccctctatgatacgatgtctgtggcatgcaggctaatactataatcaagcgtgattaattaattagtagtattgctcgccttgataattnttggttggtaatctgatcgtctcacgatttcctcgat

SEQ ID NO: 34827 - DNA, 318 bp, Oryza sativa
gcacgagctcagctatcgcagaggaaagccgacacctttgtttaatacgtcagtaagagggggtcaaacagcagaggtgctaaacaccccctttaaatggtatactactgtcagcccctgccttaaataacgggctaccatctgcaactgtggattaaaatgctcgtgggacgtcgcttaaggacaccgcaacgggtcacagcgagcaaatgcgttgatacaaacttggaaatcatgcccaaaccaggttctcgcaggtcgcacgagggagtaggctagacagccaagctatcatgcacagcatatctgctacctgtg

SEQ ID NO: 34828 - DNA, 241 bp, Oryza sativa
ttattctcatcacaagctagacttcattcttgccacatgatgatgtcctggcttggtgaccactaacccatggtggcattcattagcctcatcgtagtgggagctattccttttcacacctcataggagaacattagtctcacaaatcggttgcatccttcacttgatgaccaacgggtgcatatgacatatatggatatgttggttgagtattcattaacatcacatgtgtcatagactc

SEQ ID NO: 34829 - DNA, 229 bp, Oryza sativa
  unsure (1)..(229): unsure at all n locations
tagcgagtgagaggcccggtcggacgaagacaaatatcttatgtgttcttctatatctgctacaaggagaggcctgtggatctccgaaacaggagaccgacgtcaccagaatggaagcaacctcaagacagtcactcaaattcgtagnttgttatgattggacagatactacctgaggttcatcgagaacttatacaaaattcttcgacccatgacacgagtgctgaag

SEQ ID NO: 34830 - DNA, 412 bp, Oryza sativa
  unsure (1)..(412): unsure at all n locations
gtttctatcttctatatattntnttcattttaattaataattttctttgtaggctaagtttccacgtgttgatactcctggtgctgcttgataattgtttcagtctaaaagctatttggtttgaccttgtaagttaagttntaatacctggtctatattntatttactttggtttggtttgactnttntaaaaaaatttcctttgtanggtaaagttcttcacgttgatcgtactgctgctgctttgaccagtgtttcagtatacatttcacangttttcttgaaatgagttgtgtgacanaattttgatgacgaggatatttgtctactggcagacatagatacatatatggagcactctagcagatatacatacttgtatgagtatagaaaacaatatacaacattgagt

SEQ ID NO: 34831 - DNA, 414 bp, Oryza sativa
  unsure (1)..(414): unsure at all n locations
ctttagtcctaggtttcgaccaggcctttgctcttctagtttctctttttggttcgcggcgggcgacctttgctccttgtttgattttgctaggtgaagtccgagctgcttcgttgtggtaatgaagctgggtaacgatgacacactacagcttctttctacgggtgttgttgctgaacatgaataagatgtggcgcttangcagcttgggctgatgtccattgtgggatgttgaggccgcttgatcattatggcagcgtgttaggtatcgatgttgtattctaaagtcggagctgctgtgtcgcttggcggtaagctcggcaacgatgacagattgcaaagtcggaacctcctatattgctcttggtcaaatttggtatcgacaccctatgttgggctccgtcagtggttttt

SEQ ID NO: 34832 - DNA, 492 bp, Oryza sativa
  unsure (1)..(492): unsure at all n locations
atccttaagcaccgcngctgcagctangcacatccccgtggacctgagcaagtcttctactatgtgctcgggcatagggccactaccatcccaccaacggtggtttgtcagtgcaagctttcttgcctttgtgcactcgatgtctttccatttcagggcgacaagtcagatatctgcctaggggtgtgtagtgtgataagacaacaactgccacccttgtcgtccgttattttggctgatcacttaagagagtggacaagcaattgaagaanagccttagtgcatgcccaatgcagggtgcaccctcatanganaagtgatcaagcacccatgtagggatatgcctcacatagtgcaagccatatccncattttcattttacactgcagcacctggcagtcagtcacattntacatttaagccctttgagtattnnntattgcatatacatccattattntgcaattacccnctannaatcacatacatata

SEQ ID NO: 34833 - DNA, 404 bp, Oryza sativa
  unsure (1)..(404): unsure at all n locations
tgngttagggtgtgttctgatgcaagatgggaaggtggttttctatgcatcttgtcagttacgtcctcatgagatgaattaccctactcatgatcttgagttagctgcagtggttcatgccttgaagatttggcgtcactacctctttggtactcgtacggaggtgtacacggatcacaagagtttgaagtatatcttcacccagccagatctgaacatgaggcagcggagatggttggaattaattaaggattatgacatgggaattcattaccacctgggaaaggctaacgttgtagcagatgctctcagcaggaaaggctattgcaatgctacggaaggacgacagttgccgtgggagttatgcaaggaatttgaaagactgaatttgggaattgtcagta

SEQ ID NO: 34834 - DNA, 422 bp, Oryza sativa
ttgcttcagcagatcaatcaggcccacagattgccaatatctttttctccactcgcccagacgggaatacaggtcatggtgcacttacttggttgccggcgaaccagcctaatcttggggcttcgccgtggagtcacgtaccttagtgcgacttcatcaataccgctcatgggcgaaccgctcagccggcaggaccaacaccacgcttctgaacaagccaagcaccaacccatgtcgccatggtatggtcgcagacagttttcgacccatccatggcggctcagcaagcatcaccaatcggagccgggcagacgaacgccatggctcaaacttatgcgcaagccgtaattgctctcttcgtcacaccgtacccacagcaaggcaccgtgaatatggcgggaggcgagaatgggctaccgctg

SEQ ID NO: 34835 - DNA, 367 bp, Oryza sativa
  unsure (1)..(367): unsure at all n locations
agctngaagagaagcattggccgccttgttctatggtatcttcttgccaaatttctaacatagaggaagttgtcgtggatgctcctgccttttgatgaaggcgcttgattgactgtgacgagggttcgcatgtgtaatcgtagtcgcaaagccaaggttntggagaggatctttgctatactgtggattangctaatgggcctgtagtccgtcacctcatccgcgccttccttttttggaatcangacgatgttagctgagttcaggaggttcatgttcgcacatctcagaatattaagcgattcgaagaccgccataatgtcccccttgataatgtcccagcaaactttaaagaagttccccgtgt

SEQ ID NO: 34836 - DNA, 283 bp, Oryza sativa
ctataaaactcaagctttatgtcctttgtttatatttctcgagagctctgaattttatctggagcaatttgaggacatgtggtgtaaaacaaaggcgataaatccatcaacttgtgaacaagcaatgcattatagtattaacatgaatcaaagatattgccatgaagctcaaatcaacaatcaaggtgcacgaattcaaatgaactatagtgcaacatattcactataaaataagatgagctttataagtagtgattataactttataaaaagtattgatgct

SEQ ID NO: 34837 - DNA, 472 bp, Oryza sativa
  unsure (1)..(472): unsure at all n locations
agcttacttccnctnccaatcattcggtaacccttcttacgaaagaaaggtgttcttattgctatctaatagctgatagctagttcgcgtgggctaacgaggtaattcctcgacgaagccgcacaaggaagcgggaatgagtcttanggagtattgtgctaacccttacctgtagcgaattaaagaaattatctangcccggtacacgggtaatccgtactccttattgngtaaggtaggttcacctttactttgcangggtngcatgaagaaaaaanagtaactcccattcggngagtccaagcagtgatcgatttcttttactanataaatcacttctttngatcttagccatgaagatgcccgagaatcgccaacagaacagatatctattcagccctgctcgatgacagcanatanatctcctttgattagtgcttctaatcccatcccatctnntactttctttata

SEQ ID NO: 34838 - DNA, 446 bp, Oryza sativa
tctcaaagctggcttcatcagagaggtacttcttctatagtttctagccaatccagtcatggtgtggaaggtcaaccggaagtggatgatgtgtgtcgacttcaccgacctcaacaaggagtatcccaaggatcacttcccccttccttgaatagaccaattggtggactcaacagctggatgtgagttgttaagctttcttgacacctactctggctactaccaaatcagcatgacgaagaggacgaggagaagacaacattcatcacgctgtttggtgtattctgttacgttaagatgccgttcggactgataaccgcagaaaacaccttccaacgcacggtccaaggtgcacttaacaatcagcttggaaataatgtcgaggcctatgtcgatgacattgtagtcaagaccaagacaagcgactcattgattgacgatctccg

SEQ ID NO: 34839 - DNA, 190 bp, Oryza sativa
  unsure (1)..(190): unsure at all n locations
cgcagcctcangtgcatagggatcagtcgagtttaatctatttctatatgcctcgccaatgcggtcctatgatcctttactactcccatggggttgttgcactcaccacagcttgatgcgggcatagtgagcactctgacagaaaggcacgcttacttggctggaaatacgtacttgtgatgactcttat

SEQ ID NO: 34840 - DNA, 285 bp, Oryza sativa
  unsure (1)..(285): unsure at all n locations
acgaaaacgaccatcttatctactggctagatcagaanaatagcaaagcagtacatgagtggatcagacattgctgcagatgggattgacaaaagccatcagaataaagaattaaggactttacatgataattgaggaattaaactgcactatgagccaatatntttggttgtacagattaaattatatgggtaatataagagtttctgtgagctagaaataaaaattgaacaataagatgcanggtaaagttttaagatgccatctgcgtacaagaaaaatgac

SEQ ID NO: 34841 - DNA, 448 bp, Oryza sativa
tatattgatcttttccccgggtggtaacaccaaccgggactattgtgaaatctggtggaccgaccaaagatggtttctccactagtggcagctgctgtggatatggatagatctagatgacgagtccgcacttcctcatgttcccggctcctgctccacgcttcccgaatcgatgatggcgccgacgaagcagacagcctgcctgtgggaggttgggccatcgggaggaagacggagggccgccatcgaggtcgccgccaccttgcctccgcctagatctcatcttcggtagaatgatggcggaacggcctcaaggctgtctggccgacaaatcccattgagcatgaggtcgtcatcgtcgtggcatctcccgcggctcgttgactagtgggggcggcagtggcatggagtcacagtcggtgcccgaggacgacgagctcgatgaggc

SEQ ID NO: 34842 - DNA, 457 bp, Oryza sativa
  unsure (1)..(457): unsure at all n locations
tgtacagtttgngaaggggttttttgagagaaaagaagaatctacttcattcgatatgcccttatgcacggccatacataacatagaaatcacacgtggaaggggtgggcaattagctagagcagcaggtgctgtagcgaaactgattgcaaaaaaaggtaaatcggccactttaagattaccatctggggaggtccgtttggtatcccaaaactgcttagcaacagtcggacaagtgggtaatgttggggtgaaccaaaaaagtttgggtagagccgggtctaagtgttggctaggtaaacgccccgtagtaagaggggtagttatgaaccctgtggaccacccccatgggggcggtgaagggaaagcccccattggtagaaaaaaacccacaaccccttggggttatcctgcgcttggaagaagaactatgaaaaggaaaaaatatagtgatagt

SEQ ID NO: 34843 - DNA, 249 bp, Oryza sativa
  unsure (1)..(249): unsure at all n locations
taaatatcacttggttgcttatttcattatttgggattcacttggttgaaacaaatggtagactactccactatattaaaaaatatcaagggacaatatgtacaaactattaaaacaatgacagaatcattgctaccggcactaacggcttttaaagggtgatagatattggcgttgtattaattgtggtgttaaaaatnttctgtagtccgacaccataccatatctaatatgcactgatcaaggggg

SEQ ID NO: 34844 - DNA, 461 bp, Oryza sativa
  unsure (1)..(461): unsure at all n locations
gacctatgatactcagcttagagtaggggtatacttatgtagacagatattgttgtgaaggtcgtaaagtgcatcaaaaccctaatggtggtaacccactcagaatgctatcattttcacaaggcattcgatatagcttttgatgaaccatttcaaagtttctcttgaaggcgatgaaacagaagatttgcttcacaccatctaagaaagggataagcagaaaggtgattgataaaggataactagggagtagatcataccatatatcacactggcggatatatccaatgaaagagtcacatcaaggttggggtatatgaaaggataaggtgcattccgataattgagacccacagagaagagcagacattaatttgtatgttaagatattgaacccgagttgtatccatttcaagctatgttaagtgtctactccanagtaatctacatgcgacaatata

SEQ ID NO: 34845 - DNA, 458 bp, Oryza sativa
  unsure (1)..(458): unsure at all n locations
taatatatttatctaatataattggttaatatatttttactacaaataaatgttatttgcttttcagcaaccggtgatcattgtgattgatcatttatgtgcatatttaaccaattattatgccattatcagttacgattatgnntaattttgtgaagtgcaaaattcagaanaagaaatgaattagatgagagatatgtngtatttgagtaaaagaatgatatttaaacaattatgggtaaattttgagaatttatacattaagaaaaatgtcgccaaaagagtgtcaacccaagggctgaaattttgccagaaatattgaagcttgagcgaggcaatgaataatgtgtcgtctttcaatttaaatatttttcatttanactataatttcaattaaaataaaaatgaaatttcaagtggatggtagtntgaattatatcatatattaaactgatatg

SEQ ID NO: 34846 - DNA, 419 bp, Oryza sativa
  unsure (1)..(419): unsure at all n locations
tcggaggatccctatgcctattaccaggagggtgatgaagactatatcttccagtaggtcttagttacggtcgttgcctgtggcaatggcgtgccgttgccttaactcccgtgccttatctacttctggttttgggatgtattccgaaccgttcggtccgatgatttaagactatgcctgcgggcttatgatgtaataattcgtactagacactcgtgtatgtgcacttggtatttcagctatgaattcgtgtgtaccagactacttgatccagagaaatggtactgtttacacgattaattcctgttataaaaacggnggtccacactgacaattgtttgacttggtgcaaacatctgcttaatttgttccaaatagagtatgtgtctagaacaagttttggatcgtaataatgcact

SEQ ID NO: 34847 - DNA, 482 bp, Oryza sativa
aaactaagcttacataatctgtaatccggataaacaagatgcctcaagttctctctatgtgcagaatgatccatgaagttgattaatttattataagcagcagcccttattcagagtagatattgtactatgatgcagtaggccgaggtcttgcaacgtgcaacactgcagataattaacgtgtggctgtcgaagttgcctgcaacagctgccagccctgagcaatctctgtgctaaccccgcgcctccaacctgggtctgggttagttttcaactgtttcatcacatcagaactttttacatatataaacttcccacttttctcttcaaacttttaattgtagctaaactttcaggttaaatgtggaactaaacacagaaaaaaaaaactagcatatctcatcggggaagagacgaagagtagaagccccggcacgtcgccaccactcgcctgcgagcgaagactagagactcacccgatg

SEQ ID NO: 34848 - DNA, 338 bp, Oryza sativa
  unsure (1)..(338): unsure at all n locations
cctttgttgattggtgtgctttctatggcaagaattagtggctagcccgttggttgcttcaacgaatcatcttgctctttagagtattttgtgccgcttcttttcatatngagcaaaataatatggcacacagatcaaaattttttaactgatggctttgcacaagacactacgattcttccacagtacttggccacagataatangatagaagagtaaaaggcaagctattctaaagaatcttgaacatcaacattttggaacacttatacaagtcgaccaagctataatattaatatattaagtgccgttatctaacattactgatgctagatatc

SEQ ID NO: 34849 - DNA, 465 bp, Oryza sativa
  unsure (1)..(465): unsure at all n locations
tataaaactcagcttatggccgccgccggcgaacacgcggtggtggatcagtggtcttatcgtctgcccggtgtacagcgcgatcaccagcacgccggccaggcacaggccaacgccggccgccttcgccgagcccggcaagctcctcaaccggatcatttcctgccttagtaggagcgccaagaagaaggacatcaccggaatcgagctgcctgccgcggatgccaccgtcgacgtggtgtacttgaggcccatgttgtacaggtttaaggtccccgtgctcctgccaatttaatcgaatcgaagtaaattacatatgtatgttacagtgacctgagtaactccaaggttctaagtttaaatcttcataggaagtaaatttagataggtttatttgagaactaagtttcctatntaataggccaagttcctaattntttttaaaaaactgtatatatcttggta

SEQ ID NO: 34850 - DNA, 106 bp, Oryza sativa
  unsure (1)..(106): unsure at all n locations
agcttgtgatatgaaagagtgggaagctcctgaatcaaacagaactattgcnggtatggagttgacagagaacatacccatcacaacgtctggagcattctgagcg

SEQ ID NO: 34851 - DNA, 424 bp, Oryza sativa
  unsure (1)..(424): unsure at all n locations
tctatgtgacaatataaatcttattagaggattatttttgtatgtagagctatttttgaaaccatgtatagaaattatttagctatgatggaaaattttcattgttttctgccaattatttgatatggaaattcagaaagagaagcagaaaaataaaatacgataaaactaaggggccaaaataaaatagtctaagttgaatggctcaagcgcagagcaaaagttagagcaggtataataaccctcataggccggcgatactgactccacgtagatttgaggagtgagctggagggatgaanggaagagagaaagagagagagcagctcggcgactccacgtagatttgaggagtgagttggagggatgaanggagagagaaagaagagagcacttcgtgataatttacagcctggctgacact

SEQ ID NO: 34852 - DNA, 491 bp, Oryza sativa
  unsure (1)..(491): unsure at all n locations
gcttagatctgggctcgatcctagggcagagaccgtacttttgcactcgcatcgatctcacttgggtctggtgctcagctagtagttttagctacctgctgttcttctttacatcacgtgctaaagttacaacaaatatatgttatttttgcattgatgatagggcccaaatgtacttgtcttgatctcttaatcatgttccatgaatttgatatggtttatacatgtacacttgatgcatggtgagatactcccaacaacagtagcatgcatgcgtttgagctaattaaattagtcttagcaacagtgcttatgtacagactaatagaccttgcacggtaaagtaaatctctgttataaaaatagtgataacatagatctttcttgacatcncccatgctaccttatattctgttangttgtccctcgattatangctgtgatagatcatgcagcatgcatgaactagcttaccatgnntctaagtaagt

SEQ ID NO: 34853 - DNA, 408 bp, Oryza sativa
  unsure (1)..(408): unsure at all n locations
tttagcaagatgtacgtatatagggcatttagtttattgttgtttctccatcgatgntgcaacttgtaacataatctccatactggtggtatggatgaatagtgctatgcctgcatgactgcgtcctttgcttacctggttacttcacttacccttttagcacaagcaagaagacaagattacacaagtcttcaacttctagcaatgttgaataaatgctggtcattagtcgcacttgctgcgtcacaagtatatcatgaaggaggcttcaatgcttcaaagggtaccaaaaaatagcttccattgaatgagatcagatttcgattacatacaggcaatcaatgaaaacgctatggccgacgactgctcgccttgatcagcaaaactgcagcatgctaaaatggtatt

SEQ ID NO: 34854 - DNA, 397 bp, Oryza sativa
  unsure (1)..(397): unsure at all n locations
agcttctncacttcatcacaatctgtaatggtttcacctatatcgctctttgtagaccgatattcttgcaccctcttttgtaaccactctaaattagcctctttactcattatacaaatttatatggcttagccgtgctacactagccggctntacagagataggtacagaattgccatcggatatactaataaaatcatagctagaaagatccctccccgataagcattggatattcccatgacgccactcataagtagcatcggccattgcacctcggccgatgtatccgcttgaacaatttcaacatcatcggccgtcccattgagatatacattgatgcaangataaggcacacaacaatnggcatgaatctaacaacgacccanaataacat

SEQ ID NO: 34855 - DNA, 465 bp, Oryza sativa
  unsure (1)..(465): unsure at all n locations
actcagcttactactctgtgcctgctctgatgcatcttggtgctatgtattgtcattgcccctgtttcttgctagctagccatggagacagagagctaatctatagtactacaccctaattaagtacatgttgaattttccgatgcacaatacagcaaatgcaatttggcaatacataggccaaccagtgcagtgtacttatatgtagacaaattgagtaaatcacagggcagacatacatgagccaaaaaaaaaaaaaacaagtcacagtcacagatcttgtataactgggagaattttacctgaacaaggggattttctcggtgcttcctggatctcgataccgagggcagtgctgaagaagaagaaaaggcggacaagaaaggtgcactaaactgcaccatanagccaaatagttcacattcagaaatatattataatgctgacttanattaaatacttgat

SEQ ID NO: 34856 - DNA, 489 bp, Oryza sativa
  unsure (1)..(489): unsure at all n locations
gctngatccatcatatgagctcgatcctcgccaccaagctcagtcacccaccacatgagagaagaggcctccattgtagagttagtgtctatatagaaacctcatcctatgtggtgttntgggggcttgggacacatgcaactttgagtattcccactgctcatgtcctaatggtccgttnggttggtgcctgagcaacttgcctgagagctacctgagaaatctatcaatttagcctgactgcagcctgaaacaatgtctatttggtttgcccatgtgcctgangtgtactaatgtgtatttaagctttcanaagttacgttgtcaagttttgtgataagtactaactaacgggcaaacaatatccatgggaaatatagaataattacgcatcttcgatgcaaccaaaattntctaatatgtatttgagcntcaacaatagcatanttgtgataagtctaataatagacaacaataccatgaaatatg

SEQ ID NO: 34857 - DNA, 431 bp, Oryza sativa
  unsure (1)..(431): unsure at all n locations
ggacctataaaactaagcttacagaagntagtccgtatttagcagaagtatgttgtttaccggcgaaaccagcagcatagccaaggtttttaacagtctaacggcacgaggggcaaaacggtgaaccccaaaaatacaaggtgcgctgctgttgcgggctttggcagctgcagctgttgttgcagctgcacaacgtagaaatcacaccaagcacgtaaaaaaatgggcgaataattcgcgctcctccacccgtccaccactactaccccccgcaccgtaccaccatcaccaccttctnctctacccctccccgatctcacacaccaacgcggagaanaaaacagaagcgaaaaaacaggagagagttnccacaccacacacagctcgacaccattacaccaccgctttcttcannctcctcgcgcgccgct

SEQ ID NO: 34858 - DNA, 442 bp, Oryza sativa
  unsure (1)..(442): unsure at all n locations
ntgtgaacaattntcaattgagctggtagtctattcttgttatgatgattntataggattcaaattgcaaactggttacacgtaggttattatccttaaatctagttttttgcgatggtgcattactaccaatttaattaattgaaatttaattttattttctatcaagatatgagtacttttgtgaatttaattactctcaaatatgtcatgtaatttgtaatgtaaatattgtcttaacatatactctctcagatgtaaaacgtatttgatatttgactttcttctggtcgntaacatgtgacctcaaccataatatttttctattaaaatacatttacaaaattatttaataattttacgagatgaaaatactcttaaaggtagatctaacacataccacttttttatattgttcagactaagtaatttaaaaatcatt

SEQ ID NO: 34859 - DNA, 365 bp, Oryza sativa
  unsure (1)..(365): unsure at all n locations
attaaaacaatgccaagtgaaaactgtcaggtattatgaaacaaaggaagtatatgatggtttggaatagtatattgccaaacctcaaaatcttaaaccagttgtatatatataataaaatattatgatttgagatgtgaaaatgacactagggtggattatcatgataaatactttaaggtnggttacttttttaataattcttantaatatataattagaanaaaaaggatcaaatatggcacgagagattgtgtcgatgtcataaaagacanngtaaaatatatacagaanaaatggctttcattaaaaaggaaaaatttaagcgggaatcatttcacttgaaaatctattaaaattgacat

SEQ ID NO: 34860 - DNA, 457 bp, Oryza sativa
  unsure (1)..(457): unsure at all n locations
tgatgcgacgtgtgggttaaatttttttacttataatttcctctgtcttgacagttgattttattttatttttagggtgatgaatgaaaggtaggggaataaaaatatcttttttgagatgatcgaaatggttggccgtcacttcgagatatagtaatttttgctcggtcgcccaaagggtaaactggtatctcgaagtaaaaaaattcagaatataatctttctgtcaattatatagtacctcttcgtaaaaaaaaatcaatcatagtagctatgaaactgaacacacttatgtttattcgtagctaggagttagtttttatgggatggagtagtaattctaaactgtattgtttctctgtgtgaatggtttgtgctgtcaagctacctgtgtgaatgaattaacctgagttatgaaaaanaaagaagcaatcgtgttatattttcgtgcctttat

SEQ ID NO: 34861 - DNA, 459 bp, Oryza sativa
  unsure (1)..(459): unsure at all n locations
nggcttgagcaaaattcaacatattaacagcaaatatgcttattatttatgacaataataatgaagtgtatgaacaaaagttgttgtccagaaacttttagttgtttctttttcatccaaatcatcaataaaatgtgaatcagagccaagcaatcacccaagagagaagcattgttcaagacttcatgcctttgtcagaattctatatttgtcaacaatttttagtaacaaactatgaaaaaaaaacttactaatgacaaaagactgatgcaaggagttagtctctatgtgcaatttgccattagttgtgagaacttgttgcaattntttccacaaaatgacagaaatccagagtcatgactataatatagtgatcagtattttattacaaggagtgcctctcctgaaacaaccttgcacatgaggggaaaacattctctggtttcatctagctactgg

SEQ ID NO: 34862 - DNA, 277 bp, Oryza sativa
  unsure (1)..(277): unsure at all n locations
acgatatttgtgggcgccctcttttntcttaggtgggataaaataaatccggtatgtaaacagagttgggagcactaccacaaaaatncattttctatatgtcccaaatcttttttatgcgngtgagcctggtgtctgcgccaaaatgaattttccatgcangtggcgcacccgcatgcgaaaatctgcgggtgcttatattgactgcatgcaaaaataaaaaatcacgggaaaatccaaaagaaaaaaaccccaagcctagccccagcttctcgcc

SEQ ID NO: 34863 - DNA, 434 bp, Oryza sativa
  unsure (1)..(434): unsure at all n locations
tctcgggttcttggtctctgcccgaggcatcgaggccaacctcgttaatatacgagctatagagcggatgcgccccccagcaagcttagagatgtgcaatgcgtcaccggctgcatggccgccctaagccggttcatatcgaggctgtgagagaaggcactacccctatttaagctcctcaaacgctccgggccgtttacctggacggaggaagctgagcgggccctcactcagttgaaggcatacctcagttctcccccagtcatggtcgccccggagccagatgagccgttgctactctacctggcggcaacgccgcaggtggtcagcgcggcgttggtcgtggagcgcgacgaggacaaccctcactccgcgcatncccaccctgtgtcgactcgacccgggagagagcanggaggagaggcccccgagtc

SEQ ID NO: 34864 - DNA, 383 bp, Oryza sativa
  unsure (1)..(383): unsure at all n locations
gtctggtctagaagcagttagatacaacanagatccaatcatacttctatactctntntgatcaatagcttcaccatcttcatcaggatccaacacttgtgtagaaccaattggtgttgaaattggcttacaattctccatcttgaactgtctcanaagatccttcatatacttcgtttgatgcacaaaagtaccttgaggtggttgcttaatttgcaatcccaaaaagtacgagaactcacccatgatgctcatctcaaattccctgcgcatagtctcagcanaatctacaaccaaagcgtgagtcgaacaaccaaagatgatatcatccacataaatctgaacgaanagttgattatcaccatgcttaagaacaaaaagcg

SEQ ID NO: 34865 - DNA, 455 bp, Oryza sativa
  unsure (1)..(455): unsure at all n locations
nttcgatatgcaaaagagagattagatggatatggggatgaggagatcactcttangctcatgggctgtaatgtgaaggatgaagtgcagtacaatctgccttcaagtggtgagataactgcgattgttgttggggattgctcaaaaaaaacatatacctatgatgtattagtgaaatctactgacaatcgattgcgtcaggtctcagctctacatccctcatatatggcgctgcaatatccattgcttttcccatatggagaaaggggctaccaccttggcatcaagtatactgatttccctagcttgctacctactgcacgatgttacgtgacgatgctagaatactacaggtataggatgcactacagacttaacaaacccaatccatacacatgttgtggaaggctaagcgactccttagttgtagatgcttactccactcgtgaatcatc

SEQ ID NO: 34866 - DNA, 253 bp, Oryza sativa
  unsure (1)..(253): unsure at all n locations
ctgcaactgaaagagaaaatccctagtctagcagttacccataatcggttgtacttaccgggggtattatactggtacaaattcaataagacgggggccaccgtctcaccatgttaatctcaggatatctcgacccagaactctatccatgctcangggcggatctgatgcgcgacttattgagtacagatcataagccancagataaacgcgtatacctcgatacggaaatagcgagcgtgggcatcctgct

SEQ ID NO: 34867 - DNA, 443 bp, Oryza sativa
  unsure (1)..(443): unsure at all n locations
tctttccttatttgagggtccaaaagaatatgccacctaatttatatggggacatcacaagtgaacactgattcatacggtatgtactttattatggccaatttatatatataacaagaaatatgtcagaaaccttactacaattttataatcccgatatgttattagttctgaactaatattgaaaatttagctggatggccaactgaccatttaaactgtgctattttangaagcatggatatgtcgattaaaatttaacatgtagagaactctgttattactaaggctaggcaaaattactcatgtaaaaaatgtcatcctgcttaaattttagtaacgcacaagaatgtcaaattccacgacaccaacagtgatggtgatggcttagtgtccttcactcttactcatgagaccgctagccataggtaactaacatatat

SEQ ID NO: 34868 - DNA, 247 bp, Oryza sativa
  unsure (1)..(247): unsure at all n locations
agctngaagcttccactataagaactcacccagccactttgctactnggacgacgaagcagcagcagcaggcagtaacagcatcgctcgctcgtcttcgtcgtcgtcgatcggctccggtgagggtgatcggtcgccggcagaggcttctgatgctggagaggccgccgatcctgaagagataccgcgcaccggngtgggcagtggtggctcgctggaaatgtcgtcgcagcagcagcacgccggtg

SEQ ID NO: 34869 - DNA, 447 bp, Oryza sativa
  unsure (1)..(447): unsure at all n locations
tgctgggggggcgcattcgctctatagctcgtatcttctcttgttggcttcgatgcctcgggcagagaccaagaacccgagaagcttgcccgcaggtacaccgaacacgcacttatcggggttcagtcttatgcgggcggagcggaggctttcaaaagtttccgctagatccgagagtaaggtttcttggttgcgcgtctttacaaccaagtcatcgacataagcctcaacattacgtcctatttggctacccaaagaaattcgagtagtacgttgaaaagtaggacctgcattttttaacccgaagggcattgttgtataacaataagttcctatgggggtaatgaacgcagttttttcctcatcctccctagccatgcgaatctgatggtaaccagagtatgcatctagaaaacacanaaggtcgcaccccgctgtggagtcgac

SEQ ID NO: 34870 - DNA, 189 bp, Oryza sativa
  unsure (1)..(189): unsure at all n locations
atacccaaaaggaaggcgaggactttttgacacatattcaccagttgctcgcttgaccacgattagagtactacttgctctggcagcctctcatggtcttctcgtccatcagatggacgttaagacagctntcctaaacgtagacctggaggaagagatctatatggatcaaccagacgggtatgtact

SEQ ID NO: 34871 - DNA, 451 bp, Oryza sativa
  unsure (1)..(451): unsure at all n locations
tgatgtatctgtgtccatgggtaccggctgtgaatcaattgtttctctcctgccagcgntttattccgaggtaggtggacttgtcgggatcgatgggccgagggacaaaattatcaagttgctaagggagaatgcagctgatgaagattgtggatttgtgaatcgacttaagatggtgtctatcgcacggtttggaggtttggggaaaactactcttgccaaacaagtttatgagaaaatcaaatggcagtttgattgtgctgctttcgtgtttgtatctcaaatcccagatatgaagagggttcttttggatttgctttgtggacttggggcttctggtaatacatgggatgatgagaagcaactcattgacaagatcagagaatttcttcatgacaagaggtttgtgtgtatatagagtaacttctactacctttctggtatttcgtat

SEQ ID NO: 34872 - DNA, 502 bp, Oryza sativa
  unsure (1)..(502): unsure at all n locations
tcggtgaatggaaaagcgtctgcgccatgggccaccagtggggtcttcgcatctttggtcactgtcttcccatcaggaccaatggcgacaagcgaagggatcccagtgattttgaagatcttactcaattgttgcttcctttcgtctcccaaaggaagagcaagccatggcatgccagagaagaactcatcgtaggaactctgctctcgatcgctagaaataaatacgatctcaaaatcattgggcttctccttgatcttngttgtattcgttaccaagttangcaggaaggctcggcatggagggcaccatttagctgaanagtagaggaggacagtcttcccaacaagttctgatacaggaaccttcacatntaaaagcagatgttatcttcatgtctaatccacattcagataggtaataacacatcagagtgtngggaaaatgtcaagaatctacatgaagtcatatacatcttcctttggacactngcgtcatattg

SEQ ID NO: 34873 - DNA, 461 bp, Oryza sativa
  unsure (1)..(461): unsure at all n locations
tatccatcttcatatggggattgaagggatttntttagactttttaattaatattttattaatagaccctataaaattttattttaaaatttaaattttttggccacgccaaagaaattagcgttgctaaataatactgtggcgtgaagttggaacttgaaaggttatgccaggtcatagtcttaccacgccatcatgtgtggcgatgcagcctcatgatgcaaagccgtcttctctagcgtttttccatatgtttagttcgtgaaaagaaaatttttagatgtccaaagataaaaacttttgggactatcgacaagtgcatgcgacagatcttgtgcggtctagtagtgcggtagtgccttgctttgcttgctntgcatgtctagtgcctttattcttgtcagatngattcacgtactcatcgagcttgtgagtgtgacagcgagggagtatggagtgag

SEQ ID NO: 34874 - DNA, 442 bp, Oryza sativa
  unsure (1)..(442): unsure at all n locations
gctttacataatctccactcgtgtcttcagcgtacctatctcagattgaagtcccttgactgctgcatccacttgaggtcgccagctatccatcgctatatacatctggagcaccaccgcttgtggttcattctgcttcaccgcaacggcgccgatggcgttcgtgattccctcaagcatcttctcgaatactcccgcttgtttctccatggcatcgacttgaagctgtagccgcgtttggaaccttggcttctccaggatggaaacgagctctgataccaagatgttacgacccgagatctcatcaagaagaattagagatagaatctggagattagaacgaacatagaagaacatagcatattcagacttggagagggggaaaggatnggattcataatatgtntgttcatacagtcacctctttagtacaaggtatcta

SEQ ID NO: 34875 - DNA, 437 bp, Oryza sativa
  unsure (1)..(437): unsure at all n locations
ctattacgcgaccttagaaactcagcttgaaccgggtgatatagtttggttgcacttgagaaaggatatatttccagaattgagaaagtctaagttgatgcctcgtgctgatggtccttttaaaattgttgagaagattaatgataatgcatataaacttgagttgcctcccgagtttggggttatccccacgtttaacatttcatatttgaagccatactanggagaagaggatgagcttgagtcgaggacgacttcaattcaagagggggaggatgatgcggacatcactaactcggatacacacaacaatcctccaacggtcattcaaggaccgataacaagagctcgtgcgcgacaattaaatttagaggtgagctcattcctatgttcttctttgtatgaattcgagaatagaatgctacctaatgattata

SEQ ID NO: 34876 - DNA, 334 bp, Oryza sativa
  unsure (1)..(334): unsure at all n locations
acttaacgatgtgaagattcatcttgtcctcatcttttgacagaatatgtganaattcatgtcacaatgttcgatgtggagatatcggaaaaaccattaagtataaaaagttaggggaaaatctgtaagggtattacactgttttaatctttttaataccattaagattttagttaaaaaacaatatataanatataaagggtggaagtaaaatcactggtataaaattatcagtattctattatnaaatgttggagttcacacccttatagtctcacagaaggttgatgcatgcactttggatgccgcgaacgctctactacagtcacatatt

SEQ ID NO: 34877 - DNA, 378 bp, Oryza sativa
  unsure (1)..(378): unsure at all n locations
tattcagaatccccttctccattgcaagaatctgttttctttgtatgcactatctgatatgaagatgaagtcgttcacctgcnaatacatacacagagatccaattataacaagtccctgctagaaatggacagtgcagagcaaaggggataaaatgttgctacctctggggcccaaatctcctcgtacttgcaatctatcagcatggcagaaacggcgaccagttgcagctccctccgctgcacttgctgcatcgagagagagatttgtggcgcacttgtcgcttgtgtgtaagcggtgccgccgagcagcaattccagagctccacgccccaggacccagccattctcggaggccgcagcgtctcaaatagcattg

SEQ ID NO: 34878 - DNA, 427 bp, Oryza sativa
  unsure (1)..(427): unsure at all n locations
tatgccattntcaatccaatcgtggattatatgcctgtcatacctgtactcttttttctattagcctttgtttggcaagctgctgtaagttttcgatgaaatctttactactctgtctgccaaattgaatcatgtattcattctaaaaaaattcgaaaaatggataagagccgagaagtcttatattatgaaccttcgattctaaaattcaaattcttctacattgaatgtatagctgcagcaataaatttggatcagcctttctactccctgcatctacgttgagcaggtatctttaggtaaccgcacaatacctaacctaatttattgataagagtgcttattataaatcaattcttgcaatttttttcaaaaattgagttttgcattnttaggtgtcaaaataaacaaaacccatcctagtgga

SEQ ID NO: 34879 - DNA, 130 bp, Oryza sativa
  unsure (1)..(130): unsure at all n locations
agcttcgaagaacaatatctctcatgtgatgtatgattcttttaaaccgtctgcaccattatgttagacanaagtgcttatcacaagtagatccatcntgactatatttctactaaccttgtatgctgtt

SEQ ID NO: 34880 - DNA, 399 bp, Oryza sativa
  unsure (1)..(399): unsure at all n locations
tgtacgccctgcacactaaaaggacatgttttgatgtcatgtatgattgncaaaagccctggcccgggtgatgggcatggggatgggggaggagcaaaaagcctactctgtctgcaccttcaactccggcttttcatccctctccggaccggagcctttccgataccgtcgagatgaagccatgcgaaccggcgcaatcatcgcccggttgggcgacgaccaaggcaaggagcacgaagaagaagatgacgacgacgacaacgaccgtgctcatgataatctcacatgatcacacaatgcagaaaaacccattgcggcattgccgctgtgcctactctggagaaaaacagtaaatgctacgagtaacactgagaaaaggcaaaatngtgaaagttggca

SEQ ID NO: 34881 - DNA, 430 bp, Oryza sativa
  unsure (1)..(430): unsure at all n locations
gcttatccctaagtgaccgagtttaaagaggatgcggcatggcagnttatctattaattaggaatagtttgntagtttccttttatctttaagaaagtgtgtttagtgtccgataaagactttatattttccttttatctttaggttaatttctttcttgtccgacaaggaattgtatcaacctatgggtataaatatgtacacccggngtctatgtaatctatctccacgatcaatacaattcggcgcatcgccaccctttntatttctacttttgttttacgttccggcgaaacttggcacccgacgcgaggctgcatcgtcttcgatctctggcgaagggataagtccaatgttccgtcggtccaggcaattgtatcgtctacgtcggcgtcattcaatgctgcatcagtacattcgacctcttgga

SEQ ID NO: 34882 - DNA, 312 bp, Oryza sativa
acttgaaactcaacttacaaatgcattccacatacatttcaaatttagtttccgtacacgcttatcaaacattggatccgcactttacatcttatcacctgctatcttccgtaatctccggccggattaccgacattatgacctggtggttatcaaaaagccccctcaagaagtatctttcaagcccagcatatcgattgctctcgcctggtgtcatgtgtttctattattacatggcttgaaggggactccattggtgaggaaaccgcatacctgttcttgctcaaaatttttatattcaactgacaatgc

SEQ ID NO: 34883 - DNA, 321 bp, Oryza sativa
  unsure (1)..(321): unsure at all n locations
tacatttgataaattccttcatttgatgtggagggaaaaaaatccccaatctattcaaacacaaatctgcaatcgttgtcctactatgtatgaacaaaagaagagaaaaaaaatgctgtagaaatttattaaggatgatggcctcgaacaacctggctctcgagaatacgcttcacgctcgcggcgcatncaccgcacgacatcccctgcaatcaaactaagcagtgagctgagcaaccggcggcgatggagagcgaaccggaacgagcattacgcaccccgacgcggagcatgatgacgtcggcgtncgccgtcttggtc

SEQ ID NO: 34884 - DNA, 443 bp, Oryza sativa
  unsure (1)..(443): unsure at all n locations
agcttgntgggtgtataaaaataagtatacattgttggttctccaaaattttcttcataaatgtgctcatgtaaggctatagctatacaagcataatgataatagcaacacttacatccaaagataaaggggaacagatgcaacaaaaacaatgataggcacacctggagatgcctcctttgatgatttattcccacctaagaagcgaggagatcatggngctgaagcttcaacatccactactggtgaagagcttcaatacaatggtgcacaaaatgatctcgcgaatgaactcaagactangatggctcacaagcagaaggaaaatgatactgagcacatgaatggtggaaaacttcttgaatatgtcatgcgtttgatggaagaagatattgatggaacggtattgctttcactaatataagaatagtactatgtatttt

SEQ ID NO: 34885 - DNA, 339 bp, Oryza sativa
gtgctttgccactactattctctgcgcattgtcgtctctttcgttcccgcacattcttggagattggtggcagccggggatcgtggaccatcgaaacaatgacattctgcgctctcccggcgctcaatcgccggcgccgggggggaaatcgaaccattgagtcggtggccgtgaacacagcgccgcgggtggtcaacaatgcgctgatcccgctgtccagaaggttcctggatgcgtgggtggccatcaatgatctcggtcccaacgtctgcgccgtcaagatggagctgctgtacgcgcatgggatgctcgacaacgcccgtggcaccggctgcatgg

SEQ ID NO: 34886 - DNA, 253 bp, Oryza sativa
gcttgcaactggctttaaaacgttcctacccatcacctactggtagtaataacaaaataacagattaacttgcgtggcagtgcatattgaagcggagagagacccaatttataacaaaaggtcattgaacatgcatacaatgacaggtgtgacacatgcttttttgagcaataagcccaagtctatcaagattattgtggcttgacagcatctgatggtactcgactactactcaagtgtaatactactactc

SEQ ID NO: 34887 - DNA, 391 bp, Oryza sativa
  unsure (1)..(391): unsure at all n locations
tccattggcgattacaaaacttcaaaagctaacacatcttattgtttcttcgaaagcagtacgtgtttctaagcaatttgttccttcttttgatgtgccaacacctttgcgtatctgctccatgacaacccttcagacattactactcatggaagctagttctcaaatggttcatcacctaagctctcttgtggagttaagaacctttcgtatcagcaaggtgcgaagttgccattgtgagcagttgttcatggccatcactaatatgattcatcttacccgtcttgggatctatgcagacagtagtcaagaagtgctgcatcttgaatcacataaacctcctcctctacttcaganacttttcttgcaaggtacattatctcatgaatca

SEQ ID NO: 34888 - DNA, 350 bp, Oryza sativa
  unsure (1)..(350): unsure at all n locations
ctactnttagaagttcaaaaataagagattattatcaagagctcattgacaccctcggagttcacaaaatttccagatgataatcaaaagctcattgacactctcagagaacaccttgctaacaagaggtatgcctaagtctgtatatagtttgtctttgatgtgacgttcatattcaggtcgggtgaatatttcttgtgtatagctaatactttataactatgtgtacatttctactgtttaggttgacttgtattagaatttagcaccatttggaactttcgatcctatcaaggaaaaacatgtagtgcaaaccaggaaactatcgtaggatctaaaaatagatgttt

SEQ ID NO: 34889 - DNA, 406 bp, Oryza sativa
  unsure (1)..(406): unsure at all n locations
ttcctggtccagtgagaacacatggtcctgaacatatggaacaaatgagcggatgcattcgttaagagcatgaacaataccagactattatgccattcccaacccaacaagctgccacctaggataaaaaataatataacaagtgaataaataagaaaagatgcatgagacatggtttctacacaacattcaaaatatcatgtgagataagtagcactaaattntagtatagaatagtggtgcttgcattggaagagtagtgtctagtactaatttcctaatgatgtggagtttatagaaactgtctagtgtcttgggttgggaatggcctaattcagctacaagcatatgtgaaggagataaagagaggagagagaaaaaatataggctatagtatgaacttcaa

SEQ ID NO: 34890 - DNA, 400 bp, Oryza sativa
  unsure (1)..(400): unsure at all n locations
gctttatactcttttcgtcccaatataagtgtaactttatatggttgggacatatgnctattcagatttatagtcctaacatatgtctcatctgtactaagttgtatttatattgggtcggaaggaatatacgtgttcttagtgacttgaaagctaatgctgaaaaataaatngcgtcacaaatatcttaaaatcaatttgaaaattaaactcgaaaatacaaatattggcttattaaagcacctctattntacaattcaatcttccctctccttatgcaaattttaggtatgtgtggcanaactccaactccacctctcctagagttggatcccagccaaatagtttcagctctacctaaatttagaagttagagctctaccacaacatgccctctatc

SEQ ID NO: 34891 - DNA, 492 bp, Oryza sativa
  unsure (1)..(492): unsure at all n locations
agctntacatatgcgcctcctctatnttggtgtgtctgaagaagctaggctctgatgtgctgcctcttgaggagatgggctcttacgttgtgccagtggaggagacgggctcttatgtggcaatggtggtggagttggcatcctttgaggggagggaggaagtccttcaaagctagacccgccatcgcttggctcgccatcaccacctcctgaagggaagataatgaaacgcttgcgccacaggattatgttgnggacggcttctccaagagtgttcaccccctcctcatgagcaaaatcaagctgcactgccctgtatctcctcggcacgtcctccacttcaacccttgaatagccacttggtatcggcttactgtgtatccttcctccctccgttacgggatgtgccataatgcgtgccacctcttgagtgatgntntgaagtggcacatgcagcctgcatacagtacgtatagtgatgtcgtccatggg

SEQ ID NO: 34892 - DNA, 367 bp, Oryza sativa
tcacggttcacgcctcaaaaaatgttaaaaaactgtttttgagcatgcagatgcagtagtgtaatgctactgtagtatagtacatatgtgcatgcaaatctgaaaatataaaactgtcctcaagggaaggaggaagctcataattcacactctttaaaagtgctcttgtcgatttgtaacctacctctaaggacagcaaatttataagttttcatacaggtgtgtgctgttgctcacatgcctggccaatatatacagctgatgaacagcaaatacaatgtactacgaaatgcacagcgctgctgcagattgatgataaatcggctgggttatgattggaccaattatctgacaaaatggaaaatta

SEQ ID NO: 34893 - DNA, 379 bp, Oryza sativa
tccgacacttattaccatccgcggtgtccaaaacaagggaacgtgacctcccggaacttcttgccagcacgcttggtgtcagcatgctcggcatggcattgcttctacccattcggatatgtagtcgacaagggctaagatgtactcacaatcatgggactctggaaaaggcacatgttgtcgttgccccatacatcaaacagttgcatatgaagattgcatgttatgggcatcgcatcatgagcgatcatacctccatgctgtatgcatcttgcatatttccgaatgaattcttttgtatcttcatacatggcgggccaaaagaatccactctgccatctttgcatgtgtgtggaatgcaccatattggcctccatat

SEQ ID NO: 34894 - DNA, 375 bp, Oryza sativa
aagaaaagacatttattgtgattattaccaacaactatatcaagccgaatggcacatcttatgcgaggaagtttaaggggaatcttaagagggcctttgatcaattctaatccgcatttgagccatcaagtgatgtacatggtgaaaatggagaatgatgatattggaaagaacatatccggtgtttgcttcatggcgcgtggtaaatcggatatagagtatgaagatcatgaagtaagtgcttttgaaaaagctatttaatattttatgagcaaaaaatatgatatgtgaaacgatgtatagaaaaccaggatcttgtattgaatctcttaaattgaaattgataattaaaatctctattccaatgatgatatt

SEQ ID NO: 34895 - DNA, 434 bp, Oryza sativa
  unsure (1)..(434): unsure at all n locations
agcttgtgaaactcgaagacgttgatgttgtcaatttctgcaagccaagtggatcaaggaataagaaaatgatagtcgaatcaaagtgttcagctatcaagatagagtgaagtttggaacctatcttagcacctataccaccaaagtgactctgaagaatagttagtagggtagaacgctgttgcttgctttgtgtgtaggtatgggtgcattcctgtcattgatgtagttcagtgatgagcgtgtaactatactaggttgtttgcttaatcaacttacacaatataatgaactacacacaccagatcagtggtaacatggttaaggtcttaactntagtgtaacccctctccttctatctnttctaatctgcaacagatagtgaatcctcgcgccagtggaagtggaaacaataacaatgaagagaacccacc

SEQ ID NO: 34896 - DNA, 397 bp, Oryza sativa
  unsure (1)..(397): unsure at all n locations
tgtaattcgttcattgtgatcaatgaagaagaatttatctaaaccctctccctctgtcgtttcttctgtcccacggtgtgcccttctgcctgtgcacttctttcttactttgttcaatcttaatgtcgccgtgcctcgctgccatggggactgcggcctaaggcgccagtcaaccacaactacaacctccgatcactgtcagggcatgcagatatgttctgaattgttttattgtagttgatatatgactagattttattgttagggtttaaagtaaatttatatacatatattctaccattttgatgctaaatactgcacaatacctatatttttttttagtttgactacatggctgtaaataataggtgaatntaattatggagaaaattcttaa

SEQ ID NO: 34897 - DNA, 415 bp, Oryza sativa
  unsure (1)..(415): unsure at all n locations
taaaataattaaaacacacgtggctctattatctactntagtacctgcaaatgagtctgggtggattccggggcaacccgaaccctccgttgaaaatgttaaggcgatcacaatgaggggaggtaagtccactcatgatccgccaaatcctaaccctgcagggactagcagtatcacccaggaagcatcatctggtaacaaggctgatgaataagtntagctagagaagacagtgtcgcaagaatactgtgacacacgactgttgctattccctcaaagaagcaggaaactgtcactagacgagcagcttgctcattttgttgaggtgattcaaaagatccatatcaatgtgccattgttggatgccatgcaattgccaacatacgcacattatcttaaggatattctcaacaac

SEQ ID NO: 34898 - DNA, 373 bp, Oryza sativa
  unsure (1)..(373): unsure at all n locations
ttgagcttgctgttcaaaaaattttatgaangatttttccaaaaaaaagaaagaaaaaaaatcagaagtgaagagaaggaaaaaaaaaaggaagggaagaaaggaagttgttgttgttgctgttgtgtttgtgttattttcgtgctattttgagtggctacgcttgtgactatgctcgcgtctctaaagggttttgcctatgaccagcacaataccatcgttgaatgattattcaacttgctttgattaatgtggttctagctgtaccttgatattacttgcagccacctatagctccacaaatttttatctactatatcacaagatcgtgcttgttgtcggctccggtactactaaccgttgttgctgttct

SEQ ID NO: 34899 - DNA, 266 bp, Oryza sativa
tattcattggaaaaaaggaaaaaaaacaactttgaagtatctctggatgagtcactatgctcactatttctttaagattgctagcatctctggcttgtaaaaaaaatgcatcagctaggatctcattttctcatttgcagaattgcattacaaagagtaattactattgcccatgattagtaatcccacggcggttaataggaaatagtgtcaatcgagttctagttaaaagcaaccattatgggtttagtacaaatcatacatgc

SEQ ID NO: 34900 - DNA, 274 bp, Oryza sativa
atgctggacctccattgtcctgcacattacaaaagcataggaacatatgattaagtattgcagcacactgtatcacataatgttacctgacctttttctatgataaaaaagtattttttttgtttgtgataattcaactcattcacacaaccatcaccagagttacattaaaataatgaaaatgaattatccacaagatgcatatacaacctatttcgcatattgatggtgccaaagctttgcctttacaatgatgcctgttacctcaaaaaaa

SEQ ID NO: 34901 - DNA, 488 bp, Oryza sativa
  unsure (1)..(488): unsure at all n locations
gatcctnctctggtgcaccaccgcgcatcgtcgtctccggcatcatcattctcctcaaccagtgtggtttccccacagtatcttggggacatgtggagccccaattgcaggatagaagcaactctcgactcccggttgatcaacccgtttcgcgtcgaggggcagaaagagttcagtggaccgtacaacaccatggttgaagttccatcgatttcccgtgatcgtcgaagattaagagaagtagaagatttgctccaaacttacaagtgagtggttcttgaaaatggttcacgttgcttttttactctcaatcctcaagtgggttcagtactctgaactgtgatatctgtagtactatacacttataattagcattggttcttcaggttaattntgtatcgngtggagaccatngatctgagaagaatgacaaatgatgaaaagatngctttctggatcaacatacacaacgcatttgtgatgcatgt

SEQ ID NO: 34902 - DNA, 228 bp, Oryza sativa
tcagtatcaaaaagcaaacataattatagcatcagaatcaaaaggcaagcataattatagcaaacagggtaagttttcatgcactaatgaacttcattgccagatgaaataaatattgtggaacatccatttagtaaggttcatcagtttaagtttactagctcaatattaatttaactaatccgagccagatgaaagcacaaaactaagttatgatcacaattcaca

SEQ ID NO: 34903 - DNA, 484 bp, Oryza sativa
  unsure (1)..(484): unsure at all n locations
agcttgcatatcatgatagtatgaagtaacagctctggtatctntgtttaaacattgcagtttattgaacaaaatgtcagcataatacatgggaacataaacatctctgaaatatcgtttcaggtctttccaagattgtggtattttgttatgcctacaaagatgtttccaatcattaaaagcatgtttaattaaaacactagaggcacacataaccttttgtttctccgacaagacatgcttttgaaattcactatcaaccgctagctcccaattaatgtaagcacgaggatcatagtctccctcgaaataaggcagtgcagatttgatcttacctagaacatcatcacttacctcataatggtcatgttgatccctcctcatgtctcgacgaagatatcgatgttgagcgcagctatccccaattatcttgcgtatcccttgccattgtagtagaanacaagaaacatacacaaaaatatgc

SEQ ID NO: 34904 - DNA, 404 bp, Oryza sativa
  unsure (1)..(404): unsure at all n locations
tgtgttacctctgaccataaggaatttgatgtgatagtgataaacttatcanggcaaccatattttctacatagagcaactgaatctaagtaattttgatataaatatcttgccccccccccaatataagaagaaggcaatataacttgctgcccggcatctgatgcttctgtgatgcctgaatggaccatattggatacctcactaaatgaagttgttctatacttaagctgaaatgtcttggatctatagtgactcaagcgagattcttccatacaacaatatgcatctatgacatatgcctgggttcctctcttgcagcgcataagagtattgaagtcatcaactttgtcatgaagcctatatgcaaagtattcaaccatagtagacttctttcttttgat

SEQ ID NO: 34905 - DNA, 424 bp, Oryza sativa
  unsure (1)..(424): unsure at all n locations
cacaagagctctcagattgcgatggttgtggtatgaatggagagatcctgagcaagccttgggtgggattggaaacgccttgtgatggtgtggatagggacctcttcgccgcctcaacaaagataacggtgggcaatgggaatacgacgcgcttctgggactccgcatggattgacggccaaagaccaaaagacctaatgccgntggtctatgagatctccaaaaataggaagaaatccctacgccaaaggaaagaagacgactcctatgtgcatgacctgaccctcgatgcggattcatctatcacaatcaaccttctcaatcagctagtctgcctgtgggaggcggtatggaatgtgcacttatacagcgaagagccggatcagattngttggaaattcacaagcagcgggcactatacagc

SEQ ID NO: 34906 - DNA, 401 bp, Oryza sativa
cgccacgccgttctccgcttttacattgttccctgaactaagagtggccttccttggtgagccgcaccatgagatgtgtcccgccatatcaccgttgctattgttccatcaccaaaactatcacccaaacagtgctcctctcctttgctcgcctcatttgagccgatgaaaacaaacaatgttacttggggtgctacaaagctagtagattggcagccatggcctttattgctttgcggagatagaggacgttccaatccagatcatgtgactcaacagtgtggcggagggtccaagaagaagaatgcatcaacgaactgagcggttgtgcggtgcaacgcaacttgaggggggagcgcgcgatggcatgtgggatgggaggcatatcgagggcatctaat

SEQ ID NO: 34907 - DNA, 481 bp, Oryza sativa
  unsure (1)..(481): unsure at all n locations
agcnttgacaaaactctgcccaagtaacctccgttgcatctatactggtcgccacgtagttatcccatcaagcagaagcgggaccttgcaactggtgtgtagcaaaagcaactttctcttggtcgttgcattgcagtaggttcagcttcttctcaatagcacggagccagtcattggcctccattgggttggtggtgcttgagaaagtgggtggctggatacgaagaaagtctaacagtttggacacgtgtgatggtggaggaccaaactgctggttctgttgcgcctgctgcaacatctgatggtaatgttgctgcatcntgtgcatcatcattgtcatcatttgagtgactgttgggttttcgggcggtggagatgatctgctgccagatgcaccactgacatgagctccatcggtctgctcttcgctgncactgngcgtcgtggagtcacggggatcattcctttgcttcaccatctg

SEQ ID NO: 34908 - DNA, 400 bp, Oryza sativa
  unsure (1)..(400): unsure at all n locations
ngatccaattgctcatctgcctcaccccttaatccaattgtctgttggtgagcaaaccccggccggcgcgccgtttgttatgcatccagccacccacatcgttaatcactctcacagttaaacatctgcctgtaatgcgtgtgtgtgaacgtgcaaaaacgcaatcatgcatgggatcagtggacggcgtattggtggtgaaccatgtcttttggctaatctaatcaccaattatgagcttaccacattaccactagtactatcatgggggaggtagcaatcaagtcggtgtccaatggcaggagcccgtagtacaactaactcggcaagagtgtccgccttcctgcctgtgcctgccattgaaagtatgcgtcgcgtactcgcgttgcatatttgcatg

SEQ ID NO: 34909 - DNA, 344 bp, Oryza sativa
  unsure (1)..(344): unsure at all n locations
tctcttgtagcaaacaataatagcgctatgttgntgtattcagactttcacagaatcttgcttggccttggcgtacaagcctcttacattccaatngaacagatacacattatcctgcgacatagtgtaaatggtctactatcacagcccanatggcaaaaacacagccagtgcagctgggagaaacacagccagaaagggggtagggggtagacctcatcggtgactctgattcatagttgagaggagaagcagcaagcaacatagtgcacaggtagcagcaatctaaaagacagatacatcttgaagagctgagtcttcaacaatagaaaggtgtctatcat

SEQ ID NO: 34910 - DNA, 380 bp, Oryza sativa
tagccaaatgtatatatgttgccggcttgtgttgttggcacgggttgtcaaatttgtcatggtcgtacctaccgtcagactgagtactcttttgctgtattattgatataatccgtgtttagttctttggccaatttttttttaagtatacgtacacacatttgaagtattaaacatagactaatgacaacaaattacagattccgcttattaactgcgagacgaatatattaagcctaattaatccatcattagcaaatgtttaatgtagcatcacattgtcaaatcatgacgcaattaagctcaaaagattcgtctcgtaatttacatgcaaactatgcaattggtgttttttcgtctacatttaatgctccatgcat

SEQ ID NO: 34911 - DNA, 495 bp, Oryza sativa
catgcaagctttccatgaagtacttgcacgcacatatcgtgtttcgcatgaagccgcgacggctgtcagaagttggtgttgcgctgcagtccgaatccatcccgcgcgaatcctctccccgtttgatcctctccattgttactgagtaaaacaagagtgcacgtgtctccggggtataaataagaatcatatgaatttaagaatgaacgcacctgatagttgagttgacgtgcacgagcacgggcaataagaccatgaagttgtacttgtggaggcgtaaatgtatcgttggtgttgatgtcctcatcactcttaatggctggcaatttggtaacccgacaattcaccatgctggctagaagaggatgaagttgttctgaaacttgcatgtgacacttgttaatcattgaccctacgtccgcttgagctggtcctaactcgaatgacatgtaattccagataacctagaaacctgcttgacctgtctttcgtctg

SEQ ID NO: 34912 - DNA, 356 bp, Oryza sativa
taattagccggcagccgctaaccctgaagtgcattcaaattactaaaccgaaatgcaaaatacagcttataacaaacaaaatgcatgaaccatgggcaacacggcgctcaacgtcgcgacagccactgtggccgccggaccaaccgcatggatcagccagaaatacatgccggggtttgcgacgaacgcccatcgaagcatcatcatgccgccgccgcccggagcgatcatcatggcaccggcgccggcagcgcccgccgccgtgaagagggcggcaatgaacatgccaacggctaccgccaccgcaccgacggctatggccaccctgtgccataacgggatctcgatgcccagca

SEQ ID NO: 34913 - DNA, 389 bp, Oryza sativa
tatgtctccattctatagaaagttctacaccagctttgggaagattgttctttgtacctattggcatttttgttgcaagatgacaggttggttcctcaactggagtgaatggagcagctattataaccctcatatttgcaatggttggatttcttgatgatatttcaaatcttgtcatggactgcaatcgtaaaataccgcattggatgagattatttgttcaggtgaatggtgctttttcaagagagatgataggatgctcttcccttatttttttgacgggagatgctcttcccttattatgttgaaagcaacttacagatcttttgcagattgttgctgggattacctatctatcctgttaagttctacaaatatttaacaccata

SEQ ID NO: 34914 - DNA, 291 bp, Oryza sativa
agcttctttgagataaagaactctacaaatgcattctttttttctttccattattaaactgcactattgtggtgtggataaattatcctcctttctgctttgtagcctatgaaggaattcatgtggagaaatgattgcaactacgcccgtatacaagtatggttggcttggccacagtcataccaatatccacttttatatgcagctcttgcctatcaaattcagcaaagaataacggttctttctatggacgagccaagccactcgccggaaggagtggaacagcgacat

SEQ ID NO: 34915 - DNA, 391 bp, Oryza sativa
  unsure (1)..(391): unsure at all n locations
taacaccttctgaaagctggtaagtctctttctttcatggaagcatcaaatgcatagcattttccgaaacacaaattccaacaatgaaaccttcagagaggctcacgacgaaaggaatgaatcccagaagcattaactctgcatatgtagacactcaattagataagacggtaaagaaataaaattttaaatgaaatagcataaattttgtgaaatacaaatataccgtaagcagctattttgaatatttttgtttaaccaaaataagtgaaattctacaacagatgtaccatgtgtatatattgaagtccggttaacaatatcgaaaataagcaactgaagatattcctgaatgataccntcttttaatctctcgagagctgaatacaat

SEQ ID NO: 34916 - DNA, 427 bp, Oryza sativa
  unsure (1)..(427): unsure at all n locations
agcttgcacagatcatattgaagctcanagcatccctgatatgtcacagtaaaagaacataactatgttgctaaaaggatagcaattgcatctcatccaaactaggtcgaaaaatctataatgaccttgcttaccttcattgccaacaaatcaaccaaagaacaaagaagtggtacaagattttctgatggctgctgagatatcataccaggagaatagtaaccaaaagttntgatctttgaccacaggccaaatacattctgagcgctatcaaagattacctattcagatgacaacgatgtaacaagcatgatcagaanaagcaaaaggcagaagtatttattttgtttatatacttgctaaaacatctaggatctgttgtaattacctccgcaccaagattggcttcctgcgcacaatgtgcatg

SEQ ID NO: 34917 - DNA, 354 bp, Oryza sativa
tccctgatcgtcttacccgcagttctataaaaggtctaaatgggtggcttgttggaggcaccaaacattcatagacatcgagctctctttgatctctcgctgagctaagctagcatttgttcatctgaagtgttattccagttaagttcaggttcagtagcagcaaagggcgagctcttttcaaaataatcgaagatgcctgaccacaacggggtgaagaagagcatactgagcgtactgtgcggctgcttttctccaccaaagacgaaaggttgagatgagatcatggcttcatgtacatcgatctgtagtgttattcatcttgttcagatctaaaattgttctgtgtacatg

SEQ ID NO: 34918 - DNA, 397 bp, Oryza sativa
  unsure (1)..(397): unsure at all n locations
ctcatcatcttcaacatgtattggctcataatcattaacagactctgcttgtggtggaagagactgcgattcttgctggctgctactcccacaaccagtaccatcagttgaattcctggtaaatctgacaaatgacaaataaatatagatcaatatatctttcagcctatagaataatcttggcaaacttgaaatgaataatctctacacataaatcatactgaaatctgctacaacctataaaataatatatttcttatgatctacactacacagaatcggattcctctatttcaanacttaagtcataacaatttatacctaacacattcatgtgcaccatacatatacatgtgtgatatctatttctaacatactctaaatcacattcatatct

SEQ ID NO: 34919 - DNA, 340 bp, Oryza sativa
tccgaccgcgtatgcgtatgcgtcgatcggtctttttatctgatcggtatcctgatgaccgagtatgtggtaggtcgacgtacggatagaacggaatttatttctaccgttttcctggaccgcgatgacgctgtccgtatgaagcccgcagagctacgctgctgctgctatcggataaggaaaactgatgaaaaacctctaaatataagcagttcaaaataatttatgaataaactcttatacagtaatgtaaaaatcaatgataggtgtgtttggaaaaccagttgtggctgcagcagcatatttgctgcttgatgcactattgactcgtaaacataaa

SEQ ID NO: 34920 - DNA, 382 bp, Oryza sativa
  unsure (1)..(382): unsure at all n locations
atcttaagcactgagctgcagctttctgagatatatgtgaaaatttcatggtgtataacaaacngaaacaacaacaaatggccgatcaatttataggcagagcaacaatttggtgaaacaataaatggctaaaaatttcaatatttcacctcatcagtaaccaaataatcaatgtaatctgcaccagtggttccaggaaatcccatgtaagaaacctggattggggctgggtgtaaagcgaatatttcattccgtgcaccctgaaacaagaagcaattttacgataagaaaaaaattccaagaacatttaaagttaatctcccacttgagacaacacnatgattgaaaactatacggtggcattcaaatatatcgcacacat

SEQ ID NO: 34921 - DNA, 375 bp, Oryza sativa
tgaactatgaaactaagcttatctggttgggagatttttgctttttttgaaattggacttcggaaaatttagaaagactgtgttaaaacccgagggattttaaattggacacacctccatatatttcgaaacaccgggtatggagtgttatcgacctttcactttctccaaaagttccctctccagaatattacgtgcgtgaccatatatcctatcattctccctctctttcaatcatcaactgttatggtatattcaattccaccactttatatataatccctactctgtgtttttcatctgtgttccatatatgtttttctcaaagaaagcaccgttacggagattgaagggcacaaaatcaaatgcttcaat

SEQ ID NO: 34922 - DNA, 456 bp, Oryza sativa
agcttatcccttcctaaagcaataaaagaacgatatgtgttgtacaaattaatagctggaaatgaatgggtggatcgatggacgaatcaaattaatcaatggattcatcagcagggccctgatcgaatttgttgtagagccgactattttccacgcagagggcaagagtcccacataactaatgtatcgatacatcataactaatctggtcatgcgtccaaggaataacttttgccatttaaaaccacgaccttgcatctggctggtgatggacaagttgtaatactatatactccttccgtttcacaatataagtcattttaacatctctcacatttatattgatattaatgaatctagatagatatatatgtctacattaacatccatataaatatgaagaatactagaatgacttacattgtgaaacggaggaagactgttctcctgttctct

SEQ ID NO: 34923 - DNA, 497 bp, Oryza sativa
  unsure (1)..(497): unsure at all n locations
agcttcaaacgggtcagtcaatgcagaaatggtgtgctccaatcangcattcattcagattataggaatttaagggtgagataaacagacatgtccataattcctacaaggtaaaattataaagtaagactatgagaattatagtttagccataaggccatatatgtttgtgcagtgatgttatatactccctttgtctcacatcatgcaacctacctgccttaaggatacctcagcggttagactccaaaagatctttcagctcatcagcaattgcacgatagcagaacatgtattggttctgaaaaacagatgtatcattagaacatccaaatggtcatacacaaaanaaaacaaactgcacatctgcattgtacagagactctatttagtatcagatgttacataatcaaggatngatatataattatcaatttcccttcattctgaanataaagaaaagttttactgctatctcattaggtgtacattccatg

SEQ ID NO: 34924 - DNA, 409 bp, Oryza sativa
  unsure (1)..(409): unsure at all n locations
tggacatcattctatggatggattggttggctaatcacaaaggacttatagatngtgccgaaaagtccatcaccttgcaaggacctggaagaaagcaagtccgctttacccctaacacccctaccgcaagtcggtctatcctaacttgtttacaagtcacctccttggagtctgtgcccatagtctgtgaatatcccgacgtatttccggaagaattaacaagaatgccaccagaccgagaaatcgagttcgccatataactggcaccaggcacagcttcaattgcaaaaagaccctaccgaatggcagctaatgagttagcagaagttaaaagacaaatcgaagaactggaaagtaaaagttatgtgcgacctagctcatccccttggggaaccacaatgcttttgtt

SEQ ID NO: 34925 - DNA, 306 bp, Oryza sativa
ctgatcgttctaagcacgagctcagcttaattgcggtacacacattcttcttttaacattgaagggcaagtgtaggggatatggtctgtgaaaacatatcaaggcaagttgacctaatgatacaaatctataccgaaccaaaagtattagcatgggcagtaaacaagacagcatgatttatatgcaactgatgcaccattacaagggaatggtgagtacccaaattatgtaaagttaacgagccatctacacgacattatattaaggcacggaagcgggaaaaattttgaagaatagccactcaac

SEQ ID NO: 34926 - DNA, 375 bp, Oryza sativa
ctcgtcgtctccctgtctccttcttcttcttgattgagcttcgcaagttttctaagttggcgagctgcatagctttcgccctctcccaatacttaaaaatgcccatgatgaacatgaaagaagagatccagaccatcgttccggacccgcttctgatgactatattcttgtacatggcaaatgctgctcctgatacctgcaagatcatttctaccttctggcgcgtcgacagaacattgtcctccaaggagtatgcggtgatgttgtccggaccagcggcatggagcagcatgaaagccccccagagcgtcaccagctccagctcctgcggcgtgctgccgaaggcgagcttgctgagtgcgtacgtctcggtcc

SEQ ID NO: 34927 - DNA, 205 bp, Oryza sativa
gtgccatgacagagaaaattggttgcgaagttggaaaaatgacttagaaacccatcaaggggacaaagctcaagaaatccgagaagaatatgaaacaaggggatagttagaagcaagatgatagttcgaagccagatgataaactcccttccccattcaagaagcattccatattttttaagtacctcccgtactggaaagatct

SEQ ID NO: 34928 - DNA, 393 bp, Oryza sativa
actggaaagataagatatgcagtggagagatatgctgtggagaggaatcatgaaaggcatccaaacaggatgtcagatccgtatatgtatataataaattcggggaaaactaccgatcaatctacctatcctatcggtcactccaatacatacatgtattaatctttaaaatatttttttatcctagactacttatcttatatacgatccgactacatcattatatttattataatctaatctctataacaagataccatataattatattttgataaagtaaaacatatgttttaaaccgttaaaactcaatgtttcgtatgttatagcgacatgtttcagtgtatgtttcaccatgttttatagaacccactcaattacttgtccctactc

SEQ ID NO: 34929 - DNA, 321 bp, Oryza sativa
  unsure (1)..(321): unsure at all n locations
agctttngcttcttgatgccggtgcttccgataagactgtttttatgtacgccgaagacgccgccgttgatctgtgccgcgacgcacgcttgccaatcaccgatccgtttctcccgttagaagttggaggcgtcgtcgttttgctgctgccacgccgtggtggtgccccagcgaccaaacgcccaggcgggcgctctgctgcaatgctcacgaaagccaacacatattgttacagtgaacgtaaaaagacacagaagtaattgattcgatccaagatgactaaaattaattcagttgacttaaattcaattctattctaaa

SEQ ID NO: 34930 - DNA, 387 bp, Oryza sativa
tccatgaggccaaaaaaagattcgtatcctgctattctgcagcctctgatctttcactgcgctaagctgaccgattaccatatctacgtacagtatgcagcaatctgcgtcgcagcacccctgcgctgctacaggaagtagcatatcagcgcatggagggagctcgctgctgatgacttcacaccataaaagcaagctcagagctagcgattgtgccctatacccctcgtgacttattcctaccatatgttgcacacatcatccgcagcatgaacaacaacagaaagtttccaaaggatgaagtgaacaacacaatgggcaaaaggtgaagaaaataaatggggaaagtgctgacccgggtggaggaagagaggaagtggtatgcgt

SEQ ID NO: 34931 - DNA, 450 bp, Oryza sativa
cgtagtactaagatgtgtttcatttatctaaaagcccttatattgtgcgacttatggagtagcacttatatagaatgaatgatgccgtatcgtgtatataccatgagctaagctaattgtttgtaagataggagaaagaaacagagaggcgtgactgcacaacacaagctttctttgattccaagctcttatcttttccatatccatgagaccaagagctaatcccatgctacctgctggatggaacttggaacacttgcacctgatctgaatcattgagtttagacatgtggtgtcccactgctcccgttcgctttatcgtttctatcgaatgcgaccgttttattgctttttggctccccctatatccatccatgatagcccatggttctcggatcaggatgcgagcaccggcttattcgtgatgacatgagtgaataaataatcctt

SEQ ID NO: 34932 - DNA, 394 bp, Oryza sativa
tgtcactttaaagttcatatttgtcatatcaatcacatcaaatcaaaattttctccattctactctctgcctaccaaccatatattccctccgtttcataatgtaagtcattctagcatttcctacattcatattgatgttattgaatctagacatatatatctatctatattcattaacatcaatatgaatgtgggaaatgctagaatgacttatattgtgaaacggaggaagtatcatttaatagagagtattatactacctccgtttcaggttataagactttctagcattgcccgcattcatatatgtgttaatgaatctaggcacatatatgtctagaatcattaatatatatatatatatatatatatatatatatatatatgaatat

SEQ ID NO: 34933 - DNA, 442 bp, Oryza sativa
  unsure (1)..(442): unsure at all n locations
cttcctggatggaattttccttattttctacgacaagagtgcgcacgtacttgaacttggaaataacatttatagtttcagcatttatgccttctacgtacaagtgtcgcactgttagaggtatgccaattccatggtcagtggctgttaatcttgaacattccccaatggagacagtgcatgaaaattcatgcattccatcatgcaagacatagtaatcttcagaagtatcaacattcagttctctgggtacaagtgaaaagaatganttttccctagagtattgaagtactgtatagcaatatcttcccgggtatttatgccatcctctctttgaatatcagtcctgaactcacccacatctcaaccatctcttccatcttgaacttgtaatgaggtggaaatatgctgcagtaccggaagcanacctgcacttcattac

SEQ ID NO: 34934 - DNA, 391 bp, Oryza sativa
tagatgcgtcgcagtacacttggaaacccttctttggatcaagcttaatcaaaatgggtgctgatattaagcgacttttcaactcttgaaaactctgctcacatacttctgaccacttgtacttcacatctttctgaagcagtcgtgtcatgggcttagcaatcttggaaaaattctctataaacctccggtaatagcctgcaagacccaggaaactgcgaatctctgagatgtcttcggttgtttccagttggttactgattccacattactcggatcaacggcaactcctccggctgagatgacgtgtccaaggaactttacttcatacaaccaaaattcacacttgctaaacttggcatacaattgatgttctcgtaacttctctagt

SEQ ID NO: 34935 - DNA, 221 bp, Oryza sativa
  unsure (1)..(221): unsure at all n locations
agncttatnnnccatctctatgcttnatttatagccatgcctttcctcccttcattcatgtgtctntttatcaaagactctttcttttaaaggagacgtaagtacagtctaatgtaaggagttatttgaatggaatttttatgggaagccaactttcagtgtaagagcctaacttagtcatgtttatgtggaaatgaaagtggaaatgaccccttgacatg

SEQ ID NO: 34936 - DNA, 367 bp, Oryza sativa
tatagaatctactttcagatggttttggtccctctcataaattttaccgagctgccgggtatctgcaatacaaaccacgtacctcatccagtccgaatttgacttgggttttgggccttgtaattgtgtcgtgagcttagcccaagggggtgtgctccatatggcaaccctatgacgtccctaatcacatttattcagtagccgtcatcgtttatagtcaggttttgcttacattattctgtcaagaacagtttcgccgctagatcggtttctagaaccccaaattcgtgtgcttaatcattaatatgcaatttgattgcaatctatcttgttcttgattgtgttcttaaatttgcatgcagggatt

SEQ ID NO: 34937 - DNA, 422 bp, Oryza sativa
gaccctaaaacgacctgcggcatgcagcttcagggcttactggagcgcgccacaccgtgtgtttctattcttctcacaatctccgtggagtgttcgaccgagcagaacgacggcgcggagctaggacagtgctcggtggcgctgaccgccgacataatctccacgctgcggtacgacaccatctcgctctccaccacatacacagagcggtggcgctcctccctcgccgccacgggaggcgccttctgcaggtgcaccatcctggcgtacacgccgtcttcacccccgtcgtgcatccccaagagcatcgtatgcgtgccgagctccacgacgcggacagcgtcgagcaccagaatcgtgtcccgcttgcggagcgtcgagaggcggagcgctacgatcacggtggtcctgcccacggacgc

SEQ ID NO: 34938 - DNA, 371 bp, Oryza sativa
tgaacgttttcaagctaatgcctgtttggttcctgttaatgcaccctatttttccgtggaaattctcgccatacgcatttctcttcaagccaatcgggtctttattaaagataagattgggatgacacctccaagaacgtagaaaagcacgagatacgcaagctgcacgagcagcttcacgcattgacataaaggaatgtatacgagacaatatgtcctgcattacacaaacatcagataaaagatcaacattgatattgcaaatccatatgattacttcaattggagaaagaaaaaacagaagaatccacagagtaatgttctgccccaagtatctctccacatgaatgcacagggtgaattgcattaca

SEQ ID NO: 34939 - DNA, 327 bp, Oryza sativa
gcttctccactccgcctgccttctcatctgcattttatgcgccatcgggttggccgcggctgctgccggacacccatgctgccagacgaggtgcggtgacgtcgacatcccgttccccttcggcatcggcgatcactgcgcgattcacgagggttttcggctcgagtgcgacaacgccacgaaaggcaccagcaatcagaagcctttctggggggacttcgaggtgatcaagatctccatggaagacggcaaggtctgggtgaaggcgtacatgtccaggcagtgctacgaccaatccacgggcggtatgtcatacagcgacgcatc

SEQ ID NO: 34940 - DNA, 387 bp, Oryza sativa
tagataaagaaactatttatattatattcaagtgtataacttttaaaagtaactatttatataataatcataatgtaattgtattgtaaatatattataattacaatataagttctacaaaactctcatattattaaacaaaaaccaaaccatgcgtatccggttggctagcgaagcacatttttacctatgaggttgctggtttgacactcttagcctcacaagtgacatgggaatttttcttcccttccctccatgaatctcaacacgatccaatgatttaaagaaaatttacaagtcgaaactttaaaaaaaatcataccgtcaattgtatagccatgtgaccgttttcctttttgatgatgataaacgttgaaagattatagt

SEQ ID NO: 34941 - DNA, 422 bp, Oryza sativa
  unsure (1)..(422): unsure at all n locations
gatctatttgcattcattattatctaatgttactttctatcctggcaatgcttcggctacgtacattgctttttatgaagctggtaactttgaattgtatctggaattgcatccactggcatttatctatttgtgtcgggatatttttttttctgttggaactattgcattataagacaattgcttacctctgttagaagctagtgtaacgagaataattcctttctttgttgggaagaaagtgctatactgcaagcataaaaatgataccttangtgctggacgcttttagtggctgaaagagctaatcaaaacttgtcctttgcttttattcctgagtgtcttatttgtcctatactcatgcagtcatgctctatacaatgcttacctgtgctatgtcgtctagctgatctatttctaat

SEQ ID NO: 34942 - DNA, 390 bp, Oryza sativa
tggcaccatttcaagcaagtgtattaccttatattgctgcttcaatttcacggttacctaccaaataccctgtttacatgtagtattcacatatatacctgacactacatagaaacctcatacttgcccaacctagctactgcattgtgttaagtactgcatgagaaagaattgctggttcctcagtaacatactttgacaaggattctaattattgtttttttttgggaaaataatgaagaagaaaacactgacttttgctatttatagcccaagctggatacttttgttatcctctcatctaccagccaatttatttttgatgtatttagcactcaccaagaacctacactcatctactttccagttactctaatacaaaattgatag

SEQ ID NO: 34943 - DNA, 481 bp, Oryza sativa
gcaagcttgtagcaagttccgtagatgaatctggtgcctctactttgaataataaatttgagcatactatgagttcttattttgataaaagaattgagtcatttatgagttccaaattcgaccgacttgtcacctaattctactttaagtactagtcaagcccctgtacttaaaatagatccggtggaattgtacccgtgcatgaaatagatccaatcactaagaatgttgttttgcaccattatctagtacataatccaccagttgctcttgctaatccacatattcctccacatgtaactaatgcctataatgatcctaatgttggatagcctcaagatgttagatatgtccaatataacaatattgcgccgccaccaccttttatgccacaaaatccacaaccaaagcctgaaaagatggaggagcatgtgaggaatattactagagaagcatttggaattgagccaaggaatcatgc

SEQ ID NO: 34944 - DNA, 380 bp, Oryza sativa
  unsure (1)..(380): unsure at all n locations
tcatacatttctcaagtttagtatagtctctagagtacagtggaatagaaatagaatagaatcttcaatcctcaaagtcttcggaagagttcgaatatagctctagtagttttccttcctttgtaagacttaatacttttattagaatattcttctttatactactctggtattgtattactttacgagtatatgaatactaactttactatatatccgagttatattgattatgatgctagctaaactgggaaatgcaatagtgtgggtataatgaacgtgcatacgatgactctatgtcatgacgatgatattagagtagtatttggtaatttaagcgtggtggttagaatactggatatcnatatttggggttatat

SEQ ID NO: 34945 - DNA, 372 bp, Oryza sativa
  unsure (1)..(372): unsure at all n locations
agcttanccactcttcgatgtccattaatatgtttttttatcttgttntacagngngtancgtgcgaaaattctatacacaaaatatgctttttattaatcaaacacatctattcctaagttatttaatagttaaaatccagagaatcatattctaatcatggttcttgtgtatgtgcagatccattatctaatatatagaacacaccctgaatcctaacttggaaaacataaattgtgtcataaaatatttcaaccaaagcaaaatatcttgtccacatacttatctatcttttgagtatgtcaccctcccaacattttcatcatatttatacaaatacttatctttcttttcatactcctacatgctctg

SEQ ID NO: 34946 - DNA, 378 bp, Oryza sativa
tctaagccttggcgtgacgcgtctcatgtgttgggaccaggctcatgtgttgggcaatcgcggtgtgcgggttaagtgtacatccacttgagtgggagtaaaccaaatctattcaaataatcctgctcgccgttattgagcaccgggacatgtattacacctggctaaaactctaattctttaaactgtgtgggatgggatattgcatgatgaattttatgctgatggaaccacttcctgagaggcgggaacgtggacgtcctcagaaaaccataacgactcaatggcgggaagctatccttgggatcacaatggatggtggacagaaccgtcatttgttaatatgaacactggtttaaaacttgatcagtctatgct

SEQ ID NO: 34947 - DNA, 458 bp, Oryza sativa
  unsure (1)..(458): unsure at all n locations
gcaagcttgaagaagtcataagtggagtcctagcttatatctctgttgagcgcctgcgaagatggagtcatacatcctctagtccgctgntgtttttcttttgttgacagacctaatgtgcctatataataatatagatatcatcgngataattaataaagatgtggcttttgtatcaagtctgttgtggtgaccacggattttcctacgacggggattaatgcactagcgttcggaaaaggtattttctggccatgacaagtttgaagtgttaagttgtcagaattaataagacaaggcaataccaatttgtgaacaaattgttataccaactttggtagagcatatgggtgaaatgtcattacctcatattcaagaaggtaatcatatggatacacgtccaggctaagatcattctcgaaanntgaaagtatctttggaaatttatcatcaacact

SEQ ID NO: 34948 - DNA, 407 bp, Oryza sativa
actggctccaataaagaccacaatgatagccgattgctccccaccacttgtcaagggccataagcgtcaacgcggcaaggggaaggtccgggagttggcgccggagccaaaaaagggcaaggctgcgacgtctatgccggtgagcaaatccgggaaagtcgtgagggcgccatcccaatttgagctatgcatgccattggtggaggacaatgtgttagctgtgatgggtattgcttgccgagatctacataagcaatacatggagctaagcaatgccaagcggaaaatgagggagtcatccatagttggacatcacgaccaccagccgttcctatcgtcgcctgcctatataactatatgctctgatgacctcttcgaccttttcaagatccggaagttggacactg

SEQ ID NO: 34949 - DNA, 337 bp, Oryza sativa
  unsure (1)..(337): unsure at all n locations
cttttttacttttttaaatataactgcagattaactgcttcagcccacaaagatttaagcatacctttggcttggagcatagaattggccatatcattgatcgtcccgatttttcgttctgcaactccattttgttgcgcactataacctgtcgtcagctgtcttccgatgccagcattttcacaatatttctcaaattcttttgagatatattctcctacttgatcactgcgcaatactnntaattttcgattactctgattttccaccatgaccttgaattttttaatgtctccagggctgcagatttttctttagaaaatatacccaaacattc

SEQ ID NO: 34950 - DNA, 391 bp, Oryza sativa
cacgatcctaatctattcatattattaatcttcacacctgcacgaactttgctttaactcatgccatcaagttgtagttccaaacattctaatttaacatagtaaaatctctaacttgggtatatttatttttaaggttgtccataaccgattgttaatacattataggatccatcaaaacgtacaaactgttgtgctaaatgttagccctactcaacttcaaaacgtacattttgacttaacagagttctctctggtggtctgtcctcacaggacctgtgagagagaatggtgatcacaatatctgcatgttttctgcttgatctatctatgcttatgcatgtttatacttcacatcctgcaaactatcccaaagcatttgctgtacgta

SEQ ID NO: 34951 - DNA, 304 bp, Oryza sativa
  unsure (1)..(304): unsure at all n locations
agcttggacgggaggaagaagacgaatagcgtttgttcttgttgttagataccaaatgtaaatctcacaaaagaacacgtaaataacacaatggaggattatagaagatgaacagatgcggtacctatgtacctagagctaatattgagacaattatacccttctccatcttcaaaacaattataattntacccttccttgctaaatacctataacaatacttgaataccatttaagtggtacctttcattatagagcggtggggatattacctttttagaatgcaaacaccgtaaaagttctc

SEQ ID NO: 34952 - DNA, 399 bp, Oryza sativa
ctgtggagtgcactatcatctgtgagtgtgttttgtgttaattgccatattttttttggtagatttcacaatataacagtgtactagcaatctaacatatggtgataattttcaaatttgtagattatgatggatcaaaacatggaagattcaaatattgagcctgctcccaagctcattgaagtggtttttcaaaactgcaaaagcaatgtggatcaatgggttgagccttacctcagtcttacaattgatcgattgcgtcgagcacacaaaccatatttgaaatgtctccttgttcaagtggtaagatccctttgttttcaaatcttgctaatcaaatgatgttttgttagtgttgcctgagatcactttcttagaatcattgtttcaagcttatac

SEQ ID NO: 34953 - DNA, 447 bp, Oryza sativa
  unsure (1)..(447): unsure at all n locations
agcttgntcagtggcatgaacggcagggccacatggtctgctatcgcacgagcaaccttccggcagtgatgtctggcaactatgcatgaggctgaagggggccatatcccaaaaaatggatggccatatcccatccttccttgatcatgaaccaaacatacttttattgaagctaatcataatgtagattgacaaattctcgtaaatagggacatattatcatccagattctcaaaattggtagctatataatataaaatgaactatgggtagctacataatataaaatgaactangaccaaaagttataggtttctagcttcttcaaattcttaanaactaactaccaaccaactactccctccgtccaaaaaaaagaatctagaactgtatgtaacataatttagtatgatgaatctagacagaggtatgtccagattcgtacta

SEQ ID NO: 34954 - DNA, 406 bp, Oryza sativa
tcagtgcagtgagttctcgtcaacagaagaatattcatctgatctgtatgcaccaagttctactgctcatactgacaaaatcgagtccagaagaaagaaagtggttgaagcttcagtgtatgctatcgtcaataaaggtgcagaggaaatcatactgcaatagttgcctagttgggtgctcatctcacctctatgaaccatgcatcacctgtcattggaagggcagaaaatcatgtgcatgagaagcaacagacaaattgcaaatggcatactaggaaatcaagagataatgcttaccgagtatcttctcccttctgcagggttcttacttcttctatcttgttctctctacctgccgcacaaacaaatatattgctatttttgcaaatcagtccataacatcatc

SEQ ID NO: 34955 - DNA, 482 bp, Oryza sativa
  unsure (1)..(482): unsure at all n locations
agcttgtatatttgtacgtaacccttaatcttaatttatattggttggcctagcttgggtcggcccagaaagactcctgttctttgttttaatagttttcttagtgaaccttgcaagttccttgttttcatcttgagttacatgttccttttaacttttctcggttgcttcatattaaactgcccatantttttttcagatggtgatattatcattaatcctgaaaagggccagaataaaagcattagtgaaggacaggcgatccactgaagaagcatttggaacttacgtggaggtgacagcttgtaattcacacatatagctntaacatgcttttcgttcttgtataccacctctntggtgcatcagttattagaaaaaggccatagatgtttntggatgttttctcatcatgncttgtactaacaatttagtgaaatattatcctcataatcactttctctgctgccttgtagtgcatg

SEQ ID NO: 34956 - DNA, 376 bp, Oryza sativa
tgacctatatatactcaactttcttcgtgctaactcaggagttttcgcgagtgttcaattgactggaccttgcacaaacatttgtgtgacttctcactcttattttttatgctacaatgatacatggtgtactcttatttttcacctgatgagtaacctgtatatggtacatcaatccttttgtacattatgaagtactccttaatacatctactcaatgcaaagtttttaccacaaaaaacagctcgaggaacttacaaaaatatttacattaaatactctgaactctgaattctgaagcatagaatgccatcattaccaacgaaacctatggtcattggagtcctcaccattggtcggttattaacggaatact

SEQ ID NO: 34957 - DNA, 473 bp, Oryza sativa
  unsure (1)..(473): unsure at all n locations
agcttggacaaacatattggtatctgggactttctctgtatgagaaataacacgacatggaaggcatgcatgactaccattacttcaattttggatcataacaaggaatcaaaagattcacacaatttcatacatacaaaatcggaataaaatttgtgtttgctcattttcagaactagtttcacacatacaaaattggaataacatttgtgtttgttcattttcagaactagttcgtaatgtgatacgtgaaaataataagccataagatttatccttgtaaagcaaaacatcggtattctaaaagtgggtctactgggctgttcacaaggaacaagcacacctacttgttatcacgtaatcacctgtttggccctctaaattggccagttagaccggatttccctatgtttgggaccaaacaaaaagccacataccactntcttaaaataactagtatcattaagaaatta

SEQ ID NO: 34958 - DNA, 382 bp, Oryza sativa
tacttctgtgaatgttgaatttgtgacttgtgtttaaaaacttttttttctttgctagtaagtcaggctagggatgcaaatatgcaattcaaaacttttcctgtacaaattcatttacatttgaagggactaaaaaatattttcctgttctgttattcattttgcatggtttctactttcaatacaatcaaacagaaacaagacaactagtgtttttagataatggaatatagtagttgtgtggtgagacttgtacatgtctagtacgctgtgtagtgtagcttttcctaactatttatgcagtctgtttgacaacaataaatacaatatgttcatcgttcatttagactctttcctagggctgcctagattgtattctgat

SEQ ID NO: 34959 - DNA, 486 bp, Oryza sativa
  unsure (1)..(486): unsure at all n locations
agcttaacaaggttacaggttgaccaatttcattctattcggcgcaatacctaaatcatttgccaacttaagaagtgtgaagcatctgtaaggattgttcatttccattttgttcctgctttgttcttcaatctgaattcagtgctagactcaatttcccctttcatttcagtcacatgaataataattcattaagtgggcaaatcccgtccgaattgtccagactgaatacacttttgcacctgtaagtggaagcctattggttgcatttttttctaatgcatgttgtatcaggtaacatggaattaatcttattatatactctaactaaaactttgcagccttgttgataacaacaatttgtctgggcctcttcctccagaactagctgcggcaaaaagcttgaaaatactgtatgtatccattgtcaattgtcaaactcaattgaaaatagctngctatgatagcatacacctgtttcttata

SEQ ID NO: 34960 - DNA, 389 bp, Oryza sativa
  unsure (1)..(389): unsure at all n locations
ttacttcttgcacaggtagctcttaccggtgcatgatgacgatgttatctcagtataacaaattaagaagctgagtgttgaaactaacttgtagcatccaccaaggattctgaatttctgactagatctcctcagaagagaattgaagcaactgaaagaaagctgcagaaacaattcctcctcattgaaaatccactttatatatgcagcatggtgcactaatgcaatccaacccataccagaaactaaaatacttgaagatgttatgataggtccagcattgcaagtacattgtactaactggattactggacaatcaacaactgcaaatatgtgaacttcagaagttggctcaaagaanaacagaaaaggttcagagctggaacgga

SEQ ID NO: 34961 - DNA, 342 bp, Oryza sativa
tccaggtgagtatatccaccaggcggtccaccgccggcgctgacgtgccgacccgtctgagcgcggtctcaccgaaccgcaggtttgtcacgaccgttccaggtgagcatctgcaccagcctgtccaccatcgccgttgacgtgccgacccgccggagcgcgacctcactgagccacgggttcgccgcgacgttgacgatgatcccgacacgggcgcggacgcccgtcgcgccatgctactcgccggggggtggccatttgccagaagtgagagagagagacgaggagaggagataaaaggcgaatgatggatatgatgctgacgtggacacttgacatgtg

SEQ ID NO: 34962 - DNA, 355 bp, Oryza sativa
  unsure (1)..(355): unsure at all n locations
taatgttaccacattaaagttcatagttttgtgttcctataaaaattngaatcatcccaaaataagttatattcgattttatatggattctacaagtttaagtgttctgctgttaaaaagtaaaggctcttagtattatcttttacattgtcagattttaaactcatggggtccacctgtctgtctcaagccaatatgcaaaagggcctctatggtttcatgaaatcaaacgcaatcctatgactgttctgtgtgtcttgaacttttgcataaatgaccctacattaacctaaattcttgtgacgaagtccctggttcgagctgaagcaaatcaagccatggctgagctcgatct

SEQ ID NO: 34963 - DNA, 397 bp, Oryza sativa
taaattttatgaacatgcaattttgacagcattatttattttgaactggaaatccttgtaatgatgaatggttgagtgcatggcctatgcagaggctggaataatatattcctttatcttaaaaaaaaaagcatctaactgttaggagtttcttattctctattagtttagtacataatagagagttagagatcatgatggttttgactagtcctttatatcatacaccccttcttttactcaatccagaatgacaataaaagtcagattgactctctttttttttccaagcaagaaaatggatggacaagtgtctggttgcttagcactcaatccagaaaaaaggctttcacgctagttgcttaatctgttgtacgtctctttactttggattttt

SEQ ID NO: 34964 - DNA, 386 bp, Oryza sativa
  unsure (1)..(386): unsure at all n locations
tccctttcgtctggaacctgtgtacaccccgcattggcgtgacccgaaggacacaaaatcgtccactgcaaattccagattacggcgtcggttatctgcataactcttctgccaagactgtgccacctttaaattatcccgaatggttctgactttagctttagcttctctcaggatatcagttccgaacacttggctttccccaacttggtcccacaatagcggtgtccggcatttgcgtccatacaacgcttcatatggtgccatttgtatgctggcttggtagctggtattgtaagagaactcggcatangggagactcttatccccggtcttcccgatatctangacgcatgcacggagcatatcttctatgatctgattta

SEQ ID NO: 34965 - DNA, 462 bp, Oryza sativa
  unsure (1)..(462): unsure at all n locations
gctttgcgagagatttgcgttgagttatatttttaatactcggtcgaagtctgtatgcattctaaggacgtgaaattggattatttcaatggatatatgttcagatgctctcatatggacatcatcaaggtagccaacaaatcagcaatcagcaatgatatatttaatctcgccacacaacttgacaagctcatgtactcttagataaaacacgcgaaacatataatactttcatatatttatcatttgagatgaccattaaacagtacggtatatacaggctcatatatttgtttgaggaatgtccgcagcgaccttttcaagatgagggaccatgactaacattatcttatatcatatttgctgggcctgtggaanaacaaaacaagagccaaaaccaaactacagaccaataacaaaatgaattctatatctaaccactgtgagcatagtaacctcata

SEQ ID NO: 34966 - DNA, 320 bp, Oryza sativa
  unsure (1)..(320): unsure at all n locations
tttcatatatcagcaatccatctgtgtaatggttttctcgtaccgcttcagtcattggaacactgtatttgtggtcggttgttaactttgattgagtactaaaccttaatgcaaacttggttccctttgcttaatttgtggcaatctgccgatgtcatggtacactcttttcttgctttcttttagaagagtcgatttcgtagtacatggcctgcctggtctctgcagatatgatgtagtcctgtcggttggtaaacttgtgttctgtgctgtgactgggtgtgatgctgttgcatttatacngcttgtccttgatgtat

SEQ ID NO: 34967 - DNA, 358 bp, Oryza sativa
actgtgtggtcatagtgtatggtttgaataaatactttttggtcttgacaaaaaaaaataattttagcttcttttcatggccagaaaattcaaatagaagcaagctgtttaacatgccacaataaaatagtcaacacaaacaggaacagaacatagaaataatgagaattgcttatgtacaattaattaacaagaggtgttcaattgtacataattattcgagagtattattcaaacaaaattgcataaaatctggcaaaaacatttaacttctcatacatgcaaccagatatgacttgcttattaattgtttttcacgtgtcaatattcaccacacattcgctcctgcctaacatac

SEQ ID NO: 34968 - DNA, 444 bp, Oryza sativa
  unsure (1)..(444): unsure at all n locations
agcttctcanagccgggttcatcagagaggtactccatctatagtggctagccaacccagtcatggtgcggaagccaaccggaaatggagaatgtgtgtcaatttcaccgacctcaacaaggcgtgtcccaaggatcacttccctcttcctcgaatagaccaactggtggactcaatataccggtgtgagtttgtgagctttcttgatgcttactccggctaccaccaaatcagcatggcgaaagagaacgaggagaagacatcattcatcancgccgtcggngtattctgctacgttaagatgccgttcggactaataaccgcatgaaacactttccagcgcacggtccaaggtgcacttatcgaccaactcggaaataatgtcgaggcctacgtcgatgacattgntgcaaaaccaagatagcgactcattgatgatgatct

SEQ ID NO: 34969 - DNA, 358 bp, Oryza sativa
cgtgcgccgtgtaatgatgtgcaactcgtggacgccgaagtgtggaccttccaccccttcctcctcatgtatcccggcgggacgccgttcggcgcgactgtcaccgccctgaatccgccccggggcgacagctgcaccacctccacctgctggtagacgtcgccgcggacgaacggcctcggcgacgcgtcgttcgcgaatgaccagatgccgcagcacgtcaccacgttctcctccctcgagcacgccgacaccttcccggcgtgcctccccgtggcccggacggcgtattatctgtcggacgacagcggctggccgacgacgggcacgaacacgacgtcgtcgcgatccgtgtggg

SEQ ID NO: 34970 - DNA, 327 bp, Oryza sativa
agcttgaagatcgcagcacgcccatggtgttcatatggtatgcagcgggcaccaaagcgtacaaggtgttcgaccctgtgaccaagcgcatgcatgtgtcacgcgatgtcatcttcgacgaaggcgcgagctgggactggggcgctaaagtgaccgagtctggccttgaacagacggagttttccgtcgagtatgtgctgacacatgtgagcggtggtggtcgcggcgctcatgatgaaaactcatcgtcaagctcacgacgcgctgcatcgaccatgcctgatgagccgcgcacgccattcgcaagctcgggaccacgagcgtctt

SEQ ID NO: 34971 - DNA, 401 bp, Oryza sativa
  unsure (1)..(401): unsure at all n locations
taggccaaataatgttgtttgcgggcctaatctctccattttatcattggggggnacgctaaaccgcaattgttgtatcgctttgcttcggctattgataagttattatgcatatgagcatagttaaatttggcccgtcactaacgttaaatggaccaaatgatccacacaagttcggcccagaatcaacattaagcttgttgaaattcggaccatgcaaaacattaaacagacctatgtaccctactattgccaaaaaagaactatatatcatcgagaattatatgccatgcccgtaatggcaggtaattaggtaaacaagcaattgatttattagtatccatccaattaaaactgtgtgttacactcgaaataaaattttctgttcgtaacacctctga

SEQ ID NO: 34972 - DNA, 397 bp, Oryza sativa
ctgagcggttcatcttatggtatatacaatctctgtctgacttacttgtgctgccatccttgtgatatcaattaaccaagaagcaatacagtgcaagccgccaggatttctgaactggaaaagcggattcagactctggagaccgacaaggccgaattggggaaacagagggactcggctctgaaggacgttgaaagtaccagcaatcaatgcctcataagccattatcttctttacgctaactcattgatgtgaatctgttgatgcagaccgcaagatcaagtcgcaggctgaattcgacgtcttaattggcaaaatcaaaaggcttgaaggggctacggatgaagttgctaacgctgcttacccactcgttcaagccatgttcttcaacaacaat

SEQ ID NO: 34973 - DNA, 371 bp, Oryza sativa
  unsure (1)..(371): unsure at all n locations
tagccaaaatattggtaactttataaaaaaaatggtatggttgatttctatgacatcaaagtgaataggccccacatcttgaagattaggaaaaactaaaatagattaagtaaaggtagccgttgatgtaacaatccatttgaccctgtaattaatcttatccttcccatttctatacacataaatcatttgtttgacccatttattttttatacgaggttatcaccacttcttgccgaagagaaaagttctacgaagctccaagtatatatactcatatatgtataaaaattaccacgcacgccatccatgattccataatcattgaccgctctgncgtgacgcttaattatgcttcgataagcattaat

SEQ ID NO: 34974 - DNA, 395 bp, Oryza sativa
tctcacctatatatggaatgcctatacaggtcttcatgagtcaattttgtggaatcaaaccgctcgagacaataatgcacatacggaagcacatcgagcgggcaacaaactatgcatacacagaaattctaatgaaaacaaaagataatacataaggtattcccaaacaaatatactgaaacgaagatcgaattaatccagatatgttccttgtgatatgtagcatggtcctacaaatgtttcaaatgccaaataccagaatgcttcaatcaattacgattggttccctttccctttccaattagcaaaaatgagagcaattttcttgtatgctatgtctctgaacgtctccttgcgagctgagggttatcagacagcataacatcagtcaacag

SEQ ID NO: 34975 - DNA, 477 bp, Oryza sativa
  unsure (1)..(477): unsure at all n locations
gcttaactgcatgctaatcctaccttaaagtttttttttttgtgcaaaggncaggntgtgttctcaaatctggttgaagacatgctttgtcgcttcttctgtaccatataagtttctattgtttggacttattatgcaattgctcttttgtacttctaccataatttatggtaccttattctgtactgttaattgttctgtggtgccatctggaattgagtaaagtctataacacttgaccagaaagttaataagccacaatacagtccataaaaatattgacaatgtgcttatttagttttgtactgccatgcaagctgctctatcatcctctcaattagagcttcagacaacaatatgcttctgttatcaaccattttattatgtttcatcctttatgcagtgctatcattaggaactaatatgtttgatgtttctcaacagtacaacaagatggtactctggatgacacctctc

SEQ ID NO: 34976 - DNA, 391 bp, Oryza sativa
  unsure (1)..(391): unsure at all n locations
tactctagcttcgcctcaccgcangaaagagaacctgtccgccttctcgtctccttgtttcttcgaagattcgcgtaaggggtgaagttgtgcccgatcgtgctgaacctgtcatcgacatcataagtgatgaggaagaagaggaagatcctgaagaaagagagccagctactccagatgaagaagatccatcgctttgttccgacgcaaggcggaattagtcgcttagttagatcgttgccgtagttcgctgcgttagattgcttgtttaagtttgcttgtgagtgtgtgggatttagttgttgcttacatcattggtgggatgtaccacatgagtctattcttttgttgtcaaatgtagattttggtggatatgttaagcacttaatgt

SEQ ID NO: 34977 - DNA, 427 bp, Oryza sativa
  unsure (1)..(427): unsure at all n locations
ggatcttaagtcacctgcggcatgcaagcttgtcagcatagaaatccaagcattttcgtttattctggngaaccaagtggtaccatgcttgatagttcatacttcaatctgaagaatttgaatattattccggatatcctaagtagttcatatgtcatgcaacagtggcagaaaaatgccccagtgtggaatggcctatcaaatgtagtccatggcgatcatgtgccaatgattcctccaggaattaatcttcctcaagttccatttgtggacaattccggttttggtcatatgaagttccctggtgatgttcaactgatgtcccagatcgggatggcaacatccttttgtacaccaaattcttttgggataccatgttatnctaatttgcagtcgcctagtgtttgggtcctccattcggaatcgg

SEQ ID NO: 34978 - DNA, 378 bp, Oryza sativa
tgcatggttgtcatgatcgggatgtttatgctatctgtgctttcccttcgaagtaagaattgtagatcggatttgatcccgccaaaatctgttaagtacatacctgtatatatactcctatatattagaataagaatacgtggtacacactgatacttattatcggcaagtccaaggtatagaccggtgtggtctctacgttaattagaaactatcatgttacaatatttaaaacagtacggtgtcttaccattaatattccaaaataccttcttactagtcatctttcctttattatactcaatgcaacgaaataatgtcctaatatatgctaagagtcaacttatgccgctgtcatgcgtatcaacctatttttct

SEQ ID NO: 34979 - DNA, 390 bp, Oryza sativa
  unsure (1)..(390): unsure at all n locations
agcttgccagcggcaaacgagggctcgtntgagggtgctaccaacagacaaaatgaagggcatgctattgcgattccattcctctacttttctcgggcagtggacatcggagtaacaccggtggcgagtccgaacggcggctgtgcttatgctgctactgcatgttgagttggtgctcgattctaagtgaatgaaatgcatgtatgcaatcctatgggctcaagggtgctcaccgaaccttggacgatgcgcgtgaaagtctggacagcggcagcggtgaataatatggtccaccgacggtgtatatctccgggaagacaganacggctcgatccactcatcgaattgacatgcatgtgttntcatggggttagtgatggcccacggatg

SEQ ID NO: 34980 - DNA, 363 bp, Oryza sativa
tctcaaagtcctcatagactcctgagatcaactgtttggtcaattcatcaccaagaccaaacaaaaacttctcctgcttctcggcatcggtgcgcacgtcctcaagagcgtatcgcgcaaggcggttgaactcatgcatgtactctgtaactgacatggttccttgctggagcgtgcggaactctcttttcttttgtgccataatcccctcatgaatctgtgccttcctgaagctttgacaaaactctgcccaagtaacctccgttgcagctggacgggttaccacgcagttatcccaccatgcagaagcgggaccttgcagctggtgtgtagcaaaagcaaccttctcttggtcgctgcatt

SEQ ID NO: 34981 - DNA, 440 bp, Oryza sativa
  unsure (1)..(440): unsure at all n locations
aagagcgcgcctcgccttcatgagcagctaaagttctcccttcaaagataccgggagctctcccttaagacgttgcacaagtgcccccaaagaagacatcaacttctccaagtctgcggagcgtccaagctcgtaactattttcccatgcagcggtggcagcaccaatgtactctatggtgccctncttgttcaagggtttctccatcaaacaatcttggatgctaaatagatcctcctccaccatgtgggcgttgcgacgttcagtaagcgtggactttggaagctccagcgtcggcaattcgtcagtcgccgaactcacagagttaagttggagatagcgaccgcacgtcccgaactcagcaaggtaacgggacgtcttctccatcaactcgttcatctggcaagctgtgtcggatggattgcctgaagttctacaat

SEQ ID NO: 34982 - DNA, 387 bp, Oryza sativa
taccaaactgctgccgtcctgtttgaggtcctcttagccgtcaatgtctcccagaaaattgaagttgatcaagcggtaatcttcttaactataacttgattatgcatttcttcattttcttcttctactaacttgtaataaataacctctcttgcagattttggagacacacaaccaagtcgaggaaaagaaaaaactttatctcccttacaacatcctcccgcttgaccctgacagcgctaatcaggctatcatgcgatatcctgaggttcccattcttctcaaaccctacctatcttaatcttacgtatcttttccaactcattctgcattttttattctcctcattttacagattcaagctgcttttcacgctcttcgtaatac

SEQ ID NO: 34983 - DNA, 426 bp, Oryza sativa
gaatgaattggtgtgattggttttgatgaaaaaattattcgaatgatgggaaagtggatactacctcctttccatattacacgacgctttgagttcttgtttgtaatgtttgatcattcgtcttattaaaataaatagaattattatttattttctttatgatttgctttattataaaaattactttatgtatgacttttctttttttatatttacactaatttttaaaataaaacgaatggttaaacgttgcaagtaaaaagtcaaagtaacatctattatgggacggaggtagtagaaaattaaataacaaacggttgagattggttgacatgaaagaattgctggagaagtaactatattttgggataaaatcttaacgttagatagtatattttgagacagagggaataaaccgtaacgtgg

SEQ ID NO: 34984 - DNA, 384 bp, Oryza sativa
tgaatcaacaatcaaaattcatgatttcatacgttttataatgcaacatcttaacaagcacataggttgaagaataaacactaaacacatattattttgctcacatcgaatacgttcttgtcgtcaagactgtttccaaggattcggtatttattttttttatattttttattctctttttcacaatgagcaattaaaggtatttgaggaataacaagtcaatagagcatatatatagagcatttataaatcaaaccatatgctagcatcaacattgcatattttcttaattcaagtatagaatttaagtgtaatgcatcatctcccttaaaagcaaaatctaaatctcatgaaaagactagaatacatacaagctatgctaga

SEQ ID NO: 34985 - DNA, 381 bp, Oryza sativa
  unsure (1)..(381): unsure at all n locations
ataatgggacccacaatttccttctttaatgccattggagcacttatgtgtttatccaattgcacaagactcgatattgtttttgcggttcatcaattggctaactgaagaggacacaactcgctcggatattaccatgactaccttatatattattccaccaaaggggcatatgttctacattatatttacttgttatatattcgaataaacagtgctacacaatgagctctgtgtgtattcgcttgcagagatactatcttgngcgaaagaaagaaaccaagttgacttctagtgtaactcggagtccaggaccagtctcgattacaagcaccacttatacaaagaaattctaataatcttacagtaataaatgattcg

SEQ ID NO: 34986 - DNA, 309 bp, Oryza sativa
tcttcgctgcaccatattgaccgtgtgccctcttctgtccaacggaagattgactaccactagcctactcctcctggttcccctccacatccctttacacgtgcccctgatggttacactacgcatgcctctccacgtttccttactcgtgcaattactggataggatcctcgttaccctattcttcattacattactggctgcttacctccgagattgtatcagacaatatctggtactcatatcggtcagccatctgctcatacaaaaaacatctgctaaagcaccagacatatatgttttaacaat

SEQ ID NO: 34987 - DNA, 513 bp, Oryza sativa
cttaagcacctgaggctgcagcttaccagacctgaccactcttaaccaatcaaatccatattgtatatagtccaaccttcacgtatgttgaaattacatcaacttgagcaaagagaatccccatataattggacactaagaaacaacatgcataattcatgaagtatcgagaatatgagaacatttgtcaaagcaatatcacttaacaacccttaagaaaataatatttgcataagctaaataagaaatgattagagtatagaaggaaacataaattattaggaactaatcacagagcaactatgtctaaaattttagtgttagtgtgagatgatgagcatataaaaagtaatggatgttgtgcagatgtagaaagaaggtgctcctctaaagttagagggacatgtgtcgctgacatgtggctcccatgtccctctaacttaagagtagaggagcctcttccggcgtggaatgcgtatatggctctcaatcacctgcatgtgcgggtggaaa

SEQ ID NO: 34988 - DNA, 260 bp, Oryza sativa
gaaacattgaggaaaaagtagagctcaccttatacctaatctattattaatggtaagtttaaatgtgcctatagctagtaattagcacttctattaactcttagtagcacttctcacacgtatgtgatcgcccaataataatatatggatggaaagttagtttctcttgtttcatagaatgaaaaacaataggattcagacatagatttggtaccgtatgattgtactatatgaatccggatcatatgatagtgctatca

SEQ ID NO: 34989 - DNA, 484 bp, Oryza sativa
  unsure (1)..(484): unsure at all n locations
agcttcgaccaggtcttcagatgcagtcaatttgtgtttatgtaaacgatgaaagctgggtttggggtgtttgtgattngtgaaaggtgaaatggaagtgcaaaggtttcagctaaagccggactgggtgcttgtgtagagaggactcagttgcatgggaaactgaaacgctcctttcttatcccttccaaattntttcttcaaacttccaattttttccatcacatcgaaactttcctacacacacaaacttctaacttttccgtcacatcgttccaatttcaactaaaatttcnaatttaacgtgaactaaacatgcccttattcagtattaattgagtattaatatattggattgtccccttcccaaggggctccacaaattctggattattccattnnttatnntaatttttacatgcatgttgactgaactaatacagtactactttccacatatctagagccttaaataacatatatg

SEQ ID NO: 34990 - DNA, 400 bp, Oryza sativa
tttccttgccatgccggcaagagctcctgtagtctgccgcactattcttcgtcggcgatgtgccatcaaccaccaatgtgtctggacactacttccaccagctccgccatgattactccttcgttgacattgcggactctgccatagaacgacgcccgcttccacggtcttttcctcccgtatcaacacacgggtatttttctagtctttaattatatataagtagtggtgttggcaaataataaaaagagatgcgcctcaacatttgtagaaatgagttgacaattaaggggagcaaagattgattagagagagagagagagagagacgcgatgcatactatcatatgctctccgcgcaaaatctaaaactcatggtaactctgtccatgcattgacat

SEQ ID NO: 34991 - DNA, 318 bp, Oryza sativa
tctatccactgattgtaccggcataattatcttgcctaattttttgggcaacacattggttccttcataaattaagaacatgatgctatgatgctctattttacaaggaagggtctaaagtggtatatcatcgcttaacattgcaagagcccttcgcaccacatttacttgatgtgctttatgaagatgatgacatggtatgtaaaatgaaaataatatccttgctaagtatgtgtggcaaacttttaagacatttctttccatctttcggcgttttaacaatcctagctgattcgcaagtttgaaatttaaaatact

SEQ ID NO: 34992 - DNA, 372 bp, Oryza sativa
tgtacaaagtagagaacccaatggagagaatccattgaatccaaggaaatgctttcctcctagcctttcgtaccacgtggggtcacgtacttagcaagcccaaggccagaagagttagaatcagaagagaaaagcgctgatgcgaactggagaagaagtacgtaagatgactattaccagcaccgaatggccctcagcagggataactattcctagacgtcaaagaggaaataccttccgaggtgcacgacagttgacccagcacctcctaagccatggtggcagagtatctgatagtgaagggtcagatcaagtctcctcggatgatgaagatgagtctccccgacatcttggtgaggaagagatggaatc

SEQ ID NO: 34993 - DNA, 404 bp, Oryza sativa
  unsure (1)..(404): unsure at all n locations
actggatcaacatcagccgtcacttcgntatatagttgttttatttgtggttgttgaatggatttgttcaagaaggcgcctaaagtcgaaattcgatctcaacttggtaatcatttgatgggcccatctgctccattccaaacctatatccccgggaatctttaagagactgaaaaaccattattagtcccacattatcttataattaactgcatcttcttataatgtatattatattcaacctcatcactaacaacatctcgttagattctacaacattttcttattgtattccttgtgaaaagggacagtggcgacatatacaaaatcagttgaagaaatgtaagtttaattagttgctactatatactcgtacattgacactagtaagaacggttgaatgg

SEQ ID NO: 34994 - DNA, 360 bp, Oryza sativa
  unsure (1)..(360): unsure at all n locations
atcctcttagtcacctgctgcatgcaagctacactgattgtctgggtgggtttggctatgggttgcctatacgacgtcttcaaggagcaaattgacggaaacactgtcgtcgtcgtccgtcgaggcctcaaaggagagccgagactgagttttcacccggcaaaacccctagaggtgatgggacgtcacgacaacgccctcaagagggaaagcgacgctcgaaagcgatgttgttgctggctcggncaggccaaggccatgctgggntttcacctatcgttcaccacctgcctattcaccaatgtcgccacaatgctccgctaccatcgaaacctccatcagctcgtgggcactgagccg

SEQ ID NO: 34995 - DNA, 409 bp, Oryza sativa
tctgcgcggtaccttgttgcccgcgtgccctcttctgtccaacggtttgttgacttccactagcctcctcctcctggttcccctccacatccctttccacgtgcccctcctaattcccctccggatccctctccatgttcccttcctcgttcaaatactgggttggatcctcgttcccctcttcttcgttccagtattggctgcttccctccgcgattgtatcgtacaatatctgttcctcatcgcgatcagccatctgttcatactacacaatcttagaagctaagtctaattacaaatctaataatcttatactataactcaaatagtgatatatgctaggtctaagtgacgtatattatatgaccctagctagtcaataattatatcctaagtctaattacaaaat

SEQ ID NO: 34996 - DNA, 483 bp, Oryza sativa
  unsure (1)..(483): unsure at all n locations
agctttgggcgcggcagcgccgcgtctgttgtttgtctatctcgacgggacacgggagatcgatcgngttcttttgtgantttcccttttgagggaattgggctgggtttgacgtcgactcgatcgcgacgacacacggccacacgggagatcggttcttttgtgtagggatagaattgggccggattgatcggtgggccgatgattggccctcttgaaattctatcttaaggacagttgcggcccaccctggcaccctgcctcttttgaccgnagaatttctcttcttttattttttttgtggaggatgggcacacattactttgcctctcatgtttggttcagctagattgtggctgtacagacgtagtgctgcagctgttctagtaggaattcgcttgctaggttctgctgattgtgcaatgctgtcacaactagttatctcgaacatattcatacacaagtatcatatctgtcgatgac

SEQ ID NO: 34997 - DNA, 371 bp, Oryza sativa
gggatactttctgatattcattcccttggagataagcctgcatttatttcacacattggggacatcagctatgctaaaggttatgcttgggtatgggatcacttcttcaaccaaattgagcctattgctgccaataccccataccatgtctgcatatgaaatcatgaatatgattggccattgcaaccttggaaaccttggtgggcaactggtatatatggaacaaatggtggaggtgaatgtggcataccttacagcgtaaagttcagaatgcctggcaattcttttgtgcctactggcaatggagcttccgacacccgaaatctttactacctcttcgattcaagggttgtgcattttgtttacattgt

SEQ ID NO: 34998 - DNA, 513 bp, Oryza sativa
  unsure (1)..(513): unsure at all n locations
accttaagngacctgcggcatgcaagcttatctatgagagagatagagagggagatattattttttttcaagnacccagcccataccttgtgatatctttagtcccggcaaggcctgcgtggaatatctgcttcacatgtttttaggttggacttgtcttgtttcattaaaccagccagatttgcctctccgattggctgctgcacttccctgatccttccttgagaccgctaaacaaatacttcacctcctgccaacgatctcagcttctgaaccttntttctttcgtgccctagcattctgcttagccacacacagcctgtcgaccttttcagcattactagtttactaccttttcttatctttcggatggctcctggctgttctaanaagggatgttgtttgcttcataagtatgagaaagagcacctggctgctacatcctactccaaactgccttcctcagaagtctctcatagntaggaccttcactgctgacaagtganatgagtc

SEQ ID NO: 34999 - DNA, 385 bp, Oryza sativa
  unsure (1)..(385): unsure at all n locations
tagaacatcaaaacaacagtcagaactaattggatctacacaagctctgagaacgctacttcaaaaatcagagcaacacatttatagatgaatctttcaccaactaataataacatatttttagctttgaaaacaagtgtggcactaatattggcatggcatgatatgaatagttcagaagcacatgcaaaaataacagttgaacagaacaatgttatctgatgttatacatgataactgagcacatacacctactggagaggctttaggaaataaaataaatgctaacagatttgtttagaaatatatcaggaataaaatgctctattttcattcatgaaaaagtgcaaaaggtgagtantttgcacgagatggttcaataatt

SEQ ID NO: 35000 - DNA, 490 bp, Oryza sativa
  unsure (1)..(490): unsure at all n locations
agctntccagaatagatggactaattattttataatattcctaanaaggattatnntttggataatagcagaacagtgttgttagacaatagaatgatgctgattgctgaaaactaatatgtcaggcatcgcattagtgtaaggatttagtacacatgcagatatgacatgtccaacaccaaaataatgaaacctatataaattttagattaatgccaacgtacaataggataaaagaacccttaaattggttcacttaccctaacttaaagtgaaatacacaatactaaagacaccaccctattctaaccctattctaactagtactccctccatcccaaaatatttgacgccgctgattgtgttaataatgtttgaccgttcgtcttattcaaanaattcaagtaattattaattcttttnctatcattngatttatggctaaatatactnttattgatacatataggtttacatatatcacaaaagt

SEQ ID NO: 35001 - DNA, 356 bp, Oryza sativa
tctagtcatggtgttaaattttattttatattttttaattcattttgtaattcctgttttaattgaaatacttttgtattcaagattaaaagacaaaaatatcaagattaacataacaacatcgtgttcacaaaaactatgctagcttgtgaatcacatcccagaacaaatcacataagcatgcacaatcacaacttatgtttacaggaatcacacgttttaaacaagctatctgacagtaagaaaaaaaacacaacatccatgcactttggctcaaaacctcgaactgtgaaacacgaaatgctctgcaaaaattgtggaaaaggataatatttgcaataaaactgaacactcac

SEQ ID NO: 35002 - DNA, 445 bp, Oryza sativa
  unsure (1)..(445): unsure at all n locations
catgcgaatggtttggttaacatatgcctaattccgccaaatacacagatgaaacccaaccatacatgttccccgattataccttctaaatcattcacactaacaatctgaccctctcccccaaaaggggattgtagtaagtaaccaaatataacactggagctaaaggtcaaattggtacatgttcactgaccagtccaatataaataaaatggaaaacaaacatatcatgtcttgcttactactgaaatgacgaatcatatcaagctctatgttgccatcaatctaaaaggaagtcataagttaacaggctgagagctgatttcacagggacaagtcaacaagagaacaccaagttntttaagagagaaacaagatatgtgcatgtaactcaagtaagataatgacactaagcatatncttgattgaataactgtctgacagc

SEQ ID NO: 35003 - DNA, 363 bp, Oryza sativa
tttcgccaggggttctattggccgacagctctttttgatgcggtctacctggtccggcgatgtatagcgtgtcaattccacgccaagcaaattcatcatccggcccatgccctgcataccataccactttcgtggccatttgctgtctggggactcgatatcctgggaccgtttaagcgggccccgggcgggtttgagtatctgtatgtcgcgatcgacaggttcactaagtggcccgaggcttatccggtcgtcaagatcgataagcacttcgcacttaaattcattaatggcatcacgggccggtttggagtgcctaaccgtattattaccgataatggcacccaattcactagtgaactc

SEQ ID NO: 35004 - DNA, 491 bp, Oryza sativa
  unsure (1)..(491): unsure at all n locations
agcttgtttgatggtacataagcttgattatcttcatatctacgcacaaaaggcacattcttcctcaacaattgagttaatggcttgctaatcaatccaaaaattataacacacttcctgtagtacccagctaacccaagaaaaccctttaacttcttgattgtcatgggaatctgccaattaaccacttcttccaccttataaggattggtagtaaccccttgagcactaatgatgtggcccacataagatagtttgttttgggcaaaagaacatttactgagcttcaccttcatcgatgcaacgtcaataatgtcaacactcggtgaagatggttgagatgggattgaaaatcatagctataaatgagaatatcatcanaatacacaagagcaaactttctaagaactgggacaagagtgtcattgatggcactttgaatatatcctgagcctcagtcataccacatgacataactctatattcataat

SEQ ID NO: 35005 - DNA, 364 bp, Oryza sativa
  unsure (1)..(364): unsure at all n locations
tgaccaaagtaaattaatgcattttaagtatatattctgtttcagttgtttcttatctcaataacctgaagtcgtcggaagaatcattgaaagagcacgttggtttgttgtcatgtttgtctcgcggatctgctaagtagttttgatttgcttcaatatgaccttttttgtttatactcagctggagaaagctaagaaaagagaggcggctntcattgtaacatttgcgaaacgtgaacaagaaattgcagaactgaaggtaccctcttactgcctcattttgctatagggagatgaaagacatgtcaatatggataaatctgtttaatattctgtacttctcaattaatggatgtgaagtata

SEQ ID NO: 35006 - DNA, 387 bp, Oryza sativa
ccatcatgcatgaatgcaatcaccttagcactgtgctaagatatgggcgtcgccccatatatagcaagttgaatgtcctaatcttaagccatgacacaatcatatgacacaccccccaagttattaattcgtatccttgagggattccattacaaatctgacgcaaccaatgtgcaaatttatgcctctatcgcgtaccgcacacggtacagatgaagcaccacgctcgacaccaacataaattaaaactctgtactgtacatcatgtaatagcatattgatcacacttaataagcatgtatcctctcagttctcaggtgttcatcactggctctcttctcttgacccttaccaagagcccattcttcatgtggagtatgacggaca

SEQ ID NO: 35007 - DNA, 361 bp, Oryza sativa
ttagcttccatcagtacactccaatctttccccctcaaaagagtacatctgaatctcagcactggaaatcacctcggatacttctgtaagtaaagatcatgtggagcatatcctgcagagacaatcctgctgccaaaacgccgtccatgtagtgaatgagctgcaatgcatgcagcctctttgcgcaagaactctacaagtatacagccagcttcgagcgcactggtgtttgaagccaaagcgttgtctctagcatcaactgcaggtgccttctctgtgttgctttcaatcacaccagcaccacctttgtgctcgttctccctaccagatttgtccgctccatctccaggtgctgtggaac

SEQ ID NO: 35008 - DNA, 422 bp, Oryza sativa
  unsure (1)..(422): unsure at all n locations
atgatagtttgtctgcanaagacgacagtggcaaagactggtctttcattctgaggcagataggcatgttctcctacacgggcttgaacaaaactcaggtgacatatgctttaaattttcacagataacacttccattcttctatcgactggtgatttctccatatataatgtgactgcaaacactgcaattcacacaatacactaagtattcttaatttgattcgcttgtatttgcagagtgataatatgaccgacaaatggcacatatacatgacaaaggatgggagaatttcgttggctggattgtccctggctaaatgcgagtacctatctgacgccatcatcgactccttccataacgttagctatacgaggattcangtcactgctattgtggntaatccttcaatatgctgggat

SEQ ID NO: 35009 - DNA, 381 bp, Oryza sativa
tatccaaaaccaatgtttatcttaactttgctctgttaactatccaaattcaaggccatgatgttgtgggcccaccacatagtactgatcctactatcctagtagccaggtcatcgctttcccagagactttctgctaattaggcttatgacagtccggccaagaacaatgcacgcttacatgtgaagccagattaacctgatggttacctcttgtgatctttatccaagaacaagcagacagatatccatggacagggacatttacatctggctcgactatttttttctctcctgccacagctgtagcgaaagttactgcatcgtcgaaattaaagaaacgagttttcggaagccacaaaggagaaaagattttttgaaa

SEQ ID NO: 35010 - DNA, 507 bp, Oryza sativa
  unsure (1)..(507): unsure at all n locations
atcttaagtcacctgcggcatgcaagcttcgtcgatcttagaatggtgggaaataatctctatcaccaaataagcccccaagaaggccctccattcgttgacgctcttggtcgccggggaaatttggaatgaaagaaacagcagaaccttccagtaaaaggagctctcgtcgaatggcctgctaacaaaaataaaagaggaggccagagcatggatctcttagcaggagcaaaacatctggaaaattggcttataacttagttcgttaggacctttggtcatgtttttccttttatactgtacagtttactccttctctattcaatgaaattggcggctcgccgattcattaaaaaaatattnttaggtctctttcactcatgacatattntttatgatgtctaccaacaaattataccaaatttaactatcgtatagcaaaatttatcttttgaaatggagaaaggacatgtgaagctaaagggttacatgtcaccacatcaccac

SEQ ID NO: 35011 - DNA, 393 bp, Oryza sativa
tatgtttgagttaaattggtccaactacaccgattgggttgaaattatgtaaaggccctcaatggtttaacttgctgccgctggtgctggtctgtaactgaaataaccagcaatagagcctctattgtggttgtgcaactgcaagtaaggtagttgagtactacccccaaacgaagaagcaacatagtagaagttagacggagatgataagtgaagacatctgcttagtagtgcccaactagtggtggatactagcaagactggaggaaataaatctcgagttccttatgtttttaaacatatggaagagaaaggagaaataagacatctctttgtgagaagatgacctggtcatagttttattcatactcttaagatcattcacatttcgtc

SEQ ID NO: 35012 - DNA, 423 bp, Oryza sativa
  unsure (1)..(423): unsure at all n locations
agcttcaagcactgtataccgacatatatagtgctttcacatacaatgaaccatatcaatattaatgtgtgtgattttntatataatagatgaagcatgaaatttttgtgctaattatacagtaaaaatgatctcatgacaaattcttgatgcaagtttatttgttgcatggtcagttacttggttttaagtacaaattaatgtggcttaatctcagcccttgatgtatacggaatgacacatatntagccaactccaccttgtagaggtatatctaactctatgggatctggacccgtctagcctactttataataccaaagtcctttctctttcctatttcataanaattatatgctcatgcaggagtagaatgtngacaatattatgtttgtaggtgcatcatatatgatcggtagatgt

SEQ ID NO: 35013 - DNA, 395 bp, Oryza sativa
aatactcaatcttgtgcaagctaagaaaatccgctgtcatgagcaacggcactgctcttatataagaaggaatgcatcataatgcttggcagctataacaatgcagtggcactcgaatatggtcagttgctgaaccccggagtcctccataaattattagttttgacagtactacactgatttattttattgcagagatagctccaatgaagatctatgggcagtcatttatgctttggactgatctattgtaaggacaataatcgttttctatggaaaggtttttcaaaaagaaagagctctgcatcatcgtcttcgaacagttctttctttgaattacgagcaagctgctgtagaatacagcaaggaagttcgtaagagatgggacataatct

SEQ ID NO: 35014 - DNA, 414 bp, Oryza sativa
  unsure (1)..(414): unsure at all n locations
gcttgagctanattacaagaggctctattgtactatttgtatactagaattaggagaagagagtagagtagaagaagtcggaagaattccagagctggcgggaatcttctcttatttcctttatttcctgagtactcccttcgtcttataatgtaacactttctagcattacctacgttcatatagatgttaatgaatctagacacatatatatgcctagattcattaacatatatatgaatatggacaatgcgctagaaagtcttacattgtgaaacggaggaagtaatttagatttatcttgtgagaattatctcttgggtagntcctaaatagcatacgggattattgttcactataatcaactaaaatatagtgattgctttggtgagttataaacactaaagtacatat

SEQ ID NO: 35015 - DNA, 393 bp, Oryza sativa
cgaattgtttggtacacagaactaaattattccgaataattgtaattctttattggagtacttatctaagtgtaccatgtttatctttcctcatcagtttaagcttttaagttaagtctgtctggcacataaaactcattcgtaccaaatagtcgcgattcgctgtcggaatacctgacaaactatcaaaagtcatatcattcagtcatgatgaattgaactgtttcatctgcatttcaaacaggaagaaactcggaacattttgatccattggagctgtgggggtttcatgcctgagatgcagagttttgcacatgacctctcctgtcatgtccctgagaaatgtcactgttggttcttcagagagaacagtatcatgctctaatcgctgtc

SEQ ID NO: 35016 - DNA, 471 bp, Oryza sativa
  unsure (1)..(471): unsure at all n locations
agcttgcaccgccggtcaccgtggcggcgggtgctcttttgactccgactcctcgtcggtgggtgatctcgcgccgtcaccttcaacggttacggcgaacaaggcggcagctntcgatctggatctgaaccggccgccgccggtagagaactatctcaggatgggttagctgacgaacttgtaggttctctcttaatttcttctttgatggatatttctctccgatgttntggtcctctgtgtttntggttagtagcctgtgagagacggaagagccttgtaaatagttnttctgccgagggcgaaattcatcttgggatctgttaattagaacagatcatgccggcgatgagatggactataccgtggagtgtatgtattcctttatattagtatgaagaaattattcagaaagtcacanaaatatctgtgcacactgagnttgatggacnngttttattttgggctttc

SEQ ID NO: 35017 - DNA, 392 bp, Oryza sativa
  unsure (1)..(392): unsure at all n locations
aatttgacaagagaacaaggtactcggcgttttaactagagtggtattcgagctcactgctgatcgaagccatggttaacggtcaccctcccgtcttcgcggtcttcctcgtcgagcagtttacctgcttgcgatgatggcccggccatggacggtgcatgccggacctgtgggcctcgtgctttcgaatgtatgctgctctatgcacaatgccggctgttgccaccccattgccggcggctgtggcggcatcggcgatgccaccaatgccaaaccttgacctatgcatncatggaaacgccacattcctgcggcttccgtcaatctcctcccggtatttggtatccagcattgtgacaaaataaacaaatggctcgtgttcctgtatggta

SEQ ID NO: 35018 - DNA, 428 bp, Oryza sativa
  unsure (1)..(428): unsure at all n locations
gatggatatcgagtcaactcagttcatccgggctcattaggataacgaattggattggctcaacttgctatgctaacgcgctaaacacttggctcggcttgtgtgctagcttgagccatagccagcttatttatctcgtgagccaaaacaaaaaaaaggagaaggggatgccacgctcgaacctcgttgtgccgtatttgacattgagcatggtgtatggtcaagaacccgcggtggtgcgacgacgtctggcgctggcgggttaattgacagcggatntaatcgaacctatccttgggacatgacgccggtgaggagctntgtccaagatgccaccatcccagaacggtggctcgttgaggagagtaccttcccggcggtgcttgctccaagtgaccggaaaactgatgatggcctcaatgaggtct

SEQ ID NO: 35019 - DNA, 393 bp, Oryza sativa
  unsure (1)..(393): unsure at all n locations
tantactagctggtttgataatattagcactaatttttatgtatatnnnnnttatcccataaaaaaataattcccgactgtctatatacacggttggaatttgatttttttaatgtctggaaatatttttttttaatcaagggcaaggagcccccatttccattactagaatatatctggacatatataggtcctatttagtttccaaaaagttttttccaaaaacatcgcatcgaatctttggacacttacataaaatattaaatatagataaaaataaaaactaattgcatagttagaggggaaattgcgaggcgaatcttttgagcctaattagttcatgattagccatgagtgctacagtaacacacatacgttaatgacgtgataact

SEQ ID NO: 35020 - DNA, 384 bp, Oryza sativa
  unsure (1)..(384): unsure at all n locations
gcttcttatatttcatctatgctgagatcttggtataaagcaagatcggggtattagcctatacagggtgggttcactccatccgctatgctgtgagcgcgcataatcccttctttggagcatgtttagatatgaagcaatttatactgtctcagtgccaccaccgatctatcccagtcgctcgatctaagcatgccccatctaatggattacgtgtcgctgatatctacagccgatcaagtacattgaacaatctccaagtttttacttgcctccaccgatctgacttgaattgcatcggcgtggcccccaatgatatgtcatcagcaatccttgccgatcggctatcgttgacggatntaactctttgatgttccctgtcat

SEQ ID NO: 35021 - DNA, 388 bp, Oryza sativa
tgacattacggaccactgggtctagtaccaggggtgtccgcccctggtggaccactctgtcaagatgatccgagcggtcaaacttgattgcaatctctgaccatcgaagatactggggcgtgtcgggctgaacagcattgatctcccgttcagtcaacttctgcttccttttggactcataagccatggggccgccaaagatatggttgagctccttgcggtgatcttgaaaacctgccggggtgtcaccgtcgtccttcttccttgacgtgctttgttcttcgccaggattcttccgtgcagtcttggtgtattgatccgcgaattgcttgtaaatgaaacaatctttggccacgtggttggagttaggatggtgcgggcattggga

SEQ ID NO: 35022 - DNA, 334 bp, Oryza sativa
tgtgctggtgcatgacgagcaaccaacaacctctacacaaaacttgtgtgtattgtaccaacaggatgcaaggacgtattgttatctgcataccggttaagaggacgctttccctccattatagccttgaagagaagtagcacataaatagcatatatgtaggctcgtactagcacatttctccttgccacaatggtactcctgtcactaactacttttgtaggcttatggattttttattctttcgtagaaattctgttgataacaacttcacaaagagcagactattgtactacagacctccataagagttgaccttacattgttctgatac

SEQ ID NO: 35023 - DNA, 399 bp, Oryza sativa
tttatacgaattgtttggtacacagaactaaattattccgaataattgtaattctttattggagtacttatctaagtgtaccatgtttatctttcctcatcagtttaagcttttaggttaagtctgtctggcacataaaactcagtcgtaccaaatagtcgcgattcgctgtcggaatacctgacaaactatcaaaagtcatatcattcagtcatgatgaattgaactgtttcatctgcatttcaaacaggaagaaactcggaacattttgatccattggagctgtgggggtttcatgcctgagatgcagagttttgcacatgacctctcctgtcatgtccctgagaaatgtcactgttggttcttcaaagagaacagtatcatgctctaatcgctgtc

SEQ ID NO: 35024 - DNA, 497 bp, Oryza sativa
  unsure (1)..(497): unsure at all n locations
atcctctnagtcacctgcggctgcagcttgacatccaattgttctgtgattttatgttgccttcaggattcatcaatatttcaggtatgcgtaaagttaggattttcatatgcatgctttacacagcaatgtgtttattgaagaanaaactggcagagggcactaccatttaacaaatagcacgtcaagcagtgaaaattggcgttcaagtcataattgcatatagcaaattatcaatgttgcccttagactacgaaatgggtggttaatatttgtttttgctccatctagtanaaataaaatgactaaagaaatggatgttgtttgtaatgatctcttggaccatgaagganaaaactgctaagtcagttgtcatgcagcagcgactttgtgtanagaaagaggcgacangatataggatatgaacttacatcttattttcttaatttgatctttgtagaacttacatacatgtctaataataatttaattcctta

SEQ ID NO: 35025 - DNA, 226 bp, Oryza sativa
ctgagggtcggcgcatcataacggaagtggaaaattatggacgttctattgccccggccgaggccggcatgaactatgtacgtcacagcggttgggttgtgcgtgataacgtgcctgtcagtacggtgtactgtggaagaacaatggcacgcggagatcatgacagctttttcccagattcagaaaagagatgctgtggaccacattgctcgagacattcaccctt

SEQ ID NO: 35026 - DNA, 335 bp, Oryza sativa
  unsure (1)..(335): unsure at all n locations
agcttcatttgccaactccttgcaattaagttctattttctatgtgngagnnggagctctctagttattagaattaatatatattattttggctttttaatattattttatcttttttttgtcaggccgatggaatatcgacttaactatattatggaaagaaatgcacaaataataatacaaagattaacaacaaacatggttggtgcacttgactctatggctttacaccatggttacacaaggagaaaggggaactatatggcagagcctgaactcttacacacagtcgagtagcagtagatagttctagtacaatctctaagtccaccatt

SEQ ID NO: 35027 - DNA, 372 bp, Oryza sativa
  unsure (1)..(372): unsure at all n locations
tgcttggctagtgatgagctatctatctgcatgcatgcgtgcgtggagaatagtaattttggcaaagtgccaaagcggaataagtagattggtagcagggaagaagaaactagtatgaactgtaagaaagaaaggaatatggtactccataaagttagaaatatttcgccaaagtgagggaagaaagaaagggagaatggttgtttcttgttaaaagaactagcaagagggtggcccgcgcaattacgcggctagtatctagataaaattttttaatctttttacacataattgtctttaagaactattaaataataatatcattgtctgaggactgtataaaagtngaaccccataatcaacgagtttttg

SEQ ID NO: 35028 - DNA, 402 bp, Oryza sativa
  unsure (1)..(402): unsure at all n locations
tcttccctggaaacttgagcctcttattcttgcatattttggatttcaagcacgtcttgctcatcaacatactttntccagtctcgttcttggcaactttccttgaattatgttcatccctcaacaccaaagacgcatcactagacttggacaaaatccgaatttttatcccattagaatcaacatagacatcgccttctctttcgtcgtctcttgggtcaaacggcaccacttctgggctacggttctcagtgcaaacctccttgttcgtggtgggtgtagccaattcgatagcccagttagtgccattcctctgatcaagatcctcaagagtgaacagacgggcagtcttgtatatgtccaccatcagtcgcttcttccttggcttaactttcgggttca

SEQ ID NO: 35029 - DNA, 343 bp, Oryza sativa
  unsure (1)..(343): unsure at all n locations
tgtacagnttgtgatatgggtttttgagagaaattatggagggacttcaaacgatatgcgcttatgcacggccatacataacatataaatcacacgtagaaggggtgggcaattagctatagcatcatgtgctgtagcgaaactgattgcaaaagatggtaaatcggccactttaagattactatctggggaggtccgtttggtatcccaaaactgcttagcaacagtcggacaagtgggtaatgttggggtgaaccacaaaagtttgggtagagccgggtctaaatgttggctatgtaaacgccccgtagtaagaggggtagttatgaaccctgtggaacac

SEQ ID NO: 35030 - DNA, 429 bp, Oryza sativa
  unsure (1)..(429): unsure at all n locations
gagctcttctcgatggcttgtttttgatctggngcaaatctccgcagtttttgctttactggcttggcgtcgggtcgcaccatgagtttgtgctcaatcacctccctgagtacccccggcatgtcggacggctgccaagcgaacacgttagcattgtcgcggaggaaggtgatgattctcgcctagtgatgccccgatcttgatggtcttgtcggggttggcactgaagagtggaacgatcttgattgcatcgtccggtttcggcgtcttgattgttntgctcactctcttgggtggctcaactgtggcgggtatgcttggcgtgtgctcaaccatgtcgaggcttcgcttgtcgcattgcactgccagcttatcattccctttgatagtgattgttcccttcggtcccgcatcttgagcacttgatat

SEQ ID NO: 35031 - DNA, 271 bp, Oryza sativa
tctcacaaatttaatgtcttttgctccctattgtatatctcatctgggtatacatctatgattatgattgattggagatatccctaaaaaatgattggttggagctccccttgaaaagttttcatctgttcctaaacatttcatggttgttcacataagatggttggaactgaatagtatgttaatcgttgataaacttgatttgagctaactgttaattaagtaataaatactacaaacctcaagtaataaaatgttgaaccttttctta

SEQ ID NO: 35032 - DNA, 411 bp, Oryza sativa
  unsure (1)..(411): unsure at all n locations
agcttgggctatgccgatttcatcccagtgggtctgcttgctatccgacactcgcttataccaagccggccaacttttctcagctgatggccaagatttgaaagtgtttttccagagacctaagctagggttggccaatctaaaaggaattcgattggttttggcattgatgatactcaggggatctagattgtcgattggaccaagaaagtactgattcttatgaactacactatggatngcaacttgatgagaaagatgctacagaagagaagaaaganagattgagtgagggaagaatcgatctaatgcaaaagaaggaaaatntagctgatggtagtaccctaacatattcngcggatggcgcgctcggnggttcggcggaacttgacattgtcagaaacagggtta

SEQ ID NO: 35033 - DNA, 417 bp, Oryza sativa
  unsure (1)..(417): unsure at all n locations
gctaaatgatatttcagtgattaagacatgggtggggaaatatcctctagaggatatcaacacttataaaggggcctaaaagagttccaacctaattaacttaaatgaagcacaataacgaacgaaataaattaattgctttcagaaacataattggatgatgtggaccatctcgtctctatagaanggtcaaagtgtaccatcatcanggccatactttggattttggatgagatagagagaaagatnatggacaaggaaaaaccacctgcatgctgcagttgccatggaaagttgaaaccatagttattagttaataaaaaaatcatatcacaccagtttcatgtaaccatataaaatgaaaataatataggcatgtattgagtgaaatatagcaaatgtccatgttctgcatac

SEQ ID NO: 35034 - DNA, 381 bp, Oryza sativa
taatactattttctaatcgcgccgcgccaacaaaattatatcttttattaaatcttaggtgatgtgaatgttctttcagtatccgaagcccatggttgaacggctgtattatagattatcacgtattcacattcaagtcttaatcagaataacacatggcgtcagctcctgttttgctatagctccttaactccaggcgtttttacaccatacaaaacaactggttgtgtgtgcagcaactgctgattcttatgtagctttcatccacagacatatcattgaatcttccctgcctatgacataactatactaattagatgataaaatatctaaataaacgtggcctatccgactacaggttgtgtaacatattcgactcca

SEQ ID NO: 35035 - DNA, 431 bp, Oryza sativa
  unsure (1)..(431): unsure at all n locations
gcttgcttanacaaatgtgatggtgctaggaaagagcataacaatgttatgtgataatcgctcaaaaaaatgtacctacatgggctcaacaatacagntttcaggacaatggcattgtcaccattgacaatccaagtcaatttgagccgcagaaatattatggattttatgatacctaaggaaactttgcctctaaaaagaatgaaaaaacataataaattgcgccgtattgctgaatangaatggtatgaaggagtgtcatgtaggacactataactatgcatgtattcttgactttaaaggctttattcttatcaacagtttgctgcccatggaagatcaattaagccatgctgatacttatacaactnnntgtttttttttcatgcaactgtcttctatttctatacnattggaccctggatcatcaa

SEQ ID NO: 35036 - DNA, 405 bp, Oryza sativa
tgaacccgggtcgacctgtgtgttccaaatgtgttcccgtaagattgtacacggtgtgcctcccacgacatgagctgatctcggaacttggtaacgtacaaaatttactttactgagcgtaaagcttgggagtatatacggagtataatttttggacacggttatgtacctataaccaataattgtgatgatccatggtaggtaaatccaacatcagaaattattcatgtcccaagcttcaaaaatcctacttcaaaatatcaaatatttatgacatgaatgtatcatcaagtgcacggtgtggttgttcgggccttataaaatatgtgcccataatttttaagtacgtaaagaacactgtatatatactccctacttaattagcgacataactagaatactatg

SEQ ID NO: 35037 - DNA, 404 bp, Oryza sativa
  unsure (1)..(404): unsure at all n locations
agcttggaagtgtgtgtgagagtgaatgaagtgttgttcttttatatggcagntatgacgggtgtgagaaggggaaatgtccgaactgcaccgcaaccgtcattgggagaacatctggagcatccacgccaaaccccangatgaaccgtgatcggggggttcggccgaaccagatggttcggtcaaacctgggctgggccctcctggcctggccttcggtcggtggactctcgggaccttnctctattcatttctcggagttttcggttgaattactgatgtttcgatgaagttcacaaccctacttgtatggatacataattctcctcactttagtcttgatttcctcccaacttcagggtttatcatctgcatacanatatacaccaacacttgtggaatat

SEQ ID NO: 35038 - DNA, 403 bp, Oryza sativa
tctaatggattacagataagttgatgtccaagacttaccattactttcaagatagaacaggaaattcttggtgaaacgtcatgtcagtcacatatgctctaacatttttcaatgtcagtgaagtatcctggccaaaacagtaacttaaatgctctctaagtagagaaattggacacctaatactccctccatttcatattataagtccctttgacttttttcttagtcaaacttttttgtttgactaagtttatagaaaaatttaacaatatataaaacaccaaattaacaatgaatatattttgataatagatttattttgtgttgaaaatgctactatgtttatctaaaaacttgatcaaacttaaagaagcttaactaagaaaaagtcaaaataacttat

SEQ ID NO: 35039 - DNA, 377 bp, Oryza sativa
tgtccacacttgttgcctaactgttttggtgcctttggtgcctactcggccaatgccggataggggacatgcataagtgaatgagagagcaacgttgacaagaatgggaggggagatgggagcctgttaacagtgaatattggtaagctcggagtagtcatcggcttataatcaacatcggctttgaagtcctgagattagccgatgagagttgtcaagtcatcatttgtcggattcttgctatattcggttaatgaaattgatctactaaatgaagcttatccagaagagaccgagttcaaagagaatgcggcatggcaagttatctattaattaagaataagttgtaagttccttctatctttatgaaagttctt

SEQ ID NO: 35040 - DNA, 474 bp, Oryza sativa
  unsure (1)..(474): unsure at all n locations
atcagctatctgaaggcccgatcaagtccaatattgatcggctcgaggctcggaagattgagctcttggcactacttcaagaatgtaacgctgagctgtctttggagcaacaaaaattggctaacctaccaaaggctattgaagagcagaagttgaggctgaaatcggctatcaggaatattgccgatatgactaagtccctcaaagtcatccctggaaccgatgctcaagacgcccaagccatataagaagtaaagcaaattatgcaaagggctatatcggctattcagtaatatttgtctcaatgactatccatgtaatagggcttagaaaattcttgtaattggctaagatattttggtacttcaccaactaagtaactgctttgataatcctttatgccgattaacataacttctgaatnntgcctcaaaatttcaaaaatatccaactntgtatatatatatgcccccc

SEQ ID NO: 35041 - DNA, 384 bp, Oryza sativa
tgatgcaatgcatgctgcttgccccccctgttctttcatgtggtttggctgagtgtaaatagatcgatgcttctgctgtgtgtggtaacttttatggtactgatgtgctttcttctatcttcttttccctgtacctaaatgatccatggttttcagtactttgtacatcggagtcctgcagcaaagctttaaacatcttgtttgatattagctgccaacctgggcgtctcctaagttgatgtatgataaagtctctgttcgtgttgctcttgtgaaattctcaataagagcaccacattttcaacagtgctcattctgaataagtgctactagtgttcttgatgtttctagtaaaaaatactctctccgattctaaatatttga

SEQ ID NO: 35042 - DNA, 430 bp, Oryza sativa
tagcttgcaccgacggtcacgcgggcggtgtgttctctattgactccgactcctcgtcggtgggtgatctcgcgccgtcaccttcagcggttacggcgaacaaggcggcagctttcgatctggatctgaaccggccgccgccggtagagaactagctcaggatgggttaactgacgactttgtagtttctctcttattatcttctttgatggatattactctccgatggtctggtcctctgtgtctttgtttagtatcctgtgagagacagaagagcctttgaaatagttattctgccgagggcgaaattcatcttgggatctggtaattagaacagatcatgccggcgatgagatggactaaaccgcggagtgtatgtattcctttatattagtatgaagaaattattcagacagtcacacaaatatct

SEQ ID NO: 35043 - DNA, 227 bp, Oryza sativa
tgttaattgtgacaagagaactttgtactcgctgaataactagagtggtattcgaactcactgcttatccaagccatgtctaccggtcacctccgcgtctttccggtcttcctcgtcgtgcaaatttacctgcttgccaatgaatgcccgccatggacggttcatgcccgaccttgtgtctccttgctttcaatgtatgctgctctatgcacattggcggctgtttg

SEQ ID NO: 35044 - DNA, 468 bp, Oryza sativa
  unsure (1)..(468): unsure at all n locations
agcttacccggcaccgccagggtggcctctaganctgngtttctacgccgaccggggcgcgcgtcttcttttgcatctataaacccaaaaatcgattggctgcccaccgatcgcgtcacgtcagagcgatcatctagaagctagcgagagcgaaatagcgaattccaatcatatatgctaagatctctgcatttattatatgccctggtaccacacttgttcttaattagcttctggtaattaagnttatttcttataccacacattaatttatccccacaataaaatagataatatgtgacaataacatggtcagtccaccttcaaaatttgtaagaaaaatatagaaaacttgagaactttcaatcctatcagaaagtttctagaaaaatatgtgatacaaacattcaaacctagcctctcatttgaatntcctatagaatggacaattctatatagaatttagag

SEQ ID NO: 35045 - DNA, 388 bp, Oryza sativa
tgagagaggtaactattcgttttatcagagtgttattataaggattcatattagacttattcgtagtgaaccaaatccattggttaggctatgctcaaaggaaaaaatttacatattctatgggctttataagatcgaagaatagttcagacaaacaacaaaatctcgttctaacttaaagttcaacaaggtggtcatggaactatgccagcctaatggcattgtattatggaagaatacttataaatggagggaaaatccatcttgttgagatcaatgtataatgcctgacatgtcaaatggtgcattaatagctcgtgtctgtgtgttaacaacattgatagtgatgatgcctctaacaacttacctattcaacttaacttgatat

SEQ ID NO: 35046 - DNA, 332 bp, Oryza sativa
tgcaaacttctattccacagtaaacactcaaattctgctaaatttttacgaacggcgagcttggatgcgcgatggagcggagatcgagagcaagaaattctcacctttgatgtcgcggagggcgactgagtgggactagatggaagcggtatcggaagccatcaccacctccgaatccttcctcttcccttcaaaattccgacaaaatttggaagcaggaaatgtttttttttcttggttttccctcacttctgcgagttttctgtggcgtacggtggctaaagaggagggcgggttacatatagctcgcgcgggaggctgggttcaatgca

SEQ ID NO: 35047 - DNA, 370 bp, Oryza sativa
ttcttgctattcaagggagaagcagctgactcgatctacatggaaaatggagcttctaaggctatcattcctgagagatacatactcaagggggagcacccctatcaatgcgatagtatgcagcctgaatacttcccctgttgcgaggtgcgtaaattactcgtttccattcattcacttcttttgtgccataaccttataattagcgccaaaccatcacgagcaactcataagccccgtgctctgctgtaatgcagcgcatagaatctgcatcgggagatggagatgcttgccaggcagatgcataagcggctgtccacggaggagagggagcacacgtacacaaaatggtgtgtctcgctggactcca

SEQ ID NO: 35048 - DNA, 367 bp, Oryza sativa
ttctaaacaccttctcagacccgtcattgagagatttctggtgaaggtgagtataaacaacccttaacttcacctcatccaccacattacctgattctttcgtaaactacatatgatcactcattatgacacaaaaaaagcagcccacataagcttcaaatgcatgacacaactaaaactagaaagtcggttggttaccatgtctcccgtgatatccttcggtgtgagctcttgtgtcactatggcactctgcacaaggaatttgtccttgcattgcatgtccggtggcgccctccgctgagcttgcattgttactaaatttgatatcaattgataactaaattcttagcatataaggcagtcattc

SEQ ID NO: 35049 - DNA, 402 bp, Oryza sativa
ggatcttaagcactgagctgcagctatatatgattatacctgttttctatttgcaaagtttgtgaacatgtttctgactgcttcatcttatcatgcaagcttggtttatttaccttttactttgattttctaactctattcaaattaatccaaaaacttgtgctattaattggataattgacttaactccctcctgtcacttgtctttagatgccgcgctacaagcctgagtacttgttcggtactgaaggatttgtccaggagttgcgtacgatgtccttcctcatatggtttggaattgcccctttgtatgcccagatcccgcatgatcgtgatgaagaataatgcggagtcaaagtcaccttgaatagcaaccgtgaagatattccatcagtgatgttc

SEQ ID NO: 35050 - DNA, 342 bp, Oryza sativa
tgccacagaatgggctatcctgcgccatcatgattatgctggtcttcaaatcaaagtatgcatctcacaagttgacttgcggcccaacgggcacgttgtcagctgatggggcaatgaactcccggagtgtcttctcggccatactctacaaactcggtgacgcggggatggttggtttcttggtcaagtgatttttctaactcgcggcttaacattctaaaagaaagactctggattgtctttgaaattttccggcaagttgaaaccaaatgtgcactaccctattttcacacgaaaagtgaaaacaaccaatgttatcctacaaaggacagtgatatatac

SEQ ID NO: 35051 - DNA, 357 bp, Oryza sativa
agcttgctacattatatatagctactatatgtttttcttagcaattttatttgtctaaattatatttctaggcctgccccatgggagatttgcaaatgggagatagtgtattcagtacaattgacataagggcattgtattgtaacaaatctcctgggaaggtaataaaagaaataactatggtatacagagttttatgaagaaatcatatgccctgatgctacatttgttgtgtacataaatggactagtatcttttatgctatgaatagtgttctatgcacattttttgagaagaaatcatatgctttgtacttctgatgccggtaatagttatgttcgtaaaactataatagtt

SEQ ID NO: 35052 - DNA, 352 bp, Oryza sativa
gatccttaatcacctgagctgcagcttttgtctgtgaaaaactttctattatcatttttcctacttgtgatatactagtagtcaaactatccaaatgtgtttgcacaaaactacattaaaaaaagctcgatcttggggaaagaaaaaatagtcccttgggggacggagattaaactccccccctttggcatcctttgaattgaagcttaaaaaaaaaagccatgggttggagattaaaactcattgtacatatgaatagtgatactttctcaagtagttaatgttagcacaacttggcccactttaaaatttggcatctatttacccaaatagttatataatcataagttat

SEQ ID NO: 35053 - DNA, 353 bp, Oryza sativa
  unsure (1)..(353): unsure at all n locations
tattcaaggaccatccaaaccatgaagaatccattctttatacacaacttaagtcaagggataagggctaacacttcaaaggatatccaccggacatacccacaagatgtcactcactcctattggacatgcccacttctctcttagtttaggacgtgagaaaactcatcacacttggttagacaagcccacaaaatgcacctacatgcatatgaactaatatggcacaagatcatccacaagctcgcttcatagacccctcttgatagtacggcgtctatctagcaaatccagtctacaccaaacaccaagaccgggaaaagactaagaanacattcttagctacattatac

SEQ ID NO: 35054 - DNA, 344 bp, Oryza sativa
agcttgaagaagtgcttgcttgattatctactgtatcaagtgtggcgggtgccacaatgatcgttgtattattgtatccatcatgattaaaatcttgatgcccacagacttgtcgttggtctctgtttttttttatcgtgtgctggggtgtctatttgcggaattgcgtgtatgtgagcatggtgtgcatgtatgcgtatttcgtgtaatcagaaaacatatttggtaacgatgagttttggcaataaaaagaattgggtggcaaatgattgtgttgggtatttttttaaccaatattttacggcaatgctagatatcgcatatcattcttagcttccaaaatg

SEQ ID NO: 35055 - DNA, 393 bp, Oryza sativa
  unsure (1)..(393): unsure at all n locations
ntataagcaattctccagtccaccgtcctcgggtttatctgtgcaagatttcataactagctggattggttaaagtagtttgtgacatgatttaagggtgtcaagacttcttgggaactatggaatgaaaattatgctatgtatgggtatcatctttgggctatgctattgactgttaacaatggtggcactgaatatttatgttggtgtgcaagcggaatggatggcacctgaagtacttcgtaatgaaccatcagacgagaagtaagttctaaattctaaaaactaagctctcagatgtattcgtaccttaaattgagttgtgattgcttaaatggctgtgcataattgcagatgcgatgttnttagctatggggtcatactgtgggaact

SEQ ID NO: 35056 - DNA, 347 bp, Oryza sativa
tcgtgaaaaccttgagcaaggcaagtcacccttttattattgcccctataattgaaaagtcattattattttgtttgcaacttgccttattagaatcacacacttaacttgctcggcctcggtttgcgtgccaaaccgacggacctacccaatagtcgcactaatttccgtaagtcggactaccctgattccttgtcgctccacccttgtggtacctcggtattcgtgctctctgagcgcatataccaaatatcccacatacacagttgtttgtcgaaaacttgggaaatgggtttgtgaagccttcaaaacccgacatgtggtgtcggtgtgtttgaaaataaaat

SEQ ID NO: 35057 - DNA, 348 bp, Oryza sativa
  unsure (1)..(348): unsure at all n locations
agcttgtacgatttgagaaaaccctacgttttcatcttatngatctactttcttaattacaattgacagatttgccacaaccgaagaggaagagagatttgttactattcacaatgccatttgaggtaggttgtactgttaaaagcgttatatccattcagttaactgataaggagtctactattttgtgaggtgtaagtgtcaagcgaatgtgtactgtatgatgtaatggcttggtaattattggtgatctgaattaggggaaggtaaatcttttctttttatcataaagccgcacaaatatgtactccctctggttcacaatgtaaagggtttttctccctgtca

SEQ ID NO: 35058 - DNA, 322 bp, Oryza sativa
gcttactcgagttcatccaacatacctccgttcactggtgcatattattactccggcgagcccgggagttggaacagcggctggccgaataagaaaagatacgcctcgaaccggaagttgcaccggacgcccaacacgcgcccgcccttccttccgggttaatacgtgggcaccatcctcacgagtatatcctcgaggcagctccggcaggcatccgccgacatgtgcggcgtgcactgcgccagcgagtagatcttgggataaacctcgccggcgacggcgagcgccgccttctcccccgtggcgaatcgcctgaccgagt

SEQ ID NO: 35059 - DNA, 364 bp, Oryza sativa
agcttcctttagtagattgattttctttaccgaatatagcaggaatccgactattggcgactttataactcctatcggctgattccgagatgctgcagccgataatgattctaagtcgatgacgtctttgttgattaccaaatttcactattaacacaacggcagcggcgtgaagcggaggaagggagcggctacagcggcggcggcgtctgcgggcgctctgagggacggcaacgacgtgaagccgacccccgccagcgcccggccgtgaaaggaaagagcggctgcggcgagaaacttgagggagggagcggcggccgatccccagcggctggagcttcacgcgcggtcgggggcagcggcg

SEQ ID NO: 35060 - DNA, 407 bp, Oryza sativa
tggctccaataaagaccacaagaaaggcttatattctccccaccacttgtcaaaggccaaaagcgtgaacgcggcaaggggaaggtcggggagttggcgccggaaccaaaaaggggcaaggctgcgacgtcgatgccggtgagcaaatcggggaaggtcgtgagggcgccagcccaatttgagctacgcatgccattggtggaggacaatgtgttagctgtgatgggtattgcttgccgagagctacataagcaatacatggagctaaacaatgccaagcggaaaatgagggagtcatccatagttggacatcacgaccaccagccgttcctatcgtcgccttgctatataactataggctttgatgacctcttcgaccttttcaagatcccgaaagttgacacttg

SEQ ID NO: 35061 - DNA, 364 bp, Oryza sativa
agcttcttaaaatgctccatataagaacaatgctagaatactgacatgaacaatgctaatacctttttgtctcaaacgatgctagaatcttgcagatctcttcccataataagaaaggagttccaattcttgtgtcatagaagttcatgccaataacattgccatcaagattaacaagagggcttccaatcccagcctagcaagttaacataaataagttgtgatttactgttttctattgaaaacattgctagctaattcattccaatgcaactatatactttgtcagaaacacaaagcagagtctgtccaatgtcaagctttcacaattgtaatattatctaggtttcatcaaaagataccg

SEQ ID NO: 35062 - DNA, 393 bp, Oryza sativa
tggtgtgaaaaattctataggctcagcaattttttatgaaaatagatattgaaatgaaagtgactcagcttgtaagatgacaaaaactgctcaaatagaagcctcacatgatgtccttcagcatcaactgctgcatatcatgagatccactagattttcacttcagctagctgtaactgcctagctcccgctttgcagcctcaacaattacaagcatattatatggtattgaatcttttttcacctatcctaaagccaaattgtgaatttgcaatggcagtacctgcagtactacttaaaatgtttgcacccaaataatcaaaatattggaatcctaaactaggataaatagatcatcatgcttaacagagaaaagaggcacaaatggatgga

SEQ ID NO: 35063 - DNA, 333 bp, Oryza sativa
agcttgtgaatacctaaatttacttagaatgctaaatgcacgagcattacacttggactagaaggaatcaaggaaatctacagaatcacggcatcaaagctagataatgctttggacttcatttcttttcatgtgcctaaaagcccacaacaggagaaaattcttcagtgtcatggacatggacaaataaatgtcatgataaacaagaatactgccatctcgataattgaaattactgcttcatttgtcgaattttctatgaattattcttatagtacagaatgatgaagaactcggctgcagtttactcaggaagtatggagaagttcctaa

SEQ ID NO: 35064 - DNA, 379 bp, Oryza sativa
tgtacgattgtaccaactattgtatacttctaatatatatgagtaataaggtttagttctaattctagaaaaaaaaacttattttattttgagacataggtagtactagattattttatctttggaattgaccaatccattttatctcaaaatatagtttttttttgcttgtcaacgaaattaaagaaaagataaaaagtaaatagtcgggtggaagtcactgaagttgtggagatatggagtattttgaatattttatgactatatatagaccacccttgatactatagaaataggtatattttgcaataaaatgtgaatagtataagtagctatgttctatatggagggagtataatccaaagctactctaaaattt

SEQ ID NO: 35065 - DNA, 358 bp, Oryza sativa
agcttatattggtactggcgtggtttgtctttctaagattgtcttaaatgtgtatgaatgataaatgtgtatgaatgtaggcccgcattgctaacataattcaagagtagcatgtatgcccacattgtaagagtaatttattctagactaaaatagtgtgttatatatagttatttttaaaaaagaaagtctcttaactactatctccttcgtttcatattataaaactttctagcattgtccacattcatatatatatatatatattaataaatttaaacatatatatgtggctagattcattaaaatctatatgaatgcgggcaatgctagaacgtcttataatatgaaacggagg

SEQ ID NO: 35066 - DNA, 360 bp, Oryza sativa
  unsure (1)..(360): unsure at all n locations
agcttattgctagggatatgattgtttctgtgcacgtgaaacgcaantgtagcgtcagtgaatgtaagttgcacccttggattcgccgtatgttgattactgttgcaagaaaagcacaattttttgaatttgattcggaaggcaatgcaacatgggacttttcaggaactcaccgtgcttgtctagttgaagaatataagcaagaaatataaatatcaccggtcaaaaaccaacccaatacagacggcctgctcacaatatttaatgtgaatgagcgatacctccagtttgacaagagttggttcttggatttgaagaagattgcggtgctccaactatgtcgatggcataacttgtatc

SEQ ID NO: 35067 - DNA, 367 bp, Oryza sativa
tcgaacctggttggggagtatgttgttttcttctatttccctagaaagttaaagctcttccaaaccattcaaattttttatctagattctcagaaactgagaaactgcggttatagaattcacagagatgaaagacataagttgaaaaacctagcttttttagattcttaaaagctagactaccaaccagtttcttctcagagacttaagcttcctcgtaagtgaaccttgacgtgaccaattttcagcatccggtaaccggtggagctccttgttgccgtccacaatcaccattgacggagattgagctctctattccgactacaagcgtgtgctatgaagcaatatgagtgccagatttcctctg

SEQ ID NO: 35068 - DNA, 338 bp, Oryza sativa
agcttacttaggtggtgttttttttttctaaagatgaagataaagattaagttctttacgcaaaacgatatggtattaacgtatgattgattgagttttaattattacaaacttaaaaaatatattaatatgatattttagagtaactttcatatagaaagttttcgcacgaaacacaccgtttgaaaatttaaaaacgtgccacaaaaatcttaatcttcatccaacttttgttggagaaaagaacaggaacttattactcctaccatatgtggcaacttaattactggccggcagatagcttaagtttagctgggtaataaaaaaccgcctgtagc

SEQ ID NO: 35069 - DNA, 230 bp, Oryza sativa
tacatattccgctggcatgattagcttctctacaccctataagagttcagcgctccccatgctgaacaccacattgttgattaggtttgtgctatttttccatcgacaatttacagcgtgtgagccgataataagaatatatggttgacaacacaatggtggttcctcatcgtggagtggatgactcgtgcttatagaagtttattggaactaaaagtggacatagtcta

SEQ ID NO: 35070 - DNA, 359 bp, Oryza sativa
agcttctttacttaagaaataagcgtttttccttattatcagctcgggatatgcaataaagagggagctctccaagcgctgagcctatgccccatagaacagctttcacctgagcctgagggagtaattcagagactgggatccggacagaatgacccgatgcttggtacaaaggtggcccaaaatctgaacacttcttgaccagccatgaaggcccttgcttaagctgtgtgagatcagatggagcacgtatgaaatcacttccaccacattgaacagtcttgatagtgaagagggcaaattgatggcccagatacatgacaaatgtattcccacctgaacctgacattcaaagatat

SEQ ID NO: 35071 - DNA, 207 bp, Oryza sativa
cgaacgcgctgtgaaatatatcaccctgttgaaatatgctatatatgagatcctaccccagtatacagaaatttaaaattttcagtcactacagaaaggcgaagcgcaacactgaaacggaccatttacctgtcgaaccattgatgcccatgtgcccagcttgcagttaggaactctttcaaccaccattccacacatccaacagcg

SEQ ID NO: 35072 - DNA, 368 bp, Oryza sativa
agctttgataggtggtggggtgaatggtaactgcttttattccaccaaccagcatcaatgtgtatgacagacctctttccagatgttgtccctcaagtaaatctctaactttgctcaattttatttaaataactgtccagccgattaatcttaaccaatcgtccttttggtttgcagacaacagaatcttcccctcctcatcaaagtaacagtggcaaagatatccaatatgccccaggtttgattcctaacggaggtggactatcccctccggttatcggctatgatgcccccaagacctcagctcttcttcaagggctcgttagagaaccagccaatgctggcaaaaagaggaaaaccagatcgtc

SEQ ID NO: 35073 - DNA, 383 bp, Oryza sativa
aatactcagcttgttgccaagtcaatgtagcgaatgtaactccttttcttgtgtgtttaggtcaaaatcagtggatcagttcgagacaacaagctaccagctgagtcagagcacctcgctctggtcagattatggttagccaatgtcagatgatggatgtgccatatggtgatgcagcaaccacagagtccgatgcagcaaatgcaacgacagtgtcttcaacaacaggtacaagctcagatgcaagccggaatcaagatcagagctaaagccagtttgttttccaagagcaagcacccgcaaccctaaacagtagaccaccaagcccttagcagaccagcacagtcgagccgccacttatcctatgagcaacaagtgatacc

SEQ ID NO: 35074 - DNA, 354 bp, Oryza sativa
agcttcggatgtgcatcgactacaccgaccttaacaaggcatgtcctaaggatccttaccccctgcctcgcataaatcagatcgtcgactccactgcggggtgcgaccttttgtgttttctagatgcatactctggttaccatcagattcgcatggctagggaggatgaggaaaaaactgcgttcattacccccgtaggaacctattgttatacatcaatgcccttcgggttaaagaatgcaggtcctacttttcagcgtactactcgaatttctttgggtagccaaataggacgtaatgttgaggcgtatgtcgatgacttggttgtaaaaacgcgcaaccaagagaccttac

SEQ ID NO: 35075 - DNA, 390 bp, Oryza sativa
  unsure (1)..(390): unsure at all n locations
tatacgcgatgggcatgtagaggtacactacacgcttaagagttctacactccccatgctgatcaccacatggatgatttggtttgtgctattttcaaatagacaatctaatgctcttgtgcctataatattcatatttgtttgacatttgtttgtaggttcatcgccttgtgggcaggactcgngcttatgtatgtattattgtatctaaatatttcctttttttattttttttcttaggagtataaaatttcgtctcctttcattcatccagatgcccacagatgcacaacgagagtgtggaatgttcaaggactgggtgtgtcaccaggttgataagaggtaactttcgtttatgccaaatctattgtctatatttgtcgcataatg

SEQ ID NO: 35076 - DNA, 339 bp, Oryza sativa
agcttcatagccaattatgcgtgatctatcgtctagctagctcatgtaagtttcttcttgttgttaataacgtggaatgcatacatatatacatgtatataccttaatcttcaagtacagcaattgcaggatttccctgacccatcagcagcaatggcacgtgggccaatggatctttggaacgagtgggcgacccaaatcctggtgctcttgagcttcactctgcagatcatcctactccagcttgccgggattcgtcgccgagaagctccaactgtgctgaggcttctcctgtggttggcataccagctggctgactccactgcgatctacgccatc

SEQ ID NO: 35077 - DNA, 393 bp, Oryza sativa
tatcatattcactcttcatgaaatgagcagctgggattttcttcacttccccattaaagtctccagactccatgattttgcatgtgtcctttacctccaataacacgtctaaatccatcctgagcctctcaacccctgcgttacacgagctatgttgatgcgctgctgtcaagacctccaactgaatattatcattttcacccttcatcaaatccatggtagtcggtatttcctccacatccatcttatggacttccaattctttcatagtttctgccttctcagcatcaaatgcatttgcagctgcctctttcctatgggccactgcaatcgattccatcttgagcctctcaacctccaaccaaagcttattattttctatcttcatcttat

SEQ ID NO: 35078 - DNA, 347 bp, Oryza sativa
  unsure (1)..(347): unsure at all n locations
agcttgactatatattcatggcatgtgtggttgatcagcttcgttgcactgcaccgaatattcagaactgctgacctccatcacacaacagtgatgcttaatttcctacgaggaaatacagtttttattgactgaagtttcaagtcaattgtgtgaagaaagattaattcaaaggtgatcgactggctggcagagctttcagattcagttgatgacatcagcaaacaaaagattcaatgcattaattcatctcgaagaaaaggattccatccaaactactccactgatctggatgcagnttccttgatactcctacttatttagcatttgactgctgattgatcatt

SEQ ID NO: 35079 - DNA, 349 bp, Oryza sativa
  unsure (1)..(349): unsure at all n locations
caggtaccccaatttttttttttatttaaagccgtatttgggagaagaagatgagcttgagtctaggacgactcaaatgcaacaatgggaggatgatgaggacatcaacaccatggatacatccacgttccccccatgtacaccatcgatacatccacgccgcctccatgtacagcatgatggtcctattacccgcgctcgtgcacgtcaactaaattatcaggtgagttctttcttgagttcatattcctcttctttataccccggagacgcgtgcactcgtgtcttactcangaacgatggagaggatcccaatggaacaagatttcgcggggtggattccgactgc

SEQ ID NO: 35080 - DNA, 346 bp, Oryza sativa
agcttgcctccctcaaagagtttatctctcattgactacattcgacgggatgacaacccatctgatgatgaggaataggctgttgacattgaaaagcattactaagaggtgaagaaggttcttacaggacagctagatagcctacataatgtgttattttaggaacaaaagtaccagcccactatgcccgctcgtgactatgatgggaatgaaaccctctatggtggcggtgaacatgatcaatctgttgaacaacttggccgtgatggggaggtacggataaggcacgaccagcttccgtgattcaagaagaaggatggggtccatacatttgagcatgccatga

SEQ ID NO: 35081 - DNA, 273 bp, Oryza sativa
tatgcagaacatttaaagaaatggagctttgtttttattatcgctgatgggccttgcttaaagtaggaacatatccccttctaacgcgtaggcttcaactactctatggccggatatgttcaccaatacgacatatgctctggaactgactattgggtcctactaaataatggcatactactgcaaagtcactgcatcatcctgtcctaacactatcactagctctaaccagagggagaaagaaccgtaccaacattatgcccaatagcatct

SEQ ID NO: 35082 - DNA, 360 bp, Oryza sativa
agcttcgacacgctagatcctggagtctttagcttcgacggcaccggatccgcagccatgaactctgctggcggcggcaaacagcgggactcaaaaggagagtggcgaacgtcatgtatgcgagcggcgacggcagttgcgagatggcgaagcatttctctcttccttttttttttcatttttttcttttctttttctatccggctgaccggataatcccgacgattaatttataatagtgtaatttaatgtttggcacaattttttgggacttcctagattggcgaactttttcgtcattgaaatttgtgcatctccaaaaagtccgtagcactgcatgtcatatgttgttatcctctc

SEQ ID NO: 35083 - DNA, 402 bp, Oryza sativa
tcttcgacatagcctactctactactatcgatgggcttcttcgtcatcatagtcgatcatgtctgttgctgctaatcgtcattaccgtcggttgcatttgccgtcgccgactattttcttcatcttcatgattgatggatttcgccattgccattgatgagcgtctacgttttcaccaccggcttgcctccgccgccgcccatggtgtcttcgctttcacggctggcttattatgcctttactgatgggcgtctttgtcttcttcaccggctgtctcgtctgtctccgactaattatttcgtcaccatggctacaaaactccgtcgctattgctgggtgccttcatcttaattggtagttgatctgtctgccgccgactggtttcttcgcctccatggctat

SEQ ID NO: 35084 - DNA, 348 bp, Oryza sativa
agctttcaagtgccatgatcccattcttttttcaattgattaaatggaattattttgttggtaatctcttaacaaatactatgagtgatccggatgtcaagtgcccaactcctatgtatgcttgatgcttccctcaatgctcatatatataattgggtcatcttttagattttgaaccatccacattaagtgaaggtttatttttgctaaagtatgcagcaatccatgatctggaagcatacaattttatgaattatagtaatgatgcctaataaatatataattcttcagtcttttgtttctttcattctaaacgttcacaaccaatcagatctttactgtatacta

SEQ ID NO: 35085 - DNA, 384 bp, Oryza sativa
tgcgtatacacaacatcacattcaatttgatcatggtaggagcctatagaaaaagtattttaactaagcgggttaccttcatcttaccacatgtattaaaccactgaatatgatacggatgtggatgtggatgggtaatcaagccaagcttcttgaccatctcttcacttgctaaattgttgcaactcccgctatcaataatcactttgacggtatggcctttcacaagaactttgctttggaataaattgtggcgttggttttgctcttcacacttctctttagcactaagtgctagcttgacaattaggctaagatactgatctagcgactctggatgcaaatggacttcctcgatgtcatcggtatcttggcctcctacat

SEQ ID NO: 35086 - DNA, 327 bp, Oryza sativa
agcttgccgttcgacttgggaactactaccgggttcgccagccactccggatggatgacctctcggataaatccggcctccaaaagtcgcgccacctcctcgcagatgaaggcttgacgttccggggcctgccgccgcactttctgccgaaccggccttgcgtccggccgcacggcgagacggtgctcaatcacctccctggggaccccgggcatgtccgccggtctccatgcgaagacgtcggcgtttgcccgcaggaaggagacgagcgcgtcttcctatttgtcgtccagaagatcaccgattcgagtggtcttggacgggccg

SEQ ID NO: 35087 - DNA, 382 bp, Oryza sativa
tcaacatgggagtcctttcgtcgcatgactaaactctaccggacatgtatcgcatgagccgacaccacaccaaattaatttcgctcgctccacgatcaaaatttacttggtggggggcatgtgtttgatggtattttggcgattatatgtgtacacaagacttactcatgatggacaaagcaaacaagcagtttgtaagttggctagcttatcatttctacacaatgctcggccatgtatatacacgcaaataaatgcatgcacaggcagctgggaatatatatacttggattagtatatgtgcatgtataattaaccaataactagccgtgtgaagattggctggtgaggcaatcacgtgcatgcatgcatgtactacagt

SEQ ID NO: 35088 - DNA, 354 bp, Oryza sativa
gcttgcaacacagcagttttatgttaaagatgtgtgtttactcaagaagtcagtgtcctcgaggcccttggcgcagacgaggaggacctccagcttcccgtgcaccatctctcctcttctcttcgatcgatctctcgctagtcgctagtcttcttgccgttgatctcttcttcttcttgatgatgatgttgcacaggcactttcccctttgctagtatggccagtaatcttcaccaactcatatagcaagtcgttgaaggtgccagccaaggtggccaagtaaccagcatggcccactctgacagtctgtgtcttactaataaccattaattattgaggagaataaaaaaaaag

SEQ ID NO: 35089 - DNA, 280 bp, Oryza sativa
atcaataggataaaaatgtgcttgccaacatgccatggagcccacgggtgttaaatttgaaaaaaaaatcatgtgggctctacggctgcgatggctatggtacgaacgaaaggaaccaggcaacaaataagagacacagtgtgacgaagtaaacaagcttctcttcacaacatcaacaaagattattgttggagatagcaacacaacgcgcttttgagattccacatatatagaagggcgtatgccaaaggatctcatgccgctggcctatgcaatctcc

SEQ ID NO: 35090 - DNA, 400 bp, Oryza sativa
agctttgcataacaacctataagctggattgatttgttttgttcccacagagggctacaagacggcggagccccacgcgctgaggaagctaaagccccgctcagtcaccgcctacgtcacaaggtacagccttgaagagtactggacgtccatctggctgacgacggcccatatccacccccgcttgtccgtcaacaaaccgatgaactctgaacacctgaacggagatttcctacactgaccatcgaaacccccatttttcctaaaccggagatgcacagtacatacaggactgaaaacacggaacaaaaagcctacaaagctctaacactaaatactgcctccatcccaaaaataaagcacaaccactcttaacccacaaaccaagacagaattatta

SEQ ID NO: 35091 - DNA, 348 bp, Oryza sativa
gcttgctcactaaatccctatttctcagttctgcctggggtcggaattttgcaagatgaagttgatcctatggcttctgtgatgaaagtggagaaagctccgctggaatcctatgctgacattggtgggctagatgctcagatccaataaatcaaagaggcagttgagcttcctttgacccatcctgagctatatgaagacattggcatcaggccacccaagggagtcatattatacggagaacctggaacagggaagacactacttgccaaggttagtgttctggtttgcgtattgggagtcaatataacttatggcagtaatgcacgcttcaaccctccatttatg

SEQ ID NO: 35092 - DNA, 356 bp, Oryza sativa
ttagtaaatttttattttatttttgtccaatgttgcgtgtaaaaagaatggccttatcatcgtcagttcatctcttgtttgctttctgcagatgctgctatccgtttccatttatgcttccacccattaatatttgttatgctttcaatcatgaatatgagatggttttctgttgcagattccgttcagattgaatctctcccattgctagtgctacacataaatggtattactcgagaaaataaagttgcgaagacatgaccactaatttttagatattatactcattttagttcatataacagtaatttaaagtggattaaaataattttgccacatttagagtagattttttg

SEQ ID NO: 35093 - DNA, 366 bp, Oryza sativa
  unsure (1)..(366): unsure at all n locations
agcttgcaagaatgatcagngactaactaacttggtgtgtgtagggtttctgctttgatcttcgcaagggcaaacacctgttttccctaggatcttgggccatgaagctggagggtatgtgtaatctgaaccaaccctgtccaattcttgttcttctactacactgtttagtggttcagtctattctgttcttgtattggtttttttttgttttaaaatggcttttggtgtttagtggaatttagtgtgtacttgtacgtcataggttgtttggtttatggtattcggttactaactatagttagtgtgcacgttggggagtcctgattagtcagtggcattttcattaagttcagtaaagaaatc

SEQ ID NO: 35094 - DNA, 348 bp, Oryza sativa
actcaactttctagaagattcacccaaaatcttcatagactgcgacctattgtctagcttacaaaggggagttctttcaagaatgcatcttcactaattaaagccaacagaactcattaaggcctaacccacctgccttgcagctcacgaaaagacatgcatcttcacttaaaaagggtatagaatggtactctcctctaatttactaatggattgttcttcccaagttctaattcacgggatcttcgatcacatagactgggttaccaccatagtataactcacatgggtctcaaacccatctccttcgatgcattgtctatcacatttcgtgatagtccctttgtg

SEQ ID NO: 35095 - DNA, 367 bp, Oryza sativa
agctctgaacccgggtcgacctgtgtttcttaaatttgtacccggcagattgtacacggggggcctcccacgacatgagctgagctcggaactcggaagcgtacaaaatttactttactgagcgtaaagcttgggagtatatacagagtaaaatttttggacacagtaggtactataaccaaaattgtgatgatccatggtaggtaagtccaacatcagaaattattcatgtcccaagcttcaaaaatcctacttcaaaatatcaaatatttatgacatgaatgtatcatcaagtgcacagtgtggttgttcgggccttacaaattaggggcccaaattttttaagtacgtatagaacactgtatat

SEQ ID NO: 35096 - DNA, 409 bp, Oryza sativa
  unsure (1)..(409): unsure at all n locations
aaaactcagctttggtgtactcactgatcttcttgagcttttatttattttgaatcaaacaccctttcttttcattttttgggtcttgaaaatggggcttttcgatcatggacttgtgccgatatctgacattcgctcaccagtacgtgttgtccgtacaggcaggagctatgaactcgatgcgtgtttcaaactttcagagtgggattgtttctggtaatctgtcacttgcgaagcaaaacagatcacatgaacagaggggaagaacacatgtgtcttgcctagtgtgagcttcttcccttttttgcccctcaactttcaagctttgtgtaacataacgaatctcnaaagtgtttgttctgcaataatttgtttattattgtttgtaaaataaggtcaatttcatata

SEQ ID NO: 35097 - DNA, 346 bp, Oryza sativa
agcttcagccgggatattgacgagttttcatgtttgtacgctataattcccgcagtctaaaacacctgtatttatatatatatatatatatatatatataaagaagactcagacatttatactatcttttatgggtgtttagattcagtggtgtaagtttttaatgtgtcaaattgagtattatatagggtgtcgtattggatgtttgggcactaataaaaaaactaattataaaatccatcattaaacagcgaggcgaattttttaaacttaattaatccatcattagcaaatatttactgtagcaccatattgtaaaatcatagagcaattaagcttacaagat

SEQ ID NO: 35098 - DNA, 392 bp, Oryza sativa
ctcagtcgctcgccgcggcgacgggaggagaagattttttgttgggttcgggggctcctgccgcgtggccttcttcacggcgtcgccttcaaagacctccaagtcgaccccaactccttccttttcggccgcattttacttcccacctcgccaccggacccgcacagactaaggctccgcccgtgccgcgccagcaagccaacgcccaccaacaccatcgccagccgccaagtccctcctcttctgccggctggatgggttggatgggttggctcgcgagcctaacgagctagctcgagctttcaaacgagccgagccgagccagctcgttatcctaacgagcttgaccgagcccaatcgagccggctcgctatccaccccctactacgtat

SEQ ID NO: 35099 - DNA, 357 bp, Oryza sativa
agcttgcacgcaatttccatgtactccagtttctgagtaaccaccaattgcatcgcatgtcacgaatgtcagcaaatgctcagctgatcacattactattactatccgaatgcataccgagtttgaaaggagcaaattatgacatggtgcgataactaaacaagaattgccatacatatatttgagtatactccaagggacccagggaacgcaagaatcatctacaaactggaatcgtttcatcttatatgagttctacaatgatgtactagtacataaattcagcttcgcgtagaaagtatagttttggcttatattaactttctcaaagaatcaaagaaagtatagttttggctt

SEQ ID NO: 35100 - DNA, 395 bp, Oryza sativa
  unsure (1)..(395): unsure at all n locations
ttgaatgagttttgatagcaaagtttagagagggagtgaaaatgagttgagatggagtggatttccctctcccggccggttggcttaaataaggcgcccacaacggtcaaaattgacatgtgggccccattaaccgaggaccagcaaaaactggcagctgaccattgcctggccggttcagccgaacccctcgtgggcccaaccggccccactttcgaccgctggcatccaacggccagtgtggtcatggcacaatgaattttcgttgaaaattttgttttgttttgctctaaaattcatttggaaggagtgcctcaaaagtcaaatctaaatgcagatnttgaaaattcaaacatgcattgatacaaaaatcagattgacagaaataaatatga

SEQ ID NO: 35101 - DNA, 361 bp, Oryza sativa
agcttccatctgcatggcagccttgtcattctgctatctggtaatcatagccaaagcttgacttgcagcaatcgctgaagcgttcctttcttcttccagttccttgcagaggaggtgtatagattttcggtcaagatcaatctgtcgtctcaaccgttcagtggcactttcaccttccatctcacttacagtgctaccctccagtgactccaaaccagatgcatttctctcaattgaaattctgttcgtgatgttctgcactatcaaatcatcaccacgcccatacgcacgtgggctagggcctgggtcgacccatggagccttgagtcctctggaagccgagagctgttacagcagtaac

SEQ ID NO: 35102 - DNA, 415 bp, Oryza sativa
tccagcccagaatcatgtgatgtacagctggaaattccatctgattgtagttcatttacttctaatggcttcgttttagacaaaacatctaaatccgtttctactaaaggtattttctcatctgtataagtgatgagatccctacataaaacaacaaattaaatgaatatcagcagatatccaacaaccgtacacagaggtgcatggaatttatttgtctaaaatttactttactgtacaacaaataaattggaacctcaaaaggtgaacagcatggcatgaaacacttggttgcacttaccattcaaaatcaataggtcgctggatcacccgacgataacctcctttcatccttgtaatagagaagtcccttagaaacacaatagtcagtaacttggtatgcatgatttcaaat

SEQ ID NO: 35103 - DNA, 349 bp, Oryza sativa
agcttcgacaaagaggcggttctgtcctatcgcctcaaagatggcagcgcactgtgggcacacatgtacacgcgcctggaccggcaggggtaccacggaactcgagaggtaccggccgccttggctggatttgtttgaaaacctggtgctcgagggctaaagatggtccaagacattattgcaaatattggttcgagtatttttcacgggggagggagtcgattttgtatttttcaaatttgtaggaacccgaataaatgatgtaaacttgatgtcatgcagcgtcacattgcttggagattcgggctcgccaccttcttctccaccaacttagtaagggcttcttttt

SEQ ID NO: 35104 - DNA, 379 bp, Oryza sativa
  unsure (1)..(379): unsure at all n locations
tgcagaggagcgttggtttggctctgccctatttttagccttttctaacacgccggattgttcttttcagtttattcattggattattaccgngaattatttgatgtgtagttcggaaaaaaaattttaaaagaaaatatttctatatttgttagaccccttattctatgctatttattaagcttattttttaaaaaatgatttacccttcaaaaaataaacaatctacgacaataatatggtgaacgatgcatttcaaagtgtacttattccatccttaaaaaaaccaacttctaaagatgaatatgggccatcacttggttaaattcattctaaaatttattttttattagaccgaagatattccttagaaagaatg

SEQ ID NO: 35105 - DNA, 344 bp, Oryza sativa
agcttaaactgtagaaaagatatttaaaatttgggattttctcgatgatttcacagtttagcaaaaaaaagaagaagaagaagctgaagatacgcaatctgtggggtgagaacgagataacggtcctaatatgggttcttttttatataaaaagaaaatcttactaacgagaatgcaaaatgcagctgatttcctgcttataattccatatgtaactaaccagcacatgtcctccgctgagcaaaatgaagtttccaaagggctttgtacgacaaacaacccataagattccataataattcggcaataattaaagaattccgatccatctgattggcgtttac

SEQ ID NO: 35106 - DNA, 394 bp, Oryza sativa
tcttaattaaatctggaaagcatttgtaactttgttataaacctaaagaaataccatgtggttttggtatcgttaagctagcccactttggaacaaaatattcttttagatagaggaatatgtagaatcatatagaaattttgcctatatggcccttttaagcaaagaatggggccatggatactgtggaattcctatgtaacgattcaatcataagagttttggagcaaatttaacataaggttcaacctcatgggagctttttctcctttgaatctctcatcaaatttctgcgcagcatgcaaatggtcactcctgtatctttcatatattctgtaaaatataggtccctcgagttgctttctcaagtacccgtaaacttctctctataaat

SEQ ID NO: 35107 - DNA, 351 bp, Oryza sativa
agcttaccactgcacatttttctcataatgagaagaaaaaaaaaagacgctaagttcagcactcaatcatcgcgccggagaaaagcaatccgcgtggaaaatgtactgcgcgagagatcatttacatccatcttcgcgctgctcgaccgtctccctcaagaacttatcgcgcgggaggttgctgtcgctgaagtaaaactccacctgcgacaaccaaaccaaatcaaaagctcaaacctcccccccaaaaataaatgctcaaacaaaatcgccaaaagggggagaaatccgccgtgaacaaacaacaagaaggcgggatcggacacctggcggagaacgctcttcgccttg

SEQ ID NO: 35108 - DNA, 390 bp, Oryza sativa
tgtgcttccgatgcgtctcacgcttcgtatctgttctatcaccaagcaggggggcgatcctcaattaagacctgagcttaatcgtgtggcaggagggatagcttacagttgtcgcagtgatgactctgggtgcgtggatgtcatcctatgcagatcacgcatccctccctacgagatctacaagctctcctgcgtcatggaggaagaggtccatctagaacgtgcgtcctagaaaaatgaatttggtaccctgtataaaaccatgttaatttgcttgcttctaagtagtatatgatcttgatgaaatttacgtcttgcttgcgtatgtacggacccattctggtccattgatgtacagtgactgtgaactaaacggaaatttattttttg

SEQ ID NO: 35109 - DNA, 341 bp, Oryza sativa
agcttttctctattatgatgagatttcttatttttatttccccctggaattaataacacttttaatgatgttgagcagtggaacttccgtattggcttcacccctaaagagggtttggtcatctattctgttgcatatgttgatggcagccgtggacgtcggccgatagctcataagctcaactttgttgagatggttgttccttatggagatcccaatgaaccacattatcgcaagaatgcttttgatgctggagaagatggacttgggaagaatgctcattctcttaagagggtgcttgctcaattcttaatgattctttaccttcagagagttttaac

SEQ ID NO: 35110 - DNA, 371 bp, Oryza sativa
tcacagatgcaacagctacaccatgctcctccattattcgtgctttgatgatggtaacaacctctttagagactgccttaccctctctaacctctgcaatcacaacaagtccaacctgatcagaagaatctggaattgagaagcctttctgagccagaacttcctctgggataccgaccacagcacaacagcctggtcggaggacctcataagaactttccacagtcttctctacatccgcaaaataaatatttctaccagcgacaatgatgagatctttgatccttcctgtaataaaaaggttaccatcgatggtccgtcccaaatcaccggttcttgtgaacttcttgttgggtggttcttaagctgat

SEQ ID NO: 35111 - DNA, 331 bp, Oryza sativa
agcttgccgttcgccttgggaacgatcaccgggttcgccagccactccggatggatgacctcgcggatgaatccggcctccagaagtcgcgccacctcctcgtggatgaaggcttgacgttccggggcctgccgccgtactttctgccggaccggccttgcgcccgaccgcacggcgagacggtgctcaatcacctccctggggaccccgggcatatccgccggtctccatgcgaagacgccagcgtttgcccgcaggaaagagacgagcgcgtcttcctatttgccgtccagaagaccaccgatccgtgtggtcttggacgggccgtcgc

SEQ ID NO: 35112 - DNA, 409 bp, Oryza sativa
tgtagagggtccttttttctctctgaccatttgcttgtaatgttttactttcatcagctctttctcattgtgtaaacttttcagagcatggctgcatactaccctactttgttttgtcatctttgctggcagactgatatctaatgtccccgcatgtcttcattacagcgaagctagtgatcatttctaacaactgcccacctcttcggaagtcagaaattgagtactacgctatgttggccaaggtcaccgtccaccatttccacggaagtaagttgacacccatgcttttcgacatctcttgacctttgcaaagatttaaacagtgaggcatgcttgggagtaaatatgtaatcaaattatatcgtagaaacgccatgctaattatttttatgcgcttttttaaatg

SEQ ID NO: 35113 - DNA, 347 bp, Oryza sativa
agcttctggaagacccggggattagaggtgagcaccacgaagaaattggggaagaaaaaaaatcgatccttttcctctaaaacgagaggtgccctggctgcgagggaatcatgggaaaaaaaaaagtcgtggacggtgtgacgcgatgtggtcaacgtggacaggcctgataggtgggcccaccaagtcagtgtcgtgacgtcacggaggctgggccccacctcgttgatgcggtggcagattgagaattttgagagggcctctgtttccaacagatttcacgttcaaggagctctgaacttgtgaaatgaatctgtgatgttcacagttgtgaattgggaggtata

SEQ ID NO: 35114 - DNA, 253 bp, Oryza sativa
tacagcaactgaagttgatggatgaaaagaaacatacatgccttgccccctttgccacaacagctaaaacatatagtttcaacagaagtaacaatcctattcgttgttcaaatcggggattgttaggaatacctcaaggacattcaccgattcacgatgaaagacacaccttacaggtatccgtagagaatgtcccatataaattagaccatatttttctaccgcaaaatttgctataagatatcgtgacttc

SEQ ID NO: 35115 - DNA, 403 bp, Oryza sativa
tctgataaactgagattttcggctaacccatcactaactcttcgatatatttcttgctgaaagtatccctgatcccactgataacgagtaggcccaaacaattcaattggggtagttgctgacccataccacataattccggcaactacgaaagctgcaaaaaaaacagcagcgatactactggaaagtacagtttcaatattgcccatacgtaatcctttgtatagacgttgaagtggacggacactaagatggaataggcccgctaatatgcccaatgtacccgcagcaatatgatgagaagctattccccccggaacaaaaggatcaaaaccttctgcaccccacgccggatttacagcttgtacttttccagttagtccataaggatcagacacccata

SEQ ID NO: 35116 - DNA, 366 bp, Oryza sativa
agctcgtccggctcctcctgtggctcttttttctatggagagccaccagggggcgacatcagtaaaatgttaaaccaacgcggtaagaaagaaattcgcatggtgaacatctgagacagaccatacggtcgttctccaagcaagtaacacccccccactccgaccgaccgcagacaagaaagaataatcaaagtcgaggcctagcatttctagaatagtgcgagaggggattacatccataatagtctcctgaagacagagaagagagacatgctcatcacggactacatcacgcacagcattccggcgggcgcgcgagttcagaccttgcacgttccacaccaaaatgttctcgttgcatgatcc

SEQ ID NO: 35117 - DNA, 356 bp, Oryza sativa
agcttctttgcctactgaactatcatgagatgtccgagcttgaaaaactaagttatatccctcagctgtgcactgcaacacattttcaactatgttattaattgaaaaagagctgtgtcaaacaaccaacaatctaagatacttacaagttccttgagagcaacaatagaacctcctgcttttctggaattgttctcccccatcttcacaaagcgagtttcttctgaagtacttgcaattggtaacacatcgtccctactatttccagggtatccaaaaatgtttgtattgctaccaaaaccattttctttcatatcagtcatcttatttggatcagatgacagatatttatctgc

SEQ ID NO: 35118 - DNA, 319 bp, Oryza sativa
tagcagagacaagaaaaaataggaacaaaaaattgttttttctttctgccatctagcagatggaaagaaccggttagccataaatcctactattcagtaccctttttctgatccgaattcccaattgctgtttgttaatcgagacggacaagcagcgttgacagacggctacagtcgtacagagattaaagtcgcacctttgcaattctgcagagcgaggacgcgcagattgcggaagcccccggcgacgacgtccaggtcgtcgtcgatgacgccggggtaaaacgagcgggacagcgactgggaaaggtccagctcg

SEQ ID NO: 35119 - DNA, 329 bp, Oryza sativa
  unsure (1)..(329): unsure at all n locations
agcttggtgccaggctgaccaagcttcttctagtcgcaagctgactacatcagcgttccagntgagggtccctacaagcccgcgcactaccggtactaggctgcccagcacgactagcggctgtggcatgagaagtgtcaacttgaagttcgccatgacgactctggagtatcctgctttgttttcatcatcttatatgccgccacttaagaggatttgttgtggggtttatggtttgagactggtgaaggggaagaatgggaagccggttgctgttgcccagaaataacgcgctaattgggtggagtcggggaggtgtgctctggcac

SEQ ID NO: 35120 - DNA, 392 bp, Oryza sativa
  unsure (1)..(392): unsure at all n locations
tcctcgtatagtggtcaagggtctcgatgttaactatgttgtggctgntaatggtgctcttcaatgtctgcaagcgcatgttgcgcactccgtccgcgccgatgaaccttttcttgaggcaatcccaaacctccctggtcgcaacctacatgtggagaacctctatgagcatctgaaaaagatggaacttgtacttctttgtgcggcgacgccctcctaccgttcaccttgccaccggtttgatcgcctccaagatgcctttatcttccatcatcacttgcacctaaaaagtaccctgctagtctagtacactgtcatcagatgaggatagtggaaggcactccctgtgctcccactagccacgtccgatgtcacgatcgatatagctctga

SEQ ID NO: 35121 - DNA, 363 bp, Oryza sativa
agcttcctaatctatcagaagtttttacaacttctacaaaagacttcctaatctatcataatggctttcactttcacctgttaaatttcagaaatctggagataacaagttaaacgttagatacatcttattgatcataacaagggagtgacatgagaaattaaccatttcttcttgctactataaaaacacgtattaacagaaataatagtgtactcccatatacctctttgcagtttcatatagagaaaagtataattgcatgtttattttccatgtgcatttttttgttgcatcaaaaccttaaggcaggatagcttgataaagaaacattaatcattgtagacagtaactcaagatgcc

SEQ ID NO: 35122 - DNA, 288 bp, Oryza sativa
  unsure (1)..(288): unsure at all n locations
aacccagcttggatcaaagccgtctcaaaaataattttgtgtttttctgcccnctgcaaaaaattcgcagcggactattaacgggcctgtaaaacatttcgcagcggacacctatcctaccggcaagacattttatgtggtcacctcgataatcgtcttccaagaaaagctcaatcctttaccatactacaaccctcctacactaatttatctataacctctcctcctccaccaccgtctaaatccccacgccttcttacattcttcctgctctgcagggcctttaaa

SEQ ID NO: 35123 - DNA, 362 bp, Oryza sativa
agctttcttgacgcttactcttgttattaccaaatcaacatggctaaagaggacgaggagaagacagcattcatcacgccgttcggagtattctgctacgttaagatgccgtttggactgataaccgcatgaaatactttccagcgcacggtccaaggggcacttaatgatcagctgggtaacaatgttgaggcctacgtctatgacattgttgtcaagaccaagacaggcgactcattaattgacgatctacgggaaaccttcgacaatctccgacgatatcgcctcatgctcaaccctgaaagtgcatgttcggagtaccatcgggcaagctgcttgggttcctcgtctctggcagagga

SEQ ID NO: 35124 - DNA, 399 bp, Oryza sativa
tagctgtgtactgaccaaaccgaacacactctattttcgccgcatcatgatcgatcctatcatataggaaaaacaaaaatgagaggaagaccattagtttgcttgctaaatcgcttctgacctaatttcttgctcctcctgttgaacaataatggagatgaggatttttttatggccttacccggaagggagctcactgggaactatgaagtacgccaacgcctgcaaagtgccctcctttggagccaccattgacacctcttcccctctcaccctacaaaccaattaggagtggcatataatgaaatctctcttcctacgctgaaggaaggtaatagtaatcaagtccatattagaagaagtacgataggcaaaagttatgtaatgggcacatgtaat

SEQ ID NO: 35125 - DNA, 361 bp, Oryza sativa
agctttctctttcttccgccttggttgcgaactaaatggcgagatttgggctgaaatgcggttgacaatgaaggggagattgatgcggtgggtgcacggatgatttctgtggaattttggaaggtggatttgagcgaatcggttaaccctagtttcgccggagcagcctttgcactgtagcgggaaatggggaaagtggcgagagtctcggtgaggaagacgaagagacattctgtttctctttggtgttattagggtatcggaagtactaatgggcctgggcctaaaatagtacttcagcccaatgttgctaatcggcgtggctaagtggtgatccgtacggacttaggcattttttgtt

SEQ ID NO: 35126 - DNA, 399 bp, Oryza sativa
  unsure (1)..(399): unsure at all n locations
tgtcagatagatttagaggaacccacactatcatgttgtcaaaatcaaaaattgaataaaaattaagaactcaccatgagaataaagtctcgcaaatctttcagcattccttccctctaaaacataatcaatctcatcaaacatgtgcctgacctgttgaacagaaggttcaaaagctataagcaaactatattgcaatatatattaacggccaaaatatgggaaacgtggtctagaatggaaaaacatagtatatggcagttgcaactaaattgtctgaaacaaattatattacagttgtcttaatgagaccatctattattagtcctacaatacaaaacttaaattttggattgagatattgacatggtttctatgacnattatttgaccacaaaaa

SEQ ID NO: 35127 - DNA, 353 bp, Oryza sativa
agcttgctgatgaatttcaaccggttatatttgtcacaacacatttcattaaagtattgccatctgcaacctcttggtatcaattgctacaactttcatactgattatgccatttcttctcttttgccagcctgactcacgtgttcttcgggcacagatcctgcaccaactgattttccattgcttcaacctagcaccatgcatccaccctgccatagagggccttcgtcctcttgatgacggtgaaggaagctcccactagtggcaccgctgttaattctatgttcgtagttaccagtgcttgcgaactttacgacatgtacgcatggaaccgatgttgatgaaactacatt

SEQ ID NO: 35128 - DNA, 347 bp, Oryza sativa
  unsure (1)..(347): unsure at all n locations
taaaacttgggatgaatgcaaaatactgttgttttttagatttgngttttcatactatagacgtgctctccttgggaaatttgaacatctaaaacaaggtgacaaaactgttagggagtactttcatgattttaaaatttgtatcacttgtagtggtttacaagaatctaatgagaacacaatgactagatttttcagagggcataattccaatattcaggttgggcttgttaatgtgacatataatcatataggccaattgttcatgcttgcttgcaatgttgagcgccacaatttggagaacccaacggagcaacaagctatgcttttgcctcctatcactgatg

SEQ ID NO: 35129 - DNA, 345 bp, Oryza sativa
  unsure (1)..(345): unsure at all n locations
agcttccttgcagctcgcattaccgtttgttctggggttcgncgctgatggcagcaccgatcgacgaggctgtgttcggaactaatccctcccgccacacaaaaaacggaacgattcattagcacgcgaataattaagtattagtttttttaaaaaaatgaattaatttgattttttaagcaactttcatatagaaactctgtttttgcaaaaaatacactcgtttaataagtttaaaaagtatgcgcgtgaaaaacgaggtagatgggttgcaaacatggggatgcaaacacagtcaggcagcaaagcaagcagtacagaatacaggcgcaacagaaaatacct

SEQ ID NO: 35130 - DNA, 380 bp, Oryza sativa
actcactttatgcaaaccaagcccagagatttttctttttccttgcccaaacctgcctttgcaaaaccatggatgcagaattgcagacagacgatgatccggagccggtgtctgcctgcccctgcaaattctgatctttgatggtatcaactattaacagctagcaccatgcatgccacacacggctcgctcttagtgcgcggaagtcaaggcacaaatatactccgcgcattttaaaatgtatgatgccgtcaactttctacataacgtttaatcattggtcttattaataaaattatataaatataacttattttgcagtgactcattttatcacttaatatgagtataacctaacctataccttaacaaatccgact

SEQ ID NO: 35131 - DNA, 356 bp, Oryza sativa
agcttctcctcgtgcttcgcattgtttagcagttaaacgaataatgaggtatttgaatcatacacttgagtttggaatttggtattctacttcatcttctatatgcttgagtggatattccgatgttgattttgctggttgtagaattgataggaaaagtactagtggaacatgtcattttcttggtacatcattgattgcatggtcttctaagaaacaatctagtgttgctcaatcaactgctgaatctgaatatattgctgctactagttgttgttcatagattctttggcttatttcaactttgaaagactatggtcttacttttgagaaagttcctctcttttgtgataata

SEQ ID NO: 35132 - DNA, 348 bp, Oryza sativa
ttcgtggcgttcataggcatgcacagcagatcccaacaatctcttttttcattccacacatcatccaacacaagcaaaactttcttttgcttaatttcttctaccagtctctcatggagattaagaagttctgatagatcacacttctcctttgtaaccgcgacaatgatgctctgtgttatgttgttgatatcaaactgctcagatacgcaaacccatgcgtgcacatcaaaatacttgcacacttctgggtggttatacactagctgggccaagcgtgtctggcctaatccttccataccaacaattgccatgacagaaaccggactagctagatggtcacctctt

SEQ ID NO: 35133 - DNA, 339 bp, Oryza sativa
agcttactatgagtttatgtggatgagagatagcgaaaaattaaaggtgttggctttcatgcaagagctaacttattacaaattccaagacaaatacattaaatgtataagtgagggatagctagagagaagagaaaacaattatagccaaccttataactaatccattatatatgttgactttaagatatgctaataataagaagtgagctatactattatttttgctcttagcagcctcagcctgcagccagaacagtctggcaatcaagcaccccggtgaaaagaattgtacttaaaaaagctaaacatcgctagtactacagactaattgacagc

SEQ ID NO: 35134 - DNA, 346 bp, Oryza sativa
  unsure (1)..(346): unsure at all n locations
gccgacgagaggggtgccagaccaacagcaggttaggtcccacaccatactgtgccaagaagcccaagggtcctccccgacaccaccccggcgaaaccacatgtctctcggcatcaaagctcccctgataagctagctactcaaccaggggtgtcccattccacccatgcggacggacatgtcttatgtttggatgaaattccaaggaaacggtccttaagtgcaagagcgggaaaccagacacccggcacgttccccggaccgcggttntggaaattcatttaagtcgcaagcaccgacccaagagtcgggttttccaagtctcttggaaaacccaaggtttacc

SEQ ID NO: 35135 - DNA, 338 bp, Oryza sativa
agcttggcaatcagatccgtcaaattataagtgtaacttttgctcagattatcgagccttcacgatctctctcactttcactggatcgtcgaggaaacgcaagcacttcttcttgaagccatcgcaatggtgctcccgggcgaatgcaagcatggaaacaaccgttctcccgttcacgtactcgcacagtttgtgctcgcacaccaacctcagcctctccatcttgtacctgctcgccgccgcgaccaggtccgggagcatcgccgccgcgtcccctcctcctttcgtcgtctctggctccggcagcgagtcggtgtacatgtagcggagcaaagcct

SEQ ID NO: 35136 - DNA, 311 bp, Oryza sativa
gcccctgcttggctcatcttcatttatgcttcacagatggcaaatcaagtgctatagcagggcgaggtcacagctttgcagttgccctccaattcatcaactgacgttgatccattcacaccacaccacacaatactccagcagccgaagcagcactgacgattctagtacaacggagtttaagcaatctcatggaagtggaatgtggttatgccttctgactgtcagccctggtgctaaaccgcagtatgctgccccccttcttgtacagcttcatttgacttaagaagatcgtagcacgggtactgtat

SEQ ID NO: 35137 - DNA, 365 bp, Oryza sativa
agctttctacaatagccactgcatccttctgttcagaggaagccaggatgagaatcccagcatcacgaaatggaaacacccctattaccacgttgtccggtatttccatcttcgtttccttcctaccatagcaagcaatttgtctaaaactacctgtcctttcatccttggattctcaccaccaatggtttgtgttcagtgaatgatctaaccatgcgtcattcacagttcttcgttcttgtctttactctcatgattttctctttgttccagacttgccaatccaaccatgagcatgtcgtttgctctgaatgctgagccaaacactgtgtggtataataaccgctccctcctccagaatacat

SEQ ID NO: 35138 - DNA, 397 bp, Oryza sativa
tggtgcgcctgtcacgttgttcaggagaactcaaagatagtatcgttcgccttcagatggatgggctgaaacaattctaccaacttgatggatagtagtccgtttccttttttgccaaaacttcccttttttttcctgattgtcaagtgtaatactctggaaaatcacaatataatatgcttcgtgcctccttatgtaacctattcgtttcaaagtatgcagtcaacattgacttttcgacaccatcctgattaagcacttcttcaatgtcttgttccccttggtatgcaatcatgtgcatgttagggagatgaagctgtagttgcatcacacctgggcgtattttgcttagttcaaaactatatattctccataatgcttcatgaggtgtcaccca

SEQ ID NO: 35139 - DNA, 363 bp, Oryza sativa
agcttgtcaccaacactagtgaatgcaccaatcagcccctcatcttcattttcttgagttttggctttctttgacttgcttgcagatgatacctctgaacgatcatcagtagtgctaggtccatcattttcttcatcatttacagcttggacatcttctgttcctaggactgaacagagtcctttgcatactttcctgtagccatggtcctaccaaatagtgtatctcatcatagtgcgcaagaagtttgttaaaataatcagcatcaacctttttatctttccatgaaacaaaagttattgtataagtaaatgcaataaaaaatgaaacaaagaacccacaaggtcaagacatatacgttaa

SEQ ID NO: 35140 - DNA, 400 bp, Oryza sativa
taacagtttaagcgtacatcaacagaaacttaacaactgtttttggctccttgcaagtgactttttataacaattcaggactaatctcaagatactacatattaatctttctgtcagaaactgatccttttccctatacttcagtgactaaatattgcatacaaattaaattcaggacaatctgcatatatcgcttcggtacaacgtaaagaagcttgaattgaaatgcaaatttatcgaaaacgcatggacaaactaagtgaacagtaggtcacttgtagaattcaaccactgaattgggacaatgtcatctcatcacatgataatactatcaaaaaccaacagaacattggcattgtcagaaaacagagcattgactcagaaataagaaatcaacata

SEQ ID NO: 35141 - DNA, 347 bp, Oryza sativa
agcttcacgtactctagcgacaccttctttctatagctagcacacacaagacatagcacgaccaccaacatcgacaaccgttttcggcgccaatctatgtcgaccctatgctgactgctctttgttctgtaatccatcgcatgtacatcgctaactaacaatcctccatgtagtaccttatcgtcaacacctccaaaatagcctctaggaaccacctctctaactttcggttgaacgccatcaatctagtcaagagccgaactcgacaagtcacatgtcgtcttcccagtcgccggaacaacccgagtgttacgtctacccgtcttcttgtcgaacgcaactcattg

SEQ ID NO: 35142 - DNA, 381 bp, Oryza sativa
tgcctccatctcctcgcaattcggcattgcgactctttttcttctgaccccaagtggggatggtacttcttcttggcgggattttctttgtttctgaccatcatcgcttgcccttggtgccctgtcttgtaagcagcgaacttcgcccaatgatcccttaacttcgggaataacgtcaaattcggtgtcagccccttcaggaattatttcttgtagagatctcccttgaagctctggaattgttctggcattttcttaagaatccactatttcactatgttctccgtacccgcagggagcatgaacgtctcgagcatttgtggtcacagcatctctttctctgaattcgagacaaagctgtcaatatccccgcgtgccctt

SEQ ID NO: 35143 - DNA, 355 bp, Oryza sativa
agctttatgtcaagacaaagcaatctatcttccaacgaggtctatggaatctacttcgggagtcatcagtttcgtcttcacttaagagttggcgttctacttgagaaactccaattatttcaccggcaattttggcttctccatgctgccacaatatactccaaatttctcaagtatcaagtttgagatgtaatttacatgtctgggagtttgatggattattatcattgacatcatcaccaacacctctacttcatcggccctgacgtctccgccattgctaaggggtgactacgtcctcgctgtcggttgcttttgtcatcaccgacttgcatcgccgacttgttatttcgtc

SEQ ID NO: 35144 - DNA, 384 bp, Oryza sativa
ctatgaaactcaagctgttcgatgttctaatcttggtaactgcatgcattgattatttacaatatattagaaccataaatatgtgaagctttctagcacatagtatagaaacttacattctctgcgttagtcctgtacctcccattaaccctaatgaattcgcacgcgtaatatccgcaaaggaccgttcctcacggttgcttgtgacacttcaagacatatcataaaaaaaaatagttaaattttgcaattagtgaaacaattggaatacattaagtgagtggagtattaccggccaataagtacgtattagcagcttctcccttgttcgggtctgttctccacccttgaacttgtagtactcgtacgcgctgtatggatgtt

SEQ ID NO: 35145 - DNA, 352 bp, Oryza sativa
agcttacaagtaaaccagatatggagattttgactaaagttgctgtttccatttttatagaatttcaagattacaatggatctacgaaaagatcgtgtatttacaactacaacggaatagtatacaaagtcaacacaaatcattaaatggaatttatggctacacaaaccgttgaagatagttctagacctggaccaagacaaactcgcgtaggtaatttattgaaacccttgaattcggaatatgggaaagtagctccgggttgggggactactccttttatgggggtcgcaatggctttattcgcgggattcctatctattattttagaaatttataattcttccgtttt

SEQ ID NO: 35146 - DNA, 354 bp, Oryza sativa
ttcattttcgggcttatcctagttgttggtttagtttatgcatggcgaaaaggagccttggaatggtcttaactgaatattcagacaaaaaaaaaaaagaaggaaaagattccattaagacagttatgagtttgattgagtttcccctacttgaccaaacaagttccaattccgttatttcaactacactaaaagatctttcgaattggtcaagactctctagtttatggccccttctatatggtaccagttgttgtttcattgaatttgcttcattaataggctcacgattcgactttgatcgttatggattggtaccaagatcaagtcctatgcaagcggacctaattttac

SEQ ID NO: 35147 - DNA, 345 bp, Oryza sativa
agctttgctggtaaataaattctcttgtctcattattgtctgcggcatcgactggataatcttaatgaatggtgattggcgccaaactttacatgtcaatcactgaactaccattctactgtgaagcaatattcttaatgtgtttatatgtttctggtccaacccttcttttttcaatgtctttcaaggatggattattaattgtgttgataaattcatgtgcatataatatttaagtaatcgctaccattatctacactaattgaagattataaataaaagatttagtttctgtatcgcaggatgttcttccaattcttacagaacttcgtaatgcacaagaca

SEQ ID NO: 35148 - DNA, 297 bp, Oryza sativa
ggagatgtggcctaccgagggcggcttgaagctacattgaaagacaaataatacccaaatggccgcatgctttctaccataacgctccctgttgctgattgacatggggaactagctgttggctgcaacatccaatctcacatacctgctggaagagctagcaatacgattggtcatgcgaatctaagcaacaaaggaactggtcaaggtggcattcgcctcaacagctcggagcatctagagaacgcccatatagccctcgggccaatataccacgacatcaagaagctattgcca

SEQ ID NO: 35149 - DNA, 359 bp, Oryza sativa
agcttttatgaaaatcacggttttcttgtatcacacatttctaggtttctcccttgaggattcattttcaatcctttcggttaaaccttatgcatttagttggatttatttattttcgaacgttctcttgtatcaatgcttttgacatgctatttggtctttaaaagtttggtttatcgagtgacggttgttttttcagccttgtgtttcaatttagtacttttagtatgatttcttcaattacaaagattttcttttttgatcttctctttggactttaaatatttattttagttctgaaatctcaatttcctaaattttgtttgaactgatgcttaatattttttgacaagaacata

SEQ ID NO: 35150 - DNA, 393 bp, Oryza sativa
  unsure (1)..(393): unsure at all n locations
tccgaatctacaaaggtttgttggagacatcaatttatttcatggaaccatcccaccatccttgngttatgccaccatgcttcaagttctgcaaacagtatacaactttttgtcaagaagaattcctcagtgtcttggaattcaacagaagagcttatcagttgtggccctttcaaaaaatcagcttgaagcaacaaatgatgctgattgagttttcttatccagcttggcgaattgcagcaatttgaatgcattagatttgggttacaacaagcttcaaggtgagctaccgagttcaattgggaatctttcttcgcatttgagctatcttatcatagcgaacaacaatatagaaggaaaaatacctgaaggaatatggaacttgatcaactt

SEQ ID NO: 35151 - DNA, 351 bp, Oryza sativa
agcttgctatgcccccgccattaatactcggcccgctgccctcctccatccccgtggctctcgccaccaacaccggcccgctgccctcctccatccccatggcttcggtgctaccactggcgcctagccgcctacccgttccgccgcccaccgctgggccgctgactcccacgaccatccctataaccccggcgaactcccccttcttcccccgcccatcctaaccccacccccaccccgagaccctgattcgttggtgcttcgccggagtttgggttatcgccggtgtcggaaaagaaaaagtcgccgaagttcgagaagaaacacctaaagcatgaatcgcgaagcaca

SEQ ID NO: 35152 - DNA, 351 bp, Oryza sativa
  unsure (1)..(351): unsure at all n locations
cgttcgatttggagggaactgaagggagattgttgaaaataattccacaccacaatagttatggaataaaatcctctctaatccctctccttggggattaactgaacatggcttaaatagaaaagataatgacatacaaagcaatgggattgaagaatggcacccacaactgagtttgagatatccaattatttatccaccattagttcctacagtagcattttgatggcgcctactagcagggggaaaatctggcctattccagccaaaatcaactggaatattgcttatcaagtactccaagctnttagcagagggaagtccaccttggtatattttaacatatatttg

SEQ ID NO: 35153 - DNA, 323 bp, Oryza sativa
  unsure (1)..(323): unsure at all n locations
agcttgaatctttgcctcttccctttgttacctaanaancagacaaaacacaagaaaattttcatcatatgagaaattcatctctaatctttgccataatttatgctaaaatttcttgtgcaaaccttatgcagctcttggccctgtcatcgtcctcccaccggcagtcgccggcgccgccgcgcttctcgccgacggcggcgacgctggcctctaagtgcctcaagctcttggacacctcctcctcctcctcctccttggagctccagttgatgagcatggcgtcgaactgcgcgccgaggtccagcttggcgaaatggcag

SEQ ID NO: 35154 - DNA, 373 bp, Oryza sativa
tatggaagaaccgcagaaagctcttgttccagacgctcatgacatgaatctgagtggaaacatattgcaacaaggtgctataatggccaatgcactcatcgtcaacgaggaggatgaggcatgtcgctgggagatcctagctgaggtgtgggctcacttgattgtgcacattgctcccagttccagaatagaagctcatgccgagaacctcaagtctggtagcgagttcataaccgtcatctgggctttgttttcccactgtggcatcgagaagagcgaattatggcagtagcagaaaaagggtgcagagtctgggaacagcacttttctggatttgctaaccagagcagtgatgtaacaaatacccatgttc

SEQ ID NO: 35155 - DNA, 348 bp, Oryza sativa
  unsure (1)..(348): unsure at all n locations
agcttactggagagagtngactggtttgtcgatgntgattggncaatctttgatttttcaggtcttcatgattgactatggtttcttcttgcccatgtagatatgaaatatttatcactgaaatacgcgcattcttctacttatatttgccttcgattatgcgttgtacttattctgaacacaagtgtggcattcaaactgcccgttggcatgccactaatgttttttcccctctgtgtcaactgtgaaaagatcttttgatcgcgttggacacaagcgtgatgggcatatttgtagagcttaagaaagaagcaaatgtttgtcattccccatttcacgtgttgctca

SEQ ID NO: 35156 - DNA, 149 bp, Oryza sativa
actcaacttctacatcccccacgaattcgtgactgcgggatttccttgttctctggggctccagaactggacaccatgaacaacgagggaacggatcccaccattccgagcttgggtgctgccaatacagcggcctcaacattagagga

SEQ ID NO: 35157 - DNA, 328 bp, Oryza sativa
agcttgactgtcctgggaggtttactcccgaacttgccgaccaattcttcgtggcgaatccctttggtgaaagcggcgatgataacgtcgtcggtgatgtcggagatcttattacgttgttcagaaaatcgccggatgtaatctctaagggattctccggacttctgaataacgttgtagaggtcgtattgtgtgccgggacgctcgaaagtgccttggaagttggcgatgaagtggtcgcgtaattcggcccaagatccgattgtaccacggggcaatccatggagccaagatcgggcggaatccgctaaagccactggtagatagt

SEQ ID NO: 35158 - DNA, 402 bp, Oryza sativa
  unsure (1)..(402): unsure at all n locations
gaactaanaaaccccagccagccctttnacttcctgactttcgcatcctcttttagaggtgcattgtacctcatatcataattaaaaaaacactagactataagcgaaacaagaaaaaagtagcatgcagtccaacagtcgccgatctcttcgtccaagtagtgccactacccaagttgccctagtcatttaagagaatctccatgaaacaggggacagtcctagataacaagggaggcatctgggataacttttccttggtaacagggtgtagggacaatacaatcatgatccattattgtgctttaaaagagcgcgagttagacaagtaaatatcacatattataccagcaatgcatcatcgaagaattgtgttgcttttgaaagctggccaggatcttc

SEQ ID NO: 35159 - DNA, 313 bp, Oryza sativa
  unsure (1)..(313): unsure at all n locations
agcttatctcttacgctctatgaatggatcagtcagaacatcaccaaccggccgcctcgtctgccgccgactggtgcttccgcctgcacggctggcctttaatgccgccgttgttgggcgtctacgtcttcaccgaccgacttgtcttcgccgccgccgactggtgtttccgcctgcacggctggcctttaatgctgccgttgttgggcgtctacgtcttcaccgaccggccgcctcgtccgccgccgactggtgctttcgcctgcacggctggcctttatgctgncgttgttgggcgtctacgtcttcaccg

SEQ ID NO: 35160 - DNA, 387 bp, Oryza sativa
aatactcaagcttctcttactgaaggggggagaaagatagagcttgtattttttcaaccacaggactcagctagtcacaccggagatgcacaattaatgcaaaagaattcaaggggataataatataggggttaagttttgcagcaaacagcatttaatagtcacttatttgcccaaagctattttgtaaacacgatcctagagctatacaatattattaatcaatggcgtgaaccctcacgaacctgccttaacccaaggcctacgatgatctataccgaaactgcaaccctaccctgggtcccaactcgtcccagccaacccaaaccaaccattcacattttagttgttgaacaaattttaagaattaaacactgactgggtaca

SEQ ID NO: 35161 - DNA, 356 bp, Oryza sativa
  unsure (1)..(356): unsure at all n locations
agcttcccccgccacattttctgctgctcccgctcccgtcttcgctaagatcaacagaccacagagctttaccgccctactacccccgcgacgagcgaaagcggagataaaaaaaaaaattccccccctccgagacctacctcttctccgcctcctcctcggagggagacttcttcttcttcgcggggggcggggggaggtccccggcgtccgcatccgcgtgcgccatggcccggatctcacggaacctgtgggggctcgctcgccgccggcgtctaaatgggggaggggaggggcantcttctttgtttcccacatctgggttgggtggctctaggctgctggttatattaaaa

SEQ ID NO: 35162 - DNA, 391 bp, Oryza sativa
tgccgcgaaagagaaggaggggctcataagattgtctgcttgctttgactttttgaggtttttggatgaaaggattacattttttcaattggaaggttgttaccttagagatgaaaggtttatatttgaattaaaaagtttggtgatttgatatgaaccgtttagatcctgctttggaaagtttgtaattttttaaatgaaagcttcataattggcttaaaagttttcatgattttgagttgaaagctttgtatctttgaattaaaagttgtacgatttcaatatgaaaagttcataattttcaattgaaaagttatatgaatttcggcgatgaaagtatgaagcacaaattaaaagttttgatatgtttagaatttaattggagtccgac

SEQ ID NO: 35163 - DNA, 362 bp, Oryza sativa
agcttatcctaaactactagaattgattgatatgatctataccgtatacgacgtgacgcgcgttttttttcttcttaaaattaaagcactttcggtaaacgcggcggtgctcaatggctttgctcatcttgggcaggttacaacacgggaactcttctccggccccaattgctctcgtgacgagtgaaaaatcagtgaattaggcaatgcccaatggcctcattttctgttgtcttatcggttttataacagaacaaacacttaatggtgggactaaatgaaaattgttaggacaggaaaaaacaaaatttcatcttaaaatagaacatatgtatatgtaaagaaatattattatgaagtaa

SEQ ID NO: 35164 - DNA, 362 bp, Oryza sativa
  unsure (1)..(362): unsure at all n locations
tgtcctcgggtcagtcactccgtcgagcacttggtgagttctgagttttccgngagctcgggttaagatcactggggatggcgggcaatgctgatcgtgctaacctctcaatgtttgttaaatgcaacacctcgtgccgaggctgatctggtggtattgcccatggcctcaatttggttcgtgtgaaatgtggactggaggcagtattgttgaatcggtgatcactatgtagtgcttttagcttgatttcatatgctagctatttcagtgactagctgcgcaatcctctccacttccacatcaaggtttgatgtttgagttgatgatctcatcactcatgtatgatttgctagcctggcttc

SEQ ID NO: 35165 - DNA, 358 bp, Oryza sativa
agcttctgcccttctttgtcagttatattaaatactgaaaccaaatagggatttagttaaaaaataaaaaataaaaaatgaatatgtaggtgtaaactaattagtaaactatatgctttattattaccatccatgacccatccaccatctgaggttatgtacgccttacttatcacaagattcagatcaatcagaacttggattacttcaaggagaatcccatactcatttgcactgtctacctatgcaatttaccaccaaaaccgaatcagtatctattctcactaaagagatgaatcaagaatcttcatcaagtggattaagaatatcctgcagatgatagtagggccattattca

SEQ ID NO: 35166 - DNA, 395 bp, Oryza sativa
tttaaccaagctcttacaagatcttaccaatgcaagtggaatggttacatacaccgactcaaccaagcaccccaatggaggttggatgtatcgatgccttggcaaacacttgcggtatggctgtaatcaaatttgtggagctctgggtaggcttaaatatgtagcaaaagaatagcaaatgctcaaatcagataatgcaaagttgaataattgttcaaagtcaagtaccgtgctggtcctaagctagaacatactagagacgcgagcctagacacaaacgataccacaagatagcactaggaacaactcatgcacaattctgatatatgaagttcagctcaatgataacaaaatgaatttctccttttcttctttctttctttctcttttttttt

SEQ ID NO: 35167 - DNA, 358 bp, Oryza sativa
agcttcacgaatcttcgagaaatccttgattgatgaaaatccgcaaccgcaattatacgcaaacaataaaaaacctaaacaaaagaccgaaagaaagaccctatttagactaattaatagtgccattagatagatctcaattttacggaattattggaagtggaacggggtcaatcggaattacggatcaggagatatggattttctaaggttgaatggattttctaatcaaaggaaaaggatttaattaaaccctttttgaaaaagaaagaaggaggggaaaatttcagactttctcaagcgcttgggcgcggcccaatggattttagcggctcggccgagccattgggccggcgcg

SEQ ID NO: 35168 - DNA, 376 bp, Oryza sativa
tcgaaccaaggtcctctagctccaccatcttgtggagctttctggaagacgcctaaaacgtttctcataacttatatggttttacttaacttttttcttaaatgaatgatgctcttgattttgtggatgtaatgttctttcgggaggaaatatatgaacatttgaccattattctattctaaaatttaatgcaaatatcttaaaaacataagtaatactcaaagtaactttaatgataaaacaggttaggacaaaataaatattacttacatattctttcaagaaaatgaatacttatataaaattttaatgaaacggatagtccaacttcatatccgatggtcacaattaacagcaagcatttaaaaacggaatg

SEQ ID NO: 35169 - DNA, 351 bp, Oryza sativa
agctttccgaagagcaacccctcgttttgtttcgcagctcgattcgatcgcctgtgcaggaggtggcggcggcggcggggacgagcattctcatcaagagaactcgcggcggcgatgatcaaccgagtggcgctccgcgtcgggagcctggcaatggcggtaggctccgtgtgcttgggtgcaagttcctgaccatggtgctcgtcgtcaacatcgtgcagctcaagcttgtccgcctcggctgctcgcggggcgccggtggtgggtcgccgtcgtgccggtcgtcgatcacgctggtacccaccggcatgctgaactacatcggcgtctgtacttttttacacctccacc

SEQ ID NO: 35170 - DNA, 353 bp, Oryza sativa
tctacatcccccaccctccccctgacggtcccagcaaccatgaactcgggggctccagatctggacaccatgaactcagaggtcgcggatccaaccatcccgagtttgggtgctccagatcctgcggtcctagcttcagcgacgccagatccgttcgtgaggtaagcgatccgccgtccacaccaccccacgttatcgaggtcaacctgccgtggggagagcaagcgtcggctgtccccttccaccccatcctcagtagtcactgccgcctcatctattttacttagtttagtgctaagcagaagtcaccctttccttctcttgtatccagatctgagcttgcagtcaaccga

SEQ ID NO: 35171 - DNA, 350 bp, Oryza sativa
agcttggtcaaaagaaggatctttttcagctttaagtcagattctgaagctgaagctatcttcttttggaaaagcgatctgccgaaaatccagctctttcagtttctccattaggccttccatgccctgagcgtcctcctctctctctctcgctgtgatatctcacggcgcattgaagaattcaggatttaaagtggcaagtgtgtcttcactgcttttgcttcctgtcgtcaagtttgtggcttctgcattggctgtcatcaatccaaagctcatactctgttgctactgacatacgtcgttgctgccaagatctgggttggcatgctactgtgctgctgtttatcttc

SEQ ID NO: 35172 - DNA, 352 bp, Oryza sativa
agcttatcaacctcattcttagaatagggggcatccaggatttccaaaccgtcttgtgaagggattaaagaagggagatcaaaaggcatacattcaaaacaagaaattcccatcctcatcttaaaagcattccaagcagtatgggctttaacctcatgatcagagagggttgacccatccacatcaaccaaaatagctatagaattcttcctgtatgattcagttgccattgcatggaaaaaatttgtgttttcccctccaaatttagcccatctaatagtacaccttctcttccagtatgtttgcttatatttctaagtatgtaagcaacttatatctgacaaaaactctg

SEQ ID NO: 35173 - DNA, 368 bp, Oryza sativa
tctcttactgaagaggggaaagattgagcaatattttgtacaaccacagggctcagcaagccacaccggagaagcataatttaagcccgggagtaccacgggattataatattagggttatagtttgcagtaacaggctttaagagtcacttaattgcccgaacccattgtatgaagacgatcctcaagccactcagaattaattaacatggccgcgaaccctcactaacctgccttaacccatgggctacgatgattcaaaccgaactggcagccctaccctgagtcccagctagttccaagccaacccaggccaaccattccacactttaggtgatgagcaaatgctaacatatttgaacactgac

SEQ ID NO: 35174 - DNA, 328 bp, Oryza sativa
agcttcaagaagtcctggactttcttgatcccctcggcctccaatctcttgtcgattggcccatctttgcctatgttcctcagcctccaaacgttgtccgtcagcaaaggagggaaatgcttcttgtacactgcaggtaaaaggaactctgtgattaataatttgttccttctattgttgtacttaatatgatctgttcatcgaacttacattcgcctcgatgatctttgactgtgaagctctcactcactgcctcttggatcctcaatccgcaactgtctgtcagcatgacaacgcgcacaccgattctgaacttcctgcttctgat

SEQ ID NO: 35175 - DNA, 391 bp, Oryza sativa
tcttgagctggagaagaaagccgacataaaggattacactatgggtcggcttgattaatattggaatatgttatactaataatattgtactgatcattttgatatgtatctactagacttttgattcaataaattgtttgttcaagtattataacatttataacttcaatatgcaacatttataacttcaatatatcagtagcgttagggatttaaacattaaaatctatattttgcgataattttaatattaaataagtagttattgttatgcattgccttaaatcaatggtgactacagcattgtggtcaatcgcgtgtaaatagtacgttactaaggatggcctacctgataaatggcacgaaaacaagaccacaagatgggtcttac

SEQ ID NO: 35176 - DNA, 330 bp, Oryza sativa
agcttgtgcgctggcatgccgaagaactgaaagtcgatagtatgctgaggcacccaacagattcagtacagtggaggacaatcgataggatttaccaagaattctcaaatgacccaagaaacatgcgtttcgcaatgtgtacggacggcattaatccttttggtgatttgagcagttgtcacagtacatggctagttctgcttgttaactataaccttcctctctggttgtgtttcaaaagaaagtatattatgcttgccatgctcattcaaggaccgagacaaccgggcaacgatattgatgtgttccttgaaccgataatcgatgact

SEQ ID NO: 35177 - DNA, 393 bp, Oryza sativa
ttacagacatctcgtcgatgaggcaactgctactgtggccgttcctgcctccatcttccatgaatcacatctgacagacgttcacatggcgacatgaacccccaaggtcattgatttataggaagggcagcaacaaggagggaagggcgggtcgcaaacacatccccgcggccgtcgcatcactaccaccaccgacgcggagctagagaaggggtgaagcatattccgtatgcgctcgcccagcagcatgagcccttgtggtcatcgattaccgaggaggaccgtgacagagagggggagggtgcgcgtcaagcattgcagctagtcactacgacactgtaggggtggataccgagctggctatgctcggctcgttatgctaaagagctaaaa

SEQ ID NO: 35178 - DNA, 351 bp, Oryza sativa
agcttccttctgattgctggttgattcggataacggtcttctgcttggtatcgccctcctgaggttgattgccctttgctcggccgggagtaggtcggggagagacacaacttcttctatcgatgacaattctttgctgaggctgtcggtgcaaagaatggttggtgctgaaggtattattgctatgatttattgcagagtcaagtgcagcgggaagagcattggtgctgtggatgatatcgtcgatgttgctgttggagctgactagctgatgagacaatcgtagggttgttcgttggatttctgcggtcttggtcaacaacacactgagttggcaatccctgggcacat

SEQ ID NO: 35179 - DNA, 316 bp, Oryza sativa
tgcggaagtatacatggccagagtggtgttttttgtttttgttcctaagaagatagtgtcggatagaggtagccagcttacttggaagttttggcagaaattacacgtagagatgggtacccgtttgaatttcaaaaccgcttatcacccttcaacagatggtcagactgaaagagtaaaccaaattttagaagatatgttgagagcctgtgttctaaatattggtggaaagttggatataaatttgccgtacgccgaattcttatatatcaacaggtatcaagctagtttgcaaatggctccgtatgaagcatta

SEQ ID NO: 35180 - DNA, 354 bp, Oryza sativa
agctttaagagttggggagtgtacttcatcgtgtaacaaagagggcatgatagatatctatcgcccatcttgagggggagtgttgagttatgtatgtgttggcccatgaagcccatatactactcatatgtacatgtatatagcagagttagaaaaatgaaaaaagtagtgaagcttctagagaaaaattcccaaaacttcatttaatatgcttcagcaggatctcgaggaaaatatgaaatccaagaggttcctgattgttttggatgatgtctgggatgtcactactgactgttggaacaaactactggctcctttaagagctaatcatgttaatccgtcaaaggaaaaagt

SEQ ID NO: 35181 - DNA, 385 bp, Oryza sativa
tggaaactctgtgctccactgcttttgttgtggtgggttaaccggcatgaccgccggcacaaagcgcccgcgggcgatgggcatgggcaaccatccttacccgtcatgtaataatgggtatacccacaggcacaaataatctcatgggcacacctacccatacccgtgcccgcagcgcccgattgccatccctagctctgataatgacagtgcggcgttgaaagagcgcgcttcttcggttcttcccgggaggggaagaatcgtctcgcctaaacaatgatccggttcctctatagtaacctagacggggattgttgatgcgaagagaacagtgaataaatgcagtcaagtagtaacactttgatcccttcgccttaaaagctct

SEQ ID NO: 35182 - DNA, 345 bp, Oryza sativa
agctttgctctcaaagttcattcttgcattgctagtttacctcaaattcaaacacttagctgcataaaacaagttgctttggtgaagctaaccagcgggtgaaacttttgttatgttaacccccgccgagttagtccattcttgtttcctttgtgcagaatgaggaggcgactgtctcgtctatttaaaaagggacccggctctccgttaagtcatcatgacgagtctagcactcattcatctgcagacatctcgatggaggatgctgacgttccgtaacgtctcttgagcgacgccgacctcgaccttgtcggtgatcaggaaaaacaagcctactacatgctg

SEQ ID NO: 35183 - DNA, 362 bp, Oryza sativa
tgacttcagcagcggggcgactccactccacattgtttttcttgacggcagcgacgaaaccaacctctataagacaactccaactaggaagatcttcagctctggtgtgggggaaaaaagagcaaagctgagtactatccactgtactcagcaagtcataccacaagaggacgtatgatgcacgatatatccaaaggaggctaaaggttcatttgcataaagcacgcatttaaaaacagtagttgaaagcagcaaaacaattgtagtaattaattaatattaaccaatcattgtccaacgctacaccacgctgcaacaggcccaaccaaccacttaaactacaccagttcattaagctaaac

SEQ ID NO: 35184 - DNA, 359 bp, Oryza sativa
agctttcttcgccttgctcaagaagcatgatatattcaagtggacccaagaggccgagaacacgttcatcgcgctcaaatgctacttgtcaaaccctcatgtactcgttgctcctcaaattaatgaagaattattcctatatatcgctgctacgccttatcctgtgagtacggttatcgtcgtagagagggaaaaagtacaacatcctgtgtactgtgtcagcgaggccctccatgacgcaaaaactagatatccgcatattcagaaactgctctacgctatggtcatgacatcaagaaagctacgccactacttccaagctcacaagggtactgtcgtctcctcctttccttttgggg

SEQ ID NO: 35185 - DNA, 381 bp, Oryza sativa
tatcaaagctagaaaaagacttgccgaaaatttttatgttcgcagttcatccgggggtatattgaatattccttcatttggatcagtattttaaatggggtgtaataatcgatttaattgcatattgcacatagtggtcaaatttagtagccatgtttcaagttgcatgcttcccttttgatgatcacaattgccctccgatacaacttgtcatatcgttctgccatagtgcttactcttggttgaaggaagatatagaaaatgtagtggttgttcattgcaaagctggaaaggcgaggacaggattgatgatctccagtctgctactataccttgaggtaaaattgggttcacattaaattaaatgataattatgataca

SEQ ID NO: 35186 - DNA, 356 bp, Oryza sativa
agcttgtgcgtagtttgtaattaattttgtggcgtgccagtattcctataccaccttttttttttctattttaaaaggaacacaacgaaaggccccggaaatttctatagcacctttggccattcgcttgcggttaagacaagtgtttctatttagattgccacactttagcaagaaatgtttggcatggacaatatgtgccaccataaaaaaatgtttaaaccagacttgtttctaatgtcaagtggatttgggtaccataaatcatttaaaaaacacgcacaatacaaaaaggcaaatagcagaatgatcaaaaccaatgttagccaaacaaatttgcaattcaatctaaacag

SEQ ID NO: 35187 - DNA, 373 bp, Oryza sativa
taccgcgcaagccaaagggcctccacggccatgttgtatccttgaagtgtgtaacatcgattacttgtggtctctttggcacaatttgggccgctagccttcaggagagatagaaaagaaagtagaaaggaataaaggagagtcactactgtaggatcgaatcacaacaactaagccaaccagaggggggtgaatggttggtatcataataaaaaaacccggaccggtcatcgaaccgcttggacccttggttcatcggttcaccggttggaccgctgggtcaaccggtctaatgctgaaccggaaccatcatatattatgcataactcccttcaaacagggagctcatgttaacctaatggtgaagatcaca

SEQ ID NO: 35188 - DNA, 370 bp, Oryza sativa
gatccttaagtcacctgagctgcagctgcctccaatgagcattttgtttcatgggcttcagcagctcagccaagaaagcagttggtagagcttgcgctttcgagaacgggatgtcaggcacctccacccaaattcctgtccttgggtcaaacacctcggcggattggagcggagctaacccgttcttgcctttgctgacaccaccaacaacatacagcttgttgttcagcaggctagccttgcagaatgcgcgcccggtgctcatcgagctaacctcctgccacgcattgacaaaaggatcataccttcatacacatttcatcgccgagcctctagagaattcacctaaaacatagatgcacccggtgac

SEQ ID NO: 35189 - DNA, 339 bp, Oryza sativa
gagctctgttatcaagattacatagtgtttatgtgtgagttacagtgactgatcaacctccattttccatttatccattctgattactgctattattttgtcctagatttctgcttctcactaacatatttcaatcaacttatatgtaggccaactcttactgctggttctgtaaaacttaacgttgggcaatttgggtcagcactacagaaatcatcaatgtcaagggaggactataaaaaagctgttgttcaagcaaaagagcacattctagctggtgacattattcaagtagtcttaagccaacgttttgagaggcggacattagctgaccccttt

SEQ ID NO: 35190 - DNA, 398 bp, Oryza sativa
taaaaggggttaggattgtgctatttcggggggatcagtgttgtggtacgcggtatgatgtgatgtattgctgttatgtaactcgaggcggtgttcagcgaggtcgggccggtgaggcgctgcttcatggtcgcgccgaaaggtaagagaattcacgaattccatggctgtttagccagagatgtttggtgtttggaggtgcttattattaagggcttcgcttatgcgataatgtttgtttctaatgcaaggtccgagacgagccgaggctttggattcgtacagttgtaagtatcagtggttgcttttgaagtgtttcaatgaaaatgcgtttccctttccatatttcagaatccacactgctttgatcggagtgactgtctaggagcaattctcat

SEQ ID NO: 35191 - DNA, 307 bp, Oryza sativa
agcttcgccgcctccggccgtcgttccatcagccgtgcgccgtcgcctaagccgtcgccctcctgtcccgccatctccatcggctccgcaaggtcgagctctaccccgtccaccggttccccaccgccgagtctcgttggaagtcgctgtcaccgtgaaggccgagttcgccgcctcggtttgatctccggccgagcgtcctcgccgtgaaccagtgggttgccgccgtcttttgatctacagccgccgttcgccgtcgtcccggctgtccctggtctgagctgctccctccttcggcatcgcagca

SEQ ID NO: 35192 - DNA, 343 bp, Oryza sativa
agcttactcaaccggcacaatgaaaagcgaacggtcagcaaaggcgaagaaaaggaagggcgagagaagcgtgaatagaaaggatgaagggttccatgttgttacccatgtttcgcctaaaggagagccgctcgcccctaagacggcacgtgcgaaattcagttcacagtgtggcataatagtaagggaaaagatctccatcacggtcaaggactgggatcatgtatcggatggggataaggaagtcctatggaaagagttgaagaaaatcttccagttcccggatggatcagaggcagcagtgagaaattgtgcactgcaaacaatggccaagtcttggcgt

SEQ ID NO: 35193 - DNA, 313 bp, Oryza sativa
cagccttcatgacaaagcaattttattgtttacacaagtttaccatatgcccacgaaaggggtcccaaaccaacaacaagttaagtcccacaccatactgtgccaagaagcccaggggttctcctcgacaccaccccggcgaatccacatgtctcttggcatcaaagctcccctgataagctagttactcagccaggggtgtcccatttcacccatgaggtcgtactttgtttatgttcagatgaaaattcaaggaaacagtccttatatgcaagagcggaaaaccctacacccgagacgttccccggtccgt

SEQ ID NO: 35194 - DNA, 391 bp, Oryza sativa
  unsure (1)..(391): unsure at all n locations
tggtatccgccccttctcatatgggctggtgatttctcttgtgtacgacagtgggtcagtcttcagccctgaggtgctcgacctcactgaagaggacctgatggagaagtttgcatctggtgtttcgatggttgcctcaatgtccctggcaatctcatacccaactattgctgctgcgccacacatgttcctcaatgggtacaagaatgtgcttgctgttgctgtggagaccgaatactcatacccacatgctgataagatcaaggagtatttgaaggtaacctagtttctatttcataatttcccttnttgatgtctaaatgcgtaagaattgtctaaggtagtctgataattagatggcggtactaagctgtagcatgcccatgtcttg

SEQ ID NO: 35195 - DNA, 353 bp, Oryza sativa
agcatggcagtaaggccattttcattccaagcaatatgtctggcacattggcacatgccaaagtgcttggcgtgggcttcatccttcccgtagcccacatctgactaaacaaagaaagggcattcttgctttaaccattttgatcatacccgccgctgatcatcgcaatccaagagatcacgttcttcctcggcatcccctcaaataatgcataaaagcatcgtgggcaccaccgctgctgcaatacacagaaatcgtggcattgcagcatgcgacacaccctcccggcccgcaagaacacgccaatggccgccgatcaaaaaacaggatttcagtcccgcacaagcaattct

SEQ ID NO: 35196 - DNA, 391 bp, Oryza sativa
tgaggaggcacagttcagatacttcaattggtgtctctatgaattgcagcttttgatctttctgttgaagaaatctatatccacccgtagatttctactcttttctcccaggattttaaattttgaagatcttggccttaaacaagtagagctttctcttattcaagcagctttggggaacggatggctagttgttcagaacttcagatcacctcaatagcacagtcctgaattaggaatacatccatttcattcagatatgttcaagaaagtttagttctctcttattgactaaatgacttgtatctctacagtccccaatatcagggactagctagtggaccatggacagacaacgagatgaatacaaggcagagccatccaaaatatg

SEQ ID NO: 35197 - DNA, 301 bp, Oryza sativa
ctatcacatcatcaccgaaccaatcaaaggtgcaggcactagaacaacgccagctatatctcgccacaatcaaaatgagcagccacgtttggggctcccagctcgctgcttatcatggaggaagccaaagtttgccgcaatcatgtactacaaaaatatactcatgtgtataaaccgcgagcttgctatgcttatggatgatccatgttgaggaaaccacgtaccgatgtcaatcaccgtccctttttgtttaacgcaatgacatggattcgcgggataatggacaaacgtggaacacaaa

SEQ ID NO: 35198 - DNA, 345 bp, Oryza sativa
agcttgcaaagttgctatcctatattccaggcaaaaataaatggtgcttataacctacagtttaaccaaaactgtgcatgtgctctggattctatgacagatccaataatacaagcagacccatgtgcgcatggaacgtgcgcacacatggatagaattcattccctgattgcaatttacatatatgcaatcaactcgataacacacgcaatggaagattataccatgctctgacacacggtcagtataatacgagaaaacttcagacaccagcagggaatttctgtccagaagtatgagtaatcacacaaataaagaattcaattatattcagatgcatgactg

SEQ ID NO: 35199 - DNA, 388 bp, Oryza sativa
tcaacgactacgagccccaagtaacttgtttttttttaaaaccttcaagtaatttaagcagtacagaaataaataataaattggtgggaaaataatccatgggttgaatggaagccaacagacctgaggtgaactacaaaagcgtgtattcatggatcatccaagtccccacagtgtcatggattactaaaaacctgatgcaatacagagtatttatgcatcacagtgcagctattgcaaagcaagtttttatctccatataaacttagccacagagaagcaatggcctgtttgggtgtcctgtcttcaggcatagtatggctttctctgttcaccatctttgtcagtataccattagctaccagtgatgatcatgaaaatgatcgac

SEQ ID NO: 35200 - DNA, 325 bp, Oryza sativa
agcttgttatcaatcacaaaagttgttccaaatcattgtaactccacaattatgggatcagatatttgatgttttacaatagatgaatctgatgttgattaatacatgtggctttgaaattaatgttttatcattggatctaatgaagattgaccaaacctttctacagttctactgtaatacaggcactgcctgtttggtaggcaactgggaagcataagcaatgaacctgcaagaaaaaaaaatcattgtcctgcgctgtaccttgtcagttaattggctgtttgatgtactattttttttctttttttaaaaaaaataactg

SEQ ID NO: 35201 - DNA, 388 bp, Oryza sativa
tgttaggaatttctgacaaccgcttattaatggtgtgcgatgttcgattgattagcctgcttgcaccgaatctatggctgagccacgacgttttcagcattcatccatggatcgccactaaattttcatccaaaggataagaaaagtgattaaaatttaaaagtcccctaagatccagatagcccctaattttcatctaaaatgtcctcggtcacaactcacaagtgtcacaagagaccgcgatgtttttaagcatttatctatgcaacgccgctaattttcatctaaaggattaaaaaagtcattaaaaggtcatctagaatctaaacagcccctacttcgcgttctcagctttcgttgattggtaatatacttctggtccggatga

SEQ ID NO: 35202 - DNA, 352 bp, Oryza sativa
agcttaccaagttcataaatgtttttttttttgcatatataattcagatgaaattaatgtctatgcactattggtacatatgatgaacaaggatgcgacttacatacgtacgtacctccggtgagcagggcgatgtgcagcaatgtgaggaggacgaacaaggacagaagcagtagcaacgagatcgagcagcaatgtcgccgccgccgccgcttcatcccttcctcctttctcatttgctccatgcatctatgatctatctctgccttttaattagtttttgacattatgaaattgttcgatgggttaatttacagaccaaatgcatgacctgcacatggcacttgcactg

SEQ ID NO: 35203 - DNA, 394 bp, Oryza sativa
cagcttggggagaaaactatgataacaatatacaatgttattatacaagccaaacacccttttagattggtttggagatttttatttgtcatatcaaaaaggaaaactgggtgtgctaaaaccacatgaaagttttggcactaaaattttaacagcatagaaattgaaagtttgaactgaatcgatggtaaaaaataataacaaatcaaacacctatgagcatataatactgtgaaaagataacaaaattttgatataacaaagaatggcggcttcaatggaatcaattcgttactctcacttcgcatgaggaaacaggtttcagtcagccgagcagcaagcatttgatatggacagacattttggggctgtttagttccaaaaactttccaaa

SEQ ID NO: 35204 - DNA, 357 bp, Oryza sativa
agctttatctatcacctattcgatctttttgcgcgctacgcgttaatctaaccatggtggtggatgataatggaacttacaacctgggcaagagccacccgagaatccagccgagaagcattccagcaccaacgatgcctacaccgaccgcaaacacgacagccttgcgcaagtggctgtccttgttctgcttccttcctttcttgcttgatccatccttcctttcttgccctggcgtcaccttttctttgagcatgatccaggggagttcagggaacatggctgctatctggagttccttcaacctgagctggaggcatatgttctccagctgcagcattttcagccattgcttgc

SEQ ID NO: 35205 - DNA, 347 bp, Oryza sativa
tcttggtgtgagcttaaaaaaaacaaactgttttcttatttatatgggcatactaaggcttatatttagacctttatctacgaaatgaacgtatatcaactaaacaaacttcttggtgtgaaaataatcccccccggttcaagtcctaaaattgacataatgtgcttgcatttaccactaattattattatggtcagtggcttatatgccattgcagtatggggtcttgaatccccactcactactaaattctcttgcatatatttattttaacagaggactatcattttgtatagtttgttcaacccttctgaaaaatctttccataaccgcctctgattctattt

SEQ ID NO: 35206 - DNA, 340 bp, Oryza sativa
agcttcgcatctttatcaatattcacaaaccaacgagcaattcctgtcttgcactgttatattattatccatgcattggattaaaaacaaagagcaaaactccctgatggttctcttaaatcaaaacattaataattacaaacaggcagatctgaactaaaaattcattcaaatttaaccttgagcctcacaccgttacaaaacggagggagtagtattcacaagccgcgtagcggttccactgtttacaacgttgtgtacactacatacatcggagtactgaatcacaagaccacaaagcaaaaattggctgatggttctcttaaatcaaaactaattc

SEQ ID NO: 35207 - DNA, 389 bp, Oryza sativa
ctttggttagtgccccagttttggcactgcctgacttctaaaaactttcactgtggaaacagatgcctgtgatatgggaataggggcagttttgtcacaggacaggcaccctattgcctttgttagcaaagcattaagtccaaaaaccaaggggctgtctacatatgagaaggaatacctggctatcctattggcagtcgatcagtggagatcatatttgcagcatgatgagtttgtcatactcacagatcaccacaatctaatgcatatcactgaccaaagattacatactccgttgcaacataaggctttcactaagttgatgggactgcagtataaggtttgttatcgaaggggaacctctaatgcagctgcagatgcattatcaa

SEQ ID NO: 35208 - DNA, 357 bp, Oryza sativa
agcttaaaagttggaatgcctcattctacatacttttgcagtatttgacttcgtctgtctcattttctgctttactaccctgtagatcaagagcttgaatgaccgaatttctcatgaaagcatatccttagatgaggaaaagaggttggtcaaagaaataaaacaacttaatggaaccaggtcaaaggttattgagaatgctgctaagagagctaaaatgcaagatacagttgttgagagaggcacaatacatgatcaggtcaaagtaagtatgtccaaatataaccttgtgtttatagcttcatgttctactggaaactgaaagctcagtaatggttccatttgattttaactatt

SEQ ID NO: 35209 - DNA, 402 bp, Oryza sativa
tcgacgactttcttgcatttgtaaaaactacatggcaaatttgcatctggaggcaacatttctttcataaccttgaccagctcatcaaagcaagctacagacatattatggtctgattttattgtcaacaaccgagagactgcagataattgagagtgttttccacacttctcccacaatggcttgtctgctgcatctaacatatcaaaaaatgaagctgcttcaacatttggaggctcttcaatattttgacaaaaattaagccctacggcatccaacaccatctcatctatatgatctgactctccataggcattacctccttcattcatctcattgtcaatactgccttctggtgtctcactggtatcagcttcactttcaccatgtctactccacaca

SEQ ID NO: 35210 - DNA, 370 bp, Oryza sativa
ctgcaagcgtgcgagcttgcccgtcgtgagtggagatgtttttctactcctatccccagtctattttcggaggcggacatccaatttcacctcgattgatatttttgtacgcgatcattaggctataagagtcatgtccgcttgcgaaaataatacccttacgtcgggaaaaatgcttttttctactagtgcgcttcatatgattatccccaatttgtaatgtcaaatcttgaggatatatatagactctaattgtcatacacatggatataatgggaatcatatattatttatacagcgatatacatatattgccagacaaatccaacattattactccggggtgcccattatataactttgcatatat

SEQ ID NO: 35211 - DNA, 355 bp, Oryza sativa
tatcttcattatttcagaaaaaaaaaagatccgagcatcttctatgtcatagcatacaacaaaaacaaaaatgggaacacatagcatagaacaatacaagacacatgaaccgtcctgaaaaattcagagcaaatacactagatctattaactcgtccagcggggccatggccaccaagacggagagcagcaggtacaaggcaccaccagcagcaacggtggtggctgcaagccggcaacagaaggacgaagaatgacgaaggaccccagcagcaacgaggagccctgatcgaagtgctgcaatcggcaccaatccaaccacagttaccactgtgatgagaactagtagtgtgcat

SEQ ID NO: 35212 - DNA, 352 bp, Oryza sativa
agcttggatccaatggtcaatataatttaccctcatatgtctgtgttaataacaagagatttgctatatttaagggcatatgaaaatttgtaatttttcagtcacctaaaattacacattgctgagcttaaaattgtagtgttatgcaatgtgcaactttatttcattttatagttataatttattttcatctgagtttgaattctttttacatggaattttataaatgtgcgtaattgtaaatttatttcattttaggttagtgtaatttattgattaaccttttatatatggaagaatgtttgttgctttgaataattaaaagtggaggtgatgagaaccatccaattgc

SEQ ID NO: 35213 - DNA, 393 bp, Oryza sativa
tcgccttgaagttaaaagttttaattttttgtattattctctttcagaaagttttaaatgttatttaaaagtttaaattttacgtatagaattttcaaatttgtagtaataaaaaggaaacaatgttcatggaaaaagagaaaaagaatagtcaccgtaattcaaatcgtgattaatcaaaacctgattacgctaatctgatcttatctgctgcccatgtgaacgtgagtatgtccggatgtccccacctccctgcactgcgtagctgtgcaatcgcgtgatgggctgggacggaaccgcgcgcgactttctctggcgcagacgcgcgctatatgtaattcgcactgggggatgcgaatgcgatgcgatgcgatgcgatcgtgtgatgcgggg

SEQ ID NO: 35214 - DNA, 353 bp, Oryza sativa
agctttatgttcggcgcagtactaatactggaacttatgagcaagaattgctctatcaatcaccatctactttagacatatcttctgaaacttttttcaaatccaaaagtccagtatcttcctacaaattagtgaattaggaggagctctttgtgccgaaaaagaaagagcagggcaatatttcaaacttgcattcgaactgcgaaatatttatacaaaggaggagagatcaagataatgcagcagggttggttatctaattggctagtcaaacatgaggtggttcatagatctttgggcttcgatcatcgaggaatagagactttgcaaataaaagcagaggattgggattc

SEQ ID NO: 35215 - DNA, 400 bp, Oryza sativa
  unsure (1)..(400): unsure at all n locations
aactatanaaactcaagcttgtggctggtagtaaaacatcgaactttctttttatataaaattcgatcctcaactatttctcgcgatatcttcttacgaagttttgttagggcatctataacagcctctggtttatgtgggcaaacccgcaagtagacgtccacaggaattaacttatcaactccccgaacaggactataggaatccgtactgaacattccaccagtaatagtacaagctcccatagcaatgacgtattttggttcaggcattcgctcatataatctcactaaagagggagccattttcattggtactgtaccggctgttaaaattaagtccgcttgcctaggacttgatcttggtaccaatccataaccatcaaagtcgaatcgtgagc

SEQ ID NO: 35216 - DNA, 328 bp, Oryza sativa
  unsure (1)..(328): unsure at all n locations
agcttgcagcatttccttggtccatatgacttactggntcttgctattcaagggagaagcaggtgactcgatctacatggaagtggagcttcgaaggctatcattcctgagagatacatactcaaaggggagcacccctagcaaagcgatactaagcagcctgagtactttccctgttgcgaggtgcgtaaattactcgtttccatacattcacttcttttgtgccataaccttaaaattagcgccaaaccattacgagcaactcataagccccgtgctctgctgtaatgcancgcaaagaatctgcagcgggagatggagatgcttg

SEQ ID NO: 35217 - DNA, 357 bp, Oryza sativa
agcttgcatcggaggaggagtggttttattacgaataccactactcaaggggcattcgtgtttcaccagatatcaagaaggtgttgttcgactgtatttgggagtatatgaagttagcatacccagttgtacaacctaaaatggagacagatgaaaagaggaaaaagccatgctccgctcatgttgaaagtgttcgggaattagatgaagctttggcatttctcccaaagtttcaagagtctgttcttatcttgcacattgccacgaacgtcttctacggcctgtgcatcgaacctgatcaaaatgcggcatcattcaaacaactggaggcgatcaaaacgttgtcagactacatgg

SEQ ID NO: 35218 - DNA, 382 bp, Oryza sativa
atcattttcacactttacgtaatccgtttgcttctgtgatttttacatgtcccctcttaagggcttctgattccttcatgattttgcctattacacctatctagcttcatcttgagcctctcaaccctggcttcaaacaacccatgtttctgcttttctctcaaaacctctaactggatcttatcattttcacccttcatcatattcttggtgggctgaatttcccccaccttcatgctatggtcttccaataccttcatgatttctactttctcagaatcaaatgcctttgcatttgacctcaactagtgcgcccatcatgagcctctcaatgactgaccaaagcctatcattttcaatcaacgcctctacattagtagac

SEQ ID NO: 35219 - DNA, 346 bp, Oryza sativa
agcttatgtaacttcatgtattttcatgggtgattttgcatcaaagaattggaacattgaacccagtttgtttttccctaagcaatacttttctgagtgagtattttacacacgtttatcctcggtctgttttctgttgtttacagttgaacaatcttaatatcaatgctacaggttcatcttcagtgctcatatgaaagcgtttttgttgataaattcccagcacacttcattcttttttctatcatgagttcctgatgataaaaatgcacacttctcatatcaaacatttttttgtagtacctgaaattgattttactatctggggttctatttcctgtaaaac

SEQ ID NO: 35220 - DNA, 373 bp, Oryza sativa
tgttgttatgcacgtacagagtattaatttatacttatctctaacaacctttggatatatcctttacctagatctgacgtgtgggccatgtacccctaactaacctacactaaacatgccgtgaccactgaaaacttcaactctgtcacggcaactggattctgggacgcttttgatttttagcacataaaagggtgatgtgtgctaccggacaacgatggtgccttgcagctctgggcagtaatgttcaaggctgatctgttaactactatacaaaatagaatttataggctgatctaaatattatgcttcctagttcctacgaaatagcttgtaaaattttataaaacgggtatctcctatcaaccataac

SEQ ID NO: 35221 - DNA, 319 bp, Oryza sativa
agcttgagtttgtcaaacatttttgttcaaagccgttggaagatgcttttcttttgccactgaatgctgatacttatgaggaatttctaattttgcagtcagagctcgaacaaattcacttgcaagcgggatatggtgatcattggaatttcatctggaatgttgataaattctcgactcaaagactttacaaactatttttttttctttcctacaaccaccaaagccatttgtttgtatctagaaaacaagatgcgtgatgaaaataaaagtatttgcttggcttttatcgatggaccgatttaacacaagagatatg

SEQ ID NO: 35222 - DNA, 356 bp, Oryza sativa
cagcttgtttagttttttattcccagcaacgggaaaaccatgtgaaccgatgcggtcacaacactcttcctttagccaacccttttgcttcatcggctgtagcagcttgggtcttgacacgccactcctgccttggctttgtcctcttctgccgatgattaatctcttgctccacttcatgaaaacactctctgttcctcaatctttgaactcttctcttctgaatcttcggaaaataccagaaggacaccattgagtttttctgccctcctcgccctcttgatcatgatcctgatcaactgggcccaatctttgatgaacaggaaactcttgtcaacctcaaccgaatgttttat

SEQ ID NO: 35223 - DNA, 349 bp, Oryza sativa
caacttcttcaagaaaagttgtttaatacaaaggacaccattcatgctctaacattcttggtaaaataaagtaatatgtaagattggttatccaatttgcttgaatctacattaagacccaagaaagggataaccataataaactaaagcaaaatgtagaaaaggtgtaaacacagagtacacatgtcattttatcttaaaaagaacgttaggagagactgaaaactgtctacataaagcataataacgacatacacatgaaaaaatcggtcatacttcagcaggtaaatctgttaaaagccaaaaggcactccatctaaacagtacttatatcaaaaatactttctga

SEQ ID NO: 35224 - DNA, 401 bp, Oryza sativa
  unsure (1)..(401): unsure at all n locations
gaacttaaatctcagctgtgacacatacaagtccagacttagatttgtttttttggccaaactggcgagttgagatggatgtatattttggacgaatccatcggatagcccaattgtttgtaaccagatacccttttgtagtccataaaacggtttgttatttattccattatttagttgtatccagattttgacatccaaagaaaacttgccttaagaaaaccgtctgtctgctatcccagttatctcgttactcttctcatcatcacagcaaaaatgccaaanaagtataaccaactactcactccattgactttttaaatatgtttgatcattcgtcttatttgaaatatttaaggaattaattcttttctatcatttgattcattgctaaatatact

SEQ ID NO: 35225 - DNA, 345 bp, Oryza sativa
agcttataaatctcttcaccaacatacaagttatatctaatcccaaccatgtcaacaaggtccaaacaataacgtccatttagaaactataaactggtgaatctaattactgtttagcatgtagcggctagcagctagaactagactgctaatctatcataacaacaaattttagatgtcggtttggtgctagtacctagctttgtatttgtcaagggtcaaaaccaggtgatacttgtgttgcaaaaaggataactgctatggaaactgggacagcaagtgaagcatcaagcactaattctacctagcacataatactaccacacgactttttaagcaccaact

SEQ ID NO: 35226 - DNA, 266 bp, Oryza sativa
gcgggctgcagcgtgaaatttagccatgtcacaagtcaaagaaattatacggttcccatatgaaaatgcgttccacaaacagcttcaattaccgagacacattccatcgttacattcataaaagcttattctcctcgaatactgatgggaatcaatcacctatttcagaccactgcctttgtccggtttggaaatgatttcaaaaatttatcttcattcaaagttcaagaaagtggatccaacggcacatactcctaacatgtttt

SEQ ID NO: 35227 - DNA, 465 bp, Oryza sativa
  unsure (1)..(465): unsure at all n locations
agcttggacagaaaaaanatcactacattattgttgagtcaatgttcactaagcatatcctgatatccaggaccttcacctcaacttttggtaaaattatgaattctaaaccatggttgctaactttgcaagaataaatacagtgtgtaaaagtaaaacaaaacaatcaggttttccatcaagtcaaatcatattcaaattttcaaatcatttggacttttcacatataatccctccgtccccaaaaaattaaactcaactnttagagattgaattttgtcccaaaaaaccagcttctaccatcatacctaccctcagcatataaaaaaacaagaagttntattctttcaataccctttacatatcactcaccattactacttgtaaaaataatgaggggcattttggtcattttcgtccttcactaatttntctttcgatgctacgattggctcttatatggga

SEQ ID NO: 35228 - DNA, 407 bp, Oryza sativa
gcaagcttaagcggaggttcaaatttaacatatgtgacttgctttatattttatatatgaatcagctaatatcaaagaattagctggctatgtcacttaaatcttctcgcctgattgtcatgtttatatatgtagtgtgcaaagcaagaccagggaactaatttgtgccgctactacgtatgcgagtattgccactgccttacaaccgcaaatctacaccacaagagagctcgacgcacatataaataaattccaaatttcattgcgtacgtatcgattatttatttactaattcatttcatatattcataggttattcacatgagggataacctcacacacaacgatattatcgttgcggttcaagaacaactcatacgattcatcaacgaacaatgtcttgatcc

SEQ ID NO: 35229 - DNA, 403 bp, Oryza sativa
ttcatgggatccacatattctactattaaagagatttcgtgaatgttggtcagtgagtgattgcatcttatatatatacgcttgactgttggagcaacatgtggtcgcaacagacaaaattcgtgtctttgttaataccctgctgccatacttgttctctggaaaagcacatctaataatgttccactcaaaggaatcccataaatcatctaccacaatgaagtacctgccaaaaaatttcatggatttctctacacagtatcaacgtaatgtactacatagatgatattgtgcaaagtgtcttacatatatttatttagaggaataacttttcggcaagtgaaataaaatgaattactacatatctcacggggtccatagaaaaaatgaacattgaaattca

SEQ ID NO: 35230 - DNA, 375 bp, Oryza sativa
tacaaacaaagatgccatctaatctcggcgaagcgtggcattacatcgtaccacggcttcttcagtccagcaatcaatgtagggcataatggacataaactcgatatcaccaatcgtaccagtactagaaataggaaacaaggagaaagggtttgatgcccttaacaacctctaccaacctgtctccacaaaggcacaagaaagccatcaatgagctctcgtcaggaaatggaccttaatagtaacaaagtcagaaataacagaacagggtccacccggaacaaccaatcatcactaattctgctggcgagtgatcaaacataaccataatacgcttgatttaaccccgtgaactgagttatacaaatgcatcca

SEQ ID NO: 35231 - DNA, 326 bp, Oryza sativa
aagtcacctgcagctgcagcttatatgagctatccaaaaaggcggattttatttctttagatgtaccgaagaagcctttatgtatttctgaccaacctttgcttctgatgcacagtttgaaagcggtgggtgcctatcaaacgtgatgatggtgttgactctggtgatgatggcttgaaatgaatgtggagccccaacaagtgtttcttgatcaaaacttgtgatcctatctataatatcacatacgagccaaagaaatctctgtacaatattgctcttttcttgaatacgcatgagaagtgcgtgtcatttcattagctagggag

SEQ ID NO: 35232 - DNA, 398 bp, Oryza sativa
tgtccggacgactgagcaaaagtatatacgtccatgctaagcataccggcatgcaactgctcagctactccatgcatccatgcacgctatctctctgcaatccgcagctatgagaataatttattgttatatatcgatctgtacctgaagatagctaacagcatgtatgctggtaatactcttaccacaattgaagtgtacataacaccaacacacttttattaagggtggttcagatcaattacttcagcatcttatttgccagagaaaccaacaccaggggttgatgtcaactgtacagtagcacatgtgcagacaacgcaataaaatgtacagtacaatacactgggaaaagatagagactatatggatgtatgggcattgataaaaagcttctc

SEQ ID NO: 35233 - DNA, 453 bp, Oryza sativa
gatccttaagtcacctgagcatgcaagcttgtttcatacatccctgaacaattcagtctcacaactgctcttgacatatctcattcagaattttttttctcaaattaattggactgatagaaaaatattgcttttcaagaatgtgaaataaccaactgactgggaagttgatgtcatatgttggaagcaatctgctaaaatgttaaagaagtgcatctaacttttgtacccagtgaattgcaaatctctatcttcgttttttatttacagattctctggttctaaagtaaaatagggtgacatgggaactttactagcagaggaatgggcttatattcttggaaaaaatacatttctccatgcagaatgtgatcacaataatgatacttgctgccatgatttctatcactcatgcacgcattgcccttgatgattgtatgcaagtgggatata

SEQ ID NO: 35234 - DNA, 366 bp, Oryza sativa
tgtttcattgagtacttcaatttgaccaagatgttaattacattttttagctgaattgtctaaagtttggctagtaaaattgaacatgcaattcacctagaatgacgcaattttatcaaacgtcttacgtcaacgacacacggagtctatacacaggaatgaataaatatttgttacaagtatgacaataaataggtgcctaattaactcgatcgaacctgtctaaccttcagaacattaaggttctatatggacaagtaaaatatattcataagaactcgttgctcaaagttttctaagagaattttaaaatcaatacaagccatgtaaataaagttttttaacaaaggtgggcagccacaattg

SEQ ID NO: 35235 - DNA, 371 bp, Oryza sativa
gcatgcaagcttgtcgagatcttctcgtatggcttgttttctatctggtgcaaatctccgcagtttttgctttactggcctggcatcgggtcgcaccatgagtttgtgctcaatcacctccctgggtaccctcggcatgtcggacggctgccaagcgaacacgtcagcattgtcgcgaaggaaggtaatgagcgcgagttcctatttctcgcctagtgatgccccgatcttgacggtcttgtcggggttggcactggagagtggaacgatcttgattgcgccgtccggtttcggcgttttggttggtctgctcactttcttgggtggctcaactgtggcgggtggggtgggcgtgtgctcaaccatgtcga

SEQ ID NO: 35236 - DNA, 382 bp, Oryza sativa
tggcagacttcaaaacatttaccgtagccaattggggtcttacagtgtaaaaacgaagaataacaccgccaactgactttcttgggaccccggttgctgaaatggcacactggtatttggatgatttcttcaagcaaatattggatgcctgcaattctaatagtcacactgttccaaacgttcaagaagtaatacaacaatatcattgtctgcaattttcctaccgatacacagaattactgaaacgacacctatcctttctagcttgtacatgctgttactttgaagcataaactcaatataacaccacctatgtggatgtgcaaatggacaggtcgtaatcatatacatgttgactttgtaatttgtttatcaatcaagc

SEQ ID NO: 35237 - DNA, 478 bp, Oryza sativa
  unsure (1)..(478): unsure at all n locations
ctgaagcatgaagcttaaagaaaaaaatcgataggagctcatgttattatgaaaatttccagtattaatagtgatggcgccattgctctctctccctgccattctttattttatttttcttactagtactagcaaattagctggccaaaccaacaagcccaaccgagtcaacacgctcatgcatcttttactccggtgaaattaacatctggagtcattttcatcagatgatgatgcattcatgcatactagtactaagatctacaacctacgaaggataaattaagacataacatcacgacttaggccgtgtttagattcaaaattttttattcaaacttccaactnttccattgcatcaaatgtttggatatatgcatggagcattaaatgtggataaaaaaatcaattgtacactttgcatgtaaatcgcgagacgaatcttttgagcctaattacgccatgatttgacaatatg

SEQ ID NO: 35238 - DNA, 237 bp, Oryza sativa
ctgtaccttaccaccacccaccagggaaaaccatgttatgttaacagcttagggtactaatatttggacttgcttgcaacacctattatgatgagcctatttatctttaaaaaggacgtctgctccactatccgcttaaagtgagcgcaaatatgagggtaagcatatgttttttccgctcaaaaccacatactagtcttaaaaaacaaattggaatgcaactttacctccatgcta

SEQ ID NO: 35239 - DNA, 383 bp, Oryza sativa
  unsure (1)..(383): unsure at all n locations
agcttggatgtttcttccttgatgaatgccaacttgtaagatgcatgggctgattgcagctgagaaaatctccctggacgattggtatatttcgtggttgatgtcttcgaatctgaagtccagtaggtgctcaagttctgcagaatcttcataaaggaaccaaactcgtgcatctttntgaaagccttcatagaagctacagaaccaatctttgagcagntcagccgaaaagtttgccccagcatcggttggtgtagaggcgtactttccatatgatgtgcatctccgatgagtgagttcctcttcgtcgtcattaatgatcggctccagtcttgggaacttagcttctgacacgggtggccgattgacaaccttcataacta

SEQ ID NO: 35240 - DNA, 390 bp, Oryza sativa
  unsure (1)..(390): unsure at all n locations
tatggttgaaccggtaagtcctgttttatgtaattcagattcaccagtcattttcttttaatcgattgtaaactggtcacgagtcctgcatgcttggagcgtaaaatgttatagtttagtttttcagatgagtgtagtattatatgtccatatgccttataggcttaaatcatcataattttgctggtgtattgctttgcctttacagtcagggttctgttgaatgattctatttctatatctgtttgttaggctgtgcgtggctttaccatttagcatccttagaggaagggtcgcgttaactctaagcttattcgttntgcaaggttatagcatacttcaagaacatcttcccagttgtccccatgtgtgtgtcatgccacaagtgca

SEQ ID NO: 35241 - DNA, 176 bp, Oryza sativa
  unsure (1)..(176): unsure at all n locations
ttgtgattgggaantggaaccgctggatgtgacaatcctatacaaactttattactgtcatccgaggacagatcgtccttgcctactttcagcccccccgtacttctgtcaaatgaaatcacaacagataatgcatacatcaataatctaataaatcatctactctattcaaaaat

SEQ ID NO: 35242 - DNA, 386 bp, Oryza sativa
tatcgatcgactctgctctaattatatgttatgagcttaattcgttcgtcagaccagtcctgtacctctgaacaggcgacaggataaaatatatatctgatgactcatgataaaaacatattaattcagacttttttggtttggtctctctctactagtacaccagtagcattgattagtgatctaatcccaactaaaccaaagtgttatagtgtccatagatccttattaatccatggaatagtgagaacttgacgtaaggaagaaagaacagagtatagtagtagatcagtataacaaattgattaataactaacgtgtgcatgaatagacaacagttggtaagacataattaactgagaaaagtttttacgcatgcatgttcg

SEQ ID NO: 35243 - DNA, 464 bp, Oryza sativa
  unsure (1)..(464): unsure at all n locations
agcttacactgtcagtgtgttacaaaggatctatattatataccattagttccaaactataaatgtaagaaataataaatccttaaggcctagaagtatagcggtggtttacagtccctcgtccatcttaagctcaacctgactcccatgccctctcgagcgattctcgcacgcatgatgtccccttccctgcgcgaatggaagcacacccctgacccccaccacccgatcaaaatcaatccaccatccttcaccgacgctttctgcggagattatgagtaccgcatacccacacggctgggctatccgactggttacaggggatagatcatgtatatagaatatgtaataaagtaggactcggtcgctatgttgccttgtattccaaggcagggtataaagccccaatcgggtactaccatgtactctctctatcccaaatataagcatttntagcatagtga

SEQ ID NO: 35244 - DNA, 439 bp, Oryza sativa
  unsure (1)..(439): unsure at all n locations
tcatgaatcaaatattggtgagcaagttgatccagaagatatggattntttaaatagaccaaatagccatgagaacatagagagttatgttgccatggacagtgattgcagcagtgaagatgaagggccaatagaatcagataatgactcagacaatgatagtgattctagtgactaaacaattgatatatatatgtgtgtgtgtgtgtgtgtgtgatattattatttcattttctcatgagcagnggcattattacaaatttactatgttatctattcttcaatgactacatttgcttgcaaaataacccttgttntactagttaagtactatgtcaagacgccatcgacatttatccggatcctgaagtgaagaccattttgaggattcaacacaagatgaaccttcanattctttgggtacttcaacaaaagaaag

SEQ ID NO: 35245 - DNA, 238 bp, Oryza sativa
tagcaacactcgaaagcgaggaggtcgatcattcctggaacgccgcctctctcaagcgcttctatgcctataatgggtgggccccaaatcgccaacttgtgaaaatgtacatacaggcatgtaagcccttctgcactatataagcctctcggcactatgaaaacctttctgcacgaaaaaaaagaagaaatagagaaaaagaaaaaactggatgtaaggctattattcgctatggagg

SEQ ID NO: 35246 - DNA, 443 bp, Oryza sativa
agctttttctggtaacctcaaagattatcttatgagttcctgctttcatttaagaagaataatagacaacacgcgaatattaactacctatatatatgccaccatattttttatgaaaatagttaatatatatttacattatatatcttaaaattacatatgtaactttaacggatttacaacgtgaactaaagttcatattgtgaatttaaatcttatacattgaaaaatatagaaaaaaaacaaaaggatgccaggtggacgagaagataaacgaattctactaattaagggtaggtgggttctatcaacagcttaatattgaacgtaagctgactagaagcaaccggttacgtacgcacgtactacacgaatctcaacggagcatctcatctatgaacccaaatctgactgtgattagaacagaaatatgatgaaaaaat

SEQ ID NO: 35247 - DNA, 381 bp, Oryza sativa
ctggtatagaagtcctgaataagcattgcatctttattttagagtccaaaatagcagaaaagggttctgggaataacctttacatgaagactgtcaacaaaaaaatggaattcctcttcccacattgggtgtcttgagccatgaaccatggaactgtaaggcattaagagggataaaaaggaggataaatagacaacctcaacagtagctgctttacacactataattttataaaagagaataatatcgtcttgtaccagaacattcatcattccattttgcaccaccaccttgtcccacagaaaccttttcatgtggcatgtggatcagacacttcagacctatataccagaaactaaactcctcacccccttttatctg

SEQ ID NO: 35248 - DNA, 463 bp, Oryza sativa
agcttaattgtaaaactcttgattcttagagatactttaatgcatgcttgttcacgcatagaggggttcaacttctttctattgcaacacatgacttgatatgctatatgtatgctaagctcttgaacattaatgagcataattcctatgcttgatgaaatcattgtcacaagggggagaagtaatgtgaaaatttttggatttttggagaagcaaggtagaattttggagagttgttgagacgagcatgtctttggttcaattgagaaattctctcttttaaaaaggcggagaagttttcttttggatttttgagcatgatgtgcacatttgtacgaagtgtgctttttaccactattgttttcttttccaacaccaaaacaattttgatgaagttgccaatgtgttcatgacaggggagattgtaaatcaaaggtgttttgttattattctgtgatgaaca

SEQ ID NO: 35249 - DNA, 423 bp, Oryza sativa
tcttgttcagtgccttgaactaacttgcttggtgatgttgatgtgagcagttatctggattttgttgtcacccataacccattggaagaactttctaacaaggatgcataagccctgaacaaactgaaagagcatctcggcccctagcggattttggatgacagatcacaaagcaattaggggacctatgtgtggattgagctaaagtagagctattagtcccatggcgatttgattgatgcttggtgacccctaaaaatgaaagcataagggctaaggacactagggcgattaattcaatttgatttcaaatttcactcttgggaaaaaccacaatacaagacgtggtcaagtcaatgcctacatttgtattttcagggggtcaatagacatttgatcttcatttagagagagagagagatg

SEQ ID NO: 35250 - DNA, 462 bp, Oryza sativa
  unsure (1)..(462): unsure at all n locations
agcttaacaactnggagtactatcttaaaacaagtttgctctatttatatatcttttagaaatatgtattttccaaaatatgaaaaaaaaatgtgtataattcattataataattatgtaaataagcttaacatagtttgaaaaaaattaattattagagaataaaaatgtacagtgagggtctcattttgatgatccactgacgagcccacgcatcctatggtggtggatccatggtaacaatagtaacagttaacaccaatgtggcattttcttctcttataatttaattatataaaactatgttaagcttattcacatgactataatattcatcatagggtgccacattggtgtttccatgagagtgtatatgcgctctgaatacatatatcaatcttcgttatcgaaccccttttctcatttatgccgaaactaaaggtattccacattgcatttgat

SEQ ID NO: 35251 - DNA, 391 bp, Oryza sativa
  unsure (1)..(391): unsure at all n locations
tcgatcaacaattgntacgttaggatatcatttattttatacaaaaggataatgataaataatttgttttgaatatgaagctagtaaattcaattttatgttaaaaaaatgctctatcaaagtaaatgttggtcaaagtcttatctctacaaaacaaaatatgcctcccttttgagatgtttttttttctcttctgcgttagtgcgtatataacactccttggaatcaaaatcacaagtacaactgaaattatatatgatgttgcgttgggttttgctccttgcgtactctaaccctcttaagagttttgatttaacttgtccgaattaagctgccataatggcctgtcatccatgacaagaatggctcacgtactcctttgttttaatta

SEQ ID NO: 35252 - DNA, 440 bp, Oryza sativa
  unsure (1)..(440): unsure at all n locations
tgaggcatgcaagcttgtagataatcttgtagcttgaccaaagtgttttatgcttctttgntccgaactgatgatctttgcataactctgtatcaagattcgtcattgactatctcaaattccttaaggaaactcatgtcactgtgcgttgggcccacaccccatttgaaccttgcatttgtcacctcacttagtgctgtacttggaataaatgggcaaaacatctatttaaagtacaatggtatatagatttcccttgttctccacattgtctgtacgtatttgatgttttgcaaccatacttttcaatcattttaggccacaatgttttaaactacactcctgtcatacagttgtgaacaatatcataaaactcattgtaagatctttaattttttttctgaaaagtgtttctgtacttttctccacttcttaaatat

SEQ ID NO: 35253 - DNA, 385 bp, Oryza sativa
tcgtctcgtcgcaagaatgagaacctgtacgcctccttttctcttattagcatcgaagattcgcgcgatgggtgaattgtgcccgattgagctgaaactgtcatcgacatcataagtgatgaggaagaataggaagaccctgaagaaagaaagccagctcctccataggaagaagttccatcgcttcgcttcgacgcgaggcgggagtaggcgcttagttagatcgttgccgtatttcgacgtgttagattgcttgttaagtttgcttgtgagtgtgagggttgtacttgttgcttacatcaatggggggaagtaacaacatgagtgtaattcttttggttgtccaatgtaatataatggtgagatcaggttatgccacttaaca

SEQ ID NO: 35254 - DNA, 388 bp, Oryza sativa
  unsure (1)..(388): unsure at all n locations
tttctgaagagtgcttctgatcttccaaaaaaaaactcaatttagatagggatgtggcaccatttaggacaacaaatctaagtaatgtcatatctctatctaaggttttttttttttggaaatgttcagaattgttgttctcacatccctgcttaaattaagttgggtttttttccgagggagtagtgatttggatgagaattgaacaatctatgttggcctgtatgttggagtagtgatttggatgagaattgaacaatctatgttggcctgtatgttccatctcgaagtgacaccgaanaagtgtgctgattgtgttccataagtagatattttagtttcaacaagtctttcactctctgagtaatgaagtcctctttttgaaaca

SEQ ID NO: 35255 - DNA, 387 bp, Oryza sativa
cgacattacggaccactgggtctagtaccagggggtaccgccccgggtggaccactcggtcacgatgatccgagcggtcaaacttgattgcaatctctgaccatcgaatatactggggcgtgtcgggctgaacagcattgatctcccgttcagtcaacttctgcttccttttggactcataagccagggggccgccaaagatatggttgagctccttgcggtgatcttgaaaacctgccggggtgtcaccgtcgtccttcttccttgacgtgctttgttcttcgccaggattcttccgtgcagtcttggtgtattgatccgcgaattgcttgtagatgaaacaatctttgggcacctggttggagttatgatggtgcgggcattggg

SEQ ID NO: 35256 - DNA, 267 bp, Oryza sativa
tgagactgctcgacactacgaaacgtcaaggatggacgtattgttgactgcgctacacttgccggtggggccctccctgctcggaacactggacttctttgttctgtcgataccaagactcccctttttggtggcccgctaatcagcctccacagcgaggacatgaccctcgagatctagaacggactgacctattgttcctactactgttactccgtactgcttgaacggaagatcctggggcggccgaatctgccacaccggaac

SEQ ID NO: 35257 - DNA, 377 bp, Oryza sativa
agatactattgtgacgcctcctactcagtctcgagctttacaaaactaacgcactatggtgcatattgctatggatactaatattatgcacgcatcttagaacaacgaacgctatgatgaagagaacaaacacgaagaggataataacctatacatagctccacgcatgcttgaggaactgttaattgaccaagtgcctaccatttctgaagatgagaagaaaggctaatataatggtgctacaagtgctcaaggtatgcatagttataatgcgccgactatgttcactacttgtgctaacgtagagcaacccatagtggaaacaattggaagatacctgtgcacaaaacaaattgcttatgtctcttgtgataaag

SEQ ID NO: 35258 - DNA, 259 bp, Oryza sativa
tgtcacacacgaaggagtgcgagagcttttatattacacacgcacagccccgtacctggcgcgccacaagaccgatcgtggagctcctcacaccggagactgcgcaagccccgctttgccggttccgtcagaggaccagggtgagagtttaagctcctactgtgcggaaagatcccgagaatcggaaaagcgccagacaccgatgatgtatacaggctcgggccgctgataaacgtaaaacccgacgcaagtgatctgg

SEQ ID NO: 35259 - DNA, 430 bp, Oryza sativa
  unsure (1)..(430): unsure at all n locations
agctngaagattggagctcggatgcaatcacactcttcacctctgntatgnctatgaagaaaaccatatgtgttcgatcagctccgatgaattacaggctttgcaacttctattcctagcttaggtccagaaaattcttgatatgtgatgaaccagacaggcagacggacagtatatatatactgctttgatgttgggtgagaaatgttagagagtaaaagaagtgggtgaaacagacacgatcagtttgcagatggtcacaacaacttgccatctccctccttgcacgattcacttggtacggacgcattgctcttgcttcagccttggtaccttgtactgcatctgtactatctcaatgtgaatcatgtgagattgatttcccaattcccatgcggatgacagatcacacacatcttcaagacccaca

SEQ ID NO: 35260 - DNA, 406 bp, Oryza sativa
  unsure (1)..(406): unsure at all n locations
agcttgatagaaaagccctgtgaaaccgttcgggctatgagctttttcagccggcatgtctctaattgtcttccaaatttcctcctccccgaagtcctccactagctctgctaggttcagctgctccaagcctaaattctgaaaatggagccccctcctactagcatcagactcagtcgtgcccatcaccccttggaaatatccccttgtcatctgaagcatatcctgctgggttgaagcccgctcggcagaaatgttgggagccataaaatggtatatgatggaatggaactgaaaatggattacacatctagtacttanaataggtactcaccttttctttttaatcaaattcatcttccacagtattgaagtattagaaactattaagagtggcgggctgggc

SEQ ID NO: 35261 - DNA, 396 bp, Oryza sativa
  unsure (1)..(396): unsure at all n locations
ntactgtttgacaccttttaagatgcattgtacctactcctaaaaagttaagtaactgcggtataaaaggattttaaggtattgggcacttgatcacgcgcactttggcctaagcaaaaagtgcctaactccctaaaagaacgtgacaggccacacctgataatatgggctgcagacatattatgcctatgccaaaaaatatgccttcgacaccctttaaaggatgacgcatgtaacatgcttccgagtaataaatctttcgggtgatatagaccaagtgtagctcatatgaatagcttctgatctgaatgattatcccttatgggatactccaaaataaatataataattgaatcccgactggcgcaagtattctgttgatagcccttacaggga

SEQ ID NO: 35262 - DNA, 433 bp, Oryza sativa
  unsure (1)..(433): unsure at all n locations
agcttaancaagagagcgagccttgagactagtgtactctatcttgcctaacacagcattctgcagagagagggagagaacctccctttntatacacacaattactagtaaactatccaataatctaacgaataaaattaacccggttagttaattaccttaatcgcccccattgactttagcggcggagtcatgcatgcacagcactgcttcactactgaaaacacgcatgtataatgtatcgatgtatatctctacggcctttgagagagcgacatgaattgtagactaagaagacctggatggcctcctagtagtttagctaaaatcagcttaattagtttgcttggagcacgtggtgacttactgactcggccaccctaattccacaaaaaccaaacgcccacttgcattgctcccgtagcaacgcgtg

SEQ ID NO: 35263 - DNA, 382 bp, Oryza sativa
  unsure (1)..(382): unsure at all n locations
ttggctatcgttaaataaaattgctgcttgcgtttggggtagatgaaaggagcaatccgttagtactagtagcctcttttgtttggaaaatgcttgtaaccgggcgttctacaggagacgaaacgtcggacagcgctcatggtgggacccactgtcaatttttttaacccacgtctcttcctaattcttatcctctcatttatcttctcacggtaaacgctggtagcagcggcgacgagaatagatggcgtcgtcgccggcgaccacagcacaacggcaccagggcgacgtggaaaggaaagaggcgttggacctgtgcaccggcagncatggtggcggtggcagataaggaagagccatcgtctccacggccatggtgact

SEQ ID NO: 35264 - DNA, 295 bp, Oryza sativa
taactaagcccacccgcggtctctgcataaaatgcacacagccaataaaaggacgaaacatacttggcttaaatattttaaactttggtatcctaacctagatatactttctccaataaagctaagagctacgtagtagaaccatatgagtttctctctgaatttagtttctcaatttgctcacaacatctggcttcatatatatgtgtgataagagtagatgtcacgttagcattttatattttagagctaccaagatatgccatcctgctaatatgaacataacccttttctt

SEQ ID NO: 35265 - DNA, 402 bp, Oryza sativa
cggctaatcatgtggtaggtcaggtgtttttttttcacgatgtcaatatttcatcccaaagcaattctatatatcaccttataaaattgaatttagtcttcaagaattacagtgcacatccaatttacatcaccagttaggatttttttcttcaccttctcaaatctcaaccgaaatataatattttctatgtagtaaagtttaatttattgaagttattagaatgaaaatttgaatatgcttatacaaatccgtactagtatattatcaaaataagtactccattcgttccataatataagggattttgagtttttgtttgcactgtttaaccacttgtcttattcaaaaatttttggaattattatttatatttttacttactttattattatccacagt

SEQ ID NO: 35266 - DNA, 434 bp, Oryza sativa
agcttgcaagataagttgaaacagttggtaacgatgtcacaagttttgtacttttgaataacaggtttcaaaagaaatgaaagaaagttataaaatcaacatgctaaatttattttattgcagcaagattaaataaagcaatattgtaaaacttttgctggtaaatgagccattagtacagtaatagatgtacagtactaataacactggaataaatttttaatgagaaccattaaaagagattatgaagtgcatgtgccattagtttggtttaaaagagaaagggaggagaacagttctacttttccaatatttttagagggcttctatgggtaaccgtttggcataacctaaggtcaaggggctctgataccaacttgtcacgcccggaatttctatccaaaattccaaacgcttacatgtgtgtgaaccct

SEQ ID NO: 35267 - DNA, 390 bp, Oryza sativa
tgttacttgtttgtaagaggcaacaatgcatagaattttgttttgttaaggtaatcttattgttttaccttctctatattttagttctttaaaaatattttttatatactcaccgtatcgtcatgttgatgtttttcaaaattcccgtatcaccgtaccaatatcacgtatccatgcatcatgactggtaacacatgcaattaactacatcaagcactccgctctgagagctgtcctctcctttgagaacccccaaatagcatgaatcccaggataactctaacgataaaaaaattgactgaaacaaaataaaatttaccgccatatctgatcacaaaacgattacaaataacaacaatgacacaacttcaaagatcggacacatattca

SEQ ID NO: 35268 - DNA, 357 bp, Oryza sativa
  unsure (1)..(357): unsure at all n locations
agcttttgacagaatggaaaagaagaagattattgtatacatgcncaatgagtttatcattagcacaaaattaattaagtattagttattttaaatttagaaaatgtattaatatgatttttttttaaaaaaataaagaatttttttgaaaaaatatacaccggtcagcagtctaaaaaacgtatgcatgaaaaacgagggatctcctctctttggcttgtgaatgaacgtagcctaataacaactctacacttttatgatattcgagagcagaattcctgtatctaaatgaacaccgctattattttgatttaactaaaagactaagtagatcattttttttgtctctcgattaat

SEQ ID NO: 35269 - DNA, 376 bp, Oryza sativa
tacctgatttccagcatctggcccattataatgataaagaatggggcggcatctcttatcctcgttcattaaacttgaattctggaaatgtgaaatgagtgcagtccttccctggatcctagcgtatgccaaggaggctactttctcactgttgaatttttcccatttcttgccattgaacgcctgcaaattacagcacatattcagaaacagatcattacaaattgttccgaataagtctaccagtaatcttatgttgttgtgcaactcagctagacatatttaggagaaacttacataaacatataccacgaacttcatgttgatggatatcaattaaagaactgtgtagcatgcaagagtcaataaaagaaat

SEQ ID NO: 35270 - DNA, 392 bp, Oryza sativa
  unsure (1)..(392): unsure at all n locations
agtcttctaaatccaagcatctcgacattgatcattcttgtgcaacatcatcccttcctattgcttcaccagaatcggtgtcccttgtggagatctctgtcgtagcgtcaaggggagaatccgagaagcagaactagtccgcgctgccttcgctacgccatctccgccatagaggatctcatccacgaaacatccaccatccaaacgggaaactggtttaaacactcgggtggatgttcnacccgttcttgcatatcatctaaatggttatgaaaaattttcaaaaaaaaaacatgataggttaatatataatatatcatctcacaaatatgcaagttcaaattcaactnttataagttgtaagtataacaggaccgtcatctcacaaatat

SEQ ID NO: 35271 - DNA, 353 bp, Oryza sativa
tcgttgttagaggtgactttaatctgaccgctgtttactatcttctaacatatcactgggtctataactgggaatggctctcacgaacaagctgctcggattcactttctttacattcagtttacttcccattattatcttcaggttgacctcagttagcattcaacgtattcccttacacccttaaccctgatgtgttctttcccaatggatcatctcccaagacatggcattacctgttaaccggtgcttgcacttttcactccgtgtagcatctgataccgagttgaagatttcactccttgcgctcataaaaacatttttaccctaggcatcttgcttacctaaagaca

SEQ ID NO: 35272 - DNA, 469 bp, Oryza sativa
  unsure (1)..(469): unsure at all n locations
agcttgagcctangcatggataaagagatagactttgttgttgtatgtatcttgggttaggtcgggtaaggcctataaagaagttacactttgaacaaagtgcaaatatatatttattgaagattttgaattgaattctgtaaaatagctttgttaaatattgttatagtggcgttaattcgtaatgataattctaattatatttgtattcgaatttcatatttgaaatcgatttattttaatttttggcactagcacaaacagaaaaatgaaaaactaataaaggtcagcatgatgcaaatttgaaaaatatttttgattcttccaaatttctggttcagtattttaggttaaaaatcttcaggatgttacaaactcttaaatagaaaacatttataagaaacgtaacatttagcagtttagaaagcgtggtaataaaaacgagcagaattttctcccgatccatatg

SEQ ID NO: 35273 - DNA, 394 bp, Oryza sativa
tgtccagctcttctcagatagcttgatttcggtttggtgcaaatctccgcagcttttgctttactggcttggcatcgggtcgcaccatgagtttctgctcaatcacctccctgggtactcccgtcatgtcggacggctgccaagcgaacacgtcagcattgtctcggagaaaggtgataagcgtgagttcctatttctcgtttagtaatgccccgatcttgacggtcttgtcggggttggcactggagagaggacaatcttgactgcgccatccggcttcggcgttttgggtgttttgctcactttcttgggtggctcatctgtggcaagagggctgggcgtgtgctcgaccatggtgaggctccgcttatcgcattgcactttcaacttaaca

SEQ ID NO: 35274 - DNA, 336 bp, Oryza sativa
  unsure (1)..(336): unsure at all n locations
agcttctcgcacgctcggtggaagagatagaggagtctaaagacttcttaagctcctgaggtgactgcccgttgacctcctgtaccgccgctaccggcgtggctctcggagctcccactgttgccgctgccgtacggagagaagagatatagaggagagggtgatgagaaaaagggtctgatgaatggagaatgtgagttgcatggcgcatacatgtgggtcccagatgttctcaatgccgttcttatttttactaatctagagctcgtgcatggcaactganaacaaattgagtttgtagcttatttaatcaattaatacggcactatttaatct

SEQ ID NO: 35275 - DNA, 353 bp, Oryza sativa
tctcgggttcttggtctctgcccgaggcatcgaggccaaccccgagaagatacgagctatagagcggatgcgcccccccagtaagcttatggatgtgcagtgcgtcaccggctgcatggccgccctaagtcggttcatatcgaggctgggagagaaggcactacccctatttaagctcctcaaatgctccgggccgtttacctggacggaagaggctgagcgggccttcactcaattgaaggcgtacctcagttctcccccagtcttggtcgccccggagccagatgagccgttggtacttagagtggcagctggactggggatccgccgcctcctggtgttaagcgacttcc

SEQ ID NO: 35276 - DNA, 411 bp, Oryza sativa
  unsure (1)..(411): unsure at all n locations
gctccttctacccttcctgtgaatgaattggtttatagcctttatgcccgagagtgaaaggtgcttcaccttgcttggtgaacactgacttactgaagaccggaatggaccaatgtgacattgactcaagaaggtagacaaaaaggccaactatagaaaagccaagctgactgaatgaaataccgcagttcactctgactccggntcggtacctactctatatctgaagattgaccacagcggaatgccttaccgctttacaccttgctttccttattttaactactttacctcagaattcctctctagagagaattctctttcaaagttgaattttttcattaacccatctactgccaacacaactaacttttttctcttttcacaaaaccctcttttctctctttgttg

SEQ ID NO: 35277 - DNA, 397 bp, Oryza sativa
tttgagaagagaccactttgataacgagctttcgggttgtcgtattgataccgcccttcgggggaacaggagaatagcatgcacgggagaaggatttagggaaaggtacccaccttttaacgggagaaaggccaggtcatcagagcaagcatagtttactgggcaaagcaatcatctcgttttcccctccctttttgggaagcacctctctacgcgaatgttgatggcggctttcaccacaggattgtgtcccttatagatctgataacaagtttatagctgacaatacgaataaaggataagttcgactgtcctgcatcaccattcatcatcttatcggtatacaagaacacggtgacaagacagcaaccgcccatcgctatctctctccccgtgc

SEQ ID NO: 35278 - DNA, 378 bp, Oryza sativa
accgagaggagcacattgagcggtgcagaagcgaacaagaactgttgccctgtagcaacccaagacgcactgagattcatcggcggactggttacaaaaactaatgattcgatatgatatacggaaaatttatcgaagggttcaaatctacttctactattacccaagttatcggtattataaacaccaagaggtattattgtccaaagaaaggagggcatgtataattatcattaatagtgactatattttttctcgttttgggaatttttaaggaaaatgagtgatactagcataaatggataccacatatcgttctatatcagaaaaacaacatatatgatgaagttatctctactcactatgatagtatattac

SEQ ID NO: 35279 - DNA, 358 bp, Oryza sativa
tctaagctcgccccattaagcgaagggttcctgcttcgtctgactttttctccgacgacgaggatgatgccgaagaacgtgacggcgaggaggaaggagaggaataggaagatgtggaggctgtggcttataatgccacgagcgaggcggtcgaagaccgcgtcgacacccccggcttcactcctaccccaagtcccggtctaatcgagaccggggtggagtcgaacagctccccccttcgtcgaaaggatttggaacgtgctaaggccctagttgcgatctcttcacgtgcattggcgaagggaggtcctgtcatacatgtggtccataagaaaggactcgctcgtgtcgctcgcat

SEQ ID NO: 35280 - DNA, 468 bp, Oryza sativa
agcttgtgaatgagtcatcaagaagctcggttttatatggtttacctccattcagatcctttgttggtcgaattttatttgctagtaccaaatgtatcctcacacttttatgtggttcctgatgaaggcccgctgactgatctgttgtgagcacactgatcttgtcatgccggcatccctgtaacgctgctgcttcttttgcagtcgtccgttcgaactgaggaaaaaaatacgtcgtagattgccgacctctgcttgctctgtagtagtctgttgtctgaaatggttccttgtgtcgtaatcctacaagagttgcatgcgctgtttatctataattctatatagttgggtacctggtattgttcagataaaatgtgagaagtaacacgcgattatctatataggtggtgtatgttattattgttgagataaatcgtgagaaatggttcttcaaaaagagagaacatt

SEQ ID NO: 35281 - DNA, 111 bp, Oryza sativa
tctataatctatagccctgcggcgagcgtatgcaatctcatggcgagcgaatggattggatggatatgggaagaatgcgctatttcatctcttctctatccatacctctac

SEQ ID NO: 35282 - DNA, 413 bp, Oryza sativa
agctttatatatgcattgcttgaactaactcggttgttctaaacaatcggtaaagaatctccatgtgtacgaactgtatgcctcaagaacattgcaaacattaaccattaaaaccacatatatgcgtgaaggtttccttctctcttgatacataacatagcaactaccacgcttaatctgttaaagaaacaatcgcgatagcttatagaagatgcatcactgtaggaaacacatagctcagtgaagaaacaatccatttcactagtataataatgcaacacgattcatgactctcatattctaaatccaatctagcaaccagcacacagagccaaacgtccaatggaaggctcaatccatcccccgttggataatccatacacgaagagaacctatcagtgtgttctatacac

SEQ ID NO: 35283 - DNA, 382 bp, Oryza sativa
tgggcttcgcataactatggtactggaacgaggttgttttttctttacaagtagaaccaaactggagcatgttcctagttcagttaattcttcattacgcgaatcacggatagattatcgcagatttcttacgaccatttttttcgccgtgctggcatatgttctgtaaccatcttacccagcctgattaggagccccttttgtgttcctgaacaatgaaatttttcagaaccttgccaggatgtatttgtctctgaagactgaatataaagaaaaaagcttttgtttactgctgcatcgaattgaattaatgatatcagcttgaaggttatttccttatgtgtggctgtgatgaaaattagtgataccaagtatggacttg

SEQ ID NO: 35284 - DNA, 356 bp, Oryza sativa
  unsure (1)..(356): unsure at all n locations
agcttcactgctacagaacaatctagctccacaacgattggtagcagagtccattgaagagccatattaatcccttctttgcaagctagaagctccgcctccaaaggaccactgcaatgatcaagaaaaccgcaggcagagaaaattacttctccttggctattcctcagcactgcaccaatacaccccttaccggagctggcatcaaacgacccatctacggtgagcttcatccatccctganttggtttctcccatctcagaatcgctggggttgaagcagatggatccttcattntcggcattctgctatactggacgatatgcttccctttaattaaatttatcgattggca

SEQ ID NO: 35285 - DNA, 394 bp, Oryza sativa
taaggcttgtttgtttttgatgaaaaacaaaggatttggattcctaaggattaatgcctatagatgtcattcggtttgtaggattgaactataggaaaatcaaagtaaaatttccttttctacaaggtgtatagagaaaacatatgaatttttccatccactcaaagatcttggaaaaattcctagtcctccattttcctattcctatgagtgtaaatttctccaaactaaataagcccttagtttgccacataagtatgacaagactaatcttagccactttagtcaaaaagttgtggcatcattagtctccaaccaaacaagtcttaggaatccgtcaaaaatgatttccatatatatcaatttaatataatatgcttcttttttcaagctc

SEQ ID NO: 35286 - DNA, 457 bp, Oryza sativa
  unsure (1)..(457): unsure at all n locations
atgctgagattgtagtcaagctcacaagtagtgattgtttccnttgtcttgcagnaatgaatacatgctagtgataggggagtattctggtgttagagggagtatgctacagtgctggtccctgcagttccagagtgttttttggctgaacttgtcatgtactccgtagctggaatgatccagtgggtgtaaccctcggtgtgtgagttggatttacctctttgttgaactactgttggctctctgaaaaagccaagtcactatcaatataatgatccttcctctaaaaaattggggtcgtggattattttttcacagaaaccatctgtgatttttcagtccacgttcaactcaagggctgatgttgtgcttcaaggacaccttggactgaagaagagcatataatgtttctaatggtgctgcagaaactttggtaaagagactggcgtgggatctc

SEQ ID NO: 35287 - DNA, 380 bp, Oryza sativa
tggccttacatgatgcatcatacagagaatgttttttcttctctgcccgaactttacttacggtcttgggttcttagctggatccaattggaaaacaactaacaaatatttacgaattaggtaggaaagacgcctccttgatgcctccgtggactaatcaccccagttacttgaactaagcccatcgaacccaaccgccatgggcttatcttattcgccaccggtgtcctctactccagccattttcaaactccaacttgtttaaatttgaacccttacacgccggacccacctatccctgcgggggatttcttcttcgttcgccatatcgatgaaaagtctctaaactacgctgaaaaatggatacacttgcacaattt

SEQ ID NO: 35288 - DNA, 344 bp, Oryza sativa
agcttgttttgtatgttgttatggtgaattaatttcatcacaaagatgcaggtaaattcaaatttgagcgcaaaacctattgtgaattataaaaaagaaaaaagattaaatggaatgggccaagtatgcactgttcacgaggcccagtaaggcccacaatgggaggaaaatatctttggaagcctctgcttcgtttctctggcgaatcctaccgtttttcccctctctcgcgtagctgcgctcaagaccgaaagggcgactgcgtgcgcccgcgccaaatacgtcgcctccgcgccggcgaggccggttcccgcgcggtaagtggcggtaaccgcgcggtacgc

SEQ ID NO: 35289 - DNA, 418 bp, Oryza sativa
agcttggggtttcatgctggtgtcacgattacatatggacattctgaaaaaaatgaagtctctgaattccacctttgttctgaacttctgatattatattgacagaagctggtgttaaattttcagcctgttcttttttcctttcaactttcagggattggtgtagctatattccttgaggaatcttgaatctgtctttgaaggcttgaagctgtgtaagactgcattgtcgattcggcaaacttctgggcccttggtctttgaatctgtcttgaggaatcgctgatctgcaactacctgtgtccatgatggatgtgtagaaagaaacagtgtcggtcgagctgggctgagcctgcttcaatgttataattggcttcttttatccagacagacatcaattgcagtgacagggaacaac

SEQ ID NO: 35290 - DNA, 343 bp, Oryza sativa
ctttgtcaggtacaattctcaagttttaacaatcaacaatacattacaaaacacaatcatatcaaatgaaatattttaatggggcccgactgtaagccggtcaacgttgagtcaagggctgaaggagaagcgttggtcccactctctttttattttatcttcctttcttttctttctctctttcctcctcatctcttttctatctctccctatatcttttctttctccgcttcttttttctcttgtgcttcccaaccaagtagagaggggatgggcggcgacgcatggggatgatgcccgggcagcggggcggcgaggcgttgtccgcgtttgtggcggtgag

SEQ ID NO: 35291 - DNA, 443 bp, Oryza sativa
  unsure (1)..(443): unsure at all n locations
agctntgtccacgaggcgttaaatagtctaattgttatcctcgacaagagggcgaaaatctacgctatgaccttgggtctcgaattggcaaacaagcaatcttagaatgagatggatgaatatggagcaaaccgtacactgttactccctccgtttcacaatgcagggtattctagtatttttcacattcatattgatgttaataaatctagacatatatatctatctagattcattaatatcaatatgaatatggaaaatgctagaatgacttacattgtgaaacagaggaagtagcatgcagatcgcaatcttgcacctttgagtgaatatccaagcagacatggatttggaattattatttttttcctaccgcgaaccacatgtcgacaaatagnagacatgagagtgtgctgcacaattcctaagaataaaactgaaag

SEQ ID NO: 35292 - DNA, 233 bp, Oryza sativa
aacccgcatcaggaacataaaaccagctgataagaacaaagcagtttctacatttatagcacacctacaagccataggtgagaataacctaacacataacctagggaatatactcgtctaaaaacccttgcacaaaaaccaaagaaactttaaccctttcttgttgaccctttgctcaagtaatttctctttattcgggacgtcttgagggagactgatacaggatcggaccc

SEQ ID NO: 35293 - DNA, 403 bp, Oryza sativa
tctccgccttctgcggagccctgcgcttcccacctgacatatctgcagccaacaaattgttgctctaccatgaaattctccccccaacagattttcatcaacgagtttagcgaacagtgaagggtcaacatatcagcacttagagctcatcagacaaactcacatgggtaatcaaaggtgacaactttgatagcatcgagcgcatccttcaccatattcttccaactaacagagatgagaaatcactccctcaatttcgcacatcatcacgcacataccaaaaaaaaaaaaaagacgctacctctaccaacaaaatagtcgccacaattccgattatccatacgcgcacacgccaaggggggagagaagacatgacagagagataaagagagggagagctcac

SEQ ID NO: 35294 - DNA, 438 bp, Oryza sativa
cacctgcagcatgcaagcttctacacaacagcgtctaccccagcatcaaccattgtgtttctacttcaacaatgctggtccatcaatgacctgaagcgagaacaccgcggttacaaccctggatggctccatgtcgaagaatcctccctcagaagtggagaacggaacatcgacgacatccaagcccgagaaggatcctaatgcggccaaatcttgtccttccgacgagaatcacgagccgacaaggacaatttctgaggcaacaaggtcctggtgttttatccacaaaaccaggaaacacaccttgtaggcttgctggggttttctcgacgtacaagctgagatctgtgcctgcaaagagcgtggaattcaatgtacttctctaacccgtgatgtctattgtcatattcacaagacaaagaatcacgacctctcaag

SEQ ID NO: 35295 - DNA, 357 bp, Oryza sativa
  unsure (1)..(357): unsure at all n locations
agctntgttggtcccctagaggactatggccaatggtgtggtgtggttgatggatcccttgtggagtctccatagaattgtgcaagttctctgaagaacagctcgcacttgcgcttccgcttcttgaagcagaattgtcagggacatcttggtaccttgagggcagcactattggggtctgagtaaacagcgaccgcctgcaaaaaacatcagatggaaattgagtttcaaagtttctttcagcaaatttaatcaaaagtacagaaacatgaacacaggccacagcgatgctcatctataccaaaatcttggctactgttgaactgaaaaaggataatgctcactccacatttatct

SEQ ID NO: 35296 - DNA, 338 bp, Oryza sativa
  unsure (1)..(338): unsure at all n locations
ntggtgagcctacgcaaagcaaacaaaggcatctgttcttggttcctaaaagatgccgccacctccatacccttgcgggacgggcgggcagccccactggtgctctggcacagcatccaaggtgatctgccaccacaaccaggttgcatctcccaccaatatgaccccactatgatggcgggcaacactgctttgggaacggagcaggcaatttggctgcgcatttctttaaagggttcatctacgagccagtggagcatgccggtgactttaaaacacaaaagaattaacgccgaagaatctctggttccaaggagaagaaaacagaatatcttttg

SEQ ID NO: 35297 - DNA, 456 bp, Oryza sativa
agcttcttgtcaaacccttttgatacccctacgattatgttgtccgtcagggtcctgcattgaatagttgcaaccctttgtttttagagggataaatagtaaagatgaaggcttgacaagatcattcagctgaccacgctatgattagtaagcaaaagcaaaacattcttctgtagaaggttcttcagcataaggaaaagacaaactagattctatcatgcattcatgctagtgagaggaattggaatatggttggcagttggcacacaggcctggaggttttgagagtaactgagtaagcttgtcaacagtgaacagaatatatttggtggcgcatcacacctttcatgaatccttgatcctgcatcacctgtactgactactgagtgctccttgaaatcaaggtgggtgcgtgtcccaatttaatacatatgatatcttgctattttttatttt

SEQ ID NO: 35298 - DNA, 383 bp, Oryza sativa
caggaccttagaaactcaagctatactgctctagtcacttgaaggagatgctcgctcctcttctatctgagcaaagaaacaaaatattatggtcagttggcatttaataacaacacttaccaaatgacacacgcttaatactggttaatggcaccaacccaatcgcatcacttgaccatatcaattacccaactttaattaaaaaaaagaatagacaagcttcaaattacggcatatatgtcaaacacttagctcaatcacgcacgataggtcaaaagaaaaaaacaattacgcacgataacgccgacatcactgggctgggccactatagaaggaacagaaaaagttccccataaagaaagagagagagagagaagggacta

SEQ ID NO: 35299 - DNA, 271 bp, Oryza sativa
agcttttgctgaccgatgataagacaccttctattgttgaagactcatctcttcagatgtatctgtcttttagaatgctgctacctgtgcactatgttgcttgctgcttctcctctcaactatgaatcaaagtcaccgatgaggtctaccccctaccccctttctggctgtgtttctcccaactgcactggctgtgtttctgccatttgggctgtgatagtagaccatttacactatgtcgcaggataatgtgtatctgttccattggaat

SEQ ID NO: 35300 - DNA, 403 bp, Oryza sativa
tgggagcagatggtgcaatttctatcatagggcctatttggggagaactgctagctgctgtagcttctcccagaatcagaagctccctcaaacagtctagcttctggtttagattccgagaagctgtagttgtagaatccagaaaatgaactagaagccagtagttgggaaacacagcttttccatattctcagaagctggctaccaactagctgcttctcagtaaggtttttgggaagctcttcacgcgactgctccttattcgaccacaatggctcgtcttctagttcgcttgtgtgctgcgcgccatcgtcaacgcccgcaaccgccagtaattcctgctgagcaaccaatcttctggtaccctcggtatgtgttcaacatgttacacatatttgatcta

SEQ ID NO: 35301 - DNA, 256 bp, Oryza sativa
cattttttgttgaaccttgagacttacggagagggtacttatactttaaatgtcggtacggaaaaccccgcccagctattgttaagggatgtaagacatcaccctgactgactgaaatacttaagatgtatgttgctggaacattaaaactgccattatcttatacagtaacgtacacttaatttctatagttacccctttgattattggaagaatgtgtccttgctgcctctgatatcgcttcccttgtttctct

SEQ ID NO: 35302 - DNA, 446 bp, Oryza sativa
  unsure (1)..(446): unsure at all n locations
agcttcatatgcgactccttcacgagcataanatatactatttggcgaacgacaccttcacgaacatacaagaaacaattagccttaccattgaatgatagctggggaagatcttccttgtcggaaacaagagtaacagttgtcttgcaatgcagttggtctccaacatgagtagatactttagcgtactttggtggaacctcatatccaagatcatacgtcatacgacaaagctcacttgtaaaaccatagttcccatatttctcagcttcctttagaataatgccttgctttccagagcttctcttttctcattaatctgattaatctttttgggcagatcagcccatatttcatcaaagcgtgccatcatatnttccaacctctccttgtagggattcctctaaaacaagttgaaagacgaggaaaggaggatgagaaaagct

SEQ ID NO: 35303 - DNA, 395 bp, Oryza sativa
cttacaccgctgtaccatgttgcaagcgtctttgatggcattcggccagaaaaatccttgtcgaaaagcttttccatccaatgtgcagccggcagcatgtgacgagatcccacagatcccttcatgtatgttgacgaaatgtttaccgtcgtcggacgagacgcatttgagaagtaccccgtttggcgccttcttgtatagatcgttgctgatcatatagtagattttgacatggcgggttattttctcggcttttgcatcgtccttgggcaactcgtcgctacttatgaatttaatgagtgggatccaccagtcatctgtggtctcgatgtccgcaacaacgcgttctgcctctgtagcaccgatctgatgtctggggcgagtgtgctatcttc

SEQ ID NO: 35304 - DNA, 142 bp, Oryza sativa
ataggctgaccaccctcgctaaaattacacggaggaaatcaaaaaatcgctagaattaatcgtggcaaagggagcaatatatctattcttatttaaggtaaaaagaagaaagcgttataacaaatacctgaaccgacgagat

SEQ ID NO: 35305 - DNA, 379 bp, Oryza sativa
gaagtgctcacatcatggtctttcaattattcttcattttggggtaaacttccacatgcataattgtatacaaaaattggaagggttgtaatccataaaagaacagggatatatgatgcattattattgaatttatctaaatttgttctttgcacatcaatgtaaaatcacttaatatgacattctttttgccaaggtatgtaacatcacttattgattcgaaactggagaagttcaaaaatttgtgggaagaatccgacttctattgggcagagaatgatgcacgaactctccaatctgatagaagaacgtctgaggtaagtgctctgtgttcagcaaataattaattgtttgatggtatccaatattatgaaaacag

SEQ ID NO: 35306 - DNA, 302 bp, Oryza sativa
  unsure (1)..(302): unsure at all n locations
tttaattaatataatgngttaaaaaatatatatatttgcgctagaaatgtaattgcgcaggcctcactattagaactttatggacaatgcttacaacttcggttaagctgaatttagatgaggggggggttctaaatttcaaatcttatattacatacacacgtttttcaaaacgttaacaatgtgttttttaaaaataataagaaatgtttaaaataattaatattttaaatttgaacatttttaatacctttaccatctacacttttttttttttgataggatttggtcccaagccacca

SEQ ID NO: 35307 - DNA, 433 bp, Oryza sativa
  unsure (1)..(433): unsure at all n locations
agcttatgtgtggaaagacaacaatgtgtttctgttgatcttaatctgnatcgngaggaggagaatagcacttgcagaggatcacagctgaatgcactgtataatatagttttggtacatacgtgggaccaaatgaaatgacatttccagatgaaatgacattctgttccatatacgggtggtaaaaaatgagtggagtagcaaaatacaatggaatacctttgagatgtgggacgaatggcacgaacctcgaaaggtgatgaacggagatggctgtatggggacatccccttaagaagggatcagaagagtttgccttacttctactagaaatactcttgaggttgtcgattcgcacctagtgttgagtggcatggaattaatattaacaccgtatacagtaagtatatgcatcatgganatacatctacat

SEQ ID NO: 35308 - DNA, 185 bp, Oryza sativa
cttttctattctatacctgaacaggaaaggagtataatgagaagtgaagaaagcccttacgcctctattgattttgtgcccaccactgaacgcctctcttctgaagcgcctcttagtgcagctcatcaagggcatcatcagccctcacaacagtcaaatttaaactggcgaaccaaaaattcaca

SEQ ID NO: 35309 - DNA, 378 bp, Oryza sativa
  unsure (1)..(378): unsure at all n locations
agcttgtgttgtgtgtggagcacacaatgacgtatattatgctgnnnancattgcacggaacggaggtatatggcaggtcaacgtcgcgtgagtgacaggacatggagctaattcctgacgttaacagagttgattactatactactctattttactttaactggtttaaaatataaggctcgtaagttttttaaggtagctttaacataaagctttgaatattaatatatttcttttactatcaacggctatataatattggtatcatatgaaaaatacatttaaatgaatgtaataatgtctcatggtgcacaacatataaattatttntataatacagcanatgcacatgtacacacaacaccacccttgcacac

SEQ ID NO: 35310 - DNA, 311 bp, Oryza sativa
aaagattggatcgttcccttctattaccttaactgtggtgatgcaacatcaggctccgtctgttttctgaaagcaagacatgttcattgaggttccacctaaatcaccggagtgtatgcctcctccgcgggctgctttaactaccatcgcggatgttaacgaaaggagggtgaacacatggaaagttaattagcgtggaaaaggatgagcgatatactccgcgtaccaataactttatggagtcgatatctatgccgcgatagatggctggcgctcctttaaaagccagtttaatattatagcccactact

SEQ ID NO: 35311 - DNA, 401 bp, Oryza sativa
agcttgccaacggctatcgggttcgccttttttcttattacaggatgaccaggcaacagctccgtcggtcgaacttttttgttgtaagttgccgaagtgcctgtggcatacttgcgcatgtgctcgagtgcttcgactcttaccccctccaagagttcgagcgacacctcgcgcccctcttcgcccctagagaacgtcacccttggtgagttagcccctagctctgttggggtcattgcctcatcgccataaagaagcatgaacgggctgaacttggttggtcttgtgggggtcatccgaagggcccaaagaacaaataacatttcctctggccatttgcccttcgcttgcccctcaagccttttctttagtgcttttaggatcttaccatttgtacgttt

SEQ ID NO: 35312 - DNA, 390 bp, Oryza sativa
cttagctaaataaacctaaaaatagataatatgatatttataaacaactttctcttttttttgaaaaaacacatcatttagcattttggaaagtgtgccatgaaaaatagagagttgaagttgggaagaggtgacaaagaacacaccctaataagtttatagaaaatgtaaaatcaaataagtgcattttaaaatataccgagtattctatgataaatttaataaaattaatttcatgctataaatgctggtatgtctttatataaattaattatggacaggcttctgttcggcatgagtggacaattatggaccgagtattctaaaataatttcatgctatagatgcttgttctccgctcatatgtacgttttttgaagtgctaaacaa

SEQ ID NO: 35313 - DNA, 385 bp, Oryza sativa
agcttgcagcttccaattttgaggattgtacacatcatttgatttattgtcgagatgagcctctgaagagggcagtgaggtgtggaatctacaagcacgatgatggacatggcggcatgcttgtcagatattgcagtcaccttgcaggagcctagaactgggtgatacaggatggtgtcctgtccagaacatgataactccatgagaggtgtgccgcacgacggagattgtgatgcaaggctgagtgggaaccggacttttggtccatggttgctgcactgatttggtggacaactcttgatgttgaagaagctctgggcatcccatgctgtggtcgcatagatgagaagagatagtagcagtacaacaacaagaagtttagcca

SEQ ID NO: 35314 - DNA, 389 bp, Oryza sativa
tataaattagctaaggttgatgattagatacactttcttgcagtatattgaatgattaattgcatatgtttccaccttaattccctgtccatctctggccgtttcagcgcacaaagatgagttaagtcattgcaacaacactcctcctctccatcattagccatagctcctacccggccatgggttcagctagggaggaggaagacttcaccagaaattgtccaccgttctggtgcagcgacagtggaccagaaatccggttccctcaccagcttgaatacagcaactcatcttcatcataatcatgcagtgcttcatgcgcgatgctaacatgctctggtacaaacaccatcctgcatcacccaattctggggccatactatggtact

SEQ ID NO: 35315 - DNA, 204 bp, Oryza sativa
  unsure (1)..(204): unsure at all n locations
tcagctngaactcgcatgacctccgagcgaggaatgtcttttttgtacatgaggggtaatcgtccgcgagcccgtctaagctcgagctctcttgacctccgtgtgagggaagcaaatgctaccatagagcctgtttcgttctataaagagagggaggcaaggggccggtgagctctcactcctgtgcggggcacatgttgcgcc

SEQ ID NO: 35316 - DNA, 394 bp, Oryza sativa
tgatcagctatctgaaggccggatcaaatcaaatattgttctgctcgaagctcgcaagattgagctcttggctcaacttcaagaatgcaaagctgaactggatctagagcacaagaagctagccgatctttctcagtctattgaagaacaaaaagcatagctgaaatcagctatcaagaatgttgctgatatgactaaatctctgaaaaccatccctggaaccgatgctcaggatgctcaagccattgaagaagtataacaaattatgcaaagagctatatcagctattcagcgttacttgtctcaatgacgctttgtaataactcttaaaagacttttggaatcggctaaaaaatatcttaaggttctcttgacaaccccttgtgccgagtaa

SEQ ID NO: 35317 - DNA, 391 bp, Oryza sativa
agctcaatgcgcattacatccctgaccaagaccattcagtgttctcttattacaagtggtgacagacagatccacgtcgtacaaaaatattaatgattaccaacgcagcgaaaagagaaaacgagctaaacttgagaagcgctgacatactgcatgagggccgactccacatctcacaggcgaacacccttgacgagccagctgacaataacccaacacctaacaaagataagctccaacctggaagatactccagctctggtgtgggggaaaagagagacagactgagtactacccactggactatacaagtcatactggaagaaaacggatgatgcaagaaaaaaccaaagagggctagggctcatttgcacaaagcacgcctttaaaa

SEQ ID NO: 35318 - DNA, 321 bp, Oryza sativa
tatcgagaagagaccgagtttaaagagaatgtggcttggctagttatctattcattaggaatagtctgttagtttccttttatccttaagaaagggtgtttagtgtcctataaggactttatctttttcttttatctttaggaaagtctctttcttctccgaaaaggacttgtatcaacccatgggtataaatatgaacacccggggtctatgtaatctatcgctacgatcaatacaatttcgcgcatcgccaccttttacctcttctactttattttatcgtctggcgggacttgcacctgacgcggggctgcatccgtg

SEQ ID NO: 35319 - DNA, 391 bp, Oryza sativa
agcttgagatagaatactaattgctagtgttcacatttttttttctgagatcaccaacaaatatgaattccgtcgacattgcagtttataacattatcatcatgaaacttatccatttgcagagtctatagtcaagtgcctgcaagaaaaatgcatacaacacaacaacagtcctttaagatgctaaatacaaattaaacactggactttatacaaacctttatcagataaatattattctaactatgttcttctgcaatcccttgacagaatgttaagaagcctataattttcttaaagtagcttgcaacccataccgatacttgaagaaagacatcatctccagggttcaacacacaaggtgtgattcaacaacagtaacagattaagt

SEQ ID NO: 35320 - DNA, 311 bp, Oryza sativa
ttctgctcttctgaatgtaatgccacaaaaaaacatccgtgtttaagtcatgtgcaaaaatatgacaaacaaatttgccgtccaccttttgatctaacaaaaaggctggtcactcccaaaacttcagaaggatatatacacatcatttcgtttattaactatcacacgaaatttctaaaacacattcatatgcgaacattcccaaaaccttttacccagttataagcttggtgcatgaattctgcatctttcaaatgaaagttgacgcttgcattgtcccttgagcctttcccaagatgataacaatgatt

SEQ ID NO: 35321 - DNA, 218 bp, Oryza sativa
agcttcctcgtccaatgcgtaactgacaaatcatatcatttctacttttcatatatatatatatatatatatatatatatatatctgtgatatagatagaggaatatacgtgtactccacactactcatctcatgaactctaactggcgctaattcttgttctcgatgaacacatatgaactaatgttgaaattagagacacttttagagtgacatca

SEQ ID NO: 35322 - DNA, 384 bp, Oryza sativa
  unsure (1)..(384): unsure at all n locations
taaagccaataccagcacaatctagttgggccatttccacaccgaactcatcatgaaaggttggttggtcttggttagtgtcaaccaatgatatggattatggaacatcaagggtccaccttatgattatgaagcatgcttgcccttcccgttgattgttcgtgatatttttcaagttctatgagatatttactggagttntcaatggcacaggaacaaaaaggtcataccatcttcattttataggaaagcaaagacaaaacttggtatgaaattaaagaacgaagaaatttttatacaccgaagttagaagatcaaaaattgggtggggggagtgtacacccacacacttcctctaccaactgagctagcctcaatttctat

SEQ ID NO: 35323 - DNA, 447 bp, Oryza sativa
  unsure (1)..(447): unsure at all n locations
agctttgaacacctgacaggttacattgtttatctattcgtgcgantcgcgctgtctcctcctctttaagtcctagcaaatctcccaaacctatgatcttttccctgcagctactgaatatgattcagcagggaataattttggaaccctgtaaatgaaccccgctatataagaaaatgtctgtaattgagttgagagatccagtgttctcctgcttagctccctgcagaatctatgaaccagacaagtgtgggttcgatagcaagaaggtttttccccattgttttttcggtaactcttgcgaggaattcaccaattgtcttcgggtactgtaagctgtactctagcaacattgctcggcgggaatgaactcttctttgatgcaaacaaagcttgactagctcttcttgcattgatatatacatgatcatgtgcattaacccgaat

SEQ ID NO: 35324 - DNA, 396 bp, Oryza sativa
tccatgttactattactaccactactctgtctgtctgcatgcatgctaggttgatgcgtgtgatttctcgcgtgcgttcgtgagatcacccacccaaccggccgctggcaggggccgtatcgcatgttccggtgttgggccgcttcaatttgtaggacagacttcttttcgcttgggtttttgagcaactatctaaggaaggaagacatggcaggggcaacgccgaggccaacgctcgacggtcgagattgaggggagtattggagctgataagtgggtcctaccgtttttatttttatccttgtgactgacatgtgggtttcacaagctgactcatccagtcaacatgatcaaagatgccacgtgggacataaccgccttcgaaactatctgggg

SEQ ID NO: 35325 - DNA, 369 bp, Oryza sativa
acatcacctctcataagaaaagaaagtgttttcttttagtaaggatgcaccaaatcaaagtgacccgattatatatatatgtatatacatttttacagcatttttagaggtattggttttacttcctacataataactagagacattattatagcagcataaattgtgctactaccacaaatcgtactgaaaaatgtatgcctttgctatagtcaatcattgaattctagagcaatcatggaagtttaacttatcttaaatgtgctaataacctcaacttcgttccactaattatttgtataaatctaacattatttgtactagttgtttagctacttaaaaacaaattaacctcccttctgcagatgc

SEQ ID NO: 35326 - DNA, 62 bp, Oryza sativa
ggagttttttttttaagacagcaagcctgggcttgagccacctggaatatatccccgactga

SEQ ID NO: 35327 - DNA, 436 bp, Oryza sativa
  unsure (1)..(436): unsure at all n locations
agcttctattgagaggcagatgggtaaaccaccttctattgtgtgtcagatgttgtaaatagcagttaggatggcctgagacctccncattcggccactcctcttcttcttcccctccctcccaggcaaatagttgagttttccagttttaaatagcagttagtatcccaccctccttccctctcaatataagtagatttacaagcaactaggaagatgtaccttcttcagtgacaccctttaaagcccataaatcacccattatgggcccagctccacctatggaaaaaaatatatgaaataatcagaaatatatgttgatggccaaaagttatgcattgattcattaataattaanaatcatcagcaaatacaagtcaagtcaagaaatggtaagtacccctgccaccaaatacaagcaacctcttctcgatca

SEQ ID NO: 35328 - DNA, 327 bp, Oryza sativa
cttaattagtgaattaattacccattcgatttctttttgttttgcccaatgggagctcctacgaatagcttagctcgctagctagctcttcttttaattggcggcgataataatccccactatcccaccccaatactgctgcttttcttttgctaataaatatgaactgaatctgtcattaagacgtttcttactttctcgttcctttaaaggctttaattacttaattaattagtctctgtgcctgatcacaaggaattaatctataggggtaagaaaatcaattccttaaagacgtactcaccactgaaccagagaagagaaaat

SEQ ID NO: 35329 - DNA, 326 bp, Oryza sativa
  unsure (1)..(326): unsure at all n locations
tatacgatatggtgaatatgggtaggtgggaggctataaaaaagaggactctcttcattaaaaaaaacaatctatgtgaggatgtgagatcacctagtataacgaatgttggcatgatggtgtcacatatccacctagtttttttttttntggatgaaaggagtatatatgtatgcctgatccacacccttgttacttgaaactacaggtcacatacgccttatggattataacatgccttatagataggattcatacatgaatactcatatatacgactaaattatggaggcattggtcatctgtgagtaaggattcatgaaata

SEQ ID NO: 35330 - DNA, 339 bp, Oryza sativa
aaccacttggcttccattccatggttcttaacaaaagaaaatttagttaccattggaaataacccttctgatatcttattcttcatccagatatttacaaaggtaggaaacaggagttacttgactctgcaaaaggcattctgcaccgagctatatagaagcaagttcattacattttcaggtacttgaactcttaagactacatcttgttcttgtgaagactgtgagtacaccattgctctgatttttttctttatccagccgggactctgtttccattcatgtgggtctaccctgagtcatgttcaacactatgacacattcattgtaaaaatcatc

SEQ ID NO: 35331 - DNA, 463 bp, Oryza sativa
  unsure (1)..(463): unsure at all n locations
agcttatgacganagccaaagaattcatttctattattnaacagcaaccctgtgctcacgttaaggcagttgatataatactcaagatttccgtccccattgtataagtcctaaaccccaagttttatatgcaattctcatattactgtagttattaaaccaacccaaacatggaacaattgggccttggtgggggaagggggtgatacagttgaccacaagttaatagtaactaaactccttaggtgaaaacttgtaagaagttggacactggcgaaagaaacccataactgggcatcaagtaaattgcttggatgagctcttgagagcctctcattgactgaagatgctttgtcactagagaattatgaattcgatatttatatgttttgtgaaaaaaagaataaattgcttgttcaagaagaaactacatcaatcttgtgactacaaaactttgtgtccg

SEQ ID NO: 35332 - DNA, 342 bp, Oryza sativa
cgcctgtgaagatggacccgtacgaccactagtacactacttgttatatttgattgtcaagacttaagtgcccttcgtaataatgtacatattatcgacatagcaaagatgtgtcttttatattcatgttagcgggtggaccccggcttttgctgggacggcgattaatacactatcgctcggaaaaaggaaattatcccggctgcgacttaccataagccacccctgactgccgagtatctgacgacagcccgtcatgaccatacaatcggcgctataaatggatgagtcgccttgccacggaagttacacacgattatatacattgcgtggaagaatacc

SEQ ID NO: 35333 - DNA, 403 bp, Oryza sativa
tgcaagataagttgaaactgtcgaaaacgaggttacaaatctttgtactttcgatcatcaggttcctaacacgaaatgaacagaaagatataaaatcgacatgctaaatttagtttattgcagcaggattaaataaaacaatattgttaaacttttgctggctaatgagccattagtacagtaatagatgtacagcactaataacactgaaatagaatttgaatgacaaccattaaaagagattatgaagcgcatgtgccattagtttggtttaaaagagaaagggaggagaacagttctacttttccaatattattagagggcttctatggggaaccatatggcataacctaaagtcaaggaagctctgataccaacttgtcacgcccggaatttctatcca

SEQ ID NO: 35334 - DNA, 445 bp, Oryza sativa
  unsure (1)..(445): unsure at all n locations
agctntagcactaccaaaatattagtagagtaaaattatttttcttacatttggatcgctattaatataaagtcaaattatcataatatagtgaagaaacttatagaatataaccaaataggataggggcactaccaaatatttgatctcaattcaaattaacacataaactattgcatttactaataaattggtagggcatgtttttttcaatcaaaccaaaactgcccgaaaatcctggcccagtttatcctggcggggattcttgcactttctttttgaactcccaggcaaaataacctaacttttttacacggttttctttaaaatttataaatagatgaataaggattntaaaaaatcaaaccttctcatcttcatcttcaggttnttaattntataagttttaaaaatcacaccggtcatcactcattacttatttgac

SEQ ID NO: 35335 - DNA, 361 bp, Oryza sativa
  unsure (1)..(361): unsure at all n locations
tgccatcgtcgaggttggcccattacattgaagatgttccaattctctgatnggncttatctacaaacaatccatacaaacattatcatcgatatggttatgcatgaaaaacgtttattatcattagaattgtttcacccgttgcaacgcatggacatttttgctagtttattataaaacgcaaccaggtaaccacaaatcaatttccataagtttattaaaaccaacaaatttacctttaataagaatacatgtgctaatagacatactccctccgtccctaaatattgggcaccattgttttttttttaatattgtttaatcgttggtcttattcaaaaaattaaggaattaaaaattc

SEQ ID NO: 35336 - DNA, 308 bp, Oryza sativa
aatactcaagcttcgagacagaggttcttgaaggttgatgggactattattaaatttgggcttcaagagaacgtcgaggacaactgtatttattccaaatttaagaatgggatattcattttcctaattctgtatgtggatgacatcctaccatctagtagtgaagtcagtccactgcaggaaacaaaaaaaatcttgtcctcaaactttgacctgaaagacctcggtgaagcttcatatgttttgggcatacagattcactgagaatagaacaaagtatgcattgggactttatcaaaagacatata

SEQ ID NO: 35337 - DNA, 358 bp, Oryza sativa
  unsure (1)..(358): unsure at all n locations
agcttgtgggaggaaaagntaaatcgatttgatgtctgttacaagggtacttgacaactcattaactattggtggaaatatcatatctatgcacacgtataccaaattactgcttgtgttctgaattgcagcaccattgcgcccaaccactacagtgaatacacaggcagcagcaaggttcattggtcactcattgccccatttgacaactggtacataattgtttattgaaaagttttacgaacgggttggttttttatggcgtagtgttgaggtttcatttgctatttcagatcaaaagaggagcatgcaggcaatcagtagaggagaaagatggagttactctgggaacaagaga

SEQ ID NO: 35338 - DNA, 245 bp, Oryza sativa
tcactttcgcggtgtccctgagctaaatacacataatcgcgatgtcctgtagcaaaatttcccaaaaaaaaaatacattcagaatgcatgcacacgaaaatctgacatatctggagagaatataagagcggctcgggcggcgatccgtgatggcgagctcgccgttcttgccgtacctgaggcggaacgtggtcatgtgcagctcgcacttgttggcgtcgccccaacaccggcagtatcggggc

SEQ ID NO: 35339 - DNA, 454 bp, Oryza sativa
  unsure (1)..(454): unsure at all n locations
agcttaagaaatgtgaatatcctcaggattagcttattatcatgcatatcactatctgtgaaaaaaaaaatcagtggtcagacaaatgcttaaatattaagttgtgaacatactcgcacaagaacgcatcagcctcatcaatgaaaagcagcatgcccttccttgacttcttagcccagtcaaaaatttgatgtatnttggtaacagcttctgatcctaagggtgcaacatctcctcccgtcatcatggcataatccaagccctgtcacataaaggatgcaatggtaagattatacaattgttgtataactgaagttgacggatacatatttttgtattaaaaaaaatccagaaaacaaggttctttatagaagatccataagcctgatatttctcgaagaatggagcagaatagattagccaattagatctattgaaaacttacagatttgcg

SEQ ID NO: 35340 - DNA, 289 bp, Oryza sativa
tctgctcgagcgctctcttcgtgggcactgcgcttatgacgacatccacctgtcgcaccgctttcagcaggctcgggtaatcttcgagcgatccctaaaccacaactgcacaagttcatgcattggaaaaccgacgtcgatcgaagagattccccatctatcggcatgtggaagggtgggggcctggggggctcgcggaatgccgtgctggttgttaccttcacgaccgtggcgccggcgagcgacgtgagtggggcggagtctgggacagctaggtggtgggggcgga

SEQ ID NO: 35341 - DNA, 352 bp, Oryza sativa
agcttgtggctggtagtaaaacaacgatttttcttttgttatagaggtcgatcctcaactatttctcgcgatatcttcttaccaagttttgttagggcatctataacagcctctggtttatgtgggcaacccggcaagtagacgtccacaggaattaacttatcaactccccgaacagtactataagaatccgtactgaacattccaccagtaatagtacaagctcccatagcaatgacgtattttgtgtcacgcatttgctcatataatctcactaaagagggagccatttttattgttactgtaccggctgttaaaattaagtccgcttgcctacgacttgatcttggta

SEQ ID NO: 35342 - DNA, 366 bp, Oryza sativa
  unsure (1)..(366): unsure at all n locations
aggacctatnaaactcaagctttggctgtagtaaacatcgatgcttcttttgagatattgttcgaccctcaactatttctcgcgagatctttctaccaaggtctggttgggcatctataacagcccctggtttatgtgggcaaaccggcaagtggacgtacacaggaattaacttatcaactcccccaacagtactataagaatccgtactgaacattccgaccagtaataggtacaatgctcccacttgcaaatgacggtatttttggttcaaggcagtttgctcatctaaatctctctaaagagggagccattttcattgttactggtccggctgttaaaaataagtccgtctgcctaggacta

SEQ ID NO: 35343 - DNA, 264 bp, Oryza sativa
cgagctcagcgacacgagccacattttttcaccgccaggggatggctcaccacaacccctaactaaacaaaatttcaataagatccatctcctctagcccctgacctgggaggccgaaatgacattttaaagggacaagggatcacgtgggcagccagcttctaccatgtaacgtctaaattataagcgggggctgcccttgcaacggtaaagacgaactgtattgcacccctcatcaactattgaagtatcatcctggaaaaa

SEQ ID NO: 35344 - DNA, 350 bp, Oryza sativa
gaaaccctagcgttccaggtccaggataagcgcctccgcatattttgttcggtgtttttgctcgtcatcagatgtgaataggatgagctcccacttttgaccaactagttttatgcccgtatgttgtaacaggtcaagcccccatattattatggataaactgggagcccgtatgttaatgggccaagcccatataattaggaagtgatggtgggtatttttcgcataccgacatgccgcatgcgttggatgaggggattggaagagatggaaagagaactactcgacttttaagatagtagagatcacaatttttgacccttttggtcttcttccttcctcatatttct

SEQ ID NO: 35345 - DNA, 323 bp, Oryza sativa
accttggaatactaattgtttatgtttcatgacacatgtgcattaaccgtatactcaagcaactgttacgtacaacgaagccaacctcatattcaacatacctttacatttaagtagacgagatttgtttggtatatcaaaggtactcctatattaaccttacttcaataaaaaccgaaagtagtatgcatgagagagcctctttacctactaataattgaagtggcctgaatagtttactcggcagcaaccaaccaaccagggagattgattgattgattaatcagcatgcctgataagatgagaaattaaatcgtagtaat

SEQ ID NO: 35346 - DNA, 330 bp, Oryza sativa
tcgtccttaaagcagggacatgaatagtcagacagtcaacttgcgtggcacaacacaagagcattgattctaacacaatttgtcaataagtataggtttaacaaaacaaatgcaaagcaatagccataacagcatgggaaaggagtagatcttatacctgaagaatgacagacgtggtggtgtttggatgaacagtgagcaggcaaatgctctgcaatgtcctcttgagcgtaatcttatactccttcttttgcttccctgcggatataaaattataaataaaaatagcacaccatttgagcgattcaattggggagcaacgatagcaag

SEQ ID NO: 35347 - DNA, 412 bp, Oryza sativa
aacttacctacaatttttttatttcttgaattacattcttggtttggggatataattatgattttttggacaaaagtgtcttatacaagctggataataatcccgaagcagggaaatcacatgtggtgtggacatgtgggtgttggtggcgaacgcatgagtgtatctaattaagcccacccgtaaggtcttaaatatagtgcccatatattggttgaccttttaaacaactcacatatatcaccgagtggctctaaaactactagttcatttcatatgatataccggcatctatactggcattttttttcacaattgcattcacatataatgaacattctgctatgcatatgcatcaatgaaaaacatgtctggacttatttttatggtgagacctctcttcatatattat

SEQ ID NO: 35348 - DNA, 360 bp, Oryza sativa
  unsure (1)..(360): unsure at all n locations
ggacaattaaactattgcgcaggntggggagtgagacaatttcaatcacaccacagtcacaagccaagcgcattgaccaaattatccccccctcctatctccaaccaaattatccccccctcctatcttcaaacactccaatggggaaaatggttctaacgccaaccactccattgggaaaaaattntccaagacagcgaaattaacggccaacattgtaccacagaaaaaactgcacgctcgctctctcgaggtcgtacctgcaagacgaccgagttgatcacgtctgcgtacttgacggcgaagttgagcgacatgcaccaggcgggggccaacgcgtaacaccaatctggctcctcg

SEQ ID NO: 35349 - DNA, 430 bp, Oryza sativa
agcttatgttgatgatgtagtcgtcaatttctatcttaatgatgacctgattgcggatttagaagaaacttttataagcattcgtgctttcaagatgaaactaaacccggaaaagtgcatctttggagtaccatcagggaaattgctcgaatttatggtatctcaaagaggcatacaggccaacccggagaaaatcaacgccatcctcaacatgaaaccgccaagcttccaaaaagacgtccaaaagctgactagttgcatggcggcgctcagccggttcgtctcacgactcggcgagcggtggatgcctttcttcaagctgctgaagaagactgacaatctccagtggggacccgaagcacagaaagcctcttgagacttcaagaaacttctcaccactccaccagtttttgcctcgccacatccacaa

SEQ ID NO: 35350 - DNA, 369 bp, Oryza sativa
tcttcgctgcacctagttgaccgcgtgcccttttctgttcaacggaaggttgactaccactagcctcctcctcctggttcctctccacatacctttccacgtgcccctgctggttaccctccgcatccctctccacgttttcttcctcgttcaaatacaggtttggatcctcgttcccctcttcttcattccagtactggctgcttccctccgcgattctatcgtacaatatctgttcctcattgcggtcagccatctgttgatacaagaaacatctgctaagtcacgagacaattatgttttaacaatctaagtcatgtatgctaattgtaaatgtcggacattagaaccctacacaaccttacgtgc

SEQ ID NO: 35351 - DNA, 446 bp, Oryza sativa
agcttagccatagaatggcaaagcatatatttgtctggaaaaaataaaaggcagtctagttagtgtacccaatcatgggccaaaacaattaagtgggacacttgcaatgtttgtgaaagaggaacaaatttaggattctagctttgctaatctcctacatggtagagcagttggctgacaatggatacctcccatcccatggtcagtttctgatatgaacaaagcatagaaggaaggagaatctgcaattctgcatggaatgttaccttagtatcatcaaataatatccacggttgctatgttgtctgttgtctgctagaagtgcttcctttgatgctcattcagaaaagttcaatagtttactaatctttgagcactgtggttaatatcaagtgagacatcaatctgtctcagcatattaaataaatcaaattgtagattacata

SEQ ID NO: 35352 - DNA, 219 bp, Oryza sativa
cctgaacaggacctttgcagaaatgcatgggatgctaagactggcgaggaaagcattaagaaaaactcccaccatgtgatggttatgcataagcacaagcccaacaacaagaagagtgatcaaaagagaaagcttaactctgatgagatcacgagtactagcaactctaagacccatggtcaaaagacagggcccgctaaagatgcagagtgcttcttt

SEQ ID NO: 35353 - DNA, 358 bp, Oryza sativa
  unsure (1)..(358): unsure at all n locations
atctcataaaatattctatgattaaatattagaacggagatttgaccattgtgcctgggtttgagtctcaagacgatttatggtttccttttggcccaagttcttattgatatgaacattcattatgaataaaatgaattcattgggaaccttcatagcatactcaaagcatgcattgcacacaagaattttttccttgagtcggatgatgtatggcactataaagcatgggaagaattactaagaactccactaaatgcggcagccacaggaataattctagtaactactccagatgaaactattgctcgtgtaatttgggtggaccggactcatagaattgattngatgtcatccg

SEQ ID NO: 35354 - DNA, 346 bp, Oryza sativa
ttactgtggagacaaacgccagtgatgctggtattggaagcaatgttgtcacaggaaggacacccaatagcatatctcatcaaggccctggggccaaagtccaatggactgtctacatatgaaaaggagtgcatggctattttgttagcagtcgaccattggaggtcttacttgcagcaccaagagtttcttgattctaactgactatcatagcctggtccatttagatgatcaaagattgcacactccctggcagcagagggcttttactaagctactgggcttaccagataaaatcggttacaagaagggtaacaacaatgctgtggctgatgctctatctcgt

SEQ ID NO: 35355 - DNA, 413 bp, Oryza sativa
agcttcttatgaataattgcctcgtttgttagccaccattgtccagaggaataataatacgtactatgacctacatatatttacatcggttgatgatcgaacaaagagtgtgctgcaaagaacctttttctcattgggtgcttgcatcaatgcttttgtgcattgtcgacctgttctatgcatagatggaacttttatgacaggtaaataccgaggtcagatattgacagcaattgggtgtgatgggaacaaccaggttctacctatggcttttgcatttgtagagagtgagaacactgaaagctggtactggttcctagagagagtgcacattgcagtggtgcgtatgaggcccaacgtttgccttatacatgatcgtcatgcgggtatgttgcgggctattgactacttgc

SEQ ID NO: 35356 - DNA, 394 bp, Oryza sativa
tttcgccgatcagtgcaatgggtttcgtctccggcattttcgacctcgacttcccatccgggcagacgtttctgttcggcagcctcgacttcgtcaccaacaacttcggcaagatctctctccttgactcggagtcaaaccaaccgggagagaaccggatttcagtcccgtttggactcccaaacacggctgaaagttacttcaagaccatctcaaccgagtcggcttcaaaccactcgggcgagatcgcatcttctccaacgtcaccatatcaagatgatggggcttacccaccgatcctgatgaggctccccgacgatttggcggtcatctccatcacgacagcgtctctattccgcatgcctaggcggaagtcggcttcaacaccgatttc

SEQ ID NO: 35357 - DNA, 408 bp, Oryza sativa
  unsure (1)..(408): unsure at all n locations
agctntgtaacaagtactcatgggtcccgagaattcttctttattttctgctaagtccgttcgaagtttatgctattacgaggcccgaatccgaatccaaaacatgtagaactttatctcgtcttctatgggccaaaagtgttgtggtgaggtataagtatacttggagaaggtcttggtttggtccccaatcaacttttttaattatccatgcattaggtacgctcggtctctttacttcgaccagcaagtacttctgcaacgaataccacataactattgtgtgcaacgttggtcaataatatataacaagtaatctatgtataactatgacattatttaattaaacataagagtatttatggattccaccagtatgtctatatctcctttttgtggaacctctcg

SEQ ID NO: 35358 - DNA, 397 bp, Oryza sativa
ttggagaagaagtcttatgtggagtcctggcttataccttatttgagcgcctgtgaagatggagccgtacgcccgctaatccgctgctggttatttttgattgtcaggccttaagtgcctctgtaataatgtaaatattatcgatataacaaagatgtgccttttgtatcatgtttgtgtggtgtaccccggcttttcctgtgacggggattaatacactagcgttcgggaaaaagcaattttctcggtcgcgacaagctggtatcagagccatctcgactgtaggataagccaaatggataaaacctaaagacatatcttataaatgaaactatttgcgaaagtcccttttttcttccttcccctgtgctatttgcaaaaaggttattctcttttc

SEQ ID NO: 35359 - DNA, 464 bp, Oryza sativa
  unsure (1)..(464): unsure at all n locations
agcttctctcatggcggccatggccgcggcggcgtattctttctgtggtcgcctcctctctccttcttcggtgagctctcactctctctcttccttcgagtccggtctactgcagcagtgttagtcaagcagatattacttctaaatatctaatccaatctttttcttacatgtctcttgtgcacaggcgctcacccttgctgcggcctcacggtctccgactctcccgccgcttcgctccccaaaggtgtggccgctttcatcagagatctgacttatgcccatgtttcttttgcgaatcatttttggaaatatggaccaacggtgggtgttactactggcattcaacttttgggcacacttggagcagttttctcttgtacttatggatgcttangagacttcattctatctttagagccattcattacccgatgaatattaacacgaatcaatagactctc

SEQ ID NO: 35360 - DNA, 398 bp, Oryza sativa
cagcccccgatgccggtgtagactctgcatggtttcttttttatgttagctgtcggtgtggtgttgtacttgagggtttcgctcaatcttccctaattaactgagcactgtaatatcactgtcaaggttgatcatgttttctccttaaaataagatatcttcttaatataaaacgttggcaacggcctgaccgttcgaaaaatagaatggcaacaggcgcaacctaactaatcttacaactttactcaccggagatgtatatgactatcggcacgacctcctcacaagtggatctggaatactccttattctccagcatgaaagacgaagccactggaagctaacaccggaagaagctccaatcacattttccatggagccaggataatgatataatg

SEQ ID NO: 35361 - DNA, 418 bp, Oryza sativa
  unsure (1)..(418): unsure at all n locations
cagctttaaggtagtctaagctatgcaagtgcatatttttatgatgaagaacttcccacagtactgcagcactcttattntcaaaatgatgatgctttcacatatggttgctacaaacttgcctcatttttgcagcaatgctgctgtgctctgaagccatcctaagacgagaaattcatagaaatttgaagatggctagaaatcccgcgtgatgttggtgacagatctgattattgttacttcccgcatgcattttggcgttttgcattctgaagttgatgtatctctgtcagctggtatctccaccagaaccttatttgtttgagctcagtcgctttcagtgaatctgagtatagccatcccatcctaaaagaataaagattataagctcgtatcagtttcaaaaataaatctttca

SEQ ID NO: 35362 - DNA, 393 bp, Oryza sativa
tgtacccttcttacttatagagagagagagagatctttatcggaggcgtacacgaggacgatgaagtagagggcaatgaaagctatgggcacccgaggcagctgccacttccccggagttggagttgtcggagcagcagctccctggggaagatcgatgatctccaagcgccgcctgtacggtgggggaggcaccaccacgacggggccatgcggcggcggcggcggtggcgacttacgcttggggggcatgtcgccggagctagctagctgtccgtaatccctgtttcttaattatctctctctaatcgatctctatatatcgtcgtcgtagcctcgacctcgagacggacaggtcaaggctagcttccagctcagtgtaattaatcactag

SEQ ID NO: 35363 - DNA, 372 bp, Oryza sativa
  unsure (1)..(372): unsure at all n locations
agcttggtgttttttttttctaagctntaatnttgtctgatatttttaggacactgagtntatgccgcattcgctgttgaaagaaataaatcacatttgagctgacttcttgattggtgtatgtgtcgtggtagacttgaactatgaaaanctggtggcggaggcggcggcgcggtggttccggcctaatgagatctacgcgatattggcgaaccacgcgaggttcaagatccacgcacaaccggtcgacaagcccgtgagtatgtgttcatgcacccctttagaccctcatgtacctgccatggtcttttctttgatggtatgatgtgaactcaagggagcagagcatatgggcacgttgattggtaaagt

SEQ ID NO: 35364 - DNA, 384 bp, Oryza sativa
tgcaccggttgattcagaagtttcggcaagggggctgcctatacaacgcctccaaggagataaatgatgaaagcaccgccgccgctgtctgtcaaggtctcaaagagaaccgagactggcttttcacccggcagcctcactaaagggcatgggatggcacgacagtgcccaaaaaaaggagtgatgctctaaacgccatcgttgccggcctggctaaaaccgggctaggtttttacctgccgttcgccgcctgcttatccatcgctaacgcaccaatgctccaaccgccgtctaacctccgccggcgcatgggcacccgcgccttcttgcacacaccacaccggcctccgccgtcgccccgcactttctcgcgtgctgatctct

SEQ ID NO: 35365 - DNA, 245 bp, Oryza sativa
tcatgaacttgccgtactgatgcgtactgatgtttttcttcagcgccgccgtcgctgccgccgacgactccgacatcttcgccggcttggtctcctgcttgcagccggagcggcccatgtactggacgatgtggtccatggcgtcgtcactggcggacgagtgcagcatctgcgccttgacatggtccctaacggacaccgtcgagcagatgctctggctgtcctccatggccagccccgcgagc

SEQ ID NO: 35366 - DNA, 305 bp, Oryza sativa
  unsure (1)..(305): unsure at all n locations
agcttctcgcagaccttgccgtcctggatgcagtttctgatcttggcccaattcgcggagttctccaccctcctctgcagccacgtggagtagtccccgaggcggtactccctgtaccctctcccggagacgacccanccggcgccgcggttggtgacgacgaaggcgaagactgtgaagaccaatatggcgaggatgatgaggaagagcgcgaggaggtagagccacatgatgcaggaggcgccgcatagcgcgccggcgaggccggcgagggagagcgcaatgaggagcacgctcagcgcgac

SEQ ID NO: 35367 - DNA, 320 bp, Oryza sativa
cagtgtgggagatcctccacatgtgcatccactttaatgggggtggggaatctgaaatatgagtatgatatatgttaggcaaggcaaaaaatggttagctgcatccatgataataggttaagtaagacaaaaagaatctgaggttataatctgaggtttagaaggttaaggacaaaacaaaatcagctgaagacattaaaatagtggtgcgtatgtgaacataaagctattgtggaagatgcatgatcaggttacacaaatggtattaatgcaagtcaagagccatgatgtatgtccttggaaaacaatgcaagccatta

SEQ ID NO: 35368 - DNA, 463 bp, Oryza sativa
  unsure (1)..(463): unsure at all n locations
agcttaaactggcagaacaacattgtatgcttcangagatttcaaggtactatatggatcaatgcagagaaactctttattaaggcggcttgttttaatgtagctaaaggaaagatttagtactccatggtattttaagaaaatagatatttacctattggccacactaaatgatgcagaagactgcagacaaaacttcagccttccattgtcgacgctctttgcaccatgctttgcatccatgcctctacctttgtgaagagttattacaagggatggactccatgatgatattgattgaggtactgcctgtatctcttcaatatcttcccataaaaagaaaaactttgttttccggccaaacatgcttgagtaaaatccaattgttcttggagataagaacagatggccctgtcatcagaagtaaaaagaatctttctcacgtgactgaacccttcataag

SEQ ID NO: 35369 - DNA, 398 bp, Oryza sativa
ctgggctttacgataagagttaattaaagtgttcatattccactaaaaaaagtgttaatagattctgtagtatttttcacaggaaacaatgtgactaatgtgaaaatcattacatctaagggcttcttttgaatcaaaggaattatgatgaatttcataaaattaaaattctatatagagtaaatttcacaaaactacatatactatgacaaaattattacaaaactacatatttaactcaatgtatcacaaaactatacatttaacatcaaatttatcacaaaactacacatttaagatgaagtgtcacaaaattacatgtttagtaactaaattatcataaaattacagagtttataaccaatttgatcacaaagtaataatgtttataactcccc

SEQ ID NO: 35370 - DNA, 446 bp, Oryza sativa
agcttaccggcagggtgttttctggcctactgtttgtccgacgccgacaaaattgtgcgcacatgtgaaggttgccaatttttcgccagacaaattcatctaccagctcaagagttgcaaactatcccgctgtcttggccgtttgcggtttgagggctcgacatggttggcccgttcaaaaaggcagatggcggttacacgcatctctgtgtggccattgacatattctccaagtggattgaggccaaaccggttgtcacaatcacagcagataatgctcgagacttcttcatcaacattgtgcatagatttggagtgcccaatcggataatcactgataatggcacacaattcactggcggagtttttaaagacttttgtgaggacttctgaattaagatttgctacgccttagttgcacaccccatgagcaatggacaggtgga

SEQ ID NO: 35371 - DNA, 359 bp, Oryza sativa
tgaaaactaaaatcaatggttgagccaacggcattgtctaagtctgagtatcgaagaacgtttactagtgatcgattttttttttttgcataaacatgtcggtgacgagagatcggacaaagagcccaggcgggcacccgactagcccggaaggtaaggctgtcaaaaaaactcaaggctcgcgagctgctccagttcggctcgtactaagctcgattcaagctcgggtataactccaaacgaaccgagcccagacctttttctaagctagcgagctttgtcgagccgagctcaagcctttaacgaggctatcagaatattatcttctatcgcttttaataaactaatgagatcacaca

SEQ ID NO: 35372 - DNA, 126 bp, Oryza sativa
  unsure (1)..(126): unsure at all n locations
caccnacgacatggtgcacaggtgtgaagcctatcaatttcacgggaaacacacaagactactagcgcaagcgctccagactatccctcttacttggccgttctcgtgctggggctcgacatactc

SEQ ID NO: 35373 - DNA, 406 bp, Oryza sativa
  unsure (1)..(406): unsure at all n locations
agcttcaccatctacttatagatgtcgggcggtttgggatattatctagtagcaaaataagtngcctggaacatctacagactctgagaagcatagaagccaatagctacatagtgaaaaaccttggatgcttgacaaggatgagaagtgtcggcatcatgaaggtgctggagtcccacaacactgatctatggacctcaatcagcaagatgacatctctgaattcattgtctggtctcgcagaagatcgtgatcgatacgcccttgatctcggcaacttaaaacctttatctcacctggagaagctgatgataagtggcaggctacacaaaggagcaattcctctccgttttgccagcttcaccatactgagaaacttgagcctctgcttctctggtcttcatga

SEQ ID NO: 35374 - DNA, 419 bp, Oryza sativa
  unsure (1)..(419): unsure at all n locations
ttcagtgacacttanaatactaagctatgaaactcctaacccacaatagtgaacttcagtttttaataaatgaacaaagatctctatgaaataggaacgtattcttacaccagatgagctgaatttcatgggtgtgatctcatcgatacccactactagaagtcacaagtatccctaaatcccaaaactctaaggaacagcccaaaaactgtaaggatcggggttccctatagtgaaccctaaggaatggcccctagggaagcattctactggaacaatctggttcccttgggttttcttggttgaatctagggaaaactgtagctacatacgtaggaatctctatttgttcatataataaacacatgaattctaactctgacaactaccgtagtaatatgattcatttatcaagtttt

SEQ ID NO: 35375 - DNA, 343 bp, Oryza sativa
  unsure (1)..(343): unsure at all n locations
gcttgagntgggcaactgcatgtacgaacgtctctcttgtttatgttgtatcacgactcgccactggtacacgcttgcacgacaggcgcccggatgaagagaatcactccatacgcacgccctgtgcccgtgtcacatttggagggtgaggcctatcatgtatgttcgaggttgccgttctaatgaagacatgcatttcctcaatacaccaccatatagcctcatggacgcacgtgtgctctcattactttctagcacgcccacatggatccttttgttggaaaattcagagttttctaaagcaactcagatatcggctgcagacgtcctttcggttttatta

SEQ ID NO: 35376 - DNA, 387 bp, Oryza sativa
cagggatggatctggtgagccatactttgtcctcaacagtgacggcgtaagtgaataccctttgggtgagctcataaaatttcacaagagccatggtggtgaggcaacgattatggtcaccaaagtaaatcctttctttgaccactctcttgaattgtaaacttgtgtactgtgtatactgactattatttaaatataggtggactaaccatcaaaatatggtgaagtgggtatggaagaggtcactggaatggtggaagaatttgttgagaaaccaaaaatatttgtgtgcaacaagatcaatgcgggaatttacttgatgaatccatttggtcatggccgtatcgagctgaagccatcttttattgcgaaagaaggactttcttg

SEQ ID NO: 35377 - DNA, 198 bp, Oryza sativa
ctatgggctgcatcggacagggcacctgctagattagtctcacttctgagaacctccctgggcaaatattctgtgcagaaattacctaccactcttcctgaaacaaggaattacggtgatgcttgtttcactacaatgatccgagactcatgagtagagaacatcaactgttctctacagggaaccatacctccctgt

SEQ ID NO: 35378 - DNA, 420 bp, Oryza sativa
  unsure (1)..(420): unsure at all n locations
agcttcgtcccagaatttcaaaggcatagatgctttgttctttatatatagcccaatctcaacaatatgacggagttttcgatcaacggcaccattttgttgatgggtatgagggcacgacacttgatgtgctatgccaattttcttaaagaaggaattcaatttttgatactctccttcccaatctatttgcatgcctagaatcttacgattaaattgtctctcaaccatgctttggaactctttaaatttctcaaaaacttcagacttataattaagaaagtagatacacacaaacttactataatcatcaataacactcacataatagcgcttggctccacggagtcagaggcggaccccatacattgaatgaataagttcaaagatactaggacactaaagactangaatggcact

SEQ ID NO: 35379 - DNA, 297 bp, Oryza sativa
gcacatgacaagtgaacgcggactggagtctaggatgaaagaatccgggaaaccgagtggtcaccaggacaaagacacgtggagcaacacaccgcgcccatgctgagactgactaagatgagccgcgtaccgagaagacggcgacccggacattcgtgccacgccaccaacatacgacgtgaaaaagccgggttaagggaaacgccttacacgactgcctcaaatcggaaacaaaatcgccatgtgcaaacttcggtagatagggcgcaaccaaaggcaggtgagacagctccaaaa

SEQ ID NO: 35380 - DNA, 460 bp, Oryza sativa
  unsure (1)..(460): unsure at all n locations
agcttcactacgcctgaccattcgttccaaacctatattctttgcgacaaacaaatccatgtttcagtaatgatacactatgtttcttatcaaggttgataactgcaattggctcatgttatttttcaatgaagtgaagcgaatcaacaatgctgcaaattccatcaccgatccaaaaccaattcttgagtcaccaattaatgaaatggagtaatcctaaattgtcctggtattaaatactagtataatataatgagacaagcaaagcgttatccaactgcttcaactatacaatctagctagtactgtccatggcgtcataatccaccacttaatccacgctctataggcaccacaccattagagacacacaggaaagcagtgctatgcattgctataaaggtaaatgagtcangcaacaatagcacttcaaaagggtcaatctttttttgtatgcaca

SEQ ID NO: 35381 - DNA, 396 bp, Oryza sativa
tgcccttcaaagtaaggtcatgtataatcattaacaaaaagaagaggtggaattaagcttaatatgcttgttacagaacagtgcaaattagtgttaccagactttatgtagtaagcaaaccagggtaatgtatcacgcatatactcataaaatgaaaggacaattaaatatcaccgaaggacccacaatatgcagaacactaatgatcaaataaaagtatatgatgtgatgttaaaggataaatccatataattgcatacctattacctatgcagaatgagccattaggtcttagtatagacccatcaagagaaacagcaccatcatttatcaaaggaatagcatttcgcaattcagctctagtcttatagacttgcaactgagaaaacaagctgt

SEQ ID NO: 35382 - DNA, 393 bp, Oryza sativa
  unsure (1)..(393): unsure at all n locations
agctngataatactcttctacatattgtgtttctctatctaagttgntgcaatgtatgcagcaaatcatgtgcatgatatgaaggaacaaatctagctcgtatgactgttttcattgcatcctaagtttggggagtgttatttggattggaacgaacaaattcactccaccaaatggatgcaaaattatggaactcactagtagcagccctaacacgtttattctcaggaaaatcatgacaatcanatttctgatcaatggctaactcccaagtaagatatgcatcacggtcatatattccatcaaagcaaggaattggtaacttgatcttgcctaaagaatcgtcattatcatgtatctcccaccatggtggagcgctcatgccatggtgtt

SEQ ID NO: 35383 - DNA, 391 bp, Oryza sativa
ttattcctactagaaactatagagaatacaaagtgaaagggggaatttcctccttgaagtgtgtgttgtgaagtgaagtaagcttctccttttatagcctcctaatgacagtagtgaagtcagttgtaggtagggttgaaagtgattcggataatttccgtccgaccggaccttttttcggattcagatagtttcggtcggatatatctggaaatttttgaattcggaaatgaattcggattttttgtcagatatgaaagcgaatatgatataggtgatatccgtcggaatcggatatccgtcggatattatccagtattttccatcggatatccgacttacacatcagacccattagctagcccaacccaaaaatgaacttcaaattaaa

SEQ ID NO: 35384 - DNA, 364 bp, Oryza sativa
tgcaattcacacattggagtatttggattatgcctttattcagttatccaacaaacctctctgagtattgctccatccaaatatggtttggtacgaacatgaaatcgaccatcggtcttcgtttcatgaatagaatggctgcgcattgctttggaaactgcaacagctaacttttcatgctgatgcagcgcatgtgaaccagaaataattattacctcctgcccagcatgaaccattcttttaacctgaaatacacaagatttggagactcagtgtgaaccatattttcaacaaactatgtgcatttcataattatacatgtctggcagaaacacattttcatttggaacatacatcagtcaga

SEQ ID NO: 35385 - DNA, 315 bp, Oryza sativa
accatgagcaaattgggagtaaaagactaatcaagttagatcggctgaaactcttattctatctttatttgaagtcaaagaaataactagataaaatgtgttaaaacagtacttaacagaacgaatctaaccgaagcaacatttagcggtgggagaaacataagaccttattaaatcaatgtaaactcattctagatggtggatataccgcgttatctatcctaatatctaagcctatacctatcggccttctccgatgatggaagctagcttatgaagcttacataacgagagcaatctagatgacgtgatata

SEQ ID NO: 35386 - DNA, 244 bp, Oryza sativa
  unsure (1)..(244): unsure at all n locations
gagagaatgtaatactcaagctcggccgtcggcaaagatgcagaccactgacaggtgtcatctgcggngccttcagacgcctgagacaacatgctagcgaagacagagcccatgataccatgaacactggagcgtttacagtggggaatactcacgatgaacggccgcacaaaccaactcttcctatcgttagtggttgcctaccaccacgacatgcgagacaattctgtctcaaaatcgtaca

SEQ ID NO: 35387 - DNA, 461 bp, Oryza sativa
  unsure (1)..(461): unsure at all n locations
agcttgccaggcatgtggannctttgagctcttttatgtatggatgcagagtaattcacaaggtagtcttgacttctctatgggaaggataactttatttctgcttaatggtttggataccatatcatgaaaaccttttcagtggcacactatagcatgtattgtctgaggcggtctgagcaaattttcttcacactgttatgctatccatagacttatttattctcaatatcagttggcgaagtattatctgagtaaaatttcttcagactgctattctatccatagaaatgnttattctgaacatcagttggtaagttttaaagtgggtagcctgtgggacatcatttctcatattatgcatggtaatcagcatacattcttttaataagttgcaatcccactgtagccagctattcatggattagcatgtgttggaaatgaaaataatgcacttatac

SEQ ID NO: 35388 - DNA, 429 bp, Oryza sativa
agcttctgtccaggcgtatattccaggctctcaatgcctgccggagtccatacaatgccttatgcagcttgagcacaagatgctctattcctgatctaacaaacccttccggatgtgcaacatacacctcttcttcaagttcaccattaaggaatgccgatttgacatcaagatgatgaacctgccagcggcgatcagccgccactgcaagcacaacacgaacggtatcaagcctcgctaccggagcaaacacctcttcaaaatcgaccccttgtttctgcacatattcttttgcaaccaaccgtgccttgtgcttgattatcttccctgtcgagttcttcttgagcttatacacccatttcagcccaatcgctctgtgcccggctggcaacataggccactcccatgttttggtcttctcgattgctc

SEQ ID NO: 35389 - DNA, 324 bp, Oryza sativa
tataaacattcagcatgaatactttagcaacatccaatgctgagaaaggatgagattaaggcataaagtgtgcatacttatagaacttatcaacaacaaccagaatgcaatcttgggggtatgatttaggcagaccttcaatgaaatccattgatattatctgccaggcaccgtcaggcacaggaagaggttgtaataacccaggatatttggacctgtcacgcttggcttgaaggcaaacagcacaagaagctaattgcttttgaacagtgagcttcatatgtggccaagagaaaagagacttgatccttttgtaagttactg

SEQ ID NO: 35390 - DNA, 413 bp, Oryza sativa
  unsure (1)..(413): unsure at all n locations
agcttattcagaagaaaccgagttcaaaaaaggatcgtgaataccacaacatggcaattcagttttatctaattaggcagggtgtggtaattttcatttttatctttcgtcaagttttcttagtgtccgatcaggaatagcttattttcttttatctttaggaaagtctgtgtcgagtcccataaggactagtatccacccatgtgtataaatatgtacactcgaggtctctgtaatatatctccacagatcaataaaattactttcacttcatcggtaccctaatttattcccaacgaggtcttagtttcgaccatggactgcatcggttaagtctgaccttcagcgaatntgcgtcatcttcacttgcatcggcgtggcttagacttcctttgttagatgtgatattctat

SEQ ID NO: 35391 - DNA, 432 bp, Oryza sativa
  unsure (1)..(432): unsure at all n locations
tcgtgcttcacatcgtcaagcggtcaagcgaataatgatgtatttgaatcatacactngagtttggaatttggtattctacttcatcttctatatgcttaagtggatattcagatgctgatnttggaggttgtagaattgataggaaaagtactagtggaacatgtcattttcttggtacatcattgattgcatggtcttctagtaaacaatctagtgttgctcaatcaactgctgaatctgaatatgttgctgctgctagctgttgttcacagattctttggcttttatctactttganagattatggtcttacttttgagaaagtacctctcttttgtgataatactagtgctatcaatattgctaagagtactattcaacactcacgcaccaagcacattgatattctgttttactttttgagggatca

SEQ ID NO: 35392 - DNA, 422 bp, Oryza sativa
  unsure (1)..(422): unsure at all n locations
ttaagtcacctgcggcatgcaagcttctttggggctaatggcacctttattttttctcttccattttcagcagctttcttgcgtgtgtcaagcttgggtggagaagatttcgccctcttgctcctcttggcaggaggggggaggtgcggtctgctgtcaacctccataccatcgtacccaaaatcagtatcatactgtaattggagatggtcatctctttgntcaacggcaggagggagagatacaacagtttgatggagacgcgtctgcggcggacgagaacttggcgctggccttggagttatattgatctcaatgctgtgcttgggccattgaataaaggtcccacgtgcagccccaagggtcagaatctcgtcattaggtgggtgtgggatagtgtagcgaacccaatcgggcttcac

SEQ ID NO: 35393 - DNA, 348 bp, Oryza sativa
  unsure (1)..(348): unsure at all n locations
aacttatgaggaaaccacttctttccaagaacacatacacaatcatgggcacaaagccctgctgttctgtcataaaaatttcaactctcaagcactacttctaaatttccataaaaaattcacctctcaagcacaacttctaaatttccagatatattgaagaggcttgtttcatattgacgacgtattgcctcagaagtacaggagttgtacacaatcagaacgggagaaatgatactaacttaatcacatcatctttgtttcagacattgctctagggacaagcttccaatcatcaatagctagatatgagtagacaagtatacttgattntgataggatgagtga

SEQ ID NO: 35394 - DNA, 414 bp, Oryza sativa
gcttatcaccagagctgatgataccgaagaggtcgtgataaatcttcttcagatatataatgacatggtatgttgccctacttttcatgaattctaatttctgttcaaaatggttcctacttccagtttttgttcaaaatggttcctacttccaaattctattcaaaatggttcctttttgttagatttaaatgcaatgttgtagatgtgcaaaactgtggcaacggttgtatatacaaaaggctgcatagtcttaagatcatcttatctcttatcttttaggtatttaacgtggttcttggaagatataaatcctgcaccatgttgatttgctcagtacgggtattgttgtaatgatttgctctcacagtttgtagaagtgtataattacgcttgtcatttttctgaacttta

SEQ ID NO: 35395 - DNA, 416 bp, Oryza sativa
  unsure (1)..(416): unsure at all n locations
ctaagcttataagatcccttctcagnatctctccggatgcattcttgggaatgtccgtcacttacgccacctttctaaccttcgtggtaggcgcaacctgcgtatattatataacagaagctcagagaaattgcgggattggtaagccaaatctgaatcaacagtgaacactgaacactgaacatgatgtttcatttcaacttctattttggatctgacgatcgaatcatgctaacctgttttgcacaaacttcatcaccttgcgctctgacaagtagctttctttcttactcactatataagccatcgggaactggccgacctccctatcaagaaacctgcaacagaactcaacacccacccattgagaacctagcataattatttctatagaagtgataactggcatctatatg

SEQ ID NO: 35396 - DNA, 390 bp, Oryza sativa
  unsure (1)..(390): unsure at all n locations
tcttaataatcttattgacctgaagaccttctgggcgaagcatggaacaaacaagtttgttaccataaggtaaaagacaatgaaattctaaaatttgttggctttgtaggttgctctgcagctgtttggtctgagtaattgtctgtatgtactctagattacaaactgcagaatccttttaggtgtaagttttaggcatgtcctgtccctttgcagtagtttacatgcctcatctgtgacctgngtgctgacctgtatggtggctatctgcatgtatctttgtcattatctttacaagtagcagtgtaatgcgacaatctctaatttatgtggcatgaaagttaatctcgttcaacgttctcattatgcttaagtcttcntgtatacaat

SEQ ID NO: 35397 - DNA, 390 bp, Oryza sativa
  unsure (1)..(390): unsure at all n locations
tcgacacgtcaccacggcagagggccatggtgtcagcggcatctaagactgatccaacaccaatccctcgacgcgtgggacatcgactggcgtaaggcattggctgcccgagtagccaaactcggctggcgtgaggcattgatctgttcattggcttgtagtctaatcggagttgaggagttcctgtgattgcactagaattcaattcctagttggcaatcgagctgctcattctggtgacgtaagccaaaagcaaatagatcaactaaacagccaaaaagccgcagtacaaattctaaggtaattagtaagattaatttcctaattaatctactaatttcgtagatatatccggcatatatctacaaaggtacgccatattntatatat

SEQ ID NO: 35398 - DNA, 394 bp, Oryza sativa
tatctgccagatgaaaacaagttcgtagtaacaaggggcataacatgcatgttggataatggtgccagtgaagaaatcaagagaatatgctttggagtattcatagaaagaagtcttcctataagataatcatctttcctttgttttgacattcttgatgtattttccactgtatggacatccttctatctttgtatcggtagcctcttaaaagattgctttaaagttcctcatgaagacagagaaccagctgactactataactccccatctcatccctgctgctgatccgtggtaccatttctctatggggaagtgttgattgattaatgatcagaaataaaaagaatgcagagaatatgatccacggctatgagagaaagcaaactatact

SEQ ID NO: 35399 - DNA, 434 bp, Oryza sativa
  unsure (1)..(434): unsure at all n locations
agcttgggttgcagatgtacatgtcacttttttatctttaaatcaatagtggatatgagatcactgttggatttggacagtggctggctgcctcatacctgtgggctagggccattatatgtatcgggaactaccgaactaatcatgagtgccgaactgccgatgtgtaagtagcggtaaaagttcatgaatggattgtgacaggaatacaggatgctcatacgaaataatgcaagagtttctctaaagaaatttcacaaagaattagtttaccagagaactacaacttttatcctatgcgtgtgtttgacatgtcgaaccaatttgcaacagtgtctgaagggtggacccggcctatctgtagttntctaataaaatcatttgctattgttgtagttctatgaaattcccagctaaagttaaagcanagtgac

SEQ ID NO: 35400 - DNA, 422 bp, Oryza sativa
  unsure (1)..(422): unsure at all n locations
atcttcgaaaattaagaaactntatgacgatatcaccttatgactcagacacgccaacaaattctggtaaggaactntgcgcatgctccacactcacagtaaattgtgaatggtgcatgtgcttcgatgtgtgtatagatatagccaacaagcgagattatgttgatcattcaccctagatatatcttgctttctaggattntgattgtagctggaaggacatnctcattccattttgttatttgtactggagttccattaatcatatgatgcatgaatgtttttttgtttatcttacagtggaatntgactntagcggaagttatctagcttgtggtggttcagatacaaggtattntctcaaaacctgcaagtctgaccttttggtgcannatgtataccgtaaactnttatatttgata

SEQ ID NO: 35401 - DNA, 375 bp, Oryza sativa
agaatatggtgcatcgaatagatgcacctaattacgtgtagcctccaactatgtgattagttaacaaactaaacatatagttgaaagacaaaataataacacaattgtgcattatatgacaaaagcatacgcggcgcctaaataggcatgctagccgactgctttttatgcacaataaaagaaatccgagtggtttacactctaaaaggttcacgaatgaacacactcgacaggcatccgaatataaaaactctaaagattacccatcaagtattataaagattatgggaataaataacgtcgatagcctaggccatgactatttaccatgaaaacaggcatataacacgccaaggaaatggactatataaaaac

SEQ ID NO: 35402 - DNA, 415 bp, Oryza sativa
  unsure (1)..(415): unsure at all n locations
ntgtgaaatagataacacagtttggaacgaggtcacatattttgtgatttcgaataactggtttcaaaagagagttattaaatcaacatactacatntattntattgcagcaagattaaatataacagtattgtaaaacttatgctggtaaatgagccattagtacagtaatagatgtacagtactaataacactggaataaattntgaatgagaaccattaaaagagattatgaagtgcatgtgccattagcttggtttaattaaaagagaaagggaggagaacagttctacttttccaatatttatcagagggcttctatgggtaaccatttggcataacctanggtcaaagatgctctgataccaacttgtaacgcccggaattctatgcacacattcagacgcttacatgt

SEQ ID NO: 35403 - DNA, 425 bp, Oryza sativa
  unsure (1)..(425): unsure at all n locations
agctttgccgngatgcgtctcatgtgttgggactatgctcatgtgttgggcagtcgcggagtgcgggtaaagtgtacatccactgcagtgtgagtaaaccaaatctattcgaatagccgtgctcgcggttattgagcaccgggacatgtattacacttggctagactctaaattcttaacttgtggggggatgggatattgcatgatgaattttatgctgatggagccacatcccgagaggagggaaggtggacatcctcagaaaaccatgacgattcaatggcgggaagctatccttgggatcacaatggatggtggacagaaccgtcgttgtttaaagtgaacactggtactaaaatttgatcagtctatactaggttntaggcttgtgaaaagaattgtaaaattagctttatgcaaaagaa

SEQ ID NO: 35404 - DNA, 431 bp, Oryza sativa
  unsure (1)..(431): unsure at all n locations
tatactaattaatttcactataatccgtgcttggttttccgtgtcgggtggcctccgaacacagccaagtcatcgatctgcaaaacggacaatggaaaagtaaagccattgatctgcaggaaaaggctgttgcattntggctaggttgtgcggngacgtcatcaggtggccaagcagcagctattccttttacggttttaccaacttgcccatatttgtaactccggccaattaacacaaagtactctactttagtggttaattggctagttatactagtcgtagtagttaataatataagtagtactccctccgttccaaaanaaacctaactctagatttaaatctggacatagtgtatatccaaattcaaacccagaatttaatttctttntttgacagagggtgtagtatactatatattatatcac

SEQ ID NO: 35405 - DNA, 437 bp, Oryza sativa
  unsure (1)..(437): unsure at all n locations
agcttcttgactggaagaggtactcaatgcatctgtattcattaattncttcacgtgcatatgctggattatctcaagttaatctcacgtcgtactagtaatctagtactaagtataatgcgcctcaaatcgtccttgcatctgaggattgcaagcttcagttgcgtactagtactagtagcaaatatgttggaccatttgaaatgcaaataattttaaattgcagtagagtaaaagcaaagcaattaacatggcatgtccagttgagttagcacagaaaagctcaaatacagagaagaataatacatatgaattccagcatcatactaccattcgttttatttattctgttgtgagttgttttacaacaatttatatcttatgcatatatataaaatttctgaataaaataaatggttaaacgtgttctaaaagtc

SEQ ID NO: 35406 - DNA, 302 bp, Oryza sativa
  unsure (1)..(302): unsure at all n locations
gtatgggngaggaggagatgatcatggtagatgggatgatgatggcgagagtgacggagttcatcattgagaatgacttaccggctgtggatgagctctagcgcctctgacacgccggtctcttcggcgacaactgcgcccgcggtggcggcggctagataaagaagagaggcatgctgctctacgccgagcacatcggtgacccgttcgcccggtgtcgccatgctccggaccacgtcattctggtaattatctactccatacgctccaatatataaaaattcaggaccagatgagatatg

SEQ ID NO: 35407 - DNA, 320 bp, Oryza sativa
ggaaagaaccgggaaaatgggaatgagaatggagcgagccacaagggaacttctttatccaagggagctactataccttttgattacagcaaacttaccattccccctcacaactttgtctccgtgcctttcgggcgtgctcctcaatttgatgggacacattacgccgcttggaagcacaagatgaagttgcatctaatctctttgcattcaaatatttggaaaattgtttgtacaggtgttgatgtaccccatgatgacatggagctcacttcggagcaagagcaactcatacaccgcaatgctcaagcttgcaatgc

SEQ ID NO: 35408 - DNA, 240 bp, Oryza sativa
gtggctgaatagagctctgccatgcggctacctggtgcgccacataatgcagtggcaggagatactctgtgtgacccccataaagacgagcaatccgttgcgcgtataactggatagccattacactacgatccgcttatgattactatgctaactaactactgatgctcgttgcttatggcaattgccggaggcgcgcatgtgctgtatggatcgacaatgtcgatccaccatttgatg

SEQ ID NO: 35409 - DNA, 411 bp, Oryza sativa
agcttatagctgaacaataccgaggatttttctgccggcatttcgtcgaacacttcacagaccacccccgtcaaccgcccgaactgggacggcaggtatgctctcccaccactccctccaccgccggcttccctgcgggttcgacatggctctcgcgatcctcgtgttcgacatgaagccgccggccatcaccccgatcaggacgtatttgaacgggatcacggccagcgccagcgccaaccctgtcagcatccatatcaccgtttctgtatgctgcaaactcagaaaattatccagagttccacaccatgatgatgaaggaacgcgttaacatgacatggaaatgaatcgcaacggtggaacgattcggtgatcggagaacgtgtgtgatgaactctgatgatattgata

SEQ ID NO: 35410 - DNA, 479 bp, Oryza sativa
  unsure (1)..(479): unsure at all n locations
cacataaaactaagcttgattatgtccttgccctcactgttgagaacttcctcgctgtgcgtcttcagactctngtcttcaaggctggcatggccaagtccatccaccatgctcgtgtcctgatcaggcaacgccacatcatgtatgatgaattaactactacagatctcctgtcttgtaaatgggtaaatatgaagctctaacctctatattacaatttccatgtctcagtatgttctctctatagtttcaattcccaagtatgcttctatatgatatttctacagcagcatggaagctgtatcattctctcatagtaatcgttcattgtatattcatcaattctcttgatctagcattgtgtaggcagagctataatgtcatattatgcacaacacatgctctattagctgaaagctgaaagccataatatattagtattggtcatgtactcctgttaactctcatcattngagtgt

SEQ ID NO: 35411 - DNA, 329 bp, Oryza sativa
  unsure (1)..(329): unsure at all n locations
agcttcggagacgaaatacactggtttctggcctaactctgnttcttggacgagagctgcactgaccgccaccggtgaagcttctanatagagcagcagttcgcttcccagtgttgggctgaccaaggcgggtgggctttgcagatattgttttagctcgtcgaacgcagcttggcatttgggcgtccagctaaactttccttgaacatcctgaagttttaattaatcaccttaaggggaaatcggggtatgtccttagtaaaagttggaagttttaaagctatttgggtccaaaacctcatccggttaatttgtgtataaaaaacatg

SEQ ID NO: 35412 - DNA, 249 bp, Oryza sativa
  unsure (1)..(249): unsure at all n locations
cccctatattattatccccttgtactcctttgcttaattgtgctcttctgtgtggcttgctgagtactgtggttgnactcattcttgctctaatcttcccctcttctagaagagacgctctggagaagatgtcttacgtggagacctggcttataccctcactgtgcgcctgtgaagatggagccgaaggcccgcttgtccgctgctgtttatttttgattgccaggcctgaagcgcctctgtaataat

SEQ ID NO: 35413 - DNA, 404 bp, Oryza sativa
agcttgctcacttaccgatcaaggtgggtggattttgatttgttcacgcctaaaaaggcctatgtttatgagacgatttgatccttctatgtggcatgagggaaccctgggtcggctggggaaaagctttgttgcgaacctccgataccgacaggtgttcagaataagttcgtatcttgtgggtaaagagtacccctctgcagaggttaactaactgttctaacagccgtgcccactgtcattggcggatgtgaggtggttccccgtgcgtacacttgtttgcctgtgctttgtgaaaagctgttgtggtgtgggaatcggcaccagaaacatcctatgtggcaaatggatgacctgagtggccaaaacgaatctgtgtgattcaggatgtctgcgggcattat

SEQ ID NO: 35414 - DNA, 493 bp, Oryza sativa
  unsure (1)..(493): unsure at all n locations
gcttcggcttggcgacggcaaggacgaccacggctagggcttcatctcggcatctgttatgcggngaggtagcttctacctggcaacggcgacgacgactgtggcgagctcgtttgattggttttttttgctgtgaaattgagctgaaaaatcgattttggtttggattcagttttgtttgcaaaattttatgctggattgtacgattggccaaggattttagcggtcagccgagattgaaatattttttgtagtcggacaatataacttagccgcctgcgaaccaccaacgtaaatctatttccgtaggcggctaatctccgcttgtaaaaatactctattttcactgacctttagttgaagtggcgcggncagccaccagcgaaaatcgattttgaccgcctgtgattaccctttttagtagngactatcaatcacatgaattgtgatcactctagctatgtttcgtaaaacagctatttgatgtataatt

SEQ ID NO: 35415 - DNA, 182 bp, Oryza sativa
  unsure (1)..(182): unsure at all n locations
gctgcttaacacggcgattcctccgcagcaaccgtgttgaactactatgctcanctctatgagacagctcccactgatataaacactcacatctggcgtggaggaaatgagagcaggactgactactacccactggactaagcacgtcataccctaagaggaggtctgatgcaggatcttac

SEQ ID NO: 35416 - DNA, 373 bp, Oryza sativa
agcttcttgaccaaatcaaaactcaccaagttgttgcatctacctccatcaatgatcacacgtgcacgacgattgttgatgatgaagaaaatctgaaacaaattatggcattgcaacctctcaaactgctgcacctgcgtgctgagcacccgctgcacaatgatggtcctgtaggccattgtgtcatcacgaccaaagacttcgccatcctcatcctcaacttcttcttcctcctcttcctcttccacatcggaggtggtgatgtagccatcttctgtaacaacatatgcccgttgactagggcaatctttctgcacatgcccaaacccttggcaacggtggcactgaatgcgtcccgtcgaggcaacagatg

SEQ ID NO: 35417 - DNA, 482 bp, Oryza sativa
  unsure (1)..(482): unsure at all n locations
actcagcttattcncntatcaacttcattcaacaacttccaaaaataagttgaaaacaaatgcttctctaaaagtgcattgcaaccctacataaaatgcacgacatacatgaacatcttctacatgctccctccgtcccctaatataaaggattttgatattttatttgcattatttgaccattcatcttatttaaaatttttttggaattattatttattttttgtgacttactttattatccaaagtactttaagcacaactattcgttttttatatctgcaaaaaaaanttgaataagacgagtggtcaaacagtgcaaacaaaatattaaaatcccttatattatgaggcggatggagtacttaatagtatagccaactatcagctctaaatcatcagccaatctaatagcctatttatacaatnagtaactacaaatatacctcctctgtacttgtaaaggaagtcgttatgacaat

SEQ ID NO: 35418 - DNA, 414 bp, Oryza sativa
  unsure (1)..(414): unsure at all n locations
agcttgtggaatcgagtttgattcggatcgggttccctctctccaagccgagggttccttcgccggtgccgtcgtcgtgggcctccgccgtcgtctccgagcccctttaaaagcttccccgtgctntncgctacccgccgccaccctcgccttcgcctctcgncgncggaatcgtcctagcgccgtgcgccctagcttcgctgtcgccgccgccgctccagccgtgtgtcgccgccgttccagccgtcgccgtcgctcgggaaggtcaccgtcgtgttcgccgtcgcgtcgccgtcctcgttcgcccctttgccgtcgctgaagaacgccggagcgtcatcgccgccgtcgacccgaaggttgccgccgccgttttggtcaccggtgagttcgccgcgttggcctctacgtgct

SEQ ID NO: 35419 - DNA, 438 bp, Oryza sativa
  unsure (1)..(438): unsure at all n locations
ctattatttatttggccggtcggccaatgtaactaaagtagatgtagtttataatcgctttcatcttatttgggtttgctatgtataatcatgcttgagatgaaagtgtgaatctagtgcacatcctgggaactagattcacatgagtatgacttaggaatatttgagatgttgtagaactttagcccattttgtcaagtctcctgaatgtgtaacacatctggtcgccgccttcgagtggtttgatgggcacatctcaggctgaagttgactggcaggctaaaggcctagcaatatctccaatattcctctctcgaggcgtcgtcattatgctcgtttgatgactngaattattcacttcatctctcaattataatggaanggccagagagcctacgacagggagaggggagtatcttgtgtttatatgtcgatgac

SEQ ID NO: 35420 - DNA, 424 bp, Oryza sativa
  unsure (1)..(424): unsure at all n locations
agcttctcatcctaattcaatcgacttttaatctcttcatcatgaatgggtgctttgctcctgcaaacatgaaagctttgtacctacgttggaaaatataactcagataataatttcattacaaagcagcattgatcaaagagtgagagcataaaactaaatagagtgaacataaaacaaaaaaatatatggaaatttgtaagaacaacaggaaactgattattcgtatgcatcaccatcatcttgcanagcacctgtgacatactaaaccctcgaaaagaaagggagctagtgctctagaataacataagaataaggcccttgtgatttgtcaatgttttataaagaaaatcactgtagtatttagtgggcaaccaagattacatcaaaccatngaaatacaccacctactggtactttttac

SEQ ID NO: 35421 - DNA, 406 bp, Oryza sativa
  unsure (1)..(406): unsure at all n locations
tggcccgtaaagataaagaacagttcacggactatctctggtttgataaaccgncactactcaaacctttgtttttctctattaagattgatttagtattcatcttatatttcctacgaatgctttttacttcttatataaaaattgcttaaaatataagataaatatattttttaagtttgtaataattaaaacttaattaatcatatcataactatcattctcattatcctcgcccgcaaccttatctcaatatacaatgccagtccgccgcaccgttttgcggctaactaagcagtaagcacacatttgtacgggcaatcatggagctcctgctccttgatgcgccgagtgttattctcctcgtctacttcctgtaccttctccggctcttctatgacgctcg

SEQ ID NO: 35422 - DNA, 416 bp, Oryza sativa
  unsure (1)..(416): unsure at all n locations
ggaccttaagtcaccgcngctgcagctgatgagtaacagcagctttttgttttgtttttggtagccggctagtagctaaagacgacgaccgtgtgagtgttaacaaaatgggcgtacgcgacctccaaatcaacacatgcatgttagcacctatgtggcgtttggcttttatcaactacagctcgtgataattatactgctactgataggctgataactgtgtaacaaagcatccgcgactgactgatgataaatttgataatacgcgtcgttagtttcgcaacacatactgcgccacacaattttcaattgctcaccatgattccttaatccccttcacctcgtcgatgcttacatgtgttaaccaaatggtgattcgatttatgtaaggatgcacatcaatcctactggacaga

SEQ ID NO: 35423 - DNA, 487 bp, Oryza sativa
  unsure (1)..(487): unsure at all n locations
actaagcttctggagaatcaaactgaacttcttgtgcaaatgcaggtgatatttagcttatattattaactnttcttaatcaggtgcctgctacctgaatactttaaatgtgtacttggacgtgttattcttagaatgataatgatcctgaaagttcagagcttcaattggagacgcacaaaatgctgttatatttgaaacttatatagttcgttaaggatcaagttattgaaacagtgcttctaacttgtatatttgaggggcaaaaaggaacatggtatattttcatttcacattntagttctaagatttgttgccacaccgttttagctaatactggcgtactggaccggctacttcctctaataccagtaggtttctagtaccaagtccaaacagaagtgtactagtatcaggtgtcttagttagggatattagccaggccagatctgaagcctattcatccagattnggaatcataaaagtg

SEQ ID NO: 35424 - DNA, 380 bp, Oryza sativa
  unsure (1)..(380): unsure at all n locations
tcaagaactatttcgagtacacatcttgatgcaaagaaaaatatttaaaatatctatacaaccaatgatctcaactaagaatttataaacgtacatgtataaatctactttgctgaaaaattgaaatctttttgtattgtaattaacctatattactatactggcagaaccatgtcaaagagaaaatgagtattcgatcgcatggtgttcagttgaaaactcacttaacaggaagataacaaaattgcaaaagaagacatggggttgggaattattttttcgtttatgattggattttgtagtctaaaaagaattggcacccaattccccacacgcacccctgaanaacacgaagcatgtaggtcttttcagtacataat

SEQ ID NO: 35425 - DNA, 484 bp, Oryza sativa
  unsure (1)..(484): unsure at all n locations
tccgctcttcacatttcggttctccctcaagcccggagaaaacagatgctgggctaaattcatagaattagcactgatntcattacttaaatccaactagcgtgtactgtgcgtggaacagccgtgatttcagtgggagatgttggtgacacgctacatatagctcacaagttgtgcctaaagatgccccatttgctagttgtaaaaacggagacgtaccggctgctcttgtcaacttagcaatcaccaacactcttgacccgcttacctgtcggccggatcgaaagaacgaaattccaaaccccaataaaggtatatctgctaggtctaaattaagccctagcataactttgttagagcaagtntaatagtatagctcgctattagctctaaatcatctatagccaatggtataatcaatttcatataatacttactatactnataatatctgatcccacctggcatacacacattatgtttt

SEQ ID NO: 35426 - DNA, 426 bp, Oryza sativa
agctttatgtctaacatgcatgaattgataattgcattaacgctggtttaggattcttcctaagcaatggaatgtttggaacaaagtagtttttagttgccacataaattgagtcaagcagccttatgtaactttactactatacatggtacgatttcaattgacgttttatcagaactcaccgattgccacggaagtccataaattctgaagatggtcttactttagggctcatagaaaccacctctgtaactccagggagtacttgaaatgaaagctgatattgattcttgaaactggttatgctttcacccatcctctattagcctgacatgacaacgagttaacctttccagtaacgtgcacctgtcgttttaatcgttcatgttaaaatgggtagaaggatataatacatcagatctggga

SEQ ID NO: 35427 - DNA, 403 bp, Oryza sativa
  unsure (1)..(403): unsure at all n locations
tctttggttagattaagcgaactaattcctcgattaattgtcttaggttgcgtggttgtgctgttcaaaaattagtagatacagtgcacttattccagttctagtgcctaactaattgtttctgggaaatggttgttttaattggtagataatgattcaggttccattccctgtgccatttttgaagcacattagatgatggcaagctattaaattgagctcttttctattatatttacggagttagattaggatgttctagagtattttctaacttgttatcatgggtttatttatttcctttgaaacacaactngntctcatgggttttctagatgtgatcctctgagatttgagttaaactgattctatttaatgcgctcaagaagtcagacactcccta

SEQ ID NO: 35428 - DNA, 428 bp, Oryza sativa
  unsure (1)..(428): unsure at all n locations
ttagcttatatgagatataagccgatttatttttctcctaagcttagtggtgaaggatatatctatctcatataaaccaaaaagcagctcctccaancnannncagtggtaaagtggctaatggtttaagaaaacccaagactttttggcatataggccttaaaaaaaatggcctaatcatccccatcgaagaagctgcattttgtcctttttctccacttcggnggatcttgcatgtgttacagaagggagaggaaccagtaacttttactcagccgcattattgcatgcgaatatattaactgtgcctacattgaacgtattaacagtactacaaaaaccatcgttagtggcgggcattttanggtttcgctggcagaaatcgcaaccgccacaaagtcaaggccagtgaaaatgtagatcttcac

SEQ ID NO: 35429 - DNA, 427 bp, Oryza sativa
gcttactaaagacctaggagtatgacttatactctccacccgaggggtagtctacagacggtctagtaccagataagactttgagtgaaacttgcttgcacaagacttgcaattcaaggcgtagtccattgttcaagttgtgagtaagtgtagcttggagttctaggtggatgttcaaccttaattggtctccatcgaaccgctggtatataaacagtacattggaaaaggcaaatctcagtgggattttgagatttggtgggggattgttggaattaatgaatgggccttagcccactcgaagattaattctttggaaaatcacaaaagcccacctcatgggatggcatgcatgtggagtttattaccaccttgcttattctatgagagggggacctccttaaaagggaggatgccctcctagcta

SEQ ID NO: 35430 - DNA, 429 bp, Oryza sativa
  unsure (1)..(429): unsure at all n locations
cgtggctgctatgttcatgaggttcaacacacgcattatattatctatgttagtgaggttcaacacacgcattatagcaactatgttagtgaggttagaaaagtaattttctttttgaaagagaaaaactcaagagaggaaacaccatagtgaaagaatctgctagattgctgtcaaaccagcatgcatatgctaatactacctgaaaatggtagaggcacgtgcagtggtttcagtaaaaacaaggcagtattagaattctaatctagctaaggcgatagagtgacagacctatggtgtaaaaagatccaagacagtggtttatcatgccacttacagacttccannaattgatcaaccatttatgttgaacacattgatgcattgaactaactaaagaagattgtgtacatgtagtactgtaacagg

SEQ ID NO: 35431 - DNA, 411 bp, Oryza sativa
agctttgccaatatttaaaacaaaaacaaacatttcattgataaggggaaaaagggtgtgcagaaagcaagtaacttcaaacaaacctttttcctatccccaagctccttcaaatcctcatcaatcaaatcatcaatgggtttatcattggacccttttggtttatcagtggactctgttggcttatcaggaagctcttttggttctgtctgttcagatatcggaggatcttgtacgcgctgcttctttagttttgattcatcagcattatctgtttgttcctcattgtccttgctgggaactacaggggtgtcagacacctctttctgctgctcagaaggtgtggtttcacctttgtctgcattgtttgtgtcatcagtcacctcccctgaatgatcttcttcctcatca

SEQ ID NO: 35432 - DNA, 395 bp, Oryza sativa
  unsure (1)..(395): unsure at all n locations
taccggtcaaataccttagttgccaaaagcacttgatataatggacatctcaaggaactctntatcaggacctctgccatcgaactttggagatgaccatgtcttatcttatctgcatctcatctccaatcgtatcactggccatattccaaactctatgtgtgatttgcatcaccttgtttacttagatttagcggacaatcttttggagggggaatttcctcgatgtttccagccagtgttattgagtaagctatttgtcagcaacaatattttgtccggaaagttcccgccatttntgcgtagtagacataatctagagatgctggattatgcatcaaatgacttctatggaggaatgcccatctggatnggagagctgttgaatctaccat

SEQ ID NO: 35433 - DNA, 439 bp, Oryza sativa
  unsure (1)..(439): unsure at all n locations
gcaagcttcttctaggttgttccaccgatgaatcttttgatgttttcttctgaccccctgaagatgctttacttttatttttctgaagcttctgcttctgtgattcctctataggggaatcccccgaggtgcgcttggtacctctcgaaggttctttgataatatttttctcccttgattttctcctgcccttctgcttgcctctagcggtgtactcatcaccactatcattatcttgttcgtcagatggaggttcaccaaagtcttcatccatgatatcatcagcggtatgctcaggtatcccatctttntgtaattttctcctgtttcgtaatttcattgatgttcctgtttctctggcatccctttctggctcttgttcaataacatgatcatatggctccccctcatggtattgattctctgggtcattacattc

SEQ ID NO: 35434 - DNA, 462 bp, Oryza sativa
  unsure (1)..(462): unsure at all n locations
tcttgttgaaagaaaaaanaacctgcatagtgttgcttggatgcagcttattgccataatggngtgggtggctagactgcaccccataacagctatcaaaagatagctcatatggattaacttcttcctggaaggacacaataaaaagtaactacatagtcaagactatcataccaaacaatgtacggaacaaaacccagcatcgatcataataactaccataaggtcaacaacaccatttgtcctgacatgagtaccaagatttgaggcagtagaagaagaatgaanagcatccttctgactaacgtccgatgataccatgaaagaatccttctatacaagaatgaactcgattagtacatataacaaactagcgtagagtacacatagtcgacgtaaggagataccttatgggcatattgatttgacaccgactccacatttgtatctatactctttttg

SEQ ID NO: 35435 - DNA, 409 bp, Oryza sativa
  unsure (1)..(409): unsure at all n locations
gtctattgcattttgtatctcaaatgtacctctacattatgaatgaactgcagcaagtttatcctttcttgcgatgctagattaggatggcccaagaaacatagtgtcaaactgacttgaagccaaactttccatttattctgtgtcaataaaaggagaaggtttccatttattcattttatgttaccaatcaccttaccttccctagaacacaattttatcaactacgaaaaagattgtcaggaagttaattatgcagtttgtgacatcagacttatgttccatcacttctttgctgtcccctcccacctatgtcacatacaggatcncanatgaccttttatctcactgtctggaaataccagaatgtcagcattacattgacctactcattcatngaacactaata

SEQ ID NO: 35436 - DNA, 412 bp, Oryza sativa
  unsure (1)..(412): unsure at all n locations
tccacgctctctctctctctctctcttctccgatgaggcgggtgctatgcttgttgtttggttgacgagagaggagaccgtaccgttgcttggctttgggtggttggggttgggccgcgaagcttgtggaacattcgacggtgatgggccgatgggccggcccatcttcatttaaaaaaatatcagagtaaatttcattttcgactaaccttttattggcgatgtttcagnttgggccacccttcaaccaatgatttcactttggactangtaattntacccattttgcactttaaagtgcacttcaattttttatccatctactttgttctatgtcaaagcaatggtctacatacaactaaagaggttattgatgaataggagctgacatattcgaaggtcgtcatacact

SEQ ID NO: 35437 - DNA, 432 bp, Oryza sativa
  unsure (1)..(432): unsure at all n locations
agcttatgaggtatgcaccactatatctggaattctattattatcaatttgcacacttcttaaatgaagttgattgttgaatcgataatcatgaggcaaacaattcccagaaaatctgtccactcaggaccttggctctgaaaaaaaccagtgaatgaacggatattgaagaaaaccattatgggtttctttggatgaatttaacattggtgaacaatcatcgatgtttacatcctatattccaaagaacacaaatcagatcacttacaccaccatttgctaagaccaatgccatcactgttgctgcccaaatcacttaggacaaaggattccacataaagctgaggaacttgatgctcttgttctatttccaaaggaagttaaaaatatgaggatttcagaacangaatgtacgttaacaatgatcagaaa

SEQ ID NO: 35438 - DNA, 341 bp, Oryza sativa
acttagatactcagcttctggccggtttgaccctattaaccggagtgacgtctaacaaccaccaacgatcctcgaaataagagaaattcctccaaaggacgaacaagatagatctaacttgggacctagcaagaatcaaaaccaacagatcgaaagggacacacacacacacacacacacacaagattcaagaacaagagccaaattaacacacatgcacagtactcaaccaaattaaaaacctacaatggcaagatgctactgtagacgttggccaggttgaagattcacgacacccagtgcatgatatccgcataggaggccataacgtgcaagtgcaa

SEQ ID NO: 35439 - DNA, 428 bp, Oryza sativa
  unsure (1)..(428): unsure at all n locations
tcattggagaggtcccttgtggctgtgaacacttctcttgcagggatcttgaatacgttggagagaatgggccaagaaggtcatgatggatcggctaggcgcaaccacaatggccatgatgctaatagcagcatcgcagcaagggaagaactggagtacgctgctgacactgagcatgatgaggaggtacttggtcgtccacaaagacaacaacgccggcagcgccatggcatgggcgctccaccacggcgggaggtacgtgataatgatgattctttaggcaagatcaagtttaccattccttgctttgatggaaaatatgaccctgatgcatatcttacatgggagttagccattgatcagaaatttgcttgccatgattntcctgagaataaacgtgttagggctgctactagtgagttcactga

SEQ ID NO: 35440 - DNA, 379 bp, Oryza sativa
  unsure (1)..(379): unsure at all n locations
tgaacctttgctcgtcccgagtgaatgatgaaaggaaacaaattactgtgttgttgtcaagagttgctactatgctgcatatctcaaagatataagtgcaaggtatatgtactctctctccgattaaataatatatggcaatgcaaggtatatgtactctctctcggattaaataatatttggcacggnggcttacccttacccctgattcccacgagacactgcttctccttgccttgggcggttgaaagacataacaacaattagagcaccaatcacccgatctttattcaacttcttattccggaagtgttcaaattgatttgtaaaagaaagccaaggttctcaaatgattcacttaatctctctaaatgtatca

SEQ ID NO: 35441 - DNA, 375 bp, Oryza sativa
gtcttgtgtcaaggatattgaatggtggcatgccatggcacttgtgggatgtttcaagaatactgaaatagttggatgttactatctggtttactgcatcattcagaaacaccaaataccatgacatgtgcatgctcatctacagtgaaaatacaccaaattcacatatgtatctaattatatagccaggctgccaatgcaagtgtgtgctggagcggtcagcacaatgcatctgggctgggtggctggctgctgctgccttctgtagctgcaggaggacatctgcttggctgtaattgccaaactactacgttctccgtcctaaaaggaataaacttcaagggataattattcagatttatcctcagaaatcgg

SEQ ID NO: 35442 - DNA, 413 bp, Oryza sativa
  unsure (1)..(413): unsure at all n locations
tctaccggnttacctccctcatcaaggtctagatgccttttggttgccataggtgtcttgatgggcttcgcatcctccaagccaaatctcttgagtagatccttgatatacttggtttggctcacgaacgtcccatccttgagttgcttgatttgaagtgcaaggaagaagctcaactctccaatcatggacatctcaaattccctagacatcatatcaccaaattccttgcaaaatacctcactagtagaaccgaatatgatgtcatcaacataaatttgacacacaaagaaatcatcaccaatgattnttgtgagaagagtggtgtcaacttttccaattttgaaatcctttgaaaataaaaaatctctcaatctttcatactgacggagctcgtggctcctcaccgggag

SEQ ID NO: 35443 - DNA, 433 bp, Oryza sativa
  unsure (1)..(433): unsure at all n locations
agcttgtaggagatgtcaactaggtcgtcaaacttgcttaatacaaattcaggattccaggtccctaaatttgctaaaatatgtcgtttagttccataatcgtcttataaccttgtagcactgatgtggatcgtgatgtagcacaggaccatgcatgtgatgtggcacataaataagaaaaaaataataaaaatggcgaggttcccttttccatcactcccctacgaggagggagagatgcgtgagatgctagccacatcagtgtcaagcaatctcctagagagatgtacacgtggcagattcagacctacaagatttatgtttagaaacctatatctgtattttataagattatggtcctaactgatacctacttacaaatttacaagttntcaggaccaccggtatattttactcttcttcgaaaagctac

SEQ ID NO: 35444 - DNA, 452 bp, Oryza sativa
  unsure (1)..(452): unsure at all n locations
tgtccactataaagtatttctataaatacatatagagaaacatcatatgttgaacacataggacatttggtagaacaacaaaattatgcaaatatatctctacgttctcttggtcaacaaacagatcgaatagagacaacccttatggaaggctacaaaacaggaagacctgaggtaaagataaatattccctctaattctcagtcttcgagttctcagtctgttagtcctatgtttgtcccaacaattgatcctaacatcaaacttggaaaacaaaaggcttttggacccgcaatttctgaagaactagtcagtgagctagcctaaaaactaaataatttataagtaaataaaaatatcaatgagatntctgataatgaaaaatatgatatggtcaacaagaattttagaccttctactctttacttcacnaactaggaatattaccctcg

SEQ ID NO: 35445 - DNA, 432 bp, Oryza sativa
agcttcaactctagtcatctcatcttgtgctttttctataaggaaatttgcaccacggcaaccaatatatatgatgtctagaggagcacaccacaatatgctttggctaactttcatcattccaagtggagattgattgaacattgcatgtaaatttgacaagcttcaaaaaaggcactgagataactacagaataattgataattacaattcaaagaaatacaaagtgaataggatatcaaaattaaaacttctgcagcgattctgtttcctagagctaaacttttttaaaaaataaatgaatgtgtcaaaacggagtaatgcaagaactttgagaaccaaaatcaatgacctagtccataatcatttatccacagcaagatgcagcatacctgataaaccgtggtctgcagaggagcttgggtcaacttg

SEQ ID NO: 35446 - DNA, 469 bp, Oryza sativa
  unsure (1)..(469): unsure at all n locations
taaaantactccgtctnttccataatataaggcatgctcaaacttggcttataatttctcatgtactataaggcctatagcaataaagttataatcatatgaaagtaaatacaaatttcaatctaataataatattttcagcaaataaaatttaattcatatttattatatactaaaagtccattaatcttcctataaacactcctaagccgccatgtggcgctcctacaagcactcctagattgccacgtggcattttataatctcaatgtcgattttcatttaaattggtggacccgttattttagaccgttagatcagatctatttaaaaaatgggttatgcttctgtctataaacantaatccgttacttacttanaanaaatccgcgtatcgaanaacgtacatggaaaaaagtatacctttacgtactgttcnattnttggaaaagaacaacaacacgtacgt

SEQ ID NO: 35447 - DNA, 379 bp, Oryza sativa
ttatattttttgtaagacgtggatctgtatgtcaacaattgtcgtttgtgtaccctggctggtcctggacaggggtttaatgcacattcagtttagaaattctggttcgtgaatttctgggcgtgacatgcatggccatgacaaaggtgattgagaagtcaatcacaagttataaaatctatcaacaggtccgagtgaatgattgagctattagaggatggcacatatctagccttgagcttaatcgatatcgtgaggcaaaggggttcatacaagtatacactataggttcaaccgatatgatctttatgtgtgtccggtgggtcaatacgttctgctaggggccgctgttgatgcgtggaccgaaaaggagttttcg

SEQ ID NO: 35448 - DNA, 408 bp, Oryza sativa
  unsure (1)..(408): unsure at all n locations
tgcaagggtccatatatatctctaactatgaggtntaagatgactcttggccattaggtctcattaatctcagtcctttagaaaaataatttcctccacatacattatggatgctctaaaagatgtcctttcatctatcaaaacatcttttgggtgtcaagtaaccgcttctctgtatagaaacaatacataaaattcaagcacacttgatacacctttttttagagaaaacggaaattcattaatcaaaagataaatcctctcttgcaagatgtgggatgagtttacaagagttaccacaccaaaactctgagctttttcatacgagccataattgcagctcatcgcttacctatattgaaacgataaccctttcagtacaaatcctgattccagacatatgaccta

SEQ ID NO: 35449 - DNA, 431 bp, Oryza sativa
  unsure (1)..(431): unsure at all n locations
tgaaccttngctcgtccacagtgaaggacgacagtatactatgacttggttgntgatatagagatgctactatgctgcatatctcagagattcaagagcagggtatatgttctctctcttacattacataatctttggcacggtggcttactcttacccctgattcctacgagacactgcttctccttcgcttgagcggtcgtaagacacaacagcacttaaagcaccgataatccgatctttagccagctcttgttctggaagttctgagatgattttgacaaacaataccgagctccttaagtgatacactcagtctctctaagtgtatcagaatgaattcctcaccacacgttgccttggagattactactctagaggtttgatatgtggcgctcggtatggatcaatcatggtatacttgcattcac

SEQ ID NO: 35450 - DNA, 428 bp, Oryza sativa
gctagatttcattcttgccaacatggtgatgttcttggcttggagaccattaacccatggtatcatccattagcctcatcatagtgtgacctattccttttcacatctcaaaggagaacattagtctcaacaaatcgggtgtcatccttcacttgatgaccaaccggttgcatatgaaagatatggatatgtttgttgagtattcattaacatcacaagtgtcatatactcgtatgcaaccttaagtgcaaagatccgatataaataatacgtgaacaacatggatctagaacatgcacaataaatgtataagatttgccccccctaaatatatgcatacaaataaatatacatgagatacaagtgtatgcataattagagaatgaccaatgggagtttatcctatacacatagagaaggcatatgta

SEQ ID NO: 35451 - DNA, 455 bp, Oryza sativa
  unsure (1)..(455): unsure at all n locations
ggctntacacatccataaaatccatgaccttgtaatcaactatagatactactatatatataaatcaatattacacacagacctacatatggagtatggttaatctatcgatcgatcaacactaaacaggattattaactggcccctgcctggtctgtaccctctactaatgatggaatcaatgaaataattattaataataaacgattaatcaaggggaccaaatcaacagtaattagctagctaggaggctagctaggacgccgtgtgctcctcttccttcgcaagaaaagacttggtggtggtcgacgtcgtcgcaccgacggcagcgggcccacccacctggtacggacccaagctggtcaacctgcacgtttcaatatcaattagtaatgaaaaaaaagaanagaaaagggcatgcaaatatatatatatattcgtagtaaaggggaaca

SEQ ID NO: 35452 - DNA, 421 bp, Oryza sativa
  unsure (1)..(421): unsure at all n locations
agcttgctgggtgggcgcatccgctctattctcgtaccttctcgggggtggcctcaatgcctcgggcaaaaaccaaaaacccgagaagcatgcccgcatgcacgccgaacacgcacttgtcggggttcagctttatgcgggcggtgcggagactttccaaagttttcgcttttcgctagatccgagagtaaggtctcttggatgcgtgttttcacaaccaagtcatcaacataggcctcaacattacgtactatttggctacccaaagaaattcgagtagtacgttgaaaagtaggacctgcattctttaacccgaaaggcattgtcgtataacaataagttcctatgggggtaatgaatgcagntttttcctcatcctccctagccatgcgaatctgatgataaccagagtatgcatcta

SEQ ID NO: 35453 - DNA, 333 bp, Oryza sativa
accttagaaactcaacgtgtccagttgcggatgcgtcgcatgtgctggcttatggttgctatcggtgccgccctgtgtgcctcttagagggacaccctcggcgcgtcttctcgtccaccgcatctggacgccatcgtgggccttgcgctgcttgcggtcggccgtcaaggagtaggagtctccctcccggcaccctggctaggcttccactactctccgagtgagatggagcttcccgccaatggtgatatgccccaagagaggctgtggctcatcgacgtcgacgaacttgatgcgacctatcggctccttgatcgacatcgcggataggtc

SEQ ID NO: 35454 - DNA, 377 bp, Oryza sativa
  unsure (1)..(377): unsure at all n locations
tcaatacagtcacttttcatcagaaagaaaaaaatgtcagcaaataaaagccaatcttgccagcactgagtctctgcaacagcataaaaaagaaagaatgaatataggcaacagacagttaccaaagacttgcacatatctgacaataatggtaagcaaatttaatttcttgaggtaaaagtttcacgttctaaaagaaaaaatagtgaaaagggtgcatcaatagaacatttgaaatttatattcccatcagctgtccacttgaaaaaggaactntattatattgacaaggtaaatggttaactttcaaattctaacctgagttcgtgagcctcagtagttcaattgtcctgtcagcaactgcctcaccgatcata

SEQ ID NO: 35455 - DNA, 392 bp, Oryza sativa
  unsure (1)..(392): unsure at all n locations
ntccgtgcacactaattagcaaatggtcacgaaaattctataaaagattgtacacttacttcaaatagtattgcacctacatgtgaaattttatcttcaaattcattatattttagccataataaaaaagacaaaattctgacagatttttgcccttaaaattatcagatttttcactttttttattacggtaaaatatagtgaatttgaagtgagactttctagatatgtgtaatatgaataggagtaaatgatttttttagaatttttcgtgacatttgctagttggtgtacacagagtatgcacgagaaagttgtgtgcatagaatatgttcccgtacatggacaaatatatgtttagatganagttaaaagtngctacattcttaaac

SEQ ID NO: 35456 - DNA, 418 bp, Oryza sativa
  unsure (1)..(418): unsure at all n locations
acctgcngcatgcaagctnggaccctctctctgcaagctctcactcttgcgttttctctgctccttgagcctctgggcaagcagtttctggtactcggcagcctcggacttcttcttggcaattctttgcttcttctgggcgattctcgccctcttcctctgaagagtcaggggagtgacaagcctctggatcttatgagccttgctaaccttcttgcctgcaggaaaaaaataaatggttggtaaataggtcaactctacactaaccattaaattgactgcatatgctaggctatgtcaaaaaattacagattatatcttagcttattatcttgattacgagtgtgttttttgtgttgattacacaagcaccagaggcatacaatgcagtccacaacaaaccatatagcaaagcaac

SEQ ID NO: 35457 - DNA, 452 bp, Oryza sativa
  unsure (1)..(452): unsure at all n locations
atttattatataaaatattgaagatagaagtttttcttttctcaagnttaacaagacagtgttgattaattntaagtcatgccttccccgaaaaaaaaaattaagtcatgcctttgacaagaaaaccaaacacacatagaggaagaagtaaaagggagagatggatcaagctagtaaattggttagggatggcaaatttggccacgggtccgggtatacccgatccaatgggcacggacgtgggtgtgattatttgcctgccgaaacccgtagacattgtgggcaatagccgggtttcattttttgcctgtgggtaacccatgcccgacccgatacatatgtattagctaatttcgacttatctcttaattcttatactcctttctcttggttcattgtgatactaactaataataaagtgggatataattcacattattgttgataactga

SEQ ID NO: 35458 - DNA, 432 bp, Oryza sativa
agcttactaaccatggcgagtacacgacagcattttcttattacgcacaacttcttggaaccaccgctactaacttcaataggctaatctggaaagcctgggcgccgtgtaagtgcaagaccttcgcctggctaatcatccaaaatagagtcaggacctctgacaggctggcgacaagaggttggccaaacggttccatttgccccttatgtcgtcggacccaggaaacaactctgcacctcctcgcagcatgtagatacacaaggagagtctgggcggcactatcggagtgggcgacgtgcgagcaactaaatcctagccaatggaggcaaacttcaacggtgctagattggtgggaggctaccgcaaacatacaagagacacctaagaaggcactccgcactttgatgttgttggtcgccttggagatat

SEQ ID NO: 35459 - DNA, 228 bp, Oryza sativa
  unsure (1)..(228): unsure at all n locations
tgtnntgtatgtgnntatggtgaaaaatttcatcanaaagattcatgttaattcataattgagcgcaaaacctattgtgaattataaaaaagaaaaaagattaaatggaatgggccaagtatgcactgttcacgaggcccaataaggcccacaatgggaagaaaatatctttggaagcctctgcttcgtttctctggcgaatactaacggttttcccctctctcgcgt

SEQ ID NO: 35460 - DNA, 445 bp, Oryza sativa
  unsure (1)..(445): unsure at all n locations
taagcacctgagctgcagctataaatagtaaattaaagaatgctccggttctatctacttgcaggattctactccaagtagaattaatcttgaccgcttattttgaagggcacgtaagtaatctcctaatatcgcttaggggtaattttggcatgggatgttttctttggttcgcatcgcattaggtccggactccatcacacgcagtcacctcgctattnctcccccggcctcgccgncttgtccgcccccaccgtcgccgtccgtatctcccaccgtcgccgccttgtccgcctcctcagtcgcattgtccatatgggagcggaccaatgtggcggcgtccgaacgaggatcttgagcaggagttctggcggtagtaaaaattccgacgtgggcttcngcggcggcggcgtcacgcacgcacgcaacgtcatttgcgtggcgg

SEQ ID NO: 35461 - DNA, 332 bp, Oryza sativa
  unsure (1)..(332): unsure at all n locations
gcaggggcgcagtgtccttcgagcgcttttctctatacacggactaaacggagccctttccatagaactactgccgaccttgcatggnatggcttggccttggtgctgtgatgcactaaagctttgttggcttttacagactgttggctgtctatccaccgtcgcagagaatgatcaacgccagaattttgttgggatggtgaccaaaagatgttgactggaagttgaacaatagaggggactaatacctctctgagctctctttggagaaggaatatgnctcttctaagatatatttttctttttcggacttcatgtggcatcatattttg

SEQ ID NO: 35462 - DNA, 448 bp, Oryza sativa
  unsure (1)..(448): unsure at all n locations
agcttggtgcattgtgctttagtaactaggttcttttgctcanaaccatgattgggttgtgctagctagctgaaggaaaaaggctacttcattaccatcacgaggcaactcatgttgctctggccattcaactagggctaacaaataaccttccctttggactgctacatcacacttcaaggtgttttatcatgatgtattttgaatgttttaggaaggccttgttctcagagagacaattttagggacgtcgataatgataatggggaacattataatctcatcccatgcatctttttttgcccttgtcctacttgttttcatggataaaatagttttaacatttccatctcacccagctgactgttatattgcgaggacttccttagagcatgttgcttaaactaatgtgttctttattgttttgcagctctgcagaacagctgtg

SEQ ID NO: 35463 - DNA, 401 bp, Oryza sativa
  unsure (1)..(401): unsure at all n locations
tgcgagcgaagatgatcaagtgcaccacactcaatacaacgattcggttctcctctnttcctgttcctaacattattcatagctcgagaaaatntgttagatagcacaaccaagtcctccccctcgaactgttcgagttgatcatcggacatggcattaaataaagcaagaacagaagacttcgatgaggaagcaccaacattccaagagattgaagacgatacctaagcactagactcagaatcacctntacgagagagaatattcatctcatgaagtttcagttntgtgtaaagcgaatccaaagtcaaagtagacatgttcacagactcctaaatagatgtaattttcatctccacatagacatgtcaagaccacttcaaaagtgacgagagatctca

SEQ ID NO: 35464 - DNA, 100 bp, Oryza sativa
agcttcaatcctggtcaaatacctggtttcatgtctgttaatgctcatctagaaagtgatagtcttatactccctccgtcccatcttaagtgcagccatg

SEQ ID NO: 35465 - DNA, 486 bp, Oryza sativa
  unsure (1)..(486): unsure at all n locations
tacttatctaatctngaaaatcaatatgcatgaagttggattctcaagacatatactaatatttgtgtgcaatcagtcgtccaaaatagagttgtagtaaaggttgtaatagttcttgcttcttcatctggccttttctctntttcttttcttcaactattcatcattggagattaactatgtttcattgcatttcattcacatgtacccggtgaatgtaagtcaattaaccagaacggtgcacaatttgtcaggagaacattgttttgacttttaactccatgtttctgcattgaacttgcaaataaaaataaagagccatgtttatcagaataaaatggttnttgttggaaagctgttgttntttatactgaagttcgaacaagctgttgagccatgccaccataattgattcagtaagaatgtacccttgtattgntgatatgacctttggttcagcagggggtattaattatattgactctt

SEQ ID NO: 35466 - DNA, 428 bp, Oryza sativa
  unsure (1)..(428): unsure at all n locations
agcttgcctcagctctgcctcccttaattatttgttatatgcattnatctcaaccaaatttaaatagcaaatctgagtaggtttctctgttatctagacatactcatggttcatattgctttctatctttgtttcagttttacttcttatattatacatcaagtttttatgcttttgcttggcagatgagggagaatgcgttgacctgaaattttacgcactccgacctcctccatcggctgcgctgccgctcaacctatgccaccgccggatcgacgggagccgccagccgctccacctgcgccgtcatagggagcctccaaccgacctcctccatcggctgcgcagccgctccacctgtgccaccgccggatcgacgggagccacccgcttcccccctcccctacacctccacctggtatggtgtc

SEQ ID NO: 35467 - DNA, 390 bp, Oryza sativa
  unsure (1)..(390): unsure at all n locations
tgaaccttngttcatcccgagtgaaggaatcacatatattaatcttgtttgttgatcaggagttgctactatgttatatatctagaatgtacaagtgcaaagtttgagtactctctctcgtattaagcaagtagacatggtggcttacccacacacccaatctcatgtcgtaacacatgcttctcttcaccttgggtggctgagagacaacatagatcatagagtacaagtatctcatgcattgcctaactcttattccggaagatttcaaatgatcttgcaaataaaaccaagttcctcaagtgattctctaaatcactcaatgtgtatgaatatagatcctcaccaagagtatgccttcatgactcctacactacagctgaatatgtg

SEQ ID NO: 35468 - DNA, 426 bp, Oryza sativa
  unsure (1)..(426): unsure at all n locations
ttaagtcaccgcagctgcagcttagacagtcagtggcggactcttctctttctcttgacgntggacgacggcgccctcggcttctacgaggatgacatcctccgtgacttttccattctcgtcgtcgccgccgagccgctccctctcgcctccaccggcctcctcggcgtgttcgtcacctctgcatcgggggcgctcgcttctccgagctccctctcgatcgcctcggcccgcattgcgatctcctcgctggttcgccgcgcttccgtccacgcctccgccgccgccgtcttcatctcggccaccgcgtggaccacctcggcgcgccccgtcaggtactcgtactcgaacctggggatcgtgaattcgtgacgttcctggacgaccagctccgcgacgtcgcggccgcggcggtggccagcgtcg

SEQ ID NO: 35469 - DNA, 414 bp, Oryza sativa
  unsure (1)..(414): unsure at all n locations
tctcggtactgggctggtcaagagctaagcactattagtgcactactacattttcagatntcagaacaaacacaagtataacttcaggttttagatttcagaacaagcactactatattnttcagacttaaaagctaaagtttaacatttcagagcaaacacaattacaacttaagattttagatttcggaacaaggattactacattntcgtatttcaaagctaaagtttaaaatttcagagcaaacacaagtacaacttcagattttggatttcagaacaagccctactactgtattatcaaattgtagaacaaacacaagtacaacttcagaattgagagttcagaacaagcactactggcattttagatttcagactataggttaaaatttcaaacaaaccagtacaact

SEQ ID NO: 35470 - DNA, 371 bp, Oryza sativa
  unsure (1)..(371): unsure at all n locations
agcttatggagaagggcgagcaattcattcatatttcatgttttcaacaagttgcttgtactagttagttgtgctaggtatcctgtgtaaattctttcaagcctaaccttgcagcatacgcatttgaaagaaatgatttttgtataatgaaaatcgaccaaattatgaatgaaaaattatattttgttacagaaaaatgatattctgaactaaaatagtatgggtatttgactctgctattacacagtataactgtttgtttgatctgataaatgcaagcacttgcagataataaatgatgaagacggnggcctgcagaaacggaatccttctccatcattgcgtgagaggggggtccaactttctcatgc

SEQ ID NO: 35471 - DNA, 453 bp, Oryza sativa
  unsure (1)..(453): unsure at all n locations
ntagtttacgagtacatgcctaatggcaacttggtcactcggatacatgacaaagagggtgggaaagctcccggacgtttgggtttaagacaaacaattagcatatgtgttaacatagccgatgcactggactatttacaccatgaatgcggaagaacaactatccattgtgatttgaaacccagcaatatacttttagctgatgacatgaatgctcttttgggagattttggcattgcaagattntatatcgactcttggtcgacatcaacaggttcgaatagtacagtcggtgttaagggtaccatacggtatattcctccaggtaattaatatggctacttctgagttcagtttcagctnttggtatagacagctaaatagataactgtactttctcttcatacctatgtagagtacgcgggaggtggtcatccatctacnttctgggat

SEQ ID NO: 35472 - DNA, 432 bp, Oryza sativa
  unsure (1)..(432): unsure at all n locations
caagctnttatcattctggcatcgagctcatttttcgtatgacctcccctacagtatcgtcaccgcagtagagtttaaccaccaaattcgggatggattggtgtggttcctctacgcctaggacaccagaatatcgaaccatgaacgaggaaaggcatgagagaaatattggctagtaattgtgaagccccaattcttgactggaagggacaccaaaggcctctgccctccctctctatctatccaagagatggaagggcagagcttttttttggttttttcatcttttcatcaaagagttgaacaatgaagatagatggcaagtgcctgatcgatttgatcaggtcgtgtaggaacaaggttcaaatcgttcgttcgttaggatgcctcagctgcatacatcactgcacttccacttgacacctatttaaa

SEQ ID NO: 35473 - DNA, 419 bp, Oryza sativa
agcttgatagctactctagtaggtataactgcttaactactgcaattccagaaacagctgcagcacaatggaggctcacagtaacaacattatctccagtaagtacagttgcctgataacttagttactactccctctagtcataaatatttgatggttatgacagtttcggtcaaatcttttaatctttgatattcgattttatattagaacaagtctatctataaaatcttataagttcacaagattatgatagtacctagtacttatcaaggcaattctacatatacattattttacctttaaaagtaagcatctgagagattattgatggtcaaagttttaagtttgagttaaccttgtccgaacatcaaatatttatgaccggagggagtatttagtttaatttctatggtatc

SEQ ID NO: 35474 - DNA, 482 bp, Oryza sativa
  unsure (1)..(482): unsure at all n locations
taataaaatgaactggtaaggagcaattatgccaaacattttgttcttatgtgtntctctgctattatgtctcatttctcgctctttnttttcttggccaatcacatagtgtacattgacataagtaaggtgtttgatgtatttggcatatatatgtttatgtttttaacacaataatattgtatctatgtgacatttggattattgaatctatggcaaaaaggtgaagttagtaatttacaactgataaaacatggaatacatagttcacacatctttgggttattacttgctaactcttcgcatgagctattngcgtgtaattgaataaatcanattcaaagggatttaatgcatgattcttataaacaaaaatattccattcttgtcatctttgcatgccttccttatctcttcagacagttcatgtgagcagttagcaagttagcactcgcgagcagtctttactctgtaacagatac

SEQ ID NO: 35475 - DNA, 359 bp, Oryza sativa
cccagcttgaagctactctcagctccacgatcctccaccccaatgatgaactcacgttgcccactccctcccctggacgcgtcgcgctggcgcgcggaatatagaatactcctaccgcaacttggcccggacaggcacgcacacgcacatgtaacggcccgcaccagccgcgtcggtgctccctcccggacgcatccacgcgccgcgcgcgcaccaaaccgagcttcgatcggtcggtttgcccgcccataatgcagcacgactatagtagtcgtcgtaatagatagtagtcgtcgtagtagatagcctcatatctcgcgcatgtggcccaccgatttaggcgccgacacatggtcgtc

SEQ ID NO: 35476 - DNA, 491 bp, Oryza sativa
  unsure (1)..(491): unsure at all n locations
tgcgatgaaagagagtcttanagatctcctctcctcaagatatgtaagggaccttgctactttagtggttgcatatggcatcagtatcaaccttgtggaggtcacatggaaatcgaagctcaatgcacaggtaactttctcagctttngttggttcatcttcaaattaatttgtcaaacagtttttctaattaagtatttctttcttcatcatggcagttccctagtccaaatgagtattcatctttcatgggtgatttctcaaccgctactggcattgctactttcacaatgatgctgttaggccggatcatactccgaacattcggctggngagtggctgcaatgatcaccccctacagtttgttgctgactggcgtcggnttcttctccctgattctatttgggcagcctctcacttctatgcttgccacaatgggcatgacccctcttncttgcagcagttatgtgggtgcacttcagaacatattc

SEQ ID NO: 35477 - DNA, 403 bp, Oryza sativa
  unsure (1)..(403): unsure at all n locations
agcttccaatatcctcgagcatgagatccaagctatgttcatctcatccattccaaaatattgatggtctttttgctgtcaatagacttgctgcaattgtgttgacgctagcattatcagtcaccacttggacaacatgttgctcccctatctcttctatgtacctgtccacaagttcaaagatatatttgccatctttcctgtcacctgagcattccactgaatctaagaagagtaccccatgagcactatgcacaactaaattcatcactcccctacccttcctatctgtccatgcatctgtcatgatagaacaacctgtgagctcccatgattncttgtgctccttgaatccatccatcacctttttctttcttttctgtaaaaacgatccactcatctc

SEQ ID NO: 35478 - DNA, 138 bp, Oryza sativa
  unsure (1)..(138): unsure at all n locations
ggaaagagccgacgtggcggagagcgtaacntctccttttggnggaaagggaagaatacagtacacatctcaaccaatacatcatcccaattcgctctcgttactataagtctatagtctcggatataaatttcatgc

SEQ ID NO: 35479 - DNA, 429 bp, Oryza sativa
  unsure (1)..(429): unsure at all n locations
agcttaattatctactcttcaccggatgagaagaataatcaattataaaagcgataaaataaagaaaaaaaatacgtacgtagtgtcattaaaaaatctgatgggctttaaagtaggatttcctactatttaaaaataaaatatatcgctctataaatatatgcggttaaactagatcgtatataagatatccaatcaacactctttaacattctatatttcaattatctatttatctatctattgtctattacatactaaaagtttattaaattttatacaaatgcttttaaaccgtcatgtggcacttaataaattaaagaaattcctacaaattctaagagaaaggcaaaacacctaatcctcgatttttcacttaaatcggtgatccgttatttacccgtagattagatctattntaaaaactac

SEQ ID NO: 35480 - DNA, 432 bp, Oryza sativa
  unsure (1)..(432): unsure at all n locations
acctgaggcatgcaagcttntagattttctttgaagttttccggcaggttgatttctttcatgcactaccctgttttcacaacaaaaagtgaaaacaaccaaggttagcctgcaaaggaaaatgactatacagaggtaaatataaagcattagtttaagtaatctctatcatgaatcttccccggcaatggtgccagaaatgcttgttggtatttcttaacgacattacgagaaatataattcccagcaatagcgcaaaaatacttctggtatattatggttatagagttcatccgcaagcgcacagatataccattgtagcatttcacccaagagtattccaagggtatcgtatttattttatcccgtgggaagatcatgtagagagaactcaactaataatttatatattacttgccataatcatatcta

SEQ ID NO: 35481 - DNA, 463 bp, Oryza sativa
  unsure (1)..(463): unsure at all n locations
ctgggttcccctcttcctttgacaagatgactaggcttcattttcggggncgaactttattggtgtaagttgccgaagtgcttgtggcgcacttgtgcatgtgctcaagcgcttcgactcttactccttccaagagttcgagcgatacttcgcgttcctcttggcccccagagaacatcacccttggtgagttagcccctagctctgctgggggcatcgcctcgtcgccataaagaagcataaacgggctaaacttggttggtcttgtggnggtcgtccgaagggcccagagaaccgatagcaattcctctggccatttgccttccgcccnctcgactcttttctttagtgcttctaagatcttgccattagtatgntcggccgcccatttgactgcnggtgtgcgaccgacgcgacctgattccaggtaatccttcgacattctttaactatcaaagcaact

SEQ ID NO: 35482 - DNA, 438 bp, Oryza sativa
  unsure (1)..(438): unsure at all n locations
agcttgtccatgtacgcattgcaaatagaacattaacttttatgtanggatctatgaagaaatcgcttgacttcatcactgagaatctttggagacttcatcactgagaatctttggattcaatgatccgatgatgtacacgttgtaantgaccgctaccagtacaataataagattcctgtaattatagattcgcatgaggtttgcagatggctaatccttttctccaatgatacaacattacacatgttttggtgatagaccatgataatacatattataagaataaggttctgcatttctgattttggaaacctttgcttgcaattggcttggacgttcactcagttctttatataaatatcaactgatttaattaagaatttgataagggtagcagctgnctgtgctcattaatcagtcaaccaaaaccatgag

SEQ ID NO: 35483 - DNA, 373 bp, Oryza sativa
  unsure (1)..(373): unsure at all n locations
ntatgagtaacattnttagatatgtcatatctattccttctcgtttntgtgatctctccatattgcggagctcagtcttcaacattgcttcctgaaacagaaatttattacttaaaaatgcataatctatgctccatttcttcaaatgaagatattttgtgcacatcttgcaaactttaatcctggttagcattcattgaccacaaaaacctaattaaagactttggtacacttttttgcataatttaagctaagtattccttgagtagaaaattcacaagacatttttgattactcaaataaataaggacatntaaccattaatcttggatataaactacagataggtgcagaaactcaacctgttgatatg

SEQ ID NO: 35484 - DNA, 396 bp, Oryza sativa
  unsure (1)..(396): unsure at all n locations
agcttgaggcgtgggaagtatgacgaatcacttatgtgtgttcctaagngnacctgcagttatttaatgttttgagtaagccatttcaatgttccatgctggaatgattatcatctccatggtgtctgactacctttgttgcaagctctctgatggatctcttatggagattacaaaagtctacccattggatgcagttcttgactctcctgaggatgttcctgatgatgtaaagctcatcattttcttttttcatgtcaactcctgctctgtattctgaatcgggcctctggtgtaggttaaagcaaacataaggtatgctggatcttcaaactggactgctaacggaaagctgcagtatgccttttttgccatattacttggaaatagattctt

SEQ ID NO: 35485 - DNA, 268 bp, Oryza sativa
gaccttagatactcagctgtgccattctctttcttcttggctgctataaggatactttttctcagttgacaattgccttgctaacagcttgcattcaaaaccaaaagcaatactgcttcattctgaatcacccctgatagaaaagcttagccatatgtatgatctaactatgcatagctaacatctaatgtaactatgaaatgaacgcagcaagcgaagcgaatgtgaattcatgcggaatgaattgttggaggaccccggacctgca

SEQ ID NO: 35486 - DNA, 498 bp, Oryza sativa
tattaatcgagtttgagcttgatcgagcttgaaccttgatgctatttgttattcatgcttgtctcgagctcgtattgagctcgagcaggcgagttagctctcgagctcggctggttgacaacccctgttgatagctagctggagtatccgtgttattcacatttgcatacactagaattaatatcactgtgaggaataatgcttgcgttgtgagtactcaatcattaattgatttgtatgacctaaattcacggaagtccaattctactagcacaatgatcagatcgaagagctgaaagagtcctgttcatgggtgattattgtaggtgtgaccacaacacaatgataacctcaatgagcacgcaacgcgcagggcccaccgtaagtgacgtgtcggcccaccagtagatgatgtgtatatatggtacgtacgtacttaataataagcgattatgggcaggtgaaaatatatgtacagcaattaatcaaagtgtgtac

SEQ ID NO: 35487 - DNA, 439 bp, Oryza sativa
  unsure (1)..(439): unsure at all n locations
agctggcttatggacatgaggctggtntaccattgaatttagaatngggtnangaagaacggagntgcaaaatgatttgacagccgatgagtattataatctcatggccgacgaaagggaagatttggnntaatnaagattaagagcccttgcaaaggttactgaggataaagaacgagttgctcgacattacaacaagaaagtggtgcccaagtccttttctgaaggagaacttgtatggaaattgattttgccgattgaaactcgggataacaaaattggcaagtggtcgcccgaattgggaaggaccatttcaaatctataaggttgtgtctaagggagcttacgtgttgcaaggactcgatggagaagtttatggacgagcgctaaatggcaaatacttgaagaaatattacccaagtgtttgggttaatgcatg

SEQ ID NO: 35488 - DNA, 435 bp, Oryza sativa
  unsure (1)..(435): unsure at all n locations
tagccatgcttagaatggtcttccttgtcattatgggctcattatatacatgagaattgattnttaattaatctagacagaactttaatagttgtgattttgataaataaaatggtggaaaacatggattttaggtttgggcctcaagtggtgcacatatggtgattagttgtgtaccgatagggggagagtgtgcccaaaccgacctaaggacttcactcaatgtcagttcatttcgtatatagtgcaaccacatgtgctagtatgggatagcccaagcttagtaaattatttatantttagccttacattctggcaggccggtgtgtatgagttcgtataattcagaggagcattctatttaccccgaagtggtagtttaggtgactaagcgtgtccattacaacggtattgtgacatgtggtgggttcccgt

SEQ ID NO: 35489 - DNA, 436 bp, Oryza sativa
  unsure (1)..(436): unsure at all n locations
acctgcggcatgcaagcttggaagagaggcaaggttgtttttcanattctttgttcgaaatcatttttgaaatcactaagtgatttacttcttgttagggttgggtcgaaaagagacttgcgtctcaaatcgacttaagaggtgcttttctacaactcaataggtaatgtaccgacctcccgggtcagatcattacttctcggcttcccagagccattccacttgattaatcggctcccagagcctttttcattttctcggactcccagagtccagctgcccagcagcacaacaatccgctttcactcgggaagcctagactatgatgcccatagacatcccgaatcacacagattcgtttcttgaccactcaggtcatccatctgcacataggctgattctggttacgattcccacaccacaacaacttttcaca

SEQ ID NO: 35490 - DNA, 284 bp, Oryza sativa
  unsure (1)..(284): unsure at all n locations
actcagcttgccgccaccacaggaatcccccagtctagaggtttggaaagccatttattggcggctacaatgtggaagttttcttgggctttatttgggcgccaacaaatatggattttgagtatgaagaatgacacctgtcacatgttgaagccatgtatgtacacccaccacacacactcaggcttgtggtggaaattcttacatactntggaggacaatccaacgtatataattttgaatccttgggcatagttgttaaataatcgttttctttgctaaat

SEQ ID NO: 35491 - DNA, 423 bp, Oryza sativa
gcttctcgtgccactccgtgcacaccaccaattaattttcttttattattctatgaaacaattgggcatttacttctaatagtattacacgtatctgccaagtctcatattcaaattcattatattttagccgtaacaaaaaagtgaaaaaattgacaattcttagggtaaaagtctataagaattttgtcttttttgctactgctaaaatggtatgaatttgaagataagatttcacatgttggtgtaatactattggaagtatgtgtctaatttttttctagaaatttctatgatatttgctagttggtgtgcacagagtgtgtatgggaagcttgtgtgcagaggatatgttccgtttccatatttggtaaatatatggtggttggttgagtagaacgctagatataactatcttaatgt

SEQ ID NO: 35492 - DNA, 462 bp, Oryza sativa
  unsure (1)..(462): unsure at all n locations
atatgaaaatccgaatcttaacactcaaatatttcaatctgtgaacactctgaagtcaatctacttaatatatcacccattgaacatttctgatttctgatttgaggtgtgtcctgaattctaaattttctgacatttttgttgctgtcaagaatatgtctgaattctgaattactgattgacttgtgggcttaattctaaaattgtgttaattaattagctctgcaataatgtgtttgactcctctatttctgattgacttgtggtctgttctctgaatttctacagtaatgtgtcagcaactctacattctggntatctatattgagttgtggtgtgctgcattagaagggtcctcagagtgactnntaacttgttgtttaatttttacagttcaatctcattcgacagaaatgtagatcaatattcagaagatttgagttaagttttgtgattattctg

SEQ ID NO: 35493 - DNA, 429 bp, Oryza sativa
  unsure (1)..(429): unsure at all n locations
agcttcagagatcagctattaatgatggggtgtgttntttcttttgattagtccaaatgtctgcctcctgctcctaggcaatgcagctagtccaccagcgaatgtttgggtgaacactgtcccgtacggcattatttttgattttttgtcgaacaagaccatccaggattttgagataatattctctaaagttggatcctaccatcccagacggattgatttggttcatccaaccaaacactgcgatcagccgaatccttgattgatcctatccatcttgaccttcacgtatcaaatggcccatgtacttttgtatgactttcatcctataaacctatgttcattgttcacacagaaagatgggttagatgggaatattgcattgtattagtgtataaaaatgcatatgtatgttcaatatatgtgtgt

SEQ ID NO: 35494 - DNA, 370 bp, Oryza sativa
  unsure (1)..(370): unsure at all n locations
cagatagctagattatatatataattgatcgattattctggaatcaacagacaaatgagactaatcgaattaattacgatacaatatatctgctgctgcaagatgagcacgatgaatatgcacaccttgatgtggcattcagtcaatggcctgccggttggcttcaaacctctagaaatgcaaagctactgacggccggccgttgccatgactcccatctcctcttctcgatcgagtagctaaaggtaaaaagatggcaaatggtgggccaaaagaaacaaaagaacaatattcttgagcacaaactaacagaatgctcgccaatttcttcacacttnctgaattgcacgcagtacactaacctagcttg

SEQ ID NO: 35495 - DNA, 365 bp, Oryza sativa
  unsure (1)..(365): unsure at all n locations
agcttataagtaattaagctctctaatcagggtttttattcttctgtttgagaagtttgagaaggattctctcatgtacaatttagccgctataacttcatttagcctggctataactggttgagaagctaaccgctaaatgtcttaacctgctacttaaaaacattgctctttattgcaacttgcaactccagcatgtgtcatgcatgaacatggcagntgtgatgtcacttctgagttctctgactgtaacaccagtatcaacgacattgaaatgctgccacatgccaaaagtcttgggctatcanggtatgcatcatcgatcgatcacaccaatgatatatctgtgtacttttctaaagctg

SEQ ID NO: 35496 - DNA, 396 bp, Oryza sativa
  unsure (1)..(396): unsure at all n locations
ttattttggtgattacatacaaatcggaggtgcctaaaaggtttgcaacttcatccttcaatggttttttttgtcatgctacatttgcacctatgttttgcacactttttttgtctccaaaatttagntggtagttgatgagagagaaaatgtgtgtggggaagaaagaatatatagaaatttagttcatttgctaaacaacgttttataaaatagttgagaaggaaaactctagtgaaagttaatattaaataatagaaaacaaactataatataaattaaaagaaggtaaacacatttaaaatagtttaaaactttaccaatagttttaagaaatattggngtgatatatatgagtttttgatgaataagatatctataatattgatgactgca

SEQ ID NO: 35497 - DNA, 469 bp, Oryza sativa
  unsure (1)..(469): unsure at all n locations
acctcagagtcacctgaggcatgcaagcttatcgtacatttctgcttcaagtatcatcagtatgtatttgaagcatgangtatttgtagtactacatgcccagtatcacacgagagnaanatttattatggaccaatagatattgttctaccagctaaccaaagaggacgntnaataatcaaggcagaggagcattaattctgtgcacagtaatcagcggtataaagtgcaagtcaatgttcaactgaagctctgacagcaaatatgttatagtatgctttacatcttcaaagaagcagaatataaaactggattaattgaaagataactgtacactggattatgcgcatgacgaataataagtcatgataaacgactatgaacaaaattaattgtgcctaacaaggagatcagacaagaagataaggagtacctgaagcaaaatgctactgatggtgcttaatcggtc

SEQ ID NO: 35498 - DNA, 370 bp, Oryza sativa
  unsure (1)..(370): unsure at all n locations
ctaattntttttgcatgtaatgtaagcaatataatctcttacagggccatagcttcgcgagtcccagctgacgtcaggattatccccttccacccagcagtgccccacgggtatctgccggatctcctgagccgccggcacctggatccagtcgccgggcaacgcgatcaacctcttcaccaacaagctccggtgctccgtcggcgacctatcagaaaaaaatcacacaaaacaattcaagatccagaaaaagaacaaacaaaccatccccaagaactcactcgggggtgacagcgggcggcagcggcagaggcgagagctcaccggaagacgacgacgtcgccgcgggacaatccgtagcgggcgtcga

SEQ ID NO: 35499 - DNA, 399 bp, Oryza sativa
tggtcacaaccaagcccaactagaaaaaaatgagtcgtttatactatattagttagggtaagtagtgaactcaccagttcctgatagacgacggcatcactattgttctcaaatgtgacagagccgtccgggttgaccttaccccttgcccgcgcccagttgcgagctctttgttcagagatgtctgaaaacggggcagggacattcgctactgcagcggctgcatcttcttgggaccatattgcctccttgccgatgtaccctgcggtgcctagccaatgtgggtgctcattccgctgttgcagtaggcgatgtgcctcgcttgattccctaaactcttgggtgttcttgagagagcagaattcctcccacactggcttcggtatttgagggtattca

SEQ ID NO: 35500 - DNA, 447 bp, Oryza sativa
  unsure (1)..(447): unsure at all n locations
ttaagtcacctgcngcatgcaagcttgcccncattaaatagtcacgtttttctattgatactttatatatctgcatgtttatttaaataatactatttcttagggcaaaatgagcttttgttagattaaagcaggatttgcaatatttgcttcgtatccgcatgctaccattcacatccaactctatatccatcaaatatctatctatgaactcttatcatatccttggttcaggaggattcgtcagttttgacccttactaacaactaaaaatgggctctgacaaaatctcagagaaatggtagctacattagcctgatgacacacgttcgtgtagaggcatagtttcaatgttcaatgatggcgcatgatatgattaaataatcatcatgtgctaatcttgccccgattaaatagtcacgttccgagggtatatacgtgtgatca

SEQ ID NO: 35501 - DNA, 324 bp, Oryza sativa
gcaaaagcatatcaacgatacagagcagaacacaaagaatgacgggacacgaacaatatatgcagagagaggtaaagaacattcctcgttaggtggaggaagcagtaacgtggtgggtactgataaccttagcaaagtcaacccgtcgaccctcgctgccattagccaggcagaagcgaccaactaccgccacgagaacctcgcagcgaagatagaactccatggcaccagattaagtctcaactctgatctctggtagcacgccaccagatcgaagagatgacattggattggccatgagctctgctctaccgatcgacccct

SEQ ID NO: 35502 - DNA, 441 bp, Oryza sativa
  unsure (1)..(441): unsure at all n locations
agcttncttcttgagtccgaggccccaatgtcatcaatcctgtctcttctgcattggtcgttgggagtataagacaatttatgggcggagctaaaacgaaatagagagatgtaccattcacttgctttactctactttaaatcaagtttaagctaatatgagtatttgagtttggattaaggaggtacatatatagtaaaaatagaaaaactatagctaaaaaaattttcttggccaggtttctgggcacccctctctcctacctagctctgcccctaagtgcattgcccgttcttctctactagtcaagttttaggttgaactttttttttacgggatagttttaggttgaactgatctatccatatatgccctttaattgtccatcagcttaagcactgcggttaaaataaaatatgcatgcaaactctgccttactaa

SEQ ID NO: 35503 - DNA, 441 bp, Oryza sativa
  unsure (1)..(441): unsure at all n locations
actcagctgagcatggttgaccatttttggccaagtttgttaccatctgaacaatgatttcatcttcctgaanaaaggagcatgccattgtgagcgtaagatgagtaaccaatacagtattatttaagagatgaaaataaatcaaatagcatgcttacttctttggaccatggccctttgactaattcagggtttagaaccttttgccacctgtgcaagcattgtacatcggttctatccggaaagcattccgctggaaaattagaatgttctctgtcaaaacttggagttttaacaatatactggaaatctcatcaacagggtaagcatgtctagggtgtgagttaatgaaacagcagaatgctttcctgacatgagttagcataacatcgaanataaatataaaatatgctggatggttatgatatctagtgactaaag

SEQ ID NO: 35504 - DNA, 418 bp, Oryza sativa
  unsure (1)..(418): unsure at all n locations
agcttatcgtccaatttcagttcatatgcatggtattgaccaaccatgcccttgttttggagtgctatgcagttcgctagtgatgaaaatggttgaaaatgatatcatttttattatttttacgttaatggtattgatacacggtcgcggatttttcatatttataaatttagttatttagtggtaacttcaatatgtagatagaaattaaaagaaataaattttactgtcagaaataataaaaaaggataatactttttactatattttgtgaaaacaatatcggtatggtccgaaaattttgtactattttcgtcccttcagtcggcgacaatttagtggtctgctcatgcccttgctcctccagctcatagctttngccagcaaagacatgctatagccggntcaaatctcttac

SEQ ID NO: 35505 - DNA, 365 bp, Oryza sativa
ggccgaatccgaatcctggtttcataactcaagagctgtgaataaacatgagaaattgaaactggagcaatccttgccgtggccatcagtccttcaaccgcggcgtcgaattctgaatccagcccgttgatgatgtacgccaccagctcctcctcatccagcggcttccctgtagccgccatcttgtcggcgagggacctcatcttcgcgatatattcgctcatagacataggtcccttctatgtggtggttaaggcgaggagtacattgattgtacccgccttcgacttgcacgagaacatgtcatcaatcatgttccatgcctgggccgccgcctagcgccggcacttgtgcagcacctcctg

SEQ ID NO: 35506 - DNA, 351 bp, Oryza sativa
  unsure (1)..(351): unsure at all n locations
tcattatcttcgtctttgcttcggagcagacgttctacttcaacaacttcaattatttcactgacaattttggatgccctatgctgccataatctacttcaagtatcaatcaagcatctgcaaccgctatagcaccaagttctacagccatcttcataaatcaaggggcattgcatcagtcttcattatgcacacgctcgtatcaagaaaattattcgagcttcgatatcttctcaacagtttgatggattattgtcattgacttcatcaccaacacctctacctcatcggccctgacatctctngccgtgctaatggatgactacgtcttcttctccgggtgcttcgtca

SEQ ID NO: 35507 - DNA, 342 bp, Oryza sativa
  unsure (1)..(342): unsure at all n locations
gctgatggggagagaagttgaatagtactgatgatgtgctgatggaagcatcatggatggcaaatataatgctcagtcttgctgcaagcctgcgatgcagcatggtcatggtttacaaattgcaatgctcattgaatgcttcgctggtcggtcacaagtcacaagcaagaaagtgaagaaactattgcccccaaccccacagaccacagtggaagaacagcgagcacctccctcctctgcntccccaccatgacacacaggttcctgcattcaagtcaacacaaacaccacacaaacgcccttgccgtgcttggcgctcctcgcanactgtggcccatgggc

SEQ ID NO: 35508 - DNA, 344 bp, Oryza sativa
gcttaattgaaattctttggttcatgggtatacttttatgcatgcctgctattctatagatgggttcatcttctttttattgcaacacatgacatgatatgctatatgtatgttaagctcttatacattaataaacataattcctatgcttgatgaaatcattgtcaaaagggggagaaaagataagttttggggagaagagatgagttttgggagcagagaaaagtttttgagaagagcatgtttttggttcaattgggaatttctttcttttaaaaagggggagaagttttctcttggatttttgagcacgatgtgtacgtttgtacgaagtgtgcttttta

SEQ ID NO: 35509 - DNA, 422 bp, Oryza sativa
  unsure (1)..(422): unsure at all n locations
aactaagctagcaggatgattcttttatgggtctcagtagttataggatgttcttgttcataaaagcagntatagggtgctaattgtctgtggtgtgtgaattgggtacggtcttcatgtggattaattctaatctttttcctctaattaatcgtgcaggtgtaacctgatacttgttggagcatctgccatttgctgggctctatggntgaagtaaaatggtatacgttttgacaaatcatcatctacttcctatatgcaggtaattttcagggcaacacacttggctccggttgtgtgcacagctactaaggtgtgatgatgatggggagtttctataggtcgcatgccgcanattggagtcgatggttatgcacatttattcctaattatggatggagggtcacacatagacttgaata

SEQ ID NO: 35510 - DNA, 412 bp, Oryza sativa
  unsure (1)..(412): unsure at all n locations
ctgcaagcttgttgatggggtggtgcggtgaggaatgttactctttcttatgagcactggcaacggcaacagggcggagaaagtagcggatccggtgcgcatgagagaaagcagatcctgggaaaagaggagggggtggcatctggaaaaagaagatggtcgtgatgtggagccttggctgtgggggcatgggcaaagaagaagctggcgtccgtgctgggcggaaagcacttaatcggccaacttattttcccttttgcgtgttatgagattattttttttatggtaatgggcataccatgccgaattataatccgagatacaacttctccaagggtgtttntcagtccaactgaaaaatgatataagccagtattttacaccgttttggaccagaaacagacatttcaag

SEQ ID NO: 35511 - DNA, 403 bp, Oryza sativa
  unsure (1)..(403): unsure at all n locations
tcatgtgacagaagtgtcacagacgtggagcanacagagaactgtgaacatggtccattggtatccggtgcgtgccgcagacttcagttcagcacattttctgttcctgacctaaacgatgaggcacctgttcccatggacatnttcccggacaagtgttacaattcatagattgtaccaataagatccaacgatagtggtggctaaagacctgcgcggtgggccggagtgctgaagctgaaccacctgctgttgaatctcggccagagggctgtgaacaagatggtgcttccactatttgccgtgagaagcagcttgcaagaccgaaggagttggatgaggaacttgagtactgtgtgcagaagatcacgatgctggaatgctanggacacatagataatga

SEQ ID NO: 35512 - DNA, 426 bp, Oryza sativa
  unsure (1)..(426): unsure at all n locations
agcttaaactggaggaacaatccattagggttacctatttggttcgagcgtccaaagtgtgggtgcagagatcgctggcatgtggctacatcctttgctgaacaaacatttcgaaggagatattttgtctgccccaatgtatacaacgatttcgttgtatgtctaaccatttacaaaatccgctatgatttgcacanaattactacccaaactgaataacattactatttttacagggcaatccaaggatgggtggatttactcgatggatcgacaatgtcactccatcatatcatggccagaagataacagagtcagaaacacaagttgagtatcaacgattgaaggaccacgagaatacaatgcattctgaccgacctataaagggccgataggttaccgcatgcttgattcgtcgggatcgac

SEQ ID NO: 35513 - DNA, 461 bp, Oryza sativa
  unsure (1)..(461): unsure at all n locations
ggtgtgtcactctacccttggattatcataacccctgcttataatatgattatcacaagtnatatataaattattagttgagttctctctacatgatctttccacgtgataaaataaatacgatacccttggaatactctcgggtgaaatgctataatggtatattcgtgtgcttgcggatgaactctgtaaccataatataccagaagtatttctgcgccattgctgggaattatatntctagtaacgtcgntaagaaataccaacagtgacttgatctcacttgagcatcaacattattntcatttcttggtatctatttctttcattcaactcaatanaactggtagtcccaatgatctggtagtcaaacctcacttgttgaccaaccgatcgcatattaaatgatatgaataatntgatgaaaatcaacaacaccacaaatgtcatatactcacaca

SEQ ID NO: 35514 - DNA, 392 bp, Oryza sativa
tgcagctttaaattttgcgtctaggagagaatagataagtttatgctatatgaaagatttagggaatgatttccatttaatttattcgtatggatgtttatggaacggaattactaacctttcgtcgataaaaaatccatccccaaatattacctaatttatgccatcggatgagttatgtggctcgtactctaaacccttgttgttcaactccaacaaccttctcttcttcttctccggagacaccatgaattccgaagaaggacatatgggttatggtcctggattacagatcggagtaagaagaacgacagagaatgagttctcagcctttacatggacacaaaagtgagaggtggtggcttgatgatgggcggcggagtatgcggact

SEQ ID NO: 35515 - DNA, 473 bp, Oryza sativa
  unsure (1)..(473): unsure at all n locations
ctcagcttgatcattacatattcagcttctcgttgtgtagagactatattaactatccaagtaagttgataaaaagttgtaatcacagccgctatgccaataatgaattntgtagatcatgcaagtagctatatatattacctcaaagttggcaaggctttagtgttaaaataattcatggggtgatgacatgaagtgaattctgacatattaatcaaagccaggatagtagaaacgttttccatactagttatgtgtcttaatgaattgaatagcccttttttttcatgttntatgctgagctcttggttaaatgtattntgttcccttttttcagtccacatcgatgttgtgtgctcctcagcttttcttttaagagtactggagatagatattcattnttcgtgaaatatttataggtgatacttcatgtctaaatatccacattccttatgtgaatatattcttcgaat

SEQ ID NO: 35516 - DNA, 362 bp, Oryza sativa
  unsure (1)..(362): unsure at all n locations
ttaggacagtttttcatttcttcgcccacattcaatagacagagcctaatcgccacaacctgacgccactattncatagaaaatggctcgattcgtcatgatgcgccatgttcccaagcaagtacaagcaatgaacaacttatgatgcgatctgttaaggaaaaatgaccacggtacaaaaagtcaaagctcaccgaatcgaacacccagctcaaccactggaacactcaaaattccccgcaacaaacgtatgtcaatccagggtcgtctaggatcacgatcgatcgaatagatgaagcgagaagcaccgatcaaatcataattttaccctctcgggtgtgaagcgaaacaaaaacctgtac

SEQ ID NO: 35517 - DNA, 442 bp, Oryza sativa
  unsure (1)..(442): unsure at all n locations
ntgagctagccgcatatccctgaaacttaacggttctatttttaagcaggaagaatcagatagacaaaggaattgaactgtcaaaaaccccgcaaactacgaagcatccgaccaaattccaacaacacatgcaacacgaaaccaaaacaagcaatcggccacttcaatcaagctaccgaaccacaaacagcaaggattatccgcagaaacacacctatccagcacagcagcagctcaacatggnggaaatgtgtgaacagtaacacctaatataacaggaaactacagcagctagcaggagaatacatcaaacgccagtgtctcaaaccccaaacgaaccaaacacgccgagaaaagacagcacgagacaaaaataaagagcaaaaccaccacgaagaccatagaaatcctccgcgcgaactaatcaacaaaaaacaaacaa

SEQ ID NO: 35518 - DNA, 381 bp, Oryza sativa
  unsure (1)..(381): unsure at all n locations
atagattgtgccgaatagtccatcaccttgccaggacctgcaggaaaacaagtcccctttacccctaacacccntaatgtaagtcgcgctatcctaacctgtgagccacgccacctgttggagtcggggcccatagattgtgaatataccgacgtatcttcggaagaattaacaagtatgccccccacacccagagattgagttcgccatataattggcaccaggcactgctccaattgcaaaaagaccctaccgaatggcacctaatgagttttcacaagttaaaagacaaatcgaagaactggaaagtaaaggttatgtgcgacctaactcatcaccttggggagccccagngcttctggtaagaaaaggatggctctg

SEQ ID NO: 35519 - DNA, 424 bp, Oryza sativa
  unsure (1)..(424): unsure at all n locations
taactttacctttngttaaagagtagaaccgatgctagctaacccgaaagcaagaactcgtcgaaataaaacaagagccaaaaggtggcgatgcgccgaaattgtattgaatgtgtgtccctctttttacatgaagctcacggtctatttatacccgagaattacaagatatatccatctcggacacgactattatctctaacacactctaaaataccataagtctttacggcagactnttgcccacacatattttaaggaaattacataaaatatcctaattaatagatacagntgccttctcaggactctatccttgcgtggcaaccaccatgaagcatattaactcaacccgatgacatacaccaaatcgtattgccggaatcggctgtatctgctagccccgtccgactcgaacatctgc

SEQ ID NO: 35520 - DNA, 359 bp, Oryza sativa
  unsure (1)..(359): unsure at all n locations
aagaactaacgcatatatgtgacttgttccactggatatgatagatcaccancgtgtgtgattgcatatctacattgggtgcaagatacacctctccatattgctcacaagttcatcactggtttgcactcctgtagacctgacaggagttgttaggtgacaaaattaccttaattgactgggcttgatccatctgcataagcaagtgtgatccttaatgttcacatttgtctgaatatgcaaaactgcaattgtgtgggcgacatgggatctcattgcactacttgaaaacggaacacatgatggtgctcccacacattcagtatgctttgtttggaacactggtcgggaagtacatt

SEQ ID NO: 35521 - DNA, 253 bp, Oryza sativa
  unsure (1)..(253): unsure at all n locations
tgcctccatctgctcccacttcggcatcgcgacgctatatcttgttgaccccaagnggtgacggcacttcttcttggaggcattctctttgtatccttccatcatcgcctgaccttgttgacctgtcttatatgctacaaactcgtcccagtgatcccttagctctgggaatgtgtcgaagttcggtgtctgccccttcaggatatatatctgggacagatatcccttgaatctctgaaactgttatgccatt

SEQ ID NO: 35522 - DNA, 385 bp, Oryza sativa
  unsure (1)..(385): unsure at all n locations
ggagattgctcgcttggtgcatgactgttgttatgtatgggtgataagaagacgacgatagtggtggagtgtggcancaacggcggcaggaggagaggagttatcangtgggtaagtgatgggagtgatggaaaacaaaccaaccttattacgctttctttcttttttccttccaaggattagacttgcactgcaaaaacaattccaagatttggggttcgttcctatggattcaatcacaaggaaccagtcacagcgaaatctgcgacggaagaatgggtacgaccgcggcgagcttggtttccctgagattgctcgcctccgcttgaggccgccacctgcttgaggccccccgctgcagcttctgcctgcttccactgccgac

SEQ ID NO: 35523 - DNA, 341 bp, Oryza sativa
  unsure (1)..(341): unsure at all n locations
tctccaggtttcatctcanattaatgtactcctttntgaaaagattacgacgaagttctttaatattatttggtccttgatgaaaattactccaagcagtccaaatctcatgagcangttgaagatgagcaacacgatcataatccgaacgagaaataccactcaaaagaatgtgcgagctttgcaattttgtcaaaagcaattttttcagcagcagtattaatcgcttcaggaatcacataaggatgagaaacttttctccaaatatcataatcttcagccagaatataaaagggcatcctactacaccaatgagaagaatcccgtccatcganaacatg

SEQ ID NO: 35524 - DNA, 283 bp, Oryza sativa
gcttcggcgtcaacgacagcgtcaaaggggacctctcgccgtcgcacccgcttcatgccagcgttcacaaagacttctatttcttcttattcattctgccacctctcgccctctaaagcctagctaacacgcttgaatcccgccgcgcgcgcaagatgccaagttctgggcggacaatatgatgttctgagcggaagccatttacagatccgccttcaacatacgcaaggatcttgatgctcaaatcctctccgagtaattcactgaactatccccatgtaat

SEQ ID NO: 35525 - DNA, 433 bp, Oryza sativa
agctttaccaaaacggacaaaatatgtcattatcttatttatgcgtaactttctcatacggactcagaatcaggaaaataatatatccacggacatctacagaaaaaggtacatccgattcttattggctttgccgggttcgacgatattaaaacctccaaattctgcttgcaagattgggtttttgaggagagaagtttttcggtagacatttggaaaattgcacatgctacatatttcgtccgtttgagtttatttttttatgggtggctcttgtgagttcctaagtatgaaaaaaatatccaaaaaattaattaaaattaaaaatgtggacatctctctcctctacactagagaggagagagaggagaggagagaaaaaattctacaggtcacatattttggctatctgaagtcattttttctatgaatg

SEQ ID NO: 35526 - DNA, 485 bp, Oryza sativa
  unsure (1)..(485): unsure at all n locations
actaagctgagaagtttgggttttggctagagtcgagtattttttgtcatattaccactgaaagattcagaattatggttgtaaattcctgattttgaataaaaaattacgatattatatcgaaagttcgaaccacaagtagatagttgtgttttaaaaaaacattactagaaagtttcatttggtttctcaaaagttctgtggttatattgatagtttgaaccacaagtagaatattgctaaatttctagttgaaagtttcagttcatggatacaattctttgtgattatgtataatgctagtttgaaccacaagtagaaagtttttaattattaattgaaagttcagaatgtgaataaatggtctgtcatttatattgaaagtttgatcacaagtggaagtnttcatttctagttgaaatttctggtttgaatcagaagtcgtggttattgtgaagtctgagccacgagaagttattgaattt

SEQ ID NO: 35527 - DNA, 429 bp, Oryza sativa
  unsure (1)..(429): unsure at all n locations
agcttagctcgctcttacctttttcgctgcatttgtaatctttcatatnnttgtcagatgtggatctgtatgtcaacaattatcgtttgtgtaccctagttggtcctggacaggggtttaatacacattcatcttagaaattatggttcgtgaatttctgggcgtgacattttgtcaagtctcctaaatgtgtaacacatctggtcgccgccttcgagtggtttgacgagcacacctcaggctgaagttgactggcacgctaaaggcccattaatgtctccaatattcctctctcgaggtgtcggatatttcattatgcttgtttgatgactcgaattattcacttcatctctcaattataatggaaggtccggagagcctacgacagtatgaaacaacggtttcgaatgtattgaaacatgaaacaaa

SEQ ID NO: 35528 - DNA, 336 bp, Oryza sativa
  unsure (1)..(336): unsure at all n locations
tattctcaagctagtggagtatgaatagaatatatttctgagtccggcactcctcggaagagtacgggtatggctctatcacctctcatttattcttttgtaagactcgtactatatgtagaatattcttctttatacaactctggtattgtaatactttttcaatactatgaataccaactctactttatatctgaggtatgttgattatactgctagcttattcgggagatgctcatggggccgntataatgtttgttatgcaatactctatgcatgacgatgaattagagtagatctgtagttaggcgggagttagatactgggatcatattt

SEQ ID NO: 35529 - DNA, 419 bp, Oryza sativa
agcttgaccatggggacatcgctctgcaagattattgcttctaatacgagatttgcagtatttatgataaatataagcatctacaaccattcttctaaatatgttagaaatgaaaaccggaagatggttgtggtcctcgcaaagcgacgtgacactaattccttatgtgagcatgaatcctgcgggattttgaaaaagaaactttcatgctcatatgtggaatgttttctctcgtcctcgagagtcaatgtcttaagcttgtccgtggcctgaagattttcgttctcaagagatacatcgtgcaagaatcgggttgtttcatgatgataaacaagaacagtgttttgagggccagagggacaaggcttatgcttgatcgagggtgatgagggttgtttagtttcatgaagatgggaaat

SEQ ID NO: 35530 - DNA, 486 bp, Oryza sativa
  unsure (1)..(486): unsure at all n locations
tctgtctgcgttcgtcgagcagagaatggtggctggagttgaataattaatctntcagcttgccgagcccgtgctgttccggtctttgcaggtatgaaactgtctagtatctttttctgctcctgtgctaatgtattactctctccattccaaattgatctacatattttataggtacaccaagaccaagaaaagctaataactctctcatactatatttactctagcaacaaactcaatgcatgtatcattcccactatttcctagccaatagcaaatcanaatattgcatgtgggttataaatacttgtgtgcatggatgcatgcatcaatgtccatntactccgatgcacaaataacgaatagacttaatgaatgaacacanatatgtagatcatttangaataacctcanaanaactatatgtagataatattgaatgganggagaactagtatgatgtgctacgatattcattatggatgg

SEQ ID NO: 35531 - DNA, 433 bp, Oryza sativa
  unsure (1)..(433): unsure at all n locations
agcttgttcttcatttgctcactctttatattttattcgngaaaccaacgaattaagatcgatcgatgtcaatgcaagtgtttaacagcgataggtatccgcgccgacggcaagagagaagcagagcacatggatgggtgcgtggcgtcaggagtggatgatgaagcggccaagcgacaccgcgacacagctatctatctatctcgatcggcctcgatcggtagctagctcacggcaagctagctactccatataggagtatgttcatctcacaaacctgtctctctctgtctgatgctgaagcatctctcttttctctcttctttttcatgagatgtaaagcgctgctgcatatgcatgcatgaatttgatcgttccaggaataacatggacagcttgtgagctaatgcattgcatgcttgccacatatcta

SEQ ID NO: 35532 - DNA, 494 bp, Oryza sativa
  unsure (1)..(494): unsure at all n locations
gagctttagtaaagaatcatcttctaaagctggatttgatagtttgttgtgcttacatcgnncacgtgagacaagaaagaaatcactcacgaactggactgaagaggatctgttatactgaatccttaatcccctatatggcagagcatggcctctttcaatcatagcagatgcagttttgaccacaaattcagaaattgttggagctttgtaatcttctcttgtagacagaagaaaattactagtgatctcttgtagaccaagctctttaatactatatgaccaatttatctcatcctccatctcagatttgagcttatgttgtgcagaattaagctctacaccagcccacatgtgaagccaatctgaatgctcgctatatatggaanagacagataacgacctgtacaggccttcagaaatgaagctatcttctgttatcctgaatctgcaagcaacttgctttctttatcataagtatcaatatggcattc

SEQ ID NO: 35533 - DNA, 301 bp, Oryza sativa
  unsure (1)..(301): unsure at all n locations
ttaaaagaanagttaagataggtcacttctattctcacttgttctccctttttgtgttgattaatataaaggctctactgcaattattatatcaaaagacaataaatacatactccaatatttacgtcttgcatatatatcatattgttttgtgggaatatatcataactttctattcctccggaatcagttgattacttcaaccactcaattgagattcacgtatagaatgcagatatatccgtgcttaattaaatcacgcaaccaaacgactcttgggcaagctaaataaaaacaatat

SEQ ID NO: 35534 - DNA, 419 bp, Oryza sativa
  unsure (1)..(419): unsure at all n locations
agcttggtgctcagcactagagattctatcattcttcaacatcngnggggctatctagaaattcaactaattaatgataaaatgatacattttatatctgaaacatgcagctttttgtgcctactaaattgtccagaagcaagtgcacctaaaagggttgtcatctttcccctaagtcatcttaaccagctatctaaacagcctatgagaactaaaaggtttattactgaaaacaaatgcttgcatagttgcatttcagaaatatctagtaagcttgtcaactgaaaaacaggtgataactactcttatcaatcctaaaaaactgtcatttctcttcttttggacctctcccaatctcattgtctntattactgaaaacaaatgtgtgcattgttgcattacagaactatctagtaagc

SEQ ID NO: 35535 - DNA, 460 bp, Oryza sativa
  unsure (1)..(460): unsure at all n locations
tgtggaagtcgttggcatgcagtgatgcagatgcaatcattctttggtggtgctgctgtanggctagttcttaactgaattgtttcatgtgccacattgttcctccgcattgtgtcaatgctaactgtagtttatgttgaatgtgcccctgtattctatcttctcttctttttgtaagcttaatgtattcttttctcggatgcaggatggatcttcacatgccatatcatcttcaaattntaactgtggcgagggatcggttgactgaaatgagtgaaattgaactgaagtactccaatgtccaatctacgaacaggtttgattggcagcggtaaatactctgaagcacattattctgtcatacgtcctgaatgtctatacacaagctactttgcatgtcatgcatcacacatgaacacccacgagccatggcagccaggcgcgacgtgacactgaaact

SEQ ID NO: 35536 - DNA, 431 bp, Oryza sativa
  unsure (1)..(431): unsure at all n locations
gcttcacgccaacatatataggaactatgtctgtctttcacaaaagtaccgatttggaaacaatactgcagtcagatatgcgctctccatgctgatctccttcagatttcagtagccagaattgatctgttccccttcttctaatcggctgttgagctaccgatcatctccctctaggagcaaaagcatttactcaccaacaatgagccgtccatcaccggcgattaattccatttatttccctcttaagcctctttcagttcctctttgactaaattttttacagggctattgctttatttttaacactacacgctatactttattcactttcaattngatgacagtgtcaagaaatccatttagttcccattcattcacatgacaatggttgaaaaatgagttaattatgaactctgctaggagtcatt

SEQ ID NO: 35537 - DNA, 262 bp, Oryza sativa
  unsure (1)..(262): unsure at all n locations
gagctggccccagtgacgaaccactttttgtgtttctggatcaatgaaagtgntcgcttcacatttcgagaacaactcagatttccgtacgtcttggggcgcctaaacatgccaggaatcaacattgttactgtatgcactctgagggatctcgcgaacagtttgggtcacacaagaaaagtaaaaccttttctactcagaccaattcacagacatctgccatgtgaagcctatatctggttatctgctgacaaacaactaa

SEQ ID NO: 35538 - DNA, 411 bp, Oryza sativa
  unsure (1)..(411): unsure at all n locations
tgcaagcttcactaaagattacccatgtgcaccagcttatttcttgtgaatgaaggaatgggttgcaccacaatcaaacaatattactgccggtgtccagttgacggggaatgtgcccaatataacctctggtgctgactgcgcctcctctgcagatgcatgattaacacgggcctgaacgaacttgggtccagcacgtcttggcttcgggcactttccaaccgtgtgtccgggtttgttacaattgaagcaaagtttgggtttttctcccaacctcttgggctgttctggcagaactggctgaactgattgagctggaatctttagtgaactcggagtanggttgacgctgtgctgctcacttgttgtgtgactatcactatggtgggtcttattgaagctacccgggtg

SEQ ID NO: 35539 - DNA, 483 bp, Oryza sativa
  unsure (1)..(483): unsure at all n locations
gcttgacacatgccacactatattngcatgatcatgcacgccgactttatccgtcaacttgctcatatttatacatatcacaaatgcatacacgttgtatatatgcatggctgtacaatgttccgttttatacatagatagtgggaaagtgattttatcacccgagcggatatctctcgtttcgtgcatgccacctaaatagttatcaaaaaatatattttttaacatagattaaaatgaaatatatcactccacaaacatacaaatttaaatttaacttctacaagttgtaacaaaaataacaaatatagntgtgaatgtgcgataactatttccagtttaatttgttatttctggtgtaattgtagaagttgaatttagtattgcatggtcgtgaagtgatatattntgtattaatccatgttatcaatatatttnttgatttttggaactatttagatacatgntatgaaaacacatata

SEQ ID NO: 35540 - DNA, 351 bp, Oryza sativa
  unsure (1)..(351): unsure at all n locations
atgagtattgtgatgggtggaccctggacagttgttcttgcgggccggcaagcttaccgcgcgttgcttgcttcaggaaaagagcgtcaggccaagccggataactcgctccggcacggtcatggtcgcgccggtgaccgtcttctggttctgggcaggcaagcgcgctgccaagcaaggtttacctttttcgttntttaagtaaaactgaaagtcggtaaaaactgacaactttcaatcaacgttgtacgaanaccagttaataccgatcggctttaccaaaccagtaaccctgctgtcangtactacgactttttagataatgaanatagattatatatctggctttat

SEQ ID NO: 35541 - DNA, 417 bp, Oryza sativa
  unsure (1)..(417): unsure at all n locations
ggatcttaagtacctgggctgcagctgccgttcccttggaacgacaccgggttctcatccactccggatggatgacctcttggatgaatctggcctccagaagtcgcgccacctcctcgcggatgaaggcttgacgttccggggcctgccaccgcactttctgccggaccggccttgcgcccggccgtacggcgagacggtgctcaatcacctccctggggaccccggtcatgtccgccggtctccaggcgaagacgtcggcgtttgcccgcatgaaggagacgagcgcgtcttcctatttatcgtccagaagaccaccgattcgtgtggtcttggacgggccgtcgcccagggcaacctgcttgatcgggacctcgtcgcacgtgatcatncgatgcctcggggcggctgggacgg

SEQ ID NO: 35542 - DNA, 481 bp, Oryza sativa
  unsure (1)..(481): unsure at all n locations
tatccatcttctgtgcctaccagacatggtatgtctcaagtctctttctgcataaattatattacttctgcagtgtaacaagtagagaacagttgggctctaatatagcaatacttcagacgtggtattcattcacttcattgtcactttctgtacccccattccaaaatgtaaggtgttttagtttttttcctaagtcaaatttctctaactttgaccaaatttatagaaaaatatattaacatcgacaataccaaataaatgcactaccaagacatttgatggaactaatttgatgctgtagatgtcggtggtcaaagttagggaagattatttatgaacaaactagaatatcttacattntggaatgggagaatttgtatgtgcccatctatcggtacatgttctgatatgacagtacttggtgaaccagtatctatacatattcactntatcatagacatgataatttccaaatgtg

SEQ ID NO: 35543 - DNA, 381 bp, Oryza sativa
cttatgccatcccactgcatatgctatatggtgataatagagtttactattcaacgactggatattataaagcagcttctgagaacctacaacaagataaattgcttaccaacgagggaccctatccttttgttccattcataatcccagtgcacacttgtgcacctgactgtccaataagaacaaccaaaggatgcttccccgtagacctctaatagtgctctttccaacaactggtattccgtttgtgaaacgtctgtcacattccattcatttacccattctcctgaaaaatgagaaaactgggattaagatgtaccgaatacaacgaaagaatggcttgccagagctggattaattgagaaagcaccattattcatt

SEQ ID NO: 35544 - DNA, 503 bp, Oryza sativa
  unsure (1)..(503): unsure at all n locations
ntcgcctttccggacgatggcccaccacgggcccncatacgatggttacaggcccacgtcatcggacgcgagtcgggacagcggcgagggaccagcaccaccaccaccggcgcagcgcaccaccaggcacggcatcgaacgcgcgcgcgcgcgccgcacacgacccccccgtgtcgcgcgacgtcgatgacaacgcggccccacgttcacgtggncctgcctcccgtgagcgtgggtacgcgtggccacggtcgcggaagcctgcgtcgattgttttccctgtggtggggcccacgaaattcgagcgttgaatacaaagcgcctttttatttggggcccatcctttgnttggtgagtcgcgttccacttcccctgtcccttntattcaaggctcctttntctctgtttctacagtaggaattatttcgtgttngaaccgngataacgagcctaacgaaagagccattncaatatctaacactctcttgtagtcatgatctttg

SEQ ID NO: 35545 - DNA, 475 bp, Oryza sativa
  unsure (1)..(475): unsure at all n locations
agctntccttcagcaactcaaccaaccttactatcatttaagtacaaccgcatcggcccacccggaggggaatacaagtcaaggtgcgcctaattggttgccatcgattcagccgggcctgtgagtttcgccgtggaatcaaggaccgtagttcgacttcgtcaacactgctcaggcgccaaccgtccggcagcaagctccaactccaggtttcggaacaaaccaagcacctctagttggagccgggcagtcgaatgccatggctcaacctcacgcacaagctgcgatttcgcccttcgccacaccgtacccgcagcaaggtgcggtaaacagggcgggaggcgaaaaggggctaccgctgagtaggggaatcaaaactcgttcgatcccaccccagttcaagttcccacccgttccgcgctattcaggcgaaactgacccgaaggagttccttctcatctacgagtcagcgatc

SEQ ID NO: 35546 - DNA, 355 bp, Oryza sativa
  unsure (1)..(355): unsure at all n locations
ctcagctattatttagatgagagagcccttcttgggttatgtgtaacctgccttttgactggatatcattacccctgatagggttttgttggcggtgttagtgcaaatttatccggaacatctgcataaagtccagatatgaaacatccaacataggtagggatattttaacatattnacaagtgtggttttattaatgcggtgatgaacccaaagtgggaggaaatagactggagggaaagaacatatcatacangtgggtttgacttataaaacactaaaatggccaaactcgaaatggataacagatagtggggaatagcaaagccagccgatggctaccagcaggtcggcg

SEQ ID NO: 35547 - DNA, 374 bp, Oryza sativa
ctcagcttgatacacctgagtggtatagcagctcgctttctcactatatgattctttacaaaggcttgaagcctaactagtccttttaaagcccgacgggctctcctagcctgaagagaattcaagttaaacttgtagtaaagcctgaagaaccaaacatttgggaatcatgggaaaatccataattccatttcagcaattctatgtttgcatatactttgcattggacttggactagctactaaattggcagagagagaaagagagagagcatcaataccaggaaggctcttaacacagtctgaataactgtagcagcccagatctccttgagttcttcttcagtctgaggcacaagcacgttatgtgaacta

SEQ ID NO: 35548 - DNA, 473 bp, Oryza sativa
  unsure (1)..(473): unsure at all n locations
tagcttataaattctggttcgtgaatttctagtgtcgtgacagtgcacgacaatgttcatattttgcttgttgacatatttggcattgtttcaaataaccatccacatgagctttcagcccaggctaagcaagcaaacgtttgagtcggtgatatgtagcagcaataccggaatggacaccaattggtgatgaatgaaaagcctgaataagcttggtttggagaccagcattagagcccacccaaattttgtcattatatcgaatcagtccttccttcaatgaatagcccgggctgttgggagaatgcacaaccaattcagctaacagccactgagcatgtggatccactgcatatgaattaatcatctcttcaatccactggggttgaaccacataaatggcactcacttgngatagattctaaaagagcattagtaccacattgccactcacttccgacttgagggatatt

SEQ ID NO: 35549 - DNA, 436 bp, Oryza sativa
  unsure (1)..(436): unsure at all n locations
ctcaagcttattaggctgcaaagctgtctgggttgattcgagattatttgtttattaagagtcattttcttggcatgttatatgcttatattgattatggtcagagttatagtctatgctattaaacttcttaattaccatgatgtttatcatatttggtggatcattttaagagtttcatactcggattctagtcaaacatgtatttntgtggaccttttgagtgtttgtcactcgggccttttcataatttttattcttgatatattaaagctgataagcaatcggctgggtattttactgaataccatgcgtgctttgatatatgacgtttggttgtataaccacttgtttcttaactacatgtatagtctttttaactaaccatatagatggncgcttcacctattatgtgcatcttctcgatgcaccatgt

SEQ ID NO: 35550 - DNA, 463 bp, Oryza sativa
  unsure (1)..(463): unsure at all n locations
agctngcggacgaaggtgcaccgaggatagcttcttctagtggtggtaccgagcgcccgagcggtggtactgaagatttcatgtgcgttcttggttcattaacattttccgagttatttggttacacgtttagacataaatttgtgtgtgtgtatgtgtatgtaggggcccggcaatatggatgtgtgttctttggcttgtggggtttctgacctaagtgtaaacttattagttaatcattacgacgatcttggtcgagtggctgactcatcgctggatgatggttttcttgcaggcggagccggaggcggcaaggtggggctgccggtgttggacggcgcactcgctttcccgcaggccacaacggcgtcccagttcctatctgccggtgagacctcctatctcgctctcctggtgttctcgtgttcttgggttcccattattggaaaatgagatattatga

SEQ ID NO: 35551 - DNA, 322 bp, Oryza sativa
  unsure (1)..(322): unsure at all n locations
tcacgttggcagcggaagccatccgatccgattgggcgatgttattttntatataggattcaaatgggaggagattggtgtggtggttggggtgaggcatatgccggtgtcccttgtatatacacggtgcgctaagaagccgctggacgcaaccttgaactgcaagcgccgggggttagtcgaaatgttctgctaaaaaagctactgtaatgccgaactcgaccgagggcttacgtgtgcgccaagggggatggggggtgagcccgaacttcaccgaggctgatgccgacgctgaccgccaagacgtcgaccgtgggagggg

SEQ ID NO: 35552 - DNA, 390 bp, Oryza sativa
ctgaatattttttattattaattttttgtttagaaaatctaataacaaaccctctaaacttatttttcaaaactaagtcctttttaccaagctaaataaaatattgggaccggttgtttttaacaatacttaataaaagggttaaacaaccaaaaaatttctagtttggacagggtatttgtatcatactcttttcacacccttatatgtggagtacatattttctatataagaaagaagaaagatctgaagaacatattaaaatgtcgttaaaatcatcataagtgaaaaagacaaaaagggagatatcattgtcaagtgctcaataatatggcttctctcagaccccattttttcttcaaaaaatgaaattatttaattcaataaaat

SEQ ID NO: 35553 - DNA, 417 bp, Oryza sativa
  unsure (1)..(417): unsure at all n locations
tcagtcgcatttttggtgactactgcatggaatgattttcttattagaattgccacaattcaaaccggntagtttcagttctgcttcttttaagctgttcaaatttgctaagcacttccattccagtaggatcaaataaagatgttgccaacttttggctgcagtagtcacatcttggctttaattttcacccttctatatatgcaggatacctgatagaaacaacaaacggtacaaaacaatttcttcgaacttggtcatcttttggtaaaactggaaattattcgttccattgcattacaagtattcccaaacttctttcaaacacgtaattaaccttgtattgtgtaacagtgtgacagtagaaagtaatagaaacgatgacctaaccgaacgcgaacaatggatcccactcat

SEQ ID NO: 35554 - DNA, 348 bp, Oryza sativa
  unsure (1)..(348): unsure at all n locations
agcttcgttcttcatgggctatgtcaagtctgtttattagctcacatgcaatgtctattctcatatttaatcctctgacactcttcctgttccattccctgagggctctggaagttctagctaaattggtgtggagacttctgattgcatctgcggctaaaactggcttgttccacgcctgttggacagtttcaatgaaacctgngagtcggagccagtattgctcgaatatgacaatgttgctctttggcctgtcngngtttgctatgagcaagagcgggcagtggtccgagaccagcgtggagatggccgagaggagggcaatttggaaccgttctttccagcttt

SEQ ID NO: 35555 - DNA, 454 bp, Oryza sativa
  unsure (1)..(454): unsure at all n locations
catgggtatactttaattcaattcttgcttgntatattatatatggggttatcttctttctattgcaacacatgacttgatatgctatatgtatgctaatctcttgaatattaatgaacataattcctatgcttgatgaaatcattgtcaaaagggggagaagtaattgtgaaaatttttgtgcaaatttttggagaagcaaggtgaaattttggagaagttgttgagaagagcatgttnttagttcaattgggaatttctttcttttaaaaagggggagaagatttcttttggatttctgagcacgatgtgtacatttgtacgaagtgtgcttttaccactantcgttntatttttccaaacacccaaacattntttatatgtttgccaatgtgttcatcaacgcggagattgtgaaatcatcgtcatgattaatatctgtgatgaacaattg

SEQ ID NO: 35556 - DNA, 321 bp, Oryza sativa
  unsure (1)..(321): unsure at all n locations
agctntggctctatttaagcaagagccatggctcgccattcttcttcacacagcgctagcttcacaagcacaccacctacctcctcgctagctagctcgatcgcttccggtcaagctcgagctaggcgttctcgcgttcatggcgtccgggcagcaccaacccaccgtgccgaggtggaagccgagcccgccgcggccgcagggccgcgaggccgacgacgtggaccagccgccgcagttcgacgccgtctctgacatgagcgcctccgtgcgcagcaccgacgggttccccttcggcagcggccgctcctcgttcgcgcc

SEQ ID NO: 35557 - DNA, 468 bp, Oryza sativa
  unsure (1)..(468): unsure at all n locations
gcaagcttgacgttacggaccactgggtctagtaccagtgggtaccgccccgggtggaccactcggtcaggatgatccgagcggtcaaacttgattgcaatttctgaccatcgaagataatggggcgtgtcgggctgaacagcgttgatctcccgttcagtcaacttttgcttccttttagactcataagccaggggaccgccaaagatatggttgagctccttacggtggtcttgaaatcctgccggggtgtcgccgtcatccttcttcctcgacgtactttgttcttcgtcggagttcttccgtgtagtcttggtgtattgctccgcanactgcttgtagacgaaacaatctttggccacgtggttggagttaggatggtgcgggcattgggagttcatgatcttgtcgaacgtgttgacgcgcgaacgctgtcgagaagagtgagtgggcggtgcaacaagttcc

SEQ ID NO: 35558 - DNA, 365 bp, Oryza sativa
  unsure (1)..(365): unsure at all n locations
tcggcacatcataatggaagtggagaagaggcgttctttgcccccggctgaagccgccaagaactatgtacgtcacagcggttgggttgtgcaggataacgtgcctgtcagtacggtgtactagcgaagaacaagggcacgcggagatcatgagagctttgtcccagattcngagaaagagatgctgtagaccacaatgctcgagacattcacccttcctgcgggtacagaggacaaagtgaaaaagtggactctgaagaaaatggcagaacagtttcagagcttcaagggagatctgtaccagaagtatatcttgaaggggcagacaccgaacttcgacacattcccaaagctaagggatcact

SEQ ID NO: 35559 - DNA, 448 bp, Oryza sativa
  unsure (1)..(448): unsure at all n locations
cttaagtcacctgcggcatgcaagcttncgacaccgactccgtttcgtatctggggcttatcagtgaccaccggttccgatttgggtgttgaagtagcatttagctagtctaatttcggattcttagcgtaactagtaactctgtactccgtagtatagcaaatattctgattagaagtgggacgttgatatccgaatttgtcagggatactatatctgacattctgatcgcttcatgtaggttntctgcttggtaatataatttacggactangctatgtgtttttaaaagattattgttcatcagattattcaaatgaattatttactccacactttgataactaagtaaataatttaatttagagtgaaatacatggcgcggcttgaacttgtgattggtgtacttacatccgggaacttgaaaagtacacgtctaatcccgaga

SEQ ID NO: 35560 - DNA, 426 bp, Oryza sativa
  unsure (1)..(426): unsure at all n locations
tcaagtgttctgcttaattacaatgtcccaacgatacggggtcttgatctttctcgagttggtcttgcccgaagagcctagcaaggccaaagtccccaatcttggggttcaagtctgcatctagcaagacgttgcttgccttcatgtcgcggtgaacaatcttcttctgggagtcttgatgaagatactgcaatccacgagcgacgccttctatgatcctaaatcgtgttgcccaatctagttgtcttcgttgctccacgtctaattagccccaaatgaagacatcattgttattgttgcacaccatcacatgagaaagaagtgcatgaccatatatactcgaaggaggtgttaatattaccgaaaagaaatgtgtcgagacttttattgggcatatanctcatagacagcaacctctcttcatct

SEQ ID NO: 35561 - DNA, 418 bp, Oryza sativa
  unsure (1)..(418): unsure at all n locations
agcttcctggatctggngaagttctctttcactgtattgggatcgtttgatcgatttccttgatcgctacttatgggcgtgcgctcaaaggatacaaacagggattcgcaaacaaaaaggggaattcgtagtcactttttcctgtcgcgtaaaaaaaaggctttacgcgagagcaatagaggttgggatacatctatctcttctgagcaacctcttttggattcttaagaccacccttgcagtaggataccgtctgctntgggttctttattatattatctccttcgagggatttttaggatcgttcaggctatatttagtctattttggcttttactggctccttttctcagggaagtggttaaggacctcagaagatagaggagagcgccaggcgcagaattccggaatacttcta

SEQ ID NO: 35562 - DNA, 449 bp, Oryza sativa
  unsure (1)..(449): unsure at all n locations
cgtgcttatcctagttggtggtttagtttatgcatggctaataggagccttggaatggtcttaactgaatattcagacaaaaaaaaaaaagaaggaaaagattccattaagacagttatgagtttgattgagtttcccctacttgaccaaacaagttccaattccgttatttcaactacactaaaagatctttcgaattggtcaagactctctagtttatggccccttctatatggtaccagttgttgtttcattgaatttgcttcattaataggctcacgattcgactttgatcgttatggattggtaccaagatcaagtcctaggcaagcggacctaattntaacagccggtacagtaacaatgaaaatggctccctctttagtgagattatatgagcaaatgcctgaaccaaaatacgtcattgctatgggagcttgactattact

SEQ ID NO: 35563 - DNA, 449 bp, Oryza sativa
agcttgaggcttggatgatctcgatagaccatgttgtctatgacgatgatggttccgatctgggtaggttggatctccccctcagctgaagtcgtcgagtagctcgttgtcggagaatccatctcttaaacccatctcgtcgaaaccttgaagcaccaaaagaccccctacctggcgcgccactgtcgacgtttgatatcgcgattccggtatttgcatagtatggggatcgttggtactaggatatatgcgagattgaggtaaaagagacagagacgagggattttatacaggttcgggcccctgaattatcaggtattagccctacatcctgttggccgaagccggtcgttactcttattcatcataatcacaccagtacaatatttgcggtagcctatctaactattatcgacatagcggtctgaagttctgactcgtagtcgaca

SEQ ID NO: 35564 - DNA, 437 bp, Oryza sativa
  unsure (1)..(437): unsure at all n locations
ctggccatgatgntaccgataggcaatagtgaggtgttctatgaccaattattcatcgacagcacgaatgctcctcccagctatgtttcttttagatcaaaggcttttgcgcagctttttactaacaaagcataacgatggttctnctccaagctatgttggaattctattggccttctttgccattctatttgccttcaaatatcgtcatgatgttaacttatatcctacacatgaaattaaaatataagccgcttttggtgttggacttcctccgtttcatattataagactttctagcattgtccacattcatatatatgttaatgaatctagacatgtatgtgtgcctagaatcattaacatctatatgaatgtgggcaatgctagaaagtcttatcacttgaaacggaggtagtaatctatatctattctct

SEQ ID NO: 35565 - DNA, 483 bp, Oryza sativa
  unsure (1)..(483): unsure at all n locations
tgacttctgcagcgggcaactccactccacaggcatccttgtctgttcgactaaaccaatttcaacaagatagctccagctgcaagactcttgctctttcgtaaaaaaaaataatgccataacgcttcataacaacacaactcatgctgatgaagactaacatgtgtgagtggtgaaatcataaactaccaactccctatatataaacgcctctgatatgctatctattctccaacaacatattatccacatatatctcanattagaaatcatttggtgagatcagccataagtttggtccattgagtgaattggcccttgatatccataacagtagggctaatgcctttcataaaaaacaagataaaaatcatgatggttgatgtgagaattacatacgtacttgttatcgatgcgacgtacacacactactcatggtggatgcttggacagtggtggtcgacccgtcnggcgttacacata

SEQ ID NO: 35566 - DNA, 446 bp, Oryza sativa
  unsure (1)..(446): unsure at all n locations
gcttgtgccccaagtgacaaaagcaatgtctttcttatnntttatgcgaacatatattatatattgtgtattattattacaacatgttttggtgatcctttttagcttggctcgatttaatttgttgattagatgtgatgttatgtccctttgttaggtcgatgcaacagccaacagctctccggcatatgatgcatctgacaacaggttgatgtgttgcacttgtacagtgtgcctcggctgattggtcatctttgagttcttttttggggctgccttgtatttgatttcccttttgtgcctgtaagagaaaaacttattctcgacaacgtggaaattgaattgatagattcgtgcaaaactgaagctactgtgagcttataatggaagaaactactggannacaaattaacatgcttgcttatcttggaacggtgaaggccatt

SEQ ID NO: 35567 - DNA, 473 bp, Oryza sativa
  unsure (1)..(473): unsure at all n locations
tcatccttcacaatatgattgtgttatattataatgaagcaatcacagatgtcttggatttgaattataatccatgtgcgacgatagtgctcccgcctgaagtgcaaagaagcgacaatccagattcatgcttcacagaggtacttcgtagaaattccgctatcaaagctcggccaacacataggaagctaaataaggatctaatcgagcacatatggcaacgctatggaaacaaagaatattagactaaaggcattgtaatataattattatatttatggttcccagaaaatattggaatcatgtatcttattcatgcttgatagtattatatcagatatatagccacacaatggtatacacaaatgcatttntagtttatcanagctacatgcaaagcattaaatagcttacagacagaccctctgtctgtgagttgatgagctggctttatatccgtctggatgataact

SEQ ID NO: 35568 - DNA, 318 bp, Oryza sativa
  unsure (1)..(318): unsure at all n locations
tgacttcacggatgaatccggccttcagaagtctcgccacctcttcgcggatgaaggcttgacgttccggggcctgccgccgcactntctgccggaccggccttgcgcccggccgcacggcgagacagtgctcaatcacctccctggggaccccgggcatatccgccggtctccatgcgaagacgttagcgtttgcccgcaggaaggagacgagcgcgtcttcctatttgccatccagaagaccaccgatccgtgtggtcttggatgggccgtcgcccagggcaacctccttgaccgggacatcgtcgcatgtgtcaa

SEQ ID NO: 35569 - DNA, 430 bp, Oryza sativa
  unsure (1)..(430): unsure at all n locations
agcttcactcnctctataacatatgaatcttttatcatatatttttggccaatgaaaccccactctcctaagcaaccaatttatcttacgggccgattgatgaatttcacaaatcccttcatgtactactctcctagcaactttagattgatcattatctaagtaatactccatctatttttcggcgatataatatttgagcgcttgccgccgtatcttccgatcaaccttaagtgtaggatatttcaaatatctaatcaaaggaattctccaagctatttctaactcatgggcacaaatgtccgaattcacaattaattcggccttttaatcaattgtaacgtgcccnccagcctcctatctgggatcggtcagaccggccacgtaatgtcggtcagaccaccctgtctgcccggtcagaaccggcatg

SEQ ID NO: 35570 - DNA, 438 bp, Oryza sativa
  unsure (1)..(438): unsure at all n locations
tctttatcaatcttgatagacagtgttacaatcgattattatatnttatggttaatattctntgatatatctattctatagccgattgtgtctaactccatcggctgagaccaccaatgatacgttattggcctatcgactgactaactctgcttttgtctttcttgctgattgtaggatcaaattagctggcacgtccttgacacactcgagactagccttggacttacactggagttaagcagatctcctaggccaccgtattttcacgcaagcaccatggtagatggttgttctggtctagttggtcagaccgagaaacaagaccgaactatcagaatggccgattcacacatttgtgctgacaagtgatcagtcttccattttcaatgaccaagaagactggacttgattatcagtaatgatggaacaacaccc

SEQ ID NO: 35571 - DNA, 445 bp, Oryza sativa
  unsure (1)..(445): unsure at all n locations
agcttcatcagttccaacacgcatgacatctttctgtgcttcgactngcatccatcatacaacggcatctggcaatcttccaccaacttactaaacttctcataatctctgtcgttgtcctctgcgtcttcaatgtcatgcaacattgtagatagacattgagtgtccaaatctatggtctccacctaaaggagaaggtacgaacatgccttctcgagctgcggcggtgttctctacaccctgatccaacacttcttcagctgcgacatcaggcgcctcttgctctccatgcttggtccagcaggtatatttcttcatgaatccattcattatcaaatgagcatgcacttcatccttgtcttcgatcatctgttcattcttacagtccctacattggcacaacatgtgcatgctcatcctancttttctgtcattatccgcaaat

SEQ ID NO: 35572 - DNA, 418 bp, Oryza sativa
tcgaatgcaatattgaggaaatgtggtggtttgccattggctatcattaccacatctagcctgttggctaacaagaacaaaacagatcaatgggatcggatacaaagatccattggttatgcacttgcagagaattcagattttaaggcataagatattatctctcagctatttcgacctacctcaacatctcagaacttgcttgttgtttctgactatattcccagaagatttaggattcctcgaatgcatttgatagatagatggatagctgaaggattcattcaaggagatagtcgacaaaacctatataaattgggaaattcttatttctattaacttattaacagaagcttagtccagccattggaaatacgcattgatggccaagcgcggagttgtcgagtccatgacacca

SEQ ID NO: 35573 - DNA, 466 bp, Oryza sativa
  unsure (1)..(466): unsure at all n locations
tgcttagctatctgngtcanggtatgattaattggggtgtttatatcttgtctgtcctgcanggtcatgcgttcgtgcgtgcatatcgttgntgttgcatggatacatgaatgaatcgatcgatcgatggatggtcctactagatactccctccgtttttccatagatgacgctgntgactntttcttatatgtttgactattcgtcttatttaaaaattttatgcaaatgtatatgatataaatcatacttaaagtactatgagtgataaaataactcataacaaaataaattataattacgtaatgattttgaataagacgaatgatcaaacatgtgagaaaaagttaacggcgtcgtctattaaaaacggaggtagtatgtatgcccaaccgtctataattaatctatttagcaagtngcatgcatgtgcaacccattgatcgaccccatatcatgcatatgc

SEQ ID NO: 35574 - DNA, 479 bp, Oryza sativa
  unsure (1)..(479): unsure at all n locations
gcttactatcttcgagaatatttgttattgtttatggcatcttgcatcatctcactagcttagaaggcctaattgaatcaccctttatgtaagacgttcgatcgagaggcagtgacacacaccaaagcctctgtttggaacaagggaataaaatcgaattttcgccaccaaaattcctccatcacaaacatgactaaatttgtgagtgctgatttctgagaaaacatgtggtaacattcttaatagattattcgtgaacacgaggatntgaaataacaagcaatatactccctccttccctaaatatttgacgccgntgactttgttaaacatgtatgaccgttcgtcttattaaaaactnttgtgaaatatgtaaaactatttgcatacatgaaagtatatctaacaataaatcatatgatatgataagaattgataattacttatatctctgaataagacgaatgggtaaacatatt

SEQ ID NO: 35575 - DNA, 309 bp, Oryza sativa
cttccacccgggcagacgattcgggtcggcagcctcgacttcgtcaccaacaacttcagcgagatctctcttcttgactcggagacagaccagtcgggagagaaccggatttcagtcccgttcggactcccaaacgcggctgaaaggtacttcaagaccatctcaatcgagttggcttcaaaccactcgggcgagatcgcatcgtctccaatgtcaccagatcaagatgatgaggcttacccaccgatcctgatgaagctccccgacgatctggcggccgacttcatcacgacagcgtcgtcatcccgt

SEQ ID NO: 35576 - DNA, 380 bp, Oryza sativa
  unsure (1)..(380): unsure at all n locations
agcttgctatatactagtaggaataaccacaatatctcaggatataacgagtcagctaaaacaacagatctcctccaactccttacaacctcgcattcaaattagcgaaaggttgtgctattntgtttgattatgacaacctaactgaagtcatggcaagcctcataaaccaaatttcagaaattcgaagactcgtgctgtttactactatgcaagtttatactggtgagcgcgtgttaatttttccacgaataagcaacaatgttgntgaagcaaatgctacaatgtgagaaagccaagcatggcatcgcaaacagcaattgctgaagataattagacaaacataagtattgatgcagtgcagaaattacctcacggat

SEQ ID NO: 35577 - DNA, 431 bp, Oryza sativa
  unsure (1)..(431): unsure at all n locations
tatagctacaacataatgccactaagagatagtatccactgttagaagatgcagggtatagaggtgaagccaccagtatatgagaagaaagtggggaggccaaagaaaactatgagaaaacagccccaagaactagaggatgggactaaaatttcaaagcatggagtagagatgcattgtagctactgcaaaaatggtggtcacaacaaaactagttgtaaacagaggaaggctgacttaaaacttcagaagcaacctatgcagcanatggcgacttcatcaattgttgattcagaagagcttgtcatcactcgggtaatatttatacttattntgcttgtgtatttggttatctccacntaactatgaatntaaactcattgtatatntgtttcaggaacctgtcatcactcaggtactattgatgctca

SEQ ID NO: 35578 - DNA, 442 bp, Oryza sativa
  unsure (1)..(442): unsure at all n locations
tcgacaacaaaaatttatttttattaagttaagaactgaagaggcacccaacttcatccactgtaaatagaaaccaaaaggattgcatattttatggaccttgggaagatattatgattgtgtcactaacaactaatctttaatttatccccctgagacatgaccacatgaataaatatatatactcacaagtaccattgtagaatagaagaaaagggaggcaagcaagaatggctcacattctgctataggctangcatagtangaggattcacggcgtaggaggtattgtggcttcatggtgaatgcaactgttgcagcaggatgagccaatctgatccaagcaacanaaacatgtaagacctncaattcttcatgtccttctaactaaaaggacagtggtctacacaaacacatatattctgctanaacagtaaatata

SEQ ID NO: 35579 - DNA, 349 bp, Oryza sativa
  unsure (1)..(349): unsure at all n locations
caaccagcnaactggcaccaagaaacacgagaccnatgtcttttgaaattctccacagcagagggttattcttttgcttacctgagaaagaacagaaccaaacagcatgtctctcatacgcttgacctacgggaaattctcagatgatgaagggtagagactgggcanacaaaggcgcaatcgtgaggaataaacttggagagttacattaagacaactaacatggtgtgaccaaggacatgtctgcaacacccaaacagcagcttcgcacaccactgcagaattgataccagctagtaagcaccacaattgatgttcacaagaaagaaaaaaacaggcaaagacaaac

SEQ ID NO: 35580 - DNA, 412 bp, Oryza sativa
  unsure (1)..(412): unsure at all n locations
agctttggtatctgctcctgtgatatctcttcctgatttttctttgcctttcactggtgagactgatgctagtgatgaaggtattggtgttgtgttatctcaacatggtcatccgattgcctttcttagtaaggccttggggggttaaaactaagggtctttccacttatgaaaaggagtatttggctattttattagctgtggaccattggagatcttacctgcagcagcaagagtttgtcattntaactgatcaccatagtttaatgcacttgaatgaacaaaggctgcacaccccttggcaacacaaagcttttactaagttgttgggccttcagtttaagatttgctacaggaagggatccagtaatgctgcagctgatgcactttcttgaagagtatctgaactaca

SEQ ID NO: 35581 - DNA, 361 bp, Oryza sativa
attttgtgcgcgaagattagtctgtagttctgccctttgcatgctctgctgcctgaattctgtggaacctaatgggcccgatatttccatcaagacaggggcaggccaattttttacccggttaccaagtgggtcccaagtatgaataagttcatcggagggctctcaacttaacagcgagattttgttatgtccctcaaccacaaaatcagaaatgttcgcccctaagttagttcaactcgtcaccggaagtctcttgcaggatatttgccgtttactgacgggcttctactagcagaaaaagtaataaatcatatggccacatgcacttacatattttttctctttcttacctgattct

SEQ ID NO: 35582 - DNA, 484 bp, Oryza sativa
  unsure (1)..(484): unsure at all n locations
tgcaagcttgntatcaagattacatagtgttaatgtgtgagttacagtgactgatcaacctccattttccatttatccattttgattagtgctattattntgtcctagatttctgcttctcactaacatatttcaatcaacttatatgtaggccaactcttactgctggttctgtaaaacttaacgttgggcaatttgggtcagcactacagaaatcatcaatgtcaagggaggactataagaaagctgttgttcaagcaaaagagcacattctagctggtgacatttttcaagtagtcttaagccagcgttttgagaggcggacatttgctgacccctttgaggtgtaccgtgcattgcgtattgtcaatcctagtccttatatggcctatctacaggtgacgaatattntcagtactccctgtgaaattcttatggtaaatatgtgtcatgctgacaacatgcttatatctatatatcgcac

SEQ ID NO: 35583 - DNA, 483 bp, Oryza sativa
  unsure (1)..(483): unsure at all n locations
actcagcttaaaggggttaggattgtgctcatttcgggggatcagtgttgtggtacgctgtatgatgtgatgtattgctgttatgtagctcgaggcggtgttcagcgaggtcgggccggtgaggcgctgcttcatggtcgcgccgaaaggtaagagaattcangaattccatggcttgttagccagagttgtttggtgtttggtggtgcttattattaagggcttcgcttatgcgataatgtttgtttctaatgcagggtcggagacgagccgaggctttggattcgtacagntgtaagtatcagtggttgcttttgtaggtgttttcaatgaaaatgcgtttccctttaccatatttccagaattccacaactgcttttgatcgtgagtgtactggtctagtgagcaaatttctcaatgctaagcgtanattcatntgtcagtgtctctagtggtggtgtgtctggtgtactgtgtagtatc

SEQ ID NO: 35584 - DNA, 485 bp, Oryza sativa
  unsure (1)..(485): unsure at all n locations
agcttggtagactaattcttgctgattgtagaaagactaactctcactgacgtgcttcngcttgcttttatacccaccaagcaccagcactctctctttctgtccacaaggagacatataatattgtatataatcattagcacaattagctctttgaagccgcgcgcaaccagtttgtagaaaaccaaacccagattcactactggatttggataattggccggaaggcaaaaatcacattagtcccggttcaaataggaatcccggttcanaagcccaacagtacttnttgatctttagtctcgggtggtaagatcattnttagcccccgttgagaaagtggtaggcccctcactatctttagtcctggttgggttaccaaccgggaatatagatcgacgcgtgcgtatataatctactcgtacttagcaacgcgcggtgcactttcgtgctctcgtctctcaatctcttcgaatccctccctc

SEQ ID NO: 35585 - DNA, 341 bp, Oryza sativa
  unsure (1)..(341): unsure at all n locations
tgatgtaggtttcggtaggagcaccagtctaaattnggcgccacataccatattacatggtttgcacggtctcggccgaagctcctatctcacccttgcccgtgaggggcttggtggcgatatggcatgaggcctttcgaccaaacctgccgaaagcctgcgaccggcgaagattcaagcccgagacgttaggggtagtccagacgaacctttcccatggcgaagactatggagcaaggatggcgagaggcaaggaatcgcagctaggctaaaggcttcctgggcgaagggcgcaaggcgaagagcatatgccgaangggggggggcgacttcgccgtaac

SEQ ID NO: 35586 - DNA, 483 bp, Oryza sativa
  unsure (1)..(483): unsure at all n locations
ctacgcagccaggagggatgagtagttatttggacttgtgttttgtctgcagtagacttgcacatcatgaatattgttctacgtatttgtttacatcaggatccgaatattctgagagcaatttgctatctggaattatttgtgactctggcaatgtatgattgccatattactattttgagtatagcaattatgacgtgaaagaaatgtcgttgtttaatgaatgttgaaaaatatatttccatgaatgccctgtcacttttctttccttgtgcaattatttgctgttgaaagcatgactcaatgtagagtgacgcanattaagatatatgacggttntgttactgttatgcactggagaagaagatttcaagttcagattcatgtttctgcctgccaattggaaatngggataagcattgtcacctgaaatttcacccattgtagcagcattgattggggattttatctaatgcattaata

SEQ ID NO: 35587 - DNA, 478 bp, Oryza sativa
  unsure (1)..(478): unsure at all n locations
agcttgctcctcaacgaattgtcatccttgctttcttatacagtcctataacccgcgttgcaacagctccaattccaatgagtgcactaccacaaggtgtcaatgctcaatttcagccccagccaccagctgacaagacagaggccagtatctgcgttgtacctttggaagttccaatacagcagctgagaaatcaagtacaagatgaagaacccgagtgtaagaaagttattgtttgttacaactgcagtgaagaagggcattactccaaaaactgtccccaaccaaggcaaaatcgacctccacattaccgtcaatttacacgaagcagacattccaatcgtattgtggtcactggagcaaacgccgtacccgtaaggcctcgtgttaatcagaacccatagcagaaacaatgcaccaatgctccntctgctgcacctgactcggcaataaatcatagcaaccactctctgcatcg

SEQ ID NO: 35588 - DNA, 412 bp, Oryza sativa
  unsure (1)..(412): unsure at all n locations
tgctttgactcgacatttttcttctgtttcttcatggtctgaaggacctttttgtatcgatccattttcgccattagatcatcctgaaataaatgatgaagttagcaaaggaaatataatcagaaagattgaggcattaatcttgcaattaattaaaatctctgcatttagcacataccggcacaactgattcaatcttgacactggatgacaatttcttgaggcgctcatagagcttcccgacgtcgacagtccctggcacgtncaccttcaaactgctgccatctaactttactntgaaattatcctggtcgacagattctataaagtaaaaaccaagatgatgagtactcataggtattttctgcataattcacccttccgaacatctctgtccattttgattggactg

SEQ ID NO: 35589 - DNA, 450 bp, Oryza sativa
agcttgtcctgcggcagcggcgggacatcttgctcttggggcagatccagcagaagtggcggcggcgttctttatggtgggcggatctagtgtcacgcaatttctatccaaaattccaaacgcttacatgtgtgtgaaccctcgtccaggaatcaaccgaggcacacaataacaaattgataatagagtacaaatattactctaattaataagcgaataaaatgtcattacagaggtagatagttcctctcaatcaataaagttctaagcagcggaaaataaataaacggcgcagacggctccactccacaggcagcttgaccaaggctacacctaatcctccacaccatcagcctcattgtagaactcttcctctgatgaatgaatgcaaggtgagtatatgacatactcagcaagccacgcagctaatatgcaagtgcacaggataac

SEQ ID NO: 35590 - DNA, 344 bp, Oryza sativa
catgaaactcagcttcctccgatcctggcgctctcctggatcaggtctttcttgttactctcgaattcgctaacctagaaggcaagttcctttcgcggaatcaaccgaatcggttccatcccttgaaggaatttacagcataatcagaggatttcgaaaaaattgggctctgataccagatgttggatctaatctactaaacatccagacagcacagatatatggaatcgttactgatgatatgcccatcaacggatgaccttcgcgcttcccccaattgcaaagcctcttctatcatcccaatataatatagtttcttcgttcacgcagataccaacctactg

SEQ ID NO: 35591 - DNA, 421 bp, Oryza sativa
agcttgtgcgctggcatgccgaagaacttttagtctatactatgctgaggcacccagcagattcagtgcagtggaggacaatcgataggatttaccaggaattctcaaatgacccaagaaacatgcgtttcgcaatgtgtacggacggcattaatccttttggtgatttgagcagtcgtcacagtacatggccagttctgcttgttaactataaccttcctccctggttgtgtttcaaaagaaagtacattatgcttgccatgctcattcaaggaccgagacaacctggcaacgatatcgatgtgttccttgaaccgataatcgatgacttctaaaggctatggaatgagggcacacgaacatgggacgcatatgcacaagaggtatttaacctccatgcgatgctgttttgtaccatcaa

SEQ ID NO: 35592 - DNA, 415 bp, Oryza sativa
  unsure (1)..(415): unsure at all n locations
tgtagagcttgtaggagtactccgtatgcttggaagttttttagctttgcagcagtaatcctactgctgctggagaaatgctngcccaacagcacaagggtcaattcatatcatgccaagagatcctttcgatgatggccgggagattntatgcccaaacaaggcaaccgggcggagcgtgagaggtggagagcgtatattggcgcagcatcgagtggtagtagaagcaggctagcagcagcgatccatgcatgccgcgtcccatgacgcgcagccccacagttctgcatgcgccatgatgccgttctctatccctccatcgctcgcttgtccggcctcctccanttgatctcatcatcggcaactatagttacattgctgctcctacctagctagagtaggaagggagaagaga

SEQ ID NO: 35593 - DNA, 471 bp, Oryza sativa
  unsure (1)..(471): unsure at all n locations
agcttgtcacaccaaatgatgattaaaaccatatccgatatatatatgtacatacgtatgtgtgtatactttctcaaattntagggtcgttacgtgtgtgacaatgttacatggcacgtgaggactttgtcacgggccgggcaaattttgggagaagctataacggcctgtttagttggcaattnttttttatcttgcatgttacatcggatatacggacacacgtttaaagtattaaacatagtctaataacaaaataaattatagatttcgccagtaaactgcgggacgaaattattaagcctaattaattggttattagcaaatgtttactgtagcaccacattgtcaaatcatggtgcaactaggcttanaagattcgtctcacaatttcgaggcgaactgtgtaattggttttttagctacanttaatactctatgtatgtgtccaaatattcgatgtgatatcgt

SEQ ID NO: 35594 - DNA, 458 bp, Oryza sativa
  unsure (1)..(458): unsure at all n locations
acactatgaatactaagcttgcctgaatcaaaacacgagctgatatatcagacgttcatctatatcaaaattacaaccacacaagcgcgtatgtcctactctctaagccgacaaatgaagctctccatgcagaactgagctaacactaacagtgccacaagtttatagagaagccgttttttttttactcactgaattttccggcttgtcaggttgatacacatccatcttcacatagttgaagtatcaaccatccgatatttacaggtgcaaatgtactattctgtttcgtatcacgaatttgaaatgtaggtacagagcaggtctttgtgaaaatggtgggtacagagaagttccctcttctatggatttttcagagacagcagcctcttctcgagttcgttcaattctgaactgtacacganggaatcatagagtccacgaagtggaaaatcatg

SEQ ID NO: 35595 - DNA, 408 bp, Oryza sativa
ttaatggacgcacccctgattgcttgatgtgcacttattagagcaacaaagatctggttgctgctgcatttagttggtttgttctttctagctagacatgcaaagcctgcatgagccatgagattgggtcggagagatctagtccagagtacagacagagatgcagaattgcagatcaaccttgaaatgaataatcttgtcagtgcactgcttcagttcaaactatgtatcccccacatattgtcacgggcatatgctttgtcgagtaattcatgttactatagcagatgagctgacataaaaaccacagtgtaactgtggaatgactgtaagtacagaatcatctgttaagtgatcaagagcccgtgaatggtcttgagagggttgagcgctatatatgttactcat

SEQ ID NO: 35596 - DNA, 400 bp, Oryza sativa
  unsure (1)..(400): unsure at all n locations
agctntctgatcttccttagcatagacaccaattgtatgttctgntgtcataggtctaggacaggttcacaatctgcgtgttaataggctntgaggttgcttatgaccttctccaaccacgcacacgcacacattgagaatcttatattcttatatatgtgaatggtacaggctcaatcaatttgcaatttagtatggtgatgtggtatttctgcttccctgcgcatttcatttagaaatctcacgagtgggccttttgaatctaagtgcaaagatcagcatcttttgctgctggtcattggtttatatatttcacatcacttgcataaactgatgtgccatttccccttatttcttctcactttcagnntgtaatggtgtcacccatattgaaaacaat

SEQ ID NO: 35597 - DNA, 426 bp, Oryza sativa
  unsure (1)..(426): unsure at all n locations
cacatanaaaactcaagctctaacctatcctttgagtggttttagaccttgtttttcgttttctgggtagncctctgagtgagctctccatagagtctaagttcataaaaaaacggactcccgagcgaaaagttatagtcgttttactctgtgcttttcggaaagtccgaaaaattaccggaaactccgataatttttcggacaacttcgaaaatttccggacattccgaaaatggctgcgaatctgagatatgcttctgtaagttttcgaacttgtccgaaaatgcttttcggaaactccgaaaattacagtcttggcctccaacggctagtttttgaggggctcgggtatataaactcctccacccctcctttgagttgctgctgctcttggggagtattagacacatccaaagccaaatagca

SEQ ID NO: 35598 - DNA, 80 bp, Oryza sativa
  unsure (1)..(80): unsure at all n locations
agcttggccattgggccaaagactttctacagtcacgacgcggccaggtccacgtcgcacgggtggaggaatantcttct

SEQ ID NO: 35599 - DNA, 490 bp, Oryza sativa
  unsure (1)..(490): unsure at all n locations
actaaagacctagcagtatgactgatacgctttattcgaggttgtagtctacagacgggctagtaccagataagactttgagtgaaacttgcttgcacaagacttacaattcaaggcgtaatccattgttaaagttgtgagtaagtgtagcttggagttctagatagaagttcaaccttaatcggtctccatcgaaccgctggtatatagacagtacattggaaaaggcaaatctcagtgggattntgagatttggtgggggattgttggaattaatggatgggccttagcccactcgaagattaattctttggaaaatcacaaaagcccacctcatggaatggcatgcatgtggagtttagtaccaccttgcttattctaggagagagggacctccttaanagggaggatgccctcctagccacttgaagcatgtgtggtggagagaagagggggaacacacgcgcgctcgctacctcgcctggcgggc

SEQ ID NO: 35600 - DNA, 459 bp, Oryza sativa
agcttctcctgtgaatgatagcaatatgcagttctattacattatcacagaaccaatcaaggataatgcagtcactagaaccacgccagctatatctctccagaatcagaatgagtatccatgtttgtgattttcaattagctacttatcactgtaaccgggagtctacagcaatcatgtaataaaaaaaaatatattcatgtctataaaacagtgagcttgctatgtttatggatgattcctgttgaggatacaatgtaccgatggtaagcaccttccctttttgtttaaagcagtgccttgtattcgtgtaataaggcgggaatgtgtaataccgacaagttctaagaggattcctttggaagatgcggatatgtgatcatgtgtgtaactggttactgacaaaggagacctatggtctcgtgtcagaggaactatattctaacctcgagtttataa

SEQ ID NO: 35601 - DNA, 436 bp, Oryza sativa
  unsure (1)..(436): unsure at all n locations
tactaagcttcttgatgcatactccggatatcatcagattcacatgaactcttcttatattctcatgacagccttcatcatgcccttcggcactttctgccatctcagaatgtctttcggcttaagaaatgcaggggttacgttcaccaggttggtgtacaaagtcttggggttgcagctggggcgaaatgtcgaagcctatgttgatgaaattgttgtaaaaagctgcaaagcttttgaccacgcatcagatctgcaagagactttcaacaaccttcgcactgctggcatgaaactaaacccagagaaatgcgttntcggtgttcatgccggtaagttgntgggattccttgtgtccgaatggtggatcgaagcgaattccgagaaaatcgatgccattcagcanatgaagccaccatcgagcgtacgacaagta

SEQ ID NO: 35602 - DNA, 473 bp, Oryza sativa
  unsure (1)..(473): unsure at all n locations
tgcaagcttgctggtgctggagttgtgtcttggtgttatattatggcaggatggggttgttgagatgatccagaatttttttaaanaaaatatatatctctttttttttatagtatattcaagccatgcatgcgtgtggctgtatcctcatcacattctagttgtcacacactatctcaagctcttgaataaatgaatagtgctactacttggatctgctcatctgacagaggattgaatgcatgtctccaagagggcaatagatgcaaagatgttgatgtagtatctttttaattaaactatgccagataattcaacaggggagaaattcttgcagtacctgaaagttgaaactcttatctctgtctctgaactgagccattgacaatttcatggatcaatcaaccctgcatgcttgtgagtacaaaactntatccctttaatcatgtaaaccagattcagaagtcacctct

SEQ ID NO: 35603 - DNA, 493 bp, Oryza sativa
  unsure (1)..(493): unsure at all n locations
tgggataagctggccagcagttggcagatgctgaatgcttgtgtgttttatacgtgcaaacattgcttggggttcaaagttaacattttacttttttttcatcctgagttatcttttccctcatcacctataaatagctctcctttgttgagaaagaccaccagagagagaaatttgcaagtgatcaacagctgacttgtttgcctctgccatggagaagaattgtgcatgcccaccaccaagcaagggaaacatgatcacaattctgagtattgatggaggtggggtgaagggtatcattcctgctgtcatcctctcattcctggaatctaaacttcaggtcaatcctatatttcttaatttcttcccatgtataattgtgtatagcttagtgatcagtanggcttgggtaaatatgttaatggaattcatagcccttctaagtaacatcttctcaccttganattatcatctggcctttcgactacatgat

SEQ ID NO: 35604 - DNA, 417 bp, Oryza sativa
  unsure (1)..(417): unsure at all n locations
agcttgggcaacccctttgcctctcttttgtttactgtattgctaaaaaaatttcgcaagtattttgctctcaaaactttcatatttgttaatcatcagattgtatcgagatttgtgcatgagtgaaaaaactgatagaaagaaattttcatgcatgtcatacgtaagatcttcgtactagctaaccaaaccatagttgaatgcaagttttatataagttatatcgtaggtacagtatagttacagtgcagttatataatgtaattatattttaatcataatatagatatatgtgaaagttttttactgaaataacttgtggcagttcccaatagaatactgatgtggcttggnggctaattaattctattagggatatagtagtagtttttaccgatcagacataacctctcttag

SEQ ID NO: 35605 - DNA, 446 bp, Oryza sativa
  unsure (1)..(446): unsure at all n locations
agaaaggttctattatgctagatctaatatttctacacactttcagctacagctaaatgaacatgcacaacctatctggacagaggtaatattcaactttgaacaacaattcatagtccttggagaaaaaacacaaagtcaagctatgcacataagaaatgggatagtgtcctatgatggaaggtgagactgctttctacacctgatgcttcctttctagtgcagtttgtgcatataaaaagataatttangaaattattgttcctcccaaacaggaaacttttcctatctattacaaatggatccctagtggaggtcacagaacttcagcccctaaggtatgaagcagtattactgaagtttatattaatttgcacggctgccatatcttggtcaatattcaatgaaataactagcatatgaatacaatgttcttttactgaaaa

SEQ ID NO: 35606 - DNA, 406 bp, Oryza sativa
  unsure (1)..(406): unsure at all n locations
tatgatactcagcttgcgagctggacatcggntggctggaagtaacttttatttttaggntaacttccgggcatattngagttgcccttatattccttccaggggaatgtattatcattggtacacgtaaatattgggttttccaaccatttcttttcacaaaagcttgtgatatgatggaatgggaagcttctgaatcaaacagaactatcgcgggtacggagttgacagagaacatacccatcacaacgtctgtagcatcctgagcggtttcagcttgaatgtggttcacccggcctcgaccaaagttgttggaaacatgtgaaccttgtccacttgcctgagagctatgacgagactgagctgccgctggggtaggagttctggcagtgctgccattcgcatg

SEQ ID NO: 35607 - DNA, 225 bp, Oryza sativa
cactacagtgcaacccctttttactttccctaaacctatcaaaccacctaccaattaaattaccgctcagggaaaacgatattgcaggattgatactaataacaggcaagtctaacgtaagctccaccctataacaatacacaacacatgaaaaccactctggatttagagaacaggagaccgctgccttcttaaagtctagcaccctggagtggacttccgcat

SEQ ID NO: 35608 - DNA, 445 bp, Oryza sativa
  unsure (1)..(445): unsure at all n locations
tgatcaaaactaacaaagttntactagagaagagtaaaaacgttttataaatgaattggagggagtanggaacttgtaattctttccatgttccaagcagcggctaaccatgtttcgcattgtgggctgcggcattgcctccatattaacatccaagcatcaatcttgcaggaagtaatgtctttcggtgatgtatcacatcgagttattgagtatgaatatgattgagcaacacttttccaaaatgtgacgtgatgtacaaacaagcctggcatgttaggtcactaatgaaaggacagtccaagaagccaatgtgttgttgatcactctgcatgaagttgatcgagtgatcagtgtcagtgtggtaccatgtcaacacattcacgtacacttcagtgtaaaattagtcacataaagcgcaccaactgcctactccgtaagaact

SEQ ID NO: 35609 - DNA, 485 bp, Oryza sativa
  unsure (1)..(485): unsure at all n locations
agcttggtgagaagttcatcagctgggatggtgtccacttcaccgatgctgcaaacgagatcgttgcttctaaagtgataagtggcgaattttccattcctaggatcaagctgaccgccagcgttgtcaggcccaaaaaggctaaaaattcgcggttatgaaaaattaagattattttggtttcccaaaggaaatggtgaaggtgaatcactaacagatctggccaacagaagggaattcatttgatttcaggcccttttcggtcattgaggaagaacagaatatgaagaatttcaaaattttattttttttgtacacttggggtgtgtgtgtatatcctagggggttgatacgtgcaggttaatactatgtataattcttttctttaatnttgataaataaatagagatgaatctataaatntaaatcagaactccccttgcagtgagtatggcagttcannacccaaataganaatacaagtg

SEQ ID NO: 35610 - DNA, 402 bp, Oryza sativa
  unsure (1)..(402): unsure at all n locations
tagcttgcagatcaaacactataaaaacaagcatgcctttatgctacagatagccagatagagtcaagcattctgtcaaaagctgctctttcctcaaaacatcagacgcctttctcttaaaatcaggtgaagcagcagaattgcatcttcctcagaaaattgcagctgattcaaagctgcaaattgcactgaactagtgaactctgtactaatcatgaatggttgtttgaagttgcatccaatcagattgccaactgacatgctcacgcacacacctggagcctacactgcacggtgtgcaacctgcagatatgttaaccataaacattaattagccccttccccatcttaatgaaatttggtcgcattccttcngcccgacctggcaaanaaaaacattaa

SEQ ID NO: 35611 - DNA, 477 bp, Oryza sativa
  unsure (1)..(477): unsure at all n locations
agcttgcatatgtacaacatcacattcaattttatatggtangagcctatagaaaaaggtattttaaccaagcgggttaccttcatcttaccacatgtattaaaccactgaatatgatacggatgtggatgtggatgggtagtcaagccaagcttcttgaccatctcttcacttgctaaatngttgcaacttccactatcaataatcattttgacggtatggcctttcacaagaactttgctttggaacanattgtgacgttggttntgctcttcacacttctctttagcactaagtgctagcttgacaattaggctaggatactgatctagcgactctggatgcaaatggacttcctcgatgtcctcatcatcttgtcctcctgcgtggtcagtggcagctaaagcatattcatcatcacaatcactagcagaagtatactcaccatcagcattcacaaatagagctcgccgattt

SEQ ID NO: 35612 - DNA, 222 bp, Oryza sativa
cctcacctcacccagatcgaggcgccgccggggtactctcgtcatctcatctccccctgtttcttcctcccttcttcttcatctagccactccacatgcgccgcgccaaacgcccaccattattactaccttcccttcccttctctcgtttcagtcaacttcgccatggcctcgcctgcgcccacccaccacgccaagacgccgtcgctcgccctgcccccg

SEQ ID NO: 35613 - DNA, 483 bp, Oryza sativa
  unsure (1)..(483): unsure at all n locations
ggatcttaagcaccgcggctgcactaactccaatcttcattctttttttagctntataaaaccgngggctctcttatctatcgtagagctagagcttcaagatgccaatatttgatgtatggaagatgttaatagggatgggaagaacaccggtggctcgagaaagacatagttagtagaattttctttcagagataatgaatattttgtaaataaatgaaagcatttggcttctgcacagagttcactcagttgaaacaccatgaagcatgcataaggaagaaaaaaaagcaatacggggaaacttccctactgacttgccccggtgaaggctctcacctctatgggcctgttatgtttatatgatatagagagtaaaggattctaatcggtaaagattaattccactagcgtcacttgctttggaggaatgaaatatactataactagatataaattctctttcctacgagtcatagagat

SEQ ID NO: 35614 - DNA, 413 bp, Oryza sativa
  unsure (1)..(413): unsure at all n locations
ntggctggngcacatcacaatctacaccatgaccaatatgtttttctgattcctcaccccaagagtagatctctccctgcttggtaacaagtgtggcatgccttcccccacaagaaatgttctgtacatcaagttttacagcaaattccaatggctttggtataagacaatccatgtttacacctgaggagttcccaactctcgaattgccaccaccaagaatcccctccccagtcccctctccccatatgaaaacatcacctagggcatcaccatcatcatgaccagaaccatgacttgatgaactaacagcactggataaactaacacggaaagcatccattgggatgccccttgagtgtaaatttgtgttatctgacttgccagaagacactgaatggacagaaccggca

SEQ ID NO: 35615 - DNA, 366 bp, Oryza sativa
  unsure (1)..(366): unsure at all n locations
agcttagctaaaaatgactagcatggctaatatcatttatcctatatatgctntattaatagtaacatttattaaatttaaccaattaattaatgctaattgatttgtaacttgtgcgacgatgagcacagaaggacaaagcatcagtgctgatgagagcaaaggactacgtgaacgtcctcaaggcgaggatagctgagctggaggagaagaacaggaagctatctgaatcacagcagctgcacgccggcgacggcgacggcgagcgagacgacggacctgacgatgacaagattgaggtcaacacgagcagatcagcggcagatcagggcagttcaccgaacaagtgtcaagagcttcatctga

SEQ ID NO: 35616 - DNA, 233 bp, Oryza sativa
tcatcctcgagagataagaaagaaatcagagccatccatcatagttgattcaactgatgccatgattatattgagtactaagatgcaagggtattcttctactctcttgcaaatggttgcaagcactagattgtgttctcccaaataccgaggactgctattcctcactctctcttctctctcgcgcaacatcgacgcccagcgacctctggtttccctaccctctttcctct

SEQ ID NO: 35617 - DNA, 458 bp, Oryza sativa
  unsure (1)..(458): unsure at all n locations
agcttgaggcggggggccgggcaacttcttgtttttatcgacccatggtataacaagattgtgttggctgattggtattgggagaaggtatttggagtaagaacaagaggattttgtgctttgaggatctgatttgatatgtaatatgtgattcttttcccccacagtgggggatttaccgctaaaccctagcatttttttatatggacgagaaagatcgcacacgggatgcaaaaggcccacaaaacgtgtggtctatggacagtatcggctggtatacaggctccatgtttgctttatgcatcttgttgctcggccgggccgccgattgcatgagcgcccgcttcattctctctcttcctttgtatctcatccagctcagatagtgatgacatgtatgggctaatanaaggctgattagcccttattatacttgccctaatctacagctggctctg

SEQ ID NO: 35618 - DNA, 439 bp, Oryza sativa
  unsure (1)..(439): unsure at all n locations
gcgcctatgcgtttctgaaacaagatgcctgacacccacaagaacactactgtcagtatagcaccaagcagtgcaactcaagtactcaaccgtagctnttgcccagatcaggctcagcaacctttgctgctagccaatagccactgcccactggtcacttcacttgtatcagtagcatcttcctgtacagcgaagcacatgcttgccttccatgcacggacgagccaaagctgcccatgcatggacgagtgcatcagttcgggaagcagaattcaaagatcatgacaaagcgtagctaggcctagctaagacggncttttccttcttcctttcgatcctttccttgcgtttatntccccttcttcctttcgatctttttcctcacgctgttcgccgaaagtatctagatctgatgcaaggacgaatgtattactacagc

SEQ ID NO: 35619 - DNA, 465 bp, Oryza sativa
  unsure (1)..(465): unsure at all n locations
agcttcattcctactcgctagactagattaactattcactctntctctagctacattattgattattntatatcctaaaataatttaactcttctcttttctagaaacacaatacaaatgcggacacccacaatgcgcatgcactcacccctttgaaattatctcttctcttctcttggaaattcgtatttcctctattttaaaatacagctatatttgtaactagaagtagttatattttgactgagggagtattatctttattactttgactagcgccatactcctacgtattctaccattcacaaccaacacaaattcaatccacaaacaattggactaggtattacctcgcattgagggcctgaaccagtataaacgattgtgtcaccatcccttctcgatgttgtgcaccctagaaaatatatngctgatctctaaaatcgacagccatcatacccagtg

SEQ ID NO: 35620 - DNA, 387 bp, Oryza sativa
  unsure (1)..(387): unsure at all n locations
ttacccatcaaaatgagtccaacctgtataaaatttatatcttcctctctttatcgcaatctcacgtatacgctgattcaatataccctatacttaaaatgccattatcgggtataggcgtatagcgcatcaacatttgtattgtataataaaatataatgcctcaagaatgtactgagtacgtctcaatccacgtgtttgagccgtaattaaggctcttatcccctcagcattcatctttgacccttatgacttattatccctatntttactgcttcttaatactcaacaagttcccatcatcatcatcagctgcttaatgtgggtgtgatgagagaaagccgcangaatccgatgagaaatacaccagcacttctttaaatagcg

SEQ ID NO: 35621 - DNA, 413 bp, Oryza sativa
  unsure (1)..(413): unsure at all n locations
agcttagttggaacaactcgctttatttataatatatccctttattgcttctaagaaatcatcgagttgtttgtttggatattagtaatgatatgggaattattaagttgaccagataaaaatgtagaatgcatcaaaaaggaacttggtatcaatgagatcacgtctcctttntgtttgatagccatggatatgatgtttctataatatggggatggtgatgagtctctcttttgttttcttgcggtaatgcagctctgttaatttctctattacggtttggcaagatggccggtgtctccggatgtgattntttttgagtaaatttcactttggaccttgtttatttgaccaagtttaaccatgaacttatgtcaactcgatcttttcagttaacaccatgaattgatacc

SEQ ID NO: 35622 - DNA, 288 bp, Oryza sativa
  unsure (1)..(288): unsure at all n locations
cgatggagcaaagaccgattgatacttcatcttgtctcgtgtgttactattncggnnacacctatgccttagaccggaattgatagtaattctctccttattagtcctattgatgttgacaaaaagagagggaaaagtgttaatattgtggatccttggcccaagaataagatcaataattgctaatgtcgaaatcataaagttgcaaaggatgagttttttactatctataggaccaataagctgctacttatctcagagatgtctatggcttattctactaatgat

SEQ ID NO: 35623 - DNA, 419 bp, Oryza sativa
  unsure (1)..(419): unsure at all n locations
atctctgagtcacctgcggcatgcaagctngagaagagggaagatggtngactaatcagatctgtcaccattgtcatggccctcagaaagcccaccttctattgtcaatgacatgcattggaaccggaacctcgatgaagatggttgactaaccaggtccctcaccgttgtcatgcccctcggagttccatcaccatcgacacgaatgttgctattattgccatcgtgcgttataaccgggacctcgatgaagaggattgactaaccagatccatcaccattgacatcccctcagaagcccattgccattggcacgaaggttgattgtcgccactgtgcattagaaccgggacctcatgccattgcaccataaggaaagggcagaccagtcgcacccaccatgacctttaaagcaatca

SEQ ID NO: 35624 - DNA, 456 bp, Oryza sativa
  unsure (1)..(456): unsure at all n locations
ctatgaaactcagctttctagaatctaaggcgttacagtgtgcccgtgtggctttatccttactcccaggaaccgaatattcgtgtccacgtactcaaaccgtttggcctcctcaggaccaaagcacccatctttttatcctatggcaggattggtgtgtangcagctcanattcctagccccacatttctgccatacagcacccctttcatgaccctggtactactaaagaggaaggcaatgtttgatcatgctcctcctgcagtaaaaagagcacattccagctgggccttattgccttccctctctgataatgggctntctgatcaggagattttagatgttgcacctttgcaagcccagccatcaagtccagaagtcaccctagtagtgcttcagattcctatggctcctgtgaaaaaaaaggattggaagactatcctatacaatcctact

SEQ ID NO: 35625 - DNA, 484 bp, Oryza sativa
  unsure (1)..(484): unsure at all n locations
agcttgacaggtggcgatggggggggtcatctgtctctaacaagcgagaggacacgcggcggaggatcgatgggcgctgctgtgtaaccccaatgggtgcagtaccataccgaaggattgatgggcaccggagtgtggccgagcagcggaggatcgacaggcgcgacagcggagggtgtcaatgattaaattcactgtggccctgtttagttcacaccaaacttttcccanactcccaactttccatcacatcacatcacatctaaaacttttctactcacataaactctcaactttntttccaaactaccaactttccccaaacttctctccgatttcagaaactaaacacaacctgtgtataccacatgtaggctgcatgtgccactagaaaacatcagcgtacattggtcgttctagccgtacccagcattcaacagttgacagcttgacctaactagatattaagtatcagcatatcaat

SEQ ID NO: 35626 - DNA, 476 bp, Oryza sativa
  unsure (1)..(476): unsure at all n locations
tcatcgacaacatcatcaacaccggccccattcaaggagtccttactttatcaatgctgntgnggactcaagtcggcgaaatcgtcttcccggtttacaccacggtaccaatctcggctgatccatcaatgaccgatcccatgtcgaaggatcctcccgctgtagcggagaacggaacatcgacgtcatacgagcccgagaaggttcctagtgcggccaaaccttgtccttccgacaagaaccgcgagccgacaaggacaacttccgaggtaacaaagttctggtgtcctatccacaagtccaggaagtacaacttgcaagcttgctgggtttttctcaacgtacaagctgaaattcgtgcttgcaaggagcatggaatccagcgtacttctctaactcgtgatgtctattgtcctattcacaagacgaagaatcacgacttcttaagctgcaaggtctttctccgcgccatgaaa

SEQ ID NO: 35627 - DNA, 485 bp, Oryza sativa
  unsure (1)..(485): unsure at all n locations
agcttgccacaatcttacaagcataatatagctctcttaagaagaaagaatcaaaactacggcagactgataataactattaacaagtaatcatttcagaactgaatacatacatctgtgctcactttcttgaccaatacatatacaggtggatagtgcagaactcagcccactggagacactgttggtgcatagttgcaaacacgatcaagctgagagttgtctccctgctgcattcggttgaacaggtagcctgcaataaacaaaggcaaaatttgcgactggacactaaaaacatgtaattagctaatagacatcgtaagaacgcgaatttgcttgtggacacaaaaaaaactggtaattagctaccagacactcgttgctttattntattatttncgaangggaatggagaaaaaaaatactcattaaagacaattntacccttggtcaacaatgtanatgctacaaactttgaacgtcag

SEQ ID NO: 35628 - DNA, 462 bp, Oryza sativa
  unsure (1)..(462): unsure at all n locations
tgaatctcccaggtgggattagctcacagtagaaggttcagcttaatctttgcatattggacaccagttcttctgcctgagccactggtgaatgcagcacacatggtactgatgctcacatcccagccgtccaacttcttcaccctctatgtactcctcctggaatagacaaatattcccattactgtgacgatttaccaaagtaatcccttttatttcttatgttcaaaccaattgatgaatcctttaatggctattttttacaggcacagaatcgattgccgttgttggaagggtgatggaggtttcagatgcaggttntacaaaactgagtactactccatccctttcatattataagacgttttggtttctccatcctcgtccagattcactagcatccatataaatntgaacacatacgaagcacatacatggatccatgcatgaatctattcaaaa

SEQ ID NO: 35629 - DNA, 456 bp, Oryza sativa
  unsure (1)..(456): unsure at all n locations
ttaagcgactgagctgcagctaattaaaaattagtttaaaagaatgtatctttaattatgctttatattataggatgaagagtgtacatagttaattaactatcagtactccgattaattgctatggacgttgtcaatcattccagtctcgagaaagactccctccgtactcataaagaaagtcgtttaagacagcgacacggtctccaaaacacaactttaactgcttgttctatggaaatatntattaaagagcgatatatgtatacttttatgagaatatttttcgagacaaatctattcatataattnttatattcttaaacttaacaacttaagagttattcatgatttatacttccaatgtttgacttaaacattgtcctaaacgactttctttataagtacggagggaccaatagaaacacaagctaatggtgagcttctacttcacag

SEQ ID NO: 35630 - DNA, 372 bp, Oryza sativa
  unsure (1)..(372): unsure at all n locations
tagactggaggaacaatccattaggtttacctaaatggtcggtgcttttttagtgtggntgtaaagatcgctgccaggcggctacctcgtttgcaaaataaacaattggcaggagatactttgtttgcccccaaagaagacgacgatttcgttgtacgtataacaaattacaaanttaactagcatctgcttattattactatcctaactaactaattatgtttgtttcttatggcaatccaaggaggtgcgcattcactttatggatcgacaatgtcgatccaacatatgatggccaaaagataactgagtctgaaacacaagtagagtaccaccgagagaaggagcatctaatatgcgatacatgttgaa

SEQ ID NO: 35631 - DNA, 455 bp, Oryza sativa
  unsure (1)..(455): unsure at all n locations
gtcacctgcggcatgcaagcttgtctgcagaaatgaaaggtattgttggatgttcttaatttgaggatattattggatacagcaaatggtacctattaaaatataacagatataataacttcatgcttaattgcttaccctttccaacaatagcctcaagagactcaagggtagtgagagatgcagcgagatcatcaacccagatgttgcgtccatccacaacaccggcaaagaggtactttccagaggggaaaccagcactcttgataggtcaagagtcttggctccacggataaggtcaaaaccataagcagtcacgctgttcanggatgtgagggtcctgcagtgaaaaggcagtatcagtgttctgccactaanaagaanaagcatgctaaaggaaaggcgggtttggtaatgatacgatagtacaggaaataaacatacttgtatgattc

SEQ ID NO: 35632 - DNA, 410 bp, Oryza sativa
tcgccaaccttttctagaatctcggtgagcatcctgcagcctatattacatacatgcatgcatttctttgggtagatcaagtctatagcacgacatgcaccaccacccgaaaacgttttccgcccggactcgccgccggcgttactccgatgtccactaaccgagaaaagtagagggatggaatcgcaataatatgaccttcattttgtcttttggtcgcaccctcaaacgagccaccgtttgtcgctggcaagcttgagatcgagctcggccatggcctgccctgtctctgcccgactggagaggaaggcagggactttgttttgaaaatttgaacaatcatagggttaaatatgagaacatacaaaccaatgacatgtggatccatggacctaagtgaacttcacatg

SEQ ID NO: 35633 - DNA, 480 bp, Oryza sativa
  unsure (1)..(480): unsure at all n locations
agctngcattaaacacctaagttcccgtgacttgctgagtacgaaagtactcacccttgctctatataaatatatatatatagttcctccgccctgaagagaagataaagtgaagtgaagattagggtttcgtcctggttcccagccgtcgcctgtggtgttgggtgttagaccgttggttccgctgctgttgttgttgttggtgttcgcctcgtccgtgtcgacggttgtattctcgggctgtctgagctgcaacctaagttaatgtaaataagtcctctatttattttaaggattgatatgattcatatttgtcaccgtgggtaccagcactatgtcctgggactggtaccgagatcgcggtttcgtaggaagcggttcgcgccgttttccctacgacacgctcctgtcaggtgccgttgtacggcggtatcagattggggtgtgacacaccgncacccagcgcagctcacccctact

SEQ ID NO: 35634 - DNA, 441 bp, Oryza sativa
  unsure (1)..(441): unsure at all n locations
tctttcttgtctnctatcaatggagaggaggagcggcttcctttatccatctccagntccatctcatccccgacatagtatccttggactacctccagcaccaccatcgcaccctcgtcagctccctcctcaacctgagtaccttcttcctagtcagcgttagtctgcgccgcccacgacccaggaggcgaaggtggcctccttagccagcatcgctgctcgggaatgggagacggctccgcctagggccatgatgctgcccagctcttggcctgcctaagtggtcgaccgccgtcccctgcttgagctcgtcggcgtcgtcactgtcatcctctcctgcctctccttgcctgaatgatttcagcacagagagtgagaaagagagaaaacgtggagggagagggaggagaaaggggaggaaagatgaaaagtagtggtcac

SEQ ID NO: 35635 - DNA, 488 bp, Oryza sativa
  unsure (1)..(488): unsure at all n locations
agncttacccggcatatatagcccaatgttctattttctttcancaatatatacaaatttcagagaacagttatctacagtatataagaatgttcatacactctcagattataattcaacgtccatcttcaaataatataaaggggttaactgatcaataacactagaaagatcgcatgttgtaaaatcacattgatatgtcaatgacatatcgaccttggtcccaattctcacctgaatgctggtttccaatctatacatgtttgcaaattgcattgttcctagaaaattttcccaaatattaatgcacttgcaaaaatattggagcatctggatggcatccacatatatgtgtatttgcttgccactagtttcagctaggttggaaatacaacccagttcagtactaagtagttctacatttgaagttataaaattcacatagattatcttctacaccgtatctttggtctcaatactcttacaaa

SEQ ID NO: 35636 - DNA, 438 bp, Oryza sativa
  unsure (1)..(438): unsure at all n locations
catcttatatatcctctcgatgatatatttactatatctgggctcggatatgactatgccatcaaagaggaacttgtccggaattctgtatcattgcattataacggtaatatgaagccttggcttgagttaggtataccggactacaggaagtactggaagaggnttcttacacgagatgaacgattcatggatgagtgcaatgtaagtccataatgcacttaaacctgtgaaacataatatctgacggtagattgctacgtctgctgctgtattatatacctagaggggacgagcacttccattgaggaaaaatggngccaggaaagcagttattagccatcaattttgacagagtagatccagcaccatctgttcattgaattagtgagcttgatggatggttcttctacagttagagaaaatagtcttaagctg

SEQ ID NO: 35637 - DNA, 417 bp, Oryza sativa
  unsure (1)..(417): unsure at all n locations
agctnggtttactttatntacttcccttctacttgatttctaaaccttattcaaattaatccaaaaacttgtgctattaattggatagatgtcttaactccctcctttcacttgtctttagatgccgtgttacaagcctgagtacctgtttggtgttgagggttttgtccaggagttgcgtacgatgtcctttgtcattggatttgggactgcccctttttatgcccagattcgtcatgatcgtcatgaagagaagtgccgagtcaaagtcaccatgaacagtaatagtgaagatatcccctcagcgatgttcgaagctggaggaagaaactacatccatgcatgtcaggaagtggcaaggatcgccataggagagctccgtgatagctacagtgatcaattggccgacactgagta

SEQ ID NO: 35638 - DNA, 419 bp, Oryza sativa
  unsure (1)..(419): unsure at all n locations
tgcccagcgganagcaatacacggaaggaggaggacttttcttatactacgcttccatccgggagctcatgaccaatctgataagaacaccaaanaaaagtcatgaacatcacatgaatatggcaaattatgatagttgctgagaagtgagaagcttaatgcatgttctgttagtgttcttactccctattcggccagaagaagagtggtcgagccaaaagacaccgccggngcgaagcatcaggtagacgccgtaatggtggggctctgcgccgccgcctgcttcggtttgtacccgtcgaanaactgcgtggtgtagtcgttaccgtcgaaatcgctgaggacgaacgacgacttggacaggtatgacttgcacgggaaggaaatataatggttagtgaggtggtcggagttaatgg

SEQ ID NO: 35639 - DNA, 448 bp, Oryza sativa
  unsure (1)..(448): unsure at all n locations
agcttaatagattcgtctcgcgaattagtccattattatagataggttttattaatagtttacgtttaatatttataattattgttcaaacatccgatgtgaaagggatttaaaagttttagtccgatctaaatagagtctaagaaactttcttgttcaatcatcttttaatcacatcttttattcatccaaagaaatttcgttggtgtgcggcaaccggatgatcttcgccaggatcactggtgggtgtagttagtggtcaaatatttggatgcttggtttcaggggttcacattctctaccgttctctctctctgccctcttccagaatgttgcatattgcctcttccaaatcttcttcagagttttttagttttgtttagaagatttgtttgaacttcttcttatttcttccaatttaaccaanatttgntcatgaagacttata

SEQ ID NO: 35640 - DNA, 292 bp, Oryza sativa
  unsure (1)..(292): unsure at all n locations
tgactgtnctgggaggcttacgcccgaacttgccgacttatttttcgttgcgaatccctttggtgaatgcggcaatgataacgtcgtcggtgatgtccgagatcttgttacgttgttcagaaaatcgccggatgtaatctcgaagggattctccggacttctgaataacgttgtagaggtcgtattgtgtgccgggacgctcgaaggtgccttgaaagttggcgatgaagtggtcgcgtaattcagcccaagatccaattgtaccacggggcaacccatggagccaagatcg

SEQ ID NO: 35641 - DNA, 256 bp, Oryza sativa
gcttagggggaaggcgaagaaagcccccttcctggggggcccgagccatcaatgagataccactctggaagagctcggattttaaccttgtgtcatacccgcgggccaagggacagtctcatgtagacagtttctatggggcgtaggcctcccaaaaagtaacggaggcgtgcaaaggttttcttcggccagacggacattggttcttctagtgctaaagcagaaaggagcttgactgctagactcacccgtcgag

SEQ ID NO: 35642 - DNA, 424 bp, Oryza sativa
  unsure (1)..(424): unsure at all n locations
catcaatggactcctgacgtctacttttttgttttgttcgntcgacaaaatcctacctctatatctatctctgaggtgcttgggttttgcaaaactccatagatatgcagaagagaaatgctatccccactccgaccaagacagaacttttaccaaaagtttattgtgatctttctgttcaaataacaattaaggtgaagcagggtcaggaacaacgaatctctttatgataaacagatccattttgcaagctcgttattacgggtagttcctacaaagaatcggactaatgacgtatacaatgcttgaattatcgacgtagatgctacatagtgggttctcatccttcagagactacgagtgtaatangagcatccgttgacanaaggatcaccctaagatgatcatctcatggctattggga

SEQ ID NO: 35643 - DNA, 468 bp, Oryza sativa
agctctaacggatagggtgcgtattattgctattttaatgtgcgagagagattgaatgaaaagagcgaattgagtcaatgcggcacattttatagatggggaagggatgacaaccgtagatgcgatggttgggaccatcgcgtccgttgccaatgagcgccgagtgtaagaggcgtggttgccttatacagatgagatcaccatgtacgttcttaacacgtatgtttacatgcgtaagtgtatatgcgcgtctcgttcatactgtggtatatcttttaaaaaaagaaacggaaaaaacttgcgcccttaggcagtaaacttggtagctagccatatgaacacactcctaatatcctcatgcatgttatatgattatgagacgctatgaatatttggccattctttaacacccgcatgctgtccactttggaactatgatgccatatccatattctgtgcaaatatttg

SEQ ID NO: 35644 - DNA, 447 bp, Oryza sativa
  unsure (1)..(447): unsure at all n locations
agcttcactggcatgcgctntataattaagtatcagaacacttagcttcaacatggactacttagatacaccaaaatgctgcaggttagaaagaaataactaatataacagaatgatctgtcaactgaattctgtaagtgaaatagaaacaaaacctgaggagtaggatctgtcatgatatcgttctttacgttcttggcggcccaaacagatttaattnttacccactggaagagagtatgtcaaatgccagttcataagggaagaaaacagaagccaagaggaggatcacagagatgggtagccaacatacctcattcatctttttctgatcgaatttctcaaggtatagaaaaggacgggaaggatccatattantccacagtgctccttcttctttaagtctagcattatcttcgcacaccaccttcgtgtttcttcatttga

SEQ ID NO: 35645 - DNA, 415 bp, Oryza sativa
  unsure (1)..(415): unsure at all n locations
gctcatcatctgatgacggccgccgtgctgctgctgctgggagatggccggagtcaagccgcagttcatgaactcgtcgccgccgccgtccgactcgaagctgccggtgttggagctcgagtcccccggcggtggggccttgacggtcaccgtcgccggcggcctccaggcctgctgctgctgctgcttcctgtaggtgatgcttctcttgaagattctgcagatggtccagacctcctgcatttntttcagtcagaagtgcacaagttagaggtcaatgctattangaggctgtactcttatcggttagaaatggcaatcggtagaatactagaaacacgtcagaacgtgagaggatgtccagtattccttttaaacgtgggaattcagtangactttacatggattagtcaat

SEQ ID NO: 35646 - DNA, 476 bp, Oryza sativa
ggatcttaagtcacctgaggatgcagctggatggtcttctgtgaagccacagtttgattcatgggctgagcgcagctggaagcatctacctggacgatcggtctatatcgtggttgatgcccacgaatgtgaagtacagtatgtgctcagaatgtgtacaatctgcataaacgatccgaactcatgcatcttttagatagccttcatagaagctacagagccgatccatgagcagattactcgacagtttgccccagcatatgttggcgcataggcgtactgaactacgatgtgcatctccgacgaggagctactctacgacgacttaatgatcggatcatatttgggaacttatcttggactctgatgggcgatcgacaaccttcatactataaggtaacgcaagtgtataggcccaccgacacctggtctacactaaccgacagtatttacctatgcatgtcgcattggttaat

SEQ ID NO: 35647 - DNA, 280 bp, Oryza sativa
gacctatcaaactcagctatgcgaaaccgcaagcctgtgtatgtctgagattttctgtcttatctttaatccagtgtaactgggactagtgctgctgctgggagcgaaaaggttatagctagactgcagatgagcgaggagaatatgtcatatgccttatggctaaatcatcataatctgctgggtattgctggcctttacagcccggttctgtcgaatgatactattacatatctgagtgtacgctggcgggctatccatttacatccttaaggaaggt

SEQ ID NO: 35648 - DNA, 443 bp, Oryza sativa
  unsure (1)..(443): unsure at all n locations
ttataaaaaatattgcagattatcagtggcatctctttattcattactacccaaatctctgtttatgtatgcatatccatcgatttaaagctttggagcattaaaagttagaaatttaaagttctgtttgtcaatacatacatgttatacatgaattaatcatccccactaatcatatagtatgttcttttaccaatatttcctgacaagttctctcanttttcagtgggtttgccacctttgcaagattaggtcctcagacagcaatcaccttcgttgtgtgtgagaagcttcgtgaactcgcaggaatgactgctatntagtgctagtactccatgactaggaagatgcagaccaatagatgtttagtcggagggcatttttttttcnctttaattcaaggcatttatttccgcattcattatcagaaaaaatcatcgatg

SEQ ID NO: 35649 - DNA, 491 bp, Oryza sativa
  unsure (1)..(491): unsure at all n locations
gctgggcgcaattacttggactaataagcagtctacccctattatgtgtgtgttagataggattttagtaacatctatgtgggaacagaaatttcctttatccattgttagctccattntaaggattggttcagatcactgtcctttgcttttggacacaagagaatgggggagaatacatagcaacttgtttacggttgagatgagttggcttgaacaagagggtttcaaggaagatttgtaaaaaaatggccaattaagctgcaaggcaaggctatggattactggcatcttctcatgccaagtcttaagagatggatgatgggtggagtgctaacatggttaatgcgcaaaagagaagaaggacagagatagaacttaagttggcacaattagacaatattgaagataggacggatctgttccccaagatgggagtcagatatgagttggaagggaagtggaaatatttattacacgacgagatttgt

SEQ ID NO: 35650 - DNA, 480 bp, Oryza sativa
  unsure (1)..(480): unsure at all n locations
tgcaagctntcagcaggctgagcagcagcttaggcatcgtatttgtttcagttgtgatatatcaacggccccttttcaatcggtcatcattgtaaaattgtgaaagataattngatcgtcgctcgttattccaatgaggtgtaacggttcagggtatgtattaatcacctgaagcatgcatggttactaatcatctgatgatggcttcttccgtaatgaaaaaacataggagctagagagattaaatttatatatattacagaggaccttcgatgctagtagctagcgtacaggaaaaattacgctacaattntaaaactgattacaactgtaaatattttaatacttatacgatgtaattctcctattagtntagctagcttcacgttgcttgcaggagtacgctgttcgtcgttactcatctttttgaaccgtattcaccatatangttctcacaatctagatgagtatgtagttata

SEQ ID NO: 35651 - DNA, 308 bp, Oryza sativa
  unsure (1)..(308): unsure at all n locations
ctcacccttgctctatataaatatntatagtncctccgccttgaagagaagatgatgtgaagtgaagaatatggtttcgtcctggttcccagccagcgcctgaggtggtgggtggtaatcacgtggtcccgctgctgatgctgtagctggtagtacctcaactgagtcgtcgggtgcattctcaggctgctttgagctgcaacctaagttaaggctaataagtcctctatttattttaaggattgcaatgattcatatgtgtcaccgggggtaccagtactatgttctgcgactggtactgagatcgc

SEQ ID NO: 35652 - DNA, 425 bp, Oryza sativa
  unsure (1)..(425): unsure at all n locations
tggcaacgataacatgtgtaggctgcagtgtcatctcaaatgttattcttgttngatgccgngtgtcgaactctgtcatggtaacttatgataggttagctgntggtgtggtggtgtagttgtggttttcgctcaattttccctaattaactgagcactgtaagagcactgtaaggtttgatcatgttttctccttaaaataagatatcttcttaatataaaacgttggcaacggcctgaccgttcgaaaaaaagaatggcaacaggcgcaacctaactaatcttacaactttactcaccggagatgtagatgacgatcggcacgacctcctcacaagtggatctggagtactccttagtcaccagcatgaaagacgaagccactggaagctaacaccggaagaaagctccatcacatcttccat

SEQ ID NO: 35653 - DNA, 496 bp, Oryza sativa
  unsure (1)..(496): unsure at all n locations
tccttgaactgatcatgattctgttgtgttcttcgctaaatgttctttttttctgaaagtgtgaattanagatgcttagattgctatgctgtttgcagatgaagtggttgtgttgagaaggcgatggatttataggtgaagagaggccagtgcatgggcaacccaagtggagggcgggaccagaggagacaaagccatgaatgttgccgtgtaattgttgcagtaggagacggtgaggacattntaatgtgaccggctgttatctgagtggtggagcctctgcaactagtttgatgattggcgatgtactgtagtactgacttgaaaactangtagccttttagcatcagaacctatggaccaaccagccaaatggtcatgtccnctttgtactgtggtgcccagaactggtagaaccctcagctagactggatgcttctatccgagccatcttgatcatatgggtgttcattccacgcaacttgcttgcatatct

SEQ ID NO: 35654 - DNA, 482 bp, Oryza sativa
agcttgccacagaatgggctagcctacgtcatcttgatgaggctggacttcaagtccaaatccacatctcccatgttgatctgtggcccaatggccacattgtcagcagagggagcagcgaactcgcggagagtcttgctagccataatcttgaaagtcggtagtgttggtacggctggtttctctgtcggtagagttttctgcggagcagcgactcgcagcctaacgctccggaagaaagcttctggattttctttgaaattttctggcaagttgaaaccagtcatgcactaccctgtttccacaacaaaagtgaaaacagccaaggttagcctgcaaagggcagtgattataaagaggtaaatataaaatattagttcaggtaatctcttttatgaatcttccctggcaacggcgccagaaatgcttggtggtatttcttaacaacattactagaaatataatccccggcaacggcacca

SEQ ID NO: 35655 - DNA, 415 bp, Oryza sativa
agcttaggaagatgccgtgcgctgattctctctgcttccatgagcagtgcatattcagctggcttctgattaaccgccattgcccgctctgccgcttcccgttgcctgctgagacggaggaggatgaagaggtggtccaggcagagaacgacgacgacgacgatgatgaagagaccatcctatgtctgcatcgactgttcgctgatgcggctgatgagtatacgagttgatcagcattgagagatgcaatttcagtttttgatgtaaatatggatctgaatggctggaattgttcattacacaattatgccatgtgaaaagagaatatcacgattaattaagagaatttttgagattgctaatgcgcgcgcacgcgcgagatcagcatgtcacgagcgtttcggcgtttgacatg

SEQ ID NO: 35656 - DNA, 358 bp, Oryza sativa
  unsure (1)..(358): unsure at all n locations
cacgatgcagacgatgcgcacaaccaccgcctagtttcttcatgtgcgctcgcctgccaccggccgactcttccncatctgctgccgactgagaagacaaggagagaagagaagagaaaaaggaaataaagaagagatgtgaagcccacatcattttctcacttacatgtgggccccacatactttnttttcgactatgatgctaagtcagcaaaaccaggtttctatactactatgggacctaaaatgcacggttntgtacagtttatgggtgaagatttctgatattgaggataagggatgtcaaacaaactcgtgataatgttgatggacggcatgtgaacttattcctatcctt

SEQ ID NO: 35657 - DNA, 462 bp, Oryza sativa
  unsure (1)..(462): unsure at all n locations
agctttccatgtgttgtgcactgtcttatgttctatcanagaccanaaccaagcaagaaacggcggagtcgagtatctaaacatccagaacggtcaacaaacccatcagtcagaaacagtagctctccaagaaagagaagaagaagacaaactcataatataaccatcataaaattaaacacgcgtaccgtcttgtcagtggattgcaggaggttgcacagaacgggcgcggcctccatggccttggccgcatccttcgcgctgaagtcgcccaagacgttggcgacgatcttgagcaccagcttctgcgaggcatttccacaaacaggtggtgagcgtgggcgcaagcatgtcaagcacggatgcggcagagcagcgcaaagaatgattaaaccacaagagatgagagatagtctgatcaggatgaggaggcttcacctgcttgtgcattgagatgaagtc

SEQ ID NO: 35658 - DNA, 400 bp, Oryza sativa
  unsure (1)..(400): unsure at all n locations
ccttgatctcagctttctttcnacctaccaccaccaccagcttctttttgtggctcactttccttctttaatacccataaatgctggcagatatgatatctgctcccttttttccctctctctcttatctcactcaaaagagatggctcttactactaccctagtacaactcagctagtagtgtgttgagcaaatttaatagtatagccactctggctcaatatcatactatctaatacctattctatatattactataaaatcatattatacccggcataccttcatacacacatacgcttaagttggtcagctggttaattgatcccgtctcttctctcttttcttccaatatggtatacggctaactgtatgattgtttacgggttacattcttatg

SEQ ID NO: 35659 - DNA, 465 bp, Oryza sativa
  unsure (1)..(465): unsure at all n locations
agcttatgacaatgcgagcgaagatgatcttgtgcactacactcaaagcaacgattcggttctcctcttttcctgttcctaacattnttcatagctcgagaaaatttgttagataacaaaaccaagtcctcctcctcgaactgttcgagttgatcatcggacatggcattaaataaagcaagaacagaagactttgatgaagaagcaccaacatccaaagaagtcaaggaagaaaccaaagcactggacttagaattaactttacgagcaagaatattcatctcatgagttttncaatttgtgtaaagcgaatccaaagtcaagtagacatgtaacagactcctgatagatgaactntcatctcccaatagacatgtcaagaccattcaaaagtgcgagaaatctcagatgtggatantagcatcatagaagatcacagatctagatcctcaaatttattaaccg

SEQ ID NO: 35660 - DNA, 436 bp, Oryza sativa
  unsure (1)..(436): unsure at all n locations
ctatgatactcagcttaaaaggtcatgcgtgcctgtcctaattgtgttgcactctctcacgctcttcgtgctagagtttcttgtgtgtgaccgcctcgactaatcgtgcatgcaatgggtagatagaaattaaatacttcctccattttccattttatattataagatcttttaacattacccacatttatatatatattaataaatctagatatagatgtgtgcctagatttattaacatctatataaatgtgagcaatgctagaaagtcttataacctgaaacggaggtagtagcaagtaagcaaaaatagcgcanagttttaaaaagaaatgagaaaaagaagttggaatattttntaagaaagaaatctttgcataaatatagtatacactatattacgggttaaatctgaaataagatggtgtagctcata

SEQ ID NO: 35661 - DNA, 392 bp, Oryza sativa
agcttgcgcgaagccaccggttatttataattatctttcgctgcccggggggtgggcttatcagagctggcgggctatgcaagtattgctttagctcgtcgaatgctgcttggcactctggtgtccaattaaactttcctacgccccggaaggtcttgaagaagggcaaacctcttttggctgcctttgagaggaatcgactgagtgccgcaatttggcctgcaagctttcgtacttcatgtacgctcgacggaagcttcatttgctggatggcatccgatattccttgagattctcctcgatgcctctttcggaaacaaggaaacccaacaacttgcccgcgcggacacctaaaaagcacttctgcggattcagccttatgcctgctatgc

SEQ ID NO: 35662 - DNA, 226 bp, Oryza sativa
accactagcctcctcctcctggttccccttcacatccctattgcacctgcccctgctggttcccctccgcattcctctccacatatccttacttgttcaagtactggttaggatcctcgttcccctctttttcattccagtactggctggttccctccgtgattgtatcgtacaatatctgttccttatcgctgtcagtcatctgttgatacataaaacatttgct

SEQ ID NO: 35663 - DNA, 338 bp, Oryza sativa
  unsure (1)..(338): unsure at all n locations
caacaaaatcacacagcaccgggcaaatcagacagttacaaagtgattgataaaaataaaaactccgggccagctgatgttcatcagcaaatattttacaagaaaaaaaaaggttctggattattaagacaaggcttttagataaccacagatatattgtgctccagggttcgatctatcggaaagggaaaaattctgaaattccgatccgaaattgtgaatcctgttagagcctctagatatcaaaaccgcattatgtaacggccccagaatgggaaatcgatcaggtagccaagccatagcangccagcgcctgatgcagatcagtacttgtagtc

SEQ ID NO: 35664 - DNA, 414 bp, Oryza sativa
  unsure (1)..(414): unsure at all n locations
agctttatcagcaactgaaatatcaactagttatattcattctaacacaattgcagtttaaataggcatatattaaaaatataataactacactcagtttcttttttttaaaaaaaaaaaaacaaggccccatttcaaaatttatttaactccagactacagtataaaatattaaaatgtttatgaatcgaagagaaattcttttacatggtattgcaattatattgggtataaaaatataaacagaaattccttttgccaatgcgaagtctctaaagatgtactaacttctgaggtctaaaaaactatctagatataaactctntaaaaatatcatattcccagcaatcataaaatacataatcacctgattagaatttttttaggctcatttttaaagcatatttctttatt

SEQ ID NO: 35665 - DNA, 370 bp, Oryza sativa
  unsure (1)..(370): unsure at all n locations
ttcagggaagcgacagcgcggcaccgaccagtaacgaaccaaattctgtctcatgacagtagcttggaactaaagaagcccgcgatcggtcgatggatgggaaggtttcagactctcatcagtgtagccaaccaaccccncaaaaaacattaacctttccctgtttcttgtataggtagttaggtgcagggtgcttatcaattgctaccccctgctatatagctcaccacactcaccagcctcatgccaaccgggcaaccaccgctggctcagattcgcgccgtcgtcgtcgccgctcgcaacgctcgtaacgctacgtcgcccacgcatcgatcgcgcacagcacaacccggatgactgatgagcttgt

SEQ ID NO: 35666 - DNA, 407 bp, Oryza sativa
  unsure (1)..(407): unsure at all n locations
agcttcaagtgtgaatgatctgtactgttcatattctaatttttggcactgatgttctgctctggttcattcaggtaccatgcatttaatttatcccctaatctggtaccgtggtacattaaactacacaaatgtccagatgtctttgaatggatctgatgaatcatcagtatgaacttgattgataccatgctttgtataactatgttatttaatcctgccaatttcttcaagaatgtgagatgtgccaccagccactacttaaggaaaacattcgaagtgcttgtaatatgaaaagggactgctttctttgntaaatatagtgtatatacacagagcatttgtcctctctttcagtgttttccagtttagtaaattctcagatggaattttacccaaactctctg

SEQ ID NO: 35667 - DNA, 377 bp, Oryza sativa
  unsure (1)..(377): unsure at all n locations
gaccttgatactcaagctgcgagtgggagtgtgaataatggtgcgaccaacatggntaatgtctatacctgagccgcttgccgtgtgcacttgatcgttgccggcatatttgtccttcaccgtcagcttgtcaagttcactggtaatgtggtcggtggcgcctgagtcgatgtaccagtttgtgtcaacctcgtaggacgaggctgcgacattggcactcttgtcttcctcagtgaaagaggcatcaaacctcttccagcacttgtgcacggtgtggccgatcttgccgcagagttggcatgtcggacgattggttgttgtgaaggagccatcgtcacctcttgcaccgccgcggccgaaaccaccgtgaccaccgc

SEQ ID NO: 35668 - DNA, 451 bp, Oryza sativa
  unsure (1)..(451): unsure at all n locations
agctntagcttggtgtcttaaatgtgtgctatcttatggttgtaagataccctttttaatgtttctcgagtctaagcgctttgtggtgaacgatntttgtgttgatgtgagtctaaatattctgtatcgttttgacggtgtacgtctggttggatgcagatgctggcttttagaaatcaatcatatataaaaaaaaggcatcgtgaaatcaattatatattaaaaaaaaaggcattgtgaggatattgctagtgtgttcggatcactgtgttttatcactcactgtctctttaaaagttgacacaaaggcggaaccacttcccaacatttcggcgttagaggcagcgagcgaaatcggntactgaacacatacacacatacacgccgtcttctcgccgtcgctgtccatggcgataaaggcgatcgactgatccatcngctgaatgaatca

SEQ ID NO: 35669 - DNA, 491 bp, Oryza sativa
  unsure (1)..(491): unsure at all n locations
cttaagtcacctgcggcatgcaagcttngtgttnnggaagttaaataactacaattctgtttatgttacagtgaatcaatacagcaaacagtgcccaaatactgtagcaaattactgtacaaacatagttcttttagggccccctttgaatcacatgattgaaaaaaaacgtatgagtaggaaaaatataggaatttgataggaatataagtgtaaaacagaagattacaaaacgcaggaaaaacacaggaataactgtttgattgaaccgcaggaaaaacatatgaattggatgagagagatagattcaaaggaaagttaccaagaagttgaagctcttgctaaatttccttcaaaatctttataggatngtctattccatangaatntcanaggattggataggattcaatctttnttttcanaagacatcaatggaaattttcctataggaaataaatccttcaaaatttcatgtttttcctttcatt

SEQ ID NO: 35670 - DNA, 437 bp, Oryza sativa
  unsure (1)..(437): unsure at all n locations
gttgggctacagattataataagctacttctataagttgtctggttctttcagcttactcccaataatctggattataataatcccaaactaaaagaaacatgccttacaggacgaccaatgtatgttatgtcaggtcgagatcgataattcgattttccatctccatcaattgaagcatcaccatgtgtatgtgacgtaaaatcaaagcagaagataacgtcagaaggtaactgaactgtaatctctaaattcactcatacgtccagatcttatacgccaccattacaatcagagctgatccaacgctaaagatacccaccattacggaacttccaatacgacacgtctttaaggccatccccaactcatctagtagtttccatacttgtcatttcatatagatatcatgtgtagaaactatngttttaatggatg

SEQ ID NO: 35671 - DNA, 386 bp, Oryza sativa
  unsure (1)..(386): unsure at all n locations
tcacttccaaaaagtacttttatttggttctgattccgaattcttatccattggcttgactaatagcccattctgattctggaggcaatggtttttttcctatacttgcagtagatttttttaaatggaatgattggttcacccgtggagttgtccttgtagctatcctgtgtaaatgcttgattggataatcctgcgtagctatcctgagtatgttatatggtgtgtcataactgacaaaggaaggtggtgtaactgcaatcgtcttttttctggatttagtattgataggctattatctattccattattctgccctttgtgcaatgataaagttaaatattggttactgttntgtttctcactatgtagctatcaactggata

SEQ ID NO: 35672 - DNA, 425 bp, Oryza sativa
  unsure (1)..(425): unsure at all n locations
ggatcttaagtcacctgcggcatgcanaacttagtcacaccataagctcaacttctttttatacttgaaaatcgacatactagaaatcttgcaaatcatacccaaatatccgatcccgatatgacattatcaaacaagaggaatgttaagttgaaaaggttttaccttgtgcttggcacggncagagccggactgcgagagcgcgacaagcggtgggatggcgccctcacggacaagaagcgcgcggttgcggtggcactcggagcagaactgcatcagcgccaccacggagaactccctttacctcgccgggccggtctcgatggtctcgacaagcgccggtatcccgccagcctccaccacagcgtctcggccctctacgatgcccgcgaggctggcgaggaccaccatngncttctacgacg

SEQ ID NO: 35673 - DNA, 446 bp, Oryza sativa
  unsure (1)..(446): unsure at all n locations
ttaatcactattgaaacgttttttttgaaaaaaaagaacttaaaatctagtagttgagccctatgtgagttctaggttttggtaatttctgactccctctctgagcagcaataggttcttagtccgataacatgttttttagggtttgcatgggttagttaaaaatatatgtagactgatggatatactgccaagaaaggggagacaataaatgtaccttntttttattgttntcacaaatggcattagctttgttggatacttttattctctcgccggctcccgcgtcatgtaattgagtggtagaatccatcgttgtagtggtaagtagtcaggcataatctacttttggcatgaaatgtggttgtgagtattttacttactncatttcanaatgaactaaagtntaatattangagaanaagggaataatctnatacccctca

SEQ ID NO: 35674 - DNA, 465 bp, Oryza sativa
  unsure (1)..(465): unsure at all n locations
agctnggaagtgtgtgtgtgtgaagtgttggtttgatgttcttctataaggcagttatgacggttgtgagaaggggaaatgtccgaattgtcccgcaaccattattgggagagcatctggagcgtccacgccaaaccctatgatcaacggtgatcggggcggtttggccgaacctgggctgggccctcctagcctagccttcggtcggaggactccctagactctcctctgtctatatctcggagttttgggttgatttactgatgttttgatgaagctcacaacccttccttgtatggatacataattctcactctagtctagatgtcctcccaacatcanggtttatcatctgcatacaaatatacaccaacacttgtggaatatgtgagattaagcacctatcactatgttggatgttttattatctagactttatgcagatgggattttatatattttcgc

SEQ ID NO: 35675 - DNA, 417 bp, Oryza sativa
  unsure (1)..(417): unsure at all n locations
agcttcacacctttgtaccatgtcgcatgcgtctntaangggcggtggccagaaaaatccttgtcgaaaggctnttccgaccaatgtacgaccggcggcatgtgacccgcagaccccttcgtgtatgtcgaggaggaggtgcttgctgtcgtcggacgagacgcattntagaagtaccccgttcggtgccttcttatataaatcattgctgatcatacagtagatttttgcttgacgggttattttctcggcttctgcgtcgtcttggggcaactcgtctctgtttatgaaattaatgagtagggtccgccagtcgtacgtggtctcgatgtcgacaacggcgcgttctgcctttggaacccccgggctgatgtcgggggttactgggctatcttcatagattgcctcttcactgat

SEQ ID NO: 35676 - DNA, 436 bp, Oryza sativa
  unsure (1)..(436): unsure at all n locations
aaccctaacctcaccgttcctctcccactccctggtcatttccttccctagaccccttctcacgccgccagcccatcacaccgagttcaccgcctttcaacgcgcgtgcgcgacaggcgacactgctcgaggcctatggcgcgaccgcgcgaggctccctgcgccaccttcctcccctgtgctttcctccccagcactgctcgacgctccctgcgccgacctttcctgactcgatgttgttcatcacctcaccgagacaccaacccaccgacggcagttttcgctgcgacgagcccaggatgaagagggtttgggatgtgttntcttaattatcttatgcatgtagcaatagcatgttgtggtctgtgcacttgtggtctattggtcttgtgattgtggagcaataatacgtgtgggatgtgcgtgatgaaatgat

SEQ ID NO: 35677 - DNA, 215 bp, Oryza sativa
  unsure (1)..(215): unsure at all n locations
cctttggtttggtaattcaacacctcgcacctcttatcatggagtcgcacacgacactcctcccgcaatgtcgtcatggagtcgggaacatgaccacttccttcgcggccgcgtcgttcatggagtcngcgaccacgtgcatttcctcgtcggcagcgtctgccatggagtcggcaaccacaagcagcgcttcctcgccggcctcgtcgttcatg

SEQ ID NO: 35678 - DNA, 289 bp, Oryza sativa
actagctgatgcggacccaacgccaattaattctcttaatggaatgaatgacaccgtctcacgtaatgctcacaagttgagcccaagctcagaatgttgaatcatttcatttatacttatcaaatcaaagtaacctaaagcttaattctacatacaaaagaaaaaacacctcttctgcaccctgaaataacaggaactgaacgtacggatctctaattcatcaagcaagaagactaccgatccaatccagcacaagatagatatatacctggtgtgatgccgccgcaac

SEQ ID NO: 35679 - DNA, 361 bp, Oryza sativa
tatatcttcagccaaacactagcattcactagctatctattcaaaattatcctggcaattcgttccctaattggattaatgattcatggctttgcatgcttgtttcaattacaattgacaactcgcaagactgttatgagattccttaccttggtgacctgccatgtcttaaatttctcttcatacagaaaatgtatgctgtagaaaactttggacaaagaagtaactctttgactactgatggtaaacatgcccctggattcccatcactggagatactgaatctgtgggagatgtattctttgcaattctggaacggaacaagatatggcgattttccacaccttcgaggtctctctat

SEQ ID NO: 35680 - DNA, 431 bp, Oryza sativa
  unsure (1)..(431): unsure at all n locations
agcttattctgagtccattctcccaatcctatgcttattgattacanttttaagatgttgcattcggtaccaacaaatcatttctttatggtaaaaggctacatctttatatgatctttcttacacaacaaccaatactactgtgtcaatcaagggttatggaacttactgacaattacaaggaatgttgcacatctagcaaaaaaaaaaatctatacttcggttgaagattttgatattagctagaactttactagatcacaaatatacatatttatattgtcttcgttaggtcagtcaggctctatgtataacaagctaaatggcaatatgtcgagatatgcgctgaatataaatggcagtatcaataccagatgtaaatggctaannatngtgatatgaatagtccatgttttcttttttatctacat

SEQ ID NO: 35681 - DNA, 496 bp, Oryza sativa
  unsure (1)..(496): unsure at all n locations
tatcatgtcagcagcaagatgagggtgcacttactgttttttcaacacaggcatctatagatacatcggctattgccacactagcacttccggccatcaatgccaacaacgcgaacaatacatgaagcttgctgtggagagataatacaagcatcgcgactactcccatgaagcctgcaatttctcagcaaacagggaggcataatcaataaaaataatttcataacctgtaactgaataacagtcgcacttaatcaaaggaacattatgttgaggaaataacagtagaaaaaaacatatcatcagacttgtcagtactaaataagtcaccgggaacatgaaactatgccacgttcctcgttccgggaacgccgntcccgttctgggaacacaggaataacctctgttccccccatgtttaaacatataaaatgtagcgttccatggttcttgaaccatcgatcccggaactnntatgacatangtactaatgcta

SEQ ID NO: 35682 - DNA, 422 bp, Oryza sativa
  unsure (1)..(422): unsure at all n locations
agcttacgagattacataattacttttcatgactaatctacgttccgnntttatgcctgaagctaagtattctaaaatttatttgtagtcaaagtgttcaaaagttgttcagctcttgtaaaaaaagtgtcatatatttatgaatagagggagtataagttaaaattatggctccatatacaggggtatgacccaattnttaacttaaatatttgtatgattgtaatttctatggataagtgggtgaattcaatgatagaagttgacaaatgggctaggcactacacggtcttaaaaaaacttgattgctaaaacttgcttgattaattacttgcagaggtccagttaaagaacatgaagtatgaaaatggggctggcttcacggatgagaaattgagatatggcggcggtggttatggtgg

SEQ ID NO: 35683 - DNA, 440 bp, Oryza sativa
  unsure (1)..(440): unsure at all n locations
ctcaagctgtacgtatgtgaattacatgttgtacagtacactggccagattgtatactgatatctttgctttcaatttctgttatacaagccgcaatccatactgcatactgaatactgaattntcactaacaaagtattactgcaatccatactgaatactacattntttctattcattactcangcatatatcaaattaccaatgtactgacatactgattctaacaaatttcattgagcataaacaggaactaattactaatgcatgaagaagagagtcatatcatgtatcatagtgtacaatgaataatctgtgacaaggagaaaataccatgaacttgggccttgntggtttccttgcagaaaagcaaaattggggggtacagagccccatcctgctccttgcggtggccatggnggcatggntgacatcggtac

SEQ ID NO: 35684 - DNA, 441 bp, Oryza sativa
  unsure (1)..(441): unsure at all n locations
agctntatccattggagatgtgtggtcagcgatgctatggtggattgacaagtgttcctcaaccatttggccataactgaaaaagaaatatcattctgttcaaactcagtagattttagtgacaccatgtccataacactgcagttttctctatattgtctcgcccgtagtcacattgtgcattttgatttccaattcatgatttgttatctcctttcaataaattataaaaggcagcatatgccacaggattgcttgctcactgctgctagcctgctactacaattttacacagtatattttcttagtcggaaattntatgtaccaaaatttcagtaatttcaacccttcaaaagaacagttccactcaaatatnttggtatatttcatatntagttcaatgtcagcaatatttcaattttttcacctgatattagtaat

SEQ ID NO: 35685 - DNA, 426 bp, Oryza sativa
  unsure (1)..(426): unsure at all n locations
ctgagagtcagtgggcgtcttccgatgtaacggaggagaacctgtttgagatggtggcgcacggcgtgcttccggcaaatgagatcatcgggtggcgtccagcgtgcggtgaaacgtttccgacccccgacacacacgaggtggtggtattctcccatttcttctatggcgggttttcccttccgacctcaagtttcttccgagggattntagatttctatgggctcagtttgcatcacctaaaccccaattccatagtccacatcgccaatttcatccatgcttgcgaggcctttctggggattaggccgcattttgctctattccgtcgcatcttcttcctcaagccccagccaaataaaagcaaaccgtgcgtagttggnggagccagatttcaactgagagggaccttgagccaaaaatact

SEQ ID NO: 35686 - DNA, 435 bp, Oryza sativa
  unsure (1)..(435): unsure at all n locations
agctgccgttcgccttgagaacgacgaccgggttctgtagccactccggatggatgacctcacggatgaatccggcctccagaagtcgcgccacctnctcgcggatgaaggcttgacgttccggggcctgccgccgcactttctgtcggaccggccttgcgcccggccgcacggcgagacggtgctcaatcacctccctggggaccccgggcatgtcagaggtcacatcgaagtccacccgctccgtgcggaagttggcggaaccaccgaaggtgaacgggaggtcgatatgacccaacggccaggtgtgccccggaaaacccaaaatttgcgagtaccaatgatagtacatntcccttgtcggtgacatggngcctgtggtatcgtgactagaggcttgggtagccgcggtcacccacgtggcctgaccccctc

SEQ ID NO: 35687 - DNA, 409 bp, Oryza sativa
  unsure (1)..(409): unsure at all n locations
ctgctataaatttacctgttcagcctgtctttaatattgcgcaaatttgaagttgttcctgaagtggccaaaacacctcccgtatactaggtttgatatttaatggcaggtgagcttcaagtctgctgacatgaacatgagatgtaaatatactccttaacatcgactaaaaggggggacattcctatgcacacatgcttcaggtgcactttgtgcacaacaactaaccaatgtcaccagaaaatcttatataaaattgttcatttacttctaatcttactccacctatatataaggtgtggaattcacatccattaaatatcagcgggtaccaaaaggataanaatagagaagaacacaactctctgttttatgagtatgtatatgtcagctggtgtgcacagtgagt

SEQ ID NO: 35688 - DNA, 454 bp, Oryza sativa
  unsure (1)..(454): unsure at all n locations
tgtgaatgcagagtaagcatccttacgcaccaatggctcctttccagattcaacatctgtgttgacattattgaaatttcttgccaatgggataacctgctcgcctactatacatccttgttcaatccaagacctctctgcgggagaagtgcataaatcacttcagcggaacatgcttttcagagaaccaaagggagtacttgcaccagatttttcagtgtttatacaaagagattggtgatagtgataggataagccactaatttcaataatgaacaaggatgtatactgaatggtgacatacacattgtgtntagtttgagaagaaataagaaaagtcccagtgtgtacggaaggggcaatgcagtagaagaataagaacaaaacaaaggctagtatatgatctatagagaaagaaagggctggaatccacccagaccaatctagtcagtcg

SEQ ID NO: 35689 - DNA, 435 bp, Oryza sativa
  unsure (1)..(435): unsure at all n locations
agcnttggtcctgaagttgaatcttgatttgttctgaaatcctatgcatgggtgccaccacaattcatctcctctttgcattggctcatgagagacatgtctcatgagagtggtcatggtcaaaagacttgattggcaatttgtcactgcatgttattgttgccccatgagcctctgggccatctcaaagttcagaaagagaagaactgaagataagaccaccatgtgatctcatgctntttccttccacaagaaacactcccaattccattttntctttaaaaaaaaacatttcctcctctgtactgtacacttgtagctctgaccagcaggaagagggtgttgattcgatggtctctggtggtcgcttggtgtgtaagaactgaagctttgattcttgctcccatttctgtccttgtggactcctctatccac

SEQ ID NO: 35690 - DNA, 352 bp, Oryza sativa
agttcaggaggtactgagaaaacaccacactcccggccaaaggttaataatctcggcactatatatatataggtattttcatgcgtgctcatcgttttccgtctttataatttcataagtattttcatttcctttttccatatctctagctagctagtctaatgtatggtagttaagtagttggttatattatatagggcatgtttgaagaagctttagattctgagaaacagctgtttggtagtcagcttctgagaatctggaaaagctatgaaatccagcttctccagcttctggcttcttagttcatttgtcagagtctgtaactacagattctcagaagttgtgaact

SEQ ID NO: 35691 - DNA, 367 bp, Oryza sativa
  unsure (1)..(367): unsure at all n locations
agcnttggacaagggtgatgtcaaacttatatttctntgtccataaataactntaaaaatatttggtttaaagaaactagaacaatatatatagatttatctttcaaaacatatatagtaaaagttaacatgcatttattaattttatatattataatagaaaaataaggtcaaacatatattttgtagactgtgtcattggtcaaaacgtcaattaaaataaaaccggagggagtacctatatattgtggggtttggctagatcaactgcgtgcatgcgtgcttgagaggtgatgctttgcatggctcgcgtcgaccgcgacacgcgcacgcgcgggacgggacgggaagcatggtcccgcgccac

SEQ ID NO: 35692 - DNA, 308 bp, Oryza sativa
  unsure (1)..(308): unsure at all n locations
ccaaaggctcgtctgacctatgcacgaccggcggcatgtgatccacagatcccttcgtgcatgtcgacgaggaggtgtttgccgtcagctgacgagacgcatttgagaagtaccctggttggcgccttcttgtatagatcattgccgatcatacagaagatnttggcctagcgggttattttctcggcttctacatcgtcgtcgggcaactcatcgctacttatgaatataacgagtgggatccgccagtcgtctgtggtctcgatgtcggcaacggcgcgttctacctatggagccccccagctgat

SEQ ID NO: 35693 - DNA, 449 bp, Oryza sativa
  unsure (1)..(449): unsure at all n locations
agcnttgctgctatatatcactaaattctttctacctccaaaccttgaaattagcaatcaactggtgctaatcaatttctgatgtattattcaattgaactacatgaatactttgctgcttaaccttttttttctttctcttcttgtagcaatatacacctttttttttctttctcttcttgtagcaatatacatttcaggattaataaaaagaacaaacatagtaactaggtagagagagcaagcacaagcatatgcacatgcaattgcagtgcagcatcacccgtgaccatctcttgatgcaaatgcagacaagggatcccagatatattctgtttgtgtgagaaaactccanatggtgttgggacttgggagatgggcaccaaccacgcacataggaacaaaatgtgcccactccctagctgcaccttgacgtactcatgtgtcat

SEQ ID NO: 35694 - DNA, 454 bp, Oryza sativa
  unsure (1)..(454): unsure at all n locations
aggcgcagaacagaactattacaacattcatgctatcattatgcttcaggaatctggactgattattgttacaccaagcaaatcaaaatactcaattacctgcaatcatagtagcatatgtttttgcacaccataaaccaagctctagtcaagtcacaactaataacatctttttgttgtactgtatagacattgttcatatggtcattctccgggatttaaaactgtacgttatgtataatattatctcatatgtacacatcttgatctatcanaaccttaaagttgagaattggatatcagactcaattttcgttgtccaggacataacagtacaatatatgtatacagtaaaattatctagaaaatgacatgccttctataaagaacattatgactgcgcagcatggcagacgatatatatantgtaatgcagcatgacagacaatgacat

SEQ ID NO: 35695 - DNA, 453 bp, Oryza sativa
  unsure (1)..(453): unsure at all n locations
gcttctgtaaccccttgcctataagattaattagttctcaaatttagaaattttattctttttgaatntaattttaaaaataaatgtcaaaaacttatttccatcatgaatgttttgtcacgccaatacttgcatgagaaacaacactaccatattatgagaggttggtcttgcaatattgtttggctcaaagattaagatttagaaataagttttttgattgctctattgataaatcaaaaaagttgctttaaaaaaactcanagtgactcaaatatggtctaggtcaagtctttggatttaaatcgtgaattgaaaaggactttctctaaatctttttatataaatcatggagctaatcccgtaacaacttccatgcatgtngcactttcaaccgtataaataataagaaacaagttaatgatagagctcattacaagctataagcttatt

SEQ ID NO: 35696 - DNA, 305 bp, Oryza sativa
  unsure (1)..(305): unsure at all n locations
gcacccttctgaaattgaagcttcccatggctgtcagtaacatatgtaccaagatattcttgaagatcagtatgctcgtgattgttgatacggacaaattcatgaccagtttgtgctgcaagaaacctgacaggctagttttgccacttgatgtgggaccttgcacgagaacagggtatttnttaatgtaaacagcacaggcaaggttgacaatgtgctcagtgacactgttagttaacacatagctacgcaaaaagtcgtcagattcagaaccatttagtagctttgcttttcaacgaagtagt

SEQ ID NO: 35697 - DNA, 372 bp, Oryza sativa
  unsure (1)..(372): unsure at all n locations
atagcttgccggacgcgtctcatgtgtgngacgatttcatgtgtatgtcattcgcacagtgcgggtaaagtgtacatccactgcagtgtgagtaaaccaaatctatttgaatagccgtgctcgcggttattgagcaccgggacatgtattacacttggttagactcttaattctttaacttgtgtgggatgagatattgcatgatgatttttatgctgatggagccacttnctgagaggcgggaatgtggacgtcctcagaaaaccataacgactcaatggcgggaagctatccttgggatcacaatggatggtggacagaaccgtcattgtttaatatgaacactggtattaaaacttgatcagtctatgc

SEQ ID NO: 35698 - DNA, 439 bp, Oryza sativa
  unsure (1)..(439): unsure at all n locations
agcttcccgggcttctttctcgacgttgagcgttaccgctgntcatcttcggccccaacataagccgcaatgacatttctccccatggttttgctatgtagttgaactattttcggtaaaaattggagggtaggctagagcctgatggagcctacctgctagaatcgccattgctttcgagtgtagaaggtggtcagaagggtgcgtttggatccaaggctagcaggggcctatcctggccaggccagtcgtttgatatcagaaaaaaatcctagcctgtgggggcgagctagcccataggagcgagaaaaggctggctcacaagggagagctgaactatanggcttatagatccggtcaatttgcaatcatgctcctccccttgctgaactctcaagcattctcatcatctgcagtaatgcccgtgccctatataaat

SEQ ID NO: 35699 - DNA, 462 bp, Oryza sativa
  unsure (1)..(462): unsure at all n locations
actcagcttcaacggtgccatctgtagactggcctggtttctgttgttgttctagaattccgcatatggcaagctnttgtcccaagctccaccaaaatcaagagcgcaagctctcaacatatcttccaagatttgattgactcgctcggtctgaccatcagttngcgggtgataggccgtgctgaaatttaaacgggtccccaattcttcctgcagtttctgccaaaactttgaggtgaactgactacctcggtcggatactatcttcttgggtaccccatgcaaacacatgatccttgcgagatacaattctgccaatctctttcccgtataggtggtatgtactggtataaagtgagccaccttggtgagtcgatccacgactacccagattgaatcatgttccgatgatgttcggggcaggcccgttataaaagtcattccaatcttctcccattttca

SEQ ID NO: 35700 - DNA, 419 bp, Oryza sativa
atcattctggcatcgagctattatgccgtctgttcttctctacagtatcgacaccgcagaagagtgtaaccaccaaattctggatggattggtgtggttcctctacacctatgacaccagaatattgaaccatgaactaggaaaggcatgagagaaatattggctcgttattgtgaagccccaatacttgactggaaaggacaccaaatgccatctgcctccctctctatctatacaacagattgaagggcagagctatcttttggtgtttgatcttatctatcaagaggtgaacaatgaagatagatggtcagtgcctgatcgatttgatcaagtcgtgttggaacaaggttcgaattcttcgttcgttatgatgtcataaatgcctacgtgactgctctctcacttgacacctattt

SEQ ID NO: 35701 - DNA, 241 bp, Oryza sativa
agcttaaagccatgaatcccgtttatgcatatatggatctggatcctgtttaacaaacatataggatgagtactatgtgatattaatataatactcgagataaaatcaagtattttaaaatatttataaatatgtatttctgctcttgtgcattttgagttcctcgagcagatgactctgtacgtttaaacactctgcccgactagtcatagccacctagcactgagagttggcctaggca

SEQ ID NO: 35702 - DNA, 493 bp, Oryza sativa
  unsure (1)..(493): unsure at all n locations
tactcagctattcatgtgatctgtgacctctcccatggttagtgtgtcaagtttaaatactatttggttatctctgatgacttctctcattatgtgtggaccttccctctaacaattaaatccgacaccttttctaccttgtctcaatgttttggatgtgcgaaaacccagttctccaccaccatccaaagcatccagtgcgacaatggtcgtgagtttgacaactctagcgcccaaagtattttttctcaccaacggtgtctctctccgnttgttctagccccacaccttcncccaaaacggtatggttgagcgcatgctatgttctctcaataacatagttcgctccctcctggttcaggctagcctcccaccgcctctttgggtggaagccctccacacagctacccatcttattaacctgcattccacaagactctcacacaccacacaccgtttctctcctttatggtcacacncctctatcacacct

SEQ ID NO: 35703 - DNA, 379 bp, Oryza sativa
  unsure (1)..(379): unsure at all n locations
agcttgcccgcaggtacaccaaacacacacttatcggggttcagttttatgcgggcggagcggagattctcaaaagtttccgctagatctgaaagtaaagtttcttggttgcacgttnttacaaccaagtcatcgacatacgcctcaacattacgtcctatttggctacccaaagaaattcgagtagtacgctgaaaagtaggacctgcattctttaacccgaagggcattgatgtataacaataggttcctacgggggtaatgaacgcagttntttcctcatcctccctagccatgcgaatctgatggtaaccagagtatgcatctagaaaacacnaaaggtcgcaccccgcagtggagtcgacgatctgatctatgc

SEQ ID NO: 35704 - DNA, 432 bp, Oryza sativa
  unsure (1)..(432): unsure at all n locations
ctgtacgatcgagtattttttttcttaaccacaagagtgcatgatcataaaatgggtacatgcatgctctaagatgatcaaaactgagtccacagaagcaagaataataagtcatgctactgatccccccgtctcagaatataataacttttagcctttagaatttttgtctaaaatataataacttcttcaccaacattctcttcttaaccaatcacaagcctacagcattcaatatctccacctatctgtatttctcaatcaatcacaacctaccaccatttaacttcacctactttcttaataactggtgtcaaactctaaaattcttatattataggacagagttagtaattgtcatggatagacaccctattcctaaaanacgatttaaggggcacatcatactatgatggtatgctatgtgatcac

SEQ ID NO: 35705 - DNA, 331 bp, Oryza sativa
  unsure (1)..(331): unsure at all n locations
tgcttagcgctggaaacgatgaatcaggatttggacttctaagagactgatccagaggtaaaatgtaactgtttattgaagcattccctattctaataaacccctgccctcttttgaccaattcttcacgcacataacttataccaaatttcatttggtgtcctatnggggttgctggacagcaaaacatgagctaaagaaaccatctatcaaatttgtgttctcaacaattgacagagtgaaaaatggcgcttgtggaattcagatatccaggcatttgctttctcttcctgaggtagatttctcttctttgaacttactatttgcatat

SEQ ID NO: 35706 - DNA, 373 bp, Oryza sativa
  unsure (1)..(373): unsure at all n locations
tatctggagtgagatctatgaggtagtgtgtgagccanagaggtgctgcatctatgctccttatataatgaagatgatagaggaaaagactgggatttgttatttcaaggacaatcaacacaagcctttccgacctcatgctcctactacttcagctactccttctaccagggcaactcgtgcttctacctcagctgctccttcttcctctgctgcaccacagtgttctgagtcttcttctcccataaagaaagccctccgggctatcttttgtatgtgtgctaagacagctaagaaggtaaagaagatagaaaggcgtcagaaggaagattagatngcagcaggcaaggatgtctctgatatttctgatgat

SEQ ID NO: 35707 - DNA, 413 bp, Oryza sativa
  unsure (1)..(413): unsure at all n locations
gcgatcttgagccacctgcggcatgcaagcttcacatctcacatcacctaactcgttaacaattcgttctggtaccgcgagtcaaacaattttatatatgttcacttcacaatgtggccatttggtcaacagaaaatctcatccaactagtacatgagtactgaactagattgaattatcctaccaatttcaaccccaaataaaatcctccaaaagtagtaggtacagaacccgtcaaccagttgatcgacacagcaaagccatgacgaanacacgagcaacatcatggaaaggaacacgcaaggtgatcatctncganagatcaaaatagtggctcagaattttgacaatgacagcaagtcatatggtagaaggatggaaaggaacacccaagtggcaaatttgtggagcat

SEQ ID NO: 35708 - DNA, 491 bp, Oryza sativa
  unsure (1)..(491): unsure at all n locations
tatatcccaatgtctncaaatcctatatcacacggtagatggcttgagatctctctatcttttttttttaaaaaaaaaaaaccttgttcataagttcattccatgaacaatgatgaacatcactcaccaaaggcatacggngtatgtatggatgcaattggccaattagagttcacattccagtcacagccctgccttttatcagcgtttgtggccaataaatttggtcttcaggttcctgatgcttgtgcttgtgtttctgcccaatggtaaagttgaagtactagccgaatcctgctcatgaattgacgtactattgtgccatgacccatgagtgctaatngtatttgggctgcttattagcagtgattgaaatttcgaaatgaaattcncannacccccttccccccccctcatcgcaagcacaatctcgccaaaattttctttttttaactttttgtaattatcgagttatcaaatcattaaattat

SEQ ID NO: 35709 - DNA, 362 bp, Oryza sativa
  unsure (1)..(362): unsure at all n locations
accgctagagcccctccnctcgaagccgccgccgccgccaaatccagccccgcttgaagccgtcgaagtcgaatccggctcctaccaaagatgccacttgctcttcttcatccgaatccagatgtgacgacgagagagggttgtcactgctgacgcccggatcttcctcctagtcgccgctgtcaccgncaccatcgccaccgncttcgtctatagctgctgcatcgggccctcttcctctcccttcttccgtcagatccagagcccaggagctcgatctggtggcctcaggcttctggttgccggatccggacgtactgatggcggcgaanatcgtcaggatcccgctattgccggatcta

SEQ ID NO: 35710 - DNA, 382 bp, Oryza sativa
  unsure (1)..(382): unsure at all n locations
tactcagcttgcccgcggtacaccgaacacgcacttatacgggttcagctttatgctggcggagcggagactctcaaaagtttccgctagatccgagagtaaggtctcttgggtgcgcgtctttacaacccagtcatcgacataagcctcaacattacgtcctatttggctacccaaagaaattcgagtagtacgttgaaaagtaggacctgcattctttaacccgaagggcattgtcgtataacaataagttcctatgggggtaataaatgcagttttttcctcatcctccctagccatgcgaatctgatggtaaccagagtatgcatctagaanacacaaaaggtcgcaccccgctgtggagtcgacaatctaatctatg

SEQ ID NO: 35711 - DNA, 358 bp, Oryza sativa
  unsure (1)..(358): unsure at all n locations
gcttcagcttcagcttaaaacccaatcaaaaacttaatgaactggcctgttaaagaaaagtttgtctacatctcttcagacgaatgaacaatttgtacggcaaactgaaaattttgccaaaataattagtaattccggcgtacgcagtattgcagtaaggtgtccattcgaactctgtccatctgtggtgaagagaatgaactaacaacctctccatcgagacttatggttgaatctgacaggtcatttctccaagtcaaactgcaaattttgcagtctcttgcaacttggtttgatgcacaagatcgatcgattctagcgacacattttntgtgctctcgtgtcccttatggacatc

SEQ ID NO: 35712 - DNA, 498 bp, Oryza sativa
  unsure (1)..(498): unsure at all n locations
ggttcctgtgttctggaagtttntggttctctgaaagtctgaagcagtgagatgacttgtatgttctgacttgtgagttggtgccttgtgtttcttcgcatacacgtagcaaagagcatttcaagtggagcaagagcattatactattagaggatctttacagatggattgcgcacatacagctgcaaagacagccaatgaaacaaataataatatagtttgttaagatgaactnttatatcagaaagtcgaagcagaagatagggacctctcaacagactaactaatattcaaaatttattgtactaatcccccaactaacccacctaaatctccacaaaatcagtaatacagttcacttcagtttaaaaattcccagtacagttcacgcagagcanagcaggaaattntcttcagttcanaactttgacaaccatggagataaacaaagggctgtctctgaaattggagcagcaacagcatctcaatatattgtct

SEQ ID NO: 35713 - DNA, 369 bp, Oryza sativa
  unsure (1)..(369): unsure at all n locations
agcttcagataataggaactgggatggtgtcattgtcagcacttatgaagaagcaaaagcggcatacaatgttcaaagaaggcgctgcaaagagttggaaggcattgtttccagattgaaggtgatccaaattatattcaccaaattatattcacccttgaagtaattattcccacagcaaactggatagctctgcttgcatctacgctccacaatttctttnttttttgttcccttcctgcagatatacctgaaatgcatctagccatcgtgcttctgctcttatgatgctactgtgaactttnttcagggcgaggatctaagaggcttagatgtcaaagtcctggaagagttacaaaattttcatgt

SEQ ID NO: 35714 - DNA, 335 bp, Oryza sativa
  unsure (1)..(335): unsure at all n locations
taccnaatcatccttctcaaacggttcaagataagggaggaggtccatggccggagagagcagctgctgtactgatgacgccaactggcaatcaatcaaccaatcaccagcttacaattcggccacacataaactcgattcggactaaagacgccttgagaaaaaatccgctttccttactcgttggcgcataagagataaatacgccttcttcctcgtctcatagtagtatacacaaccaatcatcgcgatccgccctcgcaaacaaaaagaanaaagaaaaaagaaaagaanaacgaaacgaaagcttcttcttcctcctcccatggagtcgc

SEQ ID NO: 35715 - DNA, 496 bp, Oryza sativa
  unsure (1)..(496): unsure at all n locations
agctntagtagcctgaggagatgagctngcaacaataatatcatcaacataaactagtacaaacattgtataggtaccacggctatagaaaaatagtgatgtgttagctttggaaggtacaaagcctaaatcctgtaatttcttactcaggcgagaataccaagctcgcggagcttgttttaaaccatataatgccttgtccaatttacagagataatgtgggtgtaccttatcttcttatcctgngggttgcctcatgtagacttcttcttccaaataaccatgcaaaaaggcattctatacatctaattgtctgagactccaaccattagaaacagcaatagatagaataagtctgacagtagcagctttaactaccggactaaatgtgtccttatagtcaatcccataacgttgcttaaatccttttgcaactagtcttgccttatatctatctatngacccatcagaatttcttttaatcttgtatacccac

SEQ ID NO: 35716 - DNA, 350 bp, Oryza sativa
  unsure (1)..(350): unsure at all n locations
nntgttgtttcattgcaactaattctagtatacgtacttttgaagggtgtgtatacgctggttagtttccttctttaccttntatacagnttgcagggcaatttgcagcctcctaacgcgcgttcaagtaatccttgattntactaaatttctattaaaataaaaagggacccgcttatataagaactatgggcaataagatttttaacataataaaatagggtaatacgtttacagtttcaccactatacagcttccacctttctatttatgatatcatagctattgtttctagcttattattattacacagaagtaggggtgggctaanaatcctagagatcaaactg

SEQ ID NO: 35717 - DNA, 496 bp, Oryza sativa
  unsure (1)..(496): unsure at all n locations
agcttgttcttgctgctcttggtggctccatttatccccatggctggggttacggaaagtaaatgaggcaacgggtttcctgcatgaggctgatggttgtggaccttgtggtggtggggatgtagcgagaggtgagagcagggagagcttgctgctcangtgggtggaatcgccatggaaaactcactgaggatcaggaataggaaggtgtgtggaaggattggatgtggagtgagacgtcaggaggaggaagacggagagaaatacaagcatacggccatatacaaagccataggttggccaacagcctcacctaaatacctaatcaggtaatttttttctttttattnntttacaacatgtcttttcttttattctcttttnttaatacgaaatggttggaatcgaagtgtacatttaggctgagtttggaggacaattngctntgagaacttntacagtacattagtatattgtactgcanatatatactatc

SEQ ID NO: 35718 - DNA, 365 bp, Oryza sativa
tccctgtaagtgctcgcattagtgtgctctttcccgaggatggaggcccaagaagaagtgtcatcctgaaataagaaaaaagaactatagttcagtacttcttttgaaaatacgaacatttggaaactagtacattggtagtgtatgtttctacctggatggcttgatgatgccactaacatcttgcagtatgttaatggtcctcttatttgaagaaccaaatcgtccaatgagaccctgtccagtaaacatcatcacattttctatccatcaagcacacacaaaaattgatttgtttttggaccgaagcccaaaagatgatagtccaccaccataacatatagctatgaaaaaaacatattagt

SEQ ID NO: 35719 - DNA, 379 bp, Oryza sativa
  unsure (1)..(379): unsure at all n locations
agcttggctcttgacacaaacttgctaatgattatctttcttatggggtcatgcaagtcaacaatctgacgatccttgattnttgagacccaactattgaaacattcagagaggttgttattgatgtaatctaccttgcactcctcataaaacttgcttctgctccaaatgtatggatgattgtcatctaaccaggttagggcttcagggcacctctcctttatcttgtccatgtggtaggtgaacttcacatttgtgaagctcttagcagctgcccacatantttgggcaaacagaggaccatggtacttcttcttcatgttcttccacaagtgtctcatacattccctatgttccacttctggatatacatcatcta

SEQ ID NO: 35720 - DNA, 519 bp, Oryza sativa
  unsure (1)..(519): unsure at all n locations
gctattcggacctataaaactcagcttgggctgaatatgttgagtttgtggaatgcataaatggtgaatatgtttagttgggggctggaatttctgtcttgcaatttttttaggtcccctcctaacattcctgaagtgaagatcccagaggacctggctgttaatgttgctcgctcactgagatttgagatcaataggggctttgctaccttgagggagattggtcaagggcatgacctgaagaaatttctgattgtatgtcagattggcaacatgattaccttttttaagccttcattggttaatggtatctcttcgacatgctcaatttgcttatgctggtcctctttattaaggttgtcgtgggtctctgggttctctctgttcttgggagctgctgcaatttcctgaccttgttctacatangtaattattttggacaacaactgtacaagttaccacatttagcactgttaccaactacagttntctttcttgcagtctttatggtactgtaca

SEQ ID NO: 35721 - DNA, 473 bp, Oryza sativa
  unsure (1)..(473): unsure at all n locations
ggatcttaagcacctgggctgcagctgcttgaaacatgatctgttattctgcgctgagaagtggaacgttgacaattgtgtgttggtctcanggcccaactgctggacgtggagattgtgcctgttcaatcttgctccaatgcttacctcaacaaactcatagntgctagatgtattctgcaaagaatgttagacaactataagaataacttactggtatttcctactcaagtaagccttgctttaatcttcatcattgaacactgaaaataataggtaaaatcatccttgtcaaatttgtcccaagataattccagtatggaacattccaatacaagtcctttctagagtgtaataaaaaaataaatttatgaaataaattattagtgctaagttaccataagctgctaacgaaattaaaggagaaaaatgcaagatgtcaatgggtcgtcagccaactaccactaacttag

SEQ ID NO: 35722 - DNA, 382 bp, Oryza sativa
  unsure (1)..(382): unsure at all n locations
tgtgctctggatctcaacgagctcgtagtggtgctagagtctacgagactcgacaaggacaatggcgatgtggaagagcaagaaatcggtagcagcaccggagtcaattggtgttggaacatcaatcgaagcaatgacaccactgcatgatcgatctagaggtcaccaccgccattgagctcctggccacattcccctaccacggtgctatgtccattggcactgaggttccatggttagcaccatagcacttggaactcggtctgccatctcggacccagtgtcatagagacaattaggttgctgagatgttggactttagtgtcacaattcaattttgaaataagtttttagcaggggttattctcannaataagctttc

SEQ ID NO: 35723 - DNA, 420 bp, Oryza sativa
  unsure (1)..(420): unsure at all n locations
atgccagctaggcatttgatcaaagttcgcggcttgaatgatatatccaaagacatcaattctaaggtctactntgcgatccgcccatntgcttcacgattatgaagtatatccccgagtggaaacgatgtgaccaccgtgaccgagtgaccttggaagtagtgagataatttcctgacggtaattaaaacaccatataatagcttttgaacctagggatatcttgtcttggagtcggccaaaacctcactaacgaagtagattggtcgttggactttntgaacatggccttcttcttcacgctcaacaaccaggactgtgcttacaacctgaaaagttgccgatacgtataacaacagcggctcttgcggatgtggtgaggctaagactggtggagtagtgaataagtttttgaagtct

SEQ ID NO: 35724 - DNA, 457 bp, Oryza sativa
  unsure (1)..(457): unsure at all n locations
tcgggtacttatgtatcgcgtgcatgctttgcatgatattatttccatcaggtaagtgtcaaactctgcagagtaaaaactaatcgattagccgtgctcgcggtcatgagcggcgtgtggatatctattgagtatagacttatggttattcttctaagtggctgaaattaccttcaaattgtgttgagatttgagaatgatctccttgctggccacggaggcaatgaggtgcatanttatacatgattaatgcctaccttgatgcccaatatgtcaagtactagcttgctgaaatttatttganagtanacctgatttagaaatggtttatgcanataaaacttgctttatgctaaaaagaaccatattatgccttncttgatatatgccttgcaagtaggtgtaggcttgtctggtgcttgccagacatattataatgactgctctgctatgaata

SEQ ID NO: 35725 - DNA, 217 bp, Oryza sativa
  unsure (1)..(217): unsure at all n locations
agcttatcaagtctactttaaatggatccagccacatgtccatatctgntctggagcggccgcaattgtcattttactcccgactattttctgtccatggtgctgcgtcacctcttttggcccaatgggctgtgtatccatgttgggcccattatgggcgcgtcctaaggttggagcacgaccctatggtcgntcttcccctctttttatacctcta

SEQ ID NO: 35726 - DNA, 406 bp, Oryza sativa
  unsure (1)..(406): unsure at all n locations
ctcagcttgtatctatctttgaatctgaacattntatctctgcatttgtttctgatgggttaaaactgggtttggcactggatgatctggttcttgatcatttggtcatcatgtacttcaaaacttgcacatttggtattgaatgtagactcaaaacaggctctatatctatgtttgaaactacccagtcctaaaaatgcttgtaatacattacaactatctaatcctaaaaatgcttgtagtacataatttagaaattaagatggttctttcagtataaggtgatgtcatcnagaatgcttcatgaagtacttgcaaagctatttatcaattcaatcctatgcttattgtaatccaacaatcttttggtcatcaaaatgaccctggaaatattatccttttacta

SEQ ID NO: 35727 - DNA, 466 bp, Oryza sativa
  unsure (1)..(466): unsure at all n locations
actgtgtctataacctttctatcgcatgaacattgttcgaatgtgatagactgaaactgatgtgcttacaaataagccattggtgaaatcaaatggcttcctgagcttgcttgggttgcgctcgaccttctccaagcaagggaatgaccgtgagatcaagaatacaaggcatttgtgcaagtgccccacttaccggtgagttggaacttatctgcttaatgcatcaacgatgcatgatgtttntcacttcaatatccattntaaataattcattcaatatctattagtatagaaggctcttttcactaaaactgcatgggtttcaatggctgctcctttggagctaaaaccaaatactacctccatcccaaaataagtntattttttttcaaacaatcccaatataccaataccaaactaanaaaactataatacccctactttataanatcccaatgcaactatt

SEQ ID NO: 35728 - DNA, 366 bp, Oryza sativa
gacgcacctagatttttagtgaggagtatagcactcaagaatggcagagtagtctctgagtcgtcctatgcagctccaccggccacacagcttgcttcagaactaggttacccacaatggatggaagttaaagcttagtattggtggagaaggaagcaatcagctcaacacccagttctctaaagagaagtatgagttgagaagagctcatttagacataaatgtcatcattctggtcattgtcaaacccgttcttctctatgtccgtaagcatgtaagaggcatggctaatagtttgatccaaagtatcggagaaatcattagctgttagatcttactcgcatattaattttctctctttttgat

SEQ ID NO: 35729 - DNA, 339 bp, Oryza sativa
  unsure (1)..(339): unsure at all n locations
tgccaggatcaacccaagtaaccccatttcttgtataagatttccatcgagatgatgtacaaatagagaactgtgatctagcagtgctgttgtgaggcaattaacagcttgtcaataggagttatgttctgatattatgcggatatttagatgccaacatatgatgcatcggaattattttcccgtatcatgtaaacccagcccattattagcgtgcacagctagggagataaggagattttatttgtatcggcttttgggggtttccgtgggtttgtgcatcttttccttaacttggcatttatcttttcgctntattcatagtcagctaatgtgctc

SEQ ID NO: 35730 - DNA, 315 bp, Oryza sativa
  unsure (1)..(315): unsure at all n locations
cgctcgctgccttcctcaccgncaccccataaacgcgcatgcgttgtttgnggaaaaaaaaagagggtgaagaaagaagttgtggctgacatgtgagtccaatgtttttttttacttcttttgctgattaggatgccagtgctcattctacctaaattagacggttttgcgaaaatgaagggtggtgattggtgaagattcctagtatttatagggatttcaattaaacttgatgtaaagaagagggatgacaagtggacttatttctaacagaaatcgtccaagcccaccattcttatnaccaccaccaccacc

SEQ ID NO: 35731 - DNA, 392 bp, Oryza sativa
agcttctcgggttcttggtctctgcccgaggcattgaggccaacctcgagaagatacgggctatagagcggatgcgcccccccagcaaacttagggatgtgcaatgcgtcaccggttgcatggccgccctaagtcggttcatatcgaggctgggagagaaggcgttacccttatttaagcttctcaaacgctccggaccgtttacctggacggaggaagctgaaaatgccctcacccagttgaaggcgtatctaagctctcccccagttctggtcgccccggagccagacgagcccttgctactctacttagcggcgaccccgcaagtagttagtgtggcattggttgtggagcgcgatgaggacaattctcatttcgcgctttcccaccct

SEQ ID NO: 35732 - DNA, 269 bp, Oryza sativa
gcgcgaggcggagtgggctccgcattcgccttcatggatatcggcaagaagcacgacgccttggtcccgagaaatgcacttcaggaggattccattagccgcgcgccgatagagggtcccttctaccagcacatagcgtttggagatgcgatggacgcgttcactcccttcgcggtcctcgggtagagtcttatctgtgaggtatgcttgaatctcagcgatccaagcaatcaatctaagggagctgggagcgctcccctcgggtcccg

SEQ ID NO: 35733 - DNA, 482 bp, Oryza sativa
  unsure (1)..(482): unsure at all n locations
tcgacccggatccttaaagcacctgaggcatgcaagctgggtgggactcctcgagttcctgagcagacctcacaaaagaaagcaagaaagtcaagtgcagtaaatttgtggaagcagtatataggaaacgaccaagcctctccatcctcagagaacaaatcaacatggaacccggagtcagagcttaaccactacctcgtcaccaatcatactaagcatgatccgacgcttggtggcgacgatgtcgatctccttgggtggtggaaagagaaagagcgaactcttcctgtgttagctcactttgctcgagatattcttctggttccggcctccttcgtttcttccgagcaagcattcagcgttactggaatcattanggagaaaagaacgaaggtcatgcctgacagccgagacagttgagtcaatcttttgtcttaaagactggatgggagcagatgaacgaatgtcacattgtctacatg

SEQ ID NO: 35734 - DNA, 340 bp, Oryza sativa
tgtttgcagcccgaaccaagctaagcacctcctgctggaacatctggtgacatgggcatgctctccatcagattctctgactctctgacatatccaacacgtcctagaagattcaccatgcattcatcatgtctgatgtttgagataatgtgatacttgtgctagatcaactcgcataaatgtaggtcctgctcaactacgtcaacatgtatgcaagcactcacaactccagtgaaagtcatctcatttcgagtgccagcgctacatgattccatctgccgatacatgtccatggacttcatcaccatactattcatggccagccacacaatgacagcat

SEQ ID NO: 35735 - DNA, 443 bp, Oryza sativa
agctttgaatagtagagccaacacatggcatgttattgcacttagtgaatctgattgaagttgttatgatgctacttctccaataaacatacctggatagaatcagtgaactgatctggtgatatgctggtattgctaatgccatctaacatcttttgttgctcagccaaacggtgctctagtgtttcccttaacctcctttcttcgtcaagtttcattgctagtcgatcacgctcaagttcagactacatgaaaagaatccacgagactttgagttaagtaaaataagatggttgtatgcagtatccacaaaaggatgctcattcttaaatgagatatacatgttctacaggaatctgagaacctttaatctttacctaccttgtgcatgtcattgcgctgctttagtataacctgctccaacacttcggaatgagaaccct

SEQ ID NO: 35736 - DNA, 367 bp, Oryza sativa
tattacggacctataaatctcagctttgcacatggaaggttctgggctgcggatcctttcttcttatgaatgcgatatgaagattcttgaatggatatgtaactcggctgtcgaatgcgttgccatagacgcttattagcgtcctaatgcttatgatgtggagaaacgtcttctgatgctttgggcagctcaacatggctaggacgagaacataatcatgcgattatgcaggagatcaccagcagaaatcattagctccagcttatgtcacaaactctgcaatgcccggattttcagggtaggggaactgtataaagtcacagagaactactcgagtcatcttgctacaggttcatcttataacatc

SEQ ID NO: 35737 - DNA, 462 bp, Oryza sativa
  unsure (1)..(462): unsure at all n locations
agctttagctcagcttcaagcggagcgagaatgtcttcacattggggcttgtcatcatccttttgggctgcatgtactctccgcaaagtcgcttctgctgccaactgagcagccattgcagccttgttctcatcattaatcttcttgacttctagattctgcattcgtctctatcattggtaaagacaagatcagctaacacagagacaacggatacagataaacacaaattataagatacatactttgctgtcaaggagtgattctgtcaacttgagtttctcaaacatcttctccaactcatctgtaagctgtcatcacaatatcacaataattgtaaaaacatagtacataatcatatgtaaatacatttacagctagaaggatcagaattaaacatgatcagcnattgatcntgcatgaaacagcaagataattaagttcacatgtgattcttcttgg

SEQ ID NO: 35738 - DNA, 330 bp, Oryza sativa
  unsure (1)..(330): unsure at all n locations
tcggcttcatacaactgcaggtacatccaccatccgccttctatacacattcctgcacggctggcttgcgatagataccacgcctgctcctatcaacacacattatttcataccgatgcacttgtgtgccttgagcaacaactctatgtctccgtgcctttntgattntatcttccatgtactgtgtcactacgttgccaaacactatgttgttatcggccatggacggaccaattttcttgtatcgatccctaaagtaggcttgcgtgccgtgaaggatgaattcaacaatagcaaccaatggaagtacccgaacttctcgcattaccc

SEQ ID NO: 35739 - DNA, 373 bp, Oryza sativa
agcttcgaagatccctcatcgacggtggcagcgcactcaatatcctttttgccaagactctggacgacatgcagatccctcgcgcagaattaaagccgagtaatgcgctctttcatggagtcatccccaggctatcttctactccactcggccaaatcactctgccggttactttcggcactcgggagaactttcgcacagaaaatatttgcttcgaagtcgctgatttcgagatagcgtaccatgctatactcggacgcccggcgttagccaagttcatggctgtcccacactatacctacatgatgatgaagatgccaggtccccgaggagtcatatccctgtggagcgacatcaagcaagccgtcacatg

SEQ ID NO: 35740 - DNA, 395 bp, Oryza sativa
  unsure (1)..(395): unsure at all n locations
tatgatcagaaacagacatgcctggctatcatgtactcattttatntcactaatccaaggtccaagcgcacggaatcgttattgtatcacaacgcccaccatccagcatgctgcagagctgtagcatacgttttaggaaagtccatacacaccgagacatagcttgtccactacctaaaaaggctagatgatcgaaacaaactagaacatgcccttgagttacttatctcgccacgcaaagttgccaatccgacagaactgccttnttatgcatggcaacaccccactaaggccgaaagtgccggatcatcatcatcatcatcatcatcattatcatcatcatcaagatactaggttatgccaccgcactgcacagaatgcggcggccgatcacg

SEQ ID NO: 35741 - DNA, 384 bp, Oryza sativa
  unsure (1)..(384): unsure at all n locations
agcttcgaagatccctcatcgacggtggcagcgcactncaatatccttttgccaagactctggacgacatgcagatccctcgcgcagaattaaagccgagtaatgcgctctttcatggagtcatccccaggctatcttctactccactcggccaaatcactctggcggttactttcggcactcgggagaactttcgcacagaanatatntgcttcgaagtcgctgatttcgagatagcgtaccatgctatactcggacgcccggcgttagccaagttcatggctggcccacactatacctacatgatgatgaagatgccaggtccccgaggagtcatatccctgtggagcgacatcaagcaagccgtcacatgcgacaaggaaa

SEQ ID NO: 35742 - DNA, 496 bp, Oryza sativa
  unsure (1)..(496): unsure at all n locations
tatgatcagaaacagacatgccttgctcatcagttactcagttaatttcactattccaatttccaagccgacggaatcgcttttgcatcacaacgcccaccatccagcatgctgcaaagctgtagcatcggttgtaggaaattccatanacaccgagacatagcttctccactacctataaaggctagatgatcgaaacaaaaaataacatgcccttgatttactaatctcgccacgcatagttgccaagccgacagaactgcctttntttgcatcgcaacaccccactaagcccgaaagtgccgcatcatcatcatcatcatcatcatcatcatcatcatcatcagtatactagnttatgcaaccgcacggcacagaaggcggcgggcggatcacgcacgaatcgtggctggcattctctcttggagctagaaatatctcgcccgcaaacaggcagccggatctgtgggatcccaaatcatatactatgaacatc

SEQ ID NO: 35743 - DNA, 468 bp, Oryza sativa
  unsure (1)..(468): unsure at all n locations
agcttctcctcatgcttcacatcgtcaagcggttaagcgaataatgaagtatttgaatcatacacttaagtttggaatttagtattctacttcatcttctatatgcttgagtggatattccgatgctgattttactagttgtagaattgataggaaaagtactagtggatcggaacatgtcattttcttggtactgtaggatcgtaaagggcctttacaaccccaaaagctagccattgagatgaagggctcccccacttatatcttaggtcatttgcccttccacattcaatatgggactattcaacaatttcgcccttcacacattggtgccccttagcccttcaccaccccttcactgtatacaggccccacagggccacggtccatcagatatacaggccccgcaggcacccacagtccatcgggccttcacacactgtgtccatcgngccagagatgtaaact

SEQ ID NO: 35744 - DNA, 484 bp, Oryza sativa
  unsure (1)..(484): unsure at all n locations
tccaatataaacatgcctcanataccgcagcaatatctgttatctctagaaacttcacctataaggcataaaaccaatcataccattggntctctcttctttaattcctctaatgaccatagtactatgccatcccaattcccaacctttcacaatgcaactctgtcatatgctccctctgctattagcttcaatgcttcatcatgtangggagtatatgcaattcatgggatatgtcgttagaatgggatctacatcctacccccttgtggtcattggtatgcacttttctgaacacactggttcgagaattcggagtgctggaacttgtgctttatactatatattcccaacttgtgttcttatactctcnttgtttatgccttcgcttgcccaacacctgtgtggtctgacacccaatgtcacaatgaactgaactntagttcctggtgcctncaattcttatcagtcaagggctggagtc

SEQ ID NO: 35745 - DNA, 391 bp, Oryza sativa
  unsure (1)..(391): unsure at all n locations
tgcaagcttcgctctgatgctggattcncaggaacccctattcgtttattgtggcgtagcaggaatagaccagataaaaaaggtgagtcgatatcaaagtgcccacttgcataatctcaatgattttaactgaataatttttctactatcatacctgcatgcatagaattagaaaagattattttgtgattgaatcattgaaacagacagaacgacaatgctagataagtgaaaaaacacagaaggaacaaatattgtgctatcagcaagagagatttttgcagtcccattatatttgatttcaccaatttctatgatatatgtaggtgtaccgcgcacatgataggttaaggaccttggtccttgtattagaacaaatataatgctaata

SEQ ID NO: 35746 - DNA, 319 bp, Oryza sativa
  unsure (1)..(319): unsure at all n locations
ctggagactntaccagaatggttagagcaccaaccttctctccaagttataccgttgtcgggctgtcctgcgctacattctatttccgaaggcttgctacgtggcaacagtatcgaaatacatatgaatgactgccccaatttgacagaacaatcatcaggtatcttaacacttcagtacattnttcaaagagtaaaatgcactagcggttcttaaacttgtcatgaggtttcactaagatctacgaacttgcaaagcacacatcgaagtctctaaacttggtttattgtattatctcagtccaaagcgtcgtttgacc

SEQ ID NO: 35747 - DNA, 420 bp, Oryza sativa
  unsure (1)..(420): unsure at all n locations
gccgcatcttaagcacctgggctgcaagctggaaaataaagctgctggggatatgatcgatcgatcgatcctctgcaataattctgcgtctgtactgcaggggaagatatgttcaaactaactgtgttgaaatgatactggtgaatttgtatgctgttgatgactttgtgttagtcgatcacttcatatatgtaatatgtagttaagtgttgtatccgattcacgtacgctcgtagttaatagctagtttgagcgttagatacaattaatatccggcctatacgattcattggtgttcgatgaattactgggacgaagaaactgattaatcgatgaataaaacaaaggtttgcatctgcatagaagttacacggtggatgatcctcanaagcaatgtatcctgacatangggtaaaactg

SEQ ID NO: 35748 - DNA, 401 bp, Oryza sativa
  unsure (1)..(401): unsure at all n locations
tggagctgaaagtagaaatgggactaaacatttgntagaccatattaaaacttgcaagtctaggcaggctagaaaaggtctaacacaatccaatttgaagatgggaatagatgcagaagggagggttaccgtagggaaatatgtctttgatcaagaggttgctaggaaagaacttgcactgatgatatgcctccatgagtacccactttctattgtagaccatgttggttttcgtaggttctgtggtgcattgcaacctttgttcaaggttatgaccagaaacacaattaggaaggatattattgacttgtttggggttaacaagatttctatcagtaattattttcacaagcttcagagccgtgtggccattactactgatttatggacagcaactcatc

SEQ ID NO: 35749 - DNA, 425 bp, Oryza sativa
  unsure (1)..(425): unsure at all n locations
agcttncattatgtgctttaccccgagatgaactntgccaggtaatttttcagaaatggatttcattatcttggtctctactcggcctttngtaatatatctgttagattttgcatcaaaaaatcattacatactcccttcatatatcatttcttcagatcactggagagctcgactcagtcaggaaaggtctgaatacaagtgctcagttgctatttactcatcctcctaaggagagtgatgttcttggtgctcataattctggttcatctcgttcattcttcaatcaaccagatgttcttcctccaggaatgcaacctaatctccatctcccttttcaagggccaaatgttgctcatcttcccaattnntctgaagctctaatgcatggccatggctcagtcccacctgaaccccttactttt

SEQ ID NO: 35750 - DNA, 325 bp, Oryza sativa
  unsure (1)..(325): unsure at all n locations
tcccggntggtaacaccaaccgggactacaaatagatctttagtcccgggtggtaacatcaaccggtactaaagatgaaaaagtacccttgatcttttaaatcgggactaaagatgtttttagtcccggtttttaatacaaccgggactattgtgaaatctggtcgaccgaccaaagatgggttctccaccagtgtaattaatatatattgattntgtttgttgcatatatactgcagccatcttcgtggacgagaaggacatgagcgcggtggcgataaaggcgatggaggacgagagggcggcgaacaagatcctgtacgtgc

SEQ ID NO: 35751 - DNA, 355 bp, Oryza sativa
  unsure (1)..(355): unsure at all n locations
gcttgataatactcctcacagatttgttccctgtctaagttgttgcaatntgtgcagcaaatcacgtgcatgatatgaaggaacaaatctagctcgcatgactcttttcattgcatcccacgtttggggggtgttatttggattggaacgaacaaattcactccaccaaatggatgcaaaatcagtgaactcactagtagcagccctaacacgtttattctcaggaaaatcatggcaagcaaatttctgatcaatggctaactcccaagtaagatatgcatcagggtcatantttccatcaaagcaaggaatggtaaacttgatcttgcctaaagtatcatcattatcacgtacc

SEQ ID NO: 35752 - DNA, 475 bp, Oryza sativa
  unsure (1)..(475): unsure at all n locations
tctggatcttctttgaagttntctggcaggttgaaaccagtcatgcactaccctgttttcacaacaagtgaaaacaaccaaggttagcctgcaaaggaaatgattacacagaggtaaatataaagtattagttcaagcaatgtctattatgaatcttccccggcaacggcgccagaaatgcttggtggtatttcttaacgacattactagaaatataattcccagcaatggcacagaaatacttctggtatattatggttacagagttcatccgcaagcgcacggatataccattgtagcatttcacccgagagtattcaagggtatcatatttgttntaatcccgtggaagatatgtagagagagaattgactaatagttatatattacttgtgataatcatattctaagcaggggttaagaatatccaaggtagagtgcacacaacattacaactcattctcatataatgact

SEQ ID NO: 35753 - DNA, 342 bp, Oryza sativa
  unsure (1)..(342): unsure at all n locations
gcatgcaagcttggagcatatgctgcgctatgtctctggtaatttggattgtttcttgaagacacatgagcactgttntagaaagcagagccctaaaccaaaacagtgggcctaaagatgacaatagacttaactgaattttcagcgaagagaagcagagcgcttatacttaatttggcgatcgaaaatatgctacacagacggtgaaaagaaaatcttaataaactagcatattcacacaacgaaatggatcgagcatgcatgaacggtcacgaaaacgattaattccaagcggaagacgccatgagcagncgtatatccctactgcataatccttgggga

SEQ ID NO: 35754 - DNA, 468 bp, Oryza sativa
  unsure (1)..(468): unsure at all n locations
gtgatgattnttggtatgtcctaatacttgcagtttcatgtaatgtacactaaatcaaatcttttttttctaaaaaaaaaactagatttactggaaactggctttggttatccattattttgtctgttaaccaaacagaccagcaatttctcaagaccctgctagacctggtctctacaaaattcataacccaaacaacctaaatctttcctactgatttcatatgtgttggtgctatgcattatatcaaggcaaagcctctntttaggctggttgcctgattgtaatggtttgataatcttgtatactagacgtttctttntctttatacttntgtattctctaacagagcacaaaatataattggaacatcatttactatttntaccaccacccaccttctcaggttgtcatggagcacaaaatatctaactnttgctgtccatatcatacttcatcatttttggt

SEQ ID NO: 35755 - DNA, 423 bp, Oryza sativa
agcatacttgatgcttactctggttccaccatacagcatggcgaaagaggacgaggagaagacagcgttcatcacgccattcagcgtattctgttatgttcaaatgccgtttagactgataaccgcgggaaacacctttcagctcacggtccaaagggcacttaatgaccagcttggaaacaatgtcgaggcctacgtccatgacattgttgtcaagacaaagacaagcgagtcatcgatcgatgacctccggcaaacgttcgacaacctccgacgatttcgtctcatgctcaacccagagaagtgcacgttcggagtaccattcggcaagcttcttgtacgcccggaagttcccccttttcatgcttaaaatttgtaaataaacgtctggagaattgtttattacctaagatgagtcctaat

SEQ ID NO: 35756 - DNA, 491 bp, Oryza sativa
  unsure (1)..(491): unsure at all n locations
tctcttactgaagggggggaaagatatagcaagaatgagtactaccacagtactcagcaagtcacaccggaagatgcatgattaatgcaagggggtacaaggagtgataatatagtgttaggttttgcagtaaaacactatattattaatcaaggccgtgaacccacacgaacctgtcttaacccaaggcctacgatgattcagaccgaactggcaatccgacctgtgtcccagctcatcccaagccaacccaggccaaccattctacattttagttgttaagcaagttntaagaattaaaccactaacttgngtacattgataggcttgcccataaccgagggcgcggctattcgaatagaattactctaatcagaggtgtacatctttacccacaagacacatctntactccgcattncatggccttggaacccgtcgtaaacatgtgacataacccttcacccatcctagtcgtgaacaaaagtactg

SEQ ID NO: 35757 - DNA, 354 bp, Oryza sativa
gcttgaacaatgaagaatagaaaataaaagaatttgctagctttccaatcgtatccgatcattgcatagatgatgaccgtgtacaaaatcccttgtatgatattgtaaatgaactccacgcttgcctgcgtagatcaaccatataaaatcaaccaccacaccaaaaataatggttgattctgctgcaactctttcttgagtttgtgtgattcacagcattttgcattctattaagaggaaaaagtaaaacgttcacagtcttgagaatggatggatttagtgacaacttagaaatgatacaattgtttctctgcattctaaaagttaacaacttttccaagagaatgtgaaata

SEQ ID NO: 35758 - DNA, 477 bp, Oryza sativa
  unsure (1)..(477): unsure at all n locations
tcttattgacntacaatttccatacaaagatggatattngcaaagagctaataatagatatataacattgctacaaaagataggtgtgaaggtaaatcagagttcanagcataagaaaactaaaatgtaaaagaaacaataattagctataaaaacaggaataaccttatacaaagaaagccacacacaaggtaaaaagaggttgagcttaagaaataaccttaaagaaagatacaatataaccaggagatgccatattaatgaaggcatagccaacattgcatttattctgcagaattgaagctcaacaatcagcagtaggcaaaaatattacagagaagtgtataatccagaanatacaaaaaataccttgaaatcaataggcaagtagaagaaatcataagtcccttcatgagtttcatcaattacttccanaagcatatttgatgatacctaaaatttagtaaatatgagcac

SEQ ID NO: 35759 - DNA, 478 bp, Oryza sativa
  unsure (1)..(478): unsure at all n locations
agctngngcctctngtgcaaagcactaccgtacttccacatgtctaatgggtaaggcttagtttgtggctcagcctagtcataaacaaaagtacacggattggagatggatgaagtcgggcgtcgatggacattctccagggcaaatgaaggctacacgagctgcggcccggtagtcgagatgtcatacggcggagggttggtgcccaatgctaggggctcagttctgcctgcctgtcccgggtatcccggccgtaggtaggattgggtcggtactcttgtctaaggctaggatgggttggaaactatgtcacgtcttctgtccgtataccgtggtggtatgtggcacgtggcaacacgtgaggaagatgtgtcttgtgggtaaagatgtacacctctgatcagagtaaatctattcgaatagccgagccctcggatatgggcaagcctagcaatgtacccaagtcagtgtntaattc

SEQ ID NO: 35760 - DNA, 407 bp, Oryza sativa
  unsure (1)..(407): unsure at all n locations
gggagtgtgtctggaagtgagtgaagtaaggtctntatatatgggcaagtatgacgattgcacgatgncgaatgtctttntgccctccaactgccatcaggagctcatacagaccgtccatgccaatacctggatcgaacggccgtgggagtggttcggccgaacccaggtctggcccgacaaggcccaacttcggcctggtactccttctctactccctctatccatttttgcgagtggaatgcccaattggagtctttttagtgtagttcctggcccactctntgtatggataggttntctccttcacttaagtctggtnttggtccaacttcgacagtttattacctacatacanatatacaccagcactcgtggaatatgttagtagtaaaccctaacactat

SEQ ID NO: 35761 - DNA, 496 bp, Oryza sativa
  unsure (1)..(496): unsure at all n locations
agcttcactgccaattgcacagtcccagcatctatgaaatttatcatggcanaagcagataatagccatgtcctcccaactgctacaacatggatccatttgcttggcatgacaggagtccctgtcacatcatacactatattttcagaaacactgcaatatacaatgctgatttgatgacagtatagcaacatcttatcaaccaccatcaattgttgctntatcattccttgaaaaggaaaccctnggtaagctggagcatccaccatatattttctccattgataaggcttgctcaagaaataattagctgagaatttgaaccgacaccaactcataacttgttgaaccagtaaattttcattctcaaatcgagttagattgtagcttgaaactagctgtcccaatgactgcataggcagagcagtatcaatcatatctccaactaaaagaatttgaaaaactgtaccaactggacttgacaacctcacacttc

SEQ ID NO: 35762 - DNA, 476 bp, Oryza sativa
  unsure (1)..(476): unsure at all n locations
tgaatatcagtcgtgatacctttaggtatcaggctngatacttgtgggtgttgtcaaagttcaatagttgcaagtcaaggatgacgtacttgcacataataccgacgagctgtangatgggctaacgagaagtaccaccaaatcgagtcatccgactccaaggccattgacgcgcatggaatccgatgacactatagtgccctanggcaaggtgactagtacgaacccncgcctttgggcacaatacccagggaggccgcactgtggcgaggtcctncaaaatctaaatctcgtatgacatgagggtgagcttggagagtggagactaaatccaacacatctcgcttgtcagcgtcttcctcgaccattcatagcgattgtgactntggaggcagtataattagtgaagctcttgagtcttgacgacgaccatnctgaatggantctcacgatacananggatgngaaactcatga

SEQ ID NO: 35763 - DNA, 402 bp, Oryza sativa
agcttcgtcgccccagcaaagcaactccgactctaccccacagtaaccagataagagtgatgaacacgcgctgtagcaaggaacgaagccaaggaagtgaggcctcgtcaaacaccctagacctgaagagcttcggggacattgcaggagtccaccaaggctaccattgcgcgcagagggttcttggtgttatgaggggttaacgccaggacgagacctctaaggaggggaacggcgccaaatggcgtcgccgtcgtcatgtcggcccatggcctggcaaggctttcgccagcggtttcccatcaaaaccccacacaaccatcctgcacaagatatgtaaagtcttcaatatatctatctgattaagcacctcaagtcagacatttcagaatatctactaac

SEQ ID NO: 35764 - DNA, 320 bp, Oryza sativa
  unsure (1)..(320): unsure at all n locations
tatgaaggatccatgttaagagtgcaagtgctgtgagtttttccatnnttgtgtgattagggagacctagggtctcattttcgtaaacccataatctgttatgaatcaaatagcctggcgattgatggcgaagaanatcaagtgatcaaccaaagaggcatttgtttggactaagagtttcagatgtgtctcttcggatcaaaggcaacaatcgtcagtctaagctttgacgaactacnttcaggtttctctgaaagacagcacgcccaagcacctcattgccccagaagcatcctcaacacccggagcgaagagtacct

SEQ ID NO: 35765 - DNA, 327 bp, Oryza sativa
  unsure (1)..(327): unsure at all n locations
agcttcaagaacagtggtgtatgtgatgactgtatgtggaaatccgcgtcttttcatctcttcaattgtccacattgcctcatcgatcctacggatactgcaccacccatggacaaaaatgttaaacgtgtatgcatcaggcggaatgtgcggactaagcaccgcaaaaacctcacgtgccacttcaatctttctctctttgcagagcacatcaagaagaacattcatcgtctctgtggtcctttccaaccccatatcctccagtttatcaaacagcanaacaacatccttccatcttctcgcacccgccagcctcctgatgctctt

SEQ ID NO: 35766 - DNA, 477 bp, Oryza sativa
  unsure (1)..(477): unsure at all n locations
tagcaagtgtgagttctggttgtccgaagtcaaattcttatggcacgtgatatctgcaaaaggagntgctgtggatcccgaaacagtgaccgccgtcaccgattggaagcaacccaagacagttacccaagtccgcagtttcttaggtttggcaggatactatcggagattcatcgagaacttctccaaaatcgctcgacccatgacacnagttgtgaagaaagaagagaaatttgtgtggagcccgcaatgcgagaaggcgtttcaaactctcaaggaanagctggtttcctcgccagtgttaatcttgccggatacccgcaaggacttcatggtgtattgtgatgcttcgcgccaaggattgaggtgcgtgctcatgcacgatggtcatgtggaacctatgcctacgtcactacgccttatgaaggcactccctacacatgactggattagccgcagagttatgctctaaaatct

SEQ ID NO: 35767 - DNA, 468 bp, Oryza sativa
  unsure (1)..(468): unsure at all n locations
agctntatgttcggcgcagtactaatactggttcttatgagcaagagatgctctatcaatcaccatctactttagacatatcttctgaaacttttttcaaatccaaaagtccagtatcttcctacaaattagtgaattaggaggagctctttgtgccgaaaaagaaagagcagggcaatatttcaaacttgcattcgaactgcgaaatatttatacaaaggaggagagatcaagataatgcagcagggttggttatctaattggctagtcaaacatgaggtggttcatagatctttgggcttcgatcatcgaggaatagagactntgcaaataaaagcagaggatggggattccattgctgtcattntatatgtatatgggtacanatatntacgttcccaatgtgcttatgacgttgcacccggtggatctttagctagcgtgtatcatcttacgagaatacagtat

SEQ ID NO: 35768 - DNA, 440 bp, Oryza sativa
  unsure (1)..(440): unsure at all n locations
tctgataaaaaacgggtggttctagcgagaattgtaatatgattacctttacgctntgccgagatgtaaggggccattntaggattccatttcttaataccatgaccaaaatgaactcccgcttctatcatctctttcaaattgatgttccaatatcttcttgtcattntttccacacttccttttgattntttctttnttttcatcctacctttccattacgaaatttctttcttttcgaagattaagaaagagccgaaatagcttgaaataaataataattgttccgatggaaccttctacatggtataagcataaccttaatgaattaactaaacttctttnntaaataaaataanaatagaaaatctaacctcttagcgttctaaggtcaaaaatctaagttaaagtaaaaatctgcttatgtatccttaatatat

SEQ ID NO: 35769 - DNA, 415 bp, Oryza sativa
  unsure (1)..(415): unsure at all n locations
gctntcttctactccattacttacaacacttgttntaagctatgtattatgtttattnttttaaaatatttaatttatctttactatcaagcttcgcagcaataatccgctcaataaatcaaacagtgcctaattctcttttgaatgtttggtgttggtagaaatatagtgtgacttatgtggcattacagtttgagcctccacctcccaacaactgaagtttctcgaacagatagcagntgacttgatcatcaatcctggactatccgggcaaaaagggaaaataatcactacacaatttcatgagaggattattttcttataaaagaaataatcttgaacaagtaaatggcttanagctctcttaaattgaagatatggctgagctgccaccaacaaacttcaataagttatg

SEQ ID NO: 35770 - DNA, 481 bp, Oryza sativa
  unsure (1)..(481): unsure at all n locations
ctaagctcggtcaggcagggctatntcatacgcgagcgcagntaagaacatggaaattaatcgtaatcggatagcaagctgattccagggaaacgtaaaacgcaaggcaaaatacccaaggatgttcaccgactcggaatttattgacgtacaaaacgctaggcaaaaacatcnttaaattttataatagtagagatatgaggatgtatgaatctaaattagcattcgctaagcatttgtcatataaagtacaaaggaattacaagtattaaataatcaaggtatggcatataataagtaggagattcttatagcatgtaattntatttgaaataacacaagttcacaatagattcaacatgcccaaagaatagtgatgacttgccttgctcacagcctttctggtcctgatcctcagtcagcaactcagcaactnccttagaatctaattntacatgcgaaagattaattngaattcaat

SEQ ID NO: 35771 - DNA, 393 bp, Oryza sativa
  unsure (1)..(393): unsure at all n locations
acttttgtcacagctgacaattttgatttgacaatcgactttgaggaacttattattatgttagcttaatgctgaggtcctgtttagggtgagaattcaaacatgtggcacaaacttggatgaaaagaggacgctttgcgttaggcataggttgcagtaagatgactcaccatagtgctaaaaagaacgacagtgatggtgctggtgatcattattgcattgccgtgcagctgagtatggccagatctttgtaactgcaattgcaacgagacagttaagcttaaggagaagaaactaagacatacttctcctgngactaattaatggcgagatgagaagagaaatacagatatacagatggtgtgaagcaatagtcttgcactgacggactga

SEQ ID NO: 35772 - DNA, 481 bp, Oryza sativa
  unsure (1)..(481): unsure at all n locations
cgaacccatgaacaatccgtccaataatctacaaattntctcgaggatatagggcccaaactctaaagaacactccagttgaatgtgcgaggatatatgcacttctctttntcttaggactcgagaaaactaaccacaagatcctcgtacattcagctggtttggtttttcaatagatagattaaaatttgacgccaatgcaaatcgcttgaacgggtgcttcacttttcatcattggcatgtagagcctaaaacactgataatctggtaccaatggaaatggtgatttaataacacagagaagttggacaaaagtgtcaaagtcgtgcgtagccaggaggacaaaccattggtgtaccataattactccatgggaatatggngtcacttcacaaatatgccgtacaagcatcaatccataatggaanttacaaatggttactggctgtcttgacaccacanaacacatggtatttcgttc

SEQ ID NO: 35773 - DNA, 391 bp, Oryza sativa
catgccagcttattctgcataagaactgtacatcaccattttttatttggcttcaacaattagccttatctgttacctgagattgttcttatcactgaacaaaatcaagctagtagtagaatatatgttgtcctttcttttctcaactactgttttgacaatgttttgcgagggaatgatgtgttaacatgagacagcatgatgaacttgatgcccctgttttaatacaagtagaagtagctactgtggtccaagagacaagcaacaaccgctgaaaaaccattgtctaccgagtctgatgactaaactactttcttgtggagtcaggaacagggtttaaataccgccgggggcccgggtaccgccacccggcggtactggcggtacccgc

SEQ ID NO: 35774 - DNA, 331 bp, Oryza sativa
  unsure (1)..(331): unsure at all n locations
cgacgaaaatgtggatggagcagtgagagaatggatgataagcacggcacaaacgaggaccatgaataggagcaggtggtggtctgtgcctgtctgtcacgcttgactccgtctctgtctcttgtgcgcgcgcaagtctcgccatcgtcgccatcgacgaatcaagtccaccttatccacgcagatagagtgttcctttgcgtcgcaactgcatatcacattggtcttcgttactcggcttcggtatatgcacacagctttatactatctccatctactatatatncgattgctaaaatctctttgagaatgaaggtagtactcaataagt

SEQ ID NO: 35775 - DNA, 228 bp, Oryza sativa
  unsure (1)..(228): unsure at all n locations
ttccaatccttcagctgtcttatagtaacagatgaatctggggatatatngatcagaaagaatggaacaactgcagaaatttcaatataatacagtttaggcatcaagtgacataacccaagtaaacaatcccaattaggtattcatctcaaacctggtgtttcacttgatntacgccactcagtaaatgcattagacaaggatgttgcctgcagaaatagaacaatc

SEQ ID NO: 35776 - DNA, 255 bp, Oryza sativa
tgagctcggctcgaatgcttgaccgagtcagctcgatctgagcttgcgacgagccgaactcaagctgctcgcgagctcctagctatattgacagccctactctccacctgcatatctctatctatctatctcatattatgtatcactggctcactgcagacaaccggtgtgaggcgacgagacagatgcatatcaccatgtacgtgacagggaagttctaacattcattcgcgcccataccgaatccgacagaca

SEQ ID NO: 35777 - DNA, 327 bp, Oryza sativa
ctacctcgatcggatactatcttcttaggcacaccgcgcaaacacacaattcttgccatatacaaatccgccaaacgactttcggaataagtggtcctcaccgggatgaaatgagccactctggtaagtctatcgactatcacccaaatagagtcatgggccgatgaccgtctgggtagaccacgtatgaaatccataccgatttcctcccacttccattctggtatcttcaaaggctgaacaaacctacgggtttttgatgttctgccttgactcgcttgacaacatcacatactgctacatattccgctttctcacgctttatac

SEQ ID NO: 35778 - DNA, 90 bp, Oryza sativa
taaaatagatatgttttaaatatatgataatgtagcattatatatagcctctgttattatgatgcactgggtcaccacgccatatctgga

SEQ ID NO: 35779 - DNA, 419 bp, Oryza sativa
  unsure (1)..(419): unsure at all n locations
agcttgagaaacctggatgaaaggactcangcgttcaaactactgatccatgcaccaccaacaaagaggtggtaccattggttacatccataattgattcttcattctctcaaaaagaaaactgggctttggaggatcttcgcaggttaatttccttctgatgtcaatatgtttcatatatatgcgcctaattgttacctcatacttgaggctntaccagaaaaaaaaatcatttacattcatatattgttttaagatatgccaatgcatcacatttaatagaaatatgtaacaggttgcagatcagtggttggcagaagttatctatctataacaggtccttctaggtggggatcagaaacacacccaagaaagaaagctttaaggagctcatacttcanaaaacctctgatacatgc

SEQ ID NO: 35780 - DNA, 489 bp, Oryza sativa
  unsure (1)..(489): unsure at all n locations
tatccaagcttgttcatgcgttgtatgtatcttcttccaatggtccagtaagatatgagagtctcatatcttcgaccatctacgtgttttgccacctttaaaacaccacttttatgttctaattttggctctagttgacaccccatatgagtacacacttttatgccctgcaagtcatgttaacaccaaatggaaactgacaatgcaagtaaacattcacacattctgtcacctgctccctcaccctgacctttaatgctctagacttgtcacattgttgcatcttttaacttttttctatttaattntgtatttagtaggggaaaaggaagaaagattgaaattngaacattcacacccttcatgcatcatgaggtgatgcacatttgcttgtgagtaaacctgggttaccatttatggctgtttggngtggaaagaaacaacatatataagcattngcaattaanatgacatgggaaacataacatg

SEQ ID NO: 35781 - DNA, 346 bp, Oryza sativa
  unsure (1)..(346): unsure at all n locations
agcttctcacagtcaanaacaagtaatggttcttaaatngaatattctatcacctgttgcctccatttatgtggaactcacaagagggtctaagtgctgcttgacactctgacctgtatttaaataaaatgttatcacctattgcctctgcttattattgggatctcaaaacacaatctattactgtgtatgccttggcattttttaaaatctgagctgcccccttattcttcacattttctcagaaaaccatataaacttttagataaatgaagctnttattgatctcagacaattacatcaagttgatagaaccaaactaagaacacttctggcctctgataat

SEQ ID NO: 35782 - DNA, 374 bp, Oryza sativa
  unsure (1)..(374): unsure at all n locations
actataaaactcaagctggtaattgaggatagcaactttcttactaacatagtgctggttgcagatgtcctatgctgctggtgctaaccaaagtgctattccacttggtgggatggccacatattcagcaggcatggacagtggaaaccatggcgctacaataactgaatcaagaactctctatgtggaaggactaccttcgaactgcacaaagagagaggttgcacgtatccttttctatgcttgtaaactaaaatcacattntcctagctataattagtgtaggtatcttttgcgatgtaattcatattacacctcctaggtgcttttgcccttaactctttcttctgcagatatctttcgccccttttctg

SEQ ID NO: 35783 - DNA, 436 bp, Oryza sativa
  unsure (1)..(436): unsure at all n locations
agcttcttgttcgctgccagccttctccccacctatcgccgggtgtcgtcgtcgggcttctacctaccaccgncacccaacaaccaccacccttctccctgctggtcaccggccaccacacacctctcccgcgattcagcgtctggcgtcctcttcgcttgcatgcacgggcactcatgcagtcagtggtgctcgcgagtatgctcaggcatcgcaacgtactccatctcccaactcttggagatcctcttgccaatcccgacggtgtggctgacgtgcgatcatgatgcggacgtggcgcagatgcgcggcgagctgacatgcaacgatgtagtggtgtaacccgaggggacgacgtgtcgggagcccttnctacttcgcttcttcgcgctcttcgccgtgtaggtccatgacacagcccgcagtcgccactctt

SEQ ID NO: 35784 - DNA, 421 bp, Oryza sativa
  unsure (1)..(421): unsure at all n locations
tccttngaggccaactgccatgtgccgatgtttncattggtactgcatgatcaggtaatatactggtttggataatacttatagtagagtggggtttcttattagcacaagttctttctgctctactgtggaaatgtcatgtgttttaagtatatacaagttatactttccaagtatttttagtacagagtggggttgtctgcaatcatcaccatacgtaaaagtggactgtaccattaactatgcttgtgctctgtttaagtcttgtttgtgatgtttgtgcagacgaagcgcaccaagaaagcangaatcgttggcanatatggtaatgacattgtaactgtgcacactgntagttcatagcatcatgaatgtctgatcactcatgntaacatatgcccctgtaatatcaatgttatac

SEQ ID NO: 35785 - DNA, 471 bp, Oryza sativa
  unsure (1)..(471): unsure at all n locations
agcttcttctgtggagcaaggcctttcgcgatcgccacggagctcacgtcgacgaggacggtgtcgtcttctttgaagtcgcccttcaggacactgagggcgatctcgttctctaccatctgctggatcaccctcttcacaggcctagcaccgtagttagggtcaaagccgagagagccaagatgctccacagcttctggtgtgtactgcagatgaatcttctgttgcctcagccggttcttgactcggttcagctgcaagtggaatattttacaatttttntgttagatcaactgtgagaaaacctctaaagcacaattaatatttgatgctatggcacaggtgggtctattagagtagtcatgtaagaataactatagangttacctggatctcacgatgcgattatctctgggtgtcacggctgaatacatgactcattatctatcaaaactctgccgaatgactgca

SEQ ID NO: 35786 - DNA, 350 bp, Oryza sativa
  unsure (1)..(350): unsure at all n locations
ngaaagatntagagagccaatgtggcttcctgttaatctgccaaatctcatgttcaattattagattgccaccttcaaaaagttgaaatactagtattagtacataatatgcaatattaattttgagtttttgtgcctctaggaacctttgttgaagaggggtctagacaaccctgaacttctggctggcaattggtctcagctatgtataacctgcaaagtgagttatttccattcaaagtgagtntctccatatatttaacttttacttaaaaacctgattcatctatatcaatagattgntaggcctgtacgctcaaaacattgctctacatgcgaatcgctgtgtg

SEQ ID NO: 35787 - DNA, 462 bp, Oryza sativa
  unsure (1)..(462): unsure at all n locations
agcttggccgacggcagcagcctcggcaatggtatcgttgttttcctgcggctcgatagtgacggataaagctgtggcttcatacccgcttcctatatctagcttgctttttatgacaaggccggccgaagaacgggtgtttctttggacgcgtgagcttcacgtgtgtagtgctagaggcaaatgtggcagcgaatctccaacgtgtcatgctcaagctgaatgccatgtcgggcgccatttgaacgcccttagactgtctctggtaaaggtggtacatatcttctactttctttatttttatgagcacgtttatcgaagcgatgaacaatatatttatttntaaaaaaatctgtagaanattacttaaaaattatattaaccctaatttcaagttaattatagcttgtgacttaactaatcatacgtaactagcacataatcttcccatccgaactcatt

SEQ ID NO: 35788 - DNA, 255 bp, Oryza sativa
aatataagaaaccaatcctgtgttaaaatgtgatatattttagtattacgaatctagaaataatatatgtatcacgtaccgtaccaggcccgcttttttaaggaccgagagaggtgggccacaagtcaataatttcttcaactcaacaagtctcttcgtggtccaacatattcacattagtaccacgaaaaagactgatgaaatgatatattggttagaatgagcatggattaaaaaattctactagtactattc

SEQ ID NO: 35789 - DNA, 469 bp, Oryza sativa
  unsure (1)..(469): unsure at all n locations
agctttaattaccaagctcatgcacatgtcttattcacaatntacgaagctgctgaaaaaaagaattcaatatgttcatggttccttgcaagcaacaaccaacttagaaaatgatcggaaatgatgctatatgttatttctaacattaattttgaacacataaaaaatatgctaattatgtattcgtggacgtagcattctcatcagtctttatatcaattgacatgtgtacctttctctatgtttacggtacttccaaagcaagtgtatgcttgcacgtatatatctaaactntgtgggttcaagacttatctgtggtctgttcataaataaagatgtgtttctcttatacagtgtctttcctattagttgaagattactcttttgtacacagtgtatntatanttttnntttaaaaaaacttagtcgcctatgtgcagtgagatcaacgaattagtatacattatgt

SEQ ID NO: 35790 - DNA, 496 bp, Oryza sativa
  unsure (1)..(496): unsure at all n locations
tcaaattcttcanaaaagaggngaggtcatgccaaaatttctagtgaatntattntggtgataatatacaaatcggaggtgcctaanaggttagcaacttcatcctccaatctttnttttggtcatattacatttggagctatgttttgcacacttttttgtctccaaaattntgttgtaagttgatgagagagaaaatttgtgtgggaaaagaaagaatatatagaaattttgtttatttgctaaagaaggttttataaaatagttgagaaggaagacatagtgaaagttaatcttaaataatagataacaaactaaattgaaaattaaaagaagtacaacacattaatattagtttaaaacttcaaaaataataaataagaaataattggtggaatattntataattnttggatgaataatgatatgttattaatggatgaactgtgaaagagnttgtgaatattntatcattatngtatgactgtcattattg

SEQ ID NO: 35791 - DNA, 478 bp, Oryza sativa
  unsure (1)..(478): unsure at all n locations
agcttgtagctagcttattagctagctgatcctgactgatcttgctgggtgatgaattctctgctgctgctgctttcttctcagatgggagggaaggagctgggaagttatacacatnaggtggcaggttatggatgagagtggcaggttgtgtgtattacatgtgggggccatgggaggagaaacaattaagtaattaagtaattggctaatgggtgatatgcanagtaagcatcagaaggaaacaatggtggccttttgtataatagcttgtgtgagagcttgatttgatcattatgaggattaacaagtgtgtgtgtgtgcgcttgtgtatgatggcatgcaaagctagcccttgcataaaatatatatctttgtgcttatctaataatgtaggacctagctaatgctatctctcacatctctctgcagtcatccatggtctatcattagcttgcatctcttctagcanatgtgt

SEQ ID NO: 35792 - DNA, 424 bp, Oryza sativa
  unsure (1)..(424): unsure at all n locations
tggtcataatttgataaggttaccaaattntgacaagaatttatatgtatttgacagtaaactaaatgtaaacactgtttttaaactttactaaaacttggtaaagttgaaaatggtaataaagtgaacaagtactgagtttttatcaggttcttgctactaatttattttctaaaattatctgaactgttttagataacttctgaatacattactatggaagatgttacagccaccgaaacatcctcaaacagggcctacatgatgcccgaacaagacgaacattaatttacatatacaagtgtagttacctataacgcaagggttaatttgatccacgagaccatgnattcaactntacgcagttgaagataagactattataatccgcgttcacagctgatgtcgtgaactatacaaataa

SEQ ID NO: 35793 - DNA, 448 bp, Oryza sativa
  unsure (1)..(448): unsure at all n locations
gcttagttcctgagcatctgttnttcttctttttcccccgtctgcttttccctccagatggtctacaccaggactggcacccgcacggcaggcgagggcagcaacggcgaagaacgcgctgatggtgtgcaccccagcagtgattccggcaatggtccgccaccacttcccgagaatccgacccttgcccaagttatggcacatcagactcagatgatggcagccatgatgcagcagatgcagcagcagcaccagcagatgcaccagaggatgatgcagcacgccgaacagcagcaccagcagtttggtccccctccccctcagtccaagttgccagagtttctacgcgtcaggccacccaccttctccagcaccaccaaccccatggaggcgaacgactggctccatgccatagagaagaagctgaatctcctgcagtgcaatgatc

SEQ ID NO: 35794 - DNA, 429 bp, Oryza sativa
  unsure (1)..(429): unsure at all n locations
ctcggatggtgagtatgtggttgctgaactcatgatgtcctgtctacgttccttctcatcagtaaatggccgttgggaggagaagcctctcgtatgccctcaattctccaggggtgacatggtattctcctctggtgggatgcttcattgggttgatctcaactgtggcatactctcctgtgacccatttgcatcagaaccaactgtacnttttatcaacctgccagaggccagtggaagacccacccgtggcctggatgaatggatccacatgaggtatgttggtgtctctgctgggcggttgtgcttctttgacattgatgaggatgatggagaatctgggtcaatgagctngtgggcactangtgggaacagtggtgagtgggtgttggaatacaaagtggatttcgaagatctgtgggaagatga

SEQ ID NO: 35795 - DNA, 462 bp, Oryza sativa
  unsure (1)..(462): unsure at all n locations
ctgcagcttatgaaaaccgaaaaaagggcgaaaaacatgcataataaatgatgtgtaaaaggtagtggaaaaaaaagaanaaaaggacgaaaataaagcggacagaaaaaacgaacaaacagcgtcgaaaaacattggactgaaaaaagggagtcggacggaaaaaaaaaaaggaaaaaggtcgaaagaaaaaggccggacggaaaaataaaagaaaaagggttaaacaaaaagaaaaaagagtgaaaaaatacgacggacaaaataatcacggaagccttacantttttttattaccattttttattagatatagaattacgagctccaatggttcggcgacgatgttccagtgtgcacaagtctattntcatatctcaattcattccctcagctcttctctcttaactnttggtttggttntctttttacttatatatccattaanttacactaatatct

SEQ ID NO: 35796 - DNA, 381 bp, Oryza sativa
  unsure (1)..(381): unsure at all n locations
tactatagacctangagtatgacttatacgctccacccgaggggtagtctacagtctgtctattaccagataagactctgagtgaaacttgcttgcacaggacttgcaattcaaggcatagtccattgttcaagttgtgattaagtgtagcttggagttctaggtggatgttcaatcttaatcggtctccatcgaaccgctggtatataaacagtacattggaaaaggcaaatctcagtgggattntgagatttggtgggggattgttggaattaatgaatgggccttagcccactcgaagattaattctttggaaaatcacaaaagcccacctcctangatggcatgcatgtggagtttagtaccaccttgcttattcta

SEQ ID NO: 35797 - DNA, 381 bp, Oryza sativa
  unsure (1)..(381): unsure at all n locations
agctnggagagatgtacgctgttggcgatatgatcgatcgatccaccctgagcaataattctgcatgtgtactgcaggggaagatatgttcaatctaactgtgtggaaatgatactggcgaagttatatgctgatgatgactctgagttatgcgatcactatatatatgtaatatgtatctaagaggagtatacgattcacgtacgctgggagtttatatctaccttgagcgttagatacaattactatccggactatgcgactcattgatggtcaatgaattactgtgacgaacatactgattatatcgataatagaacataggttcgcatgtgcatataaggtacacggtggatgatcctcaaaagcagtgtatgctga

SEQ ID NO: 35798 - DNA, 488 bp, Oryza sativa
agcttcgcctcatcgcaagaaagagaacctgtccgccacctcgtctccagttagcttccaagattcgcgtgatgggtgaagctgtgcccgatcgtgctgaacctgtcatcgacatcataagtgatgaggaagaagaggaagaccctgaagagagagagccagctactccagaggaagaagatccatcgcttcgttccgacgccaggcgggaatagtcgcttagtaagatcgttgccgtagatcgctgcgttagattgcttgtttaagtttgcttgcgagtatgtgggttttagttgttgcttacatcattggagggatgtaacagcatgagtctagctcttttgcttgtcagagtgtaagatagttggtgagatactgttaatgcaacttatatggtatcatacacagttcagagcactctagaatgtaagtaggtaaatactgcgtctagggtgtcttctgtcgtctttctggtgctctgttatcgc

SEQ ID NO: 35799 - DNA, 377 bp, Oryza sativa
  unsure (1)..(377): unsure at all n locations
agcttgcaataatgggcaatggacgctnggtatgaattaagaatttatttatcgattaattacatgtcttaatcagtatatatccgtgtgtcctgtgtacgtgtactcgtataaatatacgtttggttgcatgatgtcaagtacgtatactattcaagtgtttatgtaaaagaatctaaaaagagatcaatggagtacgtgctcacatgtatatattttgnggggtttttttcttgcttttcttcttttgcgtggatgtactttatatacacgtatatatgtgttgngtgtttctgtactgtaccgtctctagattaagagaaattaaatgttatcaaaattaaatatatttatcagaaaaagtaaaagcgctgttc

SEQ ID NO: 35800 - DNA, 440 bp, Oryza sativa
  unsure (1)..(440): unsure at all n locations
atgggttattatgcaaactttcagaccttatttttcagcanaataagttatgggaccttattagntagttataccaactgacaatttgcctgcctacgtacattntccaacatccgtctgacggtattttgcgacgcggtgtagaccagttctgaacttctgatggttcatttgaaaagcatgatctttttcccatttcacctaacaatccacaaagtaaactgtgctatcaaacctcttacatattttgtgcattagacaaacacttttgtcctatggtgccctgttgtcaggaaaaaggaatatcaatgctttttataaactaatggaggaacatgatggatattaatttaaacgtatttgtattttctttgcagatcacaatctatatttgagagctatatcgtattactttgattatgcatcgacatgtcatcatg

SEQ ID NO: 35801 - DNA, 116 bp, Oryza sativa
agctttggaaggacgactacatcgatacagaggtctgttacataatctacagagaagttacatatgttgtttggagtatggacttcctctagtttactccctccgtttcacaatgt

SEQ ID NO: 35802 - DNA, 448 bp, Oryza sativa
  unsure (1)..(448): unsure at all n locations
tccaaaagaaatcaacagttaaatagctgcactccatatcatctcagcttcagagtacttttcttgctttcattccgcattctgtccaatganttcaaagctgcattgcttatttccacacggagagtggggaattgatttaactcctgcaagaaagtgatcaaacaatttactatgctccttaaaatgattattcaaaaagagaantttctaaacagntctctctatatattctaatattgtacgtgtttgaacgatgacacaaatgccaaagtcctgtaggcaggagactcaatagatttgatcttgatagttntcccatactgtatatgtgaaaatagtgtaagtttactcaatcagaactttaacccattcccnctttatacaagnaatagaagcattacantcacgtgactgaatgactcactataaagtgtaaaaacaaact

SEQ ID NO: 35803 - DNA, 366 bp, Oryza sativa
  unsure (1)..(366): unsure at all n locations
agcttggaggctgctgcattaaactcaaaacattggagattaacaaatttggaacattntccctganatctaggagtctctacccatttattgctgtgcaatattagagcatgtgagcacttggttcaagtcttatgtttcttttagctatcacatgattggcaattatgcaatttcattttctatcagattagtctcagtacccaatttgtgtggataagaaagggaggacaaattgagcaaataattagtatgttgtatggtttaatgcagagatggagttaggcacatttcactagaggctaatgtttaatcttcctcttgcganagtatcacatgctatattacatttatctaccaaattct

SEQ ID NO: 35804 - DNA, 455 bp, Oryza sativa
  unsure (1)..(455): unsure at all n locations
ngacgtgacanagctccacccgttatcgcctgaagntatctcacgccaggcgacgatcaatatangtattgatgcaatccttttagcgatgttttactgttctacgagtattgcatagcttgtcactgcagttttttttctgtgtttcctgtctacaaagtgaatatcatagttctgtaagatgtttaagtttccttcattagcatttagctgtgttatagtttgctcctttagatgctggaaacttgggaactatttcctttctagggatgtgcctgtttatgaccactataataatactgaagtctgaagtctctcacttaagacatgggtacacttgttgctgttgtactntgtgactaangttgtatgattcattnttgtccagatattgtgcatggcangaagtactcttgttttttaatttttntatgaactatgccattatatctaat

SEQ ID NO: 35805 - DNA, 479 bp, Oryza sativa
  unsure (1)..(479): unsure at all n locations
agcttaggcgtgtggtggttctcacgtcagctatctcatagagcgacanacanattgacataagagagacctctagaagtagggaccaaatagtcctttcacgctggttagtttgtgccaataaataacttatgcccctcanagtataaaaatagagatggcaatgaaatagatggcattctatcgaatctcatcaaatcaagtgttaaatcaaacggcacagatagtagtatcaatcatttgacccacagaccagtgtcaaatcaatcctctaaaactcgcccaaatgataatgcgatttcacccgtgtctttctgaattntctctaacattaaattagtgtctcgtcctcctcgggatataaacattcccttanacttagcatcatgtagcaatggcagtatgaaccactttgacagtgtcagaatcaatccagtttcaactttgtgagttttccctctatacacacgctataatct

SEQ ID NO: 35806 - DNA, 510 bp, Oryza sativa
  unsure (1)..(510): unsure at all n locations
ctattacgtgacactatgaaactcagctattaaatgcttgctattggtttactggccttggtgatcagctattatgatgtggattctatgttgaggaacataaattctgtgtgattgtttttcaaaatgatttggccattatgtgggtttcttgttttgatggaatctctcggtaattgtaatactacataattctgtatacaggctttttggcatgatgatagggacatcgaaaggggacagagcagcactggttatcaatattgctctcattgctcaggaacgccgttgactacatcaagctacaactgatagtggtggcatctatgtaattnttcaacagtaatctagtttggttctgtagtattggtccactntttaagtttagcccttatgatgatgcattcttggcttattggttgcangtcangaggctctntctgatgtaagctgtattatactngactagtggctagtggagctttgcaggttngtccaatagaatctggt

SEQ ID NO: 35807 - DNA, 468 bp, Oryza sativa
  unsure (1)..(468): unsure at all n locations
tcccgcgtgccgcctccaccgtccgatctaccctcggctagatcgggcccattcgttgccgcccgcgtggccaccacgtcgatgccacgtgtgcgccacatggcgctcccctcacccggtcccatggactcggtccaccatggaccgatgtccccgagccgatgacatatggggcccgcatgtcggcgctgccccctccatgtgctgatgtcaccagggttaattattgcgcaataaatcaattaaggtttttctttntatagtaaaaacacagtgaatcttctaaaattcatagaanattcatctgtgctccgtttaagcccattcaagtctcagtaaatcaagaanaatgcanagaatccattaaaaatgggtttgttctctggtntagtagtcttatagcctggttgcattggttgccttgatatcgcatagattctagctctcccgacagtccggtgtacttcg

SEQ ID NO: 35808 - DNA, 374 bp, Oryza sativa
  unsure (1)..(374): unsure at all n locations
agctnttccctaaaacaacaacaaanaggacaggggctatatgatatcgaagtaatggcgagtcgtcgtttcagagctgcaccttcagagtgctattttgcgtctgaattttgcgtctctcatttggaacgtttggtcgttgtgctgtcaacatgaaacttggtactactcctacacatggaaatggctgtgcaagttccagagaaataatttgagtttgtttaaattctccctaattaagaatgagagatatgcacgggcgaggtgaggagacgctcatgattaacatgacacanaaggggatgtgaatgctcatggctaatgcaagtcaattctaagagatacggacggtccactccaaccctctcacgtac

SEQ ID NO: 35809 - DNA, 315 bp, Oryza sativa
  unsure (1)..(315): unsure at all n locations
tatctcttacgctccaggaatggatcagtcagaacaccaccttcggctcgcctcgaccgccgncgactggtgtttccgcctgcacggctggcctattatgccgccgttgttgggcgtctacgtcttcaccgaccggcttgccttcgccgccgccaactggtgtttccgcctgcacggctggcctattatgccgccgttgttgggcgtctacgtcttcaccgaccggcttgccttcgccgccgccgactggtgtttccgcctgcacggctgacttattatgccgccgttgttgggcgtctacgtcttcaccgaccg

SEQ ID NO: 35810 - DNA, 385 bp, Oryza sativa
  unsure (1)..(385): unsure at all n locations
agcttaaacgtaccgcagcctgccttagagaatgggccanaggcatctgcaccgaggccaagcttcagtttcatatggcccttgacgtcattcaaacgctggatgtagcccaagagcacagagacctctctatcccagaaacaaggctaagagcaaccctcaaacgcaagatccttggccttgcctccatagagcgggcaaggaaaaagcaggcctncaaggtaacccacatctgcaaaggcgacgcanacacaaagttcttccaccttanagtgaatgtgcgaagaagaaagaacaccattcaacggctgaggaaggacaatggttgggcgatgacgcatgangagaangangcaacaattcatgaccacttcgcaagcataat

SEQ ID NO: 35811 - DNA, 314 bp, Oryza sativa
gggccagtgattcagttctattgggtgctatgcatgtgctatattgagttggtggcgtccgttcatcgtgctaagagccagtgccatcaagctgggcagataggccaacaacgttcagcaaaacagggagactagagaacaccaggtcaccagcgaacagctgctgctagtttaatttccttttggtttgagaatgggttgaacatattctttctgtttgtttatggtttcgattaacaatgcaccggcctgcggtgggttcgttcggattatgtggccgagtgacaaaacgatttggactggtttgggagggg

SEQ ID NO: 35812 - DNA, 452 bp, Oryza sativa
  unsure (1)..(452): unsure at all n locations
agcttaatggtgtngattaggataatattccatgtaattaactgctgatcgttgatttgcaaaatgaataatggtgttgctcctcctaataatatttgggccatgtgaacaagataaaatagaaggaaaattctatttggtgacatatgtataaggaatagctattttttatggtttataagaaaaacgatagtagataatgaactatctaaaatgagaatatagataaacattagatgttgatggatgaatttgatttttatgtctatgctttgattctgaaggcgtacattangaattacttcctttgtatcccactataagacgttntgggttntgaatacatttatctttnttaagaagggctntgtatccccgctaagagacgaattatatatatccaaattcgtatgcatgtcaatggatctagacgagggataaataaatctcat

SEQ ID NO: 35813 - DNA, 478 bp, Oryza sativa
  unsure (1)..(478): unsure at all n locations
tcaatgtgctacctattacacatgttgtggttacacactgttatagccatgcatgacgggaacattgcaaatttgcaatatcacttctaagtgaggattacactgaggagtgtattttttgttgaatagtcccacattgattgtggaagagctaaggacctaagatataagtggggaagcccctcacctcaatggttagcttttggggtgggaaagaccctttacgatcctatatttttgctgctcttgccgagtgtttttggcacttggggagaatctcccatatcagaggtgtagcttgggagagccacatatatatgacaatatgcaaatagcttttgtgaaactnttgtccatccatgcaaagaatatatacgagcttagctacattntgngagtangtgacatcgagaatcaacatgtggcaaggtgatcctctggttcaacttctccatcgcgcatgcatacctctaacatc

SEQ ID NO: 35814 - DNA, 352 bp, Oryza sativa
  unsure (1)..(352): unsure at all n locations
gcttcatcacgagctgcccaacgagcctgcgccagactcaccgtcttcaagagactctgctatctctgtcacttctttctctagactccacctacaacagtgctcaccttctcacctattatcttagtcatcttgccaagcaaaatcagattcctccttagctatcacatcacaagactcctcgaagaccatgttcaccttcaccttttgtcttaaatttgacttgatctaatccgtggctagataacccatgtcatcactaaatagataaatcaaactcacccgacatgaagaanaccctttcttccttgtcgtcttatgaaccaagctaacaaatccaacatccacgctt

SEQ ID NO: 35815 - DNA, 443 bp, Oryza sativa
  unsure (1)..(443): unsure at all n locations
acttataaaactaagcttgacgtaacagctatttcgtttcaatatttcctcatctttctacggatntgttatatatagacttcctgcgacagaaaattggataaataactntcgaatttaggccgttgattcatgcataggactggaatttgaaccatttcccacacgcacttgtttttgtgctcggagacggagacccattcctcccgacaacgaccaatggcgccacaacgtctcagacggaggtgaatcttaatttttttctttaatataaataaaacaataatttaaacaaatggaaaatcagatatgacttgatttgttcatttggatatctagttcttgtgggttntgtatttgagttaaaaataaaagagaagggaatctatctatctatctattatattatggaaacagctttgaaaggagacaccacgttcgct

SEQ ID NO: 35816 - DNA, 500 bp, Oryza sativa
  unsure (1)..(500): unsure at all n locations
gcttggatagaaacattttgaagtcgatggatgaaaagattaacaagagtaaattttacaaagccccatgtttagaggacaagattgcctcaagcctgcaaggattgtgctgccagctcagtgcccatgtgtctatgtgtaatgtcaaaaaactggattagctgttacagtatattggttgtgtgcctgccgttaagtgggggcaaaaaaatgctagggcttggtgatatatntgcctctaaacatggggttntgtgaaatttgctctaaacaaaaacaccatatcatgcgatgaagataaatataggtcatatttaacanagaactgcagctatgaacttgattcttgagcgaaaaaaaaatgggtcttccctctccctcangagaaatcaccggaacaataatgcatttggtggccctttatgnnttgtgnctgattacaatgatgaattgatcatttattatacttatagagcatgtactcttaacttggaacacac

SEQ ID NO: 35817 - DNA, 498 bp, Oryza sativa
  unsure (1)..(498): unsure at all n locations
acttcttttggattagtagctaatctcaatcctgcatccgtacgatagtgagataatgaagtgacgggctcatttccaggtgtatactccctctgtaccaaaatataatagatatattttaggtgatatantttaggtggatgtaacatgtactagacatattttatgtggatgtaacatgtactagtcctataaatttagacaggaacacgtcttagtacttaatgaatctggacagactcctgtacagattcatagtactactaggatgtgttacattacatcatctaaaatcacttatattntaggatggatggataatcaatcatctcattagtcagccctagctttagtgattaatgaaataagctcgatggctagtcaagctttttcacacgcaanggttagctagagatgaagatcatatncttgangggacgacacaccaataagtcatctcatttgacttaatttgtgtagtatctatactttgatata

SEQ ID NO: 35818 - DNA, 400 bp, Oryza sativa
  unsure (1)..(400): unsure at all n locations
cagcttgcctncaatttacgagatcgtggnttattatgtgacacaatccatgtctcagntgaagagcaattagctatgttcctgcacactgttggtcacaatttgagaaatcgtgtgattggaattttttgtcaaaagatcaagtgagatagtgagtcgatacttcaatgaggtgttaagagctttatgttatctttgctaagatatgatacaacttagatcaatagacactcattcanagatagttagtaacccgggccgattctacccatattttgaggtatctcgtgtcacaattattgaacttctaatttgtagttgccttctttttttgtaacaacaattttttttacatangattgcatggagcaatgacggaccatgtcctgctttgccctgc

SEQ ID NO: 35819 - DNA, 397 bp, Oryza sativa
  unsure (1)..(397): unsure at all n locations
cgatccttgagtcacctgcggcatgcaagctttcaaactatatactagcagaattatccaatagcaaaaccgttcttttcttagaaaaaaaaatacagccaaaaagagctttcccaaccaaattggttttgagtcgttggatttcaaacggacgcctcggattagcgcgcgttccgtgcgggagacgttccaatttccacgcaacccgaggatgacaatgacatgtggaccccaactgctactcttgcgctgcgtgcacacgtggagcgagttgctgccacgcgcgtgccacttgtcatgtgttcggcgtcgggcccacacgtggcaggtcttgttcgtttgtaccgtgacctcctcttgtttntcagctactctagctgtctagcacagagcagag

SEQ ID NO: 35820 - DNA, 379 bp, Oryza sativa
  unsure (1)..(379): unsure at all n locations
tactcagctgcccgangtacaccgaacacgcacttatctgggttcagttttatgcgggcggagcggaggctctcaaaagtttccgctagatctgaaagtaacgtttcctggttgcgcgtctttacaaccaagtcatcgacataagcctcaacattacgtcctaattggctacccaaagaaattccagtagtacgttgaaaagtaggaccttgaatctttaacccgaagggcatcgtcgtataacaataagttcctatgggggtaatgaacgccagtttttcctcatccttcctagccatgcgaatctgatggtaaccagagtatgcatctagaaaacacaaaaggtcgcaccccgctgtggagtcgacaatctgatcta

SEQ ID NO: 35821 - DNA, 356 bp, Oryza sativa
gcagcttgctcttaagctaagccgcgcacgatccaatctcgcacgctctattgtcctggaggattctggagcacgtacgatccaatctcccatcgcagccaactccctcagtatttacatctatggtattgctgattaattttctatcaatccattttgaacttcaatatatataatatttttaagtttgaaaaacataaaaatcaatataacaagtacttttacgtaaagtaagtttttgcacgtattattgctatctctaatagaaaattatggttaaagtcgtgcgcaaaaaattgaataattaagagttaacattaccgcgtatatatcttttttttcgaacggtcaggctg

SEQ ID NO: 35822 - DNA, 356 bp, Oryza sativa
  unsure (1)..(356): unsure at all n locations
ctaagcttcccccaagtgatcaaagtcgntgttaatcaccaaaacctgctcccttttcttttatctccaaaatatgtaaccacttcctacatggcacatgcaggctgcagctcatatatatatatataatcaatactactaattacaccacataaaaaatgtatctatataatgatctctatactatatactccaaatctatagctctccttctccttcttcttcttcttcttcttcatggagtctgcagctggctgtcgaggccgatggagttgtgcttgctcgacgggccggacggagggatgggccctctcngcaagaacccgangaaatggttggaaagctccctctccaat

SEQ ID NO: 35823 - DNA, 328 bp, Oryza sativa
aagataatttactactcattggcattgcatgtttcccttggacttactgagcataatcccttcagaccggataccaaatcaggctctcttcacagacaaccgcacagaactctccatcgtaccatgcaccactggcatcatttgcctcctggtacatacttctgacacgggagatcgtctccagctcccccgtcttgggatcgtattaacccagcgactgcttcgtgttgagcaggatgcgcccgctcgtcgggtcgacgcccatcaccgtcgtcttctccgacgtgtactccggcgagtacccggcgagctcgatgcggtacaccat

SEQ ID NO: 35824 - DNA, 161 bp, Oryza sativa
  unsure (1)..(161): unsure at all n locations
ctcactttggcaagtgaagatgcgagccgttcttgcacagcaagacctcgatgatgcgctttctggatttgacaagaggactcanggatggtccaacgatgagaagaanaaggatcgtaaggctatgtcatatattcatcttcatctatctaacaatattt

SEQ ID NO: 35825 - DNA, 447 bp, Oryza sativa
  unsure (1)..(447): unsure at all n locations
agcttctcttacacattaatgctagatgatattttatcctgcgttagaagagaattactatgtcacagttacaagtttatgcatacttatgccaaatacatacaatttttacagcatccaaatatccaataaccatccaagtggaagcagagtggaaggaagtgaaagaggaaaggtctttaaaaaaatgttggcaactaanagtctgcatgtagcaaagtcatcccactaagacaataaaaagaaaacttaattgtataagttcttggttattcacaagtgcatataaatgcctaaacatgtgacaggtatgcagacaattttcattctcctggttccttttcatacccatctgatatgagatcgtgaacactgaacaggaacattatacaggaggacgaatactttgcatttgtatacaactcatcaattatccacgcctatcat

SEQ ID NO: 35826 - DNA, 346 bp, Oryza sativa
  unsure (1)..(346): unsure at all n locations
ntctcaaggtgagatcaaaaggatgtatagccccagcatgccttccttcttcctctatattgactngngttttactaaggtcaggtaaaccccatccatcttcctcttcatgtgctagtttgtttaaatctaccgtcattgtgatatgtggacatggagttgctttacaggttgatgaatggaatggcaagcggctggttgactgcctccttaaggaattgtagggaatagaggggcacccattggcggcaaaagtagcatccaccatgtattntgaattcatgggtctgctggataattgtgccccatgtaatgggagtgtttttgccgctagtgaactcaaaat

SEQ ID NO: 35827 - DNA, 389 bp, Oryza sativa
  unsure (1)..(389): unsure at all n locations
agcttgcccgcaggtacaccaaacacacacttatcggtgttcagctttatgcgggcggagcggaggttctcaaaagtttccgctagatctgaaagtaaagtttcttggttgcgcgtttttacaaccaagtcatcgacataagcctcaacattacgtcctatttggctacccaaagaaattcgagtagtacgttgaaaagtaggacctgcattctttaacccgaagggcattgatgtataacaataggttcctacggnggtaatgaacgcagttttttcctcatcctccctagccatgcgaatctgatggtaaccagagtatgcatctagaanacacaaaaggtcgcaccccgcagtggagtcgacgatctgatctatgcgaggcagggg

SEQ ID NO: 35828 - DNA, 487 bp, Oryza sativa
  unsure (1)..(487): unsure at all n locations
tacggacctatgaaactcagcttcaggtgttgctgctaacagganatgaaatatccggtaccatacctcaagagatagagaaactcacaagccttacgcttctttatatggaaaaaaatctacttactggaaatcttccagattcacttggaaatctgctaaacttggttatcctaagcttatcccaaaacaaaatttcaggacaaattccaacttcatttggtaatctaagtcatctaagtgagctctacttacaggaaaantaattgagtggaccgattcctagctccttagggagttgcaagaatctagaagctntaaacctgtcttgtaacagctntgatagtagcataccagaggaactcgttactctntcctctctttcttgaatggtggacttgtctcacaaccaactcgatggagaaataccatcagagatnggtggctcgatcaatcttgatattctaaatatntncaaataccgact

SEQ ID NO: 35829 - DNA, 295 bp, Oryza sativa
agcttgaccattgtcggagccgaccggtcccactctagctaggggaccagctcccgccccagcaaggctgggacgtcgctcctcctctggccgccgtcggggtcaccgggacccgatctggctggcgggaggccagatccatcgtcgagggaagcagatccgcatccggcatggccggatccatcgtgccgaccatccggccgtcacctcctgcgacccgccgccgccgagaagcccccagtgtctcccgccgctgggcatcctcgtgggagagcttgcgccccgctgccgtcgt

SEQ ID NO: 35830 - DNA, 398 bp, Oryza sativa
  unsure (1)..(398): unsure at all n locations
ntngaggaaatntcatagctccaggtagtgtgcccacatctggtgttgtcctgtgacatagccccgtgcccatggagcagacagcgtgcacacgcgtgtgaagcaaagcaaaggagaatgggctctggaccagcagtagcaggctcaggctactgggggcctangtgggtatgagggttggtggatgggaagaaatcctaacccctaacccaaacaagggctcaccatatatcatgttatggcaaatgtacttggactgcaatgggccaacatgtacccaaggcaacgggccaacatgtacccaaggcaactacaggaacaatgcagataacaccctatagaagaggtaaatagacagtacaatggttacccatgtaagatgtccactccaccactac

SEQ ID NO: 35831 - DNA, 438 bp, Oryza sativa
  unsure (1)..(438): unsure at all n locations
agctngaaacgacgggtatgcaactgtntacttatcatggatggatatttaccaatatactgaaataatgttattntgtctagtttggtttccttttttacaaagcgctaggttgtaataattggctataactcttttgagtaaaggccgagatgttattttattccaatatctaaaaaaatatatcacaatgctggttgcaacaaaatcataattataggaaaggacattcaaatgctaattcaatgatattattttcatcanataaaatttaacttgtaataaaataattattggtcaaatatttaaagtgataaatattaaattgccgatgcgtcttattcagtgggacagtggacagaggaagtattacttatcatgatacagtatgcananacaacanaactgtgtgcttgaaaatcagggtgtcttcggatc

SEQ ID NO: 35832 - DNA, 438 bp, Oryza sativa
  unsure (1)..(438): unsure at all n locations
agcctggctgtctaaatatatcatggtaagtctattgacagtacggagggaaaatatcctaccatactcaactatataacggtttaactaatttcctaatattcttattctaactcatgtcatagaatcatttacgttttgttcggttaatccctcctctaagaggattaaaggggttttcacaccttgacctcaatcccctctaatcatttcaactggggattaattgaacaaacacttataagattagacaatatatcatcatagcaactcaaattcaggggcgagcatcattattaccgtgtggcagccctgttctttggctttgccatctgtgtgcggtactgtngatccggntaatttgtacgctgaanatcatctagagcatgacaacatttgcttatcagaatactaatgaaatntatctgactatatagt

SEQ ID NO: 35833 - DNA, 498 bp, Oryza sativa
  unsure (1)..(498): unsure at all n locations
ntcatgacaaggcatttccaaagccgacacaggtttaccatatgccgacgagaggggtcccagaccaacaacaggttatgtcccagaccatactgtgccaggaagcccaggggtcctccccgacaccaccccggcgaatccacatgtctctcggcatcaaggctcccctgataagctagttactcagctaggggtgtcccattccacccatgtggtcatacttgtcttatgttcggatgaaattccaaggaaacggtccttatgtgcaagagcgggaaaccgtacacccggtatgttccccggtccgcgggtntggaaattcatttagttcgcaagcaccgacccatgtgtcgggttttccaagtcttttggtaaacccaagttttacccaagacgttactcagattttaagtttgaaggcgaccgcggtactcgcacagagtgcacgatttctgatgctgcactgggtgttacaanggaacatgtataacaataaca

SEQ ID NO: 35834 - DNA, 432 bp, Oryza sativa
  unsure (1)..(432): unsure at all n locations
gcttttgcagtacaattgtgactaaattagtcttcaaataaagcgtacgctggtggactaaatggtacagattaaatacttaattattcggtgctttgaagattacaattgcatcagaaaatcgagacaggaagaagaaggacaagtctgagttgatatcacgatagaaacctaccggcgcaatatgtttatcaacatgcctagctttacatcacctttcatatcacatcacttggaacaagaattggcaacttgaaccctaagaagttgcaatccggccnacacatgcatacatcgcaatttagaagaaattaattgatatacttaaaccaataataataaatgtaatttggcatcctttattagcagtatttttactataatttcttctgacttggcaaattcaacccacctaagctatctcggtttagc

SEQ ID NO: 35835 - DNA, 375 bp, Oryza sativa
  unsure (1)..(375): unsure at all n locations
tcgtacttncactcnctacgcctaattgatcctccattatcgtcgtcgtcgtcgtcttagtcatgtcgaggggcggctgactgcctgcaacttggatacgccgccgtcgcactctcctctcctcttatcccaagttctcaattccggctagctctaagcgccctctgcttatatacgcggtaattaattagcaaacacagtagcatgatgagattagcagtacatgacgagttcagtcctcctaacgaacagtgctaaaaaaacgagagattatcgtggacagaaaaagtccatgtcgaatctaatctccgattggtttgtgccctaatgattccacgtttggcgttaccggcgactaaacaaatcgcttttagt

SEQ ID NO: 35836 - DNA, 262 bp, Oryza sativa
  unsure (1)..(262): unsure at all n locations
ttataccccatttgagcgcctgngaagatggaaccgtatgctcgcttatccgctgcttgttattattgaatggcaggccttaagtgcctttgtaataatgttaatattatcgatataataaagatgtggctttatatcatggttgtatggtgtaccccggctttttctgtgacggggagtaatacactatcgttccggaaaaggcaatttttccggtcgcgacaccgacccattcctgtctactgtcgggatacccgggaca

SEQ ID NO: 35837 - DNA, 422 bp, Oryza sativa
  unsure (1)..(422): unsure at all n locations
acctgcactggagttaagcagatctcccaggcctcgtngttttacatcaacactatctcaatgaataaagagagaaataatatttcttacacttatattagtattaaataatgtagttccacttgtcattagagaaatactatagattcagggttatgagacaaattaaggagaaaatgcactgacatgcgaagaaatacacttccggtgaatcatgtgagagcacacggattgatgggccacaagtctagtccaaaccgacttaaagtggggccaaccaaccatgcaccgaccaaggagtccacatgtcagcctcangacaaggtcggtcaagaatggtggtttccctggttcggccgaaccaagggtggcgccccttggtcctagcttccatgtgtcactctcttatgccactctcatga

SEQ ID NO: 35838 - DNA, 396 bp, Oryza sativa
  unsure (1)..(396): unsure at all n locations
cgtacccgcgatcctctgtggcacctgtggcatgcaagcttgaactttacgttggtaacgtttacaattaatctccgttctttaacccaattggcttattggtcaaactggggttgccaagtgtaaaggtttgtgatcatattacgaaaagaattacaaaatggcacaacttgattagtactttaacaaaccactcttgtaccagatgcacttcactcatcagaaattcagaatgtgagacaaggggtcactgtcctgcaagtcttcagtcttgcacctaacttgacacaacacccgtgcacagatccccttctatcttacgcatggactgaagggaaagcatcaatgccatgaatgatcangaagctaagaaaatattttcttcagggtgaaagc

SEQ ID NO: 35839 - DNA, 431 bp, Oryza sativa
  unsure (1)..(431): unsure at all n locations
ctaagctgtgccatctctagcagtacgtgctcgtagaaaggaccctctaccggcgtgctaccaactggatcctcttgaaatgcatctctcgggagcaaggcatcgagctcattgccgatgcccaccattttgagtgcagggctcattcagcttcactcacgtcggntggtaaagccttccgacaaggcttttactggccgacccgcgtgcaagacgcccaagaatgggtccggcgatgcaaggtgtgcaaattcgacgccaaacaaacccaccagccatcccaggccttgcaggtcatcccgctctcttagcccttcgcggtctggggtctggatatcctaaggcccttcaaagcgggccacngcngataccagcacctatacgtcaccatcgacaagttcaccaagtggcccgaggcttacccggtcgtc

SEQ ID NO: 35840 - DNA, 419 bp, Oryza sativa
  unsure (1)..(419): unsure at all n locations
gcttgcatttgagatgtgggtgtatctgaagcagctgtgatcccaagcaaaaatgacagcggcagccggcagcgattgtgaactctttttaattataatttccacaaaattacatatgctttggtcaaattattacaaaattatagatttaatgtgatatatcacaaaactacagattgaacactaaatttatcacaaaactacatgtttaataataaaattatcacaaaactatatatttntgagttcaaatcattaacaataatcaataatgttatgttagagttaaaggtgtccaagttttatggtaactttgtaactaaatttatagttttatgatatttaaattctataatatggngataactgtgttactaaatgcgtagttttgtgatattccattctatagttctataata

SEQ ID NO: 35841 - DNA, 100 bp, Oryza sativa
  unsure (1)..(100): unsure at all n locations
aagctatatactcgcttgtgttcattnttaccatttcgcggtaaacaaactcgaactctgttcggcccctggctaaatctcccatggggggaggaggggg

SEQ ID NO: 35842 - DNA, 485 bp, Oryza sativa
  unsure (1)..(485): unsure at all n locations
agcttgccaaacgtagactctntnttatccattgagttatatacgttgacggggcaggcctccacgtcgaagagtaaaaggacccagtggaatctacaatgtgtgtgggatgcattacatatgaaacacttagcatgttcgtatgggaatgaaatntggtatacgaagacagtaaaattaaactaactctgtgttgtacggcaatagtatgaacgtcttgtaatgctgcgccttcaggagatggacgagattgtcctctgtggcttgcggatattggtcgagcattgcggcgtttactttccgagggtcgatgaatccagtatcgaanaccccccgccgtcgggccctttgaatctccattctacnaacgataaaggaagtatatattatatatagtctacttatatacaaggacctaattaattataggaaacgtaataagagatctaactgaacaatacttacnanatctcagcactcataat

SEQ ID NO: 35843 - DNA, 440 bp, Oryza sativa
  unsure (1)..(440): unsure at all n locations
agaacctagagcccttccttganataccatctatcatatgcattggtgctgcgggggcttgctgagtacgggtggtactcacccttgctatttatatatcttttaagagagtgttgaagagaagcccttgtcggtacgcttgcgtatccaacaagatgatcggagtgcggtcttgttctaggtctcgttccccagtcgactgcctgtggcatgttaaccgagcccttatattatnttgtcttccgctggtggtctctgataggtggtgccttatctggccctaatgtaagtatttaactcttttagcctgaattcattcgtgatatgtngtgatccaactatgtatgtgtgttccaactactgatcgagggattgtgtacagataacacagaagaattccgatttccaaaatcgagggtctacaagaaactactggtaga

SEQ ID NO: 35844 - DNA, 418 bp, Oryza sativa
  unsure (1)..(418): unsure at all n locations
ntcacgccggcgagcaatccgacgcggcataatcgaatcaactcccttcagcaacaagaggaacaaatacaatacaggttagcctccgacttcgggagcagaggcgtgaagcccgaaaagaacgaatcaaatgcagagatggataccaaaaatggatcggagaggagccggacggcggcngccggcgaccaacggcggcgcgccgtttgccggcgaggggatcggaggaggaggacgacgacgacctgagccctgaaccacctgtgggccttctgggcttttgttcgctactataggcccacacgtctgtgcccatgggcctggttttccggcccacgatccatcggccccgatcaacggctgtgattcgacgagggtgagctanggcaggagtccccgccttccgatggaaaacgga

SEQ ID NO: 35845 - DNA, 473 bp, Oryza sativa
  unsure (1)..(473): unsure at all n locations
gctggtaatacacaatagcatatcccaaactgacagcttatctaaatattacaacaaanaagcaacattaaagaactacaaagatctgtactctgtagtactagaggcaacaacaccaacaataaaagttatgacatgttttttatgaatctggtatatgtgacaaatgaaacagaatgtttgagcacaatgttgcaaagggaatcatgaaatgcccattgggttaaacgttgaaacacacagaaagttaatagaagtagagaacacattttttcctcctttngcagaccacccaaagtcctgaatcacttntaagaaatactatgtgtaagcataatatttagagaaatgatgtaatacccncgtcttggactgcggcttctggaacgacccctagaccttggaactgtctcatgatttttctttatggctgataatcagataaaaggtaaatgacatcatagtaaatctac

SEQ ID NO: 35846 - DNA, 242 bp, Oryza sativa
  unsure (1)..(242): unsure at all n locations
ctcaagctnaggtcacactcacacgctggcccagttgctcagttagctttctccnattttttttcgcgcactacacgcgcatcgagcctggtcctctctcatcatcatcattcatcaatcgtcgcctgatcgcctccagcgaaagtcttcctccatttctctctccatcgaatctcatgccagcagcacgagcagcagcagcagccgtcatggatttccaggccgacgcggagtcagccacc

SEQ ID NO: 35847 - DNA, 294 bp, Oryza sativa
gcttacacatgcacaagcattgtcaattgctaatcttctgttaaatatactactccacttcactctatgtatgaccagcacaagttccatggaagcatcaagcatgtacatttctcttttctgaactaacagaaaaatttagagaaagccaagcaattgtgacaagaagcatgccaagttagctctgaattatgagtaacatgaaattcataaaaaggtgtacattttctttttctcttgtgtgataataatagactaattaattaaacgtgtacatcattacaagtatgtgaa

SEQ ID NO: 35848 - DNA, 434 bp, Oryza sativa
  unsure (1)..(434): unsure at all n locations
nggtggaatgtgcataatgtttcaataaatacanttgacgatctgattgtcattngngacatgctcattagtccttactggtgacatccttctattctcattaattatactacttttatcaccttcacaagcatgtangtaaaatgattgttatgtactgttattttgtccctgatatatttgttntatgattntatcaaagcaaggtgtatttctgaaacattatgataatgtttgcaagttaccaaaatggacaaaattctatttatggaccacaatgttgcaatttttttttctgctgtatagcaaactactcatgtgattgatctatttgccactagcttacataaatatcagttcaatcctcattgctttgtcagaaatgcatttgaggcttgataatgttttactgatgatatgttcatgctgataca

SEQ ID NO: 35849 - DNA, 373 bp, Oryza sativa
  unsure (1)..(373): unsure at all n locations
agcttacctgagtttgttttaagagaactagataatatgcccgtacgtttcaacggggggtaaaacgttntatttatcctataccatttactcccttggttntggaccgaatgctctcttggttttggatcgaacgctcattccttcctttccagcttcagtcctagccatgtccgctacctccctctgctcagcctacctctcttcggctcagcccacaagtgaaactgtaggcccagctcgaacaataccgtgcctgtaccataacggagccgatcctcccattaaatccggtcccaatcttctcgatctccaaaatttaatccggtcgagcttgcatagtccagtggccatacaatgatggagccgatcc

SEQ ID NO: 35850 - DNA, 407 bp, Oryza sativa
  unsure (1)..(407): unsure at all n locations
ttaactattatatacttcannatttggatttattgattttctttaaaaataaccttatatgtagaaagtttgttttaaaataagatcacatcgtttattagtatgagaagcgtgtccgtgataatgtaagcctaaaacgacaaatttagaagactgaaagaaaatgatagttgagtgttgacctgccagattagtgggagtactgtagactgaaactttctcctggatgttntgtcagagaacttcagcattatcctcatagtttacttagaggcatcaaagaagtacaagtaaaaccacttggtgtgaaactgtccgatgcttccaaaaacacattnttgcaaattgcatcatccaccatgcttgctatcctccatgtagtaaanaaaaaacatgcatgtatgtag

SEQ ID NO: 35851 - DNA, 480 bp, Oryza sativa
  unsure (1)..(480): unsure at all n locations
agctngggcctctgntgcatagcactaccgttcttccacatgtctagtgggtaaggcttagtttgtggctcagcctggttataaacaaaagtacacggattggagatggatgaagtcgggggtcgatggacattctccagggcaaatgaaggctacacgagctgcggcccggtagtcgagatgtcatggcagagggttggtgccctgctgctaggggctcagtcctgcctgcctgtcccggaggttccggccgtaggtgggattgggtcggtactcttgtttatggctaggatgggttgggaactatgtcacgtcttccgtccgtataccgtggtggtatgtggcacgtggttacacgtgaggaagacgtgtcttgtgggtaaagatgtacacctctgatcagagtataatctattcgaatagccgcgccctcggttatgggcaagccgagcaatgtacccaagtcagtgtttaattctt

SEQ ID NO: 35852 - DNA, 427 bp, Oryza sativa
  unsure (1)..(427): unsure at all n locations
ctggagaagaagtcttaggtggagtcttggcttataccccagttgagcgcctgtgaagatggagccgtangcccgctagtccgctgctgtttatttttgattgtcaggccttaagtgcctttgtaataatgtaaatattatcgatataataaagatgtgtcttttatatcatgtttgtatggtgtaccccggctnttcctgggacggngattaatacactagcgttcgggaaaatgcaattttctcggtcgcgacaagatggtatcagagccatctcgactgtaggataagccaagtgtataaaacctaaggacatantttataaataaaactatttgcgaaagttccttttttcttcttcccctaatgctattttgaaaanggtttactccttctttcttcttcngatttcaactagtactagatg

SEQ ID NO: 35853 - DNA, 478 bp, Oryza sativa
  unsure (1)..(478): unsure at all n locations
agctttgtactntatttataatactcttctttatacatttatgggattgaaatactttccgagtatatgaatgccaactttacattatgtacatgttatactgattatactactagcttatctgggaaatgcatcggtacgggtatagtggttgcttatgcaattactctatgtcatgacgatgatattagagtagtatctggtagtttaggcgtggtgtctagattacgggatatcattatttgggggtatatgctgcgaatgagaggtgggccgctgatggtgacagctcagtacgggtattcctccgctcgtgtatattgtcctaagttaattntctagggaaggtactcctttgtatttagcctcggttgtatggtcatgacgggctgtcgtaaggaactcngcagtcaggggttacttctcgaagtaccaggaggtcatcggatagagggattagctagtatgtcagataact

SEQ ID NO: 35854 - DNA, 375 bp, Oryza sativa
  unsure (1)..(375): unsure at all n locations
tttgactgcgcgacagtccgcaaggtcatggagggaggtgttgngcacggtgcaccacttgccggtagggcgctccctgctgggagcgccggcttccttctttttgtcgcccgcaggccttccctttcgggtggtccgcgaagcgccctcaacggcgaggacatgaccctcgtcgtcggaacggactgacctcttcttcctcctcctgtcacgccgccctgtctgagcggcggatccggngggcggcgaagctgtcacaccggaaccggaggggttccaagtccaggcctcctccttgcgagccactcggtccgcgagctgaaaaagctctgcggtagtcaggggctctttggaggcgatctttncgagcatgcg

SEQ ID NO: 35855 - DNA, 440 bp, Oryza sativa
  unsure (1)..(440): unsure at all n locations
agcttaaagccatgaatcccttttatgcatatctggatttggatcctgccgaacaaacatataggatgagtagtatctgatgtaaatataatactcgagaaaaattcaagcagtgtataaatacgtagttcttctcttgtaattttgatttccccgagcagatgactcatttacgttaaacactctggccgactagtcataaccaccaagcactgggagtcggtctaagcacttcccaaacatgcatatgagtgacatgagttcgtcattaatggaacaaagtttcacggatcggagtttactactcgggtactttcgccattattaagagcagaaaatanattatcttatctctatgctcttggattattccgaataatacttaacaccttgcgttactccgtccttccaacgagcccccgggtgctaggaatcggcct

SEQ ID NO: 35856 - DNA, 368 bp, Oryza sativa
  unsure (1)..(368): unsure at all n locations
ntaagttctaaagctcctaagaaaactaaggtgacattcgatatgcttttggacaagtatgagaggcaagctggtgagaaagctcgcaataaaggaaaaagaccaagatcacctcctagggagcgatttggttattcaccaagacggtcggaatcacctacatatcatcgttctcaagacatgtcatggnggccttatccaatgccgccaccgggttattcttttccttgctacatgccatgggggcaacgccaccaatgttcaatcatatgcctncaatgcaatacaaccaaggatggngaagaccaangagaccagctcgtgagcgtttgttttcaccaaacaatagccggttttatgctaaaaat

SEQ ID NO: 35857 - DNA, 337 bp, Oryza sativa
attgagatacatagccgagtcagaatcttgactgtgtatgctatcaaaattcctggcagcgtggcatataatgctatgttgttatattcagagggtcaacaagagaaatgtctagcagtacgaccaagatcagaacacgcccatactctttatgaaatccttcgaaattgctctcacagaaacatcatacagcctatgggagtctgggaagaaatggagacgaacctggcatttattgttttcccttgctctgatggagttgtgacttcaattccaaaagaagctttatttgatgtggaagatgctacaaatgctgaatcttatacatttgtgttca

SEQ ID NO: 35858 - DNA, 338 bp, Oryza sativa
  unsure (1)..(338): unsure at all n locations
tcagaatacttgtattaagttgagagaagagaaacagacggtatatattccagctggaattattatggcagnagaagagtataactagttgcttaacgtcatcaattctcattntataggaataattcaacgaagaacattcgatttcaacgatacttctgctctcaaggagtatttgacgttgattaattagtttaattgatttataaaaaacaactaagtggtggtctgtgcatttgatttcgaacgatagttctgcttatcaaacatccaaccactactggagaagtgctcatctcttccggttcgcaaccacctttactcccgagtagcgaact

SEQ ID NO: 35859 - DNA, 357 bp, Oryza sativa
  unsure (1)..(357): unsure at all n locations
ggtgatcgacgtgaaggcggtggatcaggcggtcgcctacctgctcatgctcgcggcgcttgtcgtcacctacctagcgcactaactaactaattactccgtattatttattttaagttcgctagaaaggggcatgccaaatcgtgtccttgttgatttgagcactgtaaacatgctgtataattgcataattatttcactgtangcatgcataattgcacatggcttatataattatatggagataagtttcaagttgtcctatttaattagaaaatgttcatgatgttgacagtcagtgcaaactgtaagaagaatacatcttgccgaacactccggtagatgtgacacattaga

SEQ ID NO: 35860 - DNA, 335 bp, Oryza sativa
cacgtagctgcggctcttacgcgtaattacctgtattcgctcatgtctctgaccgagctacagaaagaaaaaaaatccatctgaaattaatattcagacaaaccgattcttcacttgttcagacaattacctgaattcagatcgatggcgtatctgtgacaaatctttctggaattactatattgagatgaaatccgcttcaccgattaatcttatcttagtacggtactagtttagtaattaccgtggaagatctggagtatcatgaggtaaaaagagatggacatgcatgcgtatacagatgttactttgaccggtatatcagttccgtcgtc

SEQ ID NO: 35861 - DNA, 450 bp, Oryza sativa
  unsure (1)..(450): unsure at all n locations
gcgatcctctgagtcacctgcggcatgaagcttcgtggtagatgtgagtttactctgacctctgtagactatcttcgatcatatcacttggttcataactgggaatagctcccacgaacaagcaactcagattcactttctttatgttcagtttactttccgctattctcttcatgttgtcatcatttagcattcaacgtattcctgtgcaccttcagccttgatgttgtctttcccattggatcatctcccaagacatggcgtcgcctggaacctgngcttgcactttactccggtacatctgataccgagttaagattcactccttgcttcataaaacctttacctaagcatcttgctacttaatgaaaggtgactgttgtggggaggcaatactatcangggcttncttgacgagcagacatgttctgttataatcaccttcgctac

SEQ ID NO: 35862 - DNA, 365 bp, Oryza sativa
  unsure (1)..(365): unsure at all n locations
tagcacaagcaagctcacgaccgcaaaggagancagctcgttggtagcttttgcactgaacagtctgagcagagagaggaattaagcttatcatcatatcatagcgttcgtttcactgcatattacggtttaggtgcacatgaagagaatcatattccccctaactttaaagtccacattacggtttaggtgcgctttagaccaagtccttgcatggctccactacccactataagatgttttgcatcctcactttggactttccagcgcattatattggccatctctatctacataacgtcatatgcaagcttgggtatgcatgtgactaatttagcatcccaattaattcggtgaatctatgc

SEQ ID NO: 35863 - DNA, 386 bp, Oryza sativa
  unsure (1)..(386): unsure at all n locations
agcttttgcattgagatgtgggtgtatctgaagcagctgtgatcccaagcaaaaatgacagcggcagccggcagcgattgtgaactttttttaattataatttccacaaaattacatatgctttggtcaaattattacaaaattatagatttaatgtgatatatcacaaaactacagattgaacactaaatttatcacaaaactacatgtttaataataaaattatcacaaaactatatatttntgagttcaaatcattaacaataatcaataatggtatgttagagttaaaggtgtccaagttttatggtaactttgtaactaaatttatagttntatgatatttaaattctataatatggtgataactgtgttactaaatgcgt

SEQ ID NO: 35864 - DNA, 259 bp, Oryza sativa
  unsure (1)..(259): unsure at all n locations
tatatactcgcttgtgttcattnttacaatttcgcggtaaacaaactctaactctgttccgcccctggcttaatctccaatggggggaggatggggggccacttctacgcttgtagacaaaaatacccctgttttctcctatgtccaatgcaattctctttcaatcatggctggacctactcagacacagcatgctcctgtgaatatttaattaacaactactctcctatttacttactgaccatatgtccacttcgaa

SEQ ID NO: 35865 - DNA, 430 bp, Oryza sativa
  unsure (1)..(430): unsure at all n locations
tgacgttctgaaacttagcatccaggtagagcgaaccagcagctatgtattggggcttatactgtangcacagtgttgntttaagcctacgagcaacagaatgaatacatccagattgatcagttgaatgaatgaagcatcaaaacaataatgtcacaaagtgatatgtcacatctcataccaatcatttacaaagttccaagctacttgtttcacttccttctgagagatcccaagtttttccatagcatcaagtagtggtctgtaaggatgttggatgttgaaatcaaaccgaacagttgtaaggactaatctctccccggtcaaaattagtgctttctgcttctcaaataccatcctgtgatagatactacttgtcaaccattaacttgatggtacatatatacttganactcattaatgatccact

SEQ ID NO: 35866 - DNA, 398 bp, Oryza sativa
  unsure (1)..(398): unsure at all n locations
ntcacgccggcgagcaatccgacgcggcaaaatcgaatcaactcccttcagcaacaagaggaacaaatacaatacaggttagcctccgacttcgggagcagaggcgtgaagcccgaanagaacgaatcanatgcagagatggataccaaaaatggatcggagaggagccggacggcggcngccggcgaccaacggcggcgcgccgtttgccggcgaggggatcggaggaggaggacgacgacgacctgagccctgaaccacctgtgggccttctgggcttttgttcgctactataggcccacacgtctgtgcccatgggcctggntntccggcccacgatccatcggccccgatcaacggctgtgattcgacgagggtgagctatggcaggagtcccc

SEQ ID NO: 35867 - DNA, 411 bp, Oryza sativa
  unsure (1)..(411): unsure at all n locations
agcttcagcttacatgcagcattggtgagcttgcaactcaccttgagtggtttggacagctgcttctcttcttcactgaaggagctgtcatactggatgaagtttaaagcctgatatagagcaaatcatacttgcatcagtacagtgtaaaacaggtttaagtctttctttaaacaaaagcctgatgtgtgacctttccatatctcttagaagccctggcatacttttccatcttaaaccaagcattcccttcatctttcttctttgcagccgcttcaatcttctcagtattctccttcatgtcccatgattctttctcctgcacaaaanaagcatatgagaattagaatttcattagcaatcagtagatggtaagtcagagatactgaaataaaggttagttaccttatc

SEQ ID NO: 35868 - DNA, 474 bp, Oryza sativa
  unsure (1)..(474): unsure at all n locations
ntngatngangtgatataccttggtcttcanatccaaactgttattacattattgaactcctctntagaaggcaaaacttggtggatatttaagttttaaatattgtacaaatcatgacatgcttatttagagaaagtatctgcatttgttttttgttaggctggtgctgatgttaagggtgttggtacttttacccccttaatagttgctgcaactgaaggcttaactgatttctataagtgcttactggagggtggtgctgatcctgatgtgcctgataaagtaactcttttcctttttcactgaattttcttcactgcacatcgagtggttgttttcactcatggaaattatattattgatattcatatctatcagatggtctattttatgatctcatactactattcgtctaatggtntattgatagctatgtagatgcattaatgacaggactgtagntgtgacaccta

SEQ ID NO: 35869 - DNA, 488 bp, Oryza sativa
  unsure (1)..(488): unsure at all n locations
agcttccncggtgtcttctctacccgccgccatcctcgccttcgcctctcgtcgcccgtagcgctctagcgccgtgtgctctagcgccgccgtcgccgccgtcgctccagccgtgcgccgccgccgttccagacgtcgtcgtcgctcgagaagaccgccgtcgtggtcgccaagccgtcgccgtcctcgtccaccgcttcgccaccgtcggagaccgccgaagcatcatcgccgtcgtcaagccgaagaccgccgccgtttcaacctcgtcgccgtcgccgtccgttggtcttccgccgtcgctttggtcgccggtgagttcgccgtgccgtccgctacccgttggtgcctccgttcgtgccgaagcgccgccgttcgccggtgagcatgcgctcgtcgagcctgccgagccgctagcgcggtggggacgtcaccgctgacgtcatcgtcgccctctcccgtgagccggtcgtggaccgatcgatctc

SEQ ID NO: 35870 - DNA, 366 bp, Oryza sativa
  unsure (1)..(366): unsure at all n locations
tgtcaggctcctnctgtggcccatagacgatggagagccaccagngggcgacattagaagagtgtcgaaccaacgcggtaagagagaaatccgcatggtgaacatctgagacagaccagacggtcgtccggcaggcaagcaacacccccccactccgaccgaccgcaggcaagaaagaataatcaaagtcgaggcctagcatttccagaatagtacgagaggggattacatccataatagtctcctgaagatagagaagagagacatgctcatcacggactacatcacgcacagcatcctggcgggcgcgcgagttcagacctcgcacgttccacaccaaaacgttctcggtgcacgatcccattg

SEQ ID NO: 35871 - DNA, 491 bp, Oryza sativa
  unsure (1)..(491): unsure at all n locations
catgcaagcttcttcgctgcaccttgttgcccacgtgccctcttctgtacaactgaggggtgactaccactagcctcctcctcctggattcactacacatccctttccacgtgcccctgctggntcccctacgcattcctctccacgttccctgtctcgttcaagtactggtttggatcctcggtcccctcttcttcattccaggactggctgcttccctccgcgattgtatcgtacaatatatgttcctcatcgcggtcatgcatctgttgatacaagaaacatctgctaagtcacgagacacttatgtttcaacaatctaagtcatgtatgctacgtgtaactgtcgtatatgctaagtcttattaagactataattgtcaattgctaggagtcgcaccacattcgtagtcaataattatatagtaagtctattacagataacatgatcttacattaaaactcacatattcgacatgctcagactaaaa

SEQ ID NO: 35872 - DNA, 380 bp, Oryza sativa
  unsure (1)..(380): unsure at all n locations
tataagtagtgcccactgcttcaaaatctccttttccggctaagtcctccacaagtgctcctacttcaaggatcccctctgtctctggcgacatggctcttggcggtgaatccctccgttctcaagcggttctgcgcaaaatgcaatggcgaccacttccgatgttcctgaggtaaattcttcattctttatcatcctttgttttccaattgcttcattccgtcacttaaggtttgccctttcaaatctcttgattcaacatcttagagggcaaattgtgattcctgttctgcatgacccaacacactatttccttggtccaatgggtgactcaaacccaacttacttcattaacgttgagaccaatangatccctttta

SEQ ID NO: 35873 - DNA, 452 bp, Oryza sativa
  unsure (1)..(452): unsure at all n locations
agctttatgtcatacatgagaccgagctgtataggaagagtccatcaggaatcctgcaacgctgtgtttctttggaggagggaaggctattgctaagagatatacactcgggcatctgtgagaatcacgctgccgcatgaaccattgttggcaaggcttatcggtagggttttttcggcccactgctgtatctgacgccaataaaattgtgtgaacatgtgaaggttgtcaattntntgccagacaaactcatttaccagctcaggagttgcaaactatcccattatcctggctgttcgcggtttgggggctcgacatnggtggccctttcanaaaggctaccgatgatttcactcatctttttgtagctgttgacaagttctcccagtggattgaagccaagctagtcgtcacaatcacagcggacaaggctagagattcttcataacatc

SEQ ID NO: 35874 - DNA, 378 bp, Oryza sativa
  unsure (1)..(378): unsure at all n locations
tctcgggttcttggtctctgcccgaggcatcgtggccaacctctagaagatacgagctatagagcggatgcgcccccccaacaagcttagggatgtgcaatgcgtcaccggctgcatggccgccctaagtcggttcatatcgaggctgggagagaaggcgctacccctatntaagctcctcaaacgctccgggccgtttacctggacggaggaggctgagcgggtcctcactcagttgaaggcgtacctcagttctccccctgtcctggtcgccccggagccagatgagccgttgctactctacctggcggcaaccccgcaagtggtcagcgcggcgttggtcgtggagcgcgacgaggacaaccctcacttcacgca

SEQ ID NO: 35875 - DNA, 380 bp, Oryza sativa
  unsure (1)..(380): unsure at all n locations
agctggtctgcgtcagtccaggaaacctttgcttcaaacatatcagtaggccctctgctcgttcggcaagcagctccctcttctccgtgtctattatcatgtctttcaccatgccccaggatgatctgccactggtggcacggcctaagacacttgctggttttgcagcaatcctccggcgccacacatacactgatgcctcgacacggttggcgatttccagtgcttggtactccgttgacaggtccaggcagtcgagaaggcactcangagagaaatgatcagacgttatgtagcggtatatgatgtcacccaaagttgcccttccattctacatccaagatgaaggtaacaagctgagatcaactaaattacacatg

SEQ ID NO: 35876 - DNA, 493 bp, Oryza sativa
  unsure (1)..(493): unsure at all n locations
taataataaactagtatggtgtatggtggcccgcgcagatttctctgctagcatcattatattttctctcgtataatagcatatantgtttcttattatattattcaaatatattaaaatgacatcataattttaaattttgcaataactttacgaaactacaaatgtgtaatattcacactgtattttatatacgtgttagttattaattatttttaatatcaaattntagttatttgtaaattatatatattcctgtatgtactctagactcgttttttaatattttntttaattccaaattntaatatttttaattccgaattttctgtaaattgtatttctatatagactctatactcttcttncaatattatnntattttgattctgaattttattatttctaantgtattatatgtggactctanactcatctctcatattcttaaattttaatttcgaattcagtactttctaatgtattctatat

SEQ ID NO: 35877 - DNA, 437 bp, Oryza sativa
tagcttacacatgacatacatgtgcctgcagcctttttggtccatacgtatgatatgatcaagtgctgcaataatgtcatgtacggtttttgttctggagactttagctgtgatgagctcccacagcaaattttttatttcgtccacatttgttgaccgcgatggatcgtacaatctatcaattcttgttgcagctctctcttctcaagtgtgattagggttttggagaacacatgaaaagacttctttcttaatttgtagcactgtgcttattactgttgatgaggatgtattttccacactgttccacatgtgttggagaaataatctagttgacatggggaaaacaaagtagatgcacatgacacaacataattttcttatgatgaggaagatgatactacaaaattggacatgtaatttacaatattgcaact

SEQ ID NO: 35878 - DNA, 489 bp, Oryza sativa
  unsure (1)..(489): unsure at all n locations
taacactagcaacgggcagaacagttggtaaaggagatcattggcactatggcgcatgtatgttgagttcttgaagcattgccgatatcgatatatatttctttgcatgggacagtagccttttctgcggcggaacaagctaagaagtgcaggcggctctggtttcgaatggtacttactcgtcttgtgactaagtcaaagaaaagattgttgcttttcaagtggttaggtcaccaaggcgcgggcggctcgctacattctgtagttcgttcactcctttctaaatcacttgtcaggaatgggctcgtcccgtgccgtgtcaataaggtcataataggggattggagtatcanacttatctaanaccagccctactttcacgataccagataccttcttgacccaagacaccagctagtgcaatcccagttcctgcanaagaaagactccctatcangtaaaatccggtcaaaagactatganaacggg

SEQ ID NO: 35879 - DNA, 455 bp, Oryza sativa
  unsure (1)..(455): unsure at all n locations
agcttaaaagatntatctcgcagagtagttgctacctgttcaaacctttgatgtgacatggtgtaaaattttaaggtgagatctaaacaggccatgaatgaaacatgcgttttgctgtggccacacttccagtcttctataccataccgttcattgttgaagactctggatctttactattaagaggaaactaaagagctactcccttcgtcccataatataagatattttagagggatgtgacacatactaatgctataaatctggacagacgagtaataagctaccactttcgtttagagggcctgcaaaagtgcaaattacttcgttaaagaataagagagatgcacatgtccactcgcgacggtctagaaactacaatgttaataattaaagaaaagtttaagaaccaaatcaccttcacttccacagtccagaagtaatcgtcttgatca

SEQ ID NO: 35880 - DNA, 463 bp, Oryza sativa
  unsure (1)..(463): unsure at all n locations
agagaagaccaagattgtgagaagaccatcttcttctagcccaacaacaacaagtcgaagggttcttaccaagggaggaagatggagaatcttatgaaggcttttcaacaagtttgcgccgtcttcgagccactaagtgatatagatggtgaaagtggagatgatgataaaggaaataacgtcttcgatgtttgcttcatggcgcgtggtaaatctgatatagagtatgaagataatgaggtgagtgcttttgaggaagctattaatattttgagtgcaaaaaataagaagtgtgagaagatgtatagaaaacaggaatttatcattaaatctcttanatntgaaattgataggttaaaatctcttattcctaatggatgatgatgtgaannatgtgagggtntaatgaatgagaattcananattagagatgtaatgctgacatgnattgaaaatagatctt

SEQ ID NO: 35881 - DNA, 430 bp, Oryza sativa
agcttctacaacgcacaaatcctctcgataatacgctgatcgagcggcttaattatatttggctctggtttgctgtgcattcgaatgatgaagctaggccggccggtgttgagattatgggcatataatgatttaatttattccataaataagtcatgacattacagatgaaaactagcatgaacgcatcattagatctacacatgttaactacgcagaataacatgaacagatcaaatatgcgcaacatattgaacacgtaccgaggtgacgaaaagaccggctgcttggtcgaaacttttcgcaggtgtctacgaaggcacgaaacacgcgagcgaagaggaatgcgagccgtcgcgaacgaacagggagcagtcgcgcgaagcgcttccaaaaaccttattgcgcgcttcttccggtgcaggacgtc

SEQ ID NO: 35882 - DNA, 487 bp, Oryza sativa
  unsure (1)..(487): unsure at all n locations
tctcttctacccactttattcattagatttccagtttacagaaaagtatgtctgaagtacaatacagtaactactaccctaatggtacatttatcggaaatacaactgttaaaactttttggaaaaaaattgtctgcttgtcaagatgtttggtgcacgctgtctccatacacgctgntnggtgcacaccagtacatcttcaacagtatttgcaaaaaagtacatcttcaacaactaaacagagtaacagacatgacattgtttcacatacaaaaaatcaggtgaatattttttctaacacgaactggaaaatagaattgcgaactctgtcctatatcaacacaggtacctgcatgaatgcccgatcgtatgtcctggatctcanagcttcatanangtacagagctgcagtgggttgagttcgctcttgaatatactnttcanatgaattcgaaaatggatactttctatgctaaataataataat

SEQ ID NO: 35883 - DNA, 449 bp, Oryza sativa
  unsure (1)..(449): unsure at all n locations
agctttgctacctttcttacaaggattatttagaaaatccaaactctgaaaatntctagaaaattcatatatactaagcccgatatgaagtaaaccaaagttctatgcatgggattcttacagtatttcctagttaacagtttttttgaatatatttttagtatggtcattcgctgatgtcaagttccataatatttttagtatggtggctgtcgtggaattcgactgcacaaataatcctcgatttttataggcccttagttgcaggaagtttgcataaacgtctgagaaaacgggttataaaccgtctgcacaaatgtaccggtttcagttgcgaggccattaggataaatacttatcgcaccactaaaactgtggtctttgatagcagatagcgttataggttaggatatactagtatagctaaagcataggcatgtacatcctaa

SEQ ID NO: 35884 - DNA, 102 bp, Oryza sativa
ctacagtagttggatatacttctgccagctttttattggaccacgtggtgcagtaattttttcgatgtgggaggaacatacgtgctcttgatccgcctggat

SEQ ID NO: 35885 - DNA, 414 bp, Oryza sativa
agcttctggactagaagcgaggtcgttgaatatgcgctctctcttcgatatcttttccacaagatttgaggatttgttggtgcgaagatgtatatatagggggagcgttgaataaaaaaatggaatcgtgggggttgacatttaaaaagtcaaaaattggggtttgaattttttttttggttagttttacgtggggttgaccagatgggtgttcaaaaatctaaccaggtgtgtcattaattaattagtggtgagtcttgtcatgtcaacgaccgattggagcttggaatggaagcttctagcgttaatcgtgcttagtgagtggttcttctcgtggaaagtagcttaattaggtgggggtgctgataattgggtcaaatccccggggccatcattagcaagcagggttatata

SEQ ID NO: 35886 - DNA, 441 bp, Oryza sativa
  unsure (1)..(441): unsure at all n locations
tcgtggctttgaacgatatatccattgacatcaactctaaggcccacttcgcaattcatccgttcgcttcgtggttatgaagtatatccccgagtggaagcgatgtgaccaccgtgaccgagtgactttgaaagtagtgagataatttcctgacggtaattaagacaccatataataacttttgaacctgaggatatcttgtcttggagttggccaaaacctcgctaacgaaataaattggtcgttggactttttgaatatggccttcctcttcacgctcgacaaccaggaccgtgctcacaacctgtgaggtcgccgacacatataacagtagcggctcttgtggatgtggcgaggccaaaactagtggagtggtgagaagtttcttgaagtcttcaaaggttntttgtgcttcgggtccccactgaanattgtcagtct

SEQ ID NO: 35887 - DNA, 463 bp, Oryza sativa
  unsure (1)..(463): unsure at all n locations
ggatcttaagcaccgcggctgcagctttattttttaataactatttaggtgatatgcaaaagacgagaggacatcccttgagggtttagaatactttcccttcagatatattaaaatgtgtatttatttaatatcatattccctctgttatatattatgagaggttcaaagatggacgcagttcatatatgtatgaaaacagtttgtatcaatatcatctctatagaaatgatagtcagtcggtcaaggattttttattttgtcaatttaactatttaatgatgactgccatacgtctgtgatagaaattgtaaaagttactttnttatatagataaaataaaaaacggcctgaaattttcgccaccattatattntcatcatctataatataagtgtcttcgtctacatagtgctttctatagtggagctggtcctgttggttgcagttgcacttacacatg

SEQ ID NO: 35888 - DNA, 337 bp, Oryza sativa
  unsure (1)..(337): unsure at all n locations
gcttggacgatgtggntggcggcataccggacccgcgcgcgctcatcgttctctgtacccggggggaactcctccagcgccatccatggagagaagttggggtcccgggcctggtaactcgccagcacgagttcgaccgctccccgcgcgaggtccctcgaggatgacttgatggtcttctcaagctcctcggggagttgttcgagaacccaggccatcctgttgaggtgcggagcgaggccttccagaatggtggggggcaccgtcgtctggcctttccagaggcccgcttgccgaccggcgcgcttcaggcgggagaccgcatcccanagcatgc

SEQ ID NO: 35889 - DNA, 429 bp, Oryza sativa
agcttaagctgatgaggaaagggaggcaattcactttatattccaacactaatagctgcggcggcggctgatggaccagggcaaccatgacccctgcatctcctactgccagcatatgcaggaccttcttctcccatgcccacagtgcacactacttcaagaacaggacaagagcagagtaactaatcagacagtggcgaagtcgaaaattgagagttgagacaccgaatcagtaagaatggggatggagaggcaagaaattccaagatacataccgctgcctcctcgtcgtcgacaaccctctcgccaagttaccggatccaggagcaactgaatgccaccctctacaggaggagcaccgccgccaggagcccgaggggcagggatggctaatgcgctgatgacgtggactctacgagggagcagctg

SEQ ID NO: 35890 - DNA, 416 bp, Oryza sativa
  unsure (1)..(416): unsure at all n locations
tgctacagctgttgtctcatcgatcttgatcccagacagtatccggagtgctttcattccttccttctctttatcttgggtcaacatacttttgtgttgctgcttcttaactttttcttgaggcagcctcaaccctttccgtgggtttttgtttttactcccaccaagtattctgctgattagttntagctgctctacttctttcggcagctctntaacacgtgtttctcttatgtcaagagtttccaaatactcgagcttcacaatcgtcggcggaacatgggtaatatccgtccctcggaggctcanatacttcagcacaaacatcttacaaatgtgtttcatatgcctgttcttgaatcccttcagtccttgaaaatccaggacttgattattctgtcattgaagcatggaat

SEQ ID NO: 35891 - DNA, 451 bp, Oryza sativa
  unsure (1)..(451): unsure at all n locations
agctngactacccaatcctcaagcacaccgactatgggtttacctattaagnttaaatcctagaagaagcagtcgaagcccgcatcactcaaattaaactaagtctattcctgtaaaacataaattagacaaaacatggcaagactcagtacattaatcaaattaatgtactggcaagagcactataaaacctacatacatgaaagctctatgtcaaaagaaggctatttgtagtctcaattttcagcataaagccaattttagttcacaaaccatttacaacgtaatttaagcaaaacattttagcaatatgtaaagcatattaatcatagcatgatttcaacataaatagatagacatcattcccttaaaacacaacgagaaggaaggcaatcatatcacatataccaatctcatcatcatctcaaaacatttagtttcaaaagcattt

SEQ ID NO: 35892 - DNA, 469 bp, Oryza sativa
  unsure (1)..(469): unsure at all n locations
tctgataaaaaacgggtggttctagcgagatttgtaatatgagtacctttacgctntgccgagatgtaaggggccattttatgattccatttcttaataccatgaccaaaatgaactcccgcttctatcatctctttcaaaatgatgttccaatatcttcttgtcattttttccacacttccttttgattntttctttnttttcatcctacctttccattacgaaatttctttcttttcgaagattaagaaagagccgaaatagcttgaaataaataataattgttccgatggaaccttctacatggtataagcataaccttaatgaattaactaaacttctttntaaattaaaataaaaatagaaaatctaacctcttagcgttctaaggtcaaaaatctagtttaaagtanaaaatctgctttatgtatccttaaatcatatanatggngtaaatggtgattctgat

SEQ ID NO: 35893 - DNA, 378 bp, Oryza sativa
agctgcattgctaccccacactagagcgaaaactcatagggcgaggtcctacttgggtcatcattgccaaattcgcacctgcacagcagctccaacttccgatttatattgttgccaaactcatcaaccacctcgacgcagcagctccgacttctcaaaggccgtccataacaaagtggagcatgattatgaaattgccaaggattaatatgccttcatgaggcacgacgtcaagctatacgccaccatcatcttgggctaggtttacacccacaaaatccaaacacggcatgacgaggagacaaaaaggacgcctccaacgagtaaacgacgatgcccgtagcgtccatgctttcgccttggcctcaccaatgtgct

SEQ ID NO: 35894 - DNA, 350 bp, Oryza sativa
tgccatatgctgagttctcctacaacaacagttactagtcttttctgctaatggcaacgtatgaagcattgtatggacggaggtgtctcactccgctcttctggaatcagacaggggaacgccagttgtttggtacagaagttttaaatgacgcagaagagaaagtcagagctgtcatggaaagaatgagaatcgcgcaatctcgacagataagctatgcagacaatcgtcaaagggagctcactttctaagcatgggactatgtgtaccttcgtgtcactccgctcagaggagtacaccgcttccaaaccaaatgaaagttggaccacgctctgtggaccatatcgtgt

SEQ ID NO: 35895 - DNA, 443 bp, Oryza sativa
  unsure (1)..(443): unsure at all n locations
gcttaacctctggcctaccttcactaccagctattctatnactttcagtcatcctttcaatgttgagctaggttgacttatgcattttcaaaataaattcagcgtgtgccttagcatcattatgaaccctctcactagtaggtaaaggcaaaatatcaataggagcacgagggttgaaaccatacactacctgaaaaggacttaccttggtagtagaatgtgtngcctcgattgtatgcaaactccacatgaggcatacattctttccacatcttcaaatttttcttcaaaatagccctcaacatggtacccaaagtgcgggtgactacctccgtttgtccatctgtttgtgggtgacatgttgtagaaaacaatagctttgcacccaacttgttccatagcgtgcgccaaatatgatttaggaatgttgcatcacgatctga

SEQ ID NO: 35896 - DNA, 480 bp, Oryza sativa
  unsure (1)..(480): unsure at all n locations
atgggactccttcacaatggcctacttaagtgccatatgtgtattaaggccctaaaggagtacctaggctattaaagggacaacttcaaccatgagggtcttgggtatgttcctccaccaaaaggaaaggtggacaaaagtgtgatgatcaagaggccccaaggtcttagcaattntgttaaggccaaaagtatcattcctaatgattatgcttcacattgttcctttaatgcatcttatgttcttaagaagaatgctagtggtcgtgttgttgctaagtatgtangctcaaggggcaagaatatttctatcaagagagtactttgggtgcctaaggcacttgttactaacatgagaggacccaagcaaatatgggtacctaanactagaaattgatctcttgtangaatatgtctaccgtggaagaagatnggtgatngatagtggatgcaccatcacatgactggagaagaatcaatg

SEQ ID NO: 35897 - DNA, 438 bp, Oryza sativa
  unsure (1)..(438): unsure at all n locations
agcttcaaggatgggaaatggtcttgtcgaagatcatggagttgaggaaggaggagatgcattggctaaagaaagatgtatacacctcagttatgcttatatctgtcttctttggagctcctgcttttgttgctatggtcacctttggaagttgtttgcttctaggcattccattagaaacagggaaagtattgtctgctctggcaacgtttaggcagctacaaggaccaatcaatagtatcccagacacagtctctgtgatcatccagacaaaagtatcacttgacaggatatgctcttttatgcacctcgaggaactatcgagcgatgttgtaactaaacttctaagaggtacaactgatgtatcgatngaggtgaggaacggtcagttctcttggaacacaccttctgaggttcctactctccgaaacttgaact

SEQ ID NO: 35898 - DNA, 377 bp, Oryza sativa
tcaagtaaaactgagacacaagtttaccttagtgggacatgcatgtgaagtaccaagcatcattaatctttcacaatcagttggattcaaactccaagttaaaaaggaagatatgcaagaaatcacttgactcacttcatctcttttcctatttagctacagcaaactgaccaaaggcaacagacaatccaaaggaaaatgggagaaaaaggaccacagactgctcgattgctactttgcaagacgatccgttgtgacatccatctcccacacagctacactcctaaaactgtatcatgtacacataaaccaagctccacttgatatatctatcacacacttcaccatctcaatgtcattggcgggattgtttcaat

SEQ ID NO: 35899 - DNA, 428 bp, Oryza sativa
  unsure (1)..(428): unsure at all n locations
atctctaagtcacctgcggcatgcaagcttcttgtatcccaagctcttatagttccatctgaagaacaagaacagattacttgtggggatgatggggctgaaaaggaaatttcatggattgatccgctgtgtccagtgcattcacccaaaaattgcccagttgctggagaatataattttagtgcatttgttgacaaggaaaccgcgagcgtagagttctcctgacttgttaccagatatatgaaataagatgcagagggcataagtcctatagcatgcataatatcagcagtacataccacatacataaaaaagatgaaaagagaaaaggatgagtatggataaataatttgtgatgaatagagaaaagtgttattacggataaataataatgataatagagtaaatttcacacnnctncctgtttc

SEQ ID NO: 35900 - DNA, 483 bp, Oryza sativa
actcatcttgtgcaataagattctttgcctagatattgggactacaatgtctttgggtcttgcattccttatgcccttctacaccaaatataaggccagaattaattgtacatgattaatataacgccagaataactgtatatgaataaaaggatgagaaatcttatctttcatccccacccgcccccaagagtattttattatatcccctatactgatatattgcgagtgaattctgggatgtcttatctggataggactctatgttcgtttcatgttttgtgatggctttggttggtaaggtttggtgctatctctattgataatgatggaacaccactccatttagaatcagagttgaattgcttctatccattcaagatgcagattctaattccatggagttagtatgggcatttttgtactacgtgttccttgctttctacttctaacttttgccctcaccaactcattagtttaaca

SEQ ID NO: 35901 - DNA, 362 bp, Oryza sativa
gcagctgcagctgcaaacaacgggaagcgagacgtattttttcataccctcgaaaacagaaggggctaccaatctaaggcgagtctggccgggctgcggctttaaaagtaccaggggtcgtactcttaaacagcagatgtgaaatatgggtcgaggcctctcggataagcctcgctaggatcaacagctgtggcgtttgaaacagctatgcccgcttacaagaggccccaatatgtcacacacatattggatcttcttcctctcaccatcatgggatgcccgcacttgctggagctgctctgtcgaagcgatgcgccagacaaagcgccggcgaagggcggacgggcggacataccccaacc

SEQ ID NO: 35902 - DNA, 519 bp, Oryza sativa
  unsure (1)..(519): unsure at all n locations
ttaaatctaagcttcacgctcttttgatgggccttaaatcataatatccgactgtcattttctgcatatgagataaaatatggtatcctacttagtggtagggattattactaatcatttccactggtgttggtgaaatatgtgtatgcaggtgttttgagaaaaaaaaacccttcatgcgacaaaatacaccttcggacaatcagaacacatttacacggattgtgtaagatcaaagggtggtttgattcttattctgtgatgaataattggcatctgtgattattggttttaatatttggagattatcatcgaagtggtcatgtgtgcggtctgaccggccaagcccgcggtctgaccggccgacgctgagtcggtttcggtttcgggttgtttctttggatatccgtgaatggtatcatggtatggcttctagatggattcgatacgtatgtaatactggtgtttgctaacaatgagtcaagtanggatagctgggtctcgatatggttctttgtg

SEQ ID NO: 35903 - DNA, 475 bp, Oryza sativa
  unsure (1)..(475): unsure at all n locations
ctcgtatcgcgatccttaagtcacctgcggcatgcaagctngaatcaagagcacctcgttctgataccaattgaacgcgcagagatatagcctagaggggggtgaataggctttcctgaaattttctcgacaatcgcagtggttataataacagggcccggaacctcctggtgaagaacaccggaacttctggcagtgatgagcagcccggaacttccggagttcttgagccagaaacttccgggcaacagagaaaatcgaaatttggggaagcaaaacaggtcctagccagagatgatcagccacagagttgcacaagatgtaaatcacaagataccagcagattcaaacacagaacatgctcaagagagacaaaggcgattntttcccgaagttcggatcacacggatcctactcttcgttgaggtgctcaaagagccgggtctcgattaaccccttgctcacttgtggaaag

SEQ ID NO: 35904 - DNA, 448 bp, Oryza sativa
  unsure (1)..(448): unsure at all n locations
ctacttgctttctagcttattacctggcatgccctttgaaagataggtgaagcatacttattcttttcccccgggatatttctgtacactagctttcatgcgtaattataaatacttgctcgtcacatccaagctggctcgtcgctacatctctagttacataaagaaaaagattactcttttttatagaggaatccctaggtggaatttgtgatgtaattaatgctctctaactaactcaatttcaagtcatgcgccagttgattgccgttataggccagggccagttggaaagtatgcattagatagctagggctactagggctaagaggaatagcttnntgatcagtgcctgctaaaaggcctttctttcattatcggaagttctttcttctcacctgatccgcacaatgccaccaaaggtaaggatcatcccatacagagtaat

SEQ ID NO: 35905 - DNA, 405 bp, Oryza sativa
gcaagctagataccagggtcgtaaccgtgataaatgtatatcttgcaccagtccaaacagaatgtgcgggccatgtcctgacgaagtacagtgacgcgttgtacgcaggtaccgtgccccgggatgccattctacgagagacagctaccgatgagtaggacagtgctctatgatggggaaccatgtgcagttgtattccgataccatgcgtctaatagctagttaatgtataagaggcttctactactgatgtttctcagaagctcacgagtacacttaggctcttaccacctaattgaattacttggatattactatctaacctgaacgcaagagtggctggtagctaatttccttcttggaacacaagacactgctatggcacctaggcacctagtttgtttt

SEQ ID NO: 35906 - DNA, 400 bp, Oryza sativa
  unsure (1)..(400): unsure at all n locations
ctctttttttgaacgaaccggcactaagcgtgccaatattaagttattatcagcttggagaacgagaactccatggttgaccgatgcattgtggtatcttttgtatgtttttttgggtaggtttggatgagaaatgccacgatatgtccgagctcttggattcttcccctgccgtccgcaagagcttttcatgcacgtagtttgctgcgtgaacattgcatgggtatctgatcattntggagaattcgtatgcaaacacattattacgctgaatacatgatgcagctaagttgatgaaaattgttntcttggtttcaaatcgccattgcgccacaaaaattgagagcttgactctaagctgcttggatcaccccacacgccgttcgatacccgggaatac

SEQ ID NO: 35907 - DNA, 392 bp, Oryza sativa
agcttcctctatgactgctgcgatgtgagcttctatctgttcaatttctagtgagggatcaatagctgctgcgaacagaacacagaccacgtatatgaactctgtctggtatgacaattgccacgcacaataaaaggcagtcaggcaggagagtatcttaccagcttcaatagcttcaatgctaaactcctctgcataaccttcctcgccaacaagatgagcacgtcttctatgctcttctagatctgctttctttttaaaacaagatctttcatcttacttgctttcagttgttcaagccttaacacctcagattcgacctacagatataaatatattcgacgaacattcattatctaataaaaatataacactgtaccaacataaatttt

SEQ ID NO: 35908 - DNA, 438 bp, Oryza sativa
  unsure (1)..(438): unsure at all n locations
ttttcctcatcaagaggcagctggtgaatggatgctaaggagggagcataacttgcaggtcctagaacatcctctatacaagggtttgtgcaccatggatggtttcccttattacataaatgttacctctggtgaaatatccactggtagtgctccaactgtacatgatttttgtggaggtatgttatgtgatgaacctgngttatggaagacagtgactgcactgtctcttattctgaagacacatgggactctggcagtccctccaccagggatgaatgttatgtggtgcatgcataaaccagataaaaaatatggatactacgagcttagtgctagcaactcttctaatggaaacatctnttttgtcggatcaaaaaagttgcgaaaggacgtgattagagaagatacatgttcaagtgagtcactgaataatgg

SEQ ID NO: 35909 - DNA, 443 bp, Oryza sativa
agcttgcccggataatagccagccatgaatttatacttgggaggaatcagagagtcatacggcgatgaccttcccatgtttaagctgcagatgaaattcaagcatgacaattaaatagccttccatgatgtagcttctcgtatcttgattcttgagtatactttttgctcctccttctcaaagagaggaataatacgatggcagtacatcttctggttttttttctgtagacgattgttgcatatcatgtgtgtactgttgattagtcataaaatttgagatgaccgtttgtcctacgttgaaccaacgacaattaatttcattttgtgatacttgatatatggacgaaaataagttttgccagttgagttagaaattaaagccgctaccataattacgagtttctcggggacaacttgaatagtctttatctgtccgagact

SEQ ID NO: 35910 - DNA, 454 bp, Oryza sativa
  unsure (1)..(454): unsure at all n locations
agaactcaacttaagtggagatgtgaatcctcatagtacaacgaatctggacaaccctctatccagatttattgtattaggagagattacattccctcctagatcaaggctatgtttagatctaaggatgataagttttcgcgtgtcacatcggatatacgaacaccacattngaagtattaaacgtaggctaataaaaaaactaattacagaatccgtcactaaaccacgagacgaattaattaaacttaagtaatccatcattagcaaacattgtcaaataataaagcaattaggcttaaaagattcgtctagcattttacacgcaatctgtataattaattattttttcatttatatntaacactccatacatgtatcanaatattcgatgtgtgacaaccatgaaaaattaacaggggatctaacaggccctaagtatttttgatggaaa

SEQ ID NO: 35911 - DNA, 444 bp, Oryza sativa
  unsure (1)..(444): unsure at all n locations
agctngcagtaagcatccgttgaaataacagtgtgtgttcactatggagcctaaatctaacatcctagtttgtagcgtcgagtacaaatctagcgcagtcctcaacggtacgaaatacagcggagaaagtgtagcattgtgcatttcagaagcaaacatttatctccatcaatccaaataccccaacaataatacagtttgtccgaggagaataagttgaagcaccaaccttactacctagctcctgagagatgccgagagcgagggccgtcttgccggtggcgggcgggccggcgaggagcatcgcgcggccggccatcttcttctggcggatcatgttgaccaccaggccggncgcctcccgcgccgncgnctgccccacgaaccccgaagccagccctatcgccgccccattggcctgctcgatgaaaccaaaccaacaag

SEQ ID NO: 35912 - DNA, 449 bp, Oryza sativa
  unsure (1)..(449): unsure at all n locations
agctngtcgntcttccactgtaccctcaatactccatatcgacaagtggatcaagcatccgtgttctccaaaacattgtcaagtaggctgctttctcatttgaattctcatctagtcatcttccatattactagatctttaaattctaatctttcagacgctgtagatcattaaattataatatttcagatgctgtagatcattaaatattaatatgatggcatcatgcagggaggattcatattttgctggattgccaatttccattatcgaatcatggtaccaacgtgacggttatgtgaaatcaatggctgacttaattgaaaaggaactgtcaattntttccaatcctgaagaggtttgaccattcccttttccttctattattctccctacaagttcccacctttggattgcagactgtgaacacaatcatagntatacctttt

SEQ ID NO: 35913 - DNA, 337 bp, Oryza sativa
gacaccttcacggattatggtctacggttccccactctatgagctgaacactctttaagctgcgcgcttttataaagtgacaaataggagtggcaaccctcatataactgactccgaaatatgatatggttgcgtatacaccactcttgtctcgacagaagtatatactctctcttccgtaaataaaaaaagaaaaaatgtcatctacctgaaatgtctggaaacatgttatggtgtaccttgacctgctatggtgtacgttgacctgttatcgtcgtgaactgtatccgtgctgaatttcagctattcatctcttccttgcgtgtcatttcttttt

SEQ ID NO: 35914 - DNA, 444 bp, Oryza sativa
  unsure (1)..(444): unsure at all n locations
agctntngaaatatccagtttaaagaagagtgattgagtccttctttcttgagaggagtaggattatgttttgaacataaaggaagatttcatgaatcaatctcttatgaatgaagataatttgattcattgacaccaactcatttaatctaggggcaaggcgattagctagaacttgtgccacaattcgggcaaaactgtgcatcacacttattgggtgaaaatgctacaggcttattgcccctttattcttgggaaaaaagcaaataaatgctgaattgaaatactcaagtggtcagtgttgtttgctatgaagaactgtactgcctccaaagatcgtccaataatgttatcctccactgtaatactacctccccaggatataagggatttggcaatgcagatcccgtatattattggatggatgtagtatcttctttctag

SEQ ID NO: 35915 - DNA, 477 bp, Oryza sativa
  unsure (1)..(477): unsure at all n locations
tgaaccgaagttntcataggtgagaactgagtaacttgttctctttctcatgcacgttgggatggaggaacaggtgttcaacgtttaagattcttcttacgactggaatgttgattttagtggataataaaaactcaaattcattctttaattgaaaacggcgatccggttggtgttggttacactatgacaaatgaacgttatgcatcaaatttgattgttgttggctcgaaatgtgaacaatctcatccacaaaatcaacgacagatatattttataaaaatcgtgcaaaagtcacatgggcagtacaagaaagaattacatgcaaatattacagtaggaaagtggaacttgttttgcattagattacaattacatggaagcacatcgaaaatcccatcactatgttacaattgctttctactgctccactatttacatgatctgacactgatttatcatgaagctatgagcctt

SEQ ID NO: 35916 - DNA, 313 bp, Oryza sativa
  unsure (1)..(313): unsure at all n locations
gtcctcataatctctagagaccaaccggctggtttattcatcatcaagaccagacagaaacttctgctgcctctcggcatccgtacgcacgtactcatgggcgtaatgcgcgaggcggttgaactcatgcaaatactctataactgttctggttccttgttgcaaggaacggaactctctcttcttttgtgccacaatttcctcgggaacctgtgctntattgaaactatgacaaaactctgtccaacgtacttctgctccaattggacgggtcaccatgtaattcgtccaccaaataaaagcgggaccttgt

SEQ ID NO: 35917 - DNA, 446 bp, Oryza sativa
tagcttagcaagtgtgagttctggttgtccgatttctaattcttgaggcacgtgatatctgctataggagttgctgtggatcccgaaacagtgaccgccgtcaccgattggaagcaacccaagacagtcactcagattcgcagtttcttgggattggcaggatactaccggaggttcatcgagaacttctccaaaatcgctcgacccatgacacagttgctgaataaagaagagaagtttgtgtggagcccgcaatgcgagaaggcgttccaaactctcaaagaaaagctggtttcctcgccagcgttaatcttgccggatactcgcacggatttcatggtgtactgtgatgcttcgcgccaaggattggggtgcgtgctcatgcaagacggtcatgtggaagcctatgcttcacgtcagctacgacctcatgaaccaactaccct

SEQ ID NO: 35918 - DNA, 276 bp, Oryza sativa
tcgagctatcgagcggttgcgccctctcagcaaaataaggatgtgcaatgcgtcatcggttgctaggacagcctatatcgttcatatttaagttgggagagaaagcgtgttgcgttcccaatcaactctgatatatcttcttcaaattgtgcaaagaataataaaacttatgtgaaagcctcctacaattatatgtgcatagataaaatataaatgacgcttggagatttttgtatatttctatagccctatagcttaaacaatattagtgatttt

SEQ ID NO: 35919 - DNA, 434 bp, Oryza sativa
  unsure (1)..(434): unsure at all n locations
agcttgttcctcgacggatgcttcttttaatataataagtattcgagatctccttatggtatctaatttatntgcttgagtgagacatattcacatcgttatgggttcctcgcttagttgaattattaagtgctctagtactaggactctggataaagaaggaagttcctaacttcctatgcgaggctagagtagtaatcaataacttaggcatggtgtctaggttagcggttacattcatttgttgtgtggtccacggaaagtgaggtangtgctangtggtgacagctttgtccgtcctttacatccctccatgttcagttacatcatagagtcatangccgaactcagattgacagactaggggagagccagtgcccaaagcaatcgataggggtttacctttaactccagtctagtagaataacccatag

SEQ ID NO: 35920 - DNA, 402 bp, Oryza sativa
  unsure (1)..(402): unsure at all n locations
tcggatttcagtagttctatggcattgtggttatagtcattagaatgaacaggagcatcagagactgaggattctgaagctaagtcggatgctgcacacttgatcattnttcgtcccatgtaagtgcctacccttacagatccgtaatctcccccaccaacactaccaattcaagcaatagtagaatactgcaattagctccaattcttgcaatcacaaaagttcagccttgataaattgataacaaaaggcccggtctggaaaatnttctacctatgccgtatccctgagtccagaccccaaaaccgcatatgattaggaatggcaaccaattccttcacttctgcaggctgcagcaaaactgcgatcaaacaaatacagaagcaacattggttntttcac

SEQ ID NO: 35921 - DNA, 468 bp, Oryza sativa
  unsure (1)..(468): unsure at all n locations
ctgcggcatgccaagctttctgaacctgtggtctcctaagntaccttactgatgtgttggtttgatactgcaaacagccgtcctgatgctccacacggtgccgatcttgtatgacaagtaccaggataaggtcgaccactttgctggaagggctcactctgaggcctgcaagcactatgaggtgctggatgccaaggttttgagcaagatacccaggggcccggtgaagccaaagaagaactataataagttgcgcaaggagactcgattcggaagggtggcgtcttttgtcgggtttgcgagttctcaggtgtacccaactgcgtcgcgtcctactgacggtagcagctgaatgttcgttctgcttgatgggaggtttgctggctttgctgctgagtgcttcaatgatgccaagtcatgttcattctatcttgaagcctgtatctaaaatatctaaacgtgactgaa

SEQ ID NO: 35922 - DNA, 370 bp, Oryza sativa
  unsure (1)..(370): unsure at all n locations
gagtcctgttgatgcaaccttgattaggattatggaccaaacaacaagcaccaaaattgactgggaatgactgcctatgctttacaaatgactgggaagagacaaaagcaatctcaacatttgtgcattagaaaaataggaaaaaggaacaccgttttacatactagaatcatatcagtcaccagtcgatgtgctaaacataaaaaagaagtgtatttaaactggattggcaagagtgaaacaaaaactaacactataatgtaaagaactgtacagttntaaactgaattggatacagcgtgcatgtactaaattgattntgattattantattcatactcaaataaagcttgacagtanaatggagcat

SEQ ID NO: 35923 - DNA, 459 bp, Oryza sativa
  unsure (1)..(459): unsure at all n locations
agcttcanaatgttnntnttataaaaaatggattaaaactcggcctctatattcaacatggatgtacgcagccaaaagagcttcaaatgatacatacctctcgttccagattctctgtctgtgccatccagattattattcgcaacatttctgtacgaaatatttagtcttgtcagtatgagttaatcangactgtttctctggaatttaactaatcaatacatgaaaaacaagcatgtaaaactcacaattcaactaggttggagacaagaagagagaggatttccaacggcacagtgccagtcagcatattaccattcaaccgcctgcaaacaaatttaaaaaggtatatatatagttctgttgatttgagaagaataacatatcaaagttgtatgcttctagttgaaggtctttaatactggtttgtaagctttcatcccctgaattnttatatca

SEQ ID NO: 35924 - DNA, 464 bp, Oryza sativa
  unsure (1)..(464): unsure at all n locations
tctcggttctggtctctgccgagcattgatgcaacctctataagatacgagctatagagcggatgcgcccccccagcaaacttaaggatgtgcaatgcgtcaccggttgcatggccgccctaagtcgtttcatatcaaggctgggagagaaggcgctaccctttgttaagctcctcaagcgctcggggccgtttacttggacggaggaagctgaacatgccctcactcagttaaaggcatatctcagctctcccccggttctagtcgccccggagccaaatgagcccctgctactntacttagcggcgaccccccaagtagttagtgcagcattggttgtggagcgcgatgaagacaatcctcatttcgtgcacccncattctgtgctaacttggcccgggagcgagcatggaggaaaggcccccgtgtcggacggtggcctacggctcctgacgaccggagtc

SEQ ID NO: 35925 - DNA, 456 bp, Oryza sativa
  unsure (1)..(456): unsure at all n locations
agctntattattcttgggatccggatctgntattcattcaatggaaccctctgttggatattcaccagataaaagtcagaatatggttcttatgggtggcttaaaaaaatacattccaattacaagaacttgttttttatggggtaccctttctctttgtggtattccacctcttgcttgcttctggtccaaagatgaaatccttagtaataggtggttatattcacccttttttggaataatagcttcttttactgcaggattaactgcgttgtatatgtttcggatatatttacttacttttgatgggtatttgcgtgttcattttcaaaattacagtagtactaaagaggattcgttgtatacaatatcgttatggggaaaaaggatatctaaaggagtctatagagatttcgttttatcaacagcgaagaatggagtttcttttttttcaca

SEQ ID NO: 35926 - DNA, 436 bp, Oryza sativa
  unsure (1)..(436): unsure at all n locations
tctaaagagatactggaaagatgtgatggtatacccctagctttcatttccatatccagcttcttggctgatcgtcaatcgttatatcactggaatgaggtaaaaaaaattatcagttctccaataccaggaaataaggatcttgagaccatgcaatcagtgttagcactcagttattacaacctttcacatgatttaagaagttgcctgttatacttgagtgcattcccagaagattgtgaaattggaaagacccgtttggtaagcagatggattgcacaaggatttatcaatgcaagaccaggagaaaatctatatgaagcatggctgaggtatatcaatgtgctgataaaccagagcttgatccaaccatggaatgagcactacngtgaggtgctgagctgccgtgttcacgacgtcattcttaatttcatag

SEQ ID NO: 35927 - DNA, 460 bp, Oryza sativa
  unsure (1)..(460): unsure at all n locations
agcttgtgtaaccatggaacagtacaacaccagacatcatgattttcaagatctcctagacaaaaatatgttactgtggaagtacatctgactgcctctacagagaagtaacttgctctaacattatcactttntcatgcatactgttttctcaaactaaatttgtataccatcatatgagcacatggaaattgcacctagcagtggcaagatataagctaggaagtgaaacaagtaattattacctccaaggcattgcaatgaaactgttgatgcacctgtctcaaatgtgatttaggcatctgaaaaaagagtcaaatagctcaaaacaagttacaggactgtgaatagcaattaagaaataaatataatcaaatgtactgtaagttacaaaaaagctgattgcttctagagaattagcatatatcaggaaatgggccctactgatcaagtatcattt

SEQ ID NO: 35928 - DNA, 469 bp, Oryza sativa
  unsure (1)..(469): unsure at all n locations
tctgaggcctatactggtatgatatttcagcttttccaagattattactaagagtttcagtcagcttacattgtgactcgtgatgaaagtggtcccagccgtgaatatattggtgccattcttgagaaagaaagacggtataaagttcatggaaacccttgtgagcagacagttacatgctcatgtatgaagtttgagacacttggtttcctgtgtagccatgctttgaaagttttagatacaatggacataaagtatatgcctgataggtacatcctgaagcgatggaccaaatatggaaggtgtttgactgcaccgcangttgaaggtcgaaaggttcaggcagataccacattagaattttctagccgctatgaatacttgtgcccagtatatggtaggcttttgtgctcgagcatcagaatgcgaggagtcgtacagagtattagatcaatgttcagtagaactg

SEQ ID NO: 35929 - DNA, 431 bp, Oryza sativa
  unsure (1)..(431): unsure at all n locations
agcttaanaataaactttgatgagaaaacactattatcatctctaatatttaaattgaagatttaaatcttagatgataagtataagcataagtgaaaagataaggcctaaagaagcatggccaattactggtaaataaaaataacaatttatgattaaaacttctaaatgttgatgttggaaaaaaaactatgataaaanaaaactcaaaatcaacttcaaaatcaattaagttttaaaattaaattttggcttggtatacatatcgtaggcgaaagaagtggtgatattcgatttgaccatttttaactacagcgaccgtcgttgaaaatttaaatctgggcccctcattaaaatacccatttaagtttaaccttctgaacaaattcaattttttgtggtccgataaattaccgaaattgttgaagaaa

SEQ ID NO: 35930 - DNA, 362 bp, Oryza sativa
  unsure (1)..(362): unsure at all n locations
ataaacaagtcggaggaacacatctggaagcacatcaatgggaagaggttcctcaacaaactangtaaataatcctgtagcgttatcttatatgcaatgccatgtgtgccaacggcctattgaactatgaactgagctctgcctttttatatatcgaactactaatttaagaacccatgaggttgactatttccatgcggctatcattttcttcatgctgtattcttctataagcatgtgatttatcatctactaatatgaattttcatcaacaatgattcttagagagaaaaatagtgaatgacattggatgagtagatgggacattttctcagaacaantatgaacggatntcatcgcta

SEQ ID NO: 35931 - DNA, 435 bp, Oryza sativa
agcttctcttactgagaggggggaaagaatgtgctaataatgagtacaaccacagtactcagcaggccacaccggcggatgcataattaatgcaagggaggtacaagggaataacaatagggattaaggtttgcagtaaacagcatttaaaagtcacttatatgcccaaagccattttgtaaagacgattctagagctacacagtattattaaacaaggccgtgaaccctcacgaacctgccttaacccaaggcctacgatgatttggaccgaactggcaacccgacctgtgtcccagctcgtcccaagccaacccaggccaaccattccatattttagttgttgagcaaattgtaagaattaaaacactgacttgggtacattgctaggcttgcccatatccgagggctcggctattcaatagatttactctga

SEQ ID NO: 35932 - DNA, 460 bp, Oryza sativa
  unsure (1)..(460): unsure at all n locations
tattattagaatttgccacgtcagaacaatagtatagttttatcatcgcgttggacgtaaattactgtaagcatgagtcaaagatgcatatgacgcgaaagtccaaagaacatggtagtactattttctttaaccaacataactatccattagaaaggactttcgtttggaaacatttttcgatactgtcaaattactctcattaatctaacattgaatatattttgatactgtgtttgattaatgttgaaaatacgactatttctttttataaacttagtgactagaanaaaacttcatacgacatacaatatgaatatganagaagggagtactgatcagaggtagctagcttgtaagagtcagtttgtctaaagagaataaagttgttaggaagaatgtttcgataggacaatnttctcatgtttgtaggaactatgttatatacagaaatntcgtc

SEQ ID NO: 35933 - DNA, 450 bp, Oryza sativa
  unsure (1)..(450): unsure at all n locations
agcttatgtcgacgatatcgtcgtaaaaagccgtatggctttctaccacacgtccgacctgcaagagaccttngacaacttacgcgtggtgggtatgaaactgaatccggagaaatgtgtttttggtgtttgcgcgggcaagttgttgggtttccttgtttatgaaagaggcgtcgaggcgaaccccgagaaaatcgatgccattcagcaaatgaggcctccgtcgagcgtacgtgaagtacaaaagctcgcaggccgaattgcgacactcagtcgattcctctcaaaggcagccgaaagaggtttgcccttcttcaagaccctccgtggcgcgggaaaattcacctggacacccgaatgccaagcagcgttcgacgatctaaagcaatatctgcanagcccgcccactctgatcagtctagcaccaggaagcgaactgctactatacct

SEQ ID NO: 35934 - DNA, 473 bp, Oryza sativa
  unsure (1)..(473): unsure at all n locations
tctatcctctcncaacaattaatctttagtaagttttgggtgaaagtgcttctgaactaccagattaattggctacttgagtacttgagtggtgaatatcttcgcaatgcataagccattaagccttgatggacagaaacagaattgcgctaaaacagtgaaaatctgaccaaacaagcaacaagaagtaaaatatctgaacacagaacaccaattaggcatttgttgtctgatgtattgtcaagaaaaatgtaatcatatcttttattggaatacctattttactcttagcaatcaatttagcatatttatctattctgaactgctactatgttcataactagtttcaggaaactgggtgttcagatattntactagaggtcataccatacaaagctatataaatggctatggaatgacaaanatataatctggtgtgctcaattaaatttcaggagaggcactggcgtgtg

SEQ ID NO: 35935 - DNA, 439 bp, Oryza sativa
  unsure (1)..(439): unsure at all n locations
agcttgctgataaattcagataaaagtggtaccacagttcaaaacttcaaagtaagtgaggccaagatccagtctcagacacggtgcatctttcccaaggcgtatctgtactgccaaaatgtaccatttctgacgaggtatttcgtgaatcattattcctcagccatccaaattgctcgcaatacaaaaacaggctaaaatgtggtttgtgccggcgactcgcaaagcgcccagggacaagagttcgctttattcccccctccaacatctgcacatnttagtcgtagcttggtttcacacctccaaccgttaaagtaccacgaatcaatcgcagaaagaaggtgcactgntggtttaattaatcaggacttgaaagttcaaaaccagcgaggggaatcagaagccagtaaacacaaaggcctccagatctcattcagac

SEQ ID NO: 35936 - DNA, 386 bp, Oryza sativa
  unsure (1)..(386): unsure at all n locations
actcaagcttcaccctcgtaagcagaggagagccgcagctctctttatctnttatatgaaagcggacaaagcggatcgataaaccacaaataaacattgtaagcaccaaanagtgctcaagaaacggtattttttgaaaccgagagtttccacgcactggctttgctgccctcctacggaggtctgctgcagcggtacgacccctgtgccaagaaggaaaagaccgagctacaccaaaaggatctgaaacagctcggtaactacatgttcaaaggtggtcgccatgggagcaaagagtgaaagagagatggaacgagcaagaaacacgcaagaagatgaaatctgcaatgccaagagtgaaagagagatgaaacatgtgatgatgc

SEQ ID NO: 35937 - DNA, 454 bp, Oryza sativa
  unsure (1)..(454): unsure at all n locations
agctntattntaggtcatggatcggacatagtatgcactatacgaaaagagctcatccaacattcttgaaggaagcagccaaatttgttgagcttgcaaaggcacatactgtgagggagaatttgaggagcattttttgcccatgcaaagtttgtaagaacaaaattttgctgcaagatctaaatgaagtattgtcgcacatcgtacaacgaggatttaacaagggctacgagatatggacttttcatggggaagttggtggtcgtaacaaagagttagataatttctgttttgatgatgcagaaaactttataatcgaagacatgccacagggaaacatcccggaataaggtggctcatgtatagagaatgaanggtattgatttgatctggaagatatgtngcggcacgttgaaccagaagtcctaactggtacaagacgagggttggacaa

SEQ ID NO: 35938 - DNA, 340 bp, Oryza sativa
  unsure (1)..(340): unsure at all n locations
tcgaagttcgcggctggaaggaaatattcttagacatcaactctaaggcccactntgcgatccgcccatttgcttcgcgattatgaagtatatccccgagtgggaacgatgtgaccaccgtgaccgagtgaccttggaagtagtgagataatttcctgacggtaattaaacaccatataatagcttttgaacctgagggtatcttgtcttggagtcagccaaaacctcggtaacgaagtagattggtcgttggactttttgaacatggccttcttcttcacgctcgacaactaggaccgtgcttacaatctgggaagttgccgacacgtataacaacaac

SEQ ID NO: 35939 - DNA, 432 bp, Oryza sativa
agcttagcttgttccttattcgcaacattctcttatgcgctccgcaattgggagataccacaccacctttgctggggcttccctctttgacttacttccttcaccttcactctttgctcggttggatcttgaggccccacagataggacagacattcaagtcagcgtattccttgtaatacaaaatgcaagcgttcggacatgcatgaattcttctgacctccatgcccaacagacataatacttgcttcgcttcatatgtcgtttgcggtaaattgttcccctctggcaacagatcctttaacagttcaagaagttctgtataactcttgtctgaccagccattactagccttaagcttcatgaattccaacacgcatgacaacttgctgtgcttcgacttgcatccatcatacaacggcatctgacaatc

SEQ ID NO: 35940 - DNA, 396 bp, Oryza sativa
  unsure (1)..(396): unsure at all n locations
cggatcacagtctcccctattgtctcctcacaagttctctatatataccctangtgaggctttccccttgtcatatcagttgttctagggtggttttagtggtttaattcgtggataacgaaggttagagaaggagttttgtttgttgtggttcgaatttggctgttctacacgttggcagatttacagtttttcggtttttcgaagtttcggagatctaaatgatattntttgcgaaagtgtataactagaaagttgtagataatatttatatctatcttctgaccaagggcgtgattttatctcaagtggtttagatgatacgaatttttgagtataactggttgtttatgtcataatctggatagtagtagattgaactatttttggatgggc

SEQ ID NO: 35941 - DNA, 438 bp, Oryza sativa
  unsure (1)..(438): unsure at all n locations
agctngtatantttactctttntagtatgctgttcatacttgtgatgccttcaacttaatntgttctattacagatggaaatggtttcaagacaagtacaatgagacttggtgctgatgttttagttttctcccgtagtggtggaaaaggtggcaaaaggttaagttacacttcatcttgacaaacatttaaaaaaaatcattntaaaagatgctgctaacatgatatgtttacaattccctaacaaccaaaatttctttggacagatgagctaccagaaagcctgtgtagttcatcaaacttgaaagcaccaaatgatatttgttcaatttagttagcaggtcaaattaatttccctggtgtaatgcatggtcaagaatttgatttaaatctatattgcatgaccattgtgttctgaaaagcanatccttttacact

SEQ ID NO: 35942 - DNA, 438 bp, Oryza sativa
  unsure (1)..(438): unsure at all n locations
tcttgaccgtgaaagatacatgtaaaagtttctatatggtttctaagttgatactggntcaagtgctggcatacttctttcttctttgttactccctaacaccgtgttggaacatcctatctactgcaaagagatttaccttgaagatgaaaaaggtatatcggtctctggcaaggtaacaaactaacaacacaccatttcactcgatgccctccctcttgtgtgcatggatgatacttgagaangtcaacgcaaggtaaacgcactagtgcactactgtgctagtaaaactttaactggattaccatggaaaattgacaccatcagttntgtgctcatgacangcgtcctangacgaacatttgttgcctcagttctgtagatcatacacattcaaccaatcctgtcatcctatgcatgcgtngataccgagaatct

SEQ ID NO: 35943 - DNA, 457 bp, Oryza sativa
  unsure (1)..(457): unsure at all n locations
cggaccttaatcacctgggctgcaacttccacaatgaaaggactctatatttctttcattcctcaagccagggactatgtaactaacggcattcacgggttgaagccaaacaatttatcattacagcaatcaatacatgatcttaacatataatgtgttaatagacctgttgtttttaacagcatgctaacaaaggatcctaggatccaaataattaaaattaacatacaatgtgttactagaaaaacagtaattcaatgtattgggctgacaatgcaaaccatgattaaccttgtaaggaggacaaagtatctctgtcatttgngaatacttattctgaaaagagaagatttagctgaaaggaanacctctgtagtatgtctagtctaatgtagaataatgaagtgaatttcctcggactaaaaattcaaactgtgaacacctcaacaagtatttc

SEQ ID NO: 35944 - DNA, 467 bp, Oryza sativa
  unsure (1)..(467): unsure at all n locations
cggtatggcggnttgcattctcgggattagtgcttacatctctatgacacactaatcctgtctatgtaaatcatcgagttatcatatatgctgtataatctagatcgatcccgtcatctaactccatcggctagcctctatcatcgaaaacggccgatagatatagatatcgatattgagctagattacatagtgtatctaccatcttgaatgagtcttcatcgatttggttaaatctcatgtttcttttcacgcttaatgctgcattggttaggttcgatattttaagtgatgtcttgaaccgttttctctagctttttcaatgaattctaatagagatagcatcggggtttcagccgatcttacctgggttagatgtcttgtgccttatatggttctcgatcttctaaatctgccctttatattaagaatcttgttatttgaagcatatcttgctctttatcagt

SEQ ID NO: 35945 - DNA, 456 bp, Oryza sativa
  unsure (1)..(456): unsure at all n locations
agcttaanacttgagctcggctcggctcgttttctggctcgagccttctcgagctggcttgtaagacttcctgttaaaacacatcttcatatatatnttgtaattattaaacaaagcaagaacaaattattaacatgtaaaattaaaataaatttatggtagaattgaagttgacaaataataacgccatataaaatgaaataatcgatataaacacaaaatggcctaggctcgcgagccaaaataagcggctcgcgagctagctcggtttggctcattttagcaacgagctgaaaaggaggcttgggcttggctcgtttggcttacaagccgagccaagccaaccaagctcgacccaagcccgagctgagctcacgagcctgagcttttttccacgactagtgatagatatttggtttggtatgtactctaacattgtaagcgactagtaatttc

SEQ ID NO: 35946 - DNA, 429 bp, Oryza sativa
gcttgctcggcactaccagtgcacagagacaagcctatgtggatggagccataggctcgaccgctaaactgctatgaatctataataatcagcgagaagtctgaacatatatggagtgtatgtcagttgagccctactcttacggagacgctagcgttagacaggcagttacctttgcatgattaacgatggaggacagggctaagattctatgtggaggacagcgtggttggtgcatctgattctgacattgcatagcaccacctataacgcactattaatgctacttgattaaggaccgttgctaacgatatcgatatctggctatctagatgtagcagttgatcaagcagcaggcgtgacatcccggactacggctgagcttgattgatagaacgctcatatccacagcgtacgacttcttttccg

SEQ ID NO: 35947 - DNA, 159 bp, Oryza sativa
taggctcataataagcattttctattttactttaaaaagatgaaaatcataagactaagtactaagtgtctgactataatctaacgtactaatggcctaacagtggatgatgtctaattgactaaccctgtaatatactactagcagccaccgggggga

SEQ ID NO: 35948 - DNA, 500 bp, Oryza sativa
  unsure (1)..(500): unsure at all n locations
ctatggaaagaaataactaaatgggagtggatatatgtatatatatgctactatttcctgcaggttcctgcctttaatttcctaattgacatattgcgataatacagtattaacatcttaataaagaattntcagtaaataatttgcaatttcctaaacatatttctaaattttatgatctaaatgtgtcaaataatcccatctttattgaaatatcacataattttagtacattggtaggaaagttaatatctcggctaaggaaatcgggagaaaatcacgcgttaccgttttccacccgttaatcagcatgattagctaaatcaaatcacgattaaatttccttaattgcatgcgcaataatcggtagcgcttccaacgtttccttttggagcagcccccgattccctcagcgcanaataaaaggggaggccggcctgtgagaaagatgacgatctcactcacggttccaatccacatcaggttatgtattcactctc

SEQ ID NO: 35949 - DNA, 441 bp, Oryza sativa
tcttatgttcgaaaagccaacgagtatgccaaggccgaagacgccgtcaccgcatcaaagcagtcaggtcccagttggaagccaaacaagggtacgccggctaagggaggaggtggaagtaacaatcataaggaccgcaagcgtaagcctgaggaacttgttgcaaccgccactcactcttctcgacagcgttcgcgcgtcaacacgttcgacaagatcatgaactcccaatgcccgcaccatcctaactccaaccacgtggccaaagaatgtttcgtctacaagcagtttgcggagcaatacaccaagactacacggaagaactccgacgaagaacaaagtacgtcgaggaagaaggatgacggcgacaccccggcaggatttcaagaaccaccgtaggagctcaaccatatctttggcggtcccctggcttatgagtct

SEQ ID NO: 35950 - DNA, 458 bp, Oryza sativa
agcttccactcactcattctttatatgttccataactctgttgtttggttgcttgtgtgctgatcagtagaatcgactggtttctcaacacgttatcagcacgagactctaccgagctaaaaaggtaaaaagaacatgtcggacatagcaaagaaggaattcgtcgagcttgccttggatggtagtaactacctcacttgggcattggacgttgagattaaactcgactacatgggtctcgatcatactattgtgctgcccgaagttggcacggtggagtctacgaaggccgagaaagcaaaggcatttcatttcttgcgccaccatctccacccagacctgaagtttgaatatatgaccgagaaagatccactggtattatggcaatccctgaaggatcgctttgaccagcagggtcaattgtgctcccacaggcacaacatgactggatcacccta

SEQ ID NO: 35951 - DNA, 504 bp, Oryza sativa
  unsure (1)..(504): unsure at all n locations
gtactnttattagaatactcntttaatacatttctggtattgttatactttccaagtatatgagtaccaactttacattatgttcttattatactgaatatactgctagcttatctgggagatgctttggtgaaggtataatgtttgcttatgcaattactctatgtcatgacgatgatattagagtagtatctggtagtttaggcgtggtgtctagattacgggatatcattatttaaggttatatattgcggatgagaggtgggccgcttatggtgacagctcagtacgggtattcctctgcgcctatatataatcctaagttaatttattggggagggtattcctacgtatttagcacccggatggatggtcatgacgggctgtcgtaaggaactctgcagtcangggtggcttctcaagtaccaggagggcatcngatagagggtattagctagtatatcagttaactagaatgtatgtatactatgtatattagaagta

SEQ ID NO: 35952 - DNA, 474 bp, Oryza sativa
  unsure (1)..(474): unsure at all n locations
actaagcttggcatacaatgatgttcccgcaactttcccaacaccagactgagatggtgctgatggtcttcttctgactgtgagtatatcagaatgtcatcaatgaaaaccacaacaaacttatccaagtattccatgaacactntgttcattatgttcatgaagaaggcaagagcattggtcagaccgaacgacatcaccgtgaattcatacagcccatatcgcgtggtgaatgcggtcttcggaatatcttcttcacggatacgtaattggtgatatccggaacgaagatcaatcttggagaatacagtggcacctttgagctgatcgaacagatcatcgatccggngaagagggtacttgttcttgatggtgacttcattgagagctctgtagtcaacgcacatcctcttcgtcttgctttcttctnncacaaaatacaggagcaccccnaggagaagtactcggacgtat

SEQ ID NO: 35953 - DNA, 441 bp, Oryza sativa
  unsure (1)..(441): unsure at all n locations
agcttcttttgtcgcttgaaagtccataaactacaactctttgagtttaaggccatcagtcccttcattatgtttctgtgcatccaggttttttaaagcatctcagcatgctaatcttacatacattgacctccgtgttccctgctgtttttggatagataacagaatccatggatattagaactagacaaggattgctcaatgctatggtaggcaaagttggaaaacggatggacaatctcttgattccattggaactactatgctgtatctcaagagccgagttttcagacatgaaagcatatcttcgttggcagaagagacaggttagccatcttattgtgccttanatgatcttgaattctacagtatttggggccaccctatcatgccttaacattatatgtttcatttgtatctttgcttagctaaacatgctgg

SEQ ID NO: 35954 - DNA, 496 bp, Oryza sativa
  unsure (1)..(496): unsure at all n locations
tgcacaataatacaataatntcttcattcatttgatctaactcattcttgntcagagntttgctacacaatcgtcttaaaaagtttcccaactcagctactgcttcatatatatccttgtcaacaaagcctcgtaaagcagcaggtaagattgtttgcacaagaatatgacaatcatgtgttttcaggccttgtaccttgcttccatcagcattaagacatcttgatatgttcgaagcgtaaccatctggaaacttgacctcccgtaaaaaattacaaaaggcaaccctttgttctttagacaaagtgtatctagctcgaggcatctcagaagtatctccttcatctctgaactgcaagttttctttaattcttaagtcactcaggtcaagcctagcattaactgtgtcctttgtcttcccatgtatatcgagaatagtgccaaccaagctctcacatatgttcttctcaatgtgcattgacatcagaatatgtct

SEQ ID NO: 35955 - DNA, 437 bp, Oryza sativa
agcttcttcgctgcacctcgtcgcccgcgtgccctcttctgtccaacggagggttgactaccactagcctccttctcctggttcccctccacatacctttccacgtgcccctgctggttcccctccgcatccctctccacgttcccttcctcggtcaagaactggtatggatcctcgttcccctcttctttattccagcactggctgcttccctccgcgattgtatcgtacaatatctgtccctcatcgcggtcagccatctgttgatacaagaaacatctgctaactcacgagacatttatgttttaacaatctaagtcatgtatgctaagggtaaatgttgtacattagaaccctacacaaccttacgtgcttagtctaattacaaatcgtgatataagctaagtctaggcgacggatattatacaaccctagct

SEQ ID NO: 35956 - DNA, 499 bp, Oryza sativa
  unsure (1)..(499): unsure at all n locations
tcggcgaagacaacagagcagcgacacagagggaggttgtatgcatactcatctactattcatctaattctctgtgttgtctccgtgcctctcctcgactttaccatgatcagcctaccatggcatgaacatttcttgctttcggttatcgccaacgaactgaagttttctttctttnttttctgtttcatttccctctatttctcgtatgcgaatatagctttggtgatcgagaggagtatttatattatgcctctggtgaagtgtttcgctagacaaatgcatttgttaatggcagtaaatatttccgttcataactctcaaccaatattcaggtgggcattagcaattagaaagagtctcttaaaatgatctccgttacatggccaanactctagcaacttagaccgaagaattagagcacttacagttataatcanaacgttaacaagaagttctgaaatatattactcttggttagagttcanatttctttctc

SEQ ID NO: 35957 - DNA, 447 bp, Oryza sativa
  unsure (1)..(447): unsure at all n locations
agctngcatgacaactcactgtactgttacttttcatgattgtttcattattgtcaccactgaaaaaggcaccacccttgcagtttctacaattgttaaaataaagcagcttgtaaaataaaagtaaattgaaatgtgttttcacaatatcatgtctgtaaaccttattcctaactccagaaaggggcaagatagctaaaaccgaaaatacttgaactcggtcgcccggcgcggggggagcaggatcgggcggagcccccgcgcgtccctctccccatgtgcgcacctgtgggcccacccacttctctctctattttttcacaaaagatgtttcacctagtgtatttacaatggttcactatttatagatctaatgttgcagtgaattaaaatactcttttgcaacanaaaaacccatatattttggaactctctataaggaatttg

SEQ ID NO: 35958 - DNA, 399 bp, Oryza sativa
  unsure (1)..(399): unsure at all n locations
tctaagtttgggtttctttatgttagtcaccaaagcctttggcacccacacacaagtgcggtactcatcattgtaatttccattaaaataagcaaccactttgccctctgaatttttggaaattacatatgaatcatatgaaagaccctctggccggaacttcctggcattatacccagaacttccggtcagccccttaggcctatcagaagcccggaacttcctgacaaaatgtccggaacttcctgtcttacagggcaggaacttccggtcattttgcccagaacttccgggtgtctgaccagtgagagggcangtcatctcacttgcttgtgaagcttttccttctcttacaaacttcaagcattctttcccatttaccatcacacgcttagacac

SEQ ID NO: 35959 - DNA, 450 bp, Oryza sativa
agcttttatgatgaccatagcagcacttctaatcaagaaacaggcaatcttttaaatcagcacttctctgataagcttaggttgggactttgtcctgccatgacagagagcaatatcatcacgctaagcacgcaaagctcaaacgaagataacagaagccctcatggtaaacatccagagtgtgacatgatggggagggaatgtctcccgttggtgccgcagatgatggaactctccgataccggcacatctatctgcccctccaagagctcttgctttgcaccacctataagtgatgaaggcctcttaacatgccatctgagtctaactcttgcatcatgctcgatggatgttgacaaaagccaaggcctcaatgcaaatgggaccactatagacaacccaactgaggcagcaacagctaccatggagaaggatgacaccattgacaga

SEQ ID NO: 35960 - DNA, 379 bp, Oryza sativa
  unsure (1)..(379): unsure at all n locations
tgctgtcgcagagcggacagcaagatctgaggccctatttattgtgcactgatacttatattgaaatgtagcttgagctaaatctttgntgaatgagttattctagatgagctgaattttggaattctatatgtgctcaggaaaaatatcagttacgcctgaaggttttagaagatggactgagagggccaccaagtggctctagtcgtctgcctaccgagggaaagagcttcagcaatggcccttctcgtcggttatcactcggcggagctgataatatgtctaaattgtctccaaatggtttattagcaaggagatctccatcttttcattcaagatcctctctttcttctagcagcagcttggtcctaaagcatgc

SEQ ID NO: 35961 - DNA, 342 bp, Oryza sativa
agcttcagcaagagggtacttgtaagtgtattattagttaatgtccctgtggttacaaactacgctggcagccgttccatattgatgtaatactgaattcttctgttaaagtcatgtcaccggaactcatggatcaaattaggaacagactaagaaattttgattctcaaagtcgttcaggtgcagcagctaaactgaagcaaagcaagatacagctgccatacatggcttgagggttcaacgcagagtcaaagttaaaaaaatatcaatatcagaagctattcatgacaacggattcataggtgcaaagatgattcgggcaatattggtacataaatttct

SEQ ID NO: 35962 - DNA, 436 bp, Oryza sativa
  unsure (1)..(436): unsure at all n locations
agcttgntggtgagcatttggccaacctaactttcttaccatgagaccatatatagagagagacatatgtgttatgtttgtatatcgtaaagntgtattttgtatggtctgcttaatatcacatttttgctgtttttatggctttatacccctagataaagcgggatttggttttttttggctaccatgtactctcctaactgaattccatggattctcatgattttgggcaaaattttgttcaaatttattttgaattccgaatccggtgaaaagcctgaatattcaagaaggggataattaataggaaaaagtccaaattaccccatgaactattgcggtcgatccaattaccccccgacaaatagcagacatttttcactgtgaactattcaaatcggacaaataaccactcaagcactgttctatgcgattt

SEQ ID NO: 35963 - DNA, 441 bp, Oryza sativa
  unsure (1)..(441): unsure at all n locations
tnctctatcttncaactctaggattaaatccattgtttgtctatcatgaacgagtctggagtggagggaagtcagcttcatctctcagctggtagagtccatctggtctgcagattttcattcacaaaattatgcactttaattagcagagaaatgcaacagcaagattgtatcatgaagagcaaacacacaagattgcaatgtaattaagcatcacataaaaaaaattagtccatgagataggatcacctgctttcggtttcagcaggccccttgctagtaggcagagggaatgcttctccgaactttgcacagggggaactaaatgggataggtctgaaagattcaacctcaagattntcatcttcgttttgtttgattgagtgaaaaacatctgttgctggtgggaanggctgacangtattggattcttggagtaaa

SEQ ID NO: 35964 - DNA, 444 bp, Oryza sativa
agcttatacctagaaaattgtggaatcaaagatatgcctaattccattgaagaattagaaaatgtaagggtccttagttctgtgtactgcacggatttgcagcaactgctaccgtcagaaccatatgggaagcttcgcaacttacagaccatcactttaacattttgtacggcttttaaacacctgccacagtgcatcactttattgggtcatctacaatatgtagacctttcatgttgtactgagcttagagaattgcctgaaggcatatgcgccttgaaaaagcttgaagttttgaatctagagagatgcatgagattgtgtggcctgccagcacgttgtgggcaactgattcgtttacagcagatgggcttgtttgttataggagataagactaatcatgctaggatctcagagctcgaatagcttgataagcttaatgga

SEQ ID NO: 35965 - DNA, 372 bp, Oryza sativa
actcagctgttggtgacacatgtcagctgagcagtttctccactatctcctgcgttcttcgtgacacttatgagccatttcaccagacatccgttgcaaaagacagtgttgcatatatacttgttgaaaactcacagaacactgacttagaaatgatatgctcctggatcaaccttgtgatgaaatcacaagttgatcctgtgtgatcatagcagctcagctttggacgtgtcaccacaactcttgacttgttggccgaatgctgtcttctgtcaaccaatcaatttggcatcaatgtcatccctgacttctccgcacggagtcataccttggctgccagttgtctcctacgtgagtaccatcaatcaatgt

SEQ ID NO: 35966 - DNA, 448 bp, Oryza sativa
  unsure (1)..(448): unsure at all n locations
agctttgtatgctatattcaccattcttgatatgcttctggacagctctagctgatgatagctntacccaaagagaaacttatattttctctgttatgtgcagatggctgaacctgttatgatgggagcagtgtatcctttgcctttntttttgtttctttgatccttgtattctcttgtgcataaaaatattttttttgactggatgcataatatattaaactgtacacttacaactggtttgtcttgtgcaacgcgtgcctcatatttgtactagtatctttgcccattcttttactttcatatagttcaaatagatatgttcatttccctgttttggaacaatcgatagttccttaacctgcggtatagtcagatctcgtttttacttgcaagatcaatttttgttgatctttgcacagcgattcttgctttgctagcaagagtg

SEQ ID NO: 35967 - DNA, 450 bp, Oryza sativa
  unsure (1)..(450): unsure at all n locations
gagatcggactctaaccgagaggaatcgaagcctgattaatctanggttagtttggagagataaactcaaaacgaattcgattcggtttatccgggcaaaattgatctccgaaactttaggggaaagggagaggataacgaggagatgatttcccctcaagcaatcggactcggagatggccggttgttgcggaatcgacgaggaggcggcggngctcgggcacggctcggccggccggaggtagaagaagacccgacatgtgggccccacatgtcggcggcttgagaggagggggcggtgcggcggcacggcctgggccggtttgggccacaaggcgcacgcggctgagaggggagttaggccggaaatggcccaacggcctangggagggttttaaagactntcatttaaaataattcgtgaaatgatggtttcatttataaaaatac

SEQ ID NO: 35968 - DNA, 419 bp, Oryza sativa
  unsure (1)..(419): unsure at all n locations
agcttggtttcacaagcggttaagatacgntgaccgcctatcgaaaagatattcgagcgaaagaaagagaattgaaaatccgtttcccgaccaccaagaaaaattgattttggagaataaaaaacatgccggatcgatacccgagctccgccgccggatgcgtcggccacgccccaccaccccgagccactggatatgagagaggggaggagagtggaggagccgcccagagcctatccatcgttgcagcagccgctgctgtcgtcgtccttgaactgggtgacgagaaccaccgccatcggatccgtcctctccaccatcactgctaccgatctcgccgccggcgtcgtcgtagcctccaccgctctccgcgcaccatatctgatagagggagatgggtgggtggtggcggtggatga

SEQ ID NO: 35969 - DNA, 372 bp, Oryza sativa
  unsure (1)..(372): unsure at all n locations
aacatgcccttgtcacacgatgagggtatgacccacaagaactccacggaataaaatatacgactttgacttaatggaaatcangatattcagcaatagaactcaacggcactgtgcctaatggtagaggccagagattcttttgtggccatttctattatctaaaagaatggaattcaggaaatggaagatggtatttcgacacatagaatccatgagaagagaagtgtaatggcctgttcgtgcatcggtacccgccttctctagctccataattgttgaagaagaatgctgataattaagatggtggcggaggggagaactaagaaatatcccgctcataatgattcacttgactgttgacagtataca

SEQ ID NO: 35970 - DNA, 426 bp, Oryza sativa
  unsure (1)..(426): unsure at all n locations
agctntattattcttgggatccggatctgttattcattcaatggaacctcttgctggatattcaccagataaaagtcagaatatggttcttatgggtggtttaagaaaatacattccaattacaagaacttgttttttatggngtaccctttctctttgtggtattccacctcttgcttgcttctggtccaaagatgaaatccttagtaatagttggttatattcacccttttttggaataatagcttcttttactgcaggattaactgcgttttatatgtttcggatatatttacttacttttgatgggtatntgcgtgttcattttcaaaattacagtagtactaaagaggattcgttgtattcaatatcgntatggggaaaaaggatatctaaaggagtcaatagagatttcgttttatcaac

SEQ ID NO: 35971 - DNA, 428 bp, Oryza sativa
  unsure (1)..(428): unsure at all n locations
tcagattctaatggagtttttctatctttatttatctaacatcatcctatatctactgtactagtaccatgcatgtttgagcatttttaatatttggtgttcattcgagtttcatttaaatttgaataaacgacaaagttacagccgtggaggagtgtgagcacgaacctgatacttgtgatgagttcactgagtaaggcaagtcctattcaattcctcctccgatcatngtgtatgtctatattttcgtaatgcaatattgtctataacttgtatgcgatgttgaaaaaattgggtaccgatagaacaactcctacttgttacattatccaccttgaattattggtcatattcctggtgatatacctaggatgccttgtagtagtgtccaagtaccaattntagtatattcgagatactaatatagc

SEQ ID NO: 35972 - DNA, 445 bp, Oryza sativa
agcttgttacaagtctatatatgtccggcctgtgtttgttgtcaagttcatgacttcagttagagctgattagtggtatgcattctcttatgtcttatcacttttttaaaaataaaatatttatccttcggctattcatccaacatccatttttctcttttgttgcgttatttgtgaaggataatattgagtgaaaacaaacaactatatattgagctttgctggcctagatgtaaaacgagaattaaatttagtgtaaccctataaaaataaaaagagaattatcagggccggccttggtcctatacagtcgaggcgaccgccgggggcccatgacggtggaggcccataatggtggggggccaacacctaatactagctatttagtacctcatccaatgttgagatcaatgatgtttattcagaattaaacgtgctgcaagcg

SEQ ID NO: 35973 - DNA, 467 bp, Oryza sativa
  unsure (1)..(467): unsure at all n locations
tcctgtctagcatctcggtgagcatcctggacttcttattaagcacatgcatgcatgtatctagcgaaaacgaggccccaaagcagcatgcagtagcagcctaagcacagccgtcgctcagacccgccgccggcgctactccaatgtcccataaccaagaaaactagaggaatggaatcgcgagagcttggtcttcattntatcttttgacctcaacctcaagcgagccaccgtttgccgccggcgagctcgagatcgacctcagccatggctagctctgctgtgtctagagcagagggatgacttccgtgaattagattaagcgcagggatccgtttacaattgtagaaacacactgacatatgggcctaggactgcgggttgattcctagaaaccccaagggcctttgtgcatatnggtccctcacagccatgtggaccccatcctttaaaatctgaagaataat

SEQ ID NO: 35974 - DNA, 376 bp, Oryza sativa
  unsure (1)..(376): unsure at all n locations
agcttcgatcagagcaagtacctcactatctaactgcttatcacataaattaatccctgagtatgggattgtccaaatctgacttgctagtagaatggaagcggtgacaggtccgaacgtatcctaacatacaactttccacaagggcgtngtaccgatcatcgtgttgggatcacgcaccactccatataagatgtatggagggggagagcttggaaatcttcattgatgcgactctcctgcgttatgaaaaggacgcaatcgcttcatatgctttttaagtcatactgggtttgtgggttcttttaacatcaactacctcgggaccaagcagagaaagaaccatgtgtacatcgcactgaaccggcagagacaa

SEQ ID NO: 35975 - DNA, 508 bp, Oryza sativa
  unsure (1)..(508): unsure at all n locations
cgacatgtattaagccacatcattaanaaataatagcctttatattcctctcatgttttaatctcaatcatccatttgccatatgcatttatagcccataaagtataattattgctataaaacttaatgtgcattgaaccatgacaactacaaactaattaatagccactggatcactctcatgtttgatacataaccatccgtgtgtcatttagaattacaatttcacatcaactactacaagatattgtccatttagatattacgagtacacgatttatacagtgttttctttaagnttttttaagtatttctaaattctccgctgcaactaagcgggtatctactagtttaattggatgtgaatcctgatgagcatatgaatnggtgagggcctagtatgtggccgataggagtctatataacggnttcctactctagaaaggctatagaaatctctactctcttcatcanaaaaacgaatctagaanttgaagtgacatattct

SEQ ID NO: 35976 - DNA, 445 bp, Oryza sativa
  unsure (1)..(445): unsure at all n locations
agcttcatcagttccaacacgcatgacaacttgctgtgcttcgacttgcatccatcatacaacggcatctggcaatcttccaccaacttactaaacttctcataatctctgtcgttgtcctctgcgtcttcaatgtcatgcaacattgtagatagacattgagtgtccaaatctatggtctctccacctaaaggagaaggtacgaacatgccttctcgagctgcggcggtgttctctacatcctgatccaacacttcttcagctgcgacatcaggcgcctcttgctctccatgcttggtccagcaggtatatttcttcatgaatccatttattatcaaatgagcatgcacttcatccttgtcttcgatcatctgttcattcttacagtccctacatgggcacaacatgtgcatgctcatcctactttntctgtcattatccgcaa

SEQ ID NO: 35977 - DNA, 472 bp, Oryza sativa
  unsure (1)..(472): unsure at all n locations
actcagctatcacttcaaagaaactcatgtagaggcactnttgtatatgttcctctaanatcaagaattntgaaaagtagagacacattntagagacattnttaaaatgcctagaacactnttactctagagaaacttttgagacatttttagcatattttttaaaaattctttctcgtagtggaattttttcggcattgtgtgaaagtggtgaaaactgataaaaaaaattcagaggatggtgaagttccttatataacaaatcaatgtatatttgtctggtgtcccccgctagccagtgcacagcgctggcccggtggcactcggcatgaaatcgaagttgcggctgcctctcatggagtataccttgctntactccttagtctccgaactccataatcacacgtagatgccgccggtgcgtggtggggacccgctagggtttcgggctatttcttntttagaattttat

SEQ ID NO: 35978 - DNA, 440 bp, Oryza sativa
  unsure (1)..(440): unsure at all n locations
agctngatgtntcatttacatgagtggaatgtttcaatcattattgtttcatcatttgaatcgcccaaaacatttctggtcaagtagtgaaatatnttttgagtaatatgtgtgcctgatttgcagtcaattcaatactccctttgttcccaatactctaaatgttactaataagctatggcataatacattatcaataactatagagntattgcataatattctatgaataaatatacaattaaattcatatgaaatattttcaaaatataaatctaatgatgtcatatgtgtgaaactaaacatatatatttgaaattaattactattcaaaagtagtaattgttgattttccttaaaacatggacattcttgtaagctagagcatatatntttctactcaactccaaaagtaggctatggcctatagaagtcattga

SEQ ID NO: 35979 - DNA, 476 bp, Oryza sativa
tgagtgagcgagtgagtagtgagggcaaagtgtagccaatctgattataaaatgtgtcctgggaaaggcacgaggatgggagcctaccatggcggcacgcgaagggcagcgtgatgtcctgcgcctccgcggtgtgcagaatgtactggtcctgcgccccccaaccacggcacgaatcatacaaagcacaagaaggagaattgcgctactgctgcttgagacggcatcgaaggtgtgtgtgtattgattaacctgtgggacgacgaactcgtggacgacacctctctggcggtcgtggacggtgaccttgtgggtgggagcgggcgaggaggacgagtacgccctctccgacacggtgccctccacctgccgcagcccggacgcccgcgccttcgtcgtcgtcgtcgcgccccgggcgggtcggcgagccgtcgtcgcggcgaacggcggcgccccaatgcgagttctgacgatcg

SEQ ID NO: 35980 - DNA, 353 bp, Oryza sativa
  unsure (1)..(353): unsure at all n locations
agcttagcaagtgtgagtgctgggtgttcgatttcnaattctaggggcacgcgatatctgcttaaggagntgctgtggaccccgaaacattgaccgccgtcaccgattggaagcaacctaagacagtcactcagattcgcagtttcttatgtgtggcaggatactaccggaggttcatcgagaacttctcctaaatcgctcgacccatgacacagttgttgaaaaaagaagataagtttgtgtggagcccgcaatgcgagaaggcgttccaaactctcaaggaaaagctggttttctcgccagtgttaatcttgccggatactcgcaaggacattatggtgtattgagatgct

SEQ ID NO: 35981 - DNA, 408 bp, Oryza sativa
  unsure (1)..(408): unsure at all n locations
cctacaactcctactccaaccttaggctgtgtttaattccacgctaaaattagaagtttgactaaaattgaaagtttgaagaaaaaagttagaagtttatgtatgtagaaaagttttaatgtgatgaaaaaattgaaagtttgaagaanaagttaggaactaaactcggccttacaatgtggatggttcagaaatgatctggaattcgggtgttccgttctccaatctggaaacagcctcagcactgtccaggttcagataanaagcctcataaatgttcacccccaaatgacctgaaagtctgaacgaattgaaacacaggagcagcgccggtgccagaaagtgacctgtatgatgccgcagcatcagccgccgtcttcctcgccttcaattccttccacgttcact

SEQ ID NO: 35982 - DNA, 444 bp, Oryza sativa
  unsure (1)..(444): unsure at all n locations
agcttacgatccgttcgccggaagaaaaatgtctgtttaataaagtaaaaaaagtagatagtataatcggcagaaaaatataaaatataattttctaccataaaagataaagagaaaaactactatctatcttatacttaaaagtcgattacaacatcctacaaacactcccaaactgtgaaatagcaccctactcaagtcgccacgtggcaccctactaaaatagatatattattagacgatctaacttagaaaaccaaaaccacccacgttccccatacagtctaccacgccagtctaccacgccagagggatcaattgctccctcttcctttctgttgtttatccctatcacagntaaaattaaaattaactgtatagaaaataatctccaaaataggtgtgtgaggccaataaacatcttatatatagttctagataggt

SEQ ID NO: 35983 - DNA, 436 bp, Oryza sativa
tctaagcaatggcatgagaaatatgacaaaacattgacatctgcatgcttcgcagtcaatgaggcagataaatgtgtgtactatcgccatggtgggggtgagggagttattttatgcttgtatgttgatgacatactgatatttgagacaaatcttgaggtgataaatgaggttaaatcattcttgtctcaaaattttgatatgaaggatttgggagtagctgatattatcttaaacattaagctaattagaggtgagaatgggattacactcttgcagtcccattatgtggagaagatcttgaatcgctttggctatattgatagtaagccttctccaacacctgatgatcctagcttgttgcttcgcaagaacaagaagaatgctaggaatcaactggaatactcccaaatcattatctcgttgatgtacctgc

SEQ ID NO: 35984 - DNA, 316 bp, Oryza sativa
  unsure (1)..(316): unsure at all n locations
agcttcttatgataatttgcctcgtttgttagttcccattgcccagaggaataataatacgtactatgacctacatatatttacatcggntgatgatcgaacaaagagtgtgctgcaaagagcctttttctcattgggtgcttgcatcaatgcttttgtgcattgtcgacctgttctatgcatagatggaacttttatgacaggtaaataccgaggtcagatattgacagcaattgngtgtgatgggaacaaccaagttctacctatgggctttgcatttgtagagagtgagaacactgaaagctggtactggttc

SEQ ID NO: 35985 - DNA, 339 bp, Oryza sativa
cgccgtcagttagcagaatggcgtagccagaatattcatattctggcgttatccgtgaacttgtcggcgctgcactttcgcagtaatcaactgcctaatcaggtgtctgatgcaatgcacgcctggggtattgacggccaccagctgacggtagaaatcacggaaagcatgatgatggaacacgataccgaaatctttaagcgcattcagatcctgcgtgatatgggcgtgggcttatcggtagatgattatggtacgggcttttccggattatcccgcttagtcagtcttccggtaacggaaatcaaaatttgacaaaagtttgtcgatcgttgtctg

SEQ ID NO: 35986 - DNA, 395 bp, Oryza sativa
  unsure (1)..(395): unsure at all n locations
agcttgaggtataattgagttaatatgttntacttatcttntatattcatgagacctattatggaatgcattcaaaatccaaaaacacacaaaagactcaagtcacatcagtacattatgcaaatgcaagcactcaccaagttttagctttatatgtaggttggtaaggaaaatgttntaaattattcacaaatttacttatgagagctaatcatattaggctcacctaggtcttttagcggaaaaaattagtcataaatttagaaacacatttttattgttttatcgaagtcaaatttaaaaatcacattttgggtatgctacagaggccgagcctaccttcgcccaagaccttgttggtgcctccgctcgtcatcaccgatgctgctgacgtt

SEQ ID NO: 35987 - DNA, 349 bp, Oryza sativa
  unsure (1)..(349): unsure at all n locations
ggggaaagaatgagaagaagaagctgtgcnttctcattgtcttgaagaaactctcaccggacgcgtgtgctcacgcggtgcataacgagcggctgccactgatgaccgtggtgcatgtgctgtaccacgagcagacgagggcttctgcggcggtcaccatccgagccgacagcatctgcgtcggctcgtacgagagctcgaggtcaggcgccaccaccaacacggaggacgagtgggacggcgtcatggtcgtggaagacctcagcctgtccaccaagaccaccaccaagctagacggcgcagccaatagccattgcagcaacggcaaggcgaagaaaggcggcgcgtc

SEQ ID NO: 35988 - DNA, 359 bp, Oryza sativa
agcttggccattgtgacagagactgtctacatctacgacgcggacaagctcacgttgcacgggtggaggacgataaggctgctctgcttctagttcacgcaagcatatatctacctgaagtggcaccgggcgtagaggttttcctccaccttgaagagccgaaggtacttgccttcctgagtgacagctccagcatcgacaaagctgatggagggtacctataaatcggctccacccatctcatgaccgatcgactggagttcttcaacgagttagacttatgagggcgatgcaccgccgagttctgtgacgcctccggcatgtagatcaaggcggttggttacgacagcttcatcgtc

SEQ ID NO: 35989 - DNA, 373 bp, Oryza sativa
tagaacgaagtaccaacgggtggtttgttcaccccatattccctcgagaatggtcttggatgcttatgggctagtcttgccaacttttttttccttgtatcctgtgaaggatcaagtgaatcattggtgcaagacaagctcatcaattgctttacctcaagataatacgtacagatacagtggctatgtttactcgcagtgtgctagctgaagcacttggcagttggcagatcattttccatagcatagatctgatgctaagcctagataatttacatatatggtaatctgctgatggatatggacaaaaagaggatcagatgatccttgcatcagccttactttcagtgattctaactttgcaaacaaaatc

SEQ ID NO: 35990 - DNA, 458 bp, Oryza sativa
  unsure (1)..(458): unsure at all n locations
agcttaactgctaatactgccacgcaaagaaatgtattttacttatatgacagaagagtacactctcgccttctgaatcaaggtgcatacagatacagccaccaagaatcatataaaggagccaatagaaagtatgatctgaaagttaaaccaagatatcttaagtaaaaccaggcatgcgtgtacctttgctgcctagatgtaaacaagaaaaatcagtattttcatagataaaattattgcatgattgatataagagcaagcttgaagtgttataaacaagcccccagatccagtaatcttgattattaggttgcatatatctgtaatgctacacaagtgtatatatcaaataaaatganatttagactttttaaggctaattacacaagaaacagcggttcaagtttcaaacatcatgttgacatcaaagtaagacatatgtcaggaaaatacat

SEQ ID NO: 35991 - DNA, 368 bp, Oryza sativa
  unsure (1)..(368): unsure at all n locations
acacacacttatcggngttcagctttattcggtcggagcggaggttttcaaaagtttccactatatctgaaagtaaagtttcttggttgcgcgtttttacaaccaagtcatcgacatacgcctcaacattacgtcctatttggctacccaaagaaattcgagtagtacgctgaaaagtaggacctgcgttttttaacccgaagggcattgatgtataacaataggttcctacggnggtaatgaacgcagttttttcctcatcctccctagccatgcgaatctgatggtaaccagaatatgcatctagaaaacacaaaaggtcgcaccccgcagtggagtcgacaatctgatctatgcgaggcaggggg

SEQ ID NO: 35992 - DNA, 439 bp, Oryza sativa
  unsure (1)..(439): unsure at all n locations
agcttcctctntcactgttgcaatgtgagcttctatttgttcaagtactagtgagggatcaatagctcctgcgaacagaacacagaccaagtatatgaactctgtctggtatgacaattgtcaggcacaataaaaggcagtaaggcaggagagtatcttaccagcttcaatagcttcaatgctaaactcctctgcataaccttcctcgccaacaagatgagcacgtcttctatgctcttctaggtctgctttcttttgtaaaacaagatctttcatcttacttgctttcagttgttcaagccttaacacctcagattcgacctacagttataagtatagtcgatgaacattcatatcttaataaaaatataacacagtacgaacataatattttgcaatctcagcgatgataaattacataattcacgaaatctgtgga

SEQ ID NO: 35993 - DNA, 488 bp, Oryza sativa
  unsure (1)..(488): unsure at all n locations
tgcacagaaccggaagcgccccttggttcaaagagagagaatgatatgttattcacatttaatttgatgctcataggcaaattaaaagctaagtagtggtaattaagactccaagggaaaataggatgtctcctacactacccataatatgtggaattatcgacgtaatttcatatagtcattcgatctgaatgatacatgaagaacataagccagatgatggaacgctgntatatatcagtacgtaacagtgtccctagctagcatcacagtttaaattgaagcgtataggggttttaatttgtttaagctcgaccaaatgggaccagcgtccaggaaaatcttttgtgtacttgcgtacttatatggacaagtgatggtntttcgtcccattttcttcgttttctagaatgaatatattatagcttttacactataactatttggtttagtcccacaatgataattgagagtggaanaaataaact

SEQ ID NO: 35994 - DNA, 396 bp, Oryza sativa
  unsure (1)..(396): unsure at all n locations
acttaattntaaagttgattttgtgctttgtttttcatcgaagtttatattgtagcatttgcttttgtattttttttaattagtgataagcggttgagcatatacgtagatgaaaagatagtgccagaagtgatgtcaggctgttcgtaatggtctcagcgcattctctcccacaactttnttttagggggggcatttgcaaatttgccattgtttttttcaatttggtaaggatgccactcgaatgacagttctagtggtatttttgtaattatctagtggcagtcttacaataacgatttaaaatagtgataaatttgccattgcctctttttttttctagttcatgcatcgatcaacatgcatcgggtatttgcatgcatacataatatctcg

SEQ ID NO: 35995 - DNA, 451 bp, Oryza sativa
  unsure (1)..(451): unsure at all n locations
atccttaagtcacctgcggcatcaagcttggactntatatagaatactcctctttatacatttatggtattgaaatactttccaagtatatgaatgcctactttacattatgttcatgttatactgaatatgctgctagcttatctgggagatgctttggtgcgggtacaatatttgcttatgcaattactctatgtcataacgatgatattagagtagtatctagtagtttagacgtggtgtctagattacacgatatcattatttggggttatatgctggggatgagaagagggccgctgatggtgacagctttatacgggtattcctccgcgcgtgtatatagtcctaagtttatttgcttgggagggtactccttcgtatttagtccccggtgtatggtcatgacgggctgtcgtaaagaactctgcagggggggcttttcaaagta

SEQ ID NO: 35996 - DNA, 496 bp, Oryza sativa
  unsure (1)..(496): unsure at all n locations
cctctcttcgctccggcaattccactccattctttgctgccgtanagatgaatcagaatttaaggctacagaagaaaacatcaagcaaatcgtatcaaatcactccaagaattccacctgggaggtcaccatggagatggagatcgacaagcctactgcagccatctcaatttgatggatgctaccaaaactcaaggtaccaacatcaacacgacagtcgctactcgctactccaatcaatttgatgactgcttccttaattcagcctgctttttccttcaccgcccttaatttctatggcaattcagacatgttgtcgatctacaccatgacacggcgtagacgcanaattacttcttcaacatgcatttcgtggaggaagccatcttcatgacggcccgctaccacaaatccacaatctattcaagcttttgtctgtttattctatcgtacgtcaagagataattagttgcatctaagacacttttgtctcttg

SEQ ID NO: 35997 - DNA, 222 bp, Oryza sativa
attcatagtacaattttctgtagcaacgcgtttgtcttcatgaagttgcataaagttattatcaagaatgatagcataatccacgatcatctagaattttgtcggtaaaaagacccaatttcctttggtacttactggccgaatcctaaagctacacatgcgtgattttaacacaatcagaacatacgacggcgacgcatcgtaccttagctgctaaacccc

SEQ ID NO: 35998 - DNA, 445 bp, Oryza sativa
  unsure (1)..(445): unsure at all n locations
agcttatccagaagagaccgagtttaatgaggatgcggcatgacaagttatctattagttaggaatagtttgttagtttccttttatctttaagaaagtgtgtttattgtccgataaggactttatgttttccttttatctttaggatagtttctttcttgtccgacaaggacttatatcaacccatgggtataaatatgtacacccggngtcaatgtaatctatcaatctcgatcaatacaactactctcggcgcatcgccaccctcttccctgaggtttttacttatcttccggcggaatttgggcacctgacgcggngctgcatcggtttagttcgatttccagcgaaggggtaagtcctacgttccgtcgggccctggtgaatctatcggctacgttggtgttgacaaggctgcatcgctttgatctctttgatcgctctg

SEQ ID NO: 35999 - DNA, 459 bp, Oryza sativa
  unsure (1)..(459): unsure at all n locations
ctcagctgagtgctgtgatttgagctaccactccttttttgtagatttatgatcctcgtgcttatattgattgggagctagcggatgatagtgaatataaaaagcatggcttgtctgagaaacaaaatgttaagtatgcctctagtgttttacttaaaaatgcttcttatgattggaaacatctttgtaggcattgcaaaatacctcaaccttagaaagacctgaaacaatatttgggagatgctgacattgtgttcaacaaaccgcaatgtttaaaacatgataacagaactgttagttcatactataatgatgtgcatacttgtttattacattgtggtttagatgaatgcgaagaagctacagaattgaggttntcacgtangcttaacaaataaattcaggacatgcttgcttgtaacgattaaatctcntctatttgtacaactttttgaatgt

SEQ ID NO: 36000 - DNA, 416 bp, Oryza sativa
ctcctgcttcgtcggactccgatgccgacgacgaggacgatgccgaagaacgcgacggcgagggggaagcataggaggaggaggaggccgtggccgataaggccgcgaacgaggcggtcggagaccgcgtcgacaccctcggctacactcctaccccaagtccaggtcccaacgagaccggtgtggagtcgaacagctccccccttcgacggaaggatttggaaggggcgaaggccctagttgcgttctcctcaggcaaggcagcgaagggaggtccggtgcagaagatctctaataaggaaagactcgtcgacatcgcccgcgttttcagcgacgacgaatcttctgacgggactccaacttcgcccgctggccgcagtttagacctttcgactgctcccctcgctccgctcagc

SEQ ID NO: 36001 - DNA, 436 bp, Oryza sativa
  unsure (1)..(436): unsure at all n locations
agcttgtcatccacactctgtggccctcgatatagaagaagagcacccttgagacagagaagacagcggcggctcatatgcagcagccgtggccaatggtggtacgagaaaaaaaggagacgaaagagggaatatagaattcatggtagaggtcggggatgcccataccaccgccgtggcggcaacggcggaggggaagagagcagggaggccctgngagcacggcgttgccttcccctctccttgctgccccgggcctcgccttacttcttgtttgccttgccgctgtcgtttgtcggggtccgtgggacggtgaggctcgattcgatagccaccaccatcgcttctcctcataatcgacgagagaggggaggattggcacatggcgccactctggcttggagattgcggatcttggcgaagatggagcaacaca

SEQ ID NO: 36002 - DNA, 509 bp, Oryza sativa
  unsure (1)..(509): unsure at all n locations
tttgccatgattcgtcgctcgattatcgctggggaaaagtgctccgcttccactgatgattatggtgcagtcggctcacgttgacgctcgataaagagaagttagtactacgtggccgctctcggtgcacccgctnttagctacgcgtgcggngcagccaacggcgggcggaagaagaggtgaattgggtttgaagagaaagtccactgctgagtgctgactataatagatagtaatatcatctataacaaacagtatagttattgtctatacttccttcatcccaaaataaagccatttttacggttgacacgggtattaaaaaagtaggtgagaatgattagagaaagtgtgtgattggttgaaaagagaaagtgtgtgaagaagaatggttgtgaatggttgagaggaggaggtaggtgaagaaatagcttcattttggtgacagacactgtgctagaaatagctacattttatgacgganggagtaatagattaactggtacata

SEQ ID NO: 36003 - DNA, 297 bp, Oryza sativa
agcttgccagctgccagcagcagctgagagttattgggatatctcgccggcttacaggctacagcctgaccggcacgccgtagttgtggaaagccctgatggcgccgccgcggctgccggacaccaccaccatgtttcacgccgccggaacctgggaccggcaggcgtccattccggcgcagttcaacgtcctcaacgacaggagcaagctctcctcctgccacgtagtagacgtcgccgccgacgccccgtcgggcacgactaaccacgtgccgaacgagcaccgctcccggtcgt

SEQ ID NO: 36004 - DNA, 407 bp, Oryza sativa
tgcacaactgtaaggtacactaacattcgtcccactgctgctaattccttcaattctaagccctcaatccccatcgatgacattgcttcaacattaaatgtccatgtcctgtctgatgttccagacctacacggccattggccaaaaattgcgcatactgatcttcccacaaaaaatctgtaagcatatggtgtctgcaaaataaattttgattgaatcaacagaccgaacaacaaaaaatcgaattcaactgattctaaagcatatactcacatgctcaagattagggcactttacaaacttattgtttggattcatcggggtcctcgacgttcgcgcctacaactgggtcccgcacaatggacatttgcccaagagcaactcagtggtgcagcgaggaacgatcg

SEQ ID NO: 36005 - DNA, 377 bp, Oryza sativa
agcttatactagaaaaagatcggcgattgcattctcatacgtaattaagctcgtattaattggcttgttatttacaatttttccctcggtctcctcattatttcccttttttgcggtcatcgtaatttacaagtattacgccaaatgcacatgaatgaatgaatgggtcgacgaattttacaagatattaattgatgattgctgcttgattaaatttttcacgtttcttcctagtggcgacaatgtgcgcgacagaagttgtgacgacggacgacatgactattatggcagtgtgtaatgcgtggtcgatttattccttattatcaaccgatgcgaaattttttgatttacctgagatcctgggggatgcaaaattt

SEQ ID NO: 36006 - DNA, 441 bp, Oryza sativa
agcttcgcgggtgatccacttgtatacctacatcttttatcaggatcctggtgcaagaaataatacggatttgctgttgtgtgcgtacgcgccaacgggtcaactcagcgcgcgtttcggacgttcgcaggctcattagtaaagcacgtgcaggtgccaactcatacaattagtgtgtgattaacgccatatctaacgtgattaacatgagtacgtagcgctatgatctcatacttttttttttcttttttccagtaattagctctattattaacatgaacattttcaaatttaagttgaaagtttcgaattttaagataaaagttttaaaatttgagttgaaaaattttaaatcttcagttgaaaattttcaaatcttcagttgaaagttctcaaattttgatttgaaaaattttaaatctaagggaaaagttttcaact

SEQ ID NO: 36007 - DNA, 477 bp, Oryza sativa
  unsure (1)..(477): unsure at all n locations
cgctcatatacttaaaatcactgatggattgtctaacattaatatcgtggagagttcttgtgaacctaagacaagagcattgttagagggaattcaacagaaagtgtaagtatgctgtttatagtggttcagatatactatttcaattnttctacttgttagatattctcctaaataatcattcctttattctttgttggtccctttgctggttcccagagcttcctgtcatgaacctaactctcatatagcaaatatatgttatgataattacttatttgctgcttttatatttcatcctataatggcctgtgtcatactgcagatatgatggcatangtctatgtccatccattggtggatcattttcggagttattgggtagtctatctctcagtgctactatcactaaagatctagggtctatggaagtgaggcattngaaaaagccttatccattatgtagctattccattg

SEQ ID NO: 36008 - DNA, 443 bp, Oryza sativa
  unsure (1)..(443): unsure at all n locations
agcttgngcactctcatttgctggttagaggatgtcggattgatttgatccttgccaatgctttggtggacatgtatggtaagtgtggggatttgttgatggctcatacatgctttgacatgatgcccttcaagaatgctgtttcatggacatctatgctttgtgctctggccaaacgtgcgtctattgatgccgcaagagattggtttgaacagataccagagaagagcataatatctgggaatgccatgatctcttgctatgttcaaggtggccgattccatgaagcgctggatctttataaccgtatgaaattgctaggcctcgctccagacgagtttaccttggctgctgtcctctctgcctgtgggcaacttggcgatttggcttctggaaagatgatacatgactgtatcagagataacttccataatccaggtgtt

SEQ ID NO: 36009 - DNA, 275 bp, Oryza sativa
  unsure (1)..(275): unsure at all n locations
tgagacatttggcagtgtcgacactacgccatcttattgaaagagatccggtaaggcatgcaaacaggattctccttatacaatatttctgatcaagtgctggccatggttaacaccattttcatgatcgtgatattagttcttatntttctcgtgtgaattttcgttgcaacgtactcccgccgtccacaaatataacatatttaagtactgctgtagagattaaggataaggagaaaaggctatggtgcccttcattaagggcctatttgggg

SEQ ID NO: 36010 - DNA, 416 bp, Oryza sativa
agcatcagcttatagtctaaatgagaaacatcgagttttgtataagtcttcatctcctctgacaaaatgactacctgaactaaaagataaaacaaatcacaaaattagctaatggttacacaagtgctacgccatctaaaatgttacagaagataacgactaccaaaaccaataaaatagcatcattatgcataatatctatttggtcttttatccttgtcaccagacaatattcatatctagaattcgactactttgttgtaaaaaataataaatacttaaatagatgtcactttatcgaagtgtattatatattaaacataattattaactttgttcataataatctaatcatttaaaaatacattaaatgttgccacaatactgatcaatggtgattattatataagaattga

SEQ ID NO: 36011 - DNA, 448 bp, Oryza sativa
ttctcatggttccctatgacggtaatggatgaaatggacttaacctcgttcgttagtaactgttattaggcatcaataaaagaaggaatgagcttcaatctcaacacacaactcaagtggagatctctaactttcattcaaggctactctctagcagagtgttagaaaatatggagagagtgagggcaaattccaacagcagtctctcaactcttgtacctcggcagatgtatgttttataaaaatgagtactcgatatttgttctgggtttttaaattttcttggttaagtaaaatatattctcatcattgcagcttcatcgcttaatattttatataaagtgctccaatactcaggctgtataaagaaggaaattcttgcaccaggctagctatattagtaatagataatgtagatgtagtggttatgttaagggatgcctttgtt

SEQ ID NO: 36012 - DNA, 444 bp, Oryza sativa
  unsure (1)..(444): unsure at all n locations
agcttatcaagtctactttccaacggatccaatggcacatcattcanaagtttctatcaccagtaattgtaagttaaagacatgttgcacaagcagcggcattaaagttggatgtgagccttgtacaacatgtttggatggggttctattatcccaaggcccatcttgggttggtatggagtctatttacaggttccctacgaattgaagccttccaaaacaagaagtttgaagataagaaagaaaagattcaagttgaactcggtttgggctagcttggacatacctggactaaaatgcttgtttctctcttgtctggagtctgttttggacgtgtgtgcacttgttggaaaactaacttcatgacccaagtgacggaggggccaacagaaacaaactccttctggttcactacacgagccaaaagaaattaacagtgttgta

SEQ ID NO: 36013 - DNA, 500 bp, Oryza sativa
  unsure (1)..(500): unsure at all n locations
acttcacatgctccagatgctctgcccttgttttgctatatattaatatgtcatcganaaacaccaacacaaatcttcttaagaatggtgctaggacatgatacataagtgactggaaagtggcagggtcatttgtcaaaccgaatggcattacttgatattcataatgcccaagatgtgttctaaatgctgttttatgaacatccttctcagccatcctaatttggtgataccctgaccgaaggtctagtttagagaatatccttgctccatttaattcatctaacaagtcttcaatgattggcattgggaatttgttcttaacagtctgtgcattcaattgtcggtaatcgacacacatcctccaagatccatctttcttgcgaaccatcacagcatgagatgaatagggactattcactagttgaatctccttagattcaatcagctcattgataatattttccattcgcttcttctgataatgtggcactctgtat

SEQ ID NO: 36014 - DNA, 462 bp, Oryza sativa
  unsure (1)..(462): unsure at all n locations
gcgatcttagagcgactgcagcatgcaagcttccacatccacatggtcgcggtcaactatcacatgnttttgaatgcgcccgctagagtcctgtgtgtttcagcatagtatataactgagaaatttaacagcacattgatgcaattcaaccaatcatatgataagcacaagggcaaaacccaattattggaaaatcaaatggtataacgtaccttggcctcttggccatccagttcatcaaatgccttctctacctcatctctgtctcccaaggaaatacatgtagaataataatcaccccgaacccttgaatcaatctattgagaaggaaataataccattagactataaaagtacatgtgtattgagcacatcataattagcatgcgaaaaccttctcatcaatactgggatttccagaaaataatttgagcagctcctgacaaggcaagtatactggaa

SEQ ID NO: 36015 - DNA, 438 bp, Oryza sativa
  unsure (1)..(438): unsure at all n locations
agcttgaagctagtattcacgtacgaatgggtacagggcttgagcattgactgccactattaaccaatcatgagaaatggagctggggtcaatcttccgacgtcacatgtcaccacgctccaattagcgcccgcctttggatattgttctgctcaaaattgagaaaagaaaaggagtcatctattgtttttggaggcaactgattgcaacgtgcaacatcggtagttaattaccaggtcaaagcacgaagcgagcgcggcctctaaaaacattttgctaagaagacttcgcaacctacttgtacaccattttgtctgattntgccatgcaccatcacatctatcacacgctcacctataaagatacgtgcccctgaaggcctgaactattgctacagcgtgcaccaacatcacgctgtcgcggagccacacgctggca

SEQ ID NO: 36016 - DNA, 485 bp, Oryza sativa
  unsure (1)..(485): unsure at all n locations
gtctctgagcagtttcataccaattcccttaacacatctcttgaatgaggaagtangtacggatttagtgaagatatctaacagattatcataagattttgtcggtaagatgtttatttctccactttgctgaagctcatggggataaaacaacttaagggcaatatgcttggtgatattgctcttgatgtaacctgtttgcatctatgtgatacaagcagcattgtcttcatagataatggtaggtgattctgaggaaccaataccacaagaatgttcaatgtggtttatcatcctgcggagccacacgcattcacgtgatgcctcanacaatgcggtgatttcagaatgatatgtggaggtagccactaatgtttgtttagatgacttccacaatatggccgttcctccatggaggaatacaaaacttgtttgtaatctggcgttgtggggatcagacatgtagccagcatcagtgtacccaa

SEQ ID NO: 36017 - DNA, 260 bp, Oryza sativa
  unsure (1)..(260): unsure at all n locations
agcttgactaacacaaaactgtattgatgtgtatcatgtgttgcggaggcaaacgggagatgtaattaacatgcctgtgtgctggtgtgtgaatgtgtcccagatgcttggtcctctgcccccctctctggcgccaccctcatactgcatgtgtgaagcaacggccaattcttcagatttcagaccataacanagacacaattggcacccaatggctattagatcaagccatacattcctgacaaatttggcattattca

SEQ ID NO: 36018 - DNA, 398 bp, Oryza sativa
gaacacaagaaattattgttaatagtaaccatgatagtaacatccaagtgttacagcataacatcaacagcttgtgcttctgaccactgaccattacaagtttacaacaaattacacgccaaaaattgttcatgttaaacactcttgtcaataaagatttacccagatgaacagaagtcgacgccgcgacaaagcgcaacctttaaacttcccaactcaacagcttgataataaaattacaggccacgaaattacaagcttaaatagctgtcatatgtagtatcatgtaaacaatcatctgaacacctacaacatttttgtctaccaacatctccattgggacttagaaatatactactgagagctacaacacggatcttagatcattacttcgtctc

SEQ ID NO: 36019 - DNA, 449 bp, Oryza sativa
  unsure (1)..(449): unsure at all n locations
agcttcaaggctacaatgcatattctctttgtanaaggccaaatgtggcttagcttgtggatacctgagaaacatgtttattcttcccgtagacagagcacccactattttattattattattcacactatcttggagagagaaattcataaaatgaccataatgcccttaaaccaaacccgttcctcattcgactagaccacctcacgcccttcgtatcataacccaaaccctagacacgtggcgatagaagcggtggtagcaactccatcatcagtataccccccgcgaaggtggttgcgttgttgaacgggttggctctcttgcttttgagcttccctatgcagtcattgccccaactccttatggctttagctgaagaggggacacataacttcctcatggctttgggtaaagaggaacacatggtggatgcgtcaatgtctaac

SEQ ID NO: 36020 - DNA, 482 bp, Oryza sativa
  unsure (1)..(482): unsure at all n locations
actcagctatatttcctttgttctccaacgaaaccctaaatatccttgataagagatactgataagtgctctgctccctatatccacaataattcagcatggtttcactgccaccttatataaaaccgtaaagcagctcgatttgacgtgcctaccatctctactataataaagataaaaaaataaactagagtagttatggacataatgcttgtctttcaaaccagtatcattgatcctcattgcgaggactatatcgaaatccgattgctttcctttcaaaaagagaggattgaatcgaagtcctaatcgactctttctttccgtgctagcaaaatgatcaaaatcttcagatatcatngtggtaggggaatggtctcatcgaaccggtgcactctcgctatttcaatgccaagaggaactatcataagcaagcttttagcgggcaaaataatcccatggtcccaccattatttgaagtt

SEQ ID NO: 36021 - DNA, 439 bp, Oryza sativa
gatcacattgatcaatgtaatattatgagacaagatcttgacaattacaatgaaacaatgttgagttgccacttgccaccatgcttgacaatattaaaatttcaagtatcactgcattgtcaacagataacagtgctgttgcacaagatgaaaatgaaaccggttaacactttgttatcggtgactaggacaaaaggaatgtcatttggcatgctgagatcccaacaaattagcaaacgatttttcattcatgttttcttggttcgctttacagtacatatcgaaagaatttggtagtgcatctggtgtgcatgaatgagtgtaaaaatctgtatgtgcactgcaatatgttgtgcttgatactttaacaaggtgcatggcattaatgaaaaacatcatgtggattaatgcatactaataatatagcactccacatggt

SEQ ID NO: 36022 - DNA, 442 bp, Oryza sativa
  unsure (1)..(442): unsure at all n locations
agcttgcagtgacaggagcatatccttgagctcttctttaatctccggatcaatcaaattgccatcgctgtcgaagtttttcggaggctgatgtgctttgatgaacacttcaggcttgttgatgaaatggatgtccaagaaaaccccgacttgcctgatgtggtacattgatcggctgccaccggagcctccggacgcgctcacgatggcggcggctctgtcagcccagcagttgggcggccttgatccccagtccaacgcgttcttcagaggacctgcacaggatatgcgtacatcaaacagttgtagacacagagggctcacctganaaatatcttacgcatttttttttctgacagaataaaaacatgacgggtctaattggaaaaaagtaacattctctcgctgctagngggccatgcctcttacttgaccataacca

SEQ ID NO: 36023 - DNA, 470 bp, Oryza sativa
tcttgaccgtgaaagatacatgtaagagattctatatgtttgtctaattgatactggttcaagagctggcatacttctttcttctttgatactccctaacaccgtgttggaacatcctatctactgctaagagatttaccttgaagatgaaaaaggtatatcggtctctggcgaggtaacaaactaacaacacaccatttcactcgatgccctccctcttgtgtgcatggatgatacttgagaagttcaacgcaaggtaaacgcactagtgcactactgtgctgtaaaactctaactggattaccatggaaaattgacaccatcagttttgtgctcatgacaagcgtcctaggacgaacatttgttgtcctcagttctgtagatcatacacattcaaccaatcctgtcatcctatgcatgcgttgataccgagaatctagctcagggttcataagtagctcaaacacatg

SEQ ID NO: 36024 - DNA, 449 bp, Oryza sativa
agctctattgaatatttcaataacatattcaagctctttatattccatctgttccttcaaaacctgagcttgacttgagaagcgaaatacgatggtgccctctcgtatgtctgatcgagtgatcgtattataaaacgcagccacagttatacttttgcacgcgtcagttattcttttgcacgcgtcatgtgattcgaataactctgataaaaggcgataaatatgtcatttacgttttccgtatgtaatgtaatcgtcttcagttggtttatctataaacagtggttaatggtagctagcactaacaggtatcgctgcgcctcagctgctttaaaatgattcgctagaagcctagaacggtcacacgatttgcgagttctagtgatgttttgcatgcaatttcttgtagaggcatggggagattgctgtcatttatctcctgattcgcc

SEQ ID NO: 36025 - DNA, 368 bp, Oryza sativa
tgtgtttcccttaatgtaaccaaccagttagagatgataggttgtttctatgacatgatatacatagctcatctttgacgtgaacatgttaactctaacaattacatattgcatggtttctgtgacacaccgtatacatcatcctagtattatgaacaagctgtttagcacagcttggatcttgcgtcatgttttgcgttggttcaaaggtgtgcatcatgtcataaatatgccatccacagtgtaaaattgtttgtggaatgctagacctcagttattttctttcatattaccagtgaaaatggatggaaatgctaaaggcggtgggcattctgaggcacttgagaactacaatcttggaagaactt

SEQ ID NO: 36026 - DNA, 393 bp, Oryza sativa
  unsure (1)..(393): unsure at all n locations
agcttccttggtgcttactctggctaccacctaatcagcatggcgaaagaggatgaggagaagtgtcacgcccggaaattcactaataattttccgaactaatttgtgcataaaattctcgtccaggaatcatccgaggtacacaaactgacaatttaatatacatatccatcataataataacgttacatacttacaaaagagaagaataacagcagcggaatttacggtctagcgatggcttcagctccactcccacaggcagctcaactggggtataagccaaacgtcttctccttctggatcctttttcttcaactgaggttgattgattattgcaagaatgagcatatgacatactcaacaagccacacagcanatatgcaagtgcac

SEQ ID NO: 36027 - DNA, 406 bp, Oryza sativa
  unsure (1)..(406): unsure at all n locations
tgtaagtagttgcactctagcttgcacaaaatttgatcaacatctttntaatctctctccatttgaatgaacacacaacttatcatgcatgaagcttattttggagttgttaaagataagcatggtgcaagtcctgatatgatgaaataacccattgatggtaagggctggcaacatgaaacatgttacttaacatctgcgatacagctggtaacttgnagttttgcctcctttatgtacttattaaagttaaaattcatcaacatgtataaatttaactatttgcattcgtatgtgtaaataaatttcaggcgcttcaatctgcaatgaaacttaatgttttccttcacgaccagcggcccaacatgctccactgtctattatgtgagcaacttataccacatta

SEQ ID NO: 36028 - DNA, 474 bp, Oryza sativa
ctcgacccgggatctctaatcaccgcggctgcagcttaatatcttctcaatagtgtgatggattattgtcactgacataatcagtagcacctctacttcatcggccctgacgtctccgccgttgctaatgggttactacgttttcggctccggttgcttccgtcattgccgacttgttatttcgccttcacggttgaccaactacgcaaacgctgatgagcgtcttcgtcattatcatcggctgctacaccgctattgactggatcaccgatatcgtcatcttcatcaacaccctgtcaagcctcttcaacatagccaactctactgctatcgatgggcaacttcataatcataaccggctatttctgttgccgccaatggtcattatcgccaattgcgtttgccgtcgctgattgttttcttcttttccatgattgatggatttcgccattgccattgatgagtatctatgtc

SEQ ID NO: 36029 - DNA, 131 bp, Oryza sativa
tatcttcttgctcctttgcatgccaaatattttcttattatagaatatgggtcctttgcacgggaactcttggtaaatatatgctggacctgagggtgatgtattgagcttgggagtgaacctttatgctc

SEQ ID NO: 36030 - DNA, 451 bp, Oryza sativa
  unsure (1)..(451): unsure at all n locations
gggatccttgagtcacctgcngctgcaagctttgaatctttcttttgtgtgctcaatttatgtataaggataagctattgcattgccatttgctaccatatgagctccaatggcttttccaagtacatattgtttggttctcttctgattcagcaagcttgaagtgttctaactatcatagataccatcattagagatggtcactttttaaatagctgtacatgggtgatcatggtcatcattgcacgggtggccatttttaaatatgcagtcatttcaatgtgatagtacggtgcaaatttatatatgattcatttttctggtgttgcagaaaatgctacttccgtgtggtctgcctcctgagagagacgaagattgaggtggccttcgggtctggcgttcagtgttactgcaactactggaacctanggttcagtatcagtttgatatc

SEQ ID NO: 36031 - DNA, 450 bp, Oryza sativa
  unsure (1)..(450): unsure at all n locations
ngtggctggtagtaaaacatcgtattttcttttgagatagagttcgatcctcaactatttctcgcgatatcttcttacgaagttttgttagggcatctataacagcctctggtttaggtgggcaactcggcaagtagacgtccacaggaattaacttatcaactcctcgaacagtactatatgaatccgtactgaacattccaccagtaatagtacaagctcccatagcaatgaccgtatttggttcaggcaattgctcatataatctcactaaagagggagccattntcattgttactggtaccggctgttaaaatangtccgcttgcctaggactngatcttggtaccaatccataacgatcaaagtcgaatcgtgagcctattaatgaagcaaatcaatgatacaacaactggtaccatatagaatgggccataaactagagagtct

SEQ ID NO: 36032 - DNA, 420 bp, Oryza sativa
  unsure (1)..(420): unsure at all n locations
ctcgtatccgcgatcctctnagtcacccgcagcatgcaagcttgacattacggaccactgaggctagtaccagtgggtaccgccccgggtggaccactcggtcaggatgatccgagcggtcaaacttgattgcaatctctgaccatctaagatactggggcgtgtcgggctgaacagcattgatctcccgttcagtcaactattgctttcggttaaactcatagccaaggggccgccaaagatatggttgaactccttgcggcgatcttgaaacctgccggagtgcaccgacgccttctccttgacagctttgtcttgaagaatcttcgtcagcttgggattgaccgcaattgttgacataaacaatctttgcacggggtggagtagaagggcggcttggagtctgacttgcgaacggta

SEQ ID NO: 36033 - DNA, 390 bp, Oryza sativa
  unsure (1)..(390): unsure at all n locations
tggcgtcttatagaattccctgatatcctctatgcaagagttctgatggcgaagtatttcccccaaggatccctaattgatactaccttcagttgcaacattntcccgacttggcgtgctattgttcgtgggctggagttattgaaaaaagggatcatatggagagttggtaatgggaagtctatctgcgtgtggagagatccctggattccacgtgatcactcaagaagacctatttctttgagaggtaattgttggctaaaatgggtgtctgatttgatagaccaagatggctcttggaatattacagagatcaatagatgcttccttggtatagacgctgagatcatcccaactatctgtctgtctcctcatttggaagaagatttt

SEQ ID NO: 36034 - DNA, 455 bp, Oryza sativa
  unsure (1)..(455): unsure at all n locations
agcttagtagaaatttacagcattttgtatacctttntttatttcncttgtttattacatagtagatcacaattatatactacataaaaaaagtgtccccatcaacttgtttctttacaatgtttcggtattctaagcgaagatttggcaaataaatactaaacacattatacaagaatttgagaattttctatgttccaaattaatcctttaagtcatttataattaaaaatggctgggcttcataaatgaattgcccccaaagaaggacattccctgaagaaaactgataaatgacaggtacataattaaatgacagcattgttgcctgttctgaaacgcgccacattgtgtgaagcaagaaccacccggatttttgtgtgattaatgtacacataagtaagaaaggtaggtacagttaaccacaaggttttcatgccatntactgcacaagt

SEQ ID NO: 36035 - DNA, 417 bp, Oryza sativa
  unsure (1)..(417): unsure at all n locations
ctcaagtaaagccaaacatgagacatgcttagtggctaagtccaacacggcgtggctttggcatcggaggctagcccatgttggtatgaggaatcttcacaagcttctaaagcacgatcacatccttggtctaacaaatgttcaatttgagaaagataatgtgtgtagcgcgtatcaagccggcaaacaaattggagcacatcaccccgtcaagaatgtgatgaccactacaagaccattggagcttctccatatagacctcttcgggccaattgcttatctaagcattggaggtaacaaatatggtcttgntattgttgatgacttttcacgcttcacgtgggtattctttttgcatgacangagtgagacacaagctatcttncagaagtttgcangaagagcacaaaacgagtt

SEQ ID NO: 36036 - DNA, 461 bp, Oryza sativa
cagctctctgcttagcgcatattggagtcgatcctctctcttacccttattggagactatcctctctattagttcaatggctccttgaaccgctttaaacaagaaggctcttctagctaccgtgtccaagtgatcgtgggacaccggtgtgagtccattgtaaaaattctgcaggattagccagtcgtccatcccatgatgaagacaggcgggcacgtactcctgcagttgtttccatgctttcagaatagactcatcccttatctgctagaaacttgaaatccttccataaaaggcattggttttgcccatcgggaagaactttgagaggaatgccatcaagcatatgttccaggtattgacagctgcacggttggcataataccactactttgcttttcccgagaagggagaacagaaacaatctgtggcttgataacgtctggactgacgcccttgat

SEQ ID NO: 36037 - DNA, 282 bp, Oryza sativa
  unsure (1)..(282): unsure at all n locations
actaagcttctttatagctatttgctatatcactcatcatatnttacaaagcagttggtatatcactcggatcatgtaatttggaggattcacaccgcatatgctatatattgatattaagtcgcttgggtgactataattatcaaaaccactcggttggatggattatctattccttgactatatgtttggattgttcgaataaccacatagancggggttacacctattangtgcatctagtcgatacacctgactatatttttcagcccttcacagtct

SEQ ID NO: 36038 - DNA, 396 bp, Oryza sativa
  unsure (1)..(396): unsure at all n locations
gcttcttaattgttggtacccaaaaaagagcagcggatttagtagcatcagctgcaataagggctcgttgtcattatgttaataaaaagtggttcagtggtatgttaacgaattggtcgattactaaaactagactctctcaatntagagacttaagagcagaagaaaagatggaaaaattccaccatctcccaaaaagagatgtggcaatcttgaagagaaaattatctaccttgcaaagatatctcggcgggatcaaatatatgacgaggttgcctgacattgtgatcgtcctcgatcagcaaaaagagtatatagctcttcgggaatgtgccattttggggattcctactatttctttatccgatacaaattgtgacccagatctcgcgaata

SEQ ID NO: 36039 - DNA, 401 bp, Oryza sativa
  unsure (1)..(401): unsure at all n locations
tgtgctgtgtgcaagaggactaatactggacacaccttgattcctgtgttccttcagcctctacccatttttgaaacggcttggaacccatatcattaagggatttcatagaagtctttcagagcaaattcaagatcagtttcaaaaaaaaaaaaacttctataagctttatggggtgtcctttgtgactgagtgcagtgatagggatataatttctgaatactgagaatcaaatgcactggtggtggttggaccagatctggttgtgtcgcacctacggcgattctgcaacgaattattggntaatcatggatgtctcctttgctgctttgcaagagaattttcatgcataagatacagtggaactatcatgacaacaccacttgctgttctttctcaca

SEQ ID NO: 36040 - DNA, 351 bp, Oryza sativa
  unsure (1)..(351): unsure at all n locations
agcttgtagctgttctttgatctctcaccgagataactcgtgccttcagttcctcaatctcgccagcaataatatgcctcgggccaagagttttgaaacgttgtatactctttctaaagaagacctcgatgctattactggtgcggtgctgcttcaccgtggcaccaagttggtgcataaacttgtctatgcagtcctcgatgtcataagcaagctccctcagctcggtgatccaggccttcacctggatggtagggtcctcgagtgacgcatacttgtggagcgccgcttgcatgttgctcanctccgatcttagggaatggatctcacggcggacaccttttaagcacg

SEQ ID NO: 36041 - DNA, 392 bp, Oryza sativa
  unsure (1)..(392): unsure at all n locations
tgaagacggtactcatatcgacaactcttggaatattgaacatctttatcgnttntatgcttaggcattaattntgtatttccctctttgactgctaacatcaagttttttccttgagttatcagtcgggggctattataataataatggagtgtgatttttatcaattcaatttgcattacttgaattatcattgccttggttgattttttggcttaatcaatgaggactgaaagttttttaacaacttttgcgggttttaggctcaataagggttgacaaaagcttttaagaaatcacgagctaagtttgaatatcaacacagcatanatcatagtattgtacaatgtgcctcatcatatcatcatcatcatcatcatctcatcattgtg

SEQ ID NO: 36042 - DNA, 373 bp, Oryza sativa
  unsure (1)..(373): unsure at all n locations
ataatcgatgagctatatagcaagcattataatcgtacggcgccattcagggatgaacacggcgtcaatgtcgtcccccgaccggtcagcgaccagcgacaggggaaggaacccgtcagcgccgccaccgtcacctctgcccctctcacgtcagcgcggccggccgcctcgcttccatctgcggtggtgggggcgggcgaacgctgcggtgagcggtcgacgggcgtagcatacaggcggagcatctcagggcatagctagagccaaatggagggtagggccacttgcttaatttactctactatagatcgagctnaagctcatgcgggtgcctaatttacattgaggagggtgcatacttggcaaaaataga

SEQ ID NO: 36043 - DNA, 448 bp, Oryza sativa
  unsure (1)..(448): unsure at all n locations
tactcagcttgttaacaatgtaatggtgtaatgtaatgaaatatataaatccacatgttattcacaaaanaaatgtttcaatttgatggtcaatgattttttagtccatgtggtgctattattcaatttttagtcagtgtagattatgcagttatgctgacaaatatcatatttgcacttctcctattntataaggtaaactgcaatatgatcacagtgatacagcatggcaacttgcctcctcatgaacaggggtcaaaaggggatttgttatcaggttccttgatgccataggtgacgcgccatcttccacttcagacccagactccgctgagccatcacttccttttctctgcattggcatgacaacataacaataaatttcaatagaatagtttgaacacaatgctcctaanaatctncacattaaccatgcttgtagacttac

SEQ ID NO: 36044 - DNA, 326 bp, Oryza sativa
agcttatctatctacagtagctcaattgctactagacccatctcatcaccaagataggcaataaaattacccacactatatatatatacacatcactatgctaattaaatacttaattaactatctcatcgcatggaaggagactgcggcggcgtggtcgacagcgactagccggctcctctcgtggccgccatggccattgactccacggtcttggtctacgccaccagctccttcttcatccgccggtcgttgccccaaataatcgtgtacaccgtgcagctacgtccctccttcttcgtagtcgcaacagcatgaaacaccgt

SEQ ID NO: 36045 - DNA, 466 bp, Oryza sativa
  unsure (1)..(466): unsure at all n locations
tcgtcgcaccccaacgacgtagcagctccgactccatccgacagagacaaacgaagaagctggatgctaccaatacaagaaaggaaccaagaaggagaaggcctcgccaagcacctaggcatctagcgcatcgagctgacacaggagtccagcagcggcaaatggtgcatgggtaaggttctccaagatgatgcccccaaggaggatacaacgtgaaacgccgccatcgcccgtccggaaaccggaatcacagttttacctggagactggtagcggtggagaaaacgctataacgacgcctccaagaagggaatgacgccaaaggcgccaccgtcgtcgtgccagccaaaggctaagcaaggctntcgccaacgaattcgtccagcgccacctacccacacaacaactcgtgcttgaccaccacatcatctcatcagccaccagttagcccagttcaccaccccac

SEQ ID NO: 36046 - DNA, 450 bp, Oryza sativa
  unsure (1)..(450): unsure at all n locations
agcttttatcgttgaggtgtagtggatctctcttggtgagaagagaagagaagagaagagaagatataggatatcttgttttatatcagtatgttacaatgcacagatgtattgcatacacctcttaagtggaggtaattgattggcagttttcggagacttgtgttgtatctcgacaaaattgagtgtatttactgatctgatggtagctacttgcttcgtcttcttttcttttcttntttttctagagcggcatatagctgttaatcaattcttctcctgatgtacattgtagtagaagtaatttataaggatgattgtgcttcgaacaactctaatcgccagttcatcagaaccacattatctcattgtttaattctctttggtcgtgggtacttcagaaattgaagaactgaaaagccttgaaacgatctggatgaaacaacaaag

SEQ ID NO: 36047 - DNA, 429 bp, Oryza sativa
  unsure (1)..(429): unsure at all n locations
tgtgactngatcgaagttcgtggcttgaacgatatgtccaattacatcaattctaaggcccacttcgcaatccgtccgtttgcttcgcggttatgaagtatatccccgagtggaaacgatgtgaccaccgtgaccgagtgactttgaaagtagtgagataatttcctgacggtaattaagacaccatataataacttttgaacctgaggatatctatcttgtcttggagtcggctaaaacctcgctaacgaaataaattggttgttggactttttgaacatggccttcctcttcacgcttgacaactagaaccgtgctcacaacctgcgaggtcggcgacacatataacagtagcggctcttgcggatgtggtgagggcaaaactggtggagtgggtgatagttctttgagtcttcaagcgcttttatg

SEQ ID NO: 36048 - DNA, 307 bp, Oryza sativa
ggaccttaagcacgcgctgcactgggggtaaaaccatattttgatctggggaggcaagggacgggacaacctatttacgcttgggctcttactgtatacagttgacggaacccccgagttcagcaaatgccgaactttagtgacttagaaattgtgtgaaagggccggatttcgctaactcggagcctttttccggaaaaaatttcaaagatccaaaaatttactctgttactaaccttgatccctaccccttaacctttaaaacgtttctactattcaaggaaactactatcctcgggtttcccta

SEQ ID NO: 36049 - DNA, 157 bp, Oryza sativa
tttcgcgctgggtatgcgaaaggccgaccgacgccttcaacagttgccacctgaggcaaggcgccgagcgatttctctaccatctggcgattacaccgatatgggccttagacaattgttgagcgatgtaccacccaacccgcacaccgtgccaacc

SEQ ID NO: 36050 - DNA, 308 bp, Oryza sativa
agcttcatgaaacatagcaccaccgtattcttccttctgattttcttattctgctgtgtaggattagggattattgatacaacatccggcaacatccacctcgggggaccacaccggcgccgctgaagcctaccctcgacatctccgtgccgccaccgaccatcgaggacaacaccagtgacaccacgccgatctcctccgtggccactaccaaccggcgctgtcacacgcaccgtcaccaccacatcacggcggcatctcccaaccctaactgccagcacttcgtaagttgccatgcatctacccat

SEQ ID NO: 36051 - DNA, 403 bp, Oryza sativa
  unsure (1)..(403): unsure at all n locations
ngacttttaccatatttttgatagaatgatgtttattatgcttgatgcgtacacatctagtgcagagtgcagactctcatattggttatatgatatatcatgctaactattttggttgaggaaccacagaaacttaaaggaaatctaaaaggacagcacctcaatttaatgtaccatcgcataatttttttgaccccaagctcaatctgttctggaagggaaaaaaaaaagagctgaactttgctgatctgttaatnntttttactattttttagttcagtcaaaagagtaaatatgatacctagagagggttttgcactagatttgccgccatgtttaattatccattaatatcatctgttctttnntaacagttggcaaagacagtgcatggctacctatg

SEQ ID NO: 36052 - DNA, 437 bp, Oryza sativa
agcttatttatcacaatatttaatttacatctataatcatcttaataatccactagagtataatcggtcaaaataatcatgttttccaaactggccttctttacgcagcgccggcttgtgaggagagcagtaaagaaagaatccagaataatgatgtggagtcagcccagcggccccggcagttctatattctctacattttacttccatcttaacgtacaccttttacagagcgacttgctactatgaaaatgtccagttatactcgtccaaaatttccttggccgctgcactgcggttcattcctatgttgatctggtgaaaatatatacagttagtaggttacacttacacgagcttgttacgtactacttgtcagtgtatcacaagcatcggtcactgtatacgatctactcttctggcctgtttgcgggagc

SEQ ID NO: 36053 - DNA, 450 bp, Oryza sativa
  unsure (1)..(450): unsure at all n locations
tctaaatcttccatcctggatatgtttcttttcctgacatcgtctgaagatggaaatacattcactccattggaataaaaactcttcgatgatatagcaacccaaatctaaaaataggtgctctttcaaaaaataaactcaaaaatatgttagcgaaagagagagtggtcaaggaggacaagcttcatcgttagtggttcagctaacgggaaccatatgaatatatgtgatgcaaaacctgctacgcgtgcctgcgagattacaccggcgccgacgtgattgacgatccgaaattgtcacgttcgtgacacagcagcggcaccgtcaggttgcgactaatcagagccgacngcagcagcagcagccaacgattcgagccaattaaaattcccagccctacaggaatccaacgcgcatactactactgctgctggaaatccactgctgtat

SEQ ID NO: 36054 - DNA, 402 bp, Oryza sativa
  unsure (1)..(402): unsure at all n locations
agctntgattcttcaagaatgtccttacggatataatgttcattgtttagcccaccaaaaccaacctgacggcctgttgctgcatcaagagaagtgtattaaatccagtctttcaatatttaactttctttatcaatgtggttatttcctcttccaagcgtaacgacgcgctacgagaagaacacgttgcagaaattgcttaccttctttaaattgaaaagcttgaaaacaggttttggaaaaaatcaactaggcactctgcagcgaaccggtgatacaaggtggagttctcaataggaagggctgaatctatgttggcaagcagggtgatgtcagaaataacttgataagagagatgcatggcacaccaggaggagggcactctggcattctagccaccta

SEQ ID NO: 36055 - DNA, 486 bp, Oryza sativa
  unsure (1)..(486): unsure at all n locations
atcctcttagtcacctgcggctgcagcttgcctcttgaatctttcgagccaacacagatgtatgtactgttgatcctaattggtggttgtaatcacctgttgcagctatgggatcattatggataaagatctaattctcatatatttttagttataaataaatagaaaagtcatcctattttaaacccaatttgaaaataaacagaaattttgttcatcctattttaaaaccagcctttaaattntgtaggctaaaagcctaaaatgttagatcgtttaccaccccctaattgcagcttttgttctcctgctgattcctaattttttacttcctgtcactggtgttaatttgtactacccggcaacatgaacggcgcacatttggataactcagatntagaatcaaatcattntctagtttcatgacccctttgtgatggtctttatcctatccaattggcataagatggattgaagtgatatccg

SEQ ID NO: 36056 - DNA, 311 bp, Oryza sativa
atggggctaagctatataggttactgacacatatttgaagactttacctcgactaatcacaaaacattacagaggccatcaggagactgaaagtaatcccattaacgctgattaatccgtcttagcaaatgtctacggcaacatcacattgacggattatggccgaattaagctcaaaagattcggcgtgaatataactatgatattctttttttgaaacatgctctggtcagaaggaatgatcaagatgtgatcgacatgcttccaacatctgtggacattgcggttggtgatgttggcgatgcttcttc

SEQ ID NO: 36057 - DNA, 210 bp, Oryza sativa
tttaaaaaaccttgatacgcatatatctatgaaatattatggtatataaactttcaatctagttacacttactaattcattgcatctatatactggatacagtattataatccgtgtacggactattggttcatgtgattgattcctactacaagcttacatcatcgatctttatgacatattacctgagaatagcactgatataaactt

SEQ ID NO: 36058 - DNA, 411 bp, Oryza sativa
  unsure (1)..(411): unsure at all n locations
acgtaagatatatatgtctgccttattaattaatagggccgncagtttaagtaaaaatcgatggcaaaatattttattaaaaataatttaaaatagggagtccactaattgaagtataaattagttaaatagatcataaattggtaatttaatggtacaaaacatagttctgtaacctttattttaaaccgcgtgtttttaaaataatggttcgaaataaaattatattatattgttaatataatgggtgaaataacagagtccaataaattttatttccaaagattatggatctaatttatttacgtatatattatgatatatataatctatgcttataaagntatagatctttaaaatttaatatcactaattatagttacaatctcatctatacatgcatggagaaaa

SEQ ID NO: 36059 - DNA, 306 bp, Oryza sativa
acacttctacacgccaagcacaccaagctcatggagctcggtctgtagccccacctgctgtctgactcgctcctcgaatcgatgctcaacttcgccgttcagtacaatgacaaggtcgacacggcgcagatcatgcccagcgtgtcgtggaagaagatgggggcgaagccgaagacggtgtccgtctaatacgaggctggttttgccatggcggtgtataatgcaaccgtgacattgacattataaatttggtgtgtagtaatgcaataattatgtgcgtttagtataatgcacgatgtaatgggt

SEQ ID NO: 36060 - DNA, 449 bp, Oryza sativa
  unsure (1)..(449): unsure at all n locations
cgaaacgataggggtgtgtgagtgatgtctttaaacatccatccactntaggagagaaaaaagaaagaaagggaaccagcagatgctccctaatgaatgcaaacttgatgtatcctgaattcttcttgattcccaagcaaagaaatgacgacgtgtcagtactcagtaccaggtactgtaggtattttatctgatactcttagtactcacgttcagtgcatgtgtctctgcctatatacaagtgccaagtgtgtgtgtggtcaggcttcaagtctgaacttttttctctggttgaaattagcttatggtctgaacttgntcaacgaacaactaccaccgctactggtatcgcatggtcaacacttcagctggaattttgacccggtcatgagaccatgtccatctgtacgttccctttattttcacgattaaagatatcagatattttc

SEQ ID NO: 36061 - DNA, 402 bp, Oryza sativa
cgcgatgaacacgacgtttagaatatgttggtttatgatattgacctgcgacatgcctcctgctggatgcactccataagctgtcgggctacgaacaaacacctgatccatatggcgctgcagacgatgacaccaaactggatctggtgcacctgaccgtcgtcttctgcgatggcgcgacgatggctctgcactacgacgccgttgacgatggccaaatcagcctcaacgagcggcaagtatattacttgcgttactggtggctatgtcactggcgctactccaggacgagacaacaccatggtcccgcatgcttaatatcgagaccggtatcaacgacgatgagcacgctcagcgtgtaatgctactggtgctcaacactatcactaccgtgcacgttca

SEQ ID NO: 36062 - DNA, 384 bp, Oryza sativa
agcttttcagcaaaagaataatttcgatctcttatttgactggcctaacccaacaagaccaccaccctagtccttgtgaactctataagattaaatcagatcccttaacttggtcctttgtcctgttaaaaaagtacaccgatggtccttaacttggcattgaactacaaaaatgtgccccagtcgcaaaactagattatatgacatccctaacgtacaaaaccattcactataagatcttcggtggttttaacaccgattacgtccgacttggctgctgattcatcatatgacccacgtgggccccacatgtgcagatgcgccctggacaccctatctcttcaccctgctcatcctttctcctgctgctccttatgctgtgtc

SEQ ID NO: 36063 - DNA, 384 bp, Oryza sativa
ctagcgtcaagaatggttttgaggtctacgatttgtaatgcgtttgtttatctttatgacacgccatgcggggacatatttatcataattggaccggaccggctattggaccggaaaataccggaaccagatcctctagtctggtccagttaaaagactggctatgctattggcccgatataaaccggttggaccgccctgttgtgtataaaatacgggaagataaccggagatgaacccgccgattgcacacgcattgttgtcacgtgcgtcatgggacactttggtcaaacccaataccatatgcatacaagtgaaccatcgaaccaccaggctattaaacaactcgggtttagaaggaataaattatatatattacctata

SEQ ID NO: 36064 - DNA, 427 bp, Oryza sativa
  unsure (1)..(427): unsure at all n locations
agcttgaaacttgngatgaatgctttatactgatgagaaaaagatntgtgttttcatactatagacgtgctctccttgagaaatgggaacatctaacacaaggtgacaaaactgttagggagtactttcatgattttaaaattgtatcacttatagtggtttacaagaatctaatgagaacacaatgactagatttttcagagggcttaatttcaatattcaggctgggcttgttaatgtgacatataatcatatatgccaattgttcatgcttgcttgcattgntgagcgcaaaattttggagaatccaatggagcaacaagatatgcttgtgcctcctatcactgatgttttgcaagaagatcagaaaagtctccaaaatgagaagaacgatatgtntgagatgtcacttccatcactcgcgaat

SEQ ID NO: 36065 - DNA, 459 bp, Oryza sativa
tgcccgagaggaggaaggagacttaatgtgcatatttatttgtcctctgcattttgcactaccatgcctattcttatggcaagagagagacgttgatgtgctctgcaaaatcccttcttcatgcattgcttcatgcgttccttcttcatgcctattcttatttattctgattgtagtagcatatggtttgtagttggcttcgaaagcaatataaagacatttccctttctgctatgtatgtatgctctgttactggtaagctgctagtattgtctgggttcacggtctttctgctacgtgtgttttgagtccctactaacaagtattacatccatttggattttataggacatatttaccttagaaatagcccttcaatattaaaacttaaccattgatttctataaaatgcattcttaacagctacaaaactaacatatttataaactaaaagtacat

SEQ ID NO: 36066 - DNA, 455 bp, Oryza sativa
agcttggcagaccaggggagaggctgtgtctgtatcaatcgatagtgtttacctttaataaatcttgttaattaaatcataggaaccctctctagcctaagactaccattagttgttgtccttggttgaatcttatttatagaatacacacattccctgtgaatcaatacccttggaatactctaacgtgaagtgctacagcggtattcgtgcgcttgcagatttatctgtgaccgtaacaaataccaacaacggtctattcttgaaataaattctatagaagggtcaatttgtcgaaattccaagagctacagatgagcaaataaaatataatttatatctaaaacttttatatatgtgttttcaatgatttaaaagccagcgttaaaaatatcctacatcaaaaatattctaaaaccaaatatataattaaatatcaaaattcaaacactata

SEQ ID NO: 36067 - DNA, 347 bp, Oryza sativa
ggacacttaaaactaactgcaccgatccgcaccaatccggaggtgcaactctgagaaccggggtaactacgacatgtgagtggaccaaattcatttgcatttaataaaggctatcgcatctctttatggttcaccatatatatgcctttgtatgccgcggcggcgatgtaatctcacctcaatataggaaaattttgctggctgacgctcgggtttttcttctctgtttggagggtttccagtaaatctcggtctctggatgatcattgtcttatcattgtcgctatcgtcaacaagggataaagctgttccacataggttccgatgcgcataagatgatctacgtg

SEQ ID NO: 36068 - DNA, 438 bp, Oryza sativa
  unsure (1)..(438): unsure at all n locations
agcttgcccgcatgcacgccgaactctctcttgtcggggttcagctctatgcgggcggagcggagactttcgaaagtttccgctagatccgagagtaaagtctcttggttgcgcgtcttcacaaccaagtcatcaacataagctcaacgttgcgtcctaactggctacccaaagaaattcgagtagtatgttgaaaagtatgacctgcatactttaacccgaacggcattgtcgtataacaataagttcctatgggggtgatgaatgcagttttttcctcatcctccctagccatgcgaatctgatgataaccagagtatgcatctagaatacacaaaatgtcgcaccccgcggtggagtcgacaatctgatctatacgtggcaagggataaaggtccttangacatgccttgttaatgtcggtgtagtcaatgcaca

SEQ ID NO: 36069 - DNA, 396 bp, Oryza sativa
  unsure (1)..(396): unsure at all n locations
tgtgctccaagagacccactcagtcccaagcttgtacttcttctacttccctctgatgaacacattgtaccaagcacccaccgagatgatgctntgcttccactattatctcttctcttatggaggcgatgtatataaccttcacaaacttctcctgtgcacaccacactccacttggttgaccgcatgcttccccttctcttaaaaatgctcaagttctccaacttgaaacacaagcctctctttttctctagcagcacacaagctatagaaactcttgatatggtgggagaacaactagcctaaatgtgtaagaactcactatcaaggctaaactatccttgaaaggatcttcaattagctgcttatgctattggacatgcacttggcttgctc

SEQ ID NO: 36070 - DNA, 310 bp, Oryza sativa
agctctcctactctggatataacgtgtattgtgtgtcttctcactccgcgacttgaattagacgctcgtgtatacactctacctagaccccagccttgatatcggagaattcttctcgggagataagacttttggacctttgcctgcctctgctgaaccagccctgttcctaggccccatccgtgaagttggaaaatatatctgcggctactcggcttggtttttctcacggcgagaactcttacacgagcagatcttacatggcccttcgtctcaacaagatccgaccaagccttatcaggtatgggcg

SEQ ID NO: 36071 - DNA, 435 bp, Oryza sativa
  unsure (1)..(435): unsure at all n locations
aacacattttattcttgagaataccatccccgtaaactgttttcatccatatctaatgtgtccatcctactatgacaaagataaaaataaaagatacaggttatctgacattctcctcatctcttgcgttctgggagctgctatagcgtgattgaggacaagcaccgagcatgcgcgaccacacatgacgtgctccaatgactgaaatagcaacaaatggtgagcatggcatataacacgacaagaaggttccatttttatggacatatagaagagatcagagaaaaattgacaggagcagcatggaggtgacatggcaagattggcaatacgttctaatgtcatgcggcagttgttgagcaccaatgaaatgcgacaagtggcagtggtgatctaagattcccactttgtccacacccttntacatcatgctac

SEQ ID NO: 36072 - DNA, 424 bp, Oryza sativa
tctagatagtatgtacatacgaagtgcacttatgctggatcatatttacagtagaatagtgacatgctgcctgcaaaacaaacatatataaattgctataagtattcagtagcactataactgtaaaaatggacagttttaaaaaaaaccacatataaagcacccactaaaccaaaagagggatgcagtgaattacttttctttcttgattacagccttggacctctgagtgtaacctgaagttgcatggctgctgaataaagcaaataacataacatttaactatagtcaatctaaaataggagtgctcaaccaagtacgttcaaagagtaaagtgtaataacactatatgtttctttcttgtctccattatgaacaacagcttcttcctactgaacacaagagctaatgtgctataaatatt

SEQ ID NO: 36073 - DNA, 405 bp, Oryza sativa
cacctcatctgtaaagtgatcttcagatcacgtggtgaatctggcaatagcaatgctgtcattgacaacataggtggtggtcaaagtgacatggatacttttgtgtccacacaagctccgagttgtgttcattccgtaccgatgatgacgactccgagtcacgatcgtttcgtctcagcccgttgccgatcttcccaaccggatgcattgaattccagccacccgcctctgcagtgaagataatctagaagctcccatttgggtatatcatcggccgtcagctcgacggcgcccccgcagcatcggcgccatcaacgatactctcattgagcttcaaaaagttgatgcataggtctggtgataaggcaaagtcgaagataatcaaaagaaagtgtacgtgctctc

SEQ ID NO: 36074 - DNA, 472 bp, Oryza sativa
  unsure (1)..(472): unsure at all n locations
tacgtgacactttaatactcaagctgccatagatgtacttatatgccctaatatctgtactgtctcatttaataaaataccgcggccaaagccacatatgtgcagcatatttcacagtacttaatggtcaaatacaacaaaattgttgtggcaaaaacacatttaccttgaaattttgtatttcctcctcagaaagttgtttgctaaccacagtgctttctttgctggggctaacactgtgaacaaggacgtgtaaagagttaaccaataatcaaaactagcacaatgaaatattatctacatcgacaacagaagttgaacaccttccatatggaatgaaatccncataagcgaagactaatccaaagaccatgacagctattgccaatccaacctgctgggaaatttttatttagatatgataagctagctaacaatatatggaaatgcataaccattttataataaatac

SEQ ID NO: 36075 - DNA, 436 bp, Oryza sativa
  unsure (1)..(436): unsure at all n locations
ttaacaagaactggtatggattttctttatataagaattcggagaanattgatactttcaatgttttaaaaaagaactgaccgtttaattcgcttcaacttctccataattgaataattgagtgattcgtataaattattttttcttgctacctttaatgaggttcatatcatgatatttggtacgagacattgctccctttcgatagttcttttttacttaaccttttttgcatacaacatatcgtanatttacaacatctgcgtgcaaaagcaccagatccaccaaaagaaaagagaagcaagactagggcagatcaattacttaaccccaagttgatctattgcaggatcttcttaagaagaaaagtcatcatcccgatggggtttcacagctctgtttgtgctttngtctctgcgtcttccgcttcattgat

SEQ ID NO: 36076 - DNA, 265 bp, Oryza sativa
tatcacataacttaacacaaatgtcatcactcatggaatgcacatggcagataggtgatgaacacttacagaagcactgtattttattgcccaaaagaagagataatatgccaaagctcaaattcttttatacatgataatggtctagcatacagaataaagatatattcaagtattgaaagatacacgttttcttcttttgccaccatatccactcaagctgaattttctaagttataaatagcaaatcaaatatgttatgtgc

SEQ ID NO: 36077 - DNA, 437 bp, Oryza sativa
gacaccttttaagatgcattgtaccaactcctaaaaagttaagtaactacggtataaaaggattttaaggtattaggcacttgatcacgtgcactttatcctaagcaaaaagtgcgtaagtccctaaaagaacatacaggccacacctgaaaatatgggctgcagacatattaggcctatgccaaaaaatatgccttcaacaccctttaaaggatgacgcatgtaacatgctcccgagtaataaatcttccaggtgatatagaccaagtgtagctcatatgaatagcttctgatctgagtgattatcccttatgggatactccaaaatatatataaaaattgaatcccaactggcgcaattattcggttgatagcccttacggggaataatgattggtccagtcttcgatcatagaaaataatctcagaactacgag

SEQ ID NO: 36078 - DNA, 427 bp, Oryza sativa
  unsure (1)..(427): unsure at all n locations
gcttggctaaatatgcatatacctcgtctcttctcttatgagaggaaaagaaacttacacaatgtcgagcattaatatcatttgtgaatatatttcttcgatggtaccattgtagtttcatctattttacgaatatatntatattgaaatagtggtcaacaaatcaagatgttttcctgaccaacgaaaatgacaggctatttagaaaatgttgaatttattacatagttctggacatcaaatgttatctattgacaccagcaatcttaaattntattcctgttatatattatttacctggctaatttccaactgtttaaacaaatttacccaacatgttgtcactctctttgcaccaactgcgtacagatttaacttgctcttataccaaaataatgaaactctcctctcatgatgtaaaatgatt

SEQ ID NO: 36079 - DNA, 306 bp, Oryza sativa
attaaattagatttgtcttaaattatttttaataaataataaataaggaagatattgaactgatacggaataaatagaatgggtttaagaatgaggtggagaatttttttttattagatagaggaagaagatgtaaggtatttattaaaaaatgagaaaaagttaaggagagaaaataaatatggggaaatagtaaggagaaaagaaaaagagtgggaagagagatataataatataataatacattgaaaagttatagtgaaataaatgtaaggggtaaaagggagaagagagagggggaaattt

SEQ ID NO: 36080 - DNA, 407 bp, Oryza sativa
gcttgaatcgcacatattaaaagcacaagttgaatcccttatcataaaagatatcatggacaggataaataaatggatttctgcttgtgatgaagaagcttggctcgaaaaatacaaccaggttttcagagctgattttttttttagagtaaatcctccaaatgcttccatgggcctacacatgtttatttctcagagaaacccgtgtttcgaagtcttgaaaaatggcattatatatcttgcaggactcaaagaggtacagtgctggaaggggtgctcacataaaccttaaaagggcagagaatgcacggattttagtcaccaaaatcccacgtatgtagtggttgctggataattatttgcactgctcagctattccaatgtatggcccatatatattcttttgc

SEQ ID NO: 36081 - DNA, 417 bp, Oryza sativa
  unsure (1)..(417): unsure at all n locations
agcttggagcaatgtaattattccaaaattttccctcataatctcagatntctctcctcttcctctctctcccttctggacttttcaacaagtacctagcatgcgagaccgaggtcgtcgcttccaagccgacaacgccaccctgccgcaaatcccgctgcaaggctgcacaaagccgaggccgcctcttgccgatgccctacctcgatgccgcgcctggcaaagtcggcctcgtcgcgagcctcgccaacccggagtcgccgccccctgccactacaagaaatttggccttctatgacaaaattcatatgacaaaacacattttagtcacagtagtgatgcctttatgaacaattttctttggatgacaaagcgttgtgactaagttgtaatntagtcataaaaaaatgtcaccat

SEQ ID NO: 36082 - DNA, 461 bp, Oryza sativa
  unsure (1)..(461): unsure at all n locations
agcttatgcttacatgacatgacatggactataaaaaccatcatttgatcctcaagaaaattttaagtctgctaaatagtaatcattggcaatgcaatctatcaacaatgcagcagagaatgcgagagcaactcaagcatttaagaatggcaatacagccaacagttgaagcagtgcagcattttgtaacgaactagattatatggtttttgcccaattatgctattgatcccaaaatgcagtaatagttctctttgagttccagagcaaatgagcattgggccaagcaacacaaggaaaagtgtgctagaaaactaaccaaaccaaagattccatagccagaagctatacagctatagcttgatgaactatcaaaaggaattataattggacttaaacaagcaaagaatanggctttgacgaagcagccaaaaggctaccttgaacattatcgatttcac

SEQ ID NO: 36083 - DNA, 454 bp, Oryza sativa
  unsure (1)..(454): unsure at all n locations
tatcttataccggcatatagtagtagtggtagcatcaatgagantttgctacgatattttcttgatcgcgccggctcttcgtcagataacatattaattttctactgtatttgttgttcccctttgcttttgaatttgatgatgacatctcgtcagatactaacagcggctgatgatacagtgatacttacctaaattaacactgaaacctgtggattattattttgngttagtaactatactactcctacttgttgttcagtcataccatatgaataaataatgtctcacgctttgctgcgagatatatattgtataatggagaaatgatgaaatcatttagattgaaatattataaaaatgatttgagaatgggtatttagcatgtgtatgctcaattttagaatgaaataattataaatatagttccttatactacatgttgnctttacgt

SEQ ID NO: 36084 - DNA, 435 bp, Oryza sativa
agctttgcaagtgggttgtatttttctgttcccagaatctaatagaaactgaactctaattgatgttcctcatcgcgtgagagaactgagttagactctcatgtctttgttatatttctgtctttgtgaactattctggtggccaggctatgcttttaagctcttgtaaagtcatctgggaggggtattaacctcttctattgaaaaatgaggtttacatcttggtccttttgtgcacagaaagctccatctgatctgatatggggatacagcatcttggaactcctcagctaagaaagaacttaattgaaatcacatccatccagatccaggtatttctccaatttaaagccattctattgcgtgcttcatggttcaaacctcattgtacagtcggtacacatatagttatcttagatacgtgttaccatacct

SEQ ID NO: 36085 - DNA, 352 bp, Oryza sativa
  unsure (1)..(352): unsure at all n locations
cttacgtgatttgctttctgaacagacaccttctaacagtatagttccattcggtggtaaagttattattcttggaggtgattttcgacagatattaccagttataagaaaaggttcgcgtgcctccatagntgatgcatccattacgaattctcctctttggcgacatgttactcttcttatactgacaatcaatatgatacttcttcacggtgaccttggtgagcaatgttgttaagatcttaaggactttggtgatcgggtcctatgcttggtgatggtatgttgactgcgacaaaagataatggtgaatcataaccaacatgggtggatattcctgatgatctttgat

SEQ ID NO: 36086 - DNA, 107 bp, Oryza sativa
tgggcccaaactgaattatctagccatttcctgaaggaaaaatgtctccttgactcccttaattatcagcggagactacactcgtgaccctcaactttataacccga

SEQ ID NO: 36087 - DNA, 427 bp, Oryza sativa
  unsure (1)..(427): unsure at all n locations
tgtgacttgatcgaagttcgtggcttgaacgatatgtccttagacatcaattctaaggcccattcgcgatccgtccggttgcttcgcggttatgaagtatatccccgagtggaaacgatgtgactaccgtgactgggtgactttgaaagtagtgagataatttcctaacggtgattaagacaccatatagtaactttcgaacctgacgatatctngtcttggagtcggctaatacctcgctaacgaaatatattggacgttagactttttgaaatgggcttactctcacgctcgacaccaggaccggactacaacctgtgatgtcgcaaccatataacagtacggctcttgggatgtggcgagccaaaactggtggagtgggagaagtttttgaagcttcaaagcttctgtgctcagtccccactgg

SEQ ID NO: 36088 - DNA, 438 bp, Oryza sativa
  unsure (1)..(438): unsure at all n locations
agctnggcgccaccattgacatccccctatatgtataattcactgttctttgccttgacagttcatgccacatgatggattgtcttgtgttcttggtacaatttcatgatgactgttactgaattttggcatatgctgctgttgatgcacgatccgaggaagaaagagaaagaactcttggcatgggaggaggatttgaggcgaagggagctggtctgatcgccttttttcctcttcaataaaattctattgaatcattatctttatgtccaccattttctagaatattgaagtggcttttgtttagttttcatgccctttctccccttttcgtttgttgctggtttctccanatcggaatgccatgtgttcttttcttttgctgcatatttcctttttttttatatcatgtgaagttaaccaactcaaaagtggtga

SEQ ID NO: 36089 - DNA, 388 bp, Oryza sativa
  unsure (1)..(388): unsure at all n locations
agcttcgcctgaagaagatgaanaccctgttgtgggatgacatgagtgaatgtccatatttgagaccatggctagtggtttgcgatggcatgcttctcattgttgaccactacataactttgtcatttggagcaccagtcaacacagaccgtaccgcctggacatgtcagccaagcctgcaaaatgggtggaggtaaagaagctggagaactgggcactctttatcgggggtgatgcgagaagcccgccgtttgctttcaataacccggagcgctggggagggaggagcaactgcttgtactatgctcactactcccagccatggagccttcatgggttgggtgatgatgcaaatgctgtgtgggatcctaccactgatgataacctt

SEQ ID NO: 36090 - DNA, 410 bp, Oryza sativa
gcttaactatggagtcctaccaccaaacagtcacatttaggagaaacgcccaccactcagaagcatacaaatgatgatcgatctagcgatcgagctagtagtggttgagagcaaaaactgctcaacacacatcacctcactttggttggatgcgctagtagcttttaactttcactagtcctgtgtacaacttatttttctgaaagcgaaagatgactattttggtcagatgatcagtgcatgtctgtttgcaactctcttactccagacttcttttctcactctctcattatttctactctttctcactgttacacacttacaccccacatgatatgatgcttgcattgacttcagtctccatctacttttgcaattgggccctttgcattctctgtagcattcatgca

SEQ ID NO: 36091 - DNA, 447 bp, Oryza sativa
  unsure (1)..(447): unsure at all n locations
agctttccggaccggnatcgagttgcacgcatcttcctttgatggagcaatgcttcgtagcctatcattggncgaggggccacctaagctcagttgtgtggtggcacagatgtacaactggaaggaccatatttctcatccacccatatggaaagatgttctttaccaaaatgtaaagataagaagagaaatatcctagtctcagggcaaaatttctatgtcaccatctacaaacgtcaaataatgtactggactgttcataccaacaaatcgtttgtgccaatttgacttgcgacgggcaaggccatacaggctacatcacttgaactggatgcataatttatccccctttggccatgctggatcattcattcgacataaatatatagaagttntactcaagcgaggcgctatcttccattgcacataacatagatgttctacttt

SEQ ID NO: 36092 - DNA, 437 bp, Oryza sativa
tcctttagtagatcaattttcttaaccgaatatatcatgtttccgacaactgaagacttgacacgcctatcggctaatctcaggacttataagccgatgctgactcttagccgatgactactccgggcttaccaaatttcactgttaacacgctgataagttgagggacctttggtgcactgtttccttcgggccaacatctgcccaaaccgttgttccagtggaccaaaccgttcacgaacccatggtatgccgtattcttggtttccaaacctattttctggttctctacgtgcacgtgtattttataaaacttttctataagaaagttatttgaacaattatattaatcattattaaaattttaaactaatacctattaattatatacaatgagtggtatttatacgtgtctttgaggtggccaaccccttctt

SEQ ID NO: 36093 - DNA, 428 bp, Oryza sativa
agcttcactccaaggaacgagacgacttgacctggctggcatatagttccaacgcccaactcatgccaaaatagagttcatcgatcgattaaatgacagtggtcgaaaggtacccatccaatttctaaccaattagttccaccgttgaacatatccaatgtacacaatcttttcgtgcacactccgtataaaccaactagcaaatattataaaaaattctagaaaaaaattagacatttactcctaattgtactacacatatctgtaaagtctaatgttcaaattcattatattttagcagtagcaaaaaaaaaaaagaaaatctgacggtttaaagggttaaaatctgtcagaattatttctttgttttacggcgtaaaaataatgaatttgaagataagatttcacacataggtgtaatactattg

SEQ ID NO: 36094 - DNA, 409 bp, Oryza sativa
  unsure (1)..(409): unsure at all n locations
tcatccctgtgggtggagacagttctaccaatgatgtcatgaactccatanggctacatccagctgcaacgcaatcacaacttgtttgtgccccgtttgatgccggagctagacatcaaacacttatcatgcgtcaccttggggtggtcaagattgttgatgtcagtggcacacgattgcgttcctagcggctaccaactccatatatgctgcggcagtggtggcggacgtatccactacagccacagtgagatcgggctcgatggtataccggagcatttctttcaacacatggtgggcgtgacttctggtgaatccatggtgacgatgcatgtggcgtggcccttgtcctgttgtctactatctccaagtagctgttgatcaataatctcaccaatgtgacttgact

SEQ ID NO: 36095 - DNA, 463 bp, Oryza sativa
agcttatcagataaacgatgagaagaacatcgctttcgcaacgaggcacgcatgcgtgtgacatctgaataacaatgatctctcccattatagaattataccaatcaaatgaaaatctttttcttgaaaagaattagcctgaaaattcttatgcagtgtatcacaatttggtgagaattgctagctcaacgacggcaagttgctgcttattcaggtatccctactcagatagcaccgagacaatgcacatttagcttggcacaagtaagcccagctttgcctctctttttttctgcctaaaaaatataaaaattgtgactgtgagagttggggtttgcaactttaaattggcaattgacgtcttgcagattcagttgaaatgggagagaaaacttatgccaatggcagtgagagttcatgcaggtgagttagatccatggatggagcataacagttagcacgg

SEQ ID NO: 36096 - DNA, 300 bp, Oryza sativa
  unsure (1)..(300): unsure at all n locations
ctggttgggattagtgtcgtggaggaatccgcgtaagcatctccgggattaagggagggtatctgagcgtattgatgtaagacttatttttatactcccttcggattgataatacttgtcattttaaataaagacacggcctaaaaaaaataactttaaccattattttttattataaaatatataatagtattaacanatatgtgattgtattaaaatattttttaagaacaatctatattgtggccaccatatttaaaagacanatattgtaaaaatgattcataattaaatattcta

SEQ ID NO: 36097 - DNA, 461 bp, Oryza sativa
agcttgttccatatctataagataagctttgtttttctcacgcacgcacgacaactggagagcgagatgagatgagatgaatgataaagatgatgcggacgctcacacgatgacgacggcgcggctgctgtgctcgcgagatggagatggcgcgggcgcagggagcggagactaatactggagattttcctttgacgcggagggacgggggagatgctatcgactcgcaatgatttttggacaaagtggcatagccacgactgatctaaatttgtgtgatacaacgtattaattctaaattatgaatttcagaaaacaggaacgaaataatttatccaattattattaacataattagatcctaatccgtacatgggtggaattagaaaaatacctcagctctaacaaaatggtgtatcaagagttgtgctagacagggtgtaagtttcatctttcttttt

SEQ ID NO: 36098 - DNA, 375 bp, Oryza sativa
cacaatgtaatctattgaatactctcgtctgcattcttttctataacatcacaccaacaaaactgccataaataaaatgatatctcattgatgtacctattgaagcctataacaatgaatttggccgattgcattgtcagcttgcatgttctgatttacagttagtgaccatgtatatattttatgtaatccatgatccatgaacaagcaaaaataatactttatcatatgggtaagcatgctctgctttgatgaaatatctaagttgagaacttaacagtataaaataaaatcagaccatccaagtatatatatattcattatctatctaatttgagcaacctaaaatgaatggaaaacataaacacccaagta

SEQ ID NO: 36099 - DNA, 462 bp, Oryza sativa
  unsure (1)..(462): unsure at all n locations
agcttaagatgcaaaataccatcaactattatcattatggatagaaatgaaaaccatgttttttttttattcaccatttgaagaggtaggataagtgggtatctaaatgatacttacttgtgacgaggtgatgacagttatgcccatatatttgctatcttgtacaaatgctcctcaacatcgacacttgtggcactgcaatgagtatgctttataagagctgtgcatttattggtaaaaaatggaaatgagaacattaaaaaactatacgctacatacttggtgcactcgtctaggataccaaattttggacagtggaagaacaaacgagcctggaaagaaagcatttattacccacttagtaaaggtatatatccataaaaaacgaaagaaagcatttattacccacttagtaaaggtatatattcataaaaaacanatggaaattagtttgacaacaaa

SEQ ID NO: 36100 - DNA, 471 bp, Oryza sativa
  unsure (1)..(471): unsure at all n locations
aagctngacgcgaatacgatcgatggggctcggctagngggaaatcgtatctaatcaaaccaactgattacacgcacaacgagatgggcggttgccctcgtgtacaaacttcttaatctgccctgcttctagaaccaacaccagctaatcacgcagccaacgctctaatcacgtagcctctttaagtgttaatcctcttatacttaacatggcggtattcgttcaccaaattgctaatggcccatacgatttcatgggtatatcggtttatttcccatatttttcttcaaattcctgccttcgttccaaaggatgcttagagtaatctataataggataatggatgaaattgaagttatgataattactcgaagacacgaaccaatgaattactaaatattggtttatattataaggcgtttgattattttctattcaacatttcaaaggtagtcaatatatagaaaatat

SEQ ID NO: 36101 - DNA, 438 bp, Oryza sativa
  unsure (1)..(438): unsure at all n locations
agcttgaatntaagataacaacaaatggttatatggatagattggatcaaagttgttgataaatcagctgttatgagcgttgatgcttgaagcacggacagtaatgcatattgtagaacagaatatgggaagggtttacataccttcaagaatatctattgcctaaataattattagtttcaaagcatgggattggttattctgtaccctatctatcagttatgacttaggaaggatctgatttagctggaaaattaaagatgttttttaaggtacttttacactgtcaaaatcagagtcataagaaagtaatttcaaacatgaatccaataatatccttttcttatggtaaaacctaaatattattggattaatagttcgtcaaagctcttcaaaatatacagtcaaaatacaccttatattcctgaacggaagagt

SEQ ID NO: 36102 - DNA, 434 bp, Oryza sativa
tatgtatgcaattatgcataatcagtgaattacaccaatatcacctcatcatggagacatgaaactacctctaaagaatctataagtcagaaggaatattaaacctaaaatgatgaagaataatgtttcctattagtaaacatcattacgcaaatcatattaagtaacttggcagaatctctaatagatgaactgttaatggcttaatgcattgggctctacaaaagaatggctataatacaaaaacagaaatgccatggttcatgttacttacaagataaatgcaacttgccgatgactcttatcagcatcaagctgtgctggagttagaccagtcttatccttcaccatcaagtcatcctttttgccagcctgaactatcacagtgcatgcctccatgttccccctaatatcatcccaatgtataggggtac

SEQ ID NO: 36103 - DNA, 343 bp, Oryza sativa
  unsure (1)..(343): unsure at all n locations
gcagctgctttgcactataatttatttgaattgaataatatgatgatgatgccaaaaatattcggatttgcaacaagctcatgttatccatttacactttgtatgacctgcatatcagatacagtgactgcaacatcactacggagaagtacacagatgatgggtgcaacccttacccttacagccttactcaaggggtntacttaacattagctttatattgtttaaaaaccctacaataactcttttcttcaaataaaatttgttaatgtactcgacaatgtcttacaactcattatagtatgactctagaattcatgtaaattgatagaaactttccaat

SEQ ID NO: 36104 - DNA, 270 bp, Oryza sativa
caaaactctgttgcactctctaccgccgatgcggaatatgtttaatcgggtagatgatgtgcccaattgacttggatgatacaaacattgttggactatggcatattcttcaacataaacccactcctatgtaacaatgatagtgccataaagatagccaattacacgggcaacactttagaaacaagcatattgacatacgccatcacttactacaagatcatgttgccgagtgtgacatagtcattatccacataagatccgaggatc

SEQ ID NO: 36105 - DNA, 316 bp, Oryza sativa
agcttatctcctacgcttcaggaatggattatttagaacatcaccaccggcttgccgtcgtcgccaccgactggtgtcctcgcctatacggttaagtggtcacaccaccgttgttgggcgtctacatcttcaccgaccggcttccttcgccgccgccgactggtattcctgcctgcatggccggcctattatgccgccgtttgttgggcgtctacgtcttcaccgaccggattgccttcgccgccgccgactggtgtctctgcctgcacggctggcctattatgccgccgtttgttgggcgtctacgctttcaccg

SEQ ID NO: 36106 - DNA, 470 bp, Oryza sativa
  unsure (1)..(470): unsure at all n locations
tactaagcttcttatacatatcatccacggcttccatccagatggacatatttgcttttactggttgttccgacaatccacattctggatggtacaataatcttcgcccgatgataagaatagcgagagtgttgtaacctgtcttggtagatatgattaagacgtagaanagcctctctggacacatcatatagtgcagctcgcacggtatcccgcctatgacgtgttcaaaagtaatacatatcacgttcacctcgtggaggattgatcttcacggtcatatcatattcccaacgttctccccgttgataggcatgtgaatagaattccggcttctcatttatcttcagtttagtcatcaaattgattagttgatcaatgcagtcattatcgtggatagtaattgcagtttctataagttcttgctcatgcacttctgccattgtcctgaaatacacatatgatattat

SEQ ID NO: 36107 - DNA, 346 bp, Oryza sativa
agcttcaccatgcgtttctcatttatatgttccaagcgacaataccaaataaaagtgggattcaaatcattatgatgttgcctttttgcattaatgttatagactgaacatccatcaagattcacaatgtataggccattcatatggatgcatggaaatagaaaatgtcattataatagactgaacaaccattgtccacagatctaaaaccataaccctctgcttgcaaacaagaagcagagataatgttcttacacaaagctggaatgcaataacaattatttaactccaaaactaatcctgacggtaaagataatggcatagtgccgaccgcaacagcaacaac

SEQ ID NO: 36108 - DNA, 466 bp, Oryza sativa
  unsure (1)..(466): unsure at all n locations
actaagctaggataatgcgaatgaagatgatcaattcaaccatattcttagcaacgatttggaccacccctttcctgttcctggcattattcatagctcaagcaattctgttaacaaccaaagccaaatcctcctcctcaatctgtttgagttgatcatcggatgtggcattaaaaacagcaagaaaggaaggcttcgatgaaagagcatcaacatccaaagaagaagaaaaagaaatcaaagcactcgacttagaatcaactttacgagaaagaacgttatctcatgtgttttcaattttgtgtaaagtgaatccaaagtcaaagtagacatgttaacagactcctgaatagatgtaactgtcatcccccaaattgacatatcaaggccatttaaatagtgttgagaaatctcagaatgtggataantagtatcattngaagaatcaacagatctatgatcacac

SEQ ID NO: 36109 - DNA, 432 bp, Oryza sativa
ggatccttgagtcacctgagcatgcagctgccgctccctttgaactatcctttgttcgtcaccactcccgatggatgacctcacggatgaacccggcctccataagtctatccacctcctcgcggatgaatgcttgacgttccagggcttgccgccgcacttttgccggaccgggctttcgcccgggcgcacatgaagacggggctcaatcacctccctgaggaccccaggcaatgccgctggtctccatgcgaagacgtcagcgtttgcccgcacgaaggatacgagcgcgtcttcctatttgccatccagaagaccaccgatccgtgtggtcttggatgggcccgcgcccaatgcaaccttcttgacccggaacttgtcacatgtgggcatactttgccttgtggcggtgggggcataagggccaaacct

SEQ ID NO: 36110 - DNA, 475 bp, Oryza sativa
  unsure (1)..(475): unsure at all n locations
ttatagtcacctgctgcatgccagcttgctatttgctgcagtatcttatacatataagtggatatattagatgatgttcaaagcaatatctttatacatgtgacaaatgatacatgcgggtgaatgcaaaaacagtgcactagtctagaatgctacctacaattgaattactacttactcccttcgtcccgcgaaaaacaaatatataattgaataacacattctattataatgaatctgaaggtctggatcgaggtatgtccagattcgtactactaagatgtgtctcatccagtactaggctaactttttataaggtggagggagtattagaagctaggcaattaatgttgctactatatatacaacaagaaaactgctctcctcatacctttgccttctcaacgggcctagactcgtaggagcggctcttattcgatgtaagaagactangagaatttagcatatacaatgc

SEQ ID NO: 36111 - DNA, 438 bp, Oryza sativa
  unsure (1)..(438): unsure at all n locations
tgatgttctcctacgaaaggcatnggtcttgcccatctggaagaattttgagaggaacgcggggagcatctgtcccaagtgttgactgtcatccggttcgcatagaaccattgcttcgccttccccaggagtgagaatgaaaacagacgaagcctgacagcgtccgaactgacaccctttacagtgtaggtgctgtagatctctagaaattgttgcagatgagcgcttgcgtcctcgttcatcttgccacataacgggcttgcctgcgccatagtatcatgctgctcttaagatcgaagtcgatgtgtcccatgttgacagccgggtcaacatgcacgttgtcagcagacggagcagcgaattcgcgaatggtcttcttggccctattcatgatacttggtgacgttgggatggctagtttcttttagagacctcttc

SEQ ID NO: 36112 - DNA, 335 bp, Oryza sativa
  unsure (1)..(335): unsure at all n locations
ttaagcacctgcngcatgcaagcttatctcttacgctccatgaatggattagtcagaacatcacccccggctcgcctcgaccgtcgccgactggtgtttccgcctgcacggctggcctttatgccgccgctgttgggcgtctacgtcttcaccgaccggcttgccttcgccgctgccgactggtgtttccgcctgcacggctggccttcatgccgctgttgatgggcgtctacgtcttcaccgaccggccgcctcgtctgccgccgactggtgcttccgtctgcacggctggactttatgctgccgttgttgggcgtgtacgtattcaccgaccg

SEQ ID NO: 36113 - DNA, 416 bp, Oryza sativa
  unsure (1)..(416): unsure at all n locations
taatcgtataaacgacgaagatgcgcaatgttccaagagttgtcaacgagagtcccgcctcgcgctcgagtcgataggaacactgccgggtgactttaagatatgataaatggcccttcccataaatgagataacttgtgccgatctcgtgttgtttgaattttcctcaaaaccaggtcgccgactataaaggcacgggatcgaacattgcgattatgataacgtcgcaacccttgtaagtatcgagccgaccgaatcatagctgcttccggacttcttacaatcggtgcaagtcatacactcggtcctcttcgtagcgatcttcatggaaatttcgaaagcgcanagactcgaattcaacttcacttggcaacattgctgttgcccatatacaatgaaaaaggtgactggcctgt

SEQ ID NO: 36114 - DNA, 408 bp, Oryza sativa
cggatactttagcgacctgaagcatgcagcctggataccctttctattttctttcataggactacggcgatggggtagtggaggccggtcttcttctcctcctagcgaacccaacagcggcagcggcgaccgatggccacaaccacatcgactgttcgggctgctggagcggcggccggaggtataaattaaaagagctcgcggggagagcgttttcggcgactgcagcggacgggactagaggggatggtgagaggacgactatggggtgctttatatatgcacgggagctctgtttcgggccctaatacgcggcaataactcgggaaagtctaatgctctcgccggagtaagggaatattaaaccgggaatttggaatgattccatagaaactttggggatttttg

SEQ ID NO: 36115 - DNA, 422 bp, Oryza sativa
taatttctagtgatttgtatatacataatgccagtgagttatattatcaacaaacaacgggtgaaatccaatatatcctatatatttataaagctcattctctaagtgtaattaatgctatttctcttttatttcattaagccacgtcaacttaattagttgtagcccttggatgattaatctatggtacaaaataattacctccttgtcttctcttatggagtcataccaccttatttttgcctttggataattatctatattatccttttcttttccttctctcactgagcacaatcaccatagtttgcttttgaatgagcattgtatgtacaatttaaattgttataaacaaaatcatccaaatttgtttatacctgtttttcctaatggtcgataaagatgaaagtatataaagatat

SEQ ID NO: 36116 - DNA, 452 bp, Oryza sativa
  unsure (1)..(452): unsure at all n locations
agcttatntcagctgttcttcctcctcctcttcttcttcttcatcatcatcatcataatcttatcgccataatttatcgccattttcgcatccgtccataagattatacctatttcttccccagttctgaaatgtccaaacatctatggtttacaaccacgcggcgttcttgatcggcgtgacgacggccttgacctgcaggtagttcttcaggctgtcgatgcccttctccctcccgatgccgctctgcttgtatccgccgaacgggatcgcggcgtcgaagacgtcgaagcagttcacccacacggtcccgaccctgagcgcgcgggtcaaggtgttggccgtgttcatgttgttggtgaagaccccagcagccagcccgtactggcttgcatttgccctcttgatgacctcgttcagatcactgtcgacatagcatataattgcgtatg

SEQ ID NO: 36117 - DNA, 456 bp, Oryza sativa
tactaagcttcaaatttcttacaaaagaggggaggtcatgccaaaatttctattgaatctattctggtgattaccacacaccggacgtgcctaaaagtttgcaacttcatcctccaatgttatttttgtcatactacatttgcacctatgttttgcacactttttttgtctccaaaatgtagttgtaagatgatgagagagaatatgtgtgtggggaagaaagaatatatagaaatttagttcatttgctaaataaggttttataaaatagttgagaatgaacactctatgaaagttaatcttaaataatataaaacaaactaaaatgaaaattaaaagaaggtaaacacattaaaattagtttatacttaacaaatagtttgtaagaatatttggggtaatattttatgaattttgatgaataaagaatctataatattgatgactgcattatgt

SEQ ID NO: 36118 - DNA, 451 bp, Oryza sativa
agcttggagatgcacgcacagcgtgcgagatatgtttcatgatcggctggcgtcttcagagaccgcaacgtgtagccgatcgttgacagctacaaattctgctgaaataacagaaaatttcagcctggctacccgtaaaaagtctcataaatggatgagcagtcccaaatatatacatgagcatgcacaagtgatgtaagagcacggtcttcttaccaaaaagcataattttctttatgtctgaccatacattctctatcaatgcattcctaaatgacatgaataacaaatcaaatatatataatgcatagaaatgatcaaaagagatataggtgaaaaaaaaatgaaattgacaaatattttttatttccatgttaaattattaccggaatattccaggtaatatatctagacaagggtatagtgacaagaaaaaaaagatctcaacaca

SEQ ID NO: 36119 - DNA, 410 bp, Oryza sativa
tactaagcttcaatttttaaacatctgttggtcccgacaatgcttattatgctgcaaattaatctcttccacagcctcatctcattgaaaagatactttatgcagcttgcaatatttggaaacaaataaataggttcaactttcagcaagtaacaccttctattcaatcttggagcctctttttaaaaaggacatccacctctttggttttagacttaatctttttgtgagatcgatctatatattggatcttttgggcttggaacgctgtaattattttattacacggattaatcgtggaggcttaccctatggtcttggtcaaaataataaaagtgaggagaatgttgtggatggggtcaaagtaaggattatatagcattgtccttgccgatcgtgctggctagcac

SEQ ID NO: 36120 - DNA, 429 bp, Oryza sativa
  unsure (1)..(429): unsure at all n locations
agctntatagcgcggagtcctgtcgctattttcttgtgcgtaagttgatgttggggttaggatcttgggagtttgttcttgctcttggtgttgcgataagctactaatttccgatcaagttgatccgaggattgcgtggatcttctgtcttgttcttggcgctgggtatgtgcaaatttcttgcttgcgaatgcgatatttcttttctgagataattgctattgcaattttggaatacctggacaaagaaagaaagtattgattgattcttttagacgtgtccttacccgtattagcaaacatggcagcatttacctatgaaggtcttgtcagatgctatgctcttctgcttgggattatccacttggtttcactgcttaaagaggcaagcacaagttattttctatgtacccactatagctatgtgat

SEQ ID NO: 36121 - DNA, 339 bp, Oryza sativa
atttataatgagcacccacacgtatgggaacggatgctgatgttgatgatgctgctgctgatcaatctgaatctgattgattactttagctggaagcccggaggaagcgaagcgatatcgagctagctaagataaatgattaactaagacgatcgacgatgcgatgagctaatacaccctggacagatcaaacttgcaaattgctgactgactgttgataataatgatagatggcgggccgggcccacatgttcctctctggattttatacaatgacactggatgcgcccacatggaccaactggattattcagtatggcctattgtcaaaaaggatat

SEQ ID NO: 36122 - DNA, 451 bp, Oryza sativa
taagtcacctgcagcatgcaagcttaaaattatttactagatgttgaccatttattagtgaactatgtgatcacgattgtttgaccataaaggatgtagcaagctgcatattcgtagcaagcatgtcagttgtgaccaggtattcattgggtagtatgaattgctattaaattgattatacatgttgtagagtcagtagttgaatattaaaattgctataatatgatgcaatttgaatcaacacatcatgtgaattaagagcaagtttaatgttatagccaactactagctctaaatcacctgtagtcaatttaatagccaattcatacaatagttatctataagcatatactacacttttaatatatggtcccaattgtcatacacacattgtgtcttagaagttgtgctgaatatactaaacttttaattgactcggagcattatgtat

SEQ ID NO: 36123 - DNA, 453 bp, Oryza sativa
  unsure (1)..(453): unsure at all n locations
ttgcangtattgctgtaactcgtcgaatgctgcttggaactcttttgtccaattaaactttcctgcgccaccgaggtcttgatataggcaacctctttcgctgctttgaatgaatcgactgattgcccaattccgcttgcaatcttttgtacttcatgtacgcttgacggaggcttcatttgctggatggcatcgattttctcgggattcgcctcgatgcctctttcggaaacaaggaaacccaacaacttgcctgcacggacgccgtaacgcacttcttcggattcagccttatgcctgctgtgcgcaagctgtcgaatgtcttctgcaagtcgatcgcatggtcaaaagccttgcggctttntatgacgatgtcgttgacgttagctttcacattccggcccactggttgtcaggaccttgtcacaacctgcgaaagtgctctgcttcctt

SEQ ID NO: 36124 - DNA, 406 bp, Oryza sativa
ctgcagctttgaaatagaatggtcacatggtcctctgatgcccatggtgcttttctagcgctaaagaaggccttagtatctgcttccttgctacaacttctggattttactaaacgatttattattgattgtgatgcctctggtgtgggtttggtgctgttttacaccaaggagcatgaccaattgctttctttattcgtgcagtggctcctcatcatgcgaagcttgcagcttatgagagagaattgattggacttgtaaaagctgttcgtcattggcgaccttatgtttggggacgatcctttacgattcgtacagatcattatagcttgaaatttcttcttgatcagcggctgtctactattccacagcatacttgtgtcaagaatgtattcgggtatgactt

SEQ ID NO: 36125 - DNA, 306 bp, Oryza sativa
aaatagaattaaaagaagcgaggagaaatttttgtggagaactataacagcgaaacaaaaatggagtacaaattatggcgaggaaaaatgaataagaagagaaagttaaggaatagagaaaggggaaggggaaaaatacttaagaataaaataataataaaagggaagaaaagaagaaatggagaaggaaatgggttaagaaaggaaaaattttacaaaaaaagggaaggttagaaaagaaaaagggaaataggaaatgagggtatgggaggaattaaaaaaaaaaaaataagaataggaaaagaa

SEQ ID NO: 36126 - DNA, 436 bp, Oryza sativa
agcttgatggtcggcacatcataacggatgtggaagaagatggacgtcctattgccccggccgaagccgccaagaactatgtacgtcacagcggttgggttgtgcgggataacgtgcctgtcagtacggtgtactggcgaagacaagggcacgcggagatcatgagagctttgtcccagattcggagaaagagatgctgtggaccacaatgctcgagacattcatccttcctgcgggtacagaggacaaagtgaaaaggtggactctgaagaaaatggcagaacagtttcagagcttcaagggagatctgtaccagaagtatatactgaaggggcagacaccgaacttcgacacattcccaaagctaagggatcactgggacgagttcgttgcatataatacaggtgaacaagggaaggcgatgatggaaagaaac

SEQ ID NO: 36127 - DNA, 468 bp, Oryza sativa
taagttggcacatatttacaaattacaataggttttcatatacttgacattaacctgtccttacgacgctagctaagctctcatcacgcacatacatgcatgaataatatatatccacacagcacagatctaaatcgttgcgatccaaaagataattaggagaactcgtcaaatatagggaaacattcgatatatgaaatcaacgttcaaatatatatatttatgtacttaaaaaggaaggaaaaacaaacagatcctcaccgcttggtggagcagcaaccttggtgggcgttggcgcggatgatgatataatacggcgtgcaagctaagctatgcacggctgatcagtgagcaaaatcgatcgtcgaaattaagctgggcctctgtgcacggtgtgtatatatagagtgtacgtgtgttggttctggttcggtcgagttgtacccccgtaccgagattcgtaacgag

SEQ ID NO: 36128 - DNA, 417 bp, Oryza sativa
agcttactccggctaccaccagatcatcatgtctaaagaggactaggagaagacagcattcatcacgccgttcggtgtattctgttacatcaagatgccatttggactgataaccggaggaaacactttccagcgcacggtccaggggcactcaatgatcaccttggacacaatgtcgaggcctacgtcaacgacattgttgtcaaaacaaagacaagcgactcattgatcgatgacctccgggaaatgttcgacaaccaccgacgatattacctcatgctcaacctgatgagggatgttaggtcccgatcttccgataggtattgataaacagtcgatttgggcggagtcccgacacaactcaatccggcttctgaacgaacacgctactgagccccgcaatcgcagcaccatgtc

SEQ ID NO: 36129 - DNA, 322 bp, Oryza sativa
  unsure (1)..(322): unsure at all n locations
gttactgttagacttaatattatcatttgtatatttcaccatatcaagtcgtatttagctagctagcagtttgtgtcgaagttagttttttccgtgtgcatactcagcatgtcaatagcatttgtgatttagtttgatggggggcgttggtgggggcatgatcctcgagaaacaccatagcagcttggtagagaataaaaatgatggcgagcgcatgtgcgggaacaacgatgggaaggttactggaaagagcatactctggggctgggattgatagatngaggtatcatacatgatacctatcatatctatatataccata

SEQ ID NO: 36130 - DNA, 432 bp, Oryza sativa
  unsure (1)..(432): unsure at all n locations
agatgcggcttttttcctgttatgctggattatctggaaggagctcaatgcgcgagttttcgaggtcactattaagacaaacaacgaggtagccgacaccattatgtacgaatggtggattgttggcttggcgcaccgatcatatagacatctgtgttcgtttctccaacaagagttggaagaaatttaagatgctcgtgatgcgcttnttaaactgctaaacgtacgcttcctttgattttctaagaaaaaaacaaaacatatatcctttgattttcacttaaattggtgggtccaatattatacaccgttagatgaaactgatcttataacatactataaaccatgggtcccacctattctctccttccgtgccaaatacgtacgcgttctttccccttttccttattcttctttattccatatatatat

SEQ ID NO: 36131 - DNA, 454 bp, Oryza sativa
  unsure (1)..(454): unsure at all n locations
agctcttctttatgactaaacattctatattatgcccttatggatcgtcaaagacaaaattatgctgctaagagaaaactcagagtaacacatgacgggattagttgggtggttgggataatcctgacaaaaaaacctgcgaaacgctgccgcacgggcgtccttccatccaggcctctggtcatgtcaccctgcgaaattccagctgccagctcaagaaatggcacatgaaatcagtaaaatgatctttgaatatttaatcctgngagaaagagctaagctaagctaaatccaagccaaggaatgtggtcctcacgttgtcaaatctccataagatgctgctaatgaagcatcggttatgctatcatcgtgtcacattgtccaatcttaaatgaagccaggcaacatggatcagtctgcaatattcaaatcatggaacaggacgcttgtcatg

SEQ ID NO: 36132 - DNA, 455 bp, Oryza sativa
  unsure (1)..(455): unsure at all n locations
taacatcgactcctagtggactttcagagaagatctattctacttttaaagnaaaaaagagcggggatatggtgagtctggcactcccaccaccaagtcccctaatctgacacatggaacctacgtgaaagtcgtttttgcatttaaatattttgtaaaatcaaaggtggtttttattattattttgtgatgaacaattgggcattggagattattggttttgttatttggaatttattcacgaagtggttttggatatgattggatttcacactgatcgcatgattcgtcattttatgtgaccggtcataccgagctctggtatccggttagaccagcgtgtaatgcgcggtcagaccggcgcatnccgcggtctgtgtcggtttcggtttcaggttgttatttagatgtccgatttatttcatgttataacatctagatggatactatacgta

SEQ ID NO: 36133 - DNA, 452 bp, Oryza sativa
  unsure (1)..(452): unsure at all n locations
agctcggctgagcggacaatgtagtgggaggatgagaggaggcangagcgccgggaatgcaagtccccggcggttccttccggccgtcggcgaagtgaggccaagcagaaagcccccgccgaggacatcgatgatgcgataatgacctatgtttccaagaacctgtggccaccattgccactgtcgatgggggagcgtgtgctcacgtctctcgccggagcctcaaggccatgaagcgagagcttctggccgcggcccctactcatgaggcgacgcgccgggcgcggtggtcggaggttgccctcactttcgaccggaccgaccacccaccgtgcgtcgcccggggagggcagattgcgatggtggtttcccacaccatctgcaacgtgaagatggggcgtgtcctcatagatggtggagcggccctcaacatcatttcccccgcagctttt

SEQ ID NO: 36134 - DNA, 159 bp, Oryza sativa
tgacaactctatctaaacagaacgccctatgtcatggtccgtaccgacgagactctcatcgtaccatttgctagactactgccatgccaaaacgttgttgtgtgagccgcatatacgatggcatcacatatggagatgcaccgatctggtgcggacatc

SEQ ID NO: 36135 - DNA, 412 bp, Oryza sativa
  unsure (1)..(412): unsure at all n locations
tctctagacattaatggtatgcgaagatgctcgtgtgttctatgcgtcgcaatctcactcgatccgcctgagaatatgaggtttcttacaactattatgctacttcgagaataggagttcatacttctccattcgtcatctgatacatcttcagatagatcatcacatacaataagtcctctactccacctgcaaacgctgatgaaccgcgactatgccttatcactacggaatatcttatgtatagcaatgatntttgctcgctcaatcgctatcactaagaaagatgatgcgagagaagtgggtgcgcaccctctcatcattgcaaacatgctcaacaagtgtgctcttcccaacttggcatgaccaatgattgatatgacatcaaatatgtcactatatggaggttctg

SEQ ID NO: 36136 - DNA, 458 bp, Oryza sativa
  unsure (1)..(458): unsure at all n locations
agcttcagcctcagcattcatagcatcatgtactgacccgattcttcctgcacccgccagcactccacttacttcatggtcccgaatcacgaaaccccaagcactngttttatcagtttcaaaaaaggcaccatcaacgcttcagctccccaaaggaggaggttcccaggacttttgcactcgggggatctccggtttgtttcatcagggaaatttctgcaaccatcctttatactctgaaaattacttcctccggcgctcttctttcctcctcagcattcaccttatttcaagcatcccaccagttccagagtaagaacactttagtctgtctggttttctcccccactttcaggatgtgtttgcaaacttccgaagctgacacacactgaagaagttctagccgggtgtcctccaaatctagcattctccaacaatgcttcacanaattgcatttc

SEQ ID NO: 36137 - DNA, 110 bp, Oryza sativa
aaaacaataaaatagaagaaaggcaagaagagaagagaatggatttttattgtgtttaatttttagaaaggagaggggaggagtagtatgttataaagggaataggagaa

SEQ ID NO: 36138 - DNA, 383 bp, Oryza sativa
agcttaatgcagtgtaaagcattgtaacctcatatgttcagacctgaatgaccatgcactacatacagaaaaatcaagcagaggctgccgggtttgatatgaaagagagcagtgagacagaggactgttaaacagaagtgagcaatcatttgaggattcgtatcagcaggaggagatttagctactgccacacccacgtcgagcttcaccttctgattaccgcgtgcttgtgggggctcgatgcgggcacagatcttgcaagaaccaaagtctgcgtgggatggggaaggagacggaaatgactcgcaagaagtcgatgggaagacagcgacggtaaccactggctccgcacggcggcggcgacggctggctccgcgagcttg

SEQ ID NO: 36139 - DNA, 440 bp, Oryza sativa
  unsure (1)..(440): unsure at all n locations
gctttgctattgctcgtgatgcccgttagcgatgcgcacacacattctcacacagtcgcagtcgcttcacatcgacaccgtgcggtgcgcggtgattaacgtctaacatgtggtggcgccgatcgaggcgcgatgttcgcgccttggcggtggcggctaactgcttgtcgttcgtgtctacgactgcacccgctaaatttatgtttcacccattccacgcgtattaatacataaccaacccaatttcaatgtaattattcttttctcaaagaaatatggtcanaagtatacgcaaaaaacacgcgtacacttacatctattatcacacacgcatgtgtcgtcccatacgcactcgtgagactcgccatctgcggtacatcatataccactgaaagaataatgtgctgtatatatgaacacttattgactcatatcaagta

SEQ ID NO: 36140 - DNA, 449 bp, Oryza sativa
  unsure (1)..(449): unsure at all n locations
tacttgtcttatagtttatgcgctntatctgtctttggttttatcgcttgttgntttgtctgggtcaaaatacagcttatccgagtgagttttatggacctactgggccataagcttctcaagctcaagcatttacttttctaattagagatcagcgtcttggagctaatgtgggatctggccaatgacccacaagtttatgtaaatatctaatgcgttccccaacgggagaggttatttttggaggggaaactatgcgtttttgggaccttcgtctccatggttagaacctctaatgtgccccaacggtttggacttgaatagngtgaataaagacatacaaccttggcaagaacgacgttcggcagaatatatgacccatgctcccttangctctttaaaatctgtgggtggcgagctaccgagatcaatgcacgtaaattatgttc

SEQ ID NO: 36141 - DNA, 447 bp, Oryza sativa
  unsure (1)..(447): unsure at all n locations
agcttcgaaacacaaacaaaaaaatggtctcatgggtatgaaacggaaagcagccaagtctgtatgttagcaggattcgggctggcacccaaaacttaaacccttgccttctcatcacctttgggcccttcatcataaacttaacattgaaatccactgcaatgtgggacgatgagtaccacagtgccagatgtatagacataccgcatccacttaacaatgatttgcagcaacaaaatattcattatggacaacaatgaagcatggaatggaagtaatgacttgggatttatggaagaaactttgttttgtacttaaatttaattttatgatttgatacaacatgattcatttctgtgctttcttggcaagtaccaaagacctatttctttctctctttttgtggngaaacagacattntcccgcatagatcactgctcattttcc

SEQ ID NO: 36142 - DNA, 418 bp, Oryza sativa
  unsure (1)..(418): unsure at all n locations
agcttattattatgtattagcggtttttgttgggttntatctattnttttaattgtgctatggttcatgtgtggggaatatttgtgggtcccaccttattacccactctacatatgtacatttagggatatcaattttaccttgggaccgggtacccacgagtaccgcacgtaccacacgtaatgggtatgggtgtgggttagattttatgcccttgggtatggccgatccaaacccgatgtattaacaggtgtggcgtggggtttattctatgcacatgagtgtttcgtggatacccaaatatttatgttcatacataaactttagaagattgtgtgtcaacagtcaacactaactaaaacataaaacatatatatgtaagtgcaacaaagtcatataggattaatggctgaatcat

SEQ ID NO: 36143 - DNA, 356 bp, Oryza sativa
accctcctgtgcctgcttatctgtgacaactgcttctgacatatgctctttctcacgacctccaccaccactcactcttccggttgatccacaccgccacgagagcttgtattgcgggtaccttgtgcacgctcaccactcgtttcataatatgccgcaccacgaaaagacaaggaatgagaatgaatgagtgaatgacatgtggcttccatgttatttttcttctccctatttaaccatgctgactatacaaccttatatgcgcatgtcggctcataactattggcatttgagttagtgtgcaatttgactggttgtaaaagtctatgatatctgatgacgtggattataatctc

SEQ ID NO: 36144 - DNA, 455 bp, Oryza sativa
tcagtgagacaatggtatgttgtgcacctgtggtggaatcattatgttattgcatcaaactcctctccgagtactatgatttgctagtgcaatagtgcacacaccatacagagatgatacagcgctatgcacccaactgcttttgtgtgctcaacaattacatatgccaccccatgctatctataatctactcagcaatgaattaacgattcacagcactttggtttgactactgattgtgggaaacttaaagtggactcaagagcaactagctattcgtttctagttgtgtaactgtggccacctcaataaaccattcctcatggaatagaagttccaattgaacttagctcatctacaagtactggaagatttcttgctactagtgtgaaattggtatcttatctgtgggccgactcttgcattagttgatctgaatatgttaacatggcttc

SEQ ID NO: 36145 - DNA, 308 bp, Oryza sativa
  unsure (1)..(308): unsure at all n locations
ctgttctactgacacgagagagcacccagtccaaagagaaagctgtgggaaaagaaacaaacccaaagggaaaacagtggctccaggacggtccatggtgcatcttaggtaaaaaaccaacaccaatgcgcaaganactcaataaacaataacgaccaagccgaaacagaggacgagcggataagcaggaccaagtaaacgtaaaaatcccttatattagaaaacggagggaggacgcggtttcaattctctctcttacgctcagttgagttctctagccagagatgctaaggagcgccctactatca

SEQ ID NO: 36146 - DNA, 422 bp, Oryza sativa
agcttgcgatgctgccagagccgtataaattcccggcttataaagagactgcagcgacgtggaattgctgctcaacattaacaccacagctgagatgtccggcctgtcggctggattctcttggacacacagtagcccaattgcacgcagctgaagacctcgttgtcagggtatcggccacccaacgacgcgtccactgcgtcagctagggatcgtgtcctccatttctcccatacctgcacaatgatggagctcgttgttcatgaactggaagctagagcatgtacgtacgtttttctctaaacatagttagaaactaaagctattagtcctcaatatgtactcacgtagctcagtagagacgtggagtcggcagattcataagtatctgacttggtggaagcatacatcccgttgctcct

SEQ ID NO: 36147 - DNA, 441 bp, Oryza sativa
aactaagctatgtggtggatataaacaaagattaatgggtgttttatttatgcagcttttcgcaccgcccgtcgcctttaaaaaaacatgagattttctgaaaaattatggcaggtttctcaaatcttaccgggtggaagagagatacaattcatagatattgatgcgaacatgagatactgggtaaaaaatgtgacatggtgctggagagcatgggaatcatacccacagtctgaatgatgcatccaatgcctatccaatagatcatatttaccttcttcactatatacattgatacagtaaatatatgaaccaatagagcgaaacttcattttatcacgatatatcatagacacagaataaatgggtattcatctacccatcatatatggtggcacctccctgcgtgaggcactctttggatatataaattccacgtta

SEQ ID NO: 36148 - DNA, 455 bp, Oryza sativa
  unsure (1)..(455): unsure at all n locations
agctctatctgatacactggagggaaaggttctactttaactaagtttttattttcacattttcttataatatctattatttctggcaactgtgttagcaccaaacaatttaacatgacacacgtgtgcacacagaaaaaagaagtgggggtccctgngctatgaatggctattggtcaattaagaattaatgaatgaaactattcattcttgggacaatgaatctagtatcattaaagaattcatactcgaagttttctgcgttatggctcttaccagttatcagactgcaagatgccatattgtagaaaacacaaacagcttcataatagcttgcatcctgcctaaatcctgtangaactaaaaccttatttatttgtggcaatttgccaaatgttcatgctaccaataaattgattttctaacactaggtaaattaaatatgcagcacaagt

SEQ ID NO: 36149 - DNA, 445 bp, Oryza sativa
tcgcgaggcggctgcaattacaaaaaaagaaaaaaggatttatgtctcggtgactcggtgatccgcaacactcaaccgctcgctggatcgctgcggttcgatttctatgcgttgcgttgtgttgcctccggtgaggtgtcgtcgccacggggcagcatcaaccaacagcgttcagagcagccagcaccgttggtttcgcatccttctcagctcctaccatggtttcccaaaaccgcctgtggccgaggctaccgcgccccatcggtagacacgataccacggtaaccgtgaaatcatacaaaaccgtgtaaaatttatcaaacatttaaattattggttaaaattatttgaatctaagaaggttaccacgtatttatattactgtactccgcggtaagcccggttaccgcgctgttaccatcggttacgtaaacctcgctctatc

SEQ ID NO: 36150 - DNA, 444 bp, Oryza sativa
  unsure (1)..(444): unsure at all n locations
agcttgctattgacacatcctatgactgtctcagtccaagtgttaagattgaatagtacaatctgcagtattggaaaagttctcaccagtatctgtgcaatactgactagaacctttatgatttaaatcatttgtggaaatcacaattcagatgctttgcagacgttctgagctgccctcatgtatcgttttcttgtgtcaggtcattgtgtcacaagcatccgtgcagcggtgcaatgctgtcgtagacttcctcgacaaagaccgccctttcttccctccaacaatcaacagcgcggggctccacgatttctttgtgaatgtagctagcgagatggttggccccaagaatgtcagggacaagcagccactgatgggtgccgaggacttcgccttctacgctgatgcgattcctgcaacttactactacttnctgngcatgta

SEQ ID NO: 36151 - DNA, 372 bp, Oryza sativa
  unsure (1)..(372): unsure at all n locations
cttgagatgccacagaccttgtcttttgaccataccctcctctttcttcatatgttacggaaactacccaaagcagaacanaattcagataaactcttatgattatttctatgattctacgtaagattttatcattggccaaacagcaaataacattatcatggcaccctacggatgaacttgtcatgcaaattcaagtacattacatatctcccacggcattgtttttatcttggatcaatgacataccccatgcataaagcaatcaatgtctactgtgtcaccgttgacgatgccaagtcattattcgcaaacatgcatcatacatatgccttgaataaaaccaattaggtgatactctctatgtcaaat

SEQ ID NO: 36152 - DNA, 420 bp, Oryza sativa
  unsure (1)..(420): unsure at all n locations
agcttaccaagctagacttttaagttntatcccatttaagttaaggagccaagctaccttggtatccacccctacagccaaacttcgtctaacgctaaaaatgtacttataacttaaaaagtggttcataacttccagatcctcctttttttgttttggtttgttttggaccacaaactaccactcttccactcaacaatataaactaaaaaaactacttttctggagaatgaaaagtaaatttctggaacagacaatgaaacttatacattgattgacgccttaaaagtaagcacaacaaaataaaggttcatatcttaaacgacatcttataacaaagcacaagaaattaatgaaatgttcccacaccacagggaccacttaagactgagatgtttcaaacaaattaaagtacagaca

SEQ ID NO: 36153 - DNA, 449 bp, Oryza sativa
  unsure (1)..(449): unsure at all n locations
tactaagcttgtaattgcccgccatgaaaagtangggaaataaatctattttacatcttcgactctcaccacatttagtgtataaaacccagtctggtgtttaccgactttacaaaccgtttaattggacataaaatagaccctttcactaaagttatgctcaagaccttaataaagtgctatggctttcaattaaaaaccgggtctctgacctttcatctaaaaaaaacctcaaatgctaccagtcagattcaaacaaaacaaatactagctagggaaattaagtgattgcacacaatgtatatattaacatacacaattaagtatggcatagagtcctcgcnagcatatnttatttctagctgacttctagctgtctaacatttgtggacatgcatcatcttggtgaccacaaaantaacaactcaagttcactaaagctacacaat

SEQ ID NO: 36154 - DNA, 423 bp, Oryza sativa
  unsure (1)..(423): unsure at all n locations
agcttcgttntcanatggtcaagctcgggcctggttgagcatatatggccgatcatcgcatgcggtcccttaagccagccgcatgcgatgatcgatcttttattccgtgcgggtgttttatccagccttgtgcgataatggatttttgatgctgagtatcaatatgcactggaggggccgtagtttcaggcgccgtcaaatattatctggttgtgactttctgattcactatacatataaacgaattttgtgtagtatatacttagtaacatgaccttttgttattatttaatgtggtaaagtcttactcattctttgagtttgagtttaaatagctaagttcaataataggttataacgttctttataggttatactgcttttactatgtggaatatgtgttattatctatgagatacttta

SEQ ID NO: 36155 - DNA, 275 bp, Oryza sativa
aaattaaaaaaaaaagagaaaaagatgactgaactgaaaacaaaaaggaagaaggggaagaggagggagaaatattgttgggaaaaaggaagggagaagggagagaataaaaggaagaggaaagaaggaggaaggaaggaggaggagggaggatggaaagggaagaagaggggaagaagggaaaggagaaaaaaaagtgaaaggagaggggaggaggggaatgaaagacgggaggagaaaagggacggaaagggagggaggggaaggaagggaga

SEQ ID NO: 36156 - DNA, 465 bp, Oryza sativa
  unsure (1)..(465): unsure at all n locations
agcttattgcaaccaagacttttaaaggctatcaatcctacatggcatattggattctactggtaattaattactgaagccacacagtcagtcggactggagtgctcgatgtggtctccgccagtagaaccacccgaaccctccacgcacacagagcacacagaccttcgtcttccatggcgcgtgcagtgagctatgtggccaaacgaatgcgtcacatcgtcgcctgcaaccaaaatctctccacttgtccgcttgtttaatttactcgcttcacatgggggcaccgcanaacggtaggcccaggccggccggccaaggtccaaaataaacccaaaaggagcgacgccgatccattaaaaaagttcggtagccataagctctcaactgttgttacagttatgcattcgacggtcccccgggtgccccgccatcgcatcaatccacttcaagccactcatttca

SEQ ID NO: 36157 - DNA, 459 bp, Oryza sativa
agcttgcacgtcagacctttctactcctcatggctacaatcttgtttacaagctttgcaccggccaagctccaatagcctaactcatcttggatgcaattggttatttgataagatgtcgtcttttttcctctgaagattctcacatctcttctttccatatctcctatgcaatgagcaaaaagactgatttgagcgctttgtgttttgttgtcttcaggttgctagtcccttgcgtctactaatccaacaggtctttgctagcactccacttctggatgatgtgcccttgccactccaccattatatcatggcaagtcacataagcactgatgaccatatttccagggccctgacccaattttcacataaattctttctttttttgctcgtatattccctcaaatgttcacatgttttttttattccacctattcttcgtcatttttcccattccccc

SEQ ID NO: 36158 - DNA, 395 bp, Oryza sativa
aacaactcattttagagaaatcaaatttctggaacccaccaaaacaagaactttagaggtattgcataaaactagacattcactgaacaactttgtctctaaaattgggctaagataaatcatacataaaccatacacaaatttataaaatgcatataaaattcatctcaactcattttatagcaaactcagtttctatagatccaccaacttatgttttcctataaaagaaaatgaaattgtatacatactttagatcaaatgcctctgaaactattatctttaaaatgactaattttaggtaagccgaactctagaaattcacataaaattcataattcatcttagatccctcttgaagaaacccaaggtctgtaaaataacaaaacgtatac

SEQ ID NO: 36159 - DNA, 424 bp, Oryza sativa
atgttggcgatggcacaagttagcttatatcactttattcttttaaaagcagcttatctcccgcacggggcttctacattctgggatttattaagttgctggtgaatacaagggttatgttactttccctgagctgttaaagctagttctgctttcaagtgctgcttctcttggaggaaacaacaccaaaatataatgcaaatgacatcctcaactttataagtgaagatggctccattttctgatgcgtaacagcgtaatgaatagactcactgacctgctatttgtcacctccatttatgtaaccgttgtctaatttgatggtcttaccgacgaatgctgaacgaactatatgcaatggagaaggtaaatgggtattgtatttattccaccaacatctgtctttactaatactataaattcc

SEQ ID NO: 36160 - DNA, 334 bp, Oryza sativa
  unsure (1)..(334): unsure at all n locations
catagtcacctgcggcatgcaagctntattcgctaaagtgaagtgaagctgttcattttttatcctagcatgctgctcgctcacatggccttgatgaggacagcggccgcagcaatatcctggacggcaggcagggtgaccatgttgggggactccatggacacaacgacccctgggtaaacccggtctcttccctgatgagctcttcgcatgacagcggggatcatccccggcaggatcaccgccctgtgcagccgcgagaggaggagctccctgtctatattgcccgtttaggcgactagcaccagccccttgtgtaggacgaggccttact

SEQ ID NO: 36161 - DNA, 385 bp, Oryza sativa
  unsure (1)..(385): unsure at all n locations
ctcagcttgtaccctattctctacgacaaacgaattgccgaagaagcttttttgttgtatatatccacatcattccacgcactccactgcaattttctatagagggatggattaacttgacaagacatgacattattcttcttctatctggaggtcacgcacctgaagactaccgaacgagaaacagttttgcacttgttcataatgtcatactctgtgccaacattccgtctaatatattgcaatctgnnnnnctgctactgtatatatataagatattggatgactgtgcctatcaactgcttattgggccattcacaccatgttgataactgggcccattctattcctggaataaggtcatatgacgtcccgtaactctaca

SEQ ID NO: 36162 - DNA, 459 bp, Oryza sativa
catgcaagcttgtaacggatcggcaatgttcatttatctcctaccgctgtgttgaatcctatcattaaactatggccgctccgaggttgggttttaaatttcattggtcaaatttattcttcgtcatcaaaagggcattggttcgtgcagttgcaatggattacttcactaagtgggccgaagccgtgccgctcgagaatattacttgtacggaggtaattgactttattttgaagcatattgttcatagattcggtattcctcaaacgttaaaggagcttcttttatgtccaaagaagttttgctgaatcttatgatattaagttgttaagttcttctctttactacactcatgctaatggataagccgagtcgagtaaagaaacattgttgaaattgccgatttgccagttgaggtaaatcttggctctcttcggtatttcaagtaagacgacttgt

SEQ ID NO: 36163 - DNA, 366 bp, Oryza sativa
  unsure (1)..(366): unsure at all n locations
aatgcatcttatcattggggagtngagatccccggcagcccgataactgtactctggagatagtaccgttcattcatgacttttggatgccactatggatatgttacagtccatgcttgacttggttcctgcttacctggacagcctagcctcacaaggcagagcagacttaattgacatttcgagttctatattattgagggtttacctggcattatgtctattctgaaggtaccatcgcttaaaatgatggaatctaaaatgagaattaatgcatactataacaactaatctggatagaaattatatacagactcgacaatgaatttggataaaaggttatccatattcgttatctaattttat

SEQ ID NO: 36164 - DNA, 445 bp, Oryza sativa
  unsure (1)..(445): unsure at all n locations
agcttccctggattcaacttatttcttgctatcatccatgattcaacagtttcataagcatctaacatgattaaatctggagcaaatttatactgcacaaaaacaagttaaagagcaacggctagaattaaaaaatattaaatggtaattttgtgtaaaacagaaaatgtaaccttgttgtggtagaatcaataataaacttattttgagttctatactgcagcattcaaagaataaatgtaaagccattatgtaccacaaggtctactagaacattatgtcgctgaagaacttccaatgcctttcttgcttctccttgctgacaaagtaaatagaaaatgcataaggacttgacatctcagctaatgccaatgtggttccaagtgcaaaggtacctcatataataagtaaaaaacttgtattntcaagataactgaatgcaatg

SEQ ID NO: 36165 - DNA, 462 bp, Oryza sativa
actttgaaactttgagcatcatatatatggcaaactccccttcttcatatatggagtagttttaccggcgatggacacaaatgtgattacaaacgcccttttgccaccggtcatccatggatgtgcgaccgtttcttcatcgatcgatctcccaccggataacctcattcaaatacctatctagtttgaccttcgagaagttttacggtccttgagaaagtacctcgaggtacctaaattttacactaattattttttacctcgatgtacttaaacctgaaggtatcaagttttatacttaaaaactttgatatatactttccagtaatttctcaaggatggtaatattgtcctggctccaatcattgcacaattgcatgactagttgtgtattccatccgtcccataaaaaactcaattctaactctataatttggatactgcttgcaagattcatagcta

SEQ ID NO: 36166 - DNA, 344 bp, Oryza sativa
atgctagcttataaactatgtgcccattgtttttcttatgatatagacgtcacacatacaccgcctcataatgtctgcacatggttatacattcaggtcagactgatctgaagcactattgtgaatattgtgggtgacatcgaatcacccgacctggtggaatctgcacaccttgcttccatgagctggtataataatactgtgcttcacgaagattgatagttcttttattccagtaggatgtgctgctggttaataaaacaaacagctgatgaatgtgtatagcactctataatgggtttcgggagattggctacgtctgtctatatttagtgacctatgcc

SEQ ID NO: 36167 - DNA, 364 bp, Oryza sativa
  unsure (1)..(364): unsure at all n locations
taatggatgtttagtatataatagatacaagccatgcttttctacatataaatatgaattaacaccagctagctctgtttggatgatattntttaatttgtcacgctttgtaagaagtactcgagatgtctttgtacatgataaacttatattcgaattggcaagcgatatttgtcagggttatagataccacatacctaataggtgttgactaaatctctgcatgacccaccacatatcatgttttatatggaaacaacctttggatataggacagctccgcataatgaagaacaactagagtttacatggatacgacaagtactactcggattgattcatattgtttccctagtttacttgg

SEQ ID NO: 36168 - DNA, 464 bp, Oryza sativa
ggatacttaagtcacctgcggcatgcaagcttcaatgttctatttatgctgtttcttattatttcatattccataagtcatgggagttgactatggctcgagtgtggatcgggagggttttgatgctgccatggaagaaacgaggcagaatgctatgaatgcacgcttcaggatgccttttattcttactaagagtagaagataatcctgaatcggtctctccgtttgatatctctgatagtgtgatatgctgctggtatttcattatattgggccagcgttctgctcatggttgtcaaggtgtaaagtcgagtcaaggtacccctggaccgactcgtcgacttggtcgactagtccacgactagtcgacgacttgtacacaactagtccacgaattggtcatgctacaggggatgcaatatatactactgttcttagcaatgtatacagtattaactatggac

SEQ ID NO: 36169 - DNA, 479 bp, Oryza sativa
  unsure (1)..(479): unsure at all n locations
actcagctatccgcgttgtggcatttagattgtgtctctttgcactatggatgtactgataagtggccccaccctctcagcggatgaaccactaatatgttgcaagagaaccattttggcaacctctgtcaattctgatgtctcggatccatagctgctctaccactcaactagttccatcgtttctgcatccacctacacagattctagtgcaaaaaatcccttcttcataataaagtcattgagttgctcgcgaaggactttttcctcatctttattattactattctctcaaatgcttntagcacacctgtcatggcctcaacatcttgattcggtgctctccttattgtgccaccgggagcacgtttttgaagataatcttgatcataaaaccttgtgcanacagcataagccatacagtgaagttgaacactcatctnttttcaacgttcaatgactatgttctctacctctgg

SEQ ID NO: 36170 - DNA, 405 bp, Oryza sativa
  unsure (1)..(405): unsure at all n locations
agcttccatgttactattactaccactactctgcctgcctgcatgcatgctatgttgatgcgtgtgatttctcgcgtgcgttcgtgagatcacccacccaaccggccgcgggcaggggccgtatcgcatgttccgggttgggccgtttcaatttgtaggacagacttcttttcgcttgggtttttgagcaactatttaaggaaggaagacatggcaggggcaacgccgaggccaacgctcgacggtcgagattgaggggagtattggagctgataagtgggtcctaccgtttttatttttatccttgtgactgacatgtgggtttcacaagctgactcagccagtcaacatgatcaaagatgccacgtgggacaaaaccgccttcgaaactatctngggagtcga

SEQ ID NO: 36171 - DNA, 359 bp, Oryza sativa
  unsure (1)..(359): unsure at all n locations
tctatttaggatcgcttacagttcccttttggccattgtcacaccgcacctgcaaaatttattgcagttttgtanaatacatgccaagaatgtgtctgttttcgaaagatttaaaaaaagagactgtccttatcatgtacctttattataccagcttattctacccaagcgccctaaaagatcacagattgctctccaagatagaatctgcattctttatggaacatgttattttgctgaacgaaatgttcgtaaccttgaagcctgcataaccatgttagttggatgcctttgaataattaaaatgtgaacatatcgtacctcctgactgtgcctctctccgttaacataatatattc

SEQ ID NO: 36172 - DNA, 396 bp, Oryza sativa
  unsure (1)..(396): unsure at all n locations
catctctttcatctctagatcgaccctatggattttgggtgtgtgacttttggcttttcacaactttatctttgtatggtatcgngtctacaagaaggtcaggaagtgatgttcgtggctgattgcaattgtgctaagtttggaaggtatggtggcactgtcttggaatgaggggagcaacaacactangggcctcgtttaggtggtgcttgttgctaattgggttgaatccctatgtctggccttagctggttgtatctggcaatggtggttttgcatccttcttgatgacattatctagagttcatagagttttcataggcgaaaacctaaagtctggtcttacttgtttagagcataacaatggcagcacgtgcacgcgtcgtcctctttttg

SEQ ID NO: 36173 - DNA, 412 bp, Oryza sativa
agcttgccttctgatgtatgagcgtgcctttgatttatcctgttatcaacatgagatagaacaaagaaaccgcaattaatcctataaatgattgccgatcggctagatgccgatgacataacatttatttcaagccgatgtgatgctacatcgatcgacaaatatcaggcgcttgacggcaggcacgagctataaaccaaagccttcatcttccaggagctcctcttctgggtttgggaaaaattgagcaagactgagtacaaccaccgtacccaacaagtcacacccacaagtgcagatataatgaaagggagtacaacggggttataatataaagggttaggggttgcagtaaacagcattaaaagacacttaattgctcaaagctattgtgataacacggtcctggagc

SEQ ID NO: 36174 - DNA, 403 bp, Oryza sativa
gagtttttactggactcatcatattaactgtatgtaagactttctgtgaattaacatgacttcttaatctggatttacgtgattttttagattagccggagatttccccgtatatttagctgtatgcaaagctcggaccgatcctgttgacagctacgagcgcaccacgttggcaactcccaaccaacggctcatgttcagtgaggctaggcgagggagggaaaacgatggcagctgcgtcgctggcactcggatcgccgcacgctgaatcgtagcgatccatccgtcgattttacttcttgcccttatacgttatctggatcgacatcgcgccgacatgttcggaatatgcttgtccatgagtctacgtggccgcgcatggtaaatttactattactactta

SEQ ID NO: 36175 - DNA, 402 bp, Oryza sativa
  unsure (1)..(402): unsure at all n locations
gcttatgcctgacggtactatngaaaagttctagtctctgcttgntgctaaaggctatactcataaagaaggcgaagatttctttgacacttactcacctattgctagattgaccacaattcgtgtgctactttccctaacagcctacatggtcttctcgttcatcaaatggacgttaagacagcttttcttaatggagagctggatgaggagatctatatggatcaacctgatgggtttgtagttgaaggtcaacaatgcaaagtgtgcaaattgttgaagtctttgtatggtctgaaacaagctcctaatcaatggcatgagaaatttgcaaaacattgacatctgcangctttgcagacaatgaagcacatatatgagtgtactatcgccatgtggggg

SEQ ID NO: 36176 - DNA, 471 bp, Oryza sativa
  unsure (1)..(471): unsure at all n locations
ggatacaattgatgttcccgcaactttcccaacaccatactgttatggtgctgatggtcnttccacgatcgtgagcatatcataatgtcatcaatgaataccacaacaaacttgtccaagtattccatgaacactttgttcattaagttcatgaaaaaagcangtgcattggttataccgaatgacatcaccgtgaattcatacagcccgtatcgcgtggtgaatgcggtcttcggaatatcttcttccacaatacgtaattggtgatatccggacgaagatcgatcttggagaatacagtggtacctgtaagttgatcgaacagatcatcgatccggggaagaggatatttgttctcgatggtgacttcattgagagctctgtagtcaacgcacatcctcttcgtcttgtctttcttcttcacataaatcacatgatcaccccatggggaagtactcggacgtatatacc

SEQ ID NO: 36177 - DNA, 462 bp, Oryza sativa
agcttgcgaagtatatgcaatatgagttgtcggtgcctaagataataaagatgaagccgctctaccatggtgacaaagttgcatatccatgatgaagtgaacacgagtcagcagcaacagaagcaaaccggtagcgaagacgcgcaatgtgaagatattagcaccattcggcggcggaagacgatgatgtccatctatagtggtagcggtatataccaaacgtagaggcaatgacaccagtcaatatcagacgagacgaccggcggtgaagacgataaggccaatcataagtggcagaataatgcagccatggaagtgaagaaaccagtcggcagcagatgtagacagcttgtgttgaagatgatgacgcctattattcgtggtggcaacgtggccagccgtgatgacgatagcaccagttggcgtcatatgaggcggccggtcggtgaagatgtacgcgtt

SEQ ID NO: 36178 - DNA, 391 bp, Oryza sativa
ggacctttgctcgtcccgagtgaatgacgaaaggaatcatatacttggatgttgatcatgaattgccaacgccgctatctcaaaatcaggtgcaaggtatatgtactctctctcagattaaataatttttggcacggtggcttacccttacccctgattcccacgatacactgcttttccttgccttgggcggttgaaagattgaacagcaatgtatattaccaatcacccgatctttttattcaactcttattccggaagttttaaattgattgtcataagaaaaccaaattcctcatatgatcactcagtctctcttagtgtataacatgaattcctcaccaaatggtgtcttgttgattcctactctaaggtattatatgtatagctc

SEQ ID NO: 36179 - DNA, 433 bp, Oryza sativa
agcttcttcgacttctgaagactactgattttttcttccgctaggtgtagtactctatgtctccatattatgcctatggtttcctgtgtcttatttttggagatgagatgaatgagattttagttttaaaatcacagcatatagacttgaatttctttggctgagtacttatgctgaccctcactccttatcacgtaaatcgaagcaacgtttagcgcataattaattaagtattagttaaaataaatttgaaaaatggattcatatgattttttaaagcaactttcatgttgaaaatttttgcaaaaacacaccgtttaacagtttgtgaaacgtgcgagcggataacgagggggagtgagttgtaaacatgcattaacgaacctagccttatggcctgtttggtggatgttaagattctgaaaggagctgc

SEQ ID NO: 36180 - DNA, 454 bp, Oryza sativa
  unsure (1)..(454): unsure at all n locations
agcttggagctgcggactcatcaggatactttatcgttgtgatatcaaatgctggtgcgatgcgctcagcagtcagcattgttgttactgatgatcgaataaatgggttcagcgaaataattaaaaacagattttatgattcttcttgcagctctgaatcttgctgctggtttgaaactaagaatcctgtaaggctagtagtgttctattaggcataagtgatgaggcctcacgcctgcaatgctgctaatgagaataatcctgttggccctgcagtgctgctttgagaatactatagcataacacgacacatgcccataatgtgttgttcgattgtgccatgatacttgcatctttcttctatggctatccgttatacaccatttgtcctcatgctnttaccatgcatgcattctgaatgatatcattaatctggagtagataatgtcctgat

SEQ ID NO: 36181 - DNA, 405 bp, Oryza sativa
  unsure (1)..(405): unsure at all n locations
aactatanatactcaagcttcagaatatacaaacttcattgcttgctgacaaatcgtattgtttaatcctgcggccccaactggatcagggagccttgtacgtattgcattcatactaactcattgacatgtcactagttgttaaataatggtagctagaagctaaatggtcaaatgttatggtgaagacaagctattcatatccatcaattcacctcatgtgcaatggaactcatttatggacaaatcagtacctgatccaccaacagctgttctccttcatggatccttgcgagcaagaaaaactggttaattgaaaatgcttgctttccattgcatactttgcatacaggtgaattgggtatgttgttgtgttcagtatgcaaagtgaaatactgacacatt

SEQ ID NO: 36182 - DNA, 135 bp, Oryza sativa
cccgtgtccacgcgtgactgctgccctctctttgcgcctagctctcccgctttcgactcgcggcgagacgctgggggcgcgacgtgcccaggggcacccccttcacaggagtgcgtcaatgcacaaatggttact

SEQ ID NO: 36183 - DNA, 423 bp, Oryza sativa
  unsure (1)..(423): unsure at all n locations
ggatacatcacaatacacttgaatattccttctttgatcaagcaaaatcaaaataggagctgatattaagcgattcttcaactcttgaaaactctgctcacattcttctgaccacttgtactttacatccttttgaaaaatcgtgtcatgggcttaacaatcttggaaaaattctctataaacctccgataatatcctgcgaggcctangaaactgcgaatctctgaaattgtctttggttgtttccagttggttacggattccacattactatgatcaacggcaactcctccggctgagatgacgtgaccaaggaacttcacttcagacaaccacaaatcacatttgctaaacttggcatacagttgatgttctcgtagcttttctagtgcaaagcgaagatgttcttcatgctcttctttt

SEQ ID NO: 36184 - DNA, 449 bp, Oryza sativa
  unsure (1)..(449): unsure at all n locations
tgaatcggactcaaccggtcattatagacatgcataaagacatatcacaaacaacctgcgattagtgaaaaataataaaatagattaactaatataatagctaagagatcttgataatcaggaaaagaactccgctgtaaccggccaaatgatcgggtgagttttcgacacagcagctaacgatgccgatatcttgttgttgtagattgatttgatcagccggggaatattggccgactggtttaatccagccatatttttggggcgcgtgtcgacaaagtataaacataatgcatgttcatccagtcatgcatggtgctcataaggagctcttgcttcctacttcatggngattgatcacgacgatgcgaacaacgccgcgtggactcgacataatgctatacggctgcagcatgtgatcttgtgacagtcatgcatcatgtataaaa

SEQ ID NO: 36185 - DNA, 440 bp, Oryza sativa
  unsure (1)..(440): unsure at all n locations
agctntggcgtgtcatgcgcatcttgccggtgtacgccgcgcggttctcgttcgttgcggcgtgagtcagttgccctcgcctttcgggctgaggctgtcctttgctccgcccagtggctggctttccgctacagtttgcgggtgtttggctcatcatctaggcacaccaggtcgctaatgcattctatgatgcttcgactcattgacacataaattcacactgtacacgctatggtactgtactactatcacgcgagcctaatctagggatagcgccctctcgcaagtccggatgggaacagtttgcttttgtcatgggccaaccatttttggactgacattntggatttatggccgagcagatgggcgttgctattactgatcaggtaggtatcttttgttactgcttcaantttttcttcaaactttntcatcacatc

SEQ ID NO: 36186 - DNA, 322 bp, Oryza sativa
  unsure (1)..(322): unsure at all n locations
acttgcgtcngaattganaattattatttgaatgtatatgctttttgaaaaatgtggccccctcctagccgtgtttcacctttcgccagtattgacactatttttatttagttcacaattttaatatttttgcgagtatgtattcaaccaccgtatattttttattactacaaaatttttattaacgaagacacttaccattgtgtaatacacaaaatatggacaatatggtcattttatggaaaacataatggtcaactaatggaaaaggcatgtttgagatcaatatataaactcacgggtatgaataggattggttgat

SEQ ID NO: 36187 - DNA, 395 bp, Oryza sativa
  unsure (1)..(395): unsure at all n locations
agcttggcgtacaaatggcgcaagtagttttttcactaaaagtagcttacgttggatttggttgccacttcggttcttacctaccgcacttggacgcttgggtttgaactttgaacgaactcggagctttccctgtagtctcagacggaaacacagcgtatgctgctaatactactctatttactcgtactacgtatacaaaatattttaagttatcatttccacccatcaaagtagtccgtgtcatcttccctgccaagtgccaagaggggaaacaccgaaaaaggttgagttctgatccgtcatatcatgatccagcaattcatatcagggctcacctaanagtcccaaacatgcccagatagatccagagatatttctctgagctacacact

SEQ ID NO: 36188 - DNA, 341 bp, Oryza sativa
gtgacacttatatactaagctttcagccatactgtctcacctctctgagatgaatccattttagatattggatgcccggaccatgcatcgctctctacgcttgttatgctcatttctataaactatatgttgtatccccatttggtagggagaaaaggaatttcggatggttgttatccttatcggaagatttcctgtggagtactattggaaccccatggtgttattttctgaattcctatgtaatggaccattccaaatggattatggtggaaatttcagtgatgtatacatcatatgaaacaccatgcttcttgcaacctaagttttcttctgtcgca

SEQ ID NO: 36189 - DNA, 430 bp, Oryza sativa
  unsure (1)..(430): unsure at all n locations
gcagcctgagattgatatcccactgagcatgatagctcagaaatgcatgctaagtcccctttcatgatcaagcccttctcacctaccgccggaaacagctaatgaactctgcaaatttgtctgattaagtactatacttaactacaccggatacgagccaccgtcagggcaggcagctggtcctccaccgacacaatctgctgcgacctcacgtaatcacatccaagttagagcttaattacatggagcttgtcgaattagagttagaggtagtagttcagaacttcagaanttagattcaagaatgtttagagtttcagactgtcatgcactgtcaatcgtgtggaaagaaaaataaacagaatataaggaaaaggagacaagaggcaagaaagagatgagacataagacatgttaatcttatactaca

SEQ ID NO: 36190 - DNA, 102 bp, Oryza sativa
atggattaaccatgtttatgacctcgtaacccttcttctttagcttctccaagaaaggggaggtttacacggccttcttggtctcgacggtgatggattata

SEQ ID NO: 36191 - DNA, 465 bp, Oryza sativa
ctgcagctttccatggactcctgcttttctgacatactaatgggatatgtttactgcaatccacccaatcaacacaaccccaccagcatgtatctgcacaattgaaagaaactaagtaagcttggcttaacagaatggaagaaacaactaaaagagatgcccaggagtttgggtgagactgacttttggatggattcaaattgtattgcgctcttgtctggcgagtttaacggcgttctgttcattgtttgccaatatacgagcactacaaattggcagttattcatgcagttgcagcaactggtaatgttctatgacataatttatcagtcccgggtactatcacatttccagaccagaccccgctcataaacagtagcaccatgatataccagaccagaccagactagaccagaccagtaaagtaatgaataatctgtatgtataaagcagtccccctaacaa

SEQ ID NO: 36192 - DNA, 362 bp, Oryza sativa
tccggttgttccgagctcgtcgccatcgtcgtcgaccgcgctactgtcgtggactccccgctgggcatggtcacactcgggacattccaacccgcgctggcacccccttcctctacccggtgccccgccctccgacgctctactcttgcttggagacagatgagagaaagagaggtggatggccatcgccgatggtctcgcgccgtatgctcgtatccccgccattgatgctgacggtgagagatgaaggggaatgatggtcgtcccgccgtcgtcgtcgctgtcgtacccttgccgtcgctgcactgcgtcgagcactcactgacatgtgccatgccggcgagactggaaagagaggggga

SEQ ID NO: 36193 - DNA, 314 bp, Oryza sativa
cttgagcttgagcttgagcttgagatttcttcttcttcttctcgcaagacgcagagagcgagggatcagatgctgctccacctccaagtgcaaatgcaaccaaagccgtggaaactgaatctcccgctgtcgctgctgaatctggataacaccacccactgcatactaggagaaagccgacgtggttgagccctcgcctgcgacgtccgatcaagtcgcagccggagaagaagaagataaaaaggaaacagcagcaacagcaacataagacgagcaagtcatggatgttgagacctcccctgcggcgcccgagc

SEQ ID NO: 36194 - DNA, 278 bp, Oryza sativa
ttcataatgattttagacattacacttattaatacccatgatccaccaaactaacgcgattttgagttcaaaagtgtacgtcctactttggtttgctactgaaatctttcctcattaactaaaatgatattattccatcggtatagcacggacattattaattaagtccatttcatgaaatggcaggatcaatcaaagtcttatagttcaagatattaatccacatagcaccctgtgagaaaagatagtgtaatgcttgccatgtcacgatgtcacaa

SEQ ID NO: 36195 - DNA, 452 bp, Oryza sativa
  unsure (1)..(452): unsure at all n locations
agcttatttntgtagacccaattacagcctattgntttggctcctttatgaatttctactaagtcccagactccattatgactcatagattttaattaatcttccatagcttcaagccattnggatgaatgttcactcgttattgctctttaaattaggtgggatcatctaccttcccaatatcttcacctaaataaacctcataataatttggaatggcagatctcctctcccgttgtgatcttctaagtggttcattttccatcactgacggttgagaaggttcctctagaatttcttcattttgtgcctcagaagtatgttgagtgtcattatttaattctttattattttcaacagagtcggtattaccaaaatttttatctggtgctaccacggtctgagtcacaggtacaacatgaggtaccaaatgtattggaatattattctct

SEQ ID NO: 36196 - DNA, 420 bp, Oryza sativa
tcatcggaaagcgtgccaatggtgttacattattctgatattccagaaactaccagattattctattggctctggttctgaacttgaaattggtgaaaaagccgcatatgagctgatgatagatgggaagactgtacgagtagattaactggtttgctgggaattggttgatgaacagtccgagaaatacaatgagagtggttttccaagtgaagtaacttctatgatcagcgtcgatgctggggtccatttggatgggagaaatatatcggagaaaaaagtaaagctattggtgttgaccgttttggttctattgcgcctgcttggaaaatatacaaggaagcttggtttgacagtggaaaatgtcattgaacggacaagtcactgtgaagtatcgattgctttaatgagcatatatat

SEQ ID NO: 36197 - DNA, 454 bp, Oryza sativa
  unsure (1)..(454): unsure at all n locations
agcttagccatggcttggaaaatccttacatatgtctcgagtcttggntagaactattactcaatcccctttagagcaagtataatagtaggctataagccaactataaccttatgtggagaaaagagaatttaaaaaatggaagggttggctctcatgcaagagctagctattcacatacttcaagataaatacaataaatatataggtgaaagatagagagaggaggagaaagaaaaaagagataaccttatagctcagctactatacatgttaactctaatataagttataagttaatagttggctctattattaaacttgctcttataggggtaaaggaagtataattgagtgaaaaaggagaatatctaactgaaattaattacaagtcctaaaatcattatggctatagcacaatgatcagctctgaaattaattacaagtcccaaaa

SEQ ID NO: 36198 - DNA, 330 bp, Oryza sativa
atatttaattaaaaaaaaaaaaagggcgaattgatgctctgcgaactaaatatatgattggagaaaaagagaaaaaagatttttcaaaaaatgtcccaaggagaacacatgagtaatcttaaatatggaaattgcatcatagaacagttaatatcatatgcaaatacaaggataatgcaaaccaaggatgtactatgaactgttctcaaatttggttacaagaagtgaatatccttggtcgagggcgacaattaagaagctctatttggcataaactacatgttggaaaacaaaacccttgaaattaagtaacattaaacataaatgaga

SEQ ID NO: 36199 - DNA, 443 bp, Oryza sativa
agcttgagcagatcattgccactgtatctactactaccaatatgccaaataccaatctctgcattcaaaccagcacttgccatatgaaagtacttttcagtaacagttttttccttaaaaaaaaaatccaggatgcacaagctattgaatgaagtcataaatcaagggatctgtctaaatgatacgaatgacagctacttgatttgtgcaggccaggacattggaagatatgtatttaagccaggtccaacaaaggaaagaaacagaggaatctctttcaagggtacaacaagagtttgaacaacttaaaatacagcaagatgaggtcaccgtggaacttcagagagtcaatgagcagaatgagaatctactatgtcaactctcagactccagagagcattttgaatggcttctatctgagcatgaccaattgctacgtgaac

SEQ ID NO: 36200 - DNA, 78 bp, Oryza sativa
cggcatgggggagacgtcttcttccgttttttatatcttcaacccccacagggagacgtgggttggctgaaatgtaat

SEQ ID NO: 36201 - DNA, 420 bp, Oryza sativa
  unsure (1)..(420): unsure at all n locations
ctcgacccggatcttaagtcacctgctgcatgcaagcttggtcacctatatttatgggtggttatgggagagtggaaaaaatgaaaatgggatggtgactcatnttttttatgatcctcctgcttgcacttttattccagagaacatcactatactttttttttcatcatgcttgagaaatttgcttcattctcttttgagcagagttttttttagctcatgtctcatttggcatggatcattagaggagagaccatacaatgtttttagtctttatttggtggatgccgacttctggtgtagaagtttagcatatgaaagtgaatggaatgtgttgctaatcctacagtgcggagaaaaagcacaatttttggtggctaactgcacaagactttggtcatgagaatatgaaaataatct

SEQ ID NO: 36202 - DNA, 403 bp, Oryza sativa
tgatatctcacacgcatgtacaatgtgagatgcagttcttatcttaaatattctatcacttcgaccaagaaatatgataggctatcaatgtttatcattgtgaatagaaaaatgatacatgaaaaataaaacgaagtttgacagtttgcctgttcagattgggatgttagaatcacagtgtgagcatggaacccatggaagcatgaaataaaagatgcatgccatctatacatgatgcaagtctacagagaaagagattgatgacttgactcacggaagtgaggacggcatcccaactgcaaatgaatgttttctatgcgacggcatgtggtttcaatctgacctaccgcctatatgttgaaccgatgaatagtgatgatggcgcgcacaacggcggatcctt

SEQ ID NO: 36203 - DNA, 459 bp, Oryza sativa
  unsure (1)..(459): unsure at all n locations
agcttatttcccacagtatgccaccaaaaatatgcagaaccggtacacttattactagcagccttaatcatttgagcattagaaaaatcatactcatcaaattgtttttctactgctagctcccaattaatgtatgcagcggaacatactttccatcatagactggtaacttacatgcaacttgtgcaaaattatagtcatgtacctcatatgcatcacgtgaagaagtcgtcatatctcgtcgaaggtgtagatgttgacgttgagcatgaccatcttgtttccccttgcgcaatcctgccatggttagcagcnaacaagaaacatacacaagaatatacacgctcttatcaactactangtactggcagctcatatctcacacacactcaagcttttaaccaagctcttacaagatcttaccaatgcaagtggaatggtgatgtacaccgactcaac

SEQ ID NO: 36204 - DNA, 409 bp, Oryza sativa
tgcatgcatattgatttagaaatagtctagctccacttgttcttgctatagtatttgtatacggacactacttcataaatggaggagaaacgatggaaattcaccgttcaatcaatcaaaacctgtgtcaaacatatggattgatgggcccacttacccattgaatcatttacaaatgggcccaaccaccatgccactgtgctgatgatccatcatacgacgtccagtatgaagcactgtgctagggaggcctgctaggggtcggacgaccctgcctgtctccgctggcctatgcccataccaatgacagttgtaatctaccttccaatgacgcccacaaccgtcatcctcatgctatataatgacctttcatccttcattccagcatacacaaagaatgattcgcgaa

SEQ ID NO: 36205 - DNA, 272 bp, Oryza sativa
accaacacacccatcagcgattgcgcagctagtccaccatgaaggcgaaaataactagtcgtcaatgatgaagctgccggaggtgaaaacgttgccatccaccatcaacggcgaatacgacagggccgatgaagaagaagggctggtgatgatggccaagacaataatccatcaaattgttgagaagacaccaaaactcgagtagctccctcgatgtgagcatgcgtatgacgaacattgatgcaacgctccttgaagataaaaacgacaat

SEQ ID NO: 36206 - DNA, 122 bp, Oryza sativa
tgagcctaagcacctaagctatgtgttgcaaggaattattcctctttgagacccttaaaacgaccacaactatacgtaccctctaaaacaaaccggatatgatgaatacccgaactattgaa

SEQ ID NO: 36207 - DNA, 451 bp, Oryza sativa
  unsure (1)..(451): unsure at all n locations
agcttgtgcaagggcggttcggtgcagtgatctgngctacctcaaagagcttggcctcgccgtcgccataaagatgtttgccaaatattcctctaagcaagggaggaaggagtacaagtcagagatcaaggtaataagccgctacgccaccgcaatctggtgcagctcattggctggtgccatggccgcaccgagctgctcctcgtctacgagctattccccaaccgtagcctcgacgtccatctccacggcaatggcaccttcctcacatggccaatgaggtttattaattaactcattgatttagtaattttcgttatgtgcaatcgacacctttgaaattcaactgatcagctgacttggatgttgccacaggatcaatattgttcatggactcggatctgcactactctacctacatgaagagtgggatcaatgtgtagtgcaccgt

SEQ ID NO: 36208 - DNA, 284 bp, Oryza sativa
tctcctccgccgcgaagctcttggttgcgttgacgatcacatggttcgcgaaccgtctctgcccatcccgttctagatctacatgatgggatcgccttccgtgtcatcgtcgtcgtcgttcgcctcctacgcctacctcatcttcttactctgatgtcgtcgtcgtacgagtacgacgactgctaccatggcaaagatgagcacgacgaacagtgctgcgccgacgatggctcccgctacaaccccgccacttcctgaaccggatgtatgcggggtgacggtga

SEQ ID NO: 36209 - DNA, 434 bp, Oryza sativa
agctagatgctattatacaatctctcaccgtaaactaaactctataataaataactcttgatatgatccctattggcaccttcgttagggaggccaaattccttctttgctgtaactgtatcgagtctgctgtaacaactgttcttatgggtgtaacttaggccttgtttgtttcaacttaagattattgaaatctagattattaaatcagatgtctctaaactagattatattaagctgacataaaataagctacgagttgtttgtttctctggattattagaggcatccaagggtagtgggtctctagacactcaataatctggaaaaagctcctctagaggagaatatcggattatagtaatctggcttatagattggaataatctaccataataatctacttgattgtttcagcctacttctaataatct

SEQ ID NO: 36210 - DNA, 329 bp, Oryza sativa
tatcatattatgaaacataatattttaatttgtatcttcaacatgatcaaagaaacaacactaatgcttttaaaagagaacggatctcgtatatcaattaggaatacagaaacatatcaaaaatttaatcagactattagaaaataaataaaactccggatatgaatacagttaaaaacttgaactaaaatgaatacttgcaatactacaagtgatggaaaatactgtgaagttcgtacttaaaaatgcatggcagtaagcgaaaggaaattaatgaaaattggaatacccattcacgcatacctaagtaaaaattagtcgaagtcata

SEQ ID NO: 36211 - DNA, 335 bp, Oryza sativa
cgggcctgccctgccctgtatccggaggagtttctacgcctatgtcgtttgtgtggtgagctgtcagagacgtcagcccataagaggggtaattataacacgcacctgtttgtagcctgttttaagccttgatgtggtacacccgagttaaaaacgaggattaaagtgtgagcaaagttatgcgcatatgggcccattcaatgtgttgagcggactattgtgtttattggagggtgttacaaacatacctttggttatgtgtgatacttatagccccatcatgcatggctccttgtgtttttcgacaccgttaccattatcttggataccaaata

SEQ ID NO: 36212 - DNA, 336 bp, Oryza sativa
  unsure (1)..(336): unsure at all n locations
atctgaccctttatcccaccatatcagatccgtgccgcaaataatgctacccaagatagaaagcctggtatgccgattgagccgagttacgctggttgcttatccaacgccagacaagccggtcccccatgcccaatagttggacggatagcaccgcatcccataccaccagtaattgtgagaggacagggacagcgagagcgccatggatgtccnccccaagagttatcaacgatggccaaagcacatcggtggcacgataatgagaagttctggcactaaggaggctatcgagcgaccctcaatccactgatccatctagaagagagtcgatga

SEQ ID NO: 36213 - DNA, 443 bp, Oryza sativa
  unsure (1)..(443): unsure at all n locations
agctntgttgagtaatatattttcctttcccaaanaaaaaaagaaaagcaaatgaggccagggggtattggtgccaggtgggcctgatccgctccatttgcagcctgacatgggagtatcagaagaatatggcacataggctttttataagacacatgcaatgaggaatatcaacacgtgctttgggtagtgaactatgagaatgcccgaaagtctaaagagattaaggtggtgtactatatgctacttgattagacagaggtatatgcatacttgcacaaacatagcaccagcttaccctgcaatatggtcccgtgcagacaagtgcagccagccaggcaaatcatcaagcagcaagcattgatctcggtcgccaaatctcaactatgctctgcagctccccagcatatcttacacacataatcccaacagtgcatcgcaaa

SEQ ID NO: 36214 - DNA, 392 bp, Oryza sativa
  unsure (1)..(392): unsure at all n locations
tgaatcaacaatcataattcatgatttcatacgatttattatgcaacatcttatcagcacatacgttgaagaataaacacttaacacatatacctattgcttttataactctttctcaaataacctttagcacaaaataaccaagagaattttttttaaccttttcttttcttgagcctttnttctcatatgtttctcttttattccgggtgcgtccctgtcgtcaagactgtttccagtgattcggcacccattattttgctcacatcgaatacgtcattgtcgtcaagactggttccaatgattcagtattcattttttttcataattttattgctcttttcacaatgagcaatanaatctatttgatgaataacaattcattaaacata

SEQ ID NO: 36215 - DNA, 283 bp, Oryza sativa
caaaactacttggtttgcaccatggtaaggacaaaactatgatatttataactctaatataacaggagggagaagaaatccatagttttgtgatactttggcttcaaaatggaaccttggtgtgaaacctaatagtttgggatacaacaccataaatatgtaggtgtggagataatttgaaccaaatacctattattttgtgaaatttactcataaaatatatttgagaagagagtaatggtttgtacagaaacttcttaacctgggtcttaaattgagcttg

SEQ ID NO: 36216 - DNA, 440 bp, Oryza sativa
  unsure (1)..(440): unsure at all n locations
agcttcacgagctaacgaattattacaaatttataatcgccagatgcaatgatttgcaaggaaaatcaaggagcagcagacggtgcggcgaagaacgcgggccgactagccaagtgagatgattagcagtaaaccaccgggatcacgaccaatcatccatgtgatccagcctgattcctcacacataaccacacaccctgctcatctgctgggctagctggccatcagcaagccatatcctcctgcctgtgatctaatctaaccagatgatcagaaagcgaccggataacaattcagaaaaaacttatccataatataaatttcaaaacttaattttcgagttgattntcacattnttatatcatagnttcttttttaatattagcttttcaatcgctaagaacgcatgaaaantctaattatataaattattattatct

SEQ ID NO: 36217 - DNA, 379 bp, Oryza sativa
  unsure (1)..(379): unsure at all n locations
atccttttagtcacctgaggcatgcaagcttantatcacaatttttttattgagtaactagctcgatcatgaacaatcaatgcatataagatcaaagaaatatattgtagaattaactttgttgggttttggattatgacatgcagatcagcatgagcttgagcatggatgatgtgacgatgatcagtccgcggtgagccggtgccgcggtgtacggcgccgccatggtggacgacctcctgatgcattcgtcgacgcaccatgcatgctgtcgccgccggtagcttccctaatgagatttactccggtccaataaaaagtatctcgaggtactggtatcttactatttccccttctttncggtcttctttcccactta

SEQ ID NO: 36218 - DNA, 426 bp, Oryza sativa
agcttatatagagaagagaatgcatgcatttgcaatgcatgaagcaggaatgtcagcggcaggcaaaatgaatggtggcggttgagtaatggagtttgaaagcaaagagaggatgcatgagaatgtaagtatgctgtgcatggagtatggtcggatcaacaggtgcggtgtggcaccgtccttcgcgtccattgcaccgtataagcccggtaagcacttgattaattcgtttgacatgactttaaacatattttacgttatgtccgctattttgtaatgaaaaaccatatcggcgtatatttctaaggtttgaacaattttttttctgaaaatttaagcattttttattgaaaaatgacaattcttggcccgggccgatcctataggctctcccattatatattaaacccaaaatttgaaaaaata

SEQ ID NO: 36219 - DNA, 439 bp, Oryza sativa
  unsure (1)..(439): unsure at all n locations
agctngaataatcaattaaaaggttacattattgttaagtatgacatgcttactttttttgagcactttgacagattggtgggagataagagaaatgaggaggtgatttctaagcaacacatactacaccaaagctaaaggcagagttgagaatactgagagatatggcagaagtttatactctagcagtcttaagatatttgcggaagaagtaatgcagtctttgaattgtgacatattctactgcggtgatgttgatgcagaaaataaaggttagtggaaagaatcatgaacatgttaaattctcaccgttggaatctactgttaagtgcagttgcaagaaagttgaattcgtccgcatcctgtgctctcatgcattgaaaatacttgacatcaacaatatcaaatcagtttcgcaatagtatatattaaaaagatg

SEQ ID NO: 36220 - DNA, 375 bp, Oryza sativa
acccgtgatccttacaggcgcctgcggcatcaagcttgatcctcgaatccgcgttattgtttcttcgagctcggaagctacacgcgaacgagacgactcaacaaacagcgaaattaaagccctattattgacctctaagcgtgccattgtgtagatctcgagatttgacgatctttggaagttgagcggagtctaacggatgtacggctgaaaagatattgaatttctaagattattggatttttggtctaaaggaatacggatttaattaaaccctttgaaaaagaaaagaatgagggaggaggaacagactttcctcgggcggctatggtgctgccctagagaaagggcgcggctcggccgagctaatgggcc

SEQ ID NO: 36221 - DNA, 361 bp, Oryza sativa
actacttctgctcttaaatataccatcctattgactcttggtcatatatttaaccatgtatcttatttagatagtatgcgcaaatatatataccttcaatgatgaaagttagttcaatgaaacaaatgatattgacgcaattccttttactaaacaagttacaatatgtacctgcagcaatatatgttggaaccgtgcagtatatcgagcctagctacgcaaaaaaacaaaaagagaaataaagggaaaggaaaaacattaatcatgcatgagcagtatgcccggtactggaatttgtcaaaatattgcgagaggagaataatacagtactatactacctaggtttccatgcatatgcccc

SEQ ID NO: 36222 - DNA, 397 bp, Oryza sativa
  unsure (1)..(397): unsure at all n locations
tttgagccatgtatttgtgtatcccccgactctttgtttanttgggaaacgactgaacatagagtcgagagttatagcttcttatcgtcgagtagtcattgcttgattgaagataaatgttgaagatgtccaagtagaaatccatgatgacaaagttgcattgccgtgatgaagtgacagaagcaaactggtagtgaagacgcgcagttgtgaagataaaagcactagtcggcggcagcataaccagtcggcgacggaagacgatgatgttcatcagtagtggtagctgtctaaaccagacgtagaggtgagggcactagtcagcagcagacgtagacagcttgtgttgaagatgatgatgcctattagcggtgacggtgatgtagccagccgtgaa

SEQ ID NO: 36223 - DNA, 399 bp, Oryza sativa
  unsure (1)..(399): unsure at all n locations
agctntntcgccgatcagagcaatgggtttcatcttcggcatcgacgacctcgtcttcccacccgggcagacgtttcggttcggcagcctcgacttcatcaccaacaacttctgcaagatttctctcctcgactcggaatcagaccagtcgggagagaaccggctttcggtcccgtttggattcccgaacgcggctgaaagctatttcaagaccacctcaaccgagtcggcttcaaaccactcggccgagatcgcatcttctccaacgataccagatcaagatgatggggcttacccaccggtcctgatgaagctccccgacgatttagcggtcgtcttcaccacgacagcgcctttcatccgtaggcctaagcggaagtctgttcaacaccgatttcg

SEQ ID NO: 36224 - DNA, 415 bp, Oryza sativa
ctgacaagggcagtctatggggagccgtgaggtgataacttacacttgggaggtgtaagctctgtcggtcgacttggacgaggagtcatcttcacaactatgtcttctttgggccattgtatgaacgtcttgcacgcatcgcccatagtcatgatttcatcattggggggcacgggcagcggatagcctgaccaggtgtcctttactgtatcgatggacaccttggtatacccagctagcatgtctgcgccgtggaccttgtctgtaaccgagggcttgaaatccatgccctcagcgacttcaagagcgaaagttgtgtggactctcgctaataggacacactatgctgcgccttgcatatgttgaaagtttgaattaatattggaacgtgtaaggttcttattatatatggatc

SEQ ID NO: 36225 - DNA, 60 bp, Oryza sativa
acctgcagctgcaagcttgccgtctaacttcctcgcgcgatggggaaggagcctctcctc

SEQ ID NO: 36226 - DNA, 459 bp, Oryza sativa
  unsure (1)..(459): unsure at all n locations
catggcaataatgctatgtgctcactgtgggatantttttcgggtcgnttgtatctataccgaggagttcaactaaatcgaaaagcttggcatgatttccatgtgtcccttccttagccgcgttaggttgcttctaaaaaccaattcaaaaggctggcatgggataaccacattataccctgtcccaaaagaacaagtcatactttattatgtaacaaattcaagaacacaatattttcttttgtatctgtgctatgcctttttctaacaaacttaaagataccacaattttttttttttgcttatagtgtcatactccatgacaccatatatagcaggtattccactttataacacttctcttcagcaaactctttttttgaattattccaaaaggggcaatgcaacgtaaagtgcatgactctctcgtattctcaaagatnaataataaagagatat

SEQ ID NO: 36227 - DNA, 454 bp, Oryza sativa
  unsure (1)..(454): unsure at all n locations
tatcacaacaatctnctttactgtggnttctgaaacatagtatgatgataaaacctagctatttcaggagagaaagagtgtaagaccaccattttctgcagagcgtatatttggtggagtattgctggctatgtgtacaaatgattntatttgcttccatgactgggcagagggcaggatgatacgcagaattgatgtcaatgtgaaagtgagtaattttgttcctggatttaaatttttttttgcgtgtcatttggaatattatgatgctaaataggatctgctttcttatttgtagaatctctattgggccgatagtggtgatttagtgacaattgcaagtgacacctcattctacattttgaagtacaatgtaagttnttctgcattntgttggctctgtagttcaatgatgtaacatctacttgattgtactataacacaacaattatac

SEQ ID NO: 36228 - DNA, 386 bp, Oryza sativa
tgacagtagccatttgttacctctagtacaacaagcttcttgcctgtgtctttcttcagctgagtaacaaggtactgaaaaaggcttcttatctccaccgaatgatgcttcttgcacctgttaaaatgtattggttcaaaaaagagttcatcagcagtgatggcatgcttgcacaacaataaaaacataataatcctattactgagaaaggaaagacataatgtgtgaaaatgcagaatgtatagttcaggagttaatacatacaggtgcccccagaatgatgcaagacactgaagccaatcagatagattaagaccatcatctttaagtttctcacggtcaccttgagccaagcgttcattacaatatattgcaagatgtcaaac

SEQ ID NO: 36229 - DNA, 376 bp, Oryza sativa
  unsure (1)..(376): unsure at all n locations
gtgggagattacctttattagttacatggcctggcatggccaagctaaaaatgaatggattaatcactttctgaatttttttctcaacatagtggatggcgaagaaaagccgtggagctaattcatggggcagacaattttctgactacttgggttgtgacagcaaggctgccaagctatgaaaaaagaataatgaagatgggagcctaattggcgctggaaggaacacgaacgtcttgggatgagcagctgtagacaccagatgtactgggatacgagatcatgcatgtgtatcactgatctatatatatccatttnacctgcagcccgagatcacgtggccaatctggccgctgaaagtactatgactcatata

SEQ ID NO: 36230 - DNA, 434 bp, Oryza sativa
gcttaagccacattctcgggtgaggccttatacgtttatcaatggcttaaacaaaaattggtgctttgtctagcattcaatattagttagaactaaatgttaccttgatgccattaaaatgaaaatgttgaatgctgtttcgcttatggcagatcccttgatttttttctctgccataagaccaacaagaagatccaatttctctacatcatctccgtatattgctcttatggtttcaattgcatccttgtcacttgtcagatcctcccagctttttattggaatcagaaatagtctcctcctgaactcaatgtaccttgggacacttctctccctgtctcgggatactttaacctagaggaacagaaaatgatattaatctcagtgtactcattgtcgaaaggctttataacaagactacaatgtccttttac

SEQ ID NO: 36231 - DNA, 324 bp, Oryza sativa
gtgtctaggtaatttaataaatccgctctgcctagttctctttaaaagaagacaacctgtgtaacaccaaggtgacacagtctctagttctctcatacatggaggagcaaacttgttgtaacagcataggtgacggcagtgtaagactatggaccactgaccagcggcccagccaatggatcgaggatcgtggattccccgatacactattatatgctcgatcggtgaaaggtacccatagccactgccctatggatgtatgcttctgccgaacctcgttaacaaaatcttgcattggtgtcgcctatagacctggatgttcta

SEQ ID NO: 36232 - DNA, 421 bp, Oryza sativa
agcttcgtaatcaccgagaatatgatggtttctattattgttctatgcgttctccttggcagccggacagcctttggaatcctgcggatgtcatttgacatcagagcaacgtggtttgtcttcattgcaacagctgaaccagatacacccatagagactccaacatcagctttagccaatgccggggcatcattcatgccatcaccaaccatcagcgtagggccatctttttccttgagttcaccaacaattctcactttgtcctctggaagaagtttatcatgaacctcagcaaggatatttcccagctgtcagaacagaataacaagagcaaaattagatgctgtaatatgcaaaaccgaacaacaagtataacagccactcacacttgaaatatatttacctgagtctgtgcatatgt

SEQ ID NO: 36233 - DNA, 420 bp, Oryza sativa
  unsure (1)..(420): unsure at all n locations
tactagaaaatcatggaccggttcaaatcttcagacaagtatttttctgaccagatttggcctggcttcactgcattgtacctacggacacccaaaacgcaatttgctcctctgcttttctactgacttttgattntagtcacgtcaagttctggaggcagaattataataataatttggttatgtatatatttgaccatatctgattgcctagcttacgtaaccgacgcaatgtatagcttttgttttgttgcaaaaaggctacattttttttggttaaaagggaaaggctatatattctcttctgctagagaatgatgaagctatttctgctagaatatgcctcttcaattcagntattgttaattggatgtatttcaacatatatagtcgccttttctattatattattacatgtag

SEQ ID NO: 36234 - DNA, 391 bp, Oryza sativa
aacccaaccattaactaaccaatgctaccactctttaattactagtttggtggcgtgctgtcattagtgagttgatcagagttttgtgctttgtttgctagctgagagagagattgacaggaaagaaaaagaaatatgtgggcggttgaggaagccaagacggatcgcacatagtcttgcaataaaaattgtgaactgcacatggatgcgactggagaaaagagcttggtcggccggccatggagtctatcttctatggcttgctcctctcaatgtgtcctaagcgttgctgctgcctgtgtttgttttctttgattagtctctttcttagagaattagagacttttatgaaagttgcatggacgcatgtatcactcgacacggagaactg

SEQ ID NO: 36235 - DNA, 430 bp, Oryza sativa
agcttcctatatggtggtggactaccccatttatcttgaaaacacaaggcgctgaacctgtatttatcgatttgtcgacatcagctcctagggatgtaaatgaaaagagagtattgtatgagcggatttgtctaagaaatcgcttagacctatcatcaccatcatatcggagaacttagctaagaacggaggaggaattcttagttcgggaagttcaatcttgcctcccttgcaacaaacattgtaaacaatctttcgtttcgataacgtggagctctttttgacccaaagacagcaccacagtatggacactcgtgagaagggccatcatagtatgaacggtcagggtgtagtgctgtcacaaatagtgagtcatgcacttgcagaacgggacgttaaacgtgacataaataagataacaaacaaactg

SEQ ID NO: 36236 - DNA, 430 bp, Oryza sativa
  unsure (1)..(430): unsure at all n locations
gtatattattggaaaaattggaaccatgctcttataatttacanaatctgagatatggcatgctgacccacatgccattgactcatgtgggtcctacatgtcattgagataacgatggcatatctcatactttgcaaaagtacaatggcatggntccaatctacctattattaanacttaaaacatcaagggcaaacaagacanttgcaaccaaatgtagtagctagtgaaatgaagtaaaatataatggtaggggtatggaaaggatcaagttgaaatttcacgggtatagaagggatcggattaattttatgggtataaaagggattgagtgaggtttcatgggtacacagagaatttactcaaacaatgacttggaaattgagaacctttagcttcagttagatgtctggaaggaagattgcttgta

SEQ ID NO: 36237 - DNA, 426 bp, Oryza sativa
  unsure (1)..(426): unsure at all n locations
agcttgtaaccggacatgctgcttggatcttaacagcagctcaaactgaccaaagttatcacaaaaagtacatcagatctgcaataggactagccaaaaaaaaccttgataatactatttgatcatatagcacacctacacagaagaatgcgacaaaagcaatcgcaaagatggtcttttgagtgctttgttctctggagtctgaaaactggaggtgtttttgccgatgcacaggtgcgaatgagcgtatgaccacacagctttgggttcccatcaaaaccccaatactcatatccaattggaactgacccctctaagtcgttgttagaaacatcaaatattgaaagtgagtgcacattgttcagtcctggtgggatngaacctgtgagatggaggttagacaattctaacacttgcagatttgtc

SEQ ID NO: 36238 - DNA, 491 bp, Oryza sativa
acctataaaactcagcttctgacaaactggccacataaaggttgagttaatcaacattggtgtgatacgagtgagcaactcaaaacacatcaacaaggacagtatttaagcacctcagagctaacaaaaggctcgacaaaactcccgtatctctccgtgaacatatgtctgaggtcgcacagttcaggcaactcaggaaatctagcagtggcaaaaattagagttgacacagcttccaaggcttcctgaggacattcactgtaaatgggccaccagagttagtgatcaaagatcaattgcagcagaacaaaagttgtatattaaacgattgcaacaagagctgtatccaactttgtaaacatgcacctactcaattgctactgtcaccataaacaagtttgtttcagtgtagtatggcatgccaggacactttgatatatacatatcaagacattgttaaagagaaaccaacgacagccgatccccatttc

SEQ ID NO: 36239 - DNA, 409 bp, Oryza sativa
ctttgctgaaaagaccattagttcttaattgatgtacaggactaataacacttgaatatattttaacgaaaccattaaaaaaagtatggaatgcgtgtgccattaggttggttcaattgacagagaaagagaggaaacgtcctactttcaaatttttagagggcttatgggaacaattggcataactacggtaaagggtctgaaccaacttgtcacgccggaattgtctatcaaaatatccaaccgcttacatgggtgcgaaccctccgtccaggaatcagccgatgcacacaataacaaattgataatagaagacaattattactctaatgattgagcgtttaacatgtcattacagaagtaaatacttcctctcatcaataaagatctacgcagcggaaaagaaaat

SEQ ID NO: 36240 - DNA, 452 bp, Oryza sativa
  unsure (1)..(452): unsure at all n locations
ctcagcttgcaccatcaaaacaatntgctttaatggatccttcattctgcacatatacagaagaacttctttcacaatctatataatattattagcttgatttataatcatggattgatctgtcgtacgatgtcttctttgcatgcatgtacgggtggctgatgaggtccatgggccgccgaaccaacacgtctgcccgggagggaaagcgaagtcggtgatgcccggaacgaatcccatcgcactagtcggcgaaaaacatggtgcaacccctacctgacgcgccaactgtcaaaacaagattctggcaatactaaaaggggtagcaatcaagctggaaaagtggataggttatgacgtatgaggcaaaggtttatacagcggcggaattattccaccgagtgtattattgatctgatgatctgggagaaaagatatgcccctatgtacac

SEQ ID NO: 36241 - DNA, 355 bp, Oryza sativa
  unsure (1)..(355): unsure at all n locations
agctntgaagtccaggaatggcttatgactcctgaacagcaagtgcttgagagctcggaatgccatgcccgtaccggagaagatgactctttcttctgggcacactagaagcctcaagtcgaggtgaacaagggaaggtaaacatgcaagaatagtaacaccatcatccatgggcaatgccttcctaatcgtaagcttcaagctgtgaaggtcacgaagctgtacgatccatgagggtatcctggaaaacaagcaacgttccagatggagcttccagagatggcgcggtggaggggacagtgtgctcaagccatcaacctgcaaccatgaaagaaaatgtttcagcagaacgatg

SEQ ID NO: 36242 - DNA, 457 bp, Oryza sativa
  unsure (1)..(457): unsure at all n locations
tcttggtactctntgccctatcctttccccttggcttttctcacacccaagttggatcaggggacataaatccatcagaaagtttgttgatacttgcacttctcctcctttctaaatccatcaagatcaccttcccagccctccttttgggctttgggggtaaagcaggagagacattntgttggaatgggtccatgggaagatccagtactgatactgtgttttgaggggtaggtatattggacttcggtttgagaagggttggctcatgtgaatcggcccatgagaaaaggaacttaggtgaaggataataatttgacttggaaaggaataagttcaccagaggtctctcaagttaatagcgagaaattttgaggttccataaccacaaaaccagatatgtttaccctaaacttactaanaccgttcactcaaagttctatggcagtatatattg

SEQ ID NO: 36243 - DNA, 411 bp, Oryza sativa
gtgtgccctcttctgttcaccgcagggtgactaccactagcctacttcttctggttaccctccacatccctttacacgagcccctgctggttccccttcgcatccctcatcacgtgcccttcctcgttcaagcactggtttggatccctcgttccctcttctttattccagcactggctgcttccctacgcgattgtatcgcacaatctatgtatttcatcgccggcagccatctgtagatacaagaaacatctgctaagtctcgacacatttatgtcttaacaatgtaagtcatgtatgccttaatgtatatgctcgacattagaaccctacacaaccttacgtgctaagtctaattaccaatcgagatataagctaagtcctagcgacgtatattatacaaccctagct

SEQ ID NO: 36244 - DNA, 393 bp, Oryza sativa
aagctgctgtggactttagaacagcagcctatgttgtcctattcacgccgagaccctcctttctcaacccgttaaagatagagaaagcctcatcatgtcgtcctccatgagaacaacctgatatcaatgcattccacagaatcaaatccctatgggacatccaatcaaaaaccttcattgcatcgttcaaaaaatggttctttgcatacatatccacaagaccaacacctatataatcatctgaatctgcattggctttgatcatgaacccgtggatttgtcgacccacattaaatgcaccagcaccagcacaagccttcaggatgctagacaacataaacacgttgggaaccactcctgaagactttatctgcagtaacaactctattgcac

SEQ ID NO: 36245 - DNA, 458 bp, Oryza sativa
agtcttgctaacaaggacataaacggccaaaaagtgcatcactctcatgtttaatcaaaggaaaatatcatggcatagttaacatgtgacaggaggtgagtatggcactcaaattctccatacctgacgttgaaaagcccaagcaaaattaaagaggctggtcaaaaagtaggagagtaattagatcaaccgcattgcgccatgacgagcacaatctcaacgaagtggaacagttgttgtacttcagctagtaatttcagttgtcctatctttccttcgaaggaaccaatttcgattgtaataacaatgcaaagatgtttaaatttccggatcgccagaacaaatcagaaaaactgtgtccaaaaaggtgcgcggttatgttgcatattctcgaagagagaaccaaaacgattagttggagagtcactcattatgaacacatatacgtgggcaaatca

SEQ ID NO: 36246 - DNA, 443 bp, Oryza sativa
  unsure (1)..(443): unsure at all n locations
catggatagcctgtgtacagatatatcaacaattcttatggaaaaatggattctttntatattgaatagattgacaaactacatgagattgcacctttattgcacccgtatgatgggcaagattgtatttttcatcatggttgtttcgcagctgatacccaaaaaaaatgtcaataatctgaaatttctgcacaagggaaatttaacaagaatactctaccggcaggagagttgattttaccttcatctttccatacgccgggaaaggattcccgttcttgagaattacatccctctcaatgaattctgctatcatggagtcattgtacacgcccatccttggaatgttttcctgctctggagtgttcgttccgaaatacacaatgttcagatataaaagctgagcagtataaattatatcatgtgaaaagatgttgccggta

SEQ ID NO: 36247 - DNA, 412 bp, Oryza sativa
ctcagcacgctaaatattatagcattcgtcatatgtatgactaaagaagtacttttgtttgattgtatagcttattacatactttacactttgccacttgccacttactgcgtggaatttattaattcagctcactcatatatggcttgttatatatgtatgcatgcatgcatctcgatttgaatataggatgtgattgtatgcgttcataagtgtaatttcacgcgttatgtataataaataattaacaaaaattgctatactaatataatattttttttttgagaaatatggtcttccaaaaccctgtcacctcccaatttatatataatcagtggtgaactggtacttaccaccggtatgttttaatgcacatcgtaataagaaaacaattatacgtacagacagtata

SEQ ID NO: 36248 - DNA, 358 bp, Oryza sativa
  unsure (1)..(358): unsure at all n locations
atgatcaacgtggctcctgcatccagtatggacttctctgggttccttgttgccacagcaacaacaggaattccagcagcaacgcctgcacgtgtgcctgaagcagaatcctgcaacaaaagcacacatttttcaactgcaaataaaaccagatgacaagtttgcaacagatgcaaatgaagaagatgtggtttacctcatagatgaaggtgtggtccgcagacacctgaagctccttgagagccttcangtatgggaatggggcgggtttcggcttctcacattcgcctccaacgatgacggcctggaagaaatctgtgaggcccagaagggagatcatgagctcggaatttatcct

SEQ ID NO: 36249 - DNA, 195 bp, Oryza sativa
cttaccccggcgccgcacgagcaaaacccgcggggactttatttgagatgccaaccacaacacacggccaatacgcagtgcaaatacccgccagccgatattcccccaaaagagaatacggacgtactaaaaagcccagaaaaaaccccgtacaaagcccagcacgaaaaaaaccagcaaatggccgaacgaaaa

SEQ ID NO: 36250 - DNA, 358 bp, Oryza sativa
  unsure (1)..(358): unsure at all n locations
tttctagtnggagagcgtgtacgcacattataatctctccaaatatcacatgttcgctattactccatgtaagcacttattttcgggggaaatatatgtgtgtcgggatattcgttcgagatgagtatagtatgtcaatgtggcatttgacgctgggtttgcaattagcgctcctcaaatattgattgtggagtccacaataatcgcttgtggagtccggtgaagcctatccaaaatctacgaatcagctaaaaacctctaattatatgtgttcccatgaagacagccgaaggngatgctgatttgtcaagtggtgtgcacgtcactgttgactgtagtagaggcttttgaatgtaat

SEQ ID NO: 36251 - DNA, 435 bp, Oryza sativa
gcttcaccaacaaactgacggatatcactcatacattcttgttgcacatattaatgcatggctgggaaatgtgacatataatacatagtccgatgaagcctgaatctggaatatcagaaatggtaccacaggacgctggtatgtgtcagggttaagacctaactgaaaatgccattccaacttaaaagattgaacaaactgctttgtaacctcacaggtaattttgccggtaaagctttgtttagttcatcgcaaaaaagtttagattctgattgaaattaaagatgatgtgactgaaaaggtatgtgtatgacaagttgatgtgatggaaaataactgatgtctggatctaaacacagcctaattaaatgacttgactatatatgtaaacatgcttcgatcattctttgtactgagttgttatatattcaatct

SEQ ID NO: 36252 - DNA, 400 bp, Oryza sativa
  unsure (1)..(400): unsure at all n locations
ntagtccgttcggtcgttctgagtcgttctttagtttatagtcgttctgagctgccggntccgttcgccggtttggttgacggtcccgtgtcacgatgtgttggctggttgagtcactaatttgtgaggcttgcttactggtgatatatttccattgatctatttctctatgggcattaatatgtaataattgattaagggttttcggttgttagtaattacacagctcatattgtaaaattcatatctaaataatctgagctccgttttaacccattcaagttgcagtgaattcattaaaatgtatagaatccattaaaattgatttcttttactatttcagtagccttattgcttgtatttcttggataatttgtttggccgatagattccggtagtt

SEQ ID NO: 36253 - DNA, 63 bp, Oryza sativa
tcggcccctttttctccctccccagtagggttttaactgattcccatctaccacgcgggcacc

SEQ ID NO: 36254 - DNA, 455 bp, Oryza sativa
  unsure (1)..(455): unsure at all n locations
gcttaacattctaagaagcagctggtgagaatctggagaagctatgaaactcatcttctgacttctaatttattttctagattctataatcactgtttctcagaatctgagtgaaaatatgtactgtctaaggagcttatgatagttgcagcttcgagaagaatttccagcttgcagaagcttccttaaacaagccctttaatggcccatttgattcacaggatatgaaaaacacaggaatagaaaaaaaacgtagaaattgaaatagtatgtttcttaaatcttacagcaatcaacatacacaggaaagacaaaaagagtactttgatagtgctatgggaaaaacaaagaaaagttcaaaaaaaaggtcaaacctcttgttanttttcgggagaatagctaatatggtccctaaagtttcgctactgggtcattntagtccttaatctttcata

SEQ ID NO: 36255 - DNA, 438 bp, Oryza sativa
agctttggagaagatgtcttatgtggagtcttggcttataccccagttgagcgcctgtgaagttggagccgtaagcccgcaagtccgctgctgtttatttttgattgtcaggccttaagtgcctttgtaataatgtaaatattatcgatataataaagatgtgtcttttatatcatgtttgtgtggagtaccccggcttttcctgtgacggggattaatacactagcgttcgggaaaaggaaattttctcggtcgcgacattagatgatcggaacatgagatgaaccgatagccgcttgggttgatgagatcaatcggtatgtgtgttggtgacttcactggaatgtctagtactcaccaaggccgagcgcaattgtgttcatcggatagtccgatgtccacaagaaccgcacgctcatgagaaaaactagccaatga

SEQ ID NO: 36256 - DNA, 477 bp, Oryza sativa
  unsure (1)..(477): unsure at all n locations
tgctaagctaccacaagtatagtangtggcacacatatgtgtgagttaaagcaagcccagaggatgccacaattgataatagtgctgaacttctcacttactaatacaatcttctttaaaggtgccgatagcaaactaggattaattaaaataatgctccatactagctatgaggcatgactatctcgacccatgcttgaaggcagtggataaataaagccttgatggttccacccattagagggggcatttcatgtctattttttaatggtgttatcgtataaaccaatagaagcgcggtagttttagatatttattcatagatttagaaataagtgttgacataaatatttaagtatgtagtggaaatgaacgtttttttgattaatgatgtattaagcttattntggtggtacaaatgaagtttatttattaaaaagatatctaccttctaagagcaatgataatattaatggg

SEQ ID NO: 36257 - DNA, 317 bp, Oryza sativa
  unsure (1)..(317): unsure at all n locations
gacacctccccgcgccttgcgcggcttacggccgcctgtcggggaagatgactcccccttcctcccgtcaccctgagaggcctcccactgcttccgagtgagatggagcttcccgccgatggtgatgggccccgagagaggctgtggctcatcaccatcgacgaccttgaggcgacctaacgcctcctcgatcgacatcgtggagaggtccagcagagattcaatcgagcgagcgatctacctgtacttctcanggacgcagcggaagagctttcgacagctctctcttatcgtaatgtcgcaccgtactgaccatt

SEQ ID NO: 36258 - DNA, 413 bp, Oryza sativa
  unsure (1)..(413): unsure at all n locations
tggtcaatttcttgcttggtcgnttgcattatctgcgtacgttcaacaagacccaatacatgagtattgtttgtcaactctgcattacttgtgttgaactgacctttgattcgttcgagctcttagaattcttgaattagtgctattagattcacgctttctaaaactgatttttcattcctgttggtctttgatgagtgtcctgcgtagaacaggtctttatagtgcaaattgctatgctgacgtgtcttcctctgattgttatggacttcagtgatagaaattttttttagataatgattatctgataggatatatcatgctaagtacaggatcatcgttaacaaactaacaataccatacataaacaattgattgatccactctgcctctaattataacagaaatgggct

SEQ ID NO: 36259 - DNA, 436 bp, Oryza sativa
taagctggcgtaatgcctttcgtctcaagtattggaggagtaagaaaacaaacgacagaatacgcattatacgacggattcagcttgttgctacgatcaactttactctcaccattatcttatagctgaacatatctccatgccaaaattttgccaacaaagtattcgaaagcatagggattaagccaagatgatggctaaaccacatggatagggagatctaacacagtgacacggacaggcacatcaaatcagtcaaagatcggattagtccttaatggcctccacactccaatccacctttttctttcgctgacgagatgacccgtcgcgccgtgccgacttggctggaacgaggcgtcaccacctaaccatgcctcaaaccaggtgcccaatcgcctatattactcgggagcagatgctacacctagcaaca

SEQ ID NO: 36260 - DNA, 474 bp, Oryza sativa
  unsure (1)..(474): unsure at all n locations
actcagcttacacactctaaatacaacacgattctcttcgttccgtggaaatccatcaatgatatacttgtcatttccaccttatattatggcttcttgcaaaagctttatggttatctcagatgggacgattttcccttccgctatgatagtgtcaatcatggttctgcaaaatataaaaccagtaactaagtgagtgaaacaataaatatggcatgtgtacatgggcaaatgcatgtgtgtgtttttacccgttctctgaaccagaattgatttctgcacgcaagagttcaccagcgctaagatggataaaaccaaaatgctctacaatattgctgcactgagttcctttttcacttccaggaccacctgttcatggatgctacatcagattanacaacacacacacataaatacagttatgaattaacaacagcataagaaagaactgacagcaagttcacttttcttcta

SEQ ID NO: 36261 - DNA, 305 bp, Oryza sativa
cttctgaattacaaccagaactttttgccaagggtggaaaccgaatattcgctggcatttaatcttgcggtgcttaattcctttaacagttgcctgctctatatggggcgcaattatcaatccagcgaatggcttaatcgcccctggcattagcagcgctgacagattcgttaacgcttctacccaactttcttgcgttggaacaagcgcccgagcaagaggccgcaaaaagttttgctgcctgcgcatagataatctttgatttatgagtcgtcattacggcttaatgatgcgcgttcactgta

SEQ ID NO: 36262 - DNA, 375 bp, Oryza sativa
ttataccaacaatcagggagggattgcagcccatggctcacaaaacctaaacaaaacattagatatgtcgatcttatccacagccgaaacaaagtggctttagcaacctgcaaggaaagaacaaacatgccagccactaagaccacatcagaaaacattgaacaaactacagaatgcagcattatgctcctaacctcatgaaaactcactccctctgactcaccacaggatctcaacagtagagacaggcacaacatgacaaagcttccacttaccccacatctcaacctccccttccttcccccccccccccccatatatacaaacaccagcacctccctcaagttagaccacactggaaacaccaaactgcaa

SEQ ID NO: 36263 - DNA, 458 bp, Oryza sativa
  unsure (1)..(458): unsure at all n locations
ntgacactatcagtggtatatttcaacttttccctgctatattaaaatccctgagaactgttntacatggccagtatcttgagtttcaaatgttaatatttgtttgttattgctatctattatctggattgattgtttgtagttggtagagtgtctttaggtatttattatggtgcctttctcaaacctctttattacagcgtaatttgatagggaggggtgtaacatgtttcactcagcttgagcctactgcattttttcattgtatatattanggaataattatgcatacattaatggttagtcatgatctgggtcgaaggcagctccttgaccaggaatgtcctgngaacacgtggacattttcgtaccaccttgtaaacacctctttgcagtagcatatcacgttcctcgaaccaatcgatctggaactttgtactattctcaagcagttatct

SEQ ID NO: 36264 - DNA, 456 bp, Oryza sativa
  unsure (1)..(456): unsure at all n locations
tntctcttgatttcatagccttaaacttataatactacaagtaacaggtcgtgtttctttcccccccaaaagtttggggggttcaagtcaactgaactgaaccccagtatcccaagttggatccgccccgtcactgctttgcattgtcccgcaaatgtcgctctgttgggcggatgagtcgcacgctgtcgagtgtccaccttntgatttggtgtcgntcatctattggtggtgaattcgctgcgatgttgttaaatctcttggcttttgaccaagtggatggggcggatgttgatagttagtgtttttttttacttgatttcatcttgactatctgttatccgatttggacactgaaagaaaaaaaagacgtaaaatgggtttatgtagctgtttatgaaatggacaacatatatattnttagtggatcgatttgatagggtatgatgtcattat

SEQ ID NO: 36265 - DNA, 454 bp, Oryza sativa
  unsure (1)..(454): unsure at all n locations
tgactnggtgcgaggaggctggtttagcgatgtctgctctgttaaaccaaaggaaggggcttctttggcatatacccatggacaattcacggcatagtgtccttgctctctacaatcatgacaaaaggggacatgctcttttggcattggaggctcattgacctgngtggcaaatgctcgatcaaacacacactgattctggtcttgacttcgaaccaatggtagctgtgaactaagcagcatactcggaatggaccaagggtgtgcccttgttaactctcttgaggccagtggtggattgagttgaaaacttgagttacttgaggcatacccgctgacattctttcctttttctctgttaaacatcttgtacagggattgaggtgagagtggaaacaagccatgaaagaatagaccagaactaaagacaggaccttaaaggaactaactcttc

SEQ ID NO: 36266 - DNA, 412 bp, Oryza sativa
ccgccagcttgctgtacatgtgcccagaactttatatttatctcaagatccgaaaaagctttcattggaatgccattcctcgagctgtcttttttatggtgtctgataatcatacaaagcagtcctcatcttcctcgctattcagacaagattcaagcatcatgtaaatatcatcactctttggatgtctgcggtctccattgaagaagacatgaacctggttctggacctcaatccaactgcaaccagtgatcctcttcagtcccttttctttaatttcccttctgatcattgacacatcctgccagcttcctgctgcagagtaaacattagatagaaggatgtatgaagaagtatccttaggatccagtgcatgaatatgcttcgcgacactcttagccagcgtcctatt

SEQ ID NO: 36267 - DNA, 428 bp, Oryza sativa
  unsure (1)..(428): unsure at all n locations
tanatgcactgacgtntncgggcaatgggagggtaaaacatcacgatcgagattgaatgatagtttgaaatcgaatgctcgtaacgtcatgcagatagtaacgagctcgtgctggatgcaatgcaacgaccctgcaaactcctaaaacgctctgtttgacctgtgttaatcccttccggacttccggttggcggcttgtctgggccggcccgaaacgcgcgcgccgctgcaaaagcggaaacgggccaaacggcccggtcgcaacaaattccagcagtaaacagcactacagcaggcgttttcccgcgcgcgactcaacaaatagcgacgcgaaaacctnctcgtagtcggtagccatggagccttctcaactcgacggccagtgcgggggcgagccaccggcatccgtggagggagtcgtgttcatg

SEQ ID NO: 36268 - DNA, 395 bp, Oryza sativa
agcttctcccgcttagcccaatggccgaactggctgttgagcacaacctctctccgagcgctagtggtgacgacggggagcagaacccgcgccgtcgggctcgcaccccaccgtccccctctcgccgaaatcttgggcggagggaggcgctcgagggggtcgaaagatccgcgacttcgccgcccgccggcgacgggggaggacggcgagacggggtgcatcgccgcctcgtctacggcgatggcggcacgccccagggcgcgctccaggctatgggtgcgctcctgcgtcacccgcccgtcgtcctcgatccagagactccagcccgatgttggctggatgacgtggccgacttggtcatgacggcgcagcagcgcctatgcgccggcgggcag

SEQ ID NO: 36269 - DNA, 481 bp, Oryza sativa
  unsure (1)..(481): unsure at all n locations
ctcagcttgttgtaagactaataatagtgaaattaatcgttccatgcctacaagtagactcaactcaaccagcgaaagacatagtaaacacaaagctgtcaatattatcataatatttttcttttgttgaagaattaagatcttcaagatctgaatggaaaaatatgtggtgtgtttcgatttggcactttcatcanaattagactctggccattaatttctcatacaacatanttgtcaagatagaaaaccatgtaaaagcactttgaaatattgtattggtactttactaattggttaagacatacaaagtttgaaatctttaaatacatgcatacattgtaaaattggacagagtgagttcctatatatataatgttcacagtcgactgcatttcatcatccaccccctaatcttggacattctttggtgcataaaagcgcttcataattttaccttatatttgacacgacaaatata

SEQ ID NO: 36270 - DNA, 438 bp, Oryza sativa
agcttcctagaagattcacccaaaatctttatatactgtgaccaacagtcaagctcacaaaggtgagttctttcaagaatgctctgcaggacaacatcttcgctaattaaagccaacagaactcattaaggcatagccaacctgccttgcagctcacgagagtatatgcatcttcacttggagagggtatatatattggtactctcctctagtttattaatggtttgttcttcccaggatctaattcacgggatctccgatcacatagactgggttaccaccatagtataactcacatgggtctcaaacccatctccttcgatgcattgtctatcacatttcgtgatagtcccttcgtgaagggatctgccagatttctcgctgtttgaatgtaatccaacattataacttccgagtttcttaatttcctgacagact

SEQ ID NO: 36271 - DNA, 399 bp, Oryza sativa
agattcaagaaacacagagaacacaatcttatggtgtgaaacaggcttctttggaacataggaatttcataggaattggttcattcctcctaaattccttcgcttccaaggaggcttaaatggagtatcatgcatgagcagcttagaataattgttcaaccagccattttggtttgaatcatgtcatactatttattgacatataactgatgctacacaggccactaatttctttacaagggttgcttgccagccccgtgtggcgaggccaatacacaaaatcaattacacgagtgacatacaagtaaggccaggcacaatgcataatataatcacacgaaaatcgcatttgctaggacacgatatgctcttcttctatgcaacctacagaagttgggt

SEQ ID NO: 36272 - DNA, 439 bp, Oryza sativa
agcttctttactgagcacaacagaccggccatgggctatcttgccaggcctcgcctgcggctagtagctgtgatgcagcgatcgagatatacaccaattaaagtagcgtggcgacggcgctccgtcttgccggtatgcagtcgccgatggtgagcatagctgcaatggcggacagcggaccaggcggcacgagcgacaacgaggacctcgtgaaaaaggatgggaagatcacggtggagaagaactggggctgttgaggctgccatcggagtgctaaagtgagcatgcgatggtagcggggactcacgcgggagggtgaaagaggcacgtgcttggttcaactactccaaccaacggatgggggctgtggagagagctcctgtgactatgagctataggggtggatttgagtgccttcctactttgtgggcttaagtcg

SEQ ID NO: 36273 - DNA, 394 bp, Oryza sativa
gctgcagcttgcaacagcaatcgggttcgctctatttcttatgacaagatgaccaggcatcagtttcgtcggtcgaacttttttgttgtaagttgccgaaatgcttgtggcatacttgcgcatgtgctcaagagctttgactcttaccccctccaaaagttcgagcgacactttgcgcccctcttcgcgtctagagaacattacccttggtgagttagcccctagctctgctggggtcattgcttcgtcgcataaaaaagcatgaacggggctaacttgggtggtcttgtgggggtagtcccaacggcccatagaacaaatagcatttcctctgggcatttgcccttcgctgccccctcgaaccctttctttaatgcttctaagatcttaccat

SEQ ID NO: 36274 - DNA, 421 bp, Oryza sativa
ctgcagagagttgaatagttgaaacaagttacaaattttgtacttttgaataacagggttcaaaagaaatgaaggagaattttaaaatcatcatgctaaatttattttattgcagcaagattaaataaaacaatattgtaaaacttttgcttgataatgagccattagtacagttataagatgtacagtactaataacactgggaataaatttgaatgagaaccattaaaagagattatgatatgcatgtgccatttagtttggtttaattaaaagagagagggaggagaacagttctactttttcaatattttagagggcttctatgggtaaccatttggcataacctatggtcaaggaggctctgataccaacttgtcacgcccggaaattctatccaaatttcaacgcttaatgtgtg

SEQ ID NO: 36275 - DNA, 438 bp, Oryza sativa
  unsure (1)..(438): unsure at all n locations
agcttgcatatcatgatagnattaagtttcttttctggcatcctgggctaaacattgcagtttgttgaacaaaatgtcaccataatacatgggaacataaacatctctgaaatattgtttcaagtctttccaagattgtggtattttgttatgcctacaacgatatttccaatcattagaagcatgtttaattaaaacactagaggcacacataaccttttgtttcttcgacaagacatgcttttgaaattcactatcaaccgctagctcccaattaatgtaagcacgaggatcatagtctccctcgaaataaggcagtgcagaattgatcttacctagaacatcatcacttacctcataatggtcatgttgatccctcctcatgtctcgacgaagatgtcgatgttgaacacagctatccccaattatcttgcatat

SEQ ID NO: 36276 - DNA, 308 bp, Oryza sativa
acgcggcggcgagctcggccttcacggtgacaacgaacttcccggggtcttcggcttcggtgagatggctgccgggcttcctctccttgcgaacccaacggcagcagcggcgaccgaatgcgacgatggacgacgaagaatggcacggctggagcggcggccggcgcttggagagagaaagagagctcgaggaggggcggctatggcacggagaatgacgggacttgagcggataggcagaggacgactagggggtcctttatatatgcacgggagctcgggtccaggcccaaatcgacgagagaaac

SEQ ID NO: 36277 - DNA, 435 bp, Oryza sativa
agcttgacgagctatctatacaatgccatctgtgattataagctgatcactgtcacgtcgatgtctatgagtttggctgcttgcctggttagttggttaccaaatacctgcctgggtactaatttggtttgctatgctactaaaacttggtgacagtataatacttggctatatatgtactgagtgttaggttggtttgctatgctactaacaaaattcgtaacactatagtagaaatttggtgacacttcattatgatactacaataagcatgttttagtactcgtatctatctattcaactcacaaatcataatttgatattaaactagaacacatctttctcatctctaccctaccaaatattggttggggaagctaagccatacagctaaattgaaattgtgctaatatgacccatcttagaatctcatta

SEQ ID NO: 36278 - DNA, 349 bp, Oryza sativa
aaactcctaaatcacctattctaccctatctattccttaatcgaaccgttcatgtggaagaatcgcccctcgattgcatcgatgatggcagatatctcgcggcttcttgcataccctgcccgtggcccgtgggagcagcttcatcggaagctattgttgcccagcgttgacctagtgaacgaatagccgctgttgaacttgtgagaggagggacatacctgtgttcggaaatcggaatcatctcttcccaacgtgtatgcgcacggaaaacgaagcactttattaggacgggattaataagcattagctaattcttttccacaatgaatcaatatgatattgtatacaa

SEQ ID NO: 36279 - DNA, 211 bp, Oryza sativa
gacccgacggcgtaccacatgctgcagaggttcgggttccccgtcggcatcctcccgcagggcgtgcaggggtacaagctcggcgacgacgggtcctccttcgaggagtacctcgccggcgactgcgagttccgggcggcgaaaaagtacgtgctccactacagcagccgcgtcgccggccagatcgccgccggcttcatcacctctctgg

SEQ ID NO: 36280 - DNA, 489 bp, Oryza sativa
ggaccttagaaactcaagcttggtacatgcatagcacagctatagggagtcagacttattattttcagataagatgaatagagattgccacaaactaagccaggattaagtatatgactgaactttcttaagacatacacaatagtttagcataattaggccacaaataggcacgcattgaaactaataaacatctatgaatcatatcagaattttttcattccaaagtactagcaagatctattgatgcttaatctcaaccttcctcttatgccacagcttgtccagtgcaatgcttccatcttcctgtagaaacataatgagggtagaagttagaacctattgaaggaggcatcagtacaataatccatgttcctatacttaagcaatggaaattcagaattgctgtactcctaccagttgcttaatcattcaccaattcatagtctatcatgttacatacagaagtagaagtttgcaaatcaagtt

SEQ ID NO: 36281 - DNA, 391 bp, Oryza sativa
  unsure (1)..(391): unsure at all n locations
cagcctgggcctagcctatcaggtcctggatttctttctntattaaaccatggcaccagatacattatcctttgctctgctgagtaaagaagctactatgctttaggctgaacttggttgatctgcttgtaaatccagatcgaatcttcactcaacttgtttgccctccctaaagttttaatcatgtagaatcgagatcgaatcctcactccacttgtttgccctccctaaaagttcaatgcctccctcaagttttaatcatgtaacaactgcgctctactctgaatcacctgataaaaaaaatttatcttggtttgacgcattggcatggaacaaattagagtaacatccccaaatttatacgcattaatctcttgatctttgatactac

SEQ ID NO: 36282 - DNA, 404 bp, Oryza sativa
  unsure (1)..(404): unsure at all n locations
gccttcattgtcgttaatagnttgccagtagtctttaaacagaacaagatagttctccggatatctgaattcaactgtttcctaaggatgcacatgaacagtaatcagaaaaagaccagatatatggagaggtcaactgacatctttgtggaaactacccagacaaattatgccagaggaacaataaacagataaatacaaggttaatggacctatggtaggcactactgtactatgccattgaattntttttcaaggattgactaatggcangcatggagtggcangggattggtggaagcttaaccctccaatcaaggtctaagcatatttcttttgtctcaagacaaggagaaattactcatctcatgtacaagacaagaactatatgtcatgcaccaata

SEQ ID NO: 36283 - DNA, 435 bp, Oryza sativa
agcttatgacagtggatcatgatcgatgttgatcagtcacaactcacaacctagcagtcattcacacccaacggcgcatcgggtcatgcgtgtcgccacccactaatggatatactagtactccactaaataaactcttgcgtccttggcctttgattgccagggcttttaactgagagtagaagtttattataatctgtaggtgaaaacttggatgaataatgtactgtcgaactaagttgtcatcacggactacagctacaggacaagcacacagcgtgtactactgtgtactaccaccacaacattccgacatacttggttggcaagtgcgaaacattccaaaactcggattgattaacgtactagtaacgtagcgaccagggacgtatagaagacgctgagaaatactctactactctgcatgcagatgta

SEQ ID NO: 36284 - DNA, 447 bp, Oryza sativa
  unsure (1)..(447): unsure at all n locations
tagtttagcagcaagggttcccaacccatctttttcatgttccgtgcgcacgcttttaaaactactaaatgttgtttttttgcaaaaagtttatatacgaaaattgcttaanaaatatattgatctatttttgaaaacaaaaattagcaaatacttaattaatcacacgctaatagaccactctgttttccgtgcgctggagatacgttcccaaccgcctgcagcgaacacatcctcactcactttacaagcatatggttctcggggtatattcgtacttttcacatgttctatagcggatacatgttcttgttatgttctacagtaaagatcacaacgtttaaatatcatttagcaaattntatatttcgaaatcatggctaattgtctctgataggatcatangaagctggcgtcatggcgtgcatgcgcgtctgtggaattctg

SEQ ID NO: 36285 - DNA, 372 bp, Oryza sativa
agcttcaccgcactggagcgggcttaccatggaggaatcgtcgggaagccgccctgccggagcgcgccgaggatcgccggagctgctgccgactgccaagacttctatcaattctcatgccggaggtcaagcatcacgcatggcgtcgaaaccagcggatgacgatggaggcaagtatggctgcagtacataggaaggacgacgggaggacggcgagccactgctgttggatggcaacaagctagctaatgcatgttgattaagttaattattgtggcaacgtggccaaccaatcggaggatgacatgtcatcgctgctacagttccatgcacaaaccaatgcgtgggctaaagaagtcctggtggtttttc

SEQ ID NO: 36286 - DNA, 332 bp, Oryza sativa
tgccgagaaactcggcgaaatcactgtcaccaagatattccttcacatcgatgacggcagaacgcatgcgtggcatatccaacagggtccatccattatcgttcggcgaacaaatcgctagatgctggagattgggcgctcgaatcacccaatttatgatatcgtctccatcgatgaagattccagataacactatcatctcagcaatggggaattctcgatgatctcctccagttggtactccccgtccgctcgcagccacacgtggtcgagggttaggctcctcaagttggggaatccggcgaaacccggcgggagcggcgggatgtctc

SEQ ID NO: 36287 - DNA, 428 bp, Oryza sativa
  unsure (1)..(428): unsure at all n locations
agcttggaagcatctgctatgttaatatacttaaatggagccatttctcaaacaagatccattgtaactttngcaagtgtgatatatggcgattacaaagttacctgtctggcttgaatagtaggttttgatatatgaacaactgcaaagagttcaacagtgaagattcataagattagaaaatataattcataaaggagaatagtcgctgcctaaaacttacccatgcaaccaatatgccaattaattcaaagagtatagggagaacaggaagcttgtcgatgacctgaagttgatttattgtattatcatgaaaacgctcttattccaacaatcganaaactgcacatttgaagctagatcatcttaaagttacctctacaagatttatagaagcccataatgcggcaatcccttgcaaatctata

SEQ ID NO: 36288 - DNA, 462 bp, Oryza sativa
  unsure (1)..(462): unsure at all n locations
tgaccaaggcgtgagtcactggaggccacagatggagtcagtcggcgaacttcaccaacaactggatcttgtcaacaagttgaaccaaacttcttcaacgacgtcttcccctcgagttccgttgacagacgaggaaaggaaggcgccgttgctgcctacgccgccgattccatctcaagcggctgctgcggctgaaggcggaagcaagatggccagtggccgcctacaagttcatgaacaccggggaagggcactgggagtggcaaccaccctgngcccgactccggtcaagggtacgtatgaatctccttccacatctctgaaaaattntgagcaatttgagttcgggaatggggattgtgatggggatcagtttgggcgccagtataaccatagggttcctaaattagatttccctaagtttgatggttcagatcctgtggatnggagaatgagatgtga

SEQ ID NO: 36289 - DNA, 408 bp, Oryza sativa
agcttggcttggctagagctgattagagttagtttgccttaacctatgttggtgaggcccatctcctcttagagagtcttgtatttttaccctcgagtgtcctcttgtttaaggagaattagagagtcaagtatgaatacaattcgagtagacattgtggtgtccaactagaactctatttatcttttcttatccgaaaccattttgtatatgaggttaaattttgtataaagcttggtatatggtgcgtcccgctaagcttaatatattaggcatcccatactcatgatactgacaataagtttaatcaatcaataaataaatccattctaatcaataaataaataaatacattctaaggtagaaatcgatttaatcatgtgctaatggcttaactcgtttcacatg

SEQ ID NO: 36290 - DNA, 436 bp, Oryza sativa
gctttcatcaatcccatatggcaattatctctgcgggtgattcccgcaacaacggcgaatcatcttatgccgcaacaacggcgatccacatcatctaatcggattccgcaacaacggcaaccctcatcgctagcccacgctcacgggattcgcggaagtccttaagcccgcaagataaagccattaagaaagaactactaagccagcctgtccaattccagatcatatggtcgacacgatcgctacggcgcttgaatgccatataacagttgttatttaaccttatgatgataaatatatacaactgagaccccaccaccatggcaagttcagaatacatctatagtatgactaactgctccaccagtcaatccaatccatcagcatatgtaattcaattatagaaaatatcatttaatgcaaggtgatacatata

SEQ ID NO: 36291 - DNA, 440 bp, Oryza sativa
agcttcatgagttccaacacgcatgacaacttgctgtgtttctacttgcatccatcatacaacggcatctggcaatcttccaccaacttactaaacttctcataatctctgtcgttgtcctctgcgtcttcaatgtcatgcaacattgtagatagacattgagtgtccaaatctatggtctctccacctaaaggagaaggtacgaacatgccttctcgagctgcggcggtgttctctacatcctgatccaacactttttcagctgcgacatcaggcgcctcttgctctccatgcttggtccagcaggtatatttcttcatgaatccattcattatcaaatgagcatgcacttcatccttgtcttcgatcatctagtcattcttacagtccctacatgggcacaacatgtgcatgctcatcctactttttctgtcattatc

SEQ ID NO: 36292 - DNA, 433 bp, Oryza sativa
  unsure (1)..(433): unsure at all n locations
tacgctatctntccatgctcaatgtgctagcttttcattgtgagaagcatatgcattggtgggtgttgctaatttagatgaggggataatgacctggctcggctcgttattagtagtatcatgactagccagctcggcttattaattaaccctaacgagctaaaagcgtggctcggcttagcttacgagttggcttgttaagctcgttagtaagttcaatcttatttatatcaactttaaaatttcaatatttaccaatttatcatatgttagtataatataagcaataactagtaaaatattcactaaatacaaatagttagtttgctagtaaattaaaggactaacactacaccatggtccactcttgctaacaaaagtcagttggaaaatagactaaatattggaacaaattatgtgtatgcaaacatat

SEQ ID NO: 36293 - DNA, 375 bp, Oryza sativa
agcttcggatgtgcatcgactacaccgaccttactatgcatgtcctaaggacccttaccccctgcctcgcatagatcagattgtcgacttcacagcggggtgcgaccttttgtgttgtctagatgcatactctggttaccatcagattcgcatggctagggaggatgaggaaaaaactgcattcattacccccataggaacttattgttatacgacaatgcccttcgggttaaagaatgccagtcctacttttcaacgtactactcgaatttctttgggtagccaaatacgacgtaatgttgacgcttatgtctatgacttggttggaaagacgcgcaacccagagaccttactctcggatctagcggaaacttt

SEQ ID NO: 36294 - DNA, 466 bp, Oryza sativa
  unsure (1)..(466): unsure at all n locations
gagatctgagctcaattttattgcctctcatatcaaacattatgaagcaatccatttgttccaacaatggatatgcaaaatagattcaatccaatccaaacgaggccttatcccatgcctagattacaggtcacgtcctagtccctccataagatttcagccaagttccattctttgtttcttttgtgcanatctgtctctggttagtctctcctaacaaaattcaaacgagatgccccttcagaagaaaaaaaatctatatcgagataaccttagtaagagacaaaacatactagatgatatgagtatatgacttgtcttttcgggtccagtttanaaactgttaatcatctcctgtttgagtgcaggatagtgaagcagctctatagtgatctttctggtattgtaaatgtgggagtaggctagtagcagaaaacatatatgtcttttgcagctaatgatggat

SEQ ID NO: 36295 - DNA, 355 bp, Oryza sativa
tttttgcatcacaagaacattactggtgctcgtgttttcttccaacaagataccatctgcatcgaacacatgtgtcttcttgcagtccttcctaaacctttctaataaatagtatctcggcagttcacttagctgggcacttcttaagactggaattaaatgaccacatggtataccatgagtttcaaatagcatacatgtgcacgttgcaaccattgtctgtctatcataacgcacaactcttggctttctggaatcttcaatgatatcaatgattttgacctagccctcttgttgcacattgtcaataaagcaacggtccctggcagctaacacctctttctgattatgctaa

SEQ ID NO: 36296 - DNA, 415 bp, Oryza sativa
  unsure (1)..(415): unsure at all n locations
ctttacaaccacttcaacagcagcttcagtaatgtattatcacgaactgtcctcaattacaggaatggattgagtggcaacagtctctaatagacaaggaagataaggtaagagctttttttttttatctgtgctttctttgtgccttttggtttttgttttcttcactgaaattgatgtattttatcctcagcagcaaccagaatttgataatgcaagttatgatcaagaggctcttggtgcactgagcgacaatagtgaggatgatgttgaagttttcaatgaagatgaagatgacgatttctatgatgaaatgctagaagttgggcagtcaagcgggacagcaattaatgacgatgatggaagtaacgatgctgtttgaagtatgagagcaatattnttgaacatcacgtgc

SEQ ID NO: 36297 - DNA, 433 bp, Oryza sativa
  unsure (1)..(433): unsure at all n locations
agcttctcttactgaaggggggagaaagatttagttttgaatgagtncnaccacagtacttagcgagccacaccggagatgcataattaatgcaagggagtacaaagggattattatataggggttaaatcttgcaggaaacagcatttaaaagtcacttaatttgccaaagccattttataaagacgagcctagaactacacagctttattaatcaatggcgcgaacccacacgaacctgccttaacccaaagcctacgatgatttaaaccgaactggcaacccgaccctgtgtcccagctcgtcccaaaccaacccaggccaaccattccacattttagttgttgagcaaatcttaagaattagaacactgacttgagacattgctcggctgcccataaccgaggcccgctattgaatagatatactctga

SEQ ID NO: 36298 - DNA, 449 bp, Oryza sativa
  unsure (1)..(449): unsure at all n locations
cactcctacactcttatctattctcacaatctcacaagattgactctatatntgagtggaggaagcaaagggatcttgggagaggctacaacaacctatggtgtggaagaactgaagtgaaatggccaaaaggtgtgctgggtgtgatttggatatatataacggctaggtgatgtcatctagccgctactcacaattttgaactggaagaagtccggaagtnnctctnnttttntntttctttttcnttgctcntggttttcttcttgccccttatgacctgctgtttatttgttgaatcattttgggtccgttgttgtgttgtctcgacaattgcaagtgacacctcattcttcattttgtaatcacagtaagctttcttccttctgttgctcttccgccggcgtgtacatctacttgtgtactatacacaacatataccttcagag

SEQ ID NO: 36299 - DNA, 386 bp, Oryza sativa
  unsure (1)..(386): unsure at all n locations
agcttggtcaatagctgccgcttgccccatattccgcttggcgtcgccgcgagcttggccgccactaatccgggataccaccattgttctcgagctgttggttcaacctctacccgccatccccaagtcagtcttcgcctgagctatcccaggctcaacctcgagtagtgcttgcagtcggtccattgcctactacctagcagcaggaggagacagcggatatgttgccattgcagttgcgtcagcctacaacaacagacaaagagtttgaattggcggctcgcacatggtgatggcatcctgaagtggcgatgggcatcatacgaatggtgcggaagggcagaaagagtggcacganatcgagaaaatcacatcttcgatgtata

SEQ ID NO: 36300 - DNA, 471 bp, Oryza sativa
  unsure (1)..(471): unsure at all n locations
tattacagcatggacaaaagattcatgcaattccggtgtccatctcatcccgtgtttacttgcagaggcattgctggtgttgggaggaggacttgtgacaggacaaatatcgccactatgggatgaagttgactgattgaaagcaggctgtgatgcagcagaattggaaggttgggccatggactgtaacaaaagagatccataaatatttagcattctgaccagggtagaaacataaggagcgctatctatagcatcagggacaaaaaaaatgcgttaaaggtaagatgcagtatacattgcttagaatntccaggagcagcctatgtcaagaacatgaacaattcgttacaggaattttaacacattgaatcaaatatttaatctaccaacagccacaatctcttcagccaaggaacaagtaatcattgcttctttacaggtaatcactttaacanatgacatctcaca

SEQ ID NO: 36301 - DNA, 430 bp, Oryza sativa
gctttatctacatcaagatgatataatcttactgagtcacccgcggcctctgcataaaatacacacagctaaaaaagaaacaactagaacatctctcaagcacaaaagtttaacagaaacatatattttagttactatcaatccatagattaaaccgctacccatgtttctgggtaaatccgtagactagagctgtttgatcggatctgttaaattacagttgtggtgtaagggccacatgcattaaatggtgaccgaatttatgaaaattctgtgagccatcaaactagtagcactttcaagattcagcacgggacacctgaacctaagacatggggctgatggccatgcaattagaaaacaaatcaacatcacacacaaacatacacactgcatgctgggactagactactactccctccgtctcata

SEQ ID NO: 36302 - DNA, 474 bp, Oryza sativa
  unsure (1)..(474): unsure at all n locations
tttgcggttcgctaatcttattgttaatgcctaagcataatcgactagtacagtctacagtgcttgtctggcgcatcatcaactgtcattatctntttctttatgagtattttgaaggatattgaactgtcattatctcctctgaagaaaattgttatagagtagacattttaccaggtatcctgcaccaaacaattcaataaaaaagatgatctgaaacttcaacaaagacgagactttatcgattcagcacaggcaaaaatggctgaagaaaaaaaataaggtgactactagaattctgtggtgatgtttgattgctcatctgctggttttttctgaaatctggagtgtcaaggttggaatgtttttagattggttgagagcgatcagaatgttttcttttaacgaccgggaaagtgacactgatcaatataatctattatgctagtacatctggaaatgttaagaactggg

SEQ ID NO: 36303 - DNA, 424 bp, Oryza sativa
agctttcatgccttcatcagcatgtactgtgttagtgtgtttattcgttgagtttggatggttttctcgtgttaaaattgttactggtgtaagctgaagcaggattgctcaattcagtggagaaattgatctgcaggtgacttaccgttcccttagtttctgtcttcatgttttttctcaaatttgcatttcaattcaagcttcttttactgaagttgcagtgttcacaaatgtcttgggaattggaaaatgcagattgttctgtttctttatgatcgatagttgtaacatgatgcagcgctaatgatctgcagtgctgaatttagtagcactagctggcagaaatattaatatgtagtaggattgaccttattccacttcattgtttctgatgtagatgatactgtactgcagagatagttac

SEQ ID NO: 36304 - DNA, 392 bp, Oryza sativa
agcttgctaggagctaccatcctgatgtgaacaagttagtactaaccattatatgggaattgtgtttcagctacactcgatatattgcttctttttctcctttcgatccattataaacctgagtactagttgttgcattacctctttcataactacataatcaaataagcaattgttatgcttgtgtaattttctttagagatcctggtgctgaacaaaagttcaaggatattagcaatgcttatgaggttagtccagctaaccataaccaaatcccattgtttcttatgactatgttgttgtaaggttacaagtgccagccagctaacataaataagattgcaaggtttgtctgatgatgacaagcgatcattctatgataaatatggaga

SEQ ID NO: 36305 - DNA, 435 bp, Oryza sativa
  unsure (1)..(435): unsure at all n locations
aactgaattgttctgatctgaattaaaacacttaaaaagcaagcaaaaatccttattaagacagccatatcatatgcacatgatatcgaccgtcaactgaccccaaacaagcaacctaaacacgcaaactaacaaccagaagctagaccatcgataaactaattggaaaacgagactaatgctcggaacggctcctgcggtcggtggagtcgaaggcgtcctcctgctcgtcacccggtccctctgagcgactcctggagcctgacagatcagtctcgccgctgccactgggagtagcagacaaccaacctccggtgccactggctggacccctggcggctgatgctggagcgaaagagagagtgaacgcgggagctggaactggagctgcangaactgcgggcggaactggaggtgctgcnggagctgttctat

SEQ ID NO: 36306 - DNA, 373 bp, Oryza sativa
agccttgggctgctgggcaaaatttgattattcttctgcagtacaagcccagccttcagcttggagctccccgtgctcctacggcggcgccctcctctcatcctggagctaactcaagctcagcacctcctcctcctcctgagtatgatccaaatgctttcttctatccacagtatgcttattttgaaatgcaacccaacgaatacttcaacctggtacttggggctattaacaccctaagcgaaagcacttaacacttgtctaccgggcatgaagcattacatgaggatgttcgtggcttgcgtacggatgtatgagacttgaatgcttcccgggggagaatgctcactagagtgggtcacattcggattct

SEQ ID NO: 36307 - DNA, 424 bp, Oryza sativa
tcagatctggcacgatcacgatcagactataacaagtttctctgcatagtcattcgggaagacagcggagcatgtcaagtgggataaattggttctcttgggaagcagaacttatagttagagtggttgacccttgcatcgaatcgcagaagtacctagcaccggagaccaggaaagcttatatgagatagttaatggcaagttgtcaatcatggtatccttagtaagcgggatatcatagtctaaagcatatggtggtaagctggaaggaaacggcaagcatggtattctcatgatgacaagcatggtatcctagtaatgacaagcaggttacgacacatgacatgaagttgataacttgtgtgaggttgacgccgaaaatatgaatcgtgagaagttctggaacggaagcatcattaaacta

SEQ ID NO: 36308 - DNA, 389 bp, Oryza sativa
  unsure (1)..(389): unsure at all n locations
agcttgctacataattattacgatttacgagacaagtataagcaaaagtcggtactcgaataattatataaagtaagtaaagtacccaagctatataaataagaatattcattattgaataaagtcttacaagaggtagaagggatactagagccatacccgaaatcttcggaagacttgaagaactaagaaactattctaattctactccactagtactagaacaaagtaaataaactaaagagaattcttgatttcttcttcttggtttgtgttgaagtggataaggtgaactccttaaacaggctgccaatgatggttgtggccgttggaattgtcaaaaatgccccgcaaccatcattggggagtgatcanggatgtccacgtgt

SEQ ID NO: 36309 - DNA, 457 bp, Oryza sativa
  unsure (1)..(457): unsure at all n locations
taaggagttagtgtgggataactntatagtaagataggattagtaccattaactcccaatttaatccgtccttagatttgaatttaacttgtacatttcattttgcagtgcaactttgcttatgttatgcttgtatttggacagaattttcaggtattggtcttcgcctttcttgattntatttaatttgcatacattgccagatttaggtatccatatttctcaattagcctctctaccattgggagaattagttacttgtactatttccagcaatggttaatagtaacacactagtacagtagtattacatgagtcaaggatataaataaaactatgcacttgaaatcttaaactgattgtgcatcggagttaacctacactgtgcatctttntttgtctgcatgctttaatattatcaaatgagaatgaaataatntaactcagtctaatgtat

SEQ ID NO: 36310 - DNA, 425 bp, Oryza sativa
agcttcataaatcctacccgagtacactttctttggtatgctaaatctttttttctttgaaaaagtaaactgtattcacggcacaagaatttatcgggtgggtgcgcttcagtataaacacttgaaatttgagtagtgaatcaacttactagatggtgcattttcagtcaaagtgcacgtctcgttggatttttttgccacatcagcggcgcattggcactgattaaacaccaccaatctctaaatttcagccaaataccaaccattcaccatctcaccagcatccactatccacatatcgtgagagccatctcccccttccttatactgatcagcaacaaatccaccggtgtgtctccattgattaacatagtaaattatcggtgcatacttgctaaactaacatattaacgcttaaaaacaat

SEQ ID NO: 36311 - DNA, 452 bp, Oryza sativa
  unsure (1)..(452): unsure at all n locations
tacttacactactcttatgtatgcttactctaaatctggtaacagagaagaagcttccaagcttttcgatgagatggtgggctcaggtgttattcctgacaatattacttatggtacactaattgcaaggtgttctgaggtaaattcattggataaggatataggacatactgctgaattgtcctcaggcgctttaacaaaagatgatcgtatgtataacatattatctaatggaattaatgctccttggtgccagaaagaagctgcttccagtgttgaatgatgtgtggtcaaggaaccttatggcacaccttctttgntctgacaagaaccgtccaagaatgaacaaggagtanggagaacatgtggccactgattcttgctttgatcttatgaattntacatctcctaacagntcccttcaattcatttggtcatggtcaaaatcttgg

SEQ ID NO: 36312 - DNA, 346 bp, Oryza sativa
agcttcaatgcaaaagaacaagctaacgattattaattgtgactatccaaaaatattgcaaactccaagaaggttagttggagaattcgcgcaagaacactacaaaatcaagaaatgcacctaaaagttcaacaattaaacatatggatgaaaaaagaagcgccaacggagaaaccactgaaacgatccgaacaaacaaaataccgttctcataaaatcaatacgatgccaccaaaggcagacgtctagccagcaaccaaaatatattatcgagtaacatggaaaagtgactctcgaacgagaggtataaattaaaaatgaaaatggtagagcacaaaagagccca

SEQ ID NO: 36313 - DNA, 310 bp, Oryza sativa
acgaccctcagacgcctttttgcgtttcccgacttacatgactcccattaaaacctgacatcaacagaaccaaagtttttaacaaggagcacttcctctggctcgatggagaatctacgacattgcctactatggatctgtgatcgctatcgctacatgtcgggacggaaaatctctgctccttcaattccctggaatggcgctgcttggcgaaaacctacacatgtcaatgcggaaagttgcttgccatgcccccctttcatttaaaacggactgctgtccataaagggaagatatctcattctagcaa

SEQ ID NO: 36314 - DNA, 424 bp, Oryza sativa
  unsure (1)..(424): unsure at all n locations
agctttcgcgtctcatggcaaacaacgacatgaacattgttatcaatattatagcacgcagattctcaagaattcaagatgtcgtaaggagagtatcgaaatagaagtagaaagtgttcacgcatggaatgctggttcaaaatgttcagacagtcctataaatctgaaataatattgtagtatgatcaaagctcgatgattattcagcacatattcgtgtcagtttgttgaaacttgaaactgaatgagtaatcactggacgttctactacaaagagttaagaattgagacatttgcagataatgcagatatgacctgaacatgattaaagtttcttttctgaaacactgaanaacttataacacgtngagcatagtaaatactaataaacaaactggtaaatggaatcatgatcagcaagaag

SEQ ID NO: 36315 - DNA, 370 bp, Oryza sativa
ctatggtcagattaaatcataatgtttaattgacagtcatcttcattttgttgtggcagaatgctgaagcagcaagcaaagttggagcaagcgccaagggcaagcgttagcggatgagcagcatgcatgctggtatgagcaagtgccaagggcaagcgtaagcggatcgaggagtgctgaatggtactccctcagttaaaaaaaaaaaacaatcctgagtatgaacctggacacgtgtgtgggctcatacccaggatttgttcttttctttttatgacggagagagtagtatatttctgttgcttatcatgtgcgcctagcatgtcgctctttttgcttacatcctgtgagatgtaatgttagcatgtgt

SEQ ID NO: 36316 - DNA, 180 bp, Oryza sativa
tctaccatcttgtgctcttgccacacagctacagaacgtaagagcttattgggatcgaacagatcatcagctataactacgggtatctaggctccaagactataccttgcattctgcacgagaaggcgtctcggttagaatactctcaccacgcctgtcgggaaaacaccgttcttcatt

SEQ ID NO: 36317 - DNA, 204 bp, Oryza sativa
ttcatgctgttgtagatgggctaaagcttcgcaatcagagagccacggtgtctactctgtatccacagtgcccctatccttacttcagccatgtacatataggagagtgtcttactgtgcaacatttgaggtccgcttttatggcatgccaccggaccttccacgagatgaatgatgcaactcatcaactatacatgcatcaca

SEQ ID NO: 36318 - DNA, 438 bp, Oryza sativa
  unsure (1)..(438): unsure at all n locations
agcttattcttataaactaacaaagtgtgacttctatttcctgaagttttcagcacagatgagaaaacctataaccactgaaaggtctcaagtaatactgatacagaaagtcacatggaagagatgatataccaactataataacattaaaataacctgaagtatgggagttggactgaagcttactctgattctttttttcttaatgaaaatgataataatggtcttcttaattcttattatgtaccaactattttaattttatcataggcaagtaattagtatttgggcaagtagatactcttgctggggtagatgaaaccttcctattactactacttcgtacttcccatggttatcaattttgtntgagaagcatctagtttgaagccgtctatgatttccatatactctgtttttctttgctgttctcattct

SEQ ID NO: 36319 - DNA, 363 bp, Oryza sativa
ctagagcatatcttgtgagattatgagattagatgagagtgtaggagtgttttggagatggcttgaagattaagtttgattgagcactttggatatcttgtgggctgtcacttgggcttattacttttggagatcttctcctagacgggtaggtgttgcccgtgagcttccaaagatcttgtggatgtcccgggaaaagttgggaaggttttcctcaccttcacaaggaaacaaggtaagtgagtaaagattcttgtgctgagttttcagaggttgtcctatgtagagcaacttgcacttgtggtcttttctaaaagaaattttgagttggatcttggtggtcactcaattctataaaatgac

SEQ ID NO: 36320 - DNA, 360 bp, Oryza sativa
atcctcttagtcaccagaagcatgcagcttgcatgcagaaatgccagactcttatttttgcttgatctcgctaaagcatttgattcagtatactggccaagtctgttccacattctgtctgtcaaggggtttcctgataattggatttcttggatcaaaaacttacttcaaacctcaaagtcggcagtgcttctccatggtattccaggaaaaaggatcacttgcaaaaaaggacttccacaaagcgaccctttatctccttacctttctattctccccgcagatgtgctacaaccaattgcttgatagaaacctgctaatcagacaccctattcattatgataaaccctgtgcaactat

SEQ ID NO: 36321 - DNA, 276 bp, Oryza sativa
  unsure (1)..(276): unsure at all n locations
gccgaagttccccgaccctatgtccttgatcatctcgtacctctccatccccacctcccacgacaactcccccgcacgcacaagcgattcttgagaccgcccaaaccgctcggtcttaacacaccgtcctgaaagcccaaagacaagggcagagcaagaagcagaacagctgctgctaatccagcagagcaaagaagccaagaattggagagaccagcgagtggactgcgagagaagaagangaatgcgtggagtggtgcggtgtggaaagggagg

SEQ ID NO: 36322 - DNA, 386 bp, Oryza sativa
agcttagctacatgcctcctcttataaattatctatacaatgttttggaaacgattctatgttggtcggtaattttcgtatttacaatttactaactatttaatggtctgcaatatgtacgccactaaaataaatatggctataaatggtcaaaaatgttactattccaacataaatgatacttgttcggtcaagaattttcggtaccacttttaaccctacctccatgcctttgtgaagcatataatccaaaattgatgagatggcataatattacaatctgcttataaagataggacctggtataaaaagtagtatttcttccgccccacaatataacacatttgagcactcaagatttatcctaaaatataataactttacca

SEQ ID NO: 36323 - DNA, 459 bp, Oryza sativa
  unsure (1)..(459): unsure at all n locations
cgctgacagtatattctcagnctctctcatgtccagctgctctactttgacgtcanggaggcaccatggacggctgttagccccacgccattccaagcagcttatcatcgtgattattcgtgggttgaactatacagaaagtaggaacataaattaaaggatgagagaaaacagaatgaacgtgtgctaattaacttactgtggaaagtgtacaccattggtcacgcttgtagatggcaacatcaagaggtgttagaccttcattgttcggtgcgtttaagctcaccctagcgtccagcataaaagggaaggccatggatgcataaccaagctttatagctagatggagcggggtgtttccttgcttatctcttgtattcatcatctgtgtgaagcttggggatttgcagatgtntgtcaccaactttatcctttcatgttcaatagcacaatggagcg

SEQ ID NO: 36324 - DNA, 378 bp, Oryza sativa
agcttactgtcctctaacctccctgagaattgttttccacatgaagtgtaaaaactaaagagctcacgatgaaaacaggcatatgagcaaaaaggtagacatggaaatccaaccctgttgtaactcactttgtcagaaatacacttcttcccaacagcagtgtcctcgaggattcgtgcagccacctgaatggacaagcattagtttatcattacaaataatacttatacggaatacaatcgatttagtgactatgcatctatccttctcattttggtctagataaatgagtattgcttttatcttatcacatctgattctgaacaaaaaaacaaaataaaatgttggtgcattaaccacataaatattgtgaatttt

SEQ ID NO: 36325 - DNA, 444 bp, Oryza sativa
  unsure (1)..(444): unsure at all n locations
cagaaagaatnggttttgactctgggatcactgtgattttggtgtcaatgatgtaaagctaacggcattgatgttttgagggttaattgattcttgcccagaatcgatgcttggttgaaatgatcaaacttttggaagagttaagtggatccttatgaactttnttccttttgtcttactaaatgttatgtgacatgatgggagcctaatatcctatatatatgttcaggtaatggactaattaggtctaagcattgaaggcatgaatcatgcataatgcattttgggaaatattgcattgaccgattaatccctatgatgtgacatcagagatgagttgatctcattgaaatcaacttanagatgatatcattggattggtgctagtacattattagtactagctatatgccttatatatatgatatatctactctaatgagc

SEQ ID NO: 36326 - DNA, 406 bp, Oryza sativa
  unsure (1)..(406): unsure at all n locations
gcttaaaaaataagcgttaactnttaaacagatatctctactggatcaagtggttagaggtgcatactatggaatacaaggtcctgagttgaaccacaacttctctttgtttctattttatttttgggcgctttttctggaggagagaattattatnttttggcgctttttctagaggagaggtggtgaccggttttcttgggagggggagggcctactgccagttttttttttgggagaggaggccggcggttttttgggagagagaagcctttcggtttttcttataggaagagatctgcgctaatgggttggaggacggctgaccgccggtatttgggagacgaagccggcgattttcttttttgagggagggatcgcgactctcgagatggcgggtcgtggg

SEQ ID NO: 36327 - DNA, 237 bp, Oryza sativa
  unsure (1)..(237): unsure at all n locations
cttatttagggtttaaccccaaatataaaagaatttggcactggcataaaagagtgtaaaaccaaagagagccagcatgatgcaaagtttcgcaaaaaaatttctggaggaatttttggtctccgaatttatttactcaaaatttcaaggtgttacactcatccaccanaacataggcatcaccatcttgctcttgcctatcacatttgctgcatgttctaaatttccagcatgatc

SEQ ID NO: 36328 - DNA, 415 bp, Oryza sativa
tgcttgtgtgtgtgtgggtcttgcatgtgatttacatctttggtgggatataagtacatgcgtctggttgctctctgagtgctaagaagttggtgagtttactggtgtgagagtcttcagtttgtaataatgaaactcagttaagatcaataaaagttaaagtaattctctgtcctaagtagttttcccccggtttctcttcttgtgccctatccatgccagatggtgaacactcgcagcaacaggaatggtcccaatctcaacaaccccaataacaataacaatggagagaatccaacccttgctcaagttcttgctcaacagactcagcttatgaacatgatgatgcagcaacttcagaaccagcagaaccaaggaaataaccatgcaccccctcagaataagttaacagaat

SEQ ID NO: 36329 - DNA, 390 bp, Oryza sativa
gcttgttccacatctataagattttcttggttaacgcacgcacgcacgaaaactggagagcgagatgagatgagatgaatgagaaagaggatgcggacgctcacacgaagacgacagcgctgctgctgtgctcgcgagatggagatcggcgcgggcgcaaggagcggagaccaagacgggagattttcctttgacgcggagggacgggggagatgctatcgactcgcaatgatttttggacaaagtggcatagccacgactgatttaaatttgtgtgatacaacgtattaattttaatatttgaatttcagaaaacaggaacaaaataatttatccaattattattaacataattagatcccatccgtacatgggtggagtagaaaaata

SEQ ID NO: 36330 - DNA, 231 bp, Oryza sativa
  unsure (1)..(231): unsure at all n locations
ataggaagagaattgagtcgaagaagtctggtgaatcccgagtgtcggtntacactccttggttttctgctctggtattactctaatataatagaattatctttcgagtaatttaactctgcttggtgagaattatcccttggttagttcatattcagaagacgagatcatcacttactataactcgcctacaatgtagtgatttattttggagtgtagctagcattaaag

SEQ ID NO: 36331 - DNA, 420 bp, Oryza sativa
  unsure (1)..(420): unsure at all n locations
agctttctcgtgtggtaatacaccaaggcttaataagcccagctggtggtaggttntcaatttctggcgttatctccatctcgctagcctcgaccgtgccttgtggcggcacaaagtgcagacgaaagcgacgagcgaccatcagctaataaccatgtactccctccgtttcataatgtaagactttctagcattacccacatacatataaatgttcatgaatctaaacacatacatatgtctagattcatcaacatctaaatgaatgtggacaatgctagaaagtcttacattgtgaaacggaggaaataatattccacttttttacttcccttgaatcattgatatatcctctctctctagaagactacatctgaaatcgaaaattganatacgaaatccattgaggcgtggttcatg

SEQ ID NO: 36332 - DNA, 471 bp, Oryza sativa
  unsure (1)..(471): unsure at all n locations
actcagcttcactccatgaaactggcacatngcctatactaatgtatagntgaattcttgtggcgcgcgcgtgtgtgcgcgcgtgcgcctgcgtgtgtgtgtgtgtgaaagatagagagagagagagaatacgctttggatatgttctgaagcttgagtntgtcatgaatgatgtcatatggaaattccagatataataagttacaaaagggtaaggaatttcataaagacttacaaattctcgagtgctgtgagaagtgtgaagttattagatatcaccccatgcaagttgctgttggaaagatcgctggacaacaatttcaagtaacccaacataagacgaaggtaacgatagtatatggaagatcttgtgaatgatacttacagagatattatccttggaatattatcacttgtggttctgcatatcacaccatcccatgcacattgggatggggaacatggatcacc

SEQ ID NO: 36333 - DNA, 369 bp, Oryza sativa
  unsure (1)..(369): unsure at all n locations
agctctattgatctncaaaccacacggaagtttagcttcaatatggatctgatacatagtgcttttccgttaacttgggaagaaagatagtcttgtttcttcacgcttgtagcattgcttgaatgattgttgaaacttatattcctaacaataatataactgttaaaagttttagcctcattttcaacggtggttcttaactntttcttataagcagtgatacattgttatgcgtgcgttttcactggatatttgagtggtaaatgcattattcacttattcacacagtagtaattcatgttttggaaagtgctttctttntttttggtgctgatgaattgaaaagggtcttcaccacattcattattg

SEQ ID NO: 36334 - DNA, 372 bp, Oryza sativa
atacaaagcataatggaaaatgtgttctgcatgtatgtacccataatagtcacgcagaccgaatgaattttgactgaatgtggcaatctttgtgttacatacgattaataggggaaaataaagaactgcacctataaaatactccaagatgattaacatatcaaacttataatatattaaagaggacataaagctgatacgttgagtgagtttcaatgaatgaaaactttcacaacaatgtacgccaatattgtgtttctggaaaattgtagaagtttccattatttatcattgttcattcgcaatgataacaaagtttctttggaatccttgcagtgactagattttaacacttaacaagtttttttcgta

SEQ ID NO: 36335 - DNA, 398 bp, Oryza sativa
  unsure (1)..(398): unsure at all n locations
agctntgtaccccttggtggactgcccggataggttgctaagtgcaagccaatcgttgatggttacgaacagcaacgctcgtaggttaaacttctactgtttgtcctcgtcccacatggagacacattccgtcttccacaacaatttaaaatcttcgaccagtggtcttaagtacacatcgatgttgttaccaggttgcttggggccttgaataataatcggcatcattatgtacttcctcttcatgcatagccaaggggggaggttgtagatacacatcgtaacaggccaagtgctatggccgctgcttatctctccaaaaggattcatgccatccgtacttaaaccaaaccgtatgtttcgtgcgtccttttcanagtctttaaattttctatcga

SEQ ID NO: 36336 - DNA, 438 bp, Oryza sativa
agcttcggatgtgcatcgactacaccgaccttaacaatgcatgttctaaagatccttaccccctgcctcgcatagatcagatcgtcgactccactgcggggtgcgacctcttgtgttttctagatgcatactctggttaccatcagattcgcatggctagggaggatgaagaaaaaactgcgttcattacccccgtaagaacctattgttatacatcaatgcccttcgggttaaagaatgcaggtcctacttttcagcgtactactcgaatttctttgggtagccaaataggacgtaatattgaggcgtatgtcgatgacttggttgtaaaaacgcgcaaccaagagaccttactctcagatctagcggaaacttttgagaacctacgctccgcccgcataaaactgaaccccgataagtgcgtgtttgggtacctgc

SEQ ID NO: 36337 - DNA, 473 bp, Oryza sativa
  unsure (1)..(473): unsure at all n locations
ccttgcttggtcccgagtaaggacgaaaggaaacaaagacttggttgttgaccaggagttgctactatgctgtatatctcanatgtacaggagcaaggtatgtgtactctctctcaaatcaaataacctttggcacagtggcttacccttacccctgattcccatgagacactgcctttccttgtcttgagcggctgagagactgaacagtaattagagcactaatcacccactctttattcaacttttactctggaagctttcaaatgattttgcaaaagaaatccaagttcctcaaattattcacttgatctctccaagcgtatcaaaaagaattcctcaccattttgcccttttgattcctactctaaggtttgatatgtggagcttggtanggatcaaacatggcatacttgcattcacatttattactagagtcaaaacttagacttaaatagatgacttaacatact

SEQ ID NO: 36338 - DNA, 385 bp, Oryza sativa
  unsure (1)..(385): unsure at all n locations
agcttgctgctgagacagaagtgctagctgttgtggggtcataaaagcaagttgctgctgctggacagcatatggcgaaaccatactggactgcaaaatacacgtatttcttcagataaaccatagatgtgctctttcttttaaatgacagagccatttcacaaaagcattagtaaaagtaatgctggcgctgaccttctcaaacagactcatgatatcattcttcacatttacttgtggggcagctggagctgaggatactgtcacagctggtgaatctttaaacaagtcctctatgcctgatgtagactggggcttactttctactggcttagcagaatcctttntgtctgagctaagtactggctctgcagctgaacaattg

SEQ ID NO: 36339 - DNA, 473 bp, Oryza sativa
  unsure (1)..(473): unsure at all n locations
tgccgttgtatcagctctctgccggcgcttctggaggctgtacaaagcgctctctaccttgtacaagcttggcagaacgaattatatctccagttttaatctgcgacagaacttctcttccatctgtggtatacctgcagatgtatgatcgacacagttctctgttgttaatccacaaaataaaccaagtttgctgtctagtggtcacagttctgtaatggcaatcactacttacccgaatactgagaattgcccttcatcaaaagatattcctcctaaaccagactgcacaagataaaggaatataatcacaaattaaaatatttacgcaattagttcttatacataaggcacgctatgggtctagaanagcagaagcattcagaaatatggttcacaacacaagatgtagacgggtgcactggtgaggtacatgcacttatgcaatctgaatttaaaatactgtgctagcg

SEQ ID NO: 36340 - DNA, 418 bp, Oryza sativa
  unsure (1)..(418): unsure at all n locations
agcttcaaccccttcatttgtcttgctccatcagaagaataagcaaggccaaattatctatgcagagggaaatgtttaggggacatcatctagcagttagttcatgaaaatttaaataccaatttgttcctttttcttatggtacctacatgataaattttctctttggtattataatctcttggacttatacaagaaaaatatatgcgaataaaatttgcaaatccacaacctgattcccctgtttgagttaaagcatttttcatgttttcgtcctttacacattggtaattttggtgcaagaccatgaatatntgttattcttatgcaacgcctgattgatgtgtgagcctcacatccatactggttttttttaaaaaaaaacctccagttaccctaagtaattctttatcattta

SEQ ID NO: 36341 - DNA, 463 bp, Oryza sativa
ccttacccaggaagaaacttctcctgatccagttcgaatatcttctgagttggatgaaaagaagcatgataaaatccagggacaactggaaacaaaggatgatatgtctctcagtaacgcaaatatagagaagtctagtgatagtccagatgcaactcaacatgatagggaagtatctgcactcagtcaagagcatgttcaatctgcacagccacaacagctgccagactgtgcaagaccatccagctcagaaatggcaactacaccagctaccacatcttcccaattttcacctagcaccgcagtgacatctcaagctcaacttcagcaccagattgttagttctcaaatgcaccaatccgacaagctttctttggctgaacaaaatacgcagcagcaagggcttgcttatgaaattcctcagaatgtccaggcatcctcgcagagtcaagctcaaatcttt

SEQ ID NO: 36342 - DNA, 385 bp, Oryza sativa
  unsure (1)..(385): unsure at all n locations
agcttagcanaaactgttaagaaatcaaaaacttctcaagaatcatcaagcacagcataaatacaccactattgtacaaattgagcctccatgtattacattcaaactcagtcagaatcagtcctttcatcatcagagtcttcattactcggctggaggtcgttgttgcgaaattgctctacaacatcgctcgcaattttgtcagccgcattttgcgcactgctgataagatcaagggcagcttcttcacttgtcccgtctgcaaatccatcaatggtgtcgacttcaattctcgggtacaaagattttgtcatcgccaaggccatgccagcttccatacttncagctntcttgatattcttgaaatatactntcggagcaacac

SEQ ID NO: 36343 - DNA, 405 bp, Oryza sativa
  unsure (1)..(405): unsure at all n locations
ggactgangaggtgcacatatagtcactgaggggtatttatcactaatttttctttgggaaccgggtgcctaagaacccccctactactacttagcttcgcccctgaggaggagacgctaccacacaacatcaaataggcgacacggatgagatcaatcagaccgcttctctaaaataatatgtactacactatcaaagacgtatcgaanagcaatatcattgctactacgaaaaggattttcgttaacagtatttaaaaaacgtatggtttttcgtgggtgaacgatcactctgctagtaaccaaaggcaatgtaaaaatctttacaagctggtttttagagggtagacgtacaccgcctttcaataatatgttcacatacgtacggtcatcctaatatgttcg

SEQ ID NO: 36344 - DNA, 476 bp, Oryza sativa
  unsure (1)..(476): unsure at all n locations
tttaatgaattcagntatctatgtggcgatgtaacgatgagctacgctcacgagctgatgatctgcaccgctcttctaagaaggacgcaaagcattacatatgtacagttacagcattttgggcttaactaatgatgtaggttgctacaagaggccatttttggaaaaaaaaaaagattctaattgttgtttttttgttgaatcttggatgcagagttntggaagaaggttcctctgaatgaaccataccgggtgatactgagtgatgtgagagataagctttacaatacacgtgaacgatcacgggagttgttgtccagcggatattgcgacatccctgaggaagcaactctgacaaatgttgagcaggtatagaaattcccagcaaaaatcaataatttccatgtataacatatgttcaaccgatttttaacacactattatcttctgtttcagctattggagcccttggagct

SEQ ID NO: 36345 - DNA, 320 bp, Oryza sativa
agcttagctgaaaaaagagaaggcaaagacgtgttatgtagcgccaaaaacagccgagttggtgggggagatcacagtgctcccctccagctcacgaaacgtgactccctgatgcggaaaaggaccttttcatcagtgaaacccagtacccaccagcccagccagcccagccggttgaactctcccaggcgaagcagcgagccagccggcgattcatagcggaagcagccggcgacgaagtgtgagatagcgagctatcgagccagcccagccaccgcaaccgcagcgacgctcgcaggggaaaaaaaaagattccccct

SEQ ID NO: 36346 - DNA, 422 bp, Oryza sativa
  unsure (1)..(422): unsure at all n locations
tggggctgntgggcaaaatttgaataagcacaagcagttcaagccccgccttcagcttggagctctccatgctcctagggcggcgccctcctctcatcctggagctagctcaagctcagcacctnctcctcctcctgggtatgatccaaatactttcttccatccacagtatgcttattttagaatgcaacccaacgagtacttcaacccggtacttgnggctattaataccctaagtgaaagcattcaacgcttgtctaccgggtatgaagctttgcatgaggatgttcgtggcttgcgcacggatgttggagacttgaatgcttccatggggagattgcacactagagtangtacattggattctcgagtccaaatgttggagagctcccaagcatttgtgtatcatcgtcgtcgtgatg

SEQ ID NO: 36347 - DNA, 340 bp, Oryza sativa
aggctggaaacactttgtgtgaaattctatatctcctttggtatcgggcgagtcttattggtgttagtagtgatatttcctcgtagcaccttgactttgagacatctcattcgtttaccacgagatgaccacagattgctccctgatgtcgattagtactgccctctacaatagctagtttagaatattccaatccttaaactaaactgaatattcaaccacaattaatttaccctttagcgtgagcaaatatgattacacaaaattgctgaaatatcacagatcaaaacttcagatagatagcgttggaatcatctccagctcctcataaagtgtcttt

SEQ ID NO: 36348 - DNA, 362 bp, Oryza sativa
  unsure (1)..(362): unsure at all n locations
tacttagccatcctccctaatgaaaattatacatgaacaatgccggatgaaatactaaaaaaataggtggtacttgccagaagaatcaaacatactcaagctagcaaaaaggcaagataacataatagccattccacatattatcatcacagctaatatgactgatgaagcttcatttttcagtgantgtgcttcatcaaattactaataaaaatcacaactgcagtcaagctagtccccattaaaaattacacagaatgcattcacttacaccatcttatcacaactgagcagaagagttcgaccagagttcatgacattcaggacagccataagccatagaaactaaataattctcttga

SEQ ID NO: 36349 - DNA, 395 bp, Oryza sativa
agctctggaattgatggatcgcatgttaatactcatagaacaaggcttacaaggagagcagatcactcggcacttcataaaatgccgattggcaccaatcaaagagagatcccgtacagcattcgagtttgacggcaagcatgatcccaatcgtgaagaaccagactctctggactttaaaatcatgaaggagaggatgtataaaatcttctcaaatgctattgtcgtcagctactcacatcagctgccggttgtgccatataacgcattcaatccgcctccacaggtgtgtatcggaaatcttcaacccatgatcaaaacataatcttatcttcatgttgagttaactaaccgtgaaagcatctcattcaggaatatgtattgatgaaatctga

SEQ ID NO: 36350 - DNA, 405 bp, Oryza sativa
tggaataaaaaaacccaataacattattattgaaaatttgtaatacccaaggatccaacggcccatgtagccatgcatgcatgtttctttgcaaaagcagcccatagtagccgaagcccaataactgaccggctgaacgccacagttgatgtgtgtcctcagaaaagccgatcgaccagctcatccagttcatgatcagcaccgggttcacgattccgacgaaaaccggtcaaattccgtgaaatttcgacgtttcgatatggctcggaattaagtttcgattggaatttcgaaggttaaacagtagatttggtcgaaatttatcaaaaactgtgacaccgatagggctcgaaatttagtggtcaaccggtaatgtaaaccttgatcagcacttaaatgatcgat

SEQ ID NO: 36351 - DNA, 422 bp, Oryza sativa
gcttgatgctatttgcttcttctatctttggaatttatatattcaccccatagttatgtctccaaaggtccagtctcccctcaaacaaagaatccagcatctctttgatttgatccttcaactgctcccaaaactccttataaaagcaaactggcaagccgtcatgaccaggggcagtattggttttcatttttgctaaagccctctcaatctcttccacggaaaaaggtctgattaaaaagtcattatcttcttgatccacccttcccctattcctccacatatcctagctcaagaacacttttggtggtaactccgaaccaaacaagcctttataataacgagttatatgctctctcagttctgagttaccttcaatcactcttccatcctcttctagactgctaatggtactttatctc

SEQ ID NO: 36352 - DNA, 370 bp, Oryza sativa
ctgatatttgatcacagctacaccccatgtactgaatctatgggaaacctcttcccttcccattgtatcggtagtgatttaaatcaaatgttctgcatttttccacggatgtgagaaaattggattcttctggaattggatgccatcgatccacaattgtagcgtctaaaaaaatgtcttcttgatggttacgattcgtgtcatacttgtgatgcagccatttgcgttatagacattggactaatcttccattcttggcctgttcatttttccggtagcatcttggtgaagactgaaagtgattcacctggaaatgcagagatatgtgccagtcagtaacactctgtagattgagacccattttaatttg

SEQ ID NO: 36353 - DNA, 411 bp, Oryza sativa
agcttaatgagaatacaatggagtgggattaggtggattgtttgcaggggagggcgttgttcaccggcacgcatgcatcgatgatgaagaaaatcgagctggagtggatgcaaaatcggaaagtccttttagcacctaggtgctgcggcacctagactaccatccacacgattgctcgaagattcgtgctcacctttactgtatcagttagtgtatgtataggttagcagcgtatttcttttttttttagcgcgcgcttcaaatatagctgggcccaccgtaagattcctgcacacctttataggagggagaggagtttgggaccattgtgtgtacgaagtacgaagcctcatcttttctcgtccaaatatgtgaacgacacattccctatcttttccatctctctccatc

SEQ ID NO: 36354 - DNA, 338 bp, Oryza sativa
  unsure (1)..(338): unsure at all n locations
tattgatccgctcgaatctcgcgagatngagctctcggcacatcttcaagaatgcaacaccgagctggatctggaacacaagaagctagccgatctcccacaaagttgtcgatatgacatgaagggctagattaaaatcagctatcacgaatgtcgctgatatgaccaagtcctcgaaagtcatccctagaatcgatgctcaagatgcccatgccatcgaagaactataacaaattacgcagagggctgtatcggttatgcagcgctatttatttcaatgacattatgtatacgtagactnttggaaattcttgctatcggcttagatactacgatac

SEQ ID NO: 36355 - DNA, 440 bp, Oryza sativa
agctttcttctatatgtactgcacaaacagagcaatgaagctgtgggcctggggcttacaaagttcactgccatgtgattccctgacgggggtatcaatatctgaagacatgacctctattttctcttccttctcacaaaccaactcggaagaaataatctccctgtaaagaaacatcccatgtttaaagagtagtcacatactatttatggtatatgttcgtttactttttaaaaatagaaaatacaaattacctttctgtctgattcacatcatctgctaaatctaactggataggcgcaacccatctttttttgtggctggcctccgaaaactctaaaaaaaatgcaatatgattcagttcttgtcttgcacagataatatggaaatattaagaacacggcaatataagataaatgaaggtaccttcttgctcatta

SEQ ID NO: 36356 - DNA, 425 bp, Oryza sativa
  unsure (1)..(425): unsure at all n locations
agaatggttccctcgaaggtcaagtcagtcacttagctgaaaaaaatgcttctctcgagggtcaagtcagccgcttagatgaggctctgaaggaatgtgtcaagcagctgcacctagcacaggaagatcaagcggagaaagtccatgatgtagttaccaagtcccaggagttggagtctgagaactcaaagctccaaaaccgcatcactgaactgaagaagcagctggaaaccacgaaactagaagcctccaacatgtctatagatcatgatctgcaagagaagtttcacgcaattaagaaagagaacatggatctcaagtccaagcttcttgtacagtccaaggacctgaagatactatcattggaaagagacttgagncatcaagcagcggaaacagcaagcaagcaacattttgaaaacgtg

SEQ ID NO: 36357 - DNA, 62 bp, Oryza sativa
tcgaccttcacgacaatacacgattccttagagcagatccttacaaatgaaagaactgagtt

SEQ ID NO: 36358 - DNA, 171 bp, Oryza sativa
agcttggtcgctattgtgcggtttattatcttgagaagcaacgtgactggtcaaagcagcttgatcttaaatcatgtttgaccatctattttatttaaaaagtgatatattcatcatttcatttattatgaactatgctatcattagatgtgcttttaacaagagtaaagt

SEQ ID NO: 36359 - DNA, 463 bp, Oryza sativa
  unsure (1)..(463): unsure at all n locations
ctagatgattatcttgctagattctataagattntgagttatcttcgatctgtggattcttcttatgatgttaattactctcaatttgaagtttctcgccactttttgaatggacttgatatgtcaatttgggagatgaaagtaacttcgattcaagaatcagttgatatgttttgcttgactttggattctctttacacaaaactcanaacccatgagatgaatattctttctcaaaaggttgattctaagtcaagtgctttggtttcttcattggatcttggtgcttcttcatcgaactctgtctctctttattccattaatgccttgtccgatgatcaactcgaatcattctatgaggagggatttgcttttgctattaacaagttgtctcgagctatgaacaatgttaggttgaagaaaagaagatgtcgaattcaatgtttgagatgtgggagcttga

SEQ ID NO: 36360 - DNA, 435 bp, Oryza sativa
  unsure (1)..(435): unsure at all n locations
agctntgctagaccgctggctcatggatttattttcgtgtttcaccatgttcataacccgcgataatgaatatgttgattagtcatgcatttacttttgataatcatatatctttcggttttaaattgacagattattttattattataacttaccaattgaaagcaacatataatacttgtagatccttttcgagatggtttgagtggcggctttttttatatggcgtaaaaagtatggtgtagaatatagaccttttaaccaaaagtccaaaatgcacgcactagccaagttattgcacttatatgctcatttctcaagttnttgcgctagatcgcacccacctacctttatgtaccgtagacgtaatttactcgaaaggaaaaaataaaatggtggcactatttagcagaactggtaactaggagtaataaa

SEQ ID NO: 36361 - DNA, 473 bp, Oryza sativa
tcggaggatccctacgcttactactaggatggtgatgtatacgatggcgctcagtaggtcttagttacggtcgttgcctgtggcaatggcgtgccgctgccttaactccgctgccttacctacttctgtttttggaatgtattccggaccactcggtccgatgatttaagactatgcctgcgggcttatgatgtaataattcgtacttgacactcgtgtatgtgcacttggtatttcagctatgaattcatttgtactagactacttgatctatggaaatggtactgtttacacgattgattcctgttataaaaataggggtccacagagctggtatcagagccatacgactgtaggaaaagaccaaaaggcgccccaccccttttctaagttggccaagggaaaaattcccatttagtaatactttcaaaaataaaaacgctatgtttacaaactctatacgatttcatctt

SEQ ID NO: 36362 - DNA, 419 bp, Oryza sativa
  unsure (1)..(419): unsure at all n locations
agcttggacaaaggtttacatcggccgatcctttataagaagtagatataggtgatggaactaaaccaaggccgacttttgtaaacaaaaacatgaaagccgattataaggttaaggtaatcgagctacttaaagagtatgttgattgctttgcgtgggagtaccatgagatgccgggtcttagccgtgagcttgttgagcatcggcttccaattaaaccgggttttaggccttataaacaaccacctcgtcattttaaccctttactatatgaccgagtcaaagaggaaattgatcggttgttgaaagcggngtttattangccatgtcgttatgcggagtgggtttctagcatagtcccggtggagaagaaagggagtggtaagattagagttngcatagattttagagaattaaat

SEQ ID NO: 36363 - DNA, 451 bp, Oryza sativa
  unsure (1)..(451): unsure at all n locations
tgccatatgacaaaagcccttcactgaacaattngtatgtgtaggcaaataacatttaagtgtagcacatggccacatgttactcctatatttttgaatattttgtacttggtttttttgaacttctgatggaacctttgcagagatttttcatataaccatctctctggaagctttcctccatgggttactgggaacaatttgcaactgtaagttttatgttctgaaatttcttataaacttttgaatgcaagcagaggggaaaatatacatactctaggttgtgcttacatgtttcctagcaagttaaccattttgcgttctataggaatttggtggctaatgacttcattcttgatagcaccaacaataggtatgtgtcacattaaattgtacagatganaacatttgtgcgcgatctgagattggtgattcaattatttgtgcagca

SEQ ID NO: 36364 - DNA, 394 bp, Oryza sativa
agcttaatgttaccatcagtccatcacagtatcgcacgatcctttgcctcatcacctaagtcacgaccttagctgcttaacaacaggaccaaaaaacacaaagctcatataagataaacgcacaagcttaagctcttcaatgcctaataggccgacacgtagttcttcagtaattatgtcctacttccttcgttttacaatgtaagtcattctagcattttctatattcatgttgatgttaatgaatctggatagatatatatgtctagattcattaatatcaatatgaatgtgggaaatgctagaatgacttacattgtgaaacggagggagtatcaaatctgatctagcaattatgcgctacagcatactcaattgacaatggctaaatttt

SEQ ID NO: 36365 - DNA, 480 bp, Oryza sativa
  unsure (1)..(480): unsure at all n locations
actcagcttacttggagatgataataaataaaatatactttctgcagtatctgaaccatctttcaagtttaagtcgttttcctttgcaggtaagacatgggtcagtgtttgggtttagtacagattgatcagtcaactgtagccatcaaagaaaatttcggcaagtttagtgaggttctagagcctgtgtgccacttcttaccttggtgcataggacagcaaattgctggttacctctcactgcgtgtgaagcagctggatgtccgctgcgaaacaaagacaaaggtttactccaatctcgttctattttttctttntttcatgctttgctggaaagtgaacaatgagtgaagaacatatttctgttataaagtgaaacccagataactcactaactcagtatgagtgaagaacagaaatatttcattaacattttngagataactcactacggtatattttttctagctctaatgtatg

SEQ ID NO: 36366 - DNA, 377 bp, Oryza sativa
  unsure (1)..(377): unsure at all n locations
acacctcaagtcccgagacttgctgatcactttatgtcatgacccttgctcgatgtaatatatatatatggagctcctcccccctataaaaaagattaagcgaagtgaacattacgtgttcgttctggttcccatccgttgcctgtggtgttgggcgttagctcgctggttccagtgctgctgctgttggctgngnctcctcgtccgagtcgaccgatgcattctcgggttgatctgagctgcaacctcatttaaggccacataactactctatctataccaaagactagattgaggcgtaagaatgaccggggaccagcactattgtctggactgctcccatatcgcggtatccaagaagcggatatcgccttttt

SEQ ID NO: 36367 - DNA, 380 bp, Oryza sativa
  unsure (1)..(380): unsure at all n locations
agctagctntccttctaagtatatagatcacataatctcccttaaggcagattgtcactagtcaacaatcaatcattctttcatgaacctatgagtacagcaaaatgcatatgcttattttcatcatgcttgtctgttggcttgtagatgcatgttgacatcttgactttttctggaactgggaatcttatttttgaatatatctttatatctgtgagaacaaagttcctgaaaccagtactattgtcctgaatgatgataatgactgcagatgattttgagtactgtcatggtacagtccatacttaagcctttcgaaaaaaaatgtcattggacaaaggccaataagtggtgaatccactgtgccctgggacatccca

SEQ ID NO: 36368 - DNA, 336 bp, Oryza sativa
ttacgctcagcacagggaaactgacgcagatcgttacctataaaagcgtcagccatgagtatcaatgatcggtgtcctgcatcatttaggggctgggcgttacaaaattgggtcatttcgaacggtcgagtattatttcacagacgactagattgtcaaacacacgttttctttctagctcatcggctagcatgtacagatcatcatggctgatccatgtacataactgctgtgtctgaagtctgaacaaacaacacatgtaacacaactaagcaagaaatagatgcatggagcacacttatcgatgcctgtgaatgcaatgggaaaaaaaaaccc

SEQ ID NO: 36369 - DNA, 387 bp, Oryza sativa
  unsure (1)..(387): unsure at all n locations
agcttgtagctggtgtgctagtctccattccactgccacagagaggcaacaaccaggctagaacaccatgtaactagtgttcctgtgaccaagctacaaacacctgtgctcaaacaacagttagctaattacaaattactcaaatcaaacagaagaaaaaatcatgcatgcatatgaactgagaaactttctgttcatggcatttcaggcaacagagcaggagaagctcaaatatcagagaatccatggagaggatgaaacaggatgagtaaagaagcaccaaccaagaggccagccaagggaggcaagagcaaacgggaggggagcatangccgccggcgtggcgatcgtcgtcgccacgtggaacgccgcgtgccttcacgtgcc

SEQ ID NO: 36370 - DNA, 282 bp, Oryza sativa
  unsure (1)..(282): unsure at all n locations
tgcttatctcttcgctactgtatcttcacgggagctggcttaagtcgaggcctttccaccgaaagttttactcttcacagtgatatgtcattcaccgcaccctatattgtccccttatcctttatagggtgtccttctggattctttcttgggtaatcttctgaatttcttttattcttttattcttcattcttttattcttcttccacgcccaaatttgtgatattctattatcaatatatattgaaaaacatatttagcttatatntaattattcatctg

SEQ ID NO: 36371 - DNA, 428 bp, Oryza sativa
agctttcttctttgcaatgcatcctcaatgactccaacatttgcataagaatgaagtccgactacgaaaaaatgttcaaagagtgttgttggttccttatactgcttattgtcctgcagaaaaaagaagagtaaataaccagcgtagttacaaggggaagttcacattgaatacaaaccaaaataatgcaacagaaactaacatgggcactatcgcactgcaatacaaaaggcagatctctgtggttctaaaggaagtacttttgtacttgagacatgtttgatacttgtagatcaaaatattagaggtactatggtgtgtgaatttgctctggagatcacactctcaaataataccagggtcaccgggttatgaatcatgagaacatcagaatgcatcaactacttcgctacaagtatgaaaattca

SEQ ID NO: 36372 - DNA, 281 bp, Oryza sativa
  unsure (1)..(281): unsure at all n locations
ctcaactttgcttacttgccttgcaattctantanccattattgggggtagatttgctggtggacttatcttttattatattctgacaatcagttaattacttgntaatcacttatacaatgtgttgtgttagccaatctattatacaatgtgcagccttttccaatttattttaagtcttgctccaagtttgcaccttatttgacctatgcagtgttgtatataacccaacccgttgtactatgaggagcatagtagatgtgtttatcacagtatgacta

SEQ ID NO: 36373 - DNA, 413 bp, Oryza sativa
agcttatatataaaaacctactgaaaattactatgcataaaggtatatgtaaagtttatacggataaaattacatgtataaaatagaatggtttatgttggattttagtctatatgagaaaggaaaaggtcaggatatgcttgagctagctagtggcccaagaagattttgcatgtacgtaggctatgttgtgggttggagcagagagacttgtgcgcaagaggcagctaggagcagacacgcacggttcgctcgacgcgagcagtcgcgtactagacgcaccccaagtgagcagcccaagcgcccaacgaaaccactgtcgcaatcaggctgatgcggtgatgccacacacacacgacacgacgtctcgtataccctcatccctcaatcggcggcataattatttcgacgcc

SEQ ID NO: 36374 - DNA, 390 bp, Oryza sativa
agcttggtcaatagctgccgcttgccgcatattccgtttgtttcatccgcgagcttggccgtcactaatacgggataccaccattgttctcgagctgttggttcaacctttacccgccatccccgagtcaatcttcgcctgagctatcccacgctctacctcgagtagagcttgcagtcggtccattgcctactacctagcatcatgaggagacagcggatatgttgccattgcaattgcgtctagctacaacaacatacaaagagtttgaattggcggctcgcacatggtgatggcatcctgaagtggcgatgggcatcatacgaatggtgctgaagggcagaaagattggctcgaaatcaagatattcacatcttcgatgtatagatg

SEQ ID NO: 36375 - DNA, 392 bp, Oryza sativa
  unsure (1)..(392): unsure at all n locations
agcttaacccctatactattaccccttggacccccttgcattaatcatgcatctgccgatgtggcttgctgaatactgggggtgtactcattcttgctctatcttccccccttcagtaaagagaagctttggaaaaaaagtcctaaggggattcctggcttataccccagttgaacgcctgtgaaaactgagcccgtagcccgctagtccactggtggttattnttgattggcaagcctgaagcgcctttggtataatgtaaatattttcgatataataaagatgcgtcctttgtattatgtttgtgtggtgtaccccggcttttcctgggacggggattaatacactaacggtttggaaaagctattttttcgggcgcgacaagctggtat

SEQ ID NO: 36376 - DNA, 420 bp, Oryza sativa
  unsure (1)..(420): unsure at all n locations
ctcatgggtggagcaatcccagaatgctggaacgatataactatattcctgatcccaaaggtcataanacctgaactaattaaatatcttctcccgatcagcttgtgtaatgtgtgctataaattggtgtctaaggcctggcttatatactaaagaagattttgccggatgtaatctcccccccgcaaagtgcctttgttcctggaagactcatctctgatactctactaatcgccgatgagatgacacactatattanaaataaaggtctcggcaaatngttatgcggcctttaacttgcatgagtaagcctatgattggtggaatgagttcctccatatatgatctcaactaagtttccactgattggtaatttgatatgaaggtgttccacatacgtcagattcgatcatgggaata

SEQ ID NO: 36377 - DNA, 56 bp, Oryza sativa
ccggaccctaagcacctgcagcatgcaagctggggggaccccccaccctttttttt

SEQ ID NO: 36378 - DNA, 459 bp, Oryza sativa
  unsure (1)..(459): unsure at all n locations
gcagtcctatattccgcgttgtaacagctncaattccaatgaatgcactaccacaaggtgtcaatgctcaatatcagtcccagccaccagctgacaagacaggggccantatctgcgttgtacctttggaagttccaatacagcanctgagaaatcaagtacaaaatgaaaaaccccantgtaagaaagttattgtttgttacaactgcagtgaagaagggcattactccaaaaactggcggcgccaaggagaatcgaccttcacattaccgccaatttacacaaancaaacattctcatcgtattgtggtcactggaacaaacgccgtacccgtaaggcctcgtgttaatcagaacccataacagaaacaatgcaccaatgctcctcctgctgcacctgactcggcaataaatcttagcaaccattctctgcatcgacagcctcagctaagaattggt

SEQ ID NO: 36379 - DNA, 413 bp, Oryza sativa
  unsure (1)..(413): unsure at all n locations
agcttgccacgggtcatgtagcacaggtgatgtatttatcatggcagactcaattcccttgccaagcatattcagaagcaatcttgcttgcatgtccaacacaagtgctctgacatcttgagcatttgtttcttccgacaatctacactttatcctatcaagattctgcaataagttaaatagactaatcagtaacagaagaaagcaatagccttgcaacttcaagtcctcaaaatctgaagtaaaaggtaaacacacaattagaaaaactaatcttgtccaactcacaaattacaatatattgcattatgaataaagtagcatactacatactaccgtaaatggtctctgaccaatacatccagagatattattatgttcatagaanagtttggcaagcttcatgctaaaat

SEQ ID NO: 36380 - DNA, 514 bp, Oryza sativa
  unsure (1)..(514): unsure at all n locations
atactaagcttggagggaatggattgacatttctgactnggtaaattacagaagatgcatgtaatattntagaggaatgagtctattcacccagtcatatagttgaagaggcaagtaacctgtaagagaggactgaacattaacacctcttgttcgattaaaaatgaccaaagagcatcaaacatgtattcgaggctgttactttagatatggcccattaatattgttagttgtctatgtacatcctagttggtgtaaatgccagttaccatttctacgatctaaaaaatcaactcttttagtataatttcaaaaacgaaaattcagtacacatgtatgaatcttaatattcttctctagctcgttacaaaagcaacaaaagcaccgtgtcagcttgttcacattatctaggttgtacttagcattatccactaacaccctattttcatgcatatcatgctaatttgcttgccacggtgagtgggaatattttcatgtttataattatatatgt

SEQ ID NO: 36381 - DNA, 405 bp, Oryza sativa
agcttattacttaagtataaggaatttgtttcttattaaataaagggcaaaaggagatagagaaaataggtgaagctactttacttcaattaatctctccacttttactaatttaatagcgatttgcatctcttgtcaattctagatgcttagttgcctcccaaagatggtactaaagttggctaaatgttcgcgttatatgccaagggcagatgggcacaactacagagattgtattattggagttaaatatatatagccttttgagaatcaattctccacatacgtgcgtgatctatagacattcacaaaacctattctgatctacatatattctccaaaatcacacctttccacaataattcaagaggttccatgttcacttctagtcagccatccgtactg

SEQ ID NO: 36382 - DNA, 138 bp, Oryza sativa
  unsure (1)..(138): unsure at all n locations
ctctgctcccaacaaatgaactatgcgtaggatttcaacccttgtcattggtaccaccagtcatgcttatgatactgctaatgtttcccaatcagctgagtttatcccaaaccgcttagncatctttctgaacaagct

SEQ ID NO: 36383 - DNA, 211 bp, Oryza sativa
agctttatgagtggcgtcacgcccgaccgctttccttgagaagggcaatcgccctggcataacgccgggggctactgtcggtgatatgggaccgggagtatcgtgaccagaggcttgaggcagacacaatcgcccatgtggcctggcaccttcggggacgtcgggcccgagggtgaggtgtccgccctcctcctgatttccccgagggggg

SEQ ID NO: 36384 - DNA, 384 bp, Oryza sativa
  unsure (1)..(384): unsure at all n locations
gctactgagcctaccaggctctcaaggataggtccactgagctggttgtcattgagatacatttcccttaacgacaagagggtgccgagtgacggtgggatgatcccagtgaagttgttcttccctantgacatgatcttgatcctcgacaatccgtcaagccaatcanggatctcacgattgagtttgttcacgtcaagttttatgctcacgacgcgagtgcacgtcctcaagccatgtgtgatcctcaccttnnnnaattggttcgacactgagagtgtcgataaccatggcagctgcccaatttgtcaaggcatttcaccttgtagtgaattgtttgcacgtccagatatttcattcgcgacaatcgcccaatttgtggag

SEQ ID NO: 36385 - DNA, 400 bp, Oryza sativa
  unsure (1)..(400): unsure at all n locations
agcttatatacgcggaatatcaaccggctgatacattccatgtggcaaaagtactatttctccgcaaattttcttcatcaacattactcatataatattttcatgctatttgttagcttttaaaatatataatatttaatccatcggtataaacaattatgtatgatctgtataaacacctgcaatgtttcaaaaatacctatttaatttgnttgaaaaacgtgcctaacaaaataaacataaagtaaaatgtgttgtcttgtttaattgattgtttaatggccttttttaataaatcctaaagaactattattgntagtaaacatgctttatttgtaccatcaagttagtcatctttttagttggttcaatatgcatgttttacatacttacatataaa

SEQ ID NO: 36386 - DNA, 490 bp, Oryza sativa
  unsure (1)..(490): unsure at all n locations
tctcatgagtagcattcgtgcgtatcatggcgacgccgatgagatatgtaggagaagtttacttgtcattcttgattggtctggggctgggcattcttgtcgttcgtgtgaaatcttgggatcatctttcaccgttgcgaacgtgctatcctgttccttatatgccggtcttgtgccatcttgtattcttgtgttgcaatgtggagctaggatcttggcaatctttgatttcttgattttactgtacctgtggcgganaactctggtctcaaatgagtgggcatcctataacagagttgaaatcaactaggccttatgaccaannaaaaaanaaagaaaaaaanagaatcaactgggcacatggtgtggggcaattcanctttctgtattgccagtattgggaataaactctctctgactactattangtcttcttgctatcttctatcgaaattgtcgacacttattagttgcccctgcttgatctaat

SEQ ID NO: 36387 - DNA, 418 bp, Oryza sativa
gcgcatgcaggctgagaagcttacctgacaccgattgactctgcttctaaggaaccacgcacagacacatcaaatccatccaacgactcttatgccctaatattaccactgcgcactagccctcatggatattattgcctacaagcccatcgttatcctaccggtgtcgtcgtctcgcctaccataaaacttataaatagaaatattgggtataaaaactttatatagagaaagatctgaatattctttacagaaaaaaaaggcaaaacactcccatttgagcctggcgaggcccatcacactcggattgaccggaatcactcgtgcacgaacgataaagaaaaatgggccgagccacaaagggaaatctcgggcaaattatggttcgccttcctagcgcgcttgtgcaccactggcg

SEQ ID NO: 36388 - DNA, 116 bp, Oryza sativa
cgccggaaagagcccactttcgctcaagaccgcccatggaacggagcatcaagtcgaaatgcgcgacacctacctggactattctcccacaaataccatttgctcgcctacatcct

SEQ ID NO: 36389 - DNA, 404 bp, Oryza sativa
agcttgtctgtcttgccctccttgttgtgcttctgacatggaaatgggagaagggatcgctgcgaaatcgcggcgagctcctccgatcagagccattggctttgagccatccaggtcctctcattttgcaagctcaacagctgatatccattctctaattgagtttttttctatgtgttgttctttgcactgacatttttctgtaaatttcttcagttcaatccaagtatatagatcatgatatctccaaggaagaaattttttctagcttggatccattagtgcagttagtagatgaagtatgaagggaagctactgctgcatctccacctcagtctgtagttcatgaagcagaaaacgtcactggtaaaagggaagcatcacctcctgagaagaaaggtcat

SEQ ID NO: 36390 - DNA, 462 bp, Oryza sativa
  unsure (1)..(462): unsure at all n locations
tgttccattcctgatctgaatgaatggctctataacataaagctctcgttctagctgatccaacgacactcgaagagggctctggctgataagaagagaagttttatgggatttcaagtgggtgattgggttttcttaaaactgcagccgtatgtgcaaatnttagtggccaaaagagccaaccataagctatccttcaagcattttcgtccttaccaaattctggctcgaattggtaaggtggcttacacattgcagttgcccggtgacagtttaatcaccccacattcgatgtatctcagttgaagagcacctgcaaagacttcaagcaccaagttcagcaacaccttccttcagactgttggagccaccaaattcctaagcatatcttagatactagagtggtcactaagggtaatcgtgttattactcagttattggtgcattggtctcggtaatctg

SEQ ID NO: 36391 - DNA, 332 bp, Oryza sativa
cagcctaacacctcttattagactttttcactattttgaaatacgaaaaagatccaaatccaaaatgcaaaggtcgtcttattcaaaacctcaatcatcacatcccctctctcccactttacacctcggaacgcactgttcttataaagagaaaagggctttcccatcttcttaacccgaaatgaaatggctgaagaaagggaagttccttttggggggtaccccccggaagagatccactggagaccgggtgggcctgtatctcacaagattagagcacgtggctacgaaccacggcgtcgggggttcgaatacctcctcgcccacagcct

SEQ ID NO: 36392 - DNA, 374 bp, Oryza sativa
  unsure (1)..(374): unsure at all n locations
cagtatcgtcaccgcagtatagttaaccacccaaatcnggatggataggtgtggtgtctctacgcctatgacaccaaaatatctaaccatgaacgaggaaaggcatgagagaaatattggctagtaattgtgaaagcccaattcttgactggaaggacaccaaaggcctctgccctctctctctatctatccaannanannnanngccccaggctctcttttggagtttttcatcttttcatcaaagagttgaaccatgaagatatatggcaagtgcctgatccatntgatcangtcgtgtatgaaccaaggttcaaatcgtttcttcgttaggatgcctcaactgcatacattactgcactttcacttgacac

SEQ ID NO: 36393 - DNA, 403 bp, Oryza sativa
agctttaaacagtgcctaagtaaggtagcgcataatcagtaactaatattttttgcatgtaatgtaagcaatataatctcttacagggccatagcttcgcgagtcccagctgacgtcaggattatccccttccacccagcagtgccccacgggtatctgccggatctcctgagccgccggcacctggatccagtcgccgggcaacgcgatcaacctcttcaccaacaagctccggtgctccgtcggcgacctatcagaaaaaaatcacacaaaacaattcaagatccagaaaaagaacaaacaaaccatccccaagaactcactcgggggtgacagcgggcggcagcggcagaggcgagagctcaccggaagacgacgacgtcgccgcgggacaatccgtagc

SEQ ID NO: 36394 - DNA, 420 bp, Oryza sativa
  unsure (1)..(420): unsure at all n locations
tatcgaactgacctgcgaagaatttggcccagattggtccgaacatcatgcagcacctgccgccgtcgatgacctagagtcgtcgtcttctccgagcttctgcaatattatggtcttcatgcggggcaaattctcccagtggcacaatcgttggcgagtttctaccangctcantcacngcanggcggaggaagaggagcttgctaggatgctcatcgaaagggacaatgaaactgcccttaacaaatatctttttatggaatcgatgtccccagaaactgctcgacctaataaacttgcgcaaggagaatgacatggtgcangtgatcctcgcggngtgggtggaaatgctgntctatgcgagctaccactgcagcaaggagtcccatgccaagcagctgagccagnggggcgagttga

SEQ ID NO: 36395 - DNA, 401 bp, Oryza sativa
agcttatcctccatcgtctcactggacgattttgttgtctgttatatttgggtccaatataggctttataccacggctcgagttgggacctttcaaacattcaacatcgatacactgctatacccgtaaatgatcagaaactgttgtgtctcaacaaaatatggggaaaaccaagtatcaatccgataaaatggcatttcaccctggatcaggacttttacggtgattattctgcatgacacagttaagaactctgagaagggatatccaattaatgtcctggccacggatatacaacctcttttttggttgcataaaagacgacaatcgccctatcaagactggatgtaactacgcgtcacgaggtatccggcccataacaaagccctagctaataatta

SEQ ID NO: 36396 - DNA, 392 bp, Oryza sativa
ctgcaagcctgcaagctataacaaattatggactatatgtggcactggttcttttatatgcgaacccttgtgtttatccttataaagaaaacgagacctttagaatagataccttcttctttgtttaataaatcgggatttgcttctgcaaatgccacatatatcaatactttactcccaaaatattactcctagaatttactatttatggggacagacaataccccaccccatgaatagctgatttgaggatgatcaatttagaggatatgttcgccgtcttgcttaccgccctttgtttatggcagtggaaagtattttccttttatttatgaattttgggaacatttaacaaacgaagtctttcacatgtcaaacgagatctaagactt

SEQ ID NO: 36397 - DNA, 406 bp, Oryza sativa
  unsure (1)..(406): unsure at all n locations
tactcaagctntntccctgactngctgcatcaaatactaaatcacaagcttgtgatannaaacttgtggttctancgagactngtaatatgagtacctttacgctttgccgaaatgtaacgtgccattttaagattccatttcttaataccatgaccaaaatgaactcccgcttctatcatctctttcanaatgatgttccaatatcccctngccattttttccacacttccttctgatattgtcctttttttcatcctacctttccattacaatatccctctcctttccaacattaagaaagagcccaaatancttgnnaataataataattgttcccatggaaccttctacatggtataagcataaacttaatgaattaactaaacttcttcttaaataaaata

SEQ ID NO: 36398 - DNA, 288 bp, Oryza sativa
actggccatatcctgtgcttttaaaacgtacttttagcctaaatcttaaaatcacgacactttaaaaacctgaaacaatctcctacctctgccccccaatataaaggacattaacattttacttgtactgtgtgaccactcactttattcaataaatttgagccaatattaaaaataaaaagttatgtttaaagcactatggataatagaggtagtcacaaatgagatatatcatcattttaaaattttctaaataagacgaacggtcaaacagtgcaagcaatatgt

SEQ ID NO: 36399 - DNA, 409 bp, Oryza sativa
agctttctcaatgtcttgattattttaacatctgcattgactgaagactgttcataagcataactgacaatgaactatatgcaggatatttttttcatgtttaaagaaaggatagctgacagagtttctgggaaatggagtgagttccctgcaaaagtagctgttcaattgaatgacactcacccaactcttgcgattcctgagctgatgaggctactcatggatgtggagggacttggttgggatgaagcatgggatatcacaaataagtgagctctaatatgacaagtgacaatataatttgatctctcttcttatctttttccaccattggttatctttccgctcttcattgtaacaagagtaattcaacttaaaagcttgacctattcaataaattattggaatg

SEQ ID NO: 36400 - DNA, 456 bp, Oryza sativa
  unsure (1)..(456): unsure at all n locations
agcttatntgactctcttgtgtctnctggctgctgtgttgcatacattatttatacgtcgntgactctctaccaatcatttgttttatttaaaaaaatatacattattatcatttatcttatcgtgacttgatttatcattataatatttttaagcatgacataaatgtttttatatttatacaacaagtttgaataaaatgaatggtcgaaggtggataaaaaaaatcaatggtgtcatcccgtgaaatgcgtatggagtactacacaaaccacgccactctgtcgcgtgttggcgtagaacacgccatgcttcccanaatatacagcaacgtgccaacgtgtggaccgcatcanctgatcagcatantgcancaaaatcaaatacggtgttccatcgatcacccgatgctatagtcaacagaggagtagtactacactactacatgctcgcgtc

SEQ ID NO: 36401 - DNA, 393 bp, Oryza sativa
caaagcatcatcataatatacttcttacctgctacctcgaaacgaaatctccaaaagcgacgaggttgcacaatagcgcattacctaggcactaacggatacagaacactaactaatgagaaactcttctctctcttaccttatcaggcctcctactcttatctctctctctattctttctctctcatcactccttctatcaatgggaatccaccgaggtaagaaggactcgagttcccctcacccacgctggatccgccctgcgaggcacctactatatgcatgatgcacgtattatacatataggtcggaccattaagtggatgtcattcagatgctgtccgggccgacaagtcagcccaatgacccatcctaagtcactcggcacttatg

SEQ ID NO: 36402 - DNA, 431 bp, Oryza sativa
  unsure (1)..(431): unsure at all n locations
gactctgaagtgccagagaagatttctctcatccgtgtttacactancacanggccagactatgtggtgctctgagatgacctgacggacaaaccatacggttgtgatacaattacacagaatacacatttatgatcggataactctgagttctagaatagaggctggacttcaattaactaggccattgctagcctttcaacctcttcaccaccacaacagtcatggcaaagtcaagtcgctgcgtaccgccaccccctccaacccgcgagatctatcataatttttgggattaaaagtttgagctaaccataacagaagataccatgatcttgctcgcacaaaccaccgagatgattaccatcagggacctggttggcacatctaacttccagtttcgaagacgcatcttcttcaaaagccagcatgac

SEQ ID NO: 36403 - DNA, 349 bp, Oryza sativa
aacttagattgtctttttgcttagactaactcttaaatctcatgaccacgagacttcaccagaactctaactgaagaacaaattcataggaaatgactctgactcagcctctcacgatgaacagttgactgatctagccacagagagcaagcaattcttggctctgttcataactagatctcgtgaaattcatgacttggggagttcacggttaagaaaacggccgatgatttttcagcaatatcagctgaagcatagttgaagcaggagctagattaccttgggcggcagatggattggttggcgtgggactaagcgaggtggccaatgtcgccgagctgcaaggaca

SEQ ID NO: 36404 - DNA, 408 bp, Oryza sativa
agctttgagctatatctgccaagtccatatcatctccaccgggagaatgaggtactgacaatgccggtccacggggagcctcaattgatagcttatacttgggaggtgtaagctccgtcggtcgacttggacgaggagtcatcttcacaactatgtcttctttatgccattgtatgaacgtcttgcgcgcatcgcccaaagtcatgatttcatcatttgggggcacgggcagcggatagcctgaccaggtgtcctttactgtatcgatggacaccttggcatacccagctagcaggtctgcgccgtggaccttgtctgtaaccgagggcttgaaagccatgccctcagcgacttcaggagcgaaagttgggtggactctcgctagtaggacacactgtgctgcgccct

SEQ ID NO: 36405 - DNA, 444 bp, Oryza sativa
  unsure (1)..(444): unsure at all n locations
tactttatttacttaccttcttacttggatgttctaaactttattccaatntgatccaaanacttgtgctattaattggataaatgtcttaactccctcctttcacttgtctttagatgccgcgcttcaagcctgantacttggttggtgttgatggatttgtccaggagttgcgtacgatgtcctttgtcatangaattgggactgcccctttttatgcccanattcctcatgatcgtcatgaagagaattgcgagtcagagtcacttgaacagtaatagtgaagggatttcctcaatgatgttcnaagctggaggaagaaactacatccatgcatgtcaggaagtggcaaggatcgccatatgagaactccgcgatcgctacagtgatcagttggtcgacactgagtatcgctacattctcgtcaacacagggagtgatcgt

SEQ ID NO: 36406 - DNA, 381 bp, Oryza sativa
agcatttatacaacattggcgccattatatattattatatacctatgctcaacgaatagttgaagaatgatacctttttacaaataaacatgctctataattatcgacagagggaggatcaagcttactctacgccttgcattaaccgctcgtctcaccttgaaccaattggccggaatccttattagctactagctatgagaagacgatgagtcaggacgtactagcagtaactcatttcacaccccatcaaatctaggtactgctctagcctatcaattatatgtcagcaataaatatgacgccataaaattaactacgccatcatcattatcatagaaatgatgaccatactactaaacggaatggttttttaaaaaa

SEQ ID NO: 36407 - DNA, 278 bp, Oryza sativa
  unsure (1)..(278): unsure at all n locations
tcaaaatgatattgcatgatacacaagtcacacattgctagctgtggggaatgtccagggcactggaatcaccgagcaccttacaagcgcgccactatatagcatttgctggttctgatgctcccaactgccctgtgcattttcaatgtaatgtcancaaataaaatacaaataaggaacttaatcacnaataatagaacaatcggatgaggaaacaagcgatatggatctcaccttcagctccatgttgtagtagttcctcccaagttctctttcct

SEQ ID NO: 36408 - DNA, 404 bp, Oryza sativa
agcttgatggagaaaagaccggatgatgatttatttgtcacttgagaaactatttcggttacatctatgcctaagaccggaattgttagtgatcctctccctgttagttctattgatgttgacaaaaagaaagtgaacagtgttattattggggatccttggcccaagaataggatcaaaaatgcgaaggccgaagatcataaagttgcaaaggatgagtcatttagtttccaaaggaccaaaaagccgaagcttacttttgagatgcttatggctaagtacaagaaaggattagccggtcaacgatttgataaccaaactagtgattcgaaaagaccaagatcatctcgtaggaagagatttggtcaaacatcaaagcaatcggagccataaccataccaact

SEQ ID NO: 36409 - DNA, 348 bp, Oryza sativa
  unsure (1)..(348): unsure at all n locations
tcttgacttgttgtctacaactgtatcacgatggatcaaatagctcgaccctgtatgctgccgaggacggaagaagtatcacctcataaacatctgcaacatggtattccaactcatatatctgagcttaatgaacacagacattgctgagctgcccaaggaaattaacatgctccaatacctgcatacatttgacatgacgggaaccaacatanaatccttcccttcaaaatccattgttctcacaagctgtcgcgactgctctcttgcgctgctccacagacgctgcaacttcaagtaatgatgattatcttacaagtaaaagatcttctcatgaatcattactgc

SEQ ID NO: 36410 - DNA, 391 bp, Oryza sativa
agcttttgcaattgtcacgctcggatcgtgtttattttgtgcacgcagtgatgttccgttggtttcctggagaaatcgggttgttctactcctgcggggtgtagggaaaactgtcgggtccagttgtcagtgagtatttgggcccatttgtcagtgtcagtggcctactaccactactacattgctggcccgcctccgtgcgaagtagtattccctccgtcgaaaaaagcaaacccagaattagatgtgatatcaattctttgttcaaatatactgaacaaaaacggatgagtattctgaactgatcagtgcagaatcgaaaaatgagatggctttgaacgtttgatctgcccccccgaccgtgcctgctgccctgatctgctattacacg

SEQ ID NO: 36411 - DNA, 530 bp, Oryza sativa
  unsure (1)..(530): unsure at all n locations
ntattcagatcaattgaaggctgcaagacaatgagttcatcgacttcagtgaaagtcgaatatgtgcgcacaaattctaaagtccaatgaaccaaagtaatgaaagtacttgtcttcattgtatccctccagatgtctataagaactctggaaatcctttttttaaaataactttcacttcttattctctaaagatcacgttttgagtgcatttcagtttacacaaagagcctgaggaattgattattcgtttaataattngctatacgcgtttacctcaaaccatgagcccagaatatgctggttgcctcctaatcactcttggtaccagtagaattcttaagtagataagatgattggcaaagaagccctggtcttaacgtgtttgcacaattgtaactttatanntatgcagctgaactttacncgtagaataaactnntaccggttcttttaattctttaatctttgcaccacagtaagcaagggattctctctcattcatctaagtatctaatcaccatatatgt

SEQ ID NO: 36412 - DNA, 357 bp, Oryza sativa
  unsure (1)..(357): unsure at all n locations
tgcacaaactaacatctctcttgcctaattgcgccctggtgatggaaatgctctatgctatcattatcttatacttctttcttggataaaaattntggggggacccctatctcgacacttccacaatacgtacaaataagttagctacagaanaacactggcgtctttgtgatccacttacaaacattgttcactcattgcttattaccataaaaagagaatctaatcttattctgctcacaatgtgtttgatcacattaatttgtatgtctgtaataatggatangtcgattctatgccattgaaaggctcacaggttatatccaacttcaagtggcccgggtgtcccgcaattca

SEQ ID NO: 36413 - DNA, 399 bp, Oryza sativa
  unsure (1)..(399): unsure at all n locations
agcttcggcgagcaacaggcaattcttgatcattccatttcgcctcttgcgcattcatagctttgtgctccagccagccaagtgaactgaactttgaggctggatgtatcaatgtgatctattcgagcataaactcttggcatgaaatcgtggtcgtcatacagtgcccagatctgatcaacttcaatccagttgacatctctaaacttgccaaaatcacagaggtctggatagtggtaggcaatcacaggattgttcagtcctgacttntttgggaatatgcgaggagcgcatcattgtattaagaaggaataaaagtatgtacaaagtgggtcagaaattaaaaacgaaagggacaagatatatgaggggaaacgaagaacaaaagcctaatcttca

SEQ ID NO: 36414 - DNA, 460 bp, Oryza sativa
  unsure (1)..(460): unsure at all n locations
atttatttattaattgctaaatatatgttgtgtctaagatggcttatcaatatatcatattaaaactttagataattatattatttatacttgtactatgtatattgatattgttacagtgatgtttaatagaattttttaatatcggaccacccatacttcanattctacatacgccactgcctccaactttctctcctagttctagaagcttctagaaactggatttcatggnttcttcctctcttttctctaaattgttgcttgtatggtgcatcattgctattgaattggaagaaatgggttcctaacaatcttgtatcagagccatcaatccccacttgagtccatcatgaacaatcaaaagaaatncatggattggacctagataggttactanggaaaattgagatggnggataagagaaagggagttcatgcagtggagatgggacatcatg

SEQ ID NO: 36415 - DNA, 383 bp, Oryza sativa
agcttgctgcgcgctcatactctgaagcgatcgtagctgtactgatcctgatgatggcatggggttactccaacccttgcaacatcgttgcttgtattggactccatgcgctgtcaacctgagacctagttggctgattacccttctgatgacgaggtcggcggatcacgcgccgccatggctgagcacggtcatttagagatgctgtagatctgcatgaagtgggggcaattatcgatgcttgtgaggatagcccccgataatcttagcttataccgatggtgtcttatgaccatgtggctgtacggtgcctggggcttggcctcgcacataaatcggattgcagggtgtgtcctgttatggctagccaccgatctatgata

SEQ ID NO: 36416 - DNA, 317 bp, Oryza sativa
  unsure (1)..(317): unsure at all n locations
agctagcgtaataccatattaacacagccatatcataggctcatgatatctaccgtcaactgacctncatcaagctacctaaaaacgcgaactaactaccagaatctacaccatcatgtactaattaaaaacatactaatgccctaaccgctcatccctccgtganncaatggtcctcccgtctctccgggccttggaggggcggggggcggagagttcgccttccttnaatncnacaccccctcgtccatgctgaccctgcgctaacttaacaagaaaataaccggactgacagactcagaatgcggcgactgagg

SEQ ID NO: 36417 - DNA, 415 bp, Oryza sativa
  unsure (1)..(415): unsure at all n locations
agcttaaccacnattcactatctttactccattcaatgcggcatgaaagggatcaagagctcaagcacgagatccgcacccgaaacaaactcgccgcagcacatgcacgcgacgcgcatcgcccacacaccgccgcagaaacgctcgcaattgagggggaacccaataaaaaagagaaaaagaaatcttaaaaagaacccaagaaaacgctaacacaaaacctcaaaccaaacaccaccgcaagaaaagaaaaagaagaagatccccaaaacactgcaacgagccgaaaacccccaagaaacctcggacatctcgccgaagcaaaacaagaagaaaaaagaagaagaaaaagacgatttccttttttcccggagattagcaacagcgatcaaggtggaggacaaagtactgaccg

SEQ ID NO: 36418 - DNA, 428 bp, Oryza sativa
  unsure (1)..(428): unsure at all n locations
tactcagctaatatgcaagaacactctntctacttgacttaagataacattctcaaagccataaaagcattgcagacattcctctaaagctttaatgtgatagtatccncaaatgctatgccattttcanggaaacatgatgctatacatgtaggtggcatttttatgaagtaatattttgttgtgtgaggaattatgatatataaaatgacgaacatttgtcttacagattgctcgatattcctggtgctttattatctgctgcatnnnnnnnaatcactggatggtataatgttcacgctgattgccatctacaaatgccctgtgatgcttttcaaaggatggaaactactgattcangatatgattgggagagagggaccttttctggagacagcttgtgtgccgctcgcaagtcttgctattct

SEQ ID NO: 36419 - DNA, 212 bp, Oryza sativa
tcactgcataagcgccgtcagcgcctgtacatgatatggcgccaggggagccttcgacagctcaatgtaccggaggatatcccgctcgtccgccttgatctcatcctcgatgacgccgagtctcttcatcaccacccgttgagctctagtgatcgtgtggatatgttttccaccattctgggcggcaaggcgctcactccaccttggagtgt

SEQ ID NO: 36420 - DNA, 348 bp, Oryza sativa
agctttggagaagatgtcttacgtggagtcttgtcttattctccagttgagcgctctgtgaaagaggaaccgatagcccgcttataccctgcttgttatatttgatagttcagccctaaatgcctttgtgataatgtcacatatatcgctataataaagatgtggctttcatatcatgtttgtgcagggtaccctcgctgtttctgggacggggattaatacactaacgttcgtgaaaaggcaatttttccggtctcgactaatctaaagtatactatttatataatgatcaaagtaacttatgtatataatacaagaaatttccaatataatttttttttcatcgta

SEQ ID NO: 36421 - DNA, 490 bp, Oryza sativa
  unsure (1)..(490): unsure at all n locations
gattatctaatgaattatttctaaactagaaatgatccctacattntgttcatctgatagcctgacatcatgagaagcataatggcatgtgctaactatggtgactaagcaagaggtatggcagattgagaattgttagggttggataatgtggataaagggtgacaatattatctattatcacatctcagatctatgttaaccttgacacccatcaaagtaaccaagcagcaactaactgtagctctcgttgtatcatacttgtatacctcaagtttcatccatctgagaactacttgtctgctgctagaagcaatcaggatgctacagctgtgaccaaataagctctgtttcttgagaaaatttatccaagtgcagacatgcatttgctagcatatcaaagttatgttcatttcctgctntcagtttataagatgattggatgatacaaatgatgctcattggctggtagaaatgatttctatacatc

SEQ ID NO: 36422 - DNA, 419 bp, Oryza sativa
  unsure (1)..(419): unsure at all n locations
agcttgagtcataaggagaaaacaaatcgatcatatttgactctttntcctccatctctcttaccggcagaaaaagtagtactggtttatatgtaaagtaagattctttaattatgtgagatccggcttaatgcttttcttttgtcacatatactgcattgcaacaattgccatatattcacttctgccatcccattatatagcaactcaagaatggattgatatatcccctattactaatctagacatgttaaggctgagttgggcagtccatcttcccaacccaccaccttcgtttttcgcgcacatacttttcaaactactaaatggtgcgtttnttaaaaatattttcaatacaaaagctgctgtaaaaaattatatcgatccatttttttaaaaaaaatagctaatacttaatt

SEQ ID NO: 36423 - DNA, 411 bp, Oryza sativa
  unsure (1)..(411): unsure at all n locations
taagctcattggcagagcttcgatcaacacaatggatgaagcagcgacatctgatgagtgatgatccctctcgtcgtccttgactgaaaggcactgtatgattcaagatatatagtttcagacaagtaatgctgttttaaactgttgcacttcacctaccattacaatagatatacacacaagctagtaccttttttttttaccgaaaccaaatcaaactcgacattcaaatatataaaatcgtgacctaaatgcaatgtntaaggaaacacgcgtcaatgtattgtactacacgatgaaatcaacaagggatctttngtgagtcatgccgtctgcccaccatataccgaacctctgtggctctctctccttgcgntccacctaaacaaaaccaaacacaagctatagcct

SEQ ID NO: 36424 - DNA, 406 bp, Oryza sativa
agcttgtagttcatttttaacaacaattataccttttgtagtagaaacatctataaacctaagaataagtacaggcttatcataagatttgcattaataacactcgccaataggattctctacttgcatatctactaccttttgttatctgattgcctccatatcagagcttgtaaattttccacctgctgttaaaatctactagcaccaatatctctcaaagaacaggtgctacaataactgtatttagcttattttggattctaagtactacttcagtgatatccagaaccaagaagtaaaatacttgtttctcctagctaactagaataacatcttgggtttaatccacagcattagaatgatcttcactgggagaaaaaaaatattgcaaattgctagcaaa

SEQ ID NO: 36425 - DNA, 249 bp, Oryza sativa
  unsure (1)..(249): unsure at all n locations
taagatatagagaacggaataccaacctatcaatattctatcttatatttgaaagaaacattatactctcgcattcattatatggaagcattaacangagcatgcctatcatctttacacataaacatggaaagatttgagaatccatacatcacgcacttgattgtgtccaaattttatccacccctcaacncgatccacccacataaatacccgcttaccgaaaaactcgatcatactatataccac

SEQ ID NO: 36426 - DNA, 394 bp, Oryza sativa
agctttccccagccccttttcatcaatggactcctgacgtctacgaaggagtgtggttcgttcgacaaattcctacctctatatctatctctgaggtgtttgggttttgcaaaactccatagatatgcagaagaaaaatgctatccccactccgaccaagacagaacttttaccaaaagtttattgtgatctttttgttcaaataacaattaaggtgaagcagggtcaggaacaacgaatctctttatgataaacagatccattttgcaagctcgttattacgggtagttcctacaaagaatcggactaatgacgtatacaatgctcgaattatcgacgtagatgctacatagtgggttctcatccttcagagactacgagtgtaataggagca

SEQ ID NO: 36427 - DNA, 387 bp, Oryza sativa
  unsure (1)..(387): unsure at all n locations
gcttctttaatatctctctgagcaagagctaaagtggctcctaagataagtgttagtgtacctattaaagaaatgaaactcattatcaaaggtagggatatgaaaagaggaagaagtcgagctataagaanaatccccgcagcaaccatagttgctgcgtgtataagagctgaaatgggggtgggtccttccatatcatctggtaaccatacctgaagagggaattgtgccgatttcgcaaccgcaccaaggaatantnnnnncggcacggaaataggaagcgaggagttaatctcattattaggaatccanttattaactattttaaacaaatcccgacactctaaactacctggtatccacaaaaaacctataattcctaataac

SEQ ID NO: 36428 - DNA, 406 bp, Oryza sativa
tagcttggaagagaggcaagggttgttttgtttttcttttaattgaaagcatttggaaaacactaagtgatctatttatttttaagtttgggtcgaaaggagacttgcgtctcgattcgacttaagagatgcttttcaataactcaaatggtaatgtaccgaccttccgggtcaacaactcaaatggttatgtaccgacctcccgggtcagatcattacttctcggctcccagagccatttcacttgattaagcggctcccatagcctttttcattttctcgaactcccagagtccagctgtccagcagcacaacaatccgcttccactcgggaagcctagtctatgatgcccgtagacatcccgaatcacacaaattcgtttctgaccactcatgtcattcatct

SEQ ID NO: 36429 - DNA, 401 bp, Oryza sativa
agcttgtcattttggcaagaagatatattcattttattatgctctaaatcccatcaatgtttttttttgaactgcagatcatccaatagatgtttagccagatactatcacacagttgcctttcctcccattcatgatagatacttgcgttgaccacataaaggtagctttcctgaggattcttgaatccccctttttctttctttgtaccaggaagaaaattgggatattactacaatgagcctgagattctgccaccacttccaggttatttctgaccttacattttattttccttcaacggggtagttttatgtcattacgtatgtgctatgcttataaatctgaagttgggactcaccgttacgttgtcagcttctcaaccagtggatctttacatg

SEQ ID NO: 36430 - DNA, 246 bp, Oryza sativa
  unsure (1)..(246): unsure at all n locations
cttgcgacacatctgataaagcagcgtgttatagatatgactatggatgtggtgtataagaccacattcttatgatgagcaacatggcttccaagttgaagcaataagatttgtgcatctcagatgactttctgagccatctgggtttgtcctcattgcccaaaagcctttgacaacttnttgtcaactacacaatatntccagaaaaatggaatcttcnaaagctcatctctaattgtgtgcaat

SEQ ID NO: 36431 - DNA, 378 bp, Oryza sativa
agtctttcaaagttgggttcatttattaagtttttcattcagagaggcttgcaaaaccagtcatggtgcgtatggccaacgggaagtggaagatgtgtgtctacttcaccgacctcaacaaggcgtgtcccaaggatcactttcctcttcctcgaatagaccaattggtggactcaacaaccggatgtgagatgttaaaaattcttgacgcttactccggctaccaccatatcagcttggcaaaagaggacgaggagaaaacatcattcttacgcctttccgtgtattctgctatgtcaagatgccgtttggactgataaccgcatgaaacacttttcaacacatggtttaaggggcactctatgacaagctccgaca

SEQ ID NO: 36432 - DNA, 398 bp, Oryza sativa
atgttcatgctaggcaaagactggcacatcaaattgtcatcctgcggcgtaagcgcagaacactatttatgtatatgcttgaattgatactgtgtgctcgctactgatagaatgagaactattgccatctttatgtaacatatatgtcaactgatatgtgatgatcatcaaacacactcagtatgaacaaaaaactaaatgtaaactatttgcaacgttgaacggttaaattgattaccaaggctctgtagagatttgtgcatcgttccgagagtgcagaacattgcatgaaccggactagcttctactaaccttgatcgatttctttagtgttcattgccatccctattgctacgttcatgcacgtttcatcggctgtgagattaataagataaaat

SEQ ID NO: 36433 - DNA, 249 bp, Oryza sativa
  unsure (1)..(249): unsure at all n locations
gcttctagggtgagggcaaccttcgaccaccgcgcccgacacgtcgcctcatgagtatgtgccgcggccagaagctctcgcttcatggccttgaagctccggcgagaaacgtgagcacacgctcccccatcgacagtggcaatggtggccccaggctcttggaaacctatgtcatcatcgccgtcatctatgtcctcngcngnggccttctgcttggcctcacttcgccgattaccggaaggaaccgcc

SEQ ID NO: 36434 - DNA, 409 bp, Oryza sativa
  unsure (1)..(409): unsure at all n locations
agcttggaagaattggaagtcgaagctcttcatcgagtttgtcaacccgcccggcaatcatacgccgttcgatgaataccctcaaataaccgaagcggtgtgggaggaattctgctctctcaagaccacccaacagtttagggaatcaagcgaggcacatcgcgtactgcaacagcggaatgagcacccgcatcggctgggcaccgcagggtacatcggcaaggaggcaatatgggcccaagaagatgcagccgctgcagcagcgaatgtccctgccccgttttcagacatccctgaacaaagagctcgcaattgggcgcgggcaaggggtaaggtcaacctggacggctctgtcacatttgagaacaaaagtgatgccgtcatctatcangaactggtgagttcacta

SEQ ID NO: 36435 - DNA, 458 bp, Oryza sativa
  unsure (1)..(458): unsure at all n locations
attgtgtaaccgagcggttntcgttggttntgacattcttttgtccatcacagttcagactatctacagtagactctctagtgatatatagtactacctccttataaaaggtatgacgctggttagttcatttttgagctaaccaatgtcaaaccacaaaaaaatggagggagttctatagtactaccaatactatcattanttcatcanttgtactactaccaatatatanaagctgaatatttatcggttatttcagtntctcgtgagtagacacaggtgctgtatatattataaatagggatgatcctgttancgaaaaaaaaattaaatgtctaaattaattctactactatagactatcgtaaaaatcaactcgatatataatcgatcaatcgacgtcaagattaatatgttgcggttacagctacaataaaatcattgatcagctcatcata

SEQ ID NO: 36436 - DNA, 408 bp, Oryza sativa
tcgactgcagctgcaactgaagcgtggatcaaggggggggttttatatttgtttgtgcttttgcaagagaaatgaaaccattcaacatttgtttggacaatgtcactatacaaaatttctttggaaagctctacagcatactactggtttatatactcctcatagtatatcttataattttgaaaattggcttgggggaagttataaaaaaatctaccaaacttatttctgttggagcatccgctatatgttgggctatatgggtgggtagaaatgatatggtttttgataaatcaccatctattgcctatatacaagttcttttcaagacaacatactggctcccgtcctatgctcaactactaaatggctccggtcctaggcttaactactaaaattgatgaagaa

SEQ ID NO: 36437 - DNA, 301 bp, Oryza sativa
agagatggcggagcggctgacgcgtatcgcgatcgtcatcgaagacaagtgcaagcacacaaagtgccgtcaggagtgcaagaagagctgccccgtcgtcaagagcggtaatccctttcccttgccctccacaccctcacgcggtggggcaactcgaggaagcgagtggtctccccgtgccgacgcaatctatgcgtagatcgatccccgggagaggcttcgccattctagcgcggtgtcatatccgccgagacagggcgcggctgaaggttatggtggtaccctgtaattttgcaacttc

SEQ ID NO: 36438 - DNA, 409 bp, Oryza sativa
agcttattaccgattaaaaaataattcataagttaaactttaatacacgtgttcttagcaatttaaaagcaaacactgaaaaataaaccacgatgaaaaaagcccaaatcaactataaattaagtttcaaattttaaattttcgcttacgtttataagccgaaggctaaatgatgggggtgtattcttgacaactatactgatcatctcacactcagcagtatcatttttaaaaatctaataatatcttgcaaaaactacattggaattatgggtaacctgatcagtcaacttccttgtaaagcaaagatctactgctcttggtctcttgggcttcattgacatacccaacatttcttcatcatgatgcagtagctacagaaatgaaagaaccaccatggtttataaac

SEQ ID NO: 36439 - DNA, 379 bp, Oryza sativa
  unsure (1)..(379): unsure at all n locations
atgtacgcattgcatatagaacatataactaaaatgtatgtatctatgattaaatcgcttgacttcatcactgagaatctttggagacttcatcactgagaatctctggattcaatgatcagatgatgtacacgttgtagttgaccgctaccagtacaatagtaagattccttgtattatagattcgcatgaagtttgcagatgctcaatccttttctccaatgatacaacattacacatgttttggtgatagaccatgataatactcatcatacgaataagttctgcatttctgattttggaaacctttgcttgcaattggcttggacgttcactcanttctttatataatatcaactgatttaattaaaaaattgat

SEQ ID NO: 36440 - DNA, 406 bp, Oryza sativa
agcttctccatgcgtttctcatttatatgacccatgcgacaatgccaaataaaagtgggattcaaatcattaggatgttgcctttttgcattaatgttatagactgaacatccatcaagattcacaatgtataagccattcatcatgggtgcatggaaatagaaaaggtcattataatagactgaacaaccattgtccatagatctaaaaccataaccttctgcttgcaaacaagaagcagagataacgttcttacacaaagctggaatgcaataacaattatttaactccaaaactaatcctgacggtaaagataatgtcatagtgccgaccgcaacaacagcgactctttctccattgcccacgcgaatgtccactctgcctcttgctaagctcctactttttt

SEQ ID NO: 36441 - DNA, 381 bp, Oryza sativa
  unsure (1)..(381): unsure at all n locations
gctntacaggaagctaagggaagtttgtacgatgagtcgaagggctgtgacagtgagttcacaacactacggtcagttcttgaacttatgaggttaaatgcgagacatggatggtctaataccagtttcgacagtctgttagaacttctgcagaaaatgctcccgaggtctaactcactaccatccattcacttggtgtggaaaagattcatgcgtgcgtaaatcactgcatagtgtacatgaaagagtacgcttctttagatgaatgtcacacatgcggtgctgccggtacaaatcgaatagcattactggcctataaccgtctgacacaactgatggaagacaaagaaaatctcgcagcttgtgatgtataccttcctg

SEQ ID NO: 36442 - DNA, 349 bp, Oryza sativa
  unsure (1)..(349): unsure at all n locations
cgagaatcatattattagattatgccacgtcagaacaatagtataggtttatcatcgcgttggacgtaaattactgtaagcatgagtcaaagatgcatatgacgcgaaagtcccaagaacatgtgagtactattttctttaaccaacataactatccattanaaaggactttcntttggaaaccatcttcgatactggcaaattactctcattaatctaannttgncgtcatcctgatactgtgtgtgattaatgttgaaaatacaactatttctttttataaaactantgactanaaanaaacttcanacgacatacaatatgaatattaaagaagggagtactgatc

SEQ ID NO: 36443 - DNA, 356 bp, Oryza sativa
agcttttttccggagcgtcaggccgtgagtcgttgctccgcatataactctaccgacagagaaaccagctgtaccagcgccaccgacctttaagactatggccagcaagactcttcgcgagtttgctgctctctctgctggcaatgtggccattgggccgcaggtcaacatatgggacgtggatttcgactacaagtccaacctcatcacgaaggcgcacgttacttcgctctgtggcaagcctaatgaggatgccaatgctcatctacagcagttcctggagatctgtagcacgtacaccattaacggcgttagtgccgacgccgtcaggctgcgactgtttccgttctcccttc

SEQ ID NO: 36444 - DNA, 240 bp, Oryza sativa
ttcttcttcgtcctgtgaaccgcagattccttcgtgtatgtagagacaaactccttgcccgctgtctgaggaaatatagtttagtggaactattttagctgatcttttgtagagagcgtcatctatcacacaatatgcaccctggcttgtcagcatagcttctctacttctgcgcgcagttccacccgctccgccaccatccgaatccgatgagacgtgtgcgccaatcatgcgttatct

SEQ ID NO: 36445 - DNA, 402 bp, Oryza sativa
agcttatcaagtgtaatttcaaatggatccagctccatgtccatatctgttctggagcggccgcaattgtcattttactcccgactattttctgtccatggagctgcgtcatctcttttggcccaatgggctgtgtatccatgttgggcccattaagggcgcgttctagggttggagcacgaccctatggtcgttcttcccctctttttatacctctagtcgccgccaaaaacaggcgggttttgatgatagagatagctatttgctaccggctcgcagcgcgcgtgttggctaaaccgcccgtctgcctgtaatcggaaccccaccatattgtgtttgatagagaaactttcatctttatctagcaatttcagtgcttgtcctacttgttcttgcttgttc

SEQ ID NO: 36446 - DNA, 333 bp, Oryza sativa
actgccaatattggcatatgtgggtgcgatgttttttaccggtatgagacagttcaacaagcaccaacacatgattcttggacatattggagagtgtcgtgtgcattcgtggcatatagtcacttcttgattcgcgcggcgaacttttgacaattaatgccaatattgccatatattggcacacgtgttggcgatgcttttcaccggaatgaataagttcacaacgctccacatcatgatttttggaattatttcaccgtgttgtgtgcgttcagtggataatatcaattggtgattcacgctgcgaactattgtgattattgccaatattgc

SEQ ID NO: 36447 - DNA, 292 bp, Oryza sativa
gaccttaagcgaccgagcagcaacttattttcccttcaactttttttttttttcaaaacatcccgggaacgggatcgttaacaagacatgaagtgctgaccgaactggacttgacctgtatacaattagccactcccgaatatcactaaccttgatctattctttctaaaatggcatgtcacctctgaaaattgagtttgtaaatgatttgcaagggattacttgctctgtcccttgatagcgggacataatacaagccctaaaattgtggtgattgcggtcataattacac

SEQ ID NO: 36448 - DNA, 502 bp, Oryza sativa
  unsure (1)..(502): unsure at all n locations
aactcagcttaacatcacgctccacaagttgattgtcaaatagctgaactctcttaatctctatccgaaactgacagttctccttgacagcatccttataccaagaactatgtcactcagtataatgtcagatgcagtctctccattgctctgggaactggacataacttgaaacccatgaagcaaagatggctacaatgagtcatacaatcttggaagagtgttcagtagttcctcaactccatagctgcaaattaagtggtagataatctcatcgcctattagggaacagcgaacaaatattgtgttggatgagtagaagcgcacctcgtctcaaaagaggtacataataataaagcagcacgttgataagcatcgacaaaggcattcagagtgacaattgcatcgtttacaaaatccaacacctgaatgaagttggatntactacattatagaaaaatcagatgaaaggacagcggacatatcataaactatgccgtat

SEQ ID NO: 36449 - DNA, 316 bp, Oryza sativa
ataaggcgtgcttaaaactataaaccctaacctgccttttggtgtcgattaaaggagtatcgggggttcagccgatcttacctgatttagctgtatattccatgtgcttaggtgatatgctagatctgccctttatgttaagatcttattgcttttacgcgtattagactttacgtttgatatattttacttgctttaatatcttaatgtagagtagtatcggaggattaaccgatacacactagatctatctgattgactatgctatgaatgggtataggttccttggtaacatatatttccatctaagtgttta

SEQ ID NO: 36450 - DNA, 466 bp, Oryza sativa
  unsure (1)..(466): unsure at all n locations
cactatanaatactaagctttgatgaaaaagaaatgaggatgatgtcgatcatgccacagtctatctgagtgatccacgagaaaaaacaccatcggcttcacccaaacaaactccttcgactcctgctgctccagctcctttttcaagggtaaatcactcatcctaatcccctcttgaaaagaaccaaacttgaatagccgattgctcaccaatcttgactttgcacaaaaagaagactgctatgaacaagaaatcggctccaatnggntnntagcacacgctccacacgaaaaattctgtatatctttaagtctgatcataaccgatcttaactaacaattttgttatttcaacctcctccacctccttcacctcttgtgcaacctgaatcaagcaatcgcactccatcggccgcaggcagtcaacaatgtgaagaggaagaacaactagctgctcctgctattc

SEQ ID NO: 36451 - DNA, 397 bp, Oryza sativa
agcttgttattacaggtagttcgcatgctcattattacgcatagttcataccaataatcagactaatgacatatacatcttgtgtttggtttgaaaacgagataagatgggttagatccatccctattttttttgggtggaatgatactattatccggttggcataagggatagagtaccccacatacaagttatagagagaaagtgagtttgattggtccaccaccttttgaggtgtgaagctgacctgtgaatttagggaatattttctttcggggccatcccattcccatccattttcaaccaaacatagtgaaaaatgggttcgacccaacccaacccatattattcattgaaccaaacacatgtttggaattggtcacattatccatatgtg

SEQ ID NO: 36452 - DNA, 470 bp, Oryza sativa
  unsure (1)..(470): unsure at all n locations
catactcatggngtatgtaataatgtgtgacaacgaaacgggcatatgtagacacaggctttgcccaatgaaattattggtaaggagctgtaaatcactagagaagtatggctcaattttcagtagcatcggaaaaataatccaaaaaggaactcccatcatacagcacatcggctttgcaagaaagccaatggacgaaacaaattaaagtctgacaattaacatctccgattgaaagatatattcaacattctttgctgataatactccatataagaaatgtttctatgggtcagcgttatacgggtattcccaaattacgcttctgttcaatgtatcataaattttttctagctatagtatacattatgcttgtactacgagagatggctctttgtgcttccctatcagaaaccagtgatcaagtagcttatgaattatgctccatgatgcccgcttgcatgtacata

SEQ ID NO: 36453 - DNA, 389 bp, Oryza sativa
gcaagcgacagtgagtgagccttcttgaacccgaattgcgtcttgtgtggatgaagctgacacggaggtttcactgagtatgggtttacccacacatacaagtcaagctgagaatggttctacctgagatgctacctaaaaaaatgttccaaccaaaaaaagtatcaagttcaaggacaaagctactgatcaattagtgccaaatccatatccatggggagagtttgatgaggttgagtatataagagttagtgatgagagggagaattacaatgagctggtgtcagatgatgaggctaatgatccaaattacactcctgaagatgatgatgctgatgaagagaatgatgatcctaaggtgtatgagacaatatgttgtcctgaaagag

SEQ ID NO: 36454 - DNA, 409 bp, Oryza sativa
  unsure (1)..(409): unsure at all n locations
tagtgaacatcaactctatagtaagatatgagtctatagtaagatttgataagctaacgtatattagcgacaaaagttaatttatgggttaaacttttttacatatgtacttttatcggctcataagcctatgttgaaaacaaactacgatttagaaaacatcataattagctgcgtctaataagacgtanaacaaacaatggagctatagaacaatgttaatttgtcgaatctatttatagttacattttttttaaagaagtcgggtgattcagaattgattgtaacattgccaacatttttatatactaatttctattgtactttcaatggtaaaaagatcaattgcaagtgatcttccatatcttatcttctaaagccgtcagaaccgccctcatttgattgtaca

SEQ ID NO: 36455 - DNA, 324 bp, Oryza sativa
ctgaagcgcaattctttccatttctttggaatggccatacaacatagacgcatacgcggacactcaaaaccatgcacatgtttgaaaatccagacattccaacacgtgaggcaaaggttgatctacaaacccccaagtttccagtatgaccaactccttggcattaaacctgaagtgacaccaaaaacccaaccataagagcgggaacatatatgcgaaggaatatcggtatcatccctacacaaccaaaccgcgtgtaacaagaaaaaaattcggaccgcccacaaatccatcggaatgagtgacaccaaagacacagaaaaa

SEQ ID NO: 36456 - DNA, 399 bp, Oryza sativa
  unsure (1)..(399): unsure at all n locations
tgtgtgtgcctgcaccgatgtgtcaatccatgatgactgttgcctggcatcgttccacatatatgtgggggtgtgcactttctgtacgtgagcaagtgcgcaagtcacaacgccgttgtacttacgttgtgcccccttgcgatggcgtagcaaatcattgtgatttattacgtcttctcttctttgttggtatctttatttaaatgttttgtgcacaaagcacttgattaccatggaaattatggacaacaanagacctctcacatgtggttttttatcacacgggaagacaatttcagaagtggcaatctagcagtgcctattactactgagtgagttgacaaagaatctttgctttgatttttcactctcctatccacaaagacaaaccctccagac

SEQ ID NO: 36457 - DNA, 401 bp, Oryza sativa
agcttcctgtaaattttgtggctcaccagtttttatttatatgccccattttactgtaccatcagtgtagaccttctcctttctgattccacacacttgtgcgaggacgaagaggaccatcatcatcatcatcatcatcatcattattctgagctgatgatggatcttctgtggtgctcatcagctcgtgtgaccagaagatcctgacgtggaatctaccgcagcaaagtgagacgatgacatgaatgcgccaacgccagactggggtcccgaggacgctgaagaacgtgtgggtgaagacgtggcagcatgcgattgctcgggcggtgaaatctgagctgactgcacggaaaaagtaagcgaatgcaacgacaccgatcccgatgacagcatcacggcag

SEQ ID NO: 36458 - DNA, 445 bp, Oryza sativa
  unsure (1)..(445): unsure at all n locations
tagctttgaactttttctgaaagagaatgttcaaacctgctctgctgtttggatattctttggcacagttgcttcactgctccangtatgatcatgcttgatcccacaagtaattagtaatgtttgctgagttgtactatgtacgtgtgtcagtttttctttgaggtcttctccaaaaaggaggngttgatgtcagccactcttagtaatttgcacaccctanaattctcatatatataaatngttgtctaattagaattattcacactgattttaaagcctagaagagaagatctaatttttaatagataaatccaatataaatatgcgccagagtaaatttattaaatactctgcttgattctatagttcctagaattttctacgatttatttgagcccaggaagtaattttaattaatggaattgcatttcatgaataattt

SEQ ID NO: 36459 - DNA, 285 bp, Oryza sativa
taatcacgagctgcactgaggaattccaaaatatgtttttataacagtgttgcgatatatagttgacctctggtgtgaaacgccaaaacccaaaaaaattactgaatggacctaaaattagatcaactacagggatataaacaaacaattgctaaccatcaaaaccaatgtggcttaagaatgaataaggacttcacaaaaagtatacagccaaataatgaacaagggtacgctacattaaaagtattagaaaatacattgatactgaaacggaactatcttccc

SEQ ID NO: 36460 - DNA, 397 bp, Oryza sativa
  unsure (1)..(397): unsure at all n locations
tgagcctcgtcgacctcggcatgagctggaagaactatattcgattaagtcacttccttgctaatgccccctcactgcattaacttaatctcaatttccagagcgaatagggtcatgatcatttgactgcatgccacacacttagtcatcaacttaatctcattctgaaatctgaatctttgcaagtatatttgcacatactcgttgtgaacaacctgttgatttgcacaattgggttgatccacaacgctggaagaagctccccccagtgcgtggcgagctacgacatgtnactcttntcaacctccctgaaggctgcaacatcnctttggacaatgtcatcgtggaagccgcacccaggcttgagagtcttctcatcaaagtgtgggatcactgc

SEQ ID NO: 36461 - DNA, 398 bp, Oryza sativa
agcttcctctagtagatcaatttccttaactgaatatagcaagaatccgacaactgacgacttgacaactctcatcggcaaatctcaggacttcgaagccgatgctgactctaagccgatgactactccgggcttaccaaatttcactattaacacacgcccaccctcgcctgggtacgtcgactagaggaaagctacactacaagcccaaccgttgcccacgctggcttgtggtaagtacgataagttctttcagggcatcccatgaaccggtccttaatcgccatgggcacgactagcaaaaccatgcacccacagcccaccattcagtcgcattttaattgaataattacgaccatgaagcatggccatatgtcttgagcacgcagctcatcacg

SEQ ID NO: 36462 - DNA, 471 bp, Oryza sativa
  unsure (1)..(471): unsure at all n locations
ctaagctatgttccgtcgccgaagaaaaaaatgatacctgtgtgatatatgtaattataaacgtacatactataatcgggagaaaaatataaaatagaattgtctaccatataagataaaggagaaaccttatgtagtaatatctatctattatatactaaaagtccattaaacatcctacaaacactcccaaaccgtcacatggcaccatataaataactcccaatcgctacctggcaatgtaataaaatagaanaatctaancacgcgattttcacttcgatcggtggacccattgttctaaatcgttaaatctatcttannaaaaccaaacctcccacgtccccataccgtgcaccatgcatagagtgaacaatttgtatgctccctattcatttctgggtttttatccctatacacnataaaataaaaatatcttttatggaagataatctcaaaaataagtgtaaa

SEQ ID NO: 36463 - DNA, 404 bp, Oryza sativa
agcttcatgaatccctacaatgtaaattccatttatacttgatatgttttgaatttctttccatttctttggattggccttacttcatgtttgcatacctgatcactcaaaaccatgcacatgtttgaaaattcaagcattccaactgctgggacttgggttgatctacaaatttctatgtatgatttattgagctgcaaaagggcattaaaatagattggttagaatattacaacatgtggctaacgagcgtgatctatcagaatgtctgtgaataaatattgaatattacctctcctagagtcgttgcctttttcttgcaatgatgaaaagtatttgccaatgcacacaataccatctgcggaatgtcattcgaggaaaatgaatacagcaaatttggaaaa

SEQ ID NO: 36464 - DNA, 409 bp, Oryza sativa
  unsure (1)..(409): unsure at all n locations
tgttcagcagagcctgtggatgtgggtcaccgatattatcaacactctctggtatgcatggagaggagcagacgatgtcacacaatagtgtgagtgtgggactacaggagctagctcagatagagtctcggcgatggaatatgcacgatggtgaaaagaacagaaacgagagtgagaggaacctgagaaaaaacanagggaacaagggcactagtgtcttttcatggcctacttaacaccaacttaacagtagtctaacagtagtcgcactcacagagatagaaattgaaacccaacggcatagaatgaaatgtaactctttcggtagcatatatggaagccgggtaanttcgagtggcatataatacattctctctatctttatacatggttttgaggctaaaggata

SEQ ID NO: 36465 - DNA, 406 bp, Oryza sativa
agcttgatcagctgtctgaaagcccgatcaaatcatatatttatcggcttgaagctcgtaagattgatctcatggcacagcttctagaatgcaacgctgagttggatatggagcacaaaaagctagccgatctccccgcagatattgaagaacagaaggcaaagctaaaatcggctatcaagaatgtcgctgatatgaccaaatccttgaaaagtatccctggaactgacactcaagatgcccaagccatataagatgtagaacatattaggcagaaggctatatcggctatcaagcaatacttattccaataacttttgtgtaatagaacttagaaatttttgtaatcggctaagacattctagtactttattatcttgacaaccttttcgccaattaatatgac

SEQ ID NO: 36466 - DNA, 415 bp, Oryza sativa
  unsure (1)..(415): unsure at all n locations
tcggatgtgcatcgactacaccgaccttacaaggcatgtgctttgttccttacccactgcctcgcatagatcagaatgtcgactccacagcggcgggcgaccttttgtgttttctaaatgcatactctggttaccatcagattcgcatggctatggaggatgaggaaaatactgcgttcattacccccataggaacatattgttatacgacaatgcccttccggttatagaatgcatgtcctactttntaacgtgctactaaccactcttctgggccccaattaggacataatgttgaggcttatgtcaatgacttggttgtaaagacgcgtaaccaggatacgttactctcagatctagcggaaactcttgagaacctacgctctcgccgcataaaactgaccccgataagtgc

SEQ ID NO: 36467 - DNA, 405 bp, Oryza sativa
agcttcgatggtcgaagcttgagcatgatttttcttattatttgctaatgtatatacatacacaagccatgtgatcgatcagcaacggatgttgatgtggactctatatgattaggttgatcgatcgatcagcgcttgggcaattatgttgttaatgcggactatggatggtttttttttcttggactctcatctcggatgttgcggacgaaaaaatccaccaaaattaggtgaagacggacgaaaatccaccggaatccttacctattttttaattaggtatacattatcagataaaggataattggtaatatttcttatggattcaccttaattggatgaaattagaaaaaaatgacgtttttttgttttgaacgtagtaaataaatacaactacgaatcaca

SEQ ID NO: 36468 - DNA, 376 bp, Oryza sativa
tacgagcaccagatggaactgtatatatactctcgctgctaatcataatcttagaacatagcagcaagagtatttactgaaatacatatcagcttgagcaagttggcaaatttcagacctaagagttcagatacaacgccgatagaaactgacgcttctgaactgagcatacaacagcctatgtcaccacactccgtatctggagtgagccaccccacacatatcgctcagtttcatatttgaattaacacttactattttttcatagtcaaacgtctctaagtttcgccaacgttatattaaaatttagcaacatctatcataccaaattagtctcatactaagtagtaacgtcggatatatatatatatactat

SEQ ID NO: 36469 - DNA, 377 bp, Oryza sativa
agcttactccggcatatgactctatgatgcacctcaacatggagggagacaaatgacatatagggctgtcaccaccttccgactacatcacttttcgtggagcacacaacaaatgaaggtaaccgcttacccaaacaccacgcctaagatattgattactgctctctaaccaagagtggagccaacttataaagcctcttctctccaaccataccactcccgggttaacccttttacatgaaatgaggacggaaatgtaagtggggtggtttgtgtaagtgggcccgcccgtccgatgggttggctacgcagctctggaaggagggctattacaaatggtaccagaaccatgtcgactgtaggacgcaaccttaatt

SEQ ID NO: 36470 - DNA, 484 bp, Oryza sativa
  unsure (1)..(484): unsure at all n locations
taggaatagtccttctgtgttgtaatagatgaagttgttgccttttttaatatatacaggtngcacctcgtcactgtctggtttgaggagtangtgtccagtctggtgggcctcggcggcgtggggtttgaggaaagtgacgtgcacggttggtaacacatcaacgtgtggaagtaataatggttangaaaaggtgcaccttgtcgctgcctggtctgaggaggagtccaatgagtgggctgagaatctntnttcgcatcactcatcggataagagggagggataataataaaattatggttatatgcttgcacaaatctggcacacaattgagctacataaaaatgacttanattcgtcnaaatttctgcactaagaactatacatcggaattgcactactggagaaacccaatnggtgttgttaggaactgtcctaaacaattaacgggttcatgctgataacatatgtgcacctataaaaa

SEQ ID NO: 36471 - DNA, 327 bp, Oryza sativa
  unsure (1)..(327): unsure at all n locations
agctttgagcccaaagtagggaactgttatttattcgccgacgncaccgccggtggtcaacctctggtagaagcttcacaagaagctgatgccgaaatacctgacgaatccacggactcgctttcttggctttgaggggaaaccattgaatcaagtcagtgaatctccactatgtttgcaccgtttttggtccgctcaatcattatttcattctcctttggctgaaatctgaaatacagagcctacttctcattcttatctccctgaggcgtgaaaacccgtttatgacaacagcagtcgctgttccactcggatatgtcaccttgt

SEQ ID NO: 36472 - DNA, 343 bp, Oryza sativa
  unsure (1)..(343): unsure at all n locations
ntcaccatgtgagaaggtccgtatcgagtggtctgtgtcctcttaccgggctccatacagctggccacgggcgacagcactgagctgcttaaccccgtgaacatcaaacaccttcgtcgcttctacccctgcggggtgggtcgggtgtcaggtttctggctcgggccaaccctcgccccccctctggcgtgcatgggtggccggtggctacaacatatgcatattcttatttctcttatatctgaatntctattaaaccacctccacatttctaaaggctgtatctgtgcttgtttatactttttaagaatcttgcttgaaaangtcactcgtgctaatcctg

SEQ ID NO: 36473 - DNA, 395 bp, Oryza sativa
  unsure (1)..(395): unsure at all n locations
agcttgtggctggtaataaaacatcgattcttctttttagataaagctcgatcctcaactatttctcgcgatatcttcttaccaagttttgttagggcatctataacagcctctggtttaagtgggcaacccggcaagtagacgtccacaggaattaacttattaactcccccaacagtactataggaatcccgactgaacattccaccagtaatagtacaagctcccatagcaatgacgtattttggttcaagcatttgctcatataatctcactaaagagggagcccatttcattgttactgtaccggctgttaaaattangtccgcttgcctatgactcgatcttggtaccaaaccataacgatcaaagtccaatcgtgagcctattaatga

SEQ ID NO: 36474 - DNA, 178 bp, Oryza sativa
  unsure (1)..(178): unsure at all n locations
ttctcggaatacactaatatttccgaactattttgtggtataaggctctcctggaatgatcctaagtacacgaactgtcaatataatgtcctaatcccttagtaacatatctactcatacttactacacataataaaaacatcnnccgaactaaccgccttcnatctcttcttctcca

SEQ ID NO: 36475 - DNA, 410 bp, Oryza sativa
tcaagcttagacctatgatccaaacttcatacatattatgtatataattaagaaaaaaaatgcttgaaattatataaaaataaggcgaaatgaaaaactcaagctctaagtatggctccaagctgattttgtcacttggtagaaggtgtttctctctctcttttttaagagggagtaggtgcgatagtggataaacgtaccccatgcttgcaagctacattttttaattttttgagaagggtatttttaacccgatatctatcttcaacaggatatatgtagcttttttaaattaagaatgtagcccatcaaataacccaatctaaaattcgcttgtatgaagatttaaattcaggatcttagagcatcttcaacagccgcttcaaattggactctccaaacacccatat

SEQ ID NO: 36476 - DNA, 199 bp, Oryza sativa
actgatgctatagcttagataaaagagcttctgattgatgactctatctgagaaactgatactgaacctgtgcgtatgtgatactggtctctatgccctgagactttatgcctgcaccaattatgattccgtttcagatttgtttatgctagtataacaattctgactcagtatcacgttcagtttcatgctacagcaa

SEQ ID NO: 36477 - DNA, 417 bp, Oryza sativa
agcttgattctgcagaaccgcaaaaacagatgaatttctttcttaagctatactactagtacgaatcttggcaaaaatgcagtatgaatcgaccttcttcagttcctccagtccgtgtcatcgtgctcctggagtccttgctagctactgtagtagtatagctgtcatggcaagtggggccctccacccaacacgccgcaaggttggaccgccagcctggcgccccatcccaccatccctccccgatccgatcgccgatctcagccgcccgcaccaaattcaaatcccccgcgccccgccacgtcaccccccccccacacgccacgtaggacagaatactgtacacgcgggcccgtcacgtgactgctcgcccgcgccgccgccaacgacgcaagcaacgcgaccggtgggtggcgc

SEQ ID NO: 36478 - DNA, 356 bp, Oryza sativa
tgaagatatctctcatcggctagaggcatcatcgttagacagcttaatggttgattgtggctcaattaggactctgctacatgaggttcaagctttgatcccagatgagctagcccatgtccttactctagccgtctatgtcgaccaacatttatttcaactggagaaagccaagctgagactagcccaacgccagcagcgcaaaaatattgaatccacaattcatgccaatcaacaacttgttcatgaaaagaaagccaaacctgatcagctatctgagggcccgatcaaatctaatattgatcggctccaagctcaccaaattgagctcttgtcacaactcgaataatgcaatg

SEQ ID NO: 36479 - DNA, 398 bp, Oryza sativa
  unsure (1)..(398): unsure at all n locations
agctttcagagattggacctttggttgatgcccatatcatatatagnaacctgttttggcaccattagactacttttaaggctgcactttcttttgttgggcaaaaaagtacagaaaacttttgttatttacaactcaatattggatagttgttcaaaagcaactgccaattaagaacaagctacaagtgtttcgttaaatctacttggatgcagaacacagtaaagtgttcaacctaatattctaaggtaacccaccactagctattttctgtaatttcacttacgcttttcaatagattgctagaagttgagatagtttttgtatacttctaatagtctgtgcctctggtaatggtgctcaggtatgcaactgcaagtgcccgttctgatggactt

SEQ ID NO: 36480 - DNA, 399 bp, Oryza sativa
  unsure (1)..(399): unsure at all n locations
attaatgtatgatagatttgagtttaattattacaaacttacnaaatagataaatatgatattttaaagcaactctcatatataaagtttcacacganacgcaccgtttagcaatttgaataacatgtcacgaaaatctttatttttatccaactcttactgganaaatggacgggacctctaattantaatatgcttctangccatttgggaaccccattgagtacccatgaaaggatgcggaatactggttttttaattactaacaaacatctcatagtacacatgaaccagaattaaataatgccactacatataattggtgctgtgacaagtgactactgccacagtactgcttttgtctccttcttttttcaatcaaatgcagctctggcccct

SEQ ID NO: 36481 - DNA, 402 bp, Oryza sativa
agctctgcactagcactacatgtcatatggttatgttatgaatggaaatccctggacaaagcatgggtcggcttggataccctgtgcgacgaaaccggataaatactcttgtcaactacaatgataaccattggggacggagcaacatcacatttttgggacttagcctggatgcacggtcgccacccgaaggatgtcatgccacaagtgtacacaatctccaaagggaagaatagaaccttgagggataccatcacagacaatacctggtcgcaagacctatatctctcaatcatcggagacatgtcaactaagcttctatagcaactagtgaccttgtggacaacagttcaaagcgtgcaactctccccaagtgttgtagatgaaattcatttgaggctc

SEQ ID NO: 36482 - DNA, 405 bp, Oryza sativa
atccttaactcacctgcagcttcaagctttatgatttactccgcagaatttttgtttttatcttacagcccatttgttcaactatatttggcatcttgtacaacaaagaattgaacccgctagggtgtgtgcgtgcttgatctaagaacagcaaggcagctcacctgcttggcctgttgatgatgaaatggagaagtattcatggaggccaaggctcagctcaaggcccctttcttctctcctccccaaagccattccaaaccatctctctccctccctcagagaaggggttccataatggggcgcttgctgctaaagattacctccaatgtctcatgcagaagtaacagcattcattgtcagtatacggttcgttcattgctgtcgtactaatgcctgtcacca

SEQ ID NO: 36483 - DNA, 367 bp, Oryza sativa
tgcaaccacgcgctatatattatattgtcaactgcgctaataatggcacattcgctttctctgtatgtagattaaaaaaaatacataccatattgttccttggtttgtgttgacggacctttaatcataatatctgaccggcaatacctgcgtataatgaaatataacatgatatccaacttagtggtagggattattactaatcatttccactagtgttggtgaaatatgtgtatgccgtgtatttgaggagaaaacacaccactcatgtcaccaaatgcacctccgtgcatttaagacacgtttacatggattggaagccccataatttaaaacaaaccatctacaattggctcaaacataaccc

SEQ ID NO: 36484 - DNA, 430 bp, Oryza sativa
cgactgcagcatgcaagcttagcataaatactgtaaactatttatttacatgataacatttatctattatagatcatgtaaatctatgtgttgagggccgcatatacgtaccatactcgtatgactaacgcttcccagcgaaagcccatagcgtttttcaactgtgttctaatgatgcaacacacgacgatcaagtcatatgcatagcattttccatttgttttgtacttacggttcccgccaaataaggaatccgaacacctatatatccaagtatgtgcataaaataatttgctaaaatagagaatggtatcaaaataatatatatgaagataaaaggtcatgcaacaatgttgatgaagaatggtgattttggtggacaagcggtggctctaagtacaagcgaaaaacaccggtacggttgatccaa

SEQ ID NO: 36485 - DNA, 382 bp, Oryza sativa
  unsure (1)..(382): unsure at all n locations
ctcgtgataactctgataaattattttatgctagaatagncgatggtgaatggaagtatttctataatccatcagctaacgcatgtgagaaaatcttgaagaaatgtggtggtgtaccattagctatcattacaatagctaggttgttggccagtaaaccagaggaggactggtctgaggtctacaactctgtcggttttgggcatgaagacaatgatgatgtatgtaatactataaggatactgtcttttagctactatgatctgtcttcacatttaaaagaatgcttattgtatctatgtgtatttcccgaagatcatgtgatatagaaaaatagtttgatatggaagtggattactgaacggttcattcatgatgaact

SEQ ID NO: 36486 - DNA, 369 bp, Oryza sativa
agcttctccaccatctcgctgatagccaagttgttgcagctacctccatcaatgatcatgcggcaacaacgctctttgacgacacactttgtttggaacaacgtgtgtcgctgattttggtccgccttctccatttgtgcgctaaggacacgctgcacaatgaagctctcatagtgatccggaaatgcagccccaatgtgctctttcggtggctcattatctgcatggtcagccgcaagcaaagcaagtgtatcatcatcgaaatcactagcagaggagtactcaccatcgttgttgactaccaaaactcgcttgctagggcaggcacgctgcacattcccaaagcccttggaacggtggcactgaaca

SEQ ID NO: 36487 - DNA, 194 bp, Oryza sativa
  unsure (1)..(194): unsure at all n locations
attatcaatcaggttcgaccgtttatattactaatacacgagagaactactgatgcttccaatgcataaatatgttataacaataatattccactagtattaggtctactaacctttttgcagagaatgacaataaagtgaatgagaatcgacatctacaccaacgataaatcaatcacacgatgtcnatgacc

SEQ ID NO: 36488 - DNA, 406 bp, Oryza sativa
agcttcttcttgaacacccacttgctccccatatgtttacacccatagggtagctctatcacctcccaagttccgttagcgataatggaatccatttcactacggacagcctccttccagtagtctgcatcaggagatgcatatgcttctgaaattgacttaggagtgtcatccacgaggaacacagtgaaatcatcaccaaaagacttagccgtcctttgtctcttactccttcgaggagcttcactgacatcctcctcagagacaagttcatgtgtatgttcagtttgttttggtggtgtgattgaactgggaattatttcaaagggttggttcgaaccactatgtgtatccttcattgggaaaaagctctcatagaagatagaatcacgagactccataattg

SEQ ID NO: 36489 - DNA, 447 bp, Oryza sativa
ctcggcttcatacaactgcatgtacatccaccatccgctctcattacacattcctgcacggcttgcttgcgatagataccacgcctgctcctatcaacacacattatatcataccgatgcacttgtgtgccttgagcaacaactctatgtctccgagcctttttattgtatcttccatgtactttgtcactactttgccaaacactatgttgctatcggccattgacggaccaatttttttgtatcgatccctatagcacgcttgcgtgccctgaaggatgaattcatcaatatcaaccaatggaagtacccgaacttctctcattacccagttgtacacctctgtcaatatgattgtcattatgccataccgggatccatctgtgtccaacaataaagaccacttctccttaagctcattctcaatgcactgagtgaaattcttga

SEQ ID NO: 36490 - DNA, 405 bp, Oryza sativa
agcttaacaaaaggaagcatggcattgccatgtgtttccttcatgccttccaagccgtcagggagagccgagaggtcacagttatacaacttgtttaccggttctgaagtttctgcgactgacagaatcacatactgcaacaagtgaagtgatgagatatcagctcaggagtagctcatgtttgtcaatgcttagaaaagattcagagttgtacaaaacttcgtcctaagttgatcgactcatggccatagctgcataccttgccatcttctgaaacttcatgggtgtaaatgtacttgggatggtcaaggtcctcccagcacaacaagtcctctgactgatcggttccaagaaaatggtaatagacttcatgattgagattaacactagtcttgatcccagcac

SEQ ID NO: 36491 - DNA, 215 bp, Oryza sativa
  unsure (1)..(215): unsure at all n locations
attaccacacaattgacacttaccttacgctaaaaaaaccaaattcttgctttcgacggcggggcggagctgggaagtgcaacttgnaatatttttactcttnattagttcctacaaacagacttgaaaacctcttttctgtctaccctaacaatacttatggatcagtacgatgaccatatatctaacaacagttgatcaaaaattactggtaa

SEQ ID NO: 36492 - DNA, 106 bp, Oryza sativa
acataattaatcataagctgaatgttattccatatatgagccaactgtgtcatgccacatgtgtcattactgactaaaattgggatacctttggcgaacccccccc

SEQ ID NO: 36493 - DNA, 413 bp, Oryza sativa
  unsure (1)..(413): unsure at all n locations
cagcttgtcaccgatagctttgacccagacgatctgttcaactatagcccgtcacggatgacctatctcaatcgggcctaaactatagcccggcacaaatgacccttacctatgacgggcattaactatagcccgttatagcccggtacagaagagtcatctcaatcgggcctaagttaatgcccgtcacatatgaagtatttcaatcgggcctaagttaatgccagttaatgcccgtcatagatgacgtcccgcctctcttaggagggcctttnttgcccttactcgtgggcacccgggatagggcattaactatagcccgttacagatgagtcatctcaatcgggcctaagttaatgcccgtcacatatgagtcatctcaatcgggcctaagttaatgccagttaatgccc

SEQ ID NO: 36494 - DNA, 296 bp, Oryza sativa
actaatggcacacttatgtttcctctccccattccatcatcttttctgcgtgtgtcaagcttgggtggagaagatttcgccctcttgctccttctggcaggaagagggaggtgcagcctgctgtcaacctccataccatcgttcccaaaatcactatcatactcgtaattggagatcttcatctctttgttcacatcacgagggagagatacaacattttgatggcgacgcgtctgctgcggacgagaacttggcgctggcccgcccccatattaactcaatgctgtcattggcca

SEQ ID NO: 36495 - DNA, 226 bp, Oryza sativa
catcaatcatggaggaccagcacaccaaatccctgtcacgcatttgaacaaacaactcacgagcacgagctacaccacctggcatctctccgtacccatcgaccatggtggcccaggagaacgcatccctctgccgcacttcgtcgacacaccctgcgccgagccacctcgccacacagaacgtaacccgccaccatagagatcaggagacaaggcccgcacgccg

SEQ ID NO: 36496 - DNA, 358 bp, Oryza sativa
attgacctatgccttgggccagctgagccgtgatccaatgtctacgcgtaaaagtccatctatatgattattttttcaccatgcaaacaaccaataaggcctaattctacatatgggctggctcggtccttgaaccaaccttgggttcgtcacggataaaaaaaaataacattataaaattgcctgacattaataaaaaaatattttcatgaaatgttgaacacatttatccttgttatgctataagaaacattcatcttgatattaagacgttccaagagtcatatgcaaaatctactatgttgggatggtggagtggcagattgactgcttcaacacccaccttctttaaaataca

SEQ ID NO: 36497 - DNA, 474 bp, Oryza sativa
  unsure (1)..(474): unsure at all n locations
ttcccttgnnaataatagcttatgtgtgcccattccattatttgtatcattgctcaatctgaccacactcgacatggcatacaacatgctataatcatatgactgtagctttgtctcatcactctcaaattgctccatattgactgaactgatgctggatgggaataatcttcaatggaacctaccaagttcgattggtaacctntctagtantcctgattacttgtggctaacaaataaccaaacttcctggcttataccaccaccgcatcggccggcgtaagagtttgaatatgtngtacatggattacnnntatttacctttcatatcccaccaacatnttgataattacacaacctcctattcctgtcctcttgcacaaacaaactgtttggacaatccttgtacttattgaaccttgttcacttaattaaccgaatcttgatggaattacctgtatggactaatcctga

SEQ ID NO: 36498 - DNA, 390 bp, Oryza sativa
  unsure (1)..(390): unsure at all n locations
agcctattgagcgtgctccctaagatttcactgacattgaaaagatacggcgggtactttggtatcagctttcctgttatatttatcaactgcagaggttttgaggttggtttcacctttcacgttgttgtttcaactgcagaagtttcacgttgttgtttttggccatgttgtcaccgcggcctgtcatgggccgcttgcacagtagcgagtagtgtcctttcgagctaatctcgattattcaagcacgctggatggaagcagatagaagcatggccggaagctcggatggtgtgaagccgacaacgttnttccatggcttgcagcttaagaaggaggcgacgcgctgtggtcaactgctcatcggccccgatgctagacgtctgactc

SEQ ID NO: 36499 - DNA, 301 bp, Oryza sativa
  unsure (1)..(301): unsure at all n locations
tcgcctcaccgcatgatagagaacctgtccgccacctcgtctcttgttagcttctaatattcgcgtgatgggtggaagtgtgcccgatcgtgctgaacctgtcatcnacatcctatgtgatgaggaagaagaggaagatcctgaagaaagagagccagctactccagaggaagaagatccatcgcttcgttccgacgcaaggcnggattantcncttattatgtcgttgcccgcattcnctgcgtagattgcttgtttaacccgctcgcgagtgggggggtttacttgttgcttacatcat

SEQ ID NO: 36500 - DNA, 393 bp, Oryza sativa
  unsure (1)..(393): unsure at all n locations
agcttgtcaacattctggattcttttgtagtacttattcggtccattttatatcgccatgcagacttgcaactatgaataggatgggattttcaactgtggaagttgacaacatgaatacccggttatgagttgagatgaaaacacacggaaactagttttatcatatttgttttcatattttttttcggaatcggaatcggaatcgaaaactcggatatggaaataaaatcgaatattatcgaatatagatacggagcgaatacgagacggaacgaatacggtagcgaatatttaccggtatataaaaaacccctcaaattgagtttattgatatatgaagagatatcgtttattattntaagtcaacatctccaacattgatatcgtcaat

SEQ ID NO: 36501 - DNA, 426 bp, Oryza sativa
  unsure (1)..(426): unsure at all n locations
gacctctaagagactgcagcatgcaagcatgngctctgataccattacttgtcactcttctaaccaccacacgagcggaactagcgcgtgacgctccgaatgcaacaagtcatcccataccattcccacgaaatagtgctggtatcacagggaagacagaatatcacagccacagaagtctctttattatcaagtagaggaacagtcatgatgggctgcggacaaatcccaagctcacaactgattacaaaagggaaacggaagccaaggcttagaccaaacatcacaggcgcgacttgggaactaggcacgaaccctaaaactcaacgtagccggcttgcttctggaagaactcctcatcagacggaaacgcttcatcttcttcagcaactggtggggaatactcatatataagcaaggtgatta

SEQ ID NO: 36502 - DNA, 220 bp, Oryza sativa
  unsure (1)..(220): unsure at all n locations
taaccttcctanccaggaggaatggctgactgactcgaaacactaaaccacggcagccaaaagccaccccaggttacacaaacacctggacagcccgaggtacgaagaacggaacccaagggaaaaagaagacatacgcgatgcaaaacaactcgaaataagaaacaaaccccacagccaactatgaagcccccgccccccagaaaaaaaaggagaaaaa

SEQ ID NO: 36503 - DNA, 399 bp, Oryza sativa
tgcattaatcgagaaaagtttccgtgcgattcttgaagtgagtatatgccacaatcgcacccaatacacagcaatatgtccaaaaatcatgtttaggcgctttatgatctttttgattgcggtatgtcacatcccacccacgtgtggcaatatcggcattaaataacaaaagttcgccccgtgagtcgcgcaatgagtttttgccactaatgcacccaatacactccaatatgtacaaaaatcatgtttaggtgctttttgaactttttcgttccgggatattacatcacacccacatgtggcaatatcggcattaattgagaaaaaatagtgcgcgcgaggcgcgaagtgagtttttgtcacaaatgcacccagtacactccaatatagacacaaata

SEQ ID NO: 36504 - DNA, 396 bp, Oryza sativa
  unsure (1)..(396): unsure at all n locations
tgcatatcatgatagcatgaaagaacagttctggtatcttgtntttaacattgcacgcttgtgaacaaaatgtccgcntaatacatgggaacatanacatctctganatatcgtttcaagtctttccaagattgtggtattatgttatgcctacaaagatgtttccaatcattataagcatgcttaataacacactataggcacacataaccttttgttttccnaccaacatgcttttgaaattctctgtcnccccctaggctcccaataatgtaagcacgaggatcatattctcccttaaataaggcnngcaaattnatcttacctataacatatcacttacctcataatgncatcgtgatcccttctcatgtctcgacgaagaatgcnatgttt

SEQ ID NO: 36505 - DNA, 270 bp, Oryza sativa
cagagcaactaaagatagggcgatgttttttttatgggagacgctgatatcccctctcaaaatgagagaaagcactaccccccacacatacgccagatggacctacacacatacaacagccgagttgacacacactaaacgactttgcagcgacaacgcgaccataccccgcacagtcaaaatacatgtgccatgcgcaacacaaaaagagttcgcacggggagcagtacccacacaaaaccgacgaaaaaaaaacctaaagcgaaccaa

SEQ ID NO: 36506 - DNA, 409 bp, Oryza sativa
  unsure (1)..(409): unsure at all n locations
agctnggccaccttggcggtgcaaagacctcttgttggcggttttgcatgcgagataagattgaacgaccagaacgagcgagcgtatgaaaagaaccgtcgacagggccgacctggcccacgttgttgggcccaaagagtcgagacaaatcacatctcgaacttccgctgaagccttgccgtgcaatcaaaaacagacgtagatgcgtaaaactactgcaggatccggttcccacgggcataccacaacatgcgggaaaagtttaggatatagtagtaggcatgcatgcttcggttgttctgctgacgtaaatacaatatatgttattttcttgtggccttgtttagataaaaaaaaattggccaataacgtcacatcaaatgtttggacatgtgcatggagaattaaa

SEQ ID NO: 36507 - DNA, 406 bp, Oryza sativa
agctcgtctatatatttcatatattcaagccttttttttcagaatttatacaaagtatgctagtaagaaaggctaaaataatatttcgttttcaataattttagaaagtattttataatgaacaagaggaaaagcttaagtactactgtactagtaatggacaatgtcatcagcttctcctaaacacatgtagtccctgtgtatattccaaaataaaagcaactcttattccaagacaactttagtaggaggaaaaatgaccaaaatcattaatagaaaagtagttggtggttgagtacgtaaagagtattaaagggataaaacttctcattttacaaatagaggataggtaaaagagagaaaaaacaactattttgagagaaaaattaaaatctagaaattgttt

SEQ ID NO: 36508 - DNA, 487 bp, Oryza sativa
  unsure (1)..(487): unsure at all n locations
actcaagcgtggtattaatctgttaaactacattaacacttgattaatacctgtttaatatatcngatctatattgatatcctagtataaagtagcgtcggagtattatccgatacatgataaatctacaacatctgctatgctataaacatatataatctttacattgaagtacttttagacataagtgatttatactgtctcggcaagctggtctgatctatcctaatcacttggtttaaacatatttcaatctatatattatatactgttaagtatcacacgccgatcgagtagatctaacatttcttttgctttatatatcattgccgatctaattcacgttacatccgctaacttacaaaccatatgtcttcancatgtggccgatcggctacacgttatggatntaactattgttgtttgtatgttcttggtgagtgacgataaaccaactggacgccctaacccaaagcagattatgtct

SEQ ID NO: 36509 - DNA, 412 bp, Oryza sativa
agctttgtgaaacaaagaagcaaaagcccttgagttttgacttgtattggaatatccttgcgtcaaaaaaagtactgtaatatccaatttatctgaagactttatgtatgtttgaacaatatacatcttcatttaggtaagaattatacttatttgttattttctactacttgtattgaaccatttagagttatataccatattgtttaccacattttatatcgaatcatattgtattgcattcggatttttttttttggctaggcctaccctgggttcaaatcctgggtccgccactgatcctgtgttcatatgtgcatatatatttgtatacgatagatacatattagttgaattggatttctttctaagataatagctcaattggatttaagggcatcaccaatgtata

SEQ ID NO: 36510 - DNA, 196 bp, Oryza sativa
aaataacatgaataaagacatgtgaatagtggagcatcggagctggaaacaaagtcaaacaagaggtatagtaaacatgcatgtcactagaggaatttcactgcgacctcaaaccttgagcctggctctctcaactttgagccattccagaatctcgatctctacatctatgctatgggtgaccacattcagcttc

SEQ ID NO: 36511 - DNA, 460 bp, Oryza sativa
  unsure (1)..(460): unsure at all n locations
tgactactntgctctagcgtcggnccctatcctccatcaccgtctcactgctataatcatttccagntcattgtccttaccaactccgataggattcttggctgactggcgaacacaaagaaggaccataaggctcggacatgtgcaacataacacgatgggggctaatgagactcgttgcacttagcaatgcgcgaggtgatctgctacaagcatggccacaggttataacctgtgatgaaacaatctaaatgttaaagaaatatcctctctatacagacattcatcgctcgggagtcttcacatttataccaatttaactatntatattgcaatacgaagttgaaagacatattataagttgactttatacatagctagatacagatacggataaagaataataccatttttaagaaacgatgttctgtgggtcatgaatntctgtcatcgttttcat

SEQ ID NO: 36512 - DNA, 342 bp, Oryza sativa
agcttctctactcctaattttcgaaggctcgattctagtgcagatccacgggtgtctttgaaaaaagatgaacaaactatcttgtatgttgcacaactgtagtgttaaaagaactcaagatagttgtggagtgaaactaacaggaacacagactagatgtaaaatatcataattcacacccaccttggcaatttatagcatgactgctgatttccaccctgaatgaactgctgagcgatgtcattcatgagaggcaagattcttggatgaattaatgttggtgtccggtatactgcagtctccaagctcttggatggatgctcataagtgccaccattccct

SEQ ID NO: 36513 - DNA, 344 bp, Oryza sativa
  unsure (1)..(344): unsure at all n locations
ctctgcacgcatcacatcggatgttggtatacgtacataaagtctangatatgaacaaaatatataaaccaattacacagtgttgcgcggaaattgcgagatgaatcgtataagcctaattgcaccatgatttgacgatgtggtgctatattaaatatttgctaatgatggatcaataatgcttaataaattgtccgctgttacaggcccacccataacttcttccgtattaaactacagttaatactttaaatgtgtgttcagattttcaatgtgacatgccanacattttacccctgaactaaacagggtcttggatcgtcgaattcatgcttcactactaa

SEQ ID NO: 36514 - DNA, 402 bp, Oryza sativa
  unsure (1)..(402): unsure at all n locations
agcttcttcagggttcatctcaaattttatttatttctttntgaaaagatcacgacgaagttctttaatgttgtttgtaccttgcagaaaattactcaaagcaatccaaatcttatgagcagtttgaagatgaacaacacgatcataatccgaacgaggaatcccactcaaaagaatattgcgagctttacaatttagttcaaactcagtttttgctgcagcagtattaataacttcaggaatcacataaggatgagaaacttttctccagatatcataattttcagccataatgtaagattgcattctactacaccaatgagaaaaatccgttccatcgaaaacatgaggcttagttgtaaacttattagaagtagccatggcaaatactcaagattatta

SEQ ID NO: 36515 - DNA, 423 bp, Oryza sativa
  unsure (1)..(423): unsure at all n locations
tatatcttctttccgtataccatacctannagtaatcaaggcatcagtttttaaaatcacaataccatctatatttaatgcgtctataaatattacgtcttaaccaagttatagttgaaaattaacacgcgatatttcgcttatatttatagagcacataaactttatctttaaatagtaaaaatctctattttatagataatctatttctttaacggacctacgcacgcgatagagcgtcgtattgttttttataatatatctattcntannttttttttctttcgatcaacacaangtaatattcattcttttatagtccaactgatcatgaacgcacctatggagctttctttttccggtgaacagtactataaacgattataagattcatccctgtttatctcacgtacgtacgtacct

SEQ ID NO: 36516 - DNA, 407 bp, Oryza sativa
tgcaagcttgacaaaaaagtcctttttctaaacaaatagtttctaatctcctatatataatatttggcgccctgtcccaagatattcaaccccttttccgtcccaataaaattcatgctagcatgtcgaatataaatacaattaaaataaccttaagtattatagtttattaatgttcagcatccatcaaacctgtgtgttgttattaatttccatccgaatgtaattattttaatatgtttagcatatttttagattttctagaatataaagtgtacaattttgcaattgcattaaaaagacggaaattaaaataaactttaagaaaatataacatttacaaaggcgaagcaagccaaaaatgacacccggcgggttagcttcattgtacagcacagtgatctaca

SEQ ID NO: 36517 - DNA, 434 bp, Oryza sativa
  unsure (1)..(434): unsure at all n locations
ttgggatgggacgatgagagctggagaggaggccaatgtcaagctctaggactgtgatganccnacaatggatcgatgctaagaataagatatanagggaagaggtctaaaggtgcgttcgtaaaaagcgggcgggaactcattccctccgcatggaaaatggagcgagccatcatcacgagattaatcaagtattagctatttttcttcataaatggatcaatatcgattnttaagcaacttttgtatataacttcttggaaaactacaccggtctacaggttgaaaagcgtgcgcgccgaatacgatggaatggacttgggagctangaaatcccaacacaccctaaagtacgacaataagcataaatacttgatctaaaatgaaaacatatacaaatgtatggtaagtttattactaatatatacacacac

SEQ ID NO: 36518 - DNA, 401 bp, Oryza sativa
agcttcggtttaacttagagttgtactatgtttctatgttgactgaaataagcgtttatgtggaacatagggggctttatgacttccaaccaaaggttatacaccatccacatacttggtcagtgtaagcatgataaggttatgacagcatccacatactttgttagtgtactggtggattatacactattaaaagctgattacaaacctgaactagctcaagtatcccattgtgatctttattcagttctgtaggaacaaaacgcacaagctttttcttcccaacagaaattacttcaaaaccactaccaaagaactgagagtgtacaggccaaggaccagaagattaaacatctgtccaagtacataaataaaatttattggccatagattccaatgca

SEQ ID NO: 36519 - DNA, 461 bp, Oryza sativa
  unsure (1)..(461): unsure at all n locations
cttcttattatatcatcatatatactactcctactcctatactggtactactatatcgatcgactgcatgctactacacatacgcaagcgtgttaaagatagagctcgtcagcaacaatacagtgatacactgcacatgtaccggntctcagtacttaattagtccataaaggcttgaaaaagagcacactaaaccttttgtagctaggataattaanactggctgggtggcccgcgcaattatgcggctagcaccgatataaaccatctattttttatataggttacttaaattttgttatagatatctcgttgactttgaaaaccaaccttatcatcctgtgttctaattatattttttaaagttatgcagttgtactcctaatatttgcaccctcattatttgttctcatctacactactttatttgtctcctaaaccttaaaattgacctatagttt

SEQ ID NO: 36520 - DNA, 410 bp, Oryza sativa
  unsure (1)..(410): unsure at all n locations
agcttggccgataccttgtgtcaggcttaatttgttatgttagcttagattaaattagctgttggtgtgttgttggagttggggatttcgctcagtttttcctgattaacggggcactataaagtttgggccttaaaatgggacaccttcttaatataaaactttagcaatgacttgatcgttcgagaaaaaaaaattaaatgcagaaaataaattgggaaggcgtaccctgttcgtttcttacgtaaggagaggattaaattttgaataccgtgacatgcttttcaaactgctaaacggtacgtttcgtgtgaaaactttctatatgaaagttgctttanaatatcagattaatctactttttaagattatattaattaatatatcaatcaatcacacgtcattaccac

SEQ ID NO: 36521 - DNA, 408 bp, Oryza sativa
  unsure (1)..(408): unsure at all n locations
agctctggagaagaagacctatgtggtgttctgtcttataccccagttcaacgcctgtgaagatggagccgtangcccgctaatccgctgctgtttatttttgattgtcaggcctgaagtgcctttgtaataatgtaaatattatcgatataataaagatgcgtcttttgtatcatgtttgtgtggtgtaccccggcttttctaggacggggattaatacactagcgtttgggaaaaggtatttttccgggcgtgacatcccgagtggattttcctcccctcgtggtgatcgccttaacattttctatggacggtttgggttgccctaaaatccgttccgcttccttagcaagaactagagcagctagctgcgccagctgagtctctatcatcttgttaaaactcatc

SEQ ID NO: 36522 - DNA, 474 bp, Oryza sativa
  unsure (1)..(474): unsure at all n locations
cgtcgagctcttctcgcatggcatggtgtcgatctgtgtgcanatctccgcagactttgcgttactgagcttgcatcgggacgcaccatgagtttgtgctcaatcacctccttgggtacccccggcatgtcatactgctgccaagcgaacacgtcagcattagtccggaggatggtgatgagtgcgagttcctatttctcgcctagtgatgccccgatcttgacggtcttgtccgtgttggcactggatattggaaccatcttgattgccgcgtccggctttggcgtnttgattgttttgctcactttcttgtgcgattcagctgtgtgcggtgggctaagcgtgtgctacaacatgtcgatgcttcgcttgtcgcattgtactagcaacttatccgttccttgaataatgattgatcacttcggccctgcatcatgagcactgatacgctagtgagatgcggcatgaactctc

SEQ ID NO: 36523 - DNA, 368 bp, Oryza sativa
agcttgaatagatgcatacctgctatttatctatgtctacatcaccaaatttagacgccgagggtgtattatcttccccgctttggttgtcaatcgtatggtcattttggtcaccggtacattgtcatcgttgcaagcacctaagaatgtttgtcatgcaatcagctagctagtccatgccttttctttctctcctcacgttcaagcataaatattttctttctaggtatgtatgcacatttcaagataagtacattaaagctttcaatattaatattatttagatgatggaaaacccttctagtagtacatattaaacaatgaaaattcttttaaaatattgaccagcctatgtcgatagggctctc

SEQ ID NO: 36524 - DNA, 473 bp, Oryza sativa
  unsure (1)..(473): unsure at all n locations
ccacccacaataacctgcatctaacatgtgcttatgacttgtncatctgcaatctttgntgtatgattgctaagaatgttcaagagtatctgatagtcttggaattgtgaatgcggagttaccgtgaacttcttgaactagnttgatgtactgttcttgcgaggtattgtgaagttttgtgaggaacttgctcaaagtttcagtggccttaattctgcttaatgngagttttaggtcctanaatgcatatccatcttggtgagagttgatgacatacaaatcatacttggtactatatcaataggctgaactgttacacaccatctgagtacttgagtcctttgttgtctccaaaccacatngtattnntcttgctccagtatgatncctgaactatccatattgcttcatgaacttgaggaaagtatcttgttctcacgcttgtgcttcttatgatgttgaattatcctaaa

SEQ ID NO: 36525 - DNA, 400 bp, Oryza sativa
agcttccatgcacggagaacatgacatacctctgtacgcgcacgcgtgtgggtaccctaaccatttgggacttaacctagaggccatatgggaaaaatcccccggtccgatgcagataggtagcgtgccaacgtggccattgccaagcgctgcccctgagccaagagatcatttgcttattctcctattatattcccctacgtttatttcaccgcgtcgagcttttactcgtattttattacccacgtctattttttgcatcgtaatcgtactaaattagacgtaacgtaccgcgtctcgaggacccaaaacgaacctaaataactttattcttttacacaccaaaaccacattagacttaggattgtttggctagtagctaacactgccaaaccacaat

SEQ ID NO: 36526 - DNA, 476 bp, Oryza sativa
  unsure (1)..(476): unsure at all n locations
tatcttagttaatacattcaacacactntcagtttcagttgtcagtctttgagcaagggtgcttcagaattatcaggcatatacatggaaatgaaatgattccattctctgttcagtttatattccttgtaggcttatattgatcatacagcgagttaaatgaatataacttcaaacaacgctcgagtaaaaactacggagganaatgcagtcaatagtgacttgtgattgtgatctgcatcgaggattaanaagattcgtctcgtaccactgaagtccttcagtagatntgtatacttgttcaaaagattgtaagagcgatgcatcaacttgtttagttgcagaggtatatgatctgagcttgttcattcggattattcagatagaaagacgctgtactaacggaaatcttatacaggttgaattcgaatcttcatacccccacttaccggngcccacacgtcagtgacccatct

SEQ ID NO: 36527 - DNA, 342 bp, Oryza sativa
  unsure (1)..(342): unsure at all n locations
ctaagcttacaaaggtcaagtcggagtttgaaattaatatatcatattgttccatacaagattattataatccaccatgataccaaaaggagcctctaaaatctatattatctcttagcatgtgatgntttctggtgaatgattgaatggctgaatatatgaatggttcgtgttaattatccaagggtacaaataaatgagttaactaaatgggttactacatgtgaactctgagcaaattttttgtttctaaatagcagtcccataaagaatgcagctctagcctaattgtattctacatagactaccctcacgatatatatggatgactntattatatca

SEQ ID NO: 36528 - DNA, 388 bp, Oryza sativa
gctacttctgttgagttctcctctctattttcattcggctgtgactgagctatttcggtgtaacaacggctttgggtggactgtgcggctgggatttaccattctacccctagagacaaactacaggttgtttttgaattctaatggagggacttttctttgagggggtattaattggtctaacttccttaatcattgaaataggggtattgttcatggacatctctaatttgatgatatgtacgtgtcaatttaaaaatagtgttaacatcggttttattgattatgtgagaacacatggcgacatactatttgcctcatgacatgtggaggtattaaccgcttggatatttctctgaagtgtatagtctgatgacatattttttaa

SEQ ID NO: 36529 - DNA, 340 bp, Oryza sativa
  unsure (1)..(340): unsure at all n locations
tcaacgtcacactcaggccaggtcagcagagcacanattggttgacataattaaataagaaaaacatcanttttagtcttcttttgtatacagtactcgcgtttggttagtgagaagagtatatatagaataaggccaaattggaccatttgatagtagtcctgtgtcccaattcccagatggccccttagcatgtcggtttaatgactttattaatcacacacctanatactanagagagagagaggggtgggtgtggaggaagaaagtggcgctcacttgcatatgggtcccatctcgaggccgccgaccgcaatcctcaactgtgtttggatggtgg

SEQ ID NO: 36530 - DNA, 446 bp, Oryza sativa
  unsure (1)..(446): unsure at all n locations
ctgatatggatgacttgtgctctgtgtgggcctatattggaataaccatcattactaattagagatagagctcggataaggcaattgtatctattaattangatatttgagtcggtttgttagagatttggcaagagacgtcgtatatgggcttggttgtatcttggttttagaaaggttcgagtcgtgtccataatggaatagtttgtactcggggtataaatatgaaccccatagcattgtaatacgggagacaatccaatacaacttcgcgcatcgccaccctttttactcttcttcgttttcgacgagttcttcgcaagaggtaacccgtctcaatggcatgcgctatcggggctaacatgtcgctttagacgtgttaagctccatatcgcgagncattgctatatatgtcttagttaatatattcttagccttctcatttt

SEQ ID NO: 36531 - DNA, 287 bp, Oryza sativa
  unsure (1)..(287): unsure at all n locations
tatgcaatgttgntcactgtgatgaacactgtctgctataattacagcaagcatggagagcangctgaccatgccatatagagtgatcagtgatgcaatctactgtattggaaattaagtacaaaggattgggaacatgggagatcagattatgtcacaagggtaccgctcattgtgtatctctcgcggaggggtgatggcggcgtancgaaatgcttcagatccagtggcgccgcgaccggatccggcacctccgcggctagatacggcaccctaccgccggatct

SEQ ID NO: 36532 - DNA, 326 bp, Oryza sativa
  unsure (1)..(326): unsure at all n locations
ctcagctttattctgggggaagaaatggaaaagaaccgtagaacttttntaaagagcgacaagtcgacaacttatataagccacaaatagttgcccaaataaagtagtataaacttgaaaaaaaaatatttatcaagagtgagagcagagagccaaattaagatggctgcagcgaggagactgcccgtcctggagctggtctccttcgtcgccgtcctccttatcttctcaccaacagcagcagcagccgagttgtctgtggacttccacgcggcgtcgtgcccgccgctggaggccatcgtgcgctcctcagtgcaagccgcgct

SEQ ID NO: 36533 - DNA, 412 bp, Oryza sativa
  unsure (1)..(412): unsure at all n locations
ctcagcttataaagattcagaatctatattgccaggagtactttactctctctgatctcaaaaccaagttgttntggactttccatggtcaaatatatacaacttcgactacctagttctttagcacatattaaaaaaaaggttacacaagtgtaatattatgaaagctcttgttataacaaacttgaatatcattgttatatacccgaaatctatactctgaatgatttttatggtcaaaattaacttgtgtgactgcacgcattcttaaataacttggttttgagaccagagggagtactagctacttaggacctataaacttttgagaattgaaatgctttgagaaaaataatatgctgctactgcagcaagcttctaagaatctcttatcttattgaaaatgactaat

SEQ ID NO: 36534 - DNA, 432 bp, Oryza sativa
  unsure (1)..(432): unsure at all n locations
cttcagagactcacaagcattgaaggggaaattggcataacactgcggtacaagatatcaaaacatcccttcttattgagaaaccttgcagagatcttgggagacagcagcagcaacaaccaagaactgaggaggctcatggcaggaatcctcanaaaccttgcaattgacattagacacaatgcaggagattggacaaatgaaaatgctcattaccaggctgatgaaggcattcctcgattctaacggatcatttagtcaaatgttgattgcttgctgccaaaggtcgctgggcaagcactggtaatgctgtcatcagaaaattcgcataactgcttcgttatgttgaaagactagattcgttaatatataaaaatatgaatctatccatgatgataatacatatatgtggagcaagtctgtgcgtatatg

SEQ ID NO: 36535 - DNA, 414 bp, Oryza sativa
agagccttcttatgctatccatgagtgttgttatattgcacaataatttgatagataaatcctcgacgagggttgggggtgcttaatttggttggatgctgataaacataagagatgctaatctttaatggtgctctgtttttttttcttttttgggctgaacaaactgaggctggaattgagtaaaccttccgggaaattatttcctttcaaataaaaatcataatgcattagattctccaaataattcactataaccccatcaggtcacaaacaccacaacgtgattgaaaactgtcatgcaagtggatccatgacagtgtatacacaagatcaggtgtgacaactatgttgcagacacagacatggcaaaagacatgtttggcatggatagatcttcactgctattttttt

SEQ ID NO: 36536 - DNA, 385 bp, Oryza sativa
  unsure (1)..(385): unsure at all n locations
cctatatgatttatgagtattattagcatgtttcagttcatatataaacaagtttgtcatatgggtctcgtaataatttttttccgcaagattaataagaatgatgctnacaggaggccaccagcccaccaattattcagcggtggataagatggcaatgaacataacatgcataaacattttttatagtagtataaaagagaacagaacaatattttacatggagtcgacgcgtatgtgtacaggatatgatatntatactgaggacattatgtactatgcgtactgcagaacgcgatatctctacaacattagcattaaaacggtggtgataacatatanggatatggtgttttgtcatcgcaacgatggctttgcccgttga

SEQ ID NO: 36537 - DNA, 372 bp, Oryza sativa
gagcctctggttgaccgcctctccctgcacttggcatcctccaccttgcgttccaagaactggtcaagcacgccggtgcctatagggagatcatgcgaatgccaccgcacgaaaatatcgctggtcttttcgttgtcgaacccaacagaagatagaatcttttcgacaaaatcgtgttgatcttgttcgtggctatctcctttggctgaacacaatgtagcctcttgtgaagaatcatcccatgataaagtccgcgcgattgatccaatatgaagagatcttgattaggttctgcgagcaagataatgccgaatttaatctatagaagacgcataagtactatggctagcaacaaatgataagcacaatcat

SEQ ID NO: 36538 - DNA, 384 bp, Oryza sativa
  unsure (1)..(384): unsure at all n locations
tctctctcttgtagcttcttagtattagggattgagtgattacaccgtgttactacagnatgttattcccacaaacaaataatctcatgtactactaataatattttctttcttgtctcctgccgctgaattgctcccgcaggatgaccatgagcgacgatggagaccgcacctgcccgctctgtgctgaggacatggatatcactgaccagcagctcaagccctgcaaatgcggctatgagggttcttcccttcccttccctcccctccccaccactctactctncacacccccttccattcacctncctttngcatctccactgcagaattgtgtctggtgctggcaccacatcattgatatggctgagaaagaggacactg

SEQ ID NO: 36539 - DNA, 397 bp, Oryza sativa
  unsure (1)..(397): unsure at all n locations
atacccacaaagaaggcgaggactttttcgacacttattcatcggttgctcgctagaccacgattcgagtactacttgctctggcagcctctcatggtctactcgtccatcagatggatgttaagacagctttcctcaatggagagttggatgaggagatctatatggatcaaccagatgggtatgtactataaggtcagaagggaatggtgtgcaagctgttgaagtccttgtatggtctcaaacaagcgcctaagcaatggcatgagaagtttgacaatacacttacatctgctggctntgttgtgaacgaagctgataaatgtgtatactatcgctatggtggnggagagggagtgatcttcgtgttcatatgttgatgacatattgatctttg

SEQ ID NO: 36540 - DNA, 445 bp, Oryza sativa
  unsure (1)..(445): unsure at all n locations
taagtctgaagaaatagctacctgtatgtccctagcagatgcatatatagttaccgagtctcgataagatgtgacttgcgagcggattgtatcaatntctggtaattctaatatggacctcctttcgggctttcttatatagcctgaatcatatgatctttcgactaagtcatttaaagcatgcatgccgcatgaatctttcaaaagacatcagtttaatgtagaagagcttgttattttatcctgcagagtcgagcataacaaaacagacccaggagtttaagagctaggatgactgcatccacaagctggaaaagcttattgaggagaagtcaaagaaaattgctaccctgcagagtgagataccttcattcgaggtatctattgacaaaagatatacttttgaagcaatttttacactctggagtgatattgtcttttcatg

SEQ ID NO: 36541 - DNA, 374 bp, Oryza sativa
  unsure (1)..(374): unsure at all n locations
agatgaccctcaacttctaactttntcatcatatcacatcatatcaaaggactttctatacacataaactttcaactttgtttccaaactactaactatctccaaacttcttttatcttcttttttttttaaactaaacacagcctgaatagattatgctcttaaatcagaatatactctgaagaaatagatttaccaaaaattaaagatataaatacaattagtttgacgtgtcacacttaaaagtaaattcacaaacaaagcttaataagattatcgaaaactatagattaagtgctatatcataaattataaattatttttttaaaagctatgaagttaagccattgtttgggatacatatttgcagaaac

SEQ ID NO: 36542 - DNA, 444 bp, Oryza sativa
  unsure (1)..(444): unsure at all n locations
ctcagcttcttaccatgctctcacgggtatcttgagaagggtgagcattgtcaacaagtccatgatcgatgcgcttatcctttttctctacataatccaggtcacatatagtgctcggaanaatatttgcttgagagcaataagagttagcacaagtaaagtcaacttgaatatgaggcacataggattttaccgttgttatgatcacctcatgagttacttctagcatggcatgtgaatctacaatatttccatgagagcacaaaagttcatcatacttttcttgtaggtccacatgcttgctagtgagctctacaagttgagctttaagctctagattntctttctccaaagatgattcttcatgatgcaagaatattcatctgagcgtggagatgagccatctggagatgaaattcttacttggcccattttttcacatac

SEQ ID NO: 36543 - DNA, 242 bp, Oryza sativa
gcaagagccgcgactatgttgtatctcttacagatacaagtagaaggtatgaggactctctgctatattaagtaagctggcataggaggcttacccttacgcctaaatgccggaagacacatattttctcttgcatgggtagtcgagagacggaacagagatataacaccgatcactcattctttgtcagactttattcccgaagtattacaaatgattttgtaaatgaaatccaaattcct

SEQ ID NO: 36544 - DNA, 451 bp, Oryza sativa
  unsure (1)..(451): unsure at all n locations
tataaaactcagcttatttaataaagaaatacgtttaattgtattagtgtataaattggtttgcattatctctaaaggtgcgttntatggtcagatggccagatgggtaataagtttgttcaccggntgcatagggaaaaggagtacctcctgttatgtttttttcgtcttcttttcttcctcgtggccaggattcacaaagccgacgaaagctggtcagttntcgcgggttttcgacgnttcgatactgctcggaattaattttcgatgggaatttcgaaggtcaaacagtaaatttggtcgaaattttgatggggcttataatttaagtggcaaccggtaatacaaacactgctcgtgacttcttttctttgaccaccatccangcttaagccctgttagatggactaaaactnttagncacatcggatgttgacactaattataaata

SEQ ID NO: 36545 - DNA, 58 bp, Oryza sativa
tggccaagactgcgacagcacgacgtgttttgctccacgtcgcacgggtggaggaaga

SEQ ID NO: 36546 - DNA, 375 bp, Oryza sativa
  unsure (1)..(375): unsure at all n locations
cgtctttaatggccatgagttctacccatcagcagntgtatcttaaccaagagtctaggtccaagggggtgatatgcgttctttcttcacattggtacggactaggctaactctatcctgngagtttcatagttagctttcagtgcatttcatactctcccccccccccccctattaaccataactcggaatgcttcaggttatgacagacccagatgtgtcaggaccaagtgatccatatctaagggaacacctacattggtaaccttcaacacttcttattcaacatctatacattcgtgtgcaattggtgattattgattcactataagaattattgttctgatggagatggcactagtaggctaataccac

SEQ ID NO: 36547 - DNA, 329 bp, Oryza sativa
  unsure (1)..(329): unsure at all n locations
atgtangcataacagcaagctctatgtatctatgacctgtgcatgtattcattaatcatcgccactgattgaagtcatgaacccacatcttatggctgcagctattgagcagacgccctaccaagtactactttcataatataaatcatatttgcccaaaaattatacaaaattaacaaaattgctaactttccttccttcgtattttaagaatagaaaaacatcatgattaagataagctgagccaactacttcaagttaatgaacaaacatctctcttaatttgcccaccaagaactgaggaaactatcgagcattgcatgtcctga

SEQ ID NO: 36548 - DNA, 469 bp, Oryza sativa
aaaaatcactgatacagctatcaatcatcattcttgaataattgtgatcttcgcacgtgagtacctcaacatgagagggaatcagcactcagcatagccttctagcaaaggaacgctgttaaatcttgaggagctcgatgtgggttccaacgggctttcgtcactccctgatttcaaaggaagccttacactgactgaagaagcttaattgttgagacaaacaaccttgatgagttgccttacaccattggtcactgtgttatactggctgaactgcaggcacgctataatcacctaaaggctcattctgaggcgcgtcgaaagctagagcctctagagatcctctccgtgagatataacaatctcaggagccttccaactacaatagctctgtctcactaaacagaaaggagtcgatgtgagcttaaccagctcgagtcaatccctgaaacttctgctttgctacctc

SEQ ID NO: 36549 - DNA, 249 bp, Oryza sativa
tattacaactcaatacagcgtatctataaccaccgcaagatagctctgtacttcaataaaaagctgcttatctcatcacaacattgtacaaacatcactgcacgactcaataatctctcacaaaactgattctaatgttgttacatcctaaatctgattggcctgaacacaacaacacatggtatgaattgtttatagatgaaaattatagctactgcagtaatatgaagtaggagctcaagaaaacac

SEQ ID NO: 36550 - DNA, 432 bp, Oryza sativa
  unsure (1)..(432): unsure at all n locations
tctagtntattntccggtgtatccgtatatgcaactacaacttctcatatattatatganaagctaattggtgtggggactattgattntgggtggagctatagctgacagaagctcccacaaaaggacctaaggcaccactgcaattagtttcatagaggctatgttgttgattgtagacttggttttcagaccaccaccttgtatacaaatttatcttttataatgaaattaaataaaaaatcttgtgatccattggcaccactcatagttattgtcaagcttcacttggaataatcaaagaaacatgattgtgcacgaaaaatgtacctgctgataacacatctcagctcactgattagtatcatagtttatttaaagagagctgcgctagaaactactaattcgctcaatggaccaaaacttgtcatg

SEQ ID NO: 36551 - DNA, 427 bp, Oryza sativa
tacagtgatggatataagcgcgattgagatttctgtggagttatacatttgggtattgataagaccgatcacaatttccttgaagctcgatctcccccccagatgaaccatatagcccagagaaaccatgaaccagaatagaagagcttgccccacccatgagtaaatatatcatagtagcctcattagaccgtagatctctcttgggatatccagacaatatgtaggaacataaactgaaacattctggagctacaaagatagttattaaatctgtagcaccacaataaaacatatcctctagagtagctgttaatacgaataacagagactctgttatagcctttctgtacattaatggactctaggatagaggaataccttaagttgacataataaatataaattgaagattctttgatcgtcg

SEQ ID NO: 36552 - DNA, 392 bp, Oryza sativa
  unsure (1)..(392): unsure at all n locations
catatatggcccanatctacangtgcaatgtactattcttanggcttggttggcaaacctcaaacctctagattttggagtttataggttaaaatataatgatttaagcatctattcttcgtgatctaaaatatgaacaagatggtgcggtgcaaagaattcttgcagctggagctccaccaaaaggcttctatcaaaataaactggtagcacacatgagagggtatcaactaattttaactctgaagtactgtcatctaanaatactatatttaagttctgaagctaattaatatatttcctgttcatatataagaactcataagatgaaaaatgccgaagaacatttagattaagatgctaattaatctgatctcttcatatatctttat

SEQ ID NO: 36553 - DNA, 263 bp, Oryza sativa
ctcagcttagcacccatgcctttctgatgcgggttgacggtctgtttgctgggcgattgacatagttcggagaagaggtgctccgctgcaatgaagctagcctatttcgttctattcacctatcaatgacgagaagaaatgtcggattttttcccccttcctcatatgtggcatggatttactatagctggctaaggggtcctctggcggtgtacagaattatctatggcggccctcttcttgaggacatggacatagactgg

SEQ ID NO: 36554 - DNA, 376 bp, Oryza sativa
  unsure (1)..(376): unsure at all n locations
atgtcataataaagatatgtaatattattctattaatgaaaagtagacaacattgtgctcaatgaatgccttcccatgaaacaaggatgtcagcaggacaccacaaaccttagcagaaaattatattngtgtctgtcaaaatgaaaccaatcaacaatacaaagaagttgatcttctctgtatatgtgttgcatgctcgaaactcagcttgatgaaatttaattgcttttggacaatcacccattcagctgccaatggacaagtaaatcattgtttagccaccctgacctctctaatctagtatggttaaaggtgtggttgaaattgaaaccttttctttttgctactgatgtgcatntcatacaatactgattaa

SEQ ID NO: 36555 - DNA, 354 bp, Oryza sativa
tgcatatgctttgtgtcccattctcctagtttccaagaccttcgtgatgccctataagaaatatatagcctttgtttttctcctgccggctgtaggtaaacttcaatgttcatgcaagctgtatattctgcgtggaaccttcttatggtctaattattgcgtgctctgatttcagcaagccattgcgggacataatatcacatttggtgtcagaagttccattaccaacaccacgaaagaatcgtgttgtatttgccattgagaattgcttctttctgggaggctcctcaaaagatggcttcccatgccgatgatgagcctctttcattgtcctttgttctctactatattcca

SEQ ID NO: 36556 - DNA, 356 bp, Oryza sativa
  unsure (1)..(356): unsure at all n locations
atgctataganaatacaagattataatcctacnagattattgtatgagacaagagataatgtcacatcacacgtaccagcaacctccacagaccgctggagagagagcttaacaccggtcggtcaccgctacatgtgacagtttgccaccatgctaacaaccgagccacagacgtggccagctggttttggccacgcttaagttgagaaagtctttaacattcacattcatatataactagttcataatctgtgcatttcaatgccaaattacaaggtgtatgcattctcataacaagggtaattttttttttcttcttttctgataaaccaggccaaattatgtccgtgtgtctg

SEQ ID NO: 36557 - DNA, 331 bp, Oryza sativa
gctcctactctagatgtctctcaagtatgagtcttgatgctatacttcattagattgtgcctctgcgtcactctagttctatctcgtatctagtcataatcataacttatccctctatatcactattttcacgaagaatctccagcacgaattccttgatcatggacgtctcactcttctctaaaattggcttgaacctttgactgatggcagcatgccaaatgtgaatattcgaacagctgctctgaaactactaacagatgtaagctatcttgctcttgtggcgttcttattgcaccatcaaggccgactagctttatcatatgcacac

SEQ ID NO: 36558 - DNA, 131 bp, Oryza sativa
cataaaaccagcccgcaggcgcagaccggtattcggttatttttatgaacgagaaacccgaaatgagtgggagaactctggaaatcaacaattggcaaggaaacacgggcttgactcccaagaaatgattc

SEQ ID NO: 36559 - DNA, 373 bp, Oryza sativa
  unsure (1)..(373): unsure at all n locations
tcacttgtcacgcatccgcattcgcgatagccctgcctcgtctcngcctattggagatgcgcccggtgaggcagttcgtcattgtatacccggttcgtccgcccagccgcttgacgcgtttacagttgactatactcgacgaccgagacatcgccgatcatcctgcgggcttcggattcggcctggtcgagggtcaacactggaaaagtacaatgtgaagctatgtcaaaaggtcaataatgcgaaataacagagcacaacaatatatagcagaagaacagtcttaccgttcgccccctcatgaagtatcaagatcggcaaaccgtcgacctcttcgccttgttcaaccgcgacttgccatgactgggagagg

SEQ ID NO: 36560 - DNA, 436 bp, Oryza sativa
  unsure (1)..(436): unsure at all n locations
tctgtntggcagtccaccaactgctaaatataactttattagatgggtttgaagcagagtcgtagagcagtctaaacctagctctacttgtacaggtagtccatttgacacaactctagcttcatctcttctggaactagagcgtaaccaaacggtttcagtttcaccccaaacaaggaatagagtcggctagagtgctctcacaaaataaaccacagagggggagatagatntaggtagctccacaactccactccagaccgaacacttatagttaaacttaggggttggagccctatcatacggatcattcattttgtgagaacattctaaatcgctcaactccattttagatgaacacaaactgttgggcctgcttgttaaactccactctcaaattaattacacgagttgtactggagcggagttgtggaga

SEQ ID NO: 36561 - DNA, 471 bp, Oryza sativa
  unsure (1)..(471): unsure at all n locations
ctcgaaatttcaaactgtcaacttgaaatttaaactttctagacatatatttgtaaactttcaactcagattttgaaaaatttcattatatttctgaaacattntcaacttactatttatatattattttgataataaaatatataattagattaatctatacgcttagcgccattattagcgctaatgacgcgtactaggcccacacgcttaaccgcccacacgtgacgcggaacagaaaaatatgataaacgataaaaaaaagtgatacgacaaaaaaggggatcgctatcattggttcgcgagacgatgtggacacaaaacacgcgcgacttgctaatctggcgcgtctgtgcggattagcaatctcgcaaaatttgtacgtacaagaattaataataaattcagaagtccaattcaccctgacatgattataattcataatttgtgagatctgggatagtacaacaa

SEQ ID NO: 36562 - DNA, 349 bp, Oryza sativa
  unsure (1)..(349): unsure at all n locations
agctagtccgagcactctacactttatagccgctctcagtcgtctctctgcttgagaaagacatctacattccttggccatctcaagctgctntattatctcaagtgccatgtggaattttagctttgcctctcagcatgtggttttggctcacgatttaagggcttttgttgtggtgcatactatgaccaatttctgctcctgatcaaaatcgaggtggttttcatcgtagctcttctggcctcggngcatttgcccctatcttgctaacatcggtctctatggcaatccaagtctcgggcgaagcangatgagaggtgctgcgaacgacgtggacagggatatggtg

SEQ ID NO: 36563 - DNA, 371 bp, Oryza sativa
caccttgaatttctgatgtacatgagctctacagggtaataacttacaggcggtgcatagagatagtgccaactcgtagcgcagataggagccataagctcataatcatacgattccatactaataactcctatgtaacacacgtgatttcagacacttacgatctggacatcctagggggcttgttaatctaatagcaagatgaatcactacgctttaacatttcgagctctaagagcaagcagttactttaaggggctagttgctacaaacaaggtgggcatgactcatgagctccagacctaaccggatcggcctcatcttttcgcttatgcttatgcttatcagctaaggattgaattgtcaacctt

SEQ ID NO: 36564 - DNA, 399 bp, Oryza sativa
  unsure (1)..(399): unsure at all n locations
tagtgctactatctctttgcccaaattatcgttcgtgatacatgagtatctccggcgatctctctatcccacattcccactctataatttagcanattttctaaaattaggggtgctttctttgtgtgtgtgtgtgtaactattcgtgacgccgtagccaagcagccaaacaacccaactagtctctctctgtgacactccctatatttgntcttactttttgttttgctctgaaaagatagagttgaatggtgagttattacatataatatcagaaaaatatattaatgtatgagagtgaggtttatggagcttgttggagatgctctagctagtatatataagttgcaatagctagaaatagatatttccatacatggaatcataccaaccatctgg

SEQ ID NO: 36565 - DNA, 362 bp, Oryza sativa
  unsure (1)..(362): unsure at all n locations
ctcagcttgttaatccgccacatanggtatgtgaaaggcaatagaggtgtttttataccaatcaggagaggagagaacacgcaccttcgcccggccggagtgcagagcactgcaacctcttcggcttggctatgcgcggnggtgtgtgtgatctgggctctgggttggatatgcttatctgactcaagccccaggggtttaaaaactattttacagcagccttacctccacacatttgagctgtcacaccttatcttagcttgaccgccgtaacagcggagaccttgattcggagtcgttgagactaatccattgcaacttttcagcccactcaggcactcacgggttcacgggctcaccca

SEQ ID NO: 36566 - DNA, 376 bp, Oryza sativa
gagacgtagctgtcatgatctgcctataatagtagccagattgtgaacagctataagtataagatacagaagacaaactacaaactcaaagctggaaaacccatacctttctaaattctcacaagctgatactagtaatcttatcctcttcaaatataatcatagtacgagtagatccgtgaaacaccactgcaggttgatattaactataactaatttgatcccatacatcgtcacatctaattatggagtacaatttaagcagagagtttttttaaataacggataaaccggctctacactcataagaatgtcacagcctcacgaactacaagagtcataactcacccttaccaatgatacccatctaacacta

SEQ ID NO: 36567 - DNA, 191 bp, Oryza sativa
tcttttacctacctgtgtgtacttttttctcaatgcattgcaatgtattattgctttgagaatttacatgaatatagatgacacgcacttgttttccatacatggaattgtattttgcagccactaccttgacgagttgggagattcttgccacatattgctccctacatgtagcattatggatgaagttc

SEQ ID NO: 36568 - DNA, 440 bp, Oryza sativa
  unsure (1)..(440): unsure at all n locations
ggaatggagtccatggatggcaggatttcctcttgattatgtaagtggncagaattgccttatcattgaagatatatgttgctatgatcatggtgtcttggtgctcctgtcacaactgatggcgcggaagctactagattaacatgtgtcaggaatgagcaggccggtgcatatatgattgcagtcgaccactactcacctttgatgtacggtcacggcagtatcacccttgcatgatatgaatagaggtatcttcagttcaagttctgatgtaaatcaattatttctgagagcattttggtataagaacatttgtgccatacctccataaatgacgttacaaacttgctctcaagattgagaaagtggatttattcactggtgcaaatatattcatctatgtcaatataccccaactattataacgactaacataattg

SEQ ID NO: 36569 - DNA, 446 bp, Oryza sativa
  unsure (1)..(446): unsure at all n locations
ctcagcttgtcatgttcaatcttggaactgcatgcattgaagatattctatatattagtatcataaatatgtgaagctggttagcacatagtatagagacttacatcctccgggttagtcctgtacctcccattaacccttatgaattcgcacgcgtaaaacccgcanaggaccgttcctcgcggttgcttgtgacacttcaggacatatcataaaaaaatagttaaaatttgcaattagtgaaacaattggaatacattaagtgagtggagtattaccggccaatacgtacgtactagcagcttctcccttgttcgggtctgttctccacccttgaacttgtagtattggtacacacttgtatggatgtcgtaccggttcacattaacgaggatattatttataatacattcatatanaaatgcaagagcataatcacttactac

SEQ ID NO: 36570 - DNA, 361 bp, Oryza sativa
ggcgctggagcgatggcgggccaggatcgctagatgccactgttattttgtctttgcgccctccacctcctgcagcggtgccataccaagagaagaaggagtggtcgccggcctccacccatggtcagctctgcattgctggtcgccctccatcgagggcctccactttgctcgtgagaaacttgagtagttgagtatagaggaggtggaggctatacgtgaacgaatggacgaggaggaagagggataatgtgcctgctactgctctcatgctctatgttggcaaggctggtttttcgaagatccaggtgagtgccaccggcggctgatgatgatgaattgaaggttgaccattcgcttt

SEQ ID NO: 36571 - DNA, 413 bp, Oryza sativa
  unsure (1)..(413): unsure at all n locations
accagctggcgatataaagctcttttacatattggtaatatatttgaagagattctagtcgacgaagtcggaagatatcccgagttgtcggtaatcttctctcagttctcttattctgtttatactctgatttcaggataatattcttcctgagtaattcagatttatcttgtgagaattatctcttggttagttcctaaatagtataccggattattgttcactataatcaactaaaatatagtgattgctgtggtgagttataaacagctcaaatatagtgattgatagtttgaaacagctaaagatcaccctttntgttgcagatatgccatattccttgggtgagcaccanatcacattgagaatttctaagagacttatgtatttctgttgactaagttcatgaccac

SEQ ID NO: 36572 - DNA, 486 bp, Oryza sativa
  unsure (1)..(486): unsure at all n locations
tatggataagatggacccacaagctaggtgtaactgtcctggatactgttttaactaccacaaccgncataaggacccaccagtcagtgacccagagaagtgtggaggccttctgggccagcccacgttcggccaaaccctggctgcgtctgctcaggttggctctgcacgtggacgatccggatggcttgctgattggcggtgcaagggcaaaatggacaattcgcatggctacaaccatcataccgaccctataaaaggaggagctcacttcattctcaacatactcaagcaagttcaagattcctcttcatactctattntagtagntttagtgctaagtggagtagaatagaatagtcctcggagtcttcggaagagttccggatgctctagtagctttatattctcttccgnatactgtgggattaataaatacttcttatattctcagtactttacctagtatgaatactactcttactt

SEQ ID NO: 36573 - DNA, 278 bp, Oryza sativa
  unsure (1)..(278): unsure at all n locations
actcagctacattatctgacagggagctgngttcttgtttattttttcttgctctgaagaaacagggcaaatattctggtttgatcaacaactctgttctgcagtgtggcaatggcaacttctctcggcagattgccctggtttttcagaagcagagttatgcaggagccaggagacgtttcttcaggtgtcataccatcctaaatactgaaagttntcctagaagaagcatctatacagtcacacccactattcagatctatggaagctattgagga

SEQ ID NO: 36574 - DNA, 367 bp, Oryza sativa
agcaccacacatgttagactttacttatcttctattgattgggaaattagtaaatatagctctagattatcccaccgaaccagctgtggtgaggtggcagcaagcccttatccaaccggcatgcgagctggtgagtcacttagctttcattaaaaattcacacatatattagcctcggtttggtcgtgcagatcaacacaggcagcaagcagttgcagtagtagtagcaacagcaagagcacagccatggcgcagaagcctcagccgcaacagcagtagcagcaagcagttcgtccggaaaaccacctcaaaagagagaaatggcagagcagtagctagtagtcctgcaccacagtcacaccatatc

SEQ ID NO: 36575 - DNA, 416 bp, Oryza sativa
  unsure (1)..(416): unsure at all n locations
acacaanaaactcagcttgacgctaccctacctggcgcgccactgtcaaacttattttgttataataaagggggtggcttcagctagaaagtgatgggttggagacaaagatcatacacgttcaagccttcctataatacaagaataccctactcctgtgcggcgatgaatactccgagtggattattgactgtatgattctggaaaaatcaacatatgcccctagatgcgcccggaccccccttatatattggaaggagtgcggattacaaaagataatctatattcctcacggaatatgaagatagaggtaacatactgtcgtaacccgactaagtctcatggtgtttcctgatacaccatgtaagatacacaacccgagatacagataagatattctatctacattatggatc

SEQ ID NO: 36576 - DNA, 463 bp, Oryza sativa
  unsure (1)..(463): unsure at all n locations
ctcagcttttggttgattgggctgaccgactgcagcacgctgctgtgctctctctttcgatcaagagctctatctattgaaganaaagacaatctgctcattattactccacgcgaatgacagaaatgacgatgaaacttcacgggatgacagggtccgcttctttcctcgaccctctccgactcctctcttcttccctcatgcctagtccacatcgaccacactcatctctacttccatccctccctccctctccttctttccctctcttcatcccacctactccggcctcgtctcatcctctctttcctactctcttctctctctcctccgtcttggatatttcatccttctctcttctactctatcgtctctcttcttctctttttctcttcccccacctttgcttataccactcttttctctcttctctcctccttcctaacctccttctttcttcccc

SEQ ID NO: 36577 - DNA, 392 bp, Oryza sativa
  unsure (1)..(392): unsure at all n locations
tcattctccanaagagagacttgtggaatatcagcaatattattctcatcattctctagatcaaaatcattaggaggaccacaaagacctttataattagtggtaatatgcgcctttaaattcgcatcaccatttattacttggtcaccatcatgcaattgaaaagttctcatttttctatgtttaccatttgcaactaaatgaaaatactctgtattagaatcaccttccacaatatcttntgttctatccctctgataccactttatttcctcttcccttagaaacgaagataacctattcctataaaaccatctaatatcaatatccttctgagtcaaaagaaatgttccgcctttttatcaagcaagtccacctatttaaaatctctt

SEQ ID NO: 36578 - DNA, 424 bp, Oryza sativa
  unsure (1)..(424): unsure at all n locations
atgtgagcataatttacaactggtgttcattactatctctctaattaantaatgcccctctctggctctataatcctgtaccctctgtggctctataatcctgtagagccgatccgtcccaaataaatatatctgataccggatgtgatatatatgacaaatatgcctattcagattcgtagtattagagnggcacttttttactacatcggttaattttgggacggatgaacccatttcattntaatttgctcgttattctcaatcaactatcattctctggcaacaataaattgagtatgtcccaggcggaacatcaaacgcacaaaactatatagctcgaaccacggatgtgaatagaagaatggcgtgtggacatatatatacttatattatcttacagcagtattcaattggatgttct

SEQ ID NO: 36579 - DNA, 484 bp, Oryza sativa
  unsure (1)..(484): unsure at all n locations
agatcagacccaagatntgtctagctggctgctccagactggatgataataattggctccatatagctagctagcttctactgaacatgctaagctagcaagaacaccctacaacacctggacaactggatatcagattttattgattgaattaaagacaaattaagaagttggaagagactaaccattcattatatatatatntttagataataaccattcattatatatgttgatgatgcaaagaaagaactccttattagtctctcacacctgttcatcttcagatcttggcttgctagctcatgtgatcttcacacctggttcatcctcagttcttgactcttgctcatttgatctccaattaattcatggatgctcagctcctaaacaaaacatctagatctgatcgttctgcaagattaaatctgcacagaagactaataaatttgatgtagcctacaccacattattatgaatcaat

SEQ ID NO: 36580 - DNA, 321 bp, Oryza sativa
cgatagcgatgcatgtggtctgtttcttttgttatagaaccacacctatcagaaggaaatgcattcttcgctttcatagaccatctacctgctatgcagaaggtctgaatggtgtctaactttaaataatttcagaactgcgaataaatgattgcatggaatgtattcgcactccatttttctacaatggcagcagaagctaaccaacaatgcttcctcaaacatgcctggcaaaatgacaacaccattcttgtcatcatttgcaaacatacctgacacaattgatctccttatatgatctataaccttccactacatgcc

SEQ ID NO: 36581 - DNA, 394 bp, Oryza sativa
  unsure (1)..(394): unsure at all n locations
catcatgagggacacgtggcatgcactcactcctcctcttcagctncactcgaggaaggactaccacaacaataattacaggctagttggaggcacatgaaacccataggaggatgtctaccagataagtagatgtagcctatgaaatgtacctttatcccatctcttctgtacaatcattttggtaccacctggagtacataagtggaggaccaagaccatgagaaggggttgtgggaattctagcttgaatctatgctaagaatagcacataacacacacaggagtagggtattacgccccctaatagcccgaacatgtctaaattatatgttcatttcctttcccattccaaagtagctcataggtgtacattgactagctgaccaaaaca

SEQ ID NO: 36582 - DNA, 162 bp, Oryza sativa
  unsure (1)..(162): unsure at all n locations
cacccgatggggatgccagtgccgagatcaataagatgtgttatatgctagtactgaaatctcttatgaactaaacaacggtactggtaatattcatatccgggaagaataatacatcgaacttgntatgaaaagtacagttaaacaaaaccaaatgagcta

SEQ ID NO: 36583 - DNA, 366 bp, Oryza sativa
  unsure (1)..(366): unsure at all n locations
gcttgacacacctncaccacccgaagcaaccattgtcatcatcgattcttagccctaagcaaccatcgccgctgctagaaaccagctgtgccttcgcccagtggtggatccatagtgtaagcattggtgtcagcggacaccaatgacttcttactaatctctttgctaatgcactctagagacaagaattactctcttatatatatatattgacaccaccatatttcagtaatgatcccaatgactctagtttctggatccgcccctgccttcgcctctcgtcgctgccactctgaggataggagtgggatgagggagaatggagagtatacatgacttatagaattgacgagactcagacaccac

SEQ ID NO: 36584 - DNA, 354 bp, Oryza sativa
  unsure (1)..(354): unsure at all n locations
tctgtatcgctgatagcanacacatatggtctgtgttcaacatcacacattataatgtgccgcaaaaaccatagccagcttgatgtgttctcgctttcaacaaatgcaaaagcaacaggaacgacatggctatccgcgtcgactccgatcgcggttagaaatgttcctctgtacttgcctgtcatgaaagtgccatcaacacagagcaaaggaatgccatttctaaaggcctctatcatgcacccaaatgaccagaaaacccgacgaagaacattcttcccatatttcattacctcatcgagaatagccatgtgtgtgnccgggtttcttgtctgatcaccttcaatagtgggg

SEQ ID NO: 36585 - DNA, 386 bp, Oryza sativa
ataaaactaagctacacagatgcggtttctttcatgccacggccctaatctatctttggatgtgaatgatggctcacttgcgttggcctgattcttacataattgatacggcctgctgaacattatgaataattctatctaccaaacagtggtagaggtatgtgcttctccctttccatcattttacctcaattgcaactcggcgtgtccatgcacaactgccaatgagcttaaggatagctcaagaaatgtgcattgcagtgttcagacacaatgtgtatgtttccaatgtcacccattctaaatacagccagcttctacacactctctgtgtatacagctacataactgaaaagccataaagtagcactatagtattttgttat

SEQ ID NO: 36586 - DNA, 257 bp, Oryza sativa
  unsure (1)..(257): unsure at all n locations
tgcatgnngnnagagagnaactagnataagcnagctttatctaaacaatattgcatctaacaacttaaccagtacttggtgggctatagatgacggcaactattactaattcggtgagctaacaactcatattagtattgcaacctgggctctcatcactagttgtcaaacacgtgagcacgggcccatttagtatttctcctggcacagaagatatcagttaaaacactgctcaaaatggacattaagtgggaaaa

SEQ ID NO: 36587 - DNA, 259 bp, Oryza sativa
  unsure (1)..(259): unsure at all n locations
ctctctaaaagattaatgtaaagttctctctgttaatctgcaagngcacatggaacttcaacccacttctttactggcatagaatctgttagaacatcaaatttcattctccgcaacatcctagcaaaaacaagaaacttaagatccgcgttcaattgtttttaatacccttctttaataatgaaattggtcgaacaaacctttcggccaacccggcaaaaaatatccgtgtcaagatattaacatatatgtacttatt

SEQ ID NO: 36588 - DNA, 264 bp, Oryza sativa
gcacttcacgtacgtacaccagataatcataaatcttaccatacagagaggtaatcgcacggacatagcattgtcgcatatatcagaacatctcgctggatatgaaggttcagaatatatattacttctttctaacgagattagcaacacatccattcagccggcgcatggagatgatgggcgcgcacgagaggatgaaatgaagcatcagaggctaaccataccggagggcaagacatggcacggcacacgggcgtacgtgat

SEQ ID NO: 36589 - DNA, 384 bp, Oryza sativa
  unsure (1)..(384): unsure at all n locations
gcctgcatcatggcgcacggtctcctcaaatgctcgtcctcttatgtagctgactgtccncacagttgcctttctgtcgcttgcagacaacatgcttcaaacgaaaatgcagggtgaaatgcatcatctaaccccagggtttcagcaatctgctgcagaattatgcctgctaattcttgttaagatactgatttttgcctgctaatttaatcatgttagttatctctgacagtatgcagatagattagtaggaggagattaacaattttttttctttttaaaactagaagtattctgtcggtgcttggcttgttcgattagtgtggtcacctaactagtaaacagattgtggctcatgtagctctgtctgaatctcatacaagc

SEQ ID NO: 36590 - DNA, 252 bp, Oryza sativa
ctaagcttaggctcgcagagaacaatcactaatgagccagccgccgtatgtttatctattacataactcaaaccgtcggcacgctgatctgagcacagaagcgactgacgcatgcaacgtgcggcgacaaggagagcccaacacagaaccaccaaggatggggggcgcacacagagcatgctgggctgcgcgctgctgctgcgcaagcgtgcctacagggagacacacgcgtgatagatctggcagccccaa

SEQ ID NO: 36591 - DNA, 361 bp, Oryza sativa
  unsure (1)..(361): unsure at all n locations
actatgtagaatatcctgactctgtatagttatatgcatgtctatataacatacgaagagcatgctgcccatgactgtgacttgtggagtgaaccaaatcctcattgaagtggatatttccattagaangggatcgtacaaggtcggcagtaccccctgtgaatactccaccaatatgagaagttcttaatgttagttgagtccctgcctccccaatagattgacccgcaattcacctacagctttcccctattcgaccagatcgccatgagtggaactccgaccataacatagttgacagatccaagatgtgctccggcaagtacagggggttctaatatatattggttgtcttcaaatg

SEQ ID NO: 36592 - DNA, 319 bp, Oryza sativa
  unsure (1)..(319): unsure at all n locations
agaagaagtcttatgtggagtcctggcttataccccagttgatctcctgtgaagatggagccgtaggcccgcaagtccgctgctgtttatattttgttgtcacgcctgaggtgcctttgtaataatgtanatattatcgatataataaagatgtgtctcttatatcatgtttgtgtggtgtacccacgcttttcctgggacggtgattaatacattaacgttctggaaaaggcaattttctcggtcgccacaggcatgaggccctctanggggcatgagcacatatgatcctcagatctataatacacccggcagattc

SEQ ID NO: 36593 - DNA, 270 bp, Oryza sativa
  unsure (1)..(270): unsure at all n locations
tactaagcttacacctccatgggcanaggtgtgcgctgcatattccttttctttttttgtgtcactagaacgcacatgtaggtcctctaatggagccactgtatataaagtagccccttggcgaacaccacatgctctggtactgtaaacacatttacactgtatcccacgagacattgatatattatgaccagttatgcagaatgtattgcgggcataattacaatatgcaccaattggtagctcagacactaaaaccgcctgagatga

SEQ ID NO: 36594 - DNA, 100 bp, Oryza sativa
tatttgggttatacattaacttgtaacacatggcctatttgggttcctaagcttgtaagccaaaagctgggaagtaaaattaagtatctacgcaagtggg

SEQ ID NO: 36595 - DNA, 214 bp, Oryza sativa
catctctatgttcgcaggctgtgtttgtgcccattgatgtggtatgcctgttggtttccatttttcatgatattatagagaattgcgatattgttgctaattactagacttggaaaatgtgataaccatgctcatttggcttgatcaagttagccagaaattgatggttcaaggatattctggtcatgttagatataaaggcggacttgatgtt

SEQ ID NO: 36596 - DNA, 435 bp, Oryza sativa
  unsure (1)..(435): unsure at all n locations
tgtgatgagaataaagncttgtctaaggatggacaagacctctgtatatacatggttcaaccggatggtcacaagttgtgatctctgctctagctctaccacaacatggatggcgctaggcataggcatcatgtagctaagaatgttttcttagtcttttccccgccttggtggttggtatagaccggatatgttagatatgcgccgtactatcaagaggggtctatgaagcgagcttgtgcatgatcttgtgccatattatntcatatgcatctacgtgccttttgtgggcttggctaaccaagagtgatgaatttctcaagtcctaaccaagagagaagtggcatttctataaggtgagtgacatctgtgggatgtccgtggaatctttgagaggacccttaatcttgcttaattggttcttgaagatattat

SEQ ID NO: 36597 - DNA, 391 bp, Oryza sativa
  unsure (1)..(391): unsure at all n locations
ntgagctatatctgccaagtccatatcagctccaccgggagaatgatgtactgacaatgccggtccacggngagcctcaattgatagcttacccttgggaggtgtaagctccgtcggtcgacttggacgaggagtcatcttcacaactatgtcttctttgggccattgtatgaacgtcttgcgcgcatcgcccaaagtcatgatttcatcatttgggggcacgggcagcggatactctgaccaggtgtcctttactgtatcgatggacaccttggcatactccagctagcaggtctgcgccgtggaccttgtctgttaccgagggcttgaaagccatgctctcagcgacttcatgagcgaaagttggtggactctcgctagaagacacact

SEQ ID NO: 36598 - DNA, 423 bp, Oryza sativa
  unsure (1)..(423): unsure at all n locations
actcagcttaggtcgtcatggataataagatatctatttgcacttacaggtgatcgatatgtgggctcaccttgtcagggtactatatgtaccactttttggagagtgtaagctaggaaggtagattgggacgcgtctaatcttgccacccttggaggattgatctctctttagaaaaccaaaatagacatgtactagctactttcanaatataagacgtactttgtctcattagaacaagactaggtagcaatgacctataattaattactctggtacgatctaataaatatatacgtagataatattaaattggtagatccgatcaccaacagtcttcttatgataagtttctagaatctatcaataactcttgataaatgtatcccatgaataaagcatctatatttaacagttatattt

SEQ ID NO: 36599 - DNA, 316 bp, Oryza sativa
  unsure (1)..(316): unsure at all n locations
agctttagagcaatggtacatatttcagaacatactgtatcttgatgttctcgaatntatcggagtcatcttgaggatgtcatgtttctttgaaatattgtttgaacttatttcaattttttcttttgaaaatataatgttcatntttttcttggaaatatataactcgtgagtttttttacaagaatagacatttgccaataattggtaatattgtcgacgagatcgcgtgtatacaatgcgaagntgcgagttcgcgctggtgggatgcgaattggggcgacaagatcacggaggtcagtgcatactgctgtgt

SEQ ID NO: 36600 - DNA, 412 bp, Oryza sativa
  unsure (1)..(412): unsure at all n locations
acctataaaactcagcttncatattntaacccgatcaccaatcttcttgtctgagtatananatacgcctcaccagtgagtcagccaaggctcgccattgatgagtgatgatggatggctcanaaactcaagtgctgcagaatacttggctcaaggatagcattgaggactggtcatgtactatgagacaacagagacaataactcttcctacgcctatcaagaaagagaggagaccttttctaccattcataatcaatgatatatatagggcatcgaatgcatgtcctgtcacccaaagaattcaaaacaaattatccttactaccaacagtgccttccacgaatccagacacagaggagccgctgcacctcacaaatgaacaaggagttgtctctctatccctttttcat

SEQ ID NO: 36601 - DNA, 399 bp, Oryza sativa
  unsure (1)..(399): unsure at all n locations
ttgttttcaatacacanggagacgtgactattcacacaactatgagcgcgacattaacctcagaataaaataaaatgggtggtcatagcacaaataagccacaatgcttaaatgcaagcaaatattttcttttcacaattaagtaagcataagttcatacaaaattacaaaaattgccatttcagaagtaaaatatagctttctactcttaagagaagattcaacaagagaaactttgttattgaagaaatgattcaacgaaaggacgggaaatgaaacgtcaacggagaaacctattaacgtttgataaaaaaagccgcaaggtttatatgctagcacatattttcctctacaaacaacatagattctaacacattttggtatttacattctaaacta

SEQ ID NO: 36602 - DNA, 364 bp, Oryza sativa
  unsure (1)..(364): unsure at all n locations
tctgtgtattcactctacagacttctatgctgnagctnttgacactgtattctctcttctgccatcaaaaatctgcacttctcttttaccactcctttgttggtgcccatctctcttctgcctttgccatccagtcaactctagttgattacaacgcccttacataaatgaaaaatcattgaaaatcccagcaatacaattntaagttgggcaaaatttgacagctaacccagattgactagatggcaatggcaaaagatgcatactaatggagtaatgacataaaggagagaagtgtgattatttttatggcacaagagagaacatggtattattggtgtgaaaatggcaaaagtaatttctc

SEQ ID NO: 36603 - DNA, 472 bp, Oryza sativa
  unsure (1)..(472): unsure at all n locations
ctagtggcctagtcatctttaaataggcttattatattgtctcgcanattagttgtggtctgtgtaattagttattttttagcttatatttaatattggtgtttaaacgtttgatgtggtagggtgtaaaattatgggatgggatctaaacaggcccttagttcatactacaacatggtaacttgcttcaagtacgcgtaggcaggtgagatcgtacacaaatgataaacactagccatgtatagctcttttccctagcattaattgtgcatcaccacccatattgtatacttctctctgtcccaaaatataacaacttttatcactcacgatttgttcaaatataataactctttcaccaatattcttttcccaacaaatcgcacgcctccaacattcacttttttcacctactttccttctaaccaatcacatatcttaatatttaatctctcatgttcttataccgtgt

SEQ ID NO: 36604 - DNA, 449 bp, Oryza sativa
  unsure (1)..(449): unsure at all n locations
atacaacactcaatcttctacggntcttggtctgtgcccgaggcatcgaggccaaccttcttaatatactagctatagagcggatgcgccccncaagtgagcttanggatgtgcaatgcgtcaccggctgcatggccgccttaagtcgattcatatcgaggctgggagagaaggcactacccctatttaggctcctcanacgccccgggccgttcatctggacagaggaggctgagcgggccttcactcagctgaaggcatacctcagttcttccccagtcctggtcgccccagagccagatgagccgttgctactctatctggcggcaaccccgcaagtggccagcgcggcgttggtcgtggagcgcgactaggacaaccctcactccgcgcattctcaccctatgttaacttgacccgggagagaacaaggacgttatgcccccagc

SEQ ID NO: 36605 - DNA, 408 bp, Oryza sativa
  unsure (1)..(408): unsure at all n locations
tggttcagtgctgngagctactgttgtcaggcatgaacagatatcgtaattntgagtcanatggaacgacgctgaagctgcgcacaccaagaagccgctgtttccgcgacgacgaagtgtcttggacagctgcgacctggtttggtgtgaggtgacggcagatccagtcggcgagcagagagtcctccacggtgcccttggcatagctctgaagcagctttgggacgatgagcttcccgctgtcgttgataccaaccgatgctcggatgtagtctctcattgattcctgaagctcctgccgaacattctcggctgagaaaatcctgacctgtttgacagccaacgcacattttattttggaaatgaggataggcatgaaaatgacagttctnttttgttataatactg

SEQ ID NO: 36606 - DNA, 434 bp, Oryza sativa
  unsure (1)..(434): unsure at all n locations
tactcagctttcattcatgatcatcatggatcaatgttngcttcacctcaattattntagttntaatttcaactgcaatgtacatttacaactagggggagtggagagaanggactcggcgaaataatatgggacgttgtctccaaaggttaaaccgagcgtgccgtggcaagctgcaagttgtcataactgaagggaatataaggccagtggntcctcttgttgctgcannagttgcaactgaatgcaacatcatagttaggaaccatgtgcctatactcccgcattggaagctatacaaggaagaacctgcatctgcgtacgtaatctgttctatgaaactaaaggacatgcatctctgtccttccacattagtctcaatagaagaccattgttcgttatttagccataaatactgaatgaattctttctat

SEQ ID NO: 36607 - DNA, 481 bp, Oryza sativa
  unsure (1)..(481): unsure at all n locations
agctnttactggcanaagttatggtgtattttgttatgaatatctcgtagagacatgtaattaattntatctggctgttttataatgaatagtagttggtagtttgacaggttgagtcccagtttcaatttagtactgcttgcagagttaaattcattaagatataattatatatttagcttcttgattctggctaggtgctaaacaagaagaggggaaatacaaacacacggtggatctaccaaagacaacttttggcttgagagctaattctgttgtgcgggagccggagctccagaagttgtgggaggagaaccaggtgctcaagagggtatcaganaggacactgtggtgagtatttcttcgagtaaagctaaaagtaaaattaanaattacctgacttttgttggtttcttgctggtggattaggctacatttgttctccatgaatggtcctcttatgctaatggtgatcttcata

SEQ ID NO: 36608 - DNA, 405 bp, Oryza sativa
acacaagaaactaagctttgagctgttcctactctcgatacatactgtctttcatatatagattaacagtgaagattagcagagctcataagtaaacaccatattacagcaacagagaacagacaacttgcctgcaaatgctgcatacaacaaactatatctgcttggatgcacttttcttgcatttgagcttcaaagtcatcctgttgtataaaccactaaaagtgtcagctataaactactcatgctagaatgttagtgtatttagttgcaagtatgaaaggacggatggaggttgtacatctaaaggatcttacttcaggaactcagacgtgaaaagattctgtctggtactccacagctcactagcatcattggcacctgatgcagatgcatatattgttg

SEQ ID NO: 36609 - DNA, 463 bp, Oryza sativa
  unsure (1)..(463): unsure at all n locations
gcttcatgcggtgactctgaactgggattaccgtttcatttgcaagtggngnctcctgctgaagtagaaattttcagtagatcagtgtttgtaaagcttaatagtcaccacttgcaaaggtagcataagctgcacaagtatgacccggacaatcgccagggctcagtggctcacccctcgcctgattccctcattgcccgtaagccccggatgaaagaatactttaagtatctagacgaggaggatgaacaagatttttaaatttgcatgtttttagtttatttctatcataatgttatgtttcttcttggttttaataaaaacgagctcaggttttgttctgctagtacgttgagtttacctgtcctgttggtcgattcttgtaccttttggtttggttttcctcgattacttgagtatataaaccacaatgaaactcaagctttatatgacatgtacaagt

SEQ ID NO: 36610 - DNA, 411 bp, Oryza sativa
gatctatctgcgtacctctctgtgcatggatctccttttgtactctaaggggatgccacatatgcggcgagtgctacctacggagacggaaaaacattccctatgttcattacatatcttgtgccttaacccatagactatttgcgcgtcagctgctgcgtggggcccatcagatcatgcggggcgcccttgtcattcgccgtttaatggataatgactgtcgggctgccattcacaccaggaaacaggtacccgggtcaattcagagtggttggaccagctctaaccgggataagaggctgaggagcccctcatcaatatgattggacaggacggagcacgccgcacgccgtctgacacactgacagggcgagggtacacagtcgcccgtccaatcactctaactgggat

SEQ ID NO: 36611 - DNA, 456 bp, Oryza sativa
  unsure (1)..(456): unsure at all n locations
agcttcttgagtaagaatttactctcagagcatgntgtgttccaaagcttgaaatactatcagatcggcttgcgactataatnttactgccatttgcggcacaagttttggaagctgagtacaatcttctccatgccccctcattgatgtctctgattagttcgactatgattagtatcctttctccaccagttgcatggttttgatgcttgattacaccacaatttcgaagagtcaccattgttgcatcttcaagatcatcaacactgaaacacacaatttgaaagaagtggttacgcaccctttcatcattgcaggcatgctcaatcagcgtgctcttccaacattgcttggaccgatgattggcaagacacctggattttgattactacttggattggctttaagcaggagttcatgatgtgctccatctccatctggcgattaaacaagcac

SEQ ID NO: 36612 - DNA, 361 bp, Oryza sativa
  unsure (1)..(361): unsure at all n locations
aaagttntaatggttngagtttaaggggccagnngngccgtgcttataactgggttttgttngtcttctctgaactntgcgatcaggttctactgtgttcatcaatagatgatgttggtcttttgacagtaatctgatatttcatctcatttaataattttgcacaaatatatataaaaatatagtacatgcttaaagtgcctttaaaaataaaccaagtaaagaaaatgaccattacatatgttttaaaataagacagaggttaaacttatgtacanatattaacggtgtgatctactccattcgtcccaaaatataataatttttagcacttcaatttatcctaaaatataacaacttc

SEQ ID NO: 36613 - DNA, 435 bp, Oryza sativa
ggagaagaagtcttacgcggagtcctggcttatacctccattgagcgcctgtgtagatggagccgaatgcccgctattccgctgctgtttatttcttattgtcaggcctgaagtgcctttgtaataatgtaaatattatcgatataataaagatgtgtcttttatatcatgtctgtgtggagtaccccggcttttcctgcgacggggattaatacactatcgttcgggaaaaggcaatattcccggtcgcgacagccatgcaaaaaaaaaaaaaaaggacagctcgatctttagtcccggatgtttaatccgggactatatatagcgactgttagtcccgtattaaactcccagtctggggactggcctaacagggggttaatatagggaagtatgtaggagtgatgatctataacgataaattgagcaaaaaaa

SEQ ID NO: 36614 - DNA, 239 bp, Oryza sativa
  unsure (1)..(239): unsure at all n locations
tggtcacaatcaccgtgttgggcgtctacgtcatctacaccatangcttgcttccgccgccgccgactggtgtttccgccggtcgtctcgtctgctgctgaatggtgccctcgcctctacggctggtttatgccgctactattactgatggactcatcgtcttcaccgccggtcgccttgtctgacgccgactggttcttctactaccgactgggtgttttatttcatcactgcgcatc

SEQ ID NO: 36615 - DNA, 436 bp, Oryza sativa
  unsure (1)..(436): unsure at all n locations
tatcctattctacaatgtctcaattgggttatatgatgttatctctangtatatgttcttatcaaactgctttattccattggatcactcatgcttattcgaaagctttattattcttgggatccggatctgttattcattcaatggaacctctttgtggatattcaccagataaaaatcaaaatatggttcttatgggtggattaagaaaatacattccaattacaataacttgttntttatggggtaccctttctctttgtggtattccacctcttgcttgcttctgggccaaagatgaaatccttagttatagctggttatattcaccctcttttggaataatagcttcttttattgacgattaactgcgttttatatggttcggatatatttacttacttttgatgggtatttgcgtgtcattttcaaatta

SEQ ID NO: 36616 - DNA, 471 bp, Oryza sativa
  unsure (1)..(471): unsure at all n locations
gcttatctcttacgctccacgaatggatcatttataacatcaccggcgggctgcctccgtcgccaccgactggtgtcttcgcctacacggctggcctattatgccgccgctggtgggcgtctacgacttcaccggcggcctgcctccgtcgacgacgactggtgtctccgcctgcacggctggcctattatgccgccgtctggtgggccgttacgtcttcaccgaccggccgcctcgtctgccgccgactggtgtctccgcctacacggctgacctattatgccgnncgtgttgggcgtctacgtttacaccgactggncacctcgtctgccgccgatggagtctccgcctgcacggctggcctattatgaccgcgtctggtgggcgtctacttttcaccgaccggccgctcgtctggcgccgactgggtgtcccgccttcacggctggcctatatgctcgccgtgttggg

SEQ ID NO: 36617 - DNA, 386 bp, Oryza sativa
gtgccgcctatatgataactgcatatgtcgaaagacgtggttactcaacagtggttggaaggaaacaaagtgtattgaatctttgaattcttcttcttggatccccccattacatggccctaggggacttatttatagccccattacaggttcttactactaagctgtaggttgtacaggggaatttacatgattaccctcacacaagggacatttacaggggtacataatggtataggggctcatgggcccctgatgggccatctggtgatcgccggccctgtaagccttatgcttgatgggcctgaaagggcttcttcgcccttgtggggcgaactagctatggcgaatcgtctttctctcgagatactttaccttgcaccctt

SEQ ID NO: 36618 - DNA, 473 bp, Oryza sativa
  unsure (1)..(473): unsure at all n locations
agcttatgattagttctaagcaaggcacctatcttataataccagtatcgatgtagacacgtcttgcaaggtctttacctttttaaaaaatggtcttttacttggtcattgacttcatcaagtgtatatggagtacttgacgatcgaagtcaatagctagagtccctgatcgacttggaatgcaacagaaacgaacaaatcttattttcagggcatatatataatatattatatatggatgattagataacctaattagtttgaatggattcttatatgctcaagaaaaaaacagtgacatccgcatgaatgttcttaagttgacttgcatatttgactgaatattctctcacatatatacatctcgatcatttattcattaatacatcatgcttcaccaaatatntaaaaanactcagtgcatggctagntatatatgtgtaccaagttagccactcgaatgattctaaata

SEQ ID NO: 36619 - DNA, 132 bp, Oryza sativa
aactaagcgtgataagtgcatggaagagacctggtttcttaatgatgtaagctcttgcctatctgttaagatcaagggtgaaactgtagctgtagaatcactgcctccatggaactctatgacttactaact

SEQ ID NO: 36620 - DNA, 467 bp, Oryza sativa
  unsure (1)..(467): unsure at all n locations
agctntctttatagctatttgntatatcactcattatattttacaaagcagntggtatatcactcggatcatgttatttggaggattcacaccgcatatgctatatattgatatcaagtcacttggttgattacgattatcaaaaccactcgngttggtggattatttattccttgactatatgcttggtttgttcaattaaccacattgtcgggggctacacctattaggtgcatctagtcggtgcacctgactntattttccagccctccacagtcttcagatttggtaaaagtactcgggagaccatgacaaagatgattgaagcactcggcttggagtaatctggttcgagagaagattatcttttcgactgcgaaggtctcaggggctactgtggatattatggtaccccatacccatacggcatggttatccgactagtcataggggataacttatatcta

SEQ ID NO: 36621 - DNA, 369 bp, Oryza sativa
agcttggatacaattgatgttcccgctacttctcctctttcgacggagatgctgatgatggtctttctctgattgtgagtacaccataatgtcgtcaatgaaaaccacaacaaacttattcaagtactccatgaacactctgttcattaagttcatgaagaaggcatgagcattggttagaccgaacgacatcaccgtgaattcaatacagtccataacgcgtggtgaatgcggtcttcgggatatcttcttcacgaatacgcaattggtgatatccggaacgaagatcgattttagaaaagacagtggcgtttttaagctgatcgaacagaatataatctcgggaagagggtacttggttttgatagt

SEQ ID NO: 36622 - DNA, 423 bp, Oryza sativa
  unsure (1)..(423): unsure at all n locations
tcctataatctatgcacatccttcatccggttacgggtctgtgcgggataagttcattttgagcatttgcaacgaccaacatccctcctttctttggcacaacatggactgggctaacccactcactgtatgcggttccatgattggaagcttgggagtctcacagggtttcgcttcctctttgatgaagtcagggacttcattttccaaaagggtctcgggagactcatgagcggtaactgccgttacttcctccgcatactcatcttctgggagagagtctgntaaggcgaacattgcccgcgagaatggaactgaatatttgttttctccccaagttaccttgaggctgtctaatcgaggcgtgtttatgaggagttgctcaattggcagcccaatcagaatgtcaaagtcatggatttc

SEQ ID NO: 36623 - DNA, 462 bp, Oryza sativa
  unsure (1)..(462): unsure at all n locations
agcttatgtgcaaccaagagtcacctgttgatgaaaagcacaggaggagaggaaaagtgactgaattgtccatccctctgccttattggatagaacggaacatgggaagttgtattctgtccgttttttcaatgaaagacatctccaaggagagttcttcgatcccaggtttgataacggttacaaaccatttgtcaagaacagctgcacttatattcggacaggcgaacagttgaagtttaagcactttcaccccaatgccagaatggctcttaataatatggtcaattntactgacagcatagctntccatgtcatccaaactgagtttttcttaatcaaacctatcgttttgttatttaatataaggaatggatagcgtctccagcaacgtagaaatccatggacacacaagcagcacgagcagcatctttcaatggcataagagaatatacatgatgc

SEQ ID NO: 36624 - DNA, 459 bp, Oryza sativa
  unsure (1)..(459): unsure at all n locations
tgtaaagctgaaaacattggatgctactctttctgctctttgtggagaaatatgtagttgatatttgataacctctgcaagggagcatagcaactcaaaacctgcttctataagtatgatacttgattgttaaaattgtgacttacagctagctgatgaacaatttctggactagtatcaatgtgccaatcaggttccagttgccgcacaaaagaggtgcggccattttctgtactacagaagagaacctgccatttgaagaaatgttacataaggtccattgcgaacatccaatggctatacccaaatgaaaaaaaaaacgattaagcagttatatttctgaagtgacctcatcatgcggcttaccttgtcctttatcaatccactgttcgtaaaaagtccagcttcactcanggcagataacaccttttctgcaacattattcagttgtgctgatgt

SEQ ID NO: 36625 - DNA, 470 bp, Oryza sativa
  unsure (1)..(470): unsure at all n locations
agcttggacttaactacaacgaagctaatagttttgtgagctccgtcatgcttctaagaaataagattgtcgcccaccaagatgatccttatcaaaattacactggacccaaggttagataatttttatcatgtntaagattcccacattgtcttagtagcaaactgacttgaacagattattttttgctctattctaagtatactgcattctatttntgtttaggagcaaattggcgtggctaaagccctcttggagaagcttgtgttagactccaagcctgcttacatgataaagctcatcgaagagatccgaaagcttaactggataggaagtcaccacttgttagaagtaaggtataaagttgtacaacaatntaagtcanagtaaaaaatgagtgcaagtangagtactgccttgtttaataattnntaaaaataacagtatgtgttactaanttgctttttgtt

SEQ ID NO: 36626 - DNA, 448 bp, Oryza sativa
tgccaattatctgatgaatacactccaaccgtttatgctcccaatgtgttgcagttgaatcactaatactaccttttccataatgtgttgcagttgatcaagagaattactccccatgatcgattacaaggtgaaaaagaagttgatcttgaatggtatatgaggaaagcatgggcataagctttcctgaaactgcagaactttgtgagggaatcaaagcttacttactaacacacctggtacataagtgttgtgatttgaagtctaaaacagttccactccactaaattaattcttgcagtaagcagaaaatctttgccttgcaacagttagttacaacagctagaaaccaaaaccactcctagcacttacaatacaagtcgtgttcttgtattgtataagctggtacatgttctggtgtgtcttgagatatttttgcatgctttta

SEQ ID NO: 36627 - DNA, 405 bp, Oryza sativa
agcttcggagaagggattatctcttggatgatactatgacatcctacttcatcgttgctggagtggtcatctagctcgagaaaatgcatgccatgtgacacgacggaacctgaacacgacagattattcactgatctccccatactaccctctggtatgagccgcctactaacatgtacttatgaacctaccgtcgcacagaaagaagactaatcatgcgatcatacacccataaagttaccttgtgcccaaaaattagccgtgcgacactgacgcgccctgctggcagacaaaactcaaagatacgctattcttgagtggtataaacataactacacattcatgcatcatgatcgctggcacagtcgtcatgcacacgatgtatatatctgttgggctcacatg

SEQ ID NO: 36628 - DNA, 232 bp, Oryza sativa
gctattcggacctataaatctcagcttgcactgctttctctacgacttgagtctcgaagacttttaccgagctgatgggcctgttgaccacacagatatctctgatgctctgcatttgactcatgatgtatcacccgtcgctgcggaggccaacattcaattattggcagacaggcttggtgtatgtgtgattgatgacaacgaaacacctatatatatgtgtgataagatg

SEQ ID NO: 36629 - DNA, 449 bp, Oryza sativa
  unsure (1)..(449): unsure at all n locations
ccgataagaatgatttagatcgcagtctggatntgtgttctgcctgaatggaggcgctgtgagttggaagaattccaagcaagatacagtggctgattctacaacagaagccgaatatattgccgcttcggaagcagcaaaggaggctgtttggataaagaaatttgtttctcaactaggtgtgatgactagtgcttctagccctatggacctctattgcgataatagtggtgccattgcgcaagccaaggagcctagatcgcatcaaaagtccaaatacattttacggtggtatcacctcattcgcgagatagttggtagaggagatgtgaagaatgcaaaatacattcggatttgaatgttgcagatccgttgataaagccagttccccagcctaagcacgaggccacactanggcaatgggtataagatacattcatgaatgacta

SEQ ID NO: 36630 - DNA, 469 bp, Oryza sativa
  unsure (1)..(469): unsure at all n locations
gcttatcgagtagtatctaggactaactctgtcaccacaatataccaggagtatttctacgtcattgctgagtattatatttctagcaatgtcgttaagaaataccaacaagcatttctggcgccgatgccggggaagattcataatatagattacatgaactaatactttatatttacctctgtataatcattttcctttgcaggcttaccttggttggtttcgcttttggtgagaaaacagggtattgcacgactggtttcaacttgacggaaaacttcaaagaaaatctagaagctttcttccggtgcgtcaggccgcgagtcgttgctccacagaanactctaccgacaaagaaaccagtcgtaccagcgccaccaaccttcaagactatggctgacaagacccttcgcgagtgtgctgctccctctgctgacaatgtgccattgggccacaaatcaacatggga

SEQ ID NO: 36631 - DNA, 455 bp, Oryza sativa
  unsure (1)..(455): unsure at all n locations
gcttcgcgcactctattatttgcgggacaagaaagaaagtagtcaagccatggatatcgctgcaagactatcagcgattcctcaagaaatcgctgatatagaaaacactaagctcgaactagagcaaatgctgggtgtcctcggggagcctttatttctggctttcgtcgatccagcagtgatcatacaagatgatatagttcttgttcagaaccaaatccgcattcttgaaaacaggaagaaggcgctgctggaagaacagcaatcgctcatcgtgatggctgcccaccacggtgactaanatagaanaaggtagttactcgtctatctcaacgtaaatgaacaagtcacttaagggcttctactactactgctccttcttacttattttccttaaatcataatatctgactatcatactcgtatataatgaaataaaacatgggtgtcaactt

SEQ ID NO: 36632 - DNA, 348 bp, Oryza sativa
gcttccctgctccggattctcactatgtgtgtcactgaagccacaatgcgggctgtttaccaatatttgatgaccgtcatgtagcctcggctaggacatctctatcttcttcttatattcactccctagacgcaaactgaacattctgttactatcgcgtcctagatgatcaatgaattcaagtggggaatctccacccccccccccggtgatactcgttatttctactgatatcgaataaaaaaccattcttcaccaccaggcgtgaaactagtaccatatgtgactctactaatacgaatactactactctatcatgttaatttaacaccactaaactcttatcat

SEQ ID NO: 36633 - DNA, 394 bp, Oryza sativa
  unsure (1)..(394): unsure at all n locations
agaattctgcatatggcaagnttttggcctaagntccaccaaaatcaagagcgcatgctctcaacatatcttccgagatttgattgactcgctcggtctgaccattaatttgcgagtgataggccgtgctgaaatttaaacgagtccccaattcttcctgcagcttctgccagaattntgaggtgaactgactccctcgatcaaatacaatctttttgggtactccatgtaaacacatgattctcgagaggtagagctccgccaacctctttgccgtatacgtggtatgtacggtatgaagtgagcaaccttagtgagtcgatccacgactacccagattgaatcgtgacccgatgatgttcgggtagtcctgttataaaggtcattccaatct

SEQ ID NO: 36634 - DNA, 421 bp, Oryza sativa
gcttatcgactatcatttacagaattaactggtttattctgttcttggttgttgcaggataaaaaccaactgcatgcattgaactcgaaagcaagatttggacatgcactagagtgaagcaactctttcaggccagtgtgtttttttccatcaacactatccatggctgcccccgagctccaccgtgcttacgctctgagagagaatagacgctctgagagaagagaaagagagcagagagaagagaggagaaagatgtttacacccaaatttggcacctatggacgaaataggggaaaattgccaaagtttggaaagtaccgggtttccttcacagggccggtcaaaccgcacgtatatgggcggtctgaccggctagtagaaccggtctgaccgtatgtatgtgggcggtcagaccggc

SEQ ID NO: 36635 - DNA, 478 bp, Oryza sativa
  unsure (1)..(478): unsure at all n locations
agctntatcaatatccaacaatcatatgcataattattactgtactttaaaatagtcaaatcaaattgtacctcaaacatgagatcctcaatttgtgagcaatacaagtttgctgccatcattcttgcaagcaagcagacatcccttgtaacctctggtgtgactcttggatttcctgtaaaggtcatttgaaatttagagtgcatacagacatggtatctcctaagtggtagtaatttaaagacaacatctaaagaggattcattgtgctgtaattatttataaggcatagtgctaagaaccaacaacaaaatagatatgtttctcaccatcacgatctcctccatccaagacgagaactgaataagaggagcatttgtaggaacacgctcgtcgataccgatgttcttcaatgagtatccacacggcgcaagaactttggaacacccttccatattgnttcatggaagtagctcat

SEQ ID NO: 36636 - DNA, 357 bp, Oryza sativa
aacgaccaccgggttcgccagccactccggatggatgatctcacggatgaatccggcctccagaagtctcgccacctcctcgcggatgaagacttgacgttccggggcctgccgccgcactttctgccggaccggcctcgcgcccggccgcacggcgagacggtgctcaatcacctccctgggaaccccgggcatgtccgctggtctccatgcgaagacgtcagcgtttgcccgcaggaaggagacgagcgcgtcttcctatttgccatccaggagaccaccgatccgtgtggtcttggatgggccgtcgcccaaggcaacctccttgaccgggacctcgtcgcatgtagcgatccg

SEQ ID NO: 36637 - DNA, 382 bp, Oryza sativa
  unsure (1)..(382): unsure at all n locations
tattggtttgctatcacaaactctgcttaagtgcttagatattgctctccctcccggntnctcacttaatcacacatcagatgacatcgagcttcgctgtgctttatactctttctttctactataacactaatatgtcaataatatacataaattagtggttgaaggattcttaattgtagaaatatctttttattagggaaggttagtttcaaaactgcaattatgtagaaacttcaggtggtgaaaatgatatggtgtcctatttggtgatggatggatgagttagccaagcctcacgtatatacgttaatatattttgcctctttggtataactctggatccaatattctttggagctaggatttttagctctacaaa

SEQ ID NO: 36638 - DNA, 299 bp, Oryza sativa
tctttcttcttcattttcctctcccttccttcttttttatccttctttttctttatccctcctctttggtccccctgtataatctcttgccagccactggctttgttactttcatgaccaccattaataccatggtaacaaggtagagtctctctaccttttgcggtcaaaaaaaaaaacaatgagcagaagaaattaagatcaatcatactatcaacacaatacatgcagtcacttcatccaaacaagaaaaattcagaacctgaattatgcgcccatggacgtagcatagttctcta

SEQ ID NO: 36639 - DNA, 393 bp, Oryza sativa
  unsure (1)..(393): unsure at all n locations
acggatcctncaccaccaccacctcgatcgtcaaatcctctagcttgtcttttggttntgattgacgagacgagcatgtccggctccgaccatctcttggacgccctcctcgccgcncgccgcgcnncgcctttccaccttcaccttccctttcccggatccaatcccaagccccactactctgatgacctccatcttcttggagttggagtagctcatttcatccacagatccccccccttcacaactagggcatggcttcgccgaaccaaacacccaccaccaccaccaccaggtcaccaccgcaccagctccttctctgcattggcattgccttncataacctgctggacaaccatcttcttcaccattccacaccctactcatncatgc

SEQ ID NO: 36640 - DNA, 443 bp, Oryza sativa
  unsure (1)..(443): unsure at all n locations
ntataatacaagcatgttaaattatcatcccacataatttacacaatatttcaacacacattactttcaattttgaattacatatcaatctatatactatttaaattatcataaaccacatcaacttaagtggtttatagcctttccaatgatcaatcataaatacaaattctataagcttacatcatctagttatattacacgttatttctactattatcatattaaactcttgcaacaacccatggggtttcatctagtatatcaaatgagcgtcttaaaagaattttgtccaccactagaattttgtcaactgaaatactaaaccctgngggtgtgactgttagaaccaaatcaatctacttctttggctagttngtgcaacagttttatntgacgtgacatgttgacttgaccaccatagctatgtggacaattntatt

SEQ ID NO: 36641 - DNA, 473 bp, Oryza sativa
  unsure (1)..(473): unsure at all n locations
gcttggcatacaattgatgttcccgcaacttttccaacaccagacggagatggtgctgatggtcttcctctgattgtgagtatatcagaatgtcatcgatgaaaaccacaacaaacttatccaagtattccatgaacactttgttcatcaagttcatgaagaaggcaggagcattggtcaagccgaacgacatcaccgtgaattcatacaacccgtatcgcgtggtgaatgcggtcttcggaatatcttcttcacgaatacgtaattggtgatatccggaacgaagatcaatcttggagaatacagtggcacctttaagctgatcgaacagatcatcgtccggggaagaagggtacttgttttgatggtgacttcattgagagctctgtagtcgacgcacatnctcttcgtttgctttcttctccacanaaatcacaggagcaccccatggngaagtactcggacgtatgtac

SEQ ID NO: 36642 - DNA, 449 bp, Oryza sativa
  unsure (1)..(449): unsure at all n locations
tccttctgatggttggttgcagcggatgacggtcttcttcttggtatcgccctccggaggttgattgcccttggctcggcctggagtangtcggggagagacacaactccttccatctacgacaattctttgctgaggctgtcgttgcagagaatggttgctaagatttattgccgagtcaggtgcagcaggtggagcattggtgcattgtttctgctatgggttctgattaacacgaggccttacgggtacggcgtttgctccagtgaccacaatacgattggaatgtctgcttcgtgtaaattggcgaaaatgtggaggtcggngacagtttttggagtaatgcccttctccactgcagttgtgacaaacaataactttcttacactcgggttcttcatcttgtacttgatttctcagctgctgattggagcttctaaaggtacaac

SEQ ID NO: 36643 - DNA, 379 bp, Oryza sativa
  unsure (1)..(379): unsure at all n locations
tgatcttgtcaactaagacatcaaactgtgcttgagacttgatcttgcggtctacatcaacagattcacattaatgaatcagtatatagaagataatggcttttgaagtgtcgattattggtaccttcaacctcctttaaagccgaatccctctgtcttgccagctcaaccttgtcattntccagaagttggatctgcttctctagttgagatatcttggcagcttgcactacattaacttcggttaatcaagattacagagataacagcacanatcagttgggcagagtttgcgccgaacctttgatgagccactcagttcgaaattgactcctgaagctcagcaatccgatccctcagatcatgttcattcttcttg

SEQ ID NO: 36644 - DNA, 456 bp, Oryza sativa
  unsure (1)..(456): unsure at all n locations
tactacgcttagatcttgcacgaagtgtcatggtatatgattgaatttcgtatcatcaagctataacacacagatgaattgtccaatccaggaagaacttattccaacccttttccactactctttgttaccgaccatatagccataatgttattctacagtacgtatggtatgtcccatagacatatataatgacctgaaaagatgccaaaacctggcgcttctagtggacttgtcgtcattgatgatcttagagcatcccaagagcatgactacttgtcatcaaagtgttttccttcttaaactttaatttataaataaactatctagaatgataagtattatagagtcaatagagtatttaactcacgagacgttttacggtggttgcatttaaaaataatanagatctaacactccancatanaatgtattaagtattgatatatatactta

SEQ ID NO: 36645 - DNA, 361 bp, Oryza sativa
  unsure (1)..(361): unsure at all n locations
agctntattatatangaattgaaactgcaattgttctgatctgaattaaaacacttaanaagcaagcaaaaatccttattaagacagccatatcataggcacatgatatcgaccgtcgactgaccccaaacaagcaacctanacacacaaactaacaagcagaagctagacagtcgataaactaatggaaaacgagcctaatgctcggaacggctcctgcggtcggtggagtcgaaggcgtcctcctgctcgtcaccaggtccctctgagcgactcccggagcctggcagataagtctcgccgctgcccggctctgagccactgaagctactactgcgagatcgcggctgccactgggagt

SEQ ID NO: 36646 - DNA, 390 bp, Oryza sativa
tcacgcctgtgcttgccccgtttctgccgagcaacgtgtcgtcgtgccctcgtgaaagcgccgtactcttatcctagcaaataaaaggcacactgttttttttaacaaaaatttgtgtgtacataactatcttttgataaaaatggacatatgagatttagccatatcattaagagtacattttttactaatgatttaatctgtgagtaaaatttttcattggctgcaccctcatacacaggaaccatatattgataaaaaaagtaaatttcagccacatcaatgcctcagaaaatttgacattttgatccaatctcaacttacactatagatggtaagtcatccagccgcaagtttccagcagtgatagataggggtggaaacgagcct

SEQ ID NO: 36647 - DNA, 387 bp, Oryza sativa
  unsure (1)..(387): unsure at all n locations
agcttcangaagagatgggttctaagttgaatttcagtatcgcttatcatccgcagacagacggacaatttggaagggtaaatcagattttggaagacatgttgagagcttgtgcttagacttcggtggaagttgggataagaatctgccttacgcggaattctcatacaacaacagttatcaagctagtcttcaaatggctccttatgaagcattgtatggacggaagtgccatactccgcttttgtgggatcaaacgggagaatgtcaggtttttgggactgatattctgagggaagcagaagagaaggtaaagatcattcaagagagatgcatatagcccagtctcgtcataagagctatgctgacaatcaccgcagggattta

SEQ ID NO: 36648 - DNA, 426 bp, Oryza sativa
  unsure (1)..(426): unsure at all n locations
tatgacatgtgtaaggtaaaatacaattctaacatatctacatcacctcaggttaatgagagtccaaataacttttataaacatttacatgcatttaggatttaggaaagggaaacacatataagacataagtcttgcaaattatctaaaataattcatgcaagataaaatcgtggaaaaattcatgtaggctctacttaatgttggtatttcttaacgacattactagaaatataattcccaacaatgacgtagaaatacttctggtatattatggttacagagttcatccgcaagcgtatggatataccattgtagcatttcacccgagagtattccaagggtatcgtattaaattcatcccgtggagatcatgtagagagaactcaactaataacttatatatnatacttgtgataatcatat

SEQ ID NO: 36649 - DNA, 468 bp, Oryza sativa
  unsure (1)..(468): unsure at all n locations
agcttaatcaatatacatggagtatataggtatcaaatcgatccatatgccagcgacagcgagcgatatactggcaagtttaattactactcatagccagtactgttattactgtacatgtataaatacggccgggatacagctaacctggccataaatatatatattgctgcccgtattcctgtgagatcgatatatattgctgaaaagaaaagaaataaagaatgagtcgtcatcaccagcaaatatgtatgcgtgcgtttaactnttgaattcatgtcgttggcgcaacagaaagaaaatagtccagcaagacgatgaagttgtaaaatttgttgtatccatctacaggtgatggttggcgtcgttccgaaatcaacacgaaagagaagaaaaagganagaaagggtggcgtcattttgagtatatacgtgtaggtggtattgctaactacgacgccagcatcgg

SEQ ID NO: 36650 - DNA, 448 bp, Oryza sativa
  unsure (1)..(448): unsure at all n locations
tacccgcaggcacgccgaacacgcacttgtcggggttttgctttatgcgggcggtgcggagactttcgaaagtttccgctagatccgagagtaaggtctcttggttacgtgtcttcacaaccaagtcatcaacataggcctcaacattacgtcctatttggctacccaaagaaattcgagtagtacgttgaaaagtaggacctgcattctttaacccgaaaggcattgtcgtataacaataagttcctatgggggtaatgaatgcagttttttcctcatcctccctagccatgcgaatctgatgatatccagagtatgcatctagaaaacacaaaaggtcgcaccccgcggtggagtcgacaatctgatctatgcgtggtanggggtaaggggccttaagacatngccttgtaaggtcgggtagtcgatgcacatccgaagcttgccg

SEQ ID NO: 36651 - DNA, 465 bp, Oryza sativa
  unsure (1)..(465): unsure at all n locations
agctntcatggtaacctggaaggggaattagagacagtaagacttcataatgttttcactttcttttattagtaatcattgagacttgatcactacaagcacatcatatctccgttcagtaaatctcatagaagttntgcttcttttctattagccctttttttctgtaagtttcatgaaagtttttcttcttttctaatttgtctcaaataaaaaacgggtatattaatcaggatcctagtaaaattgaagctactccacaagcagatccctccaaagggaaggcaccaatcattggtatgaaattcaacagtgaacaagaggcatatgtttctataatgcctatgctcgagacatgggttntagcattcgaagaagcagttaccattatgtgaaagaatcccataataaagaatcggacattttgttgttctcgtgcaggtactagttccaacttatatttac

SEQ ID NO: 36652 - DNA, 446 bp, Oryza sativa
  unsure (1)..(446): unsure at all n locations
tgcagctgctattgtccgtgatgagattctgctgaacaatctctctaatggctgtccaagttcctcctcaattatggaaaaagctacctgtcaattcgatcaataagctaagttaatcatcctgatgcctccgcagtcctagtaagtataatcttccacaaacatgcatggaatttttacagtacacatgtacctggttaggaaatggaggaacatcatcttgcaagatacagagttcattcatataatcctctcgaataatatcaggcctgttggctaaaacctaacaaaaacaatgggaccaaatgcattaaggactgtaatatacaaaggaagcagcagagatatttggagtgttatcgtcttgggagatttanggatntatcagaaagagaagaatataacctgtcctgctntatgaatgaanggcccaaatcacacagaag

SEQ ID NO: 36653 - DNA, 446 bp, Oryza sativa
  unsure (1)..(446): unsure at all n locations
agcttagccaggtctgcagtagcctccatggtccacctgctccaactattgagccgacggctatcttagccgatgcattgtttaacatttggtatagatagccgagaaggattttgcctaagggaaattgtttctttgatcctaaggcttcggctacaaattgccaattggttgtgggaccacagctggatccacagaagagaaacttttctagccacataagcaagaaagctacgtactcccgaggtgtgacaggccctttgcccatgtatgtcgctacataaccagaccaccctcctatgctnttggtcttgaagtcaaattggttcttggtgttcatactcgtaggttagctgatgaagntacatctaatccagtaatcatgataatgtctatcaaaattggagtcatcngcctttggtaaataagaaagcattgatggtgtt

SEQ ID NO: 36654 - DNA, 386 bp, Oryza sativa
tcttcacgatcaaaaaccttctttgatactcgatcgagacaagagcacttggttatcactaaccgagtgtgaactggcttgactgctcttatagcaatcggcaggaagattgctagcatcttgtgacaatcatgaacattgcacccagagatggtcaaatctttcaaagatacaagttatctgacgttcgctgacaaaccagcctggacttttacactatgcaagcaattacataaatgaatgtctcttccggcatcagcgagtagcaagccggaggaatatcgatcttcacatatggcagctcttttggctgaagctcatgccctacgtccgaattgacgatgtcggctcgggacttcaacccatctttcgtcttactccggaca

SEQ ID NO: 36655 - DNA, 385 bp, Oryza sativa
  unsure (1)..(385): unsure at all n locations
tgtgcattaaacatcagtatccggacagaacagtaacagataagcggtaactcaaagctatcacctgcaacttacagttaaacatttcactaatttttaccacggnttaggtggagttgatgggtggcactctaactgtggtcagcaaagagaatgaaggatcaacattntcatttgttctgccttgcaaaattcctgttaaggaggatcacagtgatgatccagatgatatgcccagttctggtggtgatttcactactagtgatatagaagggtctttcattntcaagccacaagcacggcttatcttttgacatccngagtttcagtaatgaacaacaccaagttgatcggtggaaccaattctatgatctncgaacatact

SEQ ID NO: 36656 - DNA, 466 bp, Oryza sativa
agcttcagctcgcaccattgagattcttctgttcatcctagttggcgaagtgtgcagtctatagtactgtcacaatgtcaacgaatcagtctctgccccacgttcactgattggagtaggtgaatttatcaatttggtaggaaaacgatcatggggataggtgatcagacatttcgaacaacagacgaccacctgcctgatttttgttaaccaacctactcctccattccaaaatataagcgcatcatgattcacagtattaagaaattttttattcaatcctaaattcttatattctgggacgaaggtagtacttcgtattaccttgttaattaatgtttcatctataccacacatgataataagataataaaaaccgaaataactaaaatacccacgctttattaaatcttaatgtaattattttttactttatctatcctaatgcatctattaatttattaca

SEQ ID NO: 36657 - DNA, 403 bp, Oryza sativa
tggtggtgagaagttatttcacaagtatcagctgaaagaacgtgagagttcttggtagagaagattcaaatgccattgcctattgcaggttagtatctacctttctattaactacctgctcttcatttgtttcttattcttataagaaagagaacttctggagaagccctttttgctagaattccacccacaaacaattgtatttcaagttctgattattttgatttatttttttccacatgtggaggcctgtagggtagcattatttatcgacctccttaccttctaagcttcatgccctttgaactttatgctatgcaatgcatgcataatgtactcattactcaacagtaaaaatttactctgataaagtcagctcttgatttccaatccatttgttatg

SEQ ID NO: 36658 - DNA, 466 bp, Oryza sativa
  unsure (1)..(466): unsure at all n locations
cttcttggagtacctctgcccttctacaatcttgcacacctttatacacatttgcattaacaaactgcacacagcatgcacaattcaggtagaggtaaatggatgatgaatcaatacctccatatgtaagtatacagggcgagaatcactgccagactgtaggcagggccaagaagcgtacttcagtctgtaattgtacctatcccagaagtactgaacaacagtcttccttgtcccattatcatcaacaggaaatctaacaacatcaaaccaggcatcagtttggtgaaaaacaagttatgttcatgctatataacagtgaacaagcatgataacaaaatgcaggtcctaaaaaagatgacaaagcactattcttatgacagtnaaattatgtgcacttcaacctttacacatcaattttggtgaacattgtaggacatttacagcattgacagtatggatatca

SEQ ID NO: 36659 - DNA, 473 bp, Oryza sativa
  unsure (1)..(473): unsure at all n locations
gcttgatgtgctgccaacttaattaatttattttataatatataatagcagttctatttctttcaaaatattntgaaggctacttaaggtttaccatttggcttatcctaaggcaaagtggctctgataccaacttgtcacgcccggaatttctatccaaaattccaaacgcttacatgtgtgttaaaccctcgtccaggaatcaaccgaggcacacaataacaaattgataatagagtacaaataaatatctatttaatattcgcaaataagtaattactacagaggtagatagttcctctcaaagaataacattctacgcagcggaaaaataaaacttaacaaactacggaacagctatggcgactccactccacaagcatcttaaccagaacaagctcaatccttcaatcatcaccttcgctgaaatactcctcttctgatgaatgaatattgcaagaatgagcatatga

SEQ ID NO: 36660 - DNA, 457 bp, Oryza sativa
  unsure (1)..(457): unsure at all n locations
tctctatgaagggcatggccacggtgtaggagacttcgttaccatcgtcaaattcttgggacgccttaggtctagtattgatctcgtttttctcccagagcgtcacgttgaaccgtggattttcaatagggcgacggtgagaggtgcggctaccgtctggtgaattaaataagaacatatatatgaacaaacattaaataccagtcgaaatttcattctaataataagatttagtagaataaagactataattaattatggctgagatttaaattattgaaggcgtgtgtacttaccgagtgcgctggggatggcgataaagctgccggcgacgacngagagcggcgcgaagaagagccagacgagcatgagaacggcaacgtagagggatatacagcggcgttgcatggccgctagctgcatatatatgtgtacgtgcgatcttattagtacgtga

SEQ ID NO: 36661 - DNA, 467 bp, Oryza sativa
  unsure (1)..(467): unsure at all n locations
agcttctttatagctattatgctatgngaattttttattatgtttcaactntacgnnacactcatcatatttacaaagcagtcggtatatcacttggatcatattattcagggattcacaccgcatatgctacatattaatattaagtcgcttggttgactacaattatcgaaactactcggtgcatctagtcgatgcacctgactttattttttcagccctccacagtcttcagatttggtaaaaatactcgggagaccatggcaaagatgattgaagtactcggttttggagtaatctatgtcgagagaagaatatcntttcgactgtgaacgctcaagggctactgtggagattatgggtaccccatacccacacggcatggttatccgactaagtatagggataacttatatatatgaaatattgaacagattatgacttgngtattacgtttccctgtatat

SEQ ID NO: 36662 - DNA, 465 bp, Oryza sativa
  unsure (1)..(465): unsure at all n locations
cgatgacggaaggagcagcaaggccttgccggagatcaaaacgcgacggctatcttcgagttgacggcgacgacgggcttcccggggtcttcgacgcaagggaaccggctgccgggcttgctcttgaccttgccgagccgagagaggtggcggcacaggagggcgacgaccgatgcgacggcgaggtgcggctggaccagcggccggcggcggcgaagcttggattcacgtcggtgaggtacttccagacgtcttcggcgacggggaagtggaggccggtcttcttctcctcctcgtgaacccaaccgcggcagcggcgaccgaaggcgacgaccacagcgacggcgcatggctgctggagcggcggccggaggtggagagagaatgcgagcgcggtgagagcgattccggcgacgacgacggacgggacttgaggggatggtagaggacgactanggggtcctt

SEQ ID NO: 36663 - DNA, 279 bp, Oryza sativa
cttaaccgcaaaaccgggtataacccgtcccccaacttacgaataccgggcaaacgaggacccctagcattatggagcgtagttttaattgactgacgtggcacttgcatggctcctttgactgatattcgtccacgtggcattgacatggcgtttacatggcaattttatccccacaaaataataaaaatcgtgggacccatatgtcagctacacacaaaataattcctctctctctcgcaaccagagcaagcgatgggtggggtctacaggggctgt

SEQ ID NO: 36664 - DNA, 423 bp, Oryza sativa
tggatgatgtgtgaacactagtattactacacttgtacttcctcattcccacgccgttgacttttttaaacatgtttgaccgttcgtcttattcaaaaacttttgtgaatattattcaaaaacttgagtggtagtagtatatttaacaatgaatcaaatgatagaaaaagaattaataattgcttaaatttttaataagacgaacgattaaatatgtttaaaaaaatcaacggcgtcaaatatttatgaacggagggagtactatccaacggttacatataacgaaattaccggtagctagctagctctagctcgtagagtgacatgaagtttgttggagcaatgacggatggagtcaaccctggctgtgttcagacgaagatcaaatgttagtggaaaattcaaagagaagactgatggatg

SEQ ID NO: 36665 - DNA, 357 bp, Oryza sativa
  unsure (1)..(357): unsure at all n locations
agaaagaaggagatcgacaggttcaagcccgaaccaagtcgccgccgttccgggttctattctgttcgatgcttcttccaagtgttggtgctacctttatactggcctctcttccttgggcttgcttgggtccaacttggataactgtagatgtagcccactctatagatgcagcccactagcacctgacaatcccctcttcttaaaattcggcttgaccacaagccaatgaagtaatccttttgaaaccctgtggctgctcgaactctntaatgatagaaataaaaccaccacatgaagtgaataaacaagtactgacaccctgtatagcttcttgctgcatttgcatnnctctat

SEQ ID NO: 36666 - DNA, 412 bp, Oryza sativa
  unsure (1)..(412): unsure at all n locations
ntcatgacaagggcattccaaagtcgacacanggttattatatgccgacgagaggggtcccagaccaacaacaggttaggtcctagaccatactgtgccaagaagccacagggtcctccccgacaccaccccggtgaatccacatgtcgctcggcatcaaggctcccctgataagctagttactcagccaggggtgtcccattccacccatgtggtcgaacttgacttatgtttggatgaaattccaaggaaacggtccttaagtgcgagagcgggaaatcgtacacccggtacgttccccggttcgcggtgttggaaattcatttagntcgcaagcaccgacccaggtgttgggtgtttcaagtctttttgtaaaccccacctttacccatgaagtttttcaaatttaagt

SEQ ID NO: 36667 - DNA, 471 bp, Oryza sativa
  unsure (1)..(471): unsure at all n locations
agctttctcttgacgacacccttaattactactgttggatcattgcttctatagacgggcacatccacatcggtaagaagacaattatcacccatagaacataattgagaaacggacaaaagattgtagtttagagatnttaccaagagaatgttggctatggaaagatcattataaattgcaatcttacccaatcccataacctttccctttccatcgtccccgaaaactatgttatcttgtgaagtgccattcggatcaagagttgaaaacattgattcttctctggtcatgtgatttgtgcatccactatcaattacccaacttctttcaccgggacatattcctacaagagatcaatttgtaatcttaggtacccatactcgcttgggttctctcatgttagtacaagtgccttatgcacccaaagtactctcttgatagaaatattctttgcccttgggcctacat

SEQ ID NO: 36668 - DNA, 165 bp, Oryza sativa
ggtgtatagtgatcatgctccctatcaaaggagttgcttaagttgacacaaatattggaatagcaacatttcagtatgaagatgcatgcatcaccgagtgacacaatgcatgccacaacagggattacaacacacaacctagtggtaatattataatctaatgaa

SEQ ID NO: 36669 - DNA, 457 bp, Oryza sativa
  unsure (1)..(457): unsure at all n locations
agctngagcaatgctcaatcttacaataggattangctttgtcatcatatcagcaggattatcacgagtacttatcttgcatacctttagcttaccttacgcgactatatcgtgaatataataatacttgatatcaatgtgtgttgtcctctcttgaaacatctgatctttagtaatgtatatggcacttttgcttcaacgatgtcaaccagcgatgacttcatcaaaggtgcgccctccagaaaaggatatcttaacactggcctcagatatggcaacaggcgccggcacatgatgccatgtctaatgtagttgttggtttggggacaaagtggatgggttatgtccatacctcgttttatggaatgggatgattctgttttttgttggttacagggatggacaaaccttgtctttgttcgtttgagggatatatgggatgaataatctatacatg

SEQ ID NO: 36670 - DNA, 451 bp, Oryza sativa
  unsure (1)..(451): unsure at all n locations
actcagcttccnatcctataaattccttggaatgacacattgatgtggatttggagaaaattagcaagagctccaacctctttgagtaaatttcctttgagtctatctctctcatctgatntatgcgttttcctgcgctccttttaaacgaccattcctgtgtttttcctgtgttttgtaattctctgttttacacttcacttcctgttagaattctatggtttttctatttctctgttttttttttctaccttgcgaataaaaggggccttaaatgtgcatttaatggtttggaacaggttgcacaaaatccggagttccggacttctgtcttgtttatttgagcattcctaagctcatcaccgactagttaatgccccttgctcggttaatcctagattcctagtgtgagtggtacactaatgcccttagagatccacgtcgcgtttga

SEQ ID NO: 36671 - DNA, 451 bp, Oryza sativa
  unsure (1)..(451): unsure at all n locations
agcttctagaggtgtccagnaagactgcactttttctgcgggtgttcaagaagctgggaagcttctagatgtcctctangacggtggcttcgaatgttcttcttctggaatttgcacctagtatcagctaattatgtgcgctgtattttgcccatgctactgccatatgcaactggtgcctcttatcccccaacagctactgctgcccttttaaaatttgaaagttacggagtaatttcagctgatttttaagtttcttcattagtagattactttctgtattggttgtcaaatcttaaataaagttctacttataaatatcttggctatctagttcattttccccttgtcttttgtcatggaaggctgcctgtnttgtcgtgtggtgacagttctgaactttcatctatacttgagtgctacgtggagtatatacatacaaagtgctcca

SEQ ID NO: 36672 - DNA, 382 bp, Oryza sativa
tcctctattcacaatcaccagctaatggatgaatccattgtcgagacggattcatagaaatagtaaaataaaaactatcaacgaatatatccaagtgtgtcccacttgatatcttcatgatcagaatggaactcgttagctcagctgcacggaaagacaccaccaaacccttcattagctaggccaaatctcccttcctagatctcaatctaataaaacttgctttcggtagatcgatctataaacccatctgaaatatttcgatcgagaaataggaatgcacatcacattgtcgcattggctggattttcaccttttaaaaaacttattctacaaatagatccctaaaaaaaacttattctaggaatgaacccttttcgcg

SEQ ID NO: 36673 - DNA, 458 bp, Oryza sativa
  unsure (1)..(458): unsure at all n locations
acttcagcagcggtgcgacttctcttttattcaatccttgacggcagcgacgaaaccaacttcaacatgacagctccaactagaaagatcttcagctctggtgtgggggaaaagagagcaagactgagtactacccactgtactcagcaagtcatactggaagaggaggtatgatgcatgatataaccgaaagaggctagagggttctttgcataaagctagcatttataagcagtagttgaaagcagtaaaacagctgtagtaattaatcaatattaaccaatcactgtccaacgctacaccacattgcaacaagcccaaccaaccactgaactacaccaattcattaagctaaactatgggtgagactaatcacggtgaatctggttgatcgcccatacctgcggcacagctattcgaatagtnttactctggccagaggtgtacaactgtaccca

SEQ ID NO: 36674 - DNA, 379 bp, Oryza sativa
acacaagaaactcaactttcttcacactatccaacccactgttttcatttctacccctggcccaccggagggaatcaatctatgacgccaattggtaaatcgattcagccggcctgggagtttaccgtgaacaagaccgagtcgattgttacgctgttatgcccaaccgtttgcacagctcaacttaggttttgaacaaccagcaccaatccagctgcatgacgtggtccagccattttgacccatccatgcggctacaagttctcctattgactcgcattcaatgccaggccatcttccaaagctgtattcgcctttcacccaatgtacgtccaaaacaaccttaattatccttatattttccttcatataaatcttt

SEQ ID NO: 36675 - DNA, 180 bp, Oryza sativa
  unsure (1)..(180): unsure at all n locations
agcttgngacgtgtgagctagagagaagacgatggacaggaaggtctccttgaagccttgtatcaactttctttaattaccgaaatttcagagttatttaccttttgttttgtaggatgattaaatcttattcagagctcgtgaatgctagtatctttcttttgtgtgtaatgatgattc

SEQ ID NO: 36676 - DNA, 442 bp, Oryza sativa
  unsure (1)..(442): unsure at all n locations
taaggctagtaatggttggtcggacaagtagtttacatatcttcttgagctgntaaaggacctgttgccagaggggaacaatttaccgcagacgacatatgaagcgaagcangtattatgtccgttgggcctggaggtcagaagaattcatgcatgtccgaacgactgcattntgtattacaaggaatacgctgacttggatgtctgccctgtctgtgaggcatcaagatacaaacgagcaaagagtgaaagtgaaggaagtaagtctaagaggggaggcccagcaaaggtggtgtggtatctcccaattgcagagcgcatgaagagaatgtttgcgaataaggaacaagctaagctagtgcgctggcatgccgaagaacggaaagtcgatagtatgctgaggcacccagcagattcatacagtggaggacaatcgatagga

SEQ ID NO: 36677 - DNA, 442 bp, Oryza sativa
  unsure (1)..(442): unsure at all n locations
tctccacaaatagtaatactatactattacttggtactacttatctgttgtacgttactacaatcacatcacgatgttactacactgcgttntactgtattttttgggtagtgttactgcataaacacgtggtaacgtgtaccttccgtgcagtaacacttttacttttgtgcagtaacaagtatatggttagcatctaagacttttaacctatatatttttgtttcagttcctgatttactgtaattcaccacaatattactgtcacatcttacacatacagtaacgctatattggtgggaggaaaccggttttcttgaaagagggaggaagaacggnttcttgaagaggggagtacgtagatgcattttgaaggttaaccctctacatacataacactatagcatcatggtgggaacgattnntaaaaataatatatatc

SEQ ID NO: 36678 - DNA, 460 bp, Oryza sativa
  unsure (1)..(460): unsure at all n locations
gcttcctcctnctccttcctcctgatcctttagcttcctatatacgattccaccatctaagggccaggcccagacttgcttgccgcangttactgatccaccgaaggagggaggcgcccgcccgccgccattgccgangtgacngtggtccgtgcggagcgcgaggaggagtccaccctggagcagggtctcctcgccatcccggaggtgagtttgaatccgccctctgtttctttggcgcgccggcggtgaatcaacgatcgtgcttgtgaatcgtgttgagaattttttttcgttcttttttttgggaggtgaatcgctgttttcgatttcagtgaggagtgaggaatatgttattggttgtttgttatgtacaccaccttaagtcttcngctgagcggaaaattggaaaggaaatatttctcttctatgtattccatatcgattcgtggaagttaac

SEQ ID NO: 36679 - DNA, 464 bp, Oryza sativa
  unsure (1)..(464): unsure at all n locations
agcttaacaatgaaatgttcatgacccttcagattatacttcttagggcatatctcacttacaagcaaagaaatgtttcatcaaaactcagacattagctgttgtagggacgtgacaagccaacgagtaacaaaggtgtcgatcaagagtatagatctcaaatactattcaaaagaaaactgatgtacaggtgtacaaggagctcaatcactcttcatcaatcttgtcattgaatcgaccagacatcacaaccaaacaataaactatcaaatgcaacccgctaacacaagacacgagagaagaggctacagccagcaaggcattacaatcgctgacattcgctccactcacggtcatccacatctatcaagggcaaactggtatcttcagaaaccaatgagacaaacgcgaagaacgctgccgcagatgtcaccgctcatnggcagcttcctttcaaagtgaca

SEQ ID NO: 36680 - DNA, 422 bp, Oryza sativa
gcttgctgagagatttgtagccagttttgtaggtatgaactatctgtcctttcgactctgccatggcttaactcttgacatttgtattcatcaagttgactagggaaaagactaaatcaaagttttacctgctgaagtttgaccagtcccaactccgccagatccctaatagcatttctttggacatcggtcagagtattcaagctataagcctgaagcatgaataagttaaacagcatgttgaagcgaatttgcaacagatgaaccaggccacaaagcttggactccacaacagatgaaagataatgcttagttaataacattaatctacagactgataacctctttttaagcactaaatctctggtactggctgaactagtaagcattattaagcaggcatgttagattgatgtccctat

SEQ ID NO: 36681 - DNA, 338 bp, Oryza sativa
  unsure (1)..(338): unsure at all n locations
ccccattattttgctcacatcaaataccatcgtgcgccaaactgttctaaagattcggcattagattttttcatattttttattctctttgcacaatgagaaattacaaagctatttgaggaataacaatttaattaagtatatatataaagcatttacaaatcaaaccatatgctagcatcaatattgcatatttgcttaattcaagcatagaattaaatgcccagcatgtatgatcgtaaagggccttttccaacccanaaactagccattgatgtgagggctcttcacttacatttagttcttcgccttcacaaccatgtggactattcacaatt

SEQ ID NO: 36682 - DNA, 465 bp, Oryza sativa
gcttgaccagctgctgcactccctctagccggggcatctttattggccaccatcttgttttatctctctgcatgataatatgagtttcaaatgtaaggtttgcagcactaatattacagaataccaacagaacaacagagtttcattcaaagtcgtattgcatatacataggaagtgttaaaatatgtctatcattttggaagaatacggttatgctgtcacacagcattttggaagtgactattttataagcacagaaagttcttcaatgtggaatatgtcaaaaggcaaaataagaagcacaagaagttcttcaatgtggaatatgtcagaaggcagaataaggtacacatcttggaagtgtatgatagtactacaccaataccacgtgaagtttagctgtcacatttgagtgctaataaaaatataaaaaagaaatggtgctggtgctcatgcctatataca

SEQ ID NO: 36683 - DNA, 466 bp, Oryza sativa
  unsure (1)..(466): unsure at all n locations
cgtttcaatcaccatcatccatggcttcttccatttacacgcacgacgtgacgccgccggcggtggacgccgacatcatcagcgagctcaacgacgacgtgctgcttcacatcctcggcttcttgccgtcggcgagagacgtggcgcgggccaccatgccgtcgaagcggtggcgccgctgttacgaatctgcttgcgagtttgggagttttgggattagaggagcagattctaacagagagaaggggtaggaagaaggggaagaacagaggagagaacttggagcaggggaagatgcagtagttatggaggaataggttttctgttcacttgttgatgccttttcccctctgctcactcgtgcttatatanctcgcacgttacattctggacctaagtccattccggccacgtactcttacattaggcatgcgttctcttgctggtcgcgtcttcactgggatac

SEQ ID NO: 36684 - DNA, 441 bp, Oryza sativa
acaagtttgtaatattttttccattttgtagaatctatgactcactttcgtttaattcatgtgttcatgagttaaattactggacaattggagagaaaaaacattcacatttgaaaggcttaattttggcccaaaaccaaaagcactccaaatcttgtaataatattaaatagctccatcgtttgctctttagtttatcgatcactgtcgaaacgtgaattttaaatcttaattttagaatcattttgattttttttattttagtttattttagtattggtttttaagtcattgaaatatatacataaaaaaatatttttttaagttgctataagtattaccgtttataattagggtagttgctataagtattaccgtttataattaggtgtaggtgaaactatggaactgtggtggcaaaaactatattagtaagctttg

SEQ ID NO: 36685 - DNA, 417 bp, Oryza sativa
agcttaaagccatgaatacctattacgcatatatggatgtggatcctgcagaacacacatctaagacgagtagtatctgatattaatataatactcgacatataatgaagtctcgtataatattcataaatatgtatttctcctctagtatatcttgattttcccgaacagatgactctgtacgtttaaacactctgtccgactagtgatagcccccaagcatcgggagtcgacctatgcatttcccatacatgcatatgagtgatatgagctcttcactaatggaacaaagcttacggattagaattactgctcatgtgcttctgcaattataagagcacacacaccacttatgtcatctctatgcctttgatgtattgccaagagtactgatcaccttgctactctgtccatgca

SEQ ID NO: 36686 - DNA, 441 bp, Oryza sativa
  unsure (1)..(441): unsure at all n locations
tagttatttggaatctattccttacttattgtatgcttgcatactcccacataagacagagatgatgcatactatctttagaatctgttaaaataatagctaagactaagtcctctacgaatagatttggagagagatgaatttggaggaatctacccaacaagtgtaacattaagttatatatgatgaaacaaaaaaaatcagcaactgaaacatttaaatattttagaaacatggtgaagatacacgttgaaacatgtcgctgtcacacatgaaacaacaagtattaacggattgaaacatttgtntttcttttatcaaaatataatcatgcgatatcttattgtaaagagttaattacaacgaatacaacggtgtgatcggatcatagatgggacaacgtaattaagagaaaaatcatnttgaagcttgctaaataca

SEQ ID NO: 36687 - DNA, 351 bp, Oryza sativa
  unsure (1)..(351): unsure at all n locations
catgcagcttcctggatctgggagnttctctttacttgtatgggatcngttgatcgatttccttgatcgctacttatgggcgtgcgctcaaaggatacaaacagggattcgcaaacaaaaaggggaattcgtagtcactttttcctgtcgcgtaaaaaaaaggctntacgcgagagcaatagaggttgggatacatctatctcttctgagcaacctcttttggattcttaagaccacccttgcagtaggataccgtctgctttgggttctttattatattatctccttcgagggaattttaggatcgttcacgctatatttagtctaatttggcttttactgctncttttc

SEQ ID NO: 36688 - DNA, 443 bp, Oryza sativa
  unsure (1)..(443): unsure at all n locations
ntaacaatntatggactagttgtggcactgtgcgctttattttgcgaaccctttgtttaatcctaaaaaagaaaacgagtcctttagattagatactttcttctttttttagtaaattggtatttgcttctgcaattccaattatatcaatactttactcctaatttattactcctagagttttctatttatggggacagacaataccccaccccaggaatagctgatttgaggatgatcaatttagaggatatgttcgccgtcttgcttcccgccctttgtttagggcagtggaaagtatttttccttttattttaggaattttgggaacatttcaacaaaggaggtctttcacaggtcaaacgagatctaagacttaaatctaaagaaattactangatgaatctatntctattaaaanaaattgcattaaaaaaccgatc

SEQ ID NO: 36689 - DNA, 431 bp, Oryza sativa
  unsure (1)..(431): unsure at all n locations
agcttacacaatattatatggggtacctatcatataaacaatttaagatctatattaactaatatatacgtgtactaaaacaaatagacccattatttaaatcatcggatctaaatttttattactttggactattattctcaaataattcagtgttttaaaataaaatctacaccatcaccataatgttgtatacccattaaattaacaatttaaaatatatattaactaatttacatttacactaaaaccggtggacccattatttaaatcattggatctattggtaataatggctaaagttctctttttggccactgcacaatacacgtctgcactttgcctttcgcacatgtgacatantgtcgtgtttgaggcatcttgggtgatcacgaccgctgcagcgctacgctgttgtaatagcatgaaaa

SEQ ID NO: 36690 - DNA, 443 bp, Oryza sativa
  unsure (1)..(443): unsure at all n locations
tgtcctctgcaatntcacataattagtctggtcggacttttgtacttcattatagaattagtggtatcttcgctttttaatactacatctgttccaaaatggacaaaataaattatatgtcgtcgttgatttttgtaacattttaccatttattttatttaaaaattcactaggcatatgtaaaagtataaattgagattatagttttcttcgataataaaataagtcacaacagaatacatgatatttatattattctttcaataacatgaatagttaaacgatatgaaaaaatgttaacgatagcatatattttagtacagagggagtatntgacaccattgagttttgatcatatacatttaatataatccacaaactattttttttgaaatatgtaattatagctgatatatgtgagaaatgtctatcaataaaaatgt

SEQ ID NO: 36691 - DNA, 425 bp, Oryza sativa
  unsure (1)..(425): unsure at all n locations
agctntctcaanatcaatcttaaaaattacacctctnttatctttgcgatgtaattcatgtaaagtctcatgtaaaataaccaccccttccataatatttctcccaggaatgaacgctgtttgagaaggactaattaccttttgggcaacatccattattctatttgtagcaactttggtaaaaatcttaaagctaacattaagtaggcatataggtctatattgttgaatctttaaagccttagcacacttaggcaaaagaatgatagtaccaaagttaagcgaatataaaggcaaactcccagaatgaaagtccttaaatagttctaaaaggtaaatttaatgacattccagaaaacatggtaaaactcagcaggaaatccatctggacccggagctttngtatgtccatctggaaaataaca

SEQ ID NO: 36692 - DNA, 452 bp, Oryza sativa
  unsure (1)..(452): unsure at all n locations
tcttccacacagtcagcgactcttcgccaacgttgtccttgcacggtggcgcgaagccgtcctcgttgcagcacccgttcacgtagtcacactcgtccaccaccctgacaacgacagaccgtccattcacggcggcggcggtgacgacgacgcggatcctcccgttgcagcggcggcagcgtgcgccaccaccgccgtcgtcgaggcacagccacccagacccggagtacagctcgacgaccagctccatgttccggcggaagcacatatgcagcgtcgggatcgccggcgcatgtccgataccggctgtgagccacatgaaccgcgggtagcgcttgccgacgacgcagcagtccgggcttcccttggggcaccgggcacctcgtctcgtttccgtggagtaggcatagccgctgncgccggcgtgcagctgccagcagcagagatgccat

SEQ ID NO: 36693 - DNA, 400 bp, Oryza sativa
agcttcctttagtagatcaatttccttatccgaatatagcaagaatccgacaactgacgatttgacaactctcatcggctaatctcaggacttcgaagccgatgctgactctaagccgatgactactccgggcttaccaaatttcactgttaacaccatccaagaagctaatcaccttatgactcgaggcatcattaatcatcatgtcggctataggcataggatattcaacttttgaagtagctttatttaaatctctaaaatctatgcaaactctaatcttaccactccccttcttctccactgggactatactagatatccactccgtatatgatatggcctaataaaccccgctttcaataaccgatcaatttccttcttgagccggtcatataac

SEQ ID NO: 36694 - DNA, 457 bp, Oryza sativa
  unsure (1)..(457): unsure at all n locations
cttggaaaggcggcagctccgaatttggcggcgcggcttgttggatttgtgggcgcggccggcgcgggctcggtcggcggcggcttgggccggcgacacaaagaggaggagaaggccgggccggggcggcacgtgggcttggggcttggcttccccaggcctgcagctcaagaaggagagagagagctggaggtagaagaaggtgggggaaaaagaaaaaaagaaagaagaataagggctaaactgcaaaagggtagaatagagaaaaagagaggaaggaaaaagggaaaaagacagggacttctctagaaaattccaaatataaagtatctggaatttttgggaaggatttacgatttgaaaaggaatatcggatctggatggaatntgaattacggattgagctncacttccgaaatacanattaaaccaactaactgcaattaagagtcacaaa

SEQ ID NO: 36695 - DNA, 449 bp, Oryza sativa
  unsure (1)..(449): unsure at all n locations
agcttcangggaaccatatccctgaatntcccaacagctgcagatttcaagtaggtactctagattaggatgctacatcctactacaccctagctacacaacctttgtccctcaactntggctctatggccctgtttagtacacactaaacttcccccaaacttccaactttccatcacatcagatcatatccaaaactttcctactcacataaactcctaactttttttttccaaactaccaactttccccaaacttctccccaattccaagaactaaacatagcctataatagagaggcagtggatcaagcctactccctccgtccctaaaaaaggttaacatagtacaagatgtaacatttccgagtactatggatctggacagaggatggagtgagtaccatttgcataacagtgaaactaatcatcatatatcactgcatcata

SEQ ID NO: 36696 - DNA, 433 bp, Oryza sativa
  unsure (1)..(433): unsure at all n locations
ttgcagaaagtggctaagcaacatcgcaagggttntatctcattagttgtgttggtggcttggttgatttggaaacatangtggatgtgtctttggagaggtttcagctaatttcaattccgtcatgcangatgttagagatgaagctaatcatggtgagttttttgtgtttctttggaaagttcttatagcctttgttcccgttatgggcatgcatgagtccttnttaactcttttatcttaatataatgatatgcaactctcctgcgtgttcgagagaaaaaaaaaaactttgtttctctactctgctgtaccgtggtgtgatatatagcttcaataacttttagtcttccaactttcaatattggttatatgtcttctcangcagtgattacatttataatctgtggatttgctacattaaatctgtgat

SEQ ID NO: 36697 - DNA, 449 bp, Oryza sativa
  unsure (1)..(449): unsure at all n locations
agcttcacgatcagctagagcccacgtaactgtctaactcagccataatgtccaatcaagcctcgccctctcacctccgttgcatatatgtctcagtactaagaaacgtttctaggaagatatcatttnttttctccggcagccaagaaaaaatacacctgcaaaaataattgacactgtctcaggtcataaatcacctacgaaaacctactttntacagacgggtatctaagaaatccatctagctatgaagggaagtctatttttacattcagatacctgtgaaatcagtctttaaaaatcgatatttagcggatggttgtagtaagaaaccatataaaatatgggaataccactaaaatatgaaaaaaaaattgcaactacatataaagtcggatgacgacaacttaatatgannaatgtatctctcaatgagaatgtacaacttt

SEQ ID NO: 36698 - DNA, 444 bp, Oryza sativa
  unsure (1)..(444): unsure at all n locations
tttcttcgcagcagaggttgcaaaatatgagctgcatgatgggctataaatntgtattngataaaataaacggtctgtagtaaatgattgtttaaagatataggaaaaataaagatagatcgatgtaagagcatctctagtgatcgatacatggattgacgtactgatgcatacgaggagctagagacaacgactctcaattttgagtcacaaagtcggccatcgttctcatctctctaaatggagtttttatttcaaaatgggccatacaagtttaaaacacacagttaaatgagttggtgagatatgtgggattttttctatttttaagttgggcccatgctattgttctttcaggaattagaagtcatcttaagtcttcatcgattgcttatattccctaataagccaaaatagctattatgaaataaaaaattaatttat

SEQ ID NO: 36699 - DNA, 453 bp, Oryza sativa
  unsure (1)..(453): unsure at all n locations
agctntgagaatganattacaataacatgttcctacttttgcttagatgagtttttcatgaagttccttcatatattctccgttaaaagtgaggcgccctaacattataggcgcgacaaggaacttggtggcccgtctcgacggttcactcaccgtcaagaaaaatagcacacgtacgcatagaaactcagcaaatcagatctctggatggcggacgcattagcatagctgaacccttaccgtcaagaaaaatagcatacgcacgaatagaactcagcaaatcagatcactggatggcggacgcattacaatagctgaaccgttacgacttcacaacaaactatcctctcaacaaatgatgtgaaccaatgaagccgatggtagcagaaaaggatgtgagcaattcaagccaaaaatcaataccagcatctaacagacatntttttaagctta

SEQ ID NO: 36700 - DNA, 416 bp, Oryza sativa
tcttgtaacaagcgcgtccgcgtctgcgtctccctctttgtgcgctcgataggacacgcagcacggcgcacccccaccctccttgtacgcgcgatcgaattcgattgtgcgcctctcggctattttttttcccaaatagcccgcacacacacacacctggttggatggaggctggcacgacggccactcgcaccggaaaatgtatgcatatgcatgcgtgccatggcgtgccgcgtctggtggatggcgacgtgttaccggtggacgacgacgacgactcgggtgatggatacgtatccggaacaggatcagattatcaatcgatccaacatgctcggatcgatgcagagtaccagccggtgtacgtgctttaatgaagtccaagttattagccgtcgcctggccggcggtcgatc

SEQ ID NO: 36701 - DNA, 319 bp, Oryza sativa
aacttgccacactgaaagcattgaacagatccttctcgcttcctattcttgactttttcaaaccctgagaaaagttgttagtaacctaaaccaagtcctcctcgaatcactcgaggtgtttatcggacatggctttaataaaattaagagctgatgaagaagaagcaccaatggaagaacttcaagaagagataagggcctaatttaggatcaatctgcggaaagaaattcactcatgagtttagcttggtgaaagagaatcaaagtcaagcggcatgttacagattctaattgagtactttatctccagatcgacata

SEQ ID NO: 36702 - DNA, 439 bp, Oryza sativa
actaaaatttccaaatggacctctagcaacactctcttctatcttttttttatgaaaatataaaacgtactatctccatcctaaaaatcctaaaatatagtaaaaatatagtaaggtataagtatgaattcggactcctaacaggctagaaatatagactgaaatcctaacatgtatagtaaattatctgccgtattagtttacaaccaatccatacgtatatgtatggatgaactgagacatatgctctttcgataagttcggtgccacacttgatactatacgcttaataatatggctttcacgcactatcttacatggtatttacatgacactaaatcatatattattggatagaacatgtaacggatctagaaaatttcttaagcatgggcaaaatagctactggcagtggtaacactggtgaagcaacatactc

SEQ ID NO: 36703 - DNA, 395 bp, Oryza sativa
  unsure (1)..(395): unsure at all n locations
tatcactgtacttncctatcttgactgtcatcatctatgtttcttcttgaaagtgtcagtcgggggctatcatcataataacggagtgtgatnttttatcaattcaatttgcttccttggtctatcattgccttggttgatttttctacttagtctgcgaggactgaaagtttttaatagcttctttgggttttaggctcaacaaagcttgataaaagcttttaagaaatcaaagacttggcttgaattatcaagcacagtataaatacaccagtattgtacaagttatgccttcgcttgctacatttatgctcagtcagaatcagtcctttcatcatcgagttattactactctgctgaaggtcggtgttgcggaaatgatctacgacgtcact

SEQ ID NO: 36704 - DNA, 349 bp, Oryza sativa
gcttaatgcgctatgctataactcgctgctcgatacacacgctctatgaagaacactttcatgtagcggaggtgctggagttaatgggaaatcaaggcattgagcccacagttgggacgtacaaaatcctcgtcgatgcttcattggcggctagagatatcaacaaagtacggtggacaaggctcttgcggaaaagatggtcatggtctcatggagaagatgtgccttgagctggatgtgtatacggtatacatacaatatggtatggcagataggatgcatgaggctgagaacctattgcatatcatgattgagaatggtgtcagaccaaacaatgtaaggtgcacta

SEQ ID NO: 36705 - DNA, 254 bp, Oryza sativa
  unsure (1)..(254): unsure at all n locations
atacaccatgccatctgtggcctcaagccatgcagaaganttgacctatgcaaatacgttggcctcaatcgaatgggatgaacgcgctcggattcttggatgccttggagatcccctcaacgaacctatctggtttaaacttcggggcattactcccccagatgttatggtcatggagtatgagtaacaccaggagctcgactattacaccagccgggtaagtgacacccccgatctccatttcttagatgtct

SEQ ID NO: 36706 - DNA, 338 bp, Oryza sativa
gctagagcatacccagcagctcatctaaatagtatcctccatactcccatctagattttcataataaagatacctactccatattacttttcactctaacagatcatctatattacatcctctatataccaacatcctatattttactaatattttacaactaccacatacttatcactactctaataaaaaactccccatctgtatgtcttctctaccgccgatcatcccacctttctttcttctctaccaccagcgccgagaggacagggaagatgatggccaaccggaggggcggcgcattccgaagagctgctgggcaaaggggcggcgcggac

SEQ ID NO: 36707 - DNA, 435 bp, Oryza sativa
  unsure (1)..(435): unsure at all n locations
agctntgtcatactatattacagaacaagcatatattaattttctagcagctntggttgtatcaccagatcgaatccaatggtcaagtcctttttatttggaaatcagagtttatacacatgtgcacccccccccccccccctttacttgcaacttgagcacgtaggatgcataaattaaacatatagatcgatgtcacttcacctaaataatgttgctcttgcggcgcgaatatttagagaatatgcaggagaactgcatatcattctattgatgaagaagtgaggagggatcagtacatataacacatccaagctacacatggaacataaatcagtttgtcatacaacaaatngagttcgataagctacatgtttcatgcctaaatgccattattatgctacactgaaacattcatagaatcttgtttgatgg

SEQ ID NO: 36708 - DNA, 460 bp, Oryza sativa
  unsure (1)..(460): unsure at all n locations
gcttaccaaatctttgcaatntcgaatccttcagganaaaggccaccgctgcgtgaatcataacaatgttgagatttccataaaacgaggtgtaacacagtcctgtttctgcaagtccgaacctgttattccgcagatccaacacaaaagacttcacattgttctcccttaatttctgaagtgcttccttaacagatcctgtgagaagacaatcaattaatatgatcagcaggacataacatctggaaatatatggtgttttataaaggcattagaaccactcaaagtcactaacctgcggcgttttggttgaaagttgtcaatttaatgtaaccaaccttttgaatgtcttttgcacctggaatctcacacatcctcgaccttaccggatttaaagtgacagtttgtcgcctatgataaatcnacaatgcaatgaccaatgagtaaaagtaactgtttg

SEQ ID NO: 36709 - DNA, 388 bp, Oryza sativa
agcttatgtttgctccggaatgtgaagcaaatttctatgatctgtcagatatcgcaagaaaccttcatccagaatttcattcatttctccagattaatcgtaccaaccatagtaggaaaagatttcagaatgttggttgaacaaattaacaaaataatacataccagtgtaacataaataaatagcacaattcaccagatgcacatggtagatagtaattacttgcacaatctaaaatctgttctgttcatcacagcttccttcagcaaatccaaaaaaaaatggttatggtaaaaaggaatggtatcttgattatataaaataggtgaaccagttgagatggagaaccagcagctcaccacaacattgaacatggtcacccaaagct

SEQ ID NO: 36710 - DNA, 437 bp, Oryza sativa
agcttcattgcttgatatactggagatctttttttttcaacctacgcattcacagtgagattaattaattcgtgccatcacaaagtttatgcgtcttcagaatatcgactacttgtgctatatagatctttcatggacaacggataagtttaacatatatataaaaaggtatatcaattattcttgaggaaacactaagatatatgtactagacaagctatactactcgtgagataacattgctaaggactaaggagcaagcatagatactgtaagcaaattcttaccggcactgtaaatacttggagcgaaattttattgattcattacaagcttgcatactcgatttataggggagtggcagcacctgtatagtcaatatatgctttttgacgcatttcttctgctgtggtataattagagttaaatcaatgtat

SEQ ID NO: 36711 - DNA, 353 bp, Oryza sativa
  unsure (1)..(353): unsure at all n locations
ntgctaatagtttaccatttcttgtccatanggcatgctagcaccctctgccaacgggggaggggatgaaatgtctcggagcaatattgatggcaatagcttgaggtcctctgcggactccacccggaacttagtgtctggagcttctctctactctggtgacacaacatctcctgatgtacctcttcactaatgatgtgaggcggaatatcactggttctttgattatccactctacatatatgtaatggtccctcgatatctcgatttgcgatctcaggtccaccaagagaccctcgatatcctcatgctcgctctctaatgctcatgacccttctcagttgcgtactatt

SEQ ID NO: 36712 - DNA, 384 bp, Oryza sativa
  unsure (1)..(384): unsure at all n locations
ttggttatgtgattcatgagcttctcgtccttctacggcgaccacagccccctcctcagcttcttcttgtggcagcacgactgcttcgccatggtagctctagctgaggttggaaaggctgagaagaggagaattaagctagccgagctcccaatgagctggtataaaaggggaggagcaagcaagcaaagccagctcagaaatgcagatgagctcgatcaacgaattanctaaaccgaaagagaggggccggangggcggaggtcgctgtcaggtaggtgcctggacgcacagtacacgctgtccagtgcacgcatgccctactgctcctgctgctgctgctgctgccttcgatatccctttcgatccctctggtgatttgct

SEQ ID NO: 36713 - DNA, 450 bp, Oryza sativa
  unsure (1)..(450): unsure at all n locations
tcacaaatcttcgagaaatccgcttgaagaanaatatcttgttaccacaactaggcgcaaacaatcaaaaacctaaacaaagaccaaataaaatatcctatntaggctaattaatagtgccattagatagatcacaatttaatggaattattgaaagtggaacggggtaaatcggagttacggatcaagagatatgaattttggaagtttaaataaattttctggacaagaagatgatttgtcagaattttctggaatacgaaaaatggtttatggaatttatagaaataatattctcaagaatattattgatagtcactgacatgcgggaccgagggaatgaattattggaatcccggaataggataaaggactctatgtgaatttggaaaaagaaaggaaatacttgtggaatatcggaaaaaaattctcaagaatattttgactcat

SEQ ID NO: 36714 - DNA, 457 bp, Oryza sativa
  unsure (1)..(457): unsure at all n locations
gctntacgagccatccctaaacattccatctaaataaaatatttgttgcggcacggcgagagatggtgaggggaagtgtgagattgaatttttcattttcatgggtttcctaaattgattttaacactgaaggcatcgaaccaaagtttccattgtccaaacttaccgaactaacactagaacttgcccttatggttttgtggtccacaatgcatctttcatagcaaaaacgataaaaacaaatctattgaagtgatatatattggctaaatgggaagcacatacatacactntgagaacttgcgaagtgatgttgtctatataccgtcctaaaataaaataaataaaaaaaaaagcaaatgcaccagccgggaatcgaacccgggtctgtaccgtggcaggtactattctaccactagaccactggtgcttattgcatgcgtagtctgtttgattt

SEQ ID NO: 36715 - DNA, 459 bp, Oryza sativa
  unsure (1)..(459): unsure at all n locations
aagaaactcagcttcagcttttatttgccttttctccttcgcttggaataattcggactagctgattgcgctatgttactatcactcttttcttctaatatattgacgtgccatccttctacgcggtaaaaaaaaaagttngctttccacactcttagcaacggggaacatcttaatatgggcactagaattgatttcactcgggttctggatatctcaaactaattgtacttaaattattgctaattaagtaattgactggtataaagctcacataatctcgatatgaaccgaatccagagccagaagttatgatncgttcagcagcagatgagggctactctacacccttaatttcgtttgggcagacaanattaagtactctatgttactagtaataattgcaaaattctgttccaaatgattcctagcttagagatggtgttctcttttctctga

SEQ ID NO: 36716 - DNA, 415 bp, Oryza sativa
  unsure (1)..(415): unsure at all n locations
agcttgtttatggacatgaagctagtttgtcatgggaagttataatcggctccagaaggatagaattgctagacgatttgacggccgatgagtattataaccttatggctgatganagggaggacttggttcaatcgcatttacgagcccttgctaaggttaccatagttaaggaacgagttgatatgcattataacaagaaagtggtgcccaaaactttttcgtaaggtgaacttgtatggaagttgattctgccgattagaacacgggataacaagttctgcaagtggtcaccaaattgggaaagaccgtctcaaatctataaggttgtgttaaagggcatatatattgcaagggcttgatggtgaagattattgacgagcgctcaatgggcaatactctgaaaatattttcc

SEQ ID NO: 36717 - DNA, 460 bp, Oryza sativa
  unsure (1)..(460): unsure at all n locations
gacctatgaaactcaagctgctgtttgggaaaaagcatataaatttgaagccagttattcttttgggaaactaangcgagttctcataagcatatactgtcaattaaggtatgttcttctatttaactaaagcgtggagatgtatagttctcgtaagtactcagtagaaaaagatttgtttactaaaatgaccaaggttatattttctttgttagatcaaagaagataaaaagcaagagattgcgaacatatgacaaattagctaccacatcgatggagttgttaagcaaagcaatcagcataccatgtaatggatgagcagagcatcacactgaggaaaagagcatttgcatggcaaaccaccacaaatcagagcacacatgggaaatattaaagcaaaacattatgatgtacctgaataacattttgatagcanaataagagtggtatgcataatact

SEQ ID NO: 36718 - DNA, 416 bp, Oryza sativa
  unsure (1)..(416): unsure at all n locations
atcctctgagtcacctgcngcatcaagcttggtgaccctgntttgaagcatgatatttgttggcaaatgttcctgaggatcttctcatgcaaagtgacaactgaaacatgaatgaaggccatcattcagtgtctgctccaccgttgccatcaatccaaggtaagtcagagaaaagagggccatttggtttgttgcccaaatcagccagccaaaacattggtagtgtattcatttgatttgttgcaaaaaaaaatcgatatttcaaaattttggcaatagatcaagccaccgtacttgaccaaattttttataaggtctacattggcaaaatgattcagacatgcccttgccctcacctaacaacaatgggagttcgtattctttgatactctgatgtaatacatgaattatgtaac

SEQ ID NO: 36719 - DNA, 452 bp, Oryza sativa
  unsure (1)..(452): unsure at all n locations
ntggttcagcacataattatattactgtacattatatgttggccccattggcaacgcaagattgatcgggcggcactctgggctttatgaaacccacgagaatctacggtcatcctccgtatcttaatgtataacgccgttgacttttcgaccaacgtttgaccattcgttttattcaaaatttttgtgtaaatatcaaaatatttatgtcatgcttaaagaatatttgatgacgaatcaagccacaataaaataaatgataaatacataaaatttttgaataagacgaatagtcaaacgttgaaaaaaagtcaacagcgtcggacatttaaatatggaggtagtaatatattagcatattaaattaagagtgattttaccattcttganaggtactaaatgagactccctcattccanaaatctaagacgatttctttttcatcaaaatca

SEQ ID NO: 36720 - DNA, 434 bp, Oryza sativa
  unsure (1)..(434): unsure at all n locations
agcttgaaggcatcattggctgatgctagcctgtttattggtaaagtagtattagattagctcagcttatttggttctttcttcaggtgggttatgtttatggaaaagaaaaatccaaagtcccaatgcgctatgagatgaaactntgtcgttgagttagtcgagagaacttgttattagatgcaaagtctggggcaatggtttaatttcctgtttcctgtttcatttcagaagagaggataactgttttggtgattggaggtggaggaagggagcacgctctctgttacgccttgaatcgctctccgtcttgtgatgcggtcctatgtgccctgngaacgcangtattgctcaatctggagatgcgacctgtatatcngacttagacgtctccgatagcgatccgttatcgcgttctgctgcaagaggggagt

SEQ ID NO: 36721 - DNA, 446 bp, Oryza sativa
  unsure (1)..(446): unsure at all n locations
tgtgtngcttgtatgaccttgtgaatatgtcgcctttattaacttattattactatatgatagctggatagtcgttgcatctgttattgccttattggagatgtgagtagaagcaatggttggtattgagtgtgttctcatgagctgccctattgaaatgtactgatgaaccgtctgaaatgattattgaaattgaagaaaaaccacgatcaaatctggcgatggaagaaaggtgaatggtatagacaatcgaggttgcgttaaactcccaaatttcaaactactttatccgtcccaaaatatagcaatctagaagatgagacacatcttaatacaattaatctggatatgcatgtccaaattcgatatatttgtccaaattcgatatatttgtgtcccatcaagtcctatggccctgttagttcgaggggaaaaaaggtttggcg

SEQ ID NO: 36722 - DNA, 429 bp, Oryza sativa
  unsure (1)..(429): unsure at all n locations
agcttagaagtgtgtgagagagtgaaggagtgttgctccttatatagaggtaggtatgacggttgtacaatgcgaatggtcggaaatgccccacaaccgccattaggagatgatcaggaccttgcctagccttcggcccatctcctcccctagtcctcctttatccatttctcggagttttgggctgactctntgatattttgatgaagtttacaacccatccttgtatgcatacatatttctccacactttagtctagatttcttcccaacttcggggtttaacacctgcatacaaatatacaccaacacttgtggaatatgtgagataagcacctatcactgtgttggatgtttattatctgaactttatgcaaatggtggcggtatagaatcggatttaacagccaccaaccaanacccccacact

SEQ ID NO: 36723 - DNA, 435 bp, Oryza sativa
  unsure (1)..(435): unsure at all n locations
tcgtgtcgtctctgtcatatttcaggttcgtctagatattactatatatcantaccatccgaagcatggtgacaacttttggatgaacgattgtgcatgtgactatgataatagatgctattgatgacctccacgctgattacaagactcaagccatgagtcaaaagcatgctcaataggaggaaattttcaggctacagaagatggtcgattaaatggaacacatgtctcaacctgaagatagtgacaccgccaggatgttgaaatatacagaagctcgttttgcctagtatcgcaaagacaccaatcgtaagctcgttcttcgccagaagaggaccttcgaattagaagatgaaccgtggaatttgaacgtagaaccttcatcggatgaaagatgaatatgaagatgtgaagcctttcatgttgtcaagcgtc

SEQ ID NO: 36724 - DNA, 315 bp, Oryza sativa
  unsure (1)..(315): unsure at all n locations
gcagcttaacacaattaatttcaagcgnccattctacttttaattttactagaataattatatccttcatagaatgaaacatccatagacgtctaatttgtccaaaacgtctaacatgcttaatttcaagtgtcccaaactacgtctaatttaatcggattctgaaatagagacaatataaaacggttaatcccaacatctattaaagatggttgttgtatgctagtcgggccatctatttcacttcatcatgctacaatcccctaaacagaattggtcgtgagatttttcttgccagaaaacactttgtatgcc

SEQ ID NO: 36725 - DNA, 420 bp, Oryza sativa
  unsure (1)..(420): unsure at all n locations
tacgcagcaatgttcataaattnttgactgatcgtagtgatgcataaggcaaatgttaagttcttatgcttctgaaagcgttctatcatccatgtgaatgttgcacgatatggtatatctagtctcaatccttttcgagtagtactctactatgtacttgcccataagaattatttccataacctcatgccgattttcttatcgtatatggagctttaccgtacatactggcatattctatattccacgactcgtacaccacccgtagtagaattttcagtatatgtcatcctattcgcagcactttcagctgttgccacttaattcgtaacaccttcagaacataccaccagagaacgcgaattgtntattccgtgacactccgtccatccgatgccgcacccgtcaattggtccgtgc

SEQ ID NO: 36726 - DNA, 345 bp, Oryza sativa
accacgtggggtcacgtactatagcagccaaaggcaagaagagtaagactcataagagaaaagcaccgatgcgaactgaagaagtacgtaagataactattaccagcaccgaatggactccagtaaggataactattcctagacgtcaaagaggaaataccttccgaggtgcacgacaattgacccagcaccttctaagccatggtggcagagtatctgatagtgaagggtcagatcaagtctcctcggatgatgaagatagtctccccgacatctcggcgaggaagagatggaatcataggcatgcaccccattgtggagaaattggacacgtgctagcatgtg

SEQ ID NO: 36727 - DNA, 426 bp, Oryza sativa
  unsure (1)..(426): unsure at all n locations
ctaaatagtgattcagatggatattcaacattttcacaaatatgtttggtnatgtggattccaagtgcatgctgactagtgtttaagtaaagcacaaaatgtttacctttcgctggtatacaaaattcanaatacccatagtacaccccccacataaaaaaaacaagctattaccagagttcacaatttcataacattattcatgaattaagattttgggttcttgatctctggggatatatcatgatttcaaaataattaggtttctcgttctctattaatgctatccgagaaacaggaaccagggtcccataagcaacaacttgtggcatacttgccacctgctcccaagcgcaaccccccgtgggctatgccgctcctggtgctacccaacatggattatgctcggggcatatntgtctttcg

SEQ ID NO: 36728 - DNA, 402 bp, Oryza sativa
  unsure (1)..(402): unsure at all n locations
cttctgnattcttcgtatgttgtagattctattaactattcattcagcanataggtatccccagaagatctattaacattcatgtaattcagggaagcttaacctaagtggtggtggtgtttctctgggccatcctattggttgcagtggtgcgagaatcatagtcactttgctctgngtatgctaccaggccattcaaaatcagatcaaaatattacgtgttgttctcaaatgcaaaatacttcatggctgtactgaagtttggatttaantacttcatgttaattatctgtcagcgccattntctctctttaatctgcacctttacatgcaaaatgtgcaatcttcctctttttaaacatcaacactgtttgctccacagattcttatacataaaatgga

SEQ ID NO: 36729 - DNA, 426 bp, Oryza sativa
gcagcgtcgagcttcttttgcatgatcatgtgattggcacattttgcaatggttgtagacatagtggaaataatgagtttgctggtgatgccggtccaggccttgacaggaccgagtgactggtttgagcgctcatatacttaagctgttgaagtagtagttccttttccatttcaatcttgtgtgttctgaacaagaacatttttttcttctgtttctcatgtgcccttcctgcactatgtgcatgaaagaccccaaaaaaagcaaaagaaagaaaacaaaaaagaaagacatatcctttgaggaatggactgtacatgatataaagtaaagatcccattcttcatgtctggataagctgtgctcttttagtctctgtgctgaatacttcatttctgttcatattatggtgtttactgaccaaat

SEQ ID NO: 36730 - DNA, 409 bp, Oryza sativa
  unsure (1)..(409): unsure at all n locations
ggatcttaagcactgagcatgcagcttctagggcctgtnttgagagctccaacttccatatattagcttcaggagttgagtatggagtggagttgtggagctgcctaaacccaactacacctctctagttcattctatgagagcgcttcacctaactccgctcccattntaggtggagcagaaactatntggctgggctttagctccaaaaaagctggagctggagctgtgccaaacaggcccttagtacacggaagccttttagaagggccaaaacgtgtacaagattaaacaatttcagctagaaagctntcaccacataggctaacaatcanttggaaccacaaataatgaagaagcaatatttattaaagaggattgtcttctagtttatgcaattgtgctaatc

SEQ ID NO: 36731 - DNA, 361 bp, Oryza sativa
  unsure (1)..(361): unsure at all n locations
tggagatatttgctganaatngngaaaaggaaaaggttatgttgaagttgaaattgagctctctcttacgtcaataaaaaaaacattgaactctcatgagctccgcgagaaatggaacatttattgcttgatttttctgcatgtattcctacctttggcagtggggcatcaccgcttaaatttgcgcacagtacattccgttatgctacgaatgcatgctgaggtgcacgatgcgataagccgacaatgttgccgtggaaggcaacatttcacggaagcattgcacctcgaaggccgaagcactgaggcagtctgagcaaaccgcaacaaagctgttcaaaacccggacagaacgtacccc

SEQ ID NO: 36732 - DNA, 478 bp, Oryza sativa
  unsure (1)..(478): unsure at all n locations
acctgcggcatgcagcttacactgcaactcaagtactcaactgtgtgcccgttatgtgatcagatcaccccaaggacaggaagcatacagaggaagaagagctttatccctatgaacaacttagctatatacttacaggcaggaagctactgtattctctcagcaagtctttatgatctcaggcttccagctccgccatacaatctgccggcaaccgaatttgaattcttggaaccttctcttcagtgaccccttctttggccgctntgagcccggttcagaaaccgacccatggtagtgcagaggaggctgtggtgtgccggtctcaatgctggccacaatcttctgaccatctcatacacctcactcatctttgggcgcgactttggtagccggacgagacagcggttcgccacactaccagctttgtcatggacttganggtgtagtgcccctctagccgtgggtctatgatgat

SEQ ID NO: 36733 - DNA, 447 bp, Oryza sativa
  unsure (1)..(447): unsure at all n locations
ctgccggtaatcttanggacgagcgagtgatntccgagagacgagcctccgccctttgtcgaactcacaaatggggggtctcacgactccccgctattgaggatcttccctcgacagtggtgtactagtcagtttgggttcatgggttcgaaatctcaaacattctatttatttgatactacctctgcctcaaaatgtagcaacctaagataggacgagacccatcctagaacaatgtatctaaacatatctcatgtccaaatacattgtcttaagatagaatgtcatgtccagatacattgtcctatgatgagagttgttatattctgtgacgttgggagtattacggttttctctaatatttgcatttgttccatattattggttaccccaatatgaaattagaccgctgcgattgatagaaaatactcccttcatcccaaatat

SEQ ID NO: 36734 - DNA, 470 bp, Oryza sativa
  unsure (1)..(470): unsure at all n locations
gctngagactgaagaagggaaaactatactatgcatacacttcaagcgcaactctgaagctgaaggtgttgcttcctggggtttgttctgtctgagcgtctgtaccacaacagtagagttgattcatctgaacagtcgataatcacaccagcaggctgcgtatataaacaaccccggtatcgttcgttgcctttgtaacaggtgctctcacaaaagtcattntacagctggtgcctcagcatcagattaattgatacaaagaaattgttcgaacagcactatgtgaaaatcaactatgaatatctntgcttctttacatcaacagaattccctaccaagtagccttagaagatgttacttgaactgcattgccttgctttngagacccaaaccatgtcaattcacgtgtttcacggcctccacactttgagcacataatgcttccagtgcccccgcaggctaaagaattt

SEQ ID NO: 36735 - DNA, 452 bp, Oryza sativa
  unsure (1)..(452): unsure at all n locations
tagaaatacacgtagtacacattatatatgatttcatacaaaccaattccatggttgcgacaccatattttcttattaattcaagacttcacagtttcacataattttagtttacaattcatatgatgcaagggtaattaaaaaatcataaccaacataatcccaaataaattagaatagagtaaacaaaggtatttcaataaaaaatcactcacacatatacatatgtaataaaattttgaatggtgatctctctactgatagtattatactaccagtagaaatgatctgatatgttcgttatttactaatacattgattaagggtaaccttttcatttatatattttttttgcagctagatngatcaatctgttggtatttattgtgctagcatcgctcatattccatcgaaataagccanaaagaatataaatatggttagtaactact

SEQ ID NO: 36736 - DNA, 402 bp, Oryza sativa
  unsure (1)..(402): unsure at all n locations
cgatgcgaccgcaacgggctcgatgggggtgactatgagctggggggagggtangagcgtgaccaagcggaagccctatccctcacgcgtgctcgtgaagacgacattgcagttgtagttgggacccgccacaccccgcacgtgcgcaagtccatgacgtgagcgctcccggtcattatgagccacgtcagctggcggcctccgccgttgagctttttcctgccaaccgacacccttctccccacccattggcgaatgccctataggtttgggttgagatatgagtagagggagtgacgtggaagaagatcgctagttggcttgtgggttccacgtgggccctgcactgactcagccaccactcatacaaaccggaaagcaatactaccttgggattaaaag

SEQ ID NO: 36737 - DNA, 446 bp, Oryza sativa
  unsure (1)..(446): unsure at all n locations
tttggtagacgcaactnttttcaaaatctatagctcttccaagttgtctagattctcaactagattatgagaaattgtacttataccatctaaaaataaactagaagaagaagaagaagatggagaacacatcgttttcatatttagactagctgtctaaaactaaactagaagaagaagaagatggaaaacacatcgtttcatatttagactagctggctatccaccagccgcttattaaaatcttaagctcttctatacaaggccatatgtaacttaggccatgtcaccatgctagcaaagcaagacgtcaggcaacaacattagggatgcgggatctgctcagatttgttcttttggagtcttttcaattgcaaccaatgtatgttattcactctcggatgtctaacattcgaatggaaaattattaaaaatttaatgtgaaa

SEQ ID NO: 36738 - DNA, 414 bp, Oryza sativa
  unsure (1)..(414): unsure at all n locations
agctntattacttgcatttggactattataatataagtatttgcatggattatcatcgaattctaaanttagaggtgtaatcagtgtaagcttatgcctcatcctggttgggaaggttatagtagctttaggctgtgtttcgatatcaggcgttcccaactccccctctcgttttccgcatgcatgcttttcaaactactaaacggtttattttttttttaacaaaagttataaacgaaagttgcttaaaaaatcatattgatatatatattttttaaaaaattagctaatgcttaattaatcacgtgctaatataatggaccgtcctgtttttatgtgcacttgttcgtgttgggaactagctggaatgaactcagcttagtcattggagttactccatctgtccaaaataaa

SEQ ID NO: 36739 - DNA, 447 bp, Oryza sativa
tgagcaatgatgcttcccttgtctatagtggcatcatttctgtcctgacattgacatagggacagagtgtcatgccaaaataattgataatttggtttcttcttttccacaagtgtggtctattagtattataattcgcctctcatgcaaagttaaccagtactgtatgagttaaatatagaagtagtatatactttaaaacgaatatatataaatatataaccctattatttatttaatatgattttattcagtaaattgtccattctggttgtaccatctatgtgtgctatatatagtcttagctagttcatttgatatctacttatttcttaatatttactccatattaaagccaacccttattatagtttggaaccgagtggattagtactagtcagctgttcttatacacacatctaatacttaattaattgtgctacaatg

SEQ ID NO: 36740 - DNA, 384 bp, Oryza sativa
ctcagagtggcctgcggcatgcagcttatacggtctggagtgcgcctcatactttatagctgtcagagataaaataacgagagcctcaatagcctcggagaatatacatcgacgttactcaatagcctcaaaagaatatatatcagcgtcggtctataatgcgtaactcagcacaacgatcactaactgtaacaacctaatccgtaaaccctagactccgcgcgaatgtaaaactttcgcctcgctggtcattcaaaatagagcctagactcctaacagactagcaatcaagggacgaccaaacggctccacctatctcttatgtcagtgggtccaggagacgacccttaacctcttccgggctaccactacacatgaagaata

SEQ ID NO: 36741 - DNA, 416 bp, Oryza sativa
gtgaccttagatactcagcttggttaggttgtgttctgatgctagatgggaatgtggttgcctatgcatctcgtcagttacgtccgcatgagaagaattaccctacccatgatcttgagttagctgcggtggttcatgcgttgaaaatttggtgtcactacctctttggtactcgtacggaggtgtacacggatcacaagagtttgaagtatatctttactaatccggatctgaacatgagacagtggagatggttggaactgattaaggattacgacatgagaattcattatcaccccggaaaggttaatgttgtagcagatgctctcaacatgaaaggctattgcaatgctactgaatgacgacagttgccgtgggaattatgcaatgaatctgaaagaatgaatttgggaatt

SEQ ID NO: 36742 - DNA, 442 bp, Oryza sativa
  unsure (1)..(442): unsure at all n locations
agcttgacatccttgtacgtacgcaccanaactttggtcttctaacctacccgggtgaattaattntccatacaatgtgctatcttgtggctactagtgctagcaggcagatgacgacaaggtgtacacgtgattcctagttgcagatcttgtgctacctttttctttttgttttcttcttcgatatgggatgagtttggtttgttggattttggttgatccagacttgtttggtttgctatacttgagtaggagactggcttgaacagtttctaagggagcacttggcctaagaaaaaaaatggattccatttgtggtgagctatagtagaggccctagcccaccaaactaatgacatgataagtgattactccctccgtcctagaatatagcaatcatgatcggatgggacgcatcataagtatacgaatctggacaggg

SEQ ID NO: 36743 - DNA, 409 bp, Oryza sativa
  unsure (1)..(409): unsure at all n locations
tggtttttaaccccccctncactacctctttctaattctacntatgtgcctccctgcttttacacgcttatactaagtattaagttatacatttgatttctgatccgtttgaaacatcatattctttacaattaaatcaacaattaaaaactcagttttgactatattttaaatcataaaaaaataattttgcgggaacattatattagattatatactaaaagtatattaaactccctacaaacgttcttaaactgtcacgtggcgttttacaaacgcttctaagatgtcatgtggggctctaataaacttaaaaataaatcatgcaaattataattaanaagaaaaaaatactctaaaaacatttgattttctttaaataggtacccaataactttactattatatc

SEQ ID NO: 36744 - DNA, 462 bp, Oryza sativa
  unsure (1)..(462): unsure at all n locations
agctttgctgacctctattcggaatacgaatccttgcgatccagtctgattcagagtggattcgcgcgcagacacgagtttcccgggaacaagtctgattcagagtcggatttctcttttcagggcaacaaattccggtggtgtccgtgtccgtttcagtttgcgttggctaacttcaagtatatgaaggtataccttgtgcctctcacttcatcaaatgttccaactcggcaagttttcaagcagacgacgaatttcacctttcaagtggggatcgatctgttccaatggcggcctgtagcatagccaggattataaacttaggggatctacanaatgtcccannaaattgtgctgcctactcttcagagttgtgtccaagttcctagccctttctcccagttactgaaggaagtggaaaaagatgatggtgatcagccatcaatgacagagagtgtcatg

SEQ ID NO: 36745 - DNA, 434 bp, Oryza sativa
  unsure (1)..(434): unsure at all n locations
ngagggtntgaatccatgcaaattntntcttactgttctgatggtacaccttatttcaggtacctaagtttgtccttttgttcggtactccttttgtttggtcaataagctccttttntgtgttgccactaagggcaatttgttgttagagactacattccgaaattcctaattatttaggcagttagaagtctcgggcagtggtaaccaggtcttgcccagcctcacctcccaagctttgagattcgggcaggggcagtggaggccgagggtgccgccgtccacaactgacatcgtctcaagcagtcaagcatccccagcagcgcaaagaaagtgctggtatactctctgatcttctctcgtaaaattctttcttgctttatctgtccactgcctgttcctcttgaatttgaattnnttgacattcccataat

SEQ ID NO: 36746 - DNA, 447 bp, Oryza sativa
  unsure (1)..(447): unsure at all n locations
agctntactggtagntcgtaccaattatcatctttntttaacacatcagcagtgggaggaagatatgacagctgaagtgatcatcaagtttgtccagtcacgagaaatcaacagacgctcccttaaaagaaaaaaaaatcaacagaggcgtcgttacgattggctgaaggcatgatcatcctaactagtaggtgataccctaagctttgccgtgtgattcatggataagtatatattaaatattatcaaaatgatgaaagttgaaatggttaaaaaataatgtgaggaagatgatctgacacatatttgttgatttctaaaatatatactcctccgtcccacaaaatcacgaatcctggagggggaggggttgtcaaaaaaactctcttctatcattttgccacagaaaccttatcttctcggcttgtctcgtctcgttctcttctt

SEQ ID NO: 36747 - DNA, 443 bp, Oryza sativa
  unsure (1)..(443): unsure at all n locations
tcaagtattnntcaaatttcaattcattagcttgaaatcttatatntatttccccccattctattctcatggccctgaaacgcccgcgtattgcgcattttgttgctccctcggtggtaagagcacaacctctcttccatctacatgaacgattctttgcttagtgtgggggctaaaatttctagccttatcctagccttaagttgagccccgggtgccatcgacgcccgggaccccatgtgctggctcttccgtagcggctggctttggtcccaccggcttgctacggtactcggcctggctcaactgtggacaggggatgctggctctagagttttcggctctcacactcgtgcgaaagtaatcgtccatgtagaagganaagagattggaaggagggccactgaaggaaagagcaacagaatgtgtaacgtggggacaca

SEQ ID NO: 36748 - DNA, 377 bp, Oryza sativa
  unsure (1)..(377): unsure at all n locations
actcactgcatatttttcgcttgatgtattcacgggaaacaaaccgagaggagcacctttgttgatggatgagagttaaatntataaccatgaagggttttttcttttgccccatcgcctttgggttattcaagatcatattgggatgggaagagtattttctagtcgagtgaacttctatgagcactcaatcttgaacttaattactacatctgttttaaatagtttgtctaagtcaacatttcatcttatctataaatttataactcatatgttaaatcataaaatatattttaactcaccagaaaattttcttatattacttaatgtgtaaatacaagattataaaaatatgaattaactagacagataaacaa

SEQ ID NO: 36749 - DNA, 442 bp, Oryza sativa
agagaagacatagatggtgagaagactctcaacaacaagcccaacaacatctagtcgaaggattcatctcaagggaggaagctgtcaatctcagaagcttttaacagttacgccgtcttcgagccactaagtgatgtagatggtgaaattggagatgatgataagggaaagaacatctccgatgtttgcttcatggcgcgtggtgaatctcacacatagtatgaagataatgaggtaagtgcttttgaggaagctattaatattttgagtgcaaaacataagaagtgtgagaagatatatataaaatatgaatttatcattgaatctcttaaatctgaaattgataggttaaaatctcttattcctaatgatgatgattgctcacattgtgagggtttaatgaatgagatttcaaacattaagatgttaatgctgcacatga

SEQ ID NO: 36750 - DNA, 375 bp, Oryza sativa
  unsure (1)..(375): unsure at all n locations
cttagaaacgattacctatatctttgctatgtcaagggctagtcattccttccctgcgcttgcatcgnaccaattcatggatttaccccttcgcagtaaagccttcctatactttgcttgatgtgcctgagtctacctcatttgctccttgaaatacaccctctcacactcttaaggcgaccatagtagtactggcatggctacatcaatatgcaagtaagcttcaacttaaaaattacctgatttaacaccaggtctcctacaagcaaatggccaaataatatgctgtcacagtcaatcgtgtatgtgtcatgtggactccatcaaacatattgaagtgttgtattcctggactacaatcatatgattgtcact

SEQ ID NO: 36751 - DNA, 469 bp, Oryza sativa
  unsure (1)..(469): unsure at all n locations
gcttatattattgttgagaaaggatccaattctatacacatgcataaagcaaaatattttaaatcaaagatgtgtanggaaatattatagactccaatgctaccagaagtaccttaaatcacggatgcattagtgagtctttttgcaataatctccacattcttcagcagagcactatcacgaacctcagcacactgataatttagatgtatagtccttggttccaatattgctatactgtccctgcatcatggaaacaaatgcaagtaagaaaaaatatccatcacatatcaaaacacaagtttctttaaatcaaataaaagcatcatggcatatagcaaactaaaatttgaattttttttggtgctacattggtacatgtcagaattgagtgttcctaaacagatgaccaatcatgcatgcacattgcaaccaaaacaaagatgaaaccatgtgatcagatattaca

SEQ ID NO: 36752 - DNA, 424 bp, Oryza sativa
  unsure (1)..(424): unsure at all n locations
taaaccctgcttaccatgtcccgcangttattcatccatgttggacatgttctgctcccacagtgtaatatactctaaaccttgagcccctcgtgaggcgtgagaccttccagcacctctttatgaatattactctgagcctccttgtacttctgaccagtccatcttaagctcaattcggtcagtttttccttctttacgagatttgctgcttttgcatcagcttatgtcacattatccagtttttttagctctagtcgaccaccaaggttcaactgccgcagctctcccaaaatactgcagccagagcaagaaccggctacaaaacatgtaagcgtctgtacgcaagtgacgtgttcgaagtccggatgcatgctttttaaccttcaacattcgtgagttgaccaatgacggagggcggtca

SEQ ID NO: 36753 - DNA, 432 bp, Oryza sativa
atgcagcttacttaattactttatatgctaagaataacttatttgaatctagaaggaatttagacatatcataagagtatattgtgatttttcatcacaatataatcatgtgagatcttgttgtaaagtttaatttgtacaataacagtgtaatcggaatttaaatcggatgagtaacttaagagaaacttctataagaagaagaaaatacatagatattgagtgtactagtagtttttttttggaaagaatggtgtctctttttagcactatccagctagcactctcggtgtagttgtgtccattgtgatattgtcacactcagaacaaacaataacgtgtatcacacaaaagagagaattaaaacattcactagcccgtatagcctatatctaagatcacaacaaatcattatctatggaaagtagaatt

SEQ ID NO: 36754 - DNA, 438 bp, Oryza sativa
acccaagcttaagtttattccagaccaaacaatccttagcccaacagtttatcttcaatattttttattcaaaataatattctatcaaatatcagaggcctaggaaaaaacgatttacctctaataaaagagccaatatttatggactaattaagttttctgacctaaacaaaaagttaccatgccacaaaaaggaatccaagaataatcttacaacactgtcactcacaaatcggaagaaccttttactaagcctacttaccaatggttggatcatccttacagtcctactcctaatgctctactgggtggtccactttgaaattgctaggaccatatttctcaactaacggtgaatgcaaacatttaagatgcttaatgtattgcaatcttatttataaaccagttttactttaagagcttgaattacatgtgtat

SEQ ID NO: 36755 - DNA, 465 bp, Oryza sativa
  unsure (1)..(465): unsure at all n locations
agcttgaacctttgctcgtcccgagtaaaggactaaatgttttctaacttggctattgatcaggagttgctactatgctgtatattctcaaatgtacaagtgcaaggtatatgtactctctctcaaatcaaataatnttatcacgtggcttacccttacacctgattcccgcgagacattgctntaccttgccctgagcgngtgaaagacagaacagcaatgatgagcactagtcacccaatctttattcaactttntattccgaaagttttcaaatgatttttcaaaagaaatctaagttcctcaaatgatcctctcgatcactcaaagtgtataatatgaattcctcaccanagtaacctttgtgattcctactctaaggggtagtatgtggagcttggtagggacaaacatggcatacctgtattcacatttattattaagtcaaaaacttagactagagca

SEQ ID NO: 36756 - DNA, 440 bp, Oryza sativa
  unsure (1)..(440): unsure at all n locations
tatgtgcctctttccacgtcttatacagatctaacgctattgtgttttctgttntcacccagcgcaagcatgatcagtcagctatactccctccgtcccataaaaaatgaatcgaggaccggatatgatatactttattacgatgaatctggacatatgtatatccagattcatggtactaggatgtgtcacatccggtactagattaatcttttatgagaggattgagtaggttgcttaacaagatacacaaatatacaagcacatagcatattttgtgtctctttgacatcatcctaagtccgcatcaaatcgttatgagcgggatttacatagatcagactatatttaaacccgttcatattacaccaagagaaattgtatatacacatacaaaaattggttccagggaaaacaaaattaattctttaatgtttcat

SEQ ID NO: 36757 - DNA, 405 bp, Oryza sativa
  unsure (1)..(405): unsure at all n locations
ttgcgtcactcataggttgatattctgcttacanatcatgtttagtaaatgaagaaacctaaactaatttagagtaaaacttctatattcttactcttagagagaaaaaatatggccggtaaatagaaagcaatagataaacatctaaattaattgtaaaataaaaaatggctctaggttataagccatagcgatattttaatcatgatcagtttaagtttttcccgtcacttttgtcactcagttctagctttgagaccgctaaagatataagtataaagtcttgtcataaaactaattttcgctgccgaatataaacacctttcaagcatatctatatatttctatggaaatatattcagtgtcgcttgatcaaataagaagatacaatctcttattcccctg

SEQ ID NO: 36758 - DNA, 442 bp, Oryza sativa
  unsure (1)..(442): unsure at all n locations
tggttgcttcatcatttgctgcccgctttgtttccgcttattcatgatcatgaagctcanatgaagtgcgggatttttcagcaagtgaactagcttcagctagcattgattttgctgatgtttcactctgcaaagcactggatctctctttctcagcatgataaaacatagcagatataacctcatactgctctagagtatccaaaaatttctgcatatatagtaaaaagatatggaataaagtgagttttatttgaaatacttacagtttgtatttatacggttgaaaagaatacctttagtgaagatagtgtagctggcaagttagttaccaaaagatcctgatgctcctgaacattggaagcaatccagttagattaaaaaaacatagaagttaactaanaaatggaactaaatatttcatggcatgagccgcaatata

SEQ ID NO: 36759 - DNA, 403 bp, Oryza sativa
  unsure (1)..(403): unsure at all n locations
ncaagcttaatattagccatccattcatctcactctattntatcatatccctccattcatttctatttcccatcccacctctcctaacctattttccaaacacacccctaggtgttggaatttacactctcatccaaagtcattatatatctgctcctgttcacaataatatactccctctgtcctaaaataaatccaatactaaatatgaaatacgggtaagaaagaaggggtaaaagatcttatgatcctctttatggagcttctagccaccacaatttcttccagaattttcaggtccctttcaaattctcaactagattaagagatttataaatccatataataaactagaagtggaaacccaacctctttatattctaaaaactagctaccaatattt

SEQ ID NO: 36760 - DNA, 454 bp, Oryza sativa
  unsure (1)..(454): unsure at all n locations
tataaaactcagctgccgtcgccttgggacgactaccgggttcgccagtcactccggatggatgacctcgcggatgaatcccgcctccagaagtcgcgccacctcctcgcggatgaaggcttgtcgttcccgggcctgccgccgcactttctgccggaccggccttgcgcccggccgcaccgcgagacggtgctcaatcacctccctggggaccccgggcatgtccgccggtctccaggcgaagacgtctgcgtttgcccacaggatagagacgagcgcgtcttcctatttgtcgtccagaagaccactgattcgtgtggtcttggacgggccgtcgcctaaggcaacctccttgaccgggacctcgtcgcatgtgatcatccgctgcctcggngtggctgggacggaggggctgagcctctcgtcgccacccgcgggcttggacgctgcggcg

SEQ ID NO: 36761 - DNA, 423 bp, Oryza sativa
  unsure (1)..(423): unsure at all n locations
agcttaactntaatcctaatgcaatacttcatgttctggcaacccgctgttctcagatgtcgctctactacgtactcggacagggaggacttaagagatcttgagggttgtcaccacctttacacctaccttaaacgtactgtgggatacgcagcaattactggaaaacaattacctaaataccacgtctaagcaattaatatctactttattgtttatgactcaccaaagcaatcactatattttagttgattatagtgaacaataatctcgtatgttacttaggaactaaccaagagataattgtcacaagacaaatataaatttctcaagagaatattatattgaatgccgagtaataaacagaatanaagaaatatgagcagattaccgacaacttcggaattcttcaacttcttctac

SEQ ID NO: 36762 - DNA, 394 bp, Oryza sativa
  unsure (1)..(394): unsure at all n locations
ntgtacctaataataaaaagcgagataagatgagagaatctgttcatatatgatcttactgatacgatgcttttatgatgcacacgctgggttctatcatggaatcaatgcacaaactgctatatttaggctggtctgttgcatgcttagcagcaactctccttcctggcttccttgtctcccttctcgcagtgttacttcatcagagctccttgtttttctggctgtacttcatcaaccttctggttcatctccataccttgcccctccttccataattctatctacagttcaacacctaatttgaaactatggaacttccatcagcctgattctggtgctaagaagctgggtttttttgccacttcgccagcaccaccaaaaagctggaatg

SEQ ID NO: 36763 - DNA, 427 bp, Oryza sativa
  unsure (1)..(427): unsure at all n locations
agctngagcaccacctttggagtagcttctgaatgttntttttntttaaaaaaaaaaaactattagactatgccagaataggattcgtatatataagagaaaaccacttgagtggtatttacgacacggaggacatactttcactaccaccaagcttatttacagcatggacaaaagattcatgcaattccggggtccatctcatccgttgtttacttgcagaggcattgctgttgttgggaggaggacttgtgacaggacaaatatcgccactatgggatgaagttgactgattgaaagcaggctgtgatgcagcanaaattggaggttgggccatggactgtaacaaaagagatccataaatatntatcattctgacccaggtagaaacataaggacgctatctatagcatcanggacaaaaaaa

SEQ ID NO: 36764 - DNA, 455 bp, Oryza sativa
  unsure (1)..(455): unsure at all n locations
accttagaatctcagctagccactgcatgtgtcgaccccgctcttgtttcctgtacttggccattcccaacctggtcaatagctgccgcttgccccataacccgcttgcgtcgtccgcgagcttggccgccactaattcgggataccaccattgttctcgagcttgtggttcaacctctacccgccatccccaagtcagtcttcgcctgagctatcccaggctcaacctcgagtagtgcttgcagtccgtccattgcctactacctatcatcaggaggagacagcggatatgttgccattgcagttgcgtcagcctacaacaacagacaaagagtttgaattggcggctcgcacatggtgatggcatcctgaagtggcgatgggcatcagacaaatggtgtcggaaggcacaacgagtggcacgatatcnagaattcacaatcttcgatgtatag

SEQ ID NO: 36765 - DNA, 459 bp, Oryza sativa
  unsure (1)..(459): unsure at all n locations
agctnggcaatctatacccttgaccaatagggtttataagactctgatttgcatacagcttctagaagtcccagtcagccttttccactagaggggccggttgaacggaaaccacaagtttgtgtctgggctactactaataattgtcaaatgtattaggaaaaatggaagatgcacaatgtgaaaaggatctgctggatttctggactcttgggtagcgtacacaccttgtgaataaatggacttggtttaccggcccaataccatagtactatgcccaacaagatgtcaaggttggatagagaaacaggtacagggcaagcaaactcataatgagattccactcgtactaacaaagatcgtctaaatntaaaagagctaaatngaagtaggcagtccatcatggatggagaataaggaataactcaattaacgtaagagtgtaagacgctctttcat

SEQ ID NO: 36766 - DNA, 437 bp, Oryza sativa
gaccaagatctcagcgtggaaggatgtcagatattattagtcagacgggttttttgtcctgcctcagaacgagcagtacaaccttgcgtgcagtttgactaacattccttgcaaatagagctatgcaaaatctgaaagcatcacgtcatctgttcacgaacagaatggtgagcgtataactctgtaacaaataggagtagtaaccgattaactgaacggtcagaaatagtattgagctatactttgcaagtcaatgttgttttcaccctgaatagacccaagattaccggtggtaaatcgaccagaatctgacactgaccttctaacaacggatagcgggatactaattgtttggtaacgacctggaatataaatggggctgatgttgagtaattgctgctacagcatcagcatgtctgaaatttaccagctgcctc

SEQ ID NO: 36767 - DNA, 455 bp, Oryza sativa
agcttcctcgtggagatatgggcaattttggtcactacggcatccaccgttagcaaaaaatatgcaggggtttttatttgttctacggtgctcagtcctgttcccatatgatgaatcagggccacttctaccaatagcattatctctaacctcatctctccatccaccatgaggggtggaatcatcatgaacatatcggcaattcgcacccctactgcatcttcctttgacaaaatcatggcatggcatcgtagaccgatactcccttcgagttcagatctttccaagttccttcatcataatggccacctcgaggtggcctattcttaaatagtcatcttgttctcgtggatccatgaagtccctattctgatgcccatacttttcccttgaatctcaggataatgctcatcaaactgtctgcgcacaccatcttcatgagggaacctgcaatt

SEQ ID NO: 36768 - DNA, 447 bp, Oryza sativa
tcctagaagattcacccaaaatcttcatatactgcgacttacaatcaagctcacaaaggtgagttctttcaagaatgctctgcaggacaacatcttcgctaattaaagccaacagaactcattaaagcatagccaacctgccttgcagctcacaagagtatatgcatcttcacttggagagggtatatatattggtactctcctctagtttattaatggtttgttcttcccaggatctaattcacgggatctccgatcacatagactgggttaccaccatagtataactcacatgggtctcaaacccatctccttcgatgcattgtctatcacatttcgtgatagtcccttcgtgaagggatctgccaggtttctcgctgtttggatgtaatccaacgttataactccggagtttcttaattcctgacagacttcaatcgtcttttc

SEQ ID NO: 36769 - DNA, 397 bp, Oryza sativa
  unsure (1)..(397): unsure at all n locations
cttatatatattcaattactgagcagcgcactcgcggagatatcatagagaaaagtagtgagcagacaccgaccgcgatgtctcgctccggcgtggtggccatggacgccgccggcgccgatgcagaccaagcccggctgcaccagctgggctacaagcaagagctcaagcgtggcctctcgtatgtgcttcttcttcccttcttttaccacacttcattgcgatcattnttcaccaaattaagcttgtgagtgttaatttggcatatattgcaatcctttgttagccttggttccaacttcgccttctccttctccatcatctccgtgctgacgggcgtacgacgacgtacggcacggggctgcgctatcggcgggcagtgtccatgacgctgggt

SEQ ID NO: 36770 - DNA, 452 bp, Oryza sativa
gctaaactttctgatgacatcaaagattctcggtgaacctgtcaatcttgacatattattgcatttagtgttccaatttggcaagtccaaatgtaccacttgtttatatctccatttttactagctcactttcctgatatatgtatgatagatcattaagtgggcagttcttcctgccttcttcacattgtagttctcagtgtatattctctatattcttgatctatacatggacttggaataaggtgttcaccctgaataaggagggaggtcagtacattattcctaccttaaaaatctgaagtatggttgaatattgtattagatgatattcagataatattgctagtttataacaggccaattggtttatacctaagccactcggtcaatgcaaagctatatattctataattcctttatttcttaccaaggaatgaaatgtgccagta

SEQ ID NO: 36771 - DNA, 395 bp, Oryza sativa
gcagcttatgagttccacacgcatacaacttgcttgtctttacttgcttcatcatacaacggcatctgacaatctccacccacttactatacctcctaaaatctttgtccgtgtcctctgcggcttcaatgtcatgcaacaatgtagatagacattgagtgtccaaaactatggtctctcccctaaaggagaaagtacgaacatgccttctcgagctgcggcggtgttctctacatcctgatccaacacttcttcagctgcgacatcaggcgcctcttgctctccatggcttgtccagcaagtatatttcttcatgaatccattcattatcaaatgagctgcacctaatacttgtcttcgaacatctgttcattcttacagtccctacatgggca

SEQ ID NO: 36772 - DNA, 391 bp, Oryza sativa
gacttgttgtaccttcctaatatgctctcttatgtgtttgctcatagtttcgccagcttatggcctccttggctggtgccgacatactcctgaagaacttcttggcactcgggtttataggaatcttcctttctggactctgaggcttcaattgcctcttcacttctgctgacatgtaagcgtcaagctcctcttgcgtgcaatcgtaccgtggctccttgttctcggcggcgtcaacttacaccttctttgttgcccttgtgcgggcaggcggtggtgcttggtgagttcttgacttgaaaggtgctggaggacaccgcgcacgagcctgatgaggagtcggtgcacgagcctgaggaggagtctgtgccggatcctgacgaggaatctg

SEQ ID NO: 36773 - DNA, 189 bp, Oryza sativa
accacacgagcgagctcgcccgacgtcaccctcttgctgctacttcgtgtctgccacgcacatctagcctggagacgaccaagggatgaccagtggtggcgatcgactcggagcatgaagcacctcccattcagggccaggagacaacgaagggacgtctagagacggctgcttgctaccgtaaggatc

SEQ ID NO: 36774 - DNA, 449 bp, Oryza sativa
  unsure (1)..(449): unsure at all n locations
tgactaatgggtggcatatcattatatttatcatcactactatcatcatcatcactttccatgagcttaggagatggagttacccttaatgtcttgccataacacaagtgggagcatagtagttgttatcgtcgctcaagttatcaaagaactcgcttgaggtagacaacttgatggcgattcttgccactcccttttcatcaccggagcattcctcgtcgttggagtaccaagcttccctaggtgagctcgcccggagtttttcttcttgtggggcttgggtttgttatccttccctttgtntttgcttgggcaattgtcgatgagtgcctgtactcaacgcactcatagcatgccttggatgattgcctttntcttgttctcattgcctctcttatcttatcgaagcaggtttccttcaagaagtgcttgaacctcttgacgatgag

SEQ ID NO: 36775 - DNA, 386 bp, Oryza sativa
  unsure (1)..(386): unsure at all n locations
gctgcataaaatatatttaatgccacacaccacagagtgttcattcatgtactattactgtagcaccttaatattttnttcagctctcacaaaaccttttggaagctggtgtaacagtgtgtgtacatagcattttaattgttggggcatatggatgcttggaggggggcaattaattgtgggccccacaatgcaataggttccaacgacctctaactactggaagagagtgtggcttgtgctgctgctgctttaatgccactggaagtgaagtccacttttgtgagagtgtgaagcactccacttcactaacactgctactacttcttcaactgaatccaactgctcttactgatcactcactggctctctctctctctctctct

SEQ ID NO: 36776 - DNA, 424 bp, Oryza sativa
agcttgtgaaacctgctaaattgtttatttatttgaacttaatcaatgtgcaatgcttgctctagaagattgtttaaattgaagtatccctctcatactcatgccatgtttacattctttttgcaataactgtcagtacatgcttatgaatgctcatgcttatgcgtccatactttgtatcaatcatgctttacaagctttatctctgtttttgtccgggctactgagtgcgtttacgcatgagtagtgccgaaaatagcactgagacagcctgtaatgggaactctagctggaaaacttgattgaggtcatacagcagtgttggcacaaccatcacttgctgactgataagatcaagtggaacgtcgtgattgtgctattgtcttttaagaattaaaacaaaatcgtatatataaaagtcatg

SEQ ID NO: 36777 - DNA, 382 bp, Oryza sativa
taatgctaatatctgaagacgttctgttcaaatatgctgcactctcttttgaaagaaacggtgcaccagttgtttctgatgaaacttcaaatctgtcagctttgatggaaacaagctcatagaataacccacggaacatttttcggcatagctagactgcgtacaaagactgaagatgcactgcatatgcttcatgtttgggaaactgcactgaactttagcgtgtctttgaacttgcattcttcaactgaactgtgacatgctgagagagtgttgtaaattccgttcataacatggtttacctttattctctggcagaagttagttgacttgcactattacttcaacatctttgacaaatgccatgctcgcctgtattgca

SEQ ID NO: 36778 - DNA, 450 bp, Oryza sativa
  unsure (1)..(450): unsure at all n locations
taacatgcaaagatgccacatcatcatccactaattaataagatgccacatcatcatccactaacaatcatcacatttaaacatcatgcaaacatgctatatctttatagttnttataatttaagaacttttcaaatacaaacatgttaaattatcatccaacataattcacataatggtttaatgtatatctttattatgtgttatgatatcctatatacttatatagttcatcctcacttagttagtgcttaaatgattaatctctggtacaaattatctntcttcttttttcctctaattaagtcatatcacatcaattggttttagcatttagatgattaatctacggtccgaactatctccctacttttttttcttccataaagtcatanccaccttacttttacatttgaatcaccatctacatactatttaaatttagattat

SEQ ID NO: 36779 - DNA, 459 bp, Oryza sativa
agcttctgttcctagtaaccgctgattaatgaattactattaacaactgacttcattgttttgttgcgactaatcactgtgagttgtgaaggtcgtcggatgaattttgggcgtgctcatcttgtagttattaatggttgcatcttatgtggaaaggctataattacaatcagctaccgctgaaaaataatactgctccatcgatgtattatataataaaatatagtctgtaagtattaattacgtgtgcatgatgtaaaaaagaaccccctctgacttcatcatatgttgagaacattgttaactttaaccattcttatccactctaaagatccacgccatcttggtacagctgataataaaagctgaagccatctttctaaggaaactattctaattcctctaggaatgtttcctcgttaactcaaaaccatttaatgggtatgaaaattctggaaa

SEQ ID NO: 36780 - DNA, 429 bp, Oryza sativa
  unsure (1)..(429): unsure at all n locations
agaagtagactgccgacgantatcaggagacagaggtgtactctngtttcattcgccccggcatattgggacgagcatcgaaccactctctttgcaagacgacancaaaaagttcagtactactgtctccgtgtcacaatttaagtcattctagtatcttccacattcatattgatattaatgaatctagacatatatatgacttatattataaaacggagtgagtagcacatatagaagtcaagtgatttgtactcagtactacattctaatggagtacaagctagcagctgtgtgctctggtgttgtgatggagtgagcctgaactgagaatcctttgtctgaatgctaaactgcagaacgccgtggagccgtcgccgcgtgtcgtggggcgatggacgggcacgatcattatcaacgcgtcgtggt

SEQ ID NO: 36781 - DNA, 340 bp, Oryza sativa
agcttgagtaggagagctggtgttctcgtttggtggaaagttctcgccaaattccttgcgtacatgaaaatgtcgtgtatgcttctttttttgatgaaagcactctgtgcgtggctaatgacggatcccatgtgaggctgtaagcggagggcgagtgttttggagagcagtttggcgacaccatgaatgaggctaattggtctgtagtcgcctatggactccgccccttccttttttggtatgagcaccacattggcggagttaaggatagagagattattgcttcgctgttggtcaaaagaatgtataaccgccatgacatctgctttgatatttccca

SEQ ID NO: 36782 - DNA, 457 bp, Oryza sativa
  unsure (1)..(457): unsure at all n locations
tggaggtctctcgacgtggctgatccccacgggctgggttgatccggttagtaatgtcgtgtgggtaaagtgtaccccctttgcaaaggttaacaaactgttcgaacagccgtgcccacggtcatgggcggatgtgaggtggttcctagcgtagttttgtttgaccactgcttgtgaaattgctgttgtggaatgggttcgatgtttggaaaaatctgcggttgatgggatcagccaggcccgggtggccgtttgaaaagctgttggccgggagccaaccttgatctaatcaaagactgatacattgcacatactccgaccggacgagacgcactgtctcatccatgttgattgagaagcactcatatagttgtttcaaaaatgagtttaattaatatcaatcgcanaaacaatagcccttcctttgaacctgcatttaaacacttaattcccatga

SEQ ID NO: 36783 - DNA, 446 bp, Oryza sativa
  unsure (1)..(446): unsure at all n locations
agctngccncatgtgctgcacaatgggtggacctcatgttgtagccatggacaaagtccagaacgttagaaagatatactcctatctagaaaaaaaaaacacttttgtactttcttttttcttggtcctagacgtatggatgatcttatgctgccgccatatctatataccttgcccatatgataggagcactcgagcaatatgcatgtctcacttaaataattagggcactaaactatgttgtttaacttaagaggggtcaataaacctatcataatattttaagggactctgtttggttagttgtctcactttatcacgccacacttgagtatgtttagatatgtgtttgcttcttatcacaattgagtcatgccactttnnttagccttagaaaccacatgcttttaaatttaaagccaaccatatcacaattgtgcctatct

SEQ ID NO: 36784 - DNA, 462 bp, Oryza sativa
  unsure (1)..(462): unsure at all n locations
gacacataaaactcagcttgagcctagtgtgcnagtagatagctcaacggagattatccatngtatcccgggaaatactttcctgctagcctctcgtaccacgtggggtcacatactaagcaagccaaaggctgaagaagtagaatcagaagaaaaaagcaccgatgcgaacttgaaaagaagtacgtaagatgactattaccagcaccgaatggcctccaacaaggataactattcctagacgtcaaagaggaaatacttttcgaggtgcacgacaagtgacccagcaccttctaagccatggtggcagagtatctgatagtgaagggtcagatcaagtctccttggatgatgaagatgagtctccccgacatctcggcgaggaagagatggaatcaaaggcatgcacccgttgcggtgaaattgaacacgttgctagcatgtgttcacactcttgactca

SEQ ID NO: 36785 - DNA, 367 bp, Oryza sativa
  unsure (1)..(367): unsure at all n locations
agctntctgaanatgtgttatgtctttgtttcttgaaagaagaaatgcaaggccggtgtttccatcttcctgtcagaccaagtaagctacttggtgcattaatgaatgaatgctangaatgcaataacaagcagcttgatctacctcggacaactaactgcaactgtaaactgggcagtagtagaaatacaattagtatatcatcataagttaattacagataattaagctactagctaggtggcgacctcttctctttgggaggcataatgtactactagtaatgaggtttgtgtttacgaatcagagcacatgctccagccactgagccaccagttgatcacatgcacgctcatctcaagcttct

SEQ ID NO: 36786 - DNA, 449 bp, Oryza sativa
  unsure (1)..(449): unsure at all n locations
tgctcttgattacagtaagcatgtccagtaagcctagatatcgttatcttctttatgaaaccacaccgacgcagctcatggttggatctatcagtactacttgacttgcacccaaccagatgaaatattcttgcacaaccaaagttaaaacttatttaaagtcaatgggacaggaaccaccgaagaacactctatcagattgatctgctatgaaaagagttatccaccacacatgatagcctacactgatgccaccgagaaaaaagggggaattgatttttaaataaataggcaagtgggtgctgacagtcactagacaatatggcacacctttccctttctataaaaaggaggaaaaagaatcaagaagtttcaaacagttttgatgtagtggcattgaacttcataagttactcanagagtctagattctgatgaaactagcacaga

SEQ ID NO: 36787 - DNA, 429 bp, Oryza sativa
  unsure (1)..(429): unsure at all n locations
agctnntcggtagttggcaaggcaacaaattaaacatactntnntttggtaattcccaaactttctgctctaaaagattccaccaaaatttggtaaggtgccaaactgagcactacccatcctcaccttaccttaccaaactttaacattaccaaagnttgtttgtttggtttttttttttttttttttttttttgcaatgaagtgaacaagccctaagttccatgcaatcggggcaaaaagtgtaggataacaaatagatgttgtttgtgtagaccatgtacgtattgcaaaggactaagtggaattacctattttgcatgtgggtgctttaatccttttaatccgtgactacaggagtcggaatagataaactatagtagtatggagaacagtatataaaagagaaatgtttgtgcttcccatcatg

SEQ ID NO: 36788 - DNA, 352 bp, Oryza sativa
  unsure (1)..(352): unsure at all n locations
acggaggggactaaggaagagggagtatgctgccggcggtggctgcggctgcgacgtgatgtagcagctattaaaggagttggagcaagcaccactagtgccgtcgtttgaggagatgatgacatanggggagctgcgccgacggtggacgtcgaggtggtggtagtgctgctgctactgtcattgctcgagtcagtcttgctcggcctcagagcagtcgcctcccctcccctctccctaccaaagcaggccactaaatttggtcgtgcgggcgagccctctacgacggtgacaaagtatgtgacgccgtggtggtggatgtggtcaccgcgacacantgcccaaactacgt

SEQ ID NO: 36789 - DNA, 444 bp, Oryza sativa
  unsure (1)..(444): unsure at all n locations
agcttaattcctcccaatctaactcatgccttttcttgatcagncgatcaggtactactgaatacatgtatgttatgtacacggtagcatgtccactactgcaaaattattttctgcagacggccaaatgtgctgcgtgttaattaagacgtggaaagtgcttattttcatagtaatcaatcttcacatgcggctaaattatgccatccgtctacacaaaccaaatttcgccgaataaagaaatcgcagccaagggcagcagcagccgacgacagcttcttcgaatccaatcccaaacatcgatcccaaatccacaccaaatctgatcaaacatcgcccaaatacaccagatccagtcctaattaaactttccaaatccacaccatatcaatcacagtcgcgcggcggcgccacgttgtacttcataatcaataacacagcagc

SEQ ID NO: 36790 - DNA, 446 bp, Oryza sativa
  unsure (1)..(446): unsure at all n locations
cgatctctgagtcacctgcggcatgcaagctngatagccattaattaacaccatactgtctgtctcacacttagcagcggtgggtgctttgaacagcacacattcatggttggtgtgtttggtgaacaaggcgactgatgatggtatagccaaaaaagaaaataatgttgcatgctgattatctcgcatatctcattgtcttttcgtgcatagcacaaaccgggtcatgttggtttgaaaaacgcgagagacacttccattttaacaaacttatctgtgcaatgcgattcacccaagcattttgagaaatgtattcacttgtgttgctctgtcaattcagattctatatgcaaaaccagagatgccatagataactaattcagaccaagtggaatggagaagaaagacacgctcacatttgttagaattgatgtttaacatttggt

SEQ ID NO: 36791 - DNA, 180 bp, Oryza sativa
cctatccttgagactctccgccttttgttggagcactgactccacctgcaacgcggctctggagatgtgcttctcgacctgagactgatgcctctgctgtggctgggtgctcgatgacagcggcagataggtcggttgtttcagcctgtgatgaggttaatttgacttacttactggctc

SEQ ID NO: 36792 - DNA, 464 bp, Oryza sativa
  unsure (1)..(464): unsure at all n locations
agtcgacctgacgcacgcacgcttcgaaaatatgacattatcttatcttattttttatatacttgggagnatatgctagattatgcaagcataacttctgatcaggaatagtccatatgctcacaaattaaattagttgtgtgcatctttaccaagtcagcaattttcctcaacatgttcaaaagggcaagtatgtgccaaacatcaaactttgttgggcatagctaccttcaaattcctcctgaattaggtgagtgccaaagttcaatgactgaaaccataatgtcaatgtgttaaattgacttgcctcaactttttcatcacagtcaacacctaagacaggcctagacctggatacttgctcagcttttgaccggatataaattgaggcacaacgaccactacatcactgtattctcattcagaatagaataaggtattcgcatatggtacagcccaacatg

SEQ ID NO: 36793 - DNA, 395 bp, Oryza sativa
  unsure (1)..(395): unsure at all n locations
tacgcacaacgaggtgagccattagcgcatgattaattgagtattaactatcttaaatttcaaaaatgaattaatatgactttttaaagcaactttgctatagaaatttttttgcaaaaaacgcaccgtttagtagtttgggaagcgtgcgcgcggaatacgaggtgctttctcaccctatatcacacaaacgaacggagcctaagggactaagaaaagctggagcaagatgaaattaattgtgcattntacacgctatatcttgataaataagtagaaatgcttatattttggaacggatgtagtacatttaaacanattcactctgtgcatcttcaaatctgactacataagcttacttcaagtatcagtgttatcattcattcagcaaattc

SEQ ID NO: 36794 - DNA, 436 bp, Oryza sativa
  unsure (1)..(436): unsure at all n locations
acctgangcatgcaagctttctgaactggtttcactaaggatgttgctggtattgttgaatgagagctgcgaatagtacgattgcattttcactctgaggttataaaatgagagagaataatttagggacaactcactgtacgcatgcttttttttaactactcacaccatattgacagagaataaaaattataatattacaatcctgcgagatcataaccaggaaaagaagagaaatagccaccacccacacaccaatagctccaacacacagccccgagagaaggctagcaccggaccggtcgtcactaagcgtgaccggccgccgctaggccaacaaaggagtacaagtgagatcgcccaatacccaaccctaacaactgacaccaaacccactctaaccacatcttctggattaatggagagagggtgagat

SEQ ID NO: 36795 - DNA, 246 bp, Oryza sativa
taccgacgcacgacatgggagatggacacgagcgactgcccacgacatcactgttaatagactgtactgtttcgataaccatcactatgtaataacgcagtctacgctgatctcactttgactatataagagcagatgctcttatactaaccaagacgaccttcgaccatcatattgatgacggcccacacgagctggtggtatatcggtgattcgcaaatttgatgctcagattcttccttgttc

SEQ ID NO: 36796 - DNA, 435 bp, Oryza sativa
  unsure (1)..(435): unsure at all n locations
agctnnttgtataactggttccttttgatacttctatgtgaacacccattgatccatccatagtattatgaatatgttgtgtagacgcaaaagtagaagtagcacggtattgttgataactggctattatagagccaattntcttatcagaataagttttacaagcatcttctaccatatttttgtcaaaataagcactaaaatatgcatctacacaacgatcaatatgttttcgaatggcaagacttggatcgggcgaattggaggttaccttatcatcaaagacgtatttgggaagaggaccaggcttgagaaccacaccttgatgggtcctaatgcatgatttcatcaacagcacctgtgtgaaccgcttgtccactcctccatgacttgacattacttctcatcaagatcctccaatgtaaccttattgat

SEQ ID NO: 36797 - DNA, 395 bp, Oryza sativa
  unsure (1)..(395): unsure at all n locations
taaaattcatctatttataaaaagtttgtatatcaaaagtttttatatataaagtttgtatatcgaaagtttatattagtaaagtttgtatgtataaaggtcaagttgtattaaagtttgtgagtagagatattagtaatttgaataggatttattaaaaagaaaagttcaaaaatttgggtaaaaaatctgttgagtagaagatgttactataaaaataaaagattatgtatgccttagttacacaataattatatggtaatgctttaattacaaacatcacactattttttntagcaaaatatatgcataccgtcaacatatgcaaatgattgtacctctaagtacatgctagctaattaaagtgtcggcctgtatagttgcatgctactcca

SEQ ID NO: 36798 - DNA, 433 bp, Oryza sativa
  unsure (1)..(433): unsure at all n locations
tacatctatgtatttggtatattcanngcccaaattctgggagaaagtactgtcagctatcataacaatcacggcatagaacccacttggtttgcagcctatgcacacactttggaaatcaagaaacagcaggattttttaaagatggcaaactggtatttcagacataattcaacaaatcatcgatgctctaaaactatggagtaacccggccaatcccaacaccagagcaaaaatcaatctctggtctgagacaatcagatgagggtaatggtaatttagcttcttggcaatttctggatattntcctccttctatctcctttccctttttttcttntttcctgcttacctttttcangaactcgtaccgtcattttatcatgaaatggtatgaggagagctgctctaccttttcattaagaaaaatatat

SEQ ID NO: 36799 - DNA, 455 bp, Oryza sativa
  unsure (1)..(455): unsure at all n locations
agcttcaatggttgcagaaaggatacaactggttagaaggattttcgnggaatctattgtgcagtgttaaccacaaggtaatacatctgtggtgtagcacacacataacaaaacaatcacccacacaatcaacagcacacccccaaaagaaatatgagtgtgcacatgcagtctattaatgggtctaactgattatttnttgttaagcaagaaaacaagtgaatgcttttatttttcatgtcgtttggttgttgttatcatactcttcacccctttttctgtatttgcagtacatttgttgtgtcagctgcaattctgaaagtgcgtacagaagaagttgcagaacttgtccttattgctacgcataatgagtgccaacgaaggtggggaaatatttgaactgtttagtccataatgaactctgttatntatctggtgtaatctagtttgcatat

SEQ ID NO: 36800 - DNA, 451 bp, Oryza sativa
agcttgccttgtgaaggagtcatgcacatttcttatcattaatgctctcaccggctccgggtgcctcttcggcgtcctcaccgtccaagcctcatgttgatgcattattggggtctaataattaaatttggtttgtttagattatgctctaggaaaacctggtgcatgtattaagttcaatattaaactagagtcttatatatgtgagttaaattggagtgtgatcaagtaatcttagattgtgtgatattggaacaatttgcatctatatagtatttttgcgagtgaaacaattattgtctttactttgtttccgggaattaaagaatatcttttgggggcttataattctgtgagggtagttatttctgcttttcactattaaaatagattcctataaaaaaaattcctatatacccagttcaaaaagttcaaaagagttatataataa

SEQ ID NO: 36801 - DNA, 454 bp, Oryza sativa
  unsure (1)..(454): unsure at all n locations
tactcacgctggctgatgtaaaaagtacataacatacatgtgtttatttatataattagaatcagatgagtagactgtatctagtagagtacgagcgttataaaatagactaaataaattagaagtagaattagagaacctaaaaaataattgtgatattaaggcattaccagagaattaggacatacanaacaccgaatttaaagagcaattggtaacactaaaagacagtaatactgctaaaataattcaactaagagaggccataactaattctggaaataaatatatagtaagattgcctttcacagaaatattacgtataagaatccctgttaatataaaattgacacccaaagtatcttattaaatattagcactagtatacaccgggttaccaagatattatttatgacacagtattcataagatcgtctgaataattcacacaatt

SEQ ID NO: 36802 - DNA, 452 bp, Oryza sativa
  unsure (1)..(452): unsure at all n locations
agcttaatgttttcactttaattactttttagtttattaacttaatgttgtactgggtcattctangtatcgattcataattcattttttgtatggcagactgggagacatctattctcgatcaattattaagattcaacagacaaagcaagcaaattcaactggtcttttagtgttggaaaatttgactccttggttcatgaaaatgctcaatatttgtgcttttgcatgctcaatctgggttgatgcgttgtatgaaggggagctatggtaaattgtctaattttgaagtcactcaattatatgtttcctttttgtgtgaatcatacaccaatctcattatatgtttaattggacatatatcgtgttttaactgtttattcgcattaccaaatattgctgtagcgttagcacatgcatgttactatgttagatagtaagcataatatgta

SEQ ID NO: 36803 - DNA, 409 bp, Oryza sativa
  unsure (1)..(409): unsure at all n locations
gatcaggagtcgctattatgctgtatatctcanatgtacaggtgcagggtttgtgtactgtctcttanatcanataatctttggcacgatggcttaccgttacccctgattaccacgagacactgcctttccttatctttgagcggtgagaggcagaacagcaatttgagcaccaatcacccaatatttattcaacattcattccggaagtttttcaaatgattttgcgaaagaaatccaagttcctcaaatgattcactcgatctctcagggtgtatcaatttgaactcctcaccaatttgcctttttgattccaactctaacgttgatatgtgagctcagtagggatcacacatggcatacttgcattaacatttattactangtaaaaactatgactacatagatg

SEQ ID NO: 36804 - DNA, 448 bp, Oryza sativa
  unsure (1)..(448): unsure at all n locations
atcctcagactcacctgcggcatgcaagcttgagcatatatacaatatatatgtttgggtttgaaaacatcacacgaaccacacgtgttgtccttttatttacggcaaagtgttgcctgaaattctgaaaccacaagcggtgccagcatagcacggtaaaaaaaccctaaccactaagtattgcacaagctttaaaatgtagcagcaccttctgcaagcagaaaacttgaaaaggctggaactttttacatgttaaactagtaagaaattatcctttacagcatttcaatggagggcgtggtctggaaagatgagatgccctcggataccgncctgacaaanattactttggcagacgttggacctataaaattgttggtcattccttcagaactgactgtcactctgtaagtaataagctcagttgctcaggcaacaacatgcaaag

SEQ ID NO: 36805 - DNA, 374 bp, Oryza sativa
  unsure (1)..(374): unsure at all n locations
gatacttctgttacaccaagtacttcaatttactatcctattatctctttattagagcaagtttaatagtaggctataagctatttcatccgtttcatattataagactttctaacattacccatattcatatatactgtaatgaatctagacatatatatgtgcctagattcattaatatctatatgaatgtggacaatgctagaaaatcttataacctgaaacggnggtagtagtaactagtaagttagctttagtatcaaacttgctctaactatttctgctcccgtaatctccgtatagtggctactgatttgtctgctcaattaatctactctacaanctcaatgctggttgatcttttaaccatttct

SEQ ID NO: 36806 - DNA, 413 bp, Oryza sativa
  unsure (1)..(413): unsure at all n locations
agcttatatgcagggtattgtgcattatttttgattagaanatagnccctgttctaaaccaagagattgagtgcaagtaagtatttatgatgtgaagtaggaaactttccctttctcccagatcatagaataaaaatatttctacttcacaggatcttatacatgaaggagcacaaagaaatgtttcaaatattaacaaacagaatggacctgtttcaatgagaaatttacctcggtggtgagcgcgggtggagcctggtttgggcactgcgagggcaaccttcttggatgatcatccgcgacgggcggaggtcaagggcagagctacagtgtggccatggacgacaacagtcaacaggtctgacgcangtaactacacattgtccagtacggcgttgcaagcgatatgatat

SEQ ID NO: 36807 - DNA, 453 bp, Oryza sativa
  unsure (1)..(453): unsure at all n locations
tcgatatcttctcaatggtttgatggattggtgtcactggcattatcaccagcacgtttacttcatcggccctgacgtctccgccgttgctaaggggtgactacgtcctcaccgtcggttacttttgtcatcaccgactctcatcgccgacttgttatttcgtcttcacggttggcctactatgcaactgccgatagaggatctcatcgttatcatggactgctacactactattgactagatcaacgacatggttatcttcatcaaacatcctgtcaagtctcttcaacatagcctactctgctgtcgttgatgggcaacttcgtcatcatagccggctatctctgttgccgctaatcatcattaccgtcggatgcgtttgccatgccgactattntcttcatcttcataattggtggatttcgccatcaccgttgatgcgcgtctacgtct

SEQ ID NO: 36808 - DNA, 312 bp, Oryza sativa
acatttaatacgatcaaacaagagtggaacaaggtataaataaacacaaggacgagagtcacgctctccacacaaaactccaaaagccgaaagaaacgaaaaccaccacaacgactatgattatcccaggaaataaagggggcctcaccgactcagtgccagacatgcaaccacacagcatagcgaacccacattcgcatgtcctgggcgagaaacgacaccaacgaagatgcactggaagggactatcaatcatggagcaagcaatacaagcgcatgcagcccccgctcaatcctgaaaccaggcgaaacg

SEQ ID NO: 36809 - DNA, 407 bp, Oryza sativa
atctgcgaaccgcaactaggcgccttcaatcagaaacctataccagaaccccataaaatatcctatttaggctaattaatagcgcccttagatagatcaacaatttacgaatatattgaaagtggaacgggatcattcggagttacggatcgagagtatgaatttcagaagtttatttgaatttctagacaaggaaatgatttatcgaatcttctggaatacgataatttatggaacaagggataatgatttatcgaattttctggattaaagaaatgatttattgaatttgtggaaaagacatatggggccaacatatggtgagagaggagtgaatcgcaggcgacacatatggacttttggctactgtgtttggcggagggaataatgatggacatttttctttt

SEQ ID NO: 36810 - DNA, 386 bp, Oryza sativa
  unsure (1)..(386): unsure at all n locations
tggtttccttaacctccgatgcttagcagtaagctccgcaattgatgcatttctcttttcttttgcagaatgaagtgatgcttgggtttgctctaacaactttacaaacattggatcagtctatttaagttataattgctatactatataactagaaaaggttttagatttatagctatgtgttttccacattattttagctaatagaaacaaacaatggttagctattatcatgactatcaacatgacttttgagcgatgtgacaaatatgatctcaaatttagataacatcctaatacagttacagcattcgaaatatgacaactttaacccctatttctctttnttgtattatcatgtccatacaatctgttaaaattcataa

SEQ ID NO: 36811 - DNA, 443 bp, Oryza sativa
  unsure (1)..(443): unsure at all n locations
tcttacgcgctnttacatcttcgagtttatttgattcttatttactcaatccaagngcctgccgtgccaaagatacctccgtctgtgcgggtgtctcatcctcatcatctggctcataactccaacgtctggaactctctgaatgagaacgtctgtgatttctctgacataaatcatcagaatcaaaagaccaataaaatgtctgttgcccacggaaagcattgcgaaacaccgtttccggntcatcttcatcacttgtgcaaaactcaaatccacctgttctctaaacaagaaacaacaaaattctataaggttcaccttatgcattatgcatgtgtcatatccagctaaaatatttcttgtaactganatatttataacataacagactacattaaacatatgtgaattctgaagatagaagtgctacacaggacaataat

SEQ ID NO: 36812 - DNA, 411 bp, Oryza sativa
  unsure (1)..(411): unsure at all n locations
ctcttcttcattttccacagttagcctgatctgcctacctcttaaaactacagtgttggctgccaatggaagattgtatgtgtgcgaagcttggttcttgcaatctatggcagggaattagattctggctatatatgcatccgaaggtctcttcaaaggggtttatgttgaatttcttgttctgttctttcttctgggtatgccagtatctctaatactctattgttgcaggactttttgcgccaaaacaataccggaaagttactatggcaagtatttggcatccaagctgcacccttgtgtctctttggcatccaagagcacgaagacattatcgggatgctttccagcgttcaggttgttacaaaagtcaatgccaactttcatctgntaaacatatgaaatccgcta

SEQ ID NO: 36813 - DNA, 485 bp, Oryza sativa
  unsure (1)..(485): unsure at all n locations
ataaaactcagcttcacagcttcacattaatctcccatcctctctcataacatgatcatagagccgcacttccatgctgtggaacaccgcatgtgcttcatgttttgggtacccgggctttggaagcaatatattggcacctggttggccaaaaacagacataacaatctcgattgcttgggtacctccagatgtgaggaaaatatcatctgtgcaaagcttgtaaggaagatcacaggataggtactctgcaatagctctggatttcaacagaaaatggcaacaaaagcaacacagagaatgtttattagtacaaacaaggattttcacttttccatatactggtgaaagactatcagcaattgcttaatcatgagacantgcgtgattaattaaatatgttccgcattctttacatgatttcacatacagtattcatccccgttctttanatatgtttgattaacttaagtatgtgtgattat

SEQ ID NO: 36814 - DNA, 453 bp, Oryza sativa
  unsure (1)..(453): unsure at all n locations
agctgtgcctgagcccaaggaatgtgtgngtttttacaagagaaggcaattgcttgctactctcttaaccgataaggcgaagttatgtacttactagatacggtgaagttatgtactattaatatatatagaaagtatagatatgtgccaatatgtatgttaggaaaagaaaaggaaatataactcagaggagctggctagatatactcttctaaaagaaggcaatggtggtggtagtgaatctgctagactgccacaccaccaagtctatgttatattttcttaccatctaatccttatgtacttttatattacaagatagtcattctacacattgtggctatctatttcatccctaaaatcaagtttatctaccggacgagtgcatgcatataattcaaattaattcatagcagagcacagacatttaaatttcaaagaaacacacttgag

SEQ ID NO: 36815 - DNA, 357 bp, Oryza sativa
  unsure (1)..(357): unsure at all n locations
attggtccgagcctgggatgtgattagttggacgactttctctaacagtaaaggatatgataatactggagattatttcaagaagaaaaaacagacaataattaaatgttgctgacgcctcatgtaataacaatatcggtaccattgcttgccgtagcagcttcgaatggantagcgcacctgatcttaattaattatgttctaccttgtctttctcccctcagctcttaattaatttaccatattgctgcctacgcgtatagacgtgtagtgtaatgaacgccgcgctagttccagagttattctgtaaactaacaacttatctatcacatccaaacgtctctacacataccaact

SEQ ID NO: 36816 - DNA, 449 bp, Oryza sativa
  unsure (1)..(449): unsure at all n locations
agcttcacttgttttaanacttatttacctanttgatgtgctnttacagaggcaactagaatctctatgagcacagagagcaggtcttgaagacatgcttaaagaaatgaagagnaaggtactatcttttattgcttattttgatatcgtgtacataaactactataagtcccagacatatgttatgacagattaggaatttcttttgttcagtattagcttgttgataatcatgtagatgacttttgttttatgtttaaaagctcatgcaaatattctgattcttctacatttggtcgtatgtgcatactagggaaatatccatgtttttactttttttttagaatgcacgagagctgctttatttcattaagacgaaaaaaaccagccatgcaaccaagggctcacaagctctttcacaaatagcattactctttttttttttacat

SEQ ID NO: 36817 - DNA, 440 bp, Oryza sativa
  unsure (1)..(440): unsure at all n locations
ttttctaggagatgacttaatacgttgattangtatttnttagttgggaggacactgtttgtgaagttcttttttttttcaagaagttcagtagttctaaactatgcactaatttggaacatcttggaagcacaacacatagtggtggggttcggcgtagtgtggtgggtgtggagtgtttggatgcatcaacgtcagcaacagcaggctacaaaaaacattcagagaaaaaaaaaaggttgccgtctgtgatgcgacttatctgaaattccccacgtacttttgtcataccctgcatcaaaacttccaagatataataaaaaacaggatcattcatcacaggctatgattaaagcaagttaacaaatgacacgtnatttgcactaatctagtagccgacctatacaatatttagatacatactgatacatactaacacc

SEQ ID NO: 36818 - DNA, 414 bp, Oryza sativa
  unsure (1)..(414): unsure at all n locations
atgatacaacacactgtaatatctattggatttgtatgtcatagacttaaggcctgtttggttgctgccctgtgaagaaattgcctgacccgatactagcctgagtataacgcgaggttctttggatgtctccctgggactcaagattccacgcctggcttgatgtcctcccgcacgtcgttagcctgagccaaataggtcgcctgagctccaggcgaatccacttaccaccgtaatcttcttcttctatctggagagaacgataggatttcaacagccacacgcgtgcccccgccgccgccgnctgctgcatcgtcacgcggagctgctgcagttgttgctccatcgccgtcatgtgaatcagccacctccatccttgctggatcaccgaggaaaagctgactcgcggatcct

SEQ ID NO: 36819 - DNA, 414 bp, Oryza sativa
  unsure (1)..(414): unsure at all n locations
agcttcatgtgctgcaactgacgagttggtctctatagctgactccgccctatccttctctaatcgcgaactggatatatacacccctcgctgttgcgtgcagtataagtagatggtaataaactcgatcagtgttatatatgttacgtggcatgtagctcttaggctgacaacccttggttgagcaaagaggtgttattatgggctggtttggtttgtggcctgaattggctttgccaatatttaacaatttcaatagtgtttagtgtctatttagtttgaagccaaattttgacatgtctaaagaaataggctattttaatagtgaaattgggttggtttggcttcaatccgaacacaactntaccttgccacatctaaccataccaaaacttagcaaaatttgatattgac

SEQ ID NO: 36820 - DNA, 458 bp, Oryza sativa
actagctgcaatacacatgaattgtacaggagcttaagatgtttcatacttgagcaacaaagcgatcaaaacaccagcacatcctgcatccagccgctaagtacacaggcaagataatatcaagcacgtaacagatgcagccagtaataatctcacaagagccaacaatagactccgatattacgcattgacacataaaacacattaaggttttgatagataaaaagatctccagcaggagtgtgacaccacatagtctgtaaggaccgtctgggtttattgaccaacattacagataagcaagcgcacaggacacacgaacaaactcgaagcactcataactcgtaggaaaagcacacgacgatacgaactggaaatattcatggcgaacaatactcaaaagacgataaggcgaagtatgcgatgaatgggggacgaggtggacgcgtcactcttcc

SEQ ID NO: 36821 - DNA, 446 bp, Oryza sativa
  unsure (1)..(446): unsure at all n locations
agctngcatggtaatggattatggtaatttcttgacttctgtacattntggtaccttaatcatgaacaaaggtaaagctctgggtactacaagatgtgtaatgtagtgtacatgggtactgcagcatgctctatgttttgcccactgcagcaaccaaatgtaaacttccagcatgcatgcatgcatgaacatatcaaaataagttatgggaaaaaagcagtcaactgaagcatttgtttgcgcacaaattgaaaataaccgatgtgaagctaacaagcaagtagagtagcacaagtagagtgggatgaggacattacttttgtaattacaaactctttatggtgatatagagtagtactcttttttaatgatttataagtaaagcaaattcgtcagcaattcagaaatccaagggagctggaggaataccatctatggaggatact

SEQ ID NO: 36822 - DNA, 318 bp, Oryza sativa
  unsure (1)..(318): unsure at all n locations
agtgctgtcatatgcgaggagaattcttcgacccagagggtgccctaactacaagtgacgaattcaagcaacttcgggagtggaacaatgctatgccataatgtaactagatggtgtatttgaagtgacaatgtaaaaaaatattggaatatatatattttgataacacttttcacttatgcaatatatgtagttttctcagtactaaatgcttgataattactaataatcttcctgcatcaatttctattaaataactaanaagtaatatttgggcaaattattattgtatcaaatttcaaaaatttctacctatct

SEQ ID NO: 36823 - DNA, 427 bp, Oryza sativa
  unsure (1)..(427): unsure at all n locations
caagtcacctgaggcatgcaagcttcaccgctntgagtgatccacgatgtcgttcttttgggaaaggacggcgaaattggaaatgaagatggagcgagcaacaagggaactccatcacccaagggagccactataccttttgagtacaacaaacttaccattccctctcacaacttcgtctccgtgccttccgggcgtgctcctcaatttgatgggacatattacgccgcttggaagcacaagatgaagttgcatctaatctctttgcatccaagtatttggaaaattgtgtgtacaggtattgacgtacctcatgaggacatggagctcacttcggagcaagaacaactcatccaccgcaatgctcaagcttncaatgcaattctctccgccttgagccggaagagttcaacaagggttatggact

SEQ ID NO: 36824 - DNA, 385 bp, Oryza sativa
  unsure (1)..(385): unsure at all n locations
agatagtagaatattgttcataaaagtcccttgcctggccaaaacaaaataattcacttttattaaaatttattttcaagctagacaacttttcaaacacagataaaatcaatttcagattcttggcttggtgtanatcgtgcctccgaaaagatgatggtatcatcagcatattgcaaaatagataaaccatcatccaccaaatgtggaattaccccattaatggtaccaacatctttagccctcttaattagtagagctagcatatcagccactatgttaaagagaataggagacaaaggatccccttgcttgaggcccttgtangtttngaaaatttcccaatttgatcanttactntaatatcaacatgaccaccctgaac

SEQ ID NO: 36825 - DNA, 456 bp, Oryza sativa
  unsure (1)..(456): unsure at all n locations
ttaagcaccgcggctgcaagctttcaaatttgcgtaaggctntatttcttatggtccaacatgactaaatctggtaacactaaaatgtttgctaaatttagtaagggtntcagcaaggaagtgaacaagcccaacatctcgctcaattcgncgaagttcgtacggtgatattttgacacaggaaacatggngaagtcatgtgttatactccattgtagccagcaatttttgaaagcctttaattgagtattactaggggattataacacctatttttcttgtattgattacttgctttgaatgaaatttggtagtcgtagtacattccagataggccggagcggaacgtgtttcttgcttgttctgccagttatacatgacttgtattattgcggacgttctggccatcgtgttttggtggtctagtactcctatatgaatactggcatttttttg

SEQ ID NO: 36826 - DNA, 304 bp, Oryza sativa
  unsure (1)..(304): unsure at all n locations
ctggtcagtcttgttcctgccaagtcagtcattgctattcgtttcttttttgctatgactaatatggcaatgatgtgcaaccttttgaatgatagctattgaaaccacaacctattcatgcatgangatgaagcatgatatgccacagattaaccatgccatgtatggaattacagtattacagagtattttgtgtnttatgttcaaccgatacattaacagctcaatagttatatacttgtctaggtcngatattagcatactgctcatgctacattggcccattacatacgctgtatactta

SEQ ID NO: 36827 - DNA, 451 bp, Oryza sativa
agctattcgataacctcgcattggcagtatttcttcctatgaactttcatcctcatgcactctaggcgtacacagtttctagcagtgagaggagttctggcgcacccgggaaggaaagcttttcatacacacattaagttataatcatgttttaaattatcatatggcaatcctaccagtggcaatgccactgtagagcccctgcctcacacatcaagaaaccactatgcttgggtactgcctctgctcagctatttactctgctaggtctatccccatacgagaagtgtggttgtacggtgtcgtttcatgcttaacttcatggctcggtccttaattgactggggacggctctagcctttcccggataccacccaattcaccgcccaccccaggctaaaacatgtatttaatatcattcctactttctaaatcatgccattgttatcat

SEQ ID NO: 36828 - DNA, 451 bp, Oryza sativa
  unsure (1)..(451): unsure at all n locations
ttaaatacttagtttcatatatattagttgctntggtgaaactagcctgcgggtgaaactcttgctattctaacccccgctgagttagtccgttttgctccattgtgcagaatgaggaggcgattgtcttatctgttcaatgggtccggctcttcatcaagtcatcataatgagtctagcgctcgttcatccactaatctctcgatggaggatgccgacgctccgcgacgtctcctaaatgatgctgatctcgaccttgtcagtgatcggaaaagacaagcctactaaatgctgagagaccgggagtatgctcacacgcgagagtactctccggagctactgaaaaagatacgtatggatattaattttcntctatttggacagctgttggttggcagaggtttgctgtggtagatgagcctgattcccatntgcttactgcttggtattc

SEQ ID NO: 36829 - DNA, 422 bp, Oryza sativa
  unsure (1)..(422): unsure at all n locations
aagtcacctgacgcatgcaagctngcatctgtggctcacttctcgggttcttgtataagcgatcaaactgccaaagggtttcattaaaatcaccaataactagccaaggtaaccctgagttcagtttgattttcctcaacaacgaccacatattatgtctgttttctgccctaggttctccgtacacaaaggtagcatgccacaacagatcatcatgggacaatcgcacatacgcattaatatatcttttatttatctctctaatatcaacatagatagattcatgccagaacaaagcaagaccactactcatcccttcactacttattcccacaaaaccactaagccccaatctcctacgtaactcactgatcttttccacactctgtctcgtctccatacgaaaaccagctgggaacgtg

SEQ ID NO: 36830 - DNA, 453 bp, Oryza sativa
  unsure (1)..(453): unsure at all n locations
gcagctccaagaatacctgtcagggctttattgacttctgctaccggancacgaagaatattgtatggtgtagcggatgacctccaccttggtgaacccgctgaggtacttctccacctcgtgccactcccctccctgcaccaggtcttcaaagtgcttcatgttgaagcagaaggccgactcctgctccaacctaaaccgaccgaaataaccccaacaacgaatgggaaacaatcaaaaaccatattcaccaacataatgggtcaaaatccctcactccaatcaaccgaataacacgcttacttgtgcaccgactccttgaacttctcctcatcgaggaactgcatgatgaggaaaaccagcttcctggtaagcacgacatggctccgacgatcccaagctgtcgcctcagctcttaaagccgaactaaaaaccccgcttccgcggcagatc

SEQ ID NO: 36831 - DNA, 330 bp, Oryza sativa
  unsure (1)..(330): unsure at all n locations
accctggatatacaacaaacacttttttaaaatttgttgttgcccttttgacaagctagctagctaagccagcgcataacatacaatcggaaaaattgagattaaatttgcatggtgtggatgcatacactctccaactagctagatcgtacggtgagtttgaggacatggggattgaaaagattgataagatacgcacagccaggcgagccattatcacatgattaattgagtattaactactttacaatttaaaaatagattaatatgatcttttatagcaacgttcttatagaaaattttacannaatacccctttagtaatttggg

SEQ ID NO: 36832 - DNA, 456 bp, Oryza sativa
  unsure (1)..(456): unsure at all n locations
agcttcagcctatccagtgcatacttgtttgttgctgcgagaagcggctcaagcaggtcggatgtacctaacaatggtggcaaaacgtccgtgtacacgaagtgtagcagagctttgaacgtcgccggctcgatgtcgtgcagcgtgacgcacggcatggtggcctcggccatggagccgaggagctgcgccctgaacaccggcgagcgcgcggcgagcacggcccggtgcgcgtggaacgtctcgccgccaacggcgaacgacgcgtccgagccgtcggcgctgccccccatagctccgagttgggcacccagattggggggcggcacggngataggattgccgtggacgtcgttgcgcacaaccatgaacccaacacgaatgtgaccgtgcctttgtcgctgacatgatccggctgtagatcactctgcttgacgaagtgacgccacccagtga

SEQ ID NO: 36833 - DNA, 208 bp, Oryza sativa
  unsure (1)..(208): unsure at all n locations
tggtgctgacaacaganaacagcaatgctgaacaccaccccgctganagtaagcttggtgaacaaagtgattacctggngtgcatcatgagcaactccagctcagagacattgtgcaccacagacttcttgaacttgttggngaggtagtgcctggtcttcntgtctgagccgtaaccaatggtgggcatcaaggtgcatcccttgac

SEQ ID NO: 36834 - DNA, 441 bp, Oryza sativa
  unsure (1)..(441): unsure at all n locations
cctgtgctgcagcttaccaagatggctagacttcttttgtcttccaatctcccataaagccggccggatgaaggcgaccacgtcgtcagcatatagggaaatctganatggaatccctaacggtctcaacaattcttcactggggctcagcatatccatcgcgatgatgaagatcattggggaaatagggtcaccttggcgaacacctctcctgtgcaccaatgggccgccgggctccccattgattagcacacgcgaggaagcagtacggaaaagcattgcaatccaagaacgccatcgatgtccgaagcctttgtgctctagcacctccaagataaacggccaagagatggtgtcgaatgctttggctatatcaagtttagcaacaccgaaggaaccttgcgatcgtggaggccgttagccgattgcctgacaagcatg

SEQ ID NO: 36835 - DNA, 426 bp, Oryza sativa
agcttatgagccatgcaccacagtttctttttgtgcggcgaatacggcccatgatctactcatgtccacacagcccaattgattccttcacgctatataaagcttgtactggcattccaaaggagaagaaaaaagagagtacatctgaatagttgctctcgtccacaaagcacggcccagataagatcgccaaacatttgggaactccgtgtatgatacgcagtactagatctcgtacgttgttatctttattacttgtgcgtgtaaccgttgaatcgctgattgatcgaatggttatagttttcaaaaagaaaaaaaaactgaatggatatagaggatgagtatctaacgctgtgttcgctgaggggagattgaactaaaacatctgcaccgtaaacggagcagtccattatcacatgattaatt

SEQ ID NO: 36836 - DNA, 474 bp, Oryza sativa
  unsure (1)..(474): unsure at all n locations
actataaaactccgctttggtatggcgagatctctagagcttcnttaagcttgtacccccaagccttctgtgttgtgaatacatctctatgaaaatatttacagtgtgtagttcagtagagcaattgatcaacatgagtattatattttgatatgcgaatgttgttctcacaaaagaaaagtgttaattttgtcgttctaattctataggtaaaacgactgcaattcatgaattaattggttgtacccaattactacacaaaattgatcttcgatagggcgcacaacgtgcgccaaaatgtctagtactatgtaactattccatggttgtatgcaaagacgagggacggtagcagaagcaccgatgatcaagatgacaatgggaaatccctcgccacaatacatccccgtcgcacgcaactacagtgatggggaacttntttgctatccgcacctccacacgcgaaaataatca

SEQ ID NO: 36837 - DNA, 439 bp, Oryza sativa
  unsure (1)..(439): unsure at all n locations
agcttaagaggctgtcaggtgggtttatgtcgtggcaaactangctagggtgagagggttgggtaagattctgggtaaacttgatttttagatcattttttttcggaattattttctcctctaactttgtagcttcataacttaatgtgtagaccagaagaattagtgtagattttactggtggtagatgattacacctagattccattttctttggttgcactcaaaaataatgggtggactgctcacagaaattaaacaaagatgggctattataaagctagattgaatttttaggaggcttatacagaggaggaaaaatctagaaaaattacatttattcatgataactaatctagtatttgaataaatattctccatgttcacttatgtgcaggtaaatgtacttttggatgaaatatggtcttagtcgattaaa

SEQ ID NO: 36838 - DNA, 474 bp, Oryza sativa
  unsure (1)..(474): unsure at all n locations
ctacgcttgatgcacgcgcanaaactgcaggacacgggtgtttgtttgttttggtactagatgcgatgaactgatcgaagcgttatgcattggaacgcgctggaataaatcggtacgatgggtagttataggttttcttggtctcttagcccaaacaaattacgcgttgtattaaggaacggagggagtaccaaacaaaggactgagagtaaaaaagaaagtcccatgttcaatcccttcacctactcccttcttcaaactctcaatcccttgtcttctcttactaaacatgcgtaagtatcataatatcattgatgtgatacattaaagtactatgatgatactgcactacgatatctacgaggtgtgtcaagagacaaatcaacacataaagttcaatggtagaaaaaatataatcaaaacaataccccataatcagagacactgctntatagtctcattggcctttgaaac

SEQ ID NO: 36839 - DNA, 440 bp, Oryza sativa
  unsure (1)..(440): unsure at all n locations
tgctngcacagctaananctttttatttttattcctacngaannaatgcagatactgttgacaaacatatatagcattatattaccgagcgtcgggtcttgataaacagcaacatctctggctgattgatcatatcacttgtggctccttggagaatgtttatataggtgcacatcacaatttaatttgcgtagcgttaaaataaaatatatacatgggtacatgggctattccatccttgaaatttataaaacctgcgtgtgtattcattaataatggtttcacttttaatatgggaaagtcctgcacttgtatattgaggcagtgtttagattcaggggtgtaaagtattggcgtatcacatcggatacacacacgatgccccatggggtgttacgcactaataaataactaattcagaatccggggtgactgcaaac

SEQ ID NO: 36840 - DNA, 449 bp, Oryza sativa
agcttggtcaagggtttacatgcattatttgttatctagtacatgcatagttgcttgtcaagctaatgttattaaacacatgttgcaaatgccaattctaagtggaagaattggcaagtgggcgtatgctttgattgaatatgatttgacttatgaaccattgaaatctatgaaagaccaaattgtagttgattttatagtagaccatcatatagatattgcttatgaggatgaggtttgcttccttaatgttatacatttgaagatttattttgatggttcttcttgcaaagaaggtcaaggtattggtgcagttttattttcgcgtagtgcgttttgtggcatcggttcgtttggaatattattgtaaaataatcaagccaaatacaatgctttattattctgcttacaagtgatggagatgattggagctacacatgcggaagcgt

SEQ ID NO: 36841 - DNA, 284 bp, Oryza sativa
accacctggacgatgatgatgaaaattatttattttgaagaaaatcgcggaataataatcgaagcgtcatggcgaataaggtagatgaaatactgtcttaaacaattcaacatatcaactgagtattgaatgtcctaaaggcaacacctacacaagagcacaactcgaaaacatttatcatggatagcacgcccaaattacccaaattcaacatctggataaatcctgcccaccagcaggaccaaacacaagaatcagaccacgtataaaggaaaactcaaaga

SEQ ID NO: 36842 - DNA, 470 bp, Oryza sativa
  unsure (1)..(470): unsure at all n locations
atcctcagagtcacctgcggctgcaagctattataaatcacatataccatttattgntttgctataggatgaataattatgtgcaacatttgtggatgattttgcctattcaatttcacgaataaatttcatatagttaatttgaaccacaacaataataataataataataatggtatatttagatatgtggtgtgcttcttaccngtgctattttttaggaaaatactgtgccattttattcaacaatttccgttgctcatgttaccaatatataaaactgtaaaaaatgtgacataattatcgtttgtgatatgttaaaattttcgttacaataaatttatacttaatcattacttaacatcatttcaccctatgtgatgtgaaatcaattaaccctactttatttcacgttgcaactcacagacacccctactagtatagacgaaagggacctatcggcattggaa

SEQ ID NO: 36843 - DNA, 426 bp, Oryza sativa
  unsure (1)..(426): unsure at all n locations
actacctattaactagtactctaagagatgcatttttttatagaaaacttgatcctgtatgctgttgctgatgattggaaagaacaaattcacacgtggtcaatcagtggtcccatactaatggcccgatcttttntagaatatgaagctttattaaacttaattactacatcaagatgaatcaatcaactgagtcactcttggcctctgcataanatgcacacagcccacaaaagatgaaagaaacaactagaacatctcccaagccccaaagttngacagaaacatatatcttagtggctatcaatccgtaggctagaccgccacccatgctcctaggtaaaaaaactcctgtgccacctggtccaacttcgagataccaccgtatatcttagtggctatcaatccgtagactagaaccgcacc

SEQ ID NO: 36844 - DNA, 484 bp, Oryza sativa
  unsure (1)..(484): unsure at all n locations
atccttgagtcacctgcggctgcagctatatgctgtgaataaaaatattccttatttatttgcacacaccatgcgcacactactttaacagatgtgcttaagtccctaaaagacacatggtttcaccacaccttgaaatatatggcatatgtggtatgaaatccgagtaaataaactcaaaaatgatctaccaaccgcttggaaaatgaccacgatatataatcagcctaagccataatattgatcaataaaaatgcacaattacgtggcaaaaagcaataatattgtatccaatcaattactttataaacccaaacagcgccttgactatatagaaaagtcagcggngcagctatataaagctttactgtttgacaccttttaagatgcattgtaccaactcctaaaagatgagtaactgcggtattaaaggattntaaggtattgggcactcgatcacgcgcactttggcccaagcaaaaag

SEQ ID NO: 36845 - DNA, 316 bp, Oryza sativa
  unsure (1)..(316): unsure at all n locations
ctaagctatctctacgctcaggaatgatcagtcgaacatcttattcgtctcgccgtcgtcgccgccgactggagtcttcgcctatancggtggntggaaacaccaccgttngtgggcgtctacgtctttaccgactgggcgcttcgtccaccgccgactggtgtcttcgcctatacggnntggtggtcacaccaccgttgttgggcgtctacgtcttcaccgaccggcttgccttcgtcgccgccgactggtgtctccgcctgcacggctggcctattatgccaccgttgttgggcgtctacgtcttcaccgaccg

SEQ ID NO: 36846 - DNA, 457 bp, Oryza sativa
agcttccaccatctagttcatgtacgacttctttctcttagctctcagaagcaaccaaagatcattttttgatgagataattaagaatatcgacaggagctgcaacttcaaggaggcattgatgtgcattgggctcgcagtgagagagaaaaacgatgagcccttccaatggatgtgttggctccggcatctgccgcaacacggaggcacaaatgaccaagtcgatttctgcaacattttgggagcccttgaagagcttcttgaggcagtcagctgcaaccttgagcaatccttaactgaatttacagacttcaagttgaaattttgtaggtgcgtagcgtacgaagacgcgtgtgagagctttgaaatgttgcttcgatgtatagaacgactacgaatcagtacacgaggggaatgctagcattgcacaagaagcatgaaatataacttcttggag

SEQ ID NO: 36847 - DNA, 473 bp, Oryza sativa
  unsure (1)..(473): unsure at all n locations
ctaagctttcttacataactggtgcacttgtgcttgaagtatgtgtactcacttagaatatgaggaacaactgccatatcttccactaacggctggctggccattccatattgaacttgaagctggcgaaggtatgtcctgccgatccttcaatcacggacaaaatcctgtcaatatcagcgagccagtttccaagttgccttatagatgacaggaaatatttcccttcaatcacggagggaaatgttagcaccatgcacgatcagaaggatatgatagtgcacatgtgcacaatgcatacagctagcccatgcatcagatatactgaactgaccatttgaacaagagaaaattaggaaacaagtcatccggaacccaagcatcatctttacctgatttttcgcgaatgcacaaaaaatttacacgataatatattagaananaccagaattcataatacacaacgcaatggc

SEQ ID NO: 36848 - DNA, 446 bp, Oryza sativa
  unsure (1)..(446): unsure at all n locations
agcttaagatgcagcttaagattaaaatctttttgtttacttacttanaggggttgtgttaaccaaagacaatctagcacgactgaattggaatggtagtttaagatgttgttttttatgaaaaataagaatattcaacatctttttatggattgtcattatgcaaagtttatatggagagcaatgtagtatttttttggtctataccctcctagtaatatatcacatatttttaatggttggcttttgcgggtggacaagataatgagtaaacttatacttgtgggagagcaggaatgatttggtttttgacaaatcttcatctatcacatatatgcaggtaatctttagggcaacatattagctccggtgttgccccagctacaaaggtatgatgaagatggcgacttatgaaggttgctatcgttagcttgagacacaatatg

SEQ ID NO: 36849 - DNA, 459 bp, Oryza sativa
  unsure (1)..(459): unsure at all n locations
actaagctagactcataaagtcacaagctgataacaatcatctttttaccaactcaattagaacaacagggggaattgaaggatagggaggaattggattttatcacctcgagcaccaacttcttactggacatttcgtcaaacattgggcttggcctacctttccatctttcttggccctttgcttaagaggtggcaagaaaaaatccaaaaaaaaaccaaaccaaatagagaactgcatacggggcgggaacggtgtggctagcagctgagagaaggcggaggtgctggtgttggatgcaacagtggcggcgacaatgtcatggacgccgcgacggcctgtgcggagcagagtcatggacggagcctgacttgcgctgcgatgccggaggtcgaggacggagacgcnattgtggcgtggcaacnatagggacagcataactcctctttctaacggct

SEQ ID NO: 36850 - DNA, 455 bp, Oryza sativa
  unsure (1)..(455): unsure at all n locations
gcaagcttatccactagtgaccgtgttcaatgtggatgcgctatggcaagntatctactaattaggaatagttggtcagtttccttttatctttaggaaagcatgtttagtgtcctataaggactctatgttttcctttcatctttaggaaagtctctttcttatcctacaaggactagtatctacccatgggtataaatatgtacacccggggtcattgtaatatctccacgatcaatacaattcggtggatcgccaccttttaccttttctactttattttatttatcacggtggaacttgacacctgacgcggggctacatcgctattcgatctccggcgaaggggtaagtacaatgttctaccggcctagtcaatttattggctacattggtgtcgttcaaggctgcatcagtacatttgacttcttggatttctatgggatgttgatata

SEQ ID NO: 36851 - DNA, 323 bp, Oryza sativa
  unsure (1)..(323): unsure at all n locations
ccatccctctcacttggccattcttgtgctgngggctcgacatactcggaccattcccacgangacagggtggctacaaattcctgttcgtggcgatcgacaagttcaccaaatggatcgaagcaacactcacaggggaaatcaaggccgacaacgccatcaaattcattaaagggatattctgcagatatggattgcctcaccgcatcataacggacaacggcacccagttcatcagtgccgacttccaggattactgcattggactgngagtcaagatctgcttcgcttcggtctctcaccctcagagcaatggacaagtc

SEQ ID NO: 36852 - DNA, 451 bp, Oryza sativa
accttagagcaccgcggctgcagcttgtactttactagaaattatttttttacatttatggtattgaaatactttccgagtatatgagtacctactttacattatgttcatattatactgaatatacggctagcttatctgggagatgctttggtgcgggtatagtatttgcttatgcaattactctatgtcatgacgatgatattagagtagtatctggtagtttagacatggtgtctagattacgggatatcattatttggggttatatattgcggatgagagttgggccgctgatggtgacagctcagtacgggtatttctccgcgccggtatataatcctaagatgattccctgcgaagggtactccttcgtatttagccccggtctatggttaagacgagttgtcgtaaggaactcgacaatcaggggtggcttctcgatgtacca

SEQ ID NO: 36853 - DNA, 438 bp, Oryza sativa
  unsure (1)..(438): unsure at all n locations
actcagcttangaaggcggagaaatagttggtgtaaggacttatttttctntgtatcttttctaagagaaaacataactgaataattagtcatggtaggtagcgaccatacaatgccactntgccactttgcttctctccagtcttccaacaagcactgacatactacattgtgtgtttaagatagtccaatcaataggtgttcctctatatatatataggaagaattgaggtaattgtcacactatataatagtgtacactcatgttgccagacaaaaccagcagctaggaaagaacagcccagaatgctagcaaaaccgtgtgccatcggaatagtcaacgaaattaagcagggtatagtatattaccagaggggtgcaatantggaaggcatcaaacatcgtgaattcttggactggtgttaaagatgatataat

SEQ ID NO: 36854 - DNA, 445 bp, Oryza sativa
  unsure (1)..(445): unsure at all n locations
agcttgtttgagcttaatntgggttctctatgttcaaccaatttttaattttgtgacttatttttgaatattaagtttatataatcttttagctttataacttaattttatttttttcactttgatcactcatttggctctaggattgctaaagatagagtataagatatttccctaaatttattctcatatcatagctttagtaacatatctttcatttataaattacagccaaaaaggctcgaacaagcaagcccgatgtttcctcgaacagtggcatgtatggatgcaactcgattagtaagctgggttaattacttgtcgaccatgtgcaagcagctggcattatatttgctgtaagatataaaaaaagaacacaagaagatttccgggagctgtagtgcgcacattccctgtggtatcatggngttagtgaactaatccc

SEQ ID NO: 36855 - DNA, 413 bp, Oryza sativa
  unsure (1)..(413): unsure at all n locations
atatgaaatgtagaatgtagatccttataaaaaacttatttaggaaatatacccttttctcttgctccatggtccaatatgacagcgccagtgacattgacgctgtcctccttgtcccccacggaagtgactgatacgaaggaggaatgacatcaatgtcattagcattgaggaccaattagttaaaaagttatttacaaataggtccttggcaccaatgaccctgacaccaagaacctatttgtatatatttctattctaaatgagtcctattcagaaatttttttttgcatataggtccacagtctcaatgacaatggcgtngtttccattcacatcttgacttagcttcctcggagggcaaggggatagcgtcagtgtcattagtacctgcatgttggactacaatacta

SEQ ID NO: 36856 - DNA, 441 bp, Oryza sativa
  unsure (1)..(441): unsure at all n locations
agctaggaccatctgaacctctgttatcttccttctacatatcaatatttatacattagaagttccagtagtgaatgaacaaaagggggaaaaaacaagaagaagaatacaactgtcacctattaatgtaaccctcactaaaaaatgttttcatttgtcatcacagaaacgttacctcatgatttgaaattaagacctccaaaatccattcgggccattccgcaatggaagtcagtgcaattctattctcattattagtgctggccaaatatagaagatcctgaaataatataagcaataagtaatcaaacaagagattttatgacagatgatatacgatagtaaaaaagataatacttattttaagaattacaaacatctgcacgtcgcgttntaaatacaatgttaatgatattggacaatccatgccataatttatct

SEQ ID NO: 36857 - DNA, 465 bp, Oryza sativa
  unsure (1)..(465): unsure at all n locations
ctcagcttcttattctgagcttcaatgggttgcgntgtttttgcttctagagaactctcgaaaatgtgatggagattatcggacaaatgcagttacgagaaaacggtccgaaaaaccactatcctaattacgctaccatttctagaagatattctaataattactaataccgattgaaacggtcagtataaaccgggaacgacagccaaaaatctcggaaattttcgtaccgttttcacccctaaacagcatactagtactacatccgtcccaaaataattgtaattctctgttgtttagcatatattaaggtttgagaagaaatactatggtgtccctcgttaaatggtgtttatatctaccctatagttaaacaaatagttgcactcatctttcattcatcactcaatgattcagatcgtctgtgtagaatcgaacgattgagatcgatcccacctcccaaaa

SEQ ID NO: 36858 - DNA, 252 bp, Oryza sativa
cttgtcaagagaccgtcttacattgcttgcagcatcgggatcctaacttggtcactctcatccgcgagagggaggacttcaagaggcccaaccccaaccttactgggacctacctctctccaacccctttacttgtgtctccttctcttctagctcatgcgacaacaactgtgactggctatggcaatgataatatatcgttctgtgcgaccagttgtatctacagtctaccttgggctgactcaccttgat

SEQ ID NO: 36859 - DNA, 386 bp, Oryza sativa
actaagctatctagaaagttcagttcaggagaatgcggtatggttattgtatctattaattaggaatagtttgttagtttccttttatctttaggaacgtgtgtttagtatccgataaggactttatgtttttcttttatctctaggaaagtttatttcttgtcctacaaggactagtatctacccatggatataaatatgtacaccttgggttattgtaaatcatctcttgatcaataaaactactctcgtcgcatcgccaccctctttaccgaggtttttacttatcatacgacggaacttggcacctgacgcaaggctgcatcggctttcgatctccggcgaaggggtaagtcctatgatcctgccggccctggcgaatctat

SEQ ID NO: 36860 - DNA, 357 bp, Oryza sativa
  unsure (1)..(357): unsure at all n locations
cagcagcaagccacacaacagaagagtgaatgattgagcaaaaangaggacaaccacagtacagaggaagccacaccggagacgcacaacgaatgcaagggagcacaaagggaaaaaaacaacaacgggcagaaacgcagaaaacggcaatcaaaagccacggagacgcccaaagcaacagaggaaagacgaaccgagagcaagacaatactaaaaatcaacgccgagaacacacacgaacccgccctaacccaaggcccacgacgagatggaccgaaccgcaaccacacctgcgaccagcccagcccaagacaacccagccaaccaatggagaatcatgcggggagcaaccgaaga

SEQ ID NO: 36861 - DNA, 315 bp, Oryza sativa
cggagaggacccaaaccccaactctcccagaagaagcagtcccgcagccgccagaccgggcgttgcacgctcgtgcgcaagggcatggcctgcaccactggaggcgaagcgaccacaccacgctgcgcgcccaacccacctgaagaacaaaaggctactcacaacacatcagcaggcaagagggcagaacccaaacaggagcaaccccactcgcccacctcacttacggcccggcagcagacgcgcagcatcagagagaagagcaacaccaacggtgcctgaacgcacaaagcacaggagcagccgaaagccacc

SEQ ID NO: 36862 - DNA, 443 bp, Oryza sativa
  unsure (1)..(443): unsure at all n locations
tccaatcgtggatttatgcctgtctacctgtactctnttttctattagcctttgtttggcaagctgctgtaagttttcgatgaaatctttactactctgtctgccaaattgaatcatgtattcattctaaaaaaattcgaaaaatggataagagccgagaagtcttatattatgaaccttcgattctaaaattcaaattcttctacattgaatgtatagctgcagcaataaatttggatcagcctttctactccctgcatctacgttgagcaggtatctttaggtaaccgcacaatacctaacctaatttattgataagagtgcttattataaatcaattcttgcaattnntttcaaanattgattttgcatctttaggtgtcaaaataaacaaaacccatcctagtggatttgtgtggtaaggaaaaacgggtaatctattc

SEQ ID NO: 36863 - DNA, 463 bp, Oryza sativa
  unsure (1)..(463): unsure at all n locations
agcttataataatagtataacaaccntnctttcttgcaccttnntatcggcatcgnagtaattccaaagaattatctaaccgcgttaaaaaaggaatttaacagcatcgggtcacatcattgtgagcacaatttgccaaagaataaaagcacctaagttcctagggatcacaacgggccatgctggtaataatattgggctgaagtactgtataggtccaggctcattagcactcccgataccctaacaaaacaccgtagtccaagcgacgcttcgacttccccgctgagactctcgccatttccccattcctcgctagagtacaaaaccgcgccgacgaagctagggttcatcaatccgctccaatccatcctcaaaaactccacgaaatttcttcgcgcgtncaccgnaccaattncctatccctctccagccacatctcggaccaaattagaccatttac

SEQ ID NO: 36864 - DNA, 334 bp, Oryza sativa
actctggcagagccacgatttcataagacccacgaacgctgaggtacatgtaatttatgagcttgctgatgcaattaaggatcgtttgatattggatcccaggggcattaagatacctcagctgcttcaattgaccaatataatctggtaactcttgtatagagcaatcactcaaatccaacacacgcaaagactttccagaagaaaatgcaccatcactaatacggaatttcttacagttcgtaaagcacaaagcccgcatctttgctaagtaacctgtggatgactccgatggcttgaagcaattactgaacaagtgcatatggtgactgtt

SEQ ID NO: 36865 - DNA, 441 bp, Oryza sativa
  unsure (1)..(441): unsure at all n locations
accttcatggctgcaaactgcatactgactagcttattttttctctttggaaaccagnntcgtctgagatggctgccagaagtcattggcaatctcaccagtctccggcatatgcatttatcggggttcctagacaatatatttggcaaccaatctggagtcatggacaagctcctggaaatagggttattaaatctatcaacattccagggtaatatttttcagcaactaccaccaggtcaaagtcacagtttcattgagtgcatcggtgccctttcaaatctggagcatctaaatttgtctaataatgtcagcctttatagtgtacctgaaagtctgggtaaccttatgaagctacacacattatacctcacatgttgcattggacattgtggctaccagaaagtataagtaaaattcaaagcttgaatatgtacttat

SEQ ID NO: 36866 - DNA, 455 bp, Oryza sativa
  unsure (1)..(455): unsure at all n locations
agcttagggggtctaaatccagtaattaactcctatctcaaacctaattttgactcgaatntggatntaattcgggtatttgtgacttagggttcttcccaaaaaaaattagggttcttcatttggggatttagggccgattgtatctggcttattggggatttcggaaaatttcagtcttgtttatccccttttgcttaatagtggggaatttcaatctagtttatcccctatttcttggtttgctgagtgctagccgaaagattagcttcggtctaggaattcttagtgtgagaattgggaatttcaatcttgtttatcccgaacctcttctttctctcaaattctactactaagcaacgaaattaaactcttcttaattgtgtttctactgttggccgagacaaccagcataacatggcttaatacgcaaccaagacttatggaaattaatc

SEQ ID NO: 36867 - DNA, 437 bp, Oryza sativa
aacttcttttgtgtgactttgacacatcgatttttttatgttcttgctgctgggtatatgtgtgagcgcacatcagcgaccaatctcgtcacaaagttcttcatcaaatgccacaagcattccctctggtcagcatgctcaaacacagcatgtacaaccatttctaagactctacatgcatcagtacaaatagctaatggattcacatctcctatagccttatgaagttgtctcatgaaccactcccaattatccgtaagttcagcattaatggacccaaaagctaaaggatacatccagtgatgcccatcaacagaagtggcagcagccagatgaccattccatctatcattcaaagcaacggaatctatactaatatatggctacattcctataggagaccgtctatgcagggcctcaaagcatagaaaaaccta

SEQ ID NO: 36868 - DNA, 326 bp, Oryza sativa
  unsure (1)..(326): unsure at all n locations
gcttgaccccagatggatggcgcanatcataggtataatgtagctaagaatgttttcttagtcttttcccgggcttgtgttggtgtagaccggatttgctagatagggcccgtactaatcaaaggggttatgaaccagcttgtggatgatcttgtgccatattagttcatatgcatataggtgtatttggggggctgtctagccaagtgtggtgagttttcttaagtcctaaacaaagagagatatgggcaaatcctataggtttgggtagcctcatgtggttatgtctggtagagtattctatcgagtgtgagccctttctatct

SEQ ID NO: 36869 - DNA, 443 bp, Oryza sativa
  unsure (1)..(443): unsure at all n locations
agcttgaccccaagatggatggcgctnagtantttataatgtagctaagaatgttttcttagtcttttcccggacttgctgtttggtgtagaccggatttgctagataggcaccgtactatcaagaggggtttatgaagcgagcttgtggatgatcttgtgccatattagttcatatgcatataggtgtatttggtgggcttgtctagccaagtgtggtgagttttcttaagtcctaaacaaagagagatatgggcaaatcctataggtttgggtagcctcatgtggntatgtctggtagagtatcctttggagtgtgagccctttctccctaagacaagatgtgtttcttggatggattgttcatgggtttgctcgccctctgaagacatcttccattaagtccaagaacgccatatttctagatccgagttcagagatatc

SEQ ID NO: 36870 - DNA, 361 bp, Oryza sativa
  unsure (1)..(361): unsure at all n locations
tctctctcctcgagtctgtccccaacctagctntcgagtctacgtgtccaccttattgtcggctaatcgctgtgttgtactcgctcttaggttattgtgtgaaaggtaggaaccacaatcttcccagcggtggtgtttggtggagtcgaacatagctggccaaatgggcggccggcctaacacggtacatgcccgctggtggcacggcccattaggcatgacaactgtagcgggctgtgccgtgacggcctacgtgccaaggcctcagcctaagaaaaaaattganatttgaggggaataagatcaataggcagaaaatataatatgaaggannaaaaggataaagataggacatatgtga

SEQ ID NO: 36871 - DNA, 406 bp, Oryza sativa
ttgagcaaaaagatatagatcggatagattcgaaccggcattgcaaaggtgatcactactatgccagcccaaatcatgatcttcaccaacttggatatggttctctcgcgaaaatcgccagttgcagagatgagaaccatgaaaagcaagaacccgaataagaaaacagaaaccgaggaaaccacaagagtgaagactagtagagtctcgtcttttgtcattctttgctcctttttcactcaatgattcattcgaatatcccgaccaaaaattctatatgtctattcatagggcctcgttgctaagtgctacaagatctagtgcactggaactcgcgctatggacccgaatcctttatatggaacattgtttttacaagaaaaaccctcagatatgaagaatgaaa

SEQ ID NO: 36872 - DNA, 379 bp, Oryza sativa
acaaatacaggttatgctaagtatattaggcataacaagcgtttcgttcttgtagagtagataattggattttgattgagttatttttctaagggaaaaaggaaaaggaggattcaaaatccttttttcttcggactttcccaaacacaaaatacctccttgtattcgcactctcaaatgagagtggaagaaattcgactttcatataatatcttaatagaattccatgtaatgatcaatgcattttttggattctatattattcgcatgtctagaatcctaccaagagaataccccccatttttatgtaattgaagtaggattgacgaataagaaataaaataatactgtttattagtgtcgcataaaacccgaaatg

SEQ ID NO: 36873 - DNA, 361 bp, Oryza sativa
  unsure (1)..(361): unsure at all n locations
agcttattattttgtcatgccatcttatgttctattttaataggcctatagnctaacgttactgagtttaactntttgtttatgaagattgattggcttaacaagtttgtcgaaaacatttggccttatcttgacacggttggctcatacaagctagtgcaatattatttgtccaagtttttatttggcactgttttgtaaatattgtcttttacaggcaatatgtaaaactgcaaaggaaatcgctaagccaattattgctgagaacactgccaagtataagattgattcggttgaatttgagacattaacattaggttcattaccaccaacatttcaaggttagttctactcttatatc

SEQ ID NO: 36874 - DNA, 447 bp, Oryza sativa
  unsure (1)..(447): unsure at all n locations
agcttnggaggatccctacgcttattattttatggtgatgaagaccatggcgctcgctaggtcttagttacagttgttgcctgtggcaatggcgtgccgctgccttaactccgctgctttatctacttctgtctttggaatgtattccagaccgctcggtccgatgatttaagactatgcctgcgggcttttgatgtaataattcgcactagactttcgcgtgtgtatttggtattttgtcacgcccggaaattcactagtaatttccgaacttatttgtgcataaaatcctcgtccaggaatcagccgaggtacacaaactgacaatttaatatacaaatccatcataataataacgttacacacttacaaacacaagaaaacagcagcggaataacggtctagcgatggcttcagctccactcccacaggcagctcaactggggt

SEQ ID NO: 36875 - DNA, 460 bp, Oryza sativa
  unsure (1)..(460): unsure at all n locations
cttgtacctttgctcttcccgagtgaaggactcgcataataatattctagntgntgattaggagtgactactatgctgtatatctaaatgtacaggtgcaaggtatatgtgctctctctcaaattaaataagtttggcacggtggcttacccttacccctgattcccatgagacactgtctttccctttcttgagcggntgagagacagaacaacaattagagcactagtcacccaacctttatccaacttttattccgaaagttttcaaacgtttttcaaaaaaaaaaaatccaagttcctcaaatgattcactcgatctctccaagtgtatgaatatgaattcctcatcaaatntgcctctttgattcctactcntaaagtgattgtggagcttggtagggatcaaacatggcatacttgcgctcacatttattactaattaaaaaacttggacttaa

SEQ ID NO: 36876 - DNA, 388 bp, Oryza sativa
cttagagcgacctgccgcatgcaagcttgtcaattaaccaaaaaacttttattatcttatcggagcaggaagccacagatatgagccactgcctgagatatcactctacgggaatagctagctaggggcctgtactgtatctatactaaaacgccctaacgggaaccgaacgaatccgtatggaggcgcatgttacctttctgcaaagcgtgtggcatgtgttgcccaacattacgatcaattggtcgatatttgatcgaaatcaagatgttgcctgtctccaccaacatctttataatctctctgctgcattaattatataaatatttctccagctgtgctatatacacacacatttgcgcgtaatataagcttttgcacgcctatt

SEQ ID NO: 36877 - DNA, 403 bp, Oryza sativa
  unsure (1)..(403): unsure at all n locations
atcgcgancaggagaaggcatctcgagaataattatttaagtccccagagcgagcagtgacgcgaaattccccaggagagatctccatctccacctccactgctcatgcggggatgtcgtcggcggcgtcggcgtcngctgcctgatgggcaagcgatgagggcgccgccgccgccgcgcanccgcagcatgaggggccggtggtgacctgcatgggcgtgaacgggctcaaccaagtcgtcctcccggaggttcgaggcagctctgtcgaagtaagactagtactgccccctccactctctcgattcaactgcagatctcgccgcgaatcatgcgctgtgtggagggcacacatgctgtgccattgataacatgctcaagacaactctggagtggttttttt

SEQ ID NO: 36878 - DNA, 408 bp, Oryza sativa
  unsure (1)..(408): unsure at all n locations
agcaccgcggctgcagcttgaaaattattgacattcttatttgttcgattgaggtaaatcaaagtcttctgagatccttataatattttctttaatatgacttagcaaatgattaggtcaatcttntagtatttttatccactagcgtaaacatacataaaaattacttttttcaatgctcctcttaagaatactgtcctatcataaagaatgataatctttcatataaataccaataatgataaattttatatgaaaaattgttgttctcaatgagctacctttagagtcgaactggtttcatgttagatcgattagggccccaaatgtctgctacatgctctcagatgtattctagaaaattcttgagtttgtagttttcacacacctcgcatcgatatatccttt

SEQ ID NO: 36879 - DNA, 438 bp, Oryza sativa
  unsure (1)..(438): unsure at all n locations
tcatataaanataaatttatttttattncgacagaacgtacccactgcacatgtctcttcaaactttgctgtgtccaatggatcaggacccaaagtagaaagaaacgacagagcagcatctaattgcgcggtggtcttgatctggaaaccacaatttgtcaagttcacaacacttacgaactcagccacacagcagcagtgtttacaacacaatcacacacaacagaactcacctttgacgacacaatgtattggatgacaacgggacgatgcaccatggcattcgccggatacttcgtcgcgacctactccaatgcgcaaccaattaacacacaaactaactatcaccaattcacagattntaattcgatcaatactactatcatataataactcagcagcgacggatgctcacagtgtagagaagattccccacag

SEQ ID NO: 36880 - DNA, 449 bp, Oryza sativa
  unsure (1)..(449): unsure at all n locations
agcttaatatacttaaatactattttattctgacataaagggcggatntaacatgtcattgaagcatatagatcgaatatggttaaatcagataagatcggctgaaactccgatactaccctaatcggcaatcagaggacatgctagagattgatattctaagcacgacttaatagatcaaactcaactgatgcagcattaggtatgaaaagaagaacaatatctagacaatcaagccgctgggtgtttcataaagtggtagatatcttatatgatctaggacaacgtcgctatttaacataatcggctgccttctattaacagatgttagccgattgtaaattagatgatgatattgccaaggattatgaagatatatgacaacttgacgaattatatagacaagattagagtgtcataaagatggaagcactaatctcgagaacaca

SEQ ID NO: 36881 - DNA, 382 bp, Oryza sativa
  unsure (1)..(382): unsure at all n locations
gagatttgcccgaggaggcaattcgccgttataaacccagttcgcccgcccggccgattgtcgtgttagcagctggctatactcgacgaccgacacgtcgccgatcatcctgcgggcttcggtttcagcttggtcaagggtcaacactgtaaaagtagagtgtgaagctatgtcaaaagtcagataaggcgaaataacaaagcacagcagtatatagcaaaagaacagtcttactgttcgccccctcaggaagtatcaggttcggcaaaccgtcgacctcttcgccttgatcaaccgcgacttgccatgactgggagagggganaaatgcgatcatacaaaattccttcaccaagtcacggcagctaatgcgggagcaaacc

SEQ ID NO: 36882 - DNA, 448 bp, Oryza sativa
agcttcaagaagatgtcacacagttcgtgtttggccagatttacatagcagatggtgcatgcgacattttggggctaatttttatagacaattcaggagtaaaagattgatggacctgttcaagaagttatgcaagcagaatcaacaaagaaagtttgatgccatatgggatcaactggatcgtttgaccactacacacatggaagaggttaggaaaaaacctatagttgccagacaggaggagccggagggacttgaacccattcctaatgaagcaccaagtattactcggcgcacgaagcgtggaagggccacgaagtgcttcacggagtgggtagaatttgagccaagggagaaatggtcgttgtttacgatacagacggatcgaggtatggtgtgatgacaacaaatcttgctgaagtgtataactgggttatgaagaatacac

SEQ ID NO: 36883 - DNA, 425 bp, Oryza sativa
  unsure (1)..(425): unsure at all n locations
nggctcggctcgttgattntcctaacagccgagctgtcatttcagctcgntagagataatgagccagctcgagctggctcgcgggccttaacaagctaggggttaccaggccacgaagatccacaggcagtccacacacggaaggcccattggcccaaatagacattgcatcaaaaaccctaaccctaacagggtaatacccctagccgccaccattgaccagtgcatccccttgccgattgcctgattccccaatccccatggcgccgctccccatcgtgcacatcgacgccgctccctgcagccgccaaccccatcgccatcgggcattggcgccgccgccaacacccacatcgccatctgcagccggtgccgccgcgccacctgcgtctctcccctcaagctattgagatcgcgatgtcgtc

SEQ ID NO: 36884 - DNA, 239 bp, Oryza sativa
  unsure (1)..(239): unsure at all n locations
gcacgctgaccgccaggtttttcctggaatgaagaagggatactatgttatactatactgtagtatggactgaagaaagtatatttggggcttggaaataagcatanattatactcaaatttcacactcaattctatgattagtgatcaacttgcatgcttaaatctcgctgcttgcttgatgaataattagtttcatcggtttacactaacgttatgtactacagcttgactgaaatc

SEQ ID NO: 36885 - DNA, 373 bp, Oryza sativa
  unsure (1)..(373): unsure at all n locations
tggcggctggttgcagggtatttggttttagtaattaagggttcaggagtaacatggccaaaacttacattacatacttaatataacccaaaaggatttgaataaaataaatcaatttggtatattcaaaattctatatgctctatgcccattctttccctaatctttggatggtcttctataaatttttagggattccacatttggctttcacgcattcatagtttgtgcttggtatcacggacatgctngttcgagaggcagcttcacagagtgatattgccacaagctcaagctagaagcacataatgaatatgaaaggcagctctctgagatacaaaaaagaatctacatactttctgtgaggttataa

SEQ ID NO: 36886 - DNA, 478 bp, Oryza sativa
ctcagagacacctgcggcatgcaagcttggccacacttggttaaagttgcattctttttttatgaaagaagccaaagactgggcatcttataagcgtgtatgacgaactggcaaagtggcactcgcttcttttctttcggcttactgttcacaggcgctgttccagtctttgtttttagctcgatgatttaatgacaatgtccgtctactcatcttggatgcaatcacgtaattagttctcagcaaccattgatagaattcctaccttgtggtgagtaaccaaccaagtatcatccatttattagtggtctcagtttaatagaaaccggataaatattggtagtactgtcacacagtcaccaactcaccaaccaaacgaaatggaaatatctctatacagtactaacgcaatagcattatatcattaacaaaagaaatctaccattgctcgcaccaaaaaagaagttcatttcatgac

SEQ ID NO: 36887 - DNA, 214 bp, Oryza sativa
  unsure (1)..(214): unsure at all n locations
tacaccgtattgttatatcaccattactacttcagtaagcacgctctcaccaacaatattccataaggcacagacggctcanatcaacaaacaataagccccaatatggcgcctatgatgcccagtgatgatagtaactaagaacatgaatccagaggaanggctggctggaagggcccataaccagcacataactgaaactatgaacaaaatc

SEQ ID NO: 36888 - DNA, 302 bp, Oryza sativa
aattgcggaacttggctcgaatattcaaaggtaacaaatttgtcactctaaataattctgctaaattctttcttaatgaagaatcaaaaaaccaataaggatcaatagttcctggcagaagggtgacaaaatccatacctcggcagtgtttgtcaaatgggaaaacgaaaatgatttccccccatctttaaatcctaaccattcattcctcctcttctatttaatcctaacccttcgttcatttccctatctcaaccccacccctcatttcccattatccagacacacccttgatgcccaca

SEQ ID NO: 36889 - DNA, 122 bp, Oryza sativa
tgcagcttggaagatctgtttagagaagattcctcatatatgtgcagaatgaagcactatttataacaattagtgtttgattggttataatctactccctccgtttcgaaatgtttgacgcc

SEQ ID NO: 36890 - DNA, 372 bp, Oryza sativa
  unsure (1)..(372): unsure at all n locations
actctgaaagaaacacaatacctcttcatggagaccattctgcacaaatcctgcaaataatgaactccatgtaactgaagttttctcaggcatattctcgaaaacccagcaggcatcctttatcatattacactntgcataaacatcaagaaatgcagtcccaacaaaactgctagaatcaagtgcaagcttgatggaatagtgtgaactgttgcatcaataaancatatttccacacatcccagagaggctggataggaaattcggcatctgggcccttctagtgcatcttgaaaaagctcatgctttactctctctatatgagatatcagcatcatggattcaaagatatgctttgacaaattgatcaaa

SEQ ID NO: 36891 - DNA, 445 bp, Oryza sativa
  unsure (1)..(445): unsure at all n locations
agcttcagcgctgagatgcccgatgttgcgctctaaaatctnggcacttcactttgtttctttggtggctgctgacattgcctatttcagcgccaactgatatggtgctgatgtttgttgtttcagcgccatttgtgttggcgctgaggatgcaaacactttgagccagcacagcaaactgctctctgcccaggaaaaatacatttaacaccgcatagcaacctatttcagcagcacaggaacacaacttttagaaaccatccatccattccagccattccatccatccagtctggggagccgttccaagcgccactcccgcgtcgttgacggtccgcaagagctcttgtgcctgtaaggttagaaagtgcaaaagtcacaaaaattaaagcgagagcgtgcaaataacataacatggcaagtactcaccactctatcgcgaaga

SEQ ID NO: 36892 - DNA, 478 bp, Oryza sativa
  unsure (1)..(478): unsure at all n locations
tataaaactcagctagcttaacccgtgcatgcatgagtaaatgtatcagatgattatcgaagctgataancataatggagcatattcatgatatcttgaaattaaatcagagggaaattattagaagtagctcttcatgaattaatgcaagaggttaatcaaccgagctagcttctatatatgatatatgaaagtgtgcataattatttgggcttatagacatgattgaggcagacaagcttgagtgcatgaaaagctaaacatgcaggatataggtatgcagcgatctgcatatgtagaagttcgccatttagcagagttcatgtaaatgtactgaaagataagcgtacgtggtacatttagcttctcaaaaggaagctacatataataatccatacaagtcctatactaattggagaattggagaactccagagtaataatatgtctcggtatggcttccatcaatttttcatctg

SEQ ID NO: 36893 - DNA, 451 bp, Oryza sativa
  unsure (1)..(451): unsure at all n locations
tgcttccgttttatgtgcataacatattctactattatacactgcagcgngcaaattagtcttatgcatcattctgcataattttaaactataataatcttatgcattcacaaaccaagaagaactgtatattacaattttatgagcgacaatggtaaaaggttggatattcagcaaaatactgcacctttgggtgattatatcagcaagcactaacaaaatgttatgacatgtctagagaagcagaattaatttacaggaagtcaagatatgttgagtgaatgctgagggggtgatttgacagtaatggaccatgaattacccatgtgtgaacccatgagaacctagttgaggaaatttcgaaaataccatcatcacataagcgagttgcacaatatcatcttattngagaatgacactcatggcctggaccacatgttactccacatgc

SEQ ID NO: 36894 - DNA, 206 bp, Oryza sativa
gataatacttccctctcccccattcaagaaagcatttccattattttttaagtaccctcccgtactggaaagatctggaggttcggcatgccatagacgtcatgcatctatagaagaatgtgttcgacacatagttggacttgttcgacatgccgaataagataaagatggtcgccatcacgatgacctacctggatggaatcacg

SEQ ID NO: 36895 - DNA, 417 bp, Oryza sativa
  unsure (1)..(417): unsure at all n locations
agctnttactttgacatcgtccctatcatatcttttgtcagaacgagaacaccttgctgatgatcacctggagctgaaagaacatggagagtctgacgtgcgcctagggttatacaaacactctggagatccgcagaaatgatatgatggacttaaatatatgcttatattcacacgtatgagctcatgttcctagataaacaaaactgtaccctctgacaactaagaaactcattacactagtaaggcacacacatgtatttgttatttagcacaatagtactagcattatctaccgagcttccacaactatctgaagcatctgatgctattacatcccagtacgctagaaattatggactccctaaccattccctgaccactctgacaatagcgagtacatatgagaggaaagat

SEQ ID NO: 36896 - DNA, 420 bp, Oryza sativa
attttttatagatgaagagatcctctgcgcgactgctggaggaaaattcacattaccgtagtgtgactttcgtcataaagatgattctctctacagcattacgaaggtctgcatgtcactcacaatgtaggtgcacatcattgatgcttatagatcatgtcatcccacccaacctacttatgacaacagggcagtgcaagtaacgtcgattaaccatgcccgaaaatgaattgagtggttctctatttgaatcttacggtaaacactatggccatgtttgtctatgactactaataatgtgcgcctcttctgcttaccactcgagcggagcaagtacgtgactatcaatgattatgctataacaggaccgttctatgtgatgaccgatcattcctgagtggctactactagcgttgcact

SEQ ID NO: 36897 - DNA, 453 bp, Oryza sativa
agcttttcttcaacaacttagccagtcctacattatttcaggtacagccccttcggcacagccggaggggaatacacgtcaaggtgcgcctagctggttgccgccgaatcagccgggtctgggggcttcgccttggagttaaggaccacagttcgatttcatcaacgctgcttctgcaccaaccgttcgaccgcaagcaccgacagcatgcttcggggcaaaccaagcaccaaaccaggccgccgtggcatggtcccagccatcgttcgacccatccatggcggctcaccaagcatcaccaatcggagccgggcagccgagctccatggcccaacctcacgcggaggctgtgacttcgccctttgccacgccgatccgcagcaaggtgccgtgaacagggcaggaggcgaaaaggggctaccgctgaatgatggaatcaagatccgtccaatc

SEQ ID NO: 36898 - DNA, 380 bp, Oryza sativa
  unsure (1)..(380): unsure at all n locations
tactaaagacctangagtatgactcatacgctccttcttttgtttaatctacagacggtctagtactggataagactttgagtgaaacttgcttgcacaagactcgcaattcaaggcgtagtccattgttcaagttgtgagtaagtgtagcttggagttctaggtggatgttcaaccttattaggtctccatcgaaccgcttggatataaacagtacatcggacaaggcaaatctcagtgggattttgagatatggtgggggattgttggaattaatgaatgggccttagcccactcgaagattaattctttgaaagatcacaaaagcccacctcatgggatggcatgcatgtggagtttactaccaccttgcttattct

SEQ ID NO: 36899 - DNA, 431 bp, Oryza sativa
  unsure (1)..(431): unsure at all n locations
tgccgcatgatttcttctacagatcgncaccgcagtagagtttagaccaccatattcgggatggattggtgtggttcctctacgcctangacaccagaatatcgaaccatgaacgaggaaaggcatgagagaaatattggctagtaattgtgaagccncaattcttgactggaagggacaccaaaggcctctgccctccctctctatctatccaagagatggaagggcagagctttnttttggttttttcatcttttcatcaaagagttgaacaatgaagatagatggcaagtgcctgatcgattcgatcaggtcgtgtaggaacaaggttcanatcgttcgttcgttaggatgcctcanctcatacatcactgcactttcactttgacacctattaaacagctcgtctcgccgctaccttattctatttc

SEQ ID NO: 36900 - DNA, 393 bp, Oryza sativa
aacgaagcctatcgttgtatccgcacgacttgactctaaaagtaataatataatgcgaaaactactttgtctggataatgtaattaatgttgacataaacataattttacagcatgcatgacatgacataagtaaggacaaagtctggcatattactaccatactagtgttaggcaacaggagacttattgcacaactaattatcatctgaaaaaaacatataatacaatcagagcattcccgtaatacttttgtcgttcgcaaaatacttgtccacactattcataattaaacttcgatcattcgtccgcttttattatataatcgccgcttataaggataccatactattaaaatttgtacaccctaaatacagacatgttatatcacatc

SEQ ID NO: 36901 - DNA, 383 bp, Oryza sativa
  unsure (1)..(383): unsure at all n locations
ctatctgaaacggggatcagcctgattagttcacttgttctccatacatccctgtggactaggggcccatattttacccctttgcgactactcctcctacgatatttgttcctcaaccatatgatgatcaaaagacaaagtaccactatagccttcttccttagcaagaagtgatgcgtatattggtgtcgagtgttctccatctggatgagattacatacgcagcttcaaattacttaaggaaatgtgtcggttcagtgaanaacaaattaatttactgaataaatattgtgcccagccaacatgtagatntgtcgactaaaaataacattactgaggtgtaatggacacctgtatatttctgtgcgcaaagaaatcaacac

SEQ ID NO: 36902 - DNA, 456 bp, Oryza sativa
  unsure (1)..(456): unsure at all n locations
agctaagtggtgccaacagtgaagttgtataatatatcangaccctgtaccatccatagtttgtcagcaatagactgggtacaggcatgtgcgagaaattgttgctttctctgcatgatgaagagaagttcttgaggactttcaatttgtacttgcttgccaccatcttgtgtcctgccaccggcaattatgtgaatctcgactatttgcattctttggttgatgtcaagatgtgtagtcagtatgattggtgcacacatgtggcgagctgtttgatgcgggaaatcaggaaatatcagggattctctactgagcaacgagattccatttttcagattggagagtgcctccccttgcttgttgaagntttttattgctcaccctgctatatatatgctttattggtttcattggcgtgcttgatccaatattttcagtaaatacatccatttgtct

SEQ ID NO: 36903 - DNA, 405 bp, Oryza sativa
  unsure (1)..(405): unsure at all n locations
actaaaatccatgttagtgtattagaccatggggaactcaagaaanattccaccacgccatttttgattattaattaccgttattaattaggaatccacttctaggtaatttaaaccaatttcttcgggcgatttacttaatgaaatttttaaagcaagaaaggggaaactttanggcgtgacatctacgntatatgacatcaagcagacaaaagaaaaaggatatactgggtcangtcccttatcangtaatagccctagtccagtttatatgagattgatgacggagaaccacagattacaatgaaagtaagcgaatcagacgataacgacangatcgtaacgatgtactcaacgagatcttctggcgacttggctccgcgtactccgggcttctaaactatg

SEQ ID NO: 36904 - DNA, 390 bp, Oryza sativa
  unsure (1)..(390): unsure at all n locations
gacgcgaaaaggtgaggaggaggaggangagaggacacaccacgccgccgacggaagcttccccggaagctgcactgcnctcgcttggaagctactatctagcacagtgcttgtttccgtggagaggacaatgattatcggcatgcacgcagctagccttaacgattgaaatgtgcaaccagcatgtgtgaatatgggtaatgcgtatctgtggatattcagtggaattgtggttgtggctatgcataatttctgtctgtggaatttgacacttttggaggatctaaaaatgtttttgacatttcttactcgtatataatttattcctccccaaccggtatgcacacaatatcctcatttttttatctaaaaatatagtgtgaataatat

SEQ ID NO: 36905 - DNA, 289 bp, Oryza sativa
tccgcctggcccacatgatgagagagaaattggccatccctaataccaatatgaactaacaattgagttatatcatctagccgaattattgtcacggatttttaaagttattataatggtgaattaaatatttcaaaaaaaattaatacatagctcagaataagttatctaataagtgcaatacaagaaagcttttttaaacaagaggaacaaataactcgtttcataatctggtaataacttataaaaagataatgagttttcctatgagttggcatcaatctctaaa

SEQ ID NO: 36906 - DNA, 231 bp, Oryza sativa
aagaaattaagatcgatccatcaaacagagataattaaccctgtgcaggaactcatcctgggcgccgatggcgtagaggatgccgacgacggcgggctggttctgggtgttgagatgcaccatgtgcagctccatgtcgtacctccggccatcgacggcgtgctccgacggcgcgtgccagtgcacctgccggagccggtacgccgtgccgttaatcaccagcccgccggc

SEQ ID NO: 36907 - DNA, 466 bp, Oryza sativa
  unsure (1)..(466): unsure at all n locations
aaaactcagctaatacacacacggagttnggggacgctcncattggttcgaactntgataacccccggtgttccattctttcgcgatctatctcaccaactagatccatagcggaagtacgctcttgatcatcgtgccatatcccccggccgaactcacaaaggggggggggtctcacgatcttccactagagaggatcactccttgacagaggtatacaggagtactgggcttttcgcattttgatccttatagatattctacaaattgatcccaagaaaacttattttaaaaatggtccttttcgcggcgctaatgttattggcaccatggtccaatatgatggctccaatgacattggcgccatcctctccgtcctcgggtgaacactagtcactaatgtgaagggatgacgccaacgacattcatgccgaggaccaatttgcacaacaaagtgaaaatgact

SEQ ID NO: 36908 - DNA, 450 bp, Oryza sativa
  unsure (1)..(450): unsure at all n locations
agcttatgttcattcctattcttttactggaacataatttacgcncatcctttgcaacaacttgtagagtgtatgtacggcacctacttgtacatgtgttgtttcaaatgattcgaaactgaaaactttttctagtgtaattctgacttaaaattaattatattttcccctgttctgtttgagcattatatgctatctgtagctttgatgcaaaattccatatggaggctgtcaatctgctctgttcgttaggtttgtacgatccttggtgcttaagacagcatttttttttcgtagacgggttcatctgaaccatatttactgaatggtgtccataaaagaagtccttttttttctttntcgagggaacaacactatcaccgatcaagtgaacagtataatgcatagtatttgtatttttatagagatgattaatggcccttacttctg

SEQ ID NO: 36909 - DNA, 407 bp, Oryza sativa
  unsure (1)..(407): unsure at all n locations
tgttcaccgcagacacggaagctgctgtgtcttatgacatgtatgacatcctcaattggagggttcacatggggagatgatgttctttccagtgattgaataggaggggatcctttttctagtgcgaagtttttcgttgaaacaaatggggcaatatctgctactgatgaaagcaattcttgcactgtgaacttatcctcatcattctgtacaatggcattggcagtgctctgtgatatcttactgcagggcacgttgtccttganaatactcacctgctcagatatatcagaagatggctccaaggctaagttttcacaaacatcatcattactagccatctcttctggaaattggtggtggttagctccgagctaggcattgctgttaggtcatgttttcgtatg

SEQ ID NO: 36910 - DNA, 461 bp, Oryza sativa
gatctctaagcaccgcggctgcagctagtcacagcagttgaaatcttaatttgtactactcatttccattctcacttctcagacaaagcattctacaatgtccaatttcaaatagagtgatacacaaggctctaggttgatttggttctgtgctgcacctatataatattatttctagaattgcagtttggagtttattttcttttaatattgaatcattatcatgagtggtaggctgttaaatctcatccataaaagagttgatgtgctttttcgatttcaattacttttaacaagaacctttttctatataaatacaggaacagatcctatgtcggatatgctttgagagagacatttgcatagttctgcttccatgccgccattatgtcctttgcgagtaagcttctttggcaatcactgattcatgtatgtttcacatgttatgtcgtctgaagctt

SEQ ID NO: 36911 - DNA, 331 bp, Oryza sativa
  unsure (1)..(331): unsure at all n locations
agcanattcgagacgaaagcgggtggtggagagagagagaggatttggatgctcaccaggatgcangaacccctcccctgctccggtcgcgagattgaggatcggcgccctgctctgccctcctcgcgagatggagatcagcgctggcgcatggagcggatacgagacgggagtttttcttctttatttttttcttggcgcgcgacgggagtgtgtcttttctttccttatttttattcacgcataagggacagcgacgaaagatgtcctttttatattttaaaaaaaagtctgtgtattgcaacgggtgaatgctattctaatcttatta

SEQ ID NO: 36912 - DNA, 435 bp, Oryza sativa
  unsure (1)..(435): unsure at all n locations
agctnttatgcattcganaaaactgaattgtattagtcttgatctgcatcgtactgtatatnttgttgtacagaaattataacactgtattactcttctgaatcaaacagtggattgcatctatataaattacccaaatcaacctaaacaaactcttttttttctttcatccattttccatttccaactttgtttggaattttcgtgtttatgttacaacttttcaaacaaataatacctcaggtgtaaatagtgagtttttatttccatactatataggacatatattgggggtggggaagaacaacttgtgttgntcttcactcatcatatatagacaattctccttagaaaatcgtctaagaaatattaagcaaaagaatcaattcgtaccacataagtgtacacactgtctttagcacattctttgagtac

SEQ ID NO: 36913 - DNA, 304 bp, Oryza sativa
aagacattccatcggaaacgtcacaagcctcgcttcatgatgggatggcatggtgcaccttccactatgatatatcggcaacatccgtcctgaccaacccgggttaattcaacggcatcaacaacagtggccggcacacgtaacaagaaacaacacaacctcaaccttactcttagtcgactaatgattccacatcagtcacgtcagtcatctctgccagctcagccagaacagccccatatgtttggaggtaagcccaacttctgctacaattgtaacaaacccggacacacggttggaaagt

SEQ ID NO: 36914 - DNA, 448 bp, Oryza sativa
  unsure (1)..(448): unsure at all n locations
agcttgggagggacnagaggttatttggatanttcttcccaagaaacgcacgactagatgatgttgttgatgaacaagatttgtgggcctggaaaggaagacatgacaaaccaacttcgttgtcaagagacggccttatattcttgcaccaagggatcctaccttggtcactctcatccgtgagagggaggagctcaagaggcccaaccccaaccttactgtcacctccctctccccaaccccttcacttgtttctccttctctcttaacccatgcgataacaactgtgacgggctatggcaatgataataaattgttctgtgcgaacagttgttttctcgattctaccttgggctactccaccttgatccccctctttcctcctcagacgcactcttcaagtgtagcaatgtagagaagatcgacgataccaccccactggcatgga

SEQ ID NO: 36915 - DNA, 357 bp, Oryza sativa
tatgctgaggggctagacttgaacattggcccttctacggactacgacatttgctccaagtcattgatacggtatgaatcgatgaaccggcataattgcatttaaagatgtatcgagttatacgtacctagcttgtaggtttagttataacagatctgatttttctttgcacatcagtgcaaacgatcacataagatttcttttttgacacaatcaatccaatctctacctcaatgagttgtacgcacttcaagctcaacatctctgcgtactgcacgaatattctgatgctggatggttgcttcaatcagagatctcttccttttctgtattcatacgcttaaattagacgacata

SEQ ID NO: 36916 - DNA, 470 bp, Oryza sativa
  unsure (1)..(470): unsure at all n locations
ggatccttaagcaccgcggctgcaacttgggcagcgattttgttttctcttaaattntccattntacatacctctctactgttgaatttcattcgcttcccttaagcacaaaaatggacatacggtgtaccctctacttctaacacaagggggtgtttagattcaggggtataaagtcttggcgtatcacatcgagtattgtataggatgtcatatggggtgttcggacactaataaaaaaactaattacagtatccgtcaataaaccacgagacaaatttattgcctaattaatccgtcattagcacatgtttactgtagcacaacattgtcaaatcatggagcaattgggcttataagatttgtctcgcaaagcagtcgcaatctgtgcattagttattttntagcatatatttaatacttcatgcatgtcacggttatggataccacatacctaatattagttgact

SEQ ID NO: 36917 - DNA, 104 bp, Oryza sativa
caaacacttacatctatacttctctttagtctgagaaagatggactggccctgacgagaaatgcttcaatgaactaggaaaaatctggacaaggatatgatctg

SEQ ID NO: 36918 - DNA, 430 bp, Oryza sativa
agcttggcccatacccaaaatagtttatgtcatatgcctgatagcgcgcacaactcttggagcagaattaatgaccaggggatcgactgatggattatgaaatttcggtcgcctatagaagaggaaaagcttattaatataaaagtaggattgacggatgtgtaggtgagggatatactccctccattccaaattgatatacgtatagttttttttaggttattcctaaatgatctacatatttgtgttcatttattgagtctattcgttatttgtgcattggagtaaatggacattgatgcatgtatccatacacacaagtatttataacctacatgcaatatcttgatttgctattggttaggaaatttgcggatggtgtatgcatctagtttattgctagagtaaatatagtatgagagagttatta

SEQ ID NO: 36919 - DNA, 297 bp, Oryza sativa
cacaagcaacaacggcgcggccgtgctattcttcatcatcaagtgccctgtcgccgaacagtatacgagggagaaggtgattgccgccatgtttcgcgagatgaactcagggtataatcaggtggggagtgggcgccaccggttgaggcagctttacttcgatcgctggttgcagacaagcttcaagcactctgttggcagacactcatccacccaccttacaacgctggtgatagaagaagcttgtgcgcagagtaagacaggtgcgactttgactctttcgagctcggggaagac

SEQ ID NO: 36920 - DNA, 375 bp, Oryza sativa
aaaaaattacgggtacacgtcacatcggatattcggatacacattttaaatattaaacgtagtctaataacaaaataaaatatagatttcgccagaaaactgtgagacgaatttataaagcctaattaatctgtcattagcaaatgtttactggagcactacattgtaaatcatggcgtaattaggcttaaaagattcgtctcgtaatttcctggtgaactgtgcaattagtttatttttttctatatttaatactacatacatgtgtctaaacattttatgtgacagcataaaaaattttattggtactaacaggtccttaacaatattttcatgacaactaatagtataccatgctttcccgagaccaacacg

SEQ ID NO: 36921 - DNA, 468 bp, Oryza sativa
  unsure (1)..(468): unsure at all n locations
agncttgctactatctgtgtcgtatganggaanattattactcntagnacgagggggggggactattgagtccgcggtatggtcattccgcgactaacagatcaccggnnggggctctgacaatgaccctgacagccattcgaacccgggactataatctttagtcccgggtggtaacacaaaccgggactaaagatcaaatatgcccgttacccttttgaaccgggactaaagattatctttagccccggtttttattgcatccgggactattgtggaaatcggccgaccgacgaaagatggtttctccaccagtgctagtgcaaaggattatgggttatgtgtgtgtacgttcgttgaaatatgtatatggcgggagatgtcatatatgtacattcttctatcatactacaccatgcaagtacacaatgtgcanattgtatatatatatatatgagtagttggact

SEQ ID NO: 36922 - DNA, 452 bp, Oryza sativa
agcttcatcatgtctggtcacaaattatttattgcacttcatgaacgtaaatgatactatggccgtcactagaagcttacgaacaccaactagcacgctattgaactattcggccatgttggttgtcatgtaaccccaccggcggccatttctatcgtatgcacgagaccacttatctttatccaacaactcatcttcaagccatttacgaggaccttcgggaatacgctgtcttagtgcctcaacatccctctcaaatatccacttctcgtcaatctgacatatccttaggagctcttttgtctggtgcttgtccgcaccggccttgtggaaattagcactgaagtgcctcatgcaccatcggtggtgaccggtggcaatcctagaacaggagtcgtcatggcattcattataccagcatgtcgatctgagataatacaaacctccctatg

SEQ ID NO: 36923 - DNA, 369 bp, Oryza sativa
  unsure (1)..(369): unsure at all n locations
agctntanaccccagggcagttgccgtcgtgatatatcccatccaaagtgtcaaggtgaaagttgtcattgatgcatttcgccttattaaccctcagaccatgatgcttggtcaggagccacgacagacaacatcaaatgttgggcacctaaataagccatctattcaggtaagtgggtaataatgttggagcttctacatatgttttctttntcctattacttatgaatgatcagggtatctcttttttgtcaggctcttattcatgggctgaacaggcactactattcaattgcaatcaattaccggaaaaatgagcttgaggaaaagatgctactgaacttgcacaaaaagaaatggaccgatgga

SEQ ID NO: 36924 - DNA, 280 bp, Oryza sativa
  unsure (1)..(280): unsure at all n locations
aaatgatgtagattctgttgagctaactataccatcatgctcatgaggaatattcactccatagtcatatatgacctcatcttctactgtcctatngaatcaaatattgctcttatngggatgcctgcatatcacatttagaaaatcatatggtgcaaagactaccacaattagggtaatatggacaacaaacatggacctaaataccatttgcgatgctatctcactctctgtgtgggcatgcactgcaataaataaatagcttaattacgagcttcct

SEQ ID NO: 36925 - DNA, 396 bp, Oryza sativa
  unsure (1)..(396): unsure at all n locations
gttcaattgagaaatacacagccaaccagaatatttgtatatagattcttcgataataacgaactatatttgtgctctggtacggaatttatatcacaatgagggagacttntataatttaatcgttcctgagaaaacacaatcatcgccggaatttaaaaacnatagtttggatcaaagattnactagaaactctcatttcacttatcnntcgtatctctcagataacttagggcttaagatcacagcanatggtgtcaactcacatcttctcagggttccatggataatgtgttggctaatattcacttaaaacttgatagagtacttaccatgaacacatacattagagatataaaacagagcaactattcatcatgttaacatggagaacta

SEQ ID NO: 36926 - DNA, 421 bp, Oryza sativa
  unsure (1)..(421): unsure at all n locations
acgacactactacataaacgtgtggtctgtacgagaccccatgagttctgcaaacggaccataacttgcatcttctggaaaatcgagcggtattttcgcatacggctccttaagacgcccttatggaaaaatcgatttttccatatggacctcttaagcgaacttcacacaaaaatatttcatttttgcgtgcagtctacttgagaggccggatttttctatgcgggcatcttaaggagccgtttgcgaaaataaaatttgaaattagtttatcctacttatatgaactctaaattggatgaatttttcctaaaagtttctaaaatcatgctctatncatgtattggctcttactactattattattttcgcaatnctttcttgtgacttctgtttatcaactaactcgatcgagttatat

SEQ ID NO: 36927 - DNA, 313 bp, Oryza sativa
  unsure (1)..(313): unsure at all n locations
gcccaaattcacaaggagctttctgatcttcaaactgagctgggcagggtgtgttacctactgataataactgatcctatgggagaagcagctcgcaagagggatctctagcaccgagaaacaaaatcttcatcatctaatgatagtctaagaccagagtccagaaagcaaaacaaagttgcacaaaacaaagcctcaacagaggagaagcttaaggaatcttgtgctgaaaaaacacaagtggataaaccagccgaggaagagaanggtatntnctataccacgagaatggcagcaaacctgcattcttcat

SEQ ID NO: 36928 - DNA, 412 bp, Oryza sativa
  unsure (1)..(412): unsure at all n locations
agcttgaccttcgncagcgtcacgcttggtangtgctcaancacgacctccatccacacagtccctgtgcttgagatcctcttcgcctgtcaccccgactttcgccccgccgtctccttgctcgcgatcctctccaccattgtcttcctctcctctctagctcaccctcgatctcctcgcacgccatccctagactcgattcctctccgccagcattggccccaagcttgacattgacttctgcttgtgcaatccttaggctcgtacttctgcgcgcctgccttggagtcatgaggactcgccagagtgatagaagaggaggtcgatatgctctctcaagctcccatcacgatgcttcgntttttagtcccatctaacctcactgacaggtgggtccagnggcagagccatg

SEQ ID NO: 36929 - DNA, 284 bp, Oryza sativa
  unsure (1)..(284): unsure at all n locations
aaggataacgaggaaactgtttcgctttgtcctcacgcacacacgcctcatgcgtncgtgtttatcgatcatgccactgccctgctgatgaacaagttcttcaagcaagttacggtgatatgcgcgcgcccactcttgaaggagcatggaagtattggcggcacatggagcagcggaagataggcatttctttgaaccggatcgtttcagctaatctatcgcccatcaccgcatccgacgcatggttggatggaatgaaatggaattacatttacacgttcacg

SEQ ID NO: 36930 - DNA, 429 bp, Oryza sativa
agctctgcctccacttaggccttcttattttagtcttaaccacatccacatctgaatcaatagcacacaaccactcatgttggatgatggtgcctgacgacaacaggcctcacagagctgtctatatgtccacgccaacactgctgacccccaactgaaacggcccagatcaccaaggttggcgaccaaaggaatccatatcgccgaagcaatgtcacccccagcatcaggaaacagaacccctcccaacaagtgcaagatgtatgcacgggcataacactcagcacgccatggctcagcatcgtcgtcaagatgtgagaagttctgactcagccaagacaagggtattccattctgcttcttcttcccccctgcccctgctcaatgttcagtggaatgcaaacagctgctgcacttgtgcatgccatc

SEQ ID NO: 36931 - DNA, 338 bp, Oryza sativa
  unsure (1)..(338): unsure at all n locations
tgatactgctccaattgagaagaacttcaactctggtgagggggaaaagagagcaagactgagtactacccactgtactcagcaagtcataccggataaggaggtacgatgcttgatataaccaatggaggctatgggttcttttgcataaaactagcatttaaaagcagtagttgaaagcagtaaaacagctgtagtaattaatcaatattaaccaatcactgtccaacgctacaccatgttgcaacaggcccaaccaaccacccgaactacaccagttcattaagctaaactaggggtgagactaatcacggngaatntattgatcgcccataacc

SEQ ID NO: 36932 - DNA, 434 bp, Oryza sativa
  unsure (1)..(434): unsure at all n locations
agctatacagaggccactctctatggngtgttttgttttatggcctgtatacatgtcggagaccatggataaattcgtgtacatcacacaattactaattaataaagtgcactcgctgaatgtgtataactacaactatgaacacactgtactagtcctcaagtaattttattttttctaatttaaatcatggaatgtgcgtacgaacacaaccatttcacacgcacgccacacacatatgggaatgtgttcggctcccaaactcatgctcaaatatagatgataaagttttccggtcaagtataattaactaaagctgaatgtgctccatcagtggttgatctagtttcagattggttgttgctcctttatagcaattttctgttagttaattacttttgcaaaccagatcagtttagatatagttgtctatc

SEQ ID NO: 36933 - DNA, 383 bp, Oryza sativa
agctagacgcaacctctacctgacgcaccaattgtcttatctatgattctgcaatacaaaaagggggtggctatcatacatgaaatgtggatgggtttggagacaatgatatttatacaggttcatgccttctcaatgtgaagtaataccctactccctgtccggggattgattccgcgagtgtgttatatatattatgatccgggagaaaagttatgccccaagaggcacccggacccctccttatatagcgggaggaatgcgtattactagggacagcccatattccttacggaatatgcaaataaagataatatacaattgcaaccgactagaacccatgtattatcttgatacacaagttaggaaattaacccacgccc

SEQ ID NO: 36934 - DNA, 420 bp, Oryza sativa
  unsure (1)..(420): unsure at all n locations
atacaaggcaaaccgtttatttattgtagacaagcaatgaataaaaattatgttgttttccaatgcccctctccctcctttatgtctctccccctatgatcagatcaccagatgttgcatatttctcccatgctaagggttcatacagctattatccatttatcctcctctgtacaaaatacacatggagcagtagagaagaataagagataaatgaatcacggataaatattgcctttaatctcaattgagagatcttgctgtttcaatatctggatagtcagaactcgcatgttagtccctcatgagaaaaaggacttgtatcttacanatgaagtcgaaaatgcaccagttccttataaacaattgtgatagcataagacatgactatacctctgagttgctgtgatgcaagtatga

SEQ ID NO: 36935 - DNA, 398 bp, Oryza sativa
  unsure (1)..(398): unsure at all n locations
agctatcaagagttgttgtgcagacctgagcctgttatatgatcctatgttgtgtactactactactgctgtactactactaccctgtgaactcttgttttgctatacaagtctataacaataagttttgtttgttaatggagaacttgatgctcttgcattctgtggaattntctgatggtactagccctaccattaaggattgagatcctctgcagtcgacatcatgcccacgtgtaattgacaaaggtacngtacagtgactgcagaggatcgtgatccaccattaaagggcacgccattagtgatggacaatcctaacaggggaacagaacacaggacacataacaggggaggagaaacaattttggtgtgaatactagtagtattcagctcta

SEQ ID NO: 36936 - DNA, 492 bp, Oryza sativa
  unsure (1)..(492): unsure at all n locations
aaatatttcctccttctttctttgatgtgatgctacacttgtctgtccatttacctgaagagggcaattttagaggtccagtacaatatggatggatgtacccaatataaagaaggttattaacattgaaacggtttgtgaggaacatggcaaggcctgaagggtccattgcagaagcatatgttgctgctgagtgtttgactatttgctcgaagtactttggtgatgatgttgagacacgacacaatcgggagggcagaaatagagagcgtgttgctattgtgaaaaaagacctatctgttttccagcatggagttgatcttcttggagcaccaagtcttacatatcttgaacatgaatgtgaaaaatggtatggttcgtgctaaacaattgtctggaggttgagccatatattgagtatgtcatcgcatctactattttcatntgttcttggatcttacttattagccctaatgttcgattaactatcat

SEQ ID NO: 36937 - DNA, 280 bp, Oryza sativa
agcttatcataaagggcttcgacaaggggttttattctttctttgagcaaaaagataaagatcggatagattcgaaccgcaattgcaaaggtaatcactactatgccagcccaaatcatgaacttcaccaacttggatttggttctctcgcgaaaatcgcgagttgcagagatgagaaccatgaaaagcaagatcccgaataagaaaacagaaaccgaggaaaccacaagagtgaagactagtagaggctcgccttttgtcattctttgctcccttttca

SEQ ID NO: 36938 - DNA, 476 bp, Oryza sativa
  unsure (1)..(476): unsure at all n locations
tatttatttctcttcatttctatcacaataagatggactntacccattatgagaatggatcagttattaaatcttggatggaaatatcttttacctatttccctgggcaatctcttattaacaacttcttcccaacttgtttcactataaaataagataatacaataacagtaagaatattttcaacacaaaagtcctctcaaacaagagaaagaaacatacctttttcatagatatttcgaatatgttccctatggtaactgggttcatgagttatggtcaacaaacaatacgcgcagcaaggtacattggtcaaagtttcataattaccttatcccacacaaatcgtttacctataacgattactacccctatgaaaaatcaattacatcggagcgtatccgggggcgaatccactttgaatatgataaatgtattgcttgtgaagtatgtgttcgcgtatgccctatagatct

SEQ ID NO: 36939 - DNA, 91 bp, Oryza sativa
agcttcagttgcacactatagccacatgtgtgttctatttttatcccaagtaaaagctgatcagatatggtgaagcatatcacaccatctg

SEQ ID NO: 36940 - DNA, 481 bp, Oryza sativa
  unsure (1)..(481): unsure at all n locations
actaagcttaataaggccggcttcttgtcacctgaatcctaatcattgcacaaatgctttatgtcctttcgatgacctattgtgctattaattcagcaatagcaattctaatcatcatcttcccactatggactactagaacatatctaattcagaaaatgatctaacaaacccattcttttgttttgttcagaaagagaattgggtgctatggtttcttcaagaaaaacaaaagcaaaaatggaggtgctgaagattagaacatgatgcaaatgaagaagtgggctacatccaggaagaggatataaagcttctgtagtgatctgcttatacaacaagcatcagcatgcanaaggagctcatgcaatgatgcaaaacaccaactntgcatacataatatcagtgcaagatgcatgaaacgatatgacaccagtgaaaagtgcaatgtgcaccactatgactggctcacacacagagaata

SEQ ID NO: 36941 - DNA, 436 bp, Oryza sativa
  unsure (1)..(436): unsure at all n locations
cagcntagctatattattatgagaagtctacgttctttctncgtgcccgaaaaaagaaccaaccacgggtttcaacttccacttcagctaaaatttcggccatttcgggagaaccgaaaattcagagatttcagtatttttttgggccaaaattttctgaaatttcgacaccatttaattgaatttgactaaattcacaaaattcgagaaaaaccgaaaaatttggccaagatattgacttgcccagggtgggggttcgaaattaaattactgaaatntcaatccctgcctcgtactaagaatgtaagtcgtactacgatatggaagtgggcacggtgtcgaaatggagactttgtcacaccatgaggagggtgatggccgaacaaatatctgcatcctccacgttgcttgcttggagcataattgaaatcattga

SEQ ID NO: 36942 - DNA, 456 bp, Oryza sativa
  unsure (1)..(456): unsure at all n locations
tcatgcttaaanagttaaccttaacacaagacgaaattattttattatttattcttcttcgttgacagtgatcacactattatattctcgtgtgaaggagagttcaccgatcgagagatgacaaaaacactatttttgaggctcaatgggatacagtaggcccaccttaattaattccactccacaatgatagcctttgtagagttggcgttaatatgccaagcatgtaccggatccaaccttactgtcaattattgtagacccatttgagttgccatattacaattaagatgcgtgtaactgaagaaagtgtaccataatacatatctcanggtggaaaactgcacatgttgacatgggtaatgcacaccatatgcataagttcagacactatgttaattatatatgtagctctatgcctctatatgaaaacacaacaatgtagcacagctgtgt

SEQ ID NO: 36943 - DNA, 435 bp, Oryza sativa
agcttgccatcagtctgtcaggttaccctgattctttattgattcctgtttagcatatttgatctataccgaaatcttggtataaagtggtatcggattactagccgatacacgttgggtttgcctgtcagctatgctgtgagcgtatataatccctgccttaaagtgttcatggactcaagtggtttatactatctcggcgcgctgaccgatctatcctaatcacttggttcaagagtacttcacagcataaattatatattattgacatctacagccgacagagcacgtccaattatcccttctccatatactacatggccggtatgactgtatcgcatcagcccggtataaacgacacgccattcgaacccagccgatcggttaatcgttacgggattaacatttgtttctttggtcttggtgggggtttct

SEQ ID NO: 36944 - DNA, 359 bp, Oryza sativa
  unsure (1)..(359): unsure at all n locations
tcgcatccnctataatatntgaagcaatcctcaatcattctctgccaatagaaccccgctctcccaattaaccaattcatcttatgggccgattgatgagttccacaaatttcttcatgtacctctcctatagccactttagattgatcatcatccaagcacttcaatagaactccatctatatttctgcgatatagatctccatcaagcaatgtatatttgaacgcttgcaaccaaattnttcgatcaaccttaagtgtaagatctttcaaatatttaatcaaaggaaccctccaatcttcttgtatttcctgggtacaaacgtctgaatttacaattaaatcggtctttgaatcaat

SEQ ID NO: 36945 - DNA, 211 bp, Oryza sativa
aagaggacaaatcaccgaacaacaagacccacaggagtgccaatataagcaagaaggcgaccctgccgacaaaaaacagcaccacgaccaaagcccaagcatcaaaccccaacagtaaacgaagccgaaaaagggcacaaccaacaccggacgtacccaaacgactcaccgacaaaacaagccagcaccacaaggccaaaccccaaatccc

SEQ ID NO: 36946 - DNA, 466 bp, Oryza sativa
  unsure (1)..(466): unsure at all n locations
ggggtggcactggtttcagagactatnggctattcaaccattcttctttggcccggcaagcatggaggttgataacatacccagatagcctgtgtgctagagttcttaaagcaaaatatttcccccatggttccctgattgacacttcctttgggagtaactcgtccccagcatggagaagcattgagtatggcctagatttgttaaaaaagggcattatttggagagtgggtaatggaaattcaattcggatctggcgggatccatggctgccaagagatcactcaagaagaccaatcactgngaaagcaaactgcagactaaagtgggtgtctgacctaattacagaagatggatcctggatgtgccgaaaatccatcagtactttcataatttggatgcagaggttatactgaacatctgcatttcttcaagatcggatgaagacttcattgcctgcaccctg

SEQ ID NO: 36947 - DNA, 326 bp, Oryza sativa
agcttgatgatatagtagtagaacctttgcttttattcccctacctggcgcgccactgtcgacggtggatacccgtagaccgaatatagagggtattatggtacgctggtacgaggatctacgtagtacgacatcaagcaaacaggaaacaaggattatactggttcaagccccttgataggtaatagccctaattcagttgatatgggattatatagtggaaaccacagattacaaagggaatagcagaactcgacgataccgacgagaccgtagtcgagttggttcgactagatcaccccggcgacttggctcctgaaagctcc

SEQ ID NO: 36948 - DNA, 422 bp, Oryza sativa
  unsure (1)..(422): unsure at all n locations
atattggcaatggcttccaagtcattggttctgcttggtgcggntttagcctcactcctactcgttgcacaagacgtctctgctgcgagagaactcgcagaagcaaatggtttgcatcttttctctgactcatgtatgcatcaaaatgaagtagagacatctgtgtataccattatgtacttaattatttggtttccctgaaaagtagcatccatagtttaacctataaaactaattcaacttggaagagaacatagattgctattatatattgatatacttatgtagagagagcatgttagtagatgaataacactactttcttatatgcagaagctaaagggagaacatganacaagaagtagcttatggccctcaagatgagaagctagcacatcatgctgacggatatggacatgggg

SEQ ID NO: 36949 - DNA, 412 bp, Oryza sativa
agcttgcagaagatcacacactttttcttagttttatattcacaaacgctgaagagggtcctagcgttcaatgacccaatgccatgcatgcagccatatggaaaactgattaccagttatggaagctgacgacgacacatcgatctctcactaaccgcccatttactctgccattcatgcacgaggtctaaccttttgccaaaaagaattgatatccatatatccatatgatatgagctgacacagtgacaacactgaatcacttgccactttaacagcctattataaagccctgcagaatgcatgcgaataaacatgagtccattcagtggctaaggaaagatcattacaattcatcgatgcctgggataccctctcgtgaaaaccccggtagctgctgatttctctgaaa

SEQ ID NO: 36950 - DNA, 364 bp, Oryza sativa
  unsure (1)..(364): unsure at all n locations
catctagagcagccggcgctcattctttatgcgccatcctacacaccacccacagtattgacaaagctcgccgtgtgcatgcttctganaccctcatcaacaatctcacagcattggttatcgtcctgnggcaatccttcagcgctatccgaccctccgggactgcggcaagcgcatccaagatatccaacgctggctctacacactccgttggcagctctggcagcaattctactagttgcggaaccgcaccgatgctaacaatcaaacttcttgcacgcttgtgcactgcgcatatcgaattgagcagctcaagccccgcagcgacgccgtacggatccgcttgtctcgaacgaggcgcatg

SEQ ID NO: 36951 - DNA, 440 bp, Oryza sativa
  unsure (1)..(440): unsure at all n locations
agctntangaattagtgggctataactttatattttgagagaattaattatgataaacaaatttctttagcaatccgcagttgtctgtgtcaaatcctatgttactaaggcttaacatgcaaacatgccaaatcatcatgtactaacaagatgtcccatcatcatgtattaacaagatgcaccatcatcatccactaacaaccattaaatttaaacatcatgtaaacatgctatattatctatnaatttataatttattaaattttagagcttttaaaatgcaagcatgttaaatcatcatcccacataattcacaaaatatttaatatatatcttcattatttttataatatgctatgtactagttcatcctcacttaagagtcctagctagttaatgctatttctcacttctctcggtaagacataatacaataatat

SEQ ID NO: 36952 - DNA, 409 bp, Oryza sativa
  unsure (1)..(409): unsure at all n locations
tctgtctattatatcgattccctatgtacatggattggcaacaacgacatggtatggntgattntatacaccctactacagaaacggtttttacatgcgggtgaaagagatttttgcatgcggttagcacaaccgcatgcgccaaaaggtacgtcaaaatcggttttttcacatgcaaaaaccggccgcatgcaaaaataaatttggcgaaaaaaataaaaaacaaaaaacccacaaaccctatcacgctgcccaccgtcggagcgccggatccgccgacccaccacccgccatcgtcgccggtgtcagatcagccgcccncacctccagtagtcatcgctgcccccggatcgactgtcccaccaccggatcgatngtccccaccgcccacagtcgtcactagtcgtcg

SEQ ID NO: 36953 - DNA, 420 bp, Oryza sativa
  unsure (1)..(420): unsure at all n locations
taagcacctgggctgcagcttactcccggtatttaaccgggacttatgactgttatctntagtcccggattctcccttccgattcgctacctgggagtaaaggggggtgcgaaccggaagagatgagtacttctccagtagtgtctgcgccccccatcaatagggcctatagcatagcatgataaatcgtgccggtgatccatcggatttnctattactatcttctattggaatttcggtaagaaaaaagccaagcaaacacacatgcggacctaaaaaaaatatacaaagctctttacctanacagatcgattaaaacttactggatcaatctctacggtttctctactcctatattgcaatatgggttaaagaaaaataaccctcnaacaaacaaattgttaataaacaactactagc

SEQ ID NO: 36954 - DNA, 494 bp, Oryza sativa
  unsure (1)..(494): unsure at all n locations
tgcacagacngccgaagaacgggttagtatctccttgtcaatcttcttcatgaccggagaatcatccacgaaccgccttgcgaaggctgcactactgtttaccatgtcatcaaaatgtgattcatcaagtacaagtggctcaagccctgtaggatcatcccacacaaagaatcgtaggtccccgttgacagttgtgtttctgaacttggaagaattgcaaataacagtctggaagtaagattccatggagtaagctgtgttggcgaagtacatcagtagtttgcggtgaaggttatcccaaccatgaacacagtgttcggtgaagttcctacttagaattacccatggagaacctacataacaaaataaaccatagatatcatatgtgagcctgagtagaaaatcgtgaggcanggctaatagttatgaactactacattaattgccatttnttttctcataatttaacagatatactaattcgtacgcttact

SEQ ID NO: 36955 - DNA, 340 bp, Oryza sativa
agcttatccagactctcggtgtaaccaatcatttttatctcatgtgggctcactggattaccttctactagcctgcacgcaaacaaggactttgagatattaaacctctcagctcttgcttggccctcaaacatgttacgtagtcccgtgattatcgtatgagcatccaatgcctcatattgcctttgaagctcaggggacatagtagcaagaatgagacggcttatatcaagataatcattgcatcgcttttcatgctccctacgttgagcagcaggagcattgttgggcaagttagcttggaaagactctgaagcacaaactctttgtgctctgcctg

SEQ ID NO: 36956 - DNA, 430 bp, Oryza sativa
  unsure (1)..(430): unsure at all n locations
tactcagcttacgatgaccatttngagctagatgccattctgcaactgtatttgtatggatagaactgtggtcagatatttgaacctgaaacctacagtgcacaatgccaaacgtgaagctgaaacttcttacctaagcagcagcacgttgcaggcccatcagatgttgttttgcaaagattcagtgtagccttattgtgagtaatagcatatgtactactgaaattattttgagtaataatgtactattgaaatagtgagagctaagcactatatgagttatcatcaacactccagatattatgtagtgaatcaggccacaagatcattcatagttaatcagaaggatgaatatagtatatacctttgaattcagactcgattcagatattatttgagatattggtccattgctcttntatggtgaaca

SEQ ID NO: 36957 - DNA, 377 bp, Oryza sativa
  unsure (1)..(377): unsure at all n locations
agcttctaatatttttttcttaacctctctccatcattgggagtcataaatggtctaatttccattttatgtgattttttatgtcctaccttacaaattaccaaaggaaatattgcttatgacttactatgctaccattatgagcaggtcaatagttctggtgtcatgcctataatattttctacatcttctntggctttgcctggtactttggcacgatttactggcttagagtttcttaaaaaggctgccatatccctaaatccaggaggtaaacaaggagtttctataattcttttgaaatatgtgtctttatatgggagatggaatgcattatacattttgtttgcatgtaaaacacatttggtaactttatg

SEQ ID NO: 36958 - DNA, 487 bp, Oryza sativa
  unsure (1)..(487): unsure at all n locations
tctggagacttccagttccatgtagcactctcataanaaatcacatctctgctgataataattttctttttctccagattataaagtctatagcctttgataccatcggcatagccaacaaatttgcaacgatcacttttattatcaaagtttactctcttttgtgctggcacttgagtatagcaaatgcaaccaaatattctcatatgaccaatgacaggctttttaccataccaagcttcaaaaggtgtacgatttggtactgcctttgtaggacttatatttaaaatataaactgcagtgttaactgcttcagcccagaaagatttaggcatacctttgtcttgaagcatagaattggccaatcattgatcgtccgaattttcctttctgcactccattntgttgagcactatagcctgcgttcactgtcttcggatgcagcattntcacaatatttctcaaattcttntgagatatattctct

SEQ ID NO: 36959 - DNA, 253 bp, Oryza sativa
  unsure (1)..(253): unsure at all n locations
agcttaattataataatccgcanatctccatattacagttttaaacttcggatgatcatattctggtcatacgagctccgaatcgacccggtcaagtctcttaatggttggtataacctaaagaactgtgtgccttctttatatgtggtggtattggctctttataagcttgtagctttgcttgtgtgcttcgcgtagctttcgtcgttccggaggttcccgaagcgtggttcgcggtcgtcgctgaaggttc

SEQ ID NO: 36960 - DNA, 450 bp, Oryza sativa
  unsure (1)..(450): unsure at all n locations
tatcaagtctactttcaaatggatccagccacatgtccatatctgttctggagcggncgcaattgtcattttacttcccgactatttttgtccatggtgctgcgtcacctcttatggcccaatgggctgtgtatccatgttgggcccattaagggcgcggcctaaggttggagcacgaccctatggtcgttcttcccctctttttatacctctagtcgccgccaagaacaagcgggttttgatgatagagattgcttcttgctaccggctcgcagcgcgcgtgttggctaaaccgcccgtctgcctgtaatcggaaccccaccatattgtgtttgatagtgaaactttcatcnttatctagcatctcagtgcttgcctacttgttcttgcttgttcttcgattgcttgcaggacgagtgccctcgtggccgggttgacgcgcaccacaag

SEQ ID NO: 36961 - DNA, 355 bp, Oryza sativa
  unsure (1)..(355): unsure at all n locations
agctntgcgtattagtactattagttaagtataaagtacattcatcagctagacatcataaccattacttccatcctacttgctctctccaatccgtctccattcagatccacccaaccatggatgtccatcgggctaaagcctacgggtagcggctgcggcgtgtactccaagagcaatagaggagcaacctaaggattccccggcggggtacggagtcctacggacgccatccgcgccgccgattaaaccgcccccctcccaaaacccatctacggggtcggagatctacacggactcgctcgtcgccgtcgctgtctccggaaaaaaaagaagaagcgagggggggggggtc

SEQ ID NO: 36962 - DNA, 497 bp, Oryza sativa
  unsure (1)..(497): unsure at all n locations
ntgactgcttgtagaatgatccaagtagagatgtagagagcctactgtgctatcacatcaattcatcagccttgtacgcttggattgtttgttgcaccagctactcctgctgctgttgatcctaaaaccagcttattgatatgctggcagtgcaccattgaaggctcctatagccatatttggcgaggcagtggctagccgaggacagtgttaccatgtgatcagtgatcattctacatgggaaagctaccagtgatgagagcgccacgtttcgccctagcagcgacctctggcacggngggccccacacgtcagcggtggaggcaaggcaaccacgaaggcaatcgccatcgcctgccctttcatgcccaaccaacgctcgcctgcatagaagaagctcttcgccttctttgctgtgctcttgttgcctctcgctcgctgctgcggctactcattgatcctgngtagtttgctctctcttttctatcactctcatc

SEQ ID NO: 36963 - DNA, 482 bp, Oryza sativa
  unsure (1)..(482): unsure at all n locations
ttggtcgcttgtccaaatggtggatcttgatcctactactcttgattcaatcatctggaaatgggagagttcgggccaatacagctcaaaatccgcctataaggccttgatttctggtcgtgtcaccttcctttccaccccaatttggaagtcgctcgctccgcctcgatgctgcttcttcttgtggttggtcgcaattaacagatgctggaccgctgaccgactgcgcagacgagggttgccacacccggatcgctgtgttctatgcgatcagtacgaggaaagcattgatcacatcttggtagcatgccctgaatcgagacaattatggtggtggacgcttcangcaataaggagccgaactgcttacttgtcaatgagccatcccttcacaaattggctatgtgagaacccgaatgaagattgtggaagcggattgtcgacgcttctacaccgtcgtgacactgatggcttggacaatt

SEQ ID NO: 36964 - DNA, 351 bp, Oryza sativa
  unsure (1)..(351): unsure at all n locations
agcttgaccaaatnntaaagaaattgattaactcattatgatatataatataaaatggatggagtaattagcatatgtttttaacttgggtttattcacggcatctgttggaaaatgcgttaaaaactacgtgcgtactcctccagttgcgctagctggttcaaataatgagattctctgatactgatgtgtgtgtagacttttttttcttttttgacaaaaaatttctatgtggtatacagcggcattgttcatcgttgaaaatgtatatatatagtacaattttctgtttgacttggatcattgaataaacgggttttgttatgtctcaaagaaacgctgagtcaacac

SEQ ID NO: 36965 - DNA, 394 bp, Oryza sativa
  unsure (1)..(394): unsure at all n locations
tgtatattatgaataaagaaatntccaaagtattgggcatactccatgcgcacactgctttaacagatgtgcttaagtccctagaagacacatggtttcaccacacctggaaatatatggcatatgtggtgtaaaatccgagtaaataaactcataaaggatttaccaaccgcctagaaaatgaccacaatatataatcagcctaagccataatattggtcaataaaaatgcacacttacgtggcgaanagcaacgatattgtatccaatcaattgcttaaaaacccanacagcaccatgactatattaaaaagtcagcggggcagctatataaagctttactgtttgacaccttttaagagcattgtaccaactcctaaaaagttgagtaact

SEQ ID NO: 36966 - DNA, 320 bp, Oryza sativa
ttaagtcacctgcggcatgcaagctacacatgcagttgggaattattatattctataattatcattgacattcatttattgatgtgtcaaagcgaaatatggcttatatgtagagaagcataaaaaataaaaaagaatataatatccgtaggacataaaatgagttttttcctctatagccaagggagtagattgattcaatactacctttgcggattaagtgcttcactaaaataagtctctctataaaagtttcaatgctatcttgtgggttaagtacttcactaaatagatgtgtaaaaacattacaaaagttgttt

SEQ ID NO: 36967 - DNA, 457 bp, Oryza sativa
tatatcgtttagatatcttacaaattatttatacttattatatactaaactcacctattatatagagatattatgttaagattgttaagtcatgattaccacgatggtttgtttacatactttgctctatggatatgtagagtaaaataatccttaaagcttttcttccacaattgaaatgttgaaaatatatcattccttcgggtccatagattctgtaggctattccaattacctcgacaaagaatggatgaacaaaatttatgtccccttgatggatgaacaaaatttacgtccccttgattgaaaggaaattcataggaattttagaggattttattcctatataaattttctccatatagtcctttgaaaaaaaggaatgagtcctatggaatcctatataaattctatggaatgcatattcctatacatgttttggagaaaaattaatatg

SEQ ID NO: 36968 - DNA, 219 bp, Oryza sativa
  unsure (1)..(219): unsure at all n locations
agctcgncctcgttctcccaaccctacgacgtatcatgttagcgaagccatgcatcctggcaactgcttgttgaagcgaaaacacacactggcccggaagatctgcttaacttcagcgcaggggcaaaatcttgcctttaggatcgagagtgtgctaattgatttgatcctgcaatcaacaagaaataaagaccagaaaaccacgattaaatccctaaa

SEQ ID NO: 36969 - DNA, 457 bp, Oryza sativa
  unsure (1)..(457): unsure at all n locations
actcagcttattctctaatatttgttgagatncatattacattattttctcatcttgtaatgcttatttatgtcaatatttgttgagacttcatattacattgtttactgtttttctcccattggatcccctcccctggtcatgcatagtacagctattttgttcactctacatgggagattgtattagttctgttatgcatgggagtttatattatttcgtcaatgctgaaatgatatgtactatctgaggaagggtactcattttattagattgtctagaatatttgatgtatcggatactggctcgtatataagatattaccacaatcgtagaacatgttgagagcatactcgtctataactattattctttctcgtcacacacaaatcggcattactgtattttccataagcatattttagctttaatgtaatgatttatgtggtatctgctg

SEQ ID NO: 36970 - DNA, 231 bp, Oryza sativa
  unsure (1)..(231): unsure at all n locations
tccctgcaccagttgagcctataaaatggttcatccattctcccaaggcattccttatttcatttggaatgccacaggccaaaacacagntcattacacttcacacaaaccgaactaattggcaattaaaagaacaagtgatctattgcttcttcttcattacaaaattggcattttttactctcttttcaagaccctttttcaaataaatatctttagttaaaatgctgt

SEQ ID NO: 36971 - DNA, 392 bp, Oryza sativa
  unsure (1)..(392): unsure at all n locations
ggactgatacactctcatttaagttttaagtgtgccacctgcattaagcacaactcaataaaggaagtgcaaagaaattattccacaacaagcataaatggaagtggtggtgctgcgtacagaaaaacattataataaattataacaaaattatgccaattccgatagcttttcttaaagcacaagaaaggggaaagaaaaaggaggaatgcaccaatttatcaaggcatatatttacatggaagactacatgccagttattcaagttagacataacctcttatgtaccataattntagaacgttgctgttgcaggatagtgttactgcatgactagaatggttgagctttatacaaagactaataccaccgttgacgtcacctctaagcag

SEQ ID NO: 36972 - DNA, 406 bp, Oryza sativa
  unsure (1)..(406): unsure at all n locations
agcttgtgcgtgatggacagctggatattgttattggagggtgggtcatgaatgacgaggtgagacggaaggaaacatttgtggtttatacatgatcttaggagtagatggcagtttttgcttgtctaattgggttgccttttgtgtatttgttggcatttgaggcatggtatgcttgtcatttgttgcttggttatgaatggagtgaaatttcatttcatgctttacctgattgggccgtagtttcaatgctcangaatcagttttattcgcattttatgttgtgtacaccattgctggtttgatatatgcaaatgcgcttttgacggtgatgcttctgaagttccaatttggtagtaaacatgtggagattcagcactagataaaggatcagcaacaacctctg

SEQ ID NO: 36973 - DNA, 322 bp, Oryza sativa
  unsure (1)..(322): unsure at all n locations
agctngaggcagcaactgcataacttgctgcttaatcattggcaagatcatcatccaacctgaaggaagcacatcatatataggaataataatcagcatgaaaatcatgatataactgtctcctcaccattaagttgtttgtactgatatctataataattgttacagacttagactatttgccatgtttagaccctaaagtaccatagcgaaatggctgagcttatgtgatactcaggtgaaaaagtattacttctggaatccggtagctgttttaataccgattggaggggtggttaaaactataagggtgaaagtttac

SEQ ID NO: 36974 - DNA, 418 bp, Oryza sativa
ctattacggacctatgaaactcagcttacagagcagttgcgatgaaatacaggtggaatattcagggctggatgttgctcagaagtttgtccctaccaaattgccatagcaaaaattacttattcatgagcgatatctgcaatgcgcagcatcatgagctgtgtttcctgagcagatgcatattatttgctccaggataattaatttaattttgtaaatgagtatctattcgcaacaagcagtgcaaatttaaatgattctgctattacttgtgtgaagtttatacagtagtcgtacctgaagtttctgtgatgttggtgtgggtgcctaacccgacgaggcgcatatggcttctctatgcaacgattagtattctgagcgatatgattctttttccaccaatcttcatattttggag

SEQ ID NO: 36975 - DNA, 273 bp, Oryza sativa
tgcagcttgcttgcacgtatcgctgatcttctcttatttccgggacgcttctacgccgccacactctggatgcacgaccaccacccccggaacggctcgccgccatcctcgccaacttcggctgcctcaacctcctcgagatcatctaccgggggccgggacaaacacagggaggggggagagagagaatggctcaatgcgatgatggattcacaccacaaagtttcccattgtaattctcatccggatgaagtttcggaggccctgctcatt

SEQ ID NO: 36976 - DNA, 416 bp, Oryza sativa
  unsure (1)..(416): unsure at all n locations
acatgagagatcactcaagaaatactngaactggttttgctgatcaagaaaatttatcagcaagctgatccagtattttcgctctctcctcatcacaccaacggtgttgttgcctcacaatgttccagtcccagtaacctatttcctgaacacggtcatactcaaggaaacaagctccagtaccattgacacttcaatgacaaagttaacaaagtanatctgtctctctgttccttcanaaccaatgatcaccaactactttagccgtttgtgctgcaacttggatggctgccacaaaatatcattgcaagtctctccttcccaaggggtaatatggatatgaaggctctcagacatggcgctgcttctaggaggagtcggggccaagagatattccatgatgaaggcacatcggc

SEQ ID NO: 36977 - DNA, 473 bp, Oryza sativa
  unsure (1)..(473): unsure at all n locations
tactaagctntcccagcccctttcatcaatggactcctgacgtctactattgtttgttgttcgttcgacaaattcctacctctatatctatctctgaggtgtttgggttttgcaaaactccatatatatgcataagagaaatgctatccccactccgaccaagacagaacttttaccaaaagtttattgtgatcgttttgttcaaataacaattaaggtgaagcatggtcacgaacaacgaatctctttatgataaacagatccatcttgcaagctcgttattacgggtagttcctacaaagaatcggactaatgacgtataccatgcttgaattatcgacgtagatgctacatagtgtgttctcatcctcagagactacgagtgtaatatgagcatcctgtgacaaaaggatcaccctaagatgatcatcttatggctattgggaacgaatcaatcagatcgtctatttctc

SEQ ID NO: 36978 - DNA, 351 bp, Oryza sativa
gatccagtctcagacacggtgcatctttcccaaggcgtatctgtactgccaaaatgtaccatttctgacgaggtatttcgtgaatcattattcctcagccatccaaattgctcgcaatacaaaaacaggctaaaatgttggttgtgccggcgactcgcacagcgcccacggacaagagttcgctttattcccccctccaacatctgcacattatagtcgtagcttggtttcacacctccaaccgttaaagtaccacgaatcaatcgcagaaagaaggtgcactgttggtttaattaagcaggactcgaagttcaaaaccagggaggggaatcagaagccagtagacacaaa

SEQ ID NO: 36979 - DNA, 439 bp, Oryza sativa
  unsure (1)..(439): unsure at all n locations
taaaactcagcttttctgaggatgttcgtggcttgcgtaccgatgttggcaacttgtatacttcagtgggaaggatgcaaactagggtgggtgcattgcattctcgagtccaaatgttggagagcacccatgctttngtatatcactgccaccgcgatgctcctcatacttcctcttcggtgcatcctccttctcctcctcaagaatgaagacatttttggtacttgatgccaaaagggggagaaaaatgtccttaagtgtgctttatgtcctgtgggttaagactagtggtagtgaggttagtcacctcatatctaatatggtaaggtgtgatgggctatattttgtatgggtatgggctattactctatattggtgttctttatcgatttgttaaacactatgtcatttggacccttcatggtcttgtaataaccta

SEQ ID NO: 36980 - DNA, 250 bp, Oryza sativa
  unsure (1)..(250): unsure at all n locations
agctagcagtggacttggatcacaaacactgttgtctaatactactactcctactttctctcagaagagttccaaaccagcaaaattcaagaagcgcaaatggtgaaatacgactcgttcacaaaaaaaagttgtgaaatacgatagacgaaaatttcgagttcacgggttcttgagaacgttttgtactactatgagttagngggttacatgaaacaaagtactactcctaacaaactaattttagctc

SEQ ID NO: 36981 - DNA, 395 bp, Oryza sativa
  unsure (1)..(395): unsure at all n locations
tcattgatntgcattcctctgcaatgtaagcaataatatntatatcatctatgtaaatctaagaagtttgtaccgaccaacacacaagattacacaactataggatatgaacttgtgtacaagtcactgagtaagatcaagtttgtatcaaccagcatacaagataacactactacaggatatgaacttgtgtacaagtcactgagtaagatcacttacggtgcanaatctgtgttagagagggaatcgctagaatccttcttttcgtcttttgagcctacataagatgccaacagtaacattcaaaaccaaaaatagccatctagttccagatgtagcaaggtggaagggaaaggtaagttaagaatagtatgtgaagcatagaagatgcgtac

SEQ ID NO: 36982 - DNA, 477 bp, Oryza sativa
  unsure (1)..(477): unsure at all n locations
tctgtagtcaccctntctttctttctttcttgcatactactgttctatctatctcttctcttctttaccactcactgacagtacccattaactagtggtcagtcctgcactcaagttcatttgttacaagttactccctaatgacaagttctgattgatgttataaggcccttcgagattggtacttagccatggacattngttattccctttatttcctgccagatatagtttaccatatcctgaattcagcctgaatgaatgtataatcacaaaagtttatagccaacatagctgcaatttccttatctgacgccaagtctaaagagctttattcatcagtggaaataccattttcgcgatagtatcttctaagaattcangagtgcatgtctaaatgaacacactctgcacaatgatgaagctgcaatttctttgctacgtcaaaattatgtaatcatgtgccttcggttggtc

SEQ ID NO: 36983 - DNA, 390 bp, Oryza sativa
  unsure (1)..(390): unsure at all n locations
agcttcaagtattntcaatttttcaattcttcttcttaatatagcttgaagtcttatatttatttccccccccccacgttcttttctcatggccctgcgacgcttgcgtgttacgcatttgtttgctccctcggtgccttaagttgagcgccgggtgccgtcgaagcccgggaccccctgtgttggctcttccgtagtggctagatttggtcccgccagctggctatggtgcccagcctgtctcaactgtggacggggatcgctggctctagagtttttcggctctcacactcgtgcgaaagtagtcgttcgtggtaaagggagagatattgaaggatgccactgaaaggaaagagcaaacagaatgtgagtgtggggacacagcctcgt

SEQ ID NO: 36984 - DNA, 430 bp, Oryza sativa
  unsure (1)..(430): unsure at all n locations
tataggaggaactnggatcgaaccatgacaagccatccgatatgactacaatgcttcggccaatctagtatgccattgccgaggataatcgaaaatctttctcttaatcaatttgatcaaactcttgttagatgcctcggcctgcccattggcttgtgcataatatggcgaataattcaataacttaatacccatgctatcggcaaaccgaacaaactcatcggacacaaagatcgagccttgatcggttgtaatagtttgaggaataccaaagcgataaataatatgctcttgaacaaattggatagcatccccagaatcaactntcttcanaggaatcgcctctacccacttattaattaatcggttgccaccaatataaacttgtgtcctttgctcgatggtggattaatcataccgatcatatcaa

SEQ ID NO: 36985 - DNA, 432 bp, Oryza sativa
  unsure (1)..(432): unsure at all n locations
agcttaaactggtgagttgtgatccatatttattttcacttaataaaggctagattctgccgtagngaagcggaggcccgtcgccggtaggcttggttcagagccttttanggttccaccttttacggtacggatcgtaataccttttagggttctacctcatatatatatatatatatctcttgtaagccgccgtgcggcattgtaacctcacccaatatagtgaagatattttactggctagcgcccgtggctttttctctcctgctttgggagggttttccacgttaaatctcatgtcttctggattgaactgtattgtctctatacgttatttgcctattcgttcctaacataatgacaatnttgaataactaatggtacatatttacgtatcatcagctttaaatcatcatattatcattatattag

SEQ ID NO: 36986 - DNA, 460 bp, Oryza sativa
  unsure (1)..(460): unsure at all n locations
ngaaattaaagatatatatacataacgattgcgtaanattgtactatatccttccatccatcntaaaataaattatatcgctaatgtgctagcatattcaaaatgttatttctgaaacatccaacccccctaacatcaaaccttcttcacatcacacatccaaaagataaaatttagaaaaaatagtgggtgagtttatctagttgtggtactacactatagatcagaattaccttgataaataagtttcatccaccgatgttaccaattntgaacccctgcattttgaaagcccttgttagttgtagcttcaatcatctgtttcacanaggttaactttctttatattacaccacgaaatcttaagaattataaagtacttcatccgttaaattataagactgtctagcattgcccacattcatatagatgttatgtatgctagaaaatgttataatat

SEQ ID NO: 36987 - DNA, 134 bp, Oryza sativa
cggatcttaagcactgggctcagcttaaaaatgccacagccttccttgtcagattacatagcagatggtgcatgcgacattttggagctaatttttatagacaattcaggagtaagagattgatggacctgttc

SEQ ID NO: 36988 - DNA, 434 bp, Oryza sativa
gggacctcattggcattctatatctaagctcatgccccatctctagatcctcaccagatcgcatgccaacaatggacttcgcacatccttttggaatgactgctggctcaccgacaaatgcttacgtctacagtaccctgctctcttctcgcactccctgttccaggcggcgtcggtgtcttggacgctttcaaggtccatcggctctactttggcaccacgactgttcacaagagctgtcccagcttacactggctttgcaagatgtttccctctcggtggaagaggacctcagattatcgccgctttcacaacaaggtgatctcactacgagggagatttaccataccctattgccaccgcagaaacagatctagttcacaacttcatctggaagaatgcctcacctccaaagttaaattcttttgcatggt

SEQ ID NO: 36989 - DNA, 430 bp, Oryza sativa
  unsure (1)..(430): unsure at all n locations
agcttngtgctaanattatttgttgctgtttttatcgtgctaaactcaactagtggtgagcttagaactgcggatttcactgaatcacttctgaatatagcttcatctgcaggtggtccagcttcttttgtgatcagccgtggtgcttgtattctccttatgcctgcagattagtaaaaatattagatataaacctaccagacagctgttaacgcaaactgaactatatcagcaatctctaagactaagagataactgtcatgaaattatgtttggccgtagaatattatgaagtcttagccttgtatattcataatctgaacaatggatgtatcatacaaattattcctctaaatcatacaacaanagaaacactaatgacatcgtagaaggaatccaaatacatgtgaagaagtcagtaataaaaata

SEQ ID NO: 36990 - DNA, 462 bp, Oryza sativa
ggttggttcttcagtagcaatcaaacactgatcactgtagtctatatccaaaacaggttcagtagtggagagaatgtcttgcactcggcgatacctaacagggcctccatctgtttctggcgtcactgaagttggtggtgtgcaaaactccccatttggcgctcgcggtggtgaggacagaacgcccgtcgacaccggagacacgcctgcctgcaccggcgttcctgtctgctcgcccgcatcagcaacagagggcgccacagggctcacaaagaaatccaccgtgaactcttcttcttcagtcgccgcatcctcaggatcacgccacgcccatgtcgccgtctcatcaaaaacacataccgcgacacgcagacacgctgcgccacaggatcatacatgcggtatgccttctacccctgttcatagccaataaagaccatactcgtacctcgatcgtcaagc

SEQ ID NO: 36991 - DNA, 222 bp, Oryza sativa
atgtacattacacgtctatctcctagtgtgatttcagagagttatggactgacattgtaaattaacataagatagcttctctctctgaagatgtacttcacactatgttttcacgggaacaaaagctgcacggagggctgtgcttgctctctgacggatagctgggacactgacaaagatcagttagattcgctgaaagaggacaatattggagttcccgga

SEQ ID NO: 36992 - DNA, 482 bp, Oryza sativa
tgcctggaagagaggcagcgttgtcatgcacatcttttattttattacattctgaaatcactaagcgacgtatttctttctaagtttggtgccgaaaagagacttgcgtctcgattctactttaagagatgtctctcaacagctcatttggtaatgtaccgacctcccacgtcagatcattacttctctgctaccagagccttttttattttctctgactcccatagtctagctacccagcagcacaacaatgcgcttccactccggaagcctagtctatgatgcccgcagacatcccgaatcacacagattcgttgcttgaccactcaggtcatccatctgccacataggctgattctggtacgattcccacaccacaacaccttttacaaagcacaggcgaacaaatctacgcaacgggaaccacctcacatccgcccatgacacgtggcacggctggtcgaacagttagttacctcctg

SEQ ID NO: 36993 - DNA, 433 bp, Oryza sativa
  unsure (1)..(433): unsure at all n locations
agtcacctgaggcatgcaagctttgtcccagtcagtggatgatgtgtcatctgactattcttaacatgcttagcacataccaatataaactacacatagtttctagaataaatcttacctacaaattgacaagcaaaattgtacactagttcctgttaactgcataatagttgtacttcaatacaaaccatacatagttaagaaatagaccatagcaaaagtatgccaacaatacaggatccaagataaatcacatggtttttatgaaagccttgttcaaggactntgttgtttggagtctataggtgtttatacaccaagtctggtagaaacatggctatttttaaaaagggttagatccattgattatggaagacaacacttgacaagtttgaaacaagtttcatttgaaactatactggctttactgaca

SEQ ID NO: 36994 - DNA, 453 bp, Oryza sativa
  unsure (1)..(453): unsure at all n locations
tgtaataattatatgacgggaaattcacattaacagctgtactcatttcaaccaaaaatacataatagtttgttccataagcatggtctgcatgacatgcattatcttattcaagataaaccatatgctaaaatgaagcacactagtctttatctactatatactgcaccagctccctgtctccatcgcaggttgttgtgggttcatccttggtcacatcttcaggcaatctggaagttaaaatgtgcaaaaaatgtataaatgtagtatgtcggcagatgaaatggatcataagaacaattttgccgggtcggcggaaggagatcataagaacaattgtaaatatatcttaccccaagaccttctttgtgtgttcaagcanaaactgtgggtcctgtttggtttctgtataagcatgaatcttgntcacttcctgtaacatatcaatttgag

SEQ ID NO: 36995 - DNA, 496 bp, Oryza sativa
  unsure (1)..(496): unsure at all n locations
ctataatctaagctggagaatatagatagaccggagagtctgtgtgctcgagtgctgttgtctaaatatttcccatctggctcgctagttgatactaaatgcttcacccggatggagggcaatagagtatggccttgagctactgaagaaaggggttatttgtagggttggcaatggtcaacagatcagaatttggcgtgatccctggatgcctagatgccattctcggaggcccataacgccganaggtacctgtagagttaagtgggtctcagagctaattggtatggatggcagatggaacgaacaaatggtaaaccaaattatctggcctattgatgctgagatgattctgaaaattcagctaccgacgaggaagcagaggatttcctagcttggtcatcggatagactgggcatcttctcggtaagatcggcttacaagctgggcctttcgcttgcaaatgtggatagcaantctagctcgtttgagaatg

SEQ ID NO: 36996 - DNA, 292 bp, Oryza sativa
  unsure (1)..(292): unsure at all n locations
gtcccggaccttaagtcaccgcggctgcagctgattccttctgaaggtttgcaacgggagatctttgtgcgaccttaaatttccatggcatcggatctctcgtcatcgtctttggtcattcatttgaaaagagactattgcgcaataaaatttacatagattaattttcccaagacactaatctaataggcatgatactttttgatagttatggtgaccttaagatnttctttattccctaattttggtagtgggatgactatgttcatccctaactaatggaaacatggag

SEQ ID NO: 36997 - DNA, 438 bp, Oryza sativa
ttcgcctgcagggttcagggcacggcggcggcgtaaacaattggttttcgtggcaagatggcggaggttcatgtggggacggagcggcagatggtgcaccacgagacgcgattggcgaatgttcctagccgtgcctccctcacgaggccgcgttatctgctcgcgcggcagtgatcaactagtgcgcgggccgcggtggggaggtcgatcggcggcgacgtcgtgggatgtgatgcatgtatttcgagtcgtgtactactgctcccgcgcgcgtgtgcgtgcgtctcgtcgtcccaggcacgttcctcggtggaaaatgggaagatacacacgtaccggtcggtgactcggtggtctaacatggagctgatcgacattccgtccagctctgaactgaacatttggtcgaagtgctcggtcatctttacacgcaaatct

SEQ ID NO: 36998 - DNA, 466 bp, Oryza sativa
  unsure (1)..(466): unsure at all n locations
tccctggatctgngaagtttctctttcacggtattgngatcgtttgatcgatttccttgatcgctacttatgggcgtgcgctcaaaggatacaaacagggattcgcaaacaaaaaggggaattcgtagtcactttttcctgtcgcgtaaaaaaaaggctttacgcgagagcaatagaggttgggatacatctatctcttctgagcaacctcttttggattcttaagaccacccttgcagtaggataccgtctgctttgggttctttattatattatctccttcgagggattattaggatcgttcacgctatatttagtctatttcggcttttactgtctccttttctcaaggaagtggttaaggcctcagaagatagacgagagcgccaggcgcagatttccggaatacttctacggngaatgctcattgaatgcgcaatctccgtattatgccttgaagaggact

SEQ ID NO: 36999 - DNA, 378 bp, Oryza sativa
  unsure (1)..(378): unsure at all n locations
gctnatatagctgtcccgctgactatattatatagtcaatgtcgctgttgggtttatcaagcaattgattggatacaatatcattggcttttgccacgtaagtgtgcatttttattgaccaatattatggcttaggctgattatatattatggtcattcttcacgcggttggtaaatcctttatgagtttacttactcggatgttataccacatataccatatattttcaggtgtggggaaaccatgtgttttttatggacttaagcacatctgttaaagcagtgtgcgcattgcgtatgcccaataccttggaaatttctttattcacatatacaagcttctttatagctattttgctatatcactatcatatttta

SEQ ID NO: 37000 - DNA, 423 bp, Oryza sativa
  unsure (1)..(423): unsure at all n locations
tggtcgccgccttcagtagagactagtanaccctctggtgtgcctatntgtttatgctcagcatcagaaggattagactgcaaacatatcaagaaatgcaagggcatttaacaagtagactgatgcaaaaaattcagcatcttatcatcatcaattgaacatatgaggcaaaaaggcatgctctagcatctaaacagaacacaaaggtagaaagatactaaatatagaagtagtatgttggacagcaaaatataaaaggataactagtacttgattggttacctcatattcatgttgattcgaggtgcttgtttcttgattaatgatatcttttggcttatcatctgtgtcatccgagaagaagagggtgctgttggtattggcgtcactaggttccgaaacgccaactcgaaattgtcattg

SEQ ID NO: 37001 - DNA, 247 bp, Oryza sativa
  unsure (1)..(247): unsure at all n locations
ttttgttacccctacaagtatgaattaacccttttaaatattttaaaccccgaactattaaatctggatgaatcatggcaaccaaaatatcagctcattatgcctacctaccagccttatctcgtatttcttttcttgcatgacgcaccaacccctncttggtgatgtcctagttctcgacgccccaacctactttcctaggcaatgccctagttctcaacgctccagcctcccttcttggtagcgt

SEQ ID NO: 37002 - DNA, 474 bp, Oryza sativa
  unsure (1)..(474): unsure at all n locations
tctccaggnttcatctcanatttaatgtactcctttntgaatagatcacaacgaagctctttaatgttattagtaccttaatgaanattattcaaagcaacccanatctcatgagcagtttgaagatgagcaacacaatcataatccgaacgagaaatcccactcacaaaaatattgcgagctttgcaattcagttcaaaagcagttttntcagcagcagtattaataacttcacgaatcacataaggaagagaaacttttctccaaatatcataattctcagccataatgtaagattgcatcctactacaccaatgagaaaaatccattccatcgataacatgaggcttagttgaaactattagaagcgccatggcaaaaatntggatcggtaaaaatcaagaagcaacaagctctgatactacttgttgatcgaatacaagaactagccaccagaggggggtgaaggtgaat

SEQ ID NO: 37003 - DNA, 375 bp, Oryza sativa
  unsure (1)..(375): unsure at all n locations
agcttccctaacattgaagtagttcaattctgttcttaagggataaccaacgatcacagtggtataattttgaaaatgcataaaccacatacctatctgttattaagaacgtggagattcctttgttcttaatgttctgaagcattggaagaagtgatggatctttatcgatgtacctgtcagtttcanactacaaaaattagtgccatggataacatgcgaaatatattcaagtagcaaatcaatgacagatcgagcccatgtcataagtgtgctctataggggcaatgaagagaatttcaatatttgtgctttccacgtaacttagttacagatcacgagaaaatttgatagtctataaaaggattggtattt

SEQ ID NO: 37004 - DNA, 380 bp, Oryza sativa
  unsure (1)..(380): unsure at all n locations
agcggtgacaaagagaaagtttcgagcttctgtatatatgagaggaagagcttgggcttagaatagctccgagctccccggacaccgcgagggtgactgtgagtggaaggaaaaacccaagggcaatttcgtctggtcacaaacaaaagaggatgaaagacattntaacatggagcaccaccatgtttgagaatataattctggcgaatctgagagatttgcatttgagagaacccatctttgactatggtataatctcaaatttctctgcaacccacggaggtgttatggattaattcataaattgtaagtgaaccacaatttataccttttaattaagtgatagtctatagacataaaaatggattctcatctccgtc

SEQ ID NO: 37005 - DNA, 391 bp, Oryza sativa
agctgctcattgatgaacaaaaattaactattatactgaaaatctacgttcagatatagcaatttctgaacaccaatgccagattagaaagttattgaaaaatatgcatggagtcaaggactttgagtaaattgcaatataatgccaaaacgaaatggaatcagcatttgtaccacgtaacaaaattttgcccatcgatcatggaagaaacgtgcatacgattattgggctggccaataaactacaaaacaactgaaattattgacaactatgaagagagaatgccatgttacttctttcttatggaacatcccctcttctcaaaacaaagtcgtggaaaaacatgcacacttgacttgtgcagaatgtgtattcacacaaaatgcttggt

SEQ ID NO: 37006 - DNA, 231 bp, Oryza sativa
  unsure (1)..(231): unsure at all n locations
tgtngatcttgacgactaagacattcaactgagactgtgactatatcctgacgacagcatcaacaggttctcattaatgagtctgcacatggaggataacggctttataagtattgatagttaggaccttcaacccactttaatgacgagaccctacctgacatattacaaagttcgaatctgcttctccaaatgagatatctaggtagcttgactacatagattgcggta

SEQ ID NO: 37007 - DNA, 464 bp, Oryza sativa
tatgagaactaacagttgggagagactaggtgatcaatcctctatattatcactcaacttgaattgctactcacctcacctcgcctaaggagttctgtgaggtagccaacttgtatatggtgtcggtcaataaagacatatcttcttatgataggaccttagaaacaagtcaagtgatcatcatcgagtcaatgtccttggcataagacatttcaatgtctcgcaaatgacaatcaacacatagcacatactccccctgacgacaacttttgtcacaaaccatgttccaatagcataaaacatctctcagatgtatgcgtaggcaagaatccttcagatcctcaaaccattagtcttaaaaacttatctcatttcaccactataacgagaatatggaacatagagagtaatgccttccatcactatcatgtaccataataccatactgttgtgcaacgcaatct

SEQ ID NO: 37008 - DNA, 176 bp, Oryza sativa
  unsure (1)..(176): unsure at all n locations
agcttgtgctaatggatccatactcttatttcttatatattaagaatatgtgttggccagtatatgtgtaaattagagccttactaaaatcctggatgaggggacttanatttatcgatcaacacccactaaattaaattgagtttatttaagtattgtagtgaactataagtctt

SEQ ID NO: 37009 - DNA, 424 bp, Oryza sativa
ggggagaggcaagaaggaagatgatagtagagtcaatgatgtttatatgaacacgaagaagaacatgaaggagaaggagaacaagaagcattgcatgcagtggttaatccaagaactcatataagtttttgatgaaccggaagatggagatgagggcaaaggtaagcaagttgttgatctagcttttattgctcgtaatgcaagttctgatgttgatgaatctgatgatgataatgaagaaaagcttaattatgatcaattagaatatgctgcttacaaatttgctaagaaacttcaaacatgttctattgagcttgatgagaaggatcacactattgagattcttaatgcttgaaatgctaattaaattctttaattcctaatgatgataattgtcaatctttgtgaagtttatttctgaaat

SEQ ID NO: 37010 - DNA, 271 bp, Oryza sativa
  unsure (1)..(271): unsure at all n locations
agcttatttgatccannaattttatatgatgtttccttccatacgaaatttaaagaaaaggatatgatttgatccaacttgttaggaattttttcatataggatttgattcctccaagtttcccaggttttcctacaaatcagaggagcctcactatttgccaccgaatatccacgtctttcaatattttttgccacctaattcacgttgtttttttaaaaaaattttccactaggaatgcgaattcattcgccccgtgccatcccataca

SEQ ID NO: 37011 - DNA, 446 bp, Oryza sativa
  unsure (1)..(446): unsure at all n locations
ngagcaaagctcanacttagcaacaggaacatgctttgtcattatatcaacaggattatcatgagtacttatcttgcataccttcagcttaccttgcgcgactacatcgcgaacataatggtacttgatatcaatgtgctgtgtcctctcatgaaacatctgatctttagtaaggcatatagcactttgactgtcacaaaacaagttaatgcaagaataaactccacaaagctcagcaaacaatcctttcaaccaaactgattctttacatgcttcagcaatagccatgtattctgcttcagtggtagactgtgcaacaacatgccgcaatgttgccttccaactcacagcacactaccaatggtaaacacataacctgtgagtgaccttctcttatctaaatctgcagcaaaatcagaatccacatatccaataagccccttatt

SEQ ID NO: 37012 - DNA, 288 bp, Oryza sativa
  unsure (1)..(288): unsure at all n locations
actggggggcgacatgttctattatanaagttgagagtatcctagaggtgctcaagaagaacatcgacacattctcctggagccctgacgaggtggggggtgttccggcagatctcatcatgcatcacctggcggtcaagctggacattaagccaagaaaacaaaagttgcgccagatgtctgccgaccgccaagaagcggcgaaagccgaggtacaaaaattgctcatggcaggggtaatccaacagattgaccatccggagtggttggtgaatccactgttggtgc

SEQ ID NO: 37013 - DNA, 451 bp, Oryza sativa
  unsure (1)..(451): unsure at all n locations
taatcataaattatnttttatcgctaataagctatttatcatataatcagctattggccaaccgatgggcctgctgaatgtttcacgttggagcctatatctatagttgacttgacctatgctgctgatcaatgttacacgatggagcccaccggcctaattgtctggcttattcgtgaaataagccaaatagaatatacataaacgaaaaataatatgtgaataaaacttttatatatatatttttagcaatttaaaagcaaagaatgaaaaataaacttcgataaaaaaaacctaaaattaacttctaatttaagattgaaaatttaagattttactggtaagcataaccataacgaaaaaaaagatgtcgaagctccttcaagattttgtgggaggtatcgttaattcgtgatcacatttgcgtcgaagcttcttcaagatatctttg

SEQ ID NO: 37014 - DNA, 144 bp, Oryza sativa
  unsure (1)..(144): unsure at all n locations
gcctgcaacggtagcttttcccgccttttaagcgacgnttactgctactacagctcactctacagtattagtatctatacgtgagtgacctgtggaaattcagcgtaacggtataacagcaatagcagaaaaacggttaaggac

SEQ ID NO: 37015 - DNA, 500 bp, Oryza sativa
  unsure (1)..(500): unsure at all n locations
ggaccctgagccgtggcgtngccgccgcaccgacggcaagaagtggcggtgctcaaggaggcgcaccccgacttcaagtactgcgagcgccacatgcaccgtggccgcaaccgttcaagaaagcctgtggaatccaagaccgctgcccctgcgccccagtcgcagccccagctgtccaatgtcacgaccgcgactcacgacaccgatgcgcctctcccgtcactcactgtgggtgctaaaacccacggtctgtcccttggtggtgctggctcgtcgcagttccatgtcgacgcaccatcgtacggcagcaagtatcccctctaatctcattgactctgtgttgaatgcttatatgaattaagttgcctagattgattgcatattatgctggaatagagctgatctggtagctntcttaaaagggttgagacactcacaatagtatttgagctctaatgttgttgatgcttattgctcaagtagtgaacctaccctcattc

SEQ ID NO: 37016 - DNA, 397 bp, Oryza sativa
agcttcttgtggacccacctgtcagtcaccctctcttttcttttcttttttcctttcctaacccctccccctctgatcagtcccttcttccatatgttcattgacgactcctctcctccattctccgggcgcttctttgtccgcctcacgtcggttgctttaccatactggtgctgtcgtttccttgttctcccgaacacctcaatcaccattgctatcctctcctagtctccaacatcttccttcttagactatgcgcatcgtccatctctacctcaatcgccattgtgtttcctacaatcctactccaggcaccgcgctccgagcggactagatccggtggttgagctcctaacaatatgggcatgtgctattggatcaggtcacgaatatgatc

SEQ ID NO: 37017 - DNA, 451 bp, Oryza sativa
  unsure (1)..(451): unsure at all n locations
actggtactggttgatggctattctgttgtttatgttcanaaataaaactaaatggaactacaaagtccaattgcatccagtccatataggagctgaacaggtccagttaatggcatctaaagtgagcaaattttttagtgcttctgcagtttgccaactgatctgtcgattagtagaaatattactacgttctcttttaccatcattattttttatgtaatcaatgggaagatatgtctttaataactatcatcgcgattggttataacccttcttttagatgagttttctcataggagccatcacattagttgttgcatggtaattacaatatcatgtgttatttatcactaacaaatttagtttttctttaaaacaatatattcacgttctcatgaaagtattgattgattggataagcatggtatcagactcaggagctgatcttat

SEQ ID NO: 37018 - DNA, 399 bp, Oryza sativa
tgcagctgcaagcttgatgtttccctcaattcaacacttttgttatatacagttgctttcggaaacaactggcgggtgagattcttgtcattactaacctttgccgagttagtccgttcctgcttcattgtgcagaatgagaaaacaactgtctcgtctgttcaaggggtccggctcttcatcaagtcatcatgatgagtctaatacttgttcatcagcagatgtctcgatggaggacgccgatactccgcgatgactcctaaacgacaccgacctcgaccttgtcagtgatcgggagagacaagactactacatgctgaatgaccgggatatgctcacacgcgagaatactcaccggagctgctaaaaacataggtatggatgctgaatatcgtacta

SEQ ID NO: 37019 - DNA, 494 bp, Oryza sativa
  unsure (1)..(494): unsure at all n locations
ctcagctgtccttcaagtgtcaaggacttctcctgtgtctttcccttatgttttaccacccctctcttcatcaactcgttcaatggtgcagcaaaagtactgaaatctttgacgaaacggtggtagaatcctgcaagaccaagatagctcctcacctgtgtgatggtttggggaaccggccaactccttgtggcttcaatttttgactcatccacctcaattccctatggagtaacaacatatccaagagaagagactcgttccgtgcaaaagatgcacatttcaaagttagcaaacaaacgtgcatcgtgtagagcattaaaaacagcacgtaaatgatccatgtgttcatccaaagacttgttgtaatcaatatgtcatcaaagtacactaccacatatcgtccaataaaaggccttataacctcattcattaagcgcattatagtactatgtgcattagtcaaaccanaaggcattactaaccactcatac

SEQ ID NO: 37020 - DNA, 317 bp, Oryza sativa
  unsure (1)..(317): unsure at all n locations
agcttaaccattgctcatccctcactcagntgctccattgtattaagctcctgctgaacttaagatgcctggagattgcacattccaatgtacaaatgccatctgggatcagagtactgactagcctacagaagctgcctaatttcaaaggatgttctgttcaaggaaccattttgcagcctttctgaanatatttgccacctttcacttgttctttcagactccaacgctgttgtgctgactaaagaacttggacatctgcaggcccttatggttgtcaggtgatctgcataaaagtactcatgttcgtttatgcc

SEQ ID NO: 37021 - DNA, 497 bp, Oryza sativa
  unsure (1)..(497): unsure at all n locations
ctaagctgtggagacngaaggccgatgagttgggggagacctttttttatctaccaaatcttttctttaaagcctagattatgtgctaaaccgaatactangtccatcgtggcgattaaattaaagcctttctttataaaaggaggtgaacccaagaattatttttttattaaaagatttgacgcttctcgaagatcagatgtacagtctcagtgctagataaatgaaaaaagggaggtctacggtcgttaaattgtttggttagtcttggtaataataaccaatataaaatactacaaaaggcgtttaatatttttattaaactagtagagtggtactccctccgtactcgtaaaggaaactcgtttggacaacgacactgtcttctaaacacaactntgactatatgtttatataaaaatatctatcgaagagtgatatatgtttaatcttatgaaagtattcttaagacagactattatataatcttacatttc

SEQ ID NO: 37022 - DNA, 368 bp, Oryza sativa
  unsure (1)..(368): unsure at all n locations
agcttcgctatccgtttataaatctcacctgttttgtttttacgcnttgccttctgaattacaaccagaactttatgcaaggggtggaaaccgaatattcgctggcatttattcttgcggngctgatatcctttagcggttgcctgctctatatggtgcgcatttatcatcgcagtgaatggcttaatcgccgctggcatttgcaggcgctgacagatccgttaacgctcctacccaactttcgtgcgttggaacaagcgccggagcaagaggcgggcaagagtntttgctgcctgcgcattgataatcttgagtttatgagtcgtcattcggcttaatgatgcgcgttcactgtatccgctcaattt

SEQ ID NO: 37023 - DNA, 282 bp, Oryza sativa
  unsure (1)..(282): unsure at all n locations
agcntaagttcaacgatcggagctgcatttctttctcatgataaaactctcactgtcccaaaatattagagattttaaatatatgtaatatatccttatactaataatctggacaaaatctattcatattcgcagtactaagatatgtctcatccatcaaaaatctcttatattttaggacggacggagtacaatttataatattcatatccaaatttcactataatgaatgatcaccaagtgaggaagaacaagtcgaaatgtacagtagaggttaatcac

SEQ ID NO: 37024 - DNA, 455 bp, Oryza sativa
  unsure (1)..(455): unsure at all n locations
tattatacatcgtacattcatgcgacaacgcccttgctatatttcacaagtcccttgtacacagatggaggtggtggtggtggattatataaattccccatcaatcaccaacgcangagagagaatataaagaatccacatcaatcggtgctgcttaaaagtgatggttaaacaaatcttgacatactcgtatactacaggccacaaagtacatgaatgaatggataaaaatggctcaaaatacgattgcctgtcacgattgcaatcttagaatactatattgtgcactattgaccagtgaaacaaatgtatttnttcggtatgaatatgagatctttcgatggttaaattaanagcaaatcagcacaacttaaatgcctttctagaataatattgcgcacaaatggtaaattattgcaaaagcctgcaggcgttgattatatctcggacggatg

SEQ ID NO: 37025 - DNA, 276 bp, Oryza sativa
ggatccttaagtcacctgcggcatgcaagcttattgcttgctcgaacaggatgcatctgttttatcagagcattcagcaatcatcttccaggagagattagacaaattcctggatgattacagagcagccttgggcctggtaagtctcgatctcagatgttaatctagattaatctggttcatgctgtaatactagattactagtccctcgagatatagatgagcagtgggaattataagcaacagacgagtaatatgataactaatgatactacc

SEQ ID NO: 37026 - DNA, 482 bp, Oryza sativa
  unsure (1)..(482): unsure at all n locations
actcagcttaagactgttcaaacgatatctgggtacattattgataatctatgctgcacgttgctctctcacattccaaattccatatttctctttttcaagttctctgcaaaccctaatatttaatcccctctctctctctcaccggtactgcaggtggcatcaacagtggatatggaggcaactccgtacttgctcttggttacagtacccatcctggtgcacacacgcgcactagctntctctccggcgttgagtgattgtagatgtaatatgtggcgatgcccctgttcctgaccattctgaaagctatcgctctgaggaagcattgctactggtatgtggtgtgaggaagcaaaagaataattttgataagaatcattgctactgcttagtggtgttacaaagcaacaattggcagtaccaactaccaagcaataacaacaaatctgacgcacatttgaatgcacatattttcagaa

SEQ ID NO: 37027 - DNA, 423 bp, Oryza sativa
  unsure (1)..(423): unsure at all n locations
agcttnttatcattctggcatcgagctattttttctcangacctcccctacagtatcgtcaccgcagtagagtttaaccaccaaattcgggatggattggtgtggttcctctacgcctaggacaccagaatatcgaaccatgaacgaggaaaggcatgagagaaatattggctagtaattgtgaagccccaattcttgactggaagggacaccaaaggcctctgccctccctctctatctatccaagagatggaagggcagagcttttttttggttttttcatcttttcatcaaagagttgaacaatgaagatagatggcaagtgcctgatcgattcatcaggtcgtgtaggaacaaggttcaatcgttcgtncgttaggatgcctcagctgcatacatcactgcacttccacttgacaccta

SEQ ID NO: 37028 - DNA, 298 bp, Oryza sativa
  unsure (1)..(298): unsure at all n locations
agctntatgttcggcgcagtactaatactggttcttatgagcaagaattgctctatcaatcaccatctactttagacatatcttctgaaacttttttcaaatccaaaagtccagtatcttcctacaaattagtgaattaggaggagctctttgtgccgaaaaagaaagagcacggcaatatttcaaacttgcattcgaactgcgaaatatttatacaaaggaggagagatcaagataatgccgcagggttggttatttaattggctatgtcaacatgaggtggttcatagatctttgg

SEQ ID NO: 37029 - DNA, 348 bp, Oryza sativa
  unsure (1)..(348): unsure at all n locations
tccctggatctgngaagtttctctttcacggtattgngatcgtntgatcgatttccttgatcgctacttatgggcgtgcgctcaaaggatacaaacagggattcgcanacaaaaaggggaattcgtagtcactttttcctgtcgcgtaaaanaaaggctttacgcgagagcaatagaggttgggatacatctatctcttctgagcaacctcttttggattcttaagaccacccttgcagtaggataccgtctgctttgggttctttattatattatctccttcgagggatgtttacgatcgctcaggctatatntagtctaatttggcttttactgtctccttttctc

SEQ ID NO: 37030 - DNA, 353 bp, Oryza sativa
agcttaatacatcattaatacaataaacgtttatttccactacatacttaaatatttatgtcaacacttatttctaaatctatgaataaatatctaaaactaccgcgcttctattggtttatacgataacaccattaaaaaatagacatgaaatgccccctctaatgggtggaaccatcaaggctttatttatccactgccttcaagcatgggtcgagatagtcatgcctcatagctagtatggagcattattttaattaatcctagtttgctatcggcacccttaaagaagaatgtattagtaagtgagaagttcagcactattatcattgtggcctccttgggcttgttta

SEQ ID NO: 37031 - DNA, 487 bp, Oryza sativa
  unsure (1)..(487): unsure at all n locations
tgttcggttntcctcgacgtacaagctgaaatccgtgcctgttaagagcgtggaattcaatgcacttctccaactcgtgatgtctaatgtcccattcacaagcaaagacccatgacctctcaggctgcaaggtccttctcagcaccatgagtacgtcacctcctaaggtccagcagtcacaaatctctcctatagatgcggacaaggaacacggagcggcgactatttcagatcaattcgtcggggtaatcgacatcgatccccacgagccatctgtcttacttttgctcgaagaccaagcctcatcaccgacaagtacaccacacgacgtgtacgctatcggtggaaccaacacatctgaggcatgggaatggaggatcaattaattacgctagcccaacacatcagaactctcaacgcgatactganggaaaccccttttgatctcatcctgaacgctgatctcaatcagtgagtggaacgagta

SEQ ID NO: 37032 - DNA, 441 bp, Oryza sativa
  unsure (1)..(441): unsure at all n locations
agctttacctgagctgcgaggttctctgtgttttgngaccagcaattcattgcaggttggtttgaaaatagaaaatactgtcactccatgcgattcttcctcgacattagtctgaaataagtgcaataagtgcctttggcgatccagattcgctaaatctgttgtaattgtaattgtaattgtaattataattgatagctattcttattcatttccttaaacatattattgatgcagctgaaaaactgcacgatattaggtggaatttcatgcatcgctgtttaagttttggaagtcatacagccttgttgcttcatctttnttaaggattggtgagttgttaggctgtcgaagcttttttaacaaatcaacagcaacgtgttgaggcatttcttcgctgctgtgctcaagttctcgtagggagcacgaccctacgacata

SEQ ID NO: 37033 - DNA, 495 bp, Oryza sativa
  unsure (1)..(495): unsure at all n locations
ntataatntcctaccattatactaaatagcattagatccaatgttatacggngtatactatgaaagatatggcctcagttntgctcagaaatatgcatcaattacaatcatttgcatgaagggataaaaagaggaaatcataacatcaaaagagcaagtgcagaaaatttgttcttatgcataaaaaaagaacaagtgtagatactctgttcttatccataaagaacaagtgtagaggtatataaccactgaatcaatcatgcaaatttaaaaaacagcagcagcaagggtacagatagaatgttattgacatataacagcagcagcaggagtatatataccacaggggtagcaacagagggggaaattcacataaacagcagggtgaacaagtagccacagtatgaccaatagcacggcaaagatagtccacaggggcagcaacaacaggggcaaattaactaaaacagcatgtctagatagtctcctcttatc

SEQ ID NO: 37034 - DNA, 431 bp, Oryza sativa
  unsure (1)..(431): unsure at all n locations
agcttgtagggttgtattatctaggtctttaaactctcaaaatacatatccagatcccagaatttgttaaagtgtatcatctagatcccaaatcaacataacccctctaggatatatcctacgtggtgctgatgtatcatgtcacatgggacgtgacatgcccttttctttttttcttctttatttttcctttcttctcattctttttttttttttggcctttcttctactcggttcaaagataaagcggaagaaaggaaagaaaaagagaaaagggaaagaaacaaagaataaggaaataaataaataggtcctatttgttagttaaaatatgtcacgtcttgtccgcgtggcatgccacatcaacgcatataagatcctaaagaaagtgtgacgaattggaacttagataatacactatgacnaaatat

SEQ ID NO: 37035 - DNA, 498 bp, Oryza sativa
cccctgatacacatgaggtcgtggtcttttcccatttcttttatggcggattatctggtccaacttcgagattttttcgtgggatactgaatatttatgggatcaacttgcatcatttgaatccaaattccatagttcacattgccaatttcgtccacgcctgtgaagctttcctgggcattatgcctcattatgctctgttccgctgcattttcttcctcaaaccccagccaaataagaacaaaccatgtgttgttggaggggctggtttccaacttatgggaactttgagccagaaatacttctctatgcccttcaaaacttcaaacaaaggctggcatgccaactgattcttgttcaaaaccctgagcctgcactccccgagtactcctgtcttcctccggtctaccaagacacatggaattcgctgcccatgggagatgaagcttgccaagctgtagaactgatggaacatatgctgaagctcaaagagcaagg

SEQ ID NO: 37036 - DNA, 486 bp, Oryza sativa
  unsure (1)..(486): unsure at all n locations
cgacgaccgggttcgccagccactccggatggattacctctcggatgaatccggcctccagaagtcgcgccacctcctcgcggatgaaggcttgacgttcctgggcctgtcgccgcactttctgccggaccggccttgcgcccggccgcacggtgagacggtgcttaatcacctccctggggaccccgggcatgttcgccggtctccatgcgaagacgtctgcgtttgcccgcaggaaggagacgagcgcgtcttcctatttgccgtctagaagaccaccgattcgtgtggtcttggacgggccgtcgcccatggcaacctccttgaccgggacctcgtcgcacggatcatccgctgcctcngggcggctgggacggaggtgctgagcctcttcgtcgcaccctctggcttggacgccacggcgaggtggtccgcgcgctgctccatacaagcaagcgcgactttgaggccgccatggacagagat

SEQ ID NO: 37037 - DNA, 386 bp, Oryza sativa
  unsure (1)..(386): unsure at all n locations
agctngcacgatgcacatctttctctctgggcagcggatgataataattgcagcttaaattcccgacacggtagtggattggatattgcaggtgagtgttgctgcacaatggtatagctactcctacgcttgatctccctcattgactcgacgcaccatagacgaaaaagctgccagttnttcattgtttacagtatctgttcaatcttggccgtggtggccataatgatttgattcccatgttgggcgctctcaccctaccctctgcatgcattgctcgatcgacacgagagaacagggaaactcctagtcctagatagcaaccgcacacacatcttcttgcaatgctttctcctgggatggtatntaaatcatattcaaatgct

SEQ ID NO: 37038 - DNA, 484 bp, Oryza sativa
  unsure (1)..(484): unsure at all n locations
atgcttgnggaaaaaaataggatagcaaaataacatgatgtataatccanaaatagaatggaattaacactaaaaactgctagatctaggtcaatatagtgataatcagtatgcattataataaataaaagattccagttttgacgccaaagggatccattgccccccttagcgaatacatcatgatgcaatgtctcaaaaagtccaagataaatagaaggtgaagaacatataaagaagtctaacatgcaaaacctcaaccaaattttcaatatacaaaanatatataagcattcacatggtaccggtcatcatgtggttcctgtaccacttgtctgttttatattcaacatanaaaatgaatacaaaattaaatcattgcatctntaaacaacctttntgttttggaaattttcaaacatagtgtcatcgttgattcgtcagaattcatcanaggggatgctgggcctcttggccaccacaa

SEQ ID NO: 37039 - DNA, 441 bp, Oryza sativa
  unsure (1)..(441): unsure at all n locations
agcttgatcgatccatccataccgtccttgtattcatttgctcacctnctccgatccgggtcttgcacaagtctaacgggtatttctttttttaaaaaaaaaacacagtacaaacacaaacgctcacaagacgcacccactcacccctatgaacgtatacacgcaccctttatctttatgagcacttcctaaaaactgaaccaacatatcttaatattgataaaagtaccacgagcgcattggtgtcgatgtctatgaggacattagtaaaagcacccgggttaaatttaaaatataaactcggacatgctgattccatcacaaggaacgatcaacgggtatttaaaggacaccaacacgcttgtgttttgaatggacctaattaactgaaaatgggtacatgaatccttcataattaaggatggataaaagtgtggattg

SEQ ID NO: 37040 - DNA, 410 bp, Oryza sativa
aaatgtgcacacacgatgctcacaactttacgagaactctctttctttgatgaacattcatgagaagaccaatgctcaacaattcatttttgtaccatactaatagcaccctctcgttggcgtaaatgcggacactaactgtgatgacaaggagttgaaccttggtaagtggagtcttagcaccacacacatctagtgattccccctatttgcgatgtattttaatttaaaatatagcactattattactcgtgtatgatcaattctctgctgatgatatgaatgctcgtaagcatcttgtccaattagaaatcaattacatttctagcccatcacatctaatagatattattgagatatgttgtaacatatagaaattaataattaatgttatgtgtatatatagctat

SEQ ID NO: 37041 - DNA, 470 bp, Oryza sativa
  unsure (1)..(470): unsure at all n locations
acactatgaaactaagctttggatcgtgatgctccgactaggctgcatcctattactaacgggtgtttttgtaaanaatttataggaaagttgtttataaaatatattaatccatttttaaagtttaaaataattaatactcaattaatcatgtactaatggctcacctcgttttacgtatcttcccaatctcctctatctcctcctcctcaaacacaggtcgttgatcgcggtgaggatgctgtacgacgacgggtacaagaacctggcgtggctcgccggagggttcagcaagtgcgtcgacagcgacttcgccgacgtggagggggagagcaagctgcagtatgccaacgtgggtgggtgtgctacatctttctccagatcctgcttttctgcgggtagcaagtgatgatcatgaacatcgtgaatgcatccgagtttccaccaatgttgagtgaatatgctgcaag

SEQ ID NO: 37042 - DNA, 354 bp, Oryza sativa
  unsure (1)..(354): unsure at all n locations
agctngaacaccaggaagaggatcttattatgtattatagaagctgaaccaagtttagtttcgcttcaacgactcttcgatagccgggcttctgatgactaccctccttacaaaaccccttctgatcgtcttaaggtcatccaatggaattctttatcatattttttttcccaaataggtatttaaaaagggcatgaatcttattcacttgttctatttgtgtatagcccaaagaagagaattgctgaagagaaaagaacagcttgaaagatgggacttggagtacggcttttaccaccctctgcagaagatgccactgcagcggctttgtgaagtttgcatcataatttgaga

SEQ ID NO: 37043 - DNA, 429 bp, Oryza sativa
  unsure (1)..(429): unsure at all n locations
tcatgcttagatcctcttattccatgaaaatantggagaatacaaatgacccatcagttgagccctcgctgaaccctatgctttgataatttctggctcagcccctaaatgtactatataaatattgtggagataggcagcgatgatatatttgatctactacgctgctgcagattatcaaagaaacaacgactgatgagcagagactatatgagtctccggtgcattagtggtggtagataacgtcaaagtgttgatgagtgggcactgggcagaggacaagtcatatgcagctggatttgtggaatgttatttatctttttttattttttgctctttgcgatatattgttgagcgaaaatatcttctttatctgaatactcagtactcacaaggacacaaatggattattggatatacatctgacat

SEQ ID NO: 37044 - DNA, 359 bp, Oryza sativa
  unsure (1)..(359): unsure at all n locations
agctttgactgaaagggcttcgacttccttgctcttcttgntaactggcacatgtaaaataaacattgaacggagttctgtcacaagtgccgccaacagtagtgggacggattctgcaagaacgacggcaatatgtggaggctaatataccaatcctgtctaggctagccatgaagtagctttttcaatcctccccatcccacacccttcggtgtggtatagatgtatgctatttttttctaaaatattaacatgtaaagttttcttatgttcgccgaaaaaaaatctcaagttgatagtaacgctatctataggtctgcattgacccgccatgttatcatagctatttgtaattgcac

SEQ ID NO: 37045 - DNA, 463 bp, Oryza sativa
tcctccggcgaatccgagccgatggctcgtctccactcgtctcgtgcaaccacccggtgtgctcgctatcgcctgtatcgccgtggatcgctccgccgctcgccgctgtcgtacgccgtccgatccggccggtgtcgtcgtctacctcccgccggcccgcgtggcaaccacgtatgcgccacgtctgcgccagctcgtgcaagaccgggtcaagccaaccccggtcagaccctcctcgtgcgcgcgttccatcgcgagccgtgaggctgcgcgtgggcccgccgcatacacgtacaccgcaaaccgcgcgcatgcaccgtgtatctaccccgcccgcgcgcgtacgccgcgtgctcgctcccacggtgagccgtgtcaccgacaagcgggtcccaccctgtaccgcgcgcggtgagcccgggtcaccggctctatatcttcttcctaccgcgcgcgcgcgcgt

SEQ ID NO: 37046 - DNA, 279 bp, Oryza sativa
  unsure (1)..(279): unsure at all n locations
gtcacctgcggcatgcaagcttcttaagcatacgcctgcaggtgatgtggctggggatctcaatgtcagcgagcttggaccggaacaccaccgtnttcttctgctgcgccgncttcgtcgncgncgncatggaccccatcgattccccccacgcgcagtcagatccgagctcaccggagcagaaggcgaaatggggatcggagagatgtgtcgagcttcttcgntcctgactgatgagaggaaaagagaagaattggggcaagcgacccgttgttatat

SEQ ID NO: 37047 - DNA, 411 bp, Oryza sativa
  unsure (1)..(411): unsure at all n locations
taaggctataaatatttggacatgactttaggattttgttgtaggtgagtaatcaagggtctccacgaaccaaatgcagccaaaataaagggttaataggtgaattacaggaaactatatgaataaaaaggcaacaaataggcattttcacctagttagtcgcttagtgccaatgcactcaagcccacgacccaacgcattttactagtacagtactgaacctggattgacttttgtgtgcaacaatgacagcgacattgccattgacatgactatgcacgacataatagcatgagcttcacaaacaaaacacacagaaacaagcatatntatgccctcttttatactattattaaagactgacatgtgacatgtgagccatcaatgttcntgttgctcttagtactatgt

SEQ ID NO: 37048 - DNA, 347 bp, Oryza sativa
  unsure (1)..(347): unsure at all n locations
agctntgatatatacattggtcgatcaattgattgatccatggaatcagacaacttgtcgacgacatcgctggccaaccacagcattgtacgtacgtcaagccttgcatcacccggagtccgggcctaggactaggctttgttcttcttccaactttgccaatctctttctctttttttcgaatatgtttcacaagctactaaatagtaagtttttttaaatttttctattgaaaagttgcttttaaaaaaatattaatcaaatttctaagaaaataaactaatacctaattaataattaattatatactaattctttggtgggtttccgtgtcgaaaccttgactc

SEQ ID NO: 37049 - DNA, 460 bp, Oryza sativa
tgtccatctgttccattattgtgcacgccttctgttattcattgcaacatggtgggccgctattgatggtttctttgggccgacattgaagtttcctttgggctttcaaatgggccgcaatttatggtttctttgggccgacatgacgttctctttgggctttagaatggcctcagttgatggtttaattgggccaaagttgacgtttattcgggctttcaaatgggccgctcttgaccgttttctttgggcttcgtgataggccgcgttttttcaccggaagcccgtatagatggcttcaggcccagttcgtcaaacacacaggccccagttgtactggccatcatggcctttactgcacagcacatatagcccattaaagtacagtagtacagtgcattagcatgcggatcatcatattgtcatcagcaaaaagtccatttacctggcccctcgtact

SEQ ID NO: 37050 - DNA, 406 bp, Oryza sativa
  unsure (1)..(406): unsure at all n locations
agcttaataacacgggaaggctgggccctcttttatatgttggcgtgggaaccaatcatctctcagaccttcgagttagtgttgctcagaccccaccaaccttgatccggtgcgcacggaagagaattatgcatctcggtgtggccactaattcactcccatactcctcccgtctcacagaaagtgaatctatagtattaaatgtgacacattctaatactacaggcctaaatatatattatattaaaatgtgtcacatccagtgctaagttganttttatgggatagagagaagctaaaagttgctatgcttaaacacaatttaatataagttaaaatttgctatattttacgatgtaaggatagccgagtagctacatagtctcattatggagtggttgattat

SEQ ID NO: 37051 - DNA, 442 bp, Oryza sativa
  unsure (1)..(442): unsure at all n locations
tatttttaattagggttagatatatactataaaagatgcccgtgcgttgcaacgggtaaatacatttttcaatgatatattaagagctaagtttgcaacgggtaaataattttttcagtgatatattaagagctaagtaataaactgaaatattgtgatcactatacactaataattgaaaaagttaataaaaatcttaacattggcattgctataatgttaatgaaaatattttctgggtttttgccaaaagccttccttctttttagcctangtagtacgctcctccctcttttagtctgttctcttcaccctacatcttaatttccgaatatgactacatcttaacctctgaaatatacgtgccgtaagtgcggagcaattcccataatcgtcgaatttctggtcacaaatggcgaggtttatcactcactactttcga

SEQ ID NO: 37052 - DNA, 279 bp, Oryza sativa
gcagctgaacagaaatgtggtaggagttattttttttttcaaaaaagcgactggacattttagtgagtggtgcatcaatcaaaacgaaacctttccctcggtttattgaatatatgcggatacgtcaaatacaatcggcttgattttttttaataaataccacatgcgcatgtccaattactttcaaacgcatcacgatattttggacggaccgattaacttcatcataagctggctgattggagattgttatgtctaaaacccgcgactgccatctct

SEQ ID NO: 37053 - DNA, 475 bp, Oryza sativa
  unsure (1)..(475): unsure at all n locations
tcatttctatccatcattggctatggcagtgtctcaacattgactataatatatgctctctggacgatagtacacagtagctttagcttgtagtaaatgaaacattggttaacggcaaaccttccttcagaattcattgttgcattgtagccgagatattcgagcgcagagcgacttanagaatctttacttgtttagcactactancttgaagtcttgaacacatgttactgtgatccttgtaagctggtgagaaggcagtgggatgcggcgtgatccgtgtttctgaaattgaagagtggaatttgatcaaagatctacacattaagtgagtctacttttcaaacagtttactggtcaactgttntctaatttcacttgatggtttctntgctatcaatccagaactgtggaggaactttgcactgccagaatctgtatacacagtatctccactaccataataacatcttct

SEQ ID NO: 37054 - DNA, 223 bp, Oryza sativa
ctgagagaacaagctttttattaattaaaatcagctactggctgctaactgcatggactgtgatgaccacacaatataaacttaagtcccagatatatgtaagcactacctcggtgagcagtttgtcgaagcgagccttaacagccttcctgatatactcatagcatttggccttggagccctttccctggaccctttgatttatctttgagtgcttcttggg

SEQ ID NO: 37055 - DNA, 397 bp, Oryza sativa
ctgatccatgaataccaccatgagaaatgcaagccaacttgtgatatgaactccaacacagtgaattctcagctctcaccaagagatgaacaccatatgttaactagaaacgctttaacacacagcacgaatgtgttgcctgacttggttttgagtcggcaccaccattccaaccttcgtgacctcatttgagaactcttttcgcaacaatatctgtcagatgataaattacagcacgacactttgttgcactcagtttcctcctgtcatttctctcgagggtttattcacttactgcctgctatatcttcaatcctttgtatttcgaatcggagacatgttatttgtttctttgaacatcatgcaatagaaactgttactgctttcttgacattat

SEQ ID NO: 37056 - DNA, 370 bp, Oryza sativa
  unsure (1)..(370): unsure at all n locations
tatacatactcangcttcagcgtggcaaccgcagacaatgtcactggcaactacggtgtgtttcatatatggctggcactctacctagtaacctctctccgctccaatcacaaaggcggacggtggggagacaggagcaacgcggctacattcactatgacaggctttgagcaatacacacggataaccgaattcggtcatgccttttgctaataacaattcattcctcgagatttgactaaccaaattatgattgaatgcgcacccgctcacaggaaacaactatataacccatttatttactatggcactgcactaaacactttctctgaaagttcctgctgcttggaccccaataatctaatatata

SEQ ID NO: 37057 - DNA, 450 bp, Oryza sativa
  unsure (1)..(450): unsure at all n locations
ntaatgaactgcacaccanananaccttacttaagacaagcaatgctttaacggatagcacaaagagactaacgcctcagctacaaaccttgcctgactgactcccacaataaatgtggaccatgtgatccacacctcccattgccagaatgagatggcctccctgcccaggcaatactgctaatgaaagagaaaccattggctatggaccaacggatatagaatgcaacaagacacttacagctgcctgcacatatggaacaaaatacttcagatggcagcagtgacatatccttaactttngatcaaaatcaacagctactagaatatatttgaccaataacttacttaaaccagctaaacaataggattcttccaatacataacagataggctctactcaattatcacatctatgtgctgtatctaccacacaattggtcatctcca

SEQ ID NO: 37058 - DNA, 329 bp, Oryza sativa
  unsure (1)..(329): unsure at all n locations
tatgaatntagatgaaatttatgttcacgtttcattcacattggagttaatatgagtaagttatgctagcttaaatatccaaanttgaataatagcaaaacaatactgttcattaccgatatatttttattccgaaatccatctcattcctaatagcggctgacaggtggggctccacggttctatttgcttttcaccgtattatttttcttatggaaaaacaagaggtgggcccatcctgtcatctgctcggctgagggaggtcgtcttcaacctccacccgggcagaggcagcgcgcatggcgcggctgggcgcatccgggatggtg

SEQ ID NO: 37059 - DNA, 424 bp, Oryza sativa
  unsure (1)..(424): unsure at all n locations
agcttagatgccttanatactaataacattattgtgtctgctattgattatgtgtaaataaataaatcatcaccctacttgctaaaactaatattagttatttattataggggaaatcattttgtgttcactttgattcctatgcattttgtaagttgtttctgaacaacatatgcaatgtacattgcatgcctgaactgacaacgaccagagcagagtagtcgtcatacagcatgagcagagtatcaaggaatgttcttgcatggcacagtcgtccattccaagccaatttggtccatgtttctactcgaattagcactcgaatccataaaattcttgaaaaaaaaaaatgccgtgataatctataacgaacaacatgcctcctgagcatcaccaacttgtgtataaggtaaccccttgggat

SEQ ID NO: 37060 - DNA, 420 bp, Oryza sativa
tcacgtacgccagcaacatcctgtgtccagagcagacacacttttttctaccaccgacatcgtcaacgacttctgccgccaatatgtactgattctatgctgacgcttctctgttctaccatccatcgcatgtacgctgctaagtagcaatcctccatgcagtaccttgtcgttaacacctccaaaacagcctgtaggatccacccgctccgactttcgattgaacgccatcaatctagtcgcgaaccgaagccgacaagtcgcgtgtcgtcttcccagccgccgaatgacccgagtgctacatctagccgtctccctgtcgaacgcagctcatcgaaaggcctatgccacccgcccagatgttcgattccaccgatcgagaacgccaatcaccttcagcttcaatcaaccccgagcgtc

SEQ ID NO: 37061 - DNA, 122 bp, Oryza sativa
agcttatcaaagcagcttaagtacagtagtagttcgtctacaagctaaattaagtagctaatctagctactaataactctactagcagctaatagaaatccacatatatcgatctctattag

SEQ ID NO: 37062 - DNA, 455 bp, Oryza sativa
  unsure (1)..(455): unsure at all n locations
atgaggcacaggcatcatctcacacatcgatcagcagcttgccattcatgcaggggaacccggctgccctaacacgctcggtgacctttcaagagggatcttgactcgaacaacgccttggaaattattatgctgccttctgctgctataaagacatagcgtgatacagctgaaattttgacattaaaggattgtaaagtacgtatgggagatggagtgcagggtgtataacttaacatagctacaagcaagcccagtagctgtattagataacttgtacatagctatgtgggtttgagaaagatagggagagcaagttccncttataatatgtcataaataatataatgagttgaatatttagatcataaggatttccttctgcagtagtatctgaataattcgtcgctgtctgattacagtgtattaaaccagtccaactgtagccctggaaa

SEQ ID NO: 37063 - DNA, 497 bp, Oryza sativa
  unsure (1)..(497): unsure at all n locations
tccgacanagcgagcgctcgccgtcggcgacgtgcatgtttgttgcggacggcgacgtacggtcaagctgccacatgtctgagagatattatttgacttgtactaatacgtgcgagtgatagtctcagtaattaataagggtagtgggttactcgtcctaaccggagaccacctcatcccgtatataattctcccttagttaatgatgtgtgtcttatttttaatctctttagtgatgacttatatcttttatatattctgaatcacatattagttttaagaataatttgcatcattgtactctactcaaaatatgtgacaaaacgagacccatgttggatatattcaaatatttcattatccaaaagttatttatttaaattatggaagtacttagatatgcgatagagttactctatatagcattacaaataattacattacgactgagttgatgttagatactatatggaatatatccatcaactatatggaat

SEQ ID NO: 37064 - DNA, 445 bp, Oryza sativa
agcttgatcactccagctgcagagaatgatattttatattatatacatttatacatagtttaatacaaagtaatgtacaagcaagtaaaaggatagcgcggacatggagaatttacattgacattgtatatatgctccttattaaaaggaggggcaaaagataagaagcaaccacttaattagcataatcaagctgccatctctgacatgtgcatgggtttgtacaatcaacaccacagattaatccttgaaggttttttcaagacaaaacagagtgcacgttctggatatgatgattccatagtaaagtgctgaacattgagctattttcataatctaatcgatttaaatacattagtcatcaacccgtaagttatggactattattactgatactatataaatataaaattctataatttttacttacctttgaaattataag

SEQ ID NO: 37065 - DNA, 454 bp, Oryza sativa
  unsure (1)..(454): unsure at all n locations
tatgatagagtgctcgcctgctcggacaaagctctntggaaatttatactcttaaattctctgtatcctgctttgaaaatgagtgatctatgcctgtgtttttagttcccttcaaacttccaanaatttcatcacatcaaatatttggacacatgcatggagcattaaatatggacggaaaaaaaaccaattgcacagtttgcatgtaaattgtgatacgaattatatgagcctaattatgccatgattcgacaatgtggtgctacagtaaacatttgctaataacagattaattaggcttaatagatacgtctcgcagtttacatgcggaatctgtaatttattttgttattagtctatgttaatattctaaatatatatccgtatactttaaaattttacacctaatcaactaaacacggcctatgttcttcttaattngcctcacaaattt

SEQ ID NO: 37066 - DNA, 330 bp, Oryza sativa
  unsure (1)..(330): unsure at all n locations
agcttgacttgtgccttatttgtgcggatcatatgttgacttgtgttgattgtagcctcctttttcacctaccattttctgttacttcttttctcaaatgcattgcaatgtattagtgtttgtagaatttacatgaatataaatgacaccaactgtttttccatacatggaatngtattttgcagccactaccttgacgagttggcatcttcttgtcacattttgctccctccatgtagcattatggatgaagttcttccagcacaagccttttgactctagaactgtcatgggatttggagtgctcaatggcattttcattggctcctc

SEQ ID NO: 37067 - DNA, 381 bp, Oryza sativa
  unsure (1)..(381): unsure at all n locations
ttgtcccaagctccaccaaaatcaagagcgcatgctctcatcatatcctccaagatttgattgactcgctcggtctgaccatcagtttgcgggtgataggccgtgctgaagtttaaacgggtccccaattcttcctgcagtttctgccaaaactttgaggtgaactgactacctcggtcggatactatcttcttgggtactccatgtaggcacatgattctcgaaaggtaaagctccgccaaccttttgcccgtatatgtggtatgcactggtatgaagtgagcaaccttagtgagtcgatccacgactacccagattgaatcgtgacccgatgatgtccggngcagtcctgttataagtccattccaatctcctcccatt

SEQ ID NO: 37068 - DNA, 436 bp, Oryza sativa
  unsure (1)..(436): unsure at all n locations
agcttggttatgtgattcatcaaccattcaaataataacttgctccaatccaacttatcaatagaatccaactcttctggagcattacgacattntgtgctatgtaccaatgatgagtntgggtagacaaagcaattaagatagacaaacatggatcaaatttggatgtgttcaacagacatgccatctttgttaataagcttgtctataaagaacttcacaaaggacactaaagatttgccaaaactaaagaatctttttcttcagatcatcaaaacttgatttgatagaattgcctctaactggtaaactgtgaacaacatctataaatctctagattcggtggtgttcgaatctcctanagagangatgaagataaagataaagtgttttacgtacaacgaggtggtataacgcatgattaatgactttaatt

SEQ ID NO: 37069 - DNA, 465 bp, Oryza sativa
  unsure (1)..(465): unsure at all n locations
tagagatagatcaatcgctgtcctagaccctagtattaacgattaggagtagtaaatgaaccgacgcgtgtgcctcatgatttctcctcatgcgtgctatggagtacggaggacagtgcacatgcatgagcatgatagtaccctttttagggcgacctgttcctgaaggggaacacagtcccacggctgttctggttcaagtacaccaagggaccatgctttgcatgcttgcagctcctccatgcccctacccagatccacaacaataaattccagtgaaactgttcgcaacaaccagagagagagagatggatgttaactccactagaatggatgtatatggaaacagaattcccatcatgtgctgctagngaaaaatgcaacancttcacaaggaaaattcaatgtatctgaattctgaacacggtcttgaatgagtaacaacctgatccctacagtaacata

SEQ ID NO: 37070 - DNA, 387 bp, Oryza sativa
  unsure (1)..(387): unsure at all n locations
agcttcgcagatccctcatcgatggtggcagtgcactcaacatcctcttcgccaaaaccctagacgacatgcaaatccctcgcacagaattaaaaccgagtaatgcgccctttcacggagtcattccagggctatccgctatgccgctcggccagatcactcttccggttactttcggtactcgggagaacttccgcacagaanacgtctgcttcgaagttgctgatttcgagaaaccgtatcatgccatacttggacgcccggcgttagccaagtttatggctgtcccgcactatacctatatgatgatgaagatgcctaatcccgaggagtcatatccctgcggagcgacatcaaacaagtatcacatgcgacaaggaaagctgc

SEQ ID NO: 37071 - DNA, 467 bp, Oryza sativa
  unsure (1)..(467): unsure at all n locations
tgccaaacactnttcacataacctccagctccttggtagttgtagtcctaccaaacagggcctacgtatatcctgatcgttggatcctttgatctaacggcactgaaggtctaaaactgctaagcttgcagtccctattcaaacagcatgggatcccacattcaagcatgaaaagttcgaagagcatggatttacccggccacgcagtcaagcgaacaaagaaaaagctgttccgtgcttccatgctgccagcctgccactggccaccgctatgcccggtgtcagaggaaatggctcacgcggcaatggtcctggcctatgaagttggcggcgaaggaggtacgcctctgctcagtacggctctgccttctcgcggaggggacattgtggccccgcgcacggcagcaacacgcgcggctactaccagcgtctggcggcaacgacggtgtcgaggagtgatcctctca

SEQ ID NO: 37072 - DNA, 395 bp, Oryza sativa
agctacaccatatgagtatagattctgccacctgtatttcttgtgacaatatcccatatctcaggtgtagtgacaataatctgtaggtcaacaatacagtagttgggtaaaatctgcgctccactgagttcccttacagtgataatggactctttcagccgtgctgacaagatttcaacaacttcagcaaccaaagctatcattggcgctacaaacaccaatctggattcgggattggcacaccttccatctctcatgagcaagccaatctctgaaggattgaaagcccagccctgtggctttcccacacctgtcgggcacagagaatatatatctggttcgaaagggcagtatcataaccttgtttgaacctattaactgggcatccaccaaac

SEQ ID NO: 37073 - DNA, 475 bp, Oryza sativa
  unsure (1)..(475): unsure at all n locations
aacgtngtcgcactgagtntctctatatgatagaacattattgttacattaaacaanaagagtcttatataagcactcgaataagattgactcatttgcttagtctgtggtggctctacatcaacgataatgggctgattcaattaagcacattcgcactggggtggtttttacaataaaattaagttagtggtgggcatattcaataaaatgaattatgctgcggaatatcaaatttctagcgtctcattggatgaattatacgaatatccataaaaaatattgaattttttgttaaaattcgttgttttacgtggtatacatcctactgggtaatttatagtatatatatgggacatcgtgagacataaaatatgggacaaaaatgtaagtgatccgattgagatttactctcatacatgtcatatgtattggtgttcagatctttggatgatatttctatgtactatatttt

SEQ ID NO: 37074 - DNA, 438 bp, Oryza sativa
  unsure (1)..(438): unsure at all n locations
tgctgctcacctnctagtacatggtgagccagaactcttatattctatctctatcgccagacatcgtctcaaatcattgactacggattgtgactcgaatccggtgttagctaatcaagtcaaccgcgccctgaacatatcactgtcaaggacatgcatgagattatagacgttactgcttatttcagaatattaacaagaggaagggtatagtgaaattcttctggagctcgctaagctagattttaacattgtacagaacgtgcacctgatggagctcatatctatctctgagtatgatgctatctcttatggtagtgaaagcaactaactaatactaactctgtccccaatattagactttgagctatatgtatctaagacatagctagaagctattatagattgtgaccaagagagtaatttatatcgatgccc

SEQ ID NO: 37075 - DNA, 187 bp, Oryza sativa
  unsure (1)..(187): unsure at all n locations
gcaagacttacttgttcgctgccagctcttcatcccacctatctgtctggtgtcagacatgnggcttgtacctaccaccgacacccaacaaccaccacccttctgcctgctggtcaccggacaccacacacctgtaccgggattcagcgattggcgtactcttcacttgcatgcaccgacactcatg

SEQ ID NO: 37076 - DNA, 339 bp, Oryza sativa
catgctttatcactcttaccctgtcttaaatcggtctggccggatgcgttgtgtaataaaaactatattcttctaatatattgacgcgcaatccttatactcgttcgcgaaaaattgagcacactatattctataatgtcagaaggggataaaatacccttctctaagaaaataaaaaatatatacctgaggcatttcgcaacaaaaatggaaactaacttagcattcgggccatataggccttgattgggtgggcatcaatctagacccagtccacgtacgtggggctaggtctatagacctgtatgggccgggattttggactattcaaataagtcc

SEQ ID NO: 37077 - DNA, 420 bp, Oryza sativa
  unsure (1)..(420): unsure at all n locations
agcttacgttgaactattagtgataatattttttgttgttaattatgttaatctttgtttaatgatctatccattgagagatattacgagccaacgtttcacttattcgcggaaacgacatatttacaaacaaaaagtaatttgtgaataaaacttttatatacgtgttcttagcgatctaaaagaccgaaatataaacattgatgaaaaaacctcaaaatcacctccaattttaaagttgaaaatttaaattttgattcataaatataaatataagcgaaaagataaggctgattgctcaacaaaccactgtgtgtccattggatatcagtctgatgttaaattctgcgcgcccgaacattattcaatccttgttttttcaaatgtnagcatttcattgtaggaggcatcttcttttga

SEQ ID NO: 37078 - DNA, 513 bp, Oryza sativa
  unsure (1)..(513): unsure at all n locations
gacctatanatactcaagcttcattaagtatctaagctcgagttctccacacaacgcacaatctgttctcttggttatcgtgcctttaccaaccctggacgttggaggagcaagtaaacgtgcggtggcatggcaaacattgaactcacccgcagcacgttctggccctaccacgctctcaccaactcgtcaccacagtttatgccactttggtcgggcccactctcttgattcctttcccagatgcaatccatagctaaccgcaagcacatatacattggtttgggttctcccttcgctccaccatacctaagcctgtctccccaactgcatttaaggcttgtatcaagtgtccgatgtgaaaagaagctaccctttgacttgggcctctgtgatgctaatctacctatcaaatgaatattgcgctttgatgccaacttaacctaaatgaactcgttctctcaagctatgctgaatatatgaaattgatgtacatatgtcgctactgatact

SEQ ID NO: 37079 - DNA, 330 bp, Oryza sativa
aagacgacctgatgcatgctacctaatatgtgggcagcatttatttttttagcagaacgaaagaggcatgagatagtagttgacctcatgttttttataccggatggagtaacgtacccgatgccacccttgccatcaagggtggatccagatacaaaaagttgggggactcaacataccgagtacaccgatatgaacacataattctcagtattaaactatgcttaaatgctattattagacactttatcaccttctatgttatcccctatgatgaaaaagttgaaggggggcttaaggggtatccattaattttgtgggtgaaggggg

SEQ ID NO: 37080 - DNA, 340 bp, Oryza sativa
ttacctgaagaggcatattttagaggtacaacacaatatggatggatgttcccaatataatgaacgttattaacattgacacggcttgtgaggaacatggcaatgcctgaacgggacattgcacatgcatatgttgctgccgagtgtatgactatctgctctaagtaccttggtgatgatgttgagacacgacacaatcgtgagggcacaataatagagcgtgtagctattgcgatatagacctatatgttttccaacacggagtagatcatcatggagcacctagtcatacatatcttcgacaaattgtgaaaaaatggtatggtacgtgctaacaatt

SEQ ID NO: 37081 - DNA, 413 bp, Oryza sativa
taatttgctcctctaaagctgacctcagtgccattctacttcgattatcactcattcgtgttggatatgtgagattaatgtgacttgcagttagttctgatatctgaatatactaaacgatgtaccgatgctttatgcttatagtttcaggtcatattatgtgtgatacaacaatctgttttataaaagaataaaacatacacgtgtaggtgtgactttacaatattttttacatgctcaaaaggtgaaatgagctacattggttaggacatacgtatatactacaactttgaaaatcaaatgcacccaatcatcttgatgaaagatgatgagatatacttttctccttattctatttactaataagttatgacccactaaccattaagcttaacatgttaacatgccacctt

SEQ ID NO: 37082 - DNA, 443 bp, Oryza sativa
  unsure (1)..(443): unsure at all n locations
agcttcctgtccagattcgttgtaatatgatgtatctcatccggttttaggttgctatattataggacggagggagtaaatcttattctgttctttttctgtgatttgtagtaggtgtcaaatttgaatttgcatggctttggcatgatatatcacatattaatccatctggtccaaaattttcaaaactttttttagatgatatgcanagagcaacgagacatttccacgagagttgagaatcattttcctgtttactacctcatatttatcactgccatatgacatcctatgaacactcataagccgctacatggaactttaataattagaaaaaaaccatataaaaattataagagaaataaaaaatacttagctatatgttctaacttanaatggttgacccattatctccaactattagatccatcccttcaaacaca

SEQ ID NO: 37083 - DNA, 448 bp, Oryza sativa
  unsure (1)..(448): unsure at all n locations
ctttcttcaccaaggagcagtggctcgcccgccagcatgagtgtaataatgtggaggccacangctcttctgcttcgggatcgtcgagcagccgcaagcgtctaccacgcaagtgggagaaggcgcgtagtggcgctcttggcgacgccaatggcgagcacaatggcagtcgcgacgacacctgccacaactgcgggaagaccggctactgggccaaggactgccggcaggcgaagcacggcggtcaagcacacgtcgctcaagcacaagagggtgacgaggtggctctgtttttcgtacacggaagcatcgagccgcacttcactcccgcatcggacgctaccgcgcccctccacctcgacagccgcgggccacgtctttctagcaacggatcatgcggcgacaagatcgacggatggtgcctcgacaccgtgccactcaccacatg

SEQ ID NO: 37084 - DNA, 392 bp, Oryza sativa
agcttgctcagtgactggcaatatatgattttcgaaactgagaatctatgttcagatatagcaatttctgaacaccaatgccagattataaagtaattgaaaaataggcatggagtcaacgactttgggtaaattgccattaaattgccaaacgaaatggaatcagcatttgtatcacgtaacaaaattttgcccatcgatcatggaagaaacgtgcatacgaatttgtggctggccaataaactacataacaactgagattattgacaactatgaagagagaatgccatgttacttctttcttatggaacatcccctctttgtcataacaaagtcgtggaagaaacatgcacactgcagctgtgcagaaatgttatacacacaaaaagctt

SEQ ID NO: 37085 - DNA, 353 bp, Oryza sativa
  unsure (1)..(353): unsure at all n locations
tgtngatcttgtcgactaagacatcaaactgtgtctgggacttgaacttgccgaccgcatcaacaggttctcattaatgagtcagcatatggaggataatggctattaaggtattgattgttggtaccttcaaccccctttaaagccgagtccctccttgtcatcttacagagttcgaatctgcttctccagatgagatatcttggcagcttgcactacattgattgtggctaatcaagattgcacagataacatctcatgctagttgggcagagattgtacgtaccttttgatgagccacataagtcgaaattggattcctggagctcaacaattcgatcccttagatcatg

SEQ ID NO: 37086 - DNA, 337 bp, Oryza sativa
  unsure (1)..(337): unsure at all n locations
agcttctaaacggataaggggtnttaaaaatatctttccttattagcatttcttaatttcagcttctcaatcgtctagctagtatatcatacattcaattgtcttctcgaataataattgtaaactatttttccaacatggaccagaatggtcattgttgtggatggaaatcgtctcacaagaggcaaaactacattagtttcaagtagcatattaaaagggaaagtatctatgttgttgtgatagagtcatagttgtataactctatctactatgagttaaatactgatttaaatcttgatgctcacgaatattacatgtgcaatgccgatagact

SEQ ID NO: 37087 - DNA, 496 bp, Oryza sativa
  unsure (1)..(496): unsure at all n locations
tggcgcacacganagagtgcgagagcttagaataacacacgcataaccctctacctggcactccagatgacggagcatgtggctcctcaccgggagaccgcgcaggcctccctttgccggttcggccggnggccctgtgtgaggttctaagctcctagcctgtggaaagttcgcaagagtggaaacacacaagacacgggcgacgtatacaggttcgggccgctgagaagcgtaataccctactcctgtgttttggtggatctgtgtatgaagaagctacaaagtgcgagccagcccccgatcgttctgggatcgttttttctttcttttttcaaatcccccttttctaagtgggaaggtcctccttttatacctcaaggggataccacatgcaccatctctctctttnttgtggggacttatctctatttattcataaacagaccgagacttgtatgggtgccgtncgaatgaccttctgatgggacgggccata

SEQ ID NO: 37088 - DNA, 103 bp, Oryza sativa
aaaaattaacttaaaaatttgctctcgaaaacatgtgttaaggtactagcccaaaacaccccataattttcggccttttttttggaaccaccacggtcaattt

SEQ ID NO: 37089 - DNA, 509 bp, Oryza sativa
ttacggacctattatactcaagctggggttttggatcttgactctctacaagtagtaatactatatcattactgctcgttactactatcttatacgttactacaatctcagcgcgacgttacttgtagtgtgcagtaaagaccataagttttgtagtaataatgtgtcttactacaattcttgaatagtgttactgcataaacatgtggtaaaatgtacctgctatgtagtaacacttctactttgtgcagcaacaagtatttttagcatgtgagacttttaatccattataattctttggttcctagtttactataatttcaccacgatgttactgccatacgtgcagtaacgttctatatgtcctacagtaacaaatggtttactgcagctctttgatagtgttactgcataaacatgcggtcatgtgtaactgccacgtggtaacgtgtatctgtcatgcagtaacacatttacttttgtgcagtacaagtatatggctacatctg

SEQ ID NO: 37090 - DNA, 418 bp, Oryza sativa
  unsure (1)..(418): unsure at all n locations
tctaatacttcctgcgtttcattatgttagtcattctagcattttccatacattgacaacaatatgaatatgggaaatgcgagaatgatttacattgtgaaacggagggagtacctttgtaggtgctgatccgctcaataatacttacaatagttaatagtttagaccaatacactattcacaggactgtacatttcaacagaaccagatctgatggacatagttcaatcttttctcccccggatttttctgtgttccttggaatggttttttctcttagtttttttaaacgggttttattgtttnttccttccttttttgaactgctttatatgatacacctagcaagatgtagagctctaaccttggttttttttctgaaagtatagaggttgtaataaaatcataaacaaattcg

SEQ ID NO: 37091 - DNA, 421 bp, Oryza sativa
atcaccgaattgttcatgggaaaggaagattttcatagcagctccatataaatcggcatagatgatggccacatcaggatgaagcttccgtaaattttctagctcatccataagaagtctgttgtggtattgcgagaactatgtcatccacctgaggcaacctgtctctggctcataatcttccttcttaccactcttgaatatcatgagataatgtggaatacatccaattgggagattaccaggaacaactaacgtcttggctccgagcccgatcaattcctacaaactcaactctattgcattactagccatatacacttgttccatgttgtgatacatgagcttgtgatggtgaaaaaggactagttatacaaacgagtgaagtgagtccatctctaacaatccaaaaattcttatc

SEQ ID NO: 37092 - DNA, 391 bp, Oryza sativa
tgtggtgcgtatacattatgccattctttttgccggctcaattgttgatcctcctcaagcacgaatctgctgctgctgtgcctgtctgcgaggcaacacaaggaagttccttctgcgcacggcaactgtggttatcctgttcctcgcggtcacgtttggctctgctcgtcatagcggcagtgcaaagttagctgttgaatcagtggcctacgtcgccactgcttgcttatacttctgctccttctcaagctggaaggagaagacggtttccggaacattccttgctgtagttactgtagtggtcgtgagtgtggaagcaaccactggaaatgaccatggtcgtcgccatttgatcggcacgatcgtggctctcgtggtgtactgcatctgg

SEQ ID NO: 37093 - DNA, 426 bp, Oryza sativa
  unsure (1)..(426): unsure at all n locations
atgtttcttggtttctactaacaatggcagggatacgcaagataattggggataactgtgctcaacatcgacatctttgtcgagacatgaggagggatcaacatgaccattatgagggaagtgatgatgttctangtaagatcaaatctgcactggcttatttcgagggaaactatgatcctcgtgcttacattaattggcagctagcggttgatagtgaatttcanaagcatgtcttgtcggagaaacaaaatgttatgtgtgcctgtagtggtttaattaaacatgcttctaatgattggaaacatctttgtaggtataacaaaataccacaatcttggaaagacctgaaacgatatttcagagatgttcatgttcccatgtattatagctgacattttgtcaacanactgcaatgtttaaaca

SEQ ID NO: 37094 - DNA, 423 bp, Oryza sativa
ttcctgctcactcaatggccgagccatcatatgcgcgcgatctcttctctatttgagcggtgacgacagggaaccaaacccacgccgtcgagctcgtactccaccgccccctccacgccaaagtcctatgcgggagaatgcgctcgatatggctgaatgatccgcgacttcgacatccacatgaggtggagaatggcggcgagatggggagcgtcgcctcctcatctacggcgactgcagcacgccccatggcgcgctccaagctgcatgcgcgctcctacgtcacccgcccgtcgctcatgacccggagtctccatcccaacgttggctggacgatgtggccaaattggtcatgactgcacggcagcacctatatgctggtgggcggtcctccgccaccaatgcctctggtgctgctaccac

SEQ ID NO: 37095 - DNA, 445 bp, Oryza sativa
  unsure (1)..(445): unsure at all n locations
agctntaatacaagaattcactgaagagaaattaatgatgctattttccaaatggaacataatatagctccgagtcctgatggatttcctgctgagttttatcaagtcttttgggatgtcattaaagatgatatgttggatcttttcaaatattttcataatggtactttgcctttattctcccttaactttggtactattattcttttgcctaagtgtgatgaggccatgaaaattcaacaatataggcctatcttcttacttaatgttagttttaagatctttgaccaaagtgctacgaatagaataatgagtgttgctcanaaagtgattagccctactcaaactgcttttatacctaggagaaatattatggaaggtgttgttattttgcatgaaactatgcatgaattacatcgcanaaataaaagtgctgtgattttta

SEQ ID NO: 37096 - DNA, 405 bp, Oryza sativa
caccgatctttctgttgtccggcactgttgttcatttctgatgaacatatgaatggattaattatgcgtacgctttctaaactgttgaacatatgatttttaagaaaattatatatatatatatatatatatttaaattcatttttttaattgtataatagataattcattcattgttcatttaaataattatcacacattattcaccagccattcaacatataagaacagggaagatgaagcatctatatggattgtgtccccctgatgataatagatactatgtactctctagcccgatatttaattataaagggggtgatctatatgtgcaaatgaagatggtgacctggtatgatcaatgtggacaagtgggacataatcataataaggagtccagatact

SEQ ID NO: 37097 - DNA, 474 bp, Oryza sativa
  unsure (1)..(474): unsure at all n locations
atctctgagtcacctgcggcatgcaagcttgtggatgcatcangcatgtagtagataagctcagatacatacagtataactcaatcagtgtactgcaaactataaatcccaagggccaaggcatcctcaagaacctggatagccataatttctatattaagagaaaatgttaggcacttaaaaggcactgcatttcctgaagaaataactactgttgagcagtgactctatcattcctgctttgttaattatccaagtgatagctntgcatagaggaaaatcattttccaatttgaatgtatcttatttcagttttccatgtcatttaattttgaaaagcaattcaacgatggccctagttgttcctctttagagaacaagccaccttactaattactcactgacaacttgcacttttctgtatccagtaattccgtaacatgctntcttttgcaagatgcttcggcttataac

SEQ ID NO: 37098 - DNA, 504 bp, Oryza sativa
  unsure (1)..(504): unsure at all n locations
ctaagctttcaggatgaaaatttgaaacataagtatttctaagatattatttctatgcacgggaataaaaacatttttagtcaatgtgtttaagagtcaatttcaaacaattcaaaatttgatcatttttctttaacctatgtttttgttaaacaccttaaaatacttatatgtaataacggagggagtatatcagtaccctaaaatactcatattccgacgttgtaccaaggctacactttattcgattatatgtaagacgtacgaatacccatatgcacactgcatgctcatagggatggaagtgagcggcaaatcgataacttgtaccgaatttcaatttatcaccgacgagtaaggacgtttgtgtgatatctaaggtatgtggatnttcatccctcgaggggatatcacctcgttgttggcatgtatctanatagttattaaaaaatttgaaaaaaattgcaacatagataatatgaaataatcactctaaaacatgct

SEQ ID NO: 37099 - DNA, 372 bp, Oryza sativa
gcttctcttattcttccatcacggacatctagatcccgcacttccttccgcgggaaaatattatgcagctctcggaaataggacttggcatcgatgataacatcatcttgtacatccatcacatgatctgccacagaatcacctcctggctccatcgccctgctagctgccatgagaaccaatattctctcgacatacttgattgttccagagatgaacatcagcaccaatggcgccaagagctgcttgtgcgggtgccatgacttgaccatgatgtagatcgctatggccacttgggtgacgagaccgaggaggtgacgcttccacagcattgcatcctcaatggagaacgcagagatcgtctcctggcta

SEQ ID NO: 37100 - DNA, 414 bp, Oryza sativa
aagaagcagatggtgatccatgtgatcgacacgccgataaatgtgaatcggcgtcccgtcgccgtcgtctagcggcggcgcatcatgccgggtgtcgccacggtggctccactgcggatgtgtagagctgtatgagcagggggaactattgcaaactctgggacatatactcttaatgaacatctgctcgttatttgtactaaatgctggggcacgccaatggcgcgccgcctgcatatagattgcttgattagtgtagactaatcatttgttttcatgctgaatcaatgattatgtaagaaaaaaaaacctatgaatacatttgcagtgaatggccgtgatgagtaattgtccatacattgttttacagattctgctgagaacaaaactcttacactgtacaatctaaagatg

SEQ ID NO: 37101 - DNA, 488 bp, Oryza sativa
  unsure (1)..(488): unsure at all n locations
gcttcacagctcatataaacagacccttcttctcttatgtccaacaaaattattccaatcgacaatggaattaaaagattcgaacctttatatgtattttctcgtacttctatatatctactacacacctgattttgattntcttttttcccttctgagaacaaaaaacctgcttgcagaggactggtacaatgccatgaagcagatagaaaaggtccctagcttaaagaagacaatcaacttcaaatttcaagcagcaactgttcttcagaaacaatgtaaataaccacactgagcagtgaactttgcaagctttacctcctttaaagaatcctccactttgaaaaagaatcgggtcaggaaaagctggagagaacgctgaagaatatgtcacctcagaatatggatgcaatcagacattgtcattatacataaacagtanggtcgacatgatgancattgacacattaacagcatataacatgatc

SEQ ID NO: 37102 - DNA, 360 bp, Oryza sativa
  unsure (1)..(360): unsure at all n locations
cacacgtactacaaaatgataaatcaaaaagatcaattcataactcaagatgatgaaacaacatcgctcattattgagaaactgagtatctctataacaaatgtacaaaacatcacatatcatatttcaagtttctcctataagcatgtttgatcaaaatactcacagtggaacttactgctatgggagaacttacaagatatacatatgttagcctttntactttccttaagcaagtttgaaagattatgatgaggcatgcacacttatgtagtacttagatgaagcaagattgccattttaaactntattatanaatattgctagactggaatacatatgtgtgcttgcctcatcaca

SEQ ID NO: 37103 - DNA, 481 bp, Oryza sativa
  unsure (1)..(481): unsure at all n locations
tagcttatccctaactttggcggcgatggtttgtgttttgatcgcgaagagggaattttgtgaagatgaagcggtggacaagacgatacacagtatcgtgttggtttttaagaatctttaagcttttttttgggctgaagtccattaaacatttactgaccttccacgggtttttagggactcaagtatatttgtctttgcagtatgcacgtggaaagtatccaataccttgaaaattctcttttcttgcttgtacacaaccttttatttataagagttggtacaatgtgatttaaataggtggtgaacagtgagctttatatgttacactttatacttttttacattaaagataagcactggttagcgtatgttaaacaaatgcaatcaaccaactgctgcgtcattgtttttatttaacaaataccacatatgtgtgcaactnnttagaccaatatctttggctttatgatgttcatga

SEQ ID NO: 37104 - DNA, 473 bp, Oryza sativa
  unsure (1)..(473): unsure at all n locations
cacatgatgattatntaatcatatcatgcgccatctttgttcattgatactatgcctctacacgaatgtgtgccatcatgctaatgtatctacaatttccctgatattttgttagagcccatntttagttgtcaataaaggtcaaaacagagacgatattattcgctccaaatcctcccgaagcaaggatatgataagagttcatagatatttggtgcatatagagttggatttgaatggtagcatgcggatacgaagccggatgtgataccgatgatatgcgatggatgcagaatattcgatattctaagcagattatgtggtggagggtttggtaaacaatgcgattntcttggcccatatcttgtaaccactctatgtggtccatttcacatcagacaacccattcagtaaaatttgggataatntccttagctcatccactctatttggatctttttttaagtcttgga

SEQ ID NO: 37105 - DNA, 396 bp, Oryza sativa
  unsure (1)..(396): unsure at all n locations
tgttctctcttcctaaatgttcaaccagatgtaattattgcatttcacataacacaagatcttcagatcaaatgcctgtttgtctagcttcaatttgttacaaacatagtaatgactaatgacactagatcaatacttctgggtcttcaaggcttgaagcaatatttaaaggcagaagccccataaaaactgagcccattggaaagtgcttttggagtcttgtaaagaaaaaaggcagaaactataaactggctaactgcgcaagcataatgaccccaaaaatgtaataaataaaacaacaatgtacgacactgtcaccttgccctgctccattntatctcatatgtgtaattaaaaattctaaccgtaactgagaattccgaaaattctaatagt

SEQ ID NO: 37106 - DNA, 471 bp, Oryza sativa
  unsure (1)..(471): unsure at all n locations
tcaccgctntgagtgatccacgatgtcggacttaaggggaattatctgngaaaatggaaatgaagatggagcaagcagcaagggaactccatcacccaatggagctactatacactttgattacagcaaacttaccattccccctcacaactttgtctccgtgccttccgggcgtgctcctcaatttgatgggacacattacgccgcttggaagcacaagatgaagttgcatctaatctctttgcatccaagtatttggaaagttgtttgtacaggtgttgatgtaccccatgatgacatgaagctcactttggagcatgagcaactcatccaccgcaatgctcaagcttccaatgcaaattctctccgccttgagtccggaggagttcaacaaggttgatgggcttgaggaggccaaggagatatgggatacattgcaattggttcatgaaggatcaccacgccgtcgtg

SEQ ID NO: 37107 - DNA, 432 bp, Oryza sativa
agctttggagaagaagtcctatgtggagtcattgtttataccccagttgagcgcctgtgaacatggagtcgtaagctcgctagtccgctgctgtttatttttgtttgacacgcctgaaaagcctttgtaataatggaaatattatcaatataataaatatgtactttttgtatcatatttgattggtgtatcccggcttttcctgagacgggtattaatacactaatgctctagaaaaagaattatttcaggcccgacatcgctgtgtttatgaatgttagcatgaactacattgatgctcgtgtaggggtatatgtattcatgcatattcgggatgatcatttatggaccttggcgcattctttaagaatccaaagtaatacagctccttcaaatggttatgataaatttaattttctatgatactataaa

SEQ ID NO: 37108 - DNA, 209 bp, Oryza sativa
atctcttacgctccacgaatggatcagtcagaatatcacctctctgcttgccgtcgtcgccgccgactgtggtcttcacctatacggttggttggtcgcaacactattgttaggcgtctacatcttcaccaccggcttgctttctccaccgccgactgctgtcactgcctacatggctggcctattatgccgttgttgttgggcgttta

SEQ ID NO: 37109 - DNA, 411 bp, Oryza sativa
  unsure (1)..(411): unsure at all n locations
tgcaagcttggagacagccaaccacttttaattntctggatgctgctctgccttctttaggcatggaaattgaatctgaagaagcaatcgagggtgcatcanaatttcagcttgagctaaagagaagggggatgttctccagcgctctcctctacgcaagaaggagattgccctccgagtcccaattgccttgttcatcaccatcacttatgcaccaagcaagcgtacgcaacaaaggctgtttgttttcaggcagcgctcttcaaaagaatttccatttatggattgcacgaggtctcaggttgctacgctgatctgactgcgcgataactntcatatgccgggaattcatgcttaaatagccaattaagcctgatcagaatgtaacanaattcttgtggcaagttgaca

SEQ ID NO: 37110 - DNA, 389 bp, Oryza sativa
  unsure (1)..(389): unsure at all n locations
ctttaaaggggctcggaggcggcggcgaaggcccactgtggcttcttctgcgaaggaaagctcgcggcttgaaggaaagaggccgatccgaatcgaactcgaatccatcgatttccgaaccgatctatccgaagcttccaaagaagaaaaggtagaggagatcccgaggatcatttcccctcttttgattcggccggagaaggaaaggagcggccgaatttggaaaggaacggcggcggtggcgcgctatggtttcggccgggcgacggcggctcggggaagacgaacctgacaagcgggacccacctgtcatcgacagcgatggcgcgcgcggctgctgactgtgccgacttgggccgatgagagagagagcggttntgggccgactt

SEQ ID NO: 37111 - DNA, 505 bp, Oryza sativa
  unsure (1)..(505): unsure at all n locations
ctcgtacccgngatcctcttagtcacctgctgcatgcaagcttactaaagacctaagagtatgacttatactctccacccgaggggtagtctacagacggtctagtaccagataagactttgagtgaaacttgcttgcacaagacttgcaattcaaggcgtagtccattgttcaagttgtgagtaagtgtagcttggagttctaggtggatgttcaaccttaattggtctccatcgaaccgctggtatataaacagtacattggaaaaggcaaatctcagtgggattttgagaattggtgggggattgttggaattaatgaatgggccttatcccactcgaagattaattctttggaaaatcacaaaagcccacctcatgggatggcatgcatgtggagtttattaccaccttgcttattctatgagagggggacctccttataagggaggatgccctcctagtcacttgaagcatgtgtggtggagagaagaagggaaacacat

SEQ ID NO: 37112 - DNA, 498 bp, Oryza sativa
tatgttgtatgatacggcttccaaacggatcaatgctgcatattctaaatacaaaaagtgaaattaggaaatgctgctaccaaataaaccaactttaagatgggataagatgctcgatatggcatgaggttcaatatcataatagtttcttcgtagtaacgccaacgaatctcatctaagcaagatatgattcaaacaacacatggcaccacataattcatattcttaccgagaagctaatttaaacaaccacactataaataaaacactaaaagttgcatgagttatgtgtgcacctgatagcacatagatggcccctgatgttgatgagtcgcatggaattgttctctggattctttgcttgttcaagcaagaaatggaactcagaattcatgttgttcagtgtgttgatctgtccattggtttgaggaaacccagaaacattttgaggtccacgagtaactggcatttctggatatctcatggaatatgacatct

SEQ ID NO: 37113 - DNA, 335 bp, Oryza sativa
  unsure (1)..(335): unsure at all n locations
gcagcttctcggttttggtctctgnccgaggcatctagccaaccccgataagatacgagctatagagcggatgcgcgccccccagcaagcttaaggatgtgcaatgcgtcaccggttgcatggccgccctaagtcggttcatatcgaggctgggagagaaggcgctacccttatttaagctcctcaaacgctccgggccgtttacttggacggaggaagctgaacgtgccctcactcagttgaatgcgtatctcaactctcccccagttctggtcgccccggagccaaatgaacccttgctactctacttagcggcgaccccgcaagtggttagt

SEQ ID NO: 37114 - DNA, 396 bp, Oryza sativa
ctacagtaacattcactatcttttctgtctgaatccttaaagcctcactgaatagtatcatagtagtatttgcttgtaacatttttccttaacaacttgtattcactgatgtaatgtctcatttctgtctcatttcactgatgtaatgtctcatttgcttggctctcctagttaataaaacacttgtattcactgattatcagcagtaatgaattaactgatgttcatctgcatgctcggagtaggattacagtctggaaccagctgcagagggcagatagcgtactgatactgattcaggagaagacagcaacaactgatatgactgagctgatgaacactcaagttctactcaactgaggcgagcaagcatattcgtatgtatgttgagctcgt

SEQ ID NO: 37115 - DNA, 453 bp, Oryza sativa
gcttgatatgcttatataaaatgacctgtatgtattagtggcgtatatacatgaaacgaataaagaagcatgcatattatgtaagatcggctgaaaccccaatactatccttcttatgtctaattgcaggctaatttgcattggtctaagcacgactatggatgatgcatttgaaagtatgaaaagaagcatgcagtctatacaatcaagcaattaaacacttttaaggatggtagatgccttagctaaatctagcaagacaatttagccgaaaccagcataaaccctatagcgagcaataaccgatagagcaaaattgagaagctaagaatatattaactaagacatatgatagcaatgactcgcgatatcgagcctaacacgtctaaagcgacatgttagccccgatagcgcatgccattgagacgggttacctcttgcgaagaactcgtc

SEQ ID NO: 37116 - DNA, 468 bp, Oryza sativa
  unsure (1)..(468): unsure at all n locations
tctcacatgcctatgttccatgccttgcatngccactttgttgtctgctcatgggcctatccctttcatgacacattgaactcaacagtgtgatgcactcacccgatgctcacgacccttctcatgcgccaataacgtaatgattttcatttttgatcgtacccattcaacatcaatgatccaacttatggagggctttcataagattcagatactatggaaagattctgatgtgaccctttggaacaaattgaagctcttagaatggtgtgaaatatcattcgaatggctccacaaatctagggattttggagaaccacaacctgatggggttgttttttctgagttaatatctcctcatgttattgtgtttttctctatggtttggctatacgcggctatcccacgtattcttgtgtttagtatactacattttacacactatctccgatttaagcgcaatgattt

SEQ ID NO: 37117 - DNA, 389 bp, Oryza sativa
  unsure (1)..(389): unsure at all n locations
agcttccgcgatggcttggcagagtggcctgattggatggtgcaaatcgaggacaggtgtggtcggtgagctcttgacaatgcggaccagagagggcttggtcagcaacctccaacatcttcggcgctgtccacatccctaactcttcctctccctcatgcaaccctacctcacaaccgacaccaacccaaagtctccctgtcgccactgcgcatcctgcttcatactggatcgagctatagatcgaggcgacatgaagtagggttgctatccctcgctgctggtagtgaattaagctcccccagtggcggatcgagcgagctcggcaccacatgtctacctccttgtcggtgtccctacctcctccactganggtctatcctcccttc

SEQ ID NO: 37118 - DNA, 432 bp, Oryza sativa
  unsure (1)..(432): unsure at all n locations
gagangacaccacccctcatcatgcatggtagcaacacttggaatgagaggagaatgccatataaacccttgatacatgtgtacgactattgacttgagtagcatccatatgtttataaccgagaagccaaagtatgcgtgacaagcagcatacatgcgtgctcacattctgtggagcttacaggatcccatggaagtatgaaacaacagtttcaaatgaatacaaatagtttcttgggtgcaattcactgctagatatnttctctcagccctcactacctcatggtgctaaagaatttgagatgcgcggatactttgtcaacatgttggaattgtcaatctgaatactgtaagctctaaatagatactcagcagacatttgtcgaattcatacaattacaaatacatcgttctacttctatagacatatat

SEQ ID NO: 37119 - DNA, 419 bp, Oryza sativa
  unsure (1)..(419): unsure at all n locations
gagaattccgcatatggtaagcttttgtcccaagctccaccaaaatcaagagcgcaagctctcaacatatccttcaaaatttgattgacacgctcggtctgaccatcaatttgcgggtgataggccgtgctgaaatttaaccgggtccccaattctttctgcagcttctgccagaactttgaggtgaactgactacctcggtcggatactatcttcttgggtaccccatgcaaacacatgatccttgcaaggtacaattctgccaatctctttcccgtataggtggtatgtactggtataaagtgagccaccttggtgagtcgatccacgactacccaaattgaatcatgtcccgatgatgtccggngcagtcccgttataaagtccattccaatctccntccatttccattccgggat

SEQ ID NO: 37120 - DNA, 437 bp, Oryza sativa
agagaacgggaaatgtccaaagtgccccgcaaccgccatcatggaatgatctggagcgtccacgccaaaccccagtatcaacggtgatcatgggggttcggccgaacctgtgctgggcccatctggcctggcctttggcccatgtgctaccctagccctcctctatccattcttcggtattttgggctgattctctggtgtttcgatgaagttcacaacccatacttgtatggatacataattctcctcgctttagtctagatgtcctcccaacctcggtgtgtattacctgcatacaaatagagatgagctcatcccactatacaattaagatatgccttattaaaataggttgtaaatgatgattaagttataaaaaatcatctataattaacttatacccgatttataatggctattacatgtgatttatcaca

SEQ ID NO: 37121 - DNA, 471 bp, Oryza sativa
  unsure (1)..(471): unsure at all n locations
gatgagaactagtcttgactaggatggacagacctttgtttttcttgtntcaaccggatggtcacatgtgttgatctctgctcaagcttgaccccaagatggatggcgcacggcaaaggtataatgtatctaagaatgttttcttagtcttttcccggtcttggtgtttggtgtagactggatttgctagatagacgccgtactatcaagatgggtctatgaagcgagcttgtggatgatcttgtgccatattagttcatatgcatgtatgtgcattttgtgggcttgtctaaccaagtgtgatgagttttctcacgtcctaaactaatagagaagtgggcatgtccaataggagtgagtgacatcttgtgggtatgtccggtggatatactttgaagtgtagcccttatccttgactaagtgtgttcttgatggattttatggtttgatggccttcgatatctttcatat

SEQ ID NO: 37122 - DNA, 488 bp, Oryza sativa
  unsure (1)..(488): unsure at all n locations
agcttctttatagctatgttggtatatctctcatcatattntacaaagcagntggtatatcactcggatcatgttatttggaggattcacaccgcatatgctatatattgatatcaagtcacttggttgattacgattatcaaaaccactcggntggttggattatttattccttgactatatgcttggtttgttcaattaaccacattgtcgggggctacacctattatgtgcatctagtcggtgcacctgactntattttccagccctccacagtcttcagatttggtaaaagtactcgggagaccatgacaaagatgattgaagcactcggctntggagtaatctggttcgagagaagaatatctttcgactgcgaaggtctcangggctactgtggatattatgggtaccccatacccatacngcatggttatccgactagtcatangggataanctatatctatggaatatgtaatagatcat

SEQ ID NO: 37123 - DNA, 493 bp, Oryza sativa
  unsure (1)..(493): unsure at all n locations
tctcagcttcccgtttatctcgctnttatcttttccgctgcatttgttatcttttctatttctgtaagacgtggatctgtatgtcaacaattgtcgtttgtgtaccctggctggtcctggacagggatttaatgcacattcagcttagaaattctggttcgagaatatctgggcgtgacaatggacctatcccaagttctgccaaaccaccatgttctgcggaaccactatctccaccattggatgtggtgtttggcgtggacgttccatatgcatccctgatggcgtgtggagggcacttctgacatttcctcttcgccaaccgtcatacctacctctatataaaggcttcactccctcacttcacacacacacttccaaggttgagctgtattataagaagctctattgtactatattgtataatagaatatgaagagagtagagtataaggagtcggaagaattccggagttgtcggtaatcttctacta

SEQ ID NO: 37124 - DNA, 487 bp, Oryza sativa
  unsure (1)..(487): unsure at all n locations
ggatctctaagtcacctgcagctgcagcttatcaattttagttaaaatactgttatcgtatggtgttggctatcattgacagccaatacgtcattggtaatgagctgcttatcggttcttaaacccatcatttaaaaatattggtgtatatagattgttatcggaaaaatagatagttaatagtaagccacatttcaaatatagatgatagctcttattggaggccggaggcactgatgcagcatcttatcaagcgttgggctgaagtatatataattttattttcaaagactatgtaaaattgagtgtttttcaatgaaatntgttgccatgtgtggggctcaagcccaaacgctgncccacatgtgactccacatggttgatcttcttatatgcatactagctatagactcanatatatnttnttttacttgaagaatcattggatattgtgaaatactccctccattccaagttgatttacata

SEQ ID NO: 37125 - DNA, 497 bp, Oryza sativa
  unsure (1)..(497): unsure at all n locations
tgttgcactatcacacctatactaccagagattactttctactattcttaaatgctactgcatttctactcgttttcttcttatccgaacatctcatcaacatcatcatgctgatcgatcgaatacgcatttcatagacaagagtagctagacaactgtgagaccttgacaccaatgtcacaacagtgccctctcattatgggaaatctgatatcccaaacatccaatccaacaatttcagaatttgtttcatgcagattcttccttaccacttgcgtacgaaggcatgaataactttggttcatctttcttgaaagaaaatanaaccgatgccaactacaaaggaccactccactgacactctaatgatgaagtgaacacacagagtctagcaagagataagcataagattgataatgtattctattggaagttcatgggtccaaatcacacttatatgaatcgtgatcatgctctcagtttttatgcccactgta

SEQ ID NO: 37126 - DNA, 460 bp, Oryza sativa
  unsure (1)..(460): unsure at all n locations
agcttccacatgattctattctcagtacatattattgtgtgttcgaagagaaggggattgaggagattgtgaagatacgcaccacgaggtaagccattagctcatgattaattgagtatcaactattttaaatctcaaaaatggattaatatgattttttaaagcaactctcctatcgaaattttttgcaaaaaacgcacctgttattagttcgaaaagcgtgcgcgcggaaaacgagagacaatctctcctatctacacctaacgaacactcccttagtagccggcaataaaaatgtttatctcagtaaaagatactccagcttgaatgtacaatagctattgctattgagtaagtacacacgggttccaatacatcactntataattgtctagtctaatttctatctctaccaatcattctatcctttctactcagtgcattgggagtataacaatgg

SEQ ID NO: 37127 - DNA, 461 bp, Oryza sativa
  unsure (1)..(461): unsure at all n locations
tgtatgagtacttatgccgcgtttattttcttataattaattcttcaaacttctaactgttccatcacatcaaaactttcctacacacacaaactttcaactnttccgtcgcatcatttcaatttcaaccaaacttccaattttagtgtgaactaaacaaatcaatgtgcagcatgtaatgtacgagtagttatgttctttttccccttctttttcctatgtctcaagatatatgagtcgccgaaaggatcttttctacttatatttgacggctcagatatcttctctctttttgtccttntagatccgatggatattatttgttacatgatatggcatattctagttctatattaatattaactcttcactacttaagattggaggcaaataataaatgctctgaagtgaagcgaaacgaatgatctcctatagtgtgctccctctattataaaatatag

SEQ ID NO: 37128 - DNA, 479 bp, Oryza sativa
  unsure (1)..(479): unsure at all n locations
atcctctgagtcacctgaggctgcagcttgtcagatacggcgatagtggccgatcctctattcatactactagctattggtgtntgtgtcaatttagtttgtgccaagcttgccttgacaaagaatttatcatctactagtccagttgaatggttaagagctgacgtagtgatgatgacggaatgcatactgctgtgttggtctggaaatgctccagcttgtcaggcagaaaagcaaagtatccatctgcacggggcgccgccacgtacgtgggtggcgaatggcacccgtccatgccgccgggggccagacacgacggcgatggcggctcctagtgtgctctgcagccaccccaccatcaccgtgaagctcctccggcgaggacacaacatcggatgagtttgtgcacaagcgtctaccatgcatgtttaaacaataataattctgcacgattatgataattcaccaatcgtaaaatc

SEQ ID NO: 37129 - DNA, 502 bp, Oryza sativa
  unsure (1)..(502): unsure at all n locations
ttgtccacagcggctggtagcctcaacctattatgtcacacttgtctcattaaaactaattctggataaaattgatagggcattcaatggtgagccctgtatgttagttatcatcaactcatgatagatcaaatgatccacggccttctatgatcgcataaagcaatttcttgcgcatcacttcctgcaaaaagcaaaagcataaagccagttaagataattagcacatgtacaagagaaaacgaaaaattcaccatgtaccagagaaagaaaccgtacttttgtggagtatggaggcaatntaagataattagcacatgtcataacacttggcagatcatcatctgcagactctgtaactccagcgatatttgaagtattcaccgcacttgatgtgtgctaatgatcaaaagcaacaacaaagttatatcacccaaaatgatgcgacaatattcatacgttataacatgctaataagatataccaagaaatgtaccttcct

SEQ ID NO: 37130 - DNA, 490 bp, Oryza sativa
  unsure (1)..(490): unsure at all n locations
agcttncggcgccgcgcccggccccgacccctgttatcatggcggcccagcggccgaccacggccgggaagtcgctgccgcggctgaagatgcagatgctggagaaggagcagctgcgggccaactccgaggcgttcttggcattgtgattagtgttcttcagtaggtgcagaagcttgtaggattcagacattgtcttcctctgttctttgggtgccaatgtcatcgaaagcacagngatcttgtaatgtcttagataggatggtttattggaattcttcgcaagaagaacgtgtaatctgtgaagtgtatttatcattgattatgaatganagatcaagattctttntttatacacgagtgatgtgtttcgtctattatctcatgaccaatgcaatactatccttgtcttttntttgtttgagcanagtgttaagattaatatcacaatgatttaccctactgataaagaataacaatcattcatttg

SEQ ID NO: 37131 - DNA, 406 bp, Oryza sativa
ctttctctcgatcaaattctaatcaagacagattatgccactgtcggcctgtgccctgtgtgcctggagtgcatttgtatactgttgcggctgctcggcccatttctgtttacaaattccatggcttcatcccatgtgggcttctacatgttcagcacttcagacttcccagaccccccccccccccccccaaaaaaaaagtatactgttttgagatgtggctgagaacccaaaaatggtgagctactatcatcacatcaaaattcagatttttgttatttgttattgtatttattaaaaaaattaaaactatgtttttaagttttacaaatctacacccctaacatcttttgtaggatatgttttaaaattgttatgacgtgacacatatccgttggagcattct

SEQ ID NO: 37132 - DNA, 483 bp, Oryza sativa
  unsure (1)..(483): unsure at all n locations
agcttggaatctagctnttctattacttactatcgtgttattcacaaattgtttctcggaattgtgagctcctccaaacaaaaccctagcaacttggaattaaaagagcaagggttcctttcaaaaattgagtgtgggaaatacgtcagttctaccgtttcttcgacatgcttccactttcgtttcagctcattattcagaagaaagcaactcacccattccccacacgatcaactgccctccaacaattaaaaaaactgtaacaagtttagacggaacggcgccgccacgcctgccggtccaagtaggttggcttcatcatatcatccatccgttaaattgaagaanatcatttactatttcctccaatccaattcggtaggaaacgtttaaccagaacctataaatactgatacaaacggaaccagatacacccacaaattatatcanatttactgaacgtctccattagttctgctcact

SEQ ID NO: 37133 - DNA, 480 bp, Oryza sativa
  unsure (1)..(480): unsure at all n locations
tctcgggttcctggtctctgcccgaggcattgaggccttccttgttaagatacgagctatagagcggatgcgcccccccatcatacttatggatgtgcagtgcgttaccggttgcatggccgccctaagtcgtttcatatcgaggctgggagagaaggcgctacccctatttaagctcctcatacgctctgggccgtttgcttggacggaggaagctgaacatgccctcactcgattgaaggcatatctcagctctcctccggttctggtcgccccggagccaaatgagcccctgctactctacttatcggcgaccccccaagtagttatgtgcagcgttggttgtggagcgcgatgatgacaatcctcattccgcgcacccncaccctgtgctgacttggcccgggagcgagcatggaggagaggcccccgtaccgaacggtggcctaatgcccctgatgaccggagtcggccctctgc

SEQ ID NO: 37134 - DNA, 456 bp, Oryza sativa
  unsure (1)..(456): unsure at all n locations
tcttagtcacctgctgcatgcaagcttctcgnccttgccttacccggaacccggtttgtcctaccccgccccggcgttcccaactataggcatgcgaggtttccctgaaccgactagttacttatccagggtgtcccattccaccttgtggttgcacttgattatgttcgatgagtttcccacaggaatcggtccttatatgcgaatacgggacagtgccacataggcacaacccccgcatcgcgagttttcacaattcattttattttcaaacacaccgacaccacatgtcgggttttgaaggcttcacaaacccatttcccaagttttcgacaagcaacggtgtatgtgggatatttggtatacgcgctcagagagcacggataccgaagtaccacaagggtggagcgacaaggattcagggtagtacgacctacagaaattagtgcgactact

SEQ ID NO: 37135 - DNA, 462 bp, Oryza sativa
tttaatcagggtctcttttatttcttcccaaatttggcatctgggccagtaatggtgtgttttgggttgaatgacaaaagctgtgtcacttattttagcttaaagcctaatgagagtttttaaattgctaagggtttatacctccaaaggtagtggtccatatgatccagttcatatcttttaagcaaattaacttgaggctatctcactctgataagctatgcaatagacatggatatcattatcaaggctgatgggcctttgacaataatggatgtagatttttctagtcttttgcaaagtctctgcagagggtctctgtgggaaatgggcttgtcagttattaatttggtgtatgattgactataatcttagcaacaacaactgattagacgcactatgtacaaaacgaataaaaatatcattgcgtgagaaacagtagatgaattcagatcctttact

SEQ ID NO: 37136 - DNA, 427 bp, Oryza sativa
  unsure (1)..(427): unsure at all n locations
tttatactctgaccgtgtatatagtgttgctccaacactctcagatattcattgttgctttcctattccttgtgcaaaattntgcatgtgctactaactgtgtcattggcatgggtatgtggaatcccatacccaccttgtcagtctcaacaacagaaaatgtaacctgtgtcaagccctctgctacattagttatggctgttgaccaatcttagttcatcaagagctaattattctcagaatattgagagctgagtctagtcatcatgaaacttgtctgcctcaatgaacttaaaatcttttgacctactatattggccgagaaaatgttgcatatatgaatatctgatgatagacatgtgtggttcggaggtgcaatcactctctttcttctgcagaaccatcctgtgaacagcagtccgtatac

SEQ ID NO: 37137 - DNA, 455 bp, Oryza sativa
  unsure (1)..(455): unsure at all n locations
tacttggtgaagtgatacatagaatgctttctgntcttccatctataggggggtcatcttgcagaaccttgtcaataacagatggatccgaaaatgttacaaaaccaaatccacgaggcatctttgtatgcttgtctttcatgatcacagaatcagatatagctccatatttctcaaaatgcttggtgaacgattctgaataaaaaaaaacatattaagcataaacaacatatgtaaatcaaagccttatctaacaatattgatgggattacaataatatgaacattnttccaggtgaaattatggtccagattaaaatcatatgaacatgtttagcctatctgccgacagcaatgaaattaaatagtacaaactataacccagcaccaaacgcactaacaataagatcatgcacaatgtanataaacagaatagtgcattcactgaanactcaa

SEQ ID NO: 37138 - DNA, 487 bp, Oryza sativa
  unsure (1)..(487): unsure at all n locations
aagctgagcggcttgctggctctgcgctatgtcgattgaggctgtttctcttctgtttatggncgacgatgagtaggcctatgtccatccttcctccgttcattatatgttaatagcactagcagggacatggcttgttcatgagctcattaattagtggtggtgagtgtggatatggaagtagtgagtttcagcttgaggacatggagaagatctcatcaagtggctgatgtatcaatcatgtccaatgtgcaacaaatggtaagtccatccgattcaaagtaaaaatataagatgagacctagtccattatgcaattgtggtaaagaaatctagtccaaactgtaattaactcaagnttttttgtaaaacgtaatatctgctaacaattaaacacaatcttgttaatcttttactgtattatgatataagtagatcaactgtcantatgacaagaaaacaaatatgaatacaatgcttttgatta

SEQ ID NO: 37139 - DNA, 436 bp, Oryza sativa
  unsure (1)..(436): unsure at all n locations
agcttgtgtgtgaagatgatgtggactgcagcagtctttcctgtcaagntntgntctatcatgatccagtatctaccaaggtcgacttcctgttctgcaagaaggcaatggctgctcgaaagatacagtttgcctatataagatttgcccacagaatacgttcaagaatttcggctgcaattaagatccaaagccattggcgctgtttctctgtgcggatacgtttcaaaaggcaaattccaaatattactaccatccaagctgtagcgaggtgtngtttgtgccaccgggattntcagaagcaacgccatgctgcaatagtgattcagagaattttcagaggatggttagccagaaagaaactactangttagaatgtaaatctaacatgattcattcanaatatacanctggaaatggtcttggtgtgttcttg

SEQ ID NO: 37140 - DNA, 454 bp, Oryza sativa
taagcttctaatgcaattctctccgccttgagtccggaggagttcaacatggtttgttggactataggaggccaaagagatatgggatactttgcaattggctcatgatagatcaccagccgttcgtgagaccaagattgaattattggaaggaatgcttggaagaattgtgatggatgacaaggagacaccacaagagatgtatgataggatgatgattcttgtcaacaagattaaaggacttgggagtgaggacataacaaatcactctgtggtcaagagacttctccgtgcatttggtccaagaaatcccactcttgcatcaatgatacgggaaaggaaagacttcaagagactcaccccaagtgacattcttggaagaattgtgtctcatgagatgcaagaagaagaagctcgtgaagtgagacatatggtgaagattgtcgccatgatc

SEQ ID NO: 37141 - DNA, 475 bp, Oryza sativa
  unsure (1)..(475): unsure at all n locations
agcttgtgtggcagcggcgatggtggtggtagtggtgatgatgggaattcggaacaaagagagagtaagggaggggtttgaatgtttggttgtcttgtactccctctgtcccatagaaaacctaataggctagtacatatatctagattcattgtattagaatatgtcaaatctagttttagattttttttttgacgaagggagtagtacacaacataaagtaatcgggcggtctaaaatattaaaggaatttttgtcaaatgatgatagaaggtccctaatttgcatatcagcacatgtgaccgtggaatgatgatctgttgagaattctgacagtgtgatggctttctctcaggtttngcagtactggaagaggcagacttgcctgacggtttccgtgttgcatgggccccatatgtatgccccgagctcacaatagacatggacagcatgtataattagatagctgatctct

SEQ ID NO: 37142 - DNA, 355 bp, Oryza sativa
ttgcacgtcgttgtagtgtgtcactgcacgcttctcctcgattctctctcttccggctcggatgtccgatgcgtgcggcggcgagagagagcatgcagccactatgattaccaactgcatactgtggcgtataatcgagcgcgcgcgcgcgcggctcttcgatgtccaatgcaagccgcgacgcgagcgtgtgccgcatgacttgcaatcttgcactatctactgcccggctgcttggagtgctggatgcttcgtcgatgggccggatgccttctccgcggcgcgcgcatatgctctcataagtccaagaatgccgatcaatgacagcgcgccgtcggacggactggatgtcttc

SEQ ID NO: 37143 - DNA, 456 bp, Oryza sativa
  unsure (1)..(456): unsure at all n locations
agcttaacctggtatgtagaagctagcttatttatgtatcacggagggagcacaactttgaactgttatagctagtgttgaacttttagctagtgtgggactgtgggttgatggacacacaagcaaagcaagcatgcagcttggcagcctggcaagaggattgaattgattatgtgctgntgtagacaaacagaatagagaggtacagtagagtagatgctaatgagcgaggagtatgaggtcgagcatgtaggcctccagctggagggcctccttggccatctctcccatgcagaacccaatggaagccaatgctaatgctactccttgatcttgctgctgctgctgctgtgacaggaacgaccgcaccagcatctctggtgcatcctcgtcgtcacagcaacaggtgtcactgncgctgctgacccggatgccggcctccaggtcctcctcgtc

SEQ ID NO: 37144 - DNA, 408 bp, Oryza sativa
  unsure (1)..(408): unsure at all n locations
agcttgacccctcaatcgacataagcaacgggtatcattttcttttgactccataatattcctcttcccttgtatggcacataacagaagccacctatgtgaagcaggtaaccagcacatcccaattcccatgatgagacataatggtgtactggtggcatacatgtagcgccaaccagaaaccacttcgacaaagagactgcctgcaatgtagccaagctgcaaaagagaaacgtaagtaaatgactaagtagtctgagagagaaaggaagagagggggaaaagggcangtcatgtaatgtgaacttacaagcatcccaagaacaataaagaattccttgagagaaatgagcatgcctcttatctgacttggagcagtctctgcaatgtacattggagcagcatgca

SEQ ID NO: 37145 - DNA, 362 bp, Oryza sativa
gaagaagagaccccagaaagaactccgtattcgagacaacaattcgctgaaggagcctgcagcctcaattagatatggattcgattccatgaagcctgggggcgcccccagaaaagcctatcccatgaacacgagcgagaaaaaatgacttatctccgttagcacgtcattgcgccctcgtgcaaaatgaaagccacgagacaccaatgcgcatatcaggaaagtccgaacaaagagatgacagcgttgctgataacctcgaggaagcgaaacatgcatgaatgaaacacgagggccccagtcgaaatgaggaccctcacaggtcgaacacgagggaaaaaggccggctgaggcggacacag

SEQ ID NO: 37146 - DNA, 447 bp, Oryza sativa
  unsure (1)..(447): unsure at all n locations
agtcacctgcggcatgcaagctntggaggtgtattaaagtagactatctatatgtttgtgagatgctttggaaaagatagtaaaggaagcagtggtcctaagcgaaaagttgataaaggtctatttatatattcctttaaatcttttcttttgagcttgccaggtgttcttttttttctgctacatcacatttgcatttaccaatgttaacacatcatacatcaatagtgagtaatgaagtgatgaaggggcctcacgaagattcatgcttttgtatttaattactatctgcttatttttccatatatgattgtacttctgtgttagtttgggatttgttaaatgtgtctatcagatacaataagttactctctctcaatcctaaaatatatatacctttagactttnntaaattaaagaatatggtgaaattaaatgattgtcatg

SEQ ID NO: 37147 - DNA, 465 bp, Oryza sativa
  unsure (1)..(465): unsure at all n locations
tattactntatgtattaaaatctccttcatttcgtgtntaaatgtatgcaaagacgatccagattgttgaacttgtatcaatctactaatccatggcttgatacagtctaaatatgtcggtttcagaatcattagttttgggacccgacagaactggtatcagagtatatgttttcctatagtcttaaacccatatgttgtctaacccctttatgaataacttcccatttatataggataattaggttaaaaactaaaatgttgcctaataagtttgctaaggcctttattagaatgaactccccttcattattggttgtatttttggcttttatttgtgcatcatacctcctttcataagaataactattgtactataataatataacccnctccgaatactctagtccttggtatttccagaatggcagtaaataaaagcacttgggttatgtagcatgagtc

SEQ ID NO: 37148 - DNA, 461 bp, Oryza sativa
  unsure (1)..(461): unsure at all n locations
agcttntattatagatgcagtatcaccattaattttattttctctccgcttgcgaaggatctctttcctaatatccacaagcttttctttgtacccctacatgcaggacattttggttcacaaataatgcactacgatgatggatgaagcatttcaaaggacataaggctacctgcttaagctcgttcttcagctcatgccgtacacgctcaaccaatgatctttcaccctctgtcagcattaatggaccaaagcccatgccgtctgacccatcatttccatcaaacatgttggcttcactgtccacttggttatcttcatcatcagacatagtcgctccagtcccttcaccaggagatgccnctgcagaaccaatcatacaagcataactcagatgtccgaacatcatctacgccccttcagtaagatagatcagactttatgatacaaatgccagcaca

SEQ ID NO: 37149 - DNA, 453 bp, Oryza sativa
  unsure (1)..(453): unsure at all n locations
atcttttgccacctacatctgatgtgctaactgcaacgttgttttttctagcttatcatcacccaaattaattaacccttgattaaaagccaaagctattaattatattccaactccaagtaaattcaattcctccccatctatctaggcagctagcctttaataccatgcacaccttcaagatacccaagcaaggagatacccttgtcatccaatggaatggatgattccctnttggctccttttgttttgagataacagtacggcttataatatattctcctgtgctaattaaattaaggttcatgctgagctagtactactcactagtactgatgtgagaggagaatgttgggtgacatgtataaagtcttctctgtgttgaactggacacgtttccagttttaagaagctgcttagatggctaggaaataaacaagagatggacacatg

SEQ ID NO: 37150 - DNA, 470 bp, Oryza sativa
  unsure (1)..(470): unsure at all n locations
agcttctagtgctggggtctggagtggtttgtttcttgtatcattctcttgttgtagcctgaatatcagctacattaaactgaatgtggaagtaatccagactttngntctgtctgacaatgcattgcagttggaaatggtacaataagagtaaaaggtccatgacaatcactgtcaccactntatcacgatgctgtatgtctgtactttgactcatgtagaaggataaatgttatgttcctacccagataattgcaaatcttgtaaaggaaattgtgggcatcctatctgcattactgtgaagaatctgtatgtttcccgtcaaaaaaataaggggaatctgtatgttgagattgtaagggctcttctttttttatagaagggtattntttacccggcctctacatccaaccggatatatacggccatngaaatatggaacttatccccgcaataacccaatctgaaat

SEQ ID NO: 37151 - DNA, 491 bp, Oryza sativa
tcttcaattcttccatagcggcatagcatatcaatcatgctttctttatgcttaacatcaggaacaattctgtagtcctcaatcatgctattaaaatatttcctcccctcattcactatgccaccatggctgcatgcagtcaagacacccaaaaatgtgacaggatttggctcaatcttcatcgaatcaaagagctctagagcctcatatgatcagccatgtactgagaaaccaatgatcatcgcattccagcatgtaatatccctcatagacattctgtcaaagaccttcttggcgagatccaacctcccacattttgcatacatatcaatgagtgcattgccaaccaagccatcatatacaatgcccttgctctgaaggtttatgtggatgtctgtccccagctccatcttgccatcctttgcacaatccccaatgattaatacaagtgtaagctccgtatgttcaatggcattctccttcatttcttg

SEQ ID NO: 37152 - DNA, 378 bp, Oryza sativa
tctactctattccaattccaccagctagagaccactaaactaaacttgtgagaaatgagagagccattgcctgaggtgtgtgatgaattgaagagagcgaagaccttatataggcagccaatgacggttgcggcagttggaatggtcagaaatgccttccaacacgcattggggagtgatccacgccgtccagccagaacctggatccaacggcgccaggggaggttcggccgaaccacggccggcccatccaggcccataagcggcaggtggcctcctgaacttctccactccgcagacttgtgaatgttggcccaacacatcgggtcaaatctgaggactcggcctatacatacatcagactggttctcgacatca

SEQ ID NO: 37153 - DNA, 425 bp, Oryza sativa
  unsure (1)..(425): unsure at all n locations
tactaagcttatgtnnagtttaattaatctatggatgatgtcttaaatttatgatccttgngactgtaagtcaagaaaggtgttntatttggtcgctacataaaaatggctatttttcggtcaaatccatgtataatgcgatcatcaattccaatgtaagaatccacaagaggatcttatgggaggtaaaggtaccactaaaaatcaaagtatttatgtggtttcttcacaaaaaagtaatcttgacaaaagataatctcataaagagaaattggaggggaaacaagcaatgttgtttttgtaatacacaatataccatccaacatcttttctttgactgtcatgttacacgttntgcttggcaatgtgtcttctttgccttcaacatccncctccccacaatgcaaaagaatattttggtgact

SEQ ID NO: 37154 - DNA, 473 bp, Oryza sativa
  unsure (1)..(473): unsure at all n locations
agcttaatgcaattagactggttgagatagtgatatgatgcaagatctcctaacttatacctttcacgttcctaacaccagcattttgagtacaggtcataagttgtagatagtacagttcatggataaaaaagtgcattacttacaacattggcctaatagaacaactaaagataacaagagacaacagcacagagtattacaagttatatgcttgtcgttcaacattngaagcagctaacatcaataggaatactggttcctacagcagttgtaattatgaaaatgtggtatcttgacaaccaaaatgtggattcccactgatgtataatggaatcatttgtgacagcacatattacatatacaaacatagcaagtttacacctggtttaagtactccttaaaaggttgaaagactgtctcctactgattatatctaaaatatatacattgtgtggctgctatgttgccct

SEQ ID NO: 37155 - DNA, 474 bp, Oryza sativa
  unsure (1)..(474): unsure at all n locations
gcacttcactactatgtgatagcctactggattgttctttttatgtgtnaaagaagaccttccacgtttgtcttctttggcactctcacctgttaaattaaacatgaacagtagtggctaagcccagtttttcaatataaacatttagttggtcctactagttgtagctttcttcattgcattcgtacctgacatattcaaggagtcatcatcttgctgctctagttcgatctcatcatcttctagtgcttgtgactcatgcaatgggttatgttcactgatatcgccatctgcactcttgtatttggcactgatttttactacattcaaccatttagttcttgccatttcacctggaaattggtgcaatgtgtctggataatatgctacaaaatgaagttatagtaattagtgcttttcatgcatagcccatatatatgcacatataatggagaggataatgataagtgatcg

SEQ ID NO: 37156 - DNA, 486 bp, Oryza sativa
  unsure (1)..(486): unsure at all n locations
agcttccctatcaatctcggtatgtctttcagttttgtgtacccgaagtttaggtagggcaagtaaaacaattggcactttctgaatattgcaatttctcaggcagcagtctgaaccaagacgatgatatttcctctgaaaacacgaacatggaccgaagctgagatgaacattttgctgcttggactaaattgccataatccttttgtaagaagcacactgtgatccattggtaattccatccgagttaggacagtcccatatggtagcaattttttccttcttggatatggttagggctatttctctaacaagatcatgcatctgggcttctggaatctctttggccttccttccatattcattcatttccaaaacctgaagcaatgatcgactatgcaagtccttcaggtgacaatgctgctacatctgccattggtgtctcanggtctctgtcctgaaacagttcttcatctattcacaatc

SEQ ID NO: 37157 - DNA, 429 bp, Oryza sativa
  unsure (1)..(429): unsure at all n locations
gcttgagnaggccgacgagctggcgacatgacctgttattctgttcgtcggcgaggaactcaccggctgaacggcgttcaactccctctgctgcaacttcccgtagaagaccccgtccatgccggagcagcagccacccatccggagcagcataatgcgggacgcatgttgatgtgcccatagctgtatcgcgccgccttctctggatctgtagacaagctccaggaacttcttgtttcacccagtggaacggcagcaggtacattcatgtatcgagttgcatccncaattgcagagtgcaatctacgaatctgaaattaatcgtctacattaatttgactattttattgacagatgaacaaggaagaatgcatgacggtcagtgcgtgctgtacgagaccaccgcatggctgaacaccgttcttcact

SEQ ID NO: 37158 - DNA, 405 bp, Oryza sativa
  unsure (1)..(405): unsure at all n locations
gatatatactactacaaagcataagtaggggaaaggaataagttttccacgtgttttatatgaacacacaccaaattgtgaagaggaggtgcacatttacttaaatatggtatttacatgagataaaagggtttagatgggatttggatataacattcaccatcttatttaaaagggcgtcagttagtgtataaatacactaagtatgcgatagatgactatgaacacagttgttacatactccatccgtttcagattacaagtagctttaagttttttctcggtcaaaccttttcaaatntgaccaaatttataaaaactatagcaacattttcaatacaaaacaatcatattatcaaattatattaatggtagaatttaatgaaactaattggtgtttagata

SEQ ID NO: 37159 - DNA, 385 bp, Oryza sativa
aacaaaacaggacagcggtccaacgaatgtagtcctacagggttggtgcggttacacgttaattcatttcaaggagaaaccccacagctcccttcaagtcttcggagttgagttctttatgccgtgcatcagaagatgtgcacaatatcatacgcaaatctgttcattgttaatgacaaactcatacataaaaattggcatgcattatataatttatatggcatcttcaaatgtataaccacaatggtctacctcatattcatgctatggcctcacataataatgatgtacatactctcagttatgtggctgtagtatggttctatggcggtgagccattatactattaatcgaatcataccttgcctgacacctatactgaata

SEQ ID NO: 37160 - DNA, 465 bp, Oryza sativa
agcttctccggcttccgattctccctgacgccactccctttttcactcttcacgcccgctgtcatggcgtacagggcgcctactctccggccgcagctcgcggcgtctccggcgagccgagttccgctatctgattctcgtcggccgccagtatattccggaagtaacggcttctggagcggcagaggcagatcgggtcgcgcttcgaccaactcgagtatggttgaggacaaggtactccgacgacgaggtttggatggtgaccaaacttcagtccgcgctttctcgagcccaagagaaggggcgaattggatgggcagtagtcccgcttcctctagcagcagcagtagtagccatgcttcctcctcgagcgaaagttggattagagataagctgtccggtgtccgtccgtcatcgctcgccgggcgggcaccgaccaccggcaccaagaggcagtgcagcagt

SEQ ID NO: 37161 - DNA, 475 bp, Oryza sativa
tgattacctcaccgagtggaccgagtaccaagaagacttgcttgattataagatggaatattggactatgcattttgatgggtcaaagaggcttacgggtgctggagctggggttgtcctaatttccccgactggagaaagattgagctacgtattgtggatacatttttctgcgtcccataacatggcggaatacgatgcgctgctccatggattaaggattgccatctctttatgcattcgccggctaatcgtccgaggagattctcagttggttgttaatcaagtcatgaaagaatggtcctgtcaagatgataatatgaccgcttatcgacaagatgtacgcaagttggaagataaattcgatggacttgagctcacccatgtccttcgacacaataatgaggcagcagatagattggccaatgttggttataacgggaagcaatcccttctgatgtgttcgttgagcatc

SEQ ID NO: 37162 - DNA, 469 bp, Oryza sativa
  unsure (1)..(469): unsure at all n locations
gctaatanatcatacatataaataggtaatttctcatcttatttctatccatacagagaaagggtgacctaacatttatgaaagtcaaagctatcattcacacatttatggaagtgcaattacaatggaataaacactactaaatttgcagcggcattctgtgctgcaatcaagattcaaccctcagtcacctccgccctacttatggggcagctacaacctccggcgatcattctggtcgtcgagtatcgagccttcaacctgctctgcttctggcgccttttgaaccatcgtcacgatgtggtcttccgaggggaagcgccggcaattcaacaactcctacgctgatgcgtataggatgcaactctgagggcggatataatgaactatagagaacaccctgtagcgacacagnggaaacactgcttctcttctgctctctccctgatgtaatgctggatccctttta

SEQ ID NO: 37163 - DNA, 411 bp, Oryza sativa
  unsure (1)..(411): unsure at all n locations
aagctttcctctatctatcgtggataccatttgtgatctgttgtgtttgtgntgcgactgcgcgagtgggcggtggggcctcgtgggctctcgatgagtagtgatcgatcgatctttttttttttcaattttttttcttggagacacgggccgactgctgatctgatccagtgtgccgcccaacattgtgggtagctntttccagatcgtgcttctcccttttgtggctgtgaacctgcccaactttgggctgccaactttcttcgccctttgctcgaaaacattatctactggcatatatttgctcgatctatcatgcatcggcttggacttgagaaacccgggatcgatcaattgtggnggtactacaagctttcttcataagataatcaaactgaatttgatgccact

SEQ ID NO: 37164 - DNA, 485 bp, Oryza sativa
  unsure (1)..(485): unsure at all n locations
ctaagcttaaggctagtaatggctggtcggacaagagtgttaccgaaacttcttgagcttgtttaatgatcnngnngccagagggggaacatatntaccttcagacgacatatgatagcgaagcaatgtattattgtcacgttgtggccctggaggtcatgtagaattcattgcatgtccgaacgactgcatgttgtattacaaggaatacgctgacttggatgtctgccctatctgtgggggatcaagatacaaacgagcaaagagtgaaggtgaaggaagtaagtcatagaggggaggcccagcaaaggtggtgtggtatctcccaattgcggagcgcatgaagagaatgtttgcgaacaatgaacaagctaagcttgtgcgctggcatgccgaataacggatagtcgatactatgctgatgcacccagcatattcagtgcagtggaggacaatcgatatgatgtaccaggaattctcatatg

SEQ ID NO: 37165 - DNA, 475 bp, Oryza sativa
  unsure (1)..(475): unsure at all n locations
agcttcctcaggatgttgagaaaggtgtatatctttcttatctctattttgacagatacaatgattcataccttagacgaattagtaagttctcatcttcccctcaaagaagttctcatctggttgggtatttacagccttacaggttactgatatccttacataaaagattgtctggcctgactggccatatcctatgaagctgntatatttgacaactgatccatgcgtttaccataacatcgttgactcattgcttaatgattatttaacgcataacttgcaattgtaattctcaacttccaggtactaatgttctggcatatgtcaatatggtatgttcaagcttgagaaactccatccctaaatctattgtttattgccaagtccgggaggcatagcgcacattgctcgatcgcttctttacagaattgngagcaagagaggtgagttacttagcaatttgattggtaat

SEQ ID NO: 37166 - DNA, 377 bp, Oryza sativa
  unsure (1)..(377): unsure at all n locations
gacgaggaaatgaatggaaagatgaatggtgcatgagagacaagttattaccttgtgttggcatacagtcatgaaatcgattttgtttttacattcaattgaaacacctttgcataacttcgttaagcgttggtgtgttgttgctntgttttgacgtgccatgataacgccatacattctgtctcaatattagtatccaaattaggttataaccaacacaaggctacatggaggaaatttatntatgatatggatgagaataatccanatccttctatacaacaattggttttgacttcattggggctgtatgatttgccacttcaaacaatgacaattcaagaattgctaatatatgtctatgacatgtgggacta

SEQ ID NO: 37167 - DNA, 433 bp, Oryza sativa
  unsure (1)..(433): unsure at all n locations
tgcaagcttgaaatgacaattccagattacgacgagctcttgttcatagcatgacaacgctcaataggatgtcactcgattcagataattctgttgacaggtgtggagtattctttggttattctgcttatttaatgattttgatgtataacatatacgcatgcacagctggattttgtagttatgcactgacgacagagtgaataatgaagattgctggattctattaaaatttaaagctttaaagcatgtatccatgaacatactntaggtaggttaaattttgttcaaatcaagaaagtggaaaatcagtggaagacagatagctntctggtgttatcatgctctctcngttttgnttctataaaagaatcggtgattgatacagccttctaactatntaatgggcataacatgccatctgccaagttga

SEQ ID NO: 37168 - DNA, 230 bp, Oryza sativa
cattctttaactgcgaatcatcggtaccaggataaccagattttgatggatacaatgggctattctgaacccggttcggcagaatgtaaagcagtatacacacagtctagcatcaaacacaagacacagcatgtgatctatcttgcattagcacgctcgtctgctgctgatgtataattcatatgctttggtcgggatgccatgatgcacttcagtagcttcttcagatg

SEQ ID NO: 37169 - DNA, 436 bp, Oryza sativa
  unsure (1)..(436): unsure at all n locations
atgcttgatgagccagatcagcctgtccacagatttgatacaccagcattaggctaccatgcagaaccagatgagcctatccacagaacagaggcaccagcattaagccagcctgagacaccatcattacgccaccatgaggcaccagaagagcctcttcttcaacctctccttgctaccaacattgataccgtcttctctggtttcccccccagtttcactgatatgctgacacaattttcatgtaaaactgagaaaggttagcaactntctgtttggtgacattcattgcaattgcagtattttttgtttatttctacttgttcaattgtggcaacaatttttacacatattaaaccagatgctgaggaaccatatccagtaactgcaacggaccatgcaccacaagaagtatntgtgactatatttatgaata

SEQ ID NO: 37170 - DNA, 482 bp, Oryza sativa
  unsure (1)..(482): unsure at all n locations
tatctggagtgagatctatgagacagtgtgtgagccattgatgttctgcatctatgctccttatatcatgaagatgattaaggcaaagactgggatttgttatttcaaggacaaccaacacaagcctttccgtcctcatgctcccactacttcatctactccttctaccatggcaactcgtgcttctacctcagctgctccttcttcctctgctgcaccacagtgttctgagtcttcttctcccataaagaaagctctccgggctatcttttgtatgtgtgctaagaccgctaagaaggtgaagaagatagagaggcgtcagaaggaagattggattgcagtaggcaaggatgtctctgatattnttgatgatgaagagtttgttgatcactttgctgcttatgagactgctcgagacattgctagtggtgagggtccctctggcatttctcattccttcaatgaggagtcctcccactccg

SEQ ID NO: 37171 - DNA, 457 bp, Oryza sativa
  unsure (1)..(457): unsure at all n locations
agcttggatacatgctcatcatcaaactcccaccattgaccattgctttcgncctttacatgtgctacatagtgcccactattggcagcactacccttgtggatcaaaatagcagacaggccatacgtataactagatgaaggattggataaccgcttccccatatctagctgtcctgngaaactgaatgccgaagaaatctttttctttgttgttgtctgtggacgaaacgagttagacaaatttcttgctcaaatacacaatcaaacgaacaaacaaacagaaggaatataaagcaagctacacctttgggaggaatacatagcgtttcagctgaaaattaacaacaggaggaagtgagcgaagttttatgcaacgagtggcatctacccttttctgacatgactcacagaagtactggttctctccatccagtgcctcagtactcaaatagtca

SEQ ID NO: 37172 - DNA, 486 bp, Oryza sativa
  unsure (1)..(486): unsure at all n locations
ttattaattacctatgctctccctgtttgtttatatcacagagtatgttttaattttaatctaatcgtcattgtatttcatttctcaaatatttgtttttaaaaaattctagaccataaaagttgtactctctgtaactatatatctgtatgactgcaactcgatatacttaaaaaggagcaaggttgttaaaattactatcctaaattaattagaaatgaaatttttagttatgattgtaatcatataattgtatatcaaaaattgtgaaatcgtatagatgacaaatataaaatcttaaaatcagccaccttaattaagatcgtaatagaagtcgtaaagtaatcaagatttttgacaaccttacaagggattagagtangtggngatgggaggaagaaacaatcttttaggcttaaagcctactctctccatataaaaaaacttaatataggaagagatgtgatccctcctagtgcaataagg

SEQ ID NO: 37173 - DNA, 375 bp, Oryza sativa
  unsure (1)..(375): unsure at all n locations
agctggctcgggctggaggaggaagaaacatatattatatataggggtgggactntactcccgggtggtgttatgaaccagggctaaaagatcgccgggatctttagtcccggttaataaaaccaaccgggactaaagtcgttaataacagtgttattaaccaggactaaagatcccggaggggcctgacaggccctgacagcatgccctaacagcatttgaaccgggactatagatgaactttagcgaccgacgatatatgatatgcccgccaccgttctcaaccggtactaaagatcatctttagacgccgtaattgatggagacgagactattgtggaaatagatcgagcggaggaagatagtttctacacc

SEQ ID NO: 37174 - DNA, 503 bp, Oryza sativa
  unsure (1)..(503): unsure at all n locations
cactttaatctaagctgcgctattggtgacacccgaccgaccttgcatattctgtgtgtttgtcagtcggttcatggagaaacccacggacgaacacttggcggcagtgaagcgcatcataatgtatgttgctggtaccattcatcttgggtgccgctatgtgaaggaaggtgaatgaggactgcagggttacagtgacagtgatatggttggagacattgacactcgcaagagcaccacaggagtaattttctttctcggcaaatatcctgttagctgccagtctcaaaaacagagagttgtagcactctcctactgtgaatctgagtatattgcagctgcaacagctgcatgccatggcatttggcttgcccggctcctcggtgacctcatgaatgcagcaactgaagtcgtcgatctcanggtggacaaccaatccgctctggtcctgatgaataacactatttttcacgatcgatgtatcacattcaaacaaatttcat

SEQ ID NO: 37175 - DNA, 458 bp, Oryza sativa
  unsure (1)..(458): unsure at all n locations
agcttatactctgtccgttcgagatatgattttctgtggntggctctagtgtgctcctgggtgtgaaaaaaaaatatcaaaagacaaaaataaaaaaaaaaaaagttgtgtctctctcctcagcactagagagagcaagcaaaaaaaaaaaaaaaaaaaaaaaaggatccagcgagcacaccccaccattccccctttgtcaccaccttccaccaccggntcttgttttcattgctgtttgggtttgtgttttgtggcgacctttgtggttaggctcgcgtctctacttcaactagcctaggaccagcactgtacactatacccttgagcgattattcaatttcctttggctaacgcggtttctagttttctcttgagcattgctttcagcccaccaacagctccaccacaaacccgactacagcttgacaggtcttggtgctacagcaccgatacac

SEQ ID NO: 37176 - DNA, 221 bp, Oryza sativa
tcaagtatgtgccgtgagcgtgtacgatgcttcaacgcactgcattgcaccgattttacatgtgtaacaaacacttttctgtccgcgaatctcagggcattcatttcggacagatggatgcatgcgctctcctactcacttgagctgaaaactcggccttaactgaaattcggctaggcccgaatgttaagaaactgacggggacactggactatttgtct

SEQ ID NO: 37177 - DNA, 406 bp, Oryza sativa
  unsure (1)..(406): unsure at all n locations
agcttgacgtatttggccattgcgttctcagtcttcttgtccgcctcagggagcaggccagccttcttcatcagcagctcatgagcgaggtcaccttgcttggccggagaggaacgagcggctgccttcttggccaaccgagcactcttgcggcccgcctggctaagacgggtcgggatcttcttcaagagctttcccttggagacctggcgcgtgggagttntgagcagaggaggctgcaccgccgcgaatgcctgtgtcaggaaatctgcaagcttgtctggggagatcatcagaggcgactgggaaggctgagattgggcagcctgagagacctacaccagcacggcggactgggacgcctggtcagctaccagctcctccagcatatggtcagcctccatca

SEQ ID NO: 37178 - DNA, 431 bp, Oryza sativa
  unsure (1)..(431): unsure at all n locations
tagcaaaccgtatagctaatctctattatatatgttagctntaagataaactaatgaactctactattattcttgctcttaatattttctctattataaaataagtgcaccatatataagtgcatccgtatattttaaatttgaactacatttaagtcagagagagtattattactagccaattaccattgtgactacgtttaccgtggtatttattggtatgcatttattatccgtatatatattattaggataaataacacttaattgttaatgtatgagttaggatatgatagaaaattaaagttacttctctatggtactgcggcagtataaatagaggagtgaatttatactctcgacgggggcatgtcctctttattatatgtcattaaatagtataagataatttgaaagatgaataatatgtg

SEQ ID NO: 37179 - DNA, 379 bp, Oryza sativa
  unsure (1)..(379): unsure at all n locations
gcttcaatctgtatacaagcagacagctagacctgctcccaccctgtgtcaccacgcgcgggcggcacatgaggcgaaacctatccctgctgccacccctttccccccttcccccacctcaccgatggaaagcagggcggcgatccaacatggtggtggtggggcctaattgcggcgggagcaaacgtggcgccgagtatcattggcactacagggggacagccggcgcggtgcgaggatgctcaactggcggcggctgtccgcgagaggccacgtggaagcatgcggaggctggtcggnggtctcggtgcagcagtgtccacgcactgacggatgatagccgaatgtggagcaatggagcattatctgtggatcgact

SEQ ID NO: 37180 - DNA, 478 bp, Oryza sativa
  unsure (1)..(478): unsure at all n locations
attttataccagctagataaattgataacatttaactactgcttttattatcatgcatcaactaattggcatttgacgccatagaacagcctacgaacattatggctcttgctcataatagttggcgccgctcgtgatcgggtggtacacatcgataaagatcatgtgcttggcttatgaggcctgtatatggtcatgacagatttatggatatatttatggttatttcttatttaaaattgatataataatcaaccccttgtgtcaataagaatgacatagttttgcccatccacacgatcgatttgtcgaacctgtccgtatattgctccaattgattgaacttctgcatgcactttggtgtactggccattatctntcaagtgtgtgaagcaaagtgacatggttcatgtttatatgatttatatatgtgggctcgatgggccccaagagttcataactgccctatgggcccatg

SEQ ID NO: 37181 - DNA, 149 bp, Oryza sativa
cacaccgttataacagttattatctttaatctacatacgtgcagacttgataccctgacaagtttccactacatccgctaacaaaggctcatggatgtgcatcttcacaaccaagttatcaacttatgatctataccatgactactatc

SEQ ID NO: 37182 - DNA, 393 bp, Oryza sativa
  unsure (1)..(393): unsure at all n locations
gcttctttggcatatatccatggacaattcanggcatattgtccttgttctctacaatcatgacaaaaggggacatgctcttctggcattggaagctcattgacctgngtggcaaatgctcgatcaaacacataccgattntggtcttgacttccaaccaatggtagctgtgaactaagcagcatgcttggaatggaccaagggtgtgcccttgttaactctcttgaggctagtggcggattgagttgaaaacttgagttacgggaggcatacccgctgacattctttcctttntctctgttaaacatttgntacagggattgaggtgagagaggaaacaagccaggaaagaatagaccagaactagagacaggaccttanagggactaactc

SEQ ID NO: 37183 - DNA, 472 bp, Oryza sativa
  unsure (1)..(472): unsure at all n locations
actactanacaatgtattttggcgaaaanatatatatatattttttttaaganaataaaacaaattctaattagtatccaaacatccgatatgacatgaactaaaagttttactcccatccacccccccgtcccaagagcgactatcatatagagatcgtaatagtttattctgaatacttgttatctgatgaccgagtcccaacatgattcatgtgattcttctaatatgcaccaatcactacattgttctcagatcaataatcaaaggattcaccatcgcaaacatcctgtcgtcccatgttcagtcgttccctttggtgatgtgaccatggctaccacagatgcaaccattgctcacatcatggatgaacaagatgacatcaaggtcaatgcctccaagtgctggaatccgattctggcacctgatgcattgctgatttcaaacggccgccatatcntcatacaagctc

SEQ ID NO: 37184 - DNA, 454 bp, Oryza sativa
  unsure (1)..(454): unsure at all n locations
agcttgtgctggatgcagttggttgccacagacgtctgttcatctatttngccttcatcttctgcctcgccaaaacgatgcgtgctagtggcagatttagaatcaagtaaggccctgtttagttcccctaaaatttttctcaaaaacatcacatcgaatctttggacacatacatgaaacattagatgtagataaataaaaaaaactaattacacaattagggaggaaatcgcgagacgaatcttttgagtctaattagtccatgattagctataagtgctacagtaactcacatgtgctaatgacgggttaattatgctcaaaagattcgtctcgcgggttctaggcgagttatgaaattaagttttttcgttcgtgtccgaaaaccccttccgacatccggtcaaacgtccgatgaacacccaagaatgttcatttctcaactaacacactc

SEQ ID NO: 37185 - DNA, 499 bp, Oryza sativa
  unsure (1)..(499): unsure at all n locations
aagctaactagcggggtgatgataaattaagttctccttattcttttattatttaangctctaatttacatatgtattggtcataacatatctaaaataaacttagtttatgatcatttaaaacatggatccatgagtaaaagctcagcttaataattcgatcctgggatatctttcacaaccttatcaatgtgttcggcagaaaacatacaacacgttgttacaagaatagaaaactgcgttttattggtgctcagttcatagcgcagtataattatgagtggtttatgagtgctatttaccactcttagctgtaggaaatattcttaaatatatgattaatcataatatgctacgaaatcaaattgcatcgttaactatgcagtaagattattttggagtttttccatggttattgctcccctatatgtggacataacttaaacttaataatctntataaatatctacacatgttacaaataagtgtctaaatgact

SEQ ID NO: 37186 - DNA, 459 bp, Oryza sativa
  unsure (1)..(459): unsure at all n locations
agctntaagatgtcatcaagaagcaagggagagacattcttcttacctgactgcgngggagtgtactgctgagaaggtgaagaattcatgtatttaactccatgggaaggcaaaagctctgcaaaatgatttgatgtaggccagtccttcaatttaagcatttcaggccatagattttgatacatccgaccttcataatacccattgaagaagtcttgagtgcatatctcgacctgtattacacagacacagaatattancgttttttcttttctagnttatgataaatgaaaattacaataggtgcactgatgggggtcatatgttttcatgcatcatccttaaccactattaagatagagttaaacaaaacttgttgaaggcaatcccctaataaaatacatgctcccttcanaatgtgtttactggtataaatttcatattatcagatagacaact

SEQ ID NO: 37187 - DNA, 210 bp, Oryza sativa
cacatgaaatatactgctcattcatgcaagatcgggtgaaacccctatacttccttaatcggtgaccaatagcaggctagagactttgattctgatcactacttataagatcaaactcaactgatacagctataagtatgaatagaagaataatatctagacaatcaagctgttgaatgtttcataaggtggcggatatcctatataatc

SEQ ID NO: 37188 - DNA, 452 bp, Oryza sativa
  unsure (1)..(452): unsure at all n locations
atgctgtgacttgatcgaagttcgtggcttgtttatatgtccaaagacatcaattctaaggcccacttcgcaatccatccgtttgcttcgcggntatgaagtatatccccgtgtggaaacgatgtgaccaccgtgaccgagtgactttgaaagtagtgagataatttcctgacggtaattaagacaccatataataactnttgaacctgaggatatcttgtcttagagtcggccaaaacctcgctaacgaaataaatgggtcattgaactttttgaatatggccttcctcttcacgctcgacaaccagggccgtgctcacaacttgggaggtcgccgacacatataacagtagcggctcctgtggatgtggcgaggccaaaactggtggagtagtgagaagtttcttgaagtcttctaaggctntntgtgcttcgggtccccactggaaatt

SEQ ID NO: 37189 - DNA, 490 bp, Oryza sativa
  unsure (1)..(490): unsure at all n locations
tgcacaagaattattggtttatatactatgttcatttttaaaatattgtctacaattatatatacatagtgaggctcgatttatgggccccaacctcccactttgtcaatntaatctctttttgggttaagcaagaactttgtattgatgggtgcatggactggtggtggtgcatccgtcagctcgctctgaactctgaggtggtttgtttttttttctcaagcgcttgcaacactacatcatttccagaacgccttcaccataattcactgcatgcaatcaggcgcaagggttgtgttagtgatatgccctatgggcaatcatagagatgaatgtattacatactatgtttacatatttatccaactttgttccttgaaatagataactcattattagttaatgaatatgtgattctttcatgagaactacttatgttgttgttactatttctaanagatccatgatcatacatcatatatggaacaat

SEQ ID NO: 37190 - DNA, 487 bp, Oryza sativa
  unsure (1)..(487): unsure at all n locations
agctntaccggcagggtttttctggcctactgcattgtccgacgccgacaagattgtacgcacgtgcgaaggttgccagtttttcgccagacaaattcatctaccagctcaagagttgcagactatcccgctgtcttggccgtttgcggtttgggggctcgacatggttggcccatttaaaaaggcagtcggcggttacacgcatctctttgtggccattgacaaattctccaagtggattgaagctaaaccggttgtcacaatcacagccgataatgctcgagacttcttcatcaacattgtgcatagatttggagtgcccaatcggatcatcaccgataatggcacacaattcaccggtggaagttttaaagactntngtgaagaacttggaattaagatttgctatgcctcagtggcacaccccatgagcaatggacaggtggagcgagccaatggcatgatacttcaagggattaaagcgcgt

SEQ ID NO: 37191 - DNA, 477 bp, Oryza sativa
ggattctccataagactcgaggactattatttctattctatttctactccactagcactagagcactaactaaacttgagagagagctctttgatcttcttcttgagtgtgtggatgaagtgaggaggtgaggtccttttatagactcccattgacggttacagcggtttggaaatgtcggaaataccctgcaaccgtcattgtggaggcatctggagcatccattccaaatgggagagccaacggctgagatcatggttcggccgaaacctggacttgcccaattggcctatagtacggcatgtgcgtctcctaatgactcctcagtcaagtggtgcggtggtttggcccaattgaagttatcttaataggtttggaggcccatccacccataagtctgcctctgacggatttcgattaattattcggttatgttccgtcgattctccttcatttatgaatgcttctcctgcacat

SEQ ID NO: 37192 - DNA, 393 bp, Oryza sativa
  unsure (1)..(393): unsure at all n locations
agcttaatagattcgtctcgcagttcactttctgtatctgtaattnattntggtattaatctatatttaataatttaaatgtgtatccgtatacttaaaaaaaatttacaaacaaactaaacacccatgttccaaagtttgaagagaatttgaccatctggagagagatgggcagggtatatgcagtgattcagtgtaaattgaatgaaattcatcaaaagctgaggggcctgttcgcaaaagaagaaaggcagggagaggggccgacagcttatgttggcgtgtggcgcggcggtgggtgtggggcccatgcgcatggggggtgcatgtgggtcccacgccgtccaacgcgccgaaccgaagcgcacgggagcccgacacgtgggacccctg

SEQ ID NO: 37193 - DNA, 367 bp, Oryza sativa
  unsure (1)..(367): unsure at all n locations
tgtccatctgaccctncctaatcaagccattgatgactgtgttgttctccaccacatcgagtgggcagcgccctttatgatcagccatgatatggagcaagtcgagagcttgttgacttgtcttgtcatcacagagacccttgagaagaatggtgtaggagaagagatctggcttgcaacctatctcgggcattcgtcgcagcacaatgtccatcgcatctctcgtcctcctgcggtcacagatgcccttgataagaggactgaagaggattgtgctcatcctcaaccccgtcgtgatgacacggtcgactgtggcgatagcgatgtccaatcggtcgatgcggcggcagcatccaatgacgatgcc

SEQ ID NO: 37194 - DNA, 355 bp, Oryza sativa
  unsure (1)..(355): unsure at all n locations
agctnggacagtcacagaatgaagaaaatgtgtgtatgatctttttgcacangaaattagcagggcacatgagataggcaatatgacgatgcatgtacacgcgagagcatatgcgactgtgccccgctatggcgaaaaaccgacatttcacttaagaatgttatgtgcgtccataaccccatctattgacgggaggaccactagacagaccggatgaaggtatacttgtatgtctcgactacgctgttgcagatcaaaatatgctgtcaccgttaaagcgctgtatggccgacacatgttgtacatgaacggacatccgctcagatgacaaaaagagtggccgtgagagcgtcat

SEQ ID NO: 37195 - DNA, 314 bp, Oryza sativa
ggaacgcgtaagaccatattcaccgtctatatgttttttgtgcctcacaaagaacacgcgtgagaagatgaataattgcgtgctatgaataacacaagaactcattacagctttcgaagaacctgaaaatgaccactatagcaaattgtctcacatttgatgatctacacatactgctcgccatgacatgttctatgctgatcgatattcataagaaaatgacataatgccactgctgatcaattcgaacacggtgcttgcatactcagtcatacacttacaacatgatatactattgtcgattagaacgatca

SEQ ID NO: 37196 - DNA, 468 bp, Oryza sativa
gagcttgatgatacatgcatcataaatatctagctcgatctttgccacttcatccactgtgagtgttgtcatgtgaaaggagagttcttcgacccagagggtgccctagctacaagtaacgaatacaagcatcttctggagtggagcaatgctatgccaaaatataattagatagcgtatttcaagtgagaatgtaaaaaaaaaatattgtaatattttgtcaacacttttcacttatgcaatatatgtagatttctaagtatcaaaagcttgttatttactaatattattcctgcatcaatttcaattaaataattgaaaactaatttataggcaaattattattgtatcaaattttaaaaattttaacctaccttcgcaggcgagtaatttgttatttttgcaggcggccgttatctaattttgcagacgggtctagctacactccgtttgggaaaatatcttcca

SEQ ID NO: 37197 - DNA, 499 bp, Oryza sativa
  unsure (1)..(499): unsure at all n locations
tctaagctttaacatgattttcatcagaatttagttcctcattctgtttgtattcatacacaaatntgttgacgcaaaattcattgtagaggcctgagagatttgcttacatctagtacatgtcctatcaattatggtttaggtatgtcagttagtttgatctaacaagatatagataaagattagatcgtttggcagattggccaatatgccgatatataatcatgtgcctagctgatgttgatggaatttcggatcgatcggctataacagatggatataagttatgaaaaataaagcaaagaatacatcagcgaagatttggatgtgatataattttgaaaaataaagcaaagaatacatcagcaaagaatcttctaactgtattaaaaccaatgttaatagatcggaccatatagagatattataagtacaagattgantattataagatatcaattaaacaattatatgatctttgaatatgggccgatgcacc

SEQ ID NO: 37198 - DNA, 466 bp, Oryza sativa
  unsure (1)..(466): unsure at all n locations
agcttcatacattctagcactatatcatttaactcaaagaacctaatgaagttcaaatcttccacatttccttgatagttaataaattccaccatcttgaggtgtagatcaaggcactcaagtgaaacattttgttgtacattattgaagtacgcataatagcgcacctgccaaggaaaaaaattaagagttgatagaaacatgatatgcctatcgatccaagaagatggccaatgccaagacgcgcacaatagaacaaaatgggtgtttactcacttattttaataaagagaaaattcctaccttgacgtatagcttctccacacatggaaagcattttataaagtcaataacaacattcggataanaatnggtgttaatggccaatatctttacagtgcgcaccacattggagagactaacanngcaccagttctgaaatagacatggcanatgaaatgtatga

SEQ ID NO: 37199 - DNA, 423 bp, Oryza sativa
ttggaacatcatggatgttaagtatattctcaacctgttagagataatatagaatgtaagtaggaaaacatgagaataaaatggctcttttcaaacttataagcaaaaacataccggttcatgacaaaattgtgaaagtttctccttgacagatcctattagtggctgaatgttcagatcgcaaaaaattatgtcaatccattacagacaagaaaaaatatagactaagcaccaaaaagatatggacagtcatgtccagagtaagacaggaaaagacatattatagtgactgccagagaagtattccatatgataataaaatagggaacatcaacatcatatgctagaatcaatggagatatcatatcttaagagtgttctgttattctatgtttgttgcattacctgtgcggatcggcatgc

SEQ ID NO: 37200 - DNA, 480 bp, Oryza sativa
  unsure (1)..(480): unsure at all n locations
agcttcgacagagggtggntcattatcatatgcctttctcatttaaggacaagcaagacgggaagaaagctccatcacgtgttacatcgtttaagggcagctttgatgagttcaatccatttaaggtgatctcttctatgctaaaattggcagattttgttgaatcattctactatattaggaggggcaacacctgttcagacttctagagattacactatcctgctcgatcgtcccattttcacttctcatttgcacatcccatgaaagtctgctttagactcgtgcaaatctgtctgattgattttttgaatgaaaaaaaaaatatctgattgatattatgatttagttgctagatcacctgtttgaggagtgtaagcaccgtggagaggttctggttgctgaaggagtgataacaccataagacattgaagaaacaaagtcaggatatatcnggattggagtacttaatgttggttt

SEQ ID NO: 37201 - DNA, 452 bp, Oryza sativa
ctaagcttactgaccatatcatacaccaatttaaagtgtttatgttgaggaaacgagcgcataatgtgtactgtacaagaatgatcgatttcctttagatatggcactgcttcggcgaatcaaaacttatacaattgcatacaaagaatgaagaacagaagataaaaagcatgaacaacctatcagtacagtacggttccgaacaccatcacagagaagtgaataacaggttacagacaaaaaatgcacaatatctcggtaagggagaaggaagccaaatcaagattcaagagatggaagtttctttgataggtaaagaatcagaagatttacaagtaattcaatggagcgacacatgcagaaatcattgaacgaataaatagcatcgagtaaacaaagccacaatatgacagatagttctttcgaggcatataacagagagacgtgttgag

SEQ ID NO: 37202 - DNA, 478 bp, Oryza sativa
  unsure (1)..(478): unsure at all n locations
gcttgacatctgccaatttaaacaattcttttcttttgcacttgtaaagatcctatccctgtcagagataataacttggggcattccaaacacatcatatacatgctgaataaaagcctgagccactgagtaagctgtgaaaggatgtgtcaaaggaatgaatttnggcaaatttgtgaacttatcaacaacaaccaatatggtgtcatatcccccagattntggtagcccttccacaaaatccattgtcacagtgtgccaagcttgcaggggtactggcaatggttgcaacaggccaagagttctacaatgctccaccttatcctgctgacaaacttcacattgagagacatactaatggactgatttctttagtcctggccaaacaaacatattctntatcctctggtaggttgctgtaattctagaatgccctcctatgccactgctgtgcatggctagtaagacaacttgatgt

SEQ ID NO: 37203 - DNA, 416 bp, Oryza sativa
  unsure (1)..(416): unsure at all n locations
atgatagccgatcggtttattgcgatgacataccatttatcttttagccgatgtcatatattgatcgatcggcaatcgtgaataagtaataaagaactaaatctactcgatcggctgtagttgttaacaatatacaatccttatatcgatataaatgtaaatcaagtgattgggatagatcggtcgccatgccgagacagtataaatcacttagatcgaaatatatattaataaccggattatatnatgttataacatatccgatcagatagatctagcatgtatcggctaatactccgataccactttatattaagatattaaagcaagtaatatacgtcaaacataatgcctacatatcttattacaacaagatcttgatgtatatggcggatttaacatgttaatcaatcatg

SEQ ID NO: 37204 - DNA, 357 bp, Oryza sativa
  unsure (1)..(357): unsure at all n locations
cgcgttctttctcttctccgacgaggagggcaacaccagcagtgcatacgatggtggtgacgaagccgtcgactcgggcgcgtctgaatgagcccccgggcccccgccaatctttacttttttctttttctttcttctaaggccttcatgcctcttttgtgtacaaattaacttaatctgcaatcagaaatgatgaaaaaatttttgtgttagttttattttgctatacatacgagatgaggatgatctgtgccgtggtccttttgcgtcttatcttgaaataagggctcgtgcccaagtcccagtcctcgaatggctcgggtcggggctagtgcctgnggagatccacatgtcgag

SEQ ID NO: 37205 - DNA, 438 bp, Oryza sativa
  unsure (1)..(438): unsure at all n locations
ctttactacgccttctcanagtctagtttcagaatgattatntcccttcatgactgctgtcattgatgaatatactcaaaagcctgtgccatacattcctggatagtcctccctttgatgaattcatattggttttcaccaaccacttcgagaatcacaccttgtaatctatcagccatcaacttggtaagaaacttaatactaatacccattagagaaattggcctgaaaacattaactgtctctggagaaagttctttggcaccagagtgatgtaagaattattgagaacctgcaagtctgtagcttctgcatgaaaatgagcaatgatgtgccagcaatttgtcatgattaaaccattgaaaccatctgggcctggtaccttatcagctgggattaaaattatgagactatcaatctcttgagtggaaacatatc

SEQ ID NO: 37206 - DNA, 491 bp, Oryza sativa
  unsure (1)..(491): unsure at all n locations
agcttaacagtntgagatctatntgcatcagctttatgcttgtgttatgtctcctanaatacatttcaagatactttacaaccatacaataagaattaatacaaagtaccaaagaattatcctttctcactatgagtcatgctaaatattgatatttctgctaatgcacaagtttttaagagaaaggaaatataaatttgacttaaaaaagtaacaaaagagactattaattcctgatgaaatggaacaaccacattaggataaaatgcatattatctccgttataattactagtaactgattttggttgctaagcattgcagcaaaactttgatttcttttttcagatccatgtcataagatcttccacagtgcaaatatatcaaatacaactaaatatatgtcaaattacactgattgcatantttgtgaagctagcaattatggaatctgacttaccggcatccatatgcagcctatgagaacaacag

SEQ ID NO: 37207 - DNA, 410 bp, Oryza sativa
  unsure (1)..(410): unsure at all n locations
gcttccgcactcctaaccttttcctctgttgtttctctctaccctgccctccatcactcccgcaccgatacacccgccgtcgacgttcttttcaannntaaggtggcagctcgccgccgctggagccaccgccgagccaatctgctgccgccattagcttcgccgccgccaaagctaccccggccgccgcatccccatacaatcccgccgtcggggcccgcttctccccgcgcgccggtgagtaccaccattgccgccgccttcggccatggtttccgcccgccgtagaccacccctctccctctaatccttcccattgtgttccctaagaggtcccggagatcgttcgcccgtcgccgtcgtcctcccgtcgctcgtcgtcgtacgtcgccgtcgtctccactcgcgcc

SEQ ID NO: 37208 - DNA, 458 bp, Oryza sativa
  unsure (1)..(458): unsure at all n locations
atttgcttgagtgcagaatatgtgcattngttgtttataatgggactaaataattagtgcggaaaatttttacataaattttgaaaataaaacaaatgtaataaataaaaatttttatttaaaatttaatagaacaatagattttgtttatcgggagcattcataaaaaaaatatggtgagcattcgcagtcctatctttgtatgtatgctcctcatttttatgacttttaaaaataaaataaatacgtattttttatttcattatctaaaaatattttgtcataaataatgtgtcacacatcatactcataactataatagtctcatgcgacataactttacatttccaataatgtaattcgtaaattgttatgttcatccaaagggtaaaatggttatggttatagaaattagacagtcaactgattggaggggcatggaagggatcaaatcaaat

SEQ ID NO: 37209 - DNA, 385 bp, Oryza sativa
  unsure (1)..(385): unsure at all n locations
atcttaagtgactgagctgcagctgtnttggactgcgctatttgccatgtttgtttctttctgctcttaaagaacggtattacttaatggcaagtatttgaagaaatattacccaagcgtttgggctaatgcatgatcggctgatgttgccgatacatgatagccgatgaatgttcatcgcctatagatggccgatattgtgatatcgcccttagtttttttttccaattgtaatcggttatggtttaccgatgtgcaatggccggtattactatatcgncctaagttgcttgtattaatgtattaatgctgttgacattataaaattagggggggcacatatattcaaatatcgcatgatgatagtgaataattttgagcaaat

SEQ ID NO: 37210 - DNA, 375 bp, Oryza sativa
atctgcatactgaataactggaaaatcactttcatcatcatgcctaatatggttagttataacccccaatctgcaggcctcattcaaaatagcctgaagaagctcagctcctaaaacataaattaaaggagacaatggatcaccttgccttactcccagtttacacttgaatccattgctaggtactccattgagtaacacaactgaactggcagaactaaagatcatttcaacccaatttaaccatttatcgggaaagcccatatgtctcataatatcaaggattgcaccatgctcaatggaattaaaggctttttcaaaatcaatttttatgataaccatctttcttttagattggtgacactgatgaatata

SEQ ID NO: 37211 - DNA, 263 bp, Oryza sativa
agaaaaaaaaaaaagatgacgaaccaataaacacggagccaaaaaacccatttagaaaaaacagcggggaaggaaaaccacccaaaactacggacaggaaaaaaacaacaaacacaaaccaaacacaaaagggaaaacgcgagaaggaaagacaaacagaaacaaagcgcaaaaacacacaaagacaccaaaaggccgagccacacaggcggcccgacacaaaaaaaaggaagaggccccgcaacgcgcacaaaacaagaaag

SEQ ID NO: 37212 - DNA, 470 bp, Oryza sativa
  unsure (1)..(470): unsure at all n locations
agctggtattctcgtgctgccaatcacctgtttctatttccgaatgcagtgctaacacattgtgactagcatgtgtgtatgcccagagtaaaactgtactcggtttacctgtgcatactactacagntggtatgtggtgaaaatgtaggtggcaaagcaaaattgagaagaataaacagtattgtactgttgttccctctcctagactcctacgctaaccatttctgaagttgttatcaagctgtcgttntgttctgtcattcttatagatatactaacgttgactatttgttttatttgaaaaaatagtgtaaatataaaaaagataaatcacacttaaagtacttttgaagtgtactntttgtgataaagaaagtcacgaacaaaataaataataattttaattnttttaataagacgaatgatcaaatattataatataaaaattaaagtgacaagtaatatgttat

SEQ ID NO: 37213 - DNA, 421 bp, Oryza sativa
  unsure (1)..(421): unsure at all n locations
tactcagctttaagaaaattccatgactcatggatcagagcctcctgctgtgggctggcgacnggcgacggctagaccctagcctcgccggagcttgtcgaggcgtgcatagaggtgctgatggagctgcgctggcagatctgcgcgtgtactctgcgcatgatcgtgtggagctccaagtgatgaacgaaacgctggtgctggagctcccggcgaggacgcagcggcgtcaactgcggcatgcatatccaacggctgccgcgcgcggagggagctgctggttgtgatgacagcactgctggtgctggtgtgaggatttggtgagctgctattgctgttctgttgctgatgcagaaaagatcgagctgaggatttggtagtgtgctgttgctgctgataggaaaaggggaacacaaatttg

SEQ ID NO: 37214 - DNA, 504 bp, Oryza sativa
  unsure (1)..(504): unsure at all n locations
gaccggatccttaatcacctgcagctcaagctgaccaaaataacaagatttgtggctcttttatcatcttctttntcgcatgccatcaatataattttcaggttgcatatcaagtctcaataattcagcacttgaaatatcattagggtagaactcagcaagtcgacncnccttgtgtgaataaaaaaaatgagtcaacccttagcaggattcaggaataccatacaatatacaaatgaaattaacaattatacatttatacataccttctgtgtaccaaaagatgcaaatgagttagttggattcaaggctgccatacaggaaagcaacttcatattaacctcgtcaaagtgattgtcaaattcttggctaatttgatcaatgatcccaatatatacttctcttctataagtggtcatcattcgttgatttcgtgcaaacctttgagatcttccataaggggcatttncnccatccatttcatgaaattcaagaccatatcta

SEQ ID NO: 37215 - DNA, 466 bp, Oryza sativa
  unsure (1)..(466): unsure at all n locations
ctgtctgaatgcataatcaagtcaaatatcgttctgtttgaagctcgtaagatngatctcatggcacaacttcaagaatgcaacgccgagctggatatggagcacataaagctagccgatctcccgcaagctgttgaagaacaaaaggcaaagctaaaatcggctatcaagaatgtcgctgatatgaccaagtccttgaaagttatccctggaactgacgctcatgatgcccaagccatagaagaagtggaacagattatgcagaatgctatatcggctatccagcaatacttgtctcaataacttgtatgtaatagaacttacaatatttgtaatcggctaagacgttataatactttactgtcttgacaatctgcatggcattntgatatgtgactcaaaaaattgtaagctgcattgcattttgatatgtatgtgcccacctaattttacaatgtcaaaagca

SEQ ID NO: 37216 - DNA, 471 bp, Oryza sativa
agcttgacgctacccctacctggcgcgcctactgtctgttctagatttcggcaataaaaaaggaggtggctatcaagcttggaaagtgtatgggtttggagacaaaggatttatacaggttcaggccttcttataaaagaagtaataccctactcctgtccggggatgaatccgccgagtgtgttattgattgtatgatttagagaaaatcaacctccgcccctagaggcgcccggaccccccttatatatgggaaggagtccaggttacaaaagataatcaatatccctaacggaatacacagatatagattaaatacagccgtgaccgactaagtctcaaggtgtttccttgttgtacaagttaagatacaaacccgagatacaaataagatattctatacatattcggtatcctatatccagcccaaatagtatcgccgtgtagatatgggatatccataaatctcac

SEQ ID NO: 37217 - DNA, 462 bp, Oryza sativa
  unsure (1)..(462): unsure at all n locations
gcttgtcgatatatgcataatatatatgtacagcgtgatctgtgtctcttcatccaccatgggtgctgncatatgaaaggggatttcttcgacccagaaggtgccctatccacaagtgacgaattcaaggatcttcatgagtggaacagtgctatgccataatgtattaactagatggcgtatttgaagtgacaatgtaaaaaaatattgtaatatatatattgtggcaacacttttgagtaatgtaatatatgtaaatttatcagtaaaatgcttgataatcttccaatatatgtacataataatctacctgcaagaatttctattatataatgtaaaagtaatttacgggcaaattattattaaatttcaatattttctacctatcttcacaggcggaagttnnttttttttgcatgcggacgattcctattttcgcatgcggaccggactatccaacgt

SEQ ID NO: 37218 - DNA, 483 bp, Oryza sativa
  unsure (1)..(483): unsure at all n locations
gagcttgtcaaaatttgagtctgggatctgtgtttttccttctctntggntagnngagaaacaactgaacatatagtcgagaactgtagcttcttgtcatcgagtagccatcagttgagtgaagatacgtttgaagatgtccgagtagaaatattgaagattggaacaccacttgttgtagtagaataacacgacatcgaatatggaagggcatgccgagatgtcgaagctcttgtagacgtcgtggttggtgaagtagcaaaacttgcgaagtagcagcaattatgtttgccggtgccgaagataatatagataaagtcgctccaccacggtgacaaagttgcatagctgtgatgaagtgaacatgagtcggcagcaacagaagcataccggtggttaagacgcgcagttgtgaagataatagcaccagtcggcggcggcataaccagtcggcgactgaagacgatgatgtccatcagtagt

SEQ ID NO: 37219 - DNA, 398 bp, Oryza sativa
acttggcttacgtttttattctaaaaacaaatttttttattacagataataccagtttggccatgaggtgcgatgggctcacaacaatcatgtacatacacaaaatggcattaactcgtattatatattgacatgctatcaattacatacaaagttacagatattatatatataggatatatagtctctttttaagaatactaatcgaactattatgcacagatgaagggaactctaattgttaataatattttatttcacaataagcatttaagttataacagtgcatacttcaatacttatggttcccgcaaaaagaaattagtatggttaaaatacataaacatctgaagtttattattatttccttattaaagttagacgcagaaagtgatatg

SEQ ID NO: 37220 - DNA, 455 bp, Oryza sativa
agctggcgctcccgagccgtcttctgtgctgacttcatcgctgccgtcatcgctgacgtcatcgttgccgttccccgtgagccggtcgtggaccgttcgatctcggccgtgcgttttggataggatcgatctcggccgtccgtttccgtgaaccgtcgcccgtgcgcccggtccaccgtgaacccgagcccgctgacgcaataatcctcttttccttttcaaaaataattcattattgcgtcataatttaattaatatctatataagtggtttaatctgatttaatctttaaaaattcataactaattcatcttaactcagtttaatgcggctcaagttgcaaaagttgtatagaataaagatctacatattaaaattttccatagattgaagtaaatttatctaactctctgtagatgggctttagatagatttaatcttgaaaactcataata

SEQ ID NO: 37221 - DNA, 258 bp, Oryza sativa
gacatcgcacgtgcggccggatccatcgagggcgtgaccttccagcgtgcagctctggtgaccgccatgacctctgtcatccgcaccacagatcctctctcgcggaggcgacaacgaagtagatcgaggagcggctacgcatcatccccgtcctctcggcgacgcaatgtgtgcgagagcacatggccgataccatgacaatgacgtctctagcggcgaccttcccaacttgcatatgctcaaatgacacgctgccat

SEQ ID NO: 37222 - DNA, 397 bp, Oryza sativa
  unsure (1)..(397): unsure at all n locations
agcttancaatagctcaatatctattcttatctcttattaaanagagatggaaaaatggaaagatattaatacgtagaaaattattgtggtacactaattacagcttttgtcttcttaaccattataaaaagataatntctaaataaactaagagcctacataccgagctatatctntaaatatgcccttagagcatctncaacagcctctctattttactctccaagctaaattgtatctattccagcttaaaaaagtcatccaacagcctctccaaccggatggccaagccccatccggctggccaaaaccctccctccactagccaaatttggctagccaatagtcgctagccaactatgggccccacacacattcctccttccatctactctt

SEQ ID NO: 37223 - DNA, 450 bp, Oryza sativa
tatgtgattgtaactaattaatactgattgtacattatctctgtccaactggatcactgtctaccttctctttatttatgccaaatgaaacattgccacatcatacgcatagataggaaaaaataaaactggaggcttattaaacttactttgagtactccaatttaatagcacgctcattggcaacgatctactcaatatgaaattaagatggaatgtatgagaagtcaattcttataaatcggcaatacttcttctgacagcagcagaacacacctcttggaataagaccctgtgttaaatcttctcaacaacggatatttttctgcaacatattagtgcaagataatgattaatgtaatgaaatgtataacctgtaaacaacaaataatgcagcgtacaaaatgaactttcaatacattatgtccatcatggatcaatggtagatat

SEQ ID NO: 37224 - DNA, 430 bp, Oryza sativa
  unsure (1)..(430): unsure at all n locations
agctttgttccaacgagaattattggcacaccatgtgctttattccttaattcaggtatccactgacaacagaaatatatatgtgtcagtgcaagataacaggttgactaagctaaggtacttcatggagagagagcaaagaaagtgggcggcaagattttattgcctttttagaaacattctcatagcttgctttgctgatcagagaaaaggccagcaagaaaacatcagcgccacgatagctcaacgggcgtagcctattgtagtcctcttgtcctgttaaattngtcaaattnttatttattttgatgaccgtgaaaggtggatgtatataaggaggtttacgcatgcatccattaaaaggaggggaaagtagaacctgctgtatcccacaaccncaagttcacagtgctcccatcgaccacaacat

SEQ ID NO: 37225 - DNA, 423 bp, Oryza sativa
  unsure (1)..(423): unsure at all n locations
atttaagnttctttgacctggactgtttgaaatgaagtaattttgctgggaagaaaagaaagtaaatgttttcagccctccaaaattcctgtcccagttgggccttaaaaatatctttggcttctaatgttatcattgaactggttcccatgcttgatgactatctgtctacataaatccacaggaagacatagttcanagctggtactgngatcctgngcgaccttatgatctgatgcgcgagatggatcctgttcccttggatgtgactcttcaatccattttatagagcgcagataatagcagatgggcccgttacctcagcgagattgtcanatatgcagctgaactttgccaagctctgtgcangatgcnnaggcaggactctggnggtttcctgaaatctttctgtgtattatgact

SEQ ID NO: 37226 - DNA, 405 bp, Oryza sativa
  unsure (1)..(405): unsure at all n locations
gcaatngatataggaatctagttaccatatataatacccactacttcattaaaaacatggcgaaagggccataactcaagtaattccacatgtgccttgccggatcttgatatttggtggagtttgattgagttattagtcttggcgtaaacaagattacatctgcttaattgatctcaactctgacctacttattaagccattgttattctacttgtagttcttcctaccttatttcttaccattcttatattttggtttctctggttacagcatagggaatgcagagcgtcagttttatctacttgaaatctgtagcattctctgttgattgtaactcctttgaaatattgaacgactctaattggagaccgtctatgaacctctttagcatctatatctatg

SEQ ID NO: 37227 - DNA, 57 bp, Oryza sativa
acaaaaaaaaaaaaaaaagagacgagatctgaccggaaacaaattaaaaaagacagg

SEQ ID NO: 37228 - DNA, 456 bp, Oryza sativa
  unsure (1)..(456): unsure at all n locations
gcaatgcccatgtccgctaacttttttcttctgttctctctgcaacagcagatgcctcatatcttgtactaaacttttcaacctttcggcttcagccatcaacaggttcccagtctcatcacgaatgtagaacacaccccatttctcgtaggtgaatcaaaagttccggggagacaggggagattgattctcgttttccacgtgcacgctnttcatactactaaacggtgtattttttgcataaaatttctatatgaaagctgctttataaaatcatattaatctatttttgaacattaaaataggtaatactcaattaatcatgagctaatggctcacctcgatttacgtatctccccaatctcctcaatccccttctcctcaaacacacccttaatatttacgttcagaatatatatatatatatatatatatatatagttatacatatatata

SEQ ID NO: 37229 - DNA, 463 bp, Oryza sativa
  unsure (1)..(463): unsure at all n locations
aacttgcatcaaattgaattttggactgatgaagattttttgatgttctctgggttaatatcacagtgtgtgatacagtcttgacaattttcatgttagaaggccaatcctctatcaatttcgatggctatttcatacctaatattccaggtgagtgtagtattagtctgaaatagttggtgatcaagagaacgatttggcatgtgttcataaacaagcaacctcctgccaccctcacaacagataccaattagtttaactaaattgatgtgtaggatgattccaattgagctcacttcggccctaaattgcttctctacttggcatgcatggtcaagacctttcactgctacaattgtgtaatcacttataaaccacttgaatacttgaccatagctacctcccncaagcttctctgtgaaatatgtatgtgacgttgtaatcaatgtatcaaatggatgat

SEQ ID NO: 37230 - DNA, 459 bp, Oryza sativa
  unsure (1)..(459): unsure at all n locations
tgcaagcttgcacaatttatccanaggatttcacaatattatattcttaggattngcacaatttatttcatttgtcatgtaattcattcaaaccatttataatttagatatctttacttttgtgctactgtttgtacctttaaacatgtcattgccactatgttgttatgctattatttattctttaaattttgccagtctaattttttgagttctgtaagattttttttcaactttgaataccctttgctgaaatcctggctccgccactgcttggctgtagcaccacggnggaggtgactttgcgacagcagtcatggctcgggaaggcaacaacaatggtgaggagagtggatccgccgctgccaggcggatggagcccggatccactaccgtggggcctttgtcgtcgtcgtcgtcgtcatcgcggccatcnttctctctccctcgtgcatcggt

SEQ ID NO: 37231 - DNA, 432 bp, Oryza sativa
  unsure (1)..(432): unsure at all n locations
taagctanagatggaactgctaatggaatgcaagtttcatgagtctgattcgttcttatcaaagatatgatttgttgtgcacttggctaagcagttgttatgatgtctggcctcattacctgctgtcagttaatggtcctgtatctggggtgcatttctatggctattattattgtataaacatgctaagcatactccatccttttacatctgaatagatcttgcataaatattgaggctagaggtcatgtagaagtcaaacattgtttgagaacggtgaaacaaaatgtggttagtctacgtctatgtttgtggctattttcccctacctatttgtgttttttttgtggggaactacttgtgaattcaatgcttgtgttgttaagtcatttcactaggaacttccatataacataaattctaatgatccac

SEQ ID NO: 37232 - DNA, 480 bp, Oryza sativa
gcaagcttgacgtgcaaggagctaggtgaatagatccatgctttttcatgtaaagtttttttttctaacgtcaggctactgccaacgttttatataaagaaagtgtctcattttaagaaggaaacataattaatatttacagtgcctaattaattaggaaaaactgagcgaaaactattactacaataacacaccaacagctaacctaacctaagctatcatgacagagcccaacacaaggcatcggcaccaagctcgagcttgccacccaagcgatatagcagcttcgacttcaatgaaacaataccttaatgccaaaatgaacaaatagatccgacatccacgaatgatattatcccaagctaccatagaaccacttcttacacacagctagcaacaacaaccatataaagagattgtatgtgttgcggtgcaagttttgcacattctacagtgaagcggctctactctactaacagt

SEQ ID NO: 37233 - DNA, 453 bp, Oryza sativa
  unsure (1)..(453): unsure at all n locations
taagcttatattcatcgcactntatatgtaaaaattaggtgtagatatgtgttgttcgttggaaaaccgacntcacaggtgtgttgattaagccgctcacctgtgaaaatgctacgatgtacacttaagctacctgcatgtgaaattgaggtcattttcacatgtgtgcggcttaagtgtgcacctatgaaaaccggttgtcttataagtcctgacagaagattctcttcacatttttacaagctggttntcttttggatcgtttatgaaaataaagcacgggtgcctgcagaaatggttttttattagttcaacttgcatataatacaagatcatgctaggtacaacatcattatctacgtatacatatactattacattattgaaagaatatattgtgataaataaaccatgacatatagtcacaatcaccaatcttcatattatcaccgt

SEQ ID NO: 37234 - DNA, 275 bp, Oryza sativa
gctcaaaggagctttggaagatggcatataagatgtattgaaatattgcatcgatgcagcacaaaattggtgggttggagaatatttgttaagactacatatagctgaagctgttctcccagattcatgaagataaacctgctgcaatttcaaggtacatcatagttgcaggtttgagttcaatatgatcttggaatagcttacatctcagctgctgaactgcagcgcgatcagcagcatgaacatgcatctaatgtgtaatatacacacacctt

SEQ ID NO: 37235 - DNA, 467 bp, Oryza sativa
  unsure (1)..(467): unsure at all n locations
agcttgttngatgatttctagcatctatgctcatttggtgcttggaatagaaggagtcctgtactgatgtttatgcatttctattttgtgtggtggttgcttgcttcctgctgttatgaaatgcatctgagttctgaaggagttggtttgattcttctttctctcccttccttttctttctttctttctttctttntaattattttaaatggatggaatgctttctaaattccaaccaatgtatttagttttctgatctacatttattntaagtcagtgtgacaaagttacgatgaaagatagctttgtgtcggctttgtatggaagctgaattacttgtggtgttggtgggaagccagtttactcgatactagcaacattgacttttcatgcaatcatatatctgagaagggcactgatgaaacatatggtggtaagttaagtcatatggaagcgctatataactc

SEQ ID NO: 37236 - DNA, 483 bp, Oryza sativa
  unsure (1)..(483): unsure at all n locations
cttctgaaaaatactttttgcaaccttttcgttttatatattgtatcttctgaagcttatccatgaattgtttgttgatcaaatcggaattaaactattggtatgctaatgatctgaataatgtgccaagcaagaaaagatatggtttatttatgtatgccttcactcattctgctcttgtgtaacagtttccttcacctggcttatctgcacaatcttcatctgatgactctctaatagaggacattaacacctctgttgttgaaatactaaatgctgagggtagcggccaacttacaaggtaatacatctcatgactgaactcttctgaatatntaaaggtgctagaattgcctatacttctagtaaagttctatacacccaccccaccacacctatgaccttcttgatntgtatggacatagacattgtgtgttgtctgctagaatttcttttaaggacaatggcattgtcttcacatgt

SEQ ID NO: 37237 - DNA, 393 bp, Oryza sativa
ttaatcactgagctgcacttgaaccattaagcccgttttgtttctttgctgcaaccaacaaatgctccgttctatcatctatgccaataactcccagagatgaaccatcaccctcctcacgtgacatcctgttcctatactctagatatgcagcagaagtgttctcaaacaaccttcggtattgttgaatggcgaaacgcatcaattcaatggcatgctcgaaatgactgatcataacgggccttgctccaagatcctccagtatgtacctcttggtggctgcaatcatataatccttttgtgttatcatgataatcatgcgctgggtagcaactcagcatacatgagagccttcatcttatcacagaagttgtcatccatgctaactttaat

SEQ ID NO: 37238 - DNA, 425 bp, Oryza sativa
tcacaacagcgcgccgtgtctcattgtccttttcacgttgttgatgtctccgagcagcacatgacgccgaacttatgggcatgggatgaacaagccccaagctcggatcccatcttgcaacaacctgatgagagaccccgagcttaaccctgttcacgacaacccatgcttccaacctgcctcctttcgggtgtatcacaacctcacaaatgttgcattgcggtatattgtcgattacttgggtcgtccggccgtgatgatgtgtcactggatgcctcgagcagccgatggtgggatgttggttcccacttcacggataggctcgttagccacttaaccatgatagttaatgtcggatcccgtggatgataaattcgagtgttttggccacgataaagtggtaaatgccctatagaaagtcccat

SEQ ID NO: 37239 - DNA, 492 bp, Oryza sativa
  unsure (1)..(492): unsure at all n locations
agcttcgccgccaccttctccatgagccctccaatcttactcgcggcgtanggaaagtacaggggtgagcagcatggcacgcgtcggcgaatgtggtggcatgctccagtgtatgcggcaatgcgggcagcatgctccaacgaaggcagcgaatccagcgacatgggaaagaagcagctatgaatggagtcgagctcgaggcggccctgccgacctgccttctccactctcggcaaggggttgctggatccgaggaggtccaccgagtttcccccaccgaagccagtcacgtggggaggagctcaaaccctgcctccaccacgagctccttcctacgacggtgaagtatctccgggtcggctagacatatagcggtatgttgatgcgtgcgtgcggcatggctacttgcttcttcaatntcctcatgccgntgtctctgtaggtgcgggttgatctgtgcctagtcaatgtaccgtcacccggagctcctcc

SEQ ID NO: 37240 - DNA, 504 bp, Oryza sativa
  unsure (1)..(504): unsure at all n locations
tactaagctgattctttgtattatgtatatgcaaatggattgacttgtttattgagtctacanaatgtagctcgaatcaagatatatggcgggaaacatgcattcgcatgtggctatataattagcaatatattaaaccattcattctatttttgcctgaatcatatgtatgatttgtactattatagttgtagcatttgcccatgtattcgatttgtactattatagttgtagcgttagcatgggcaagttacaaaaattgcctgttgatgatatgaagaaatatattgccatgcttgaaaaccctctatctgccttgccttgcatatgctntatcattcacaaccagggaagatgctgtatcattcacaaccagtgaagatgctgccaggtagtcctttcttgatccatagtagagcttatacaaaatcatatatgcgaatattgcagtgagtatacgtaaaatttgtggaattacgtcaactaattaagttgtgagatatg

SEQ ID NO: 37241 - DNA, 478 bp, Oryza sativa
  unsure (1)..(478): unsure at all n locations
agctttcccaaattgcagaaatatgcgtttattctctcatgtaatctcaattcttggttggctnttttggacttcgttacttacaagattggttgaaattagtctagcaattctgtcggatgttcttctttcagagagaaaaaaaaagctgtcagatgttcaactacttcttggaattgacctgtctgttaatattgtctgtcttaatcggttgttgacatgagccggcctaatggcatacaagcaccagtatacaccgtcacgagtgacaacattgcgcggacatacgaaaaacggaaggtaaaagatcgccgctgacatgctcaaagaaattaattcatgtactgtaaacaggaagagtacaagagcctgataagttcgtggaagaagtttcagcgtacaagtaacaactgtcatgtactcactactgcangttgccaccttctgataatctcctgaagtcaagtcctgatacaca

SEQ ID NO: 37242 - DNA, 465 bp, Oryza sativa
  unsure (1)..(465): unsure at all n locations
tcagatatagccatatactctgcttcagtagtagatattgcttctgttgcttgcaaacttgccttccaactatcagcacatcctccaatagtgaaaacataacctgtgagcgatcttctcttatccatatctccagcaaaatctgtatccacataaccaacaagtccatctctagatctcccaaactgcaaacaagcactagatgtaccatgtaagtatctgataatccattgaacagctttccaatgctctgtgccaggattagccatgtatctactgacaatacttaatgcatgtgataagtcaggacgagaacataccatggcatacataagtgaaccaactgcactngaataagtaactctagacatgtactcaatatcataatctgactgtggacataaatctgaagataatctgaaatgtgcagctaaaggagtactcactggttgtgcatcatgcata

SEQ ID NO: 37243 - DNA, 474 bp, Oryza sativa
  unsure (1)..(474): unsure at all n locations
agctntctgtggagatccctctatattatcattcttggacttcctatcaacattgaacctatcaaataatatgctggagggaagaataccatagtcacctcatttcttgacactccacaatagttcatttataagaaatgctggtttgtgtgggcctccactgtcaaacgaatgcagcaacaaatcaacatcttctgaagagaaatctgtagacgttatgctatttctcttcgttggattgtgttttggagttgggttcgctattgcagttgtagtttcatggaaaccttgcattggcaaataatctttgaaggaatccaccctttntctatatttatctgttcangagtctgccagtctgcttccccttgtaatttagctgtattgtagctagcatgtatatatactatgtgatggacacactnttcatcatgcatgcatctataagattagtgttataccttgaaacttata

SEQ ID NO: 37244 - DNA, 476 bp, Oryza sativa
tcacatatctattcacatcatgttatgttctgttttcatcaatcagcaaataaatgtcttgggagaatgcagtatgtcactgaaatagtgaagactcagctaccacttgggattatcatccgagagaacaacgacctttaacagcaaggcatgcaggacattcgcaaagaggaaaatttcgccgacataagagaacagcaccctgaatttgctcctcttgatgtagatttcatggatatcgaatcctccctcgcagagatgtttatacgtgtacacgccactcgacatctctactgctcgattcttcatggttgcaggctttcagaacatcaaaacactcggagatccatccaatggcgttcatgtgagatgctttaatccttgaacgaacctaacaagaacaacacatccgttcaaatgtctagtgaatcccatgatctcctaactgctgatatagatgaaaacaacgcatcact

SEQ ID NO: 37245 - DNA, 413 bp, Oryza sativa
tggctgtcgaagaagttcaagccctccgctgtagttcttctcccatcaagctggcaaccatcagcagcctgtccgcaagaaggtccgaaaagacctctaccgcgccttccactgacgctcttcgtataccacggatcaatgccaaaacatgctgcaacgtggctacgcgcaagatgcaaggccgcagcatggagcagctatcgaagcacctcgcgaagccgttcaagaacaggcacccccggtcgaacaacgccaagatgtgcagcgcatagtaatccaagggattacacggtccgactcgcctggccaattgtcaaagcggcaaaagaagatgcagctccgaacggtccacaacatcacttcggcgggcgaatgagccccgtattatctgaaccagctaatctcttttgggc

SEQ ID NO: 37246 - DNA, 424 bp, Oryza sativa
  unsure (1)..(424): unsure at all n locations
ctctgtacaaatggtgagcaaggaacatacataaacaaaactaccaatgaatgataaacaagcttagctaacagttcttttaagataatggataaaatccagcctctttatccaaagtggatatacacagccaaagctaagctagcagttgatgtattagtgatacaaatgggacatatctactagagacatatatgcagattacagagaataccattgtggatgaatgttgaaatgttctgcacacacatgcgcatgataggtcaaatataaatgacctatctagctatgatcgaacaaacactaacacacatcgagnntcagtcaagatattcgcacttcacagcttgggtctggctcttgagatacctatatgctaccccaagctaacttctgttgagttgaattggtatataccattgac

SEQ ID NO: 37247 - DNA, 316 bp, Oryza sativa
  unsure (1)..(316): unsure at all n locations
ctcatgccgatcgaatcgattcactatctcttagaaagatttactctgttttctaccaaacaatacctatatccaggtggattattcataagaactactccaattaattaccgtgcccccatcatttacaatcattttggttattttggatcttgtctctctagagatcaatagnttcaatacttgcaacgtacattgcatacacggtaaaaattcacataactttcttactctctaccgcagaagtatcacattccctgttcggtccggggggaaaacaaaaagaaaaaacacagcatgacgcatgtatatggtt

SEQ ID NO: 37248 - DNA, 455 bp, Oryza sativa
  unsure (1)..(455): unsure at all n locations
atgatattgataggatatcagtagaagcagctgaacaactctttcttttttatctgaatcaaaaacatgtttatgatgttgtccttcaatcagtcaacaattgcattggtcacacattctttgtgcatggctatggtggtaccgggaagacatttctttggaatgctttgcttaatgctgttagagctcaaggaaaaattgctttggctgttgcatcatctagcattgctgcacttcttctgccangtggtcgcacaccgcattcccgcttcataataccattagatatacaagaacattcactctatgctatcaaaaaaaaaaaactcatctagcccaattgatacaacaaacatctttagtatatgggatgaggcacctgtcaatcatagacattgntttgaagctctggatagaacactaagggatatcctatcctcatatgatccatccct

SEQ ID NO: 37249 - DNA, 394 bp, Oryza sativa
  unsure (1)..(394): unsure at all n locations
tgctgcatgcaagcttctcttactgaagaggggaaggattgatctttatatgttttctttctcacnactcancaaagccgcacccggcggatgcatgattcatgccaaggagtacaaagtggtaataataggggttaggttttgcaagtaacagcatttaaaagtcacttagttgcccaaagccattctgtaaagacgaatctagagctacacaggattattaaacaaagccgtgaaccctcactaacctgccgtaacccaaggcctacgatgatttggaccgaacttggaacccgacctgggttccagctcgtcccaagccaacccaggccaaccattccaaagtttagttgttgagcaaatattaagaattaacacactgacttgggacatt

SEQ ID NO: 37250 - DNA, 468 bp, Oryza sativa
tactatgaataatttctaaaatagcatcaattgtttcttattaagtaatatctttgttgatatttctatatgtattataatagaaaatagtggtcaaattatttgttaacatcatgtccttgtccaaaatgataagtattatcaacccacataaatttttctccactttatcttgacagtgataattttcaaaattcgttcatgtctgatctaaagattgtaaatctaggtttgttaaacataagagaaaaatatgtatgtacccttaatatgtcaccttaatccctctgatgcccatattgccccctaaatcattacccccagtgccccatgggataacctcctgttgagttccatacggacgcataaataagatacagatattacaaatattagaacttttaagattgtcataatgtatcctgattgtataacaatgtattctttactgagttaacaaattgatgg

SEQ ID NO: 37251 - DNA, 474 bp, Oryza sativa
gcttacaatctcttctatgcaaataccctctcttctttctctctatgacctaactctatccgaacatgaaagccctgattcgttctggagttatcaggtgagtggctatctcattcttcggattcgcgcgaattcaaaagcaggcactgtatagaaataagtagactatcccaacacttttactaatcttgtactacaccaacaggtccttccaggccccaggtattccatcatgttgagttaaacaaaaacacaagttgagcagacagtgacttacaacagctgggatgtttgcgttggctggtatggacttgacaatttccatgagggcaacttcagcagcagactgttctgcagcctttctgttgaagaatccgggcagggagtcatagctggtgttattaatcaccactgtggacttgaagacaggctcatgggaagggccctccttgaaggtatgatactctggagtct

SEQ ID NO: 37252 - DNA, 394 bp, Oryza sativa
gctacccgccaagacgccttagtattcttcttttgtcctgcgttgttgtgttatttgatagacgacgtgcgatgtgtgcgtgtatatgatagtacatgcatctctggaagattaatgtgatcaatatatgcaattgatattagtttctttgcacgaatattgaaacgacatattaatcgccgtccttgttcattcagcaccaaaagatagctaattgttacaacaaaattaactgaaaatatagatatatttagtgtcatcacaataagtgtgcgctacgtgagatgagaatgtatagcgaaacataaaattcattctggatcaaattgatgatccgtcaatgcatttcttgatggctgtgcagactgcatgacgaaccatttgctcatccacg

SEQ ID NO: 37253 - DNA, 409 bp, Oryza sativa
  unsure (1)..(409): unsure at all n locations
agcttcactatcttgaaagattgatacccttgtcatacgaaaactggcagaagatataatcaagtacattgtggtataatcaagtacattttgtaactcgcctggtagctcgtgacatcactgagccaaccgtgaaataaagttgggaagctgaatataaaaaaaaaatattgcgtttgtattatttgtgtgaaaaacggngtataagttgtcgggaactaaactcgcccacacaaatcaggccccaaatcagataaaccagcccatccggccccataccccgtccgcgcccctgtcccttccccaacgccatgtctcgatcgatcgcgaggcaacggcggccgatcccgacacaccttcccgcacgtnttggtcgccgtctcgccgacacagcagcgtgagagccggc

SEQ ID NO: 37254 - DNA, 444 bp, Oryza sativa
  unsure (1)..(444): unsure at all n locations
tgatctcgatagaccaagtggtcgatgatgttgttcgttccganctaatcggaagatgtacttggacaggttggatctccccacagccgaagtcgtcgagtagcttgttgtcggagaatccatctctcaaacccatctcgtcgaaaccttgaatcaccaatatccccctacctggcgtgccactgtcgacgtttgatgtctcgactacagtatttgcatggcatggggatcgttggtactatggtatacgcgagactgagataaaagagatggagatgaggatttttatacaggttcgggcccctgaattgttatgtaataaccctacatcctgttggncgaagccagtattgctcttattcatgataatcacaccagtacaatgtttggggtagcctatctaactgttgtcgacatggcagtctgaagatctgactcgtagtc

SEQ ID NO: 37255 - DNA, 400 bp, Oryza sativa
  unsure (1)..(400): unsure at all n locations
ctgatccaatctgttgtgtagttcatgagaattgatatccaaccttgcaaatcattgccatgctgtctcttccaaacttgtgaggatgagnnnncacatagttctgtcctttctacctacatagcttaattacattcaaggctgcaaggatgaagatgagggttcacatacccctaatgcttttcggatactatgatatgatactccctccgtcccaaaatatattttgggacacatggagtacttacttacaaatagatactggtttgattcacatgatgacattatgcgagcttctcaatagggtgaatgcttaactctctgttctacgttcacggaaatttttcatgttggatgctaaacgcactagtcgatgacactttcatgttatgttgttatg

SEQ ID NO: 37256 - DNA, 427 bp, Oryza sativa
ctcacttactctcttttttctttctttgcttcttcgtgtcttctttctccgccgccggcgtgtgctgacgaacgatcgaatggtatgcgtgcatgggggcgatgcggtcggctggtggagtactggatgacgtacgtggtgaggcccaatgggaggcaccatgccaccattgtgtggctccatggcctcggcgacaatggcgcaaggtaacccatcatcacttctctagagatctctctctcgatctcgagatgatgacttctttctgtcacagcttaatatttatattacacacgaccaaaaatatgctaacttgtactactactacacgctcccagtttttaatgtttatatgtactagtagtacacagatgttatcacaactactactatactcactccttttgtatatacttatatatgacct

SEQ ID NO: 37257 - DNA, 438 bp, Oryza sativa
  unsure (1)..(438): unsure at all n locations
agcttggattcatntgtaacaatatgttcatgttctttatctactcggntttaactgagaacaaattatgttgttcatattggcttccccttactgttcattatcacttatttgtgcattttcccacattgacaacgacaggtaagatagaaacagagacgccattggactcgtctaagcacttttcaaacacaagcaatgtgagaagcagggagttcaatatctgcacaagcaatgagccacatattattcatggggattttgaatttgaaaccaggcaggcaacatattattggattctgacctgatgtgtttgagagagggagatagagaagaccggggagatacgtaaaacgaggtgagccattagcgcatgattaagtgagtattaactatcttaaatttcanaaatggactaatatgaaattttatagcaac

SEQ ID NO: 37258 - DNA, 458 bp, Oryza sativa
  unsure (1)..(458): unsure at all n locations
atgtttccgcaactttcccaacacctgtctttttggtgctgatgggcttcctctgattgtgagtatatcagaatgtcatcgatgaaaaccacaacgaacttatccaagtattccatgaacactntgttcatcaagttcatgaagaaggcaggagcattggtcaagccgaacgacatcaccgtgaattcatacagcccgtatcgcgtggtgaatgcggtcttcggaatatcttcttcccgaatacgtaattggtgatatccggaacgaagatcaatcttggagaatacagtggcacctttaagctgatcgaacagatcatcgatccggngaagatggtactngtttntgatggtgacttcattgagagctctgtagtcgacgcacatcctcttcgtcttgtctgtcttctctacaaanatcacaggagcaccccatggtgaagtactcggacgtatgta

SEQ ID NO: 37259 - DNA, 460 bp, Oryza sativa
  unsure (1)..(460): unsure at all n locations
catgcaagcttctgttggcttcatcaatntaccatgtactttatggtactccatctctatattaggtaatcaaggatacagtcaacctttcaaaacattcaccattaatagacatgccaaattgtatggattaactgtatgaaaccaatgtatttgggtttgtcacacaaatacttccgttacatagttttatttttactagtatgctatggtaagaacccatagttatacctaacattggacattgtaaaaactgaaaaatgacttgatagtttaagacagaatatgacagtaacaagctaatatgggatcaaagttggatatgcaagtgaacaaactaatgtaaatggaattcctgatataatatgtcattgctaaatacttttcaaacgcatcttgaaatataaacaaaatatactgaatatacatgcagatgccgacttgacccaaagtacagggt

SEQ ID NO: 37260 - DNA, 480 bp, Oryza sativa
  unsure (1)..(480): unsure at all n locations
taagctgtacaaaactttgcctaatactttcttaaacatattattaatatgagacttaaggtttcatgaaatgtatttatatatatggaaaacaatagcaactttatagaactctctccatcccaataaagcgtgcacacattgtaagatttaactccctaaatatttaaccaacaataatttactggtaacatgcacatgcttacgctacggcttaacagttattttgacaattaaatatataatgagattggtataagattcacacaaaacggaacaaattattgggtgacttcggaattagacaattcattaaccttcataccaacactgtaaccgaaattgagaatgcaaaagcactagtcaaagtgcaatgcagcatataaaaacagatagaaggggataaatctatcatctctntgcctctctttcaatggaaagacaaaatatgtaacattgtcatgaagcagcatggaacag

SEQ ID NO: 37261 - DNA, 424 bp, Oryza sativa
tcaagcttgtggctatggccagctcaataaatgatctttgtgaatcaagtctagcccattgtgagtcatccaccacattagactgcagaaagaggaagctaagtttccaacaagctgcctccatccctgttataaaccttgaaccggaactggcaccggcaccggcaccacaaccttcctcacacattactactggagtcaacaataacttcgtttgggacgacgatgatttcttcgagagccttgatctcgatgcaatcgaagcacaagcgaccgaactctggagactcaagaaagaacaatccacacagagatcctttgggaactaggcaagcatcagagataagccttctcccctttgatttatggatctgagatcgtgagagctcatgctggtgaagagtcattcagaatgttttatcta

SEQ ID NO: 37262 - DNA, 483 bp, Oryza sativa
  unsure (1)..(483): unsure at all n locations
gatgcatactctgggcctgaacccgacgattgtgatctacaagacattattagcgagctggacaccgactgcagcggcaacatcgacttacataagttcctggccctaaatagcacgctagatgattaggtgaagggcaagtactgatatgagcggcacatggaggcgttccacgtcttcgacaatgactagaaagagccccaccacatcatttccaatgcatcaagagatgctcactggtgaggaggttgacaatgatctgcgaggctgatggtgacatgcggatcactacaaggagttcataattaaattcagaacaaaaagataaaacaagcaatttgattaatatacacatacaaaatgttaaaaaaataattaaaactataataaatataacaagaatccatgtagaaaaagaaattctctatatgcactatanattcctcagtccttatatgtcactgataatgtgggccctatatg

SEQ ID NO: 37263 - DNA, 418 bp, Oryza sativa
  unsure (1)..(418): unsure at all n locations
tcttagtaatcttctccaactatatatatctcataataacttaactggtgcattgccttctgatctcagccccttgaaagcaatagccggaatggacatctctgcaaataaattggttggtagcctcccaacttcatggggacagctccaactgttaagctacctgaatctatctcaaaacacattcaatgatttaattccagactctntcaaaggtctagttaatttagaaacattggacctgtctcataacaatctttcatgaggcataccaaaatactttgccaacttaacctttcttacttctctgaacctctcctttaacaatctacaaggtcagataccaagtggaggtgttttttcaaacatcactctgcaatctttaatgggaaatgctagactctgtggtgctcaacat

SEQ ID NO: 37264 - DNA, 445 bp, Oryza sativa
  unsure (1)..(445): unsure at all n locations
cttctgctgaggaatatgatctgtgtttttctggattgtaatatactaattagtggaactccatgcaaaaatgaaagctantttggacaaatcacttatgcatgtttgatgtttgtctgtctattttaaattgccacacgcatcacccaaaatccaactcatgattcgataaactgcagttagcaagtgcgggagactatttatgtgcatgtaaaaacataattttgggaaatggttggtgctctgtccatggagacgaatatattgatgttcttgtttcattttgagatattgtacnagaaaatggaaatgttataccagtatttatgcctggtttagttcccaactttttcttcaaacttccaactnttccatcacatcataactttcatacacacacaaacttgcaacttttccgtcacatcgttccaatttcaatcaaact

SEQ ID NO: 37265 - DNA, 432 bp, Oryza sativa
  unsure (1)..(432): unsure at all n locations
agctttataatacaactagaagcatcatgtttgttaatcaagaaatggaacaccaaccaccatgtatccaagaaaaaaatcattataattagaaatctaccaagtaaagctttagaatacaactagaagcgtttagtaggaaaacaagagaatgaaacaccaaccaccatgtaaccaagaaaaaaatcattatagaatccaattagaaaacaagtaagataaaagctttagaacaatagatttgtgaagcaagataaaggttaaatatgaaacagaagatgttttcaataaaacaaaacactatttaaaaaaacaattagagaataccaagttaaagttaagaatccattaagaaatgtcaagcgagaagccatgagaatctttnttgggtaatacgaatcaaaataacanattaaattattacaaacaaaa

SEQ ID NO: 37266 - DNA, 414 bp, Oryza sativa
  unsure (1)..(414): unsure at all n locations
cctgactcggttcatctatatcaagagaagaacagtgcgctacagtatacaagcacaatcatatacttcctctgtctcgaaatatagcaatttttagctatgaatttagacaaacagttatctaaatttatagttaaaaatgctttacattctatgagagagagagagagtgtcaagataagagactggcagcaggctgcaggttgactatctagcagccagttcatcttccattcgagtttcatctagtacaaaaagagaatattgcggaattcatctctcccccaatctcattnttaatttgaagcctcttaatgaaccttgtggtcgtgggtcacgtctttgtttctttgtaaactagagacatgagtcatgatcgcgttatatcactacactcgatcaggacaccactga

SEQ ID NO: 37267 - DNA, 427 bp, Oryza sativa
  unsure (1)..(427): unsure at all n locations
ctgacagacagtttgacacgagattaacaatcatctatctatagtttgcccctaaaaatctgtagagttcgcgacagatgatctgtcccgcaccatagaactgcccacatatggtatgccacaaaacctttaccgacagaaggttaaatgttgatctctatttttacccacatacatctgtgggcaattttatgacattgtgtagtgttgtgttcatataatttgagacttaatgtgggtccatgctaaaaagtgtacataaatgtttagtgtcagagatggatcatgttccaagttttaaattgcaaatgttgtatcatagtaacttggtaaagtaggctagttatactggtcaccgcattaaataaactatttaagtgttntgtggactcaaggttgtagaattaaacaatgatatctcgagtta

SEQ ID NO: 37268 - DNA, 337 bp, Oryza sativa
  unsure (1)..(337): unsure at all n locations
atatntaccactggtttcaagttttctttatggccaattgcatatttaccactggtttcaaccagtactgtgaatctactactacaaaaagtataatggcatatttgccaccagaaacaggtggaacccaacctgcctgccattagactgacagcctgaactatcaccgttagaaggttggtttttatcaaatttatgacaaagatacctctatccaccaaattgcaagataaacattattttggcatacttatcgtataagaaaaaaaaaaggaggataaaagccttaggagatacaaccatgggctgctactggcctactggccacgaaaatact

SEQ ID NO: 37269 - DNA, 470 bp, Oryza sativa
  unsure (1)..(470): unsure at all n locations
tactaagcttgtgtcacaacatgcacaccaactaacaaagttcactaaaaattctacatgtacttccaatagtattacacttatgtggtaagtattaacctaagaattctgacaatnttaagaggataaatatgtcagaattgtcctttcttgctccctatatatataatgaatttgaagatgatactttacacagatatagtactactaaaagtacatgtacaaatttggatacaatttttgggaatatttntttagggaaagttttggtattttagttggtggcatggtgtgacacgagaagacagctaaccataattattgggatggttccaagtccttacttaacacatgacaggaagtaatcataagtgatggaggactctttgaagtagtgtctgttttttcctgtttgcgcatgactgcactcagacgtcttgatcgatgagagactacgaactggtgctgat

SEQ ID NO: 37270 - DNA, 461 bp, Oryza sativa
ctacactctaagagaccggggcgggctgttattctgttatgtatgttagagcagctattaaaccaagaatcatagactttatggcatacccatgtggagatgattacatacaacctataaatggacattgtatggagcattccaaaataaaaaagcaagagtacgcactcttgttcccttcgagggtattgatctctccattatgacctaatacacgcatcggctgtgcacgtgtccagctagggaatgcgttcgtggagaaccttgagtgaacctgtttggatgcatgaaacttattaactgtattatactcaactcttgtaattttacaatgttgaacacaacttctcaatgaaacaccatcgcactgtaaagactgaagcttctttgcatagatattcatgcacaacagttgtaaactcctaacttcttcataccaaacacaatgtcttttcaccacc

SEQ ID NO: 37271 - DNA, 325 bp, Oryza sativa
tgagaattctgactgaatgtatgtatgttgttgtttttaatatcgaaagttgtgaatgtggtaattatgggtatggaatgtttggatatctgagatacttacgatggttatactggattataaattacccccttgttccatggttaatgacataccttgcgcccattcacatgaccaagcaattggacttcgcctaacacatcgtcccactatctgatagactgctggatagatcattaagaacggatttggtgtgaacatgtgctccgaggtactggcatcgtttaccacattgggcctcatgatagtatgaccactatactaa

SEQ ID NO: 37272 - DNA, 403 bp, Oryza sativa
  unsure (1)..(403): unsure at all n locations
gcttggatggcacatattgagatcaatagntaactcttgacttatacattacaaacaatgcaccaacagcaatttccttcaattgctcaagcctagatggatcgctagtagtccaaatgacacaagtgctgccatagaataaaggtttcagcctaagcactagagcagggaagacgtggccttctaagcaatcagtgacgctagaaaaatgcaaaagccgatcaataggatattatcatcactaacccaaatatagtgtggcagtctgaatgatatgatgatgctagaacctatcccgttgtttcttttcgacgacaaccttatatcgtaaaaatcatattatttgtaggcaaatcaatatcaagttcaatgaaatccctttgcttaagtaccaattgacatg

SEQ ID NO: 37273 - DNA, 181 bp, Oryza sativa
ctcagcttccagaaccctatcgacggtggagtgcactcacatcctcttcgccttaccctggatgatatgcagattgctcgctgcgagctataaccaagcaatgcgccttttcacggagtaatttccaggattatccgcaactccactcggccagatcaccctcccggtcacttttggactc

SEQ ID NO: 37274 - DNA, 462 bp, Oryza sativa
  unsure (1)..(462): unsure at all n locations
atgaagctttaactagggattaaaggtagagaagatagctttgattctatatgtatataaaaaatacaccgngagtgtggccttatatacttctttctgtagggagattnttcgcatataaaacaaggctttaccaagtccaaatactactaattaatatattatcactactattattccatgtccaaaaaccttgggacaaactgctggggtcaactaggaattaaagatgtagcggccacaccacacgtgaatatgtgcggttcgtgccaaagacaagcagcagaatgtttctgcgagaaaagaggcgacttttttctcgtgttaggacgtcacatgtgactggtacatgcatccgtatgagtatgtagatcggacctttgcaactgtacctaccacctaatctttntgttgagtcctctccgtgggtatggagtgaccacatgctatgaatctttaaat

SEQ ID NO: 37275 - DNA, 515 bp, Oryza sativa
  unsure (1)..(515): unsure at all n locations
ggttattagtatatacaaagggtcatcctattttaactagagctaattatttcttatgttttaaattacttacctatcctatntagttagcacttcagtgtagttaatgtatggtattgtgtaaacatatttaaataaatatatatcatagattggtacaatttaaaattatagggctggtataaatggtatataaaactcgttaataagtctaacaagcttaacgagttagcctcacgagccacactgtcttttagctcctcaagattaatgagatgagtggaagctgtctctcgttatattgcaatacattatattgattagtgtgtaatgttatangcgaactcgatcgcaatccatcaatctagtcaaccactctatcaaanaaaaatctctgaaaaactgctctatacaaaataacagtaaaccttattaaccaatttgtcactaacctaactanacaccgtgcattgatctacctgtctcttatgcaactcttttataaaaaaaaacta

SEQ ID NO: 37276 - DNA, 190 bp, Oryza sativa
ctatttttttttttaaagaaatcctgtcgcggcatacctccccctaaaaaaaccggaaaccgagctgaaaaggggttataccccaattaaattggtgaaatggacaatgaaaaaaaaaaaattggtggtaaaaaatttattatggaaaattgggtttaaataaatgggctaatggccccctactttccca

SEQ ID NO: 37277 - DNA, 426 bp, Oryza sativa
  unsure (1)..(426): unsure at all n locations
gctgcagcttctcaaacgaacccctnatgtagtgaggttctttactccaacatataaaggggagcgtcaatgtattgggaataaataacccctttatgtactggtgtattgctgtggagtcatttctcggagcatcaattganttttccacacgtggagaaaaaaacaagccacaaccaaagtaaaaagagcctgtatactctatatatataaaaaaaaaacaggtgtgcctatatatatatatatgtgtaaaaagagcacattccatcttctaggactcttgctctgtgtactctcaagatttgttttttttttaacgaaggggtacatctgagaataacttatgttctacagtaaaaaagatcattaatctcaaataactgtactgcaatttgcttaattatagggaggatctaaaagtgtgtc

SEQ ID NO: 37278 - DNA, 314 bp, Oryza sativa
tatctagcctgataataaaaccgcggatatacataatatgcgttgtcgcgtatttacggatatgggataagtgcaaggcatgcgcatccatttcttaattaagcccgctaatcacctcacccctaatcgagcaccatatatgtttgtgcattattatgcatgcatgcatgcacgtagttgcttcaccggccaaataacatagctagctcttgattctctgtaatctgtatacgcgcgcatatatatactgggcacagtgtgcatttctatatttgcatggcgcatgcacgcatgaaatggcaagctagctagcc

SEQ ID NO: 37279 - DNA, 418 bp, Oryza sativa
agcttatctcttacgctccaggaatggatcagtcattatatcaccaccggcttgccttcgcagccgccgactggtgttttcgcctgcacggctggcctattatgccgccgatgttgggcgtctacgtcttcaccgaccggcttgccttcgtccgtcgccgactggtgcttccgcctgcacggctggcctttatgccgccgttgttgggcgtctacgtcttcaccgaccggcttgccttcgccgccgccgactggtgtttccgcctgcacggctggcctttatgccgtcagtgttaggcgtctacgtcttcaccaaccggcttgccttcgccgctgccgactggtgtctccgcctgcacggctggcctattatgccaccgttgttgggcgtctacgtcttcaccgaccggccgtctcgt

SEQ ID NO: 37280 - DNA, 409 bp, Oryza sativa
  unsure (1)..(409): unsure at all n locations
gtataatctgatgttaagtgaaattcagtcggttactctttctgatatcaatgactcttggcagttcagtttgggttcaagaatctatacctctaagagattntacaagctctcgttctggtctataactccccctgtgacctttaaatggatctggcaaaacaaagttaacatgaaaattaaggtctttggttggttgcttctcatggacagaatgaacactagtgacttgttggatagaaaacattgtgctcccttgngcgcgtcgatttcttgctcctcgtgtcaggagaacgctagagaaaccagagagcatttgttttttgactgcaactttagtaaagggtgttggaacaagttgtgatggtactggaactcttctttggaatttaatcacatgatacatacc

SEQ ID NO: 37281 - DNA, 436 bp, Oryza sativa
  unsure (1)..(436): unsure at all n locations
catgcaagctngcaccggctctttcatacttatcattacactttttttttacatgcagaaccagaaagtgctggtatgaacaatttggaagtcaacatcgttcgcttacataaagtaattgatctgattatgttgggagtacgcatatgcacagcacgtggacaatcatgtataatttggaattacatgaatatttgatactaataacaatcatgattcttgtatgaatgcaatctaagtaaccatagatggttctaaattacattgattattctgaaactcctactggcttatatttaccagcacatgtcacacttatattctaaagtactgacgcattattaatagagaccagtgctaccaatgtagcttgtgggccattactccaataaccttagaacattaaaaattctgaacatcagctgatcatacctct

SEQ ID NO: 37282 - DNA, 373 bp, Oryza sativa
  unsure (1)..(373): unsure at all n locations
tatgacagttgtgagaatgggaaatgtgcgaacagacccacaaccgtcatcatggagagatctggagcgtccatgccaaaacctgtgatcaacaatgatcaccagtgttcgaccgaacctggtctgggcccccctggcctgagctttggcccatctcctctcctgggtcccctctatacatatctcggaattatgtgctgattctctagtatatcgataaagttcacaacccatccttgcgtggatacatgtgtctcctcactctactctgatttccctctcaacttcggggtttaacacctgcatacanatatacaccaacacctatggaatatgtgagatttaacacctatcactatgttggatattttat

SEQ ID NO: 37283 - DNA, 264 bp, Oryza sativa
  unsure (1)..(264): unsure at all n locations
gcaancttgctttgactaatactcattcacctatttgctttattttacttaccaagcgcaccatgtagatggatatctctactaaattgtagactcacctgatgcgatgactctacctgcaaaggtgtgcattaaatcatttttgatatgcangtgctggaatttcagatctccctactactaactctaatttctcctaaggtaacgaaattggagatgcatatccttttgtgtgaacagaccttatgctagacggtatttttt

SEQ ID NO: 37284 - DNA, 341 bp, Oryza sativa
  unsure (1)..(341): unsure at all n locations
gactcanaanagaacagagggtgcaaacgcttattgtttttatctgcaatgcgtccagttgtagccgatattggtcacattggcgtgcagcgcctcctgcacgtcagcccggttgaagtacacctcggcgtgatccgacatgcacagatcgtaccccggcggcctcatgtaccacccatgctgatacaaaatgacaccanagaaaaatcatgctgattcttctctctgaacaaatgtgatcgataagagtgccgatgagttggctacgcacgtatctggagaacattgttggagcggcgccgtggacggcgacctggcgctggccgaacgccgccgacgac

SEQ ID NO: 37285 - DNA, 420 bp, Oryza sativa
  unsure (1)..(420): unsure at all n locations
tntgccgcgcgctgntagacctgacacgcctagctgattcgcttctagatnttggaagcaactaaccagaggtggttaacttataacagcctgcaatcactgcaagtgacggcggatatcttctaggagtttgagaccttatcttggtccatctgaacatcgccatgtgactatgtgagtatgcaggtccaaaccgaaagatcaacatgcgangatcacctgctcgatagattgaagcctcctagccagccatgttaaaactctcctcgtcccttgtttgtactattatcacaatactgcgtgcatagctcgagggttttcctccgaccatcaatttcctgtgggcgacctgcttattccacaatttcagtacgaacgaattaccgtgccctgcgaggaatttctgtggtgataagtcta

SEQ ID NO: 37286 - DNA, 510 bp, Oryza sativa
  unsure (1)..(510): unsure at all n locations
tactcaagcttctcatctggcttcaagcgaattttttgagaattaatattatttttatggtttatagcaaaagtagtggtcaaccggcgaaaatcgcgaaagtaggtccctgtcgaacgggtgcagttcgatagggcgcctatcgaacggccagagcgcgactggcgaggagatcggaaggctgccgttcgacaagacctgtcgaacagcccccgttcgacaggcagggctgtcgaactgcccctgttcgacaggagggctgtcgaaccgtcgaactggcgcagttcgcagttcgacagggtcgcgttctccattttatttgtaataagtattctctttaataatatgtaacttattttagtgtgtaagaaagggaaaatattntgtaatgttatatgtatatgaaattaggggttgataatgtttggcagaaattgtagtattaattgttgctaaatatttgattatttagttcattattgatatttgatgataattgcatgatcattc

SEQ ID NO: 37287 - DNA, 270 bp, Oryza sativa
  unsure (1)..(270): unsure at all n locations
ttcattacttgaaataacctattagtctaaaccagctacctgaattcagaagtttcttccctattgaacctcttgtgagtaaacactncatttggcaagggtaagcagcagttgaggtcaactcctatcctgcagtgacaagtagtgataacaggagaatgtttgactgaaccctcacgctttgctcaaattggtgttaggaagcaatgcaactgacagtcatttgtcccatgggagcatggtgctatgtgtgagccatgaccaggaaaa

SEQ ID NO: 37288 - DNA, 83 bp, Oryza sativa
ttctccagattgaagaaagtagtgaagcaagacagaagttttcaaatgcaaagtcaatttcatcttctcagttttttggagac

SEQ ID NO: 37289 - DNA, 172 bp, Oryza sativa
gcactatcctgtttccacaacaagtgaaaacaaccaaagttagcctgcaaaggaaatgattacacaaaggtaaatataaagtattagttcaagcaatctctattatgaatcttccccggcaacggcgccagaaatgcttgttggtacttcttaacgatgttactagaaatat

SEQ ID NO: 37290 - DNA, 451 bp, Oryza sativa
  unsure (1)..(451): unsure at all n locations
atactaagctcgtagaatttttaagttcttgcgaatggtcccgagcttgttttcatatcgaatttgcaagagaatgtgggagttatatttgccgaacccggcaagagaatcggatggcactcttatttagatgtccgaggatatattattagcctaactccgagtgcgtgtgaaaaagatatgactgttttaatgacggtcactcgaatcagggttctatgtcctatctagcggcggaaggatacaatgcaactaacaaaagctatcggccacagatcaaacacaaatagaaagtgatttggtgggtgactgcgacngtggtgaccgtggtgatgacggcaaaattgatgaatgtggcgatgtgcggtggtggcaagaacttgaaactctaatcgcctaacactatgaccagcaaattaacacaaccgatgcaatcgaaaactcaacaagc

SEQ ID NO: 37291 - DNA, 508 bp, Oryza sativa
  unsure (1)..(508): unsure at all n locations
tctagctatagttctgcttcactattgaggcacatagaagagcctatatgatactcaatataataaaactaaggtctataaagaatatgacctgtttcttctttgcacgcttatctttttcattagcaccacccccacgcttncccttcatctcatttccaagaagccatgcctcttgctcctcctctcgaattaactcttcttgtctcttcaaagcaacagcttcttggtacgcaacttcaattccactgacaaataaagagcacagtaggactattaggtagctaacaatntgtctaanaatctattctgttttaagttagaaaaatgtatatgcattagcttaatgcaaaattcgtacacgcagctttctaaaatttcggtagtttgtctgttagaagaagtcttcgaatttagaggtcaaataatttcattcaaatgcccaaggctcaacataaaccacccacaaagcctatggatcgactattgtgtactgccaacactacat

SEQ ID NO: 37292 - DNA, 226 bp, Oryza sativa
tgcaagcttaacattgactcatgcaagctatagcatcattatcgtgtacgtttataacatggagcatacgttctgtggacttgactctgtggaatggaacaagtcaaatctgtggaaaaagaaagagaggtagttgggtgggcagcaaaagtgaagtggtatatagtgataggaagatgcgacgaagtgtgaaggagataggggataatggaaattttggcagggg

SEQ ID NO: 37293 - DNA, 434 bp, Oryza sativa
  unsure (1)..(434): unsure at all n locations
ctaagcttctactgttgtcctaatcttgtgatgcgatctgtctcactggctgttatgttttgcgctctgtacaccanccaagtataggtagaagaagtcgatcacgagagcccctttatctcagataatttggtcatcccggagcgcgtgcagccgccgtatggttgtcgcgttttgtacgaatgggaaaaggtgcaataaatcatggttggtcatccatggcaaagagccaaacatgaacaactcttctgcttatacagtggatttgattagattggattcactcagatgttgccatttcgtcctgttcattctccttatatatatcacatgagttctcttctttgggcccgatcatatcacgtcggtccatctgcacgcgagtgtgcgacgagcccaccacgccacaacggttgggccactagcctggatct

SEQ ID NO: 37294 - DNA, 295 bp, Oryza sativa
  unsure (1)..(295): unsure at all n locations
gcttnctcgacgcttactctggctaccaccanatcagcatggttattgtgacgaggagaanacagcgttcatcactccgttcggagtattttgctacgtcaagatgcccttcggattgataacagctggcaaaactttccaacgcacggtccagggcgcacttagcaatcaacttggcaacaatgtcgaggcgtacgtcgacgacatcgttgtcaaaaccaagacaagcgactcattgattgatgacctccgggaaacgttcgacaacctccgacgatatcgtctcatgctcaat

SEQ ID NO: 37295 - DNA, 458 bp, Oryza sativa
  unsure (1)..(458): unsure at all n locations
tgaggcatgcaagctntgtcagtagtggagttcccactataagcatttatgtttaagagagtgcgcatgcacattattgtggagccctctangttaagatagttagcttccgctgttaatctgcaacagcggaaggcaaaaatccaccatcactttctgtctaatgattntgagcagttagcaatcttgaccacaccaaaaatatcaatgttcttatatactgtgtcaattaaggttcttccaataaatatgtacccaaaaaaaaaacatttttcccttccttgacaaagattggcaaactcttcctgaaaaaaaaaatccaaaagcttgtttccccttcctgagaagggatggcaaagtcttcctgataatgaataaatgattcaattgtgtaccttcttcatagctgaacactgaatttcatttgttttgaaggaacgacatngaatttcatcact

SEQ ID NO: 37296 - DNA, 344 bp, Oryza sativa
  unsure (1)..(344): unsure at all n locations
tccatgaagaaatgttgcacgcttcttcatcggttggggagattccagcggcatattgtgcaccaaatgggttggttatgtcatacaattctttcccattccaattcggtgaatcagcggcagatgctagaattccccctttacacgtgtggtggccttactacggttntgctcccattagccatcctagaggactaagcacagtgatgcagcaaactgaaggtagtgacgagagtgacngtgtgaagagccactcatccgaatcaagttcggactccggngaaatgtgcagatgaccgctccccaaagctcgagaatagtggaatcacttggagcgagttacg

SEQ ID NO: 37297 - DNA, 439 bp, Oryza sativa
  unsure (1)..(439): unsure at all n locations
ttaagcgaccgcagctgcagctagttatacgttgggtttaataatgcattattctaagaatgagggtttatggggctaacaagaaatcagactgcttgatgtcaaaaatacatctctttctcatttgnacaacttgcttgaatgctgaaagtaaaatagggaggatanaaaaagaaacaccttgtcttgcctccaatactaactattgcaggaagtgcgtantccgaaaggaggagagagacatgaaagagccccaattcattgttacactcaagttcgaacacctccatatctaaaaagacatncaggtaaagtaatggtactgaaataatcaggtgagtcattgtaacaagaaattgtcactttatgcaaagagagcaccgtagtgaaccaatgtggaatcttgtacaagtgattactcctgtcctgtgataaaaaa

SEQ ID NO: 37298 - DNA, 444 bp, Oryza sativa
  unsure (1)..(444): unsure at all n locations
actcaagctgttatggacatganggctatttaccatgggaggttataatcttctcaagaagaatagaagtgcaaaatgattggacagctgatgagcattataatctcatggccgatgaaagggaagactcggttcagtcaagattaagagcccttgcaaaggttactaaggataaggaacgagttgctcgacattacaacaagaaagtggtgcccaagtctttttcggaagtagaacttctatggaaattgattttgccgattgggactcgggataacaaattcggcaagtggtcaccgaattgggaaggaccgtttcacatctataagggtgtgtctaaaggagcttacatgttgcaaggactcgatggagaagtttattggtgagcgctaaatgacacaatattgaagaaatattacccaagtgtttgtgtaatgcatgatc

SEQ ID NO: 37299 - DNA, 457 bp, Oryza sativa
  unsure (1)..(457): unsure at all n locations
agcgacctgcggcatgcaagcttcttgtcagaacttgttggaagaatactgtatttgtctggcctaacacaactgtaacaactggttcctgagatatcttcccttctcttgatctggaagatatatcttctctgaatcacgatatgtgcctggtggtggatgattaccgcgcatacatgcagcttggaaataatctgcaattacgcgcgtttctgattcagttagtggcatatgaatccccctcggatcttgacagattcctgaacaataccgaaaacgaaaggaactgcataattgctccaagttatcaccccccccctcctcctgtgaaatcgtgatcacgacatgcatatatacaacctatagctatcgtattttgtgacataaattatgaaacaaaccgaagagaanaatgcagagaatacgaagaacacaagaaaatgtaaacgtcatatgt

SEQ ID NO: 37300 - DNA, 381 bp, Oryza sativa
caatatactgagtgaactctgtttattgtgcatgcatatatggccttcttaagatgctcaaccatgacatctcttgcttcttcagtccatgcatcatccaattgtgtcttacattcttcaataagatagtccacacagtatccgtggtgactgtcatggaaaaccaaaggcacttcatcccatagaccattttctccattcgatatgaatgttatggcacgggaagctgacacagaagaattaagttgctcaagacaccaatgccagtgttcactgctctcatcatccactacagcaaatgcaactgggaacacatcaccttcactatcaacagaagtggagtaagtagcttcactgcttatttggtatacagatattaca

SEQ ID NO: 37301 - DNA, 468 bp, Oryza sativa
  unsure (1)..(468): unsure at all n locations
agctagctgcagcctgcacagggttgctcaatcattatagtattgtagaaaggatcttcattggttctatcgtataggacacaatgaatggagctctaaaggtgcttgcaacttaaccaggtgatccattcaaacaagatttaggtgtataattgacactgctttgtttcataaaacaaagaacatgataaaagcttttgttattctaaggtggacacatttacaatttattgttaacaaacacagaaggagacgtgcatgttaagaacagagggaaaaaacaaaatcccctgtacaggacagaacataacagagggggaaaaagatgctagcaaacctgtaaatctgccaaaagcatgtccaatntacttcgaaaaatgcaaatcacacaaaanaaaatccccatctaccagacacaaaatcgagctcagtgacaagaccaaaaaaaaaaaaatcagccatcgtttc

SEQ ID NO: 37302 - DNA, 460 bp, Oryza sativa
  unsure (1)..(460): unsure at all n locations
tcgcagcactggtatcattacctatgtagaacanagtcataagttacagctgctaccaagaactgacagaatccagagtccagcgatcacctgatgatagaaagataacaaggcacatcagcaggcaatcaacaagtgcctaatgttatgcatcaccgaggataaagagtcagttaacatacaatgaggaacttcttcagatcacggccatgaccaatctccctcaaggttgcaaaacctctattgatctcatatctcagagaaagggcaatgtttactgtcaagtcctctnggaatttacctcaggaatgtttggaggggacctaanaaatcagtataataagttatggccacatacatgataaggaanaacttgacaacagggcaccacanataccagctgcgggtctaaagcgcatcagagtcaaagtactacagaagctcacttgtggatgaaagt

SEQ ID NO: 37303 - DNA, 427 bp, Oryza sativa
tagagcgacctgcggcatgcaagcttaatagtgatacaggacataccatctgtggttctgtcagatagcagactgcatccttttattctgtcatatatagatatcaattaacccacttgtgtgagtcatcgcaatttgatggattgaaaattacaatcactctgcaaagtagattgatgtctaacacagaatatataagtcattaattgccacaaattgcactgagagtttgtaacttaattgcaagggttgatataatctttgcattagtttttatatcttcatgtgatatacagcagttcttcaacttgcacatgttcactgaatccgctatcgagatcaactatctgaactgaagaccctatatatcatcaccatatatatcaacgaagtttgtaggttcaattcacttcacatatgaaatatg

SEQ ID NO: 37304 - DNA, 420 bp, Oryza sativa
  unsure (1)..(420): unsure at all n locations
taatcctcttaattaatgattcggcgagaccattctaagtgttgtcgtgtggtacagaatgttccactntaattgccanagccatgcaatattcattaaataccttagaggtaaactccccggcattgtccattctaatggattgtatccggttatccgggaaactggctctcaactggattatttgggaaataagccgcgcacaagcgtggtttcttgtagaaagtaaacaaacaatgctccatcgagttgatgcatcaactaataccatanaatactacaatgatccggacattggattaattggtccacatatgtctccttgtattcgttgcaagaatactggtgattcggcattcacctttaaattagagggtctaacgattaatatcccttgtgcacaatcagtgcaaacaaaat

SEQ ID NO: 37305 - DNA, 405 bp, Oryza sativa
tgacatgcggaccccacatgtcaacctaaaggaccgcggtagaccgagtacacacagacaggccacgggttgacagaagcagatcccgagtgtcacctaggcgagtggccgacaaacggactccactagacaccacacgggctgcacacgtggaaaccacgcggctaccgagcgggcacactaacacggtcaccacacgcacaagcgaacgactaccgacaccggtacacgggtaccgtggtcgacaaccgcacgacgggcacgggcgacaccgaaaggatgatgacggtgcagcgagaggagagatccttaccaccacgcgacgaggcgagggaacgacaacgactaacgggcgcggcggagactgacggcgagggaacgacttcagcggcgatccttggatga

SEQ ID NO: 37306 - DNA, 359 bp, Oryza sativa
ttcattatcatacataatatcattaagagcacctatacaaatatgttggtctatggctcctttgaacaataagatgtgtagcctctctccagatagtagtactagcttggtgagtaggatcttcatagatacaaaggagattaaacatcatattatgtgggttatgtacaccaaaagcaagcacataattaggactagacatagctacggtgagatccatctcattcgtcgacattaaccaaaggccaccagaattgcgatcagctgggacaacaaaactatgatcaacaggaaaagcattagtgagatcatcagaagatataacagagatctttgtgtctgatacaaatatcacctgt

SEQ ID NO: 37307 - DNA, 395 bp, Oryza sativa
  unsure (1)..(395): unsure at all n locations
aatatactccatagtactgcagaaagtgtttttttttctttccatgagtgaattgcttataggctttcagaatcctttagtccaagagcaattctactgtccttgaggaggtatcatgagataccaaaattttagtgtaaattttggtacctcatagtacctangtacaatgaggtaccaatttaataatagaaaaaatatgactttatggtaccttctcaaggactcgtaaattgctcttcgtctaactgtccaaggatgcagatatattgcagtctaatcttcaattgaatcatgcatacttgtgatatatgctcccaattctttcccatatagaaattatgcctatcatctgatcttttntgttacattattctggttggattttggattta

SEQ ID NO: 37308 - DNA, 478 bp, Oryza sativa
  unsure (1)..(478): unsure at all n locations
cactatgatactaagcttagctgtccttgttcgcaacattctcttcatgtgctccgcatattgttatataccacaccacctttcctgggcctcccctctntgacttactttcttcaccttcactctntgctcgtttgtatcttgatgccccacagatagggcagacatccaagtcagcgtattccttgtaatacaaaatgcagtcgttcggacatgcatgaattcttctgacctccaggcccaacggacataatactngcttcgcttcatatgtcgtctgaggtaaattgttcccctctggcaacagatcctttaacagctcaagaagttctgtaaaactcttgtccgaccagccattacaagccttaagcttcatgagttccaacacgcatgacaacttgctgtgcttcgacttgcattcatcatacaacggcatctggcaatcttccaccaacttactaaacttctcaaaatctct

SEQ ID NO: 37309 - DNA, 463 bp, Oryza sativa
atgcagcttatgagttcacacgcatgaaacttgcttgctttttttgcatcatcatacaacggcatctggcatctccaccacttacaaacttctcataatctctgtcgttgcctctgcgtcttaatgtatgcaacattgtagaagacattgagtgtccaatctatggtctctccatctaaggagaagtacgaacatgccttctcgagctgcggcggtgttctctacatcctgatccaacacttcttcagctgcgacatcaggcgcctcttgctctccatgcttggtccaacaagtatatttcttcatgaattcattcattatcaaatgagcatgcacttcatccttgtcttcgatcatctgttcattcttacagaccctacatgggcacaacatgtgcatgctcatcctactatttctgtcattatccgcaaatgtgacaaattcagtgaccccctctctatac

SEQ ID NO: 37310 - DNA, 395 bp, Oryza sativa
  unsure (1)..(395): unsure at all n locations
tatanactcaattagatgaatatcanaaggaaacaaattatatgttcattttaatgtggataaagagattangtaacctgccgcatcagctatccctggacatgacgcccatcgagcaggggaaactggcttgcacatcccagacatggccgagcgccgtgagcccgtgacagcgtcgtcgtcaacatccaagcgtcacagatctataanacagtgaagtctttggggaaagaggcagcggtggtgaaaggtgggcgtgctacgcagctccgcataagttgtcccggtggtcatcatcagaggggtgcatcagtgcatcacgtacttcgcggatatcgtctcccaggcggcactaagccacgaaggcagcacctatgtgtggcgccgatcgatgc

SEQ ID NO: 37311 - DNA, 395 bp, Oryza sativa
  unsure (1)..(395): unsure at all n locations
tggatctagtaaaagaaaatacagccgtgaatctatacatatgtaatatatgttggacctatcaagaccctcatttatgagaatagaaatccattggaccaatcaagaagcttctggacaaaaaagttgacactatgtttggttaattaatctctagattaaataaagaacaaaaaataaggctcagctataaattcatactgaatttattaacctctatgattatccttcataaagtgattgtagcanattagcattagatcacgttccatttctccatatgcaatgactcagcatctatgatgcactgatacttcactttcttgccgtaccggtatccgatacgtccgatactccgtcgatacatatgcttgggatgtttttngaattataga

SEQ ID NO: 37312 - DNA, 462 bp, Oryza sativa
  unsure (1)..(462): unsure at all n locations
tcatagagganattatcaagacaagtgctttcagttcagaacaagaaatgcctcctgagctactcaaaatggttggtgacattgccaagagatgttctggttctcctttagccgcaacagcattgggctctacactgcgcacgaagaccaccgagaaagaatgggagtctgtattaagtagaagcatgatttgcgatgaggaaaatggaattntaccaatactcaagctcagttacaattgtttgccatcatatatgcggcagtgctttgctttctgtgcaattnttcccaaggattatgagattgacgtggaaatgctaatccagttatggatggccaatggttntatcccagagcaacaaggagaatgccctgaaatcattggtaaaagaattttcagtgagttggtgtcaaggtcattttntgaggatgtgaangggatcccatttgagttccatcata

SEQ ID NO: 37313 - DNA, 417 bp, Oryza sativa
  unsure (1)..(417): unsure at all n locations
catagcttatggagtacttgaatttgttctcgatgtgcctaataatagattttaattcaaagccaatgttaccaacaacactgctgtacatctcacttgccacaaaagctgaagtgatgtttcggtgatacttctccaccccttgtaagtagcacttgtgcttggtcacaatgctaactntccaataatcattccatttacccttatatgcatggacacgccacgggacaatcttcttcatgcacctcacttcatacacatnaattgttgacttgaccaccctaaactctctctgcaaagaaactggccaatgcttcaccgccttcttcatctcatccttatgagcataccttgcaccctcaattacctcgttctccttatactcccagagtacatgatcactctctgatataacaa

SEQ ID NO: 37314 - DNA, 482 bp, Oryza sativa
  unsure (1)..(482): unsure at all n locations
tctgtaggganacacanatggccaatcagatgcttaatggtcatatgatgccagaaaatccaattacacctagtcattgtattgaaagggctgcattgaaggaacatttgaatcatgttcctcacgcaaaagccgcagtgatgaatggccaaatgccccatagttacaggttggcgcaaaatcccatcctacctccaaatcatattgaagggtatcaagtgaatggaaaattgagtgaacttgtcacgacaaatgactatctaactgctagtcctttcagtcaaactggagctgcaaataggcagcataatattggtgactccatgcatatacatgcattggatcctagaagagagagtaatgcttcaagtggttcttggatatcattanngtgtgaacttaaccaacaaaataatggatgggcatctgcangtgctgccgatgctgcgagctcacatgcncccatattttcagaacctcac

SEQ ID NO: 37315 - DNA, 333 bp, Oryza sativa
gatgacattagtttcatagaatagtagtacttccttccaagataattaacgcactctgggtcggcattgtcctcaacaccttggattggtcattctgttgcgaacttttttgtttggtcgattttgattcctgaataagcttggatggtggatctctctcatggatttactgagtgctggatggaggtcggagggagggttctacagtggtgagattcttgtttgaatttctacattgcttgctctcctcagcttcgcttgaatccaacctctgcagggctttattttttttgcatcgctcatactcattggtacaaggttaatatatagaac

SEQ ID NO: 37316 - DNA, 503 bp, Oryza sativa
  unsure (1)..(503): unsure at all n locations
ggatggagagaagaccggttgatgattcatcggtcacttgggattctatttctgttacatctatgcctaagaccggaattgttagtgatcctctccctgttagttctattgatgttgacaaaaagaaagggaaaagtgttattattggagatcctcggcccanaaatagcatcaaaaatgcgaaggccgaagatcataaagttgcaaaggatgagtcatctagtttccaaatgaccaaaaagccgaagctcacttttgagatgcttatggctaagtacgagaaaggattagcgggtcaacgattngataatcaaactagtaattcaaaaaggaccaagatcatctcgtaggaagagaattggtcaaatatcaaagcaatcggagccatcaactataccaactccatacaaacctnncggtgtgatgccatggtatccatatncaatgtcactatatggggtatcctttatgtattatatgccctggatgcctcaccacctatg

SEQ ID NO: 37317 - DNA, 167 bp, Oryza sativa
ctgcagatgtcatcttcccaattttttttttatcgcacaccgatctgggaaatgttgcttacgatccctctataccgaacactatgaaagcctgtggccaataggacttatacataatcgctggcgctgctggctgcttacataggagacctgtcgagccacctgca

SEQ ID NO: 37318 - DNA, 427 bp, Oryza sativa
  unsure (1)..(427): unsure at all n locations
gcttgtgacgccagtatataaagctcgtctttaattcgtattcgagtggngtcaatatcaataattccatattgatctttattgtaccctctggattagttcgtggttgctcccggaacatcaaaccaatcgcactcaaacaacaagacttctttgtcattgggaaaattgagggtgatgatctttttaatcactccataccagtccatgccttcgccctgaacaacaacaccactgttttgtgtggttaggtttttcttcacattgngtgtgcggaacagaaatccattgatggagcacctgttagctacacgaactcgatgatctggaccacgagatagacaatatatatcttgatctatttttccatctgcatgaagaatgttcatctgcactcagaanaacttcgaacgtatgatcagtcaca

SEQ ID NO: 37319 - DNA, 414 bp, Oryza sativa
  unsure (1)..(414): unsure at all n locations
aagcacctgcngctgcaagcttcttatagctgtttagtatgtgaatttcattgatgcacgcatcatattttacaaagcagtcggtatatcactcggatcatgttattcggagattcacaccgcatatactatatattgatatcaagtcactcggttgactataattatcaaaaccactcagttggttggattatttactccttgactatatgctcagtttgttcaactaaccacatagttgggggctacacctattaggtgcatctagtcgatgcacctaagtttatatttaattatttntcagcccttcacagtcttctgaattggaaaaagtactcgtgagaccatggcaaagatgattgaagcactcggctttggagtaatctaattcaagagaagaatatcttttcgact

SEQ ID NO: 37320 - DNA, 433 bp, Oryza sativa
  unsure (1)..(433): unsure at all n locations
agtcttaggtagagtcctggcttataccccagttgatcgcctgtgaagatggagccgtaggcccgctagtccgctgctgtttatatttgattgtcaggccttaagtgcctttgtaataatgtaaatattatcaatataataaagatgtgtcttttatatcatgtttgtatggtgtaccccggctnttcctgggacggngattaatacactagcgttcgggaaaatgcaattttctcggtcgcgacagccatctcttgagaaaaccacccctgagaagagctggaccacgtggtacaagtgcgtatcggctagcaagaaagttcactgtgatgagattggtatcggccaagcacttgccctcaccatagccaattctgctaaagatgaacctttgatggccgccgccacctatttttggtccaacaccatcaat

SEQ ID NO: 37321 - DNA, 416 bp, Oryza sativa
  unsure (1)..(416): unsure at all n locations
gcagaagtttcggagtctttaccagtaatttccttgtttcccactaactagctagctatacgcccttcgtctaaaataatctaataattcgacaagacataatctactacaatgaatttggatatgtctcattgaagtagttgagttttttttttgacggagggaataggtgctaagtaatttaaactatgggaggatctcttcaaaaccgacagccattagaataggtcgcctcgatggatatgtagctagggacttgactaatcaaatcggcaaagtgattgttaattgtcgcgtgacacgattctatcgatggagcaagctctagtagatctcagctnttgaatgacatgatgatatgatccggttagacgagaaacggacaagtgaatttatcttttcccctggtggagctg

SEQ ID NO: 37322 - DNA, 192 bp, Oryza sativa
atccttctcgggcttggatattgtcgacgttccgttctccgcttctgcgggaagatctttcgacatggagtcgaccggggtcgtaatcatgctgttctcactaccgataattgctgcgccagtcgagatcggcattgtggtgttgaccgcgaagacgatttcacctacttgagtccacatcagcatcgtcga

SEQ ID NO: 37323 - DNA, 369 bp, Oryza sativa
  unsure (1)..(369): unsure at all n locations
agcttgcanatcgataacagatcagccatgtgattttcttgaanataatcaagctgcttgcaatagtgaacctcctgtggtgaacaagccagacagctgctttaccaaagatggtggtcagacagcaaacatgaccagttcagatagctcttcatgtctaagcgagggagacagagatagtagcatgagcagcatgacctcattgagtgctcagaatccggaatcctcgtctacttctgattcagaaagatcttcagaaaggaacaatagcaacccaggcaatccaccaaccaagaacggttcgcgttcattacttgaaatgtgcgcaagaaatggtttcagagaataccagccacagaatattcaccc

SEQ ID NO: 37324 - DNA, 350 bp, Oryza sativa
  unsure (1)..(350): unsure at all n locations
tacactatatgntacattgtacaatataataagtattatttaccggaagacaaaaaatagagggaanttacaaaacaactatgctaaatattgtttcataatcgccagaggaggttgttcatattctaccacccctcaagagtattgttgctgacgatgatcatgtatggcccgtcaaaaaaacaaagttacactatgaaaaatcgactatgactagtgagaaaaaaacctaacttcaaatatcttggattcgatgttgtgcccaaaagagataatgtcaatttttgttggcgccatctcactaatcatgcaagtatttggagtcatacacatttgtgaagagcatctta

SEQ ID NO: 37325 - DNA, 406 bp, Oryza sativa
  unsure (1)..(406): unsure at all n locations
agctngcattanacacctaagttcccgtgtcttgttttattacgaaagtactcaccatggctctatataaatatatatatatatatagttcctccgccctgaagagaagataaagtgaagtgaagattagggtttcgtcctggttcccagccgtcgcctgtggtgttgggtattagaccgttggttctgctgctgctgttgttggtgttcgcctcgtccgtgtcgtcggttgtattctcgggctgtctgagctgcagcctaagttaaggtaaataagtcctctatttattttaaagaatgctatgattcatatttgtcaccgtgggtaccagcactatgtcctgtgactggtaccgagatcgcggtttcgtaagaagcggttcgcaccgttttccctacgacacac

SEQ ID NO: 37326 - DNA, 382 bp, Oryza sativa
  unsure (1)..(382): unsure at all n locations
ctaagctcgcatagtggcgacacaacagcccacacatgttttcgttactgatctngccgcccaaacgacacaacagcttcgacttcactgcaatgctaccctaacgccaaaagaacaagcataaacgatacccatgaaggacattagcccaaacaaccaaggaaccacttcctacatacagctggcatcaacaatcttataaagagattgcagtgtgtcatcgttgccgaacttcgtcgcacccctacagcgaagcagctctgactctacccagcagtaaccaaataagaatgatgaacacttgccgtagagcaagaaacagaaccaagacagagaagaccttgtcaaacaccttatgcttgtagagcttcagaggcaatgc

SEQ ID NO: 37327 - DNA, 99 bp, Oryza sativa
gactcgctgctgccaccagtgtcatcctcacatgaatcctcacctcaccgtctagtgatcacgaactcggcatccccaccggtgcctctatcactccgc

SEQ ID NO: 37328 - DNA, 495 bp, Oryza sativa
  unsure (1)..(495): unsure at all n locations
tcttactntaattnggaactagcattatcgcagaagtgcttattatggtacgttactgcgaaatgtataagtcggtactatgaaatttataggtcgttactgcacgttttgcagtaacatcatgatgaaattacagtaatagagaacatatgatagtaaaggtactactacagtaccactgcttgtgcatagctaaatttttaaatctcaatcttgtgcaaaacacaagtgctaaaaaatacttctctttgtccatacaaagatacatagtagcaagcttagtacaagtaaacttttagaattctaatctttaaacaataatatctctcacatcacatatntatttttagaactgttttcaccataattctttaaaacaatgttacaacgagacaataatcctgttactacacgatgatcgagacaataatgcttttatttacgttgtactacggaaagntagtgtggtactgcacattgatcatncgcgtacta

SEQ ID NO: 37329 - DNA, 334 bp, Oryza sativa
  unsure (1)..(334): unsure at all n locations
atatgacnggagcaaacaggaactaccggtnacttcattcttgatactncctctgtcccacaatataacttctagcattaaaatgttgtctcaaaatataacagattcacctacattctcttctcaaccaatcacaaacttgcacctacctcctcttaatcaatcacaaccctctctcatttaatttcacctactctcttaatacacatgtagccctaagaatccatatattgaggttagaaactaacagatacagaatcagaacctacccaggaatgaaattagatgaaccagcttgacctcgaccaaacccactcccaccaggcctgaaata

SEQ ID NO: 37330 - DNA, 131 bp, Oryza sativa
  unsure (1)..(131): unsure at all n locations
tatctccctactccttttaaacgncgccattacgagcaagacaaccgcaactactaaaagcaaaagaaaataaaaaacacgcacagccgcaagcacagtgaggctgaggcaagcggagcgcggcggagcta

SEQ ID NO: 37331 - DNA, 482 bp, Oryza sativa
  unsure (1)..(482): unsure at all n locations
atgaagcttgcacctgttaaacagtgtgataagtatttttatctatcttctcctcgnacatactagttacatgtattggtgtatnttttttgggagacaaatgcatttaaacttttgtatgaaatacctgcggtctatttttttatctgtaacttntctgcctttatataattagatggatcggtcgtcatggatgtatgagataccgagaacgcagccgatatttattaaggaagcatctanaattattgatcaggctaaagagcatgctttgagggagaatatgacaaagatcttttgtccgtgtcgtcattgcaagaatcagaaattgttggtagatcctggtgaaatatcgggtcacataatggagtacggattcaccgccaactacaaaggttggacctatcacggagaattcgcaatccggaagatgacatgaacagtatatctcgagatgaatgntgacagaattttattatcga

SEQ ID NO: 37332 - DNA, 528 bp, Oryza sativa
  unsure (1)..(528): unsure at all n locations
tatcactgagatattcatactaatcgttagacatggaagccgttcttttgtataagaagcagagaactngattaaatcactgtcgaaggctgcgaggaacatgtccgaaatcgaggacatcatggttatctctggctgtagcagcagcctaaagactcttggttccctcgtgaaagaagctgaggaactcctgcctagagcaagggcatccgaaatggaagtgataattgagcatcctagctgtgtcaatcgaaatcagattaattaaatcgtacataatctgtattattttaatccataccctcattggaaaactgtgtgccggggaaatctgataatcgatctgaaaaccgaaattaanaattactcgtgccggtcagtaataaaatcaaagtgaaaatcggcctttaatcatctgaggccaatgtatagtatntcttttcttaccactttgtacattcccatttgctggtcttctcttctttnnttctactctntcccaatcatgtaacaaatgtacttatcatt

SEQ ID NO: 37333 - DNA, 253 bp, Oryza sativa
tgcagctttctgtccttatcgcgtagtccgaaacttttactatatatacccgtatactccggcctcggtgcgtctctccgctccggacgcagggcttgtgaccttgcgagaagtagtggataatttgaggtttgcacttcgtcaactcttgcacctgtctaactgcagccttcacaaagggcgtgggcgaagcggcgcaaacagatctgggggacctccacgcgtccctgctgtggctcgcagatgtcgtggt

SEQ ID NO: 37334 - DNA, 403 bp, Oryza sativa
  unsure (1)..(403): unsure at all n locations
tctctcagagatcagntagctntaaacaaatatgttcttctatcaatatatactatggagggctactgtgtctgattggttatcagatcattgcttacttgggtttcacgggaaggggaaacacgttttgtgctctatgatctatgccatttgctacggattacttaagctactgcctcattttgcattgatgtggtcaatacatgggttctaaggttagagagttcagtttctctgtttttgntacctgcttgggactcggcatgctattggtgtaatctttcactttgaattntgtagggataaaataacggagtacagggacgagagcgagaggttggatcagtgttctcgccttcatgactcttcaatctcaactgtcaattctgagaatgatgcaagt

SEQ ID NO: 37335 - DNA, 409 bp, Oryza sativa
agcttgcgaatggacttttaagataccttaacacattaaatatatttcttaaattattacaaaataacagtatcctaactttagtttggccttaatctatgtgataatttttttaacacacaataaaaatctaacctttcaataatatatgtgcccgcgcatacgcgcgggccacctttctagttagagagtaaaactgataaagaatgtgtattacatatagttgagtaaatttcacaaaactccatgtattttgatttaaagtggtgtatcatacaactacaaatttagcaccatatttattcacagactatagatttaaagttaagtatcatagaactgcatatgtaatattgaaggtatcatagaactatcacttttatatcacagtattacaaactatagcttt

SEQ ID NO: 37336 - DNA, 210 bp, Oryza sativa
tggctgagcggacaatgaagtgggaggaggagaggaggcatgagcgcctggaaggcaagtccccggcggttccttccggccatcggcgaagtgaggccaagcagaaggcccccgccgaggacatctatgatggcaatgatgacctaagtttccaagagcctgtggccaccattgccactgtcgatggaggagcgtgtgcgcatgtttctc

SEQ ID NO: 37337 - DNA, 204 bp, Oryza sativa
tagacactcatggatcaacctggttacagagacttgcccatcccctccatcaaagcgctgccattgtctctcgacaccaatgcatgaggcgagatcttgtgaccgcagatcatagtggtgacgcaccgcaccaagggcggacaagctatgtcatgctcaatatcctccacaccgcgcacacacattactgcgtccacatacagc

SEQ ID NO: 37338 - DNA, 441 bp, Oryza sativa
  unsure (1)..(441): unsure at all n locations
catgcaagcttgganaatctccatagttctttttaaaatttattatgtcccaaaantnttataaatatgttcctttacattnttatatatcctttttgggatacaggtgttttcagtagaattcccagtgatgcaatattgaagtggaggaatctcgcagaataggtaccaatgggatttccgttagtacgaaagcattactacaatccctcaatccctgtatgtgtgtattagcatacggataaccctgatgagtctaatggacacttcaattaaagtgcatgtactctcaacttcagaagatgttaatgtagaggtgaggtccatcattggactactcagaagacatcttaactaaacttttgaacgtatgaatgtaattaaaccagtagcactttatcttttaggtacattttgtacaacattaattaattcttccta

SEQ ID NO: 37339 - DNA, 394 bp, Oryza sativa
  unsure (1)..(394): unsure at all n locations
caatgtcgctgaactcctagtaataaagtgccctatgcctatgcagtgttgttggtctccaagcgcttgcaaggaagctccaggagaggcagatcattgggatactcacgcgtcgattaggtatggtagatccacccncaataagaagtgcaacaaaccaacaggaaaagaagatgattaacttaccggctagatgatccccaactgatgagatccccaacttcctttgnggtttctcctcctgctccagggagggcggtggccggcggcccgtgcggcgggaaaaagacagctggacgacaacatgcgcggcggtgagggcggcgcgcgcggtgggagggcgacacccgcgcggcatgaagaagacagctggacgacaatgcgcgtatcgaga

SEQ ID NO: 37340 - DNA, 459 bp, Oryza sativa
tgcagcttactgattaccacatttgagtcattgtttaatgagctcatcaccaagcatcatgctcaaagccagtttgatgcccagaatgtaccatttttcacatccaagggaaacgagagatgcacatatggaaataacaacgctcaaggtggcttggtcaggtttgagtcctccgcggatcatttctgacagcaaagatagtgctccttcatctttgtacccagagatcaatgtgttccatgagatcgcatcctttgttggcgctcttcgaaaccaggcatttgcactatccatgtcccctttgtgaacatatccttgcaagatcgcattccacgatatctgatccctgtctggcatctcagagaacaacttcaaagcatcatccaacctatcattccgcacaaaaccatccatcatcgtgtccaagcaacagtatcacgatgcggcatgtctttgaac

SEQ ID NO: 37341 - DNA, 420 bp, Oryza sativa
  unsure (1)..(420): unsure at all n locations
agcttgaagagttcctttcgtcctgcgatacggattttactagtgatgtagtaaaaagggtcagcataattttggaagctatntttccaaccaagtctatagatcggggtacttccataggcctcaattgtgcaaacgcatttgatattccatgggcagaagcaagaaaaatggaggcttccaagttgtattataaggtgctggaggcaatctgcagagcagagtcacagaacaataatgtaaataatttaaccccattgttgtcaaatgaacgttntcatcgatgcttgattgcatgttcagctgagctagtattggcaacacataagacagtcatcatgatngtntctgctgtcctggagagtactggtttaactgcattngatttgagcanaataattgagaactttgtgagacatg

SEQ ID NO: 37342 - DNA, 389 bp, Oryza sativa
cggcggcggtgggtacagtgaatctgacagtgtcgcggacagcgatggcagcggcgggtagcttgccatcgccggaggcggataccgcgcacccgacgtcgtcgtcgtcgtcgacgtctgcggtggcgcgcatcaagaggaggagattggagttggatgatccacctgcggctgctggtacgcgccgccgccggtgacggcgaaggtgaagctgagcttgccgttcgccttgccgtcggtggcgcacacctggtagctcacgtgcctcggcgccgccgccgcgccgtcgccgccggcgacggcgaagtctgtcaacggcacggacaccttgccgacgagcttgctcccgagcagcggcacctgcgccttcacctcgaactgcatcatac

SEQ ID NO: 37343 - DNA, 415 bp, Oryza sativa
  unsure (1)..(415): unsure at all n locations
agctagacattgcggaccactgagtctagtaccagttggtattgtcccggcgggaccactcggtcaggatgattcgagcggtcaaacttgattgcaatctctgaccatcgaagatactgnggcatgtcgggctgaacagcattgatctcccgttcagtcaacttctgcttccgtttagactcataagccagggggccgccgaagatatggttgagctccttgcggtgatcttgaaaacctgccggggtgtcgccgtcgtccttcttcctcgacgtgctttgttcttcgtccgaattcttccgagcagtcttggtgtattgatccgcgaattgctcgtagacgaagcaatctttggccacatgtgtggaggtatggatgtgcaggcattggagttcatgatcttgtccaacgtgtt

SEQ ID NO: 37344 - DNA, 427 bp, Oryza sativa
  unsure (1)..(427): unsure at all n locations
gcacaatatgcatgcaaggaatattgttttgttgaccgttaacactataaacaaaccccatgcacgacttaacatacctaatcggtgaaaataattagccgtaaatattacatatatatatatacatcagatgatgaattgtagtaattaaattaattaaacctactaaacccatacaacgtcgtcacgactactcctgatggtacatctaagctactccatttcccatcggacgaatacaaccacgcaccagacanagtacgcagacacaaaattatcaatgataatcatgatgatggagcatcatatctactactagcacatacactatctntcttccttccttctcctaattaattcccctaacaaaatgaaggtgaagagaagaagaatgaaaagaaagcnaaacatattaattaatagaaag

SEQ ID NO: 37345 - DNA, 375 bp, Oryza sativa
  unsure (1)..(375): unsure at all n locations
catgcaagcttcngtgggcatcgactctccgaccttaatttgtatgtcctaaggacccttacccnctgccacgcatagatcagattgtcgactccaccgcggagtgcgaccttttgtgttttctagatgcatactctggttatcatcagattcgcatggctagggaggatgaggaaaaaactgcattcattaccctcattggaacttattgttatacgacaatgcctttcgggttaaagaatacaggtcctacttttcaacgtactactncgaattctttgggtagccaaataagacgtaatggtgaagcctatgttgatgacttggttgtgaagacgcgcaaccaagagaccttactctcggatctagcggaaa

SEQ ID NO: 37346 - DNA, 340 bp, Oryza sativa
  unsure (1)..(340): unsure at all n locations
gctcccggccgtgggtggcgcaagcgtgtcaccagcaactggtacagacgtgaagacgctactggtcgccaggcgcgcctncttacgccaagccgatcttgccgccggccacgccacctcgcaccgtgccgacatccactaccgctggccacgccaaccaaatgcgggcatctgccacgcctccccggctagccgcccgtggccgtgaaaccaccgcgccgtgcatctcaccggcagaccaccgccgtcgccgggctcacgccgcggtccttctccggcgcccaactcctttcccgcctacactttgacagcagtcgtgacgggtcgcctcacagccaca

SEQ ID NO: 37347 - DNA, 450 bp, Oryza sativa
  unsure (1)..(450): unsure at all n locations
ctgcagctgcagcttatactcttaatgcatttattacagtctttttgcaagtagntcccgagtctttgggtcatccttgaaaaggatacaaacataaatggtaaaccagaaaagaagaatgggaaacagatatgaaatcattcaagtacgaagtaatatacaataatctacaatgttcaatagtactatcaagtagaaaagcagttgacagtcaaccaaacaagtccgcactgcattacagtcataagcactaaacagtggatgttgaaagtaaatttccatctgcgaagcaagatgaattcaatccaataatcctcgcagcaataaccaaccttgcaacaatgaatcctgacttcaattngtttgttgatgactactcacaaatngctggtccatttgcactacgcttaatagtatactttcttggtgaaacagtacagtggatgaact

SEQ ID NO: 37348 - DNA, 500 bp, Oryza sativa
  unsure (1)..(500): unsure at all n locations
gctggagcagcttctctgtggggccttatgttataggggtggtgctgttggctgntctactttcaaattctagctatttcacctttcctttggagaaccaaatgactctgttcacattttttcttgaacgctcaaaatgttgatctttgttcatacaggcatcttgtaccattctagccataattgctttgctgccaattgcgcaacttctcttttttcacattcttctaatcaagaagggaactcctaacccattcccgttttatgtaatgccacggattgattangtactacgttgctattcctgataaatttntagagcagcttgtacaccagaatctcatacagtcataccctgtgaacacttaaaaaatatntatgtatctgattagaaaaaatntattacaaggacatccacaatgaaatggtaactttccagtgtgtgcatattggtgattctgaagtatgcgatgctaatctaacatcatgtctcacttata

SEQ ID NO: 37349 - DNA, 372 bp, Oryza sativa
gcaaaatcttgatgttcacaaattatttcggaaatcgactgagtaaattgttcactagcagaatattgaagctcaatcttccattccatcatactaatgactctcgttacctgtcaaatcaaaaaagaactcttggcattacattctggttaaaaatatctagcagcataacaaaaaatcgaaggttgcatatatatgacacaccatgcatgcatgaaaaagttacttgcacaaaacaaattctgaatgcaataatgtatatattgggtatgctactatgctagctatatacactgaattgaagatcagctattcacttaatggtaagagctctgtctttgaatgacagttccactacatataaacaataat

SEQ ID NO: 37350 - DNA, 168 bp, Oryza sativa
  unsure (1)..(168): unsure at all n locations
cccaaacaagctgaaaaactaacctaagaggctgaatatgattatattttattgaactgaactatnngccgtgcgatggacggcgatgaattcaaatcatagaatgtgtcaaatatgtaatctcgtactatacgtacagtctccatgatttaatattcgcgatgctca

SEQ ID NO: 37351 - DNA, 379 bp, Oryza sativa
  unsure (1)..(379): unsure at all n locations
catgcaagcttacccgcaggtacaccaaacacacacttattgtgtttattttatgcgggcggagcggagattctcaaaagtttccgctagatctgaaagtaaagtctcttggttgcgcgtttttacaaccaagtcatcgacatacgcctcaacattaccgtctatttgactacccacagaaattcgagtagtacgctgaaaagtaagacctgcattctttaacccgaagggcatttatgtataacaatangttcctacaaggagaatgaacgcaagtttttccttcatcctccttaccatgcgaatctgatggtaccagagtatgcatctagaaaacacaataagtcgcactccgcagtggagtcgacgatctgatcta

SEQ ID NO: 37352 - DNA, 428 bp, Oryza sativa
  unsure (1)..(428): unsure at all n locations
aagctaatcagtttctttttttttccgattcacggaagtggcacattattttatactatcgtacacaaacacgtgcagatctctccctttgataaattcctgtgttggttgctagatatcatgcgctcgaaanattgtagggtttcagtcacgatatgaaagaagcttatggatggtttgtttggttgacgtggtatccaaaaaaaaaaatgaaaacatgtgggggttgacatgtcacgggtattcttcttcctccaatcatttctctctctattcccatctttttgcacacctccctttctcttccgatctcttttcgcggcaatggctgatggcagcgaggggagaggcggtcatagtggcangagagaggagataaagcaatggcggcggccagactggtcaccaagctcctcctcgcatgggga

SEQ ID NO: 37353 - DNA, 438 bp, Oryza sativa
  unsure (1)..(438): unsure at all n locations
atgcagcttgctgtaagatctcttagagatacaagtgtttattactgttagntattcataactcattcctgtgaacatctanaccacatttattggttatattatgacagatacatcctagctaataaaaagttgactgggggctggttataatgtgctatttattatcttggatatgagaatgggctattttatgtncatgtcaatttcatattccctttaatatacttagatgggagaaacattcacctttcagacagcaatatcacattcngcatgcttaatatcttgatctcaacccaaaatgcataaaatctgaatctgtaacataaataattatgtgaagttatctgtactacctgatgttcttttaagtttggaggtttgttttgcttcgtttgcatgggatgctattgacttaattaatacacttattct

SEQ ID NO: 37354 - DNA, 430 bp, Oryza sativa
  unsure (1)..(430): unsure at all n locations
tgtgccatctactctcatgagtcatgtactgtgaccgcagcatgtattgttttatttgtnaaagaagttagcatttgcttcgatggcattgtgtttgtaattattctaaagtttgccagtacatatatgaccagaggatgccgatcatatgtagccatgcattgttatgattcttctcagtttctcagttcttatgtatcatgttatgtttcatggaaagatgaaaaggtatattgcatactgtgggaactatggagtcataaactgctgatgcttatgtaaattnttgtggaaaatgttttgctttgggataatacttgtatcaagtatgttgagaatatgtntgctggctgctcatggaaatgtatttggtcatcgngtgcttcactgcatatctcatattaccttctgcacttgaacctgcagtctt

SEQ ID NO: 37355 - DNA, 375 bp, Oryza sativa
  unsure (1)..(375): unsure at all n locations
ccggcattagtccatcatcactgactcaatagtctactaatgatgcttgctagttagtagtaataggcccatctctgaaagcctgaaagcaagtgtcacctacagagcataatatggccactgaaggcttaccttcagttctttaattaatccacatggaggttgtcagtggagaggtaattaaacctcactgtctagtagatgaataaaggattataaattagtggcagatttctctgcataatttgaagcatgatgcttacaaagaattgtgtaaaaaggggtgcatgttgtggtgtggatttcttagtagaatgctgatggccttattatggctcgagacaaanagacatacatgccatggctcatcatact

SEQ ID NO: 37356 - DNA, 511 bp, Oryza sativa
  unsure (1)..(511): unsure at all n locations
ctatgaatctcagctgtgcgttgatnggcagtttaccttgcattcatcgtctatcttatcatgttaaatacctcactgtattctcgcctccgctcagcaatgacaaagagcacatgagcgccttcagaagttttttgaacaaaaaaagggcaggacaattcccttatcggccttcagaactgttagtttctaccatggtgaagcagatcatattagaagaaagatgctcccncatgtaaaaacttgtactactgcctgcttgtattagctccaggaagaagcatagtaaaaaagtctatttgtattagctccaggaagaagcctaccgatgaactacactgtatattcctctgctgttgataagtgcattagcgaattggttgggcttctccacttannggtgggataaaccacagtggcattcatgtgtttgaggtataaacagcagtagataaacttgtacctttctcatttntggatgatgatgactgcagaatgctgtgcacttgga

SEQ ID NO: 37357 - DNA, 418 bp, Oryza sativa
  unsure (1)..(418): unsure at all n locations
cagctntttcctcacctcttgcccgcggccctttctgatattctgaggngactaccactagcctgcttgctctgtgttccctccacattcctttccacgtgcccctgctggttcccctccgcatccctctccacgatcccttcctcgttcaagtactcgcatggatgctcgtgcccctcttcttcattccaggactggctgcttccctccgcgattgtatcgtacaatatctgattctcatcgaagtcagccatntgttgataccacaaacatctgctaagtcacgagacatatatgtcttaacaatctaagcatgtatgctaagtgtaaatgtcgacattataactctacacaaccttacgtgctaagtctaattacgaatcgtgagataagctaagtctaagcgacgtatattata

SEQ ID NO: 37358 - DNA, 426 bp, Oryza sativa
  unsure (1)..(426): unsure at all n locations
cattactccgatgatgtntagagaagccatatatgatgttcatataaaaggtgaaaacacgctacaacaaanatctcatgtagttgcattcttgtagaggtaattnttaaaatggctttaaaatcaagagttataaagtgtagagacagtgttagaggcacgttaaatattgcctaaaaacttttaatctagagacactcttagcacaatttgttaaatttaccttgtagaggcactcttaccgcactttanaatttgcttgatatataaaggcattnttttaagacatttcaatctccattgnggcacttactgcgaatttaatctcagctaattaactcaataaaagaaacacgaagcacatatgtacaagtaataacatgagggtgatatggttaaaacattcaagtagaaaatgaaatattc

SEQ ID NO: 37359 - DNA, 444 bp, Oryza sativa
  unsure (1)..(444): unsure at all n locations
aagcgacgcagcatgcaacttaaacaaatgtcaaggatggttttttttttatattanaaccgcaaagcagattaacgaagtttattntgcctctaatgtcatccaacaagtggcttggtggtgccattgaacggcatggaggtggtgacgtttgttaaggtagttccagccatatacctagctagtgtttgtaccactaaataagctgtatataaactagttgacatgatagattattgaagatagagaattgatgagagaagagaggtgattggatgattctattgttatgaaacaaaacctttgacacatatagtctgtattaaaagtgtatgatgacatggtaattatagaactactaaatattgttgagttgggatatgtttgcggagaaatcttccccctttatccagcttaataagattgtttatatccaacttgtac

SEQ ID NO: 37360 - DNA, 328 bp, Oryza sativa
  unsure (1)..(328): unsure at all n locations
ttcagcctagtgttcgaggatgaaaggtacatataaattagtagtaaaattcactattatattttctaatataactatcgcaaaactaaatgttttgcaccatgttaagtataagattacaacatttatgactctaacataacacattggtatgaacttaagccatacaatctatagtcttgtgataactctaatattaaatctatatantctttttacaagtcatgtgttaaaactataattttgcattgtgatgggacgccttaaatatgtagtgttgcaataatatgagcaaagtaactgtagttttcttatatacatgtgctac

SEQ ID NO: 37361 - DNA, 443 bp, Oryza sativa
  unsure (1)..(443): unsure at all n locations
catgcaagcttccgctgcaccgctaacggctagaatagctcttatgtttatncgactagcaaataatattccacagtccacccggctccattgtgtgtcataccaccatttttctgcgggagaggattctaataactcgagtggatgtccacccgtttattgcatatgaactagatggttatngaaaaattttaaaaaaattgacaagatatatcaatatgtaatatatcactccacaaacatgcaagttcaaattcaacttctacaggttgtaacaaaaataacaaatttaattgtaaatatacatatagtaatttgagttttgtttgttacaacttgtagaagttaaattttaacttctatgtttatgtattgatatattacatattgatctatcttattcatatnttttttatttttttataactatttagataacatac

SEQ ID NO: 37362 - DNA, 405 bp, Oryza sativa
  unsure (1)..(405): unsure at all n locations
agcttattcagaagtgaccgagttcaatgtttatgctttcctgacagcntatctattaattaggaagagtatgttactttccttttatgtttaggaaagagtgtttaatgttcgataaggactttatattttccttgtatctttagaaaatatctttcttgtccaagaaagactcctatctatccatgggtataaatatatacacacggcgttattgtaaactatctcaacgatcaatacaactactctcagcacatcgccacccgagggtttatatttatcattcgatcgaacatggtacctaacgtggagctgcatccgctttcaatctttggcgaagtgggtgttggcaactttataatcttaccatcaacccggttactgattttagaacggtcgatactc

SEQ ID NO: 37363 - DNA, 445 bp, Oryza sativa
  unsure (1)..(445): unsure at all n locations
tactaagcttgagatgttggcatttattacgatcacagagtaaatccgcatgttctcggatataccgatgtagcacttncaagggtatcgaatccaagggaacgtgtgtggtcagatcttcctccggttcatctaaggacaccaagcaaatgatatgccacgatagagataattttctagtgagagacagtgtctatggaaatcttaactgtaatcctaatgcaatactctaagcactagcaacccnctgttcccagatgtcgctctactacgtaccggacaggaaggacttaagtgatcttgagggctgtcaccacctctacacctacctcaaacgtactgtgggatacgcaacaattactggataacaattacctatacaccacgtctaagcaattaatatctactctagtgtttataactcaccacagcaatcactatattt

SEQ ID NO: 37364 - DNA, 428 bp, Oryza sativa
  unsure (1)..(428): unsure at all n locations
catgcaagctggcccttgctagagcaagaaggctatctattttcattgtcttagtctcttgggaacacgtgattgtgatgccaagcttatcctcaaagtccttcaagaaattgagcattacctaatagacggatcagagcaaaccaattagaatgtgaagttagttatacttataccatgagacaacagttaaagattatctcctttttacctccggtcggtagttgatggctaaaacaacttctgttactccaacttctttcaaagcctcaatctgcatatatcggaaaactttaattcagagcttattactctcctcaatcctcatgctcatgtctgctggagccaacattttggatataaatcaagtactcttgataaccgatnggaattttcgaggacagagaanatttggtgtgataccaaaa

SEQ ID NO: 37365 - DNA, 321 bp, Oryza sativa
gattcttcttatgatgctaattatccacaatctgagatttctcgtcactctttgattggtcttgacatgtctatttgcgagatgaaagttacacctattcacgagtttgtgaacatgtctactctgactctggattcgctttacacaaaactgaaaactcatgagatgaatattcgttctcgtacaggtgattctaagtctagtgctttggtttcgtcttcaacttctttgaatgttggtacttcttcatcgaagtcttttgttcttgctctatttaatgccatgtccgatgatcaactcgaacagttcgaggaggacgac

SEQ ID NO: 37366 - DNA, 417 bp, Oryza sativa
  unsure (1)..(417): unsure at all n locations
cttatgggatcgtatgtctcgcggttatggttgtatgantattcacgaacgaagagggagatggagttaggatggtacaaaagattgctcgatctggtgtaaattgtaattcaacctggacgtggaaaaggccatcacattttttaaaggacttccgacctagacctaatagaaagggaagggtgaacgttggaaacagaaaccaaacatattcagtagcaaagatgcaaattggactatgggccatgcatactaccaaagaatgttgtacgttgcaacaggtgaatacaaatttcacgattgataaaaactttaccaattntaatgacaaacaaaaaaaccaaacaatgaccaaacaaagtcataaatcatatatagtattaaacccggttgcactctctttatgcatcatcacat

SEQ ID NO: 37367 - DNA, 264 bp, Oryza sativa
  unsure (1)..(264): unsure at all n locations
gaactagctgggctaagttacgagggctcgcgtggagcttagtttataantggggtgtgaggaggtgttcgttaggttcctaattaactgagaaagtaagaatggcccttttaaaaaaaagtgggcaccatctcctttatataactagcaaatatgagcatgcgttgcaccgggtgaatatcatacaaatatggatgggctaagattgcttgtgtacttataacacatgtgcacaaacatattgtattcggaagcgtccagatc

SEQ ID NO: 37368 - DNA, 241 bp, Oryza sativa
  unsure (1)..(241): unsure at all n locations
actgcggcatgcaagcttctttgggaanagatggtgcaatgagatgatacgaacccggagggggtcggntgaatgaccaccttggaggggaaatcatgtttccccggcatggttccgtctcccccgtcttgcggagccggttcttcttgcgctccccctcgggctgcgacgtcggcgcggccccctccgggcgccgactgctggcacgcgccgccccgccccctcggggaggagatggggg

SEQ ID NO: 37369 - DNA, 451 bp, Oryza sativa
  unsure (1)..(451): unsure at all n locations
tccaaacaatgtaaaacacacggnttggtaaaagaaatatattctctcctccagtaaaaatacattntagactgttcaaagtcaataagacataacttttaaccacctaattctttntgcttaaatttaaaagatggttgcataagaatatattaatttatgaaatcttttgttccaataaacttagctacgacattagtttcatagcctatattttaaacaacaatgattatgattaanattaatttatgttgactacataaattctaaaatggcattcttttgtgatcacagggagtatatgcaactgcaacaatttaaatatatatatattcctcccaagaagaatgtacacatacactaatcaactgcacactacaccgtaatnnttttgtggccaaccgatttctttagcggtcacaataacaaccaccaagtttaaatatattct

SEQ ID NO: 37370 - DNA, 435 bp, Oryza sativa
  unsure (1)..(435): unsure at all n locations
tgcggcatgcaagcttcatcgacaacagcgtcaacaccggcttcaactttatgagtttctacttcaacaatgctagtgtagactcaagtcggcgaaattgtcttcccggtttacaccacgatgccgatcttgactgatccatcaatgaccggaagcgagaacgccgtggttacaaccctgngcgactccatgtcgaaagatcctcccgcataagtggagaacggaacgtcgacgacatccgagcccgaagaggatcctanggcggccaaatctgaacgatgacctcgcacggtggacagaacgactacgggaatcagtggctaatctcagtaacgcgttcgaggaggccatttgcggagcacagccagaacaaccgatagctggcggtgccgatggtgaacgacctgagcagcggacatcacctcaacgagccac

SEQ ID NO: 37371 - DNA, 516 bp, Oryza sativa
  unsure (1)..(516): unsure at all n locations
tgagatcgagctcggncatgggctgccctgtctctgtccgactgtatatgaangcanggaactttttgaaaatttgaacaatcatagggttaaatatgaaaacatacaaaccaatgacatgtagacccatggacctaagtgaagttcacataaagtataaggacttctttgcaagacggtaagagactgacagtggaccccctggagataaaatctgagaatatacaagagagatacctagaacttgtaaaatccatataaaatcaaatatagcttattttgagatgattcanatttctgtgatcaccaaattataaaatttaaagttatgaaataaaaacttgcactcacnagtacaaattagcctctataattcatctaagataaatcatggcttatacaaactcataanatgcatacagaattcattttcactcattntagagcanactttagttctacagatccaccaacatggtctctataacaaagtgaataaacatatacacacttaca

SEQ ID NO: 37372 - DNA, 468 bp, Oryza sativa
  unsure (1)..(468): unsure at all n locations
tgcaagcttgagaaactgtatgcagacatggcctngcagttatgagttaatgtattggatatctgncattaaatagagntcttatctttgcataagtgtaagtctttctaagtactttggtgaggtgaagtttacttagaatggtacaatgataagtggtaagaaactggattgaatgattgatgctggttgggtgcaaataaatgctaactgtttggatggaactcgctcactgtttggtatatagtcaaatatgcatttttttgccagtttctcttacataaaattagtgaagttcaatgtttgcacttaacatattgtgagttaagcaagtcagttgaacctgatcatatttcagaagcactataagcgtaaaatggcctgaattataatctgcaaagattttgtgagatttttgagcacgatttgatggtcaggatatctatgatccttctatttaacttgatg

SEQ ID NO: 37373 - DNA, 316 bp, Oryza sativa
  unsure (1)..(316): unsure at all n locations
atactaagcttagccactgtactggaagccatgctttcaatggtgtgacttttgagcgagacangcctggaagttcctgtcagcatatacagtgttcatggatccaattcatgcactcctgttacaagaactagttcaatggtgaggaggagttcactttcaaagaaaggagcaatcagaaattcaacagtttccaagttgctagatctccactgtaactctggtgagcaatctgaagacactgataattataacttagagaatcatgaattgcttcagaaggggggctacttttctcattctacatcacccctct

SEQ ID NO: 37374 - DNA, 378 bp, Oryza sativa
  unsure (1)..(378): unsure at all n locations
tgcagcttttacctantatgtataagggacttagtattaattaatatgagctacaaagggaataaggtagaatatttctataaagttaaagtatcactcacttccatattgttaacgaccaaatttggtaatccaaagatcggagatgaataaatcgagatggagttcgagatggagatcgtctcggaaacggagtaaagatcggctggagtccgaatcggctacgacctgnatcggcagagtccgagttggacaaggttaaccgattgaaccgagtccgacaatatgacaaggaatacgttgtcggattgagttaatgagcttcatgaggattgccacgcatggatagagtcatgagaacgcaattgtatctattaa

SEQ ID NO: 37375 - DNA, 269 bp, Oryza sativa
  unsure (1)..(269): unsure at all n locations
tcctaacagngagntaatagatgctggtattctgggagactcatcagtgactcggaagaacctggaatatgggccttaattgcctgaaaaaggtctgatttggcgtattggagatgggacaaaagttagaatctggcatgatcggcggataccgagtgaatcctcgcttatgttaactggtgttgctggaaagtgcgcctctcttgggttctccagtaataaagcaagatgatcgttcctgggatgcggatctgatctggcgaatattc

SEQ ID NO: 37376 - DNA, 427 bp, Oryza sativa
  unsure (1)..(427): unsure at all n locations
cagctatgtntatctctctgcattccaaaagactgattgatgtttttttgaccaagnggnagatcttggntccatcagaaacttctttggttggctatctagcaaggtagtagtgatggacaaatagttgttttacacaccagaggacatagcactatagcgacgagcacataaccagcatatatttgataaagataatnttcataaatttagcattcatttttcaagatgttctatatcagtagtagatcatgctgtagtaggttctatgccaataaggttctttatctacgccaataagaattatttcactctttttagcttaagggctactactataatgtgagatctagctattgtaagaacacttcgagcaatttaatctgctgtggaaataacananagaaactagttaattcttcacctc

SEQ ID NO: 37377 - DNA, 369 bp, Oryza sativa
catcattgataatagatctgccatgaaatacgaccgcttatactatgtatacctgtgtatcacgtttaaactatgatatatcaaatcataacatcaggaacaattatctgagagaagcaaaacaaaatagcatatacacgactcaatggagaatcctgatacagtagagcgcaatgatcgatgctatttcatctgggctaagcatccatgaactttaaccccatgaacagaggcagaccagttcaaatttacagcatggtctattttattactgaattagctaaaagaatctcctaaatggctgcgcctatggacaaatgcatagatagctacgctgttgtacattagcacatgcgaaagaaataatca

SEQ ID NO: 37378 - DNA, 373 bp, Oryza sativa
ctaagctcgccgtcgcttgggacgaccaccgggttcgccagccactcctgatggatgacctcaccgatgaatccggcctgcagaagtcgcgccacctcctcgcggatgaaggcttgacgtttctgggctagtcgctgcactttctgccggaccggccttgcgcccggccgtacggcgagacagtgctcaatcacctccctgtggaccccgggcatatccgccggtctccatgcgaagacgtcagcatttgcccgcaagaaggagacgagcgcgtcttcctatttgccgtccagaagaccaccgatccgcgtggtcttggacgggccgtcgcccatggcaacctccttgaccgggacctcgtcgcatgtgatca

SEQ ID NO: 37379 - DNA, 471 bp, Oryza sativa
  unsure (1)..(471): unsure at all n locations
agctgggccatagggccagagactgtcgacaggctttactttctcagcccacgttgcacgggtggaggaggaagagccggctctgctcctggcacacgcaagcatcgagctatctccagcggcaccggccgcagcggtttttgtcgcgaccgaagaaaatgccttttcccgaacgctagtgtattaatccccgtcccaggaaaagccggggtacaccaaacaaacatgatacaaaaggcatatctttattatatcgataatatttacattattacaaaggcacttcaggcctgacaatcaaaaataaacaacagcggactagcgggcctacggctccatcttcacaggcgctcaactggggtataagccaggactccacctaagacttcttctccaagcttctcttacttgaggggggaaagatagagcangaatgagtcaaccacagtactcagcaagtcacaccgggag

SEQ ID NO: 37380 - DNA, 343 bp, Oryza sativa
  unsure (1)..(343): unsure at all n locations
ctactcctgngngtgtgggaatctctctctctctgtggaatacaagagttcttctcctattctacttcgatggactctagaactgcaccaaaggcatcatcaacctgaggttagagctaaccctagctctattccagtccatcccccgctttatcggtgggcataggcctctatttatatctccagggtgtaccacatgcaccccctctatctatcccttcatggagacaggagggaactcctcccgcgtggctaatcctcgatccgtgcttttacccggaggactaaccgcggtcagcccttctgtggggctcagtgtcgtcctcttcctgacacaggggac

SEQ ID NO: 37381 - DNA, 479 bp, Oryza sativa
  unsure (1)..(479): unsure at all n locations
tgcaagctatccgcgttgtggatntagatgtttcttttgcactatggatgtactgataagtggcccagatcctctcagcggatgaaccactaataggttgcaagagaaccattttggcaacctctgtcaattctgatgtctcggatccatagctgctctaccactcaactagttccatcgtttctgcatccacctacacagattctagtgcaaaaaatcccttcttcataataaagtcattgagttgctcgcgaaagactntttcctcatncttattatctactattctctcaaatgctnttagcacacctgtcatggcctcaacatcttgattcggtgctctccttattgtgccaccgggagcaggtttttgaagataatcttgatcataaaaccttgggcaaacagcataagccaaacagtgaagttgaacactcatctttttccaacgttcaatgactatgttctctacctctgga

SEQ ID NO: 37382 - DNA, 280 bp, Oryza sativa
  unsure (1)..(280): unsure at all n locations
cagcatgcaagcttcggagcaccgcgcaaacttgccattagttttttaatttcctaaatacaagagattgatgcgaaatttgagtgtgaacatcagcagtttgggctatggcccaacaatacgtagcttccgaaaccatgaaataatatggaataagttcaccgccgtccctcaactntacaccgagattntttgagatcccttaaccacaaatgtacaaatctccactcctatactatacaaaatctgtcactcaaagtccctatgcagtatatacgag

SEQ ID NO: 37383 - DNA, 233 bp, Oryza sativa
  unsure (1)..(233): unsure at all n locations
gcagtatcgcacaatgatctgaactggacgaactcagcgctcgcaagtgcgcgtnctgaaacgcatccttccatttcgacgagacatgcaccatgtgcgatttgaccagagtgggaaattgttgctcgctactccaggcatacctccatcctgacagatacagatctctgagctcaagaccattaatcttgttgcggatagcatacatgagccgcctgttcaccctcaagttg

SEQ ID NO: 37384 - DNA, 372 bp, Oryza sativa
  unsure (1)..(372): unsure at all n locations
catgcaagctnttcctcctatatgttgatagagaaggagttttttatctattgagtatgcatngnagatcaaaggcaaatcaagagtctgctgccatcactgaggaagtgaatcaagaacaaacagctgctagatttgtcgcgagtgaagctcatgaggggcaaagagttgagttgaggttcctcaataagttgaaccctcttgtttttacaaaggaaaaaattacagcggaggatggtacagctatcaaaattgccatagttagggataatcagataattacatctggtccactttcttctgcaagaantgaaattttggctctccatggtaacttttatgatgttgtccctgataattggaccgaatctg

SEQ ID NO: 37385 - DNA, 349 bp, Oryza sativa
  unsure (1)..(349): unsure at all n locations
cggcttaacacgtcatcatcagagtttataatcacatagtatgaccgtacggaagcaatgcgtggcgaagcgcgttatatnttctttaccgcttatcattaatttaggtacttcttttccttctgatacttatagtggaaaatagaaaataagctagtaagcaggttgctatgcgggttgtaagattgcgtatttgcttcctactagtactctaccatagcanacatttctgtctctgggattaaaaacacggtatggtagacaattgtttaacgagctaatgcatccagctaattccataaggaccaccactataccggtgaaaataagagtgtgaataatatatcct

SEQ ID NO: 37386 - DNA, 406 bp, Oryza sativa
  unsure (1)..(406): unsure at all n locations
cctgcagctgcaagcttggaagtgaactaaggttctgtctatctttgtttctttttcccctgaaatcttttttctatggcatgacccctcctttataacccaagggatctacagcgtcgttatgtagagcacccaaaaaatatatagtctaatgtttaatgcgaccatcacattattttgggtgagtgggatccaaacatgcataatagtcactcaagcctcaatgtgccctatgatcacaattaaacaccattcaatataatctatgtagtgctaaatagtaagcanaagagatatttctacttcctccgtcccaaaatatacctatttttaagaatggcacgggtattaagaaagcatgtgagaatgaatggaggaagtgtgtgattggttgaaaatagaaagt

SEQ ID NO: 37387 - DNA, 445 bp, Oryza sativa
  unsure (1)..(445): unsure at all n locations
ggagctagctcagncgatntattctgtcttaattcatgcctttactagttacgatcaatcaatcgatcgatcattgaggtgtcgccagccgcgccgccgtgccattccagttccagctgcagctccacctcgccggactcgacgccggcgagcctcagcaccaggccctgcgccgccttcccctccgacgccgaccacacaacggagctcccgctccttgggaccacggcggtgccgtcctctttactgtcaacgccggagggggtacggcggcggctgctcgccgcggccgcctccaccagcggccggagctcgaagaacgccgcgcccatggtgtcgtcgacgaacgggtcacggtcgtagacctcctcgtagcaagcaagcggagattaattgatctctagcctagctaggagaacacaatggagtacatcgatcgatcgat

SEQ ID NO: 37388 - DNA, 476 bp, Oryza sativa
  unsure (1)..(476): unsure at all n locations
agncttgctcaaacttaattggtatagtggtttacttcattaagcaatataaaaatattaattgcgggagacattgaagtaacaattgatgaaaagtacataatatgcaccattccaaaattgcatgtacagacttgcatatatactttctctgttattaattagtgtgcagtgcagattgaaatcatgaatggaaaaaacaggggatgaacctaanatttgttgctatgaaattcangatcatatataacgttcgctgattgccattactcgagcaaaaaggggaagctataaggcacggatngcccaaattggcataatcatcactataaatctacaatggaatgcccaaagttggcattgtcacccgaggaagtggtgaattctgatagtgngttctgataagaaagcaatcgaagaataccagtttttaaaagttgcacattntcatgtgatctgantacagannatattga

SEQ ID NO: 37389 - DNA, 442 bp, Oryza sativa
  unsure (1)..(442): unsure at all n locations
ctcagcttccttgagtgggtaagaaaaggcatttcttcagaattgttcttttactgtcgaatatattctcatacagtgaattgttacgacttaaaatctaactaaactttcatcagatgatagtaattcggaatacgaaaatatctggtgcaatttgttaacagcaaagatacatgttgctcgtataaattttgcttactaatattctttcacgccctaattaattcctagtatcaatgcacaaacgatggtttatgaatgaaaaccaggtgacaatntctgtaactaaacttgtaatgtcgatgtggntgtttgtctctctccaggcatggaacgtacgtctatctggaggtatacacaagctattcgatccatcactgtgtgacgagtctcaactgaaggagatcaaaagatgcatggagattggactgctctgtaccca

SEQ ID NO: 37390 - DNA, 408 bp, Oryza sativa
  unsure (1)..(408): unsure at all n locations
cagcgtgagtggttttagctgcagaactgtcanctgtgaatttaaagaactttcatgtccaaccaaatgcaaaacacactaattcgaagtttgaactgaaacactaataccaactgccaagagaaattctacgtatttatacttccagttaattacattctttaactgtcagttctctattagaaaaatatgacctactccaaaacagaacaatggcaattggcccaaccaacaaactaagctaggttggacacgagctacaaatatattatttatcattggcagactaaattagggtgctagaagtgcaccattaattacataatatccttggcaaaacgatatgctacgatccggcgttgcacaatacgtttgattacatatacaacttggaattattgaacggaa

SEQ ID NO: 37391 - DNA, 469 bp, Oryza sativa
  unsure (1)..(469): unsure at all n locations
ctaaatatcgcactgacgagaatataagattgtgtttatcaacatacataaagtatatcatcatgtcactcttttcaaatatatacataactaaattagctatgcaatattttaaaataaagtgtacacccattatatatatagccatctattatctatctattatatactaaaagaggcgctctaataaatgagaanaaatcctacaaattctaagaaaaaagcaaaacatcaactgcttgatttttacttaattaaanttggtaagtctaatatcatacaccgttagatgaaattgattttaaaacanaccanatactatgcagtcccacctcttcttctctncgcacatatgtaggcatacgttcttaccatgtacgtacacttncttccgttttttttttccttttttttcattatgtaaggatatattattgaaataatatagtttacaaacaaagtctacatc

SEQ ID NO: 37392 - DNA, 399 bp, Oryza sativa
  unsure (1)..(399): unsure at all n locations
tatctcttacgctctaggaatggatcagtcagaacatcaccatcttcttgtcttcgccgccaccgactggtgtctccggctgcacggctggcctattatgccaccgttattgggcgtncacgtcttcaccgaccggccgcttcgtcgccgccgactggtgtcttcgcctatacggatggttggacacaccaccgctagtgggcgtctgcaacttcaccgaccggcttgccttcgccgccgccgactggtgcctncgcctgcacgctgccctattatgccaccgctgttgggcgtctacgtcttcaccgaccggccgcctcgtncgccgccgactggtgtntccgcctgcacgctagcctattatgccatcgttgntgggcgtctacgtcttcaccgaca

SEQ ID NO: 37393 - DNA, 462 bp, Oryza sativa
  unsure (1)..(462): unsure at all n locations
atgcaagcttgaagtcagattgtagttgcgccatcagcattatgttgtttgttngcagnaaaatcgaaatgaatctgtttgtgataaatcttatgttagattatatatgcaagtactttttataggtgaccatgcatattggtcttttgcggttctagctagctaggccgtgttgcacaggtgtgaagggaactagcaaagaatgtaagatatatatgccgctatttagagataatggtcatgcaatntttgccaatcatggatacaaatttaataacaggattttctttaataatatattgttatatgaataatgtcgggattatattctttaaatttgtgatgcagcggatatggcaagactttcacattattctcttttaaaaaaaacactaactanctagctagcgtatgaaatgagccgacagcgctaagtgtaattactttctaatagtagtacgt

SEQ ID NO: 37394 - DNA, 498 bp, Oryza sativa
  unsure (1)..(498): unsure at all n locations
actatagatactaagcttacacctntctaggtttgaacttgacagcttcccattcagcggttgatatatgaacaacttgtggaccataaagatatcctttaattctttgatctggtggaacgactgtgtctggttctagaacactcttgtactcataatccactgtgacttcatgagatgcaaatttatcacttgcaggagccttatcagaatacttcttcaaagtggggaatttctcctcagatgttttcttatagacccacacctgttcacatagacgtcagaccaaattgcaaactgaaccagaattaatataaatttctctaactgaaaaaaataacattacatgaatntaagaaaacaacaccccacctttattntaaagctagagctcacttccaagtctcccctgaagacagtaactggaagtacatttctagtcctgagagcacctaagagtgacgttgggctgtcaacatgaacctacctttgtactga

SEQ ID NO: 37395 - DNA, 374 bp, Oryza sativa
  unsure (1)..(374): unsure at all n locations
cagcttatactgctggaccatgtcgcaagcgtctttgatggcttttggncagaaaaatccttgtcgaaaagctgttccgaccaatgtccgaccggcggcgtgtgacccacagatcccttcatgtatgtctaggaggagatgtctactgtcttctgacgagacgcattttaagagtaccccgcttggtgccttcttgtatagatcgttgccgatcatacagttgattnttgctttatgggttatttttttggcttctgcgtcgtcctcgggcaactcttcgctgcctatgaatttaatgagtggggtgcgccggtcgtctgtggtctcgatatcggcaatggcgcgctctacctctgtagcccccgagctgatgt

SEQ ID NO: 37396 - DNA, 485 bp, Oryza sativa
  unsure (1)..(485): unsure at all n locations
acttttcagtatacaaacttaatgttgtactgtgtcattctaggtatcgattcataattcattttttgtatggcagactgggagacatctattctcgatcaattattaagattcaacagacaaagcaagcaaattcaactggtcttttagtgttggaaaatttgactccttggttcatgaaaatagctcaatattgtgcttttgcatgctcaatctgggttgatgcgttgtatgaaggggagctatggtaaaatgtctaattntgaagtcactcaattatatgtttcctttttgtgtgaatcatacaccaatctcattatatgtttaattggacatatatcgtgttttaactgttttatttgcattaccaaatattgcctgtagcgtagcacatgcatgttactagtttagatagtaagcataatatgtacaagcatacncagacaatattatgattcacaatgtaaacatgctntacataataa

SEQ ID NO: 37397 - DNA, 198 bp, Oryza sativa
  unsure (1)..(198): unsure at all n locations
gaaaagaaagcttacaagccaatgaagttcccttgggtaaaagatgctccncacacaaaccatgccaaaaaaagtgcgatgtgaatgttatatggttatataccaatccaccttcacagacagtagaaggttccagcaatgagcaccacaaactagagcctaaaagttatttcgataattctatgaacaaacgcacat

SEQ ID NO: 37398 - DNA, 347 bp, Oryza sativa
  unsure (1)..(347): unsure at all n locations
ctcagcttttgccagcctgacctactatcctaatggccgactgtttccacccggataatatgttaacaactgcaatgatattaccanaacataaccaagttagccgcacccaatctcacagagtaaaaaacctttttgcttgaagcggtgcttgatgatttatgtctgaccagacatgatatgaactatcattatttcccctaaagaaatgtttatgataaatacggagagataacacagtgacgattgtttaggtcaacatgaaaatatgtgatatcaagcagcaaaaacaatggaagcctaataaaaaaaaaaaaagcaggcaccaatgcaaagtgtgatgaact

SEQ ID NO: 37399 - DNA, 409 bp, Oryza sativa
  unsure (1)..(409): unsure at all n locations
agctnttacacataanacgaggttagtggagcgctttatccgtaagatagtattgaatcgatctactccttttgttatagaaaaacatagctcattctacatcataatgatattttattctttcaaaattnttatatatctcgtcatacaagtcatatactcatattaaacacaccaagaggtgaagataatgataaatcaattcagtaaattctatcctatcctttaaagtacctccatgggtttctccacaatctgcatgtataagcgcctttaaggtggcaatacaaaatcaatagcctttcttataataatatgattaaaagttattttttttctaataaattattattttaagattcaggttgactatgtctnttcttcaaaataccgtaagggttcacatatt

SEQ ID NO: 37400 - DNA, 410 bp, Oryza sativa
  unsure (1)..(410): unsure at all n locations
catggatgattcaatgcctctgcacgctaggtcccgctcagccgtagcgtccgagtccgacctcgctgctgttgctgcaactacgtgtctcagtggctgcagggaggcatgcggtccgtggacgtggagagaaagccctgcttcccgtgcaatgcanaagtgttcagcgtgcaagcgtacacacaccggtgatgggcgtacggtcaaaccggctcacttcaacgtgccataaatactcggcgccaccgatacgcaggcgctaccacaactcgacatggcaacgagagacgacacattggtacgcacgcggcacgcaccatctgtcgatcgatccgtcatgcccatctgtttggctgatttgagaaatanaaagaaacgatatatctatagactaaaagataattcatgac

SEQ ID NO: 37401 - DNA, 471 bp, Oryza sativa
  unsure (1)..(471): unsure at all n locations
agcttgtttattacgttgtggtttagatgaatgcgtttaatcttaagaatngagggtnttatttgggcttaacaaaaaaattcaagacatgctttgatgtcaaagatatacatctctttctcatttgttacagcttgcttgcaatgctgaaagtaaaatagaggaggacatgaagaagcaacatgcctatgttttgtcttctattactaaccatttgcaggaagtgcataatcatgaaaaggaggagagagacatgaaagagccgctagtcccattgatcacactcanagtcgaggcacctccattatctgaagagggcatcaaaggtaaacttaatggtgctgaaattaataaaggtgagtgtgttgttaatgaattgaattcgtccactttttatgctatagcagagcaaccattagtggaaccaactgctggaatcctttgtcacaagttgattactagctgttcttt

SEQ ID NO: 37402 - DNA, 390 bp, Oryza sativa
ttgacttattcatccggtcaaaatatcgcacccgtggtgtcttaacatatgccaatattggtaataattgacataagtacccgcgcgattcacgaagtgagtttttgccacgaacgcacccaatacactccaatatgtgcaaaattcatgtgttggcgcttgttgaacattttcattccggtcaaaaacatcgcacccgtggggctcaatatatgccaatattagcattaatggacaaaagtacccgcgcgaatcacgaagtgagtttttgccacgaacgcacccaatacactccaatatgtgcaagagtcatgtttggatgctttttgaacttattcaatccgggcaaaaatatctcacccgtggtggctcaacatatgccaatattgg

SEQ ID NO: 37403 - DNA, 292 bp, Oryza sativa
  unsure (1)..(292): unsure at all n locations
tgtcgtggcagctcgatcagaaataacatgcatatattgaaacgctgtctatgatgnacatgcttttttgcttcccaatangaatagagagaaaataaaacccattttcacctcatgcaggttcttctcaatgtctaggctgaccatcaggagttcatgacaggtcttcagtgggagctttcccctgtatatgtacggatttgagcgaacctaaacgcagttaccaacaaagacaagttcagtaaactcttgctttttcttcggccatgaactaacacatgttactatacct

SEQ ID NO: 37404 - DNA, 387 bp, Oryza sativa
  unsure (1)..(387): unsure at all n locations
ntagggtgataccgatcatgtaggcggcatgaccaanaactacgtctacaatggtaaccactaagtagccatggggataaggcctttngattgcccatgcgcctgtgcggcacggaatgatagttattgaaatataatgcttatcaattaaaaacactagtaatatgcccgtgctaacgctacggngtgacaattgataactcanattgaaaaagatataacgtcatagtgacatttgatattntaaaggcattacatttccncatagaaggggtgggattaaggttcaagcaaaaaattacatatagagttaagccagtgataatcacgtggtaccgcacgtgtttcttctggtatgctatacaaaatcaaatgacagtagtcagt

SEQ ID NO: 37405 - DNA, 478 bp, Oryza sativa
  unsure (1)..(478): unsure at all n locations
agtcacctgcggcatgcaagcnttgatagttatttctttaataaataatttatatatatttaaaattattcaacattattatttacttcattgtttgaataactgtatatacttcatcgtttgaataagattggactccctccgtctcaaattgtaaagcattatcattcttaaaagaattgagcgtattttattgttagattctccttctaaatacatccatatgatactaattntataattattgatacataatatgaaataaattaatgattaaaagtaaataccgtgtaaaataattatagaccttatactttataatttccattttaaaccatatttttttttacaaaattgacacatttagtttattatgaaatattactaatgtctaatggaatttagaatcatcacatttgacatattctatcaaaacttgacaatacaaccaacttactaaaaatttagtatttaaaat

SEQ ID NO: 37406 - DNA, 105 bp, Oryza sativa
caattgtcgattgtgtaccctggctggttctggacatggatattatgcacattcagcttagaaattctggcttgagaatttttgggcgtgacatgtcccaccaca

SEQ ID NO: 37407 - DNA, 480 bp, Oryza sativa
  unsure (1)..(480): unsure at all n locations
agcttgagccgaggagtatagcctgatcgcaatttacttantattgcaatatganncttctatggttgtccgaggacgagaggctncagaatactctggtatcatatgaaacatggaccgtgggaaagttatactcgatatgcacatatgagagatcgccttttggaaaaacctgggatccatgtcttccgtatgtccccgtgttcatggagtcnttgcctgatcatgcctagatgtggtggcatttagaagcagctcatgaagaacaatattttggtcagctaagtttcgctgttagtgatcagtgaaaaaaaagttggtccgctggtggattttctgtagctttcaaagaaaaaagagtttctgtctagccacaaagtgccagagctattgattactgaattggaattcttgctattcatttactctgttacctgttacttatagagcaagtagtggagaatattagtcggaccttgt

SEQ ID NO: 37408 - DNA, 318 bp, Oryza sativa
tatgtggaggagagagggaaacaaaagagaaaggtgttggcttttgtgctagagctagcttaacacaagcttgaagacaaatacattaaatatatcagcgagagatagagatagaagaaaaaaattatagctaacattatagctaatctatcatatgtcgtgactttagtataagctaatagtacgaagtgggctatattattatccttgctttgagacagactagcacaagcaacggatagattaatttataacagttgagctggacaaataatcatatgacaactgacaaaattgctgcagtgtatcaaactgtca

SEQ ID NO: 37409 - DNA, 465 bp, Oryza sativa
  unsure (1)..(465): unsure at all n locations
tgcggcatgcaagcttactaaagatacccatgtgcaccagctaaatgcttgtaaatgaaagaatgggttgcaccagaatcaaacaatattactgccggtgtcgagttgacagggaatgtgcccaatataacctctggtgctgactgcgcctcctctgcagatgcatgattaacacgggcctgaacgaacttgggtccggcacgtcttggcttcaggcactttccaaccgtgtgtccgggtttgttacaattgaagcagagttcgggtttttctcccaacctcttgggctgttctggcagagctggctgaactgattgagctggaatctttagtgaactcaaagtanggttgaagctgtgctgctcactgttgntgtgactgtcactatggtggttcttgttgaagttacccgggtggtaaggacggtgctgccggataatcattgtggaaggtccaccgtgatgt

SEQ ID NO: 37410 - DNA, 489 bp, Oryza sativa
  unsure (1)..(489): unsure at all n locations
agcgacctgcggcatgcaagcttaattaatccgtcattagtatacgtgggttactctaatatttatggctaatcatggaataattaggcttaaaaagattcgtctcgcgatttctatgccaaatgtgcaattagcttttttaatctatatttaatgttccatgcatgtgtccaaagattcgatgtgacgtttttaagaaaaaaatttgggaactaaacaaggccttcatctcatcctctgttgccatacgtacgttaggcctttgacattttgtcctcaggttaaatcatgcttggccacanaaaagaaataatgctgtggagcctccatgttcattattaaagcctcgaaatcaccacgctaatcagagtaaggcattaatctagaacaaagcatgatgaaccagatacaaccatgtatgctgatagatgaaaatgtacgagtacgttgtccatcagaaataattccacagcagctacaattactttc

SEQ ID NO: 37411 - DNA, 383 bp, Oryza sativa
  unsure (1)..(383): unsure at all n locations
agaaaattgaatcaaagacgccaattcaatgttntgtatttctaaaatcaaagtgtcagctgattaagggtatcgaccggtaaactcagaactntcagatattttgttcaggaattgagtttttttttcaaacggctaatcagattgacggcgttatattaatagagggaagtttagttatacatccaaacgctaaaagtaaggaaaaaactgtacatgtgtaactgtaacatgcttgcacgtcaatcctccttactcctcgtgacaacaattttcccatgtgttttgcactggccaaaccccagcatcatagctcatcatctcggaaacgaataattatttgatgatttgtagcttccttttcttaaacattctcgcattat

SEQ ID NO: 37412 - DNA, 399 bp, Oryza sativa
  unsure (1)..(399): unsure at all n locations
ttacctgaaaattgaaattcatttgacagccaagttactcaaacatgccgctatctatatgaattgacagagtgcaagtgtaccgattctcttattggcatttcttcctacaaacctttcgatgagcaactggactggagttcacggctaaagcttcttcttgttacataactgtgagctatccattttgaacctttaatgtgtatttggttattctaccattatatgtntaaagctcctgttctgtggcagtatttgaaggattctattgatcaaatccgtgcattcttcaagagtacgcctaccattagccatactctggcgatagagactgctgctgctgtgcacgtatatccaacattcattctgtaaatacttattcctatgatcagatattta

SEQ ID NO: 37413 - DNA, 436 bp, Oryza sativa
  unsure (1)..(436): unsure at all n locations
tactaagctacatagcggtctggtaaatgcatgtaccttagtaactgcaacttttgttgtcaccagcttatcttggatatctgatatttctgtttccaggggatagtgcatagagatgtcaaacctggaaatttcctgttctcccgtaaactggcaaaggggtatcttattgacttcaacttggcaaatgttagtgcatatacttatctcccaatctgatgctcgccttcctgtttctttatgctaattttaacattttgtgttttccctgaaaatacatgcangaccttcaccagaagttctttcgaaacagtaagttcactttctaagtttcgaattttgtttcaaattccatggttaattgcagngcattgattagtatctcgtctgctgtattgcctcttccagtttacgctctctgtactgaatatagctc

SEQ ID NO: 37414 - DNA, 482 bp, Oryza sativa
  unsure (1)..(482): unsure at all n locations
agcttgagaaactgtatgcagacatggccttgcagttagagtttatatgtattggatatctggcattaaatagagttcttatctttgcatangtgtaagtctttctaagtactttggtgagttgaagtttacttagaatggtacaatgataagtggtaagaaactggattgaatgattgatgctggttgggtgcaaataaatgctaactgtttggatggaacttgctcactgtttggtatatagccaattatgcatttttttgcagtttctcttaaataaaattagtgaagttcaatgtttgcacttaacatattgtgagttaagcaagtcagttgaacctgatcatacttcagaagcactataagcgtagaatggcctgaatttagaatctgcacagtattttgtgagaatttttgagcaagtatttgatggtacaagatattctatgatcgcttctattaaactcgattgaatattatat

SEQ ID NO: 37415 - DNA, 417 bp, Oryza sativa
  unsure (1)..(417): unsure at all n locations
actcatttcctacactcaaacctcatcaataatctagtgatctcccctcatatacatgcatggcagagaaaagcattgcaacttgcaaggcaggggggatggcggaatgggcgaggagaaaaatgggaggtccatccagtgggagtaggatgccccgggaattcaggtggaactttcatgtcgtctctgcggtctcattcccaagcatctcattccacgggctccactgctacatggcggcaagcatgggtactaattntgtgccagacacggcggttgtcaacacccacgacgtagagcgcaccctacctacgagctgagcacgcttagagcaagtgtaataataagttataagtctactatataaacttatgtagagtctggaggagagaggtaataaaaaaatcaaatgtgtta

SEQ ID NO: 37416 - DNA, 468 bp, Oryza sativa
  unsure (1)..(468): unsure at all n locations
cagcttattangtaaactntntctagattatagggttaaaaatactcttcaagccatcccacccnctctttagacttgcgaacccaataatttaagctctaataatctagattataataatccaaagctgaaataaacagggctttagccagcttaacgcaagctactgacaattaatacgtatactagcatgcatgtcctgttcacgttactacttgtaacaaagctttcctgctcacgttactacttgttacataaatgaaaaaaacgtttgagagcacatggaaactgtacatgtacttgtactgcgctaagttcaattaatatagacgtacataaaagagtatatatcataaagagccaggggaaactgaatttgcacgcatgcatgcacattcatatgatcgagatcagtattctaccacacaagcactattaataggggcctcttatgcacaatacaatcac

SEQ ID NO: 37417 - DNA, 313 bp, Oryza sativa
  unsure (1)..(313): unsure at all n locations
ccaagctctaagncgaagcgaactaaacatcaatatnctccggctctatgttgtgtctttactctggcggcgatagagtaaggggaagagatataatcatgacaatccaacggatacccgtcaaaacaactaacacggcttatgtgatctactggactttgctcctcgcctacatgtaagttagactctacaggtaaacaggccaaactggcatgggtagtgagtacccatacacatacccttttacccatcgggcatagcttttgacccaattagatacccatgggtataaaatggagaacaaacccaaccc

SEQ ID NO: 37418 - DNA, 383 bp, Oryza sativa
  unsure (1)..(383): unsure at all n locations
gcccaatgaaataacatttagcagtgtaatttatgcctgcaccagtataaatggacatgaacatgggaagtccattcatgcaaaagttatcaaacacaatctcaatacgagaccatttgtgaacacttcactgtttgatttctattcaaaatgtggttgtacgaaggatgctcacaaagttcttgaagaagctcctgaggatagcaccacacgttggaatggactgatttcttgtcactcagatactgatgttccaacgtcgctntttattctgagagagatagtgcgatctggtgttatgccaaacgagggttagttgtcttctttgctcaaggacccatcagtattcgatctgttgcagaatcacttcgtggtaacaagaa

SEQ ID NO: 37419 - DNA, 379 bp, Oryza sativa
aaacaatcatgaagaagtaacttgggattttcgttctacagaattacgtaataagcacataacacccaattgatgcatgtcactaagattagcatatacagcaagaaaattgaaacacagtgcaatcagactatgagtgtacggattattcaattgggctaccataagcagtgagcaaaatagcaacgttataatatttcagtgaaccaatatcaacgcaaactgggaattgtcagtatgaggcatctgatgatcacaaagcataagaaaacgataccaggatacgatacgagaacctagagagaccgcggcatggacctatcagaacttttctaaacacgttcatatggataaagtcatctaaggtctgactacacta

SEQ ID NO: 37420 - DNA, 380 bp, Oryza sativa
  unsure (1)..(380): unsure at all n locations
agctggaggaattcacttagttntctaccgcaagattgatagtcgcagacagcaagcataagaagcagaaattcttatcaaagagactgaattgttcagagagtactactactgttccattcgaacgaccaanaatgcaacgatcatctcacaactctatccatcgctaagcacatcaagaagcgagaggagaaccnnaaaaaaaaaaagaaagaaagaaaacaaaacatattcagacagaaatgatgcagaagaagaactaacaccacagcttattagctcanagtctcaaaccaacagcagatcgctcacctgaggcattcatgatcgttctcttccggagccaagaaacagcagctagaagaagaagaagaattctc

SEQ ID NO: 37421 - DNA, 454 bp, Oryza sativa
  unsure (1)..(454): unsure at all n locations
tctgaggcctatactggtatgatatttcagcttttccatgaagtatactgaagagttcagtcagcttacattgtgactcgtgatgaaagtggtcccagccgtgaatatattggtgccattcttgagaaagaaagacggtataaagttcatggaaacccttgtgagcagacagttacatgctcatgtaggaagtttgagacactnggtttcctgtgtagccatgctttgaaagttttagatacaatggacataaagtatatgcctgataggtacatcctgaagcgatggaccacatatggaaggtgtttgactgcaccgcaagttgaaggtcgaaaggttcaggcagataccacattagaattntctagccgctatgaatacttgtgcccagtatatgttaggcttgttgctcgagcatcagaatgcgaggagtcgtacagagtattagatcaat

SEQ ID NO: 37422 - DNA, 390 bp, Oryza sativa
  unsure (1)..(390): unsure at all n locations
tactaagcttgcaacctggcggcggcgacggcgcggtgtggcgacggctctatatgtggggcgggtggccagagcacagcggcgagcggcggcgctagaggagttcggcacgggcacggtagagagcgtgcgataacgcggcgaatagggaaaaaaggagaggaggatgcggngatggattatatatgggcggaggagccgatcgtggccgggagggggctcgattctgccggagttagtgtggatggtggagagagagagtggtgattcaaaccgaatcccaccctttttgggcgcgcgtgcgcgggccggaaggcggtgcgtgggcgggcgacgtggtggaagaacgcgggatcggcgctgcgtgggcgcgggatgagcggcgtgggc

SEQ ID NO: 37423 - DNA, 489 bp, Oryza sativa
  unsure (1)..(489): unsure at all n locations
tgcggcatgcaagcttatacacattaagtntacacatgtaaagtttttatgttcttaagttnataagtcaaaagtttatatatccaattcaaatttgaatttgaattcaaatagttntttatatatagtatttctatacatctaaagtttatacacctaaagtttatagacctaaagtttatatatccgattcaaatttcaatttgaattatatacgattcanatttgaatttgaattcaaatatttttcatatatagtatttctatatatcanaagtttatacacctaaaatttatagacantaaagttatagacctaaagtttatatacccgattcanatttgaatttgaattcaaatattntctatatatagttnttctataccatctaaatttatacacctaaagtttatagacccaaagtttataagtcaaaagtttatctacccgattcaaattaaattttgaaatcaantnntttatacata

SEQ ID NO: 37424 - DNA, 373 bp, Oryza sativa
  unsure (1)..(373): unsure at all n locations
atatcagctccaccggtagaatgtttttctgacaatgccggnccacggcgagcctcaattgatagcttacactcgtgaggtgtaagctccgtccgtcgacttggacgaggagtcatcttcacaactatgtcttctttgggccattgtatgaacgtcttgcgcgcatcgcccaaagacatgagttcatcatcttggggcacgggcagcggatagcctgaccaggggtcctttactgtttcgatggacaccttggcatacctatctagcacgtctgcgccgtggaccatgactgttaccgatggcttgacagccatgccctcatcgactctatgagcaaatgtgggccgactcttcgctgtatgaccactgtgct

SEQ ID NO: 37425 - DNA, 413 bp, Oryza sativa
  unsure (1)..(413): unsure at all n locations
acctgccgcatgcaagcttccacagcagcatccagtatgcggtggtggtgtctgtatccgccgctggnttgatttggtggtgtctctgcaaggcaactagtaagatcttgtagagcaatgccgcagtgggttnttctcgactagaggatcttgtaggatggagtggactactacgttagatttgaatagctccgctcgctgcgaacgagttgctccagaagagaggagtccgactagtaacattttctgcatctggggaggaattcaaaactcgtttgttttgggggaggattctattctaattgattgtagaccactggatagcaatgccttccccttttatgtatctgtgtctgttaatacgcgataaatatctgataatgtagctacattatcatttcanggttatcact

SEQ ID NO: 37426 - DNA, 471 bp, Oryza sativa
  unsure (1)..(471): unsure at all n locations
agcttctgggggcgcgaggagccgcgccatggngtagttggcgtgtggnttgtcaagttntgggctcgccgctcgcgagctcgagtagtgtcaagtgtgtgtggcggttggttggggacggtttatgcgcggcgatggctgcgacgcacgagtggatggacgaggtgtgtttctgcggctctgttggcctgtggtggatacgtctgccgtgtggtgtggccttatcttggcgtgatcgactccagtcacacaaaanacataggaatgggaaattgaacttttattttgcttcanaagcaccgcgtgaggaatactcacanaattcaacacaagtattcgctggcaacaaatttaaattttaaaattatatttaaaacttaatttgaactatttttcatcgangggttatttttacattgacacttacatcactaagtatatatgtatataaatattttccctataaaatat

SEQ ID NO: 37427 - DNA, 321 bp, Oryza sativa
  unsure (1)..(321): unsure at all n locations
ttctggggcggccagtggacttatttctctgcttggatgtgctgaggttgatctagctgatcttttggaagtatcagaagagttcatgttggttcctaatcctgatcaaattacactggagagactctntagagttgatgacatcagggttggcgcaacttccacaagatctattcctcatatacagtgatagcatgtttatctttgtctcttgctgattacggcggcattattctaattaacatatcgcctggacataagagatactagtatgtatctaatagaacgagatgtgtaataatactgcgatggatgtttatc

SEQ ID NO: 37428 - DNA, 479 bp, Oryza sativa
  unsure (1)..(479): unsure at all n locations
acctgcggcatgcaagcttgcanaggtcaaagcacaagtctcatatgttataatatttatgatggaaaacattgagaaggttgattcttaaatcatccaatggtctgcacattatgttctttaaaaaccatgatgctcttcaaaggttgttgctgattctatattacaattatgaaattcaagttcttgaccgtggtgagaagattgaactgcttgtcgacaagactgaaaacctgagatctcacgtattaacgttttccttcatgatgagctgtactagtttctttatctttgaagctactggtgtgtaacacacaagaattataactcgcaatcatcttatagaactcangactctttatacaatggattgctatggagaacatactgatacatgttagtgtagatcgcatgacagtatggagtatggtaatggtatgttctacaatttagtgcattataataaaaacattctgaat

SEQ ID NO: 37429 - DNA, 286 bp, Oryza sativa
  unsure (1)..(286): unsure at all n locations
tgccaccttaatgagggaaactatgttttattctctctgtctctgtggtgctaaaggtcatgaatccagaattatcttaatttgcatatcgcggtcccttgataagtcaaatgttgcaataaatttcttgggtgcttgccaaaattccgagcacaaccatacccaaactataaacaccatatttctgtcacatgaagatatataagacagctctacagaaggaaagagtacctactatactangaatcaatgattggatatggatgcttttatatgagaaaaagta

SEQ ID NO: 37430 - DNA, 334 bp, Oryza sativa
gcttggcatacaattagatgtacccgcaacttttccaattccaaacagacacggcgctgaaggtctttcacttatagtgagtttatcacactgtcatctatgaaaaccacatctaacgtatacaaggattccatgaacacttggatcatcaagatcatgaaaaaagcaagaacattgggtaagccgaacgacatcaccgcgaatacatacagtgcatattgagtagagaatgcggtcttcagaataatcttaaccccaatacgtaatctgggatatcctgaacgaagatcaatcttagtaaatacagtggcacctgttagcttatcgagcatat

SEQ ID NO: 37431 - DNA, 332 bp, Oryza sativa
  unsure (1)..(332): unsure at all n locations
catgccccatataatactccaattgtctatatgctgacttgccgaagacagatcatgcaacttccctttaagctgcatgaattctgtgtaagcttcctgattcagaggcaacttagagcaatcttcaaaaggttttgcacaggtgatagccaaagattcatctctggtgatagcatgggcacaaagattagggtatgtggtgctccgaatctgaccattccatangtcatcccanaacagaacttgggtaccagaaataatgtcacacttngctatttctcttaagtaatctgagagactgacaatatccctccaccaaaaagatcccttgt

SEQ ID NO: 37432 - DNA, 360 bp, Oryza sativa
tgtgaagattcctcataccaacatgggcttgcctccgatgccaaagccaccccatgtcggacttagccactaagcatgtctcatgtttggctttagttgaggaaaaatccacaagataaagcatccccttaagaacacccttaaagactaccgaggagtcatcccttctaaatacggtcacatcaacatcggtaaaaagacaattgtagcccatggaacataattgagaaatggacaagagattatagtttagagattttaccaagaggacgttagaaatggaaagatcattggagattgcaatcttacccaatcccattacttttccctttccatcgtacccgaagagtatgttctctt

SEQ ID NO: 37433 - DNA, 421 bp, Oryza sativa
  unsure (1)..(421): unsure at all n locations
agcttgcatatttagaaggacgtgggcaaanacatttatttatatttataattatgtaaacaagtgcaaatagagtgtttgcaaaaaaaaaagtgcaagcagaattgcttaaaaaaattctgatgatttaatggaacacattatataaaccaagacaatatccaccttagcacaccataacagagaagtacaggtcctatgaaccacgggctaagaacatatattacatgactaaaacaattgtcaatagcagatatggtttctagtatgtgttccaacattaatgaaaacatacatcttcatttaaaattagtgcagtgtttcaaagacaatggaaacagcgtaaacaccatgtttgtgaagaaaaatcttgtgtaatgaagaaaacaagtacattagtgcttacaaatattacttgctc

SEQ ID NO: 37434 - DNA, 361 bp, Oryza sativa
tgcttgcttctcctgttcctctcaccccgtgcaagaaagaagatggaggtctagacttaagaccagaccactacaacttctctcgttgcaactagagactgatagttttttttttctcaattttcttgagtgcgctgcttcttttacatgtttattatttctctggccttgttcacctccttttatccatctttttaacaaacttattcctcatatatgctcatgccctttccattggattacacctctgcccacaaaccaaaatttcttaatgcctaaggcctgaatcctgcgagtgatttgggcaccaagcctccatcttttcgccctcatccttatctgtccagctctaatcctctta

SEQ ID NO: 37435 - DNA, 363 bp, Oryza sativa
cttcatacctagatcgtctattgtagccatgtgctttcttatcgagtttaataggcaggtcggtcaccttgaatgtattcctctgtgcatgccattaaatcaataggtgtggtaggatcttacaaataaaatagataagtgccaatttgtagcattacttatatatgggcttaagcattgcactgtttagtctccatgtataaattgcaggcaacatattagagaagtgaagttggtttatgtacttttaggaaagcatcgtgatggtacattagtactccttaaatatcaaggttttattattgaggagttttatgtttcttatcaaaattttactttagtttcaatcacatcaacacatcc

SEQ ID NO: 37436 - DNA, 438 bp, Oryza sativa
cctgccgcatgcaagcttggggaagaacatcgagcacgcacacaccctattaaagactgacaagctgcagggcttgatggatttatgctcgagtatgatgccaagtaggtacaagcatggatgtcgcttcttgttcgacgggcggtttgttcttggctcacaaactccggatgatctcgcgcaagaagatgtggatatgatcgatctaacatgttattaagtggtggttgcatgtttgttggttgacagctgaagttttttctctgcttcagtttccagcaatggttactgcatctcactatgtttgtgctttcatcaaatggatctttcgaaaagaaaatcaagactacctgctaaactggtggtaaagagaacactctatatcgttgttaattgggtaatggtgcccagatgtgccccgtgcatttgtgcaagccg

SEQ ID NO: 37437 - DNA, 363 bp, Oryza sativa
tgtgaatagcaacttctgctccattattcaggacgaaacgggctctccattgttcagaatgaaacggctttctccatccttttgtcttttcttaaattttgacatgcttcagttgtattgcgttcaaccagttgcataaagtatgtacattcccagtattcctgtgcaaactgactttctgttgagatacaggtaatcttcaaacagccagcaatagcacctcaaagctgtttcaggtgctatttaccacaagaaaaaaattaattggattctattcgtatctacattctacagagtctaagaccatagttatgtaagtctcatagtgatgttgcagtcttccaaaatcacaaccccaagtga

SEQ ID NO: 37438 - DNA, 452 bp, Oryza sativa
  unsure (1)..(452): unsure at all n locations
ctgcggcatgcgagctttgaagatacctcgggggatgatgagctgtattatcagacgaatganggggtgttgcttaagtgcttgagtaccgatcaggctaaggttgcaatcggtgaggtaaatgaaggaatttgtggcactcatcaatctgctcataagatgaagtggttgcttcgacgtgcacgatatttttggccgacaatgctggaggattgtttctgtcacgaccggaaataacccaacgggcgttccttacgtgcgtgcattaatccttgtcccaagaggcaaggtacaccaaaagttgatacaattcagagtttaacaagcggaagcgtaaataattaatttattacacgggcagcgaaggcccagcacacacaaagacatacgagaaacagcggaagactagggcgacgaccacaggcacttgacggcaggcacgagctagacac

SEQ ID NO: 37439 - DNA, 338 bp, Oryza sativa
tttatttatttagatgatcgtgtacacatcaggagatttacctggtcttgaaaattctagaacgaaagagcaccaacttcctaaatccgacaattcgtaaaattcaagtatttattagatctaataatttctgtcagacgtttaattattgattctgtctttgagctagtgaatgtcacatgtttggaaaaaatgatgctctcaagcagtgttcacaaaactgtaaaaattaacttgttctaccacaacttgatggagaattgggaatcatccagaatttccagatcgaatattaccttgttcaaaaggacattttgcaggatcctctccaaaataat

SEQ ID NO: 37440 - DNA, 399 bp, Oryza sativa
  unsure (1)..(399): unsure at all n locations
agcttagagagggngggggggtgatatatgtgtttctttaacttattaacaaancgcaccggtaaaatacatacagacccggaactttctgttaaggaactccggaatttccggcctgccaagcccgggactttcggcctggcaagcccggaactttcggtgatcatagacacgaacttccgtggtatacaacacagatgatatttcaatttctaagcaggagactaatccaatctttacaaatggtgcaatgtggtctaactgatgatattcacataatcatcccctaaacactcctgaaagagacagagcgatttttcccgaagttcgatcttgaatcttatttgacgaagaactcaaaagctggtctgtttaaccctcgccgcctgtgcatatccc

SEQ ID NO: 37441 - DNA, 360 bp, Oryza sativa
agcttgttggctattcctattcggattatgccagtttttaagtggatagaaagagcacattcggtaggtgccaaatgcttggtagatcccttgtgtcatggtcatccaagaaacaaaacttcgtaaccctttcaaccgccgaggcgaaatatgtttcggcgggtagttgttgtgcccaattgctttggatgaaacaaaccttgttggactatggcatatccttcaccaaaactccactcctatgtgacaatgatagtgccataaaaatagccaataacccggtccaacattctagaaccaagcatattgacattcgccatcacttcctaagagaccatgttgccaagtgtgacatagtca

SEQ ID NO: 37442 - DNA, 402 bp, Oryza sativa
gctggatcttgagatgatcactgtgtgacgcctttgctttctttgttcctgagccctcgtggcggtgggctggggggaaatcctctagctcggtgccacgtgatggatagctggggtcgtgagcattgttcgacctctctatgacaagcttccacctgcagcccgttgcctaggatagtcgatggcgactttcactgggctctgtcgtccttctccttgcagactcttggagatctcgcgcgtcatttcgtgccagtccgaagctgcaagcagcctgtcttagagggctaggagacttctttgtcccgtgcgcactgtagattcccacgccggtgtttctacgcacgttcagaccgttctatggcatctgtttagttggccatgcccgatgtcggtggggat

SEQ ID NO: 37443 - DNA, 354 bp, Oryza sativa
  unsure (1)..(354): unsure at all n locations
agcttcatgaattntgacataatttttagacccctgcatcatggtaaaacaatttaattaggtagcataactacgttctgaaatctgtagacagctgcattcatctttctgtgtagcccaaagcatgcatgataaaatatgcaccttttcacagtagcttatcaacatacctagtagtctccacgaattttggctaaagttttgagtctttgcatcatggcataaaaattcatatggcactgcatagtcccaatctgaaaacagtagtcaacctggttggttaatttgtgtagtctaaactataaatgataaaatcttggttccttcaaggtagttcacaacctaactcaccca

SEQ ID NO: 37444 - DNA, 355 bp, Oryza sativa
tgcgtattaaaaaactaaataactgtttttgttatcatgagttattaacttcatagcttcctgtttcttcacaagtgactgaaatcattagtttttgttgcaccatagaaatggtatatataatgtatatttggtacttagctatcattgtttaaaccatcatctatttcattctttcctgtgttaaggaaactgcattcctgattagttactttttgctacccatcattatttgttaagtgttacctcagatcaagacagcctaatttaccacatggctacttcaatttcaaatagtccatgattcctatactgtggtcttttagtagcacttcggatttaaatgttgagcata

SEQ ID NO: 37445 - DNA, 433 bp, Oryza sativa
  unsure (1)..(433): unsure at all n locations
agcttcccctcctgcatcttacctgtttgacgccctccaacaagcaggcagcgcagtaagaggtttggtcactagctcttaggtgtcctgagattcttgatttctagctttgcaattgattggtgagatgttgtttgatttgttgatgggggcggctgaacgagtctgtgaatctgtgttggcgcagatgcagttggggtgggtttcggtcaggtctggtggtgtggattagtgaacagtgaacactgcctaaaatcgatgtaggagaataatgatctcctggcctgatgattgctgatttcgatcccgggacaaattatattattaaatcaaatctgcattcgtgatgtgatctccaaatctatattggggagagtctatcccttcgaagncttacctatctatatatctatctatctggctttatacatat

SEQ ID NO: 37446 - DNA, 393 bp, Oryza sativa
acactccagcacttagtgacactataaaactcagctttagcacttcgaactctgtgtctccacaagatcgatgtgatctctcttcaccaagagaagtggcttgagcagattacatccctacaagagcttgagttctcttgttgctacctgctaaggcagctcccatcaaacttggtcactctgtcatccctgaagaagttaaatatgcagtcatgtttccaaattcactcgctaccattgaaaggcctaccacgtaacctaagagagttacaaatattaggatgctcacctatactagaggcacgatgccagaaggaagatggagagacatgggtgaagaagaagagaggggaatggcataaagagacgataaacgagtaccgacagaagaaa

SEQ ID NO: 37447 - DNA, 435 bp, Oryza sativa
  unsure (1)..(435): unsure at all n locations
agcttgacttcaatgttaactgtgccttcagctcttattactgcacatgatgttcatgaactcctaaaaaatggtgaatacatatggtgtgggagtggctcttttgtcatgggtcttctggaagaacttggctttcccagatcgatgatcaagccttatcataaccctgaggatattcacaacgcactctccagaggaagcaaaaatggtgggattgctgctctggtgggtgaaattccatatatcaaattatttctcgcaaagaactgcaagaggtacaccaatgatggaccaatttataaaactgctggttttggatatgtaagttaaactctacttatttttatgttggacaatcaaatttcaagatcaagtttcttttagattgcttaaggatgcagaacgttctanaatgcagcacatatgctaatacaa

SEQ ID NO: 37448 - DNA, 352 bp, Oryza sativa
tgagaattttttgtcatatgcccctgaatcatggctccatccacctcatgacataaagataatgccacataatgcgaaggtagcttatatttcctcccatatgtggtatttatatccacctgattagtttcaaactttcaataacgggtactcttatgattattttatttggttattttcaaactgaagcttggtctttaatttttactgctcaagaaatacaatgcatactgttttcgataaatatagggatccataacatttggtaacttcttatactgtttgtatgttttattttctcctatcttaatggaatttactctttcagtcaaaataagaaaagaaatttact

SEQ ID NO: 37449 - DNA, 311 bp, Oryza sativa
  unsure (1)..(311): unsure at all n locations
agnctgagttctggttcttctggactatacacagtggcacacgatgcagcggatacccatgtgcacggcttatgtccacttgactgatgttaatttttcatcgtgcttgcttgttactgtagttagtactgccttactggtatcatccaggagtcatattttcgttgtttgcatctctataaccttttccagagaaatgcattgttgcagtctttctgaacatatacttgataaattctcgagattccatgtactacgatttattgactgtaattggatggatcctgatcagctaggaaaagctcacgatc

SEQ ID NO: 37450 - DNA, 354 bp, Oryza sativa
tcggtgtggaatttgttgtcacagatattcaacgatgcattgatgggcttgaatggttcaaaatcaatagtgactttcttttccttgccatcttcagtaacaattgttcctgtgtagaggacgagtccatttggcggaaccttgttgtacagcttcagcctctgttgagctgatgtgatggctgccaaaacagattgtcgattgactctactcttgatgtttgaagcagtaccatattcatcacccagcatcttggtcacacgggagacttgatcacgtgggggcataatcagagagatcatgcttgtgccattgcctctagcagactccagtgccttgatcaacttcttaatc

SEQ ID NO: 37451 - DNA, 449 bp, Oryza sativa
  unsure (1)..(449): unsure at all n locations
ctgccgcatgcaagcttatgatgggacanagctatgaattacccaatgatttgccaggctggagatactgtgagtggaccatntaactaacctagagcatatcaaccttgagaaatcaatgcctggccttcaaaagatatccatcatgtcatgcgacaaatngcttaccatccctcatggtatagaagggttagagaacctcaaagagctttacttatttgccatgcccaagaacttcgtggagagcttgatgactggtggtgttaagcatcggagagttgagcatattcccagtattcgacacttcaatgaacatcgggacatttctttgacaaatctttgaaggtgaaggtacagattatggctggggcattctctgattgaacgcatacacatctggcaaatggtgacatgctggatagtgttctccactgcattgcaagatgcat

SEQ ID NO: 37452 - DNA, 361 bp, Oryza sativa
tcttcacacatgcacatccacaatctgtcgagtacttgtactagggtactactactaacctttggtactctctctctacactttctctctctagtttctctctctatctcaagagaagaagggagacattacggagggatggatgaattggaaggaatggaaccggtttcatgtgttgtctggggttaggtactggtcttaaagggccttggtgattgatgagagaaaagaagaagggggaggagggtactagtagaactagtaagtatagctagtatctgtacacatacgcggagaaagcgagagaattatttccgaaaaaaaaggtggtcagtgtaaatacatataaaggggatttatt

SEQ ID NO: 37453 - DNA, 343 bp, Oryza sativa
  unsure (1)..(343): unsure at all n locations
gtatcaacgaaaggggcttgacgttgcaacattctgtcctttgtcatctgcacaagtgacactaaatattcctctttgaggcccagtcctaactttttaacaactaaacatgctactagaggtctctcaatcatgtcgtagctaataaatagtaggggttgtagactgattccttgcttagaaagtagtactccctctaccctatatataaaggtttttgaagttttgttcttccactctttaaccactcgcctattaaaaaaatttatgcaatatataaacgaanaatatgcttaaataccttaaatataaagtagttaaagattaccattatctaattttt

SEQ ID NO: 37454 - DNA, 265 bp, Oryza sativa
  unsure (1)..(265): unsure at all n locations
agcttatctntctacctttcaaacgcatccggtcttttattctaattcattccgtgtcaacgggaatcggtaaacaagacagtgctggtgctaaaaccaaacttgggccttgggtcttgtaatatactaaactcatctcagaagtgtctccctccacatccacgaattaacacttaacccatgatctattttcctctataaatgtctatgtacaccctctagaacaattgggttttatttagttgaattctggcagtgtcattca

SEQ ID NO: 37455 - DNA, 267 bp, Oryza sativa
cagaaacagcattctgataattcgacgaccaaacatcggggcgaggggcggaaaacgacaacaccgaccctgcctgccgacaccagcaccaggggcaccgtggaagaccgaggacatgaccatcggcaataaactccagctgtggcccgaggcgcaaccagcagaggatgcaacacacagcgacaagctccgacatggagtgggacatggaaggcggacgacacggccactggcgactagcaatgagggcacgaacccatatgaaaa

SEQ ID NO: 37456 - DNA, 315 bp, Oryza sativa
  unsure (1)..(315): unsure at all n locations
agcttgtcccgaaaccgtcaccgtggtcggagtgcattgaaaggtgtagccatgccaccgcanggctaaggagccggtgccgcgttggggaagggaggggagaggaagaaagagagaangtagatgggggactgacttgtggggctaagggtatttcttacctctcacactatttctctctcttatttaacccgaaatgtatacttttaatgggtttggggttccacgaccaatattcataattcgaaagtgtcttttcggccccaaaagattgactnttgcagtggtttaaatgcttgaactaccaaagtcgta

SEQ ID NO: 37457 - DNA, 263 bp, Oryza sativa
catgataggagagatcaacaacacgcacgcacaaacaaacaaactgctcatcttgccatcttatccacgattaattaaccaacggtgcgtgtgctcctaatttctgcacctattgtccagtaatggaagcatgggctctcacctcacctgtacatgacgatgacaggtgggccccgcacgaggttccttccctcgcagggaaaaagaataaagaaataagcccatatgaaattcagtttactcacttaaaattgagtatccgt

SEQ ID NO: 37458 - DNA, 401 bp, Oryza sativa
agctggcatcatggatatggcaagcatgacgtcccttcatagtgtcctgcatccatcgatcgaaccatctatcgacgttaataaagtttcatttgcatgcagatcggttgcagaaaagattatatattatatctaatctagcgtatcatatgcaacaaaaatgaacggtgatcgaccaaggttggggggcattatttaccaaactgacggcaaaagaatgaaaataatattttgattgttttctctccttttcggttacatatatatgaacgcccacacgttattcaaagcacacgtagtgatgctcccatgctaattacttagaggactatactaccacagaaaatgaactaaaccggtcggtattacagggtaaagtagtatttacttatacaattatt

SEQ ID NO: 37459 - DNA, 382 bp, Oryza sativa
cacgatagaagaccgaagcttgcgcataatatacacgtggagcatgatttgattttttaaagaggacccggctaggggctcgaggattgaaaaaagaagtgcattattcacatgattaaaactattcctcttctgatttagggggaagcaatatcttatattaatttgtttgcactccctgaatcgattaataaatctttgatataacctgctgtgcttagagtacctaacactcgtcccaggaaactaatggtcttcttgccgcgtcatacaccgacaaaagcaacgtcttggcacacatcattacgggtttccaccttacctggggatttataacaaacaacactattgtagttctttttacttaattacaccataaacg

SEQ ID NO: 37460 - DNA, 464 bp, Oryza sativa
  unsure (1)..(464): unsure at all n locations
ccggatccttaatcacctgcagcatgaagctctttttattagggatgcaatttgcacgggtagtggacaggcccgccccactcatttctacaggctatagtgtccaacgggttggcgagttgaccaaccaagcaatgaagcaagtaacctaacacacttcttagttgtacccataccaagtaaatttctgaactaatctacttatccttgttactgctgctctatagcatcgcatgaaatcaaataggaatgaataattatggtcattntctgaaaacaaacgagattctagtcattttctcaactgtgttcagcaattcagctttcagagacagcctgcacgtgtacagtactatataagaacaacttatttgtgcacccaacttcatgatgcatgaatntcagaaggagaaacattttctcttcatgatataccaactatggctcttgacattcacaaacag

SEQ ID NO: 37461 - DNA, 354 bp, Oryza sativa
tgcagttgatcattcagagtcccatcaacatcggctagcctcaacgactacatcggatccttcagccgattctacaccaagccatcggctatcgtttatgggtcggtacacgcttttggcacacttgagactagagcctacaatcatcatcaacgtccgggtctccaattctctaacagctgattgttcaacttatcgtctaatcgctgctacatcgacatattgtcagttgcaggttcagactgactggcatgtctatacctcatcaaagtttaggtcatgcactggagctaaacagatatcctaggccttcatgttttttcgcatgaaagggatgcaacattggacatccga

SEQ ID NO: 37462 - DNA, 311 bp, Oryza sativa
agcttaagttcaaagaatatggtcttgctctgcattggagagaggaagaaataggtccaaattaagttaaacatgtagatatacttgacctaaagtgaaaatgattacttacacctagtccaagttgcaaaagaggtaaaattagcagttagtctgacgtgcaatttactctaggttttttatcgcagtttacttttcagcattgactttcaaatagttaagaacatggatataaaagttgaacccataaattatttttgctttaattgttttccaatacttattagacataaaacaaatgatgagattca

SEQ ID NO: 37463 - DNA, 351 bp, Oryza sativa
ctgctagaaggtctgaagctagtcagagatacatggaatcaactatggcacatgaccatggaactgataaggtatacaaactaagcatgcacaaagattgaaaagattgatacaagtagaaggtctgagttattttttggttacaggttgatatgtttgatcaagttgacattgactgtacaaatgaatttgataataactttgataattcatttgccaataccaatgctaagtcaaatcatgtgcaggtgcggtgtttacttgaaaagttttaattgaggctttcacaatttctaaatattgacatttatcataagttgcagcaagtacattctattagttctgctaatg

SEQ ID NO: 37464 - DNA, 434 bp, Oryza sativa
  unsure (1)..(434): unsure at all n locations
agctctcaaaacgtctctaaaaatttcagcccttttgccaacatgcattagttagacaagttgaaatcttgacagggataggagaaaaaaaaaaggagaaaggggcaggtacattcccaacttttcattggccattacacaacactttcacaatcaaggcaggttctagctctagctcaatctcttctagagctggagtctaaccaaacgatttcagctccataaaaaagaaagcggaacaagctaaagtgatatgagaaaaagaactagacaggtggagcggagtttgggctgctccgtggctctattgctaaagttagatttaatagttggtgccctaccaaacagatcattgataactctacaaataaggagacattnttttcactttgttaaggaaagaatcatttattanggcaaaatttcactttgca

SEQ ID NO: 37465 - DNA, 353 bp, Oryza sativa
tcttcccctcaggtaccggcggtcggtgtggatgaggaggagggcggcctggtgtgtaagctctgcctgccgggtgccggccgccggcgtggaagaaggccggtgccggctgcagcggcggattgtcggcggatgggatgggagtagatggtagtgaggaggggaggggaaacaagatgagatgggaagagagactgctggaatttggaaaccgtgggtcgtttccgatttctacccctggctttgttttttctgttctttgcggattcaatttttaaatgaattttagctataatttacagcccgttcacctgccttgagggacttatttcaaggacatatcatattatatc

SEQ ID NO: 37466 - DNA, 439 bp, Oryza sativa
  unsure (1)..(439): unsure at all n locations
agcttgcacgcaggcggattatacatgttcgggcctctatggagctgttcaccctactcctgngtttgggactatggatgagttttacaaaggtttcttcactccagagagcgcacttgcttcctcacttctggaattcaggttttctgggcgtcgcccctttatctcagtgggcagggtcctccttttataactcaaggggataccacatgtactgcctctacctaccctccataggagggggatcccactccactttgggctttcaaccgtgctttctcccggaagctaaacaacaaccggttctcgagtgcaacccggcgccgccccccgcctgacacgggggacagccctgtcattccctcatanatgaacgatgacttgcgacagcccttcctcgagtgacgctcggatgtgacgggtcatacccacccccact

SEQ ID NO: 37467 - DNA, 355 bp, Oryza sativa
tgggagaggcaaagacaaagatggtgagaagtccaacaacagcaagccgaaggattcatctcaagggaggaagctggagaatctcaggaaggcttttcaagaagtttgcgccgccttcgagccactaagtgatgtagatggtgaaagtggagatgatgataagggaaagaacatctccgatgtttgcttcatggcgcgtggtgaatctgacacagagtatgaatataatgaggtaagtgcttttgaggaagctaataatattttgagtgaaaagaataagaagtgtgagaagatgtatagaaaacaggaatttatcattaaatctcttaaatctgaaattgctagattaaaatct

SEQ ID NO: 37468 - DNA, 357 bp, Oryza sativa
tccctttcgttgaaacctgtgcacactcttttaatggcgtgacccgaagatacacaaagtcatccactgcgaattccagatcacggcgacggttatctgcataacttttctgccgaaactgtgccacctttagattatcccgaatgattctgactttagcttcagcttctctcaggatatcagtcccgaacacttggctttctccaacttggtcccacagtagtggtgttcggcatttgcgcccatacaacgcttcatagggtgccatttgtatgctggcctggtagctgttattgtaggagaactcggcataagggagactcttatcccaggtcttcccgaaatctaggacacatg

SEQ ID NO: 37469 - DNA, 274 bp, Oryza sativa
accatcatcagcccacttactggactccctgctcaggcggcctcttatctgactagctagctacactctctctctggatgaccaagcttcttcatcacaatctatttgaatgcaccacagacttaaccggactgggaataaaccctaaggaacatacgctgctaccggctgaacttgctgacatatcgggtgccacgagtggaactgatgctctgccgagccacaaggggacatgatttgaccaatgtgaactccacattggatatgcgcagag

SEQ ID NO: 37470 - DNA, 348 bp, Oryza sativa
gtggcatggccttgaagctctcaataactctcgtcgcctcctgcaccgacagccaaacctctgttgcttgcacctcgccctcaccatacaccatgaggcatgtatccacactacatagtgtcgacaactcgcttgccttcttcttctatcccttgagccgcttcttgaatgccgcccgccacttcgcatcattgatgatccgctgcaacttcaccttgttgcgagccatggccttcacgattcaccactttctagcaagactgcacctatggattgatgggaaatggttagattgatatgagttcaaagaaaggggaatatggtggttttataatggaagatcatatc

SEQ ID NO: 37471 - DNA, 423 bp, Oryza sativa
  unsure (1)..(423): unsure at all n locations
agcttatctgtataaaagtaattaaaggaacgccatgtattatataacactaaaaaaaatgcaaactttatgaatcanaactaaatctaatttgtgccgctaaccgttccttttcgtcttctgtttgcaggttggcatgtaggcatgcttaaaaaaacgccaggaactgtacaagctgtatatgaacggaacgaagagcaatagatcatccgttaggtcatgtgtggttntgaacaagccctataaaataggcgaagaaattctattcttctatttaccatttattggctactggtgatgctttatcatttctaagaaactgatggaggatccaaggtcacaataatcttataaacttccattttcatcggtacctgtgagctttaataatgtatccatagcattagggatggatactactcc

SEQ ID NO: 37472 - DNA, 353 bp, Oryza sativa
tgataggcctgcagaagatgtatgccatggccgggcaggaggtcgctgctgccgagtagagattatcacttattttgctgcccgtttatttagacaacaagtaaacagctatctagttgtggatcgtgaacatcctagcctgtgtcaatggcagatattctgaatagtttgttgggattacttgccagctgcatatttgctttctgatgagaaatgaatgtttttgagtctatgcgtttgctttgtttggtcttgatgatgaagttaagaattttgaagtaattgtttggtctggagtagttttgatcctggcagtctttaatttctttgcttgcttttgcaacctgataaaa

SEQ ID NO: 37473 - DNA, 392 bp, Oryza sativa
  unsure (1)..(392): unsure at all n locations
acattaaaagcagagatagtatttggctgggctaaatgatgccatgcattctaagtgcctatcaatgacacccaaaaacatatcggcatggaatcgatggtaattagtagcatctttgaagaatttcctcgaactttggataggcttatacttcccatccatgtcaacaactataactttgtgcttcacacaaaaagaagtgacctttccaagaaattctttccatacacaatcttctctcaaaacataaagttctgtctttgtgaactcaagaagatccattgcattacaatatcttgctccctccttngcagagcattgcagactgcactcgtttcacatatttcattcatcatgggccacgagaaaactaactcatatgacttgaatac

SEQ ID NO: 37474 - DNA, 316 bp, Oryza sativa
tctgttcaccatcaagaccgcgcggaaacttcttctgcctctcatcatcggtacgcacgtcctcaggggcgtagcgcgcgaggcggatgaactcatgcaaatactctataactgttctgggtccttgttgcagggaacggaactctctcttcttttgtgccacaattccctcgggaacctgtgctttattgaaactatgacgaaactctgtccaagtaacctctgccccagctggacgggtcaccatgtaggtgtcccaccaaataaaagcgggaccttgtagctggtgtgtagcaaaagcaaccttctcctgctc

SEQ ID NO: 37475 - DNA, 171 bp, Oryza sativa
  unsure (1)..(171): unsure at all n locations
ncaagcttggtgattgtaccttgcataataacttgatgttgtttatgcgtatccaaagaagtgatgtcctcatcaaaataaacaccttaagtctcctggttttcttccacacgcatgcacgcaagccactcacataaacaacactagtgagtggcatcggcttcccacccc

SEQ ID NO: 37476 - DNA, 291 bp, Oryza sativa
agcttggcgtggccacgtggtgtccagcgtagcgttttatgtgtgtgattcatgcagaaacgcaatgaactctgtaactcgcgccacatgacgctttttatgattggtataccgccttctcggagtattaacaacctgcatccaatggtttacctgtgcaagctacacgttcaaaaaaactagtactactaatagtaacggattgtttcgggcgtgtagctatgacaaaaaccagaaaatttcgttgtggtttacgtgtctggatagtaaaatttaaactcgtcgcaatcg

SEQ ID NO: 37477 - DNA, 338 bp, Oryza sativa
gtggagtgggtgtacacggcgatgatgtttgtgagaccacggtggaggccggcgcatcggagaacgaccgggaacgcggacaacacatcaccgtgggcgacggttaggtacccaacgaaagctgagccgagactaggccgcgccaccgacggcctgccgaaccgcttaggccaacgcgacgggtgctcccatctctccgagccgacgacagagaagcgccgcccgaccggacgcgcgggtcgccagcctgtacagctcgaacaaggcccggccgacgtgcgccgtcgaaaccagggagcgggccgaccgcatggagccggggcctgccaacgactcac

SEQ ID NO: 37478 - DNA, 294 bp, Oryza sativa
  unsure (1)..(294): unsure at all n locations
agctntgtatgggttgaaacaagctcctaagcatggtgtgatatgcttaataactttttgcttgcgaaaggttntacaatgggaaaggttgataaaacgctttttgttcttaagcatggtgataatcaactgttcgatcagatatatgtggatgatatcatctttggttgttcgactcacgctttggttgtagattttgctgagaccatgcccagggaatttgagatgagcatgatgggtgagttatcgtactctttgggattgcaaattaagcaaacacctcaaggtactttt

SEQ ID NO: 37479 - DNA, 352 bp, Oryza sativa
attgggggagaacactctatatgcaatcctagacggcagcgacgaaaccaacctttccgaggaagctccaacctctaaagaactctagctctagcgtggggaaaagagagcaagactgagtactatcaactgtactcagcaagtcataccggaagaggagtatgatgcaagatatatccaaaggaggctaagggttcatttgcacaaagtatgcatttaaaagcaggaaaacaatcgtacgaattagacagtattaactagttgctgtccaacactacaccatgttgtaacaggtccatccaaccacctgaactatcgaggatcattaaaagcggtgaagcttgaaacaaga

SEQ ID NO: 37480 - DNA, 416 bp, Oryza sativa
  unsure (1)..(416): unsure at all n locations
gcttgacaggtttatgtggaagataaatgaaaatatgtggggagtgttggtcccattcaagggctaactctacatatacttcaaaaaatatacattaaattttgtagtgtgagaaagtgagagaacggaaaaaaaattacagcttaccatataactgacctattatatatgttatctctactatgggtttacaattagtgggtttacaattagtgggtttacaattagtagtgagctctactattaaacttgcttaanagagtaaaataagcaacgactagtataaaattagtcgccgaccatcattatcatcgganaaacaatgagaatattaatcaaaccaccgtgcaaactaattaaaaaagagagagtagattcacttaactctagcattatgatctaagtgccaaaactac

SEQ ID NO: 37481 - DNA, 356 bp, Oryza sativa
taaaagaagactgacttagcacggacttattttacggtttataatataaaatgaaaggatgctcattggtcataataaaacagatttgttatatagatgttggaagagaggatttttcctaaaaattaacaagaaagagaaggacaaatctagctactcgcctcgaaggggcggcagccgccagttagggtgtgtttggttgggtggatgagttctggatgggagatggcagcccgattttttgtggtgtttgattggagagaagggtggatggggcagcctgaaatagggaatattccctcaatgtgctggatgagtgcgatttggctggatgaagccattcaattttggtatgg

SEQ ID NO: 37482 - DNA, 316 bp, Oryza sativa
agcttgtgctactaactctatttccttgagtactttgctaaagcaaaatgagaagcttatgggactccttcacaatggcctacttaagtgccatatgggtagtaaggccctaaaggactacctatgctatcaaagggacaacttcaaccatgagggtcttgggtatattcctccaccaaaaggaaaggtggacaaaagtgtgatgatcaagaggccccaaggtcttaagcaatttgttaaggccaaaaatatccttcctaatgaatatgcttcacaattgtcttttgatgcatcttatattcttaagaagaatact

SEQ ID NO: 37483 - DNA, 356 bp, Oryza sativa
tcaaacaagccaagcagttgtgccatctgattccaatgtgactgctacagaagtgaaagaacttgctgggagttcatcgtccccatcactaaagactggtggagtatgcaatattacttttgtaagggtggcagaaaaacatcggcgcctcctcaatgtgttcattcgacagaatccaagtttgctagaaaagtcactttctatgatgttgaaagtaccaaggctgatagactttgacaacaagcgtgcttactttagatcacgcattaggcagcaacatgatcagcatctttctgctcctttgcggattagcgttcgtcgggcatatgttttggaggattcatacaatcagttga

SEQ ID NO: 37484 - DNA, 444 bp, Oryza sativa
  unsure (1)..(444): unsure at all n locations
agctnttaaccaagctcttaccatatcttactaatgcatgcggaatggngacatacaccgattcaaccaagcaccccaatggaggttggatgtatcgatgtcttggctaacacttgctgtacggctgcaatcaaatctgtaaagctctgggtaggcttaaatatgtagtaaaggaatagcaaatgctcaaatcagagaatgcaaagttgaataattgttcaaagtcaagcaccgtgctggtcctaggctagaacgtactagagacgcgagcctatacacaaacggtaccacaagatagcactaggaacaacttatgcacaactctgatatatgaaagcaaattcaaagatacaactgatttttctcttttcctttctttttcttctttctttcccttatctattctttgtttttggtgcggcctatttcttttcttttcttttt

SEQ ID NO: 37485 - DNA, 374 bp, Oryza sativa
aggaccttgaaactcagctcgcgctgagggaaaggaagccttttattcttgagtctgactgagtcacggtgattggaagaatgacagctgaagatgaggagagatcaatatggacgcttcttattctgtcagcaaaagctgtaatgagaagtcttcaggaagtgcgtattcagcatagaaaacgacagtgtaatagggtagctcatgaactgtctcaacttgctaaacggaccgcacattgcgcggtttggcgtgaccatgtcccgtcttgtgtgatgcaagttctgaagcaagattgtaatgttattacataatcaataaagctcttgttttcctcaaaaaaaaattccttctatatctatgtcataatgaag

SEQ ID NO: 37486 - DNA, 408 bp, Oryza sativa
agcttgcacatactgaacaacagtgtgtcgaagactatgcctagctaacagctgtttaacgcgctgataagtgacctgtattcctgaatgacccccaacggccgctgtgtgaagattagcaagaattctctgttgaacatctacattgtgacccacccaaagtctgttctgaaaataaagcaccccattgcgcaaagaaaaatgtggtactgctccagaattgatacagagagtttgtaccttgctgcaggcatcgggatcagaggaataaccagccacaatgtcattgatccactctggaactgcaactgatatagctgaaagttccacccgatcagaacctggattacgagataatgcatcggcttgcgctgtgtcaatccctttcttaaaaataatcttataacg

SEQ ID NO: 37487 - DNA, 357 bp, Oryza sativa
tcagctttcatcattccaacttcgacttgtttggttgaactaatagagacacccttcctggtggtgaccctgagtgagatagagattgttaatttggagagggtgggctttgggacaaagaactttgacatggctatcgtgttcaaggatttcaagaaggatgttcttcgcattgattccataccatcaacatcacttgatgcaataaaggagtggcttgacacgactgacctcaagtactatgagagcaggctgaaccttaactggcgtcctattctgaaaactatcatcgatgatcctcagaaattcattgatgacggtggctgggaattcttgaatatggaagcaagtgattca

SEQ ID NO: 37488 - DNA, 360 bp, Oryza sativa
  unsure (1)..(360): unsure at all n locations
agcttgaccattttgaaaccaaattatcattatgaatcttaaataagctggctaactggggtgcatgataattgaaaagaaaggatgcagcatggaactatattagaagttgcactttattagaggaaaaaattaatctgagccccccccaggtatagaacatctaaataacgatgtcgaacttaacaaagccacacacagtanggccctttgagttggaatgaaaaaatggaggaacaggaaaaacacaatatgctgataggcatgcaaatgcaaaacanagggactgcaaacgcatgaaaaacacaagaaatatcgtttgattggaccgcaagaaaaacacagaaattggatgagaga

SEQ ID NO: 37489 - DNA, 358 bp, Oryza sativa
tgagcattgcggtggatgagtttctcttgctccgaagagagctccatgtcatcatggggtacatcaacacctgtacaaacaactttccaaatacttggatgcaaagagattagatgcaacttcatcttgtgcttccaagcggcgtaatgtgtcccatcaaattgaggagcacgcccgaaaggcacggagacaaagttgtgagggggaatggtaagtttgctgtaatcaaaaggtatagtaactcccttgggtgatggagttcccttgctgctcgctccatattcatttccatattccccgttctttccccctaagtacgacatcgtggatcacttcaaacggtgaagcttaatcaaga

SEQ ID NO: 37490 - DNA, 213 bp, Oryza sativa
ggatcttaatacacgagctgcacttcttggtgcttgaattttcaattttgtcgaatccgtcgcgacttttgtattcgtgaccctcgagggggcatatatggtgaaggaatgattctttcaggttcgcctcatacccccttcaaaacatggaaacccactatttgcccgcgcgaacaccaaaacacactttatagaattagatcataccccccg

SEQ ID NO: 37491 - DNA, 354 bp, Oryza sativa
tttaatagcagaacacccctcattgatctcattcaattcggggaatatgctcggggtgctggcaggtaaaacaagattgcttactccctccacaaagggaatatggtatgcccgggtctctaaattgccaggggcgaaatggggcgccgcaagggaatactctgaagcagatgtttcaacggtcgcacccttccccttcgccttgactaacggcgaaacaaccggctgacgcaaagggctaccgaataccctcgccgcagctgtcacgatccgttccgcggaggctgaagccccatcggcggcgctaccgtctgctctcatcatcgccaagtgaaagaacgggggcggtccaaa

SEQ ID NO: 37492 - DNA, 305 bp, Oryza sativa
agcttgattatattatcataccattctgcgaacatgatgtgaatcgatgtactagattaagttgtaaataaacatatacttatcttgccatgtaaattcctgctcaactagttctgcttatgcttgatcatatcgtattacaggcaggggcggatccaggacaaaagaatgggggagtttaattacaccagtttcttaaccttgagccatttaaggactttttaatttatcatttatggtgaaaaaatcaaacgaggtacttcggagggtatccatgtgttttgtgggtgtataaactattttac

SEQ ID NO: 37493 - DNA, 356 bp, Oryza sativa
tcacgaacgtgtcgctcaaagcaatgtcagccttggcatcaaagatgctggacctgtgatggataagtgcatttttttggtaaattaataggtcggatagcaagagcctagaggtaaccaatatgacccataattatacaagaaactgcaatgggtaaatttacctgctgtcaccctggaagtcagtggaaacaaggtcctcctcaacgtatccaaggatgcccttgagcttgccctcagcctcctccctgagaagatgtagcaaaattagtgaaacattcaaggcagcaaataattttcttttctgaaaacacaagcagattcttctcggtccagaaatcagaagttcataaagg

SEQ ID NO: 37494 - DNA, 293 bp, Oryza sativa
ttaccatgtgaatatgctgaaccaaacatgttctaatttgccatattcattctttatgagattcagttcgagaaaacatgtgacattgggggcgcttttgtaggaattctatgtgaggcatgtaaatggatctccaatgcacactgaagctgacaggttgcgagtcatccagtgccttgaagctgctattgaacggagggtgtctgatgtaacaactgaatgaacttttactgtctcaacaaagagaaatcagaccggtgtcactcagaacatatctgaatgtggttgtttca

SEQ ID NO: 37495 - DNA, 355 bp, Oryza sativa
cccgcggtcacagggccaccgcattttttttataacagcggccaggtcagacggaaggcgatgctgccaggaagcccgaatcctaatccaaaacgtgtagaactttatctctcgccttctatagaccaaaagtgacgtgatgagatggaagcgtacttggagaaggtcttgatatggtcccaagcaacttctttgatcattcatgaattcattacgctcgggctcttttctttcgcccaagcaagtacctatgcaaacaaaaacacaagaaactcattgtgtagcaacgtttgctcaaatttataacatgtaaatctaatgtaaaacatctgcacctttgagtgattaatacata

SEQ ID NO: 37496 - DNA, 268 bp, Oryza sativa
aatgatctcagcttgtggtcgcatatttttttttttcattgcagatagcgccggacgtaacggcaagaacacgctcgaatatgaacgggtcggcgggatacgtgcctgaagaatggtgtgctgagattaaaacggcactcgcgatcatgagagcttagtcccatattctgagaaagatatgctgaggaccacattgcctgagatttgacccctggccgcgtattcggagaacaataataatggcttaactttttttagaataccagag

SEQ ID NO: 37497 - DNA, 298 bp, Oryza sativa
  unsure (1)..(298): unsure at all n locations
agcttggtgcagggaagctcggctcggctcgattattggctgagctggctcgcgagcctggcatcgagtaaatctcaagcaaatctaagagaaattgaacaacattttaccacatagaatgggtaataatgtgataatatttctttaatatgccatcacaacacataaatatataatatgacaattaaaggtatcatttttaaccaataaatagttagaaaaggtgcaaaatttttgcatatgaccctatngcagtgagccaagcgagctcacgagcggctcgtgagccaacttcggc

SEQ ID NO: 37498 - DNA, 314 bp, Oryza sativa
  unsure (1)..(314): unsure at all n locations
tgcaagctttattggtgctttttctcaaccatggtactctccccttcaaatttgtttcaaaatataaaggattttataatttgaaacaatgtttattctactagttttatagtactaatttattctccaccattcacttttaaggcccctttgaatcacaaggtagaaaaaacggaggaataagaaaaacatangattctgacaggaattgaagtgtaaaatagaggattgcaaaacacaagaaaaacatatgaatggtcgtttgattggagcgcangaaaaacacaggaatcgaatgagagaaatagactaaa

SEQ ID NO: 37499 - DNA, 282 bp, Oryza sativa
atcaagccagtacgagaacgaacaccatggacaaaacgcatactgcacacctcagcaagagcagctagggcttcctggcagatatgaatgagaatagagaatttactaaatatctcaagctttcttggaatgctaaaataagagtaaatactgttattgtaacatgcacccaaataggccaacaccatctttattcaccattttgaccaggacatatatactaacacaatctatggacatttgcataattttagaatatccacaaaatagagaaaatgcttt

SEQ ID NO: 37500 - DNA, 390 bp, Oryza sativa
  unsure (1)..(390): unsure at all n locations
agcttgatcgattccccctctgaaacaagaagttctggaccgggaggtataagatcaatcactnggcgtccatccgatgcatcgactatggatatttcatatccccccttttctttacgcagtatttttcttactacaacctgtgacgttgcattatagaccgtattggtactcttgctaccatcaggatagatctggccccttcctcgggttccccccacatatatgggatantttaagaaatgaacgtctttcttatagcagggtcgggggaaagaatgggaagacgatttcactatatttcttacctggaacagggcctatcacaagaaatatttttttatcgggacgataactcttgaaagagagattttctatcttttttttaac

SEQ ID NO: 37501 - DNA, 403 bp, Oryza sativa
  unsure (1)..(403): unsure at all n locations
agcttgtattntgcactcttgcattctgatagtcctaaacataagaatagggtgttacgcaaatgaacgggccaaatctctgctcatcacaaggtgattcatgtgttccgatccagggtgcgggacatgcgcatgttggagaagatggatatgtttacaataacaaaaaaaaactatctaaccccatgcaggttatcttcatatattccagttagttccattcttagtccttactgatactatatgttgtgaagctacaccgttggaatcagcagggatctnttgttctactttggatgggatagctcctatataatatagttagtatagaatatatgtgtcttctagttgatatttcaggtgggtgttatcaagagggagatgccgtttattccataaactt

SEQ ID NO: 37502 - DNA, 369 bp, Oryza sativa
ctatagaaactaagcttggggtcggacatcataacttttttttatatgatggacgtcctagtgccccggccgaagccgccaagaactatgtacgtcacagtgattgggttgtgcgggataacgtgcctgtcagtatggtgtactggcgaagaacaagggcacgcggagatcatgatagctttgtcccagattcggataaagagatgctgtggaccacaatgctcgagacattcacccttcctgcgggtacagaggacaaagtgaaaaggtggactctgaagaaaatggcataacagtttcagagcttcaagggagatctgtaccagaagtatatactgaaggggcagacaccgaacttcgacacattct

SEQ ID NO: 37503 - DNA, 311 bp, Oryza sativa
  unsure (1)..(311): unsure at all n locations
agcttaggagttacgacgcagatgtgaggcagtcctgnttcgagtcacgtaaatactagaccagctctaggagaccctatcgcacaagcgggattgttcccagtacatcgcgtgccacatttatcaaaatatcggtcatcacaactgacataacagcagcattttctcagcagcagccaattgtcattgagcagcactatggcaccacaccaagtgagctacagctcttcccagagtctacaacaagtgaagacagtgaaccatcgcaagaacatggaatttctgatcatgtgacaccgccccacggcaag

SEQ ID NO: 37504 - DNA, 356 bp, Oryza sativa
tcctttggttgacggcatgattatcatcatttgcatataagaagatactactgacaagtaaagtgacggggatgacacgagagtaataaaacaatactccctccctccgttactaaatatttgactctgttgatcttttagcacatatttaatcgttcgtcttatttaaaaacttttatgaagtatgtaaaattatatgtatacataaaagtatatttaacaatgagtcaaataatagaaaaaaattaataattacttaatttttttattaagacaaatggttaaatatatttaaaaaaattaatgacgttaaatatttagaaacggaggaaatatttgctttcgcaggccattgg

SEQ ID NO: 37505 - DNA, 428 bp, Oryza sativa
  unsure (1)..(428): unsure at all n locations
agctntttgaaaaaattatttattattataagtcttctctagtagaccacaaaagtgaaaaatcgagatattttggagtggtcatcatcactccctcgtcgctgtcgatgttgtcatcgctctttaatttcctgtcctttcacgaccatgtcagagaagataagaatacaatacatgcatatccagttactgatatgtacctggttcgattttggaggggtcatcatcactccattgccgctgtatttgctgtcatcagtttcttcgtgtcctttcatgatcatgtaaaaaagataagacttcctttgttaagggcttgtttagtctaataactttttccaaaaacatcccatcaaatccttagacacatatattaaaccttaaatatagattaaaagaaaaaaataactacacacatattatttgta

SEQ ID NO: 37506 - DNA, 348 bp, Oryza sativa
tcaaaatttcttcaaaaagagtgtaggtctttccaaaatttctattgaatttattttggtgattacatacaaatcggaggtgcctaaaaggtttgcaacttcatcctccaatgttttttttgtcatactacatttgcacctatgttttgcacactttttttgtctccaaaatgtagttgtaagttgatgagagagaaaatgtgtgtggggaagaaagaatatatagaaatttagttcatttgctaaacaaaggtttataaaatagttgagaaagaaaactctagtgaaaggtaatcttacataatagaaaacaaactaaaatgaaaattaaaagaagtaaaacacatt

SEQ ID NO: 37507 - DNA, 359 bp, Oryza sativa
tcgacatggaccaaatggggttcccccgctactccctctggctctcccaaaagaaaccaaccttgtattaaaatataagaaaccaatcctgtattaaaatgtgatatattttagtataacgaatctagaaataatatatgtatcacgtacagtacgaggccggcttttttaaggacagagagagttgggccacaagtcagtaatttcttcaactcaacagttctcttcgtggtcaaacatatccacattattaccacgaaaaagactgatgaaatgatatattgtttagaatgagcatggataaaaaaattctactagtactattctgtagtactccatccaacaaagagtactaacgg

SEQ ID NO: 37508 - DNA, 347 bp, Oryza sativa
tgatcatgatccttttccggggaatactttttatttcaatgataagaaggcgttgattctgccggagcaagccgaatctactatgggaaaggaagtggtcattggtgaaccaagattccaagatgatagtgcccaataagccggaggttggcgtctggaaggagaataggagtggagcttcaacttctatagcccctatgaagaccaaagtgactcttgatatgcttttggagaaatatgagaagcatggtagtgggaaaattcacaacaaatggaagagaccaagatcacctcctagggaacgatttggtcattcaccaatacgggcgcatttaccttcatatgat

SEQ ID NO: 37509 - DNA, 318 bp, Oryza sativa
  unsure (1)..(318): unsure at all n locations
cgctatttccgcgaagccgattgatatggattctgtaaatactgaaacacatcatatctccaatcatcggctgtaattgtagcaatctctatttcgatatcttttatcattggcttatgacggagcgtggggctcctcaccgggagaccgcgcaggcccccctttgccggttcggccggggactcanggagagattctaagctctttgtatgtggaaggctcgcgagacaggaaacacacaagacaccggcgatgtatacaggttcgggccgctgagaagcgtaataccctactcctgtgtttctgagacctgtgttg

SEQ ID NO: 37510 - DNA, 353 bp, Oryza sativa
taggtagtagaagaaggcttatcttgtgatgagaaaacgaccacgtggccaaatgcgaatggctttggtgaaacgttctatagcagagagagatcttttgagcgctcgtttttgttgcgtagctcaacttgttttgaacactgtggcttggcacggcttcgtccggtactttttcacttaaatttcgtcaatttatgaaaataaaattcatttttgcttgagtctttctgaaatctccagaaccttccatagaaacagtctgcgtttcagtctttcagactgttgtttttacggtgctatcgacattgcgcctgttcggctgcatttaactttactttacaaacagtaagttg

SEQ ID NO: 37511 - DNA, 356 bp, Oryza sativa
  unsure (1)..(356): unsure at all n locations
gcttaaatctgctggggggcctcagctagcgtatnnacaaatactgctcgctattactgaaatttcaggttcaaggcatggtaactgactttggtgagggaatgcactgtcaatttctggaaattttgaagattctgatggatggatttgctacaaatatgcctacaaactatgtaagatgaactagcctaaattgtgaaacttttgatatttcttgaaccaacatgattttctgctcacttcaaaatattgaagcatgactgttaacgtgtaatttgtattgagttactatggaaattttgttatctctttctgtcgcagagaggagttattgatgtttttcatgaaaagcatct

SEQ ID NO: 37512 - DNA, 364 bp, Oryza sativa
gcttaagcctcattggaattggaggattaccatatatagttcaacttcgtatcttaataagaaagagatccaatctcttgaaaacatccatttgctttggtttttttttccctgtgatgatatcaaatggaccattttctcttttcttacgcttttcattcctgtaaaattaaagtaacatgtcacttcaatttccgcgttctttctatttcaatgtgtttcctatcatacattatatctcaaaggaggcataagagaaatttaccagtagtaaggcatttacgatgaggatagtatctattgctggcctttcctaactaagagtacgttaaaaaataaaggtatggtcataattgtatatgta

SEQ ID NO: 37513 - DNA, 401 bp, Oryza sativa
agctttggcatcgaacgcgcacagatcttagatcttgatcgattgtggttgtttagcgagggccagaattaatagaactgcttactttttgattgtgagttgtgtcccggctgcactgaaaaatcgaataagcactaatgatatattgggtgtccaaatatatttcttgatgaatttgcttgccttgtgtccgaccagattacctgctggaatatgcaaaaggatccgtcatgtatggattcaagggaggtccagctggagtcatgaagtcaagtacgttgagctcactgtcggatatgtgttcccctacagaaaccaagtatagcaacttagattcacttaaccttgctattgcgtccgaaaatcgacaggtgcctattctctgattgtctgaaatcatg

SEQ ID NO: 37514 - DNA, 356 bp, Oryza sativa
agcttggatcataacgagtgccgccttcgtaatgcttgcctcttctatggtgacgacagcgaaggaatgagccaagacagagagaagaggaccctgtgatgctacttaagttactgcaaccactaaactacatattctttcgtgttaaagcgacatgtggaaattatgctagttaaaaccgccttataaaccactaaagagacgaaaagaaacccttaccgtcagttacctggttcagggacgagaatcgagagtcagacctctagcatcggggcccaaaaccttgcttggcacgactgtgatgaacagtcgaccacagcgcggttgcttctttctagctgcaagctctggacact

SEQ ID NO: 37515 - DNA, 346 bp, Oryza sativa
cctcacaccgagagtctgttttctgtcacatcgactcacatgtatttttgtcaggctaagtgactgataaacaaccgttcagtcacctacttcggccgggcgcatttccaagccaacgatttttacgtatacggacacacatttaaagtattaaaaatagactaataacaaaataaattacagattccgtctgtaaactgcgagacgaatcttttgaacctaattaatccaccattagcacatgtgggtactgtagcgcttataactaattatgacgtaacttaggctcaaaagattcatctcgcgatttacagtcggactgtgtaattagtttttcttttttgtc

SEQ ID NO: 37516 - DNA, 433 bp, Oryza sativa
  unsure (1)..(433): unsure at all n locations
agcttcaccaggttctgatgagctctgttgccgcccatctacacgggatatccgttatgtgatctctaacccaatagcttcttcgttccctctgccttgagaaggccaaagacccttctggctacggaaccaactggaaccacaatgccactgttcattcggccaagtttgtgaattggtttgttatttgagggcactttgggtatttaaaaaaaatggataaggttaactgatggcgatggtatttcttaaataaatttgtttgtatgatgatatttttctataggtgatatttgtaatggcaaacatataataagattgcatttatatatatatatatatctcctgatagaatatacagacgataatatgtgaattgtatattanaaaactagtttggactctatatatctaattactgaaccctgcatta

SEQ ID NO: 37517 - DNA, 338 bp, Oryza sativa
gctttgatgccaaccccgagaagattctagctatcgagcggatgcgcccccccagcaaacttagggatgtgcaatgcgtcaccggttgcatggccgccctaagtcgtttcatatcaaggctgggagagaaggcgctacccttgtttaagctcctcaagcgctcggggccgtttacttggacggaggaagctgaacatgccctcactcagttaaaggcatatctcagctctcccccggttctagtcgccccggagccaaatgagcccctgctactttacttagcggcgaccccccaagtagttagtgcagcgttggttgtggagcgcgatgaggacaat

SEQ ID NO: 37518 - DNA, 412 bp, Oryza sativa
agcttgattccctttggagatcataaacttgaggttgtatatttgaaatgtaggatgttgcagtgaaagtgcttactgaccaggatgtcggcgaagctcaactgaaagaattccttagagaggtctctgccccattatgctttgattctttataacttgaactaactgttcctttggatcacaaaccagttccatctttctaacttggaaattgtttttaaccactacagattgcaatcatgaagcgtgttcgccatccgaatgtggtgttattcatgggtgcagtgacaaaatgcccacatttgtcgatagtaacagagtatctgcccaagtgaacctctccctcatttcatgtgacaaacctataatgatagttggcctcaccaatatcttctgagatgcaatagaggag

SEQ ID NO: 37519 - DNA, 336 bp, Oryza sativa
tcctgcgtgaaattgcaacatatttctttttgtctcaacgctaaagaaaaagagaacatggtcaaagatccattctagcattttcatgaattccatagaagaaaaacagtactaccttatgccgtgcgattgacagtgtaaaaataacaaattaatttaagtagttgatcagccccagggccaagaccaagataggtcggtgataccttgatacctcacgagagagaaaaaatggttttggaaacggggtataaacttggacagtttcaagtttacagaaatacaacttttgaaaaatatcctcgtcaaagaaaacaacttctgataataaatccc

SEQ ID NO: 37520 - DNA, 377 bp, Oryza sativa
  unsure (1)..(377): unsure at all n locations
agcttaaagtatntagaaatgtttcacaagctcatttattacgattgcacatggtattatttgagtgtttaagtaaatattgtgtgatgtttcaatggttacaacttgatgattcatgtatctaataaaaatgtttcaatatattttttatccgaaatataaccgagtccgatcttattgtaaagatttaattattacgaatttaagggtgcacttggatagcatattcgataagtaatttagaataaaaagtgatttaaagatcgcttattaagtctaaaagagaaaagattagaagagaagatactgctccaagtgtatgcatgcatgaacaaatagcctatacacaagtggttgaaaatccattgatttgtacc

SEQ ID NO: 37521 - DNA, 354 bp, Oryza sativa
ttgatggattccctcaaattcaaacacttattttcatatatgcaagttgctttggtgaaactaatcggcgggtgaaattcttgtcattcctaacccccgtcgagttagtccattcttgctccattgtgcagaatgtggaggcgaatgtctcgtctgttaaaggggtccggctcttcatcaagtcatcatgacgagtctagtcctcgttcgtcagctgatgtctcgatggaagatgccgaaactccacgacgactcctgaaagacatctacctcgaccttgtcagtgattgggagaaaaaagcttactacatgctgagcggctgggagtatgctcacacacgagaatactcaccg

SEQ ID NO: 37522 - DNA, 425 bp, Oryza sativa
agttttttttgatagtctagccggctgttgtctatcaaatccctaaattaattaattaatccgagattgtacaattatgtcacatcctgatttttggtttatgatttataaattatttaataaattattattagaatttatgttaaatgttcattaatttacaagtgaagttaaatgtgagaaataaaatttcctaaatataaatcatggctgcatttaatttttattaaattctccataattaaatatacgctctgcaattttctcgaattttcagagctcaattactaattttaataatacaaagagcagttcagcaatgattcgcatattaaattaatcattaaatggtcttcttataattctgttaaatacttatagtgttcaagtattttaataatttttcttgaattattagagcaccg

SEQ ID NO: 37523 - DNA, 355 bp, Oryza sativa
tagcaagcatcacatgtacctctttcattgctaatgcttggatgattcgggtggatcttggtggcacgcctcagcgcagccttcaattcgttcacctcctcctcgctggcgccttcacaatccaacgagacattgacctcctggagcgatggcaagctccccagtcccaagtcgagaccatcgtcgccggcaccggcgacggcgatcgcctcccgcacggagaaccgggagcgaagcgttctgagcctcggcattgctcctcgccggaacaccgccggcccaacgaatccccacaacccacagcacaccaggcacgcgaacgagccagctgatccaatcaccaacaccaccccgc

SEQ ID NO: 37524 - DNA, 390 bp, Oryza sativa
agctttatgacaatacatttccatgggcgacacttttgttccatttgccgacgagaggggtcccagaccaacatcaaggtatgtcccagaccatactgtgccacgaagcccaagggtccttcccgacaccaccccggcgaatccacatgtatctcggcatcaaagcatccctgattagctagttactcagccaggggtgtcccattccacccatgtggtcgtacttgtcttatgttccgatgaaatttcaggataacggtcctttatcgctacatcgggaaaccgtcacccggtatgttcaccgtccgcggtttggaaatcattaattccaagcccgacccaaggttggttttccagtctttgaagacccaatttacccagagttttcaa

SEQ ID NO: 37525 - DNA, 354 bp, Oryza sativa
tttcttagatttctaagggcgtttacagtgtgccgttgtggctttcagccttactcccaggaaccgaatattcgtgtccacgtactcaaaccgtttggcctcctcaggaccaaagcacccatctttttatcctatggcaggattggtgtgtaggcagctcaaattcctagccccacatttctgccatacagcacccctttcatgaccctggtactactaaagaggaaggcaatgtttgatcatgctcctcctgcagtaaaaagagcacattccagctgggccttattgccttccctctctgataatgggctttctgatcaggagattttagatgttgcacctttgcaagcccag

SEQ ID NO: 37526 - DNA, 427 bp, Oryza sativa
  unsure (1)..(427): unsure at all n locations
agcttatcctttntctctctctcatatagaaaaatgtgtaaaggagttgggaatcatgggtacaagcactcctacgcgggccaaatacgttgcaacttgcgagttgcgatacattgcgctatggctcaacgacgaatggcacacgttcaatcacgaacattgtcgcagggcgcacctagacgagacaacaagaacaaggataaagctggacagtcagaggcaaatgcaatttgatgaaccggcagattacattggagcatatatgccaaaaaaaaaagaaagtagtactaacatacactggtggaganaccatctttgctcggtcgacctcaatccacagtagtcctcgttccattaaaaatcgggagtaaaaacgacttttagtcccaatttataagaacaacaggactagataatctttattccc

SEQ ID NO: 37527 - DNA, 319 bp, Oryza sativa
actaagctctggaggtatgacaccttcgagattattatgacttagatataacttctggagtcctgaaaggtttcccaatgaggatggtctgggaccatcaaatgcattatatgctagtgaaagcggtgacaaacgaggaagctctgctatagacgatggaatcgacccgctaaagttgttcctgtggagaagtaatttttgcagttttgtaagctttggaacccactcatctattttgccagtaagattgttcaaatctagacttaacctaaacaggccctgaaagtttcctatgcttgctggaacttctcctgatagc

SEQ ID NO: 37528 - DNA, 361 bp, Oryza sativa
atcaatgtccatgtgcattcacaatataagattctggtcataaacatggactttctggttggtccgatgggcgaactatcaaacggctcgatattaattcgagtctaaaaccgatggctaggcttatcttgtgcaaagcttagcttgtacagtttgagttcgctcacctgtccatagatgttcctcgcattcacatctgctccattctccaacagcaatgcagcaatctgagcacacagtttggttagttgaacactgtcaaaactggtaagaattcagaacatatcgattgttcatagattgaacaacagctgaatttctttcttccttttatcgataataacacaattgatttgagctg

SEQ ID NO: 37529 - DNA, 349 bp, Oryza sativa
tgttcttgtggctgaattctatcaggtttttcatgtgattcaccacctctgatatctgaagaggacacaaattcaatgaagatgctgtgtgcagaagtatattacaggaaattctggataatattatagcaaatgttaaataacacaaggagaactcgtgaaaatatggatactgttagcagcgagatattaataactaaagaaaattcaggagcttctttatggataatatcacaaaaataattaaataacctacaaatgctatgcttacctgcaagcagcgaacatatcttttagatagaccatgctcatttaaggtgtggtggtctatatttttcgctagctgtcg

SEQ ID NO: 37530 - DNA, 372 bp, Oryza sativa
  unsure (1)..(372): unsure at all n locations
agcttgccctagttgcttgcgtgccatgcaagatgtcttttaagtccagattattgcatctgatcggcgccacttgcgattatttgcaggttcgtgcatgatacctgatacccttcccacaaacgatctaacagaactggngaaagcacttccgtccttttttggtctgattaatgaaaacnagccgcatcatccgcgtacatagatgtgtggaagcgcacagctttgcctcacagcttacttagaactcctatgtctgtagccttgtctaataagcgctagagggggtctatagccaagatgaataggatgggggatatggtgccaccctgccgcaaacacttcctgtgtctgattggttccccccggatt

SEQ ID NO: 37531 - DNA, 355 bp, Oryza sativa
ttttgcaagaacttggggctcaacacatcattgccactccatatcatccccataaaagtggacaggcggaaacgagtaacaaataaatcaagaatattctgtagaaaattgtcaacgagattttcatgaatattatgctcggtattaatgaaattaatatttttgtactaaatcaaaaaagaaaaacaatgcaaaagcaataatatatatacaactacaactttaaaacagaagcattttgttatagatatttgtttccaataatctagtatcgtggacctttagtgtgttacgtaaggggaatagatggttcaacaggtaccagcccaatagtagaggagacttaataaaactc

SEQ ID NO: 37532 - DNA, 103 bp, Oryza sativa
tcttctgacaacataaccgtgagaaaatctgcataatgaggttgaaaacaacaaaacagggataacctagtcttgccaaaatattatcacaacgcacctaatc

SEQ ID NO: 37533 - DNA, 383 bp, Oryza sativa
cggtagaaaataagaaatcacctcgctttacgctaatgatcagcggtttattcttgtctggacagcccattgcatacgtgcaactacgtcctctgctatcaattgtgttagccctgcgtgaacatgtataccagatgagccacgagcaaacgctccactatgcaatcatcttcgtcgcaaccttccactctaccatcgtagtttcccctctccacaacctgtgccacgatacccacaacatgatggtaaaaaatcggttaaagatacgtccaattaatcaaattacactacttcgtacatgcaaatttatcaaaggaaaacatgtcgtgatgcaacatgatatcaaatgtacaactgaaactaaatttaaaagaaagaaaaac

SEQ ID NO: 37534 - DNA, 392 bp, Oryza sativa
cgctgatgaacttaagaggcccatcttatagcctattctgagtatctatttttatgtggaacagacccctgtctgatgaagttgatgtataacttgaagcttaccttctatgctcttagtgtgcaaaatcaataccaggatgcattacatcttaagtcaaaatatagtgttgtttactcgtcttggttatcgatgggacacagaatgctaggcccactctggaatcaaacttatttatatacaacgtgaaattctatttttctctttaccaaattgctgaaacatatggcggtcatatttaacattcctaaatgcaatttttagaccgtacaaattaggggcttaattaatccttggcaatttgggaaataagtagacgaaggaaaataatt

SEQ ID NO: 37535 - DNA, 310 bp, Oryza sativa
ggggactgctcacatgacagatatcacgttagtgcttttttgaacataatgattgtgtgaaataaaataaataagaaaaactccaacctttaaggcagactccatcaaacacctgatccacctagcggcttcctctgaacttcgagcacccaactgaaaagcattggttgatgagaactaatcttattttcactaagtacaaaaaaaaaaaatagctccaaggtcagattaggtgagtcaacactagtggttaccttaagttgatcataatgattagaggcattgtagagtgtgaatatgtaaaaaacct

SEQ ID NO: 37536 - DNA, 335 bp, Oryza sativa
tcccggtttagctcgcttttatctcttcctcatcttttgtaatcttttctatttttgttagacgtggatctgtatgtcaacaattgtcgtttgagtaccctgtctggtcctggatagggatttaatgcacattcatcttaaaaattctagttcgagaatttctgggcgtgacaccgcggggtggtcgtcttcgtcgcgcccgacctcgccgcctccgcgctggatccaccgcgcctgacctcgctgctgtcgcttgccgccgtcgtcctcgccccggtgaggtccttgtcgccgctgtcgaccggtggtaccgtgactacggtatttggatggta

SEQ ID NO: 37537 - DNA, 368 bp, Oryza sativa
tagctttttagagaatccacattatttcattgattcttgccgattgaccccgaatcacgattggcaaaactgcataaggaggaatttatccaactttttttaaagattccacattaattcatttattccagccgattggccatatcacgattggccaagcaaaagtgcaaagggagaaatttattgacatcgcttatgccgtgtgcaatgtgcgaacaatctttatcacacgaaccgagaaaggatcgcgctccaatgctcgctcgcgtaaacgtctatccgccatgggcattgtgttgagccctaacttagcaccatgattattagaaaattccataaaaatgtggaagaaaaaaaatcgtacctac

SEQ ID NO: 37538 - DNA, 351 bp, Oryza sativa
tagaacgttagtcactcagtttttatttttggaggagtaaatacaagacactgggaacacatagttacacacacctgatttacattttttacaattttacaaacataccaacacaaaaagcgtcaggcacgcacagcgtcacgtgatgcacatgtaggcacatctgctgtccgctgatcgcaagattagacacacggttgatcgcaccagacgaaacattaatccatctgccgatgatcagctagctagtccctatcaactagttgtactgctagacaagaagagcacacactatctagccgagacgagagctaggaaggaaggaaggatggattatccttaattaatcaa

SEQ ID NO: 37539 - DNA, 357 bp, Oryza sativa
  unsure (1)..(357): unsure at all n locations
tgaattgtaaaaggtaattntgtatcattaacaaaagcataccatcactgaaatgcgacggtaacaccaatgcccatgaataagcagtaacctttccaggaaacggaactgagcaattgcaaaatcacttgccatgacagcctaaaacgttgagaacaggaacagggtgttaataaaataagcattgtagtgggcataaggcataagtacgttcacaagattcacaaagcatcaaatttgtaacctgcatcccctcaacaccactaatgccaacccctatatcagcttcctgaagcatgccaacatcatttgccccatcaccaattgctaaggtcactctatttgtatgtttaacaa

SEQ ID NO: 37540 - DNA, 425 bp, Oryza sativa
agcttacgctatctttccatgctctatgtgctagcttttcattgtgagaagcatatgcattggtgggtgttgttaatttagatgaggggataatgacctggctcggctcgttattagtagtatcatgactagccagctcggcttattaattaaccctaacgagctataagcgtggctcggcttatcttacgagatggctttgtaagctcgttagtaagttcaatcttatttatatcaactttaaaatttcaatatttaccaatttatcatatgttagtataatataagcaattactagtaaaatattcactaaatacaaatagttagtctgctatgtaattaaaggactaacactacaccatggtccacttttgctaacaaaagtcagttggaaaatagactaaattgtggaacacattatgtgt

SEQ ID NO: 37541 - DNA, 356 bp, Oryza sativa
tccatccgctcgcattacctttgttccttttgtcatgcatgatcaaggtctgtatatctcataataatctggtagatagatgataccagtgataataacaaattaagtaattaatatctgactcgattttcttaatttctctcttgatcagaagcagcagtactgatcagttaagctcatatgagcttgaatcactccaatcagttgaaagtcagctggcagctgctgctcctccgacattaagcccccatctgcaggctcatcaactcagcacggtgctaatgatgcaggagctagggttccaatggagcagctgcgctgcgccagcagatcaacatagtattgcaagctccacg

SEQ ID NO: 37542 - DNA, 422 bp, Oryza sativa
  unsure (1)..(422): unsure at all n locations
agcttctccttgtgcttcacattgtctagcggacttttcaataatgaggtattngaatcatacacttgagtttggaatctggtattctacttcatcttctatatgcttaagtggattatccgatgctgagtttggtgggtatagaattgataggaaaagtactagtggaacatgtcattttcttgggacatcattgattgcatggtcttctaagaaacaatctaatggtgctcaatcaaatgctgaatctgaatttgtgctgctgctagttgttgtcacaaattctttggcttttatctactttgaaagaatatggtcttacttttgagaagctcctctctttgtgatatactagtgctattacattgctaaaaacatattcaacactccgcccaagcacattggtatttgttttcactttt

SEQ ID NO: 37543 - DNA, 358 bp, Oryza sativa
tgggcagacaaaggcagaaggaaagagtcttctaaaggctttgaacacacgatcttgattgaatcctccttgtggtagcaataattttataaaattagtactcatgtgattcatcttatccataatagaatgaatatcatgtacgctatatatctcattctctcttttgtcaagctctacatgcccatttggcaataggatgagataaggtggtgacggggtttaaactctagacagaaatccattttacatctctcaactcttaattttgtctataatacatcctcaaacttcaaaaccaagtatttaacatcctctaattactgaaaccgttcaaattaccactagctggttttta

SEQ ID NO: 37544 - DNA, 433 bp, Oryza sativa
agcttcagagtgctcgtgaggatgcaattgcctgtttcgttaacaacagcagtgccttcgccgcatgagacagaccagccatattatataacggaacccatcacatatctaacatgcctttcatgacgaatggatttggtgtcgatctgcgccatgttgaggacacaagcattggctggcacgatatcaccacacttgagatatatgatatccccagggacgagattggccgcatcctcatgtttacatataccatccctcaaaaccttggtccttctcacaaaagctttagctttcagcggtgccttaacacgattggtaaggaccttagcaacaaagcatgcacacatgacttccgcaagtaacgaaacgataacggccagttcatatgttgtctgtaacatcccggcatagagcttaatacgattaatag

SEQ ID NO: 37545 - DNA, 354 bp, Oryza sativa
tgctgggttttctcgagaacattcttttatccgagcctgcgaaagcgtggaattcaacgtacttctccaacccgtgatgtctattgttctattcacaagacaaagaatcacgacctctcaagctgcaagggtcttctcagcgccatgaggacgtcacctcctaaggtccaccagtcatagatctctcttagagatgcgcacaaggaatgaggagcagcagtcatctcagatcgaagcggtgggataatcgacattgatccccacgagccggcagttctacacttgctctaagaccaagtctcattatcgacgaatacaccacccgatgtgtttgctatcgatgggaccaacacg

SEQ ID NO: 37546 - DNA, 163 bp, Oryza sativa
tgctgcatgcagctggaagcttttattaagtttcttcgcatttttcaagccacaaaacgtagtgtcaaccgaagcttttctggccagcaatcatatttccctctcctcaaacaggaaaacaacttttgatggttttcatatgcaactttgagtttttgaataa

SEQ ID NO: 37547 - DNA, 347 bp, Oryza sativa
tatgtggatgacatcggcgtaaaaagcctcaaggccttcgaccactcatcagcatttgcatgagactttctacaatctccacgcattccgcatgaaactgaacctagataagtgtgtattccgcgttcgcgttggtaagccgtggggatctcttggatccgaacggcggatcgaaacgaaccccaaaaaaatctatgccattcagcaaatgaagccaccatcgagcgtacgacaagtacgaaagctcacggcgcgaattgcggcacttagtcaattcctgtgaaaagcagccgacagaggcttgccttttttcaagacccttcgcggggtaggaaagttctgttgga

SEQ ID NO: 37548 - DNA, 381 bp, Oryza sativa
  unsure (1)..(381): unsure at all n locations
agctnttcaagcagtctctctctcatgaggtcatgtatgcctcctctgctctggnggctggctgcgccattggtgacagcaagaagaagacttatttggcttcgtcgcttctcgatgtgctgttcccttttgctggcatgagtctctgtagaactgaaagggttggttgcttctcctgaggggtttagagtagtgtaatttcttttggagctcctgtagctctagttggctttgatcttctatgctgtgcctcatgctccccctgtacctaggtagacctccatctagtaatgatgggccttcagtcatgattccaggtcatgtctctaccgataatgaagtgctcaaatgtctctaccgggccagctttacctcatctct

SEQ ID NO: 37549 - DNA, 352 bp, Oryza sativa
tacctaaactaatagaccatatataaattgttctgtttttaaacaggattaaaattcgcgcaaagcgtgactacgtgactaataaaaatgatttccttaattattgacaagttttctaggggtttctagtcgtgaaggataatttacatcaacaacgagccgaggtgaccatccgactaattaacccgaggaactagctcaagtagctagctagttaaccctgcgccatatacgtcaatatcaaattaaattgcgcttacaacatactccctccatcacaaaattccatcacaaaattaaagaaacaacctagaataaaatgtgagatatcctaaaacaacaaatggagtag

SEQ ID NO: 37550 - DNA, 337 bp, Oryza sativa
  unsure (1)..(337): unsure at all n locations
agcttaactagattcttttgcaattgatgacattgtctacaggaacacccacttacgctgtctaatgtatcaagttcaaagcttcaaatataataccctcaagtgcaatattttttcattcaagttcaacatggtttagttcaaccatatttgtgttgtcagcaatatacaagcataagcaacctctattatgaatgtaaaccatgcttaacactggnntctttgtttttttatggttaatctgctgattgcttagcctttgatcaactgtgtgttaggaaggttggctctggacttgcaatataaggaacaaaactaatgtatggccctacagtgg

SEQ ID NO: 37551 - DNA, 352 bp, Oryza sativa
ccattcactatatctgcgtgaaactatttttttatatataaaactttatgatcatgaatgtgtttttaacaatacaaataatggtgatctcttctctactttcttggaaatcaatgatgtactttttgcagataatctgcatactttcatagatattgcggtctgaatcaaaatttcaaaactgttccacaaatgatataaataaccaatttaatatctcggaggttattttcgtaattgactaacagagttttgctcctttctctcctgcagctctgcttttgtctgagttcacgtttggatgggatatgagcattcaagctatatgtaatgaatcctctaagtctgcctt

SEQ ID NO: 37552 - DNA, 282 bp, Oryza sativa
tgcaagcttgtgatgtagttttgatgcatcaagacacggaataagcttcttaattgctggtaccaaaaaaagagcagcggatttagtagcatcagctgcaataagggctccgtgtcattatgttaataaacaagtggatcagaggtatgttaacgaattggtcgattactaacactagactttctcaatttagagacttaagagcagaagatatgatggaaaaattccaccatctcccaaaaagagatgtggcaattttgaaaagaaattatcttccttgca

SEQ ID NO: 37553 - DNA, 367 bp, Oryza sativa
agctttatgaaggaatagcctcacatatgtggaatatattgactctgaatagttatatgcaaggctatattacatcaaaaagcatggctgcccatgacgggtacgtgtggggtgaaccaaatccccattgaattggatttttccatttgaaggggatcgtacaaagtcggcagtaccccctgtgaataccccaccagtatgaaaagttcttaatgttagttgagtccctggctccccaatagattgacccgcaataacacctacagcttcccccaattcgaccagatcgccatgagtggaactccgaccataacataattgacagatccaagatgtgctccggcaaggaaagggggttctaatatat

SEQ ID NO: 37554 - DNA, 414 bp, Oryza sativa
tgcttcacatcgtcaagcgggccatcgaaatatgatgtatttgtatcatacacttgagtctggaatttggtattccacttcatcttctatatgcttaagtggatattccgatgcctgttttggaagactgacaattgaatggaaaagtactagtggaacatgtcattttctttgggcaatcaattgattgcatggtcttttaagaaacaatctagtgttgctaatcaactgctgaatctgaatatgttgttgcttgtagtggtgttcacagattcttttggcttttatctactcttgaagagtatggtcttactttggagaaagaaccctctctttgtgataatattaatgccattaccatggctagatcatggtcacactcacgtccaagccactcattttcgtttacttttg

SEQ ID NO: 37555 - DNA, 362 bp, Oryza sativa
taagtgcttcgccgaggttgccggctaggtcaggagccggagcgtgacggcggcgtcgaatttcgccatggattccttcaatttagtggcggaccagtatctctcgacgcctagggctcaaattataagctaaaactgtcaacgggggatacctgtataccggatatagagggtattggggtacgctggtacgaggatctacgtaatacgacatcaagcaaatagaagacaaggattatactggttcaggccccttgacaggtaatagccctaatccagttggtatgggattttatgaaggaagtcacagattacaaaggaaataatggaactcgatgataccgacgagatcgtagttgaat

SEQ ID NO: 37556 - DNA, 314 bp, Oryza sativa
  unsure (1)..(314): unsure at all n locations
caagctggcagtcaaccgcttacaggggcgccaccgttgtcttcttggtagccttcatgcgaatgcttntgcagcctcccttctccaccaattctgcaattgtcttcatggacgctggagacagaggcttcttgtaccgctgcaaataaatctttctgatgctatgatcaaaggaagatcctctctacattattccaaaattattacatcggagttgctgagcaaaagaatcaagcttcgcccctgctcgtcgcttgcgaagcaagcgttcgctgtgacgctgagctgtagaaagcgccgggattggcaccttt

SEQ ID NO: 37557 - DNA, 290 bp, Oryza sativa
acagtttggtggtagtctgtggatcaattaggacacggcttcatgaagttcaaggtctgatcctggaagaactagccaacgtcctcactctagctgcttatcttgaacaacatcaattcaaactggagaaggccaagctgagattagcagaacgtcgggagcgctgagatattgaagccacaatccaagccaatcggtgactcgtgcatgaagagaagtccaaacttgatcagctatctgagggcccgataaagtcaaatattgatcggcttgaagctcgcaagatagag

SEQ ID NO: 37558 - DNA, 425 bp, Oryza sativa
cctgagcatgcaagcttttatatgcattgaatgccggaatcttattgaaaatttcctactatacatatgaaacaacaagtattaacagattgaaatatatgttttcctttcatcaaaatataatcatgcgatatcttgttctaaagatttaattaccacgaatacaatagtgtgatcggattgttgattggataactaatttaagagaaaaataatcattctgaagctcgctaaaatacatgcacgtatgtatggatgaggtggataaagtggagagaaacaatacctacaagtaatttaaggaatctttgtgaacacaatgaagacacacattggaacatttcactaccacgtattaaaaaattatgttttacgggttaaaacacatgtttttattttgacataatataatcatatgatatatt

SEQ ID NO: 37559 - DNA, 364 bp, Oryza sativa
tgatctgctatccgagggcccgatcaaattcaatgtttatcggctcgaagctcgcaagattgagctcttggcccaacttcaagaatgcaatgccgaactggatctggaacacaaaaagctagccgatctcccgcgagtcgttgaagaacaaaaggcgaagctgaaatcggccatcaaaaatgtcgctgatatgaccaagtccttgaaaatcattcctggaaccgacgctcaagatgcccaagctattgaagaagtagaacaaattacgcaaagagctatatcggctatccagcaatatttgtctcggtgactctttgtgtaatagatcttataaatgtttgtaatcggctaagatactctggta

SEQ ID NO: 37560 - DNA, 392 bp, Oryza sativa
tagcttacgtggacgacatcgttgtttataacaagattggcgactcattgatcgacgacctcaagataacgtttgacaaccttcgacgatattaaacgaagcttaacccggagaagtgtacgttcaaaggaccgttagggaaactactcggctttctgtgcttcgggcggggaatcgaggcccaccctgagaagttcaaggcaatctagaacatgaagtctcccacaagaatcaaagaggttcaacgattgacaagatgcatggctttgttaagtctgttcatcgcaaggatgggagaacgaggacaagctttcttcgccctgctcaagaagcatgacaaattctagtggaccccagaagctgagagcgcgtttattgcgctcaaacgcttc

SEQ ID NO: 37561 - DNA, 353 bp, Oryza sativa
cttgtcctagtggcattagctttattgttgttatctccatgagaggatgaaaaacactcaccatcttctaaacactcactatcttcaatgtcaagaatatatatcattatcagatagagctccattcagctggttcctctaggtccttttgcgataagtctgtcattaactcattatcatcttcaccatagttagtcagtcctattatagtttccagaatatttgtcattaccggagatctatttgtattccatctcgatcgtatatttgacctaactagttctctattgatactgtggatgcatattgtatactcccttcattttaaattaatctacatatagtttttttag

SEQ ID NO: 37562 - DNA, 391 bp, Oryza sativa
tgatcctctcagtcacctgatgctgcagctagacatgtgacaagatgatcaaggctctaccttattacatcgattaagacctcctctttttctgatcctgacattggtcatagctcgagaaactttggtgatagctcgagaaactttgttagataacaaagccaagtcctgctcctcaaactgatcgagttgctcattggacatggcattaaataaagcaagttcagaagaagatgatgaagaagcaccaacattcaaagaagtcgaagaagaaaccaaagcactatacctagaatcaactttacgagcaagaatattcatcttatgagttttgagtattgtgtaaagcgaatccatagtctaagtagacatatcaacagactcctgaatt

SEQ ID NO: 37563 - DNA, 431 bp, Oryza sativa
agcttgcccaaagggttggcattaccaatggtttggtagagtagagaaccaaactcaccctaaatacatacacacattgggttagagacaaaatattgggataatcacttcctttctaaataattggctctatgggttaatcactaagcttttccttacctaatcgtcacttggtccaccttaaaggtgtcataatatccttctgtttgcctttatctgctagttatgccatggcactttccttgatcaacctgtgcttatgaaaaatgtttggtggaagcctatctcttgcttgatctgcttgattgatacaacattattgattggctgtttctaagacatcctaaaattagtcttgttcaatacttatattatgacgccatcgatccgaactaatctatcttgaactgaatttggatctatgcagtact

SEQ ID NO: 37564 - DNA, 354 bp, Oryza sativa
tgggcattttgctagttattaataatatacacaaattcgaacatttagagaaaatggatgtcacctttagttatctaaatgtacaacaaattacacttttaacttttaaaattttctactccttttgttccaaaatataagcacttatggagtttttcaccgcgattaaggagagagaggtgaaatcaaatgacggattgttgtgattggttgagatgaggagatagatggagaatattaaatgagagatggctgtagttggttgagatgggactaggtgcataagttactacattttgcgacaaaatttaaataccagaagtagctatattttgggacggagggggggggttg

SEQ ID NO: 37565 - DNA, 297 bp, Oryza sativa
agcttatctcttacgctccacgaatggatcagtcataacatcaccaccggctcgccgtcgtcgccgccgactggagtcatcgcctatacgggtggttggtcacaacaccgttgtcaagcgtctacattttcaccgccggtttgctttcgccgccgccgactggtgtcaccgcctacactgctggcctattatgccaccgttagtgggcgtctatgtcttaccgaccggccgcctcgtcggcgtcgaatggtttttcgcctgcacgctggcttattatgccaccgttgttgggctcta

SEQ ID NO: 37566 - DNA, 356 bp, Oryza sativa
tcagaagaagctcatgtcctttgccactgatgttgagaatgatgcacacaacataagtgactgtgagaggctgtacaaggcctttttacaggaaattaatacttttgagctgcctcttcttaaaagcaaggctgtcgttgatgcaaaccttagggagaaggagagcttcaacgagctgcaggatgagattcagcgacaaatcttgcaagctcagactgatattgaggatctcaagaagcaactggaacagagcaaaattgataggcagcacaaagaggagtgcgaagcaatcagaaaaattgatttctttgcagcctccacgatcagaaacagaaaagctcattgcggatcttgag

SEQ ID NO: 37567 - DNA, 378 bp, Oryza sativa
  unsure (1)..(378): unsure at all n locations
agcttgttggctattcctattcggattatgccagttgctaagtggatagaaagagcacatccggtagttgccacatgcttggtagatcccttgtgtcatggtcatccaagaaacaaaactacgtagccctctcaaccgccgaggcgaaatatgtttctgcgggtaggtgttgtgcccaattgctttggatgaaacaaaccttgttggactatggcatatccttcaccacaactccactcctatgtgacaatgatagtgccatanatatagccaataaccccgtccaacattctataaccaagcatattgacattcgccatcactttctaagagaccatgttgccaagtgtgacatagtcattagccacataagaaccg

SEQ ID NO: 37568 - DNA, 349 bp, Oryza sativa
tgagaagaccgtcgcctcttttttactgctcccgagccctcgtctcaatccctgggggaaatcctcgagcacgtgccacggaaggtagctggggtcccgagcttgatgactcgcgaggacaagctccaccgcattccgtgccaaggaagcctatgacgacttcacgggctcgccgacctcctcctccagcctctcaagatgcgccgccatcttgttcagcctaagcgcgagcgccggtcttgtgggcaggagcttcttgtcccggcgcacggagatgcccacccggcgtcccacgcactccagtcgttcgatggcatcgtagagttggccaggcccgatgtcgttggtg

SEQ ID NO: 37569 - DNA, 258 bp, Oryza sativa
cactacattccttgggaaatttttcaagataactctcctgatgcgtaacatcttacggaattatcttgtgataccacgagcctttgaatttgggatgatccattcctatgaaacaaatgatgcatatacaaaactccttgggttcagttcctcaataatccattaaaaacacccaatgagccctataagtaatatgaagatacaatgaggcacaatgtatggtttaacatagtacatggtaataacaacccgagtgat

SEQ ID NO: 37570 - DNA, 379 bp, Oryza sativa
  unsure (1)..(379): unsure at all n locations
agcttcacacaacgaactaatgcgatactattntctttaattgatcacaaggattatgtatgagtacctcttcgctgccctcgtcgtcatcctcatcattgacctcggacttggacttgtcagattcctcctctgcgtactcctcttcctccttggcgggagccttcttggcagtgctctgaacaaacaaaccagagcatatgtttagaacaataaacaaattggacgcggtggcaagcatacaagggattctagttgtgtatacctcgcccttgttgtaggcagcaatggccttgatgtactcggccttgagcttgttggcctaggtacattaggagccttgttctataatcaaacagccatgggtacatataagcct

SEQ ID NO: 37571 - DNA, 349 bp, Oryza sativa
atcattatctttgaaacaactaatgacattatgaacgtgactaggttgcgttcttatgagtcttcctcttggcacgcaaatggagtggtggattaactcatgattaattaagtatcatttaaaaaacttgaaatgaattaatatgatttttaaagtaactttcctatagaagtttttgcaaaaaataaacacacacacacacaccatttagcggttcgaaaaatgtgtgcatggaaaacaagagagttaaagttggaaaacaggagaaaagacacacactgtaaggcttgtttgggggaatttctagcaactgcagtatcccatacaatcttcgactcccataacaatt

SEQ ID NO: 37572 - DNA, 377 bp, Oryza sativa
gcgaactataaaacctcacctcggggggttttgttgacggtcgttagcgatcagtttcgaccgtcaatattaccaaaatagaggagaactagttatgcttgcaatgcatatatatgttagaataataatattccactagtatttggttcactaaccttttgcagagaataaccataaagtggaggagaatcgacatcaaatcagacgatgaatcaatcggatgatgtcttgaatcaaacttatgtatgaatggtccaagaactcagaattgacacgatgaattgggccaaaattcacaagtctacggagtggagaagtccaggaggccaccagccaaataatgggctggatgggccggcccttggttcgggcgaacc

SEQ ID NO: 37573 - DNA, 361 bp, Oryza sativa
tgcactatgcgcaaccttttccacgaaaattgcgcatctaaatcaaatcgccgacgcgcgatcgatcgatggagacgtgacgtgcctgtctcgcggttcggtggtcctatatgctatatactcactccgtcccaaaataaatcagcttctaaaatttaaaatcaaaataaatcaacttttactcttttacctaccattagtttgcaaatctaaaaattttatttctttcataccctttacctacctattcatcgatataacttcacaattaattagagatatcttgatcattcatatctctctttaaatccaccttggaaatatagggtttgagtaattgtgggacagagggattactaag

SEQ ID NO: 37574 - DNA, 363 bp, Oryza sativa
tggcaaacagatccagctaatctcaaagtggaagattttaaccttcgggcgtgcgccctaatttgtcagcaacaaaggacaattgtctaagagggatgttgagagcacttgcaggaggtgtcactcaaatgcgacatcccatgttgtgttgcagaaaaaccgatcaagtttatatagattgatctagtgcgtgtcagggaatttgcgggtgtctaattgtatgtgcacataaatgttgagtgtaatactctacagcgagcaaaagaatccaaagtacctagaagaacggattgctaaggccatttagagtgcaagacatgactatgagaaaactcgaagtgcagaaaataggatgactacttt

SEQ ID NO: 37575 - DNA, 397 bp, Oryza sativa
gctcgtgcaatcatttacaggtctcgaattaacggatatccaagcttacagaagcctggatggccttactataaagaataattgcacaactattaatatccacctcaccttctttaagcattgacaggcctgctcaagacctacaccattaccaacccaaaggaagacagaagatggaagtattgctatagcctggttgatcgtaaaatgcactgaagcacattaattgatgcataaatggaacaccagaagaagacttctcatccacaaccgtaagaatgaaaccactaaccaagagaacaacctcaatctgtaaattataatctcctcgcattccaatactctatgtgatctgtgattcctggtgcccggagaacatactccttccatggaggat

SEQ ID NO: 37576 - DNA, 362 bp, Oryza sativa
tcacagcactcccataatgtgaattctatttcacttttatgaaaaatactaattggccctggaagctaacgctcccatgagcctatgtgtctattatcatgggtaaacatatatgaccattcaactgaacccgttgtgagctgaaactattttggctgaaagatggtacttgtagctatgggacctgacattcttcactaaaattccacttaagggtttataacagagaaaaataaaactgatggtagacactatactgaacccatcactgcttccggcaagctgtacacggagccgaccaatgaaaccatcgcgttggccatatcaactagccctaatgtactcgaataattacaagcaac

SEQ ID NO: 37577 - DNA, 400 bp, Oryza sativa
cctgcagcatgcaagcttgagacgttttcattaattcataagaattcatgggctaccttcctagacgaggcacggaaacctatccttctatatacccacgctgttcttttctttatttcctcaatctacccattcaaagaatcaaatatgatgcctctgcatgcacaccagaatcttctcttcctttttctttctcatatttcagaacattactgctgcagccaatagatatcgcagaactttcttggttctatgtcatgataatacccactgcaagcttcttgttcatggttcaagatgaattatcaacagaaacaatgttctgcattcacaaaaggggatattgaacctgcttaaaattgcccattgctgtgaagtgataaaatgttcatcatataac

SEQ ID NO: 37578 - DNA, 393 bp, Oryza sativa
  unsure (1)..(393): unsure at all n locations
agcttatacattttcctagatgactttggtangattaaatattgaaaccgcgtcaatggctagatgaatattatttcaatgtcaacgtgtattggtggtatcctttttagctcgtcattttctttcagatctactgttttttcagtttcatacagattaatattagttcaatgtcagagcaaactttgggtgcttatatgttttttatggggtgctgttgtgttacacttttggctgtgcaccttattttgccgattgtgttttgtctgagtaaatatccatggtcgatgatggtatgccactggatgtatacatacatactcaggttgtgcttcttaagatgttgtgtttattgttcttgggcccattatcctttatattaattaccgagta

SEQ ID NO: 37579 - DNA, 356 bp, Oryza sativa
ttagctgatttccttgccgagtggaccgagtgccaagaagacatgccagaggagaagatggaatattggactatgtattttgatgggtcgaagaggcttacaggcactggagctggggttgttttaatctccccgactggagaaagattgagctacgtattgtggatatatttttctgtgtcccataacgtggcggaatacgaagcgctacttcatggactaaggattgcaatatctctaggtattcgccgactaatcgtccgtggagactcacagttggttgttaatcaagtcatgaaagagtggtcatgtctagatgataatatgaccgcttatcgacaagaggtgcgcaagtt

SEQ ID NO: 37580 - DNA, 436 bp, Oryza sativa
  unsure (1)..(436): unsure at all n locations
agcttaactcacgcatttagatatttaanacatatttagtcaataaatagcagatgtatttgtaaacaaacttagtaaatgtatacttatctgaatctgttgtttttctcaatgtgccgaatttgaacttgatttaaaatcaaaggctgatagaggtcgctatattatatatttgncattttattcttatttttttataactatttacattagaattaggagagaaaaaaaacacgagagacattctcgaaggattttgaatccattccaagtagtagccgtagttgcatggatgggaacgccggaacgggatggcatcggtagcagcacgggcatatgcacacgttctgtcttgtggggcaaacaccgttccgtgctgatttatcacgatctaacccgtactccccgtttaaaaaaccaatctagatgatgatag

SEQ ID NO: 37581 - DNA, 349 bp, Oryza sativa
ctatctaaacacgaacagccgtgaaccatagccggcgaccagcacttctgataacaatagaagcctgcacgaggaaccccagaatacctggacatcgaggggagcgggacacccatggctacacggagcctaaacctatggatcacacaagcggatagatggacggtgtgctcgacagccgcccaatacgacacgaaagataaatggttgaagaggaagagaaataataccttcgaattcgagactaaagcgccgaccgaaaggttgcgtaacaaagggtaaaaatgaaaacaaccaaaatagaagatgatgtgaggggatatatccctaactcgctttaaaaacgact

SEQ ID NO: 37582 - DNA, 440 bp, Oryza sativa
  unsure (1)..(440): unsure at all n locations
ctgcagctttacatttcgcccacctggttgcataggactctgtataccagncctggcacagtgctccggcattccttatgccgaaaggcatcctgacgtgacaaaaagtgcccaacggagtgatgaacgctgtctctcggatgtcacgcggattcatatggatctagtgatagccggaatatgcgtccaggaaactcatgagttcgcagccagctgttgaattcacgagctgatcgatccgtggcaaatggaaatcgtcctttggacatgctttgttcaagtccgtgaaatctatacacatgcgccattttgccgttgacttccgcaccagtactgggttcgccagccacttctggtgtgtaatctcttgaataaaccccatcctgagtagtttttggacttccgcttttgccgcctcttgacgatcggcgaacatctta

SEQ ID NO: 37583 - DNA, 357 bp, Oryza sativa
ctcgtagtctcaacatattgctattatgtctttcaacaaaaagaaaacgtacactaatatcagcacagcctaacgttgagtgctagaatgtccattgcaaattgcaaactcttgccatttggattcttctgacatgaatgtgttttgtgcaatgatttcgacttcgatccaattgtccaaaagtgttaactgatcgtgcaacaattatgatcaatttgattttttttctgttatttttgcactgattgagatgtttcttgacttcggtggtacagcttttttgaccgagcggccatctttaccgacagcgacctgacgacggacacctccaacggcaagccgtcggtgacacccatc

SEQ ID NO: 37584 - DNA, 380 bp, Oryza sativa
aatcaaccaatgttgcgcgagagggttcaacaaagttgctgagcgtaacctgcgacgatctgcgctagcaatttgcaagctcgaccatcgcctttcgtggacatgttcgccattaagtatgatcttgatgcctaccacactaaacacggtaagttaacctgtcaattctatgagccacacattcagcaactaaaatggtacatctggacctatagatttcgacctcccgaaaactacaagcttttaaaacaatgactggtctatgactaatattatttgtcagttcaagcaaggggccttattgttgccctatggcttataagtagctgccaatatttaaatttaaaaatctagttttgaacgtaattcggatgtttctc

SEQ ID NO: 37585 - DNA, 358 bp, Oryza sativa
tactatctagcattagttactacccacttccacaatgcttattactagatcatagaaatattatattgcttaatacctgctttttcctaacattgtggatgccctaagtagtaacttgtaatttcactggaaaatgatagatagaaattggcaatcgaagacatatttgttttaggatatgtatttccacctgattacacagattctattctgcacatctgaaactatctatataatggaaacagcactaactttttagatgccattttcccgtaatattgtcttccgcaatttcttgaagttaaatgatctatctagcagactagcacgtaaacccactaatcacgatatattctta

SEQ ID NO: 37586 - DNA, 199 bp, Oryza sativa
atggtctgcttgtataatatggttatccttcctgcttcatcacgggacgtctgtagaaagcaaaaaataagtaagtgagcaccctattatgcagatctagaaacccaccacacaccgtgccgaaaaagctaatgcgcaccactgaagtccctctgtaaccatggaccttctatctacaacctgaaaacctgactgaatc

SEQ ID NO: 37587 - DNA, 366 bp, Oryza sativa
ggaactataaatgtgaagctgtaccacaaccaacctgctttcttattgcctaacgtatgagagtcgggtactcccctgttcgaaaatataacaacctttactcttaatatatgtcccaaactattggtataaaagagagtacgatatattcgtaacaacgactaaccatccccatcgtttgagtcatatgatcacccaaggcattcagatgacgacataagaacacacgatatttgttaacgaggttcagccgaatcctacatccccagagctctgattattgccgctcctcccaaccaacatatctcctagctgctaagagtacatggccttcccgtcgtcatctccctacttgtttacactaca

SEQ ID NO: 37588 - DNA, 420 bp, Oryza sativa
  unsure (1)..(420): unsure at all n locations
tgaacacatatatattctttcactcacatacgacncaaaagggaggacctactaaactatggataaagtgatagacatgatatgatgcaaattatctatatatgtttagatatgcttaaaataagaatcagtgaactagacgtctcgtcgtccctggtccaaaaattgtggccaccaaacatgacccatgtgtgctctctaacaaagagtagcaagcccaactacttatgaaagagagcatatataattcaacattaatgggattaattagcagaatatgcacaaaatgctcataggattaatgacccattttgccgtggctaccattctgcctggcatggagggcatcccattaattagttgctaatacattccaaaactacacgtacacactcgtgtgacatcacaggagcctacaac

SEQ ID NO: 37589 - DNA, 356 bp, Oryza sativa
tgctccctatcccccccccctcccaagtcccaagagcttgagcttcaatacttcagaatcacctcccgagggacaccgggcaaagcgagagaccacttcttttccataaacaaagcaaaggaaaagaaaagggggacagaatgacagtctgataaacagatcccacatatcaataacacattttcattttttaataatgaaaatagattatatctttgatttttatcataagacacacaaccgtaagtttgctaaaaaaagggtaaagataaaaataaatcaaaataagagatgaggtgatgggataaatcctcaactcccctttattattgactagcgttaaaccacatagattt

SEQ ID NO: 37590 - DNA, 306 bp, Oryza sativa
atttatctgcgggatactacagatgaagctgagcagcaatgcgcgagattgacttatatttatagatgactgaaggacacttgttttgctgccaggcctctcaacaaacaatgggcacctaataggctgtgccaaaatctcttatgtttcaaagatgtcctttcacatcatattgctgagggtggtaaatcaacaaccgatatcgcattatggtgcctaatatgtaaacgccctatagagaatataatactggagaacatagatggcgtgaggagaagggcacattgatggatatataccatccat

SEQ ID NO: 37591 - DNA, 356 bp, Oryza sativa
tgtagattagctcgcgagctatctctattctggtttttattactccgatcctgcccctgttccatcctttcagcacgtttgcatttcttgttagcttagtatgcaggcacttgattgcatctattgagaaaactgtagcctactgcaccgtctcgatgaaccctacaagacgagtctagtattgttcgaatgtgaagaagttacttttgggtcgctcgggattggtagtgaagagctgcgggcggtggtttgacaccaaggtggagactgcagctagtaggcaattggggaagcgctcctcccagttttgagtacagaacaccctgtctatcttcgataaagtcagtgagtctgtt

SEQ ID NO: 37592 - DNA, 339 bp, Oryza sativa
attatggttagcctacattcttgttgccggtgtgtatgagatcgtataattcagaggagcttcctatttaccccgaagcggcagtttatgtgactaatcgtgtccaatacaacggtattgtgccacgtggtgggtttccgttgtgtccgccaccacggcgttaagtttaaagcgtgggcccgccacttaacggttctaggtcatataacgcgtatggcttatgatggaggaacacgtatcgtgctggtgtagggctaaatcatgaattttgaaaagctttgttgcgggtaataaatacggtacttatgtatcgcgtgacatgctcttgcatgattatta

SEQ ID NO: 37593 - DNA, 428 bp, Oryza sativa
  unsure (1)..(428): unsure at all n locations
atataattcactatgagatttactatatgtttatatgcttcacgaataggatcacgacgatgcctattattcaacttaaaaatatgttaataaataaaattagtattgtacagcagagtagatgttataatatttggctctaacatatcttgccactggaacaaccacacaaactgattatatgtgatgtatcaaatgaatggatatatangaaaatactagtacttatttaatattcgatggccatataattaaatccatggcttataggttatataaatcaagtgtagccttatgattatgcaactaaaatataaacacacatagatgaatctttaacctgtttaggagaataataatagagctagatgtggaggaatcactaagtaaattaatcgatgcataccatatagaataagctatatatg

SEQ ID NO: 37594 - DNA, 314 bp, Oryza sativa
aaatactctatgaaattaatatatagaaagttctataaaagaatagtgctgagctcacctgaaacatgcccttcaactgttggatttgctaaaaaaacaatcctagtattacactatggaattaagcagggaccatctatattacgagtcatctttattcctcagtagtccgtcagtaatattgttggtgaaaatcatcatctgaacagaagcaatatagaatgtccagcctgcatagaagcattggtgcttcagtcatatgtaccaaatattggatcttaggaatgagaagtatcagtaaagccgtcatgaca

SEQ ID NO: 37595 - DNA, 463 bp, Oryza sativa
  unsure (1)..(463): unsure at all n locations
agctntctcactctagaacaatcaacaaataataatatttattgatcaagtccctatcctncacaacttaaaggtccggcatcttataacgcagacccggaaattttaatcctctacaaccaatcctcaggctttcacaaattaatacacatttggttataatcaaacagaaaattaatggtaattttacagaatagcatgtgtcagaccagtctttgctgcaataacctctgattacaaaataatcacccttgtttggcatttagagcagtcaataaaagatatagcttanatgagttctaactaacatttgcacgtggagagaaaaaatacaacaatactggagttgcataccataaacatgaaatanaactgccaactgcaggcagacgtaaattttccagctgactaaaaatcaagcatatacatatgaccaaatggttacctatccagcactcctttc

SEQ ID NO: 37596 - DNA, 451 bp, Oryza sativa
  unsure (1)..(451): unsure at all n locations
agctgggtcatacaaagaaacatgagatttacatgttgtgtcattgcttctcgaattggtaatcgaacatttctatgctactaaaaagtgcccaactaagactagtatatgttatatattgtgcataagtctggctaaccatgaggcacaccaaggatagaaatcctgaatccaccattgcaatggagtataggactttgtgaagtatgatggcaagaaaagggcatccatcaaagaagtctgagcagcattagaagttcatgtaggcagaaagcccatgtcaaacatcttaacatgtattttcgacatgactatattttatcatcataataacatagcaggaaaatagatgataaatgtggcacaagatcaaatatagataacgcangattcaaacattcacaagattaacaagtatgaatatgtagtaacaacaatgaatagtcatcac

SEQ ID NO: 37597 - DNA, 266 bp, Oryza sativa
  unsure (1)..(266): unsure at all n locations
tgaggcatgcaagctngatgaaagtgtgctccacatcacattgctctctttccacttgatgctgctcgacgccgcaacgctctgtggtggtgccaccgcgcaattatagctttctctggtcatcttagcagacgccctcttggagagcacgttgaatgccctctcggatttcctcctcaccgactccatcggatcatcattctgcgtgatagtagagtttgggccggatttacttggagaaacctaactgatagacccaaaaatga

SEQ ID NO: 37598 - DNA, 480 bp, Oryza sativa
  unsure (1)..(480): unsure at all n locations
agcttagattagattatagtattagttaggcaatgttgtgatgagctccataattaactgggccagctgattggccagaaagaggcaattgtactacccatgagcagtactggaagcagggggataatgcaatattatatttcatgtgtgtggtaacacctgatcccattggttttaagagttgaaaactgaattgagatgctttgggctcttcatcaacaatgttttgaattgagttgtttaatgtactatgtccatatttgccgtatgcattactgctgaggagtagtacataactagacttcccattcctttnttttttttacatttccactatctaanaattaatttcacacatatattaattaaatttgatttcttttaagtcaaaggaaaactatgtatatacatcttactcccttcgatcctaaatataagcatttatantgtgnttagctaagaatttctcttttagtcatc

SEQ ID NO: 37599 - DNA, 347 bp, Oryza sativa
  unsure (1)..(347): unsure at all n locations
agctngattgattgggtagctttcctgactagcgctcgtgttagtaacaaataaatgttgtcctagtagatttgttcagccaaacaaatttaatttagaaaagaaaatatattcatcaatatttaaattatttatttgaaagtgatatgagtttatttgccttatccaaagtgatgcttgatgcgactgaaaggagtatattggatatcttgtagggttacacaagcggcttttttttctcaaaacgctggacagttgcatttcatttcattaagagagaaacatatatacaaaggaggggccaaaaagccccgcaagtcgcaacaagcccaaaacacatcacaccg

SEQ ID NO: 37600 - DNA, 492 bp, Oryza sativa
  unsure (1)..(492): unsure at all n locations
agcttaatcctcttaattaatgattcggcgagaccattctgagtgtggacgtgtggtacagaatgttccactntaattcccaaagccatgcaatattcattaaataccttagaggtaaactccccggcattgtccattctaatggattgtatccggttacccgggaaactggctctcaactggattatttgggaaataagccgcgcacaagcgtggtttctagtagaaagtaagcaaaaagtgctccatcgagttgatgcatcaattaataccatanaataccggaatgatccggacatgggattaattggtccacatatgtctccctgtatttgttgcaagaatactggtgattctgcgttcacctttagaatagagggtctaacgattaatttccatgttgcacaatcagtgcaaacaaaatcttcttggtttgggaaatcgttaggtcgtcaaatatagccatttgaaagtgagatgagtcttctcatc

SEQ ID NO: 37601 - DNA, 470 bp, Oryza sativa
  unsure (1)..(470): unsure at all n locations
agcttgcccaatgaagccggatcgataaccttttggnttatcgcattgaagaactggcacaacttgatgattgggtcttggaccttttctagaaggataccctaattgcgaccggtagcagttgcgtcataagaacatggcagtcatgtgacttcattccaaccaacctcttatctttcatgctaaccagtctcttaatgttcgcacagtaaccggatgggactntgacaccccacatgcattccaacatactcgttttttctgcagcactaagagtgtagcatgccggagataggtaatagcggtcatttcctctgtcctgaggatgcagctctttcctgatgcccatgtctttgagatctttccgtgcttgcgaagtgtctttcatcttgccaggtgtgntcaacaataccccgagcacgccttggcacacgttcttcntcacgtgcatcacgtgcatcacatcgatc

SEQ ID NO: 37602 - DNA, 301 bp, Oryza sativa
  unsure (1)..(301): unsure at all n locations
agcttacttgtcttatagnttaggctctctatctgtctttggntatatcgcttggtggtntgtctggttcaataatacagcttatccgagtgagttttatggacctactgggccagaagcttctcaagctcaagcatttacttttctagttagagatcagcgtctcggagctaatgtgggatctgcccaaggacccacaggtttaggtaaatatctaatgcgttccccaacgggagaggttatttttggaggggaaactatgcgcttntgggaccttcgtgctccatggatagaacctcta

SEQ ID NO: 37603 - DNA, 399 bp, Oryza sativa
  unsure (1)..(399): unsure at all n locations
gagtataatatggcttacatttacacaggtgaaaatgaaaatgagaaaagaaaaggcaccataagaaacaacggctgatgatttattatgttctgcccttctttgttgtgacaaagtatcttgatcacaaggacggaattggcagggtaactggcagttgcagtaacattaactgccaactgtgtgctgctaatcttattngatccaaattatatggttattaatcaaatcccatagccccataatccccaaccatgcccgaagaagctgctgtaagatgctcaaacttgtattttggtgcttctgatgctgtgatagtgtgatgcttgtacatcgatnggtggagtagagtatcctgtcaaagccatagcaatctcgatgtcttctccatctacatat

SEQ ID NO: 37604 - DNA, 349 bp, Oryza sativa
  unsure (1)..(349): unsure at all n locations
gactattggtgacttgataactcccataggctgaatccgagatgttgcagccgataatgattctaagccgatgacgtctttgccgattaccaaatttcactgttaacaactatgtatattagaagtataggaatagacttcttttctcttttctttccacttagtttagataatatatgatgaggatgagtagttaaatgcttttggtcactctacccttggattatcttaacccctgattagaatatgagtatcacaagtaatatataaattatttagtgaggtcgctctacatgatnctttcacggggataaataaatacgatacccttggaatactctcgggtgaa

SEQ ID NO: 37605 - DNA, 398 bp, Oryza sativa
ataaatcaccgacgtggatgtattactctcccgacttcatgagcacgagtagaaatgctgtgtgatcagatgggtcataattattatatgaaaaatggagcatttgcatgcatttagcaaataccacagcaagttcacttgttagaaacttagtaccaaagcaacaccttctctgcatgcagatgaaccgccaataaaaaacaatcaagttgcagaccgaaacataacatcaaaaacctttcgagtacatgggatgcaatcacttctcaagtttcatctaaactctgaagtttcacctaaattctgaatatacagttaatacttggacttccactgtgtttctaatttgactgaagaaaagcattacaattgtcttgtaagcggtccattttattttt

SEQ ID NO: 37606 - DNA, 449 bp, Oryza sativa
  unsure (1)..(449): unsure at all n locations
aaatgtgagaggacaactaacttttttggaaagaagagaaaaaaaattcttcaaattcgttgtcactttgcatggattactctgcgttcttttgtagctgtatggttttccccaaaatgattatgcttcaaggaattcgggccatgcatggtcagctggctgctatttacgtccacaagaaaattaagatggtcgcatccaaagaaatcgccatgaaaatagagtataaattggtcacgagctaagaaaaagggggttgatgcttaattgctgatgctgccatcatccaatgcgcaaaacacagcaacaagcttttttggctcctttggaacaaaagatttttgaagaattntagatgaattcaatcttgtgaaatnttttcctatgttatcatttggatcatatgaataactataanaaaatcctatgaaattactttggattgactc

SEQ ID NO: 37607 - DNA, 351 bp, Oryza sativa
  unsure (1)..(351): unsure at all n locations
agctttaactagctagcttaattgatgggactaatgacattntattctcctctcgtacgggaggcgcgggcacacacgtacgcatcaggccggccgccctagtttatcctgcacaaagaaagaaattaaatntgtctggtaaaattttctacttcgtttaatgagagtatgagagtgtttatgcgtgcacgtacgcgtttgcagtgacgctggtgctgatcttgtaagggagggagacgttgcacttggaggggagcgcggcggcgcgggtgatgtatgggcccccggaggcgccgttggcgacgttcttgaggcagccgcagatggtgcggcgatcgggggtgttgttgg

SEQ ID NO: 37608 - DNA, 405 bp, Oryza sativa
  unsure (1)..(405): unsure at all n locations
tgttggaggcggcgtctcttctataatcttatctaantccttctggagacggtacaccttactctccaacttgcaaatattgcctcgattccaggtttccctgtcatgagcggctttgtctcgctccacacttactgcatacatagaactaagcatatgcaccgcctgcatcagagtggcactctcctcaccatcaggacaggtgtaagttccataatcttgaccatgaggcttgtgaggatgatactggaaagctgatgaattcaactcttcttagaagcgttgacgcaaatctccaatggccaccaaagctgcttcctggcaagcatggctatacgatcttcctccagcttcgaacttaaaggacggaaagtcttcacgatcactaaccaacgtcacacgaac

SEQ ID NO: 37609 - DNA, 257 bp, Oryza sativa
  unsure (1)..(257): unsure at all n locations
agtcacctgaggcatgcaagcttagcaaggtaagtaggtcacctctaaatctatttgttcaacagcattgagaagcactntcaagacttggagaacagtgctgcgacacagatgtcacccagttcagtgcatgtgcaaaagtgtgatccaacataatgatattttatagtgatgtgtacctgtcaaaggaggtgttatcaacacaaccgcagaccatgttcaggatgtcagtaaatagaggggaatttttaccaccc

SEQ ID NO: 37610 - DNA, 384 bp, Oryza sativa
  unsure (1)..(384): unsure at all n locations
ttcatgctattcattcttttcaacatggcattgtgctgatgtcttgcctgtatcatttcaattttgtgaattcagaactgtttgcatacatgggaaaaaaaactctgcaacgttgtaaaccacatctgatgcatagctgcatatggttcgctccccgaccagatgtagatagtnatgaactaatgatccttggttttgttcgccgaagaacatgcacgccattgtgaagaggaacgccacctttaactaccttacagcctccgttggttcatttctggaaaaaaatagcctgaacttttgaaaaagttaaagcagcactgatgatcatctctaggtttgctaggtttcattctatttgaatagagactagggaaagctgagagc

SEQ ID NO: 37611 - DNA, 94 bp, Oryza sativa
acaacaaagcactcgcacaatcacacgcaaaaagaaaatgccaaaaaaagcagccaccccgagcaaagcaagctaagacccaggaacgacccca

SEQ ID NO: 37612 - DNA, 390 bp, Oryza sativa
  unsure (1)..(390): unsure at all n locations
agcttctcattctagnggagagggatattcggtatttagcttcttgcatgatctctctgcttgcaaggatattgctntgctgtgaacttgaggtaactggtttttttttttccaggagaatccatcccggtgaggctattcttgacgccttacgagctgaccccttcgtatcggaacataaacaacaagttcagcgtcaagtactacctgaatctggtccttgttgatgaggaagataggaggtacttcaagcagcaagagatcaccatgtatcgccttctagaaaacccccaggcttcctagattccaaactggagcagcaagatgtttntcgattctcaggttttgtacaagctagcatcgaggttagggcaatggcgtacttacatg

SEQ ID NO: 37613 - DNA, 248 bp, Oryza sativa
  unsure (1)..(248): unsure at all n locations
tatatacaagagtggagcttgtttccttgagcgattcaagcgctcccacaaagctaaaatgaggccaacaaatngactgttntgctgaacatcaaccatgcaacacgaagaaaccaaattctttgggtcaagaaagcccaagcgtttactcaccaccgccgggctgcaaccttgatatgtacttgtcatacaacttcgccgctcgctctagatcaccaagctccgtgtagcagtcacctatggcgccg

SEQ ID NO: 37614 - DNA, 247 bp, Oryza sativa
  unsure (1)..(247): unsure at all n locations
gaaatgaacatctgcatctgtcattattgtaacagaatattntacagttcattaatcattgttagcaacaagctatcacattgtttgtacatgtgtataccaggatcccaagaatcatgtatgggtgtactgtaattaaggagcaatacaacagtaacaaagaatcaatagactgtatattttttttctgtatctaaatgtatttttcagttcctagaaatactcacagatgggagctagaaatact

SEQ ID NO: 37615 - DNA, 415 bp, Oryza sativa
  unsure (1)..(415): unsure at all n locations
acttacttctttatccttcacctaanaattgcttactattattntcctggagntggctctcattgtctcaacatcactcatattctagacgccttagttacaacaaataatgtgattactgagcccgaagttcaagaatatcggcatatttgtaggaaaatgatgtcttcagtccaaactgagaaaatattatgggagtcttctcttaattgcttgcccaggcagcaaggcatatggatatgccattaaccaactcaagaattgcactgtaaaatgtcaaaaactaaatggaaagtatttgtgttcttatcaaggtctttcttgtgagtnttaaggttcagaagtatgatcccttgatggtccatttgtgtggtttggatcaacaacatgccatgggctgctgatagtatcatgg

SEQ ID NO: 37616 - DNA, 294 bp, Oryza sativa
  unsure (1)..(294): unsure at all n locations
taatgatgaacagatcatgatgtcccacggcaacgtgatcttggagaagagaataananaggacgtccattgaacggattggacctaactgacgtaccctatatccgtagaatagatcgtcctttgtcagatcttccacaagatagcgaattaaaaaattatgaacatatcattggggttgaaacacctttgaataattattggaaatttgaaacattaatgtgtgcaagctgacttctggatacaatgtgccatttcttctacttgtgtagattttatcacttgacgcgtgca

SEQ ID NO: 37617 - DNA, 514 bp, Oryza sativa
  unsure (1)..(514): unsure at all n locations
tctgagtcacctgcggcatgcaagcttacacagcttgacggctacagcttgtccttcgatctacctatgccaggaaaaagtttggtttctaaacaaacaaaggctcatctggaatgtanggattttacaagaatcattccatttcctcaaaactattgtaaaatttccctattccaaaggaggcctaaacttgtgttactgaagtaaaagtaagcaggacaacagaatccaaaggaggcctaaactagtgttactgaagaaaatggtataataaggtcaaaaccatgctaatttgcaacgcgtggatacttgattagagagaaccgattangagaaatatctctgacgtgagagtaaattgagaaaccttgctaatatatttgtgcaaagagaggtacatcatccatcacattacaagatgctgaaattgatcaggaattaatctacaaggctggctacaaacatccatggcanaactgtgtcactgacacactgagcatctggtagtttgtac

SEQ ID NO: 37618 - DNA, 358 bp, Oryza sativa
tttgaagctcgccaagatcgacaaatttgccgttgatagtttttctcattctaattcatcaagaatgtcctggatggaatacattgtttgaacaagaagagttacatgaatatcatatgacttctacaataaagattgtgtatgtgcgacgagcataatggtatggatggagagtgtggactctctggtttgaatccttcatgttccacttgcgcatatttttgttagtataaatcaaatagttccacattatggtgcacggctttgtatgtaaatgcctattacttccaccattctataatatacagcacatccacccttaagcttaagacaatgaaaaactattgtcacctcttat

SEQ ID NO: 37619 - DNA, 439 bp, Oryza sativa
  unsure (1)..(439): unsure at all n locations
atcttgagtcacctgcggcatgcaagcttctcgctgagcttggtgagggcccatcgctcatcttaaaaggagaaggaggttctgccccatgcgccacctgctgcggcaatggtgaaagaagatactgaaaccgcacacgatggtaaggctggtgaaagagaggtggaatctgctgccgccaagaataaaaagatgaagaaggaaaaggagaaggagaagaacgcagcagctaaggaggcagatgctaataaagaagaggataaggctgtagaagctcctatagggaaggttgacatgaagaagctcccgaagcacgtgcgggagatgcangaggcacttgccaggaggcangaagctgatgaacggaagaagcgtgatgaggaagaacgattgangaaagaggaggaggagcgattgaagaaagaggaggaggagagga

SEQ ID NO: 37620 - DNA, 401 bp, Oryza sativa
  unsure (1)..(401): unsure at all n locations
cttgtttctttccatcggtgagctcgctcttactcttactctntgacttggcatggctttactgctttgctgtttgtttctttntgacataaactgacgttcatactatgttctgcctgtctgaatggagatatccacaccaccgtatttcattttggtggaaaatgctacccgataggactgtgtttttccatgctgcttactttgcacgaattatatagctgggcaatggatgactactctagataccggtagtgatactangaatgttgatgcgagctgtagttctagtatagcatcatacccttatggntcctaaaattatcntcccgtagtcaagatttttcttctgtggtaagagttgacattactgtgttctactgggactagtaatatgtact

SEQ ID NO: 37621 - DNA, 389 bp, Oryza sativa
agcttgatccgaaagaaagctagattttatgtgttctgttgacactgctctcataattatcgtgcttaaacaatccattaatgatcaggtattaatcgccactgcgtacactcttccttgccttaacctgtctgcatgcaaccattcgatgatggcttaagaatcaagtctgatcgacgataagaacattcatatatgcacttaaagaataatttaagtgctgatcgggatgaaaggcaacctcgtcactttgccaatttcgatccctaatcagcatctgtagttcacaaaaaataaacttcagaattattactgaaatgtgtccttacagttcttgcaaatggtgttgaagcataccctttgacatgattcacaatgattaaaagttc

SEQ ID NO: 37622 - DNA, 490 bp, Oryza sativa
  unsure (1)..(490): unsure at all n locations
tagcttcatgcgttgtcaacataatgcataattagttgcatacttcagtggatgaatgaacgggatgtttggatatgcaaatatttctatgcatccggactgaatactttctgaacacaaagcaagccaacctgccatggccatgacacgaaggatctatccatattttcctatttgtcatgtacggctgggctgggcctagcaccaaaactattcgttgttgtttattattattaagtaattaggttattcgtagatcatggttgtttattttattatgaacattntgataacatcttttttaaaaaattaaagcctttatttttccgatcatgtggaggacgcacactgatatatacgtatatcacacgttatataagaaacgtgcttgaacacacgggcaagagatagatactatatatgagtagcgatgaatcataactgcactatatatacgtgcacccatatgtgagtaatcatgagcatcaag

SEQ ID NO: 37623 - DNA, 449 bp, Oryza sativa
agcttcgcagtaagatagagttcttgagtagcacccttaattgctgcgtggacaagatcggtcatatggtttgcaaagagccatttattctatcaatttctgaggagaaacttcgcatcaatacaaagttcttgagtagcgctcttggatgctccattgacaatatctgtgttatggtctacaaaatgccaagtattctatgactttctgtgaacaatctttgcagaaagatagagtttttggtcaccaaagtcgggttggagcctgattacattttgagtaagcctcgtttgttcgcgtgcagcctggagaagcggttgatgccgaggcattatattgtagaagtccttttggctaagggaattgataaaaatgctggctttttaacatatgccatactgcgggagaaggaattcgtagcaaggtacattgatcaacacaagaatgct

SEQ ID NO: 37624 - DNA, 474 bp, Oryza sativa
  unsure (1)..(474): unsure at all n locations
gcttgtctgcgacatgaccagataataagtttatgaaatcaatcggtgatattggctagatgttntctctgtaaaagctgagtttatttcaccttctggtntttttttcttgtacttctgccattatcatgaccacatactaactaaatcctctntgctatatggtttggttggtctcgtaagtttaggcaagttcacaaaacttcacttttctctttcttacctcatcattcctggtttcctacaatgtggtatcttcagtatatcttcatgaagcgatatcacattgtcagatgccacaaggcccacatcgttctgaacataaccatcctggacaaaacanaaacattgtaacaccaaaactagttgcttgagaacaatgacggatccaggaatatctttgagcctgngcaaacctaataagagataaagactatatacacanaaccgtataactgataacttcatagatca

SEQ ID NO: 37625 - DNA, 466 bp, Oryza sativa
  unsure (1)..(466): unsure at all n locations
gcttcttatagcatgattgctatgtgaattctttatgatgtagccaactttaggttacactcatcatattttacaaagcagtcggtatatcacttggatcatattattcagggattcacaccgcatatgctacatattaatattaagtcgcttggttgactacaaatatcgaaaccactcgggtgggtagaatatttattccttgattatatgtttggtttgttcaattaaccacatagtcggtggttacacctattaggtgcatctagtcgatgcatctgactnctattttttcaccctccacaaacttctgatttggaaaaagtactccggagatcatggcgaagatgattgaagcactcggctttggagaatctagttcgagagaagatatctttctactgtgaagtctcacgggtactgggagatatgggacccatacccacngatgattatcactagtata

SEQ ID NO: 37626 - DNA, 209 bp, Oryza sativa
gtgcggcgttgctacttcatggtgacgtacgaatacgtcatggaccaaaggtctctgctccgcgtctccgtgaaagcgccggccaaaaagcgccccacgacgcctatgcctggccaccgggtcgccatgtcggagtgcgactgccacttcaagcgggagagctttctgcggactctacgcgctgcccggcgggaagctcgcgcaggcgc

SEQ ID NO: 37627 - DNA, 286 bp, Oryza sativa
  unsure (1)..(286): unsure at all n locations
tcatctactaaaaaaatgtcttttggtctgatgcattaagaggaactgcttaagccccattgtgtactgaatgcatgatttttcatgtactatgctttctgaaatgtgcaatgtatcaatttagaaataatggggtagtaatgcaaatactatgctacatantatttggtgcaatgattcgaacttatagctagaaccttgagtcctggacaagagtcattggtgtctatatagaatgaatctgctgattttgcatcgaccttactataccaaccctgtacctcct

SEQ ID NO: 37628 - DNA, 440 bp, Oryza sativa
  unsure (1)..(440): unsure at all n locations
ccttttcaatgaactntggtaatatccttttggtatttgaccatgatgttgatatgataaatcatcttctttaaaggctagcgacaggttcaacataaattctcaacttgagcatcttcaagcgaaatatgtgggcaccaggcatgctgacttgaatcgattgtagtatatctttttccaaaataaacaaaaatgtgttgttgggaatgtagtaacttagtattgaggatttcttttattgcagtgaatgggcagtaaacatccaaagggatagctatgcatcctatattgggcactatccaatgctggcatatttttccattgctgagaatgaatcaattggaagagagcgttacaattntatgcaggtatgttaaaagcttattataacatgtcttctgtaccgtagttgaaaattatgtggacttatctggttatta

SEQ ID NO: 37629 - DNA, 108 bp, Oryza sativa
atcttaacgtgtcgtgagcgacaatgcgggcgctcatatacacggagcctggagggaccctgccatcgcaggcttattctcctttaaaattacttatcgaaggatgag

SEQ ID NO: 37630 - DNA, 483 bp, Oryza sativa
  unsure (1)..(483): unsure at all n locations
agctntacttttagcaaataatgttaactatatttatttatcaataatgtctgaactactcagagcaagctaccagtaatgacggatatagtgatatacagttatacactaacaatgaatggttactctgcatccaacattagcgccacaacgagtgtattttttaacaaatcaatcacttcaagcttagatttctaccttacatgatgtcaaagctgcagtgaagttattaacaggtgattcatctttcacaaggctgaagtgcactaaatgaatgttaataatgtcaagtctggtaactatgtaagagcttcaggctcttctgctttggttatgtttccagttcaatgatcaaaagttcaaactaaataactcttagcacatactcacgacattaatccacatattgtgacaggtaatctatattttgtaacagataaattagctataggttaacaacagttacagcacagaaaagagctg

SEQ ID NO: 37631 - DNA, 414 bp, Oryza sativa
  unsure (1)..(414): unsure at all n locations
agctntgtactcttctgcccttgaggtccctaatttaattgtgattaanagggctgctgcttttgggggtgttggaagatcttggactgtttccgtctttctgtgtcatggggagatgcctgatatcatgcctggggatgaagatcttcctcctgtgaatcatattcctatccctgatcctgtcccgcagctggcacaccatgtggaagtctttggggacaatatgcaagaggatgcccatgctaatcagcatatttctcagaatagtgctctgtcagtggtggctggttctcataacatggtgctgtagaaccagggaattatctcttttgaacatcttgtccagcctcgggttcttatntaatctgttctttggaggaaatctgtctgctttaacacaactctctctacttg

SEQ ID NO: 37632 - DNA, 430 bp, Oryza sativa
  unsure (1)..(430): unsure at all n locations
agcttgccgcanaatggcttccacttaaccttttttatatgtatgtctatntgngtcaactgttaatgatggcacattagttgtcgaaaagacattacactgatgttttagcttactttatctgtcattttaatgtatgcctatgtaaaatattccaatcaaccaaggttcaatttttgtaatttgtcatattttgtattagctgaatgttgaatatttcaaattatttgtgaattttctgaattttcaccagtttttctatgccttttctgtatgaatgtctgaatntttggaattttctgtggatattccgaattctgtatgaaatttttgaatttattttgttaccctgattntcttttcctgctcattagttattgtgagtttcattttttatcacgctacgcattttaaaccctagcagctagca

SEQ ID NO: 37633 - DNA, 460 bp, Oryza sativa
  unsure (1)..(460): unsure at all n locations
agcttccaatggcttgattggctaaatattgtctttcttttatacatatggctgcattagttaagttcgatctcataagttgtgctagaactataatctctagcctgcttcttgggtattgattacggtagcatcggggtttcacccaatcttacctgatttaactttatgttttatatgcttaattggtatggtagatctgccctttatgttaagatcctattgcatttaggcgtattaagctttctgtttgatatattttacttgctttaatatcttgatatagagaggtatcggagtattatccgatacacgctagatctatctgatcggntatgctcgaaacatctataatcctttggtaaaaatacttcgggctaactgattatactgtctcggcatggtgaccgatctatcccaaacacttgatataagtatatatccacatacagactatgta

SEQ ID NO: 37634 - DNA, 485 bp, Oryza sativa
  unsure (1)..(485): unsure at all n locations
agctcgtgttagacaccagtggctgtcccctcataagttagaatagtttctccctgtagcagcactgacttttaatgtgaccacgggcctcttctatgtaacattgtgctatccatcatgggagttttctctttctttntctttttcttttccagagcctgtttagatccaccccaaaattttacaccctatcacattgaacgtttgaacacctgcataaagtattaaatatagtctaaaaaataactaattgtacagtttgcgactattttgcgagacgaatcttttaagcctaattgctccatgatttgacaatatggtgctacagtaaacattgctaatgacggattaattaggcttaataaattcgtctcgtggtttacttgcgagttctgtaattagttttgtcactagtatccgaacaccccatgccacatcccatgaaacatccgatgtaacacgcaaaaactttacacccctgatct

SEQ ID NO: 37635 - DNA, 419 bp, Oryza sativa
  unsure (1)..(419): unsure at all n locations
agctntagatctgatcatctgatagagtctaattatgtatcaggtagcttgtggtgtttgatatagtgcgattntaacggttaatctaaattggtctgagttgtactgagggtatctgtgttgatccttnttggaatatactcaatttttataattttggccactcacgctatgcgttatttggggagagctcggatggttttgtagctaagctgacaactaattgtaatgtattgtatanttttgaggcgttgctatgcttgtggctttgtgtcaagtgttcttctgtttcacgaggccttctatataaaccaattgttgattttgttcacctgcaattgacacttcattagttattntgtatgtatttctggaaatagatagcctgccgtgccaatgtgccatactgatataaatgc

SEQ ID NO: 37636 - DNA, 438 bp, Oryza sativa
  unsure (1)..(438): unsure at all n locations
actataatccagtacaaatggagtcttctctataacatctagaggcacatcacaacaacagctacaacatcaagttacgcaattggcatcatccatcaaccatcaaaactaacaagaggcatatcagcaaacaagcaaagaaatgatagatcctgtcatcttcgtttctcagctgagatctcccaagccacatatgcaaattgcacgaaacatggctgaaatgatgatctatgagtcctttccaacctttccaaaaaacacctaatcggataccgtttgacctctcaaactgacactttactaactactgcataatctgtaacttgcagaactcgagtngacaaaccaccactcanatccggcgctctactcaaccaatcctcatacaaactaaccagactaaagtgcttaaagtgagaaacaaactcatcaagttta

SEQ ID NO: 37637 - DNA, 420 bp, Oryza sativa
  unsure (1)..(420): unsure at all n locations
gctnggagatctctcaagaaggaccctagtaccatagtactccactccttgcccacacattcctttcccttgtaccctcccatgcatgtatgacagtaggagtagctatatataaggctcgaccacgcacgccgtgtctgagaccaaccatggagcataccaacctgccgagccatggcgcccaagccgccgaagcagaagcactcgccgccgccgccgacctcgagcaaggtctcacccgccacctcatggaataccaccagagcgaggcgtcgtctgacgagagcgccatgcagcggccccgcgttggccgcgtcccgccgcacgtccgcaacctggacggcggcgccgaggcgtacaccacaaagttcgtcttcattgtgcccatacaccacgccgacgccacgctctcgcggcaca

SEQ ID NO: 37638 - DNA, 391 bp, Oryza sativa
  unsure (1)..(391): unsure at all n locations
agctntngcttacgcaagcgaacaggatccagaatcatgttctccaagagcaacgatccaaaccaaaaggcgcacatgcatatgttcgtacacggtacacaccgctactagcctactacaccccatgcgttgcatggcattcaccaacatgtacagaaccggccgcgccccccactcccgctgcgcgctcgattagctcgcatcgcacaggtacaggcaaggcaacaggccgtcccgcgcgcgcggaaacaaaatcatggaccgcgtcgcgagcggcgggcgcacagcgcggccggttcacgggcgcgcgccccatgcacgcatatgccgctagcgcgctgagcagcggacacgaacaggtgcagcgtacagggacagtttgggcggtgtg

SEQ ID NO: 37639 - DNA, 468 bp, Oryza sativa
  unsure (1)..(468): unsure at all n locations
agctngcatatcatgatagtatgaagtaacagttctggtatcttgtttaaacattgcagtttgttgaacaaaatgtcagcataatacatgggaacataaacatatctgaaatatagtttcaggtctttccaagattgtggtattttgttatgcctacaaagatgtttccaatcattagaagcatgtttaattaaaacactagaggcacacataaccttttgtttctccgacaagacatgctnttgaaattcactatcaaccgctagctcccaattaatgtaagcacgaggatcatagtttccctcgaaataaggcagtgcagatttgatcttacctagaacatcatcacttacctcataatggtcatgttgatccctcctcatgtctcgacgaagatgtcgatgttgagcacagctatccccaattatcttgcgtattcctgccattgttagtagaaaacaagaaaca

SEQ ID NO: 37640 - DNA, 475 bp, Oryza sativa
ttaagtcgactgaggctgcagcttgaccttgctcgtccgagtaatgactcattattatatgttgatcatgagttgctaccatgctgtatatctcaaatgtacaagtgctaggtataagtactctctatcaaattaaataaatgttgcattgtggcttacccttacccctgattcctacaagacactgcctttcgttgtctttagcgggtgagagacagaacagctattagagcactaatcaccccatctttattcaactttcacttcgggagtattcaaatgatgtttcatatgaaatccaagttcctcaaataattcactcgatcactccaagtatatgaattcctcaccaaattgcctttttgattcctactctaaagttaatatgtggagttcggtagggatcaaacatggcatacttgcatttcaaattattacaaagtcaaaaacatagactataatagatgactagaca

SEQ ID NO: 37641 - DNA, 454 bp, Oryza sativa
  unsure (1)..(454): unsure at all n locations
agcttggtcgatcttatgagatcgaattgttgatgatgatgatttcgatctcatcgagggacatactccggtcgggttagatctcctatagccgaagntgtcgagtagtatgttgtcggagaatccatctcttgaacccatctcgtcgaaatcctgaagcaccaaaatccccctacctggcgcgccactgtcgacgtttgatgtcgcaattctggtatttgcatagtatggggatcgtcggtgctaggatatacgcgagactgaggtaaaagagatggagacgagggattttatacaggttcgggcccctgaactgtcaggtaataaccctacatcctgttggccggagccggaggtgcttttattcaccataatcacaccagtactatatgtgggtagcctatctaactggtgtcgacatgggcggttgaaggtctgactcgtagtcgacaac

SEQ ID NO: 37642 - DNA, 469 bp, Oryza sativa
  unsure (1)..(469): unsure at all n locations
catgctagcttatctacatacgtatgctcacgcacttattttttatatattcgaattgagccgagtcgaggcttgagttgatacttgaggtcagacacgctccagcttggtttaatcaaagaccgagcatattcaacttttataaaaaccaacttatacaagcatcaaacatgttacaatattttcatactaaaactcatgatactgcttaaaaatgtgacaaaactctcaaacaaaagagaatctaagagccactttagatctttatactataagtctctagtaggaaaaagaccttgtattatgagagaacgcgcctggtgatagagctggatgaagaggcgacattgatgtatgaggtagattaagagttaggactaaattctaagctagcgctgttaacaatgccatttcttattaataaatattngttatgcgcaatattactttgcacttaccggtattgatc

SEQ ID NO: 37643 - DNA, 490 bp, Oryza sativa
  unsure (1)..(490): unsure at all n locations
agcttgtaggagatgtcaactaggtcgtcaaacttgcataatacaaattcaggattccaggtccctaaatatgctaaaatatgtcgtttagttccataatcgtcttataaccttgtagcactgatgtggatcgtgatgtagcacaggaccatgcatgtgatgtggcacataaataagaaaaaaataataaaaatggcgaggttcccttttccatcactcccctacgaggagggagagatgcgtgagatgctagccacatcagtgtcaagcaatctcctagagagatgtacacgtggcagattcagacctacaagatttatgtttagaaacctatatctgtattttataagattatggtcctaactgatacctacttacaaatttacaagttttcaggaccaccggtatattntactcttcttcgaaaagctacaagatctttgcattnttcacatactctcttcttatggaatatacaatagtatgacat

SEQ ID NO: 37644 - DNA, 424 bp, Oryza sativa
  unsure (1)..(424): unsure at all n locations
cagcttatattcaaacctaaattaatcatcaagagtatatcagacattcaccaccaaacgtcacagtgaaaagaaggaaaatgtaacggtagggacataaaggaatcaagttaaaattttaggggtatagaagggatcaggtaaatttcaggagtacgaaagggatcgagtgaattttcattggtacacagagaatttactcatagcaaagcgctagtgactgacctgtctctcccccatgtcangcaatggaaagcaaagagcgatgttgtatgaaatggattgcttcaatgcatanngttttnttgaaacanacccgaaaacataagctagatattgtgatatttactttatattatcctctggagtataggaacagaaacaggtgagaaaaggatcanactattgcagcaacctttttttt

SEQ ID NO: 37645 - DNA, 393 bp, Oryza sativa
  unsure (1)..(393): unsure at all n locations
agctactcctgtgaatgagagcattatgcagtctctatacatcatcacagaaccaatcaaggatgcagtcactagaacaatgccagctatatctctccagaatcaaaatgagcagccatgtgtgtggatntcagaccgctacttatcatggtgtaatcgaaacgttgcagcaatcatgtaatacataaatatatttatgtctataaacagngagcttgccatgcttatggatgattcatgctgaggatacaatgtaccgatgttaagcacctgccctttnagataaggcagagcctcgcattcatgtaatgacggagaaatgtgaatacaaacaactccatgaggaatcgcttgacagtgcggatatgcaccatgtgataattgttactgaca

SEQ ID NO: 37646 - DNA, 209 bp, Oryza sativa
  unsure (1)..(209): unsure at all n locations
tggagacacggcattttcctgactacttcctggtaaacagatctttcatggaccagctgggctgcagttgtccatcagtagaatgtagttgctgaccccacaaagtattcggctgctgaaccactggccatgtctgatcggatattatacccaaagattgagatgatgtcnatttcaacttttgggaatggtaatatcccttatatatt

SEQ ID NO: 37647 - DNA, 462 bp, Oryza sativa
agcttcatgaatataaatagcctcatctgatcatgctatttattttgatctactgactaatattggtgctatcatcttacagggaattgaccaactgcggccaaatttatgtggtcaaatgcagaagccatttctttcaacacagtcgcagtttcaacttatgtcgccacagcagcagcagcaattcttagcacaagcccaagcacagggaaatcttggcaactctaccaatttaggggatatggatccccgaagattgtcagcgctaaccaggagcgtgttgaatggtaaagatggacaacctgctggaactgatgggtgcattacttcctcaatgcaatccagttcacccaaagtcagaccagaccaagaatatctcatgaaggttggttttcttctggaagtgtgctgcttctttgtttgcaaaaaatctagtatactctaaagtacccacatgcagca

SEQ ID NO: 37648 - DNA, 459 bp, Oryza sativa
  unsure (1)..(459): unsure at all n locations
gtgacgcgtcttatgtgttgggactatgcttatgtttgcgcagtcgcggagtgccggttaagtgtacatccactgcagtgtgagtaaaccaaatctattcgaatagccgngctctcggatattgagcaccgggacatgtattacacttggctatactctaaattcttaacttgtgggggatgggatattgcatgatgaattttatgctgatggagccactttccgataggagggaaggtggacatcctcagaaaaccatgacgatataatggcgggaagctatccttgggatcacaatggatggtggacaaaaccgtcgttgtttaaagagaacactggtactaatatntgatcagtctttgctacgtcttatgcttgtgaatagaatttgaatantaactttattgcaaagaacctgaagccattccttgaaaaactcccttacatatgcattgttgt

SEQ ID NO: 37649 - DNA, 380 bp, Oryza sativa
agcttcggatgtgcatcgactacaccgaccttaacaagtgttgtcctaaggatccttaccccctgcctcgcatagatcagatcgtcgactccactgcggggtgcgaccttctgtgttttctagatgcatactcaggttaccatcagattcgcatggctagggaggatgaggagaaaactggcgtcattacccccatatggacctattgttatacatcaatgcccttcgggttaaagaatgcaggtcctacttttcaacgtactactcgaatttctttgggtagccaaataagacgtaatgttgaggcttatgtcgatgacttggtttgtaaaacgcgcaaccaagaaactttactttcagatctagcggaaacttttgag

SEQ ID NO: 37650 - DNA, 484 bp, Oryza sativa
  unsure (1)..(484): unsure at all n locations
gctttctctttcttccgccataaatgtgatctgttttggtttgattggtccaagataccgctggaaagggatggtgaatctgagcggtggacgcgggaagaaatttcgtgaagtttttgaggatggattggagcggattgatgaaccctattttggccggcgcagttttgtactgtatcatggaatgaggaaaatggcgagagtctcggcggtgaagacgaagagacgtattatttcacttcggtgcttttagggtatcgggagtgctaacaggcctgggcctgcacagtacttcagcccaattttatttccagcgtggcccgtngtgatccttanggacttangcactatttgctttggcaatttgtgctcacaatgatgtggcccaatgctgctaaaatcctttttaatgcggnntgataattcttttggattaacacgatgcaaacaaaaggtgcccgacaggaaggtgttattctatttt

SEQ ID NO: 37651 - DNA, 442 bp, Oryza sativa
  unsure (1)..(442): unsure at all n locations
ttctattcacatactgcatttattttctatgtcattgggtggaattaacctattgatagttatagccctatntgatcttgattactttattccttgataccttgggttattataacttgactagttgagctctatatattggntcagctagatattaggtgtgattgcttagccatgcttaaaaacattagcacactattgggataacttatgattcactattaattaattaatgatggcttaatgatagttcacgatggtcaatcgtgattggttaattaattaatgtgccaactaaaacctgataatggtgggtcgtgagcacatggttttgagagtcgtgcttatgacaattaacgaccggttcacgagtttctggtgtaaacattaaccgtgccaaccacaagccagcatgggcaacggctttatcttttgtacagca

SEQ ID NO: 37652 - DNA, 488 bp, Oryza sativa
  unsure (1)..(488): unsure at all n locations
agcttgagccgatgctgntcaaagtatgctgctggtgtgagaacatcagctagctcatctgggagttggtcatggatttcatggaatctatctctgattgatccacagctgaccactagggtttctagagagccctcaagccgctttgagatgtccagcaaggttgttttcacattatcggctagaggcaccaaggctttacttgtagtttcttcttcttcatccataaactgcctgatgtcaaaagaaaacatatcggctaagacctgacaaaaggaaatattgagattactgattagtaaaggtaacataatagccgatatgatttatggattcaaagggaatacttacagggataccaggggttggtgctacctcttcttccatatgatggctacctgcagccgatggagtatgttcgctcgattcatgaactgaaggaagtggagaatgaggacgctgaaaaagaataaagttggatatcatcc

SEQ ID NO: 37653 - DNA, 475 bp, Oryza sativa
  unsure (1)..(475): unsure at all n locations
agcttaaaaaaacaagagtcaaggattctgtcttatatancttatttaattcgaatcttgttttcttgaatatgcaagagagttgtgtatcatttcattaataagaagagaaaacaagggaattgggaggggagctcctcccctcaccaagaccccacaggcctagctaggcctttacaaactaaagaacctgaaactgaccttatcccgtcagagctatagcgacctatctaagaacaccttgagcttattagttaccaccatcgaccaaaggatacactcattaaccactgcttgaagaacagtggtcacacatggattgacactgttaaaaacagtcgtttctatgtttccaaaactcccacactactaaaattatcagagagctcagccccttcttagtgtctctgtcctttcctcttgtcacccttgaccaccatttcatgaaattgatggaagcttgtactggaactat

SEQ ID NO: 37654 - DNA, 398 bp, Oryza sativa
  unsure (1)..(398): unsure at all n locations
agctngcagcataggaagacgtgatgtgtgatgtttggcaacaatggcatgagtctatgtttttttaagaaaaaaagggtaaaagctttgcctcatatatattttgatagagcacaaagagaaaaaattataaatttttatttacagggcatcaaccgaggctcaggtaagctttcttttttttttggtttttaacttcccaaagcggtaagctcatggcatgagtctaatggagatgctgggtgttggtgtgggccgagttgctgatcttgttccataggttttaatggtttatataacagcgtattgtaagatttgataacaattcttaagataaataagacactcttctttaatataacgcgtccggccttaattaattgcggtggtcttgatgt

SEQ ID NO: 37655 - DNA, 446 bp, Oryza sativa
  unsure (1)..(446): unsure at all n locations
tgcagctttggaatgttgatgagataaacaaatggttattgtctgagcagtattcatacaactcgctgatatcggggtttcttaaagctgatagatttggtgatgccttatagctgtttaaacatatggatattcatggacctaaaccaaatggttacacacatgttctttttataaattactatggaaaatctggtgaatctataaaggcaatacagagatatgaactaatgaagagcacagggattgtgccagatgttgntgctggtaatgctctgtttgttggtcttgccaaatctggtagacttggcatgtgcaaaagggtatttcatgaattataaactatggcggtttcttcggatactatcacctacactatgatgatcaagtgttgcagcaaggcatcaaaatttgatgaagctgtgaagatttctatgatatgattg

SEQ ID NO: 37656 - DNA, 321 bp, Oryza sativa
  unsure (1)..(321): unsure at all n locations
cggagctgcgaaatgatttgacagccgatgagtattataatctcatggccgatgaaagggacgattttgntcaatctatattgagagcccttgcaaaggttaccaacgataaggaacgtgtcgctcgacattataacacaaaagtggcgcctaaatggttttctgaaagtgaacttgtttgacaattgatttatccgattaggactcgacataacaaattctgcaagtggtcaccgaattgggaaagacagtatcaaatctatcaagttgtatataaaggactttacatngtgtaaggactcgatggagaagtttatggac

SEQ ID NO: 37657 - DNA, 470 bp, Oryza sativa
  unsure (1)..(470): unsure at all n locations
cttaagcactgagctgcagctactttggcgactacgactcacagctcactattattcgtaaccgtgtcaacagaatgattgatatgatctattattgtgtgttgattccaaactcagacaggagtgcacaacgtgcctgtgaagtataacttgccaagcctttaacggtggaggtggtgcctgttagaacaacggattttgtaggtgttgtcggcccacgaacaagcctatcttgtttccatcggctggtccgtctattggttgccaacatgaatctttggcccgatctatactgngccttttcattagataaatatataagaatggaattgccctgaaaaatatttgcacataagatttacatcgagttctataaataaacccatatcattcttgtgaactcatagaacccaaattaatcagacgctgctgcaagtatatatattttttcttgttgagtcaaaactagc

SEQ ID NO: 37658 - DNA, 367 bp, Oryza sativa
  unsure (1)..(367): unsure at all n locations
gctcaacaaacatctattcatgatatcaagaattaggacacccagtccaccttgatcttttggctggcatatataatcccattttgttaacctatatttctttttctggctatcactgctccagaaaaagctcgatcggtagtaatccagtctttgaagtacacctcgaggtatttcaaaaaagtataacatgaacatgggaagacttgnaagaaccgagttaagaagaaccaattctccaccataggagctgtttttgccctttcatgtgctaagttttctttgaaacctatcctccacatatttccaatcagaatttctgagttttcgatagtgtatggggattcctaagtattttgaatggaag

SEQ ID NO: 37659 - DNA, 481 bp, Oryza sativa
  unsure (1)..(481): unsure at all n locations
agctgngttggctggcttggactggatgctgcttttatctatgctgaaatgaaatggtacggagttttcacatcccgatcacacacagctgtgcagacattggtcggacggctgtcggcgcagggtacagtacagtgtttgttaacagatgcctgcgatgcgaggtgaggtactgaggtgaggcggactttcgatcggtctcatctcttctgccatgtgctggtagaccctcatgtcgatcctgtcatttcgttaattcgtgcccgatcgaaggtacggcccggtcgaggacaacttctatatgtatgtacgctntgccaagctcaatgttcgctcctcaatttaccatagaccagctacttttgagtccttctttctgcaggattacaccattacattagctctgcatgtgctcctctatgtatcctaccgaattggaattgttttattttgggctgctggagctgacattgattattta

SEQ ID NO: 37660 - DNA, 460 bp, Oryza sativa
  unsure (1)..(460): unsure at all n locations
agctngtcggagcttataataaggaaagaatagttctttgtcaacagattattttgactcttgtggctctcatcagaaatctgaaatagaacctctcacctnccggttcaagaaccanacccttgtatcttatatttgcgcctcacaatctgttgttcttcatcatctctataaattcaccaaaagctgtaaagcacaagaaacaggattagtaaaatcaacacttaacagtgataacacaagttgtgttggtacatacactttctctagaagtactatattgttcaaggaaatgtacccaagtcagaatcatgcggcccgggtgaggactctggatggtactgaagagacacaagtttcatcttatggtactgaanggccgcacangctattatcgtgagattgatatgtgttactntcaccccctctcgaagagactctgggtcaacagcataattat

SEQ ID NO: 37661 - DNA, 461 bp, Oryza sativa
  unsure (1)..(461): unsure at all n locations
agcttgctaagaaaaccaaagtctggattgatataatataattccatttagaagctcaacaattcagtaaaatgattntagaatgaacagcacatgagtatatgacttgatgagtaaaatcgtaaatattcttattcccagtaaagcatgccttgtcatgccttgtgccagagcacaaactgtagcagtggttgactggaggctttggtctgtagccgccaaccatggccacggtgaatagtagctgttgtcatgggataagcatgcacatggtacacgagaagaacagaaacagaggaagggggagattagnctattgcttggttgagtaacttatattctttaggccacttgtaaagaggtgtgctgatcctaacaatgcgaaactaaatctgatagcttaccattggactagtanactgaatcaaatgggataatggtggagccaagatggagctgac

SEQ ID NO: 37662 - DNA, 383 bp, Oryza sativa
  unsure (1)..(383): unsure at all n locations
agcttagcaagattcttcgcactatctctcctatatacatgccagaaatcaactnttcatatatctgttggaaaatacatacaagttaatgcggtccacctaaaaggctaaaactaaaaggagaggaaaatactggggatagaatacctgctctccaggattcaagctttcaaaatccattgctttatcgaattctgaaagaggaagcttatctgatttaaagctcccccattctgtgttgattacctagagaataccaaataattccacgtttacatatttttttaagtagggttaacattcaagagtgttggcattgatcatctataagacatagacaactaatgataatccaagcatanggattcacacactaaccatat

SEQ ID NO: 37663 - DNA, 380 bp, Oryza sativa
  unsure (1)..(380): unsure at all n locations
agcttgtcttctcactngcagttgagacgtgttacgcattcagcgttntccactgtgctatctctatatacctttgttgacagcatatactaatttttctaaaacctgcagtaccaggaattaacctccttttatggtagcctcactttactgaaggtcttcacttgttctagctactgacattattacctcacccacaaatgctttccttcacagggtagtgctctggctgcagctggtggtggcagtggatcagtgaagctctgggacacagagaagtggaagccaattaccagccttgctgttccgcgtccagagggagctcgccctgataaaacaggaagcggcaagtttgtcctttcagttgcatggagtcctga

SEQ ID NO: 37664 - DNA, 420 bp, Oryza sativa
  unsure (1)..(420): unsure at all n locations
agctttctagaggtaaaatcttgctcacgtatctttactgattgatctgcaagaaagagaagaaagaataagctaaatgaccatgtgattggcacacagttaaaaggttatttacattggctattacactatccacaaaatagaacttttaacagagaaaggggtagagtaaaaaagcaaaagcagcaaagagcaacaaataactcaatggaaaaaaaaaatggaaatacgtatcaacaaatgttactcctccgtttcacaatgtaagtcattctaacatttccattcatattgnatgtaatgacggagggagtatttctaagcacgccgatatcaattttgtactagcacacttggtccttggattgtgtangctggttacttaagaaacatgagctcgagttcttttcacagttggta

SEQ ID NO: 37665 - DNA, 368 bp, Oryza sativa
  unsure (1)..(368): unsure at all n locations
ttagagtcacctgccgcatgcaagcttgaatcgatgcgggaagggctcgtccttatcttgcacatgtncaggacatgctcctttctcctagcgatgctggaaggcgaagagaacgaccattcctggaacgcggctttccttaagcgattctatgtggagcgcgggtggcacccaaatcgctaacttgttaaaatgtacatactgttatgtaagcctttcggcactatgtaagcccttcggcacacaactgcacaggaggaggaccttgagaaaagacaataaaactggatgtacggctattatccactctggatgcctgacacaggataaaatatttgtgttctttgccatctttgcgggaatgataa

SEQ ID NO: 37666 - DNA, 495 bp, Oryza sativa
  unsure (1)..(495): unsure at all n locations
agcttagcaggtgtgttatgtgaaatgcacaaagataaattattgaagctgtgttctcagaatgaaacctcggaacctatttgccatgcctgaaggggaagacggtgataataatgttgaccatgctgatgttgactcacttgtcgtangagtggatcagatgaatgtacaataccgacctgacgatttcacaaactggagaagatctgacattaaaggcattagtggtgatgctactgtaattgaggaggcgcgtgctgcatccatgcctgaacctgatgacgatgacatacctgacgaagaagacgaatccgatgacacctacattgctgatggagttgttgctccagtcgaatcccatggaggagacgacgacgatgatttttttgtgtaatgttgggttggattcttgcattgcangatataataaaaataattcaatggatatatgtnttaattacaacatttacatttcgaaatctactatagcactgt

SEQ ID NO: 37667 - DNA, 388 bp, Oryza sativa
aactatgtggatcttctgcagacgaccgaggtgatgcactaaccaacgaagcatttgagtgggcatcaaatgagactagtgccaaaacagcgcgcacatagataacacgtttcatgaatgacatctcggcatttaaggtacaagttaattacttggattcggccgttaattagtgaatgtatcattctaacaatattatttgcatcacattgtttattcgcagatttcataattgatttccaagtccatcatatacaaatacttctccttccttttaattttttcttgctgatctaggtatgcgctaaacaagacatttcaatctttaaccattcaagtcatgatatttgtgagtttgacatataaaattatgtgttagattcacctg

SEQ ID NO: 37668 - DNA, 476 bp, Oryza sativa
  unsure (1)..(476): unsure at all n locations
agcttatccagaagagaccgagttcaaagagaatgctgcttggcaagttatctattaattacgaatagctggttagtttccttctatctttacgaaagtgtgtttagttataaagactttatcttttccttttatctttaggaaagnttctttcttgtccaacaaggacttgtatcaacccatgggtataaatatgtacacccggggtctatgtaatctatctcgacgatcaatacaattcggcgcatcgccacccttttaccttttctactctattntatcgtccggcgggacttggcacctgatgcggagctgcatcagtgttcgatctccggcgaaggggtaagttcaatattccgtcggcctaggcaattgtatcgtctatgccggcgttgtcaaagctgatcagacattcacctctggattgcttggttggtgataatttgctacctattatatatgctctggtatctatc

SEQ ID NO: 37669 - DNA, 463 bp, Oryza sativa
  unsure (1)..(463): unsure at all n locations
gtcacctgcggcatgcaagcttanatgataggaatatttccgctacttacaccctatttatatgggactcaaacttttaagtctctatcacatcagatatctggatactaattagaaatattagacgtnaactatttataaaacccatccataatcttggactaattcgcgagatgaatctattgagcctaattaatccataattaacctatgtgatggtgcaggaaacattctggcttcaaaaatttgtctcgcaaactagctgtcatttctgtaattagttttgtaagtaatctatatttaatactctaaattagcggctaaatacagagactaaagtaagtccctagatccaacaccaccttacttaatgattagtactatattgtanaggaagattctttcagcttacacattaggatctggattgggggcgcttcgtatgactaaatcgagagtgatc

SEQ ID NO: 37670 - DNA, 298 bp, Oryza sativa
ctaccatgctgaatatctcacatgtacacgtgcaaggtataagtactctctttcaaattaaataaatagtgcattgaggcttacccttactcctgattactacaagacactgactttcgttgtgtttatcgggtgagagacagaacagctattagagcactaattaccccatctttattcaactatcactttgggagtattcaaatgatttgtcacaagacagtcaaagtcctcaataaattactccatcactccaagtatatgaattcctcaccaaattgcctttatgagttctact

SEQ ID NO: 37671 - DNA, 451 bp, Oryza sativa
  unsure (1)..(451): unsure at all n locations
agcttatacctcgtgtctttattttcctagtgcataccatctaaactgacattgattntctcatgaagatatagattttacctcggtttccgttagcatgtttntcaaactactaaatggtacgttctgtgcgaaaactttctatataaaagttgattaaaaatattaaatatatccatttgtcaagtttgtaataattaaaacttaatcaatcatgtgttaatagcttttttattttacttgcactaacttaattttcatcttcatgagtttccaacaccaccatagcataacatccgttattcatattcatagagaaggaaattatgagataatcaacatccaagagagtttgaacatanggcgatgtgttgctcctggtagctacctactagctaggctatngccatgtttttaagattaaatngcacccacggtacaccaacttagc

SEQ ID NO: 37672 - DNA, 371 bp, Oryza sativa
tgggaacgaccaccgggttcgtcagccactccagatggatgacctcacggatgaatccggcctccagaagtcgcgccaccttctcgcggatgaaggcttgacgttccggggcctgccgccgcactttctgccggaccggccttgcacccggccgcacggcgagacggtgctcaatcaaccccctggggaccccgggcatatccgccggtctccatgcgaagacgtcagcgtttgcccgcaggaaggagacgagcgcgtcttcctatttgccgttcagaagaccaccgatccgtgtggtcttggacgggccgtcgcccagggcaacctccttgaccgggacctcgtcgcctgtgatcatccgctgcctcggg

SEQ ID NO: 37673 - DNA, 455 bp, Oryza sativa
  unsure (1)..(455): unsure at all n locations
tgctgcatgcaagctctcagtnattcgactggctcacactgttctttcatttcaaatgcataagccaaattaattgcatcgatagttctcccatgttccataaagaacacatgacacctgatgtccacanacatgaacatgaggacttaattgtcatgaacaaatgttgctgacttgtaaaaacgaaaagagcatgcacgaagggaaaaggcncctcatgacgaaagaccacattataagaatggagcaaagggtgaggcaaacaaatattgcacaaaaaataatgttcagttgcaatgactgctgaaactgtccaaacataagcaaatacagcagcagctaaacaataagcaatatgcttgttcacaccatacaaagatcatcattcatgtatgtgattataataacntttagattgcttaatggctggagctatacaagctgtaacaacatat

SEQ ID NO: 37674 - DNA, 436 bp, Oryza sativa
  unsure (1)..(436): unsure at all n locations
agcttctganagagcccaagaactcagggacatgtccagttggacctgccaggttgttcatgctgagatcaaggtacctgagatgctccagcgagatcagagaatggcctatctcgccaaccagacctgttccaacgtcggcgtaatcgtttcggaggttgagcttgacgacatggccggtgaggttgctgcaccggacgcctctccattggcaacaatcctcttccagcagctgatcatcatcatcatcatagtggcctcctctttgccaggaggagaggaggcctgcaggatccttgacgatgccttccttgaacgccagcagagcgtctctcttccgcggtttgcagccgcccgccgtagtgatcatgatgaggaggaagatgacaacgatgacgaggtggtggtggagacgatgataatggccgtactcatg

SEQ ID NO: 37675 - DNA, 362 bp, Oryza sativa
gcagcttgcttctgaagccaagtcgttgtgcaatgatattggcggtcatgtagaattcttcccatgattagctctgccaatggctgcacactgcattctgattatatattctttcaatcaacaacatttaattgcgtgactatgtctcaaatcgttggtgattttacttgcggtttggagcgtataaaatgttccatgatacgtcttgtacgagttccacatgctttctcagattttcatccttgaaacaggtggcaatgaatcaagcagactcgcagattatccaaacagaggcacaaatataatttgctttttatcactatgtgctataacctaactcaacgtgacgatctcaactgaac

SEQ ID NO: 37676 - DNA, 482 bp, Oryza sativa
  unsure (1)..(482): unsure at all n locations
ctcgccggatcttaagcacctgggctgcagcttatgatggctgaactattcatgttttcttgttcttcgcgatggtgaattagcatttgtaccaaagtcgggtggtgaaaatacgtatttgaaagatggtgacgactatatggagaaaatgtggtgttatgaaccatgacaaagacaggcaaagaagttttggggtaccaaaagtgtggattatggcatttgggttaattttagcacttagtattgattaatcttcggtaatgaagtttattgtacgagtgcttatatgaatagagggcgtcaaaattatactctattatgaagtttcttaagaactagaaaggaagcccgcgcagatgcgcgcgcatcttatntattatttatagaaataatgctgaatagaattaagtcatatctcactatatgcatataatatattggcagattcaccttataattaacaaaatctttgtcgataaatg

SEQ ID NO: 37677 - DNA, 317 bp, Oryza sativa
  unsure (1)..(317): unsure at all n locations
tattggggcaaagaactaatgttgtcttttcgaacaaactaaagatatgcacatcatttcattactaagaagaagatcacataggaggagaatccaaaaactccccaccctaaacacttaaaaacagaagaacaagaccactngagccgcaagggccataaacctagctctgtgaagctcctgctaagctccanaggatgccttcatttggtactgtttgcagcaccactgacaccctcagaattgagctattgaaagctcattcatgtgtttcacaatttcttggttacataactaaagaactattgcgggttaca

SEQ ID NO: 37678 - DNA, 466 bp, Oryza sativa
gcttcgactcacttagtgcagccctctgcagctgtatatgcaagccacactgtgtgtcaagtggtgaaactgacttcggctttccaagtgcatcccaccgctcatgcaacgatggcaccggttcatccaacggttgccccgatcctacctgtcaaaccgattcatgctcaagcaaattaatcttcggtggctgcttcatcgactctcgaagcacgggtccagacctttctgcagcaactaggccagccccacacaatcccaattgtatgccctttggcctacgccgttatgggaccaaaccaagccacgatggcagggcaactgttataccagcacaaagcccgcatttcgtctcatgatcctttgaagaactctcaagccatgtggcctggcttagatgatggaacgtcttgtcctcaactcatgtgcaagcgatggctttgtctttcgcacaaccatacccaag

SEQ ID NO: 37679 - DNA, 407 bp, Oryza sativa
  unsure (1)..(407): unsure at all n locations
atgccgtgtgtcgaactctgtcatggtaacttaggatatgttatctgctggtgtggtgtngtagttgtgggtatcgctcaatattccctaattaactgagcacttgaagagcactgtaaggtttgatcatgtgttctccttagaataggatatcttcttaatataaaacgttggcaacggcctgaccgttcgaaaaaaagaatggcaacaagcgcaacctaactaatcttacaactttactcaccggagatgtagatgacgatcggcacgacctcctcacaagtggatctggagtactccttagtcaccagcatgaaagacgaagccactggaagctaacaccggaagaagctccaatcacatctttcatggagccaggataatgagataatgcccacaacccgctt

SEQ ID NO: 37680 - DNA, 400 bp, Oryza sativa
  unsure (1)..(400): unsure at all n locations
gtgatatttgctaaaggaggtgctgtggaccccgaaacaatgaccgtccgcaccgattggaagcaacccaagacagtcactcagattcgcaatttcttgggtttggcaagatactacccgaggttcattgagaactttcttcaaaacgctcgacccatgacacaattgttgaagtaagaataaaaatttgtgtggaacccgccatggcagaaggcggtccacactctcaaagaagaactgtgtttctcgccagcgctaatcttggcggatactcgcaaagatttcatggtgtattgtgatgcttcgcgccaggattgggtgcgtgctcatcatgacngcatgtggtacctatgcttacgtcagctacctctcatgaaggcactacctaccatgacttgag

SEQ ID NO: 37681 - DNA, 65 bp, Oryza sativa
acacctagaaactcagcttgacgccgtggcgaatgttactacgctaagaagagatatggtcgatg

SEQ ID NO: 37682 - DNA, 405 bp, Oryza sativa
  unsure (1)..(405): unsure at all n locations
agctngaaactaggaggcattttaggtctcatttggagcttatttanttgcttttgactcttgtttgtaccttcttttttatgaatattattttgtccattggatnttggatcgaggtggaaccctagctccccatatgtttttttcctctcgtggtgtttatgggcttcatatcggcccagtaggaaaagcacacacaacacacggttcattctcacgagaaggcgtgtgcggngactgnggagggttgcgcggcagaaaaatggacatttgctctgtttaatacgtggtgtcattattatattatctctaaaacgcgattctatataatgcctatagggagcgtgcgtctaccgacgcttatccatttttatcattgtatgcatttacaataagattttctct

SEQ ID NO: 37683 - DNA, 409 bp, Oryza sativa
  unsure (1)..(409): unsure at all n locations
ataagagaacacttattaaacctttgttttaatcctcagccaataaaacaagactggtatattgctcttgtaataatctgccagaacggcacagtatatggcttggttaaatttggtaaattattttacctgctttaatgggacaaagttgatctcttgtggtggtagagcctgggccacatggtcaacatgttagttaacaagaatgagataactcactctgggcattcacattgtcagaanatcaggtaacagaacatagatcaaatagatttttgtggtaaaaaaaaaaaggaaactgcatgggagctttcttgggggctataaatggaagcctcaataagtgaagaaaagtaaagtcaccatccaaccaaacaagccttaatacatcattgcatttacctcatat

SEQ ID NO: 37684 - DNA, 339 bp, Oryza sativa
tacttggatgggctcggatccaggcccatattaacaatgcttcttaagcccattctggtctggctctaaatctctaattgggttcacctgcttcttatattataccatttgctattatgcatactgatggagaaataataactcaaacatctttttcatcattaaaaagaagaatatagttatttataagagcatttgagatatgtgtaacctttatgaaagcatcttctttggatgttcgatttatgaatggggaattaatcattatgtttgattgtttggcaaaaaatgaatgtgattttcatttttgaggctctataaaagaaacaggacgcctga

SEQ ID NO: 37685 - DNA, 445 bp, Oryza sativa
  unsure (1)..(445): unsure at all n locations
agctngctcgctntcttttttctgctcggcggtttattcttgcatggattgctcattgcaaacgtgcatctactcctctgcttctaattgggttgccctgcgtgtagatgtactccagatgagccacgagcaaacgcttcactaagcaatcatcttcttcgcaaccttccactctaccatcgtagtttcccctctccacaacctgtgccacgatacccacaacatgatggtaaaaaatcggttaaagatacgttcaattaatcaaattacactacttcgtacatgcaagattatcaaaggaaaacatgtcgtgatgcaacatgatatcaaatgtacaactgaaactaaatttaaaagaaagaaaaacagtttttttccttcaccttactggaagctttgctggttcaattggcccaattctaccaccactgcttatgctgatggg

SEQ ID NO: 37686 - DNA, 423 bp, Oryza sativa
  unsure (1)..(423): unsure at all n locations
agcttatcaactcaactcgatgtcgtacacatgtctatttgccggaatcggctgtatcacttaacccagtctgactcggacttagccgatccaatcatagccgatccggactccagccgattcctactctgtttctgcaacgatcttcatctttggttccacttcgatcttatcctcatctccgatactgatataaccaaatttggttgttaacacatgccccccaagtccggaataattggtaatgtttcggatttgccatataccactccgagcaagattcgcaatctgtcgtttcccaaccgttatcctcagcgctttaaatactaaccgtcgccctaaaaaatcttcaccccgttacttccgttttcaccgccgaagccaaccttctnctttctctctccggcatttcttcgacgctcg

SEQ ID NO: 37687 - DNA, 434 bp, Oryza sativa
  unsure (1)..(434): unsure at all n locations
actcttaactgtgaatcgcggtgaattattctcatagctttctaacatcagctgctaatttgtattccaaatcacaaaaatgaagggaagtatctgtcctagaagaaaagcaagaataaaacaactaaccctaaccacccccaaaccctatgtaaatgcaagaataacacaaggtatatggtttatgtatgcaacttcaccctctctacttccctccatgttggtatcctcggtgaacctttgaaaataaaacctgcaaaggtgaataccaaccaatcaattttagtccaataaaagataagaataatacaggatcgagtatagcaaggcgcctacacccggttatcttctcaatctcgttagttctctaacttctttcgtgtcacggagatgccaacacatgtcttcttcttccatntgtcattagtagctca

SEQ ID NO: 37688 - DNA, 407 bp, Oryza sativa
  unsure (1)..(407): unsure at all n locations
atacatatatatggcacgtcatcgctccagtcaggtgactcgcatgcatganaattcttacctcggattttttggattttagtttgtaagttctggttggcttggtgtgaaactttctataaattaattcttgcaaaaggaagaaaaacactgtaaaatttagtggtctaaatgacctgtctcgaacaccgggtattcatgggtatttctaaatcaactagtaatacatggcacggttcaactcacgtacgtcgtcggacaattcctgctggctagtggctaccacaggaagcacttaagtgagtgctcaaaagtttgcttaattagatcgtgggcgtacgcacaactaatagaagataagaggtatatatatcgtgatatatataatcgctgttaaacttgagcta

SEQ ID NO: 37689 - DNA, 448 bp, Oryza sativa
gctttactgtttgacaccttctaagatgcattgtgccaactcctaaaaaggcgagtaactgcggtataaaaggattttaaggtattgggcacttgatcacgcgcactttggcctaagcgaaaagtgcctaagtccctaaaagaacgtgacaggccacacctgaaaatatgggctgcagacatattaagcctaaaacaaaaaatatgccttcgacaccctttaaaggatgacgcatgtaacatgctctcgagtaataaatcttccgggtgatatagaccaggtgtagctcatatgaatagcttctgatctgagtgattatcccttatgagatactccaaaatatatataataattgaatcccgactgacgcaagtattcggttgatagcccttacggggaataataattggtccagtctttgagcatagaaaatagactcatgactatg

SEQ ID NO: 37690 - DNA, 468 bp, Oryza sativa
ggtgcgccgggaaggtctcccccgcgacatcgaacaccacatctgctcctctccttggactccagcagatcgccgagttgctgcatcatgttgctcggcggcaccttgatcctcgggactggtctagctctcgacaccctcggctccttcttgacagtgaccacacactccagggtaatccgatcgtcgacgagatacggcggcgcctcgaattcggtcctcttcatcttgagacagctgaccctgttggattcatcggcattgaacaccttgaatgtcttggcatccggctgcgccggcgcagcataggaggcgaggccggtggtctggtcgaccagcctgacgtcgcagcacgcccgcaccttgctttctccctggctctggagctcgaggaaggcggtgacgttgtcttcctcgtccgcgatgaggatgacgtgggtgtcccggaagaggaggatgggccactgg

SEQ ID NO: 37691 - DNA, 138 bp, Oryza sativa
agagagttgagtagagaagtcagaagaatctcggagctgtcggtaatcttctctcatttctttattctggtttactctgaattccatataatattgcttctcagacatttagatttatgctcggagcaatatctcttg

SEQ ID NO: 37692 - DNA, 312 bp, Oryza sativa
tcgtcttattcaaaaccttcatcatcacatcctctgtgtccacttacacctaggaacgcactgtgtttatagagagaaaggggctctcccatcttcttaacccgacatgaacaggatcacgagagggaggattcttttggcgggtacccccggtaagagatccacagaagaccgagtgggcctgtagctcataggattatagcacgtgcctactaaccaccgtgtctggggttcgaatacattattgtccacagcactacaaaggggaagggcctttactttcctcctggtggttcgaataccatgatcggg

SEQ ID NO: 37693 - DNA, 466 bp, Oryza sativa
  unsure (1)..(466): unsure at all n locations
gctttattgaattacttttatatgtcgaagaagttatttattgaaatctaaaagtaatttagatttattattaaagtaatttataattnttcatcaaaatataatcatgtgagatcttggtataaagatttaattggtacgaacacagtgatgtaatcggatcgtagatcggatgagtagtttaaaagaaaattttatttgaagtataggtggataaagtctcttatatgtggagtggtagctgtgtagtcacgtccaaaatataaatgtttctcaatcaattaacgtgtttgcacaatccgagagcacaaaattccaatggtcaccaagctatatatattctcaatctttttggtgtgaattgtagagagttgaaattgagcgaaagagaaacgaccaatcccacgcccaacaccatcactcatcttgtgcattatttctcatatcatgaatgcctatttcacta

SEQ ID NO: 37694 - DNA, 477 bp, Oryza sativa
  unsure (1)..(477): unsure at all n locations
aagcttcttcactcagctcactaggtcagtgcttttttaagggtncttggttcagatggttgttcttgtgtcatgcaatctaggactagaatatcttagccatcaagaatgcagtggtgatttcataaaaagctgtgtgagttagtaccttgtaatgagagtaatttggaagtgaatagctgaattngataactggaaattcagaattgcttcaagttgacagtgtgactctggaatttggatggtatctgtggacgcaaaacaagcatgagagactngtcccaactgtatgttggttgcatcgtgtcactgtcgttagagtgttcagcttntatgtggataatcaacttcagtgaattcttccatgnattgcagccattgatcaatgcaggataactggccttcagtcctatttgcgatggccggtggcattgctctcagcatcggacatttgatctcgcagtatgcgtgggcatt

SEQ ID NO: 37695 - DNA, 379 bp, Oryza sativa
  unsure (1)..(379): unsure at all n locations
agcttgagataaagcaaagatgtgcaaactatcctaattattacaatatccacaatggtcatgattataactttcgtacattataacaatacacactgacgttttttaaaaaaataaaacatgaattgtattataatagccaaggctgtatatgaagccataatatcatttattttgtatatatacatagntacatctaatttcctagcaaaaaaaaagttacatctaattatttaaaacatatatatagttttatttgacgataaaactagcaaatcccgcggcaaggcgcggggtgccaactagtattntatatatgttcggtcctcctcaaataaaaaaaaacctgcttagctgtgtatatatacgtacaaattac

SEQ ID NO: 37696 - DNA, 492 bp, Oryza sativa
  unsure (1)..(492): unsure at all n locations
gacacttagatactaagcttgctcctctnctcctcttcgcatcgcgacgctacagccgcctgaccttaagtgatgatggtacttcttcctggcggcattttctttgtttctttccatcatcgcctgctcttgttgacctgtcttatatgtaacgaactcgttccagtgatcccttagctttgggaatgtgtcgaatttcggtgtctgccccttcaggatatatttctggtacagatcttccttgaagctcttgaactgttctgccattntctttagagtccaccttttcactttgtcctctttacccgcgggaagggtgaatgtctcgagcattgtggtccacaacatctctttcttcgaatctaggagaaagctctcatgatctccgcgtggcccttgtctacgccagtacaccgtactgacaggcacgttatcctgcacaacccaaccgctgtgtcgtacgtagatctttgctgcttncgccggggcact

SEQ ID NO: 37697 - DNA, 396 bp, Oryza sativa
  unsure (1)..(396): unsure at all n locations
aaaaaaatatagaattaatttcattttggatgatactttttctttatggttcacttaaaatcattctttggttaaatttttcaatttggactaagtaattttatctttgttgcacaattgatcacccccaaaccgcatcttcatcaacttaatgacttctagtaattgtaaagacatgcccgcanacttttatatctatatgcatgttatccctttacccaaggagacgctatacatgactagcaaatagaattaggttggttcattatgtaacaaagggtaagttacatagttcaaagtaagaatattggttataggggagttaaaagaaaactttggcaataaaatatggctcgaaatgcattcactcaaaaatatatactanatgaatgagtg

SEQ ID NO: 37698 - DNA, 126 bp, Oryza sativa
ctaagctttctaacttgctgcacgagaaaatagattagcaacaaaggaaactaagtgtttacacccaaatttggcacctaggattaaaataggaaggattgccaaaatttggaagtctaccggttt

SEQ ID NO: 37699 - DNA, 289 bp, Oryza sativa
  unsure (1)..(289): unsure at all n locations
acgataacaatgccatggaactatcaaattacactgagaagaacaacagtacagttctctaanacacaagtaaaaagcttaaggcntttgtttttggactggcctgttagtccttttatttagggcttgttcagattaatggcaattcaaaccataccnatttttgataaagttgctaaatatgtgcatccatttagtttcttaccaaactttgataaatacataagaaatccttgcctaaattggtaagggttattttggttacaatatgaacagccnnccccccccc

SEQ ID NO: 37700 - DNA, 127 bp, Oryza sativa
  unsure (1)..(127): unsure at all n locations
gctggccgtaaaactccaggtattcctttatagaggaaaaaaaacacccgacccgtcggtttccaggcagccactaatcccaacggctttntttttttcttttctttttttttcggcgtggcctttc

SEQ ID NO: 37701 - DNA, 84 bp, Oryza sativa
tcttatctgactaccatctttggctcatgatctaacttcagtaaaaaacatctttgtgtcacaaaaatgcatggcatctttttt

SEQ ID NO: 37702 - DNA, 335 bp, Oryza sativa
  unsure (1)..(335): unsure at all n locations
ttaacatctatagaagtggaaccaatctctatctttgacaatntccatgtacatacctatccatgaaagtgacacacanccctccgttnnaaaaaaaagatcaactctagctatgaatcttgacaagcaagtatccaaatttagagttagaaatggagtttttatgggacggatggaaacacaactagtcatgcanatgtgcaatgattggagccaggacaatattaccatccttgagaaattactggagagtatatatcanagtttttaagtataaaacttgaaaccttcaggtattaagtacatcgaggtannaaataantagtgtaaaattt

SEQ ID NO: 37703 - DNA, 444 bp, Oryza sativa
  unsure (1)..(444): unsure at all n locations
tcccaatcatccaactagcagattccatttagaggatgatcatggtagttgtttattggtaagttcttgaccagacctggagacattgattgttaattcatcgtcttagtttcaaatcctattattgttattattactatttgtttcttggatgctgcaaaagtgcaatatcttatcgtttaattggacaattaattcgctcctggcttgtcgctctctttcttgagctgtggctctgtgcctgtttccttccaacatttgcaggacgtacctcacctgatgcttttaataagtaaaaaatgtgagattggatcatacaaagcaatcagtagctgccaagaagggattactggaagcgaagttccgctatctgttttctcaataataatcatcctcacattcanttttctttttgtgccatgtgtaacagggtgagacaagtca

SEQ ID NO: 37704 - DNA, 460 bp, Oryza sativa
  unsure (1)..(460): unsure at all n locations
agcttgttgctgatggattcaccagcagcaagttgtgtgtcttctcagaaggtaccatctcgcttaagttgcattcgctttaattatttcgntttctttggttgcttactctggttatccattgatggttgccctgactagtgtagaatttgatagatgccattacaactccatggttgttttatccactggtaatttggttactcgatatagttgcttttgagaagacatgtctttacaatccatttacattcttaggcattggttacttctgatgaacatcccanataagcttcaggttctaaccatatatttctgaatagatttgggtttggtggtaaagagtcaagacaatctgttgcaagaaagtcactttctttttcgttcatccattgtttgtcaaatgcccacacataaaagtttacggatttgtccatagtcantaataattagaaattac

SEQ ID NO: 37705 - DNA, 312 bp, Oryza sativa
  unsure (1)..(312): unsure at all n locations
tagatgataggaatatntcccctgcttacttaatggattagtactatagttaagtaagattcttcaagttaacacatatttggataggggtcgcttgttatgactaaatctagagtgctctcgatttagattctacgaattataatgggactggtattcttgcccctactttcagatgcaattgtgatattacccctattttctaaagtttgtaaatatacccctacttttttcaaacgaagttgtttagctctactttggatgaccgcttggtcaacctatgataaagggggggggggggtgaaattatca

SEQ ID NO: 37706 - DNA, 397 bp, Oryza sativa
cctcactgaaatcagtaaattggaacatattcaaaattgtcatgtttcctccacaactccacaaatacaagcaagctgtgattaaaaacttaatggggggataatcaatttcaatatcagagagctgaaagacagtaacagtggtgaccttttttttttctaatgaaagctttcgagcaaatattcttaacatgttggaagactcttaacagctcaaacctcacacactacatatatgatatatcataatgggaagaaaatggaatccatttcaagaaacatttatgaggtgcacttcctcagtagcaagctccaagtgcaacaagacatgtgaaatgcaattcaacaataagaactaacaagtccaatatgccatgcaacccaacatagactccac

SEQ ID NO: 37707 - DNA, 395 bp, Oryza sativa
  unsure (1)..(395): unsure at all n locations
ntgttgagcctaanacccaaagaagctcattaaaactttcagttctctcagactaagtagaanaaatcaaacaaggcaatgatataccaagtaagcaaattaaattgataaaaaatcacactccattattatgatgatagcccccgactgacaacggcaagaagaaaacttgatgttgacagtcaagatagggaagtacaatgataaacttaagcgtagaaacgacgaagatgttcaatgttccaagagttgtcgacaagagtaccgtcttcgcgcttgagtcgataagaacctggccgggtgacttcagagataataaatggcccttcccatagaggagataacttgtgccgatctcgtgtagtttgaaatttcctcanaaccaggtcaccgac

SEQ ID NO: 37708 - DNA, 427 bp, Oryza sativa
  unsure (1)..(427): unsure at all n locations
agcttgaaagcgtgcacacaaacacacattatattgtatgtctggcctataagcagttagatacaacaaagatccaatcatacttctatanttcctttgatcaacagcttcaccatcttcatcaggatccaacacagctgtagaaccaattggtattgaaattggcttgcaattctccatcttgaactgtctcaaaagatccttggtatacttcgtttgatgcacaaaagtaccttgaggtgtttgattaatttgcaatcccaaaaagtacgataactcacccatcatgctcatctcaaattccctgcgcatagtcttagcaaaatctacaaccaaagcgtgagtcgaacaaccaaagatgatatcatccacataaatctgaacaaaaagttgattatcaccatgcttaaataccaaaagcgttttg

SEQ ID NO: 37709 - DNA, 432 bp, Oryza sativa
  unsure (1)..(432): unsure at all n locations
cttgattcaccaatcgcccgtcggtcgaacacctngtgctcgatctactccacatccctccatccatcttccgcccgaaataccccttataacaccttatatcaactatgttatagtatattagaccctaacccaagccctgcgtcgagttttacctggccgtgccaagccatagcaccgtcgtcctcgcactgctctgttcttcgcccccgagaagtttttcctgccgcaatcctacgttgtaaccgatctctgtgagttcttccgttttaaccatctacatactccctagagtctatgttagcaatcaacttgcactatcatgtctccctctgggctgccgacgtgagcacgaccgctgtcattggacgcgctcgtcatctaggattttcgtaccttgccacagatctgcaagctgcatgaattcatcta

SEQ ID NO: 37710 - DNA, 410 bp, Oryza sativa
  unsure (1)..(410): unsure at all n locations
gcttctcggttcttggtctctgcccgaggcattgaggtcatccccgagaaggtacgagctatagagcggatgtgcccnctcagcaagcttaaggatgtgcaatgtgtcactggctgtatggccgccctcagtcgattcatatcgaggctgggagaaaaggcgctaccnctaattaagcttctcaaacgctccgggccgtttatctggacggaggaggctgaacgggccctcactcagttgaaggcgtacctcagttctcccccagtcctgatcgccccggagctagatgagccgttgctactttacctggcggcaaccccgcaggtggtcagcgcggcgttggtcgtggagcgcgacgaggacgaccctcgctccgcgcatccncaccctgtgtcaactcgacccgggag

SEQ ID NO: 37711 - DNA, 449 bp, Oryza sativa
  unsure (1)..(449): unsure at all n locations
agcttatctaanataaacatggtgattcatctttgtgctcctaatgcatttgtacagttgctttgagtttttctcatagctctttcatttatttatcttcagatccattttctatggcagctccaaaagcccttgaaactattgggaaaacattacactcacaatatgagcgctggcagccaaaggtgaggcacttcttttgctgtttatagactttattatgatgacattacttacgtcatgcccgaatgatgcttgcaggctcgttacaagcttcagctggatccgacattagaggaagtttagaagctgtgtaatacttgccgtaaatttgcttgaacagagagagtcctttntaattacaatggtcatggtgtaccaaagcctacagctaaaggggagaattgngtatttaacaaggtgaatgttgcaaagacactgcataagct

SEQ ID NO: 37712 - DNA, 75 bp, Oryza sativa
aaatactaaccctagtaggaaaaatttgactatttatgtgtgataaaggggtgttacatgaaaataaattgagct

SEQ ID NO: 37713 - DNA, 441 bp, Oryza sativa
acccgcttcatccgtgagtaactaagtttcttattataagttcatattataaaggaaaaatttgccacgggacaaaaaaaaaaaaagtgtaattgactgagagacaccgtgaaaacgtgatatggctgatggatactacaaacaaaacgtgtaattggccgtaggacatcggtcgcattattttattttttgcgggtcaaaataggttatttttctaaatgtctggattgccctttctcttttcttctttaaacaccggtgggtcccacgtgttatggatagtgtatgcttaatctaatttttaataggtttttaaccacctggcccacgcgtcatggactaatttgttcctaattagtagggtgattactatttgctaatcataagtgaggcccacatctctctcctatccttcttcttcctcacgcatgcggtggagcg

SEQ ID NO: 37714 - DNA, 458 bp, Oryza sativa
  unsure (1)..(458): unsure at all n locations
tgcctctgctatactaaaggtcgccgagccggacaataagctttcataatgtttatttgacacattgaanacccttcctggttttgaggaggtccatagatcattttactatgctcatttggntgccaaccctcatattgctagagcattcgatggacttccatttgaaaacaagatgcattggtttgctatgttcattaatgaaaagttccctggatcaacataagcttcttggatgagttggatagttcttttggtgttatgtgttggtggttggcttatttacctattatatgtaagactttaaactgccaatatgtttgaggcaaagaacttactagacttaaaattgctatcatgtgcaagaattaaaatgtgctattatgtgtaagaccttccggtgctaatatgtgtaagactaaaatttgctattattatgggtggcttgtattatatgt

SEQ ID NO: 37715 - DNA, 352 bp, Oryza sativa
atattggacataacggagatcatataaaattggaggtgacaggaggatatttatctactgactgttctccattaataacccaatgttacttaatgaactaccatctaatagagcagattcaacccttttccttattgatagccctatgtggatctaattaagccgatggattctatacaccgctttggatctctcagacaagctatgatagcttatcgagtattgagagagctgatatattgtacgacagcgttcgtagtacactgattagaatgtcggacccaagcgagagtcataactaggtctatacaaactacgttgatgacacttaccttctcgctgaaaactgaga

SEQ ID NO: 37716 - DNA, 178 bp, Oryza sativa
actcagcatggtttttatcgtcccaaatattggaagcatctactactggcgctcacattctgaaatatgcatatcacatgattgtttggatcactctaatacatataatatatgcctcgagggtgcacgactttaaaaatacattcatgggagaggaatatggcaagtatatacatgc

SEQ ID NO: 37717 - DNA, 464 bp, Oryza sativa
  unsure (1)..(464): unsure at all n locations
gcagcttatgttaatacattatacctgtntaaatatcttgatatatagtagtatcggagtattagccaatacacgctataattatctgatcggctatgctataaacatatataatcctggtattaatatatatttcgatctaagtgatatatactgtctcggcatggtgaccgatctatcccaatcacttgatgtaagtatatattaatataagaactatatatcgttaatatctacagccgatcgaataaatttagctccttactatctatttataaccgccgatcgattcatatatgacatcggctcaaagataaatgatatgtcatcggcacctagccgatcggctatcatttatagatttaaccacgaattctttgtctctatttcttggtgattacaggatcaaatcaactagcacgctcatacattcgaaggcgagctttggacctacactggagtta

SEQ ID NO: 37718 - DNA, 456 bp, Oryza sativa
ctaagctactttacactagtggtgaggagacttcaattagaaatattgtcttcgtatttggaaatattgaaactagagtattggggtcttaatggaaggactattaaatcaagatcttcgacacttacatccttaattgatacacaaagagcaaaactttcccaaatgagacttttattaaaatacatattatcggcctaaaaacccgaggcgttaatgttatattttatttcggagaaatgagtagttttcgtgactatcatatgcaggtgtggagattatgggtaccatatacccacacggatagcttatccgactgaagatagtatgtgggccggatctgtatattatgtaatagattagactttggaagttatgttgccttgtgatccaaggcatagtccatagtcttagccatatacgattatgtaactgtataaggaaacttatgccata

SEQ ID NO: 37719 - DNA, 428 bp, Oryza sativa
  unsure (1)..(428): unsure at all n locations
agcttatngatccatcattaggtgctaagaaacttgagcgagctcagattatgcaatgtcttatggtggcgatgttgtgcgttcgggatcgcgctgaacatcggcctaccatgtctgaagttgttactatgcttcctagcatcaagacaccgaaagacagaaaggtacaagcactgtttctgtccaagttatgcttggattgcacatgaacatactgaatggcatttgctctctttctgtttgtaattaggacgctctatttctttgcagacctacttatctactggttgggaacggacttggatgcatggttgtttaggctgttaaaacagttgtctactgtcatgtgtcaatgtgtgtaccgttaatcccagagatgacagacatatgtagctactggtaagcttgatgttaactctgatgctcat

SEQ ID NO: 37720 - DNA, 486 bp, Oryza sativa
atccttaagtcacctgcggcatgcaagcttgtccaactcagcacgccacctggctaattctatcttctaaaaccacctcaggaggttaattaaactgtattagaaagatgagggggtctaatacatgggttgatagttgagggggttaagcagttaccctgtgatagttggtggggttatgtagacttcttccaaataattaaaagcagcaatgaacatcgttgaataacactgcttgacatcttgggttttttttttccatgtaaggtttctgaacagtacaatttgaaattttaagaatttctacagttttgactatggacagaaaaaaattaaatgtgaggattggacacacatttgaaaatagtttaatgtactttgtagcgaatcattctaccctttttgtagaccctctgtaactgtaaccattgaccagttgctctgctcatgactacagaggaaaaaaaatatagcgaatcatagatc

SEQ ID NO: 37721 - DNA, 178 bp, Oryza sativa
caatttaagatgacccgcggtgtggtgggattatcttcactcttgcgggcttttttgcgaaaaatgccggcttcaccgtattaaattataattaaaatttttgataaggtagtttcatgatttgcttttagaaatttttttttgtataaaagtcactgagtgactaagtgaactgttc

SEQ ID NO: 37722 - DNA, 386 bp, Oryza sativa
  unsure (1)..(386): unsure at all n locations
agcttgtctgaatttgagccatgtatntgtgttttcctcgactcttttggtttgtgggaaacaactgaacatagagtcgagaattatagcttcttgtcgtcgagtagtcattgcttgattgaagaaatgttttgaagatgtccaagtagaaatcctgaatattgcagagccacttgtagtaaaataacacggcatcgcataccgagatgtcgaggttcacaaagacgtcgtggttggtgaagtagcanatcttgcgaagtagcagcaatagagtttgctggtgccgaagataataaagatgaagtcgttccaccatgatgacaaagtttcattgccgtgatcaagtggacacgagtcggcggcaacagaagcaaaccggtagtgaa

SEQ ID NO: 37723 - DNA, 466 bp, Oryza sativa
tctctgctcctcgtcttgggtcccttcttagcaaaataatcaacttcaacttctggtatcagagcgcccaggttcgagtagggtgtgatggagtaacgcggcgtatcggtattctcaattgaagctacaagtatagcttcaagttagggcgccacaatggcacagtccatggttcctatatttgttagagaaaattaattatgatatatggagcatcaagatgcggacgctgctactatcttaaggattgggggatattgttgagaatgtgtacagggagtattttgctggagaaactcttacggcggaacagataatatctttggcagaggatcggatgatggacgccaaggccttgttattgatccaacaaggagttgcggaaagtctatttccgcgtattattggcgccaagaaatctaatgaagcatgggacaagttgaatgaggagttttaacgatctcac

SEQ ID NO: 37724 - DNA, 454 bp, Oryza sativa
  unsure (1)..(454): unsure at all n locations
agcttagagcatatacagacagagagacatgtttattttcatactagaggccgggatcgaggaggagatgctgtacgtatgacggatcaataattaagcctagctaagctgtgtcatatacgtatgtcctcatcttttcgcttatacttgacagtcaaaatataaatttttaatcttaaatttggatctggttttgaggttttttttatcaaagtttattttttaacctttgatttttgatcgctaagaatattataaanaatttatttaaaaattattgttcatttacaaatatgccgttttacttgtaccacgaataaacgaaacgatggctccccgatcttgcacgcggatgaattgatatgcacacaaacacaatgattatgggcagctagagatcgatcgagctcgctgtttttccccaaatgcgtctctattgatagtgccatgtatg

SEQ ID NO: 37725 - DNA, 422 bp, Oryza sativa
  unsure (1)..(422): unsure at all n locations
ctaagcttatgtttttgtattagacttagtatatngttatgtacttgctatggttgtttaatatacgtcacccagacttagcttatatcacgatttgtnattatacttaacacgtaatgttgtgtatggttctaatgtacgacatctacacttagcatacatgacttagattgttaaaacataaatgtctcgtgacttagcagatgtttctagtctcaacagatagctgaccgcgatgaggaacatatatagtgcgatacaatcgcggagggaagcacccagtactggaatgaagaagaggggaaccaggatccaaaccagtactttaacgaagaanggaacttggagagggatgcggatgggaaccaacacgggcacgtggtacgggatgtggatgggaaccaataggaggaggctagtgg

SEQ ID NO: 37726 - DNA, 462 bp, Oryza sativa
  unsure (1)..(462): unsure at all n locations
agcttaaagcagtttgactttgactaaagtctttatatcttataacctgaaacggagggagtaacatggtactaagatttttgcgtagctcaactaatttggttccttgtgatgaaaccagtttactcgggttcaaatcgtatatttgactcgggtgctcgcatttacgactaattattttttcagtggtaggcgacgtactcgtcgacagctggtgatagaaaacacgaggcctgggagatctgcttaactctagtacaggtccaaaactcgccttcggatgtatgagcgtgccagttgatttgattctgcnatcaacaagaaacaaagacaaagaaaccgtgattaaacccataaatgatagccgatcggctaaatgccgatgacatnatcattatctttgagccgatgtcatatcggctgtaaatatcaatgatatataatccttatatcgatatatac

SEQ ID NO: 37727 - DNA, 483 bp, Oryza sativa
cgagtctgtgactatcagattggctaggaagtcaactttctttattctaaggttaacttccgggcatatttgagttgcccttatattccttccacgggaatgtactatcattggtacacgttaatattgggttttccaaccatttcttttcacaaaagcttgtgatatgaaagaatgggaagctcccgaatcaaacagaactattgcgggtacggagttgacagagaacatacccatcacaacgtctggagcatcctgagcggtttcagcttgaatgtgattcacactgcctcgaccaatgtggttggaagcacgtgaaccttgtccacttgcctgagtgctaggacgagactgagctgccgctggagtaggagttctggcagtgcttgcattagcatgccctgagttggtgttggtaggattctgagggcacttgctagcatagtgactcatctagttgcactcgaaacactgaattgctga

SEQ ID NO: 37728 - DNA, 457 bp, Oryza sativa
  unsure (1)..(457): unsure at all n locations
agcttncttttcattgccaatggctctggttgttatgctctcgncttcctgtagaagtgtagctggcatttgtgatttctgtacttgattatactgataaaaagtgtggatcatgcaatttattgataggggcaatgtttgccggttgaaaaaaatgagatgtgatttgttaattgtgatcgttcgggattacaatttaaacagataatattgctttcagagaggagatcgggtaggttacatcaaaaggaattattctcttgtcatgaaaattggaattaaaatgtacgtagaatcgtgtgttcagctggtagaaaatgctaccagataactgatgcaacagaaacagtagagtctcaagagctattagtctaagaataattgatatcgtgcaagaaacgtgattgtccctgatgaatttataaaagaattttaaagcacctccaggcttcacact

SEQ ID NO: 37729 - DNA, 177 bp, Oryza sativa
  unsure (1)..(177): unsure at all n locations
nggacaagttcacaagagctctgagatagcgattgttgtggaactaatggagagatccaagccagccttgtgtgggtttggaaacgccttgtgatggtgtggatagggacctcttctccgcctcaacaaaaataactggtggcgattggaatacaacgcgcttcttggactccgcat

SEQ ID NO: 37730 - DNA, 436 bp, Oryza sativa
  unsure (1)..(436): unsure at all n locations
agctngactgatttgaaagcacgctatgtgtctcttatacatgtnnngaaaatgagaatccttcagtccaaatgtgcacaagtaatcgattagtggtaaccatttatcatcaaagtcatattcttcttgaagtttctgaaacaagcttctagagatactctcatttttcaactgcgaaaataaatcaatcatttatcctgcatacgttaaatattgaacataaacaagaacatggacacactgaatcaaccttaggagtctacctctacttcattatctatgtccacaagaccaggtgatctgctagctttactcttggcatgcagagcatcgactttttttgaagtgtcacatctggctcgtgtttaggttgtcttcctttccaggtttgtttcagcgctgggttcttccggcctggagaataaagtattaatac

SEQ ID NO: 37731 - DNA, 463 bp, Oryza sativa
  unsure (1)..(463): unsure at all n locations
gggcatcgccgtanaccggagcgtgagcctgtcggcgaggtcgttcaggcttctcttgccatcgccattgccgccgcagtttggatagctcaagggtagagacctcgcaatgatctccctcaagtcggacggcgacgagttcctccggagaaactcgccggcgagcttgaccttcgtgtagttgtacctgtataccactggcagtataccggagacgcatctctgcagccgtggcggaggcatgcgctgccggaacgacagcgaggagcgtgcgccgccgccggtttcgttgacgtcgacggtggttatctctccgagcatcatgtcgcggccggagatggagaacgtcgccgggaaggacaggcacacccggaagtggcacgctcttgccgcgatgccgcggcatgccaccatggacaccttctctgccgacgcgtaccacacgctctcggccgacagcgtt

SEQ ID NO: 37732 - DNA, 469 bp, Oryza sativa
  unsure (1)..(469): unsure at all n locations
agctggatcagctgttngagggcccaatcaaatctaatattgatcggctcaaggctcgcaagattgagctcttggcacaacttgaagaatgcaacgccgagctggacatggaacataaaaagctagccgatctcccaaagtctgtcgaagagcagaaagcaagactcaaatcggctatcaagaatgttgctgatctgaccaagtctttgaaaatcatccctggaaccgatgctcaagacgcccaagctattgaagaagtagaacaaattaggcaaagggctatatcggctatccagcactatttgtctcggtgaccttttgtgtaataggtcttagaaatttttgtaatcggctaagatattctagtactttactggcttgacaatctttggtgctgattaatttaacttctaaatttactcaaaaactttcatttcttgcatatatgtgccccnactaatttacaatg

SEQ ID NO: 37733 - DNA, 52 bp, Oryza sativa
ttagcgacactatgatactcagctttgggctattccgattcggattatgccg

SEQ ID NO: 37734 - DNA, 469 bp, Oryza sativa
  unsure (1)..(469): unsure at all n locations
agcttgattgagaggggtatcgaaccggtcaccgttatattgtcggatcgatcgaagntctggtactatgctcacggtggaacgcttaaccccgttgttgtctccctggtgttcaccgatcagatacgtgaggctgccagtcgactaacggacgcaatggaagcgtcttctcagggaacgttccgacccgacagagagaaggacgagctgtcactcgccctgcagattcccgagcatccaggacgaacacgagggagaggcgtggttccttgaaatattggattcaagaaggacatccacatgtacaggagtcggatgaggagcaagagagataccgaggcaaagattgcagatcttgattatagggtatcgagctacgagctcagcatgcaagaggaggtggcaaggaaagtggatgaacgcatggtcgcacatcggtgccacgatccccagccgtacattcctcatg

SEQ ID NO: 37735 - DNA, 407 bp, Oryza sativa
  unsure (1)..(407): unsure at all n locations
ctatgaattccaataatttagaggagcttcctatttaccccgatgtggtagttttggtgactaagcatgttcaatacaatggtattgtgccacgtggtgggtttccattgtgtctgccaccacgacgttaagtttaaggcgtgggcccgtcacttaacggttttaggtcatattttccagtatgactaggatggaggaacacatatcgtgctggtgtaagggtaaatcatgaattttggaaaagctttgttgtgggtaataaatcgggtacttatgtatcgcgtgccatgcttttgcatgattattattacgcatcatgtgggtaaagtgtcaaactctgcagagtaaaaactaatcgattatccgtgctcgcngtcatgagcggcgtgtggatatgtattgagtat

SEQ ID NO: 37736 - DNA, 476 bp, Oryza sativa
  unsure (1)..(476): unsure at all n locations
ntngaaattccaaccattaatttcttaagtccttcaatagatttgtcttataaacttgtaggaatntacatattcatcttgatacaaaattaattatcaaaattttaaaaagtttgtctaaatttgattgtaaacatcaaatatttatgacctgatcgagtataaaaaaacatgtatactatagcttgattaattagacaacaatttttgtggcgcggtaggaattcagacttttcggttaggtctgtttgaccacagcaaaggaccgtgatccccatcatccatggacagctggcgtgatcacaaatgtacactttaataccttggcttgcagatgcatggtgcaatctacgcattgttgtactcgtatgtacagatcttctgcacaattgcagataaaatatattcccagtatttagctatttacttgtgctaccaagttagaaccatgcatgtgttaatntggcaagaaatgc

SEQ ID NO: 37737 - DNA, 366 bp, Oryza sativa
  unsure (1)..(366): unsure at all n locations
gcttatccatggatattccctccttgttcatggttgtttatatgggaacgggctctgctatcctttcatcatccttaaacaccttatgttggcttgtcattctgtcgaacaagttgtgtgcgctagattcttgaacacctcccttgcccaattcttctttcaccttgcactgcttgcttcccaagacctcaatgacgagaaatcccacgaaccgagcagctctgataccagaatgttaaccaccccatacacaaatcacaacgaaccaatatccagtacaagcaatggaggtgaaggtagttttgagctgcaattgtattactacaactcaagctttgtggnggaaatgggagtgaacatnggata

SEQ ID NO: 37738 - DNA, 369 bp, Oryza sativa
  unsure (1)..(369): unsure at all n locations
taagctgcactttagattgcattaactattgccaccgaatgttttgttcctgggtccacatgngcgatacatgtgggtccatggcaatcgtaattgtcacggtaaagtggcaatggttaatattcgaacctggcctgcatgtcaagtatgacgtctgcactccacgatgtgaatgagccatgatgcttactaaaacgctgggatattgtgtctattaaagctgaaaggccatgggttctctcttcaaatgttgaataaacagtgacgtgatcatccgaatgttattagagacgcgtgttccaaagcattctacaatgctagatgtagaccctctctcacgtgcacagagaggtttgttcatatgtcgtg

SEQ ID NO: 37739 - DNA, 402 bp, Oryza sativa
  unsure (1)..(402): unsure at all n locations
tatgcatatcttgatctgaatcctgcagaacaaacatataggatgagtagtatctgatataaatataatactcgagaaaaattcaagtattttaaaatatttataaatatgtatttctcctcttgtcaattttgattttcccgagcagatgactccgtacgtttaaacactctgtccaactagtcatagcccccaagcatcgggagtgggcctaggcacttcccanacatgcatatgagtgacatgagttcgtcatcaatggaacaaagtttcacgaatcagaatttactactcgggtacttttgcaattggtaagagcagaannataaattatcttatctctatgcttttgatttattctgaataatacttagcacctttgcgtactcggtccgtccaatg

SEQ ID NO: 37740 - DNA, 474 bp, Oryza sativa
  unsure (1)..(474): unsure at all n locations
cacacttcttaattattgacaatgtaacaattatgcgacattatttatttgatgctagtatatatatggcataaaaggtactcccgccggtcctaaacacgtagttttatccaaaaaaatttgtcgagtagacctctttaatacaaatacatctttttcatctcactgttaataattggaccaatagtatttcgtgttttcttcctcttcngtttttttcatatcaataaacactataaaaaacctaatatgtgccgacaaattaaaaaccggcacctatgagagttttgtcgtggtcaccaccgacggctatgccaccaccaccgcctaccttcagccgggcgaaggggccttgtctcgctggtccgccctcccatatggaaagagagggagaggggcttanatgtggggcccacgtnggattcattttgagccagtgcaaactngtccttaatggttgttctctaacctatc

SEQ ID NO: 37741 - DNA, 463 bp, Oryza sativa
  unsure (1)..(463): unsure at all n locations
agcttgcataaacatntaccagtttgctttggtttatgttagcacctttcatttaccaacacaactaagtgtaatcggggtcatcgttntcttctaggatattgggttgtacataactttgtatttcaatgtacgtaagagagaaaaaatccattaagtagttntatgtgctatgcatatctttgtattttcctctggataactaagggctcaaattatgaacatgaattatttgtgtcctattttcggaaacttcatgtagnctaattttttcttaaaaaaatatagttntaaaatctagtaaactaggagttggttcagattctcatcagaaatttttagaatcaagctcatggagccttcatactccacaattttggggaaatgtagtggtcacacaaaananaagagaaatatggcgataagaatctcctaattctatcacaatataagggccccttta

SEQ ID NO: 37742 - DNA, 346 bp, Oryza sativa
tatcgtcccctacatccactcattcctattagatgaaggctattggaaacatatctatggttcaatctttactgagctgcattaaacaaacttctacttatggctcatgtgtttttatattctataggatcgaaaaaacatgttacttccattcatgcggttattatcccatggttcacatgggacctaaagcgtagctaatactccaaatatctacatgcgcttgcagaaactccagatatgactaggacacttgcattggtgttgatggttatgtctcatccatatgaagtatattaatggacatattccgtatgtatgtacgttaagatatagcaaagcgatt

SEQ ID NO: 37743 - DNA, 454 bp, Oryza sativa
agcttcccgacgcgtcgatcaccttcgcatctgttatagaaagcggccttgtctctccttcatcagcaggctggccactgcccatgggaggaaaaggttcccctggagcagcttctactacacccatccaactgatcacgtctgcagcttcagacatgtgagtcaagagctttgatggccagtaccccactatttcttctccaactttcagcacccagtctcccatgaactattcattccagagaaaaaaaatcagatatacaaagtgtcccagttaaataatgcaaggttattggcacagtaaaggattatttaccttaataatcttaactctaatgatgtattgttttccattgacagtggaaactggcctgattattattccagggattgcctttttgctcatctgaacaaaccccgcacaacgaaggttgatacatgacttatcattatc

SEQ ID NO: 37744 - DNA, 455 bp, Oryza sativa
  unsure (1)..(455): unsure at all n locations
tctttactgagcacaacagaccggccatgggcaacttggtcagttctcgcctgcggctagtagctgtgatgcagcgatcgagatatacaccaattaaagtagcgtggcgacggcgctccgtcttgccggtatgcagtcgccgatggtgagcatagctgcaatggcggacagcggaccaggcggcacgagcgacaacgaggacctcgtgaaaaaggatgggaagatcagggtggagaagaactggggctgttgaggctgccatcggagtgctaaagtgagcaggcgatggtagcggngactcacgcgggagggtgaaagaggcacgtgcttggttcaactaccccaaccaacggatggtggctgtggagagagcccctgngactaggggctataggggtggatttgggtgccttcctactttggnggcttaagtcggggctctgctggagttatat

SEQ ID NO: 37745 - DNA, 436 bp, Oryza sativa
  unsure (1)..(436): unsure at all n locations
agctntaggtgctacgatcgtgcttgtgaacttgtcactaaaagttgccaacacnaattttggcgactccgctggggaaatttgctcaatgtcatctcaacttcgacgccgccatgacaaagccgccatcaaccaagtcggaggtggaaccatccaatatcatgccaatctcattggaggatcttgatggggaagcatgcaaggccatggaggagtacattaaggcgatcacgcgggaggcactgatgagatcatgcaccaggacctgtcaaggtgtggttctcaagcctggaccattgcttaaacctaattttaatgtggtaagtactgaagaggtatcaatccctatccaacaacacgtagcaagtacaatagattcatccattgctgctttaaatagtaagatagatgcatctttcgaatctcgttttgataa

SEQ ID NO: 37746 - DNA, 470 bp, Oryza sativa
  unsure (1)..(470): unsure at all n locations
ggcattatgtngataacgtacccctgcttccataaccttgctggtcgactaataatatcaaagcatgattgcagcacaccaaatgcgcactcgacatctttcctcgccccttcttgctttaatgcaaataatttgtcttccgccaactgaggggccgtcactgtcttcacgaatactgcccattctggatatattctatcggcaagatagtaacccatgtcatattgtgttccatttacgttgtagtgtaccgttggagcttccccttttattgcttgaataaatagtggcgacttgtttagaacgtttatgtcattctgagacccggcggtaccaaaaaaaagcatgccatatacgaagatctttagttgccactgcttcaagaatcatagtaggaacgcctntgttaccactagtgaacatgcctgcccaacctttcggacaattcttccatggccaatgcatacaat

SEQ ID NO: 37747 - DNA, 494 bp, Oryza sativa
  unsure (1)..(494): unsure at all n locations
atccttaagtcacctgcggcatgcaagcttgccanaagggcattcattattgttgtttgtttatattgaagtagacaattaagattgcttggagatgaattgtccaactaatatagatgctaacatcatgcggagttgttaaacttgtctataagaacgtcatttaggaggaagagacaaaacttattaaaaaaacatgtgaaaaacaagcaattggcacaatgccttgcccttataaggctgtgtttagatcccaaagttgaatccaaacttcagtttttttctatcatatcaacctgtcatacacacacgacttttcagtcacatcatcttcaattttaaccaaaattcaaactttgcgctgaactaaacacaacctaaaactatagacagaacaccacttgagatatcaacttgtccaatccgtcaccaatttctttccactgactgatttgatggggttttggtatccccaaactaaagggcacaatgaa

SEQ ID NO: 37748 - DNA, 326 bp, Oryza sativa
tgtgacgccccaatatacgtatgcgtttattatctatttaatgaaattctatgttcaaaagtttggttatttgagtgtatctacgtttgagtaccaaagatctcaattaattcattcctttgtgaactcaaaatcttgaccaaaatattctatcctaaattaaatttctaagattcaaatatcgaggttcgagtccccttctaaaccattcaaaaattcattcaagaactcatataaagtcgtagaatcattatagttcaaggtcctaagccaagtccctcgaaattcatttcctataatacctggatattggaaaatattactat

SEQ ID NO: 37749 - DNA, 455 bp, Oryza sativa
  unsure (1)..(455): unsure at all n locations
agcttaggcctgacggtactattgaaaagtacaatgctcggcttggtgctaagggctatactcagaaagaaggcgaagatttctttgacacttactcacctgttgctagattgaccacaattcgtgtgctactttccctagcacctcacatggtcttctcgttcatcaaatggacgttaagacagctnttcttaatggagagctggatgaggagatctatatggatcaacctgatgggtttgtagttgaaggtcaagaaggcaaagtgtgcaaattgttgaagtctttgtatggtctgaaacaagctcctaagcaatggcatgagaaatttgacaaaacattgacatctgcaggctttgcagtcaatgaggcagataaatgtgtgtactatcgccatggtggnggtgagggagttattntgtgcttgtatgttgacgacatactgatatttggga

SEQ ID NO: 37750 - DNA, 426 bp, Oryza sativa
  unsure (1)..(426): unsure at all n locations
tcgacccggatcttaagcgactgggctgcagcttacaccgtgtacatgtccatgcgtcttttaggcgggtggccaagaaaatccttgtcgaaaggcttttccgaccaatgtacgaccggcggcatgtgacccgcagaccccttcatgtatgtcgaggaggaggtgcttaccgtcgccggacaagacgcattttagaagtaccccgtttggtgccttcttgtatataatcgtgccgatcatacaatagnattttccttgacgggttattttcttggcttctgcgtcgtcctcaggcaactcgtcgctatttatgaatttaatgagtggggtccgccagtcgtccgtggtctcgatgtcggcaacggcgcgttctgcctctgtagcccccgggctgatgtcggggggttactgggctatctntcgtcg

SEQ ID NO: 37751 - DNA, 470 bp, Oryza sativa
  unsure (1)..(470): unsure at all n locations
tagtcatcgtgacactactgtgaaagggacattagctagaaactgaatataacttctnttagcctacataaattagaattttgaacgggtgtatgtttcattgatataaattagaattttcatattctattcatacttctatggtcttaatgttatgtgagtggtccggagtatgattgggctagaccaagaacggataatacccaacaggcactgttcattgtcttccttagctcaaggcgaaacaaagaggagggaagatgggcgccggtgctccggcgaccaaatgacggtgaggaatgtattangacatgtcccacgatatgactcattcatagatgcttaagggtggcaatgaagaaaaccagaacaagagggacactgggggcaacgaggtggtcccgatagagagagaaatgacaaagacaagctctagttgtgacacgaccggatgagtgcatcaaaacatg

SEQ ID NO: 37752 - DNA, 466 bp, Oryza sativa
  unsure (1)..(466): unsure at all n locations
agcttgtatcctctacttcttcttatccaatctgtttggtattttttttcatgagattaaattggatttgatggctcttgagataattgagttgagaaacgtcaggaagcggaagcggaagcggtgtcgagctgtatggaggatgcgacgtcctgaatccgttttcaccggcgttcccgcgttgccatcctattcctagctcgtcgtcaccctgtcccttgtacgcagctagcctatgcgaaggcaagggcgacgccagagcagtgagggtgcctctggaggccgttgctagctccactggatctgagcccctcggtggtaatcattctccctcagccatccatgttaattgctggacagacagggccgtctataggaatntggggcctcggggtgaaatgcnagagtgggacctataattaaaaaatcatatctaatataaataaaatatattttcacttaatta

SEQ ID NO: 37753 - DNA, 424 bp, Oryza sativa
  unsure (1)..(424): unsure at all n locations
gcagcttattttcgtgtaagttgattgacaggtattatttgagcgactntagtaagcctgtcgaccactacccaaatggaatcatgtcctgccgacgttctggggagaccggttataaaatccattcctatttctttccatttccactctggaatcttcaacggttgcaacagaccggctggcttctgatgcttccgcttgactcgctgacatacatcacatagagccatatattctgctatctcacgtcgcatactggcccaccagaattgttgcttcaggtctgttacatcttagtgcttccggggtgaatggaatacaaagtttcatgagcttctttcatgatagtatccttcaactccttattatcaggcacggcaattctttctcctagccacacacgtccttgctcatcttctatata

SEQ ID NO: 37754 - DNA, 364 bp, Oryza sativa
gcccgtgcggaggcggcgctccgagtttttttttgggcctgcgcaagacttctgcatgacacgattttccgctcgatttctttccatttgatcctctggctggcactggagaaggctgcactgtaatctggcgagatttgagtgctgatgcttttcatggactggggggtggtggcatcttttccgcagcaagaaacttgatagacaatcttatggacatgatcagttccttcacaaaagagacaagtgatcctgcttcgtggacacctgtcggtggatggtcttcttacattgacgatgtattgcacacagctggaacataccatttatcacacgagacttgcctacgttcatctatttctca

SEQ ID NO: 37755 - DNA, 204 bp, Oryza sativa
  unsure (1)..(204): unsure at all n locations
tggcacggggaggaaagccgtgagggcggctagcgtggctgcggccgtgctgatcgccgccgtcgtgctcttctactacgcccggtgcgactacgacgagatgccgttctctntattcaccactactactgccacacgagggaattagctgataataaattaatcaagtggtctaatagctactagatcattttaataactctc

SEQ ID NO: 37756 - DNA, 121 bp, Oryza sativa
tatccgataatagaatcgccggtttcatttctatcttatgttatctaacaagtttaatgcgatggagtctgggcagcaaccggaatcacacgttccattctctgaaccttactgaaattga

SEQ ID NO: 37757 - DNA, 464 bp, Oryza sativa
  unsure (1)..(464): unsure at all n locations
gctttattgtggttatggatcggacatggatgttctttattaaaagagctcatccaacggtcttgaaggaagcagccaaatttggtgagctcgcaaaggcacatgctgtgagggagaatatgaggagcattttttggccatgcaaagtttgtaagaacgaaatnttgctgcaagatccaaatgaaatattgtcgcacatcgttgagcgatgatntaagaanggctatgagatatggacttttcatggtgaagtcggtggtcataacgaagagttagattatttctgttttgatgatgcagaanattttataatcgaagacatgtcatagggaaacatgccggaatatggtggctctagtatagagaatgaatgtattgattntgatctggaagatatgttacggcacgttgaaccagtggtcataactagtataagacgaagatnggacaattgtgaagcgttg

SEQ ID NO: 37758 - DNA, 445 bp, Oryza sativa
ggaatctgatttctttatacaaatatgatacatgtgtggaataacttgtgcgactgacttgaccaaacatcgcgttgctaattcgtcatcaacaataagttcccaattggcaggattcaaaacttcaccactattgtagctgaaccaatggtgagaagttcggcttataatctcaataggaaactccaataggaatagctaattggctatagctggtcatgtttgaatccttctttggaggcttcacaattgaaagtacaaacaatacaaaatatcgtatatcaatgatatactacaagagtaaatggcttgagttaaaataatgcaggcaagcaaaagaggtgattaaagctttgaagaagcgtctccagcacaaaaattcagagggttcagtttttgctttgacggatgcttccctgcttaaatacccttatgttctcgaacg

SEQ ID NO: 37759 - DNA, 369 bp, Oryza sativa
  unsure (1)..(369): unsure at all n locations
ctaagctgagactaaagttaaatgtgttataacttataacggagggtgttcttgttactgcgcgcttgttaaggtggtgattcctattntattcatggtgggcctaagatgtatttatatgtaaacttctagattctctcactggtggagaaaccctttgtagtcccggttcgtaacccccctttagtcccggtttccaaactgggactaccaatccgggactaaagatcgctatctttagtcccgggtgaaataaccgggactaaagatcgttctttagtcccggttaggtcgcccggggctgatgaccgcgacctttagtcccggattggtagtcccagtttggaaaccgggactaaagaggggtta

SEQ ID NO: 37760 - DNA, 465 bp, Oryza sativa
  unsure (1)..(465): unsure at all n locations
agcnttttaaattgagagaagttgtagccttgattctctctgtgaacagattcgctctagctgttggaatatatattggccagcgcaatcaaacctcctcactggtcagtatcaagtgcaccaaccatgcagtcaactacaacggcaataataaggtcttctccaatcaggcattccgagcaacccttatcaaatataattgttttatctttntttntcgaaactgtgtagattgtttaaataaccggaggaaattacagcatgacgatgttataacacaagatatgtcaaaatattaaaaggagatccacacgctacttaaaaaataatttttgttggacgacaccctccttatattgcagacggatcagaactgatctcatctactaaaatcgacctttattttcatatatagctctttaagaggactgcacgtaaaaataaggctacgcgaaaatctatttt

SEQ ID NO: 37761 - DNA, 326 bp, Oryza sativa
  unsure (1)..(326): unsure at all n locations
cgggttcgcctttttccttaggacattatgttattcaacggctctgtcggtcgaacggtgttgttgtaagttgccgaagtgctttgtggcatacttntgcatgtgctcgagtgcttcgactcttaccccctccaagagtttgagcgacaactcgcgcccctcttcgcccccagagaacgtcacccttggtgagttagcccctagcactgttggggtcattgcctcatcgtcatagagaagcatgaacgggctgaacttggttggtcttgtgggggtcgtctctatggctcagagaacatatagtcattctcgctgtcttattccct

SEQ ID NO: 37762 - DNA, 464 bp, Oryza sativa
  unsure (1)..(464): unsure at all n locations
agcttaactntaatcatatcgctatacttcatgcactggcttgctcgctgctaccagaatgcgctctacttcgtacccggatagggaggactacggtgatctcgagggctatcaccacctctacaccaacctccaacttgctgtgggatactgttgatagaaaacacggtggcctgngagatctgcttaactccaatgcaggtccaaggctagccttgagtgagtcaagggcgtgtcagttggtttgatcctacaaccagcaaggaaaacaacaaacaaagtgagtcagccgatagccgatcggccgataggccgaagacgtatcattggtgatcccaatcgatgtagttagaccagatcgactatggatngatatataaattaaacacaaaccctanatatgcctcatcggttgtagtatcatttgtttggttatcaagtgtatttcagacgatactatagaa

SEQ ID NO: 37763 - DNA, 431 bp, Oryza sativa
ttagagtcacctcgcggcatgcaagcttggatagggtccgatccttggctgcttttctcttacttgttgcctgaaactgaaaggaccaacatgactgcttgtctcttggctccttgtgctgcgccccacacttccttgagccccactcgtgcccatattgagacgaccgagtgctggacggcgcctgtcggactggagcccatctgttgaggatgaaggcattcatgtttcatcaaggtagcaccacacaaacggggacgccatgaataattattataccaaccccatctgggaaataagaaatggctcgccacattgccatgatcattgatgacatcaacaccatctgggatataatctgcgtgaacggccccaactgttctgatatacaccatggaagagctgactgaacaaaatccccaaaacgatct

SEQ ID NO: 37764 - DNA, 228 bp, Oryza sativa
aaaaccactggattgagtaccctgcaatttctttctatccatgcccgccgaccatatgggcgaatgttgacatgtacgagcaggcattacaactttttatacattatctcaggtgagacgatatgacaaatgcctatcaaggcgattgtggacgctacagatagcatattttctgaaagattagaaatggagaaggtaagttcacataaacagtgatgattgatcaac

SEQ ID NO: 37765 - DNA, 365 bp, Oryza sativa
cacaatttttggcgactccgctggagaaatttgctcaatgtcatctcaacttcgacgccgccatgacaaagccggcatcaaccaagtctgaagtggaaccatccaatatcatgccaatctcattggaggatcttgatggggaagcatgcaaggccatggaggagtacattaacgcgatcactccggaggcactgatgagatcatgcaccaagacctgtcaaggtgtggttctcaagcctggaccattgcttatacctaattttagtgtggtaagtactgaagaggtatcaatgcctatgcaacaacacgtagcaagtacaatagattcatacattgctgctttatatagtaagatagatgcatct

SEQ ID NO: 37766 - DNA, 424 bp, Oryza sativa
  unsure (1)..(424): unsure at all n locations
gctgctttgtgatacgtgccctgcttcataaccatgcttgtctactattaatatcaaagcatgatggcagcgcaccagatgcgcactcgacatctttcctcgccccttctagctttaatgcaaataattagtcttccgccaactgaagggccgtcactgacttgacgaatactgcccattctggatatattctatcggcaagatagcaacccatgtcatattgtgttccatttaccttgtagtgtacgcggggagcttccccttttatagcttgaataaataatagcgagcttgttagaacgtttatgtcattctgagacccggcggtaccaaanaaaagcatgccatatacgaagatctatagttgccactgcttcaagaatcatagattgaacgcctttnggtccactagtgaacatgcctg

SEQ ID NO: 37767 - DNA, 414 bp, Oryza sativa
  unsure (1)..(414): unsure at all n locations
agcttgtgtggtcatagtgtttgggttgaataaatactttttggtcttgacaaagaanaataattttagcttcttttcagggccagaagattcagatagaggcaagctgtttaacatgccagaataaaatagtaaacacaaacaggaacagaacatagaaataatgagaattgcttatgtacaattaattaacaggaggtgttcaattgtacataattattcgagagtattattcaaacaaaattgcatagaatctggcaaaaacattaaacttctcatacatgcaaccagatatgacttgcttattaattttttttcacgtgtcaatattcaccacacatccgctcctgcctaacagacatcggacaccgatacctctcaccatatctcgcaggcccacagcgctgggtaagt

SEQ ID NO: 37768 - DNA, 340 bp, Oryza sativa
gcacaagacgaagacagagctactcactatgtttcaagagggggccatcgtctatgaggtgaccatcatcgaggacaatgcctctcgtggtgcggatccatatatatagatcttggctcgtgacccccgagcttatgcgttggcttgggtttcaggtttgatcttggagtgttctacatgttcgaaggtggtgtcttccactatgaggacttgttttacccaataagatttcttggtggtttaatcgagctctgtcctggataagatatgtattttggtgtcttattgtgctctaatctttaattgaaaacaatacattggtacctatatgtattgacct

SEQ ID NO: 37769 - DNA, 426 bp, Oryza sativa
  unsure (1)..(426): unsure at all n locations
agctttgcatactatgcgtggtcaatatttgttctcttagctgggatccaatgtcaagctttgcatactatggtaggcaaataaggtccaggtggattaacaatctaaaagtactgatcattacctgatggattaattgatagaagctgtgttgcccattggttccaggttcaccaaaatcaatttcaccagtctcaaaggacaattgaacgccatcaatagagacacccttttcattactctccatgctgaagcttacaacataatgagcgcatgttatgactagaaataactggagtgccatgatgaaaccagctaagatgagtagtaaagtacctgctgaatatgtggtgcanatttctcaagtgcctgggaatanggcaatattgccttaaagaacatttatattagaaataatactcaaat

SEQ ID NO: 37770 - DNA, 443 bp, Oryza sativa
  unsure (1)..(443): unsure at all n locations
tatagatctcaatgtgataccatgagtcttagtggctatatntttttaccatgtgcatttcacacgtattaaactatgcatgcaatggaacaaccaagtgttctaaagaaaatgaaacaaccatatctttgatttcatattatgcgtgatctctcttagaactatagtttggatgcatcttcactagcttttgacagaaggaacagacaacttaagtgccttataaacagatatctctcatatctttttggccgggtgatattcctcaaatctctgcatcaccatgccacatgaaaaaggcgattcagttctcctgtntgtaagcaattcatccgcgtctgtgttactttattggtaggtgctggcttaaattatcctaatcttgatgagtaaagtacaacgacaaagcgaataaacccatattaacatttgacatctgtgct

SEQ ID NO: 37771 - DNA, 444 bp, Oryza sativa
  unsure (1)..(444): unsure at all n locations
atccttagagtcacctgcggcatcaagcttgacgttctttagatcatgtctatttcattttttatattaagaactaaaaaactctcctttgtatgtgtgctacgattggagtttatctataataaattcatttagatatcttctcttgaggtcatttgctaggattacaatatcgattaccttgtgttgaggtaataatgtatgatttgatatagttgaacttgaacacttaaatcttttgagttggtcaagtctgtttacatttggaaactataatggtatgatatagtcttaagggtagcaatgataagagaagagagaatgtcaaccagaatttagttaaatccattgcgacagaaatgagtggagcacgcttagttttcataatgcctcttgcttggatatctganggttgtgcatgcgacctcaatcacatatctactg

SEQ ID NO: 37772 - DNA, 440 bp, Oryza sativa
acacttgaaactaagcttattgatgtaaacaatatgaatactagcttccacatatttgctccatgtaatcaaactcacagcaagtgaatacagataagtacagcgttaaaaaaagaacaccagattgacaggcagttcaatagcaaaggtccaagtttggagttacaagagcaccgaaacatgacaaaaatactaaaaacaataaaggaacagattagctcaaagcgcaactcctccaggtccgaggcaatcgtcacgcgaaatcaaaccctagtactccaacctctcacaagcacaccgcgccgcagaacaaaataaacctgtacaattcaaaatcgtcctgggggagcctatgcgacgacgggcgccagataccggtggctataataccttgcgagatgaggcgctcgacggtgacgtccgtgtccatgccgcaatcc

SEQ ID NO: 37773 - DNA, 457 bp, Oryza sativa
  unsure (1)..(457): unsure at all n locations
agcttatatatgtatgtgtttcttagcgggctatatttttgctgaaaanaaaactacgtttaagaataattttaaaataaaggtcaaaaatttaaatttggctttaattttgatttattaaggcaaccaataatgctcgtagtatcttaacggaaaagaagagctagagctaatgaccagctcatgcatgactgcaatggtaaataatcatgctacagctacaatgtggcttgcaaacacccgttttgtggatccatgggcaagcaggctctctaatcccaatcaaggaaggcagagatggaattataattctgcgaggacttggcatgagttgcgagtcaaggtaatcatacacatttgcaactgttcggtatgtgctccgctactagtagcttgctggattaacatttcagaatncgatataaacgtttctctcacttgttccgtgtatgtgcgt

SEQ ID NO: 37774 - DNA, 397 bp, Oryza sativa
ctgcagcttgatgctgtgacataaaggttctgttgcttttttgagattagaattggttccatatattattataaatcttactggtaaatctcttcttgggtatctgcttctcggttagggaataaatgaagatcttgatgctggctgcattaaacccggccatatacttgcaatatatccgcgtgaagataaaatgtactaattaaacttgaagatagtgtgttgagatcaaacttacaggttacctgaacaacaacgacataatattttgaattctttggattgctgcagtcaacaacatctgcagcagcttgtgtattcacctaataggtaacttcaacatcagcattaacacaaaggcttcattatttacagatatgttggcataaacatgaaa

SEQ ID NO: 37775 - DNA, 489 bp, Oryza sativa
  unsure (1)..(489): unsure at all n locations
gctttaaatctgtagttntatgatagattgtgcannaaacatgtagttcttgtgaaattactctatattatattaacatatgccgcagtgtatttttggttggatcaaactattntggactttctgtccgagttatagcatttacacgtgacctcatgtgacaagtcagcattttgcttatactccctctgtactcgtaaatactttcgtttagaataatgtttaaatcaaatcttgggaatatgaatcataaataactctcaagttgttaagtttaaaaatataaaaaatatatgaatagatctgtcttgaaaatacttttataaaagtatacatatatattactttttaataaatatctttatagaaataagaagtagttatgttttggagaccgtgtntctgtctaaaacgattnntttttatagagggagtccgtggtagtacacaattaatgctatagacatcctacatgaagcactgngaatg

SEQ ID NO: 37776 - DNA, 323 bp, Oryza sativa
gctttgtcgatgcatccatatcctatgacagcgtgatttgttgccatccaagctcaagcgcgactcgtgacagctcgacgcgccagcccacgatgcactgaacctgaacacccacgaagtgacgtggcacacacggacctactaccaccaccattattggagatgccgagtacccacccaccttctccgggcccacctgtcagccaatggcttgcgtcccactaagagaaagcacactggtcgcgaagcgtacacacacttcgtgacttgtttccgtgagcgatcgacaggaggacatggcggaggaagcggtcggtctcact

SEQ ID NO: 37777 - DNA, 309 bp, Oryza sativa
tcaaacatttgttctgaagctcatgacagagataccatcaagatctccagctcttgattggggtagcatccttcaagttttagccgcgatatgatcatcctagtggctatcttcagaattctcacgcgattgactgtttgttcactgcattgatctaccatcgtcctcagcttaccggcacagcttgatgcagagtcttctcgggcaatctcaccagctagcgtatacggatttctaccatctctgatccgatgtgtcaatatcgccacactaagtgacagtgaagctgcatgtagtactctcgtcctg

SEQ ID NO: 37778 - DNA, 314 bp, Oryza sativa
  unsure (1)..(314): unsure at all n locations
tggaatacaatttactgttacagtaccattcactgtgatgacaatctatggtaaaattgaagtttgagccctaaaactgtcgacagattattagctagttccaatttaataggcatgcntctccccgcgcgtcngcaccatgtgttgcacggagagaggggtggcagtctttttcggttttttaattcggacgtatatanactgtgtatacgtgtatattttatacgccaatatttttatacatataatattatatatcatacatnaacttatattgaatatacatatgatataaacttgtatataccaataca

SEQ ID NO: 37779 - DNA, 288 bp, Oryza sativa
cacgggatgagatcgccaggcaacgcggcgacctgcgacacggactcaactcaccccagcgacggatggatgggacacctcatgcgaggaacaatgattttggcagcagatatttctctttttttttttttcactacttgttcaatcgcctaatccctactacgtctctgttctttcttatcctaagtataaaaaataaaacatttcgtcgaatttcatacatttcgattgattgatattggcacattctattcagggagctagataatatataccaccacctaccac

SEQ ID NO: 37780 - DNA, 480 bp, Oryza sativa
  unsure (1)..(480): unsure at all n locations
tgtccagtaattcatcaattattggcaaggataacgactttttttagttatggcattaagatggcgataatcgatgcaaaagcgccatgtcagatccttcttaagaacaagcagcacttgagaagagaacgggctagagttgtgctgaataataccttgctggtgcatttcaaccacttgtcgttcaatttcacccttctgagcaggattatatctatagggtcgaaggttcacaggttttgccccaggtaataatggtatcgagtgctcaaactgttgagcaggaggcaatcctttaggctcatcaaagactgaacagaattcttgcagaagttcagagataggtgctggcaattctgtctgttctacagactcttctagtaaacacaactcaattacttgcatcattgaatcacgatgaaccattcctttaactngacttgctgacactccagggcactgagaagtatcaccagttta

SEQ ID NO: 37781 - DNA, 378 bp, Oryza sativa
cgagctcgaactgagcctgcttatatgctctaagacggaataagtttggcttaagcatgtgtcaagctcaaacgacatacgagcttgactcgttgacgctcgactcattgacagccttagacaacatcgccttaccactcgcctgtatccatcatcttcactgcccctttccactatctataacccctccttccattccaatccttgagcctcacatgttcccggccggccgccaagcatcgtcagacaagagaaattcgactagggtgtgtttagttcacgcctaaaatgaaagtttgattgaaattggaacgatgtgatggaaaagttagaagtttgtgtgtagaaaagttttgatgtgatggaaaaagtaaaaag

SEQ ID NO: 37782 - DNA, 481 bp, Oryza sativa
  unsure (1)..(481): unsure at all n locations
actaagcttcatcgatcattagcctcgtcttttcgtttatactacttatcattttgaagttgattntaggattnttttatcgtagtttatctttcagcctttatttttaaatatttaaggacacgtatataaaaattntattcacgaattatttttcacctgcaaatatatcatttggcttatgcttataatcagccaaccgatgtgatcgatcgaatgactcaccgaattcgtctgggttttgcacgaacttgatcaccgggcggtagtagtccgcgaagacgatggcgaccgacgggtgcttggcccggagcagcgacaccgccgcgaacagcaccgcgttgtggtagcgtgcgagcgcgttgaaccgccacaggcagccggtgccggcgtcgtagtccgccgcggccgggctcgcgtacagcgtgaggatgatcgggaggcagcccgtctgcagctggcccggcaccaccacgtacct

SEQ ID NO: 37783 - DNA, 448 bp, Oryza sativa
  unsure (1)..(448): unsure at all n locations
agcttcgccgctgcctccattggattcgctgctgttatgtgaaacccggccacccctccgttgtcgccgcacattgccggaaagtcgtcgccgccgtggacagtacctcgtcgctgtcccgatctcgtcgccggccatcttccgtcgccatccgtcgtcgcgtaagtgttggtaaggaccgtcgcctcacactctttctcccggtgccctctgtttgcatatttatgtcgtggttcgccggcaactaccgctcctatgtcattcaccggtgtaagtttttccctagggccttaattcaatctaatccgttgtttgtctagcatcgtcgtcgtctccgtgtgttgccgccgggtcgccgtcgtcatctctccctctccaatcgntntggttcggtgagatttctattcgcgtcccttggttaggtttaatctcttgtttgtgtcgtgag

SEQ ID NO: 37784 - DNA, 478 bp, Oryza sativa
  unsure (1)..(478): unsure at all n locations
nttagagtcaagaattcttatttccaaaagaaaaccattctttttgatgctcaatagaatctattgcaatcttgtgtttgctaaaagtgagattttacatcaaatcaaaatctattgagtttttgaaaaagttgctatttaaaacttttagggttggtcatttcaaacatatttttagttcaaagcttttgcaaaagaccaaccattcaaatgttgcagccttacaaagttcatcaaaaatcttgatttgaccatatttggccaaaacttgcatatgatgggttgaacaatttgagccaaaattctttgtgaataatggcatgaattagtatctctaaccaatctaaggctttccaaatgtcaaacttcataaaaatcttatntggatgtgatttgacactttggttgagaattattgacttgaatggcctacaaaactctctttgacatttctcttgatagaaaaatctttnttgag

SEQ ID NO: 37785 - DNA, 446 bp, Oryza sativa
  unsure (1)..(446): unsure at all n locations
agcttcaacagctggtcttgtctctacttgattgttctgtccctgcaagtctgactatgcaccagcggcattgaaggaaataaaaaacctgaaaattgattagccagatcaaagatcaatggggaaactctcactagctggctagaacgatgttcgttcttacccacagccgcaaggggcgcttgaagggcactaagatccgctggcaaggaactgtgaggagatgagattctctntgccttatttataaagttcttatatagagtttggggcatgcatatagttagggcatatccttttttatgtgtttgttatctcgctgcgcgccttttcgatgataagatcattttttatctgacttggttgagtaatgcatgagatcaacctgcggccttgtgaaagaaaagttggtagactgcttctttttcagtatttgtattggattg

SEQ ID NO: 37786 - DNA, 122 bp, Oryza sativa
aactcagctgtcttcgagtgattgcactcagcactactagctttgttttttaaagagctgttcctcgtcatggtgctaccaatctcgttacgcactaaactatttacggtgaggacggatag

SEQ ID NO: 37787 - DNA, 393 bp, Oryza sativa
  unsure (1)..(393): unsure at all n locations
agctntcttgtgagttcgccctcgagtattctgtctttatcagcattgatgacggaagcttctgttatgtcttgcacttggcaccgagcttgcaagaagcgacgtatgttttcccttgttgattatcctggcctttggcaaatgccgagaaggtcatgctgaattttcggctcctcataagtgcctcgaaagttaaggacaaagacatcgcgcaattgctcccatgagtaaatgctgctagtatgcaaaataaagtaccaagacctggcaatgccatcgagcgcgaggtgaattaccttcgccttcgtattttcgtcaccatgggtagcttcgattgcggatttgtagatggaaaggaactccttttagtccgtttctcccgaataccttaat

SEQ ID NO: 37788 - DNA, 458 bp, Oryza sativa
  unsure (1)..(458): unsure at all n locations
agcttgctaatggctngcacagggtatattattttacttgatcactatgggcatcagtatgtactttatgtgaattccttcttcctgataagattttcaacaatatcataccaaagctataaacatcaacttgtggtgtaataacaactccactaatccactctggagcaagatatcctactgtgcctctgaatgtagtcaaaactcggctaaaatttcttcctacaaatgctgccatcccaaagtctgcaattttaggagcaaacgatacatccagaagtatgttttctggcttaatatcacaatgtatgatgcattcgttgcagctatgatgcaagtaggacaatcctctagcaactcctatggctaggttatacctggtggtccaattcaaaatagtaaccttgctctgaaatagatgggcatcaagagaaccatttaccatgtgttcatacaca

SEQ ID NO: 37789 - DNA, 294 bp, Oryza sativa
  unsure (1)..(294): unsure at all n locations
acacatgaaactaagcttcttatagctgctntgctatgtgaatcttcaatgatgtaactttctttaggttacactcatcatattttacaaagcagtcggtatatcactcggatcatgttattcanggattcacaccgcatatgctacatattaatatcaggtcgcttggttgactataattattaaaaccactcggttggttggattatatattccttgactatatgcttggtttgttcaattaaccacatattctggggctacacctattatgtgcatctagtcttgcacctg

SEQ ID NO: 37790 - DNA, 423 bp, Oryza sativa
  unsure (1)..(423): unsure at all n locations
tgattttcaaaccatgtaagattaacgaaaattaatgagccaaaattaagataaagaacttagtacaagttcctgaatgagtcaaaatagtagactataaatgggtctacaanaattaagccagactccaaaggaaatttcgaacaattctgatgaggtggacaactacatgaaaaataaaggtgggaagtttatcaattagtgctttatattgatcatattctattagtgagcaatgtatattgctgtaagaaaaaaaattgtcatcaaattttgggctaaaggagtactangttagtattatctaagccatatattgacatanattaaagaaataatttaatataatgcagttaaactcaatcagttaaaactaaatagaaagatagtcagttatgattcagctgacataagcttgatatt

SEQ ID NO: 37791 - DNA, 331 bp, Oryza sativa
tccggacagtgatcaaactcttttttgcctattaataatattagttcctccgcctgagctgagataacaaagtgaaaataggtttgcctggtctcaccgtcgctgggtgtggggttatccgttgttccctgctgctgctgttgtggtgattccttgtcacgtatcaggtgcatttcggctgttctagctgcaacgtagtaatgtaatattccttattatttaaggattgcgatggtcatattgtaccgtggtaccacactatgtctgagactggtctgaattcagttcttagaacggtccacctttttctacatccctctgcagtccgtgt

SEQ ID NO: 37792 - DNA, 443 bp, Oryza sativa
  unsure (1)..(443): unsure at all n locations
acagtgacatnttcactctttcttattatatagagagagagagagagagagatgttttttgaaatgctattgcacctgttgattgatcaagtgcctcctcccaattctctggcaaagacgatgatggaggagcttgatgttgcatggtgttcaaaggagcactcaggcgatcccattgggtcgttccagtgctttgattataaaaataagaagcaccacttgttggatcttttgcttcaacctaaaaccaaataagttatcccttataacataagatacaacacttgtagccactgttactatcaaaatacagtcagcaccaataaaaaaagagctgttaaaggataaaacatataatagcccgtccaggtatacacagcaaacaaaaagtaataaactaatgtctagaattacaagttagagaactagttgagtgcccatgc

SEQ ID NO: 37793 - DNA, 482 bp, Oryza sativa
  unsure (1)..(482): unsure at all n locations
gcttaagagggccaacagacttgtgatgcanaaggcatctgacgtgtctaattgtccttatcataagcttnacaattatcaacaagaactgtttatgaccaaccctgtgagcactgtggtgatcaacagagtgataggtattgaaccacctgtgttcaaaagaatttacatttgccttgatggatgctagatatggtatatggctgagtgcaggaaagatatagggcttgatggttgctttttcaagggatctacaaatggagagctattgtgtgctatatggagggatgccaataatcagattgacccactagcttgggcagtggtctataaagagaacaatgaataatgggattggttctgtgactcgctgtgcatagatcttaatgttggtgatggaagtggatgggtctttatatctgacgagcagaagtaatgctcatgatccacttgttcgctttatgttctcgcatttctgtcat

SEQ ID NO: 37794 - DNA, 417 bp, Oryza sativa
  unsure (1)..(417): unsure at all n locations
cttaactntttttcatcctcaactgtatcatcaaacgtggcactgatgtggatatgtttctttgacctcatggatttggtttattgacctcatggtcatattctaatgagaaaaagttcgtctgataatatgtcagccagggattaaaacaaaattgaaggacagtctgatgatactgaaggtgcggacagggccccacaacttagtctaatgattacgatcagacttcattatataactttattatacataaaactatctttattcaaatctcaattaatttcagcatatttgaaacaatactttttaaaagtagtgcagagtgaaactatatacgctntatgttnntaaatttaagtanattcatactcaagggtgagaatttgtaaaccttaaaacataatatctgggggtggt

SEQ ID NO: 37795 - DNA, 479 bp, Oryza sativa
  unsure (1)..(479): unsure at all n locations
tactcagcttaacatgaggccttctgtctatgtntcatttactgaactgttacttcttatattacccaacaagatgatacaacaacattntacacagctgccttagtagcccacaatgccttctgctgctgctggtcctctgttctgccaatatttgagagcatagttaacgggagagacgacaaaggctcccaggacgatgtaggtgattattgtagttgcgccaatttgagtggggctcttcttctgcttgctttgtgccagcagtgcctttggcttgaccttggccatggtgcacttctgataatgccaataaaaaagactataatcagaatagagaattcttaccagagtacatagaaagaataccatgattntcgctgaacatcataaacacaaaagaaagaatttgattcatttgtaatcaacttgcataagatatattaacaactgatnttctaagacacatcaggttatac

SEQ ID NO: 37796 - DNA, 438 bp, Oryza sativa
  unsure (1)..(438): unsure at all n locations
agcttgtctcatgtatgatgccttggctggtgctatctattatttccctttcaactacagggattcagaaattacaaattactatatttattactctggtnggaatgtgacacatgctaggtctttcctttgttgcaaacaaacacacagtcccacacaaagaaatcgaacaaggtctatagcaaatgtattgaatttgcatggatttgctattgctgggtatgatcatacatcctactgtggacaacttgctgacgctggtaatttttatgctgcttcgacgagtatcacatctgttctttatttgaaggatgatatctccattgctacttctggggctgcagacaagtatgtcattccccattcatttcattcttataattcaaaaggcatgatgtgttgtctgtggtattacatctgaatacgaacatgatcact

SEQ ID NO: 37797 - DNA, 293 bp, Oryza sativa
aaatattgtggaccctttatacacgaaattgcgtacaagacacctaagttaaggccgcaagcgctgacgggtaccgtcgttgcttctgagaagtggtgggatgacaacacgaaggtacaaaaacttcaatattacgttgtgcacttttattcttgctctttcccatgcatctgactgctgccatcgtttttccagggccatcctaaattgagaaagctgaagaacgggatgcccgactatctcgatgaactggaccgcatgttcatgggggtgacagtcgacggattgacttc

SEQ ID NO: 37798 - DNA, 363 bp, Oryza sativa
  unsure (1)..(363): unsure at all n locations
aataataatacgtactatgacctacctacatttacatcggttgatgatcgaacaaagagtgtgcttgcaagagcctttttctcattgggtgcttgcatcaatgcttttgtgcattgtcgacctgttctatgcatagatggaacttatatgacaggtaaataccgaggtcagatattgacagcaattgggtgtgatgggaacaaccaggctctacctatggctcttgcattagtagagagtgagaacactgaaagctggtactggttcctagagagagtgcacattgcagtggtgcgtatgaggcccaacgtttgccttatacatgatcgtcatgcgggtatgttgcgggctatngactacttg

SEQ ID NO: 37799 - DNA, 258 bp, Oryza sativa
gatgaacctctgggtctacaatgagatggtacattaccggtgcccaggttcgatcatacttatgcctaagaccttatgtgacggctcgactcttaatcggacgagcgtgcatacatggtctatggacctaggcatgccaaactcattctagtccttcaagccgggatggcccacgctcatttgagctgtctccttgatcatatgtcgtctacaccctactgtgccacgtgcaggacggtacttccggcattattcctt

SEQ ID NO: 37800 - DNA, 415 bp, Oryza sativa
  unsure (1)..(415): unsure at all n locations
tcacattcaggtntagagaaatatcacatataaaaaggcaacattcagatagtgctcatctagtttcagcagggggaacaatttggtgtaattatttagtatgcaacattctaacagttcacatatatatttatcaagtggtcaacttaaggatctcttactactgctgaatgttcatatatgtcaatccaacggacaaaaaacaactaaatgcattccacttatcataggcaagaatttgcatctttcaggttggatgcacaaacatacacattcaacagtgcaagctcattcgccaacatgtggttcttcacctgcaacctaccacactcccaagtcttcttgaagatttctttcctgaattaccaataatgcaattcactaatccatgatcagagaanaagtcanggacatc

SEQ ID NO: 37801 - DNA, 479 bp, Oryza sativa
  unsure (1)..(479): unsure at all n locations
tctttagtagaatgatttccttaaccgaatatagtaggaatctgtctattggcgactntataactcccatcggctgattccgagatgctgcagccgataatgattctaagccgatgatgtttntgccgattaccaaatttcactgttaacagtcttgaaagctaaatatttcctagatggaagcattctgcagtgtgcgccgcgggacgggatatcatatacttggcgcagtatcttgaaaggagtcgatctcatcaaggaaggtctagtgtggcgagtangaaccggtgaaaatgttaatatttggaatgatccatggatgcccgttggatntacacgccggccgatcactcccagaggcaactcaatcctaacaaaggttgttgaactgatcgatccaggcacgggatggtgggatgagcaattagtcaatgatcttgtttggccggaggatgctgctacgattcttgccacgcatg

SEQ ID NO: 37802 - DNA, 405 bp, Oryza sativa
  unsure (1)..(405): unsure at all n locations
tgttctcatcctactaaaagtatcatgtccacatctagaccattggagctcttgcatatggatntgtttggcccaacaacctataagagcattggtggtaatagtcattgtcttgtgattgttgatgaatattctcgctatacttgggtgttctttttgcatgacaagtctattgttgccgagcttttcanaaagtttgcaaaaagggtccaaaatgaatttaattgcactattgtgaaaattataagtgacaatggttccgagtttaagaataccaatatcgaggactattgtgatgatcttggtatcaaacacgaacttttcgctacctactcaccccaacaaaatggtgtaatggagaggaanaatcgtacattgattgagatggcatggactatgcttgat

SEQ ID NO: 37803 - DNA, 418 bp, Oryza sativa
  unsure (1)..(418): unsure at all n locations
agcttcagaaagtagtatccaatctcttctttttattgtagaagtcagaagatcacaccaggccaaaaatctacttataaggattgtaataccttttgtggatgatccagcttctgatggctcgggagtatcagaccctggaataaccttccacaactgaatggcttgggtaattgcatcacgcactggtttgacctgtgacagaagtcagaaaaataagtgtagcatatgcaagagaatattacagcatgaatgtttagtatgctgaccttgtcaaatttagaacgttcaagggagcgaaggcaggaagttctaaaggaggcaaccagatatccagaactgagagcaatactagatagagctattgaagctgctttccttgtagtccaatcactactcttcanggcatccataatac

SEQ ID NO: 37804 - DNA, 161 bp, Oryza sativa
catcacaattttttttttctttatcccacccaaacaatgcgagggtataaaaggcagagacccacaatccataatcaaactctcactcttatactactaaaatgatacaacagtatcctacaactcaattaatttgaaaatactaaataactgattatttt

SEQ ID NO: 37805 - DNA, 424 bp, Oryza sativa
  unsure (1)..(424): unsure at all n locations
agcttgtgtgaggcanatcttccttcaatgatgttgtgagaggcggatccatcgctaccaagctcaggagtgtcggatccgtcattaccaatctcaggagtggtggatccaccgtcgatgggctcaggatctatgcggtgacggcggttgaggagacgcgtgcctggggcttgatagcctgccgcaaaggggcagttagcgatggtggatgaggcatgcgcctcggcctcatcctctgttgcanggttgggagaggtggatttggacctctgcaacgacgataggcgttgcgacaacgatgacttctgtgatttgggattgtggattttagggggggttttttttttaagaatgtggatntgggtttctaaggtagattttggagatgggggcatgaatttgtatatttttttgtgcattcttt

SEQ ID NO: 37806 - DNA, 465 bp, Oryza sativa
  unsure (1)..(465): unsure at all n locations
tagatntagaagacaacctcttggtgggagatataccagcttctcttggccagctntctaagctccagttgttgtaagtatatctgcatttcatcattctcttcttttggtgcatacaatcaaaatgattcatcatttttcatgctttctgtcctttntgtcacctgaccaggatacttagtgataataatttcaatggatcaattcctgacagtctagcaaaaatctcaagcttgactgacatgtaagagtatacatcttggctaagtatgatctcttttttaaaatttctgtttctgctaacactagttcatcttccatttgttgacaaacaactttttttttatggcagccggctggcgtcaataatctgtctggcagatacctggtccgtattccaagtncacgttcaagtatgtcagatctcttaaaacagttaatcaattttttaaaacctgatgactg

SEQ ID NO: 37807 - DNA, 123 bp, Oryza sativa
tcgcggaatgaatgaatgaaaataggatttgtcctgttccccccatgctttggggtggtggtattcatggtccctgtgtgtgtgttgagtttcctgccggtcgttgtggcatctggctgctga

SEQ ID NO: 37808 - DNA, 360 bp, Oryza sativa
  unsure (1)..(360): unsure at all n locations
tgacatatgggacatcatcctgcaagattagtgccacttcatattcgagattagcagtctttatgataaatgaaagcatccacaaccaaacttctaatcatgctagaattgaagaatgtaaggtggttgtgattctcgtacaacgatgtggtactaaatggacaagactctaacgattctttatgtgagcaggattcctgaggaattttgagagtgaaactttcatgctcattagtggagttttcatccgccagagttgatgtctcaaacttgtccatggcttgcangttcttcttctcaagagatgcatcgtgcaagaacaaggttgtttcttgacaaatgtcaagaacaatattttta

SEQ ID NO: 37809 - DNA, 441 bp, Oryza sativa
agcttcaaccttcttagtctcagtgtttatattatctagagcatacctggagagataggtgaattgctgcatatagtctgccacacacattcctttgcttcaaattaagaaattccattcgcttttgtgccattatcccgattggaatgtgtgctttatggaactgctaaacaaattccgccatgtaatggtattcatagttgctcctccaagtagatgcactatcagtgagctgatgagatgcatacaactccttctcacgatcattgcattgcaccgtgttcaacttcctctcaacatcacagatctagtcatcagccttcaaaggttcggttgcttcagcaaacactggtggcttggtcttcaggaaatctgaccatttattacctagtgcagatccatttgatgatgatgcttctagagtacgattactcatcaact

SEQ ID NO: 37810 - DNA, 402 bp, Oryza sativa
  unsure (1)..(402): unsure at all n locations
acgagttgctcatgctccgaagtgagctctatattatcattgtgtacatcaacacctgtacaaacgacgtttcaaatacttggatgcagagagattagaatcaacttcatcttgtgcttccaagcggcgtaatgtgtcccatcaaattgaggagcatgcccggaaggcacggagacaaagttgtgagagggaatggtaaagttgctgtaatcaaaaggtatagtaactcccttggttgatggagttcccttgctgctcgctccatcttcatttccattntccccattcttttccnctaagttcgacattgtggatcactcaaagcggtgaagcttgaatcaagagcaccttgctctgataccattaaacgcgctgatgaagcctagaggggggggggtgaat

SEQ ID NO: 37811 - DNA, 465 bp, Oryza sativa
cagcttcatcttctgaatccaggtgggtaaattattattttcttatccattggcatctgacatatggaaatcaaatgcaagccatgcctcaacttactgaccgatcaaagctccctaacataattgaccccatgatcaagaacacaatggatctgaagcacttgtaccaagtaaactccctcttaatttctatctttatcctcacaaatcttttcaactaaattcaatatgtgtgattcgctacttcacaagttgctgcggaggctgtgctctgtgtgcagccaaaaccaagttacaggccactaatcacagatgtactccactctctgattcccctagtccccatggagcttggagggacactgaggatttccccggaatcaccttgcgcaactcgaaagcagtctccctgttgagaaagacaggacatgcctgatccgaatgcggtgattcagtgagttcata

SEQ ID NO: 37812 - DNA, 423 bp, Oryza sativa
  unsure (1)..(423): unsure at all n locations
aaagaatggaacatcttctgcgtgtgggtattgtccgggctatgcagattcacagatgtaattagattctgtagagggatgcttggaaatggtaatatgctaatatctgactgtcaacatagctataccaatgcttgattttatgttgattgatattgacagttttaatacgatgctggataagatatacaagttgaataatagcataacaaaatttcccatttagtaagtacaagaaacataatcagtaatcatttatgttttctattattaataggggatggtactggtcaaacattttttctccatcgtcactatttttcctttctgatcactttcactttgtgaatgatccgtanatggaagtgcctttaaaacacatgaattacctacacatgtagcatagccattctgttgtaatat

SEQ ID NO: 37813 - DNA, 436 bp, Oryza sativa
  unsure (1)..(436): unsure at all n locations
atctatgcatgcatctgttatatactcttatgtacacaacaccttcatatntcacaggagcacatgtatcaatatagagtagtcactggtatcgcgcaaaatgctagacaacagaccaatagcgacatacacactgctccctgcatcgtaaaatataagacgaccttgttttcagacgaatcaacgacacgttgaattatgagttaatattaagctcacaacatatgtttttagtatcatataagcaacatctttataacaaaatgtgatatgtgttgtaggacatgctgattntacggatntagctctaaaatattatataaatgaatatttacgagaacacagattgaaagtgtgactctctattcatagacattgcatccaatctttatcatatttcgtctattgaggacagaggcgatatctatgatatgat

SEQ ID NO: 37814 - DNA, 467 bp, Oryza sativa
ggatcttaagcactgagctgcagctatataaaggcttcacagggggtttattcgttctttgagcaaaaagataaagatcggatagattcgaaccgcaattgcaaaggtaatcactactatgccagcccaaatcatgatcttcaccaacttggatttggttctctcgcgaaaatcgcgagttgcagagatgagaaccatgaaaagcaagatcccgaataagaaaacagaaaccgaggaaaccacaagagtgaagactagtagagtctcgtcttttgtcattctttgctcctttttcactcaatgattcattcgaatttcccgaccaaaaattctatatgtctattcatagggcctcgttgctaagtgctacaagatctagtgcactggaactcgtggttatggacccgaatcctttaatatggaacattgtcttttctcagtaaaaacccccagtatatgaaagaatg

SEQ ID NO: 37815 - DNA, 472 bp, Oryza sativa
  unsure (1)..(472): unsure at all n locations
actcagctttctactagagccttgagccatatataccttattctattatggatcttctacggttntatttctttcattcttgctcgagccggatgatgaaaaattctcatgtccggatcctttgtgggctggatcttaaagaattcacctatcccaataacaaagaaacctgacttaaacgatcctgtattaagagcaaaattagctaaagggatgggacataattattacggngaacccgcgtggcccaacgatcttttatatatttttccagtagtaattctaggtactattgcatgtaatgtacgtttagcggatctcgagccgtcaatgattggtgaaccggcggatccgtttgcactcctctggaaatatacccgagtggacttctttccgtgttcaaaactccgacagtcctaatagtattggcgtctcttatggttctggccgacggctattgcagacctttcta

SEQ ID NO: 37816 - DNA, 425 bp, Oryza sativa
agcttgcacgtactcctgtaatatattgtcacttgcggacagctagttgcagtggtaaggagtacttacttatgttttaaaccataatttaatctcccattacaggagggattaacttaacatggcagggcatatgctaacgtgagtgacagctgatcgaggaagatcatatgatggtaggccatgtgatgccggtcggtcgcacacaatgattcgacagttacgttagtcgcccactgatgaatgatccatgatgatcatcgatgactattaattaattaaagctggccttaattcgatcgatctcatctgagctggctaaataagaccggtcgtatcatgggtcgatggaccgcgagtatatataacacactgcacgcacgtaccaacataattaagccctttaattcatatagtaggtaggt

SEQ ID NO: 37817 - DNA, 390 bp, Oryza sativa
  unsure (1)..(390): unsure at all n locations
cagcgtgatacacacaatccttagctctgtttagcattgcttgagcactacncaagcatgacacggattatcatggaaactggcacagttcaccaatatttacacaaagaaacattaaacatcttacactgcatatgcacagtggaagatggaagaaatatgagacgtgggtgacttaccgcggtgaataccaacaacatagagaaacgatcttgtgttactacaatgagattatatgacacttcatagacccaccacctatacataccagttcttaaaaactaaggcttgaaaattactcacatagttgaatattcaccatatatgatcgctaactatcaaatggttattgatttgtacatcacatacaacattatcttatccggtgta

SEQ ID NO: 37818 - DNA, 405 bp, Oryza sativa
  unsure (1)..(405): unsure at all n locations
agtacaatacctagcaccgttacacgggctaaaactcttatactacctctgtcccaagataactataattatatgttgtttagcatatattaaagtgtgagaagaaagactatggcgcccctcattaaataatcgttatgtgagagtggaaagatggttgacggtatattagagataaatttaaatgagatgattgatggggcaactagtactctagaattacaattattttgggacataggttgaatcatataaatacaattattttgggacggaggtagtacaaaatacttactaccataatgcttaaacattcatntactcatagatatggtgtggatttctctgcgatattttttcttattaagattgtttgtttatttcatattattaaccggtcaattt

SEQ ID NO: 37819 - DNA, 101 bp, Oryza sativa
accattttacgggcggatctcgcagcttccttggcgtcggcggtggaagaatggatcttaaaaagcgaaccccttaagcgggccagaagaacaccgggaag

SEQ ID NO: 37820 - DNA, 427 bp, Oryza sativa
  unsure (1)..(427): unsure at all n locations
gtaaaacatggtgtttgaagggattagttaaacacataaatatgtcatagaatcatagtaaggctttgttcggaacccagggttcccaaccccactccatcgtattccactcgcacgcttttcaaactgctaaatggtacgttntttataaaaaaaaaagtttctatacaaaaattgcttaaaaaatcatagtgatcaaacttttttaaaaaaattagctaatacctaattaatcacgcgctaatggaccgctctgttttccgtgtgtactgcgcgtgttgggaagagatacttccgaacacagcctanatcaatcaagcttgtttatgattttttttgaaaaaattatagtcacaggatgttntgagcattaattgatttgtcttgaacttaaggaaggaaaaaagaaatggtagtacgttgtagt

SEQ ID NO: 37821 - DNA, 474 bp, Oryza sativa
  unsure (1)..(474): unsure at all n locations
gatcttaagcaccgagctgcacttatccaccaatatcctattgatttatttaatagatatgcaatttaaaaaaacaccttactttactttcgtttacatgttttctaaaaaaaaggtctaccttattttcaaatgataaagaagattataaataattgcttatagatattacttaaatatgatataatgtaaaactaataggtcagaaattaacatattgagcaattaatgctgatgaaaataattcatggacaaatcgtggcagatgttctccgtttaatattntgctcttgtacttatctcanacttaacgtacaacacatgcccgcgcaaatgcgcgggcttccttcctagtttattcgagatggtcttcgttatcagcatttagttgtcgtatgcagtccatattttgaaatatgaatatctgactgcttaagtaactaactatntattttcttttacttgttatgcatg

SEQ ID NO: 37822 - DNA, 473 bp, Oryza sativa
  unsure (1)..(473): unsure at all n locations
tctagtcgacaagttccacacatcgctgcgaaagctttatatattcttatgcttcatcacacatggggcatgggtggatgactaccccttcctgttctcagtgtggacactaaatgttaccagttgtcctcatgttagcactgatcaggaaagcagcttcagcatcgaacctctggattggttgaactgcctgttcaatgtgtgcagtcttcacctggagaacacattgcttctgaaactgagcatgtntaacatgcttcgctctcttgagatcctagagatcgacgggagtcgctcattcttcgatgattcggtagacgaatttgagtggctggagaagctgcacgctctgagcattagaaactgcaatgaattgagaatgctccagcgaatatctctactctgcctgtgttggaagaactctgcatagaaaactgtccagctttggaggcgtgcctgcaagtgtctgctac

SEQ ID NO: 37823 - DNA, 454 bp, Oryza sativa
  unsure (1)..(454): unsure at all n locations
agcttccccaaattacctacactgagatatcacttattattttcagtatttntcagctagaagtaaaagatgcagatcgtctatgttttctttcatcatactagctgttgtacgatggtctgaatgtcatttgttcttctgtcggtgctactgttgaagtatggatgctaccgaatctatattatgttccatgatattttttcctaaattatgtgcatgttgtaaatgtctagtacaattcaggagcagagaaactggctgaacagttaaattaaaaaatatataaatctgctggtatttattattctacccaacaggtagaattacgcaattataattacagtcactgcaaaaaactaaactggccaatctataattacgcacagcatagccgtgcgaccgttctagttagtacccggtacttctgaatatttcagtgctgtgtttatactct

SEQ ID NO: 37824 - DNA, 445 bp, Oryza sativa
  unsure (1)..(445): unsure at all n locations
agcttgatcagatggatgatccatactactggttgaatgtgtgacaccaccaccatcagagcaactntcagacctatccaacttcttatcaagcacctgtaccactatctaaaaaaagagaaaagtaagatatggtttatccacttgtacagtcaagatagattatactctcttttttcaagtgttccagtaaacatctctaaaaaaccttaataagagactgagtggtacttgaaaatccaaggtaaaacaagattcttctacgcatgtgtgagaaagagggagagagatagagtacatattaccccaatgttttctttttccacatcatgctcaggaataaaagcatcggaactacttgctttctctggctaaaagaacaggatgatggtccatatgtcagtaaaagatgcagcantgttcctcgagtatccacatcatgaca

SEQ ID NO: 37825 - DNA, 426 bp, Oryza sativa
  unsure (1)..(426): unsure at all n locations
ggtacaccgaacacacactctatcgggtttagttttatgcgggcggagcggagactctcaaaagtgtgcgctagatctgagagtaacatttcctggttgcgcgtctttacaaccaagtcatcgacataagcctcaacattacgtcctaattggttacccaaagaaattcgagtagtacgttgaaaagtaggacctgcattctttaacccgaagggcattgtcgtataacaataggttcctatgggggtaatgaacgcagttttttcctcatcctccctagccatgcgaatctaatggtaaccagagtatgcatctagaaaacacaaaaggtcgcacaccgcagtggagtcgacaatctgatctatgcgaggcanggggtaagggatcttangacatgccttgtaaggtcggtgtagtcgatgcaca

SEQ ID NO: 37826 - DNA, 250 bp, Oryza sativa
ctatttacttgtgcaaaggcggtatgaccatgaaatgatttgagctgcaacagatgcacacatagacatgactatatgtataccaaattgccagaacgcgcgatagaatgagaaaggaagaatattctcaaaggagcaagctgttggaccttttgtattcacaaacactgcaattcaaatcaaccatgagaagcaacagtggaatgattttaaataagccacaatgccaacttaatcgtctttatatcat

SEQ ID NO: 37827 - DNA, 331 bp, Oryza sativa
tgagcatagcggcggatgagaagctcatgctacgatatgagctccatatcatcacggggtacatgaacacctgtacatacaactttgcaaatacatggatgcacagacactatattcaacctcatcttgtgcttccaagcggcgtaatgtgtaccatcacattgaggagcatgccccgaaggcactgtgacaaagttgcgagaaggaatgtgcagtttgccgcaatcaaacggtatagtaactcccttggtcgatggagttcccttgctgctcgctccatcttcattatcattttgcccattcttattccctaatgaccacattgtggatc

SEQ ID NO: 37828 - DNA, 379 bp, Oryza sativa
cagcttatacagagcaaaacgcgtcttctatgtgttttataatttatcttttagagcagcctagtatcgcctccaatctcttccaattgatctcagtatccattgaacgcatgatggagggtataagaaccttgtctgaaatacatatgaataatgagagtagaagtattttaatttgcatgattacgtcaatggttatgcaagggattacaccaagtaagaacactcagcattgaatatttgtaaaatacatataaacattgaatcgaaaacattcagttgccatggatatgaaacagatgcatcaatctgagagttggctaaaagtaatgactagtaatacaaacagagcattatacttatgctattttagcggttg

SEQ ID NO: 37829 - DNA, 472 bp, Oryza sativa
  unsure (1)..(472): unsure at all n locations
gtagtcgcctanatgagccacctttattaacaatatactttntatatacatacgtatgtaatagttagtggcacgggtacattgcaaaagctatatganaataatcaatgtcaatgtcaagttgcaatgtgaagggtttctgtcttatgtctcaacttatggcttttaacagggataaagatgctgctagtgctaagcactttgttggtgatggtggaactcataatggaatcaatgagaacaacacgatcactgatgaacatgggcttctaagcattcacatgcccccatattatgactctattataaagggtgttgctactgttatggtcttctattcaagcttgaatggtgtcaaaatgcatgccaatcatgatctggttactggctacctgacatccaaattgcatcttagagttagatcaatataaacaacgtatctatattcctcttatgtgataacaactgactc

SEQ ID NO: 37830 - DNA, 74 bp, Oryza sativa
gcgcactctcgtcgtgcgcttatcacatgtcacactgtacacgatatgtcgatatgcgtcatcgtcacgtacac

SEQ ID NO: 37831 - DNA, 463 bp, Oryza sativa
  unsure (1)..(463): unsure at all n locations
agcttatcctaaatcttgttgaagaccttgtgaaaactatataaactctaaataaaaaaaacctagggcctgtttggatgccagggctgcggctacgccgtagccggcacgaacagtgccgcactcactgtgcgcagctgcagctctcgcagtcagcctgtcgaacagcccctatataatctaaaagatcaaaccaaccaaaaattattcacaacccccccccctctgaaagttggggttttttttaaactatttgccatcctctttaagtgtgcattcccaaatgtcattctcttcatcatattngattatttgccatccagacccactagggttgtttcggttttgccattcttaggctcttcgctgtcagcaagacaggttggaaatgaccttgatgcactctaatctccttttctctatcaccttttcccccgagctcaactatagccatctcatgctc

SEQ ID NO: 37832 - DNA, 398 bp, Oryza sativa
  unsure (1)..(398): unsure at all n locations
agcttgtggcccaccanagatatggttgagctctttgctagaatcttgaaaaccagtcggaccatcgtctttatcatctttcttctttgaggtgctctgatctccatctatagccttcttcgcttgcttggcgtatttctccgcacactgctcgtagatgaatcaatctttgggaggcttgtgtctaaatttgccgactaagagttcatgacagacacccttggtgaaagcggctatgatgacgtcatcggtgatgtcagaaatctagttgcgatgctcaaaanaacgtcgaatgtagtcccgaagggattcaccgggcttctggatcacattgtataggtcgaagtgggtgccgggacgttcacaagtgccttgaaaattggtgatgaagtgctcat

SEQ ID NO: 37833 - DNA, 508 bp, Oryza sativa
atcctctacaccgacctgcggcatgcaagcttagcaagggtgagttctggatgtacgaaatcttattctcgttgtacgtgatatccgctaaaggagttgctgaggaccccgaaacagagaccgccgtcaccgattggaagcaacctaagacagtcactcagattcgcagatacttaggttcggcaagatactaccggaggttcatctagaacttctccaaaatcgctcgacccatgacacagttgttgaataaagaatagaagtttgtgtggagcccgcaatgcgagaatgcgttccacactcttaaggaaaagctggtttcctcgccagtgttaatcttgcctgatactctccaggacttcatcgggtattgtgatgctctcctcccatgatcggggtgcgtgctcatgcacgaccgtcatgtggtaaactatgcttcacgcccggtactagctcatgagggcacataccctcacatgacttgatgttagcacggcggtcatgcttt

SEQ ID NO: 37834 - DNA, 270 bp, Oryza sativa
  unsure (1)..(270): unsure at all n locations
ctctactgaagagaggaaggatngtgcaagaatgagtacaaccttctttctctttangccacaccggagatgcataatgtatgcgtgggagtacaacgggatcatcatatatgggttaagaaatgcagttaacagtatcgtacagccactcaactgctcaaagccacttcataacgacgactcttgatcatcgcagtattatttatcactgcctggaaccttcacaaacctgtcttaactcatggcctacgatgattcataccaaactgg

SEQ ID NO: 37835 - DNA, 425 bp, Oryza sativa
agcttgtaccctcgagccaccctctatggagtccatgcctcgtagccttgttcaccacctccaccaggaacgtgcccattcatgaagcgagacccagctcgcaccataacagcgccgtgccaatggacttcatatcctttggtgcttcgctgctgaagaactcaagcagcccgacgaacgatgtaacgtctgacacgccaagcatgaagaactgaggtgcaagccagaagagggacatctgcacagctgcctccttgctctttctctcgacgactgctgcaacggtcgatgcaactatcatggaggcatagtctaagccaacacgttgcaagtgagtgataccgcatgcatatcctgtgcgcttgcgcatgaacggaacaaggaagcgatcatagactgcgagcattatcatctggaatgtgatg

SEQ ID NO: 37836 - DNA, 266 bp, Oryza sativa
  unsure (1)..(266): unsure at all n locations
tgggcggactctaatgtagacattgtgacaactcccatctactctatttgaggccgcttccatgtncgctacttggcatgttcaatgaaaatctcctgaacctgtttcagattacaatctaacattgtctatttcccatcatcgagatcgattgccaactatccaaactcgttacactgcacagtgagttttaacatcccttctcttcacagcggctgtgttactgtttatattcttgcaactgtactcactatgcacacgacttt

SEQ ID NO: 37837 - DNA, 421 bp, Oryza sativa
  unsure (1)..(421): unsure at all n locations
catgcaagctntttgccaaatattatggaaactntcttataaaatatagtttatgttcaaaactttacctttcacataaccattccttcgaattaagaanatttatctcaatacatcaaaaaaaaatcttgttgactttaaactttcaagtcaaatctctaaaagtttctacaagaattttcaatagaagtgcaatttgcaaaagccgatgaaagagggtatatatctcacctgcggctagatctgaagaagaaaaatgtgcacaacgatgaccttgtgtcgtatctgtggggatgaggcgcgggttggtggctgaggatgaggaggaagaaagggataccaatgtctcgccaaggaagaggaagcagtgaacctcaagctcactattgtctcgccaaagtggtggaagaggagggaggag

SEQ ID NO: 37838 - DNA, 440 bp, Oryza sativa
  unsure (1)..(440): unsure at all n locations
gtgcagatgtggcctctaatgatcatcttatctgttcgtctattgggtgcccctgcagtaatcatgcgctcgtatataaaaggtcctgtactgtggagaaaattagtgaatagtgcggacaagtctcccaggaatcttgcatctttgcattcgcagctgccagcaatggtgtctacctcgttgcactgacacaattagctgtcataaatggcggagtttctatcggtgagaaggatcgctcatgctcccatggctgtacatcaagggtggaggagcaaacgaacangcacgttgacgtctgaactagaatcatgtttgaagtcttgggccgcattatgtcctgttgatatttttaaagataccgctcacatctgaatatcaacgagtcctatataaacaatttagatcccttgtaactggagacaaattataagctaata

SEQ ID NO: 37839 - DNA, 456 bp, Oryza sativa
  unsure (1)..(456): unsure at all n locations
agcttggtgcatctgaagttaatgagagctacatattgcccatcactttggacaaattgacgcccgaacagaagaaggatcttgaggcaatgatgcagcaaacataaagccaattcttgaactcattcatggagactcgccaaggaacaattgttctgaggtataagatgaagntagttgctgatgttcctgggacaagctctttcaaggatggagaagtacagcaagttccagatggtactactcaatcaggtgataaaggtgctgcagatggttctcaaggggttcagggtgatggttctcaaggagtttaaagtgatggttctcagggatttcaaggtgagaatcttaaccaagatggcaacacggcacagctatagtttaactactttcaagatcggattgactatgccgtgcaacatgctntgaataatcaatctggggtggtagtcaaca

SEQ ID NO: 37840 - DNA, 114 bp, Oryza sativa
cttttcttaactaattgggtctggtcttaggggcagggttgactgcccactctcacaagaggaatgcctctcggtataatgcctagtctattctttatggtacaaacgcctata

SEQ ID NO: 37841 - DNA, 457 bp, Oryza sativa
  unsure (1)..(457): unsure at all n locations
atcctcagagtcacctgcggctgcagctttcagacttctttgtggctgatgttggtttatccatcgtcccgacatgttcatggtcaattagtactcagtgattgaaatctcggttcaaaatttttgaaatattgaaaccccggcaagcaactatcgtgctcataaatttcagattcttccaaactttttggaatttggtaaaaaaaaaacaaattcagtcaatatttattattttttaaaataaaaagtgtgcaaaagagtaccaaaaataccaaaaaaaccgcaataaattggtgataccgaaaatttggtccaaaccataagtgcanacctataggaagccaatatctacatgtgaaatttcgcagcaccaaccgacataaagtttagcgtgctttgttgagttatataatagtaatagtattgcacatcagttgcgccatagctgtgctataac

SEQ ID NO: 37842 - DNA, 418 bp, Oryza sativa
  unsure (1)..(418): unsure at all n locations
cacattgatgttataaccaacgcggttctatttcttttacatgatangntcagccttgataaatgatacaatttttattatttcaaaatgctatagcccatatggcacaagtagccaactaatattatatcttggcgcctatcggattgcttctatgatctgacagcatagatcgtgtgtgtgggttatatgttagtgtagactacttgacataaccaattgatgttttcaaggaaatgagacgaatacttaaaccaagtggattggccataatgaggtaatacatatagtaacttcattatcatgattaatgtgattactagtatcccttgtntcttttatataatccctcttactagatgtatatatgaaacaatcttgaactttgtttaacttacggtgtagatttcaaaacgct

SEQ ID NO: 37843 - DNA, 458 bp, Oryza sativa
  unsure (1)..(458): unsure at all n locations
gacttctgcttgngcaatccttatgctcgtacttctgcgcgcctgccttggagtcatgaggactcgccagagtgatagaagaggaggtcgatatgctctctcaagctcccatcacgatgcttcgttttctagtccctatttaacctcactgacaggtgggtccaggggcatagccatgattntaagtcgatggtgtcattcgtcggctctaattgacgatcatggtttaagtgaaacagaaatacatatgataaatacaaaaaattcctcgcaatagtggatgctcaacctatgtttcaccaaatcactcaagaaaacctatgatgcacgaacttttattagacattggcatagtcttgttaattaaccgttgtgtttggcaaaaactataaatatagtttgtagcagtattttgttgatgctgcaagttgccatgtcacatagctaatgtctatgaa

SEQ ID NO: 37844 - DNA, 492 bp, Oryza sativa
  unsure (1)..(492): unsure at all n locations
tactcaagcttggcccagngagccacacatcggtcggttcatcaacactctgttctttgtatatggaggtattgcacgcacgagctgacactaagtagcctgaatcaacgataactccaactgtggagttgacgttattaatgatatttgtggcccatatcaaagacctggcctgttctaacaatgccaaattgccatcttctgatgctgtctactgtgataagtttggatcagacactgtagtcgtccgagttgcaatccagacgggtgtggtctgagagatcttgttgtatcaaatatcatgcgaccatatgttatgcgctttatcatctgtattgttgaccacctgcgattactatagtctttcacaatgctctatacaatacttctatagctaaagactatatgtgttctataataaatatcacgatcgtcttgcttcctttcacaaatgctactgtgatgattattgtagcatggaaatatctattc

SEQ ID NO: 37845 - DNA, 468 bp, Oryza sativa
agctttaaccgtgtgggtcgaaccgattctatacttaagaatcatgttctttctttttactgctatattaagcacttagctcgagatactgtgcattttgatattaagttggtatgggctcaacctgatgttcctgcttctagctctgaggtgttcatgatgtaagggagctatgtctatgattatgtctttccaatatcagagattcgaagtaatttccttgctccactgtttacgctttgcaactgccagcatcatggtttttttgaattagcaataatcataggtactggttatactaacaattcatcattacacaatgaggaaagatgccacattgtgatgatgaactgccctctgccctactcttgttgattctgttgttcagagctgctggaagatgttcagctctgtgtgcaatacacagagtagtggagttgatagaagtgactcccttttccattccta

SEQ ID NO: 37846 - DNA, 470 bp, Oryza sativa
  unsure (1)..(470): unsure at all n locations
agcttgttcttagcctgcgaggaagaaacccttatccgctttccctgtaacgagaagcataatgaaaaaattcagttggtataaaagatcaagatagatcagttgtcagctataacagggaaccaggaaatattctgcacatgtgtgtccagggcagcaaagctatgttttccaaaactattggtaagagaacataagctaccaccactcccaatcatgaacaagtgcttcctgttaatggcataatccagtagttttaaccaaatattagaagttacaaaaccatgatattactagagatcatgtatagtagatatgtgtgcccctccctctttcttcctacatatccagggaaacagggagaacagctgatgtgtgagaatactgtgctatgtcanaatcaacagaaggtaactgcagatataagtgcaataagactgaaaaaaaaggaaagcttatggatgataata

SEQ ID NO: 37847 - DNA, 476 bp, Oryza sativa
  unsure (1)..(476): unsure at all n locations
ttccttcttgaaaaacctctgaatcctccatcagctaatgcagacagagaaaacattaatcattaacagtttttttntgggtacgggttcggnggtattccaggttctctcacaatggaaactggaaacatagtgtgcaccttgatggcccttttcttatttgctgcgccagacagtgtattcacaagagcatgaaccagctgctccttcatagatgcatcaccaagctcatatacaatactcatgcctcgngatgccagatcttgtgtaagatcattctgatcaccaagaaggtgggtaagggcttcctatataaggaatgaacttcaaaaggtaagcagaaacctagagcanactgttatacgctggaatgaacataatgatacaagatagaagacatttagaagagaaacatataatgacagataaagacanagtttgaatatgagaatagctcaacattaaatgacactctt

SEQ ID NO: 37848 - DNA, 461 bp, Oryza sativa
agcatatagttggttacgattatcttatatggtgttaccagctaagctaagggttgtcgagcaacccaacacatccttgtagaggtggatatacctatggacatatctgaagcgatcaaaattaccgaaaactatattgttagagcatgtgcaatagcttattttagttggttctaataataaacacgtgaaatacaagatgattgggaagaaagagagggtaaagagagataaaagcgagcgctagattaagcaccatctaagcatagcctctcatgtctgcatgcagtggtgcttaatccacagagcctacgatgacacactattggctgttacattacacaaattaaaagtagtactctcagacattacattgacgtacttttacatagagagaatcttagagaatgccattgacaacactgaagtatataagatacatcaaatatcgcgattacatg

SEQ ID NO: 37849 - DNA, 290 bp, Oryza sativa
  unsure (1)..(290): unsure at all n locations
tacctccctctgacggggtgtgcccaccttgtacaccacgtacgaactgcgaccgtgtgttcggtcgccggctcgccgctgatggtgtggacagctcagcgatatggcgccgtccgcccaccgcgctatcatctttgcccattgtatttgtgctggtgtgcaagcaacgctaatgctgagcttaagtacaaactaaatcattgtcattagcgactcacatacgaccacgcgatgatgatgatgacaataacgatgatntcaagaatacgtgatatacgcccttatagtta

SEQ ID NO: 37850 - DNA, 485 bp, Oryza sativa
gaccggacctctaagcgactgagctgcagctgccagaagaccggtttcattatgttgtattgccatgggctatagctgtgatgaatactccgttggttagcaacatctttgtctctgtaaatcatatttggatctttatgctttgaggtcccttcagccggtgcaaatcttcttcagcttcagtgggctggcgccccttctgcatctcaatgtggatgggttcagtggccttttaccctaagtccccacctcgtgctcttttctctcgctcttcatggcgtggcataacagcgcccagcggtgccgccgtgctgcgcgtgtggtggccttacgatggctcaaagcacaacatattgccataattgtgcaagccctcccgattttcccatacatggtgataaaactaaccttaatggttgtattttttggtcaaactgcaacattttatgttggatcgctgctgaattttgtttacaatgtctatg

SEQ ID NO: 37851 - DNA, 491 bp, Oryza sativa
  unsure (1)..(491): unsure at all n locations
ctggaatgggactntattgctgctgctcttcatagataatgtttccatccncatattattaatcttgtgttgtcctgcatcaattcctcttcttttgctattaatatcaatggtcaatcttatggtgcttataatgctaatagggttattagaaaaggctgccctctttccccctatctctttgttttggctgtgaatgaactttctaaacagttaaatgaggccttacacaaccagcacatcaaagggataaagttgagtgagtggtggcctgttattcattctcttatttatgcagatgaccttatcattacatgattagcatctgttgaagaagctagtcatatcaagaatatcattgatgaatattgtatgaaatcacggcaaacttctaattgggacaaatatagaattatcttcagtaagaacaccccttctcacattcaagatactatcaatcacattnntcttgtcctggtatcgattctaac

SEQ ID NO: 37852 - DNA, 450 bp, Oryza sativa
agctcggccatgacaaactgtcaagagatctgtatggtttaacttttcaagaactctccagcaattggtttagagcaatcactggaataagtaaaaagaattactaaattaactacattccacatatcaaactagtaccttcaaaattcccaaacagaaagggatactacctgaaatcctgaatggttcaagagattcagttactgtaatcattcatcagaattcagtcacatcatgcatatttctaccaagtttagcatcagcagtaatatatttctacttagcaatatgttggatggtgccagttatcagatgcttgcttttttagataatggctcacgagtaattgcttctactacctatgtaccgagtagttggtagtttctacctattgcggtgattactctacacagattgtttgatgcaaaagtactacctccgacataacac

SEQ ID NO: 37853 - DNA, 465 bp, Oryza sativa
  unsure (1)..(465): unsure at all n locations
gcttaagagtgactgacaacccattaagcctcttgcaagcaaaaacattcttctgttgctagttcggcctttccttagagatgtcaaatcatatgtagtaacaaaatactatggtagcaaacctgcttgagatgacacgcttgtgattgattaagcgtgacaggccatgatgcatgcacaacatgcctttgctaatccacctttggattcaaaagaattggttagtttctctagcttttatgtgcacttgtaaccaggattgatgccactgcaattcttttctctctttatttttagttattttttcccttggggtcagaattagtgatgggtgatgataccagcatctgantttagcatggacatctggtctcgatttggcacatcaatcactggcatatttacanaatctcttccctgacaaaagaagagcanatggcactttgatcagcatgcattacgcat

SEQ ID NO: 37854 - DNA, 401 bp, Oryza sativa
  unsure (1)..(401): unsure at all n locations
cttaagtcacctgangcancaagcttggagagaggacgaagataatgggattatattactttgacaacaagccaaagggttcattcatagggaggaagatcaaggagactctcaagaaggcttctgatcaagtctacgccgcgtttgagccactaagcgatgtagatggtgagagtagagatgaagataagggaaagaacatctccggtgtttgcttcatggcgcgtggcgaatcggattcagagtgtgaagacaatgaggtgagtgctcttgaagaagctattaatatnttgagtgtcaaaaatatgatgtgtgagaagatgtatagaaaacaagagtttattatcgaatctcttaattctgaatttgctagattaaaatatcttatttccaatgatgat

SEQ ID NO: 37855 - DNA, 463 bp, Oryza sativa
  unsure (1)..(463): unsure at all n locations
agcttagccctgctgtgtgccagatatagctcctataatacgtacgtattcacgcggggatgaggtgcaatgctttgcatattcctcgactggaatcaccttatctcaacttgcatagaatttgtgtatttgtgttgtgcagcacatatacagcactgtgtaaaattctgttatttcccccttcccaagagcagcatatttctgtttttttttagtgatgctctattgctctagcaaatttccgtacaatgcctgagttttggcactcaattttttttccattcttacaaatggaaaagatgtgtttgtatctagcatatactccgtaaggttattatatgaccgatgcaaaataagtagatgcaatatcactcaaaatttaacactggattaccgtcataagagagtntcgacagagtagtagagcaaactgatcatatcaaaatgtcacgtcaatctgata

SEQ ID NO: 37856 - DNA, 482 bp, Oryza sativa
acactatcatactcaagctgccgggggggcgcatccgctctatagctcgtatcttctcggggttggtctctatgcctcgggcagagaccaagaacccaagaagcttgcccgcatgcacgccaaacacacacttgtcggtgttcagctatatgcgggcggagcggagactgtcgaaagtttccgctagatccgagagtaaggtctcttggttgcgcgtcttcacaaccaagtcatcaatataggcctcaacattacgtcctatttggctacccacagaaattctagtagtacgttgaaaagtaggacctgcattctttaacccgaaaggcattgtcgtataacaataagatcctatggcggtaatgaatgcacgtttttcctcatactccctagccatgcgaatctaatgataaccagagtatgcatctataaaacacaaaaggtcgcaccccgcggtggagtcaacacactgatctatgcgt

SEQ ID NO: 37857 - DNA, 455 bp, Oryza sativa
  unsure (1)..(455): unsure at all n locations
agcttcatgacagttgaactggagctcaagtgtttcatttcttcacagttaagcaacaatgtagtactgtttgacatgcttaaactttntgatatagagagcttgtacttcctcctggcgtttagtaaaatgttaaccactgcatgagtcgcatgaaactatgtaattttctgcttcatactgcattcaattacagcatgctatactataaagaagagttcatggaaaaagcgcctttctttttaaaaaagaagaagaaggcatcatataagttgcattccatgccattcctgaatggcctcacaatggttgggacttgggagtccagaaagaaatacgtgctgngtatattgcttatacgttcatcttaacgctaaagtggttctctctacttggcagtaaacgcgtaaacctttaaccccacgacgaaccattgcaacacataacacaagctt

SEQ ID NO: 37858 - DNA, 375 bp, Oryza sativa
atataaacccgcaaggggagcgtggcttccattcgcccaagcctttcgagtcgtcttctccccttcttctcctcctcctcctcgattcggagctccacccgcagccatggctaagaactaccccgtcgtgagcgccgagtaccatgaggccgtcgagaaggccaggcagaagctgcgcgccctcatcgccgagaagagctgcgcccctctcatgctccgcctcgcgtaagccgtcgccctcgcactcgctcgcttctaggttatgtgtagaggcggatatccgtagactgatccggtttttgtggagacggatcgcgcatgtggcactcggcggtgacgttcgacgtgtcgtcgaagaccgtgggcccgttcggg

SEQ ID NO: 37859 - DNA, 344 bp, Oryza sativa
agcttgttacaaggactctatgatcggttagattatctagctgtctagccacatcgaggagctcggcatgatgtgcgtacatgccgctacttggtatgcctaacgatggctttgctaggagccaactggccaatggtcctagactctgaatcctagcggagagctagtcttcagcaccattcaagggcttgacgatgccaccatatacaatgacactcttctatacactgaataactcttctatgatggggtatcaattgcaagaaccaaattaacctcgcggagtctcaagatcatgtgggaaacataacagtcgacaagaaacatcccaatatgcatcaatt

SEQ ID NO: 37860 - DNA, 472 bp, Oryza sativa
  unsure (1)..(472): unsure at all n locations
gcttattgattgtacgtagtataacaatggtctatgatgcaatatatntccattaccttagattgagctaatatattagcatcattccaaattatagggcgtcatcttttgaaggataatcaaactcgataacgttaaaatgattgtaataattatttttatgttaagtattatatatgtatatcattagatttatatttttaagtatttntatatgatactgattttatattcgtttggaatataacgtgaaataaattaatgatatataccttctgatttgggatggtgggagccagtaattttgcgttttatttaccaaccaacccatcggtatacacaaagctgcatgggattcatttattacacagaattccacacgtgatatatatgattaccgcgcacagtgaaacccaacatatatacgtgaaacccaacgtacggagtgtctactaacgtacctgattcacct

SEQ ID NO: 37861 - DNA, 473 bp, Oryza sativa
  unsure (1)..(473): unsure at all n locations
tctgtatagctatttgctatatcattcatcatattntacatagttgttggtatatcacccggatcatgttatttggaggattcacaccgcatatgctatatattgatatcaagtcacttggttgattacgattatcaaaaccactcggttggttggattatttattccttgactatatgcttggtttgttcaattaaccacattgtcgggggctacacctattaggtgcatctagtcggtgcacctgactatattttccagccctccacagtcttctgacttggaaaaagtactctggagatcatggcgaagatgaatgaagcactcggctttggagtaatctagttcgagagaagaatatctctccgactgtgaaagcttacgggctactgtggagattatgggtactccatacccacacagcatggttatccgactagttatacgggataacttatatatatgaaatatgt

SEQ ID NO: 37862 - DNA, 413 bp, Oryza sativa
  unsure (1)..(413): unsure at all n locations
agcttncactcccatacgggcaagaagagctccttctctttttgccacagccctntcttcttttccttgtgcaagtcaactgtgccctggcacaccgcacagttcagctgtgacatcttgcacttgtaagatcacttgcttgcctttatgcttgagtttcaacattcctttactccattcaactgtgatttgagcaaaacttgacaaccagtcaatgcctaatataagatcataacgttgtacatgaagcacgctaacttctgtttcaaattcatgggtttgtaactcgaattgaaggctgcacatttggtactggtcaataacttaccgcgagacgagcatccctataccacgtgtatccacactccgctgtccttctctacttagntgtacagatcacttcacaaaatcgt

SEQ ID NO: 37863 - DNA, 456 bp, Oryza sativa
  unsure (1)..(456): unsure at all n locations
gacactatgatactaagcttcanacagcaccattggccgaagcatacctggaagctgatctgtatttgaatttatttgaacgattaatatcgcctttcatgctataatcggacgatttcgaccttttcggatgtctattgggataagggtttgatcgagagctatgagattctgttttttacctaacagaagagattcagtttacagaggagatgccangggcggtggctgttcaatgctaatgaggaacgcttgatttcttaaaaaaatgataagatccgactatcaaaccaaaggaaattgccaacaagagtagcttaatagcacctagttaccgacgcagatgagaagaactgagcaagccaataagagtactcaatctaagcgagctctcatatttgcngggtatatttaaacttgctttttttaacacactacacactactttctatatga

SEQ ID NO: 37864 - DNA, 426 bp, Oryza sativa
  unsure (1)..(426): unsure at all n locations
agcttgtctgcccaagtgttgaggtgttttcgattgtcttgctntaagcgatgaacccataatgggagactttctctgattcgatgcacgatgtatgcaacgcttgtttccgtgagcttgaagatcagctggttgcgtgctttccagagaccgtgcgaacaagcagcaaagcatgcaggccatcccggtttctggtgttctggcaaggtgtccaggattgattccacacaatcttgtatgttagagctgcgcacggctgtctcatataggttgagcttcttccagacttcccctgctaatttgcaacgaagaatgatgtgattngatgtttcaatagctgggcaggtcatacagtgtgggttggaatcccatattttaagaaccctgtttgcattggtgttgagcctgtctcggaacgcctaccac

SEQ ID NO: 37865 - DNA, 391 bp, Oryza sativa
  unsure (1)..(391): unsure at all n locations
gacactatgatactcagcttgtgctgactctgatgtagggctcgcacgccactngacacttattcttttgtaatacgaatcctagcctacatacatgccatatttctgattcatcgtcgctcatatgagaacgcgagacgcgtgcttagctctgaaacatagtttcacatgagtgagagtctagagcattagagaagtcgtccacctctatcattctgtcactctattgagatgtgtgacacatctcgctgccacctttgtgaggtgcaacgggaatgtactaggctggaattggctgtacccagcaatatctctgatgctctctactcgacgctccgggatatataatgtgtttgctatatgacttgaaaaggcaccgatgatgatggat

SEQ ID NO: 37866 - DNA, 398 bp, Oryza sativa
tcgaccccggaccttaagtcacctgcggcatgaagcttatatatttattgaagaagcttatctttcataattaactggataagggtcattgatagataaacatgcgaatgaaagttggtacttctgtgtttgtttcaaaacaaggtatacttgtgtttggaactgaattaaaatatacttgttacataaacatgtttagtataattcataggcacaactaattgtttttttaatcatcgccatgccaaaaggccatttgtacgatttatagagcctcaccccaatgcgttccaatccattaagacttgaagagagcatgctagactgatggcatgattaactgcatacaacttaactgaacattcatgttagctccattcatgtagacctgcccaccg

SEQ ID NO: 37867 - DNA, 450 bp, Oryza sativa
tctggaagtggagccagacaatgctggcaatgatcgaatacttactaatatatatgctgctgctgagatgtggcaagatgtattcaaagtgaggaagctcatgctggagaagacagtgaccaatgaaccagtgcagagctggataattcttgacaaggttattcacaccttccattcaagtgagcggttccatcccagtaagaaagacataaatgccaagatcaaagacatatttgtcgatatcaaagcagctggctcttgtccagacttgagttgagtgctgcatgatgctgatgatgacctaaaagaactcatgcttcttggacacagtgagaagctggcaataactttatggattgatgaacactcctccaggattgactatacgggttatgaagaatttcccatatgtgttgattgcaaactatgccaaatttgtttataagttat

SEQ ID NO: 37868 - DNA, 466 bp, Oryza sativa
  unsure (1)..(466): unsure at all n locations
agcttagctgggtccttgtcgcaaacattctcttcatgcgctccgcagatgggagataccacaccacctttgctgggcctnccctctttgacttacttccttcaccttcactctttgctcgtttgtatcttgatcccccacagatagggcagacatccaagtcagcgtattccttgtaatacaaaatgcagtcgttcggacatgcatgaattcttctgacctccaggcctaacggacataatacttgcttcgcttcatatgtcgtctgacggaaaattgttctctctggcaacagatcctttaacagctcaaggagttctgtaaaactctcgtccgaccagccattactagccttaagcttcatcagttccaacacgcatgacaactngcttgtgcttgacttgcatccatcatacaacagcatctggcaatcttccaccaacttactaaacttctcataatctct

SEQ ID NO: 37869 - DNA, 399 bp, Oryza sativa
agcaagcttcaatgacgccggagaagttcttgccactggacccaccgctaccaaatacaccaaactaacccagcagaagaacacgaaccgaatcatgcatcggcgtctagcggagggagggattacctgtacatgtagatatcgcggttgctggcgagcggcttccggcagaggaagcatgcctccaggaagtgcccgtacggcagcagcccacccgctccatctcctcctcctcctgcacgccagccacccgcgccccccaccaccagcacgttctccacgccggagctgaccagccgagtccacgccgcgcgcgacgcgccgccaccgtcgatggccagcgtgatctcccctcggctcccgctcccgctggcgctctcgctcccggactccatcgga

SEQ ID NO: 37870 - DNA, 461 bp, Oryza sativa
  unsure (1)..(461): unsure at all n locations
tcatggtcgtcatggctattcttgtcctggngccgcttggttacttgtttggtgtgtatattcgcggcagaaccaacaactttatactagcaggtatcgtcatcttaatctctgaacaataaatgaggatccagctgttgattgcactggaatcattacgagatattacaccattcattcattcattcaagaggatgtcctggatgacacctgctgaaacgttggcgggtgtctcgcagtctcttcacgcctgccgctagtctcgggatccatgaaccagcatcgctcttcttccaaattatgatcagccacctgctgacagggttcctgttcctttctagccaaatctaatctatatagtttcatgatatgacgaaatgtttatacaccacatgtctaactgccacagactaaatcgcgggaagttcataaggtccctttacacatcatggctgaatttg

SEQ ID NO: 37871 - DNA, 459 bp, Oryza sativa
  unsure (1)..(459): unsure at all n locations
agcttgtcatagntaggcagcacaatttgctgtgtacgctcgacgactgatctcggctctacctgctagctccatctctttcagccaagttcatcgatggagatacagatcgatcaactaattaatctctagaaggtaataattactaatcaacttggtcgattgttctgaacatctggattgttcagagactgaaagaggccggcagcatcagacattcagacctgcctgctgaatctggcgcatcacgcaggatatcgcattttgccgcttcaggcctggggaaattttttcttgtttgattgtcctatcggatatatagacacacatttaanatattaaatatagtctaataatagaataaattacaaatttcgtcacgaaactacgagacgaattattaagcttaattattcttcattatcaaatatttactgtcacaccacattgtcaaatcat

SEQ ID NO: 37872 - DNA, 497 bp, Oryza sativa
ctcagagtcacctgaggcatcaagcttctgggttcttggtctctgcccgaggcattgatgtttatcccgagaagatacgagctatagagcggatgcgcccccccagcaagcttatggatgtgcagtgcatcaccggctgcatggccgccctaagtcgattcatatcgaggctgggagagaaggcactacccctatttaagctcctcaaacgctccgggccgtttacctggacggaggaggctgagcgggccttcactcaattgaaggcgtacctcagttctcccctggtcctggtcgccccggagccagatgagccgttgctactctacctagcggcaaccccgcaagtggtcatcgcggcgttggtcgtggagcgcgacgaggacaaccctcactccgcacatccccaccctgtgtcgactcgacccgggagagagcaggaggagaggctcccaatccgaacggcggccaagcccccgacggtcgaagctgccctc

SEQ ID NO: 37873 - DNA, 328 bp, Oryza sativa
cttcgtcgggcttatgtgccgcgtccaatcttttattgtttccatgtactcgcaaacagtaatcgtgtcaacatctccggacacaccgaagtatggctggtacaccacgcatgtcaccttgaaattggacatggagaagctgccgttgcggtcgaagtctaggaggaacacgccgacgcataggtggtacttcatcaacttcatgcgagggatcaccttgtgccgtcgtgtgaccggctcgcatacgacgaggtcggtgaagcatcggcgcatccaactggattctatttcttgcgaggaggaggaggctgcactgttattgacgatc

SEQ ID NO: 37874 - DNA, 470 bp, Oryza sativa
  unsure (1)..(470): unsure at all n locations
acctgangcatgcaagcttcagccaacaagttaaaacaagccttagctatttattcttatctcaaacattttcgaaatttcacaagcttcagccaacaaatcaaaagaagtaatgatgggttggttggctagttacatgattcagccaacaagtcaaaagtgagagcacttaaatgctttcttgggaagggctaattcacttcaaaaagttgcaaaagggttggctgttggtggaggcagcaataaatgcatttgggggtggctgatgtggtgatgagggggctgctggttgtggtggacgaaatttggcggtgttggaggtggatattgtggtgaatatggcggtgatggtggcagcgngatgaatataaatgaagtgatggtggaagtgtttgtggtgactaaatcgtgagcagaactcgaaactctaaacgactatactactataaccagcaacttaaccagtcgat

SEQ ID NO: 37875 - DNA, 437 bp, Oryza sativa
  unsure (1)..(437): unsure at all n locations
gacttatgaaaaactaatttacttacaaacaagaaacctttgcgtggtgcttatccccacacatgacaaacatgagtgtgttcgaaggaatcataatcttaattgcatcactcgagctacttgcttaacatctctgatccttatctccatctggacaaatattaattatttccagctaattaattgatctgctattttttttctaattaagcacagagatgaagcctccacgatatctgcgttttgctcttggattttgcagcgtggttaagccgacgagaggagtacaatctaagcgattactccctccatcctataatataaaggattttgagtttttacttgtattggttgaccattcctcttattaaacaaaattaannaatattatttatttntgttacttactttattatccaaaatactctaaatacaac

SEQ ID NO: 37876 - DNA, 259 bp, Oryza sativa
caagcacagagccgcatgcctgcctgcatccctagcatattctgtcgtcctcgtgacgcgtgcagttaagaaaaagaatatactacatggacgaaccgagggtgcttaaataaggatcgtataagtttgatgtacggtgttgtatgagactcttgattcttctatagaaagtacattcgaactctgtcggtctaacgcgatatgaatttatcagaactaactcaatcattattagtaaatatgtattacagcaccacat

SEQ ID NO: 37877 - DNA, 476 bp, Oryza sativa
  unsure (1)..(476): unsure at all n locations
aagtcacctgacgcatgcaagcttcgctatccgtttgtaaatctcacctgggctgttttaacgctctgccttccgaattacaaccagaactttctgcaggcgtggaaaccgaatattctctggcatntattcttgcggtgctgattatctttacagtcgcctgctctatatggtgcgcatttatcatcgcagtgaatggcttaatctcgcgttgcattagcaagctctgacagatccgttaacgctcctacccaactgtcgtgcagtggaacaagcgcctgagacataggatggcaaaaagttttgctgcctgcgcatagataatcttgacgttatgagtcgtcattaccgcttaatgatgcgcgttcactgtattcgctcaatttgccgtacgctgctgccgttgatgcangaaaacgaaaagttggatcaatcgccggtaatgaactgctgttaatgctgagcggcccggaaac

SEQ ID NO: 37878 - DNA, 436 bp, Oryza sativa
  unsure (1)..(436): unsure at all n locations
tctaagtcacctgccgcatcaagcttcctatccgttttaaatctcacttgagtctgttcaacgctctgccttctgaattacaaccagaacttcttgcaaggggtggaaaccgaatattcgctggcatttattcttgcggtgctgatttcctttaacgtttgcctgctctatatggtgcgcatttatcatcgcagcgaatggcttaatcgccgctggcattngcaagcgctgacagatccgttaacgctcctacccaactttcgtgcgttggaacaaacgccggaacaagaagcgggcaagagattttgctgcctgcgcattgataatcttgagnttatgagtcgccattacggcttaatgatgcgcgttcacttgatccgctcaatttgccgacgctgctgtcggtgatgcacgaaaacgaaaagttgtatcaatt

SEQ ID NO: 37879 - DNA, 416 bp, Oryza sativa
  unsure (1)..(416): unsure at all n locations
agcttgtggtgtggttcaactgtggagtatttttacattatgctgacaagtgtccgaagccccgacgcgtgaaggttgtccctgcccagagcaactctaccgcaccagtatcaaaggcccgtgtcaatcatgttgctgctgcagaagctcaagatgctctagatgtgattttgggtacgttccctgttaactcagttcctgcaacagtacttttcgattctggtgctacacattcattcttatctatgagttttgcgggaaatcatgggatggaagtagaggatcttatacgtcctttgatggttagtaccccaagtaatcaagcactttctttgcaacgtagccnctctgtcagaatagaaataaaggagtaccatttctggccaacttatcctgtagaatcaaagactagatgt

SEQ ID NO: 37880 - DNA, 379 bp, Oryza sativa
  unsure (1)..(379): unsure at all n locations
tcacagagcgaggttgagtccgcgccgaataggcgcgaagattatattccacataggcacttggaaccaaagaacatgctgtccgaactcagngaattggtagcgatgtgccctggaagcatggactctctcagtacagctcccaatacatgaaatgaaaagtctccaatgaagagagggatgctcgtttgaacgccgaacataaggttgaggtcattcaagaactagaagctatcatgaatgcaagggtggaagaaagggttaacaaggtcctcgccgacatgaatataccctgtcacaacacctgctgtgcaaccaacttactcgtgcacaacacgacgcgagtccgtcacagcatatgagtggttgtgcatacaca

SEQ ID NO: 37881 - DNA, 458 bp, Oryza sativa
agcttcttcttgaacacccacttgcacctcacatgtttacacccataagggcgctctgtcacctcccaagtcccgttagcgataatggaatccatttcactaccgacagcctccttctagtagtctgcatcaggagatgcatatgcttctgaaattgacttaggagtgtcatccacgaggtacacagtgaaatcatcactaatggacttaaccgtcctttatctcttacttcttcaaggagcttcaccgacattctcctcaagtgtatgttcaatttggtctggtggtgtgattgaactgggaattatttcagagggttggctcgaaccactatgtgtattcttcattgggaaaaaggctctcaaagaaggtagcatcacgagacttcataattgtaccaacatgcctgtcaagtacctcgcatttaactattaaaatttataggcatgctatgatga

SEQ ID NO: 37882 - DNA, 126 bp, Oryza sativa
tgtcgtctgagcctgcgacgcgccgatcgatgtcgacggcggacttttatgattctccgtactcaactaagcaatggtgcagatgagatacgtcgggtgcctgcttgttcttgccagtttaatctg

SEQ ID NO: 37883 - DNA, 354 bp, Oryza sativa
  unsure (1)..(354): unsure at all n locations
agctagtttatggacatgaggctgtnttgccattggaagttagaatcggctcaaggagaacggagttgcaaaataatttaacagccgatgagtattataaccttatggccgatgagagagaagatctggttcaatcacgggtgccagcccttgcaaaggttaccaaggataaagagcgagttgctcggcattacaataagaaagtggtgcccaaagatttttctgaaggtgaacttgtatggaagttgattntgccgattgggactcgggatagcaaatttggcaagtggtcgccgaaatgggaaggaccgttccaaatctataaagttgtgtctaagggagcttacatgttgc

SEQ ID NO: 37884 - DNA, 392 bp, Oryza sativa
  unsure (1)..(392): unsure at all n locations
cgtgacttgatcgaagttcgtggttggaacgatatgtccattgtattatattctaaggcccacttcgcaatccgtctgtatgcttcgcgattatgaagtatatccccgagtggaaacgatgtgaccaccgtgaccgagtgactntgaaagtagtgagataatttcctgatggtaattaagacaccatataataacttttgaacctgaggataccttgtcttggagtcggctaaaacctcgctgacaaaataaattggtcgttggactttntgaatatggcctttctctttacgctcgacaaccaggaccgtactcacaacctgggaggtcgccgacacatataacagtagcggctctggtggatgtggngaggccaaaactggtggagtggt

SEQ ID NO: 37885 - DNA, 444 bp, Oryza sativa
acgcttttccagagatatggagtgtttctagtttatactgtgcatgatttaatgcatgatgttgcacaagaagtctccattaacaaatgccttattattgatgggtcagatcttcgaacagttccgtcgtccatttgtcaccttagcatctggactgagccggtgtacaatgagcatagcatagaacggaatgataatctttaagagaagttagatgcagtccaagataatgtcttgggaagcttggagtgtttaattcttgcaggtgtatatgatgagaactactcttgctaagttgtgaagactcttgagcgagtacgttatgtccggatgctccagttaacagcaatgccattcaattctgacattctactatccagtataaagaagttaatccatcttcgctacttataactgaagtgtacgtcggataagcccaaatct

SEQ ID NO: 37886 - DNA, 466 bp, Oryza sativa
  unsure (1)..(466): unsure at all n locations
cggtctgtagtagttgaaatcctctacgtttgatgccttatcacatcttcaaaatcgnntttggagatttaggtctgtgtatatcttcgtccaattggcatatatatgcctagcacacatcatgtgctcatcccttggcaagaaggtattgaatgcatggagcacgccctacataagaaaatntattggccatattaatngaaagtacttacaagtcactaaaacatgaattgactagtgaatattatattaccttttgttgaccatagatganaactcatccttctccatcattgccaacgtttagatccttgatcagcaaatccaaaaaccattcccatgagcttgtngtctctttctcaacaatagcccatgctatgggatacatatgattatttgcatcccttcttaatgcacagagcatctcttcattacatgctcctntgaatagcacctattaagacaa

SEQ ID NO: 37887 - DNA, 57 bp, Oryza sativa
  unsure (1)..(57): unsure at all n locations
atcctctgagtcacctgangctgcagcctggggcctaagagtttctttctactttat

SEQ ID NO: 37888 - DNA, 388 bp, Oryza sativa
ttgcgtatggccggtgagacgtgcacatgatggtgattggagaccatgaaaggggaggagctcccagcgggtagaattgctcggggtcttcttgctgggtggagtgagttggactgataagatatcgccagtccttatatggggatgagatcggtcaaggtgcctctcccttctcccaatcccgcttcagtgacccacctctccactgccttttccccttattccgctccactgcgggccttgacttccttcccccccccctgtcggggtccctctcgccccccccaccgcctcattccgccaatgcccccccttccccttaccctgtttctttccttatctcttctctctcgtcttcccctcattctcccccccacccctatctttc

SEQ ID NO: 37889 - DNA, 107 bp, Oryza sativa
tactcaagctcgtccagagtcgtagtcctaggatgtgtcctatctaatattaggaaattatattatgtgacggaggcagtacttcctgcgctacatatcatatggat

SEQ ID NO: 37890 - DNA, 441 bp, Oryza sativa
  unsure (1)..(441): unsure at all n locations
agtcacctgangcatgcaagctntaaatagtcaatatttttagttagtgattatattcaccatctggntactaattngtcatttctggtttcttcgtcatgggcaaattttatggtctgtntggtttgatgtccactaccaaaactttggcgggtagagttgaaaaggtacaagataaagccaataatgtcctataagaaacaatttgtgtgcaacctcaattttttttataaagtataaattttagtagggtagcaaaccaagctatagccccctttatttgttccctctcataatatgctaattctcctcctctgcgctctttacatgcaggcaaggttaatcgaggaatcaagattgccgcangtaatgctgatttcaattaaacatttaccaagataggctagtatggtaatccctccgtttcaaaatgtttgacac

SEQ ID NO: 37891 - DNA, 450 bp, Oryza sativa
taccgacagcctaatagcactggtgtgtgatgatctcgtaatattattaacgtattgttgtgataattaaagacactaaagataaatatttaatcgagttacataggaaggaataccaatcaagagaaactaacaaaaattaaatgtcatattggagggggaagaagataagtgtagtatacacatatcacttgtagtactagttattaaacagagctagagaattccctcaaaaaataaacagaggaagagaagaatctacagctaatatatattgcttccttggtacagttcctagtgtccacaaatgaggaaattaattaatcaatcgatgcgaacttatgcatctacaagctacgttaattctaagtagagatagatcaaagcggtgaggtgcatgactcattgttgacacacatcaaatcgccacgaacaacatgaacaagccta

SEQ ID NO: 37892 - DNA, 462 bp, Oryza sativa
  unsure (1)..(462): unsure at all n locations
ttaagcgacgcggctgcagctttcttatcgaanaaaatacctttgcttatctactctaagatagtacgtagnatcatgtattattccgtcgatggaactttgacgagatcgagtcttaattagtttatgggattcatttattattctggctgttctgaagactgatgagggagttgctgtaaataagaatatttcaacgcaatgttagtaactggtagaagttgtttttcttttgaactagttcatacgtccatcagcaagctgcaagctggatagcatgcgtgcttctattgacattatgctagctcaaatcttctagttaanatcatcatactgaanaacaaatcaagacaatgaagaaattgtgaagtagcttgtagcccatttcactcatttcaagttcaacttcagtggcgtcatgtctgaaactcttagaagtgatgcctgaatgcagaatgatgc

SEQ ID NO: 37893 - DNA, 525 bp, Oryza sativa
  unsure (1)..(525): unsure at all n locations
nngagtttaaaaatccctctccanaaccagcanaagagatatatactttgttcaactatcttctntcgatatatacatgtggaatgctactctcaaaattagctatatttcttttagctgcatcagcanacattgtcctcacattaactggtgcttcatccacaataaaggcaacacccaaacatcatctctgccaccagggtgtccagtagagtggttaccttctctggaaattaatcatcttgatggatatggcgtaaattgaaaagaagaaaaccgaaaacgcaacgaggacggcaaccgtggcgcctgtcataccctgttcaaatcccaggtttngctggaggaattcatgcaccgtcccgtcgaaaccagtgcccactatcctcgtgtccacgtcacctaattgtgatgtaatgacgcctcgcanggtccatgccactgggcagatataataaaaccagatccaccatcctggaattctctgtaggatggtcaataaaaaataatcagaatagattaaaa

SEQ ID NO: 37894 - DNA, 465 bp, Oryza sativa
  unsure (1)..(465): unsure at all n locations
gcttaatcttggctggagattttcggaaggagttctcatggtgatttggcgtttaagaatcttttggcaagaatctttgtaggcacaagatctacatggtgcttttggctgggtccggagtatatattgtggaaggaatgaattgggatgattatgccctatgtatggtgtttggggaatggtatcatgcctttctgtggatgatgatggtttattatgtggaaaagattgcaataagttattgatatttatgtggaaagcaaccatgctcgaagcangatctgttgagatcaaaatcttatctgagaataccttggtatacttatcttgtgccataaattggtcaaccttcatgggaagtttatcttggccatcacggggatttctctcgcgataatctatgtacatctcctcatgatgacggatatcttgtattttagccctttnttctgttatcttttgatc

SEQ ID NO: 37895 - DNA, 490 bp, Oryza sativa
  unsure (1)..(490): unsure at all n locations
cgaccttgatactaagctatcttccagctccggaggacttgaagctcgtgatgcacccaatcatgttggcaacccattggcgactgctccatgattctctagcaacgtatnttgaaatcagggctaccttgcaccatgcagaagccaggtatatgtacacctgtaaaccctcaaccagtgcgactccgattatcagcacagcagtgatgagggcgtcgaagttgttgttgtgatcatcgatgagcttgagttcatcattgggaacgtggacacgctggaacagcatgtatgcaagccagccgcagaaggtgatcatggcacaagacaggacagtgtcgtcatggcgatacatgtagataacgaagtactttgtgtagaagtagtcatgcacgaaggctaactcaacctcgatgacccttgaggctcgttcgacgtacttttggccatggagcaggccacggaagaagaagtcgtgggtcttgtctagctc

SEQ ID NO: 37896 - DNA, 397 bp, Oryza sativa
  unsure (1)..(397): unsure at all n locations
agctntacatatnggtgatgcctggagaacaactttggatgcctgcataccggttctgaacctcattgatatacggagatcaatcccttatggtattcaacaagtgcgagaacttcttggcatctcatgtngctttgatcaagttgtgcaggtttgtcaccttaccctttttgctcgtaagtttgggaggtatttcatttcaaatctgctgtttgcaggtcacgctgcagatctttccaatctttttaatggattatttgaccacttgcatttacaagaacttactaaggaaaatttatatatatatgaacttagtatttcatgatagctctatggctacctctgcttcacaaactactgtgttttcgtggaaatagctgtttgacaatggtgatct

SEQ ID NO: 37897 - DNA, 296 bp, Oryza sativa
acctgctggatccgactgaagagaagcctacctggaggatactgaatgtttctggccgccctccgcgatttgcctggggccacagtacctgtgttgtgggaggtacaaaggcgatagttcttggaggacaaactggagaggagtggacactaactgaactgcatgagctttctctggtaagctctttagtctgaggatggaagtcaagttcccagcatgcttccagcttcattgaagtgatgatgtataccgagagaagctattgttttcatttgaccgaagcctggacattttca

SEQ ID NO: 37898 - DNA, 476 bp, Oryza sativa
  unsure (1)..(476): unsure at all n locations
agcttaattnttaaattacttttagaattttattatcctagtttattcgttagcaatgtctttttaatcatgaataacacaggtatagaagtattatccacaaattatatgttgttaggagaatttctagatttaaggttcattagacgtttgggctttctctcaagaactaatcaggggaaaattcgtgtctcaaatatgaccatttggctaacaccattaaaaacaaacaaactagtgaagtaggtatctcaaaggtgcgcatccatccaacaaagaggacaagaaaaaggcattcaaactctcatgctnntttggtcaatttaaacaagaagaggaattcaggaatctggatacttcagagaacgctaaggtcatcttaagataacatttaacaatttggcaagggacgcacattggtaggattaaattatgaagcctaagcagggtacagcggtcttggtctgaagctagtg

SEQ ID NO: 37899 - DNA, 326 bp, Oryza sativa
gctgagacttcgatcatatagaccactggatttgggcttttattctttacatgatgaacagacaagtcagtgaactaaccgattcaaccactgtcgaccgtcactcatcaaagaatagaatgatggcacttgcggcagccgatggccatggcgcgtgccgtcgagcttcacacggcgccgcacgggtggctcgcgcaacgcctggcttcagtagtaactgcgcatggaggcgtgcggcgcggtcaggcaaggccgcggagctcgatgccacaagctatcgacgcatcagccgttcggccatcgtatgcgcaggcaagatgctggct

SEQ ID NO: 37900 - DNA, 451 bp, Oryza sativa
  unsure (1)..(451): unsure at all n locations
gatccttagagtcacctgcggcatcaagctanggctgatggacaatcgaaaattattttcaaggcttgtggccaaaggttatacccacaaagaaggcgaggactttnttgacacttattcaccggttgttcgcttgactacgattcgagtactactcactctggcagcctctcatggtctactcgtccatcagatggatgttaagacagctttcctcaatggagggttggaggaggagatctatatggatcaaccagatgggtatgtactataaggtcaagagggaatggtgtgcaagctgttgaagtccttgtatggtctcaaacaagcgcctaagcaatggcatgagaagttcacaatacacttacatctgctggctttgttgtgaatgaagctgacacatgtgtgtactatcgctatggtgcgggagagggagtgatcttgcgtctat

SEQ ID NO: 37901 - DNA, 491 bp, Oryza sativa
gctggattgtgctctgcggtatattatgatattccttgacattgccttcattgagagacctcctcactctcatcatggccccgaataggcataccttgcttaagtaagagtctagtaacatcaattgagccatttaatcgagtgtaataagcaattttctcagcattactttggctgatcaaagaaacatcaatgtgctgctcttttttcaataaagcatgacaatccctcattgcttggttatgaacactatcaatatcaccaacgttagctaaccacttctcactggtcactgcctaccagttattctagtgcaagcagtaagcagcgatgcagcatgtggacaaccagacagaaaatgattgaataaatcaaaatgatgtgatgcttctactctgacagcacttcagaatattgaatgaacataatggcctattcaataatatgaatgatggactaatgcaggaaaataccttgaagttgcaattgtg

SEQ ID NO: 37902 - DNA, 422 bp, Oryza sativa
  unsure (1)..(422): unsure at all n locations
agcttattaaaaaaaatgcatgcatgtgtaggggagagatggcaagagtagtatgtgtgctatcttatgtgagagaaaggttttggtattgaaaaagagacaatatgcatgttggctcataatctgaaaaaagagttgtacggtgcgtccatcgtccaagtgtccgatagtttgcgctggatcggtcgtccgatcgtaagcattttcgataactcgatgatggctccagagcggaggcagtgaagtaaagcttgaatagacgacgggatacataacaacttattttgaaaactttttgttcatacatttcaaccttttattntggataggcgacatgatgcatatgcaaaaaaaaaattattcatggataggtccacttctttttgacttaataatgtatatgatctccatccgaaaactat

SEQ ID NO: 37903 - DNA, 405 bp, Oryza sativa
  unsure (1)..(405): unsure at all n locations
gcgacactatgatactaagctttgacctgcactggattaagcagatctccaaggcctcatgtttttcttctacacatgcataaagccttgttcttttagtagtgttgccatcaaaccttgaatattcatcttctcatcatgctaccctaagcgctgatcctagcgaataatattacttgaatacagatattggctttcattttgcgaattgtaattgtatatcctaactcatccggtacgataatcattgttagtgcgacatgtctttatatgttttccatagcaatggtgcatcagcttcacgttcaccagtaaaggaataccaacaccactcaattntcgatactaccgtacattaatctctatgacattagntaagcagacagtacatttattttgttgagc

SEQ ID NO: 37904 - DNA, 450 bp, Oryza sativa
  unsure (1)..(450): unsure at all n locations
agcttacttgtcttatagattatgcgctttatctgtctttggnttatcgcttgttgttttgtctggttcaataatacagcttatccgagtgagttttatggacctactgggccagaagcttctcaagctcaagcatttacttttctagttagagatcagcgtcttggagctaatgtgggatctgcccaaggacccacaagtttaggtaaatatctaatgcgttccccaacgggagagggttattttggaggggaaactactgcgttttgggaccttcgtgctccatggttagaacctctaaggggccccaacggtttggacttgagtatgttgaaaaaagacatacaaccttggcaagaacgacgttcggcagaatatatgacccatgctcctttaggctctttaaattctgtgggtggcgtagctaccgagatcaatgcagttaatatg

SEQ ID NO: 37905 - DNA, 277 bp, Oryza sativa
  unsure (1)..(277): unsure at all n locations
cacagatgagacccaaccatacatgtcctccacatatatcttctatatcatgcacactaacaatccaaccctctcccccaaaaggggagtttagtaaataaccaaatataacaccggtgctaatggtcaaataggtaatatttcttacatctcctcgcacacgagcccaggtatcatatataccggcagaataaagagctctgagtactataagaagagcacctatacctaacaaaaatatgtgaatacccaagaatgtacacattntatttctatc

SEQ ID NO: 37906 - DNA, 439 bp, Oryza sativa
  unsure (1)..(439): unsure at all n locations
agcttgcccgccggcacgccgtatacacacttatcggngttcagctntacacgtgtggacctaagactatcgaaagtctcggccaggtgttgcagcaacgtgtcctggcggcgcgttnttaccactaggtcatcgacatacgcctctacattgcgccctatctgattacttaaagtaattcgagtcatgcgctgaaaggtagggccggcattttttaacccaaaaggcatagttgtataacaaaaggtgcctacaggagtaatgaagggcagtttttcttcatcttccctagccatgcgaatctgatggtacccagagtatgcatctaggaaacacanaaggtcgcaccccgcagtggagtcgactatctgatctatacgtggtagagggaagggatctttanggcataccttatngaggtctgtgtagtcgatgcaca

SEQ ID NO: 37907 - DNA, 322 bp, Oryza sativa
tccgctgcgtagaatggtattctttgacaggaactatccacctctgttataatttcattagttgagaatattaaatatgtatttatatgtactctattatcaatctgctattgtgtgcctcagctgatacctgaacgagggcttaacacacatgctatcattctgaatattagatagaaaattctggcgtgcaaattgcctctcagcctcccgattgaggggatcactctccgacagcttgtgcgccatgtacacggacgcttgtgcttatcttgagagcagacagtttagtccgtcccaatctcctgcaatctccatcatg

SEQ ID NO: 37908 - DNA, 462 bp, Oryza sativa
  unsure (1)..(462): unsure at all n locations
agctngcatgcgactntnttttttgngtctaaatataatataaatagttatancctttgagacttacaactagaatgacattcaatattgtgggcacatggaggcgtaggtattaattactctgttgtattttttctatgttttggcaagttcttactgtaggtattcctgcctattatcggatacttttgaatttgattgtccttttatcctatatgtgcaggcatgatcttcctttcatttaaatccccttatttcttgctgcagcttgtatgatcagattttccgtccaagcaaggtgacagtaaatgctgattttcatttattcaaggctggtgtagaaccaaagtgggaagacccagagtgtgcanatggnggcaaatggactgtgccatgtaacaagaagaccacccttgagaacatgtggcttgaaacggtacatttcctctaaaatcattgctt

SEQ ID NO: 37909 - DNA, 513 bp, Oryza sativa
ccggtgagctgtcctctgactggggacagtgcaccaacctcacctatctgtctatcaatggtaacagcatatccggcaaccttgattctgacctttgtaaattgtcatctcttcagtttttggatctatcgaataaccgattcaatggtgagctcccaagttgttggtgggagttgcaagctttactgtttatggacatctgcggcaacgacttttatggtgaattgccagcaacagaaagccttgaacttcctctacaatcgatgcatctcgctaacaatagtttctctggagttttcccaaatattgttcgcaaatgtggagcgcttgtaccctagatatggtgaacaacaagttctttggcatattacctcttggattgtgaatagtcttcctcttctaagaagtcttatccttcgatcaaataagttcagtggagagagtcctacagaaatataccaactttctgagcttcaacttcttgacttggcagcaacgtgttaactggattca

SEQ ID NO: 37910 - DNA, 492 bp, Oryza sativa
  unsure (1)..(492): unsure at all n locations
ctcagagtcacctgcggcatgcaagctntccacacatatgttgtgttcaaagggtgttctgtatatgtctatacggagaattgagtgcaggctgctcctgaataacgagatgggctcgaacttgatatgaattggacctccatctcccagtttcgtgagtatccaaatgagtgatgtcctcatcatcctccccctcttgaattcgagtagtcctcgactcaagcttatcgtcttctcccaaacatggtggcaagtccacantaatcatgcaaatgttagcaaatagaaggaaaataacacataggacatcattatgtgaaaacgaattgcacatcaaagcatagcatggagtcatattaagaagtttagatttatgcacaatcatagcactcccctttaatttaacttcctcgatgttagaaataggaggtcccttcttcatttgggatatttcattatcacacttcacactttcacctatgtcattggaag

SEQ ID NO: 37911 - DNA, 437 bp, Oryza sativa
atgtgtcaaagcgaaatatggcttgtatgtatagaagcataaaacacattaaaaaagaataaaatatcgttaggacataaaatgagttttttcccctatagccaagggagtagattgattcaatactacctttgcggattaagtgcttcactaaaatagttctctctataaaagtttcaatgctatcttgtgggttaagtactccactaatatagttgtgtaaaaacattacacaagttgtgtctaaaggtggcccatgagtctgagccaagctcgtcacataggagggtgcatatatgatgaacatgtgaaaagaatgcccgtgaagatcattctgttatgagtgcgatgaacacaattgttcattcactaaaaaagtggataagtggcttaaaggtgacattctacattgattgatattaaagtaatggtcatac

SEQ ID NO: 37912 - DNA, 418 bp, Oryza sativa
gctgcacctacaactatacatcgtatattattctactcatatgggacaatgcgcaatctccaagagggctcacgaatttgatcatgatcaatagctatgtggattgtatcgcgactctagattagttggtatttatcctccccacaattgcacgttgcttacgtcccaacaaagtatatacttgctactaatatacaatcacaaagcgtagcctacgttctaccctagatcccttatattactacgatcgtatggcacatcgcaatcgatgcttagatactgactgcctttccatactataatcacatgtatgtgtcgattatagagaattggatcatgtcacatgacttattccatatctactctatgggaacatacggagcctactcatggatgacatgggtgaagtatgatcata

SEQ ID NO: 37913 - DNA, 251 bp, Oryza sativa
agcttattctgtggatctacgcacgcatgcagtctctttgtgctcacggcgccgacgacggcgtcttctgttataatgtcgcccttcatgacactgagggcgatttccctctcctccctccgatggatcacccattttacaggcctagcgctgcctctacggacagagacgctagagccagaatgctgcacagcttctggcgaggctgcaaatcaatctactgatgactcactccggtcttgactcggatc

SEQ ID NO: 37914 - DNA, 427 bp, Oryza sativa
tgttactatattgtattgacgtcatgatctatgcgggcatagaacgatgacgtgtgtgaacatcgtcggttctaacatatgttgctaacacataggtaataaactctacgttattgtcgattggtgaccatagactatgacatattagcacgtactatctcatgataaccaatgtcatggtacaaagtcacatacaattttatgcgctggtcacatagcctcatatattatgataccgtttgaatcacatgctaaagaactatttatgcgggcacgcataattactcattatcgaccactctagctgaggttcaattcatactaacctaatgccggctctatctcatgtaccagaatattgtatgcctctttatgagaatatacaacttatcgaggatgacattacacttctatgtctagatcatcc

SEQ ID NO: 37915 - DNA, 452 bp, Oryza sativa
  unsure (1)..(452): unsure at all n locations
agctntgacggatcatatacactgccatttccatgctcgtttgtctcgacgtgatctgaaatgttgcaacagaagtagggcaaaatacagtgaattatatttgttgatatttgcaatcgtggtcgatctgaatgcagtgtccacaatgtcgatctgaatacaatatatcgtggcacggtggcaccccagctgtcttgatgttcagaaaagtaggagcaaatgatgttctctttttgaaattgtgtgcttcttgtcacccccaatatagcttgtcgattcagaccagccaattagttagaatatttaaagtacaggctactactttgtatatgtntgactacccatttgttaagaaaacgaaatatatggtatgtatgagagtcaagaaaaatgatgtcttttgctcatttntctcttctgatctcgttctggacgacaaagacttcataccg

SEQ ID NO: 37916 - DNA, 500 bp, Oryza sativa
  unsure (1)..(500): unsure at all n locations
atcggtcanatatgctctagggtattgctgctatatatcgtanaagataaatgaagtgagatgagatggcaattaanaaacaatagtttctggtgatagtttatcatagtacacaatgattgaagcagagctgccctaaacaccaaggaaaattctttagtagtaagacttcaagaagtattgcagtattaaatggttttcacccctcaagaagatattaaatagtgaatcattgtacataaacgcccctttaatataaaatataccatacgggattcccctactgtttcaaagtcaaaagaaaaatcatgagcatatgtccacattgtcagaactcaaacatatntttttcattttcatgtacttatcactgttgaactcactgcatagattttgacgattggtttttcagcaacgaattgtnatttgtagacatttataagtacacaatactgctagctaacattgggtnacanantaatgataagactctcattcat

SEQ ID NO: 37917 - DNA, 415 bp, Oryza sativa
agcttacaaagcgaggttgagtccgcttttttatgcgcgaagatgacatcctcacaaaggcacttggaaccaaagaacatcctggccgaactcggggaattggtagcgatgtgccctggaagcatggactctctcagtacagctcccaatacaggaaatgaaaagtctccaaggaagagagggatgctcgtttgaaggccgaacataaggttgaggtcattcaagaactagaagctagcatgaatgcaagggtggaagaaagggttaacaaggtcctcgccgacatgaatataccccgtcacaacacctgctgtgcaaccaactcctcgtgcacaacacgacgcgaagtcgtcacagcatatgagtagttgtgcatccacagaggtgccggcccctggtcttccgatcgcaccac

SEQ ID NO: 37918 - DNA, 478 bp, Oryza sativa
  unsure (1)..(478): unsure at all n locations
tcgcgtcacactaagaaagagaacctgtccgccacctcgtcttctgtantcttctaagattcgcgtgatgggtgaagctgtgcccgatcgtgctgaacctgtcatcgacatcataagtgatgaggaagaggaggaagaccctgaagaaagagagccagctactccagaggaagaagatccatcgcttcgttccgacgcaaggcgggagtagtcgcttagttagatcgttgccgtagttcgttgtgttagatagcttgttaagtttgcttgtgagtgtgtgggtcttagtagttgcttacatcatgggtgggatgtacagcatgagtctagttcttttgcttgcagagtgaagatagctggtggatactgttatgcaacttaatgtatcataccagttagagtatataaattaaattattaatacttcgtctagggtgctcttgccgccttctgtcgtctgttatcgcaatgtaacacc

SEQ ID NO: 37919 - DNA, 363 bp, Oryza sativa
agcttgttggaacccgggagatacctatagtacgttccattcaagcagatcacacatcctgttttacctttaatttgacctgaaactgaaaacattgttggataatcgttaatggtcacgaagatgatggccttcactgtgaagtattcccttcggtactcgtcctacactttcaatccttcttttcataaatcagccatatcttccaacaatggttcaagaaatatgtcaatatcaatacaaggctgacggggtccctgtatgaggatacagagtagtacgtattttcgcttttgacaaagccaggtaggaagattatacatggtgagaagcactggccaagtactatgtgagctgctcatg

SEQ ID NO: 37920 - DNA, 534 bp, Oryza sativa
  unsure (1)..(534): unsure at all n locations
cgacactatgatactcagcttaggctatggcgatagttatagtaggccagaaactcgatgcatgtgtcaagcatgtatgaagataagtctcatagatggattctattctatctatcactttgtgcctgaacataaccataatcttgccactagaagtcaggctcatcagttacgatcacaaaggaagattaatgaagctcaagttgcaagcgttgaagtcgcaaaatccgtagggatttctactaaagcagctattgatttgatggcaaaacaagcttgtggatttgagaatctcgggtttactcgtgttgacatgaagaataaattatactccaagaggtccctacanaccaaacaaggtgatactggaggagtgttagaatatatggagaagatagcatcagaagatgtcacgtntntttattctattcacgttgatgaggatgacnntaatanncaacatttctgtgctgactctaaaatggatgacgactatgaaaantctcgtgatgttgtatgctttgacacaacata

SEQ ID NO: 37921 - DNA, 448 bp, Oryza sativa
  unsure (1)..(448): unsure at all n locations
tcaagctgacattacggaccactgtgtctagtacctttgggtaccgccccgggtggaccactcggtcaggatgatccgagcggtcaaacttgattgcgatctctgaccatcgaagatattggggcgtgtcgggctgaacagcattgatctcccgttcggtcaacttttgcttccttttagactcataagccagagggccgccgaagatatggttgagctccgtgcggtggtcttgaaatcctgccggggcgtcgccgtcgtctttcttcttcgacgtgctttgttcttcgtcggagttcttccgtgtggtcttggtgtattgatccgcacatagcttgtagatgaaacaatctttggccacgtggttggagttaggatggtgcgggcattgggagttcatgatcttgtccaacgtgttgacgcgcgaacgctgtcnagaagagtgact

SEQ ID NO: 37922 - DNA, 53 bp, Oryza sativa
aaagggggggaaaagccccacacaaaaaaaaaaaaaaggaagaaaaaaaaaaa

SEQ ID NO: 37923 - DNA, 427 bp, Oryza sativa
  unsure (1)..(427): unsure at all n locations
agctngaagacaacacgaaactgttctgaagttttatgctttgttcagaggttcagatttcaaactacttatcttccaatatcacttatgaagttgtcttttctctcgactgctgatctcactaaccatctagctttgtccttggtgtgtacttgtgatttcaagtcaagtagtatatctttacgaaatgagcggctctgtttggcatttatctgtcacgcctaacccaacaacgtcagcttaacttttcacccatcttatcaaaaagggattattcaacttcttcttgtcccctttgtgtactagctatggatcaaagacgagagtagaagtcgtacgtgaagacattntagtcatcatcaaatcaaagagagaaatggacatttaggggtgcgattattgggaaatagaacatgaacaaaagaat

SEQ ID NO: 37924 - DNA, 415 bp, Oryza sativa
  unsure (1)..(415): unsure at all n locations
ctaagctgcgcatggtggtcacaactagctgatgttggcttgctcgtgtagttactctacataattgagggtagctagtattgtgttggtttctatgtcttgtccttatcctctcttagaggtgttatattcatacctttacgtgcccattgtcaaagtagtagtagcgatgcaaatatggatacgatctgagtagttctggttaggcctaagtaggatttttgccatatacatcacgcttgtttccgtacaggactaggtatatggtggtcccactgagctacgtacacatgtatatggtatttgaaagtggatcaaggccccaaatgattatggtgattaataacaatacgattatagatgactaacaaataatctgagtatgtgtgaaggaatgntagttcttggtaaagag

SEQ ID NO: 37925 - DNA, 474 bp, Oryza sativa
  unsure (1)..(474): unsure at all n locations
agctntagctgatttccttgccaagtgaaccgtatgcttttaagatatgccagaggaaaaaaatggaatattggactatgcantttgatgggtcgaagaggcttgcatgcactggaggtggggtcgtcttaatttccccgactggagaaagattgagctacgtattgtggatacatttttctgcgtcccataacgtggcagaatacgaggcgctactccatggattaaggattgcaatctctttaagcattcgtcgattaatcgtccgtggagactctcggttgttaatcaagtcatgaaagagtggtcttgtctagatgataatatgactgcttatcgacaagaggtacgcaagttggaagacaaattcgatggactcgagctcacccatgttctccgacataacaatgaggcagccgacagactagccaattttggtcaaacgggaacaactcttcngatgtattcgcgaca

SEQ ID NO: 37926 - DNA, 515 bp, Oryza sativa
  unsure (1)..(515): unsure at all n locations
gctggcaaagcctgtggaagttatgttgtccctagatatatgaatattttctgtggngtggaaaactattcttttcaattgtatgagcgttgaccatacttaaatcacagtattcttttctttttctgttatgtaactactttctgcatcagttatgttgggtgtatccattaactattgcagcagatgaggcataagtgaatattgttagattttagtttcttcacatgagctcccatgcttaccactttggtacaatgatacatctttctaccttcaggttttacaagagaaaggcattcatatntgggatggcaatgcttctagagagtatcttgacaggtatttatcttggatccacactagtcgagaaacaatggatattgctggtcttggatctcgtgctctgatccatttggcanaatttactgtgttctagtgtnggcttaacacatacggaagaacgtgatctacgtccacgttatggatntcactggcgacactttggtgctgag

SEQ ID NO: 37927 - DNA, 424 bp, Oryza sativa
  unsure (1)..(424): unsure at all n locations
agctggctaaaatatatgcatgtatgtatggatgtggtgtatagagaggagagtantggcagttagtttcaggaattntgtgaaacacactgaagatgcacgttgaaacatatcactatcaagtatgaaacatttagttttaacggtttgaaattcatgtttttcttttgaaataatataatcatatgatatcttgttgtaaagatttaattgcaacgaatacaacggtgtgatcggttcgtagatcggataagttattagaagaataaatatcttaagagaggagggaaaaaaatgataagaaacaggtagcatacatgttacagtgagggtccttcgatccatcacgctttntagtatggtagacgaggcgctcgatattttctgttcgtcggacgtgtgatacacagcattttctgaatat

SEQ ID NO: 37928 - DNA, 467 bp, Oryza sativa
  unsure (1)..(467): unsure at all n locations
tagagttgagtagcattgcattcttctatttatgagtaagatccatatttgtaccaaagtacttatgttntatntgtttagtttatttggcaaattatgaacttcataattggttttagtcaattctaccaatgtaccgtgttgattattgattgtttgcttagtaccctacagtactattttacaagggaaataacattcaattttgataagggggtctattgatgcacagggaaattactactgtgatgtttctagaggtgcaaatattntacttacaagttacaaccatgctaatagagatgagcttatggttgtcagatgtggtaacctaatcttttgaataatatagtgtttagcttcatgacatttctttttgcagctgttgaatttgaattccataaagctctctttttatttcttgtattggagcatcgtctgtgacaatattagatcgctttcaatga

SEQ ID NO: 37929 - DNA, 424 bp, Oryza sativa
  unsure (1)..(424): unsure at all n locations
agcttagagtcagtatcggcttaaagttctagtatctttcgatgggagtcaagtcgccacgatgtcgtgttcttggtggagtcggatcaatcaaaggaagcttatctagaagagtccgagttcaagaaggatgcgacatgacagtttatctattaattaggcatagnttgttagtttccttttatctttatgaaagtgtgtttagtgtccgataaggactttactttttctttgtagtttctttcttggccgacaaggactactatctccctatgggtataaatatgtacacccggggtcattgtaatatatcaatctatcgatcaaccatactctctgcgcatcgccaccctctttaccganggttttacttatcattcgacagaacttggcacctgacgcgaggctgcatcggctttcgatc

SEQ ID NO: 37930 - DNA, 448 bp, Oryza sativa
ctagcagctcgctctgtatcagcttctacaattacagcacgggtcaaaggtagcaaaataatattcttcccattatgcacaaaagtgtatttattactcctaccatggtgtgtagcatcattatcatgttcccaaggatggcccagcataagtgaacaagcttgcataggaaccacatcacaatcaacagaatctgcatatgagccaatggagaacgaaaccctacaaaactgtgttacctttgctcttccggaatcagttaaccactgaatatggtaagggtgtggatgtgtacgtgtagtcaagccaagcttcttgaccaaatcagaactcaccaagttgttgcagctacctccatcaatgatcacacctgcacgaaccgttgtgatgacgaacaaaatcttgaacaaatatggcgatgcaacctgtaatgctgctgtacctgcgt

SEQ ID NO: 37931 - DNA, 458 bp, Oryza sativa
  unsure (1)..(458): unsure at all n locations
agctntaaaataacccaagggactgctgctcaatatgcaccaaacaaaaagattagacagccaagagtctcggggcaattatagtggtcgccatggtttgctaacaggaataataatgccaaactgtccttgtgaagctatcgttttggagcacataattagtatattacatcatatttcatttgatccgaggtctgtttacataacttaaaaagattccaactttacttccttgcattcaaatggaagtatcttaaacttactgtgcgctgaattaaactaaaaaaacatagctaaagcagcaaaaagatgtattgatatttcttcccaaaaagacaccatcctgaataataagaaatccatgcgctatcagaatagnttttaaacaaatagagagcactgggatagataaatgaattatgagcattcattacgaccatgctaattatgattatgac

SEQ ID NO: 37932 - DNA, 451 bp, Oryza sativa
  unsure (1)..(451): unsure at all n locations
tccactggttctattattattggccggtcggncaatgtaactatatgttatgtagtttataatcgctntcatcttatatgtgtttgctatgtataaccatgcttgagatgaaagtgtgaatctagtgcacatcctacgaactagattcacatgagtatgagttaagaatatttgagatgttgtagatctttagcccattttgtcaagtctcctaaatgtgtaatacatctggtcgccgccttcgagtggtttgactggcacatctcatgctgaagttgactgacaggctaaaggcccagcaatgtctccaatattcctctctcaaggcgttggatatatcattatgcttggttgatgacttgaattattcatttcatctcttaatttaatagaaggtcagagagcctcacactatatagtatattgaattttgagagattggcatgcttat

SEQ ID NO: 37933 - DNA, 434 bp, Oryza sativa
agcttgaatggtcatcactgacagagagtatgtatttgcttcaatcgacaggtcgacaactagaagtatgcatctcttgatcacctgaaggcaactggtgagagatcgctacaaccgctggtcgacaactagtagtaagcattcctcgatcacataaaaacaaccgaaaggtggcgagagatcgctacaatcggctggtcgtcaatcacgagtaggcatctgtcgatcacttgaaagcaactgatatgtggcaagagatccctacaatcggctagttgacaaccatgagtaggcatctctcgaccacctgaaagggtgctagagttggctattatatgtgcatctcatgtaaccagcatgactcacatacccaacttatagcatacctcgatgtccgttcgcaatcatgtcatgtgatcaagccgacaacgttt

SEQ ID NO: 37934 - DNA, 440 bp, Oryza sativa
  unsure (1)..(440): unsure at all n locations
ctggctggctatgtattgtcgttaggaccggttcctangtgnaatttatccaagtatcttacagtgccgccacacgggtattatgggatacccctcgccacgtacttaattagtccatgaatattgtatatgccagtagtagtgggacactgggatgaggagacgaagttgtgtgtgtaatgagatatttggccatgtgtggcctctcctctattgtggcgatgcagtaccgataggtgtaggagcatccctagtgtacctgagtagacgatggctatggctaccagatgcttgtcgtgcgactcgaccgactatgtggtatgggatnttcatggactagctttggaaaggccttccaacgaatattcggtgccaacacgtgactggagtcagttatgtgtcgtgtgggataagcgtatgacctctgcacagtataaact

SEQ ID NO: 37935 - DNA, 298 bp, Oryza sativa
  unsure (1)..(298): unsure at all n locations
agcttcttgcaaagcatacggctanctagatgtatatgtttatctctagacagatggatcctatatgaatcggatgacgaagtaccacatgagtggatatataggaaaggaatccaaatctgtcgaatcgctcatgttatgaacttctacatcctaggtctacgcgttccgtcatctgggatatgatcttcatgtagccttcttaccgaatgactctatgagaatacgtcgatactcttacatattatgggtgacgtatgacacatgcctatttccccccggggtcttaaataccact

SEQ ID NO: 37936 - DNA, 218 bp, Oryza sativa
  unsure (1)..(218): unsure at all n locations
actatggacttgtcgatantgtatgggatgaaatgcttgactatctcttgttatctgatccaccgaggctacagaagtgtgtagattgtaatggccacattcttgtaattcatatcaccctccattgcgggtttatgcaatctaatggagatacatcataatgatcaatcattcaggttaagatcgagctgaagcaatacattttttctatatacata

SEQ ID NO: 37937 - DNA, 473 bp, Oryza sativa
  unsure (1)..(473): unsure at all n locations
agcttgaggcattaatatttcagtttataagtttagtgggcaaaatctatacaatatgtcatttttactgtataatacgcattatcaaatgaaacggttggtcatttagtatctaacatgacctttntgaagatctaacttgacctaatttgatgagtggatattgaaatgaatatatgtgttttttttatttggacagtcacaaggagatccttcgtcttgcacatatattcatataatattcatttatgttccaattcctaacttggttttgtcctttcttccaaatgggacctagctaggtacaatcagaacgaaacctaataaaaataatttacaacatgcatgttcaagcatttaattaaattcatgagcttaaattaagtgccccgtaagaaatagaaagtgcaatatatatatatttctgcatatggtctcttcttccttattaaaaagctagcagagatgacatg

SEQ ID NO: 37938 - DNA, 400 bp, Oryza sativa
  unsure (1)..(400): unsure at all n locations
ntgccgtgacgcgtctcatgtgttgtgacgaggctcatgtgttggtctttctctgagagcggctgaagtgtacatccactgcattgtgagtgaaccacatctattccaatagccgtgctcgcgcgtattgagcaccgggacatgtattacacttggcttgactcaaatctctcaacttgcgtgggatggcgtattgcacgatgatatttatactgatggagccacttcctgacaggatggaaggttaacgtcctcagataaccatgacgagataatggcgggacgctaatcctgggatcacaatggatggtggacagaaccggcagtgattaatcatatacactggaactaagagttgatcagttaatgctaggtcttaggcttgagaaaagaatacaaa

SEQ ID NO: 37939 - DNA, 466 bp, Oryza sativa
  unsure (1)..(466): unsure at all n locations
agcttatgtagctntnntgctcaaactggtattttcttctaaaccttgacttcatggagttaaagtgtgaaatacatcaattgagagtggtcttaatcatgtcagcatgaaaaattccatatctatcaaggaacaaacaaaaatcttcctatgttctcagacaaatccaagagcaagctacttgactggcaaacaagatatcgcataatcaattataagcaatttgcgatgaagaagaacaaatcaagaaatagtggaagaaatcaataataaatcaagaaatcgtgtcctcctgtcttcccttgccgttgtggcagagcttccactgccatggcaagaggatgtgatacgccggtgtcctccgccacacctgccatcaccgtgtgttgttaccaccacagtagtagcgcgctcgcagaatccctaaccctaggagaggaggggagaggggaangggatgaactca

SEQ ID NO: 37940 - DNA, 476 bp, Oryza sativa
  unsure (1)..(476): unsure at all n locations
ctaagctcatacttgtccgttgagaaagatttctgtggtggtccagtgtttctctatttgtgcaaaanatatcaanagaataaaaaaaattaaaaaagtcgtgtctctctcctcagcactagagagagaaagcaataaaaaaaaggcagaagagaggaagccgacttgtgagcacaccccaccattcccccttggtcaccaccttccaccgttcgagtaaccaccattccccctttatcgttgctgtttggattgtgttttgtggcatcctttgtggttaggctcacgtctctacttcgactagcctaggaccagcactgtacactataccctngagcgaaatattcaactngcttgactaacgtggtttctagttttctcttgagcattgctttcagcccaccgacagctccaccacanacccgactacagcttgacaggtcttggtgctacagcactaatacancctcgtccac

SEQ ID NO: 37941 - DNA, 464 bp, Oryza sativa
cagcttcatttggtatgaacttcgcccctgattttattttaatttcaacatcatcatgtcctcttaacggaatgagtgcaagtacacgcttctgtttaaaaagataacggtaaaatcataaaataagataaatggaagtaaaatcatgtttatagttgaaaacagggttaagaatgcaaatgcccttagtataattttagaaataaaattttatttgatgaaagttaatatcattagtttgacatttgaatgtacttcacatggctataactaattttgttgctacaaacactgtatgagaaataggacaccctctcaagctcgatcacctcttatattttgggataagggagtatatattacctctcacatttatttatacacttctcatccagttggaacagtaagatcacattacaaagcctctgggaaagcatcatgtctttgctgggataaacagtact

SEQ ID NO: 37942 - DNA, 447 bp, Oryza sativa
  unsure (1)..(447): unsure at all n locations
gctgagtatagataagcctagaaaaactcgtcgttgagtaggcctttnatcatttgggacttcttcataacacgggtcttgtatatgttaaataattcaagaatgagtacttatgtactctgcaagacacttataatatgttatgaacataatcatgtgaatttaaatatgatccttctaagcataagatattaaaataaagagaaaattaatattacagccaattctcattatctttaccactattttatgtgtaaaactacttatatgtcaggagtaggaatcacccttatgacacaactccagaatcgggagtacggacattcaaatgatttaattcacctctgcagagactgttcagctgtacccacacgatgtcaacagtttgcaatgctgaggacaccagaaccgatcgaaagtccacttactactatgtactgcacgagt

SEQ ID NO: 37943 - DNA, 430 bp, Oryza sativa
gcttgcccatcttatggaatgacttacgcttgtacctattctttgctttagccttaaatgtgagccatttctccattgccgtccaagctcgctccttctcggcttctgtgaccttgccgatatctttatggaggatcccgaaattcacacgtgccgccagcccgtagcagttagaccatcttccaatgacagtcctcggcgccgtgggcctaccactagcgtcaacctctcttataacttgcgctgtggtcggccatatattttgtgtccgggggggttctactcgatttactcgtacttgtcccacccgatattgacgtatgttcttgctgggcgaatctgcagcacacagaaagcaacatatgctaaggggtgctagctaaaatttatgtggtcatgtagtgaaaatttatccctataaataccatga

SEQ ID NO: 37944 - DNA, 513 bp, Oryza sativa
gatttcgcagataagttgtatctgagagcgaagcccttatattatattttaagaatcaatcctaaacgagcaacttatggtgctcctatagtcggtatttgctctgataccatgctgtcgtagactctccggaccttccattatatttgagagatgaaataaatagttcaagtcatcaaataaacataataaaacatccgacgcctcgagacaaaaatattgaagacattactgggcctttagcctgccagtcaacttcagcctgaaatgtgcccgtcaaaccactcgaaggatgtgttacacattaagaagacttgataacaaaggctaaagatctacaacatcccaaatattcttaactcatacttatgtgaatctagttcccaggatgtgcactagattcacactgtcatcttaagcatggaaatacatagcaaaatacatttaagaataaattgatctaaatcacaactacttcataattacataagccgaccggccgaacatagatat

SEQ ID NO: 37945 - DNA, 283 bp, Oryza sativa
agctcgggttaggttgtgttctgatgcaagatgggaatgtgtgtgcctatgcatctcgacagatacgttcgcatgagaagaactaccctactcatgatcttgagttagctgcagcggtacatgcgttgaagatttggcgtcattatctcttcggtactcgtatagaggtgtacaaggatcacaagaatgtgaagtatatctttacccagccggatctaaacatgagacaacggagatggttggaactgattaaggattatgacatgggaattcattatcaccc

SEQ ID NO: 37946 - DNA, 148 bp, Oryza sativa
ccaccacatcaatgatgcgcgtaatatgggtatatcacacgatggctatggttcttttgcgcaagacagctttgaactcttttacaagcctaagaccaagcattgactgaacaaatttagtaccagaggttgtatatatacaacgacg

SEQ ID NO: 37947 - DNA, 397 bp, Oryza sativa
  unsure (1)..(397): unsure at all n locations
agcttggaagtcagagggcagcgacagcttctctctgatggtggcagcgaatccggtccccccacaaccaaatctggcgccctcgctcagaactggctaaggagcatccggngcgggcggtggtgcaagacgggggcggagacgacacgccgcatgacgcgaggctgtggacggcgcgacagagctagcagcgtcaacaccagcatgacgccgtggtcggtgtgagcggcgtctatggctacaggagccccgtgcgatggcctgcaatgaacgtgtcggcggcgctgggacatgagtgagcagcgagcgcgacagggtggctcgtgttggcgagtgcagtgtggaggcgaccatggcgacatgaccaatgtggcgacgagaccgccgttggggagga

SEQ ID NO: 37948 - DNA, 486 bp, Oryza sativa
  unsure (1)..(486): unsure at all n locations
ttagaatcgcggatatatattagtagtagaaatatatatacctggggtggagcagcggcagttgggcatctacgctctccatgcccatcttcttcttcttcttcttcttcttcttcttgctcctctcctcacctcctcctcgatctctgatcttctaccactggaatggaatggtgtaatggtggcgaacaagaccccaactcctagtagttgtatttgtcggcttgcatcgtcacggtctctgtcacctcattaacttgctccctacaccctataatataagcatctctagactctaatacgatctatattagtttgaccaatagtatatactatataaacgagatgntctaagtaaacaaaccgtcgttcgtttaataatacaattagtaacatcaatcttacatgatcgaagctcttntagtttctctattaatagtcaacgctaagaatgttcgagttattagtgtgataacaatacttata

SEQ ID NO: 37949 - DNA, 418 bp, Oryza sativa
  unsure (1)..(418): unsure at all n locations
agctggttagactcgttaatgagttaactatattttattaatattgcattaataattctaaatttaacattntattctgtattaacataataataaacactaactaatatagtactcactaaatatgaatagtttcgctgtaattaaaagactaagcactagttaacaaacactaagttcatgaagatatagtgatactcgcgagctagcttgataagctcacgagctaaaaggctagctcgactcgactcattaagactacgagttcgatcgatatgagccgagcttgctacgagccgatccgagccacgagttntgatgtnttttgtccacccncgtatatgcgctgaatgagaagtggggccttcaatatacacgaagaaatagagttatgcagttgatnttcagatttcagtaa

SEQ ID NO: 37950 - DNA, 442 bp, Oryza sativa
  unsure (1)..(442): unsure at all n locations
cggacacangaacttggttcaatattatgatgcctattatactttgacaatgtgtacatagtaacggagtaagcttccaatacctgcaaagttgcaatatgattggcttcatatatcatatggtactcatagaaaaacctatgtttcttccactgcctgagttttcactaactcatgggacaacccaggtttcatatttcatatgattatactatattctatccactcaccccaaattcccaattattaattaccctttcctttctattgtatgttcttgctctgagcagtaactacaactcaactntattccagggtagcattgatagtttaaatatacggcattaattattngtcttattaacatgcagttaaaatgaacataacataatgtcctctgtacgtgactgggtggtgtacccttacctgaagatcttttagc

SEQ ID NO: 37951 - DNA, 465 bp, Oryza sativa
  unsure (1)..(465): unsure at all n locations
agcttggcccatctacctggggtgttttgaaacttacaacctacacatgtgggtttttgttacaacctacctggggttctttgatatttactctttaaaaaaatagaatctagaaaagattatgataagacatcgacaccatcgatacatccacgtcttcacaagtacaattttattgtcccattatccgcgctcgtgctcgtcaactcaactatcaggtgagttcaatgagttcattctggagttcatgttcatcttatttataccctggagatgcgtgcactctggttttactcangaacaatggagaggatccaaaggagagaggattggcgcacgcgggattctgactgcacgacagtgccaacttctgatggccgccacgaattcatgcgaactccaatttgggcgtgcaagtatttcatggacagtttatcaagtctactttcatatggatctagcctc

SEQ ID NO: 37952 - DNA, 224 bp, Oryza sativa
  unsure (1)..(224): unsure at all n locations
tcggatgtgcatcgactacaccgaccttaacaaggcatgttctattatctnttatccctgccacgcatagatcagagtgtcgactccaccgccgggtgcgacctattgtgttttctagatgcatacttctgttatcatcaaattacactatgtatctggatgatgatgaaaaatttgccttcataacctccatangagcttattgatctaccacaatgcctttc

SEQ ID NO: 37953 - DNA, 477 bp, Oryza sativa
  unsure (1)..(477): unsure at all n locations
agctntcagaacaatctttatttcttttggacatatcaaggtgttcagaactggtcgtagtctttcaaaagcaaattntttcactgtaagcaaaaatgttcagaaaaacaatcttttgcgcactagtactagagttgaaatggcgagtgctttgaattactgaatatagtaaaacacattcatatggccctatggaccatatcaaacctgtcagtttcacacgcatttttcctccatgtgttcagcctcgcacgaatcagagaaaaactcgcatgttatttatcatggagtaaaaaggcagagttcaacaatccaaaacaaaataaagcttcaatgtactcattcatgatgttgtttttggggtatttagaatcataagcacaatgttgattttcttagtttgccctgtttcttgtccgggttggccactagatcaattgaggacgctgcgctctggacggaacgcctccgtagtga

SEQ ID NO: 37954 - DNA, 416 bp, Oryza sativa
  unsure (1)..(416): unsure at all n locations
agtgtactcagcggagcagtaatataacaactactataattactagtgttgcattaaattgatgccttcatcgttcggagtatatctttgagatgacacctcttggagatgattgctcaagaaaactatttcttatacgactttatggctctgacagggatcgtcctcatagattcaaagaaacttcaataaaatagttcaaatatgtggtggtgtgccactaccaataatcatcatagctagcctgttggctagtcacactgttgcttcaatgccgctattgatacacatttgcatttcattaagaccatatttgtgtgccgaatctactacacatggaatgatacangtactaaacctctgctacaacaatcgtcctcattattcgaagaattgcatgctctatcttaatacat

SEQ ID NO: 37955 - DNA, 482 bp, Oryza sativa
atgcaagcttggtgctccactgagtatgcctggacaaactctattcttggactttacactgactaaagtttgcagtgtaccaaggaagctcgatgtccttcgcttctgtgcttctatgcctgaatttggtggctattcacagacagcatagtgaagaatccatctcatacaacatagagggaatgttttccaacgcaaaaatttgtcaacaaacattgccctgaagaaagcacagagaattataggatgacagaaaagaaaagaaaagacacgttgaagattatttgatcaatcgctgcatgccaattatacgctgaatagacacccataatataagcccatgctgaaagttaagtaaacatacatggcaccctgtttgtcgtcataggaatgaagtaacaaagacatacagggtatctgaagactatcattcaccttacctacaacatccactaactgaaaaaagtaacctcagaagtact

SEQ ID NO: 37956 - DNA, 514 bp, Oryza sativa
  unsure (1)..(514): unsure at all n locations
ctccataataatccatatatgggactgataaatactntcacaaagatcttaaattaagccccacaaggccaccttaaccacccctctaaagccacaaacaatggagatcataaacacatacctttagagctactcaagataacatgcacaccgtgcacacgtacgaagccggtctcacaaatcatcatctcccccctttgtgttcagcaggacggcaagcaaccataggccatgaactaactaattaagctacctgtgcatgttgcccaaccattctactatcatcatggcaataatctaattgagacgcttatgggctcgctaaccgaccaccccaattatcatgttcttcttctttccctccaagtcctatcatcaaaagctcatcattttttggcgccaacctcccatgtgcaacctccaaacttgctctatccattgcagctcgaaaacatctcaacattaattaattntattgattgatcggttagtactacagtactgtangagtgga

SEQ ID NO: 37957 - DNA, 468 bp, Oryza sativa
  unsure (1)..(468): unsure at all n locations
tgcagcttaagcctgaatcctatatgctatcttatcttatcctaagaacaatatatagaatgagtgtatctgatgaaatataatactcgagaaaaattcaagtattctaaaatatttataaatatgtatttctcttcttgtcaattttgatttccccgagcagatgactccgtacgtttaaacactctgtccgactagtcatagcctccaagcatcgggagtcggcctaggcacttcctaaacatgcatatgagtgacatgagtttgtcattaatggaacaaggtttcacgaatcagaattttctactcgggtacttttgcaattgtaaagagcagaanataaacttatcttatctttatgctatttgattattccgaataatacttagtaccttgtgttactcggttcatccaacgagcccctacgtgctatgaatcggtccaaaagcaactatccatcgactaacc

SEQ ID NO: 37958 - DNA, 506 bp, Oryza sativa
  unsure (1)..(506): unsure at all n locations
gctattcttagaagntatatgggtcagataactacatccctgaacctgattatctcgtaattgttgttgatattntaagagaatgtggaggagttccgttggctatagatgtcatagctagtcttttggctagtcaaagagaagttaacaaactggataattggttgaagataaaaaactctatggggtttgaactggaaacaaatcctaactctaaatggatgaagcatatacttaaacttagctataataatctatcttgtgatctgaagacgtgcctcctatatcttcatatgtatcctgaaaacattaacatcatgaagaaagacttggtatgacaatggatagcagaaggatttattacccaaagagataaccgagacctgtaagatattgctgagagctacttcagagacctcataaatagaagcctgataagccacgttcagttaagtatggtgaggttgtctcctgtcgtgatgtgcacaattcgttacttgatctta

SEQ ID NO: 37959 - DNA, 266 bp, Oryza sativa
  unsure (1)..(266): unsure at all n locations
ttaaaaaaaaaaaagggaaaataaataaaaataataaaaaaaaaaaaaaaaaaaaataaaaaaaaaaaaaaaaaaaaaaataaaaaaaaaaaaaaaatntataaaaaaaaaataaaaaaaaaaaaaaaaaaaaataaaaaaaagaaaaaaaaaaaaaaaaaaaaaaaaaaaaaataaaaaagaaaaaaaattaaaaaaataaaagataaaataaaaaagaaaaaaaaaaaaaaaaaaaaaaaaaaaaaaaaaaaataaaataaaaa

SEQ ID NO: 37960 - DNA, 414 bp, Oryza sativa
gctcaacacatttataatattttagcagcaattttactgtatgatataaaattttactagaacagtttcgggcataaaatacaaactcatagttaaagatagaaagagtaatcaatcaaccagacatcagaagagcagataatttggcgatagcataccttcacccagtattgtgctttgctaaatgattctggactagttatgtcgtagacaacaactgcagcagcaactcctttgtagtaaagaggtgccaaggcagcatacctaaaattggctggtaccaatgagttcttgattgagaaaaaccatatgcatgtgtggcacgtaagatggatcaattgtaaaaatcagtaacacatactactagaactttctcatcaaaccaatgcttctaatgcaccaacagcatgccat

SEQ ID NO: 37961 - DNA, 504 bp, Oryza sativa
  unsure (1)..(504): unsure at all n locations
ctgcccatcagcaaggagcccataacggttcatgcggcgaatcagtttctcaccctcaaagatgcggcgtggattcttctcatcaagtgtgagcagatgccttgcattgttacggatacggctcanagcatactgaacacgccacagctcacgcttgcacctcagtccatactcacccactagcttcagctctgcatcaagacgctccttctcgtaagggcgacgtggcttcttgaatgtcttaccatctgcaatgaagtaataatattgttcacaacacatgacagagaaagaaaccactgcagatagcatagttgttcatgaggaaccaaacaataacatagaaagaagccctacagtcccaaattccttatatcctgaccccaacaatatacatagcaagaaagagactgcacacacaacccgcgaagacaatgcaacaatacaaataaagaaaactacagtagttggtgagaatacgcncaataatagtatggatattca

SEQ ID NO: 37962 - DNA, 247 bp, Oryza sativa
  unsure (1)..(247): unsure at all n locations
atcctctgagtcacctgcngcatgctagcttgtcgcgagccaagttgacaaattcttctttgctaangaagagggaatgagaaagtacctagaagccggtcggtctatggacaaaagtatcgccggcataacgggtgaacacttgccccgaggccagaatgaagaagccgatgcattaacgaaatctgctgcttgcggaggaccgcattcgccaggtgtcttcttcgaagtcctttatacaccaagt

SEQ ID NO: 37963 - DNA, 416 bp, Oryza sativa
  unsure (1)..(416): unsure at all n locations
ttggagaagaagtcttaggtggagtcctggcttatacctctatttatcgcctgtgaagatggagccgtaggcccgctagtacgctgctgtttatatatgtttgtcaggcctgaagtgcctttgtaataatgtaaatattatcgatataataaagatgtgtctgttatatcatgtttgtgtggtgtaccccggctattactgtgacggngattaatacactagcgttcgggagaaggcaatattcccggtcgcgacagggtagtaatcctagtgttagtggaatatgtattattctaacacaaatatgcatttgcagcataactagtgtctctttatttcgtagtattgaccggcgaaactgatcgataacgacacgctacactattctcttcactagcccaagctacactattgat

SEQ ID NO: 37964 - DNA, 470 bp, Oryza sativa
agcttcgaggggtctgcccctcagctcgcgtttgttctcttcttcgacgaggagggcgacgccagcggtgaggacgactgtggcgactaggccggcgacccgggcacattggaatgagcccccaggcccccgccaatctccaattttttctttttctttcttctttttgtatagatcaacttaatctgcaatcaaaaatgatgaaaaatttcttatgttaactttattttgctatgcatatgagttgaggatgatttgtgccgtggtccttttgcattttagcttgatttaagggctcgtgctcaagtcccgatcctcaaatggctcgggtcggggctagtgcctgtggagatccacatgtcgagactggccgggccgggaacatggtgaccgacggttatgggtgacccgattgtgggtttttgccgattctcccccggagttaccacgccccgggcacggctcggttc

SEQ ID NO: 37965 - DNA, 522 bp, Oryza sativa
  unsure (1)..(522): unsure at all n locations
tcttctacttgaggaatctcatggtagtattataacacgaacctactaaataacatagtgttagtgcttcgctttcgtctcttacataaaaagtgccattagctacacataaaagaccaacacgtatgttaattaattaacaatgtagacaacgcacagcagagacttgttgctcaatgctcttcctaagaggctaagagttgaaccgtcagtgtcatccagaaacgaataaagtgcgccattgatcgatgctaatatactactactactactatcccttngtttctntaaactttattaatgcgatgtagtatgactttgggtggttgcactggcagattcatccgagcaaaggagctgtcgatcacactatcataaacgataaanatatgacaagaccggcacgattgatgatgaagactgattgagaagaggacgaatctaacggatatatggcagggagaaagatgagcagcgaacagcactgtttgcttttgacaaatgaattaatggatgaaatgg

SEQ ID NO: 37966 - DNA, 466 bp, Oryza sativa
gacactatgatactaagctacttgtcttatagtaggcgcttatctgcttggtttattgttgttgttttgtctggttcaataatacagcttatccgagtgagttatatggacctactgtgccagaagcttctcaagctcaagcatttacttttctagttagagatcagcgtcttggagctaatgtgggatctgcccaaggacccacaggtttaggtaaatatctaatgcgttccccaacgggagaggttatttttggaggggaaactatgcgtatttgggaccttcgtgctccatggttagaacctctaacgggccccaactgtttggacttgagtaggtcgaaaaaagacatacaaccatggcaagaacgacgttcggcagaatatatgacccatgctctcttaggctctttaattcatggggtggcgtgctaccgagatcaatgacgttaatatgttttcctata

SEQ ID NO: 37967 - DNA, 157 bp, Oryza sativa
  unsure (1)..(157): unsure at all n locations
agctnggaggtctaccgacgtggctgttcctctctgctgggtgatccaggttagtaatgtcgtgtgggtgaagtgtaccccctctgcataggttaacaaactgattggacatccgtgcccacggtcattggcggatgtgaagtgattcatagcgtac

SEQ ID NO: 37968 - DNA, 236 bp, Oryza sativa
cggatgaatcactaggtctgacatagaggtactcgtgtatctattctcttgtcagagacgagcccaccgatagcgatatcactactacggttagcacaagagccaccaccgacactacgacggtggagagccaccgactgatcccgcccgcaccggccggtgccattctgccccgctgactcatggccgtaccaagatccaaacgccactgtcacctctcatcagagaaattgctt

SEQ ID NO: 37969 - DNA, 444 bp, Oryza sativa
  unsure (1)..(444): unsure at all n locations
gcttgtgaatagaacataaagctggatcaacgtttatgacaaaaccacaattcattcataggtatattctgaagcagcacagttcgcattatcagtaggatttagattgtaaccactgcatattaaaagtgagagatggttntaaagatatgttgagttagatatttttttccttaggcaagtatccctccatgagaaaacaatactgaccttaacatcatcgcgtggataatcattggcatattcaaacatatcaggaccctgattcttcacatcgtacataaaatgtagactgttgatagcattcctattgtgcttgtcagggcaggctttcgcaatatgacctcctcttttgcagatgagacagtctcgaccctacaaaaatgattaacaaatggttgattcctgaaatgggcaggggcaagttaatacacaaattttgac

SEQ ID NO: 37970 - DNA, 374 bp, Oryza sativa
  unsure (1)..(374): unsure at all n locations
ntaaccaacaacagatgggtcagagatctgcaggtgctctctctatgatgccatggcacaattcattcagctctgtgatgaagtacacactgtcgagcctaaattataagaagacaccattcgctggaagctttactgtgaccgactcttcactggatcttcagcctataggcttttcttcatggcgtgagagatatgccctttcagcgaactcaattggcacatcagagctccatgccgagtgcgcttcttcctatggttggctgcaaaggtgcgtgtctaacatctgacaacctgtgcaagagaggatggcagcatgaagattgcttgctcctttgtcacagtgaagcagatgactgcctacatctgttcgt

SEQ ID NO: 37971 - DNA, 201 bp, Oryza sativa
aaacccccccaacacaccccaacccaccccacacaaccacccccccagcgaaacccccaccaccccccccccacacccacagcaacacagcccccaccacccacacaccacaccacaccaaacccacacccccaccccccaccccacaaccacaccccacccaacccccccaaacccaagcaaaccaacccacacccaccc

SEQ ID NO: 37972 - DNA, 481 bp, Oryza sativa
  unsure (1)..(481): unsure at all n locations
ggatccttaagtcacctgcggcatgcaagcttgctttactcaggaggtagactagttgcatctcttctaattngngtctatcaagtccagatatacatgcatgaatgcacatccaattaatttataactttntttcagttttccataatggttgatgcaataaaatcaaattttaatttatagtacatagagtaaaataacatcaagctagcatattctgcagattttagctcagaccaatgagaacaagctagaaaaataaatgatgagattgagtgaattaatttattgctatgacgtgccgtcgaacgctctttcctccttgcgactntgctatacgtcgacatatattggtttctcggctgagggtgtaatattactccttgactctggtcaacagttaaggttaggcctctcatcttcgtgagtaatcacgtgtattgatatagatgggtagacatgatgacatcttgaccatatg

SEQ ID NO: 37973 - DNA, 441 bp, Oryza sativa
cagcgtgaatatacctagctaggaaggccaactactattactgtgctagagtgtttaagaaaaacatcgaatatatatacgatcgactcgaacatatgctgatatgacgtgtatcattcacatgaagatgactatatatatatgcgaatgttacagatccaattagtgactattactattagtagctagtataataatatgctatcatatccagtacatattatgatgcatcgcctgccatagggtgtcagatatatggacaagtgaactcattagctggctaatggtggatggaagggacgtcactatgcagccacgagccatcccacatcacaacatacgatagagtcacaagcagctagctagctctggcactattatcaatctattgcttaactaattaagaaaaacgacagacactcgacataagcgtattcatta

SEQ ID NO: 37974 - DNA, 452 bp, Oryza sativa
  unsure (1)..(452): unsure at all n locations
agcttagacctactcaacatagctgttgtaaactttgtggcatatatgcgcaatgcttcgctcagccctttctagacacctattaatttgctcccgcgctcttttgaaatggcaactttatatggctagtacacagagaactgtttttgcaccaaaattattgcaaaacaatgaaactagaagtatggtgatcatcctcagactatcaatttagaattgaatgctacgactacaacgtgattgtacggtaagaanattcaatgaataatttcattgtctattctttagattctgcatatatcggcgtcaacctatttcaatgtgattgctctgaaaattttccaaccggttattcccagtccacatctccaaatctgatgcttaattagatatgaaattcaatacacattttgaaggcaaattttggtgaccgacaatgagaacgacattat

SEQ ID NO: 37975 - DNA, 458 bp, Oryza sativa
  unsure (1)..(458): unsure at all n locations
tcttaattattggagagacaaacttattcgatcacatattgcatatataggtgatacaactaggggtgataacggtacgaaaatagacggagaccacatttattgttttcgttntcattgttttttcggaatcagaaaccccggatacgagaacggaatcgaatattatcaaaatcgataacggagcgaacacgaaccggcgcgaatacggtaacgaanatttatcggaatacataaactcctcagagcgataaatccaattctcaagtctcaacggtcaataattcatcataaaacacaatcatataattccaattgttaagtctcagcagtacatcacacaacacaatctatggaatgaaatatctatcgttattccaatgcatgagaaaaatattcttacgtaactttatatttgcataacaaatatttttaatacaataacggacaacaccatg

SEQ ID NO: 37976 - DNA, 475 bp, Oryza sativa
  unsure (1)..(475): unsure at all n locations
agcttgtcaatttcgtagcaaacacacatttctactagcataagcactgcaaaccatccctctcacttggccgttctcatgctggaggctcgatatactcggtccattcccacgaggacagggcggctacaaattcctgttcgtggcgatcgacaaattcaccaaatggaccgaagcaacacccacggnggaaatcagggccgataacgccatcaaattcattanagggaatatttgcagatatggattgcctcaccgcatcttaacggataacggctcccagttcatcagcgccgatttccaggattactgcatcggactaggagtcaagatctgcttcgcctcagtttctcaccctcagagcaacggacaggtcgagagggcaaaaggtatagtactacaagggatcaaaacccgagtctacgacagactcatgtcacatgacaagaagtgngtcaagaactccctcggtact

SEQ ID NO: 37977 - DNA, 434 bp, Oryza sativa
  unsure (1)..(434): unsure at all n locations
atgcattacacggctagcatctatataaaattatctaaatattaataaatcgaaccttattatcacatggctntagtctataaaattcaccccagctgccacctgatcttacacctctgccaccaatttaccttctaattnttagttnttattgtctcactaggttatgattntatcgctnttagaagtcccatcaaacacaatcacctactcatttatgagccgcttgctgccccctctactcttcattgtcattgggattntaacagccaaatcgttntgcttatccttatgcttattcgtaccaattattagcaaaaacaaaagaanaatctgatttttgggtaaaaactttatatgtccgatgctgntgcaatgctaagcattaaaactatggtcctggttgaaccttatcacccggcatatttcaatat

SEQ ID NO: 37978 - DNA, 471 bp, Oryza sativa
  unsure (1)..(471): unsure at all n locations
tgactgctttgcttacctgtaggatacactcataccccttctggtgtctggtaccaagtactagattattntaaggagcaaacctatacagattcaaaatcagactataaccttttatggaagttgattaaagttatacacttatacatactacagttcaactggtagataatgactgtaacatacaatgctattttttgaaaaaaaatatttacagaaactaaaacagttagtgttaccatatactttagcttaagtttttgtaatttgtttattttcagttatttgcttccatatttcggtccttggcattcttttcatttccttcatactnttccaggtctggagagcaaggaatctcggataaattctatgcgtgcggcaatatctgagacatttcctgagcctaataggcggctgctacagaggtcagtgtacttctattntatgtggatatcttatctgcccgag

SEQ ID NO: 37979 - DNA, 475 bp, Oryza sativa
  unsure (1)..(475): unsure at all n locations
tctcatcaccgggaccncattgcataacagcgtngaagagctcttgtatgcgtatttatgtagatatatgggtggaagttcatattcttattgtgaataggtgactagagactgcaacatgttcatagctgntgcattttgcctctatatatattcttgttttacctttattattctttgtcccatctttgctgagtgtattttaaaatctgcagggcgttacttcatttccttgatccatctaaattcaacagcaaggatatatttgctgagagatacataatattgagttccttctatgaaactgatgtaaatatgtntctctttcaaaatgtacttttctcttgacctagactattctgtcagcattgacattcataactttgcttgatttatttatagctgcaatcttacaaagattgaggctatattctagacagtataaaatgtgagaatttacctcaaattgacgatc

SEQ ID NO: 37980 - DNA, 457 bp, Oryza sativa
  unsure (1)..(457): unsure at all n locations
catctcgacccgatccttaagtcacctgcggctgaagctatctcgctcctttcaacgcatctggtctcatgtccaaattcatctcgagtcaacgggaatcgccaaaataagacagtattgttgctgaaaccgaacttgggccttgggccttgtaatagactaggcccatctcggaagtgtctccctccacctccacgaattagcacttaaccctagctttattttcctctataaatagctntgtacatcctcaaaaacatttggngtttgtttagttgaattttgccaagtgccattcaccttgtctctagtcctcgctcgattagtcggcgactatagattcagagcccccaatagttggtgtgttgatttgccgggtcgattagatctaccacttcaatcgcaactatntatttgtgcttaatcacctattcgcaataattatattgcatcttat

SEQ ID NO: 37981 - DNA, 461 bp, Oryza sativa
  unsure (1)..(461): unsure at all n locations
tcggatgtgcatcgactacaccgaccttaacaaggcatgtcctatggacccttacccnctgcctcgcatagatcagattgtcgactccactgcggagtgcgaacctttgtgttntttagatgcatactctggttaccatcagattcgcatggctagggaggatgaggaaaaaactgcgttcattacccccataggaacttattgttatacgacaatgcccttcgggttaaataatgcaggtcctacttttcagcgtactactcgaatttctttgggtaaccaaataggacgtaatgttgaggcttatgtcgatgacttggttgtaaagacgcgcaaccaagagaccttactctcggatctagcggaaacttttgagagtctccgctccgcccgcatganactgaatcccgataagtgcgtgttcggtgtacctgcgggcaagcttctcgggttcttggtct

SEQ ID NO: 37982 - DNA, 446 bp, Oryza sativa
  unsure (1)..(446): unsure at all n locations
agcttatctcgctacctttcanacgcatctggtctcatgtncaaattcatctcgagtcaacgggaatcgccaaaataagacagtattgttgctgaaaccgaacttgggccttgggccttgtaatagactatgcccatctcggaagtgtctccctccacctccacgaattagcacttaaccctagctttattttcctctataaatagctttgtacatcctcaaaaacatttgggttttgtttagttgaattttgccaagtgccattcaccttgtctctagtcctcgctcgattagtcggcgactatagattcagagcccncaatagttggtgtgttgatttgccgggtcgattagatctaccacttcaatcgcaactatatatttgtgcttaatcacctattcgcaatatttatatggcatcttatcttgtcttgcagggtctctcg

SEQ ID NO: 37983 - DNA, 466 bp, Oryza sativa
  unsure (1)..(466): unsure at all n locations
tcggatgtgcatcgactacaccgaccttaacaaggcatgtcctaatgacccttacccnctgcctcgcatagatcagattgtcgactccactgcggagtgcgacctttttgtgtttttagatgcatactctggttaccatcagattcgcatggctagggaggatgaggaaaaaactgcgttcattacccccataggaacttattgttatacgacaatgcccttcgggttaaataatgcaggtcctactnttcagcgtactactcgaatttctttgggtaaccaaataggacgtaatgttgaggcttatgtcgatgacttggttgtaaagacgcgcaaccaagagaccttactctcggatctagcggaaacttttgagagtctccgctccgcccgcatganactgaatcccgataagtgcgtgttcggtgtacctgcgggcaagcttctncggttcttggtctctgcc

SEQ ID NO: 37984 - DNA, 480 bp, Oryza sativa
  unsure (1)..(480): unsure at all n locations
agcttggctggaatattggccttgctgctataatctcaatgtaatcgagctttctgatgaaatgctgttcaacttaaaatattgcaagtttgcaactcaaatgctcagctaaacctctgttatttcgatgaaacaaaatgtggctgcagggtgtgattgtcactgcactttcatactacatgcaaatatggacgatcgcgaagagggggccagngttccttgccatgtcgatgccacttactttgatattcacaatcatcatatcctcattcattttaggagaagcagttagcctacggaggtaagtgagacatcctgaactaataacagactcgtagggcaatgaaaaaattcataaattttttcttgaccaactcatttgctgatgttgttaatctaactgtgcagtattgttgctggaatactactaaatggaggcttattaatgttctgtgggttataacttagaggaacatgatg

SEQ ID NO: 37985 - DNA, 475 bp, Oryza sativa
  unsure (1)..(475): unsure at all n locations
ctgagcntttctcgagctgagtaattgtatataatctccagattcgttntaagaaagtttttctttatttctttagagagaataatagttaactatgccatgcaccggctgtttcatggtgaanagtgatgggccacaagccaacaaactaacaatgaaattgcacggatgaagataccaatctactccttgcagctttctgttagataatgtgcttgcgcttgatggttcgaatagactagccggtgtgaaaaaaattaatgaaggccggtatttactgtgagtttgtgagggcattcccaacccaataactaggatggtatccatagcattaaataagttgccacttaagacaaaaaatgatgtggcacgtgaataaatgaggaaagagaaggaaaccatgtcttgtatgagacatggttctacataccatcaagacatcatgtgagataatagcatttaatggagtatggat

SEQ ID NO: 37986 - DNA, 378 bp, Oryza sativa
gcttcgcttatactatttgttgtacatccaccatccgccttcaagacacattcctgcacgggttgcttgcgatagataccacgcctgctcctatcaacacacattatttcataccgatgcacttgtgtgccatgagcaacaactctatgtctccgtgcctttttgaatttatcttccatgtactttgtcactacgttgccacacactatgttggtatcggccatggacggaccaattttcttgtatcgatccctacaagaggcttgcgtgccgcgaaggatgaattcaacaatagcaaccaatggaagtacccgaactccttgcattacccagttgtacacctctgccaaattggttggcattatgccataccgagat

SEQ ID NO: 37987 - DNA, 495 bp, Oryza sativa
  unsure (1)..(495): unsure at all n locations
ctactaccacaagcaatgaaatgcaagttggctggtcagttntacgaactcgaattccttgctgagctagaaacttcgcatgacacagcatagtttcttggaaacataaggagagcacaggaaattggaatatgcaggacatctcacggatgcactcaaaatcatatctaccaattggcagaggcgacgctagactttggcatgaaggtcttcccagttcccaatgaacttgtaggcaattgcaagcctgacatttgtggcatcctgttgctatgctntttgggttgtaatgtattgcttcccttgctttgaacaatgaacaagtcacacgagctttctttgatctgaagcatctcttgctgtcaaagcatangtgttggctggtcacctgctatggctnttagccagataagagcaagtttacagaaggggaattgcacatttaattttatcatgtagataagaaacatctaatntattcaagtagtcgtatct

SEQ ID NO: 37988 - DNA, 418 bp, Oryza sativa
  unsure (1)..(418): unsure at all n locations
acagagccttcacaggagtttccaaccatcatattagtagacatctttctattagccattagataagtgctctctcggatttttattttaaattttatctattagaatattttaaaaataacttttattttcaaagtagtacatatttaaaccaccaacgctcctaagaacaattttttatgactttgacatataatagcgtatactaaccgccgcacagagtagaactaaccatttagtgaacactccttacaaccatcccagaggaggacaaggagtaacctgtaaaatgtcacctataccattngcaggtgacccccttgcaaaatagtcaacccttcttcatacaaacgttagcattgattaataattatatcccgcatcatagaaaacacttctcatagtatagntcttttat

SEQ ID NO: 37989 - DNA, 309 bp, Oryza sativa
  unsure (1)..(309): unsure at all n locations
tcttcaatcatcctctattcatataacccgctctcctaagcaaccaattcatcttatgggccgattgatgagttccacanattccttgatgcacctctcccatagccacttttgattgatcattatctaagcacttcaatagaactccatccatattacggcgatataaatcttcatcaaacaatgtatatntgaacgcttgccgccgaatcttccgatcaaccttaagtgtangaactttcatatatctaatcaaaggaattctccaatcttcttctgtttcctgngcacaaatgtccgaatntacaa

SEQ ID NO: 37990 - DNA, 333 bp, Oryza sativa
  unsure (1)..(333): unsure at all n locations
acaacctcatttccactactcaacatggagctctcattgatgtnggcatatcttgtgattagcttggtgatagtgctacttgccatattgctcatgttgcatcatctagcatttctacctcttgtgatgatcttgaggatatgtctagctctagctctacctcttgtgtttctatttgcgatgcctcacttgttgttgagaacaatgagcttatagagcaagtggntaagctcaacaagagcttggagaggtgcttccaggataataacactcttgacaagattttgagtgagcaacggcgcatccttaacaaggagggactcggattcattc

SEQ ID NO: 37991 - DNA, 459 bp, Oryza sativa
  unsure (1)..(459): unsure at all n locations
gctttcatgactctaactgtgtgcgtaactnaatgntttcttatatatgataagggctagctcaaggataaattattacgctactcatgtgaaaaattagagtatcttcggcatcatatattcaagctagatctgacatcatatattaatcttaagatctcataatattcttctttaatattattaattaaaattattgcttatacacaactttatcatccaaatatatattattctatacttagtccagctcgcgagcctgcttaaaagtcgaaggaggactaggctagctcgctcgttgacagccctagctacaactacccaatgtaatctcgtaggctctcgttatattggggcgttatacaaacaatccttgccataatcgcagctgacctcttggagtaattcggttctttcaacgaacancacacggcatatgagacacaaattaatatatgg

SEQ ID NO: 37992 - DNA, 434 bp, Oryza sativa
  unsure (1)..(434): unsure at all n locations
tttcttagtcttttcccggtcttggtggttggtgtagaccagatctgctagataggcgccgtactatcaagaggggtctatgaagcgagcttgtggatgatcttgtgccatattagttcatatgcatgtanngtgcattggtgggcttgtctagccaagtgtgatgagttntctcaagtcctatacaagagagaagtgngcatgtccaatatgagtgaatgacattttgtggatatgtacggtggatatcctntggagtgtgagccctctatccttgacttaagttgtgtntctaggatagttctttcatgggttggatggccctttgaataagctttccatagagtccatgaacgccaaattccgagacccgagtcaagagatatcgcttgtntaccaacggtcggttgagcanaatagtgacctgcggtctg

SEQ ID NO: 37993 - DNA, 424 bp, Oryza sativa
taagcacctgaggctgcagcttccatccctatatatttgaaacatcttctattatccgtggacaatagaataccgctcttctaagcaaccaattcatcttatgggccgattgatgagttccacaaattccttcatgcacctctcctatagccactttagattgatcatcatctaagcacttcaataaaactccatcaatattccggtaatctaaatcttcaagcaatgtatatttgaacgcttgccgctaaatcttccgatcaaccttaagtgcaagatctttcaaatatctaatcaaaagagatctccaatcctctgttgtgtcctgggcacaaacgtccgaatttacaattaatttggcctccgtttcgaatgaatcatgcccctcagccttctgtccagaaccggtcagaccggccgtgca

SEQ ID NO: 37994 - DNA, 348 bp, Oryza sativa
ctatactcagaaagaaggcgaagatgtctgtgacacttactcacctgttgctagattgaccacaatttgtgtgctactttccctagcagcctcacatgagcttctcgttcatcaaatggacgttaagacagctttacttaatggagagctggatgaggagatctatatgtatcaacctgatgggtttgagctgaaggtcaagaatgcaaagtgtgcaaatcgatgaagtctctgtatggtctgaaacaagctattaagcaatggcatgagaaatttgacaatacattgacatctgcaggctttgcagtcaatgaggcagataaatgtgtgtactatcgctatggcggg

SEQ ID NO: 37995 - DNA, 492 bp, Oryza sativa
  unsure (1)..(492): unsure at all n locations
gctgctctggcagctggaggaggaagaagacatatatttatgccctgatagcattcgaaccgggactaaagatgatctttagtcccggttggtgttaccaaccacgactaaagatcaaatatgtccgttacccttttaaaccgggactaaagatcatctttagccccggttnttattgtatgcgggactattgtggaaatcggtcggccgacgaaagatagtttctccaccagtgagaggaggtaattaatactatacctttgccatggctggctgcacctcctcgctcgtctctctcctgctgctgctgctgctgctgcttctcttgctcgtcgccggcgaggcgacggcggaggcagctctcaacttcacgaggcaggatttccccggtggtcttcggcgccggcacatctgcttaccaggtatggttaataggggagtatacacattaacatgacgaagcttattaattttatatatgtatatttccta

SEQ ID NO: 37996 - DNA, 501 bp, Oryza sativa
  unsure (1)..(501): unsure at all n locations
tctggaactatcactatatcanagctggttacaacaatattaattaatctatgtcttatgggtaatcgaatgaaaagctgttctggtttaagaaactccatgagaagtacgtaaatactaggttctgatgagttctctttgttntttaagacaatgatttgtgataattatttgagagtaaaaaaggaataaattattacatagttcaaagattatttcaaaaagtatttaagaattaatatggtagttttttatataaaatcaaaactctaccagcttagaaagagtgcgcattcaccaaaggagaagcctgtacatttcatgggcttcccaaagcanacaagtccgtgggctggaaacgctccacactgcagccctatatatcatctcctatcttggacggagcattaactaattatcactttntagaattgatggttaataatgtatcattcatatcggcatggttcttatgtaacttgatatgacatgtaagttcag

SEQ ID NO: 37997 - DNA, 485 bp, Oryza sativa
  unsure (1)..(485): unsure at all n locations
agcttcttttcatcatctagcagaataattgttatattcataaatgaacacgaataaactgaatttcatgatcttagaggacacaattaatgcaggtgtaaagcattcagttaanaatataatatgctaaaaggctaaagattttttttccagagcatctcacagcaacacattcttataagacatggcaactcagagaaaatggcttcatattagcttatctggtttaaactgtaatggtggccttanataaagagagaattcattgacttcattctataccccctaagtttactctagttcaatgatttgtcatcaactttgtctctctctgcaatatgccactgactntgacaattnnttctacaatatgccattgnggtggatacttttcanaaaatgcctaaaataaccttcaagctatacaagggttgccaatcaattgactcattatatgttntgaagaaaaaattgaaagtttaatg

SEQ ID NO: 37998 - DNA, 401 bp, Oryza sativa
cagtccactcagtgcgagcgatactatatacattccatcactttcagcaagactagctgaggtctgaggaactaatttggttaaacaatagcgaaattgcagaaaccaacaccccagcattttgatgaaagacagagagacatgggcaaatgatcagacatatcaactactactttcttcgttgcttgacttccggcgacgcgttgcattgcagatttgcagtccagatcgatgcatgttcttccatagccttctgctcgtcctcgccaacccagccgctgtgggcctatggccttcaccgaaggcgcccgatgcccctggccaggagggaggtagaggggaacacacctcgtgctcgctttagctgacccagccgccgccgccgtcaccaatggctcccg

SEQ ID NO: 37999 - DNA, 423 bp, Oryza sativa
  unsure (1)..(423): unsure at all n locations
gcttaccaataaaaatggcatgttgcatttgtgttctaatgggctgcattnggacctgatcatccttaaccagcccaagattatcatgggcccattgggccaaacgaatttagcaaggcctcaaggctctcaactctatcaatctagtgcaaactgggccaagctggatatatgtatcactaccgccctgtttagaggagtttttagttgctgcagctttttttagaatctccctaaacagtctagctnttgattcaggttctaagaagctgtagttgtagaatcaagaaaatgaactagaaaccagaagctgggcttttctaaattctcagaaactggttatcaacttctttgaatcttanactcctctaaacaggtcctatgtctggctcgtttatttcgtgatttttntgcatggaatgc

SEQ ID NO: 38000 - DNA, 458 bp, Oryza sativa
  unsure (1)..(458): unsure at all n locations
gggagtggctgatgttattcttaacattaaactactgagaggagatgagggtcggattacacttgtgcaatctcactatgtggacaaggtcttgagtcgctttggttatagtgactgcaaggcagctcctactccttatgatcctagtgtgctattaaggaaaaaccgaagaatagcaagggatcaattgagatactcccagatcattggttcattgatgtacttagctagtgcaacgaggcctgacatctcatttgctgtgagcaagttgagccggtttgtttcaaatccgggagatgatcattggcatgctcttgaaagagtaatgcgctatctataagggacaatgagctatggaattcactatgctcgggtacccaaagtgctgganggctatagtgattcaaactggatatctgatgctgatgagataanggccacagtgggtatgtgtcaca

SEQ ID NO: 38001 - DNA, 411 bp, Oryza sativa
  unsure (1)..(411): unsure at all n locations
agcttctgttgaaatattcatccatcaatgattcctttanatccctttgagattcggcttccgttcgtccctccgcttcgtttcatcatcgctgcacctgcgacacgatcaagagtctaatcgagaccaagattcctttttttatatatcttaattaaaaatacgtaaggcttttgtagttttttgggctcgtcaatgtccgtagcgctaccgtgcgcgtgtttttatcccaagttttacaaaattgggctacgacgatttggatgcgacgctctgattttgggagaaatggaaagaggatcgagatcgagtggattaaaaccctcaaccaattttgagagatcgagaaagattccaccggacttgatggggatgattagctccggcatgatacgggcacatgactgtcat

SEQ ID NO: 38002 - DNA, 454 bp, Oryza sativa
  unsure (1)..(454): unsure at all n locations
gtatccccacacgggattcaccattgaataatctataatgagttgctcgacatattgnggcattagaagcaaactgtntactataactctagataatgtcagtaataacaattctacatgtcaagagttgataaagaatcacaagaatgcattgatgtntgagggtcagcatttgcatgttagatgttgtgcccatatcctaaatattttggttcaggatggtatgaaaataattaaacctacaatacacaagctacgtgagttgttgaagcatttagattcttcagtatcaagaatgccagaattcaattctatggcaaactcgaaanatctctcttcgaagttgagtttttcttttgatacaccgactagatggaattccacctattaaatgattgtagaatgataatgtacagatcttgtctggatagctatgccaatcaacatggtgaag

SEQ ID NO: 38003 - DNA, 428 bp, Oryza sativa
  unsure (1)..(428): unsure at all n locations
cagcttctcgatggagtccacctgcacatgatggtgtgtgtgataacttggaggcgcatcataatcttagatctatatgtttaggtataaccagcaaaataccggtgcgtcgcaacgataagcgtacctatcanacaaatattcaactaattgaaatacaaatcagtaggtgtgtgtataattaaataaatttacaagttaaacaagtgtgagagattaaatgacactatccaatttaattttattacattctccacgcttagatacgctctatggaatattattggaattttcacagcttaattgctacggttgataacagaaacatcatttaataattatgtaatcgggaaaagacagaaaatacttcttttatggttgcttagagataaacacattcaataactataaatgtagacgcctctgaa

SEQ ID NO: 38004 - DNA, 379 bp, Oryza sativa
  unsure (1)..(379): unsure at all n locations
tcagctccactcncacaggcagctcaactggggtataagccaaacatcttctccttctggatcttntttcttcaactgaggttngatgattattgcaaggtgagtacatgaaatactccacaagccacacagcaagtatgcaagtgcacaaggataccaaaggatggcataatatatggttcatttgcgaaagcagcatttagcatagagttgagaaattgtaaaatagtagattaattaatcatcaatattaatcaacactgaacagcacactcatgctgcacaggcccaaccaaacctgaacaaccaaccccggtcgttggcgactcggctggtgctggcggccagcggcggagagagatgctagcgtggtgagagg

SEQ ID NO: 38005 - DNA, 448 bp, Oryza sativa
  unsure (1)..(448): unsure at all n locations
tagctngaagggtaaatatacatacattgtcttttctgttaccagtggctctaaaggatttgccatcggacccacatgtcatagatacatgagatcctacatgtcatagacagcgagtggcaaatcattaattggcacatcttaagactatcaaataattgaatgtcccgttattttatatctgtctgctcatgaaagaactcatgtttctccatatttgatcaagatgttgtggatggcgagggtccacaaacacgtgaaagagatgtcgtgcaattcaactatgtgtgccgccgcgcaaatggttatttcgcgcatatgtgaggaaagatgacactgtgtacaaattctactcaagagacctcatgtcatgtaccgattatcagtgtcagtacaatctggccatgtccattcattattttgatctcattagcttgcactttgtgat

SEQ ID NO: 38006 - DNA, 505 bp, Oryza sativa
  unsure (1)..(505): unsure at all n locations
ccgtgagagggcangggtgggtgatagtctatcgcaacgtttgaagatgtgcctcagtcattcttctcgtcacaagagagtcaaatcatctgngatagtgtaacaacttattagccttgacaaagtccatctcaacgaatcactgacactgatcagttccgtgaacaccgaatcgccttgatttgattctgacttacctgctggcactaccagtgccagaatgtaacttgtaacactggtgagtacatactcgattgccatggctcgtgtcaagcttcgcaggagcccatgagattgagcgacacgcccttgtatttgctgtctcctgtaattgcgatctctggctcgctgtttattttccttttaccacttgaatgctgtaaattacaatgctgtagtgcaagagtgcgactgcagcttngtggtgagatgaaagggatgtcgtgccgtcgttttttactgtgtcctgtcatattatttatcattctgtattaacttactgaag

SEQ ID NO: 38007 - DNA, 129 bp, Oryza sativa
agcttctgcacaccagcataatatttattagccataacaataacagcctagcacaccgattacacgcacctctttagaaccactctgaaatatccatcttacctattctaccaagttatatggcttagc

SEQ ID NO: 38008 - DNA, 325 bp, Oryza sativa
  unsure (1)..(325): unsure at all n locations
acactatgatactcagcttaatacaagagtaantcttccttactcggattgtggtgaactcctaacaactcacaatcaagactggtgctcctccacaatcttcttgaagaggtcaccatacaactccaaacaatctgtgaggcggcaacctccaagagtaacatgtagcaactcgactccatatgattaagtgtcgtactacctcaaacaataatgcaatgcacttgacttgcagtattcaagtggcgtgagagtggatgcaaggggtcaaatgaaatgaatctagtgacataagactcccttgctacaagtgagtgtatgttat

SEQ ID NO: 38009 - DNA, 349 bp, Oryza sativa
ttaacacagatactatattctgatatgcacatatgtacgggatttttatatagagaaataattaatgctttactaaattcgtctcacaataataaatggaaatatatgtatatgtctagatatatatatgactaaaagctataaatatatatgtctaaataccatagaagatagtattaccatttccaatttatgtgcccaaatacacaatgagaggcaaagtgagtgtaactcaactgactatgtttctagaggtggaaactgtctatccaactgttcaatatttatatctgacataagtgctcgcatttacagctatctttttaagaaaaatggtactgacgttcta

SEQ ID NO: 38010 - DNA, 455 bp, Oryza sativa
ctcaagcttgattatcttgcacatgttttccatagaatctgagtttcttgtggacagacatttgttgatttagcaggaagtgagcgtgcatctcagacggcatcggctggtatgaggctaaaggagggcagccatattaacagaagcctgcttactctaggaaaggtcattcgccaactcaggttcacagaattctcttctgtgtctttcacatcattctacaagttcattattctctctctctcttttgaaacaagacatcttcatttcatttaaaatgatttctgaacaacttcttggtggtgtagcaaggggagaaatggccatatcccatacagagattcaaagctcacccggatactgcagtcatcactgggaggcaatgcaagaacagcaatcatctgcacgatgagccctgcacactgccacatcgagcagtcgaggaacactcttct

SEQ ID NO: 38011 - DNA, 466 bp, Oryza sativa
  unsure (1)..(466): unsure at all n locations
gctcttgaccatctcttcacttgctaaaatggtgcaactcccgctatcaataatcactttgacggtatggcctttcacaagaactntgctttggaataaattgtggcgttggttttgctcttcacacttctctttagcactaagtgctagcttgacaattaggctaggatactgatctagcgactctggatgcaaatggacttcctcgatgtcatcngtatcttgtcctcctacatggtcagtggcaactaaagcatattcatcatcacaatcactagtagaagtatactcaccatcatcattcacaaatagagctcgctgatttggatagtcgcgggcaatgtgtccaatgccatggcacctatgacatgtaatatcacgggtacgtncagtggaagctaccgaagttgcactcttggctggagtctgaactgaagcattnttgcntgtttcttgagcatgggat

SEQ ID NO: 38012 - DNA, 421 bp, Oryza sativa
tatctatatgtgatgaatactataactgatattcatacttgactatctgtatatttgactggagaggcttatgcactcaccgtagagtcccagcatttgatacctcatttatcactatatgttgataggtggcccctttggagttatgttgatcacatgttaaaacagtgttcttgtctccggaatgctggcgctaagacttgcttctccactggatttgctttcgataacctcctccttttgggatatcgataaaatgacaaccttccttttagaatcacataatagcaacatttgaccatacatggtaaatattcttggtagaatatgttccacagctcagaactgcagatatatcacagcactcttacatgggagcgtatcctatgcacacaggccctcgcgtgactcaccatattct

SEQ ID NO: 38013 - DNA, 354 bp, Oryza sativa
actgagctgcagctattacaaagttttgtgatacccttaattttttagtttagttggcttaaatgcatcttctcttctactattaatagctatttcttttattgcacattataatatgttttggattttgaatagaatcatggatagatcccaatatgtgctccgtatgtatgtcgcatggccaaattcatattcatatgtatattaggtaatctaggtgaatcacggagaggccaatacattatataatgtggaacaatgggagtatttgtgtgcgcgcgcgtgcgcatgtgtatatgtgttgaccttggttgcgggcattaagaaatgctcctggacaggtcttatgatgac

SEQ ID NO: 38014 - DNA, 461 bp, Oryza sativa
  unsure (1)..(461): unsure at all n locations
agcttgttcttgttctcgaagaactaggagccagttcttttggatgaacgcaccnatggccgctagaaggaactggtccagtccaatgtgcaacataatgtaaatttatatgggctaaagtgaaaacagtactatatgcctagcccaagttgcaacaagggtaaaaataactggcccaatgtgtaatagactctaaaatatttactcctgagtaaatttgtgagtaaaaatattactcatgatgatatggacgaatctcagccgctggatatgtttccgttggatttgttctggaggaacgagattcaccctatctcacattatgacatgcctaccctatgtcacccaatcccaatccatcgcacacatataaaaacacatttccctaagcgaacagcttaaccagtccacctatatggcatgtaagtatccgccagataaaaataatacatgttttcata

SEQ ID NO: 38015 - DNA, 353 bp, Oryza sativa
  unsure (1)..(353): unsure at all n locations
gagcggagactctcaaaagtttgcgctagatctgagagtaacatttcctggttgcgcgtctttacaaccaagtcatcgacataagcctcaacattacgtcctaaatggttacccaaagaaattcgagtagtacgttgaaaagtatgacctgcattctttaacccgaagggcattgtcgtataacaataagttcctatggcggtaatgaacgcagntntttcctcatccttcctagccatgcgaatctgatggtaaccagagtatgcatctagaaaacacataaggtcgcaccccgcagtggagtcgacaatctgatctatgtgaggcagggggtaagaatccttatgacatgc

SEQ ID NO: 38016 - DNA, 377 bp, Oryza sativa
  unsure (1)..(377): unsure at all n locations
ctaagctttaaggagtcagaacctggttaaacttataaatttgactattatagttaacgatctatctctattattataagaagtttggtacgtcatccgtgtttgaattagttcttaattttatcatccgactcttatatatcctnctgtatccgtccttcgtcatcacgtagtgagcgccgtgagtctgactctctattgttgcccacgtatacaaccggtcaacgatagcaaaagaacgttgcatgtatgcaagtataccacataaattgctcaatgaacttctttcaccaattagaaatacagcacaacgctcaattgaacataaatctcttgttatactatgacataaattgaagatggttccacctatacta

SEQ ID NO: 38017 - DNA, 376 bp, Oryza sativa
  unsure (1)..(376): unsure at all n locations
tatcacanatgtccagcgtgatctgtgccacttcatccaccatgagtgctgtcatgtcanaggagagatctttgacccagagggtgccctagcggcaagtgacgaattcaaggatcttcgggagtggaacactgctatgccataatgtaactagatgacgttatttgaagtgacaatgtaaaaaaatattgtaatatatatattttgtcaacatttttgagntatgcaatatatgtaaatttctcagtaccaaatgcttgataatcttccaatatatgtacataaaaatctacatgcaagaatttctattaaataatttaaaagtaatttacggccaaattataattaaatgtcaatattttctacctatcttcgc

SEQ ID NO: 38018 - DNA, 241 bp, Oryza sativa
aaatgcacggcgagcccatgcgaagggtttggttaaatatgcccaattccgtcatatacacaaatgaaacccaaccatacatgttccccaattatatcttctaaattatacacactaacaatccaacccttttccccaaaaggggattttattaaataaccaaatataacaccggggctaacggtcaaattggtaattgttcttacatatcctccaccaggatccctggtatcatatatac

SEQ ID NO: 38019 - DNA, 480 bp, Oryza sativa
  unsure (1)..(480): unsure at all n locations
gagagataagaagaatctacttaaccgatatgcccttaggcacggccatacataacatagaaatcacacgtggaaggggtgggcaattagctagagcagcaggtgctgtagcgaaactgattgcaaaagaaggtaaatcggccactttaagattaccatctggggaggtccgtttggtatcccaaaactgcttagcaacagtcggacaagtgggtaatgttggggtgaaccaaanaagtttgggtagagccgggtctaagtgttggctaggtaaacgccccgtagtaagaggggtagttatgaaccctgtggaccaccctcatggtggcggtgaagggaaagccctcattggtagacaaaaacccacaaccccttgttgttatcctgcgcttggaagaaaactatgaanaggaaaaatataggatagtctatcttcgtcgcgaagtaatactaactagatatggaaaatgcatttggatt

SEQ ID NO: 38020 - DNA, 450 bp, Oryza sativa
  unsure (1)..(450): unsure at all n locations
gcggtgggagtggatggacggagcatgggatataagcttggcgggggcatgagcggaacaagaggagcaacgagggtatagtatgcagcgagcgccggaagggattcacgagagcagtagcgaaccttcttggtggagcggcggcagagcgaccttgatgacgagagcctttctctccccctctctcttttgggcatttntgttttatttttctaccattacccatcattaatacaccaaagttattgtacaggataaactcaaattgataattattttttttaaaaaaaactcgctgaatttagatgaattacttcgtaaactgctcgtaccatgaatnttagatggattttcacagtgaaaaanaatgataacaatgttaagcttatctaaatggaaggacatttcttccacaagttctagctggtaatcacctcaatcttaaaagag

SEQ ID NO: 38021 - DNA, 414 bp, Oryza sativa
  unsure (1)..(414): unsure at all n locations
tattctaagatcaactaagcatgtcgacagattanaccaagaacaccaaagatggactgaacaaattgtttcaagcctcactccttattgccaagccaaccggcttatcatctacagagctttcttggcccatgtccaagaagccgcaaacgaagcttgagcgatgcaagcaagcaagcatatgcattatgcatccactcacttaccctctccatcccttcccgcgccgacggcgtctgcggcaatgtcattgcccacggctatcaacctctccttctcctcctccgcagtcgccgaggcgggcggcgcatcagacttctgcgacccggttaacctcgcgagtagcacgaaggacatgccacccagcacgttggttatgcaccggagagcaacgacggacaccttgaacaccga

SEQ ID NO: 38022 - DNA, 417 bp, Oryza sativa
  unsure (1)..(417): unsure at all n locations
agcttaacattctaaaaagacaatcggntggtagtctgtttatagaaatatgaatctactagttnntttttaattatgcaattgcaacttcttaaatttcaaataaaaagctgaattgtttcgaaaggttttgttttatgagaagtttcagctaccagaaactctctcaaatatgcccatagcccatccgcagttggccgctgccgttgttacggctcccgtcacgcgcggtgtctctcacgtcctctgcggcggccgctgctgcttagctggatagcaaacgccgagccgtgcacgctccgctgccatggacagcgactcgcgtcgcgcagcacggcgccacgagcgcacaacgcgccgggccagcctcacgcgcgcgcggacgacngcgttccactggaactctgtctttctcac

SEQ ID NO: 38023 - DNA, 514 bp, Oryza sativa
  unsure (1)..(514): unsure at all n locations
tctgtnntctgaaatgaataccatgtgccatggcgactggaaccacctgcgcattctgcagttccagatgcttccttgctgtctggaaatccaaatgcttccagatcanaccctagagaatattcttcctcactttcagccaagaaagggtttagcgaggaaggagatacagaaaaatcagcatgatcaaacagcggatgaaaaggagatgcatcttggagaggcttcccgggcttttcttcccactggaagggcacgctgacgacaagtttcgccggagatgggcatgagatggctgatggcactggattggaaatnggcccagtcctttttggcgctccaggcttcacctcccagagaaatgggactgaaatctgctgcttgacgcgctcccttggattgaattcagacagttcaagcttcatccatttggatgtgtggntntactggtttcggaatgggaattgagcctgtgtagatctttcaggcactgctgatataagtaggagagaac

SEQ ID NO: 38024 - DNA, 414 bp, Oryza sativa
  unsure (1)..(414): unsure at all n locations
agcttgtangtattccaagtcggaaaaatgccctttcatataactatctcttgaacagactcttcattaatacatactccctttgtcatataatataagggattttaggttgtttatattcttaaaatctcttatgttataagacagaggaaatagaaaggagtattaattaaatcgctgcatgtgtcgttaactctcgttgaacgcttggtgttatctagtcttggatgtacaatgcttggtgctatctagtctcttcacttttttttttttgctaagagtcattgttgagcaattgttaagttaaacaacgatgtttccgtcttctctcctctcccttaagagactaaggtaactattatttcaattntcaaagggattaattagctgcctcangtcacttaccttacctta

SEQ ID NO: 38025 - DNA, 348 bp, Oryza sativa
  unsure (1)..(348): unsure at all n locations
tcccctctcgatcggaaccctagcctnccttcgatccgcggaggatatggaggttnttaccanaccctagagaggagttggtgctggtgctggtgctggtgcccgctttgatgtgatctgaaagagagacagacggcgagccgagccgaggcgagcgagagggagggagagaggggtggtgggttttcgagtctcgaatcgaaatgggaaatgcaactggaggcgagagggtggggaggagacgcccgtatattctccagggttgggctccgcctcccgtggacgctctgcccactgacagagatgggccccgaattgtcggtgtgagcgggccttggtggacctggt

SEQ ID NO: 38026 - DNA, 456 bp, Oryza sativa
  unsure (1)..(456): unsure at all n locations
agcttcttncgacttgccaaagatgtcttatacatgaccttcattgcgaaggaactcctagtaccactcaattctgagagatacacgctgccaatatctcccgaacctaacttcttaagcaatctacaatggtttaaaccaagaatgccatccttggttttgaccgtctggatcgcttcccaccttgaatcattccctttgtgcggctatgtggtggcgctgctcatgctgctgcgtgagctctcatcacttatgtcgctgctcgtgctcgcgcgacacatgctgctcttaccactctcagtgaaaatagccctgtcacttgtcttagcactaccactggtcttcctcaaactatttcgtccatcactcactttagcagaagcaaaactatcgctcgtactactcttctgtgacgtcttcttcttctgattccattacaatccaagtttggatctc

SEQ ID NO: 38027 - DNA, 381 bp, Oryza sativa
  unsure (1)..(381): unsure at all n locations
acctatgatactcagcttggataaagaatatataatcaacgcctatgttcttattctagtcttngtggcatcaaattagtacgagccttattgttaataacaatatccttctgatgacgattgatgatcaagatctagtgtccatgccattttataaacagacacatcatatatttcttagatgagagagagcatggtatattctgcaacagaatagagataacaatgcacacactctgactgtgtataatatccatatattacttaaagataatacatcatataatcaaatctgtgtcttagaaagattagtataaacaagtattataaactgacaatatacgagtctacctaatcaatcttacatacattataggaatg

SEQ ID NO: 38028 - DNA, 482 bp, Oryza sativa
  unsure (1)..(482): unsure at all n locations
agcttgtagggttcaatatatacttgtaagtnggtacacactcccttaaactacacacataacaacatcgaaatcttttatcctttcaactatataaaaaagtacttatgtactccacacagtttaaataaaacaacatgatatccatatagcaatntttttgcctgccttaatacaacgaaatgataatagtgaaaacaatataaggcctcaccggttgcccaaaaacttattatatagccgagcagcttattagaaaaaaatataatttgtgtgtaaaactaagatctatgtgttgtcagtgacttaaaagtcaatgctgaagaaaatacgttaaaaatattttcaaatcaactctaaaaataaaattttaaatttaactttggctcaatctttttggggacatccgangctaattgctattngcaatatctgaatcatccggcccaaatctagtacacacaacacaacacacaccgagc

SEQ ID NO: 38029 - DNA, 500 bp, Oryza sativa
  unsure (1)..(500): unsure at all n locations
tactcagcttaatataactatnntgtttttttggagaactggataaacaattgtgctgtactctatatatagtcttagagttgtggcgcagcgtatatcatccaaaaatacaattgccgtgtcttctcgagttcacttcctaaccgaggaagctagctagatatgtctggaggtggatcaattgccaacgatggtgaagaggccgccggcggcggcggcggcggccgtggcgaggtgacatttacagttgtgatgagctgcctcacggcgggcgccggcgggctcttgcttgggtacgacatcggtgttacaggtcagtggctagtaaactgaaagtctgaatatgccttcagagcttgaccctgcatgtttctcgtacatggcacggntatgtctttctgttctttcttctcttaaggtactgaagattatctntataccgtaggccgtagggttcaaaaaaatatcttacaccgatgttatgatcattgtctctgatc

SEQ ID NO: 38030 - DNA, 441 bp, Oryza sativa
  unsure (1)..(441): unsure at all n locations
gctngcaatttccacccgacgttcgtactctatcttacttgaatgaactgtatggtcggttcaggttgcgttatctgcccgccacttgaagtaactctgactgtgtcaatccattgtacgaaagtgtgttgtcgtgagcataagttgttctagcaccatatgaatgaaaagaactatgtagacgagacaaacacaagtagtactgcagtagtaatagcaaaagtagtactgctctacaagtttgtaagccaaaagaaacggtcacataaggactgaagaggtagaacactactgacgaggcctcttacccctgtccctcctaccctgcgccctaatgtgcccctgngagtacgtgagtcggtccgggggtacggcacagtcaacccgtcctgcctgtacaggtgtgacctctggctgctcctgagtgtgcgcctctggagc

SEQ ID NO: 38031 - DNA, 460 bp, Oryza sativa
  unsure (1)..(460): unsure at all n locations
ctaagctctgctctactgatttgcttcatcgctcatgatgattatatactaatgcagacgggttatgcaatccaccattctctaacgccaccaattgtcgggtgtctctaaatgcaggtacattaaattcttttgcaccatcttncatctcccgaagctaacagaacagatagaagtgtagataaaaaagatattaatgcaactacttggttgtgaaaacttcaaataacattctgatagtacttttgaatcgttgaaacaatcagcatcgaagtacttcatggaagccttcaatgcaatcacaccagtaattggttcttttctggaaacatcttttgcagaaacagcctcctttgtatcctgaanatgaacagacaaattgtctaaaaaaaatggtcgcaatgaagataaactgaatattataaggagagcaatcttgccttccagatcttgtgggatt

SEQ ID NO: 38032 - DNA, 336 bp, Oryza sativa
cggaccttaagcactgagctgcagcttattgttgcgctgtgagtcgggttgtttcggcagtcaccgtacggggggtgacagtaacggctgtccctgcagcaacaggcgtcacacgtggacggcttgggcgccggtcaggagctgcatccgccaccgaccctattcaaccatacaacattgtgccgcctccacagcgctccacccgtgcatcgcgccatggtgtattctcttctgtttcaaccactcacctccttctagtccgtgcacacacctcccgctggtacaccggtctctagtcggcacctcaagggaggcgtcaggtccaccggtacagag

SEQ ID NO: 38033 - DNA, 470 bp, Oryza sativa
  unsure (1)..(470): unsure at all n locations
tactcagcttaatattattgatggcaaagagctcggtacatcatttaaaatatattatcagtanactagtggttgcagtgaccagagtattactccaatgttctgagttcaaatctctatatgagaaaatttcagagattgngttgtttgtggggctaagtttcctatttcaatggccgggtaaaaaatacccttctctaattnttcttttaaaaaaaggatcagtaaactgccgctctccgtaccttaatgttcgatgctcttgagaccttattgctgtgaattatgcttgttgacaggtctaaattttatcggaagaaatttctctgttgcgatggatgtcaaaactatcgctcccgctggtttcaacattactttttctggtctgattagccttgccgctgggatgggtttgcgattacctgttatgcaaacatatattgatgagaattttcaccttccgaagatcg

SEQ ID NO: 38034 - DNA, 464 bp, Oryza sativa
gcttgagcataagaaatagtgaatgattaaaatgtttatgatagtcagctgccagcaacaaacgacatcgtcacgtaaaagcacttttaatacatacgctatagatagagtattatcacaggccaatataaattgtctgcaggtaaaataatgcgagcaaacaaatcaaaatttagaaaagcaaaataatggacctgtcattgcagaattttgcggtgtagggcttagtacattacccattgaaattaatcagaatgcatggtgattgtgcactatcatatcatcgtagctcaataactccaagtctatttaattgaattaaaggcaaagtattagtgaactctataataaagtccacactctattggatgcaataaaattttgatgtttcttttagcatgaaaatatcagacgtacaattaattagaaacgtgtgacatagaaatactacctgtcattataat

SEQ ID NO: 38035 - DNA, 448 bp, Oryza sativa
  unsure (1)..(448): unsure at all n locations
tttgcatatcatccttaagactttcagctgcaggtgatggtggagggatcatgatggtgattcgctgcttcttgactatcacccagtcatcattctcatcaatcaaaacctctgaaggtggtttgttaccatcgatgcctgacatgtctgctgcccagattataaaatgcccttcctatgggaagctcaaaatctccttactggttagaagtgctacctacaagctacaagatgaanaatacgtagaagtttaatacttatcttatattttcatgaatcatagagaattgaaatgttaagtacagtttgaaagttatatattggtaattctggatccatggaacatatagttaagtatacagttcaatataattagtaactctctggcacagacacaaacacatagtatcaagggactcaggacacgacatgacacattcacatggat

SEQ ID NO: 38036 - DNA, 75 bp, Oryza sativa
ctggaggatgaagaagacatatatataggggtgggactttagtcccggttggtgttaccaaccggggataaagat

SEQ ID NO: 38037 - DNA, 393 bp, Oryza sativa
atcgctatctgaagtccacatctctaaccttaccaaatctatgcacgagagattgtttattctttggacccacaccacacatcataatcaaatcattactgtcacgacatggttattattatatataatagtgccaccgcggcacggtacatatttatacagctctagaaacaggctacagatattctacggatcgacataaatatagtcattcgcatgtgcatgtgtacgacatagaaatctgtacatctcactcgccacactacacagaatgcagaaggggccgacgtcaataccctgaggcacgaggtggtgccactaggttggatggcccacatttctgtgactgagactggattaccctgaggcctagtactacgagcactacttact

SEQ ID NO: 38038 - DNA, 406 bp, Oryza sativa
  unsure (1)..(406): unsure at all n locations
gaagttataacacatatgtgggctcacgacacctagtttgtgaattttcttatgattggcatgacaagggggatgaatatgagtattttgcaaattagtttcagaatatttgccataaataagcatcatagattgtggatatgtggcaggcaaattgatgttgtataagtcaaatgctataagcaanaatagcccagactatgatcgaatcatatttgggataattataaattattgtcacacaacgaagtgtgttatttattagccattgaaaactgcatattcatcactgaagtatgaagttgcgtatacctattttaaagctatctggctacttgttgtacacaatatcctaaataactaatgaccgtgtggattcaattgattctgaatgatcagatgacac

SEQ ID NO: 38039 - DNA, 471 bp, Oryza sativa
  unsure (1)..(471): unsure at all n locations
agcttcgtggtacagcaatcaaaggtcatctttctatggntcctatagatgctgaacctcagccaatacatttggcatacattgatcttaatcttcaggtaaaaaaaatacatccttttgttgttccacaacaaactgtcatggacatcctttttttaattgatactattgtgttctagacccttgcggcagctagaatgctgactccatctggaactatgggccaaactcactgtggtgatgcagggtccaataatccaaacccatcaactcattcaactgacgcacagttgaaggtagtattactgattcttaactaacataacatttgtaaattactgcttgcacaattgtacagcaattgatgttctatcttgtctttcttttgattatgggaagcaagagcttgctgctgtattcaagaaaattggtgacacacaaacatgtacaattggtctttatgaactctac

SEQ ID NO: 38040 - DNA, 398 bp, Oryza sativa
gtcgacagattataccattatcaccaaagatggactgaacaaattgtttcaagcctcactccttattgccaagccaaccggcttatcatctacagagctttcttggcccatgtccaagaagccgcaaacgaagcttgagcgatgcaagcaagcaagcatatgcattatgcatccactcacttaccctctccatcccttcccgcgccgacggcgtctgcggcaatgtcattgcccacggctatcaacctctccttctcctcctccgcagtcgccgaggcggccggcgcatcagacttctgcgacccggttaacctcgcgagtagcacgaaggacatgccacccagcacgttgtttatgcaccggagagcaacgacggacaccttgaacaccgacggcgg

SEQ ID NO: 38041 - DNA, 362 bp, Oryza sativa
  unsure (1)..(362): unsure at all n locations
agcttgtgatacacaacactagcaagagtcgtcttgttcatacctncacaaccaacgatggagacaaccttcaagtttcgcttggactctacatcatcatgcatctccatcagcctactgactagatcatcgggcttcttcttggtgccaacaagctccgaaacattcttatacagtgctgactgcaggcgaaggctatcgacagtttggtgaccgacaggcctggctactgtaacaccatcaaccttgtacttatcgcgcagctcactcacctccttgatgtggctcttgatgtctctgatgatggcaccgatcttatggcgaatcttgaacttggtcaacacgttgaggcttctgtcgat

SEQ ID NO: 38042 - DNA, 405 bp, Oryza sativa
  unsure (1)..(405): unsure at all n locations
ntgagagatggtgtaatgctggtccacagatcgagaattaatatgtttatatttcagtcagattgtntgcaggctgtcgataccatgtcgaatggaggttatgcggcaacagcctcaacagctatttacgaagaatgtaatctaatatggagaggttttgatagcacatctattgaacattgcaatagagaagcatacaaagttgctcatgcattagccatggtagctcttattaggaaagagtcgcgtatttgggtcgatgaacctcctggctatattctaagtactctggcaaacgatgtaactatgttcaatgatcaataaagctagccaaatggcactaaaataaaaggtgtgggtgacttattatgtttctcactggccagatgttctcanaaatgtctc

SEQ ID NO: 38043 - DNA, 425 bp, Oryza sativa
  unsure (1)..(425): unsure at all n locations
gtaaatgaagataatgaggcatatggaaagagttcaagagaaaattattgatcatttgacttccgtaaatgatcaaggaagttgtgcatgcatgaaggcagatagattgacaaaacatctatttaatatgtgaagccaatgaagaaaaagagactaatcataatatcaaagacaaaaagaggagaagcagaaaccaccttcaccatanaacctaaaatcaatattacattacaatatagtataaattaggaatattacgcagaattatagcacaactgcaacacanattataataagttaggaagaaagtttgagttaactagaggtatcgcattacctgaatcagtaattctaaggggtgcctgcctctcatcagattctttcatgccatttgagaaaagcttagaacaacaaattacagtttt

SEQ ID NO: 38044 - DNA, 442 bp, Oryza sativa
  unsure (1)..(442): unsure at all n locations
gaggatccaagagcttgtcatattgaatacatggatgcagcagtgaaatttgtcaatgcttcttcaatgcacccctgtcaccattcatgactcatgagaggaggaaggtacgagcaaaaacaactgtgatgcttgtgcaagaacaggcaaggaatcttggacccaagaaactctcaagctccagatgacanaaatttgagcggttcagattattcagtcgaaatcatcgtcgcaagaacttgcttggagaaaggccaatgcgaaaacaaaaaaattgacaaggcatcaaatcgaccaggacactacagaaataatgtgaatgagtcctagtggagtaggagcaagaaaaaagaacaatgtgatgtacttactactacataggattagaacagtganattcatagtactgaataatgtgatgcttttgggtgtgtntagttca

SEQ ID NO: 38045 - DNA, 368 bp, Oryza sativa
  unsure (1)..(368): unsure at all n locations
atcggcaaagacgtcgtccgcttataatcattatcggctgcagtatctcggaatcagccgatgggagttatcaagtcgccaatagtcggaatcctgctatattcacgtaaggaaatcaatctattaaaggaagcctatccctaagtgaccgagtttaaagaggatgcggcatggcattttatctattaattacgaataggttgctacgttccttttatttttacgaaagtgtgtttagtgtccgataaagactctatattnttccttttatctttacgttagtttctttcttgtccaacaaggactcgtatcaacccatgggtataaatatgtacacaccgggtctatgtaatctatcctcacgatca

SEQ ID NO: 38046 - DNA, 390 bp, Oryza sativa
  unsure (1)..(390): unsure at all n locations
cgcttgtatgacttaagcaccagagaatatacaatgttggtattgcatatatgggcaaccagaatgcaccaaacaatgttntgctgtgaataaattccaaatataagtcaaatgcagaaccaaaaaaactagtatatacaaattacatttggaaacatacagtcagaaaacttttgactatatatagtccaattgtcttggcagctatggcaccaaataatgttntgttgcgaataaaatgctaaatagaagtcttaacaatgccatggcaagtgcttgcatgtagaggtgactgagggtaaagcatccacttgggttttaaaaaatgcatgctntctatgcattggagattnattacagtgtcatatctgtaggagctagccgatatgg

SEQ ID NO: 38047 - DNA, 478 bp, Oryza sativa
  unsure (1)..(478): unsure at all n locations
tactagatagacactganactaaagagataaatctgaagctaacttatccaaactaatcctgcgccatcttagttcctgtggtggttgcctgtttattcttttcccggcgacggcgctgatactgaaggccccacatgatgagacacagcataattagcatgatatacgctgtaaaccttttgcatggcacctactgcagggctccagaacagttaacttaactgtagttgggactatactttcaatgtacctactaatagctgagagcgctctaggggcttccatgagaatatcctcctctatgtgattacaaaatggagaagttnttaagtaacacctacaatcaccatgaatggtgtccaatgtaagagactcgagtgacaccacgttcttcagaatataacaagttagctcaaccaagctctntgcagagcagaaaccagagatcttcacagtcttgaggcttgtcatggcggt

SEQ ID NO: 38048 - DNA, 462 bp, Oryza sativa
  unsure (1)..(462): unsure at all n locations
agcttccttggattgatcttacttctccaagaacacgacatcatggcgacttgactcccatcggctgattctagaactttgaagccgatactgactctaaaccgatggtaactttgggcttaccanatttcactgttaacagaatccacaagaggatcttatgggaggtaaacgtaccactaaaaatcaaagtatttatgtggtttcttcacaaaaaattaatcttgacgaaagataacctcataaagagaaaatggaggggaaacaagcaatgttgttttttaatacacaagagaccatccaacatcttttctttgactgtcatgttgcacgttntgcttggcgatgtgtattctttgccttcaatattccccctctccacaatgcaaaagatatttttggtaactagctaaggggagtgcctagacaaanaaaaagatttatttggagctgtgctctatg

SEQ ID NO: 38049 - DNA, 483 bp, Oryza sativa
tatagcactgcagattacaagagattaatggttggtgagtgctatacatgattaaagtattcaataattatacattacatgttgataaggtgtcactatgaggcggcaatgagagtgatattaaccacataatactaagtactaacctcatcactgtttacttgaatatatcgtgcaactgctccaaacgcgaagttatcaactgatacaaaattgggcccagcaaaatccaaaattacaccatcttctctgcagatgccaatgtgaccgataaaggggatcaaccatgagattaacggtaatggtgtccatactatacaacaaggaaagcgagctcttcttgggtcaattggagcaggctggcttctgtcggtttccatcaggacagtataagcacaagctgttggaaagagaaacggttaacattaaataatagtgtcacaagcatgtgataggggtgccggcaatacacataaagcatgc

SEQ ID NO: 38050 - DNA, 426 bp, Oryza sativa
  unsure (1)..(426): unsure at all n locations
agctttatagtcttacntcttgtttngtgacagatgatggatcattcgcaatgcttctgaaaataatgcatgataactaaagggctacaaactaatgtatttgagcttgtaagaacagaatttttataaataaactatactgtgttggcgattctatatggtctttaaaggagataccctgtgcattatagtgcaaacttattaatctcataggaactactcctaagtaacatttaaaaattgtagtaccctcacattatatatccttcttaaataccacatgattgctcatgtgttcgaattggtatatgaaaattgaacatgcattacacggtaatattgcacttctgttgatttattcagctagtaagtttaaaatcctataatatttacaacatatatcatgtacctaataatcttcacata

SEQ ID NO: 38051 - DNA, 432 bp, Oryza sativa
  unsure (1)..(432): unsure at all n locations
tctggcaactagagattctatgatagctgtagctgctaatagcttccccanataggctcttagtagaaccaactaagctggttcatggaatcagttccagtcttacagaacttaagtacacagaaagatatataactatgacagctaactatttttttaaaaaaaaaagataaacaattgggctgctgcaatctctgcatcagcaaagtgctaagcacatcgcttcttggctaattcagcttgttaacttttcctgccttgatggaaacgccgggccgaaaccttctccgaccaggattaggagctcgagcttgttcatcgcctgctgtatcggttaacgcttcttcctcctctccttgtngaatatctgcaggagacgaatgttcgggaaagtcttttctgcatcagcacctaggctgaacaccacacgat

SEQ ID NO: 38052 - DNA, 475 bp, Oryza sativa
  unsure (1)..(475): unsure at all n locations
agcttcctgatgttctnctgcagggctttgcttgctacattatctngttgagcgattgacaggaactctgcactcccagatgcaaaaatagaagtcccaggcaaaaccccgctaaaggaaggctggtaacggggatcgattgagtatccggatggttgcggctggacctgcacaggagctggtccaccattcgctgctctctgagcagaagcatcatccaccctcctaccaagccccttcctgaactgctcctcctcccatttcctctcttcctcantcctcatcgcatccttttcatcctcaacctccctgaaaccatcattgataacccccaaactggcagcaggacctctattattgatcacgccaaatacacctttcgtgctcctctggctatctgacttctcagcgtacattgcaatacggccgcgtgtctcatcatcatcctcgtcgctggatccaccagcagcttcac

SEQ ID NO: 38053 - DNA, 462 bp, Oryza sativa
  unsure (1)..(462): unsure at all n locations
actaagcttacacctttctcaggtttgaacttgacagcttcccattcagcggatgatatatgaacaacttgtggaccataaagatatcctntaattctttgatctggnggaacgactgtgtctggttctagaacacttttgtactcataatccactttgacttcatgagatgcaaatttatcacttgcaggagccttatcagaatacttcttcaaagtggggaatttctcctcagatgtttcttatagacccacacctgttcacaaagacgtcagaccaaattgcaaactgaaccagaattaatataaatttctctaactgataaaaacaacattacatgaatttaagagaacaacaccccacctttattttaaagctagagctcacttccaagtctctcctgaagacagtaactggaagtcatctctagtcctgagagcacctaagagtgacgttcggctg

SEQ ID NO: 38054 - DNA, 478 bp, Oryza sativa
  unsure (1)..(478): unsure at all n locations
gtcctacagtgatggatataagcgcaattgttatttctgnggagttatacattngtgtattgataagaccgttcacaatttcttgaagctcgatctccctcncagatgaaccatatagccaagagaaaccatgaaccagaatagaagagcttgccccacccatgagtaaatatttcatagtagcctcattagaccgtagatctctcttggtatatccagacaataggtaggaacataaactgaaacattctggagctacaaagatagttattaaatcgttagcaccacataaaaacattccccctagagtagctgttaatacgaataacagaaactctgttatagccatttctgtacattcaatgtactctacggatagaggaataccataaagtgaacataatanaataagaaattgaaagattcgttgaaatgttcgttggaaatttccgaaagctaatatatgtctttctcatcg

SEQ ID NO: 38055 - DNA, 394 bp, Oryza sativa
  unsure (1)..(394): unsure at all n locations
acaagatgcaagtntgcgtatgaatatatcatggtggaatcagtcacggctggatgttgctcagaagtttgtccctaccaaattgcaatagcaaaaattacttattcatgagcgatatctgcaatgcgcagcatcatgagctgtgtttcctgagcagatgcatattatttgctccaggataattaatttaattttgtaaatgagtatctattcgcaacaagcagtgcaaatttaaatgattctgctattacttgtgtgaagtttatacagtagtcgtacctgaagtttctgtgatgttggtgtgggtgcctaacccgacgaggcgcanatggcttctctatgcaacgattagtaattctgagcgatatgattctttttcccccaatctccattt

SEQ ID NO: 38056 - DNA, 397 bp, Oryza sativa
  unsure (1)..(397): unsure at all n locations
gtcgtcatacataaatggttaactgttttgcaactctgtacattgacaaagaaatgctagatatcgtaaaaaaaacagagacaccactagatgagaatgatatggatactatcataatgactttgcgtctagaaatgtttatgatgttttctgtaagtattgcttttggatgcagattaaatatgtagcggtaaaaaaatatttatgcataagtaaaacgttgtgtgctatgtagcgctatattgattattatttagatgtaatttgtttcttgcgggagtatagatgtaaaattaagggcccatgtttcttaatttcgtctangccaccaaaatctcagaatcggccctgtttcttaattctgcgctaatggttacgaagagagggaatgattctt

SEQ ID NO: 38057 - DNA, 445 bp, Oryza sativa
  unsure (1)..(445): unsure at all n locations
atcctctgagtcacctgcggcatcaagctatccataaaatacaaaggtgaatataatcttgtaaggggagaataaaaaaaaaacagatttgctgaattacataaaatgacatatgaagactataaataaacatnacccgtgcatatgatgttgtgctacctccaaaaggccgagcttgagctcttacttctggggcactagttttatcaggcatcgctcctcctctaccatagtcaacagttntgtctaccacaacaaagtgatcatcgcagctgtagtaagctgcagagtctcgtgctctgatctgcatctgtgtagaatataagagatttcgtaaacactaagaaaataatttgcatgggcacatgaataaacaagttcatgctacaactgaataagggagaagcttacttcttcacgaactggagctaatcgactacatttc

SEQ ID NO: 38058 - DNA, 447 bp, Oryza sativa
ggtgtctcctctacccgccgccaccctcgccttcgtctcttctcgtccgttgcgccctagcgccgtgtagcttcgagccgccgtcgccgccgtcgctccagccgtgcgccgccgccgttccagacgtcgccgtcgctcgggaaaaccgccgtcgtggtcgccaagtcgtcgccgtcctcgtccgctgcttcgccacagtcggagaccgccggagcatcgtcgccgtcgtcaaaccgaagaccgccgccgtttcaacctcgtcgccgtcgccgtccgttggtcttccgctgctcttttggtcaccggtgagttcgccgcgtcgcgctctacccgttggtgccctccgttcgtgccgaagcgccgccgttcgccagcgagcgtgcgccgttcgagccgtctgagccgccgagccgcctgcgccgtggtgacgtcatcgtcgacgtcatc

SEQ ID NO: 38059 - DNA, 448 bp, Oryza sativa
  unsure (1)..(448): unsure at all n locations
agctttgtgtctctaaggagctcaaggtgattcatattgttntcaaacaaatgttccttaagatattcagcagcaagtgatcctccatgacctaatgtatgaaatgttatgaacaaagacatattacggaatgaaaataacttaatgaaagaaaattcaaggacagtaccatctaatacaccaaataggctgactgtctgttcgttgatcgtagtcatctttatgctaaaccgatcctccatagaaggcctcctccccttgaaacttgaataatcccagctaagtctaccatcctcactaccaaaaaggtcattgacattatgttaatccatgtgccgtctcaaatatctagtaaaaggaccacaactacaggaagttcatgatattctgaaattgcacggacaagcaacttcgaatgccagcaagtaaatacatacataatatcgcg

SEQ ID NO: 38060 - DNA, 449 bp, Oryza sativa
  unsure (1)..(449): unsure at all n locations
agcttctnccagaatgctccgcatagaagagtgatgttctctccgcatccagctgaaccactgcctctttgacgatatcaaatccagactccaagatgacctccttgattctctccgcgtgattaccagatagaccgtccggtttgatcatcgccagcgtgctctccctctcgatagctacgcagctccagcatctgcccaaaatcaaacgccaaaacaacattgtacatcaaaatgtcacatgagaagaccttaacattgtacagccacttcttcagctgaatgcaccaccaaaaaacanagcattcctgaacacagacgtttcatttcatctcaatcacgcttagttaagaatacccatgtgtacacactacagtcgctgtatgtatccaagggatcctaattaagcgagagagcgatccacagtgtgttgatgatgtgagcagggg

SEQ ID NO: 38061 - DNA, 477 bp, Oryza sativa
  unsure (1)..(477): unsure at all n locations
acctgtatttctcagcggtntacgaggtactgtatggcgcaagtggctcangcaatgcgtgaaactctgaacgctagaatccattcttcagaatctgcccattgccgtgcaggttngctacagtgatcggcatcgaaccacgcagcatatgtcatcgtattgatactactgggtaaccagtgtgaacgatgtagttgcaggttaagtactacagcttgcgtgaacttcatcccaataataaagatatatatagctctgttatgcgatgcaactgtgtagtcacccaggttaagtacgttntttagtgctccgcagtaagggtgatgttttttttatgctggaagtaaaaggacggacacagtaaaatgtttacgtccacccgtaacgcaggattgacagaaactcattaacagaataaaatacaaatatttggtatgaatatatatgatcacagaatttgctaacacacaccaaaat

SEQ ID NO: 38062 - DNA, 434 bp, Oryza sativa
  unsure (1)..(434): unsure at all n locations
agcttgacgaagatcccgatccgtcgaagaacgtacttcgttcgggtcataccacccaacatacgaagccgntgagtagtttgttgttgaagaatccatcttctcgaacccatctcgtcgaaatcctaaagcaccaatatccccctacggccctacctggcgcgccactgtcgacgtatgatgtcgcgattccggtatttgcatagtatgaggatcgttggcactaggatgtacgcgagacttaggtaaaagatacggagatgaggatttttatacaggttcgggcccctgaattgtcaggtaataacccaacatccgaagccggtactactcttattcatcataatcacaccagtacaatattttgggtagcctatctaactggtgtcgacttggcggtctgtagtactgactcatagtcgacaacagggtag

SEQ ID NO: 38063 - DNA, 452 bp, Oryza sativa
  unsure (1)..(452): unsure at all n locations
tgcctcagctnctggctctgcactgcttattcctaccattatactagcacttgctctatctggcatgacgaattgtttagtgtaaaccaagatgatggcattgaaattcattctcaagatgttctttacctccgccttgccgccaaagatttgcagagtttgagaaacaacaaaaggaaaccaaatgttgcagttgttattgctgcaagcgtaattggttttgtgttattaatggtcgggatgtttttactgatttggaggaacagattcgagtggtgtggtgcgccattacatgacggtgaagacagcagtggaataaaggcatttagatacaatgatctagttcatgccactanaaatttctcagaacagctcggagcacgctggtttggctctgtgttcaaggaatgttaatgactaactaccatagctgtgaaagactcgatgggatc

SEQ ID NO: 38064 - DNA, 393 bp, Oryza sativa
  unsure (1)..(393): unsure at all n locations
cggaccggattntagcacacgggatactaatagtgatattaatacgatccanactatctttgtgtgtaactgtgtatcacgcagttatgttgttgttgttgttgctcgtgttgttgttgttgtaatacacaaaaactacaacgctcgcagctaatggtagcgagtatcgacccaaacgtggagggactcatctgcataatttcagcacgaggccatctgagagccgttagatgactagcgtgctgtccatatcctacggcgtctctctctcgcctcgcctgcggtgaattcgacggtagccgttagctgtacccctaaaatgtacaatcacgcactaaattctaatccaaaatcttcgccataaatttttgcacgtatttgccgccacgtaca

SEQ ID NO: 38065 - DNA, 398 bp, Oryza sativa
  unsure (1)..(398): unsure at all n locations
gaaacacaaagtatccccgggcacacggcgaattctaccaaattngtccgtaatcccaaaccattcgttgcgagctgcgatacagcagtggaagtcacaatctgctcatgcaaagtcataaaatgggcgtggagtttgtttcgatatgattntaactttttgttctttgagttctttatccggagtttgtttcgatatgatttaacttttttggtctttgagttctntatcctgtanattagagtgcagttaggatcttagggaggagggctgttgccggtaaataaaggtgttaaccgtgcaaactatttagtaccgaaattgaaaaaattgcagatatgatttgttcttataatatgagtaacatgtttctctttcagtttctgtggtggctctct

SEQ ID NO: 38066 - DNA, 430 bp, Oryza sativa
  unsure (1)..(430): unsure at all n locations
ctttatctaacccccagcgttgttgtttcgtgtgatgctattttatacctgttgacagtttattattgtcttgcaggcaatagggatgaactacttgcatgctagccatcctactattgtgcatcgtgacttgaaatccccaaatcttttagtggataataattgagttgttaaggtgactctctcagaaatcacaaccctcttctcattcaatacagaacaaaanagcttactagccttgttgttctgtttcatcttggataaaccttgtctcgtttctcatacgaagaatataagaattgctgaagttgatatgatatttagttggtatcacaaagatgtgctgctcttctcttttcaatgtagtgttacatgacacacgaacattggatacactcgactacattcctctcattataatactgtatgt

SEQ ID NO: 38067 - DNA, 377 bp, Oryza sativa
  unsure (1)..(377): unsure at all n locations
taaatgatgtaactggcagttacataccaaacttttcaaaacctacagcntgaactgatagaagggataaaatttccttcatgctacaagattcagagcatatcggaccctcattccaatttctgttgctccaggaataacctcgcttcctaagtcatttgcagcaaggaaattttgacggagaagcttaagcatcacatctttgctaaaacatagattccatactacaatgtaggcaattctttgcctctagtatcaggccaagatggagtgtcacctgcagatcaaacatcagacatcactgaatgtatgcttcacagatatgtgcatatggctcacggatactcataattacatattgattaactctctctttg

SEQ ID NO: 38068 - DNA, 358 bp, Oryza sativa
  unsure (1)..(358): unsure at all n locations
gcttcctcgtcgcccnctctcngctattccctatctcgccgaacgtctctcgtgctctccatacgctccgcgccatgcaaccacccgccgacgtcgctttcgtactctggtcgctgctagccgccgctagggtcgccgccgcaccgcgccgtcgccgccgtcgggttcgcgaggtcaaactncacctcgtgcgccccttccccgtctggattcgatgccggaattcgcattccctcacgctccggtgagttctacctctaccgtcgccttcgagcatggatgccagctgccgtggatcatctccctctctctaatctctctctactccttccttatggcaccccaaagcccgtccacc

SEQ ID NO: 38069 - DNA, 459 bp, Oryza sativa
  unsure (1)..(459): unsure at all n locations
agcttaattaatccatcattagcaaatgtttactgtattctttctttgncatatcatgtcgcaattaggcttaaatgattcgtctcgcactttacacgcaaactatgtaattagttgtttttatctatatttaatactccgtacatttgtcaaactgtcgatgtgacagggaaaaaaaatatgccggtggttctaaacaaggcctttgtagcatatcttgataattgcgcattgatttgtgatttctaacctgtcttgtaaggtggtggatgatatccaaggatgacattaacgctattcgttggtttgcaagcataccacaattttgataatatcaaaacataggtaaggtcttgccaatgccaatattatttgacaatatctacgtggcgtgtgcacgtttggtagccagccaatattactagattactattaaaatgccatatttgttgggaagtt

SEQ ID NO: 38070 - DNA, 452 bp, Oryza sativa
  unsure (1)..(452): unsure at all n locations
gaagtatgatcagcacaagaatgctcgaatactatgatcagtggtaaaagtaccgaaagcacatgatggagcagagaataacaacatgaacagggtgtaaaatgaatgtaatacaactacaaacagatacacattcataaattgctggtagttgctaccaccccatagttcaataaatgtgagccaataaagctttactgaaaccttgatagcataagcatcaaactagtgcttangtttaaaacttccaaccaccattcanggtacaagaggcacaagtagcacccacaagaataacgaataggtgggtaggagagaagctctgaaagagctaattcatctaattcagaaaatgagtctacacagatatgtttaattactctntacaaaattntgtggttcattgacatcaacataatgaaatatgagtacaccaggttcgaatgtaccat

SEQ ID NO: 38071 - DNA, 364 bp, Oryza sativa
  unsure (1)..(364): unsure at all n locations
cgccgaacacgcacttgtcagagttcagctctatgcggtcggagcggagactttcgaaagttgcgctagatccgagagtaaggtctcttggttgcgccgtttcacaaccaagtcatcaacataggcctcaacattacgtcctatttggctacccaaagaaattcgagtagtacgctgaatagtaggacctgcattctttaacccgaaaggcattgtcgtataacaataagttcctatgggggtaatgaatgcagttttttcctcatcctccctagccatgcgaatctgatgataaccagagtatgcatctagaanacacagaaggtcgcaccctgcggtggagtcgacaatctgatctatgcgt

SEQ ID NO: 38072 - DNA, 450 bp, Oryza sativa
  unsure (1)..(450): unsure at all n locations
ctaatgcacaaaatgattgctcgccatctactgtctctaaaaacagccggcggcgtcatcttgtcagtcacctgctcacctgttaatattcagagatcttcagntaaaccctctacggactcatatgacctcatcccacaatccttttagccatctcatggtttctgaaatcagaatccatatttgagttcattcctctgctcttctgttcagtgatctactctcatcttggaataacactgaaaattgcatttcctctttcttataacagatcatttcatccgtatcagacggctttaatttaaacggtatgatatttgcgtctgggcacctgaacgacgaacaaaagagaactgcagaaaataagctgaaagagagagatcaaaggggagtcggagtttcatcctccgaacccaccgcttatgctctagntgtgttttgggctttggc

SEQ ID NO: 38073 - DNA, 475 bp, Oryza sativa
  unsure (1)..(475): unsure at all n locations
atatagcacctatcttacagagctgaggtactatattccatnttgcanacaattataaatgaattccaagaaaggaagcaattaaatgaagcaactgtgacttttttcgggacaagatggagctgccagatatttactgtgattaacatgcagcaccaaacgatgatttataacagatgctatattgttgtagaaaataatcaagaaagtgaagctatgttattctagaagataagataggaaaattaaggcaaaatagcaccattcaacaggactgactaagatcaaagatctataaagcttatgttgctagacatgaatctaactgcgaaaaaacatgtctcccagaatagaaacaaacatgtataccagcttaatacatttctacttttccataacaacagtaatgtacgtcatcccagattagcaacaacagttggctgagagctatctcatgcatatttttatgccatat

SEQ ID NO: 38074 - DNA, 476 bp, Oryza sativa
  unsure (1)..(476): unsure at all n locations
gcatgcagcctgtcaagtcaacgtctcggactgtttctctgttgaagaagacatcccacagactactagagctgcattaaaatcaagatgatggtcacagagaccaagcccaacgcatgagacactgagaaatttanaattgacagctgcataccttggctagctacgagcagcagcaagatgatggccacagatgaagccaaacgcatcggagagcagtcggccattgccctctctgtataacctgcagctagatcctacctagatttgaaatagggtagcagttggcagcaaactgccaaatacttgctcaagctatacaggcatgcacttcacttgcctgccgggagtatataaagtcaccacgccatctgctcatgcatgtgtgcctctgagaacatagcacgccacttgactcgggagaggccatgcatatactgagaccgcgcgcatgcatgcacgcgcgcacaccattc

SEQ ID NO: 38075 - DNA, 427 bp, Oryza sativa
  unsure (1)..(427): unsure at all n locations
tgatcctctgaagcacatngaccctcaccactcttgtattatgagggcacacagttgtcggataccactccgccgtcgcaagggcagcctcacaagcaccgctaggagcagctcactggcataccatcgacatggcgcagctcgctgctgcttatagaccaccacctcctactccacccccaacggcagcagaccggtgcaagggaaagaggccagcaacacacactactgcctcagggagttcttccaagaagtcacgaagcgactccgctggactggctttggagaggattgcggacatccgagagcagagctaccagagtcgtgttgctcatatggaagcagagaagtctatgggccttgatgcgtgcatagagttggtggataatgatggccatgacatcggaggaagtgtgtggtatgctgc

SEQ ID NO: 38076 - DNA, 406 bp, Oryza sativa
  unsure (1)..(406): unsure at all n locations
acacgcagaaaaatttttaccaactgttccatgtgacttctcttcgatccaggtatactacaaactcctctatttttctaacgtgggtgtactgaaaatatctatctagattttagaggcaatatcgntcttacttctacttcattgccaatattgatttaccccattttnttagaaatatttgttttgcccctactttttcgaaataaatcagtcgtttggccctgttctattaattgttgctaacggcgttaaatgtgaggtaaaaatgataagtatacccttagatattgatatttccggtacttttgtacaccacttgcatatttaccctattntgagataaggcatattggcaactcttacaaaagaatngacacattacattactgctatagtatgggat

SEQ ID NO: 38077 - DNA, 449 bp, Oryza sativa
  unsure (1)..(449): unsure at all n locations
tctcctttaagttcagctaattccttctgtagacggtacaccttgctctccaacttgcaaatcttgcctcgattccagctttccctgtcatgagctgctttgtctcgctccacacttactgcatccatagcactaagcatatgcaccgcatgcatcagagtggcactctcttcaccatcaggacaggtataggttccatagtcttgtccatgaggcttgtgaggatgatactggaaagctgatgaatccaactcttcttcanagcgttgacgcaactcttcaatggccaccaaagctgcttcttgacaagcatggctgtacgatcttccttcagcttcgaacttaatggacggaaggtcttcacgatcactagccaacgtcacacgaacacgacacttctcctcgtcggggtcatgggaacatttgcgatactcaggagcaacttcata

SEQ ID NO: 38078 - DNA, 480 bp, Oryza sativa
  unsure (1)..(480): unsure at all n locations
gtcacctgcngcatgcaagcttcttcaaccttggcaaactggtgcgactaattctttctcacaactccttcactggtgcactaccaaatgatcttagcaggctaaaacaaggtgatacaattgatttatcgtccaattctttgcttggaagtatcccagaatcatttggacaaatcaggatgctgacctacctaaatctatcgcacaactcatttggagactcaataccgtactcatttcaagagcttgctaacttggcaacattggacctctcctccaacaacctctctggtaccataccaaaattccttgcaaatttcacatacttgacagccttgaatctgtccttcaataggctagaaggccagataccagatggtggtgttttctcaaacattacgctacagtccttgatcgggaatgctgcattatgcggtgctccacgtctaggatgttcaccatgtcttcagaagtctcact

SEQ ID NO: 38079 - DNA, 492 bp, Oryza sativa
  unsure (1)..(492): unsure at all n locations
ctggttgatatattatattgatgttattgctgacgtctttgcatatcatacctgatatattactttccttcttttttttgaaaacctatattggccgcgaattttttttgtctgggaccactggaccaccctttgaaattaagaagctgcatgtgcttggatgcaaaacaatcaaataaatcgtggttcttttctttgactgacatatgggccgtttcatttgaatgaattttcttttagaattttaattatttgtctacagaatttctagaatcgcaagttatcttcttggaaaaaaaactttcaaatgtaagtatagtatagttgtaattagactatagttatgttgtacctatagtgtaactatatnttaatctctatataagttagatataaagttgtgcgtattatntaatagttatatataagttggatcgcagttatagtatacctatagtggattatattacattatactataggtcattacta

SEQ ID NO: 38080 - DNA, 433 bp, Oryza sativa
tgcaagcttgtcttcgggcattagacactcaaataaaattttatctagctggatggaccgcgcaattgcgcggctagcacccatataaaatcacatatttttttagtgtgattgtacttaaaagttattaaatagctatctcattggattaagactttgaaagaccaaaccttaccatcctcgtgtgtctaattatatagttcttaaaagtcacgctaggtgctactccttatgccatctccttctttatttgcttgctcgatctaccaccattatttctattcattcttattagaacctttagaaattggatattatagtttttagagtttattgtcacgtcgggttcatttttataatttctagatgtcccatcaaacattgccattatactcctctacggcccgtgcactgtatcttttctttatcgtca

SEQ ID NO: 38081 - DNA, 417 bp, Oryza sativa
ctcagcttgcacgggctgacaccaccctacagcatgaccgtcgtgtcgtctgaccagaccgcccgtgtcaacgggtggcttggcgcatcgccgtcgccttcatcttcctcaccgcagccatcgtctcaccgtcaccactcgccgacgggccttcaccaccgccgatccgacgcgccgtgcagccgtccactgtcgggagctgtgccacgtcgccctccgccgttgtcggccgagccttcgctgcggtcgccaccgaggactccacgcacgccggcctccgcagcctccagtcgcatcgccgttcgcggcctccgcacacgttagcctcagccgtgtctgcccgcgccatgctccaccgactacgccaccgtggcctcgccgtcgccaccgcgtactcggcacgcgtcggcctccttt

SEQ ID NO: 38082 - DNA, 403 bp, Oryza sativa
  unsure (1)..(403): unsure at all n locations
agtactcatgagccccganatttcttctagatcattttctatgtccgttcgaagttgatgttattaggaggcccgaatccgaattaaatacgtgtacaacttgatctcttgtcttctatgggccacaagtgacgtggtgagatgaaagaagacttggagaaggtcttggtttggtcttcaatcaacttcttcaatcatccatgcattccttatactcgatctcttttctttcgtcctaacaagtacctctgcagacaaaaacacacgaaactcattgtgtaccagcgtttgttcaaatatataacaagtatatctagtttagaacatatgcacctttgggtgttaatacataanggagtcataggtatattcgagctagntgtggcctcatcactcagaccta

SEQ ID NO: 38083 - DNA, 372 bp, Oryza sativa
  unsure (1)..(372): unsure at all n locations
cgcggtttgaatgatatatccaatgacatcagttctaagaacccatttgcgatccgcccattggcttcgcgattatgaagtatatccncgagtggaaacgatgtaaccaccgtgaccgagtgaccttggaagtagtgagataatttcctgacggtaattagaacaccatataacagcttctgaacttgaggatatctcgtcttggagtcggccaaaacctcgctaacgaagtaaattggtcgttggacattctgaacatggccttcttctcacgctcacaaccaggaccgtgctacaacctgagaagtgccgacacgtataacaatagcggctttgcggatggggaggcaaaatagtnagtggtgagagttc

SEQ ID NO: 38084 - DNA, 394 bp, Oryza sativa
  unsure (1)..(394): unsure at all n locations
cacacaaccagtccaacctttgntccattgcattagctgacgacataaggacgatgtcatattattaggtggttgcttcgggattccaagcttgttggtgttgaaagcacttcgtctttctcctccatggtgcacacaggcctgctgcaggtggcaggatgtgcaggtgacaagtggcgtggttagctggcggcaaggggcgaagggaggctagagatggcgtctccgcgtccgctggactgcgtgaaaaggggatcgatagagagagagagagattgattgattgattccagagttcgagatggtagatggatagggttttggaggtttatatatgggccttatgggccgcaagttgggagaaagattatatttgtatgcctgtagactactg

SEQ ID NO: 38085 - DNA, 498 bp, Oryza sativa
  unsure (1)..(498): unsure at all n locations
cagtgtatagtggctactgccaaagtacaagggtcattataggtttatgcttgtcgtacgtatatttgtacagtcccaagctactgtgtaaacataaatataggcgacagtntaggggataaaaagttaccttttcctcttcttttttaccccccaggaagaaaacactagaaataaaagcaatgttcacatcgacttgctgtctagctgtgtactggaatagaagtgcagggctcagcccaatggcgtgttctcagatgctgtctactccctgtgttaaaactatatagtaattttcagggttcanaatntatattgaaatataacaacttctcaacctattcggttactctatcgtttcaatcaattataactatatcttgtttcaattctctacttatttcctaattctaattctcttcttaattcatccatgtaagaaaattcttgcgtgaagtgccatctaaagggcattatgggcttggtgatatctaacca

SEQ ID NO: 38086 - DNA, 464 bp, Oryza sativa
gatgcatcaaagaatgaattattaaactttgcaattacacggcgcgacacataacttcagagacaataaactgcttcacagccctcacgatgtcagtcttcagcactcaccaattgtgctgataaaaacgagacgggaaaccatcacggcccggcgctattatgggtccaatttgaaagactgcgttggaagattcttctatactgaactccgcacaaagcctctcattcatctcagacgtcacctttccctgcaccaacctggtaactctagactgatcgagcaaaggatctgcggtgaaaacagtcttgaagtagtcggtcgccatatcttctaaaactggctgagtactatgaacagtgccggctgagtcatgcagctttgtgattctgttcttctttgcacgccaaaccactctactatggaaaaacttagcattgcgatcacccttttgatccagttga

SEQ ID NO: 38087 - DNA, 366 bp, Oryza sativa
  unsure (1)..(366): unsure at all n locations
tgacgcagcggaatttaaacatcattaatgttttgttaagtccacanatggatctcttaagtctgtaccctatatgtgactngtatttccataacaaaaccctcaagttatgttatgtatgtttaattgtgcaagtcacaaattaagagatacaaaattctagcatccacataatggatctatgagtcataaatgaggtagaataattctcgctgatcttactagagctcttgatgagctcccactgatcttattatttatgtaatggacgcataataccttatgaacttgaatcacttagctttacttagcgaattatcatctaattaatgatagatgtcagacatttctaacggtgaagtgtct

SEQ ID NO: 38088 - DNA, 434 bp, Oryza sativa
  unsure (1)..(434): unsure at all n locations
agctnttcgatgacacagtatttggagcagaatatatataatattgataatatactagctattactctaatacagactcatacaaacaaataaatctaaagaaatatatcaaataacaaacaatcaccaagtttgacaacttagctgatattgaactatacttgatatacttacataaagcgatctatttgtataagtggcaaatatacataaaacagatcatgagacatgctctataatgcataataagtaagattggtaaaacgctgatattatcgttaattatgattaattgcatgttagtttataggttctaaacaagactagggatgatgcatcgcaaagtatgtaaagaaatctaaagtctaaacaatcaagaaattaaccacttttcaggatggatagcttagcttatctaataactaatctaatct

SEQ ID NO: 38089 - DNA, 484 bp, Oryza sativa
  unsure (1)..(484): unsure at all n locations
tgcaagctttatgggagagaattgccggaaactctttctgtctataggatcacgacaagtcatatgttgataggaggataaagattcccccttttacattgttacggtgtgtttgagaagaacgcgatcgaggagattgggaagatacgcaaaacgaggtgagctattagctcatgattaattgagtattaactattttaaattntaaaaatagattaatatgattttttaaagcaactttcctatagaaattttttgcaaagagcgcaccgtttagtagtttgagaaacgtgcgcgcggaaaacgaaacatacaaactcactctctcaccctctcgaacgctgccagtacacatagaatgctatatatgcttaaagcccatcttttaattttgtagtacacatagaatgctatatatatgcttaaagcccatttanaacatatgacttgaaaanatacaataatataaaaaatgtaattattc

SEQ ID NO: 38090 - DNA, 360 bp, Oryza sativa
  unsure (1)..(360): unsure at all n locations
cacttcatactaagcttcatgcatcaggcgagccgccaacttgatcggagtcaagtggtctagtcgtcgctatanatttcggcagccaccataacatagccgtcatgcgccgcgtcacagctcgatcgctagccctactcgctagctagatcggcggccatggtgaacggctacttgttccaggagtacatcagcgcgcaagtcaccggcgtgcgcttcttcgacgtgcccgtcaacccgggcctcagcttccacttcatcctcgccttcgccatcgactacttcatggcgacgcagtcctccaagccggcgcagccaacggcgtgttccgcccgtactgtgacacggtcaacctgtccc

SEQ ID NO: 38091 - DNA, 362 bp, Oryza sativa
  unsure (1)..(362): unsure at all n locations
gctttctgcgacttctgtccgtgtagaacatctttctgttattcttggtgcatngtacgtctgcacggtcatgaatggtccactagaggatataccacgggagctcggttttcatgggaatccatttctccaaggacttgtggtcagcatattcattgttggagcatttttcggacgcttaagctcatctgcactagtcgacaatgttggatgtaaaaggactcttcaaattgatagcattccgctgattcttggtgcacttctcaagtactcagattcactgtttctaacttaatggagttcctgctgaccagtgtgcagcatgcttgtatagaattttacatagaattcacgttcttttt

SEQ ID NO: 38092 - DNA, 454 bp, Oryza sativa
  unsure (1)..(454): unsure at all n locations
agacaggttcgatatttacaaccctgagagttgactntgtaaagaaatttatttcggaataattntacatctactcgtactcgtacaggacatccagtgggctttactcaatcaagttcatggagttatggacaggagattcgctaagcaaacaattatatcaggtatatatgttgtacaattagcacggaagcattcctatttatttcatttaaaactaataatattgttgtcaattacacaggaagacatagacagctacaggagataacttgcaacaatctggtacatgtcttctgtaaacaagcttcgaaacaatatctggtctacctcatacggacatggtactgatggaggaactacggcggcagatgtatgattgaatagagttcttaccggtctatcattcaactcatgaagaatattgacatgtcaaaatcatgggactaatata

SEQ ID NO: 38093 - DNA, 489 bp, Oryza sativa
  unsure (1)..(489): unsure at all n locations
agctngaaatgaaagtgttggtgatatggcatgatgtctttcaaccaacctgccgaaagcatgcgaccggcgaagattcaagcccgagacgtcagggttagtcaaggcgaaccctccccatggcgaagactatggagcaaggacagcgagaggcagggaatcgcagccaggctagaggcctcctgngcgaagggcgcaaggcgaagagcatatgccgaagggggacgacttagccgtagcaggttcggccccgggagggccgaagaggctatcctggcccatctagcctaggggtcaattgggttgacaataacccgttggcccgctaaaggcccatggaccgcaattacgcaatgtaccgatgtaaatgtcgctttcataagggcaaccatgtaaattcccctgtataaccaaagccctagtagtaagacctgaatagggattataatagcccatacggcctgtaatgggggatcctcaagtaaaatc

SEQ ID NO: 38094 - DNA, 431 bp, Oryza sativa
  unsure (1)..(431): unsure at all n locations
tgtgcanagtagagagcccaatggagagaatccatggtatcccgggaaatgctctcctcctagcctttcgtaccacgtggggtcacgtactaagcacgccaaatgctagaagagtaagaatcagaagagaacagcatcgatgcgaactgaagaagaagtacgtaagatgactattgccagcaccgaatggccttcagcanggataactattcctagaccgtcaagaggaaatactttccgaggtgcacgacagttgacccagcacctcctaagccatggtggcagagtatctgatagtgaagggtcagatcaagtctcctgggattatgaagatgagtctccccgacatctcggcgaggaagagatggaatcaaaagcatgccctcgttgtggagaaattgacatcgtgctagcatgtgtctcacactctg

SEQ ID NO: 38095 - DNA, 357 bp, Oryza sativa
  unsure (1)..(357): unsure at all n locations
agatacacatacgctgatacgcatgtgcaacgctcttctctatatatgcgtacatggattctacagctccatctctgtagattgatcggccctgtatgttggcaaaggctgtgtttaaagccaaagttagcatccaaacttcaatacttttgcatcacatcaatttgttatacacacactactgttctagcacatcatcttcaatttcaacaaaaatgcagactttacgctgtactaaacacagtcaaaatgtttttctaacatgtgtggactttngatgaagaggcacatgagatatgcactatcagcagtaacagacggatgatcactgttacagcgctgcccatgtcatactgg

SEQ ID NO: 38096 - DNA, 364 bp, Oryza sativa
agcttcatacttcaatggtacggactaagccgcttgtaaacataatatgtagatgcatttgaagactattaacccatttatttggagaatagtcgaaaaaggctatgttttgcagaaacccgacgatcccaccaaggaggacgacgagaacgagtacacgctttgagtggaagtgagttcaaccgcgtgaacagcattgagagtgccaaggtgatatgggatacgcttccgaatttgcatgaaggcacggatagtgttcccgagtctaaggtggagatcctcaaggggcaattgaagaggtttgtgatgttggatattgagagcccaagcaacatgtactaccgtttgagcaaagatactccta

SEQ ID NO: 38097 - DNA, 337 bp, Oryza sativa
  unsure (1)..(337): unsure at all n locations
agcaacaacgatcttgtcatctcctgtgatatatatcaccaacccatgcatccatgaattggaaacaaaaactacgaaatgaggacgggagggtacatatacttggactgangaagggaatggagatggagtgtacgaacctcgtcgctatatatgatgcttcatcgctctagaggaatcttatgatctacaatcgtctattgtatccgattgccaccaactcctacagtatatcttacccttacatggtcggattcgtcactttcaccatcactacctatacctttgtctccgctaatctccacagtccttacctacctctttatcaccacatctt

SEQ ID NO: 38098 - DNA, 314 bp, Oryza sativa
  unsure (1)..(314): unsure at all n locations
cctctccccttttctttttttttcgcgctctcccgtgcctnctaccggcgccgcgccgctcgccactagcgccgccgcttgccgccacatccggtcgcgcgccgtagccgctagagccgccgccgcgccaagccgctgccgccattagcattgccgccgcgtgagccacctcggtcgccgctcggtttccgctaaaccccaccggagcccggttctcctcgcacgacggtgagctatccattctccttcgtctccggccaacaatggtggccaccgtggncactctctctactcctaatccttctcaactccct

SEQ ID NO: 38099 - DNA, 446 bp, Oryza sativa
  unsure (1)..(446): unsure at all n locations
atagcagatcggattaaccgagcaacgccatgtctgccatganatttgatggccatctactaaagtcagaccaatctccgtcgattcgatggtaacttttaattccactgaaagttttggttttagggtgcattcacctcctttctagttggcttagttcttgttgtgcaatcctacagtaatgttaccagatttggtgacattacccttactctactgtatatctccaaagataggacgtttttttactatatatctnggtaactaaattcagataatcagtaagatatgtaatttggaatataatggcatatgatattctagtatttactattntgaagcctcactcacacagtatggtataatgtangagacaccaaattactcccttcagttttcatttaactgacgttttggacaatgacatagtctacaaaatatacctt

SEQ ID NO: 38100 - DNA, 470 bp, Oryza sativa
  unsure (1)..(470): unsure at all n locations
tatactacaggttactctattatcttggcttgggtaatagatgcaaaaagcacatttaatgttataatctccttttcctctaatccaatcatgttcacaatttaactgatccatcaattctatttttaaaccggctagttcgtcaattaaatctaactcttcatcggttgattcatactcttcattggtgttttcaatttcatctgtttctatgatagaatatattgattcgtcatcttttatttcatcatcacatactaatatattntcatttacgctatctataattaaaactctctcttgttcttcatatttactagaatatctnttttgatctttatttgggcaagttctacttatatgatctggtgaattacatatgaaacatctgcatgtcttatcataagtttcttttggttatatcttcttacatttncgttatgtaagagaggcgctctattatctgatct

SEQ ID NO: 38101 - DNA, 514 bp, Oryza sativa
  unsure (1)..(514): unsure at all n locations
ttnngtccctgctttgatgctactntactgctatgtgatctcctggtcgcaacagctngcattcaaggatgtattagtaagggtatgttngctgcagcttctttcanaatcagaaactcattcaaacaatctagcttttgatttagaatttaagaagccatagttgtagaatctaggaaataaactagaagtcacaagctaaaaaacctagttttttttattcttagaagcttagctaccaacaagcttanataggcctaanacaaggtgcggtttgaagttggacttattctggtgacctggtcagcaaaggtgcttagaaggtgccttgttaagctgattaaaaagtgacgcttttgttcgtgcattgatatttctccatgaaatttcttgtgacctgaacacgacaccttgctgcacgatgcttccaacggcagatacgtacgcacactcgtngggatgggatcgtcaccttcgtgtttccgntcattctgggcgatctggntcaacatgt

SEQ ID NO: 38102 - DNA, 454 bp, Oryza sativa
  unsure (1)..(454): unsure at all n locations
gtagatcgtgtggtacatcgcattgcatgctttgactactacgcgatcagatcagagtgccttcaggataaacggatcaagcaatttttttggtgggaaatgctcgtatcgtggttttgcgcccaaacttcagtctattgtcacagaaaatgttcgccgcggttctaaagacatcaatgcaggagattcatatcgatctcgcgcattccgttctgtgaaagcttaattcagtatacatcggtgtaaagcaattggttgcaggcttgcagcatgctgcatgcagctgaaattnttcgagttactggttgccgcatgcgtgcccgaacaaggatctctgaaatgataaatcaggtttattttgcaataacaaaagatcaaaccagcaagatacttccttcatctaaatataagtgcaactttagtacagatatgatataaggtgtatttaattctt

SEQ ID NO: 38103 - DNA, 450 bp, Oryza sativa
  unsure (1)..(450): unsure at all n locations
actcagcttccagaatcaagaataagtggtggaacctggtttagttgactacattggtgtttcaaacaagtcaattgctaaggtttacgtcaggagttcaccttcaattgatcgaattcaggatagtgatatccatataactacaagtcatcttcctgggatagagtctcctagcagctacaagtattacttcaatattggaagtgttgactcctttgaagagaagttacaagaggcccagaaagcattggagatagatccacactattatgtcccaatcacttacactactgaagcaaaatggtttgaggaagtaatgaagtatgtcccaaccgttctaattatcggaattaatatattgcttgggaaaagggatacaaaatggattactggtgnnggtggtcctgggaaaggaggccgcaacatttttagtattggaaaagttcaagt

SEQ ID NO: 38104 - DNA, 474 bp, Oryza sativa
  unsure (1)..(474): unsure at all n locations
tgaccctagtgccataattggctatcaatatgtggttctgttagatccccactataaggtctatactccgacaccctcctaaacaacctttaaatttatgtaagttaacccaaggcatgtatacacacttaatatttagttcctctgttttacattccaagacgttttgggttttcaataaactcatgcatagatctatgtatgtgctttatatttgtgttcaaattaatattgatgttagtgaatctagaggagggatgaagaggctagaacgtcttatgatatggaatggagggagtaatagacagagatttaaaaaagagagagaattataaaactacaccaaatatcgcgctgaatttaagggaaataaaatcaataaagaaacacaccaaattcctatttgaatccatccactttcactatacatatncngatagcacaacagataaccccatcttttagcttatactt

SEQ ID NO: 38105 - DNA, 439 bp, Oryza sativa
  unsure (1)..(439): unsure at all n locations
ncaagcctttaggaaccatcctgctggccctagaactagttagtttccttatctttattatttcctggctgctcctgcttatcttagatttctgtgtatcatttctgatcctggttatcatctctacttttatcatgtaaacatggaaataataaaggaatcaccataaacttgatacaagtctatctataatgcttattatttatttatttgacatcccttgtctgcattcttgggtatctgatactgaataaaccattactatggaaatgtaatcttgcttggtactttaaactgaatttttgtattaatgcaagcgccccatacctttgtatttcactataggaaattgtgatggatatctnatcattattgataccacctataacttatatgaccttaattattgcagttcatctctgggctccaacatttaaat

SEQ ID NO: 38106 - DNA, 183 bp, Oryza sativa
tcaacttgagatatctatcgtgaaactaagattatctagaaatagactttatatgtctatgaagcggagacccaccttgctggaattcatactgtacatctcgtaagcttgcatagccagcgagcaataacatatatatcccaagactctcctcaatactctagcctctactatccttaacaa

SEQ ID NO: 38107 - DNA, 127 bp, Oryza sativa
gtcgtgttgttgtgcacaccgtctatttgatacatggctactggagaaacaaaactctcgcgctattgatgctagatattcctggtaagatgacaagatgtgaataaagtggttcgttgaaaacgat

SEQ ID NO: 38108 - DNA, 435 bp, Oryza sativa
  unsure (1)..(435): unsure at all n locations
gctntcatcgattagtggctggtgctactcctatgtcattgtcctcctcgtcggcaccacccttctgatgctctcccactgccttatgcctcgatctggttagccaacgtctctactatctgttgccctgatctacagaaccgacgggatcaagaaaccaactgccctgatccgatctgccatgtgccgccgagatcgagatcattagcgattgagcttggttggaatgatggctaggctgaccgtacggtggttggtgaggatgccacgtcctattcacctctggtgcgggtatcaccagcgtgtcatcgcggtgtgggacagagcgcgaggggaaatgcaaaggaagaagaggagagtggcatggatggacggtgagctatagctcgacggggttcactcgccattgtcgctttcattgggagctcaagctcc

SEQ ID NO: 38109 - DNA, 167 bp, Oryza sativa
attaatgggctatgcccacatatattctaataaactccattggcctacattcagtgttatgggtaataataccaccttctgaatctaagtgaataggtctcagcttaaatatggagctagtggatagtctctgttgaccggatgagatggtgcgcggacgatcttag

SEQ ID NO: 38110 - DNA, 478 bp, Oryza sativa
  unsure (1)..(478): unsure at all n locations
actcanaagatcaagatggccaacgtatgccagcggctgcacaccaaggaggaaggcatcagaattttaactcataggaataataaaagtgaaggaatatgagtatgtacacataattcataggactttttaagaggtttttctatacctcattcatataaatcgaactagctgggtggcccgctcacttgcacggctagcacctaaacaaaatcatatattnttttagtatgagtttactctanatttgttaaatagttatccccgtatcatccccgtatttctaactatatagtttttaaaagtcacaccagctgctaccccttacttctgtcatatcttctttatttgcttgctcggtctaccactatttctattcattctccttgaaacctttaaaaaatggatctggttnttgagtttattatctcattggggtttcgtcattgaaaaccttaaaaaattgaatttgtttttg

SEQ ID NO: 38111 - DNA, 447 bp, Oryza sativa
  unsure (1)..(447): unsure at all n locations
acctatgatactcagctgtntactgctntcaccactgctctgaaatgcctgctttatgcataagaacncctagcttccttcggttatatcatgcatcatacctcctcttccggtatgacttgctgagtacagtgggtaggactcagtcttgctctcttttctccacaccagagttgaagttcttctcagttggagccgtctcagagaggttgcgttcgtcgctggcgtccaggattgcctgaggagtgaagtccaccgctgttgaagtcaacgcttccggtttaactcgcttttatctatctcgctgcatgcgtaatctatatattttagaagacctgggctgtatgtcacacatgtgactgtgtaccctgcctggtctggacagggatttatgcacactagtttaaaatctggtcgagatatatgagggacatccctccctccctg

SEQ ID NO: 38112 - DNA, 248 bp, Oryza sativa
  unsure (1)..(248): unsure at all n locations
agcttggatgtcccttggaggctgtcttctatgtgctactggtatgtgttntaaccatgttgntaatgctatttgtgatatattattgaatgctaaattatctaagaatgtgcttacttctagcgcatgtcttttttccttatttgttcctgagtgaagtgcggccggtccttaaacttgtatagatgtgtcatctaggtccttaaactctcaaaatgcatttttgggtccccaaacttttcatgggt

SEQ ID NO: 38113 - DNA, 415 bp, Oryza sativa
  unsure (1)..(415): unsure at all n locations
gctctgcgcagtgaatggcaaggcgctaccagcantnagtctacgacgctacataaaccagttaactgtcagcagcccaagtatttctgctactntgtacataaaccatggatgatcagaggaagatcgggttggtcgcctcggctcccaccccgtccctgtgcttgatacatttcagctgcacacagagacgcccgctccttcggaggttcttggtgtccctggggagcctgattttctcgcggtcttgctgcctccgcttccttgattccggcgagctctagtccagcgaggaacatgacggcgtcgtcaggtaggagttctgccagaggttcatgaccccttgttcttgaactcctccgctgcatcgagcagagggactgtgccatccagaaccatgtcgcacttgctattc

SEQ ID NO: 38114 - DNA, 436 bp, Oryza sativa
  unsure (1)..(436): unsure at all n locations
agctttccaccacgggccccagatcagcaacgtctacgagctcgacgtcgttaccggtgagcaccagacaaaacctgtacagcatctcctcaaactatttttttcccacctnctcgccccaaccaacctttcgccatgcaagcacacacgacagttatccctcgtaagtttctgacgcgtgtccgtcaccgcgattcttttacagggaaaggagaggtggtgacctgctcggagtccaacaacccggacctcttcttcggcgcgctcggcgggctcggccagctcgggatcatcacgcgccgcgcgcatcgcctcgagcctgctcctcacagggtacaccccgaaatcccacccagcccagccgtcacacccaccactggctgcgtacgtacgcacgcgcgacacagtcacacacatcatctgatcacctcactct

SEQ ID NO: 38115 - DNA, 536 bp, Oryza sativa
  unsure (1)..(536): unsure at all n locations
ctcagcttattatagagcagaagctatagcaagaaagcatatagctagcgagagaaattatattacagttcgtttgaaacgggaggagctaanattntgcaggatntaaaatgtgctaaagcgagagctaaggtgtggtcctatatgagctgagcatgcagaggaatatcattgaaaaaaccggtgcttgtctttgcatgcgtttgcttatgctaatatgctaccaaagctagctagaatgtgcaatagtatatatatctgcaccaggacaccttntgtgctaggattagccggngtgtgcaaatgcagggcacaaggccggngcgagcaagttgggctagctagctgatgacctatatatgcgcggctaagtaaagggaccatatatatgcatgcgatgcaatatattgcaatgcacccatgtgagtcagttactcgatcttgtagtcttgtgagcacgatgcgctgcttatgatggatgacacatcangaagatcatgactannacactgcacatatcttcttttttgttacat

SEQ ID NO: 38116 - DNA, 467 bp, Oryza sativa
  unsure (1)..(467): unsure at all n locations
agctngacatctccaatagacatgttcttcatagctctcatcaagccttcatcacctacatcatccaaattctcgtgcccctcttgggagccattagtctcatcaaattgaacatcgtcggtttcttccacaatacttttgttcttgttgtagacccggtatgccttgctatttgaggcataacctagaagaaacccttcatcgcaccgactttcagatttggttagtctaacaccctttcggtaaatataacactttgcaccaaaaacttgaaaatagacgacattaggcttcctcccaacaattagctcataggaagtccttttcaagagataatgcaaataaagcctattggttgcatggcaagcggtgtttatgtcttccgcctaaaaggaatcggaaacaccatattcatcaagcatagtccttgccatctcaatcatgtacgatatttctttcagacacta

SEQ ID NO: 38117 - DNA, 486 bp, Oryza sativa
  unsure (1)..(486): unsure at all n locations
ataagttatggtctctgtcagaattatggtttcggccagcattaagatagatgagggatggggaagaatgagctanggttagggttctcaccctccccgtcggcgactntttcggcgtggagcgaatcagagccgtccattagatcggacggttcagaccgaccccgcgttaggccatcttcgccgatgggccgcctccgccgatgggccgcacggtctctgggccgcataanaagatgctgagccgcgccgctcaagcttgcgagctcacgcgtagacgggccggcccgattntgggccggcattggaagaagttggccgaaatcaatttaattcactaagcacctatntaattaatttcaaaattacacaattcaatttggcattattttagccatttaaaactgctggaannnatatgatcaatatttggtcgttcagaaagaaattaatgatatgatattatattttgaccaacgtaatatg

SEQ ID NO: 38118 - DNA, 450 bp, Oryza sativa
  unsure (1)..(450): unsure at all n locations
gatctctaagtcacctgcggcatgcaagcttatagaaaaatataatatcattntcaacacattaacanatatattattaaaatatattgaatgcagattcaataaacaataatttagtattttaaattttgctaaacttttctactgtgaacaaatttatctggccatgaacaaatgcttttgcagaccatgaaatccagattggaattacaaactaaaccgcaactataggaagaaaaagaaaggctcaaattagtctgcctgcgaatgaggtgttcaccatatgccatcgactccaggacatggatagaaaggaagaaaggctaacccagattgtatgcatgtatacgactgattttagattctttaccacgggtaaaaaacaatgtagaaagcaaagaaatatagctattgaataaggaactgangagccgttctttataaaactat

SEQ ID NO: 38119 - DNA, 363 bp, Oryza sativa
tcattagcgaccttgacactcagcttctaagaagatgtagggaacaaatgaggatttctttataaacagaaggaggatgaccgttttttttttaacgatgagaaaacatacctctgacttaatggcttgacgtgctctcgccactaatcttaataaaacataaagggtacatgattatttctcaggatatatgatttagatgatacaaatgttgaaatttttcaatcgaatctccgccgttagctaatatacgaacatagaattatacctacaggggagggacagagaggggtgtacggcgggagagggcaaatgcaacgactgatgggagaggtggcgaagggacgcgcgctttctttccat

SEQ ID NO: 38120 - DNA, 414 bp, Oryza sativa
  unsure (1)..(414): unsure at all n locations
tcatgcacagtgcaaatcattaatgctctcaccggctccgggtgcctctccggcgtcctcaccgtncaagcctcatgttgatgcattattggggtctaataattaaatttggtttgtttagattatgctctangaaaacctggtgcatgtattaagttcaatattaaactagagtcttatatatgtgagttaaattggagtgtgatcaagtaatcttagattgtgtgatattggaacaatttgcatctatatagtatttttgtgagtgaaaaaattattgtctttactttgtttcgcggaataaagaatatttttggcggttataattntgtagggtagttattttgctattactattaaatagatcctatnaaaaaattctatatacccagtcaaaagttcaaagagtatata

SEQ ID NO: 38121 - DNA, 473 bp, Oryza sativa
  unsure (1)..(473): unsure at all n locations
cggatgtctcttccttgatgaatgccaacaggaaggatgcatgggctgattgcagctgagaaaatctccctggacgattggtatatttcgtggttgatgtcttcgaatctgaagtccagtaggtgctcaagttctgcagaatcttcataaaggaaccaaactcgtgcatctttntgaaagccttcatagaagctacagaaccaatctttgagcagttcagccgaaagtcttgccccagcattcggtggtgtagaggcgtactttccatatgatgtgcatctccgatgagtgagttcctcttcgtcgtcattaatgatcggctccagtcttgggaacttagcttctgacacgggtggccgattgacaaccttcataactatcagggttaaccaagtttgtagcagccaccagggtccacctgctccgactactaagccgacagctatcttagcctatgcattgttcaacatttg

SEQ ID NO: 38122 - DNA, 368 bp, Oryza sativa
tgtgcacacctcgcaatggcgtgacccgaagatacacaaagtcattcactgcaaattccagatcacggcgacggttatcggcataactcttctgccgagactgtgccacctttaagttatcccgaatgattctgactttagcttcagcttctctcaggatatcagtcccgaacacttggctttccccaacttggtcccacaatagcggtgttcggcatttgcgcccgtacaacgcttcataaggtgccatttgtatgctggcttgatagctgttattgtacgagaactctgcatatgggagactcttatcccaagtctttccgaaatctattacacatgcgcgaagcatatcttctatgatctgattt

SEQ ID NO: 38123 - DNA, 432 bp, Oryza sativa
  unsure (1)..(432): unsure at all n locations
actggttgacaccttntaagatgcattgaccaactcctanaatagtgagtaactgcggtataaaagggatttaaggtattgagcacttgatcacgcgcactttggcctaagcaaatagtgcctaagtccctataagaacgtgacaggccacacctgaaaatatgggctgcagacatattaggcctaggccaaaaaatatgtcttcgataccctttaaaggatgacgcatgtaacatgctcccgggtgatatagaccatgtgatctgagtgattatcccttatgggatactccaaaatagatataaaaattgaatcccgactggcgcaagtattcggttgataacctttacggcgaataataaatagtccagtctttgagcatagaaaatagactcatgactatgaatccatgtggaatgtatccggaacaag

SEQ ID NO: 38124 - DNA, 362 bp, Oryza sativa
ttagttctctatattttgcaaggttgattatgtgacacataaccttgcagaaagcttcaatatatttgtcggcgctaagggatggaattccccaaaacccggagcgtacaccgtactagtctcatgatcagtggctagtacacgaaaccacaaccttgtcttcacattcatacgtaatacacatacaaatagataacatggttcacataacttagcgagtgctcaagtcatacaacataaatagggcggacccggctaatggaagagtctaacgcagcggaatacagtagcaaacatatatgttcttctgtatgcccatctacccaaccaccacatgccactgactaggaatcaccctagaa

SEQ ID NO: 38125 - DNA, 372 bp, Oryza sativa
  unsure (1)..(372): unsure at all n locations
tctacagcctatcttgtgagattgagagattagattanagcgtacgagtgttctggagatggcttgaagattatgtctggttgagcactctggataccttgtgggcagtcacttgggcttattactcttggagatcttctcctacacggttaggtgttgcccgtgagcttccaaagatcttgtggatgtcccgggaaagtttgtgaacggtttcctcatcttcgcaaggaaacgaggtaagtgagtaaagattcttgtgctgagttttcagaggttgtcctatgtagagcaacttgcacttgtggtcttttctagaatgaattgcgagctggatcttggtggtcactcacttctacaaaatgacctagaagt

SEQ ID NO: 38126 - DNA, 455 bp, Oryza sativa
  unsure (1)..(455): unsure at all n locations
tgcagctaaggcctacatgcaggcgcctgngtgtgtttctctgagtctgtccatgatatggatatcgacgatgacaacactggcaggcgaaggaaacgatcaanaagcacgacgagcccgtttaagagcaatcacaccgaggacggtggctctgtatttgtaggagaagacactaacaacgggagccagcaagcgcaggagacggagactgaagactacaccaagttcactgtgctgaagctgaagcaggagctcactaagcatgggtttggtgctcaactcctgcaactgaagaatccaacaagaagacatcgtcgcttatatgagaagcacgtattggaagagcggtntctattatgcggctagatntccctgtgcgatgaacgtgttgcacgggtganggagagcgcaaatactaatgtacttacctgaactccagttgtgtattgtaactg

SEQ ID NO: 38127 - DNA, 487 bp, Oryza sativa
cactatagagagtgaagctcccattgggaatggaggcgaagatggctaatattcgccaaatctcactctgttacatgctcaactctgcatctcatgatgctatgaacatctaagctattcacatacatgtacttttctgaatgagctgatgcagcgagcatcatccatatgtctttccccctacacataaactactgtctagatattgggcttcttgctccactcaaattctgaagttttcctacgtcagaatacctcttagttgcaatcggtgagacctgtgtcaactttcgactatgagcatcacccctacatcccttctcttttgagtacatcttcctcgccacaacatcctgatctcgaggactgacagagtcaactagtggcgccgagactggtccattcttcccagtcttgtacctcgcgcttagcatcaatgacaaccttatcagtgtcatatcttgataacctggcattaccatagatt

SEQ ID NO: 38128 - DNA, 398 bp, Oryza sativa
  unsure (1)..(398): unsure at all n locations
tactgngtattttcgacacgatgcaaatactagtagctaggacattctgctgccttggatcatgacgttcaaatgttcatttcttggctaanaggcttatcgatcacaaaatggcacaataactacggtgcttggatttggctcatgtactactattttttactgtanggatatgatgtaattaaacctcccacagtgaatcaaacggtgcagaatgcacgtaatgccatgtgctcttcaccagagcaacccattccgtctgatatatatgcatcgctggctaagcttaatatgtacccttcaagttagttgtatgactctcattgggtcaccaatatgccttaacttattaactatgaatggtaccgacccatgcaaaatttaaccgaaatatatat

SEQ ID NO: 38129 - DNA, 495 bp, Oryza sativa
  unsure (1)..(495): unsure at all n locations
agcttncgtcttatagtaaccaggttctgcaagaatagattgtgcaagttgaactttacatcgatcattgcagcaagagggactatcatcgaagtaagaattacaaagtagtttcacattaaactgttgatagtcctattaaaataaatagtggttaatttaggatatttactgaccatctgttacagtcatcgatgcttgtagtggtacatttctagcagaaggtctgaagctaattagatgaggacctgngttgtaagcacaaacagaatggattaaacatttcaaggtagcactacaatcagataatttactgtcatagaagaggatgaaccagcaattgagtatctgaccttcatgaacattcaaataagatccaataccatggcctgtaccgtgccggtaatcaagaccacttctccaaagtggtgttcgtgcgagaatatcaatagcatgccctgtaagggttaagtaacgcacaaatatcatggattt

SEQ ID NO: 38130 - DNA, 467 bp, Oryza sativa
  unsure (1)..(467): unsure at all n locations
ctaagcttgggtttttattcatccccacataccaatataaacattagaatgctcttactttatcaaatccggaagntattattttttactttatctacttccaatgtaattattccatactttcataaactcaaactctgatgcaataatttaattacttagaaataaacttattttgagataagtaggagtaaaaaataacttaatatgatacggaggtagtattatggtggatggagaataaagttggacaaacgaaaaaaaacaattgacgtatgattaattaagatttaattattacattaaaaataaatttatttcattttaaagtaatttttatatagaaaattttcatatgaaacatatttaaaaaacatgctaataaaaacctaagataaaatatgtatcttaataaaaaaagaacataacatttntactgagttctcatggtagttcagttcccacaa

SEQ ID NO: 38131 - DNA, 448 bp, Oryza sativa
  unsure (1)..(448): unsure at all n locations
taaaacacttaanaaggcaagcaaaaatccttattaagacagccatatcataggcacatgatatcgaccgccgactgacccccaaacaagcaacctacacacacaaactaacaaacaaaaactagacagtcgatgaactagtggaaaaacgagcctaatgctcggaacggctcctgcggtcggtggagtcgaaggcgtcctcctgctcgtcacccggtccctctgagcgactcctggagcctgacggatcggtctcgccgctgccgctgggagtagcagacagccaacctccggtaccactggctgaacctctggcggctgatgctggagcgaaggagagagtgaacgcnggagctggagctggagctgcangaactgcgggcggaactggagctgctgcgggagctgctggtggaggtgggttcctgggcgcaagctggatgcgcac

SEQ ID NO: 38132 - DNA, 368 bp, Oryza sativa
  unsure (1)..(368): unsure at all n locations
ggacagaaactgtggatttaaataatctggaaccaggttgccccttatcaagcatgtnttatgtttttcatccaaaaaaaaaacatcatagaagttttcacagttttgaattcagtgaccaagaaaataaactgaaacttggtttaaaaattgaagtttctgatgcaggggagaatgtctgtggtaccttgcacattatntaattttaatgcaggagattttctttattattttcgtctctgtgtgcaaactaaagagatattcgtatattgaaattttttggtagattattggatcacaccttttattttttgattaatttatgggtcatctctgttggagtagcaggttcacaaatgagcagtata

SEQ ID NO: 38133 - DNA, 400 bp, Oryza sativa
  unsure (1)..(400): unsure at all n locations
gcgtgcacacaaacacacagcaaattgtatgtctggcctataagcagttagatacaacaaagatccaatcatacttctatattccttttgatcaacagcttcaccatcttcatcaggatccaacacagctgtagaaccaattggtgttcaaattggcttgcaattctccatcttgaacagtctcaaaagatccttcgtatacttcgtttgatgcacaaaagtaccttgaggtgtttgcttaatttgcaatcccaaatagtacgataactcaccaatcatgctcatctcanattccctgcgcataatcttagcaaaatctacaaccaaagcgtgagtcgaacaaccaaagatgatatcatccacataaatctaaacaaaaagttgattatcaccatgctta

SEQ ID NO: 38134 - DNA, 360 bp, Oryza sativa
atcagagcttattcaaccaagacaggccatgggtccaagagccttgtcacccgaggacatccctccgacgacaaggctgggggctaaggagagtgcacaactcaaacggctagctaaggtcgttaactgagaacacgctctttcacacgacacccagagtaagaaacatttgttaaagatatatttctttattcacaaaatattccttacagtttgtacataaatattttgtcgcattacatcttttctccaagatatctcgttgcagggtactaatcctaccaagaaggccaacgccagtccatcgattggaaaatcttctcggccaacggcgacatcgatctcgcgagatggtctatc

SEQ ID NO: 38135 - DNA, 481 bp, Oryza sativa
  unsure (1)..(481): unsure at all n locations
gatgaagaagagatcgaagaggatgtttatcaagctgcagccgaagtgagcgatacaganagaacaccatcggcttctcccaaacgaactcctcccactccttctgccccagctcatttctcaagggtaaatcacttacattaatccctttntgcagtcatgttaattcattgccgatcgatcattaatcttgtatttgcagaaaaagaagactgctgtgaagaagaaatcggctgcagcaacccttaaaccagccccaccagtaagattatcacataaatcctttntgtatagccaatctttcataacactttattcttttgcagccacctcctcctcctgtgcagaccgaatcaagtgatcattctccatcggctgcaggtagtcacaatgttgatgaagaagaacaaccagctgctcctaccatnccagtaangtttaccttcaaaaatatcnaatcggttgatagtctgtctgatat

SEQ ID NO: 38136 - DNA, 475 bp, Oryza sativa
  unsure (1)..(475): unsure at all n locations
acaccaattatatatggatcttattttatttatgttgcagctatgatcaagcagaacaaccaaactgatgataaataaatgaatagaagttacactactacgaacatagtttttgatggtgacaaaatctggttgtgcaggcggccgagccaccagcctctaacaaattaactaccagttccacaaccgtctatgaaaaatagattntcagaagcgagtactctaaggagaccgcttgtgaattgattttcaaatgcgatagtctaaagagatatgtccatgcaaatgtcttttggtgcaaaagaaaatggaaacttaaatctaatcatagcccgcagaatcccaaattcacaaattcgccaaatccatcacggtgcccctctgcatgcaatagcagctgcagccatgcgacgatgtcctcaccatagtcattgtcgctgtcgttgagtcaaatgcctcgtcgtgggtgtcatca

SEQ ID NO: 38137 - DNA, 393 bp, Oryza sativa
  unsure (1)..(393): unsure at all n locations
tggcacgaggggaagctgagctgacctgacctgatcagagaggtgtgctcggagttgaaaaattccggtgctgatgtggtggaggggagagctagcttgctgggacaagaaactgtgtcgagcaagtggattgcagttctggccttctgggttatctgcactctccagttgaacaatggaagtattcagattcatggagcaagaacagcagcatgctgctgtagactgctgaataaaattcagaaatgcttatctcgtagatcgaaaggcaagggacattagaaactcgaaaaggatgtacaatgggaatataccgttctttgacatgcatatacatttagtcacatcaactggtgcattntcaagattaatgaactactgttggtgacagac

SEQ ID NO: 38138 - DNA, 425 bp, Oryza sativa
  unsure (1)..(425): unsure at all n locations
ccaccggaacgagagatcgatactgctcgatcagctagccgcattcgccctcgccgccgccgacgatgtcgagccggaggtcgtcgcgctcctccgtgtcggaggaggagatcaacgagctcatctccaagctccagtccctcctccccagctcccgccgccgcggcgccaaccaggtactacatttcaccgttctcatcaccacaagttcacataaccaccatgcacactagcggcatgaacaagctagctacatgagtgatcgacgatgtgtagatttgtcggggttctaaatcttcggctacagctgtttgagaagggtctagctatttaaccactatagagggtctgccgttaaatgtgttagcccgctatntaaaactctctaattaattattggtgtaatggcggatgcaaaataaaat

SEQ ID NO: 38139 - DNA, 473 bp, Oryza sativa
  unsure (1)..(473): unsure at all n locations
tgtcccagacnttggaggagtgttggtttccatcagaattcagtgaactcctgagtgctnctggactagacactgagcatcacaccctgccttttaaagaggagaagggtggtgcatccatgaactaagcactagcagtgtgcagagctacaaccacaatggctgacacctctcgtgagctgtggtgacagtgagtagatgtccattcctgaaaagaaggggaaaacaaatcaaagaaaaaaaaaggattcgagtggagttgcacagagcagcaaaagcaagtggattaacccaatgtatntattttagtttctgacttaatagatatggttcaaagcatgagagaatcgaagatacgtataccagatgcagggagaggagtagagacgcccatgcaaaatgtgtgcaagcagccatgcgaaaagcanggaaacaagtgaagattntgctggtcatatattcttggtcttgtc

SEQ ID NO: 38140 - DNA, 448 bp, Oryza sativa
gcatcattcgacccggatccttaagcacctgggctgcagcttaagatgtcgttgtcgcggagaatatctgttcgatgatattgaccataaggtctcagcccagagaaaatacttccagattaatatcaccgccaaaattcgactagatcagactagataactacggtgctatttacagatgaactcattaatctacaatgagatatcagaataactgttgcccaagttcgattatactcaggcctaagaccttatgtgacgggtcgactcttaatcggacgagcatacatacatggtatttggacctcggcaagccgaacacattctattcttccaagccgggagggcccacgcacatttggctgtactcctagatcatatgtctactacaccctacagtgccgtgacaggagagactacgtgcataatccttatgcatgcacaatca

SEQ ID NO: 38141 - DNA, 488 bp, Oryza sativa
  unsure (1)..(488): unsure at all n locations
tgcagggtctcgaaatgctaagtgcttcacatttcgagtaggctaagtgttngtgcgtcgaatcacaagttttcgattcgagttaacctgcagccccccaaagaaagggaatttccgtgaaaagcatgcaataagagaaaagcattatagtcagctacactataaatttttacaataaaggctctcaaccataacggctttgaagcagcaaaatagcattggtttcgaatatatgaagcatccttaactattcttttcacgaacgtcacacctgtgcgctcgagctcggagtactactgtctttatcttgttggctccaactggccggctgtgattntgatcttgaggcaagagatgctcggagagacctcanggtatcttcatatcctttcttcttccagtaaagcacttggaaagcctttacgacnggttgagctgcatctcgaagctgtgcatattnggcctcatcattaagcataccttggata

SEQ ID NO: 38142 - DNA, 444 bp, Oryza sativa
  unsure (1)..(444): unsure at all n locations
tttgctggatggcatcgaatttcttgagattctcctcgatgcctctttcggaaacaaggaaacccaacaacttgcccgcgcggacaccgaataagcacttctccggattcagccttatgcctgctatgcgcaagctgttgaatgtctnctgcaggtcgatcgcatggtcgaaagccttgcagctttttacgacgatgtcgtcgacgtaagctttcacattcttgcccaactgcttgccaaggaccttgtacaccaacctggcgaaagttgctcctgcgttccttaagccgaaaggcattctgaggtgacaaaatgtgccgaatagagtgatgaatgatgttntggcgatgtcgagcggcgtcatgtggatctggtggtaaccggaatatgcatctangaaactcatgagctcgcatccagctggtgaatccatgagctggtcga

SEQ ID NO: 38143 - DNA, 326 bp, Oryza sativa
  unsure (1)..(326): unsure at all n locations
aacctggggttgtacgttatgaataccctacaacttatgtttcgtgaaatttgctttaaaatttttcgaataaaacgaatggtcaaacatgatataaaaggtcaacaacatcataatagtctanaaatgcaattcactcgtaataccttcatccactttctattctgggctatgggcctctacccggtgggcttgcaaatcatagtactgaagtgcagaanttcttttatttattcatttatctattntaaaatttacaaaaaaaagctgcttagaaactacataaatatacccctaacattctttggagagcgttttaaaaatca

SEQ ID NO: 38144 - DNA, 355 bp, Oryza sativa
  unsure (1)..(355): unsure at all n locations
catctcacctataggtgtagattgaagattgtacaatgaagaattgtttggttttggtcccatacagccagctgtagtaatctaggaatcctcctaatttgaactaagggtgtgttcattctttgggtgtaaagttttctcgagtattaaacgtaaactaataacaaaacaaattacatattccgcctgtaaactgtgagacgaatntattaagcctaattaatccgtcattagcaaatgtttactatagcatcacattgtcaaatcatggcataattaggctcaaaagattcgtctcgcaatttacatgctaaatgtgtaatggggttttttccacatttaatgccccatgcat

SEQ ID NO: 38145 - DNA, 278 bp, Oryza sativa
agagctgagtgtgcttctatggaacatcactttattcgagggttgtgtagtggccacgcttgatgtggtggttggactaagtacgcctatgatagatagaatgggattgacagacaaagcttgtacctttgtatggcttgatgccgtggctggcttaagtgcgcttgtggtagccagaacgagtatggtggccaagcttggtgcattactctggctaggagcattctgtgtgctagtgcaacgaccgcacttggtcatcttgtggttgccggaatatg

SEQ ID NO: 38146 - DNA, 483 bp, Oryza sativa
gcttcaaagactcataagagaacagaggttgctaacgcttattggttgcacctgcagtgcgtccagttgtagccgatattggtcacgttggcgtgcagcgccttctgcacgtcagcccggttgaagtacacctcggcgtgatccgacgtgcacggatcgtaccccgccggcctcatgtaccacccatgctgttacaaaatgacaccaaaaaaaaatcatgttgtttcttctctctgaaaaaatgtgatcgttctgtgtgccgatgagttgcctacgcacgtatttggagaagatttttggggcggcgccgtggacggcgacctggcgctggccgaacgccgccgacgacgagacctcggtgcagacgggggtgtagaggctgtacatgtcgatgaggcggtacacggcgaagtactcggtgagcgcgctgtcgcacgcgtcggtcacgttctccatggctgaagtgcagtacttcttgacgtc

SEQ ID NO: 38147 - DNA, 356 bp, Oryza sativa
  unsure (1)..(356): unsure at all n locations
ttcacagtatctaattcacatgttttatcattattttctgactatatatttatagaaatattaaaaacataattgtatgaaagtgttttttttttcatgaacaatctaccaaaaccattttcacatatcctgatacttatgcatctattaccaactccatgtaattatcagtcacagtttcttgtgataatgctatatgtacttgatataataccttaatgataattngatggaaagattaactattntattttagattnttgctcatttgtgtttcttggtggacctttcaatnngattttctaatgcatataagatggtcagagctaagaacattaattntgcaatacactctc

SEQ ID NO: 38148 - DNA, 475 bp, Oryza sativa
  unsure (1)..(475): unsure at all n locations
gcttcttccaagaagggaacgacatcatcaatgttccccattctctgtataaaagaagagcagacaaattatccatcagttagatgtgaattatttatccataaaacagtaatcttaanaaccaaagggcagaacatttccatttcaaatatgattagcactcagcaccttgatagaagaatgagtaaaaactcaattcattctgcatatattctcgagagttcgtgtacagtatccatgatttcttttgtttattcctccaaattgagaaaacaatggttcanaaggaggatgaattgaatctacatatttggatattacataaaaacgaagttaaaataatacggaaaggcatatagattattaccttctcaaatgtagttttagaattaccaccaaggtgaatgagattcacgaagttgtaagaaataggagctgcatatcttgcaaccattctgcanaaaggacattcgat

SEQ ID NO: 38149 - DNA, 241 bp, Oryza sativa
  unsure (1)..(241): unsure at all n locations
aaaaacaagcagtataaaaagccggcaccataactgtcaacccatctaaaccagcttcttccagcgcacaaccccttctcgcctgtctgtctttctccgcccctctcttccctcttccatggcgcatcaagatcattaacccaccaaaccaanggttatatatgggtgcgtgcgtcgtctcactgcaacagccagcgcagctcggcgagatcgatcgcgccgcggcggggcgccgcgtgca

SEQ ID NO: 38150 - DNA, 410 bp, Oryza sativa
  unsure (1)..(410): unsure at all n locations
agcttgacttagcacaggaatcgagatgtctctcattgttatgattggtntcaggcaggagctaacacattaactgttggaccacactgacttgtacaaagtncgcttatgtcaatgatccacacaaaggtagattatagcacgggatgcaaatacctggctcttccaaatagaagctagagcgacgaaaagaacaaaaacttcattcaacatcttctgaacgacaatggctgggttcatgaactatatgacaaataacaggaaccactcaacttctaccgacagcatgtaggtgaacatagggagcacacctgtacgattaacttcggcttcttacaggaactactacaggacctttcagaactcgatgaacctttcacaaatgatgaaaacacaatagcagtcttcaa

SEQ ID NO: 38151 - DNA, 367 bp, Oryza sativa
gttccggaagcatgtcttcatgttcttcatggttaattgcggtaggctgacttcatgtagttgatgttgatcaagtagttcaccttgatcatcatggagttcttgtgggctcaccttccaaactgtcttcgaagatatttgtaatatcctatgagactaatcataaaaatacacttgattacaagttagtctcaaaaaacacataacataggatataccccccctaaaagtgtgcatccaagttcttaaattacttgtagaaacgcacttgtttaatgaaaaccaatggcgagtgtagcctatatattagagaaaggcacataaaggattctcaagaacacacttgtgccagaatataacacacatt

SEQ ID NO: 38152 - DNA, 461 bp, Oryza sativa
  unsure (1)..(461): unsure at all n locations
agcttgaacaagtntgngtataactaaatntatagttctattatttcgccaatagctatccgtgccctaaatatgaaatacccaatacatgtatactaacttcggtggagtccaccatataccaagttttatacgaaatcaagccttaaacatatgggaaaagtcctggatagacaatataaacttatgtaagttgatgtggtttatgataatttaaatttaaataataatgattcanatgtaaaagttgttgtggttttatgtaaaagtttggatcatagattaatcatctaagggctaaaacaattgaggtgatatgacttaataagagaagaaattaagggagaataattgaaccatgaataatcatctaaggacaaaaataattgatgtgatatggattaatgagagaagagagagagagagagcacattaacttagttaggagttaggatgaacta

SEQ ID NO: 38153 - DNA, 475 bp, Oryza sativa
  unsure (1)..(475): unsure at all n locations
tcgctagagtaaccaccgaatccaatgttatattcctaattattctcctatcccatcccacttatattggtctgcccattaaaacatacaagcataaccaccgatccagtatttttttctcaccatccacccaaccaattctcaattatatgactttggcccttggacatgttactagtttggtaaataagtttataaaaggactaaaatatcaaaattgcagccgtcaacggatctgggtagtactcctatttttatccagacatgctctgcattccaccgttattnggcatgaaacatatcaaatgaccagccagaanatcaatcgtcccgaattccatctcaccttgtgcgttatagctggacagaatcaaaccttacatcttgaagacttgaacaagtgaattgtgaactggatgccacaactagagcactgaaatccanaagccttacactagaagcagtagtcagaatc

SEQ ID NO: 38154 - DNA, 401 bp, Oryza sativa
tacgctccacgaatggatctattctattatcaccaccggctcgcctcgaccgccgccgactggtgtttccgcctgcacagctggcctttatgccgccgttgttgggcctctacgtcttcaccgaccggcttgccttcgccgccgccgactggtgtttccgcctgcacggctggcctttatgccgccgttgttgggcgtatacgtattcaccgaccggtttgccttcgccgccgccgactggtgtttccgcctgcacggctggcctttatgccaccgttgttgggcgtctacgttttcaccgaccggccgcctcgtccgccgacgactggtgtattcgcctgcacggctggcctttatgccgccagtgttgggcgtctacgtcttcaccgaccggcttgcct

SEQ ID NO: 38155 - DNA, 375 bp, Oryza sativa
  unsure (1)..(375): unsure at all n locations
gcttagcgctntcgtatggagtatataattaagtggtcatgacacgtgaggaaattactcatgggtagctaacctaggtagttaatcaaattgctgatcgggcgatcagccgtgcgccggtgctgattctaattattgatagctgatttggaattttgattnttttttaaaaaaatttttataggtcttcttcgtcatttaagttgccgaactctattttatatttttttcatgatttctagataagtagaaaatctacctaaaattattcccgaacattaaaaatttaagattgttttaattacaattcanatcacaactaaacactacggtcgacgcgggctcgccagctgccgatgtggccaccgtgtgctc

SEQ ID NO: 38156 - DNA, 417 bp, Oryza sativa
  unsure (1)..(417): unsure at all n locations
acaacaccgttttgttcaagattcctgttattacagggacaccacactcctgtagatcaatgtagctgccgctcccattgtggaagatcaccaggaatgtgtggtttaccaggtcgctcaagattgtctgtgtgacaagtggaaccacccctctcatgccctgatccaccccactgaaatcatcctcctcgtcgtgctggtcgaacaaggccatcagcgaccgaggaagctgcagctcctgngcgatggccttctgcagggccctcttgctctgccacaccgagcaatcaacgtggatcatcttctcccaccttcttcttcctggcgatggcgatggcctcatcgtcagtcttttggcgactgctctaaggacggctgaagcccncagtccaccccagccatggaaatacatcacat

SEQ ID NO: 38157 - DNA, 480 bp, Oryza sativa
  unsure (1)..(480): unsure at all n locations
agctaccatcctgatgtgaacaagttagtactaaccattatatgggaattgtgtttcagctacactcgatatattgcttctttttctcctttcgatccattataaacctgagtactagttgttgcattacctttntcataactacataatcaaataagcaattgttatgcttgtgtatttttctttagagatcctggtgctgaacaaaagttcaaggatattagcaatgcttatgaggttagtccagctaaccataaccaaatcccattgtttcttatgaactatgttgtgtagggttacaggtgcttgccagctaacataaataggattgcangttttgtctgatgatgagaagcgatcaatctatgataaatatggagaagctggtttgaagggtgctggaatgggaacaggagtgaagtgtcctagaatggtcgccattcttgaagatgatcagcatgaccgttatatgatattgat

SEQ ID NO: 38158 - DNA, 422 bp, Oryza sativa
  unsure (1)..(422): unsure at all n locations
acactaaaaactaagctntantacaaccaggatggcacaatggcctagaagttctagcgttcatcacgagcacataacanaataaaggaggagaggcggnggcaatcactgagtgcctgtgcctccaagtacagcgccgctgaccaccttgtcccaatcctcgttgccatcatcgccgncgccgtcatcactcccgctctcctcatctgagggaagcgcgagggtgaaccaaggggccgtcccctcaaagcttgagatgatcacgtcggccgcgtcccgaacttgctcctgagccctcgtctcaatccctgtgggaaatcctcgagcacgtgccacggaaggatgttggggtcgcgagctngatgactcgcgaggacaagctccaccgcagcccgtgccaaggaagccgatgacgacttcac

SEQ ID NO: 38159 - DNA, 490 bp, Oryza sativa
  unsure (1)..(490): unsure at all n locations
agcttgttgtgattgatgcacgcatcatatattacttattgacacaagcaggctctggttcaatccctgcttaccggcttgcacataattttttagtgtcaaatagtcacttgctgatttgctatacaatcttcaagctgaatttgatcgatgttctagttctaccaatcccgtagcggaaaatgagttgcttacgagtgagttttcagaagaagaggtgaaaaatgctatatttcaaatggaacataataaagctccagggcctgatggttctccggcggagttttatcaaatgttctgggaggtaattaaggatgacctaatggcagtctttagagactntcataggggcaatctttctctcaactaattgaattgtggtattattactcttctacccaagaataaggaggcaaggcagattcaacaatatagaccgatatgcttacttaatgtaagtntcaagggtcttactaagaatatgacaaat

SEQ ID NO: 38160 - DNA, 375 bp, Oryza sativa
  unsure (1)..(375): unsure at all n locations
tatttattgtgagattaatgaatttagacatatatatctatttagaatcattaatacccatattaatattggaaatgcttatatgacttacattgtgaaacagaggaaatacaccatatctagggtatgttgttattgcgcacgacttatatatacttggagtacatacaaatacacttgaggtacatttatattatatttaaatgtaattaattataaataatacctaagttacatttaatattttaggataatttctatanaagtattactcctctatccatataagtattttgacctgcacggttacagatgcacttgatcatatattatanagtagatatttaataaaagagtgctatatgaagttattat

SEQ ID NO: 38161 - DNA, 302 bp, Oryza sativa
  unsure (1)..(302): unsure at all n locations
agctcttctttctcgaagcccaattntcatatgcactaatcctattcagccacaaagtcagagactgtaccaagagagcccttccctgtgggacaccataatcttgcataattttagcagcaaaagtcagacctgatcaaataatgccatctactacaatactacacgcatcatgagaaatgtgcacatcaccaaccacaacccaaagctatagctgtatctttcctactagttcctaaccctaacaattaacatatcaacagcagcttccatccaagcgtctaactaaccgtatgcatatg

SEQ ID NO: 38162 - DNA, 405 bp, Oryza sativa
  unsure (1)..(405): unsure at all n locations
tggctntgtatctagtggtggtgaagcagatntcatatctttttagtgcatgggtttcatgaacatatacatacatgaaggagcaattttctctccagtgaccagagacaagcagatcagtatagtttgcagatttagcaagcaccaacccacacacatctacactaacatcaacttaaaaacagaggatggcaaccgaatcacctcgagcttatcgcctttctctacgatatcgatcttgagcatccagtctgcctcctgcttcttcaggttgcacacattctccgcgatctcgatgatctcgatctccggcacctacgcacactcccacctcaacccatcaacacaaaccaccacaatcaccgcataattcaccgaacccgaaacgaanattcagtaccttct

SEQ ID NO: 38163 - DNA, 370 bp, Oryza sativa
catctgatgatgaaagccctggattgtctcaaattatttcacgaaagaagcaatctttcatacatggagtgagcagatatatgggttcgggatctcaggatcttacaccacgctgagtgctcaagctttttacattccagatccatctaagcttatggtgaaaaagggtctacgccaaactagacgcatcagaaatgatatggatgagtcagaagcaggtgggaggactctacgctgcatcaagtgtgatctgcgcggtcatacttacaagatatgcccgaagaatgcagaagtttcaagcggcgcagatgctagtccatctggacaggcaagtgatggtaggcgaccacctggtgaatggaacacaagc

SEQ ID NO: 38164 - DNA, 412 bp, Oryza sativa
  unsure (1)..(412): unsure at all n locations
agctngagcctcgtcgacaccggcatgagctggattaacagtatccgattaagtcacttccttgctaatgccccctcactgcattaacttaatctcaatttccagagcgaaaaggtacatgatcatttgactgcatgccacacacttagtcatcaacttaatctcattctgaaatctgaatctttgcaagttaatttgcacgtactcgttgtgaacaacctgttgatttgcagatttgggttgagccagaaggctggaagaggctagccccagtgctgggcgagctacgacatgtcactctcgtcgacctccctgaaggctgcgacatcgcttggacaatgttcatcgtggaagccgcaccgaggctggagagtctctccatcagagtgtgggatcactgctgcaagatgga

SEQ ID NO: 38165 - DNA, 344 bp, Oryza sativa
tatactgcatatgctaattatcttagcagctggcactattggactactatgacatcgtataatgaacaaaagaaaggtgctgtgctagctactcgatccactagactcgatcataccctgcttaattacctcgctacacttactggatagtcagaacaactcaccagatcaatcatggagctgccgtgatttagatcgggcgaaatcaacccacaccacgagctaataggtgaagaaccgtatatatagctcgtaatcatatgacaccaacttactaaacgtgttaatttatgcaacagattaagccatacaaatcatgtactacctagccctattcgcttcag

SEQ ID NO: 38166 - DNA, 432 bp, Oryza sativa
  unsure (1)..(432): unsure at all n locations
tgcagcttgtcggaccaccatgccaccacagagatgtactgagtgcaccattggttcgaatttagatagaaccacttgtanatactgtagaaaaggcatataccatacttgataaagtatgctagttgatcacttactgtagggtgcacctccagtccattggatccaacgaagtagccattctcatcatatcctccaaatgaggctacaataaacaatcagatcatccccgcaaaaaaaaaaaatcaaatcatcaaatggatgaacagtaagaaattgtttcagatcatgccgtcatggggttaatatacccaccaggataataatatccgtagtaatacatcccttggtcccccacagaagcttcttggttcatttcactttccttgacagtactagctgcatcgcccgaggaaatgcatgatattgcat

SEQ ID NO: 38167 - DNA, 94 bp, Oryza sativa
  unsure (1)..(94): unsure at all n locations
tctagccctcacttacngtgatatntaagcacgagtcactttacatttgacaatgctctaaatacttttccgattatcatggctctcggtcacc

SEQ ID NO: 38168 - DNA, 353 bp, Oryza sativa
  unsure (1)..(353): unsure at all n locations
ctaagctttaaagtcaatggaagcttcaagaagaccttatagcagaagatctgagtcatcaagaaatgcagacggcatggcagagcagttcttaccttgccatcgctaggattgacggtttgacgcccaatatgtgagctgccgcttgancacaccgccccacaccaacttggactctcctctttgcaccacccggccatgccaagaaaagtgttcactttcactaccttgtctaccaccaaacgccattggcccctctgctataacttctttgctgcttagagctcatctcaaccttcaccctgctcggcacttgctcatactttcaatgatcgcacgcctattttgcctcc

SEQ ID NO: 38169 - DNA, 485 bp, Oryza sativa
  unsure (1)..(485): unsure at all n locations
gatccttnagtcacctgcggcatgcaagcttggcacattggttcgcatactttaccgtgctttatctccagcctctctctctgctntgcttgcttatatatgcaatgcatcagctgcacgcaagaaccgcggaaatctcaaaatcaagcggaagcaatggaggagaggaagtggagatcaacgtcgtcgtggccgccgatgctgccggtgatcatgatggccatggcgatcttggcggtgtccttcaacggcgccgccgcccagccgccgccggacaccaacgtgctgtgcgtcagcaagtgcgggacgtgccccacggtgtgctcgtcgccgccgccgccggcgtcagggaactataatccggtgctgtcgccaccgaagggcaccggcagcggcagcgttggtgggtcgtcgtcgtcgccttcggcgccgttggcgaagggagggcagccaggcggcagcaactactactacttcttcacctc

SEQ ID NO: 38170 - DNA, 393 bp, Oryza sativa
  unsure (1)..(393): unsure at all n locations
ggcatgctccataagatattatttatatgtacatgattcgctggaaataaaaacatccatgcatctcccccanaatcgtactagaaacatgtagggccttgcaccttgtctcttcttccctgaaaaaaaaaagtactacaacatgtaaatgcatatgcagactctaattaatatctccttcgtcacataaaaaactcaattataattggaaatttaaaatataagtgtttaggtttgaaattaggattggctttttctatatcacgaagtagtactatttaaagctttaattcttcatcagcatatatagtactcctactattacatgaacacgtagagacaagtgatcaagctgcattttcgagtgcacgctcaaatcggtgaatgaatatt

SEQ ID NO: 38171 - DNA, 411 bp, Oryza sativa
tactaagcttccattatcgaaaaataaggaacaatatccttgtcccacacactcattcacgcacgcatgctactgatacagaggattactaagacgcgatgatggttttcatgcaaagtgagagtataaagggcaatacttacatagatttcattgaacccataccgccgagcgagattgcagagcaccccaggctcgtggaggtagaccagcttggtcatgtcgtcgacgcccccgaggtcggcctccgtgtccctcggcaggactttcttcccatcgaccacagcctgacaacaacaacaacaacaacaataccagaaaccacacagccccggccagacatatcatcaaacacatagactgcacacagccgcggctcgccgctcacgccgatcagagcaagcatgcatg

SEQ ID NO: 38172 - DNA, 456 bp, Oryza sativa
  unsure (1)..(456): unsure at all n locations
aagcttataggaggaacttgaatngatccatgacatgtcatccgataagactacaatgcttcggccaacctagtatgccattgccgaggataatcagaaatcttcctcttaatgagcttgatcaaactcttgttagatgcctcggcttgcccattagcttgtgcataatatggcgaagaattaataatttgatacccatgctatcggcaaattgaacaaactcatcggtacatgaagatcgagccctgatcggttgtaatggtctgaggaataccaaactggtaaataatatgctcttgaacgaattgatagcatcccctgaataactntcttcanagaaatcgtttctacccacttggtaaagtaaatcggtgccaccaatatatacttatgttctttgcttgaaagtggataatcataccgatcatattaattccccaacctctgaatggccat

SEQ ID NO: 38173 - DNA, 488 bp, Oryza sativa
  unsure (1)..(488): unsure at all n locations
ctaagcttctgcccacaacagaattttcaagcggagatcggcgattttaaatttgcctaacccggcaaagccggngagaatcggatgtaactttttttgtagatgtccgtggatatattataaacctaatctctagtcctattgaaaagatattactggtttaaagaaggtcactccaatcagggttctatttcctttctagtggcggcaggatacaaggcaactcacanaagctatcggcagcagatcaaacacacatagaaagtgatttggtgggtgactgcgacagtggtgaccgtggtgatgacacgcaaatttatgaaagtgtcgatatgcgcngtggtgccaaaaactcgaaactctaatcgcttaacactaagaccagcanattaacacaaccgatgtaatcgaaaactcaacaagccttaactaagcagtactagtaaaaggcacaatggtctataggatcacggganaactaatctact

SEQ ID NO: 38174 - DNA, 421 bp, Oryza sativa
  unsure (1)..(421): unsure at all n locations
cagcaacgacctgcatgcagattggaatattggatttggatatgataaaaatgcacatagcagcatttgactaggtgcccacttggacactcgcaacgctttctctattggcggagaggaatattgtaataagcgctgcattggcattttgattgtctattggatagatgatgcattgcccttggcaattttggtatggatctctgcagctgcgcttcgcctattggtgccaatcctatngcaagtggcacttggcacagcggaagtccagtgccttctttttttttttggagaactcagtccaatgcaagtagactgcaagatccctccctatcctcgcccaattgggcccatgaaaacaaacactatgntggatatggagaaaggtgatgcatggttgaacgtgattatattattgatt

SEQ ID NO: 38175 - DNA, 455 bp, Oryza sativa
  unsure (1)..(455): unsure at all n locations
aactcaaccaaccccactgcatttcaagtacactctcatcggcccacccggaggggaatacaagtcaaggtgtgcctaattggttgccaccgattcagccgggcctgtgagtttcgccatggaatcaaggactgcagttcgacttcgtcaacgctgctcaggcaccaaccgttcggcagcaagctccaactccaggcttcggaacaaaccaagcaccaatccaagctgccacgacgctgtcgcatgccaattttgacccatccatggcggctcagcaagtacctccaattggagccaggcagttgaatgccatggcgcaacctcgcgcacaagctgcgattttgcccttcgccacaccgtacccgcagcaaagtgcagtaaacagggcgggaggcgaaaaggggctaccgctgagtggnggaatcatgactcgtccaatcccaccgcagttcaag

SEQ ID NO: 38176 - DNA, 453 bp, Oryza sativa
  unsure (1)..(453): unsure at all n locations
agcttaagatacctatgcgagttcatacttctggttgtggcatgaccacaactcactattgcccattcgtgacagttgaaattcaagggttgatttttccagccaacctcattcttctcgaatccaaggatctagatgttattcttgaaatggattggttgacaaggcacaaaggagtgattgattgcgttagccgcaccatcaagttgactagtgcgaagggagaagtggtaaccttccagtctccagtacagcagaagccaggggtcagtctanactaggccactggtgaagaacaagaggcagcagtggagaaaacctctatgaagttggaggatattctcatagtcagagagtatccagagggttttccggacgatctngacaacaatgccaccaaaagggatatcgagttctggattgacttggtacctggaactgcaccgatccaca

SEQ ID NO: 38177 - DNA, 455 bp, Oryza sativa
  unsure (1)..(455): unsure at all n locations
tcttgagagntttactgttcgcatcgctgcaagcttgtgacatttgccaatctgggtgctgtaccaaattatggaacagtgcaaccaggaagtccatggctctgacaattaatatatgcaaaattaacagcattttatataatctgataaatgccgagctgtgcaaatagtgtgagatagttagttaccttgtcaaccacaaaaggccattggtacaactgctagaactttttgctgtcttagagctgatctcaactttcaccatgctgtgcagctgctcatactttgaaggatcggatgcatattttgtctccaatctctgcatatagcaacagccacacaacagagcactgtcacaattatgctagacataaaccactaaaagcatgtngctttagctttccattngaccaaaattatcaaagagcaatacatcattacattgagaagagcta

SEQ ID NO: 38178 - DNA, 467 bp, Oryza sativa
  unsure (1)..(467): unsure at all n locations
gctctattaagtatcctaaatgacttatgttctttgattgcaaaaaagaaaaaagtaacccagataaacacaatgctccaagccgcctatcatatcagagaaacaaagaaatgccaaactgaagagtttaagatctatcgaactaatatgtcaggcatactactatagtacgcacaacgatcgtgaatatcttgcagatgatgacaacatacctcacacgaatattcttgttacttcaaaagaacatggtgtcaaagaggcattactaaacatataattattgggtcatttctaaaattctagtgttggaagcttactatcttatcttgccacatatgatgaagaanacaattgacaggcataaatatctaatagattcttaaactgatgcatttgtaatttctatctagagatgtaaatattactttgtacacttattcctgtacacagcagacggagatggatta

SEQ ID NO: 38179 - DNA, 487 bp, Oryza sativa
  unsure (1)..(487): unsure at all n locations
ctcagctgcttcatgcacgatgactcattgatttgacaataatcttgaccagagacccattccagttcgttggcctgatcaccggtacctaatcatgctcgaggggaagtctgaaggcgttatgcagatgactctttccttcagacctttcttataaaaagcaacgaccttttctttcgaaattcagacaatgcacgaggctaaaaaagctgggattccatatagccaagtcaaacactttgttcattgcagatcgaattgtagggccaaatactatgcgacaaaagtacatttactatcacttctaaaactcattgtcgccacccttcaatttcatttcatcagaatcagattctctgcagtccttgcatcagtttactgcagtgagtatgtacttatgtgctgttcttgcattggctcanatcgcaaccaggtgagacatcaggtgaaagctccaaccacgctccaaccacttcggctcanactg

SEQ ID NO: 38180 - DNA, 484 bp, Oryza sativa
  unsure (1)..(484): unsure at all n locations
agcttgcagactctntatgtattttccataatgcattgtgatgctctgacgtggaaaagaacaatcaggtctctgcaaaaaatgagccaacatgtttcctggtgcttagggatagcctctactaaacgcgtgaaggaaaaagagacccaagaacatgaagaatacaatttagatataagggtagatgccttagaatccaaagttgatggtttagaattgtctggatgttttaaagagcgtcacgttctgaatgatgtgcttccacatcataatctattcccaaactttctattgcagctcaagatatcttgtcccaatatactaaatgatgatccaatgccaattctggagagacttccacgtcttgaagtgctttgaaatgttaactcatcatacacagganagagaataacatgttcttccgagggatttcttgcattacgcagttnggtacttatggatattggntnggaggagtggaatt

SEQ ID NO: 38181 - DNA, 439 bp, Oryza sativa
  unsure (1)..(439): unsure at all n locations
ctcagcttagcaacatgttctaatacctttgtggttcatgctattgttgtctcatgggcataatgctcatcattnttcaggaactatcaccagtgctatttactctgatgaagagcactgaaccgtttctggatgaatactacatgctggatttggaggagacgatgaggcaagcaggctttgttaatgttcattctatactgacagatcccaggcataggacagtcactgctaccgtgcctttctgaaacatctgatctcccactgaaattttgttccatctcaattgtgattgtggatgtatactggtaaacaaaagagttgaaaaactgtacccttgttcataaaatatgacgacggctgtaccaaccacaataattacattgagtcgtgagctatttgttcgagatatttaattaactatttgccacatttagat

SEQ ID NO: 38182 - DNA, 281 bp, Oryza sativa
tggagcagcgtctgcgatcggagaatttgtctgtcttctaaagagtacagagggataggaaccaacacatgctctgaaccagattaaataaagtcctcctcgtcatgagcttgatccgcgcatgatgaatgtcatgcatagaacatttttcatgaacccggataaagacactaatgcgactgactaaaccatagcttaatgcataaactagttgcctggaaaatgatgcgcataaaattggcccatcgaacatagacacgacctaatgcatatcacccgat

SEQ ID NO: 38183 - DNA, 274 bp, Oryza sativa
  unsure (1)..(274): unsure at all n locations
tcacccaaggaacctcttagaattggaccagtttcaatgcctgttcataccaacaccaccctgattaaatctgagcaggatccagaaaggggtatccagagaacacctgngagaagtgattacaatggtgaaagggggaaatctttgccagcagaaagtggttcagcagacgctgagcaggcaaaaagagcttgctcatcaagtagcgtgcctactcccaacagagatgtttcaagaaaataccatgggccactatttgactttccttccttta

SEQ ID NO: 38184 - DNA, 201 bp, Oryza sativa
aatgtttcttcaggtccatagagagagatcttctcgatttaactaacagagagcggacatgatgtcttgacctagtgtggcggaccttcaccacctgcagatcattatgaggatccgaacccattaatgtggatgtagatgattccggaacatgttttattttacagactttctgatgctactgtgctagctgacacctgt

SEQ ID NO: 38185 - DNA, 281 bp, Oryza sativa
  unsure (1)..(281): unsure at all n locations
tgaaccgactagctacttatccagggagtaccattacaccttgtggatgcgctatgattatgttcgatgaatctaccacaagaatctagccttatatgcgaataccggacagagtcacatatgcactatccccgcatcgcgagttntgacaagtcattttattctgaacacatcgacaccacatgtcgggttttgaatgcttcagatacccattcatcaagttttcgacagcaacggagtatgtgggatatntggtatactcagcgtatagagcacgaata

SEQ ID NO: 38186 - DNA, 389 bp, Oryza sativa
ctcgtcgacaccggcatgagctggtataacagtatccgattaagtcacttccttgcttatgccccctcactgcattaacttaatctcaatttccagagcgaaaaggtacatgatcatttgactgcatgccacacacttagtcatcaacttaatctcattctgaaatctgaatctttgcaagttaatttgcacgtactcgttgtgaacaacctgttgaattgcagatttgggttgagccagaaggctggaagatgctatccccaatgctgggcgagctacgacatgtcactctcgtcgaccttcctgaaggctgcgacatcgcttggacaatgttcatcgtggaggccgcaccgaggctggagagtctctccatcagagtgtgggatcac

SEQ ID NO: 38187 - DNA, 205 bp, Oryza sativa
gaccttgaatctcagcttctgaaacagctagagataaatgatcgtgactttcttcattcattgcgacaggcgccagtgctcaaggactggagatggacactgcataggcaaagagaactgatgtggcggcggcgcttgagaacgacaccgtcggtgaggccgatatatcggacggctgcgatgctgtcgctaaaaccaatactat

SEQ ID NO: 38188 - DNA, 491 bp, Oryza sativa
  unsure (1)..(491): unsure at all n locations
gcttaccaatcacatacnctctagctcttaccacttagtctagagtcagtggcacagcacctccagcattcgacaaggcgaatgtttctccagctccatagagagggatcttctcgccatgaacgatcgccgaggcgacatgatggcttgaccttggctggtagaacttctccaactgcagagcagcaggatgaattgagcttaagaatgtggttgtagttcaatatggaagaaggaaatgcagtacagaaattctggtgctgaaggtgctagctgctacctgaccgttggcgatcgcgatttgcgagaacaagatctgaatcgatgtcgaagagacatgaatgccgaacatcgtggaagggttgtgacacattatctgcagagagcagttcattgtcaccagctttgtcggcaccccggtccggtctataccttctccggcataaaagttccccactgtcaagctctgaagaaacacanaacaaactctt

SEQ ID NO: 38189 - DNA, 453 bp, Oryza sativa
atgtcacaccttataaagtgaaagttgtcttatctcctttcttgaaaggaaatggatgcatgaataaactcttcttttaatttttatcctgggggttaggtatgtgcaaattgttcactgaacgatctttcttttaaaaaaaagcaaaattgcagttgcgcatgcattttccattggaagctctctgttttctgcatgtaaagcatttcagatggagctggtgaaattcgataagctgactgctgaagcttcagaatcagcctgattgcagtaaacagaacgtgcaaatcagaaatgagaataacaaagtagaggaaacagatagtaatacaacattctttttcaagacaaatgacaaatacatctagcagaagttcatgctttggagatgtttgtttcgacgtgatatggctctttggtataaaggaagtaacattcagacgtttcgctctg

SEQ ID NO: 38190 - DNA, 481 bp, Oryza sativa
  unsure (1)..(481): unsure at all n locations
agcttatctgaacggtctacggcacaacctggcatatgtgcctctggaggaagaattcagtcagcaactgtaactaatccttggtttatttttctagttcagcatgttgagtcgcgaaagaattcggtcggtattgagggtgggcagggcttcttcgccacaaatttgtactgcagaaacaaaggtacaggaggcagcattaggaacagtacagataactgaagaaatggggaggatatgcagtttataccttatgttgggtatacttctccctgattgcaggaaggttactcccaggaccaacacagannaggcggtgcaatgccttaacgcagtcgcttaactctgacgacttgtattgtgtgtagtgagcaagggtggaattctgcttccaatttacaatgagaagcatatgttagctcttgtaattttttatctgaatgttgatatacaagatgtatggaaagttcaatatgatgat

SEQ ID NO: 38191 - DNA, 282 bp, Oryza sativa
ccgtctgctctttcttcatatggtctacacctggaatggcacccgcacaacatgcgagggcagcaacggcgaagagcgcactgatggtgtgcattccaacagtgattccggcaatggtcccccactactccccgagaatccgacgctagcccaagtaatggcacatcagactcagatgatggcagccatgatgcagcagatgcagcaccagcaccagcagatgcaccagaggatgcagtagcacgccgaacagcatcagcagcagtttggtccccctccccc

SEQ ID NO: 38192 - DNA, 476 bp, Oryza sativa
  unsure (1)..(476): unsure at all n locations
agcttatttattggttgcgtctattttcattacctatattactctattgatgtattttgggttccttacaggatcataatattgctgattntgtatgatttgattcttgttgggtgagcccaagatgtctggaaatgacgataagtctcaggctgcagctgagagaataaaagcacaggccttatctgctgccaagggattgagcagaactcaagccgagcgagctgctgcagccgctgcccgcaatgtcaatgcttatgggcagaaagaagagggaccttcgcgctggcaggagaggaaggaggccaagagacagatgtatctgatgagtacagagaaggctgtgatactgggagtgaaaccaaaagctgcgcanacttcttcttcttctggtggcgcatatacccagtgccagaagtgtnttcagcctgngcactggacatacgagtgcaagaacgaactggtctacatttcgc

SEQ ID NO: 38193 - DNA, 342 bp, Oryza sativa
  unsure (1)..(342): unsure at all n locations
tactcagctttgaatatttttgtcgtgtcgcttttttcaactgttttttccatcacgcttcggnttggtattcttcgatctcatctgatctattgcacgccgccgccggaccaaaacctagcattgtcgccacatcatctccccgtgtggtttatccccctattgaaatttgtggattngttccaattttgagaaaaacggaaagagaagatcgaatggataaaaagccctcaaccaattttgatagattaagaagaaaatggctgganttgatggggatgaacggctccggcatatatgcaagagactatctaaaggtcggagatggcagtcggctgtgtg

SEQ ID NO: 38194 - DNA, 481 bp, Oryza sativa
  unsure (1)..(481): unsure at all n locations
gcctaacaaatatgcgctctacgccgtgaatgatcattgcaacggtctcctcctgctatacacccacgtggttaatccggccacgcgacggtgcgtgaccttgcccctactggcaccgtctcggggtacctttagcgataactacatcgtgttcgatcccactgtatcaccgcactacgaggtgatcaggatctcttaccttatgtgcaatatgagacttgacccaatcataagggagtcggaatggccaccatcaccatttctattgaatgtcttctcgtcggcgacaaagcaatgggaggatcggttatttgtcagggaaggggaggctgcaggcaccatcggcgacttagtgaagctttattctagacaacactatgctgcctactggcatggtgcactttacgtgcataggtgcacatatgtgacaaggtatacatacgtanactatgcattctgttaaacttgggctgtaaaatat

SEQ ID NO: 38195 - DNA, 63 bp, Oryza sativa
cacctaaattcctgtgacttgctgagtacgaaagtcttacccttgctctatataaatatatat

SEQ ID NO: 38196 - DNA, 462 bp, Oryza sativa
ctgctgcatgcaagcttgcatattatgatagtatgaagtaactgttctggtatcttgttttaaacattgcagtttgatgaacaaaatgtcatcataatacatgggaacatagacatctctgaaatatcggatcaagtctctacaagattgtggtattttgctatgcctacaaagatgtttccatcattagaagcatgtttaattaagacactagaggcgcacataaccttttgttctccgacagacatgcttttgagattactatcaaccgctagctcccaattaatggaagcacgaggatcatagtctgcctcaaaataggcagtgcagagttgatcttacctaaaacatcatcacttacctcataatggtcatgttgatccctcctcatgtctcgacgaagatgtcgatggtgagcacagctatccccaattatcttgcgtatccctgcaattgctcgta

SEQ ID NO: 38197 - DNA, 443 bp, Oryza sativa
  unsure (1)..(443): unsure at all n locations
tctacacgggaagtcggcttctcacacaaattccatcaaataaactcctatattagactatgctttcttctcgtagaaaagttcttggcnaaaagaaaatgagaaaaggagggaaaggcatggctatgagtaaaaaaaagggggggagaagaaggaaataaagcttgctcccaaaatattgagcaatgttggaaagaaaatatagccatgcccccttccatattcatgccaagagaacaaaatggagagaaggtataggaaaaagggataatcatttctttattccatcattccacaaaatatttttcctttccttttccatcacaaataaagaccattgatctangagtatgactgatgatcttcttgagtccgtattnttggctttgcaatatatatgatgcangtatgtcacaatttatccctaccaagctccacatatc

SEQ ID NO: 38198 - DNA, 331 bp, Oryza sativa
ggagaagctctcgcagtctcctcatctcgcagagcacttgcggaattagcatgaccaggactgcagcgacttgacgagcatccagatttctgcttccagcctctggaggcacatgaacatattgaagggcatcatcagtagtggctgctgcaacctgaagaatgtcattattaccggaggtgaatacgagggccagcaaccatggtcacttgatcggactgtcagcatgatgcgttacagggcgccccgatagcctttggacgatgcagcgagtgtcgccacagactactcaactttggacatggattggcgaagctgaacccctgctgct

SEQ ID NO: 38199 - DNA, 484 bp, Oryza sativa
ggtggcgtagtatagatagatagaagaataaaaaatggtgtgttctgtatgttcttacgaacccatgggacgtgttttccaacacatgttttagagaaaataatctcaggttaacaatatgaatttggagttccagtcctccctctacagtgttatttttttaaaatcaattagcaagtcaaagtttgttgaaggatataccaaccaagctaaagcctggatgccttaacttaagattacaattccaagtatactgagcacgtgaggactgaactaaaacatttggtgcaacaaatcaagcttattctatgtgaaaagatttgtcatatgctgtagatgttcatgagccaagccagtttaaagtttcaaaatgcgtgaaacggctatcccttggaaagtacagaaacttactttggacttgtcagtcattggagtattgtaacatgtgctgtgtccagttgacttctgagtcagatgttcatct

SEQ ID NO: 38200 - DNA, 444 bp, Oryza sativa
taggaactcgtcgacccgacatgatgcttatcgttcatgccatagacgtcgtccctagccagggtgctgctatccacattgcaatcgcaccacacgatgacggtgacaacctggccggccatcgacatgcacctctcctctcttgctccacaagtaattcacaacccgtggcgaagagctcaaccggtgtgacgctcctcgagtgcggcgctggtatggtgatttgatttgatttgctggttgtggttgtcctttattgacccttgagctacttgttctcgtaggtgatcttcgcccatgacgacgaggatgcagagaacgagttgtggtcgcacgttgcagtggatgtgcttgccgacagcgctggaagtatagggtcgatgcatccggagggaatgcgatgtcactcgctatcaacgctgaagcacgtggcacgccacactc

SEQ ID NO: 38201 - DNA, 473 bp, Oryza sativa
  unsure (1)..(473): unsure at all n locations
tatctcgccanaagtggttatctatcaccactccgtctatctgtttattcttatatcaccagaagactgccattaacacgtcgttgtcattttaaaccacaacaactgtcaaactgtcatagcttatcttgccgaagagtcattgccgccatatgcgtcgtcgctggaagactctgttgagctaccatcatagcctatcttgtcagcaagccgtcgcctccaagccattatcgttgacctgctctaccagcaccacctcccctacccctcttggcaccgctgctgaccaccaccaccaccaccaccaacgctgcgaacttacaacccttccaccgcatagtcaccagggcttagcccgcaataagcgggcactgnctctctgcaataactgaagctgagttgaggcataccatgcatggtttaagcattcaaatgatgtgctatctattggaggaaatggagtggagtatgat

SEQ ID NO: 38202 - DNA, 376 bp, Oryza sativa
  unsure (1)..(376): unsure at all n locations
cttaagcacctgngctgcagctatgccatttcaacccaatcgtggatattatgcctgtcatacctgtactcttttttctattagcctttgtttggcaagctgctgtaagttttcgatgaaatctttactactctgtctgccaaattgaatcatgtattcattctaaaaaaattcgaaaaatggataagagccgagaagtcttatattatgaaccttcgattctaaacatcaaaatcttctacactgaatgtataactgcagcaataaattttgatcagcctttctactccctgcatctacgttgagcaggtatctttaggtaaccgcacaataccttacctaatttattgataagagtcttaatataaataattct

SEQ ID NO: 38203 - DNA, 479 bp, Oryza sativa
  unsure (1)..(479): unsure at all n locations
tcannatctagagtganagtttttcanatcttgactcgaaagttttctatatcgagtgtaaaggttttaaatctgaatcgaagttttaaatctgagttgagaagtttcaaaatttgtcttacaaatttataatttgagttcaaatttttcaaagtttgaggtaaaaggttttaaaatttgactcccaaggtttcaaattttaccttgaagttcacatttccagattgaaattttataaaaattgagattataatatacacaaatttgagagtgagaaagttttaaattatatgtatggcttttaattnttcgattgaaagttttaaattttagatgaaagtttctttcacatatagattnttcttcaatctggtagtaaaaaaaactctcctcattaccgtcattatcctaaactaactcagttagttagggtaactccggaatcgcgctctggcttttcccanactcanggtcgagag

SEQ ID NO: 38204 - DNA, 420 bp, Oryza sativa
  unsure (1)..(420): unsure at all n locations
gctngatcgagcccccattattggctatcttatgattcatacaaaagctcgtagaaacgcataatgatggttacttacttcaacgaatacctacctacctacctacgggtgcgaatgtgcacataacccatctaccagtataatcggaacatcgagcatgacattacaaagctttcaagaactggagcaaatgaaacactttgacaaagacatttgagatcacaacacacagaagatctagataccaccacaccttcaacgagaaaatcatcatcaaatccttgtggcaataaatataacgaacaagtctcatgttctgagcagaaatgcaatcatagtgttacatgagctggcactaaaattatatacagatcatgtcacaagagaggggaacgaaaccaatcactagtattagactcg

SEQ ID NO: 38205 - DNA, 479 bp, Oryza sativa
  unsure (1)..(479): unsure at all n locations
ntaatcaattatttccaatgtacntaccttcgtttttaatagatcatgccgttgactntntatcacacgtttgaccattcatcttattgaaaaaaattacgtatttataatttattttgttgtgagttattntatcactcatagtactttaagcatgatttataccttatacatttgcataaaatttttgaataagatgaatggtcaaacagatggtcaaaagtcaacagcgtcatctattaaaaaaacggagggagtatcatgtagactttcaatagtcatcaaataacaatatggcttgtacacaaagtatcctcaccaccacattggcatatatcccagggaatgataagcagctntcctcatacactaacaatctcttcgacattttgtatacaaccgggttgacaaggacaatctcctctccttctccttcacaccagctggattaaataccataagttgtacattcaccccaa

SEQ ID NO: 38206 - DNA, 473 bp, Oryza sativa
  unsure (1)..(473): unsure at all n locations
agcttcgttgttagatgtgattntaatctaacatatgtatattatcttcgaacatatcacttggttcataactgggaatagctctcacgaacaagcaactcggattcactttcttgacatttagtttatttcccactattctctttaggttgtcatcatttagcattccatgtattcctttacaccttcgaccttgatgagttccttcccattggatcatctcccaatacatgacattgcctggtaaccggtgcctgcacttttcactccgtgtagcatctgataccgagttgaatatttcactccttgccttcatggaaacactnttacctaggtcatctcgcttactcatgatngattttttttacctcaatgacaaggtgactgttgcggngcgattactatcangggtctttcttgagcgatgcagagcatgtgtttgtttatccctttatcaatcacctttcggctac

SEQ ID NO: 38207 - DNA, 428 bp, Oryza sativa
  unsure (1)..(428): unsure at all n locations
catggcagaaaatattttacttttccatttttcaccacaaataaagacccttgatctaagaatatggctgatgatcttcttaagtccatatttttggctttgcaatatatatgatgcaaggattgtccgatttaatcctaccaagcttcacatatcagccttagaatatgggtgaattcttgcacaattttgcttagtgaggatccaaaaagaanatatacatcctagagagacaagagagagagtcaatatgaggagaagagctgatttacgaaaatttctaanaatcccatgagtctgacagagaagcaagaaagactggtatcgagatcattccattttatcaatactcaagatggtaagatagctacttattaagttacaggtacaggtatgggtgtgaatgattatatgcttgattatacctt

SEQ ID NO: 38208 - DNA, 492 bp, Oryza sativa
  unsure (1)..(492): unsure at all n locations
agctgatcttctangtaaggcaacccatacagattattcatatgagatacttaaaatcctagtatatagtagatatggagatatatattccaaacatacttaacaaagagggcattgtaggattatacagcaataactaaaccaatcagggggagggtgaatgattgaactacccaaaaaccaaaacttttagcagaattaaaagttacattcgaatagatagagcttggtctgactggagttgatgcgccggtctaaccacacaggtgcctccggtctgaccagtgtagtcgctctagtctgaccgtcctttgcgtagctgtcgcctgcttctgatacttaaatcctagtatacttgatatggagatatatatattccaaacatacttaacatatagagaacatatacctgctagtccacttgaaacaaacatatctaagttccaaatgtttcagtctcaaaggagaaagttcgttcaataaaaaacactc

SEQ ID NO: 38209 - DNA, 421 bp, Oryza sativa
  unsure (1)..(421): unsure at all n locations
gagctccggcgtgagtgctgcagcggcggttgtctggtggttgctcaacctactcggcaaacctgctcatggtagggaaagctgaaggtagaagaacatgcccatggtgaaccatttggtaattnttcttggtccaagttgaaaatgtcagcttatctctggtccaaagtgcgatagtggtaaaacaatgtgaccctatgtacaatttactcatatatntttataatgtatttgtcttatgttaaatatattactactctttntataaacttggagtagcttaactttgaccaaagtcaaaacgacttatagagtttgtttgggggagtttctagctgctgcagcttctcccagaatcaaaagctcccccaaacggtgcagcttttggntcagattatgagaagctggagttacagaatct

SEQ ID NO: 38210 - DNA, 500 bp, Oryza sativa
  unsure (1)..(500): unsure at all n locations
agcttatgtggaagtcatccttctcattcattntattctcttcacattctaccgacagtgatggtttcttgcaggatccatccttcattactttgaattgacaaaataaaacaagataaatgctacatgcagaagcagaacaccctagtttactggagaacacactgatcattaatgtaaaggttctttgttggagaaaaggaacaaaagtaaaaggcaaaagtcactgacctgcagctgatgagcatgattcttcgctgtaaagaatagtttgggaaggtcagaacaacaaatcccgctaactctttcataacattagaacacacattgatcccactaagttaaaaagtttaagttaattctcttaatacctccgtggacttctccttatctctgaatcgtctaccatatcgaaagaccaagcagaaggaccaaatgtgctgtttaagttggattttttctttaatggtgggtgcctatccagaataatagcaacatca

SEQ ID NO: 38211 - DNA, 365 bp, Oryza sativa
agccttgatagaatccctcacattcaaacactattttcttatatacaagtagctatcgcgaaactaactggcgggagagattcttgtcattactaacctgtgccgagttagtccgatcctgcttcattgcgcagaatgagaagactactgtatcgtctgatcaaggggtcctgctcttcatcgagttatcatgatgagtctagtacttgttcatcagcagatgtctcgatggaggacgccgaagctccgtgatgactctctaaacgacacctacctcgagcttgatagtgatcgggagagacatgactactacatgctgaacgaccggtagtctgctcacacgctagaatactcatcggagctgc

SEQ ID NO: 38212 - DNA, 462 bp, Oryza sativa
  unsure (1)..(462): unsure at all n locations
gtcacctgcngcatgcagcttaatatgtctggagtggatacattctaagatatctgttgtcatcctgagatctgttgtcatctttgtacctttccaaatactatagagtaactaaaacaattgactgcattatacaatatactattgaggcgtcaaatcattatgagttatattcctattttgtcactctgttgcatccaactcgagtttatttggtttgcgtgcatccatgatgcacatgccaaccgcagatgtaatgctaccttttctttattaaatcanaggtatcagttaagattgactagtacatccatgcaatagctggaggaggctacaagtttcatggtggagcattagcattccaccatattgagatacccataattttgtctcagatgttaataaagtaaaaatanaacaatcatacactatgaagttgaaccgcattacgtcgtcaaagca

SEQ ID NO: 38213 - DNA, 453 bp, Oryza sativa
ctaagctatctctacctcaggatggtcagtcgaacataccatctgcttgtgtcgtcgcgcgactggatcctcgccacacggcgggtggtccaccgctgttgtagggcgaattgtcttaccgaccggcaccttgttcgccgactggtgtcttcgcctatatggttggttggtcacaccaccgatgttgggcgtctacgtacttaccgatggcttgcctttcccgccaccgactggtgtccacgtctgcatggctggactattatgccaccgctgttgggcgtctatgtcttcaccatcgacttgccttcgttgccgccgactggtgtcttcggatgcatgggtgagctattctgctgacatatgtgggcgtctacgccttcaccaaccgatcgccttatacaccaccgactggtgttttcgcctatatgggtggtttggcacaccacccgttgt

SEQ ID NO: 38214 - DNA, 492 bp, Oryza sativa
  unsure (1)..(492): unsure at all n locations
tagctatagtactaagtagtgggtatagattgtatatatgtatcatcgcgttttgcctctcagtgacacagcggtcagttacccaatctctaataaacaaacccttttgaccataggcgagcaacgatagcgagctatgtactacacattcgagaatcgagataacctcgtagtcttgaagtatccaaaggtgttacaaatttatcgcaaagaatgtgctctctttattagcatctactaaacaaaacgaaattctctctctatgttacagcagagtgcaatgtgcgcctgacaactctacaggggaacagaaatatagaattgacgttacttgccaaacaggccctcaagataccttgaaccggtatgaagtctttggcgtccaaaacgagatcagaagagatanatgagcaaaagacatcatttttcttgactgtcatacataccatatattnncgtttcttaacaaatgggtagtcaaacatatacaaa

SEQ ID NO: 38215 - DNA, 445 bp, Oryza sativa
  unsure (1)..(445): unsure at all n locations
ctcagcttctaagccaataggacctgaaacatcaagatcactttttttcttttagcaactagctagcaggttgctaaatatgttttgccatgaatctccatgtgcaatggactactacttgtgtcgttttagttctattagaataactagaaaaggcacatgcaatgagataacataccaccccagtcaatttcaagaatctagacaaaggataagcatcatcacctgtgtgtattctttgtttcagtatatactagtacctggaatacttttcttaaagcggtaattntatttcacttctaagctctagctggcatgaaaatttaccatcatgacaaccagtatggacgtttttttcacctgtgcatgcagatggacaaaaggatgcttgaggagattggattntatgggctccaaacatgtatcatggaccttgatgggagta

SEQ ID NO: 38216 - DNA, 434 bp, Oryza sativa
gttagctcgctattatctttatcgctgcatctgtaatcctttctatatgtataagacgtggatctgtatgtcaacaattgtcgtttgtgtaccctggctggtcctagacagggatttaatgcacattcagcttagaaattctggatcgcgaatatctgggcgtgacaagttggtatcagagccaaccttgcccataagacaagccaactggaaacctaagagccctctcaaccccttttcatctgcatatgttctttgcactaggattagtttcgggaaaacttgtggctctgcctctctggttagagggagaaatctcggtcgttcattcagatcggatctttaaagctagctcactctaggggcttagaatatatttatttggagttattcaacagtaagtcggcgatttatccggtgatatgcactaagtc

SEQ ID NO: 38217 - DNA, 491 bp, Oryza sativa
  unsure (1)..(491): unsure at all n locations
tagaggctagagctgcacgcttgtaattcacgaattctattctatctgttgagaagaaaagaggagctgcaccttgtgtaaaatttgaagatcctgaaatcatatcatcactgggtttatttttgccctgttgtttgcctacactcgttgggtacttgtgttttctgtactccgttcgaggaggtgaccattgctatcacactatgccattgaatcatttccttctaccttttgtgaagaggtgatatggttccatttgagtcaaagtcaagtcaaatgtaatggactangaacatcatgtggggacagatgctttcccagaagcagaattgctacaccactactccctccgtcccaaaaaaaagacaaaccctggttntcgtgcccaatggttgaccgtctgtcttatttaaaaaaattatgaaaaaaaataaaaagacaagttacgcataanatattaattatgttntatcatctaacaacaataaaaa

SEQ ID NO: 38218 - DNA, 434 bp, Oryza sativa
  unsure (1)..(434): unsure at all n locations
agncttgagtgcatgcatgcatgaatatagcatattatattacatgcatggcccactcattntaccatatatataaagtatttttatttcgtgtttcgcataatatcattttcattggttcctttaattcaacttcactgtttcgatgatccgaacattcggctctcaaagtgtgtggaatgccgatcctattgtttggccttttgtttccttattgtggacaatccgaccctctttttttctcgctaagaaaacgattacatcctttccttttcccacaaaaataaaagatgctgatatcacctagcatgcatgtcaagttgccaactaatatacaaaagctccaaaaaaagtttaatttccagtcacagatcacagaagatatttcagataatgtaagtaacttcgagcgaatgaaagaacatanaagcttg

SEQ ID NO: 38219 - DNA, 502 bp, Oryza sativa
ctaagcttaattgctgaattcattatataacatagaagtgatacatttattctgattaaattaactaaacaactctagatatgcttctactttgctatcaaaatcgataaaatgatcataataacctactccaagcatgtagctccagttataaacgtaaacgatacaaaagcacatgaatcataattcatttctcccaaacaccaactccaataaaataaaataaaaaaacaaagtttaagactagtagcgtgtacctccagttgaaaaacgtaagcattataattcatgtctcccaaacacgaactaaaaaaaattgaaaaaaaagaagctaaaatacagtaaagactagctaattaatcctcagcaggttatatatagttttacagagaattttcatgagttgtaacacgacttcgccaagcataggaaggcgaggaagaatgcggcgacgaccgcggccgaaccaccgaagatgatgaaccagcagcagccgacgagg

SEQ ID NO: 38220 - DNA, 255 bp, Oryza sativa
  unsure (1)..(255): unsure at all n locations
tcgtacctacgaagttcttattntttttcttttgcctgccaacaattattagttntttaataatacatctaatataatggtctaaaatatcggttcatcaatttaaataaaaatcgacgataagattagacaatgtcatttaaattctacaagtgtttgtaagaatgctacttggcggctcaagaacacttgcaggatatttaatggacntcttaagcctatatactatatagtagaagaattgtttgaaaaaaa

SEQ ID NO: 38221 - DNA, 437 bp, Oryza sativa
  unsure (1)..(437): unsure at all n locations
tagctcgattgatgcanganatcaaagagagaggtcttgatgtttgttctaatgtgcaatcaacaccagtagcagctcgcactggtacaagctcgcctacgccgaggccaaagggcgcgtccgccgcggccaccgcgtatggcagatcggcttcggcttacgcttcaggtgcaacatcaccgtctggcgtgcactccgcgacgtgccacccgtgtacgccttcgtcacggcggcgtggcccatggccttgctcggcgggctcgtcgccgccggcgtcgcccgacgctatcgtcgtccgccacgctgcctccccatacacccgatgccgccgggccgccttcaggccgccaccgtcgcctctgcccgcgtcgttgcggtcggttgctggccgcgccgtcgcgcacctgccgcattccgctcgggagcgcacgctcgtg

SEQ ID NO: 38222 - DNA, 320 bp, Oryza sativa
tagcacatgccggaccacattcatcgtcactgattgtccagaattcatacgcgacacgctcatcaggatgcggaagagactctctccagaccagatggacgctaaccatatcaccagaaacagcagatttacaagcgcatcgtcccacctctccctagaagcacatagggaatagtgaggcaaacaacgtgctctgctccagcatcagctgggttatccattgcgaacaaaggcgccgacttgacaccacaacaagaactgctgcagccccagcattttgagcatgtcatgcctccggagtgaaaagcactctgtaccac

SEQ ID NO: 38223 - DNA, 475 bp, Oryza sativa
  unsure (1)..(475): unsure at all n locations
actcagcttaaagattcgtctcataatttacacacaatctgtataactagttatnnttttttggggatatttaatacttcatgcatgtgtctaaatattcgatgtgacagggtgaaaaattttgcgagggccttagatacaagtcatacaacaccttttgcttcagcacagcatctagtagtattctactccattagataatgatgaataatgtggaaagaggtatttggaacttttatgtcangaatggagcaacagaactgaaagatgctagcttcttttggtgtagttagtacagctatggtgctagaaagaatagtctctgattctgctattctcattgttctgtggaatggattcagtcatccagacatnctatagagtagtgtagaataggaagatagtactagatcttttcaccaagctacttgatcgatggagaactnattgatctttgattctttgatcactgtct

SEQ ID NO: 38224 - DNA, 457 bp, Oryza sativa
  unsure (1)..(457): unsure at all n locations
ctaagccatcggtaactcaggaattgtattcaaattttgttttataattgttcggaatctatcggctnttcaccggatttcacgaaaaccatcattctgtcagaacctataacggaaggccatctcggaattgtaaatcttggttgccacttgggtttttgtcactgtgcttgtgccaccggaaaaggtctaattgcatgtttttcttggctcaagtacgcgtgtttgccactttataccgatacaaaccatgcttgttcaacgtggttgaacaaaaaaaaggaagactacagtctacaaatctacaatgtcctcctcaacgaaaggcctggaatccgtgaaaagccgaaaggtgggagagaaagcgcacacgccaacacatctcgtcttccacaaggcaacaacagataagccgtaacgaaccaccaggcccaacgaggaaacatagttacacaca

SEQ ID NO: 38225 - DNA, 447 bp, Oryza sativa
  unsure (1)..(447): unsure at all n locations
agcttcanggcaataccatgtaatataatgaggagtgatctgtgtgtatcccttcttctcaagaattngtgcagttcctctaaagctcttaacaaagtccatttgcatatcacatttcggaccacattcatcgttactgtttgtccagaattcatactctacacgctcatcaggatgtggaagagattctctccagtccagaaggacgctaaccatatcaccattttcagcagatttttttagggtcatcgcccaattcttcgttataagcacagagggaatagtgatgttttcaaggtgctctgttccagcatcatctgggttatccattgtgattaaaggctccgacttgtcatccacaacaagaactgctgcagccccagcattttgtgcattccactgccttcgtgtgaaatagcactctgtaccagaaagtggaattaacta

SEQ ID NO: 38226 - DNA, 440 bp, Oryza sativa
  unsure (1)..(440): unsure at all n locations
catattcaaaatcgtcacgaataaatcatgacttttaactntacatatgattgaacacctttctggagaggacaaatatttggccacatgttgcagattacataatacacaacaacctatcaatcttagtatttaactaatcatttgcttgcttgaatcttaacgggatatcaaacattaactacaaagaaaaaaaaacacaaatagttggatttgtagttcatacctgtacaagcagtactttatttgtctcctccagtccacttaatctctctntaagagacgtctgaagaaaaggagcaacatgtcagccaaaaacagataggaagggctttggatgcattngctgcaaatactaaataaaaattgtaacagaacaagtgattcatgcattacctnctgatgaagtaaggcatcattgatgacctctatggacctga

SEQ ID NO: 38227 - DNA, 422 bp, Oryza sativa
  unsure (1)..(422): unsure at all n locations
caccttgctctccaacttgcaaatcttacctcgattccagctttccctgtcatgagctgctttgtctcgctccacacttactgcatccatagcactaagcatatgcaccgcatgcatcagagtggcactctcttcaccatcaggacagatataagttccatagtcttgaccatgaggcttgtgaggatgatactggaaagctgatgaatccaactcttcttcaaagcgttgacgcaactctccaatgggcaccaaagctgcttcttgacaagcatgactgtacgatcttcctccagcttcaaacttaatggacggaaggtcttcacgatcactagccaacgtcacacgaacacgacacttcntctcgtcggggtcatgggaaatttggcgatactcgggagccatcaacctcaggctcctga

SEQ ID NO: 38228 - DNA, 477 bp, Oryza sativa
  unsure (1)..(477): unsure at all n locations
agctnggctttcgctcagggtcctcgacaaggattgttcttgtttaagcggtagtacatttgaaggtcatcgtgctgttgctgcatcatgttgttgaagtttgcgaactgagcatcagcagattgttgccattcttgcgtntgtgctatgtgttccgtgaggttgtactggatctcccccgtctgcatataaagggtgtccattctcctagcgatttcacccaagccccaacgagaggaactcgagcgccattcacttcgagatggacgcacaccacttgatctggaaggttggttattcccncaatgtatgtcattaggcgcatgccatcggttctaactggcacttgcccagtttgagactccgatgctatggcgttgagcttgggtccatcccggtgcatncccagntggttcccaacctgcctcatacatttgcacgagtggtgatgatgatgaactttcctgttcatttctt

SEQ ID NO: 38229 - DNA, 361 bp, Oryza sativa
  unsure (1)..(361): unsure at all n locations
aagaaaacgagcatgcagttcgtacttaccccctttnttttttgactggagcaaacaaattaattgatgaaataatcgcgttgagtttataccctcattatgggtatttattttattacatgacgttgtaaacattttgacacatgtttgatcattcatnttattaaaaaacattatcattatttattttattgcgacttggtttatcatattataggtactttgcacaaaagttttaaataacctaaatagtgaaacattgtgtaaaagtcaatagcttcatctattaaaaaccgaaggtattatcatttaaacatgatctctccccggacaactttgactattaatttcaaacaatgtc

SEQ ID NO: 38230 - DNA, 414 bp, Oryza sativa
  unsure (1)..(414): unsure at all n locations
gctcacatcctctataatatttgaagcaatcatcatattatcctcggccaataaaatcccgctctcctaagcaaccaattcatcttgtgggccgaatgatgagttccacaaattccttcatgtacctctcccatagccactttagattgaacttcatctatgcagttcatacaaggcaccatctatatttcggctagatcaatcttcatcaagccactgcgaatatgaatgccttgcgccgaatgttccgatcaaccttaagtgtgggatctatcaaatatcgaatcaaaagaatcctccaatcttcttctatttcctgggcacaaatgtccgaattcacaattaattcggtctctaaattgatngaaacatgccgcccagcgctctgcctagaaccggtcagaccggccatac

SEQ ID NO: 38231 - DNA, 422 bp, Oryza sativa
  unsure (1)..(422): unsure at all n locations
atgtaatccgtcgagttatcatatacgtggtacaatctatgttagttgccctatataacttgttagcggctggttcttattgttaggaagtaatcggtagaggtatgttttggtattaatctagattgtgtcgggtatctaccatcttttgtagattttcatcatcttgcttagatctcatangtgtctttatgcttaatgttgcatcggttgagttcgatttattgagtagtatttataattatgatatctggctggntntatgatcatctagagagatagtatcggggtttcagccgatcttacctgatntagtcttatgacttacatngcttaatgatatgctaaatccgcccttcatattaagatcttattgcaataaagtatattaggcttctatttgatatattctatatggttta

SEQ ID NO: 38232 - DNA, 447 bp, Oryza sativa
  unsure (1)..(447): unsure at all n locations
gtcacctgcggcatgcaagctngaatggttgatcatcaatgatatgctcaactggtatgaatgggcctctattgaagaacacgagatatcacttgcagcaatgaacgaaggaggaggggatggaactgctgtggccgaagaggaggagatatcacttgcagcaatgaatgaaggaggagaggatggaaccactgtgacggaaaagggggaagcctcatttccaaggttgtgtgtgctgccctctttgaagaggttggacattgataactgccccaagctgagggctcttccacaacagctttggacacgaggccaccaagttgaaagagctcttccttgtaagcagcagctgcttgaagtcggtgaaggaccttccatccctatctggnttcctttctggttgtagatgtgaaggcctggagagggttacagaactctccaaagtga

SEQ ID NO: 38233 - DNA, 470 bp, Oryza sativa
  unsure (1)..(470): unsure at all n locations
tttcgatcgtaacttgatctcttgcagaattaactgatattcatatatttggttctatctagntctgctatatgcatttggttcagtcagaaaagatggatcgaaccagatgtcagcacgtgaaaagatatcgaattcaagcgataaattgataaccaggttcatgcgaagatttacatagtataggctcatctacattttcattattttgtcgctactaagaaaaaaaattaaaactggtagagacagccacgggaaaagggcacgacaatatgcaaatataaaaaaatacaatgcaaataatataatggaaaattagaggcgatggagatgacttaccgcatatttggtgatgaactactgatgcggtacctatgtacctacaactaatactatagacaattctaccatttttcatcttctagcanattatcattttaccctttctacctaagtacctatattaatac

SEQ ID NO: 38234 - DNA, 379 bp, Oryza sativa
  unsure (1)..(379): unsure at all n locations
tggatgcatataaccttaggtacatgtatggactgaatgcactttctgtacaaattcctatcggacaaaaactggttgacaaaacctagagaatacggggctctaacttactaaagcactattatactagcgagaggaattacatatttttcaggtattacatgtattacacgactactcttatacgcggacagatgaatgtgaagagggcttatcacagttcttgcagttcgctttcactcattcagcaaaagacaacagtattctttgtccttgcaagatatgtatgaatagtcattggcctaatactgaattacccncgaacatctaatatgtgatggatttatgcngggttatagcaaatggttctttcatgggg

SEQ ID NO: 38235 - DNA, 383 bp, Oryza sativa
  unsure (1)..(383): unsure at all n locations
ggaactccaatggaatactcagcatatgttggcaccttttctcatgtggagaagatggcacaaaatctgaaaacctccaggtatgctgtatgcattttttgcttagaccaaaaacatgtcccctgacctgaantttgaattaagaatgtgcatgtcatgctgcttaagtctgtttgctttcttttttttttcttctggtggaggtttanggtagaaaggaccttacgtaactttggaataataggactatatgtgctcaagtatttgcgtaattaatcgtagtttacttctttatcctgtctagtatttgtttcatgcgttctgcattggtttggatgtagtactcttttcttagatatgcaataatatgagttatgtaaagg

SEQ ID NO: 38236 - DNA, 344 bp, Oryza sativa
  unsure (1)..(344): unsure at all n locations
atgtttcttttccatgaccacattttctttactctgcaccagatttaatttcggtgcttattgatgtgcatagctagaatacatttgggttaattcatcaattgttcagacaggacatgtacaaaaatccgcgcgctcaaaaagaagtcgaagaatatgtaaataaatgtaggggaaatcattgtaaagatattctacaattgtataaagaaggctaatttgaggaatacgctccactgtgggaattagcactcttttttgttgttgacgatgagnttgagaccaaacacaagatacatatgaaagttatgacctgcatctatatatcaaatagaaatctacag

SEQ ID NO: 38237 - DNA, 376 bp, Oryza sativa
  unsure (1)..(376): unsure at all n locations
tgctgcatgcaagcttgctacatagcctcttcacatcaagttcttttttcgctcgctccaacagttggcttgatcccctacggatccctaagttgaagttctgaacacgcacgaccaagaacgttntcagatgggagacgacgatggtgacgaaatgcgctgcatccttgaggatgataaaaagcaccgccagcaacacagatggctcatcttttgcaattatacgcacagatcggtcccctggtgtgactggtctgaaatctccagtactgtcttgatgatcgacatcaaaatatgcgattggatcgaagcctgctatataaataatttacttcaagagatgctctgaagcaacaaggcaacccagaaaatctat

SEQ ID NO: 38238 - DNA, 487 bp, Oryza sativa
  unsure (1)..(487): unsure at all n locations
tagatgacaactcatganacttgtgcagtcatgctgcttgcttatcttcccaagaaactttagccttttgttgcagcatctcatatattggtgcaggaattatatgcaaaggtaaacaggatggcgagcattgctgcagatttgtttgctggtaaggaaaggtttgctacattcctactgatgcggcttacagaaacagtcatactgtggctatcagaggaccagagcttttgggaagagattgaagaggggccaagggctctgggtccccttggacttancaagtgagttctttntttcttgttntgatcttatgacaccaactattattcttaatttcaccttccttttcagntctacctggatatgcaaatttgcatcctttccgggcgaggccggttcttatctcggcacgtacatcaagtgatacttganaatcattgatagaacaatggcagcattttctgctacacggatgaaccctgat

SEQ ID NO: 38239 - DNA, 423 bp, Oryza sativa
  unsure (1)..(423): unsure at all n locations
ctggctatttataccctcatctatggttccgagcccaccggctctctcctcccttgctggcttcgcgccatctttgccgccaccgtcttccccccttccccccttcgncttcgatagattcgcgctcgccctcctgacccacggattcggttcccacgaaaccgctcgatctgggggatctgctagattcgtaaggcggcgtttcgatcgatctgttcgggggtttctgccgtggggaattctgatctataaaggtagatttctgattttggttcttttttgctttttggtggcggtttcgctgtgttaagtttgtggtggtggtggtggcggtgaggatgtactcgtgcccctagatgggggccattgcgatggtggagcacgatgggtgcctctagaacccgcagcccctggcggcgtcaa

SEQ ID NO: 38240 - DNA, 205 bp, Oryza sativa
  unsure (1)..(205): unsure at all n locations
cctgcgcaccacccatcttgccaccgtcttcaacggctcttggcgatgatgccatatagacaagcccagcagcagagagggacgtcacgacggcnaccgcgtcatctcgtgcatcagtccctgccctgcacttcgtcacactcgcatggcttcgcgtccttctccctggaagccgtccgcatctttgcatcgcatctttctcttt

SEQ ID NO: 38241 - DNA, 193 bp, Oryza sativa
  unsure (1)..(193): unsure at all n locations
catgggcggatatgatgcgtgtaccgttgcgtagatttgtttgcctgtgctttgcgaaaagntcgtgtggattgggaatcgtaaccagaatcagcctatgtggcagatggatgacctgagtggtcaaaaacgaatctgtgtgattcgggatgtctgcangcatcatagactangcttctcgagtggaagcgga

SEQ ID NO: 38242 - DNA, 375 bp, Oryza sativa
  unsure (1)..(375): unsure at all n locations
agcttccactgctgagttactgattttgctggtttcaagtgggaagtacaatcaacatatgaagggtcttcctgagaagtaccactcctttgtgaaatccagggctgtttgaaaatgcctacagttatgcagacatcattggccttctctaaattagttgtatgaagaataaattcttgaccaaggtatgtatctcaatcaagagcgtttcattgatttcaattatgggtattgttgggtcagcactagtttgtctttttccatactgaagaaaagagaanagtattgttattcaccgaatgcagtatttgattataaaaataaataaattctgttgctaagcaatatctgattgaataaaatggtgttcgagct

SEQ ID NO: 38243 - DNA, 474 bp, Oryza sativa
ggctggggttttctcaacgtacaagctgaaattcatgcttgcttagagcgtggaatctagcgtacttctccaactcgtgatgtctattgtcctattcacaaaacgaagaatcacgacttctcaagctgcaaggtctttctccgcaccatgagaacgacgcttcctaaggttcagcagtcaggaacctctcttaaggagacagacaaggaacaaggagcgacgttgacctcggatcgattcgttggagtaattgacattgatccccacaagccatcagtcctacacttgctcgaagactacggctcgtcgtcttctagtacaccacgcgacgtgtttgccatcggtgagactagcacgtctgtacaagctaacgcagaggcggagaaccagacggtcacgatggcccaacatctcggcaccgtcaacgcaatactgagaagaagctcctatgaccctgtgcttaacgatgatctc

SEQ ID NO: 38244 - DNA, 282 bp, Oryza sativa
  unsure (1)..(282): unsure at all n locations
agttagtggtgtaagagctttcagttataatgtaataatgaaactcagttaagagttttgagggaggagaaccaattnttatcgccggtcatgtgccgcgaacaaccggaatccacgatccacacgttctccttcctttccaccaaggcctacacacaatcagaagtcgaagcctcagtaccggggttagacaataataaaaatttaggaatccagtactgagacacatgaccagaagatccaataggcatatatccacgttgcaaaatcacatttagaatt

SEQ ID NO: 38245 - DNA, 461 bp, Oryza sativa
  unsure (1)..(461): unsure at all n locations
ggatcgatgcagtaggattcgtcgggagctgagaatgatggcatttgaagtaggctacaacattgtccccgagtatcgccaaattccccatgaccccaatgaggagaatagtcgtgttcgcatgacgttgactagtgatcgtgaagaccttccatcaatgatgtttgaagctggaggaagagattatattcatgcttgtcaggaggcagctttggtggccattggagagcttcgtcatcgctttgatgaggagttagagtcatcagatttccagtatcatccacacaagcttcatgatcaggagtatggagtttacaattgcccggaagatgaagatagcaccactctgaagcatggcgtgtatatgctntgcgccatggatgcagttggcgtggagcggcgganagcagctcatgagaggggaaaatggaaccgtcgcaagatttgcaagctagaaagca

SEQ ID NO: 38246 - DNA, 458 bp, Oryza sativa
  unsure (1)..(458): unsure at all n locations
tcggctntaacagtttagaagtggttttcacatcacgtcatgaatcgaataagatatagcatgtcatgcggatagcacaatataggactagatgaattatatggacctaggagccaaataggtggcttacaggtttcgatttggagacggcgctgctcccgccttagggacattaaccgattcagctcatgtagtcccctggcgcgatgatatctcggatctagtcgagaaatcggaggcatcgggtcgggggcacctcagacttgccttctctcccgcttcctctactgatctaatgtctntctcctctcgattctctgattatttgaacccaatgctgcgctcgcttacaatttctttctgaatcaaacgagacgcgaggngaggaaatcgagtcggtcgccgcgggccgggcgacctaccaagcctactcatactagtatactactacactggat

SEQ ID NO: 38247 - DNA, 399 bp, Oryza sativa
  unsure (1)..(399): unsure at all n locations
ctgcacagtgagacaagttacaaagtgcacggtgagacaagttccaaaaataaaaacacgataaaactatggccatgtttagttccccaaaaacttttcccaaaaacatcacatcgaatctttggacacatatatgaagcattaaatataaataaaaagaaaaactaattgcacagtttgcatgtaaatcgcgagatgaatcttttgagcctaattaggccatgattagccataaagtgctacagtatcccacatgtgcttatgacggattaattaggctcaaaagattcgtcttgcgggttccaggcgagttatgaaattagttntttttattcgtctcgcggtcttttggtgataactgggacagagggccaacgcatgggagagctgaccacagac

SEQ ID NO: 38248 - DNA, 320 bp, Oryza sativa
  unsure (1)..(320): unsure at all n locations
agcttatccagaacagaccgagttcaaagagaatgtctgttgtctagntatctattaattacgaatagttcgttatgtttccttttatctttaggaaagagtgtctattgtcctataaggactttatcttttccttatatctataggaaagtttctttcttgtccgacaaggacttgtatcaacccatgggtataaatatgtacacccggngtctatataatctatcttcacagatcaatacaattcggcgcatcgccaccttttacctcttctactttattttatcgttctggcagaacttggacccgacgtggggctg

SEQ ID NO: 38249 - DNA, 429 bp, Oryza sativa
  unsure (1)..(429): unsure at all n locations
actaagcttggggtgagttagccctactcgaccggtgtgggcccttggttagcttagccccgtcggcggctatgtccgcgacatgcaagaagacgagaaaaaaagaagttggagacatgccgttatcaatttccccccaacttaagtttggtgaaatacctcttgaactgcgttcatcaatttggtaaatctatgggcagatctatgggtttggcggaacagagccaccaattagacttgtgaagttaaaggtgttttgagtaaaaaagaaaaaactagatctaaatctagtttcgataaatctgaagcttttccacatagccataatcgacggggcaacaacgcggatctgccagtatatcagtaggagacatgcatggcatgggcggatncgcatgtgcgggagcgggtgcgccgcaacggatcata

SEQ ID NO: 38250 - DNA, 348 bp, Oryza sativa
agccggtgtcgtcgaggccctccttgcaggtgttcttgttgctcagcgcgccgcccagccacgaccggaggtcggagcgagcgtcaccggtgccgacgtgggacgacgtggcggcgccggcgttggtgggctggtaggacgacgacgacgtggtggacatcgaccaggacagctcgtcggaggacaggtcgagcatgtcgaggcagtcggcgatggcggaggagaggcggaggtcgccgccaccgaggatgctcgcgatggggaacgacgagatgatggacgcgacgttcttgatcgcgttcagcgtctcgcgcagcgtggagacgagcaccggcgaaatgccggtca

SEQ ID NO: 38251 - DNA, 475 bp, Oryza sativa
  unsure (1)..(475): unsure at all n locations
tactcagcttagaatagtgggttgtactntataaatagtatagattgtggaggcttgtatagtagtagaagaagaggaaaggggcatattagtcctaaaaatcttcagccttgttaggttgagatgatttttgtaagaaaaaaatgtttcattagttcatttgaatgtgttgtacgcttagggagtgtttggatccaagactaaactttagtccctgtcacatcggatgtttggacataaatgagagctaattcatgtgacaattnttttaagcctaattaatccataattagcacatatttattgtagcatcacataggctaatcatggataaatgatgctcaatagattcgtctcgcgaattcgttcaaggttatggaatgggttntatcaatagtctaagcttaatacttctaattagtgtccaaacattcgatgtgacagggactatacaattttagtcccatccaaatag

SEQ ID NO: 38252 - DNA, 397 bp, Oryza sativa
  unsure (1)..(397): unsure at all n locations
tcaaggggaattgaacaaagctcatgcaacatccacgaagtaagttctgatcataattctgtgaagaccgatggaatgagagatgtatctggattattctcgagtgatacttctgtgatagacaggtcagaaaatctgaataactctatagtgagatgcagcacaagaaataaatctctttctttagaccatgaaaaggagaatatgcaagacaatggtactctcagttctaaatccaatggtagaactgctattatgaattccaacttacatgcaaacttcatgaagcacggtgcaaatatgttcaatgagcccaatataataaaaggaaacggacctggcaccttgatcacgcctgagcctacatgttttattntaagtggacatcgccaacaga

SEQ ID NO: 38253 - DNA, 351 bp, Oryza sativa
  unsure (1)..(351): unsure at all n locations
taagctagtccacctaacaagttcgatacctacagatgaaattcgaaatgacttatgatatntatgatatgaaacagagggagttcgttcagtattacagcacacttgccataccagaccagttagcgtgttagtctaaccaagccagtcaatggtcgagctagctaattgtatggcagacgacaagtcgggcacgtgccgtctttgcgacaaattcngattatcttcagtattacgcagtcattgtagtttttaatatatgcccgttccgtaacgagcatcgttcgttttaattatgtcagagagactgcgattcaccatcctgaggtgtccttttcggtctaaatatct

SEQ ID NO: 38254 - DNA, 393 bp, Oryza sativa
  unsure (1)..(393): unsure at all n locations
tgctgcatgcatgctntagctgaattataagaggctctatngttctatttgtctactagaataggagaagagtatactcgaagaagtcggaagacttctacagatgtcggtaatcttcttatatttcgatattctgtgatgactctgaattcaatataatattcttgttgagtctcttagatttatattgtgagaattatctcttggatacttcctaagcagcatacgggattatcgttcactataatcaactaaataatagcgagtgcttccgtgatttatcaacactacagctgatattaatttcatagacgtggtcgttaggtagttgttatacagtaattgctgcatattccacactacgtctgaggtttgtgtatacgacgtgacacc

SEQ ID NO: 38255 - DNA, 408 bp, Oryza sativa
  unsure (1)..(408): unsure at all n locations
ttttaataacaatggtccgagttcgntcgacgctgttgaaatcttctacaagctgagagctgctccagatacatactttaagaacatcaaagaagctggatgcatgggagcgagcatggcattggcaatgaccaagtccctgtacccgaagattgatattgacgctgtcgacggctttgctaatgggaccagtgaagaagatgcccttgacctcatcaataatgcatagaaggttgccgacaaaatcgctgctgatgttgttgagagatatcaagacagtaatctcggtccgactgggtctgatgattctgataatgaaaaaactaagtctgatggacattgtgtgatgtgacttatgatgatggaggcaccatttgtacaatactgatgtatttatgctgcgcttga

SEQ ID NO: 38256 - DNA, 113 bp, Oryza sativa
aattaaccagctacactttacatatgtgattatcctggacgccggcacctttttgttccacgtgggccataagtggctccgcctggaaccaaacgaatgtcacggtcgggctg

SEQ ID NO: 38257 - DNA, 414 bp, Oryza sativa
ctcagcttggactctgttatacatatgacatgtgttgttcatcacacgatatgcctgccattgcacatcctctacaaatatcataagcagagcatcgcctcactgtgaagcctacacttattccaaagtgtaacactaaaaatgttgcatcgatcatttacaccttctacaaaatagtgctatgatgaaaaggtttcaggaagattaaacacaatgctctaatggaaacatgtacaaagggaacttcatgtgtgcaaatagttcagtactaaacactgacagaaactgacagaagaatgcatagcataaattctctgtggcattgcaaaaaaaaaaagagaatggatgttctcaaaagtaaatgttcaatggcctgatttgttaatctcaatttgatacctaggcatctagcta

SEQ ID NO: 38258 - DNA, 358 bp, Oryza sativa
  unsure (1)..(358): unsure at all n locations
tggtatctccttacataacgacagaacggaccaacaactgttagcagtcttcacanactgtacaataaaactgtgaaagaaacctggtcagcattcagatgccacagcattccagggcatcagaacaagataggttaacccatcgtcagttccgaagttacaaacatttcacactatcctgatgtacaagaatgtaaatgtattcgtgacaccgttctgctttccaaatcacaaggaccagtgtgcatttatctgcacagggagatgggatcaaaactccatcgtattaaaaatccaagtcctaggaactgaatgagagtaagcatagatctgacgactgacgagcaccatcgaagtc

SEQ ID NO: 38259 - DNA, 477 bp, Oryza sativa
  unsure (1)..(477): unsure at all n locations
tgccagatagatctgtatttaaggacttaacatagnttgctcttaccttacttacataagtacatttgccatagcaaagctttaacagacccatacttactataccacagaagaataaatgcttgctcatgtctctcgccttttaccttcaccttagaattgtggttctgttgacatttcctatttgctgagtacgatgtttttgcacgtattgcattacaaattatacattgacccttggcggctatgtgtcctccaaagaaaggaaaccgggttgcctgacatctgctcgaaagcttcctgatatgtctggcagacactacaaatgtaaagctaagataggcatatatgtagttctagaatcctagaaagtgacctatttactatacaatttgttacattcaggaagatgcatacgttacctttggtaggtcatttcttccagagtgtttttagattgacccccaggccattttc

SEQ ID NO: 38260 - DNA, 403 bp, Oryza sativa
  unsure (1)..(403): unsure at all n locations
tgaatgtggatcaaatacacatccatccatttaattcggcttctgtttagcggaagagtccatacagatagacgacatatgagttactgcattttcatcttagaagaacatatgcctatgaagttaaattaggagttcttaacccattgatcattttctaagaaatggtatgctttttccccaaaaaggctatttgcagcatacgtacgacaaatcaactataattttcacaaaattttagctggatacatgagattttatatgtgtaagttgaagctggaaaaacaaatttcactagacaatttaatatttttatttcagatttcttctccgaggaatctattactttctctcaatatcaagtttagacttgcgtatttntagataagcatgatcttaatta

SEQ ID NO: 38261 - DNA, 490 bp, Oryza sativa
  unsure (1)..(490): unsure at all n locations
tcactactctacaagtcacgtgtgtcanaatttctttatatatttaatatcatgacgcccattgtatcaggatgttgcaagagatttgagatcattttatctcttggtgttcatcagcataattccagcatgatgaacaccaattgttttcttaatacaaaaatagatgctttaaagccagagctgccttgcccacatataaaaaacgccaacaagcgactgatgttggcaagaagaagctcaacttggtttgcagaagatgactagcatttaccatgaatgcattcgtagcaagtttcagaacttcagaagcattggtagatatgttgttcattcacttgttctcatctatcaattcatttgagaacatgttcccccctgttcatcgtctagatacttgcatgcaacatgatcctggctgtgaattgatcagtaaattaatgtaatttactaattgatataataaagggtaaagggggagaaatgtgct

SEQ ID NO: 38262 - DNA, 463 bp, Oryza sativa
  unsure (1)..(463): unsure at all n locations
agcttacagcggcatttcatcgagcaatatgttcttacacctcgaagcagtggcaaacccattaacaaaattaccggaggtcctaaacatactaattatttaattattgaccgattatactaattagtatgatataaattagctagaattaaataatctacccggtgtccttggacacctgtaacctatacataggtacgcccctacctcgaagcacgcgccacagctgaggccgttgttaaacagcgccgccgtgtttgtcccgtacccctcctggacattactcgtttcattttttttacagtataagttgctttgatttttttaccaactaaactctgttatgttaatcaantttttttaaaaaatagcaatatctaaaatatcaaatagttttattacatctagcattgaatactatttgataatatgttngtttcattgaaaatgtactatnattttt

SEQ ID NO: 38263 - DNA, 252 bp, Oryza sativa
  unsure (1)..(252): unsure at all n locations
acactatnaaactcaagctggtgcaattttcaataatgggaaagccatacactattgcttttagcttcatgttacaagctntcctcttctttggtggcgccctccgtcgccgtactagtaacaagttcctcaagatcctagtatggatggcttatatgggagcagacttggtagctgcttatgccctgttagcgtcccaagtgtgctacagcctgcagatgagccaatggaggtagcttagacttgtccgac

SEQ ID NO: 38264 - DNA, 278 bp, Oryza sativa
tatgccaaaccgcgtactgatgcttgtattgctggccagagcgctgtctagagctccaacaactatgtgtatgggttgtgccctgatatatactgagccttgctgacctgactcttcattagcctgagccaagccatccaaatttggacgcctaagcttcaggcagctactcttaatgatgcactacatgctggggcgcgccaataccgcgccacctgcatatatattgcttgactagtgtagacaaatcatttgatacacgctgaaaccatgattat

SEQ ID NO: 38265 - DNA, 492 bp, Oryza sativa
  unsure (1)..(492): unsure at all n locations
agctnnttagtaagttaatagtggcaaatacatatttatgttggtaccaaattntcatacgatggttcaaatttaatactgttaatattatggtagcgtaaaaacttgtcagtacagtctaagattaaaaattggctccaaaccgaataaacccataatataattacagtacagtccaaaactcaaccttcaatttttttttggggaaaccttcaattgattatagccttttttttattatagcttttttttctaggtatggattttctctcaacaaaacgcggtgttttgatcaagtaaacatcataataatttggtctatgccctaattgaaatcgatcgctgtctgcgaataanatcaagtcgactggatctgatatcatgcattgtaactgttaagtgaagtccaagtaacgtacttaggacaatctcatctgctgcctcctttatcagtttatggccaggctggatgcctggatccatatatatgtg

SEQ ID NO: 38266 - DNA, 284 bp, Oryza sativa
  unsure (1)..(284): unsure at all n locations
tggagagagtatgccatctaccagtgtggaaataccaacagattggacggatggttgggagatagatctcaagcttctcaagtttggaaccaaggttgcttctggatcaaatggcgatctgtaagttccattatctttgtcgggaagtgaaaacaatataaatttacacaactggngattgagtgccatttgatgctttgctttctcangttccgtggatcatactgcagtcaggatgtagctattaaagtagtgagaccttgacgcattagtgcagatatgta

SEQ ID NO: 38267 - DNA, 391 bp, Oryza sativa
  unsure (1)..(391): unsure at all n locations
tttgagagattagataaatctacttcaaccgatatgcccttaggcacggccatacataacatagaaatcacacgtggaaggggtgggcaattagctagagcagcaggtgctgtagcgaaactgattgcaaaagaaggtaaatcggccactttaagattaccatctggggaggtccgtttggtatcccaaaactgcttagcaatagtcggacaagtgggtaatgttggggtgaaccaaaaaagtttgggtagagccgggtctaagtgttggctaggtaaacgccccgtagtaagaggggtagttatgaaccctgtggaccacccncatggntggcggtgaagggaaagccccattggtagaaaaaaacccacaacccctttgggttatcctg

SEQ ID NO: 38268 - DNA, 420 bp, Oryza sativa
  unsure (1)..(420): unsure at all n locations
gcttctacactggacttgtgagctgtcacatactcacatatagccaggctaatcatctccatgaatcttcaccatcaccaatgcaattaatttgctntgactaatactcaaatctttgcagactccaatatgtgtgtcctacaaccctagggcattgagctagattgcagctcacactgtctcccttgcagggtttcagcacacctaatccatcacacaccaaagtctgaaccaaaaccaaaaccaaaaccagctgccactgccagatagcactggaaccatcagtagctaaagagatccagagggagatgatgagatgagacaatggtgatgctgctgaggagagggctcatcagtgctgcctttctcctaactctggtgctactgttcttgctgcaactggngatcatcagtactact

SEQ ID NO: 38269 - DNA, 444 bp, Oryza sativa
atgaatatggtctgaagactctgaattaaaagccttacatcacacacagcgtgaaaataaatggcataaagtggtaaaggatagtacaatcatacattgaactcagtttcacgtttccttacgagtgtctctacataatcgaccaatccagcgtctgtcaagaaacgacaaacacatgttagtcatgcaagaaatgcagataattttacccaaagatgttttcaattaaacaaaaccaggtctattggcccagctgtctttgctatagcaatttcaccaccataattaatttcagcttccaaataccgtccaacgtcatgtggttcgggagcatatactgatcttgtggcacctaataaatccaagaacaaaaaaaaagtcagaaatactgacacccttgactatttttgaaaatcaaacagtgataaacttataaactctatc

SEQ ID NO: 38270 - DNA, 478 bp, Oryza sativa
  unsure (1)..(478): unsure at all n locations
agcttgcagtcgataagaatagccttgagttgttatagtttgttacctactttcattagcacattgttagcaattcggttaagatttgtaagtctatttaaaggcaatgttagatggaataaagcaagtcgaattcaattcattcatctcatctactttctctgtttctcatcttgntcttccggcatcgccatcacggngcatcacacgaccaaacccacgtcctcctacctcccatacctatccaattcgatctcttcctggagcccataacattaatcgtgggctgtacaaatatttgtacctgcagtacaaataaatttgtaccggcagtacaactcgaaatctttcagctagtacacatttctatcaggcccctctaagatgaatggatattgcaagaattcactgagaaactgaaccatggagttagccactcaaactccccatcccaatacggcaatctgactttcacaca

SEQ ID NO: 38271 - DNA, 457 bp, Oryza sativa
  unsure (1)..(457): unsure at all n locations
gactgtacttgtacaagaaattgtcaacgcagactatgcctttgtcatttacactactaacccatcatcgggagattcgtctgagatatatgctgaagtggtgaaagggcttggagaaacacttgtaggacagtaggagcctatcctagtcgcgccatgagcttcgtatgtaagaaaaacgaccttgactctcccaaggtaaaagctaccacttgaaattatcctatgttaaggtctacctgagctaaatgcattccatttgataggtactgggtttcccaagcaagcaaattggtctcttcataaagagatcaatcatctttcgttcagattaaggtatgctggagcagcagtatatgatanggtagagaaagtccgncataatttttgtagttggctcaagaaattattttgcattacaactaagctgactgcttgtttcagtgccctatggatg

SEQ ID NO: 38272 - DNA, 496 bp, Oryza sativa
  unsure (1)..(496): unsure at all n locations
agctngccaacagcaatcgggttcgctttcttccttatgacaaaatgaccaggcatcagttccgtcggtcngaactttttgttgtaagttgccgaagagcttgtggcatacttgcgcatgtgctcaagtgcttcaactcttaccccctccaagagttcgagcgacacttcgcgcccctcttcgcctccagagaacatcacccttggtgagttagcccctagctctgctggggtcattgcttcgtcgccataaagaagcatgaacgggctaaacttggttggtcttgtggnggtcgtccgaagggcccagagaacggatagcatttcctctggccatttgcccttcgctggcccctcgagccttttctttagtgcttctaggatcttgccatntgtacgttcggccgccccatttgactgcgggtgcacgaccgatgcgaacctgatttccaggttcagccctacgcacatttctctgaacttgtcagagttgaact

SEQ ID NO: 38273 - DNA, 489 bp, Oryza sativa
  unsure (1)..(489): unsure at all n locations
ctcagcttactgaggacnggtaaggataagtgtgggggcaggggtgaaactggtacggatagtttccgtctgtccggacaatttttcggatttcgataggtttggttggaactatgccgaaattctcggattcggaaacgaattcggattttttttctcggaaacgaaaacgaatacagtaagggtactacccgtcggaatcgaaaaatggtcggaaactatccgggaattttgttcgaatatccgcagacatggatngaaatttagaaaaagaacatgtatatatacataactttttcatacggagtcagatcaagacaaactntgtatcaaaattatagagctcgatgagatctacaactttcttggttgactatttttatatgagatcatttaagggtctaaatattcattataaaaaaccatatctatttttacaaaatcttatatctacaattcanacgacatctgatggagatgtgttccata

SEQ ID NO: 38274 - DNA, 386 bp, Oryza sativa
  unsure (1)..(386): unsure at all n locations
ttatatctaacaattaattcaatgatagaaaaagaattaataattacttaaattctttaaataagacgaaccatcaaacactgtttaaaatgatctcggccttcaatatttagggacggagagagtatatattttgatttttcatctgtaaaatattgcattgcatcaaagatttggtacatgtagatntaacttgtagttatacccaattacattgcatttatacttagttacataaaacttatattagttatagtgcatcaaaattatggttttgacaactattntttctctagatttatgatttttatgtgtttatccttnttttcattcaaatgggttctatcattagttcaatattctgcaagattagagttccaaatttg

SEQ ID NO: 38275 - DNA, 310 bp, Oryza sativa
  unsure (1)..(310): unsure at all n locations
atgatatgcagatccctcgctccgagttaaaaccaaaccatgcgccttttcatggagtaattccaggattatccgcaactccactcggccagaatactctttcggtcacttttggcactcgggaaaacttccgcacagagaatatcaacttttgaattgccgatttcgagacagcataccacgccatactcggacgcccggcgttagccaagttcatggcttgcccgcactacacttacatgatgatgaagatgcctggtccccgaggaagtctatccctacngagcgacatcaagcaagccgtcacatg

SEQ ID NO: 38276 - DNA, 194 bp, Oryza sativa
actttaacacgatatgacctgacgcactgtcatacgttacacagacaccacacccacaaatgctgatggattagctcaagcaaaccgggttgtacctacccctacagtacatagaccgtatagcggacactatatgaatgaccttgtccggtttcatcacacctaatccactcctcagctcactctgcgcacaa

SEQ ID NO: 38277 - DNA, 223 bp, Oryza sativa
acatgatgatgaatcatgaatcaaccaatatcaagcgcaaaggccaaaagagactggttaattgggtatttatccaatagtataaagattgcatggatttaacaaagggcaaattcaccaacctcctgccattgtgctaacaatgccctatgccgtacggcttctgcgagacccatctcatcagtactaataccatttaatccctgcaagaaatagaatatat

SEQ ID NO: 38278 - DNA, 412 bp, Oryza sativa
  unsure (1)..(412): unsure at all n locations
ttggagatgatccggccatgacgagccacctacaagctggacgctgatgatagtggcctcaattgatcgatcaagcactgagattgtgaactcgacctcactccgcttgccgatgcaatgcctcgttgggcctggaagatagccagaatccaccactccaaagttaacaatttgatcttggtcaggatgatcatgcagggtgttgttattggactttgctttgagctgaacctcaaattgaacaggatcaattaagacaattgcgcgagacggtcctgttagcactaganagggatcctgcaattaagagcatatatatgagctagtcaatcaacctcttaatggactcgaattaagaagaagaggttaataatatatacctgttgagtaaggagttggcagttgtctctag

SEQ ID NO: 38279 - DNA, 434 bp, Oryza sativa
  unsure (1)..(434): unsure at all n locations
tgtattcggggtataaatatagaccccagatcattgttatagattacaacatatccaatacaactntggtgcatcgccacccatttgttcttcttttctgcgacttctctcaacaagaggtaagtctcgatggcttgtgctatcggagctattatgtcgctttagatgttttatcatgacccatctgctatcatatgtcttagttaatctagtcttagtatctcgctgtagccctatcagctagttctcactntatggttctcgccgatatcggctaaattgtcttactatattagattagctaaggcatccaccatcctgaaaagcgtttaattacttgattggttagactttaggtttctttatatactttgcgatgcatcatccctagtcttggtttgaaccctaanaactaaccctgaattaatcataat

SEQ ID NO: 38280 - DNA, 341 bp, Oryza sativa
tcgatgcctcgggcagaaaccaagaacccgagaagctagcccgtaggcacgccgaacacgcatttatcgggggtcagctttatgcgggtggagcggagactttccagagtctccgctagatccgagagtaaggtctcttggttgcgcgttatcacaaccaagtcatcaacataggcctcaacattgtgtcctatctggctacccaaagaaactcgagtagtacgttgagcagtacgaccttgttaacgtcggtgtagtcgatgcacataccaagcttgccgttcgccttgtgaacgacgaccgggttcgccagccactccggatggatgacctcacagatg

SEQ ID NO: 38281 - DNA, 373 bp, Oryza sativa
  unsure (1)..(373): unsure at all n locations
ttatgcatatctggatttggatcctgcagaacaaacatataggatgagtagtatctggtgtgaatatgatactcgagaaagattcatgcagcttgtgaatacgtatttcttctcttgttaattttgatttccccgagcagatgactcattacgtttaaacactctgcccgactagtcatagccaccaagcactgggagtcggcctaagcacttcccaaacatgcatatgaagtgacatgaggtcgtcattaatggaacaaagcttcacggatcggagtttactactcgggtacttttgcaattattaagagcagagaataaactgatctcatctctatgctnttgagttattccgaataatagttagcacctt

SEQ ID NO: 38282 - DNA, 455 bp, Oryza sativa
  unsure (1)..(455): unsure at all n locations
ngaagaacagaccanatgagatgcagaacaaataagaacttatatcaactttcaagtgtttattcaatgcaagcagccagcagcaacaaatttcaatctccaaaatacatatagaacattaaaaactgtaggcccctatcacacaacaacctaaaagaccaacacttttcaatcattatgggggtcaaatccaatgaagccattcatccaaaaatacaaacttaaaggaacgcctcctccaaatcaacaacataacacaccaaccataccaacagggcgttcgattaatctagtattactgcagctctagggttccaagataattatcattaggggaaaaaaaaaagaatcccccaaagatttctgagaatagagcgatgcgggaccttgaaggcgatgtagtcgtcgctgagaatcgatagctgcatcgaacacgagatctgcttcttcaactc

SEQ ID NO: 38283 - DNA, 429 bp, Oryza sativa
  unsure (1)..(429): unsure at all n locations
agcttattcatttctacttatgttgtgcctggactaaactgatagacagatgagagatgtttgtctgattagtctgaatgcaatttaacaaatagatgcctgcgtcagtagttagtgttactgttactctctctgtttcatattataagtatcttgacttttttaattaaaattctttacgtttgataacatctgcaatactatattagtttaattaaatttaacattgaatatattctaataatatgtttgttttgtattgaaaatgtttctacattttcctacaagcttaaaataatttgactaagaaacaaatcaaacaacttataatatgaaatgaacggagtatttgttattgactgttccatttggnntcattttatttgctttnttctaatccctatcctccttncagtattntcactgttt

SEQ ID NO: 38284 - DNA, 461 bp, Oryza sativa
  unsure (1)..(461): unsure at all n locations
tcagttgacagttcaggatgaagcactacaactactactgctgtaatgcgaacagcaagttgcataaggtntcaagtaataaggtaggcaacctttttttttgtctccctttgaataaaggaaagtgtgcaaagcctgtgctgatgcctaacattgcagtgtcctctgaattcctgcagtggtggtggcaacagcttatcagcataatgttttctgggcaacagcttaacagcataatgctctctntccctgtctcttcttccttttttcaaggcattgtctgaaaaaatctcccttttcatggacaacctatccataaacactcctttcaagtacttgaatttattagattcgtaacgggatacttattattnatactttgtatcacatannatatagtatcgtaatagagcaattgtagtcaaaccattcttctatgaaacaaatacgcctatatttga

SEQ ID NO: 38285 - DNA, 444 bp, Oryza sativa
  unsure (1)..(444): unsure at all n locations
agctttgacaaatgcattaattcaactgatattttgtatggttagcaccttacgagtaccaacaaccaagccattatatacagcagtgtctgccaatcaaacagagaatcaggttttgtttatccatttatctgctttgattactttggcagggcaaagcaaagacagtaccataccagtacaaccaaagtgtatgtcggccacagtaatgcttctttaatctttggactttggagagcacatgcaatgcgatattgcaattcagacagcaaagcggctggctccatccagatatacatnttttaaaanaaaggacccatctgtatatataaaaaactgcattttcaaagaagatgatatatgcattgtgggatcccaacacaccacagagacatccacagaatgtttgtgaatctagactcttgtatctatacagagcactga

SEQ ID NO: 38286 - DNA, 355 bp, Oryza sativa
  unsure (1)..(355): unsure at all n locations
gagaagaacagaggaaggaacatgaagaagagagttggcaggaggaaggattgtattacggagatagtttgattgttcaaatgttcgatatccttctcctattacacaagtgcttatgtagttgcactgattacagctgccatccagcccattcaggtcctgttactcgaacattggcacgactcgtccgcctcggtcgcacctgatgccgaaccgggttcgcttcctctgaagttgttggactgggtacagtggaagtagctgcaagtgtaacatccccccctcctttgcgaaccgcttgcccnncagccggngcagcangaaactgattgcgaagcgccgcacatcctccatg

SEQ ID NO: 38287 - DNA, 464 bp, Oryza sativa
  unsure (1)..(464): unsure at all n locations
agctctgctttcatcgatttgaactcgtagtcttaatgagtcanatcgagctagccttttagctcgtgagcttaatgagctagctcgcgagctgctcgtttagctcgttagtataaaacatcaccatatcttcatgaacttagtgtttggtgactagtgcttagtcttttaattacatcaaaactattcacatttattgagtactatattagttagtgtttattattatgttaatacataataaaatgttaaaatagataatattaatatgatatcaataagatatagctcgttaacgagcctaacgagtttaacgagccagctcgcgagtcgagccaagctagccttttagctcgttaatattaacgagccgagccgagcaggctcgttaagacaacgagctcaaacgacccgagctggctcgttatccagccctagantanacacatgtatcatgtcgagac

SEQ ID NO: 38288 - DNA, 437 bp, Oryza sativa
  unsure (1)..(437): unsure at all n locations
tagtcttatcagtgctagtntgctgagactgaatattgcgcttggaagcccacagccacacctacagtcacagaaacaagtttcaagtgattcttgtgccaaggactccaaatgcagaacaaaagcacagaatttcctcaatgcaaagtggcagaaacgccacagcgtntgacagcgccctgacctatccgtactgctaatatgagcaaacaagagttaactgtgagcgattcctaatgggattctnntttttttaaaaaaatgatgcatccccacaaatgcaatgaactcatgcctagtacgtagcacatttatgcgacaccgtctagaagaaatttgggaactcggatttcgattcgtcaccaaagggtaaccctaggagcacgacacccgtattcagaactgctgcgcatcgaacatgcacgggaagaacaatg

SEQ ID NO: 38289 - DNA, 367 bp, Oryza sativa
  unsure (1)..(367): unsure at all n locations
agcttatcgtttgatattctgatgccacaatatgttgtgctcaatagttatttagcagagcaagtggactatttgcacaaaccacanagtgagatcaggtccactacagtgttaggctatgccctttcttttggaatctccatccagtggcaaaacatgactacactccgttcaaaaaaaaaaaggcaaactctggatttccgtgtccaactttgactggtccgtttatatgaaaattgtttataatttgtattcttattggtggtagattataaaacatgattaatagtttatgcgtgacttgtctttttatatttttcataactntttcaaataagacggacagtcgaacgttggacacagaaac

SEQ ID NO: 38290 - DNA, 370 bp, Oryza sativa
  unsure (1)..(370): unsure at all n locations
gcttcaatgtactcatcgaatctatttatgaatagcanatccacaactctctatcctcctttgtactatttgactggctcgatagatatggtatttccttcagatccactttntctaacatatttccgaccaaaaaatagtttcattgacaccttcccagtgttatgtatgttctttagaacaacattcatgattctgtgatcatttgtcagtccttcaagtgaatatccaccatcagctttcctggaagaataccacaggcgtgcaagatgcattgtatcagcatgaaatccagcaaccttgattccacagttctcaatgaccatgctatcacaactagtagtatgccaaacctacatgatgaggagaa

SEQ ID NO: 38291 - DNA, 397 bp, Oryza sativa
  unsure (1)..(397): unsure at all n locations
gaccaagcacctgagctgcagctagctatctttagctctgttcgccttttttatgtctctntgcaatggcctttttggccactgtgttgtgtaactggaattctgctcttgcgtatnttntttattcgtgaaaaaaagaatccctcttctatatataacatgaggaattttatattaagaagaataactgacaagtgactcaaaatcaaatcatatgaatatatcaggtatcaatgtatatactacgtgtggattagtgcaccactccacgtggttgcattgcacgggttatcacaacagtaaaaatattgggccagactaggctaataaataacacaattctggaatatatgttttcactcatgggcctagtactatacaccccacgaagaacagt

SEQ ID NO: 38292 - DNA, 449 bp, Oryza sativa
  unsure (1)..(449): unsure at all n locations
agctntaatcaaatntcgaactgaagttgacatctgtcttgtaaatctgtnttgatttgacctacattgaactgagactgtgcattgaacattgatgacattatttctgctacaccaacactgatggcatcaaaggtcgaatttgctggcaaagaggcacctaattttctgctacactaactagaattttctcctagacaattgctgtcagtaaaggacttatgatttgcaacattccatctgcatacaggttatctgttacggatgttatgggatcaaataccataggtgcagggaagcattggctgggtgcgttagatatgttcataattctagtcctagcttgatttatgtattctaattgatattcctagcttgtgtcagattccctaattattagatgccacctagtacataaagggtgtatacactttggaaacttaaacaat

SEQ ID NO: 38293 - DNA, 459 bp, Oryza sativa
  unsure (1)..(459): unsure at all n locations
atcatgtggtttttaagagagcgtgccctacctcttcctccctactcttacgcgctaataagtcttaatttatacaattaaaaacccagttttgaatatattttaaatcataaaaatataattntgcgggaacattatattatataatacactaaaagtatattaaactcccaacaaatgttctcaaacagtcacgtgacacagtggcttagataggatttagagtaaaggcggtccatctatatgtaataggtcaattaaaagggtggtccactatataatttttattatattaactagcacatatactatagttttaatcttgatcgatcttttaggtggtccatggcccacagtgccacctagctagctacgcctctgacatgacgttctacagacgcttctaggatgtcatgtggcgctttaataaatntaagaataaatcatgaaaattctaat

SEQ ID NO: 38294 - DNA, 369 bp, Oryza sativa
agcttgtgctccgctatcgctcttggtacgggggtcgcttggaatctatcttagatcattcatactgaccctggtttcatatgtgacaactcgaaatgataatacacgttggatccctgataagctgaatgaaggcatcttgaccgcttgttttgcttatagctggcctaagtttatgaattttctttttcatcaacagttgcccagcatacagggcagaaaagcactgcttaaattaagccttatagacaatatacttggaaaagaattattgacacaaactgatgtccattttgggccaagaacctttatttagatactgataatatgaaagcacatgccacctattagaatcgtccttacaaaaat

SEQ ID NO: 38295 - DNA, 347 bp, Oryza sativa
gagaagacgctactctatcttcaattgggatatataggttgtcgatcgttgcaaacttattcctccaggaattgaactacacgtggttatgcgcacgcacgcttagcaaactactacaaatcgcggttattgtagaaacatttctatgaaaagttgctataggaatcatattaatcctgtaaaattaaacatagctaatactcaattaatcatgtggtaatggctcacctggtcttacgtatcttttaaatcttctctgtccccttctactcaaactcatccggaagtttaaaacttggctcactttacttagttcgacactctgtttatattgaatcacggtacga

SEQ ID NO: 38296 - DNA, 359 bp, Oryza sativa
  unsure (1)..(359): unsure at all n locations
aatctgctgtttatattattattgngtccagcgcatgttagttgcagtgaaagatttccttaactaaatgttnttctgcttttgtatggtctcatgtctaccagaagtgcntttgtattgttggaagaaaggctaaacaattattatatcagtttcaaaaattggattaacttgccaaccatgttgaatgtcttactccttgtggagcagatggtttcttttctgtataattttgtcaagaagctaacagagctccttctataggttctattggaattcanagagtatgccacagaggtggatgttgactatcgtcgcaaagctgttcgtgctattggaagatgtgcaattatgttgga

SEQ ID NO: 38297 - DNA, 457 bp, Oryza sativa
  unsure (1)..(457): unsure at all n locations
cttccttaattgaaggcacgagcgcttgtttatatgaactatattccctctgtggcaccaagtacatccgctagcaacttctcagaatttctgtacacagccatcaacttgagatgcccgagctcctgctcatcggcagcaaccaaaagaactatctcggccatcagtgatcttgactcgccataccctacagagtatcataaacaaaaacagtagaagtaggactntgcgcgcacagagatcccatacaaacctttttcctttgctggaactatgaactcgctgtaatacaaatgttcgcccgggtctttggggagaaaatgctgcattctcatagaactaaattcgccattatgagagcgtgtagcctacattcgcagttatgagagcatctaacttattaaactacgcagagctgactcaaaactcaacaggaagaagcatatataacagagcg

SEQ ID NO: 38298 - DNA, 426 bp, Oryza sativa
tcgttggctaaatcttacctgagcaattagttctcttatgattcttaaacttgaaaatttgtaagtatcctgcagctgatacttctattgctaaaattaaaaagtccaatttgcgaaagttcatagcctattgatagacttgtttggagcagtaaatggattatccatctatgagcacccaacttgcatttttcatagctctggcatacccatatgatcaacatgtttgtatagctgaatattacctcctttcctagtattgaatctacatttggatcgacttacatccctgtttcgatgtaagtcctcgcactcttggtttcacttctgttatgtttccagttgtacatcttattttcgctaagacaataagatggtaaatagattaacgtgcctttattttcaacaaagggtggttatatgttc

SEQ ID NO: 38299 - DNA, 312 bp, Oryza sativa
  unsure (1)..(312): unsure at all n locations
ggctgactggtggngaccacgctatgtttcacgcgggcacgccacatatgcaaaagtgagaaatagttaataactcacctctcttcggggacaaattattaagcgcaaatctaaaagggtatttggataagtgacaaaggctaaaataggaaataaataaattgcgctctcgcctctgtagacaggtcgttcttgctgctgcatcatcagtaggagtaacacagagtatcccagctgttcggcggcataatatcagtcttcaccgatccaagtgattatcatgggcctgtcgaatatataaaccaacgaata

SEQ ID NO: 38300 - DNA, 471 bp, Oryza sativa
agactgatgcttgcttatggcataggagctgctatgtagtctcatggtcatcctgtggcttattacaacaagactttatgcccaacgaatcagaaactctctatttatgaaaaataatattggccattatgatggctgatgataattggagatgttatttgcagcattgtccatttacaattcgccacgctcacgccgccggcggcctaactttccccaccaccatgggagccaccgtgcacgccgactctctgtgcttgctcctctgccaccctcactccacttacccctccgcgctgcctggcccgccgcacatcatattcgctgcgccaccgacaatgcctgcatcaagcaccgtcgcgcggacgatgagaacatctgcaaggaggctacaccgcatcgtgcccttctctgcatggtacgcgccgatctctctagctcccaatggcgaccccaacaacccctatgcca

SEQ ID NO: 38301 - DNA, 378 bp, Oryza sativa
gagatatctgaggcatcgacgctgcagctcggtcttgtctaggatttagctagtgatgttaaacatgtacagagagttggtctgcgtagcccacacctggctctgggtggcgctgacctgtgcctgtctgcctgcctgctaactaacctcaccggtgaaagctaaactaacacggatgtggattttcatccctcgaggacacatcccctcgttttttcatgtcgtctaaataggtactatacaaatttgaaaaaattgacaacatagattaatactaaatatatcactccacaaacatgcaaggccaaattcaacttctacaagttgctacaataataacaaattaaactgaaaacagttatcacacattcgactata

SEQ ID NO: 38302 - DNA, 326 bp, Oryza sativa
gactgcgatttttaatttttatactaattcagttgaggcctatttatgtatctactttgaaaaagtcatttggttatattctgattttgcggccttcagcaattaaacatatcaaaatgtaatatatagattttatatcatgctactctatatattaaatggctacatcataaataaagaattctagaatatgttacaatatgtactaaaagcaacttatcacaaaaagcacttacattaactacttctacataatactactcttaatatttacattagaccatattccatattcactttaaaaaatgccttgggttattttgttt

SEQ ID NO: 38303 - DNA, 393 bp, Oryza sativa
  unsure (1)..(393): unsure at all n locations
gctttccgtcgttgccatggaagaatgtattacatatgttactgctgttaaatgggagaacaatgaattaatgaaattgcagtcagtgccacaatttttaaggaaatgacaggcacttcgcanataccttttggtccctgatcacgaataggtgctaaaatgtactttctgttgtgaggtcttgctatccaagtaaactctggttttagtacctgcaaaatattttccaactttgaattatctccttgaacgtaagagtttaggtatcaatctgcaaccaatttagatggtactagaggagaaaattggtcaaaattgaaacggttgcttggacaagtatgaatcaaccaattccatttatgtactacaagcaacccaatagatttttcattc

SEQ ID NO: 38304 - DNA, 400 bp, Oryza sativa
agcttctcgggttcttggtctctgcccgaggcatctatgccaacctcgagaagatacgagctatagagcggatgcgcccccccagcaggcttatggatgtgcaatgcgtcaccggttgcatggccgccctaagtcggttcatatcgaggctgggagagaaggcgctacccttatttaagctcctcaaacgctctggaccgtttacctggacggaggaagctgaacatgccctcgctcagatgaaggcgtatctcagctctcccccagttctggtcgccccggagccaaatgaacccttgctactctacttagcggcgaccccgcaagtggttagtgcggcgttggttgtggagcgcgatgaggacaatcctcattccgcgcatccccaccctgtgctggc

SEQ ID NO: 38305 - DNA, 448 bp, Oryza sativa
  unsure (1)..(448): unsure at all n locations
accgatgccacaaccattagtgcacacagatccatcaaagaataatgtccaaggcatgatgtcaaccaagccgattgaatcatcacggtgatctacaataaaaccggctatagcctgtcccttaatcgcctttggtgactcgtaccgaagatcaaactccgtcaaggaaaatatccacttgccaactctcccttntaaaatcggagccgatagcatgtacttgatcacatcggctttacaaaccacggtgcattcattggacaatagataatgccgtaacttagtacaagagaaatataaacacaagcacaatttttccacagaagaataccttgtttctgcatccaagagccgacgattcanatagaacactggcctctcttttccttcaagctcttgaatcaactccgaaccaatcgacttatcaccagccgataaatataatctg

SEQ ID NO: 38306 - DNA, 377 bp, Oryza sativa
  unsure (1)..(377): unsure at all n locations
cgtgtctattcttgtgtgcgtttcttggttgctgctaaccatggcaggattgcgcaaggggaaacaagatggtcatgctcaacgtcaacatctacaccttcgacgagatatgacgacttcttcacgtgatgcatatgaggtacatgactataattttgcacaagttgcatgtaagttaccagtctatgatggaaaggatgattccgctgcatacattaattgtgagctagcagtagaaaaacaatntgatgagtatgatttttctaatgctcaaatgattaaggctgctagtaataagtgtaccggttctgcatctttttggtggcatactgtggggaataagcttgaaacttgggatgaatgcaaaatactgatga

SEQ ID NO: 38307 - DNA, 482 bp, Oryza sativa
  unsure (1)..(482): unsure at all n locations
tctgtggccacggtgaacaccacttntgatggtattgtgaggcgtctttgatgagtggccgagcatcccaccatggtagtgagatggatgaccatgactacgttggtgattctaaggatgatctagaccagcgacgacttcgcttcaaccgccgtggtatagctcatcgttggccacgccgtgaggtacacaataatgatgattcatttggtaagattaaattcacaattcctgctnttgatggtaagcatgaccctgatgcttatctttcatgggagtttagcagtagatcaaaagtttgcttgccatgatgttccgaggacaagaggattaaggctgccactagtgaatataccgaatttgcctctgnttggtggagtgaatatcgttcgactcatataaatgctttgtcacctacttgngatgattcgagacgaattatgcgtgctagatatgtaccttcatattatgcacgtgacatg

SEQ ID NO: 38308 - DNA, 448 bp, Oryza sativa
  unsure (1)..(448): unsure at all n locations
agccttatctgngatgtaaaacgccaactggagttatttacactggcttcattctttcgcaatacagatctgccactggggttttcctttggttccaaaacaaaaggccagctcgtaatagattggacagacactgaacatagaggggcagcatttcaattaatttagacgaataggtacacagcctttctggccctgtttgggggagcttgtcccagctgcagcttattccaaaagctgcttctggtagaagctgccccaaacagtccacagcttctgagaatctgtatctacagattctgaataatgaactaagaagccagaagctggagaagctgggttccaaagcttttccatatttttagaagctggctaccaaacagctgcttctcagaatctatagctcccncaaacaggccctntgactgatgtcacaataaatacacct

SEQ ID NO: 38309 - DNA, 471 bp, Oryza sativa
  unsure (1)..(471): unsure at all n locations
atgtcaagacanagcaatcaatcagccaacgagttctatggtatttatttctggagttattaatttcgtctgtgcttcagagcagacgttctacttcagcaactcttattatttcatcggcaattatggcttctggacactgccacaatctacttcaagttnttcaagtatcaagttcgagatttaatctacatgtcttggtcagaatcagctctgcactcgggagttcaactggatgtggttttgagcatctcaagttcgatcaaatagggagtttggagntatcaactaatcaactcagattcgatgagttggacaacatcatttactaatcaaccaagtgaagcatctacaacagctacagcattaaagtttattgccttcttcataaatcaagaggcgttgcatcaattaatgtcatgcacatgccaacattaagaaaatacttgagcatggatttcttctctacag

SEQ ID NO: 38310 - DNA, 453 bp, Oryza sativa
  unsure (1)..(453): unsure at all n locations
tgcagcttgctggagcgcgccgacatagggcggnctccttctccgntcttccaaataatcgaggtcattgctgtgaagatcatcttggttggcctcatcgcacagcgcgacgtgaggcaaacgtanggaaagctccgagcataggaccgcctcagggccgtacaccacggaaaaaggcgtttcccccgtggcgtggctcggggtggtccgatttggcacagcaccgcgggtttgtttctctgagccaagagtacccgcgcttccttacgatgntgtacgtccttggtcttgacgcctttgaggatttcggcattggcccgctaacttggccgttgctcctggggtgggcgagcgaagctaatcacaccttgatgcccatgtcgtcgtantagcctctgaatatcttactggngaactgggtgcagtttctgcgatgataccgttgcgcacttc

SEQ ID NO: 38311 - DNA, 508 bp, Oryza sativa
  unsure (1)..(508): unsure at all n locations
ctaagcttctcttactgaagaggggaaagattgagcaagaatgagtactattttctttactcagcaagccacaccggcggatgcatgattaatgcaagggagtacaaggagataataatatatggggtaacgtttgcagtaaacagcatttataagtcacttagttgcccaaagccattttaaaaagacgatccttaagctacacagtattattaatcaaggtcgtgaacccacacgaacctgccttaacccaaggcctacgatgattcagaccgaactggcaacccgaccctgggtcccagctcgtcccaagccaacccaggccaaccatttcacattttattnggtgagcaaattctaagagataacacactgacttgggtacattgctcggcttgcccataaccgagggcgcggctattttaatagattatactctgatcagaggtgtacatctttacccacaagacacattatcctcacgtggaccacgtgcccataccacacg

SEQ ID NO: 38312 - DNA, 455 bp, Oryza sativa
  unsure (1)..(455): unsure at all n locations
gatccttaagcacctgggctgcagctngttattacgttgtggtttagatgaatgcttaattatcttaagaattgaggttgttatgtgggcttaacaaagaaattcaagacatgcttgattgtcaaagatatacatctctttctcattngttacaacttgcttgcaatgctgaaagtaaaatagaggaggatatgaaaaggaaacacgctatgtctttgcctccaattactaactacttgcaggaagtgcgtaatcacgacaaggaggagagagacatgaaagagccaccaattccattgttcacactcaagttcgagacacctccatcatcaaaagaggacatccaacgtaaagtanaaggtactgaaattaatcaaggtgattgcattgttaacgaagtaaatntgtccacttttcatgcaaaagtagagcaaccgttattggaaccaaatgct

SEQ ID NO: 38313 - DNA, 480 bp, Oryza sativa
  unsure (1)..(480): unsure at all n locations
gctcttacaagatcttaccaatgcaagtggaatggtgatgtacaccgactcaaccaagcaccccaatagaggttggatatatcgatgcctcggcaaacacttgctgtacggctgcaatcaaatctgtggagctctgggtaggcttaaatatgtagcataggaatagcanatgctcaaatcagagaacgcatagttgaataattgttcaaagtcaagtaccgtgctggtcctatgctagaacgtactatagacgcgagcctatacacaaacggtaccacagaatatcaccagaaacaactcaagcacactctgatgtatgaagttcagctcagacaaaacacatatttctcatttctttctatcttctttcttcttttctttatttttccttatctttactgaattattttgtgcggcttttttattctttttttttgaccttcctgctttttttctactttctttttattttttaacaaa

SEQ ID NO: 38314 - DNA, 363 bp, Oryza sativa
tcctgcttttcggactccgacgccgacgacgaggatgatgcctaataacgcgactgcgaggaggaaggagaggagaaagaggaggccatggccgataaggccgcgaacgaggcgatcgaagaccgcgttgacacccccgactacactcctaccccaagtcccggtcacaacgagaccggggtggagtcgaacagctccctccttctacggaaggaattggaaggggcgaacgccctagttgcattctcctcgggcaaggcggcgaagggaggtccggtgcataagatctctaaaaagaaaggactcgtcgacatcgcccacgttttcagcgacgacgaatctctaacgggactcaacttctct

SEQ ID NO: 38315 - DNA, 418 bp, Oryza sativa
  unsure (1)..(418): unsure at all n locations
gatcgtatgtctctcggcgatggccggaggatttattcttgaacgaagacggacatggagttatgagggtacataagaatgctcgatctcggtgtaatngtaactcaacctggacgtggaaaaggccatcacactgtttaagggactttcgagctagacctaatcaaaagggaacggggaaccttggaagcacaaaccaaacatattctgtagcaaaaatgcaaattggactatgggccatgcatactaccaaagatgtatgacgttgcaacgggtgaagacaatttccacgactgataataactttaccaatntatatgacaaacaaaaatctaacaatgacaaacagagtctaaatctatatagattaacccggttgactccttcatcatcatccatgaagaattttatgtcacct

SEQ ID NO: 38316 - DNA, 458 bp, Oryza sativa
  unsure (1)..(458): unsure at all n locations
tactttcgcgctgttatacgagggatggccactaaagtggtgtagtgtggagataatggatgacgaagaagactctacgagatagacatggcgattgaaagttcatgtgtcattaatttggttttggtgattaatgataaatccaattaaatgagactaatattgttataagcatttcttttgctactaatctcatatggatatgaaagtggaatatgtgagagatgattcccgtactttgtgtgagttaagatagaaacgttcattgatggtggacctaaatcacaaggatgaaatatactctttctctccgtacacatattgatatattaatataatatactcttgcttcacacaaatattccgtatgcatacatgtatgggagcaaatnctatacattagttatgcatgtatttgatccaacgtattcactttcatttaatngggatctctacat

SEQ ID NO: 38317 - DNA, 405 bp, Oryza sativa
  unsure (1)..(405): unsure at all n locations
tggattggtgttcactctatgccccagtacagacctggtatatgacttttaagatntataaacagacctctaatttaaccatagatgccagacatcacggtggacactgagaaattntggttaacagccatatttgttttttttatacaaaggaaaaaagagaagaaaagatgcaacaaattggtgcgtcaaacccatggcaaccctttctttaagttcactgcctaacagacaggccccatacgacatactagtaagcctaaggcttcaacaggtaaagttatttggatggagatattgaaccaaaagaaaattcaagtgattttcaagataaatgaagatattgaccagacaggaagcatgtgatgtgctatttgctgattatccttcaacaaataaatatgt

SEQ ID NO: 38318 - DNA, 382 bp, Oryza sativa
  unsure (1)..(382): unsure at all n locations
agcttatctagcaagaccaaagtcagatgatctttattattttacaccatttacaatcaagaaacattcatataatcataatctgtatgcacatcataaattggagggacgctagatatcttctctttttccttcaatacattaagccaacatgtaatttatatattntagagagcagctacattgtagttaagtaaaaaaagataatgttttatcacgaattatgaataattcagcagaagatacgttattgctactcacgtcaacaaaacagtttaaacaacatgaatgtgtatgtggtcaatgaaaaaaaagacaatcacggctatagtttagttggaaaactaaaactaatctggctcttgtgttacgagcacatcta

SEQ ID NO: 38319 - DNA, 459 bp, Oryza sativa
  unsure (1)..(459): unsure at all n locations
tcttatagctgttntgctatgtgaattttcacagatgttgtttactttatgttgcacgcatcatattctacaaagcagtcggtatatcacttggatcatattattcgggatttcacaccgcatatactatatattggtatcaagtcacttggttgactataattatcaaaaaccactcagtttggtggattatttattccctgactatatgcttagcttattcaattaaccccatagtcgggagctacacctattaagtgcatctagtcgatgcacctaagtttacattcagctatttttcagccctccacagtcttcagatttggtaaaagtacttaggagaccatggcaaagatgaatgaagcactcggctttggagtaatctgttccagagaagattatcatnttgactgtgaaggtctcaggggctactgtggagatatgtggaccccataccca

SEQ ID NO: 38320 - DNA, 470 bp, Oryza sativa
tgacctgaggcatgcaagcttgtcaagtacatcaaggtgatactatcgtattgttctgagaacaatactaggctctgcataactaacatgcacatagccaaacactcacacacactttagagtatcaacttggcataaatattgataacaacttaagatctcgtttggatatgtaaatattagagaccatacctcttaattggtatatccaccattaaccattccaaagagattggccctaatcctggttgggggttcctaaataatgttgagtaatgattagtttgcattccttttaggcacggatgaaaatgattcagaatgtttctggtttccggacatgttcctggaaacagaaagtgttggtgaaatttttcctatatttcaaaacggaaacaaatctgattttttatctcgaaacagaaacaatacctagactacattcgtcgaatctgaacgatcgaactttc

SEQ ID NO: 38321 - DNA, 489 bp, Oryza sativa
  unsure (1)..(489): unsure at all n locations
tcacggtatcagctgagtagagcagttagaatacgtctgtattattttataccaaccattcgattgataaggggtattaagagggcgaattgtgatagataagatccatcattactgattcttgacaagaaagggtcatcgctttatagccgttggatgaaacataacaacccatcagtcatcgggtgagtctttttgccttaccaaccgttagattcgatatangaaaaccatcgcatacatattatacaatgggaaggcaaaagggtgccccttcattcctttatcttctttcaataaaattatacaaaatatagttattctacatgttatttctactaatattacacaaaactcccgcggcaacgcgcggtgtatcatctagtataagagatgagacgaaattcaagtgtagaagagattgacgataactcacgggatatataagaatatttttaacatgatctattgccataatgctatccctca

SEQ ID NO: 38322 - DNA, 469 bp, Oryza sativa
  unsure (1)..(469): unsure at all n locations
agcttctcnctggtatctnttagcacaagttctatattataatcccatntgtagaactctagctcccttccttccaaaattatcttggatatctgttacgtttcaaactaatacttcttcagagagcaattaaataaattttgttatcaaagaacttacagagttgtaataatacaaactacaaagtatacttgcctttatactgaacaaattatctagcatcattattatgatggtgcaagtgtgaagagaatttatgggaaatatgaaagcttaaacagaacttgtatttcgctcaaaaaggttaagagggcatgcaggtgagctcacaatcacaaaagagatggggagaacaaagcaactatctctctattcttggttaagaagattctttgctattataaggctgtttggttggagccaatggatgtcaatgtctagccaatatgttgattcgcaatccatcact

SEQ ID NO: 38323 - DNA, 409 bp, Oryza sativa
ctataaaactcaacttggtgctagcgaagaatattacctcgcccttgtttttttatacttaagttaaggaattatttgctgcctctttcacatgctattgaaacataagagggtgttaccaagtgcaaagtgtatatcatggggtgctcaattgtgcgtgatttgcagttgtagctgcccccacaatcatgcagagtaatgcctatgtaattcaccgctaacgcgccaagtttacacatgagtacatgacagataacaaaagggaggtcgaattagcctcattccgaatcagaacagaatggtcgacaccaacaactaaactactagtagcaaactagagccctcaaaatgggcgcccagaaccgggacaccaaaaagctaacggcggcgttgcgtactgaccggagac

SEQ ID NO: 38324 - DNA, 415 bp, Oryza sativa
  unsure (1)..(415): unsure at all n locations
agctngacaagagctcatcgngttnttctgctntgtataattcttctactaacaaatagaagagtacattatcgcagccgcctccgctcggccttcgccgcgacgctgccgtccgccgtccgcccccgtgcgccgacttccgccggccgccgcccgctcctccgtgtctcccgttgccgccgtgtcttcccgaagcagtgaaaagtgagatatagtgagagagagaagagatgaatagtgagagagagggaaagtgaatactatgacatgcgggtcccacaattttttaattagaaaacgctgactgggatgccacgtgtacgccacgtagaccaaaaccaccgcggattacatcgaggggggtaattcgttcggttcgatagtttgcgatgaaaaatatccgggtttattggtc

SEQ ID NO: 38325 - DNA, 487 bp, Oryza sativa
  unsure (1)..(487): unsure at all n locations
taatngtaaaatctttggttcatggatatactntaatgcatgcttgttatattatagatggatntatcttctttntattgcaacacatgacttgatatatatgtatgctaagcccttgaatattaataaacataattcctatgcttgatgaaatcattgtcaaaaggaggagaagtaatgtgaaaatttttggatttttggagaagcaaggtgaattttcgacgagttgttgagaagagcatgttcntttttgggttcatgagggaatttctttcttttaaaaagggggagaagttttcttctggattttcgagcacgatgtgtacttttgtacgaagtgtgctttttaaccaatttgtttntatttttccaaacaccaaaaccattttgatggatntgccaatgtgttcatcaagggggagaattgtaaatcaaatgtngttttgattattattctgtgatgaaacaatgggcattggagaatatg

SEQ ID NO: 38326 - DNA, 368 bp, Oryza sativa
  unsure (1)..(368): unsure at all n locations
agcttcacanagcgaggatgagtccgcgccttattgcgcgaagatgacatcctcacaaaggcgctcggaaccaaagaacatcctggccgaactcggggaattggtagcgatgtgccctgtaagcatggactccctcagtacagctcccaatacaggagacgaaaagtctctcacgaagagagggacgctcgtttgaaggccgaacttaaggttgaggtcattcaagaactagaagctagcatgaatgcaagggtggaagaaagggttaacaaggtgctcgccgacatgaatataccccgagtcacaacacctgctgtgcaaccaactcctcgtgtacaacacgacgcgagtccgtcacagcataggag

SEQ ID NO: 38327 - DNA, 449 bp, Oryza sativa
  unsure (1)..(449): unsure at all n locations
tgctcgtctggtcgatcggaaagaacatttctagcacgattattgctttgnatgggcagatcgacccttgcaagaaatgtggtgtctgtcaacacctgcgaggtataataattttctgaaccttcgttattgctggccatatatatagtttccatactccggtcgacgtcacaagaaaaaaagtaactgaatacgaagtaagattactccctctacttcagtatatcgggatatccgatgtacaactctgatcactactgtatatattacgtaaccacatgtaccactagctagtcaatggtttggatgttattacagcaaatccttagttaaccaagctccctagctatctcagcgcaccttgtgttgctacagggtaacagtgtctggctgtgcatgcgccgttcgatgctcccacaccgcgttcatccactcgtccacgtatattc

SEQ ID NO: 38328 - DNA, 406 bp, Oryza sativa
  unsure (1)..(406): unsure at all n locations
agcttattagtgtatggatgattaagtattgactattataaacttaaaatatatatttatttatatatttagagaaacttctatattgaaaactcttgtatgagaaacactatttagtaattcaaaaaacatgcacatgataaataagacattttttcagcccaaactcacttaagaactcagcctanagctacccaaaattcctatataatatctctgttttcaaaatatagcaatttttagttacgaatctaacatagaattgtctggattcaacacttgtccagattcgtaactaanaatttgttatattataaaatagagggagtacgttaggtgggctattatatattctcgacctcgtaggatagagcacgaggtgttcctacagataggcatatttagc

SEQ ID NO: 38329 - DNA, 418 bp, Oryza sativa
  unsure (1)..(418): unsure at all n locations
taattgctattangcacgccannttgtgaaaaagaaaaagcttgatgcgtgattctgcactgtttaagctgacttaagataattatttactccacacattgctttaatcctgctgagttntttatagcatttaaaattttgtaggtaaaaagccaagggatttgttaaatccaaaggctgtcaagtccatgcagtcactctntgctatgaaggatactattggaaaaaaagaaactcgggaaattagcgcatcttttgtggttactgttacacaggtcagctacttatctcgcatgtgctatgctttttaccttgatgtatgcctatatatgtggtcttatcacttgctttntatgggttcgtgaagaaatccatccttaaacagtttaaataatcatatacagctgaacagaaaaca

SEQ ID NO: 38330 - DNA, 379 bp, Oryza sativa
  unsure (1)..(379): unsure at all n locations
gtcacctgaggctgcagcttcttatagttattntgctatatcactcattatattttacatagcagntggtatatcactcggatcatgttatttggaggattcacaccgcatatgctatatattgatatcaagtcacttggttgattacgattatcaaaaccactcggttggttggattatttattccttgactatatgcttggtttgttcacttaaccgcatagacgagggctacacctattatgtgcatctagtcgatgcacctgactatatttttcagcccttcacagtcttcataattggtaaaagtactcgggagaccatggcatagatgattgaagtactcggctttggagtaatctggttcgagagaagatta

SEQ ID NO: 38331 - DNA, 407 bp, Oryza sativa
  unsure (1)..(407): unsure at all n locations
cgacgcctgtgtcggtgccttgtgaaagagaatgattttttaaataaaactcgcgacacaaggccattcctgggcggaatacttgtgcggtcgcatctaaggaccgattcctttggaattacatccgagcatacaatagtgcgaccacacgggtggaatgggacgcccctggctgagtaaattgctaatcgngggagccttgatgccgagagacatgtggattcaaccgngtggtgtcagggaggacccctgtgctttctggcacactatgagctgggacctaacctgtttgtggtctgggacccctctcgtcggcatatggtaaacctgtgtcggctttcgaaatgccttgtcatgaaagcccttaggtcaccagacgtggccattctacacgggctgggtgattc

SEQ ID NO: 38332 - DNA, 422 bp, Oryza sativa
  unsure (1)..(422): unsure at all n locations
caagcttattccacgcataaggtgtgctgacaggtattatatttctattnttgtcaacctatcaaccactacccacaaagaatcatgtcctgctgacgttctgggtagaccgcgtataatatccattcctatttcttgccactctcactctggaatcctcaacggttgtaacagaccggctggcttctgatgttctgccttgacccgctgacatacatcacatagagccacatattctgctatctcacggcgcatactcggccacaacaataggtgcttcaagtgttggtacatcttggtgctttcagggtgaatgcgaaacacaagttcatgagcttctttcatgatagtaccctgcactccttattctcngggacgcaaagtttntctcgcaaccacgcagctccttgctcatcttctac

SEQ ID NO: 38333 - DNA, 423 bp, Oryza sativa
  unsure (1)..(423): unsure at all n locations
gccatgaatcccttttatgcatgtctggatctggatcctgtagttttnacatatatgatgagcagtatccgatataaatataatactcgagaaacaatcaagtctttaaaatattgataaatatgtatgtctcctcttgtcaatgttgatatccccgagcagatgactctgtacgtttaaacactctgttcgactagtcatagacccacaagcatccggagtcggcctatgcatttctcatacatgcatatgagtgacatgagttcgtcattaatggaacacagtttcacggatcagaatttactacttaggtactcttgccattattaagagcagaaaataaatttatctcatctctatgctttcgattattccaataatacttacaccttgcgttactcggccatcaacgagccccgggtg

SEQ ID NO: 38334 - DNA, 107 bp, Oryza sativa
agcttctgtatcggcatcccgctgggtggatcctgtattctacgacggagacgagctatcacttccgatcatggtattgtgacgatgcacaccggatacgctacata

SEQ ID NO: 38335 - DNA, 221 bp, Oryza sativa
atgtacggagaccgtactgatgatactgcgttcgagcggtgctaactgatgaccgcaccgtgtgatgggacggactgttcaaaaattgtaattctggagtcatagagactacagtcatgactattcatcagagtgcagtcttggatgacaactgcactgactggtgcacgatcgcatgatacctactctgtatctggtcttggacccatctccattggata

SEQ ID NO: 38336 - DNA, 140 bp, Oryza sativa
  unsure (1)..(140): unsure at all n locations
agcttagctcgtagatctggacttaaggctagggctatggctatgtctnatctgggtccacgggcgaagccggagaggatgcccatgggggcgggccggctggggaagtggtggttagcacatcatccttccnccccccc

SEQ ID NO: 38337 - DNA, 413 bp, Oryza sativa
ttatgtgatcccctctggtccacagtacaatcactattatgatgtggatgtctacagaaactcctctctcatcttggaaagcaaacggcctagtatttgtttctctgcagtttgtcgagttgggcaacggattgtggcattgggtgatactttggaggccgtgtatattcttgatctccaaaatgtggagtgggtcttttgcaagacatcgtcgacgtttttagacttaagaaaggaaatcaagatttctggatttgtagaccttggtaatgattcaatgatgatttcagaagttgatgcatgtgagtgttttattctagatcttaagaagaagcaatggtttggtgtagaagccgctaatggtgacatctggccgaactgtgttggtctgttgagccgaacatgtatgttca

SEQ ID NO: 38338 - DNA, 280 bp, Oryza sativa
  unsure (1)..(280): unsure at all n locations
ttggacatgagaaattaattgcagcaagagactatccatgtgatggaaggttgaaaagaaagaggaaacaactttaacttaagccaatcttagggatagaggcattntacaccctccaaactattacttttgtctaaactacacccccaaacaaaaaaaccggatttaacaccctccaactgcagaaccgctgaattaacccccccacgttcagaactgatggttntagcctacgtggcaaatgacatggcattcagaatgatgaaaagaatttaaaact

SEQ ID NO: 38339 - DNA, 407 bp, Oryza sativa
  unsure (1)..(407): unsure at all n locations
taaacatcgatntctctttcgagatatagtttgattctcaactatatctcgcgatatcttcttatgaagtttcgctacggcatctataaccggaggtgccctcgccgggtcacagggactgtggcctaccaagcaagcacttagccgcagcatctgccggctgtcaagcggactccgcgctagttatcttgactgttctctctgctgggccttttatcactagacaactccatcttcaggggtcataacgatagttatgagcgctagcaacagtccatgcttctcctcttgagacgcatgatcgtcccgatcggctactttctaaggttgacttcattccgtgaatgtgaggaccgacaaggtcagtccgatcagtcccagcgcacgcaccctgtagtaatcggcct

SEQ ID NO: 38340 - DNA, 478 bp, Oryza sativa
  unsure (1)..(478): unsure at all n locations
agctttttgctacanaaatcagcacaagtacatgtcttactatntgaaacanaatntatttgttactaaaacaaggataatatcataaaacaaggtatttttaataattactatattattattcatgctctttgtgtccacaaccacaagaaataggtacgcatttgatttctcgtataagacttcatttggaactcatatttgccaacctctattctttcattttccacatgcacgtttctcgaactggtaaatggttattttttataaaaaaatctatataaaatttgctcttaatatcatattaatctatttttaaagntttttttaactcatactttcactaatgagccatcttgttttccattccgaagagatatgttccgaacattcactctcgaactcagactaagtatactacggtgtattgatccgaacatagtaaactatgcataccggtaagtgtccatttagtcat

SEQ ID NO: 38341 - DNA, 411 bp, Oryza sativa
  unsure (1)..(411): unsure at all n locations
ctcagctgacgtgcaacactggtctaaccaggggaccgcctcgtggacactcgcagatgaccagcggcaaactgataactgtcttgacaccgaagatattgggcggatcgggctgaacagcattgatctccgtcggtagctttgctttcgcttagattcatagccagggtccgccacaatatggtgagttccttgcgaggtcttnaaaccagtcgggcaacatcatcatcttctttttgtcggcttgatctccgcagtcggttgcgtcgttcttgggtattgtctgcgaactgttgtaacaacaatcttggcgcggattgattggagagggcactggagtcatgactgcaaagttgatccaacgctgcggagacggataatcccacagtctcgctacctgcacctggatgg

SEQ ID NO: 38342 - DNA, 458 bp, Oryza sativa
  unsure (1)..(458): unsure at all n locations
agctntagagttagtgggttactatacagtatatattatctatcaactattgtaaacttgaaaaaatagatattttttaaaaaaaacttttatacttcctccatttcaggttataagacatgttgactttggtcaaagtcaaattactttaactttgaccaaatttgtagagaaaagtagtaacatttttaacctaagacaaatttattatgaaaatatattcaattatcgatttgatgaaactagtttaatattataaatntaaaacagtttgactttgaccaaagtcaaaacgtattataaatttgaaactagtactatatttgtctataaacttaggtaaatttanaacagtgtaactttgaccaaagtcaaaacgtattataacctaaaacggaaggagtacttcttacatttntacgaaacacatcatttagcactggtcattaaacatgctc

SEQ ID NO: 38343 - DNA, 425 bp, Oryza sativa
  unsure (1)..(425): unsure at all n locations
ctacgagagcctcattgcctttctgggggcgtgccttcattgacttttgactcaagcatcgaccctcactcgagattagttagcctatatgctgttgaaaaaacagcataattgatgttgagtttcttactagctctatgcacaaaccatttaggagtacatatgccatactaccacctgcctagcttctcctagccttcttgggagggagtccatatgcagaatgcagtgcatgcagccactcctggtagtacattnttgccgtcnngctgttttactgcgttcttgttaatatactgattactanctattttggctacccagtcaagtatatgtactgattagtagctagtacctttttgccactcaagtataccagttatactgatgaatgttttaccgctactagctttcttgngtatata

SEQ ID NO: 38344 - DNA, 312 bp, Oryza sativa
  unsure (1)..(312): unsure at all n locations
gcttctgtgcacttctattatactcatggtgacatgctcataacatacagggggctgttcagttgtctggctgcagcaactactgctgcaacaggaaccagtatgcaagcacgatcatgaaggaagcaacgggctgcatcagccctgcctgccgaacagacccacagtttacagcgaaatagtaacaatgtacaaaattgaggaaaaatctgtcttaggactgtcctatatgtgcgcggagtaactanttagcatgatattcaagattctatagactgcactttttggtctgccatgcactctggattaccc

SEQ ID NO: 38345 - DNA, 436 bp, Oryza sativa
  unsure (1)..(436): unsure at all n locations
ataggaatattttcctatatgattngaatcctatgaaattcctacatagatctcttgattcaaaggggcccttagagtttttaccaanctctctctctctctctctctctctctctctctctccttcctgattatcctacttaatttttgcaaaagaactactactgtaattctggatttgtcctggagcagcaccattacatctactagtagttcttattcagtgagtgcaaagaacgaatcgatgaatactcctatataacagccaaatgcggctaaagattattttacatagattaaacaccattagaaccataggcttattttgaggaacgtttttaacccagtggtaagataaagacaaccaanagatttgcttcacagagaaagctagcatgagctgagccagcagcatggtcagcttgttctcacatga

SEQ ID NO: 38346 - DNA, 391 bp, Oryza sativa
  unsure (1)..(391): unsure at all n locations
agctntagcttagctggcaatgcaagatataattcaatgcatgataaaattcaatggctgtgtcgacacgtagcactcctctcgttggaaccaaatcaaaatattcgttgaaacgggacaatattagcataaacacctttatttaatttgattctaccacgcaacatgagtaacacatgctaaacacgaagagcgtcgagaaaaagaaaatgggtaaaaaaaaaagcaaaagcgtgtaagtgcgaatgggtgacgtgcaaactgttgcttaacttgctaatgatgcaagcatgcaaccattcttaataagattaanaataaaatagaaaaagaatagaagagaaggaaatgatcctcacctgctacgaactccggtgtcgacgtcggcgct

SEQ ID NO: 38347 - DNA, 387 bp, Oryza sativa
atcaggatcccgaagctgtacacattgcttctctcattcagcatcccggtgctcgcgtactccggtgctacataactgcatatgcacaatcgatggccagagagaccttagtgttcagtgctcacatcttacatttcaccgggctcgacacaattgagaacctcacatccatcttacccaaatgttcccatgactctcgtggtaacatagttgttggctgaaccgaggagctcggcgaggccaaagtccgagaccttggggttccatctcttgtccagcagtatgttgctcgacttgatgtcccggcgcaccaccttcggctccagccgcttctgcaaatatgtgatcctgaaccatgtcaacctccacaattgagatatatcacac

SEQ ID NO: 38348 - DNA, 400 bp, Oryza sativa
  unsure (1)..(400): unsure at all n locations
gtatgttggatgaatntaaataaagtttgaggagaacataaaacaagatgaaattttacggagatatcaatgaatatttgaattcaaatttataatttgatgtccacacagtgttaagaataaggagttatttggattagtatatgtcctatttcagtgaatggggatattttaattaattntgtaatggttttacaagggagatgtaaatccaaaattcgagttctgagatntttgttaagatagaatagtttggatcaaaattttgggtttactaggaatgacttaattgatatcttgccactaattcgctgatacacacaaagaatcacagtttaaaattatgcntttaattaagataactttagctgctaacaaagtcaggtgtacaatctctacc

SEQ ID NO: 38349 - DNA, 297 bp, Oryza sativa
  unsure (1)..(297): unsure at all n locations
agtactacttactgacactactacttcgccagatgtgtatgacagcacgagacagaacaagagatggactgctaattctaacacggatttgacaccaactgatcatgaacaagttggcaattttaatatgcaagggaaacctgatgggaactntattaaatgatgacctgatggttactggtaaatatactatcatttgngccacgccaataggatattatttattaattctggattcatctgtacgatgaattaatttgtgacagtaatatatgcgacagctactgctaaaagatt

SEQ ID NO: 38350 - DNA, 348 bp, Oryza sativa
  unsure (1)..(348): unsure at all n locations
tacctaataacatccagcaagatacatttgcccagtctagatatgcttctgttatatctttcagagagagggatctttctttaatatttgatgcacttctaaaaacaagatccaattctgtcctgttggatatcatccataagaaaggaacattctcttgcattctgcagctttttacgngaaatacaatcatctagaattactgactaataaactatttgtactattttctgacaggactgcatatgctttacaatatattaaagcaaaatagaagcgatctccatatgatacctataataagaaagcttgtgaaggtttgcatttctttttatgttatgcttatac

SEQ ID NO: 38351 - DNA, 349 bp, Oryza sativa
  unsure (1)..(349): unsure at all n locations
cctgctggtgaaggggaactacgagctgtgggggcaaggcaccacctacgaggagctggagagggtggtcatggcgtaccccgaggagaggaagcttgcgtacctgacgccggagagcacctatcaaatcgtcgttgacagcttctgcaaggtcatcagcttccacgaccagaacgacatcatgaagagcctcacctacatccccttcaaggtaaattcattnttgagccataataagttcaactttagcctccccacgttgtcccacaataagatcatttttgagtaaccactgcatctgaggttatgataatagaagactaatatgttaggagtagataagtgagga

SEQ ID NO: 38352 - DNA, 494 bp, Oryza sativa
  unsure (1)..(494): unsure at all n locations
agcttctcggagccgattatgctcctcggcaattcttctcccatagtagaccctgacattggctggctgcttcctcagaacagaatagagcgatataaacagcacagaaagagcgatattgatgccagcagaggtcagaagtccgctgattttcattccttcctagcaagtgcgtggcgcgcttatgtcatccaaatacaagcacaaatttcatccttggtacccagaggctcagcacctgcaggaagagatcgctaaagcaaatcaaatcaatcctgcaagtacaaatcgctgcaaattctgtaatctccacaaagagaaagagaaaaaagaaagatagcaaaacaacagataacatcatcactgcctatttctacaccatgaataaacaaacgcacattccanaagtggcaccaaggtaaaatcagaattgagaatgaagccaattcctcggagtgggtgtacggacagtggaaccttggagataataagta

SEQ ID NO: 38353 - DNA, 468 bp, Oryza sativa
  unsure (1)..(468): unsure at all n locations
tattaaaatatattaatccagtgattnnttttgacatcaactgatgaacaaacttgaattgacttacccaacatgtggtcatataatctatactacattggtatgcatgcatctattgaacaagtcctgaatttctagtactaatatattgttcagtgccatcacctgccttgtcttgctcagttacaggtgcagacagaacaaaaaaaacgatgtctctcttcttcaacctcattccttttcttttcttgctaggtagttacaattagctctgaatttcttaactaatgtctctcttcttcaatcacatccctagcatagtgagatcacaaccaatggtcttgcagctagtttacacccacagcagtagtcctcatcttcttctgcaaaattcttcagtgaaaactgacggtcgtttgaattgagccaaaacttgcctactgatatttggtaacttaatagtgatat

SEQ ID NO: 38354 - DNA, 402 bp, Oryza sativa
  unsure (1)..(402): unsure at all n locations
tagttattagggtgtaaagtttttaagtataccgacacatgtttgaagtattaaacgtagactaataataaaacaaattatagatttcgcctgtaaactgcgaggcgaatntattaaacctaattaatccgtcattagcaaatgtttacagtagcatcacattgtcagatcatggcgtaaatatgctcacaagattcgtctcgcaatttacatgcaaactgcgcaattagttttttcccacattntgtcagggttatggataccacatacctaatacatacctaatagtagttgacttaatctcggcaggatccaccacataccatgtcttatacggaaactgacctcgaatgagttcagataaggaaagaaaccatagttctacatggaaccacaatacta

SEQ ID NO: 38355 - DNA, 409 bp, Oryza sativa
actaagcttaccatgggtggtgacctttgattgcagcaaaaagattctttatgttgtcaacaatcactgtgctatgatgagcttatattgtatgcaagggtacgtcgactacacgaataatgacaacgacatggagaccgcgcgtggtgaatcgcatctcctctgtcatgtctacgttctcagcgcgtatcccgctcggccagtaccaaatgaaatggtacaagaggctcgctaatgtgagctccacattggctagaccaaacgccatgccagagcacatcctccgacctgctccaaatggtgtgtactcaaaatgtgtgcctttaaagtcaacatcactatgctcaaacctctctggaataaactcttcagcttcgtccagtacttgggatcctaccaatagccgata

SEQ ID NO: 38356 - DNA, 489 bp, Oryza sativa
  unsure (1)..(489): unsure at all n locations
agcttcagcccttttgcatgcacataatctgccagtgttcttgataccagangggaacgtctgcctatntggcacaaagttaccctgagaagcgaanaaaagagcagtacaacttgtcaaaactgacagcaatagcttggtctacacaattttaaagcattgatcttttaaaattgctcattctccccccatgcagaatttttcacatataaaatttctagttatgacacattaaactgatagaaagtacatacgttttcttattaatgtgtattgtaattgttaatgattgtttccagtctaaaatttctcaggctcatcaacaaactagacaagggtctcaaatttgtatcctaaaattgtgctgaanattatggcggtggatagcattgctttatggagaaatattttgtctctttacctgngaatccctactatattctgcccagcaatcatctgaaagaagagatgganaacattacagacatg

SEQ ID NO: 38357 - DNA, 430 bp, Oryza sativa
  unsure (1)..(430): unsure at all n locations
aaaaaaacaggtaataaatattattttgaagtattaatagctagaaccttcgttgtctcaattgttatgcgaggttagtctctacatagctggcaagtcgactaaggtgtgctctatccctagtttttccaactctcccatgtcgttttttgtgcacacgttattcacactgctaaatggtatgnttttttttaaaaaaaataattatatactaaagttgttttttaagaaaatcatattaatctatttttttaaaacatatgtaatacttaattaatcatgcaataataagtgtttcgttttacgtgccgagaactaacccctcctcgcgaacgcagcctaagaggctctaccatgcaacataatatgtagttcgtttatgacgcatgtntctccaaataataaacattggatctcacacacacacaca

SEQ ID NO: 38358 - DNA, 393 bp, Oryza sativa
agcttgcctccgtcgatcatcgatagagcaacgtgttgattcctgcagcagcgtcggcggcggtcgacaccctgcctctgccgctaaacccgaacgttagctgcctgaatgctcccctccccttcggcaaccgcacagaggccaacggaaccggactcatggaccttgccgggacgccgttcgccttctacgggaggaacacgctgatggccgtcggctgcatcaagcataaccacctgcgccaccgcgtgccagggcagttcagacgccatcgctagccactcctgcagctcacgacctgagcttagactaggcaatcggtaacaacagcagcgaggaagcaacaagaggcagcagcaagcttgctccaccggataaatgcaaggcgaatgc

SEQ ID NO: 38359 - DNA, 448 bp, Oryza sativa
  unsure (1)..(448): unsure at all n locations
tcnaaccttgaacagacaggagccggnttagtcataggtgagaacattatatacaagtatgtgcattgctctctatttatagtgttaaccaatattaatccaaacatatacgttgtaaccagatggagttacacaaagtcaaactatacagaaaccaattgttcatcatgccattccacaaaccaactacgtcgaattcgatagtgcattattcgagcctgcaattgtagatggtgtcgtcgatgttgagttctcaaaaaatcacctaaacagttaatttatcttgtccattattaaaaatatatcgtctcatgcatcatctataggggggttgaggacgcanaatgtgtggacaatgatnttgaaggtgtcagtcaagttctggaggatgatggatacgagtcatatcgtgttgatgttactggtgtgaatgggatagtactgatga

SEQ ID NO: 38360 - DNA, 419 bp, Oryza sativa
  unsure (1)..(419): unsure at all n locations
agctngccagagacacttctaatgctcgtggaacatctaaagagaggaagctcctccttgagcagtatgcttggctggctaatcttatggagaaggcaaggatgataactgcatggccaaaagtaagtgaggggtaactaactatgtgatctttagccacaaatattaactttaaagttggatctatattctgtttatgatcttattttattactggttttgttagaaaaagaacctgattgcgttattccattagttaatgcgtaaagttgacttcctcagtcttttattgtgggggattgttctgtggttcacggaatagtgtcttgttgctttgcctgatggaagtatcgatgttttctgaagcttattgttggagttagaacttaatatgcattaactaataactatgtgtattc

SEQ ID NO: 38361 - DNA, 316 bp, Oryza sativa
  unsure (1)..(316): unsure at all n locations
tgatggtcggatgtcaatcctaagtgctcaaactgaacccncaaagaatccactccaatctcactctaatcactcagatgcacttgatccaaggagagcttatgggaataggtctaaaagttctaacaacaacttgctcaaagcaggggtaggtggagttaaatattcacctacccgaagctaaccattactcacaattttgaacttcggaacatccggcttgagggctganggttccggacaatacttctggtttggaagacatggaggaccgaaactnttctactctaactccggaacttctgattagccctct

SEQ ID NO: 38362 - DNA, 340 bp, Oryza sativa
  unsure (1)..(340): unsure at all n locations
aagcgacttataatataatatgaaatgaagggtgtatcaaatcaaataccacgagaacacattacacaatctaagctaactgaagattatacaatgttcacacactttatttatttctccactcttgtacctcgcaacaagctatancttttactacacaatcaaaacaggaatatggatcgtaaaatcaactacagtattaacgtacagtagctagatcacaccatacaaaccgaagacacgcatgtggcaacaatcataagtcaagtacacaatgtatagtttcatatgttttcgtagccctgcagcatactgacctgatccatgaccgagtctggct

SEQ ID NO: 38363 - DNA, 375 bp, Oryza sativa
ataaaactcagctgtactcgaacaggtgtggacatggctgaacgtgtttatcatgtggtggcattcaaacgcatgcacttgcgttatcacttactgcagcgcgttgattttggatcgacgatcgatcatcgaccaccgtggagactacagaaccgttcaggcattaacgacgcgacctacagacgacgaatgtcccgttgaatcctactgcgcgacgtacgtatgcgagcgcgacgcccgtgcgtttcccgccattacaacgcgttagtatatgtcagcgcgggggccggtgaaattaaacaccaatgggagctgagtgcactgactgtgagaatcaacgattctactactataaggactacagagatactcctc

SEQ ID NO: 38364 - DNA, 480 bp, Oryza sativa
  unsure (1)..(480): unsure at all n locations
atccttaagcaccgcggctgcagcttatggtggttttcattgcttggtggtgtttcatacaactcaacctgctgccacatatccataaacaaaacattccgacaggtagttatttaatactatcctacaaacttacattctgccaaaaaaaaaaaactttcagcatgcctgatatttttataatttaatgtgtaaatgttgaagagtgcaagcatctaattttctcctctgccttgacacaagagtttatgcctctagaatgtcctagcagcactganaatactctatgcatataaattttctatgttgcaagtcaccagttatgccagtttgcttctggttatgtccacaacatattcaatgttgcaaaataagtataatgcagctatgcttcaggttacagcttccaatctgcatcttttaatattacatttaactatttcattttgcaacatcgttaaactgttttttcccttttct

SEQ ID NO: 38365 - DNA, 433 bp, Oryza sativa
  unsure (1)..(433): unsure at all n locations
cgatcctacacgccctcgccatggtttgttgttctttgtgcagngngcttgattcagatctccacagagtagaagtggatatctgcacgtgacgttgccttctttatttattgtagattgttttggtggaggccatgtgcggaaggaattgagattgagattggagacgcacattatttaaaaagctaaccagctacacctactttccgacagcatggcaatttaatattagtattaggctccgttctaaactccaatggcataaatgtttctcggtttctgctagcatgttttatcaaacggctataccgtgtgttttctacataaaattcttcttagaagtgcttaaaaaatcaataaatctatttctaagtttaaataataaaagtaatcatatgctaatagttggctcgtgttgatgtcacttactcta

SEQ ID NO: 38366 - DNA, 138 bp, Oryza sativa
aaatagattatacttacacagcgtgctggttcaaacatgaaaaactggatgcatatatcacctttcttttttttttgctctacatggcacaaaaattggttatctcacgaaatattgccaatgcctttcacagattac

SEQ ID NO: 38367 - DNA, 485 bp, Oryza sativa
  unsure (1)..(485): unsure at all n locations
tgctagcctgtgcaggagtaccaccttcttgcatacaatatcttttactcttgactntgggatattatggtaagtggataaatcatgattttgtacgcttaataatgacaagggagcactntatgcttccaacagtttctctcgattgcttcagttttttggtgcttttatttttccaatgatgctattgcttgtcatgaagctttaactgctaattcttatcctgttttgtatacttcaggttaaaggctttcaggcttctagctgagtggtcctctttggtaacgctccacctgccactgctttatattcttgcattttcctcaagtaattctttgggatgtattaaatgttgtccattattcctccatatgtatgctcattttagatgtgttgctagacagtattcactgctctattctatcccaccaattagtacaccacaaaactattattcagntaaactatagaatatattattggtg

SEQ ID NO: 38368 - DNA, 480 bp, Oryza sativa
  unsure (1)..(480): unsure at all n locations
agcttgtcttatttctatctttggcatactctctattaattatagctagtctttattggggcatagtattatgagacaacctttaatagattctccatttgacatgtgatattgtaatgattntgtatcacctaactattattgtttgatgaaaaatcttgtgatgacaaaaatgttgctgtgttacgatatatctgctgataaatgactaatttggaatataaatagtcaaatagaaaaatatcgcatgacaaattgacatacatgctacggatgtgcaccaacaaaagcaaataatacttcctccatctcatataatgcgctattgctttatggaaagtttgacattcgtaaaacctacgacttatttaaatggggctgtctattgcaaaatttgacagagaacattagagttttctcgagttgcatcaagattcatacataanacagaacattatcctttctcattttcttcttctc

SEQ ID NO: 38369 - DNA, 481 bp, Oryza sativa
  unsure (1)..(481): unsure at all n locations
actaagcttgctgactacaatagaatggcagttgaacattagtgaactattgaacatgattgaactgaagagcaacaaagcgaactcgtctgaatatatttcacttgaatcaaatattcgtattacaattaggagctagatgaaacattgaaaccaataacagctcctgatatacaaacctatacttctcacaagacttactaagattcacaatgtggacaaataattaactaattctgttctgtctcaccaagatacaaaanaatcaagtaattctacaacatttatcgtgtatgcagtaaataacgttgtactgcgtgatccagcaggtgaagtgctactgactatatttgcagcatcatatagaatccagatgagtaaacacacattgttttgattactcattcaaaattctttgacggaagttcttcaccattaagggaagaccttccctgagagagacctttggcttccaacgtag

SEQ ID NO: 38370 - DNA, 410 bp, Oryza sativa
agactactgttctgtagactaatagacttctctttttcattgtttattctcagctcacctttgccctaagatatcaaaggcattcttcaatcgctctcttccacaatatcttgctttcttctaccctttcttacacctcactgtgaattcaactcaatgttttctatcaactttgcccatatggctatatcctcatggattcttgtctctgcagctttcatatatattctcccattatctaattcgcgcatgctttgtctccccttatccgtgctccgtgcatgccgcaatgtctcacgatggttggctgctggagctttgccctggacgccgacaggtcaaaattctggtgagtagctatccttgtgtgcgcctcttatgtgctccaaacctttatatatgatccatat

SEQ ID NO: 38371 - DNA, 437 bp, Oryza sativa
  unsure (1)..(437): unsure at all n locations
tgtatgcttggccatctgaccttaatctagttgagagcacacgaattgagtgcaatgctgcattatacccatttatctccctttcttgaaatagcaaagcacgaagtaaggcacagacccatgcagtgctatcttctatacgctgaaaatatgatcatacatctaagcactctcagctatcacaagaatttggcaagatatataaatactatgtaataagcaacanagttaaacaaaatatctgagtagatatctacagtcaaaattagatattatcacatgagaatgaagaatttaccgaatcacacaaagtccaatattctgaatactgagctagaacaacaggaatgcacagcattcctgtntcctatatagttgtatttgctggcaattaaacttgatgtgaatataagaatattgctacttgatatttgagt

SEQ ID NO: 38372 - DNA, 416 bp, Oryza sativa
agcttaaatgtgtataggtcacgtattctttaatgtcacttatttatgactagggtgaatgctgattatttacaataaattaattgtttcaagtataccgcaaggtagcttgtgtaaggatcgaagatgttaggccttgtgacgcacaaatagtgtatacatgtgcacgccatcctcaggataatagcattatgtcctattgtatgtattgatttggtagaatgtttggagcacaacgagacgaggaaccctaatctaatctagtcgactaatccggtgagatccttgagtacgagctttactgattcttgtcatgaatcttcgatggtatacttgatggctagggcttgaatatcagattgttgggttttttatggtgcattgcccctctttgctcggagagggcttggttgttt

SEQ ID NO: 38373 - DNA, 256 bp, Oryza sativa
tagaatatgtcggtgagcttaactctccgtcgcattggtacgacaacaaggcgtcgtcaactacacaacacgtcgactgtcatgatcacacgacccgcaattacatccttcatagacaaaaaccttacttgaaaccatttgcgccacaaataaccaggcataaaacggataaatatccgtcaaagtaagctctttatttagccgtactagatatttagccggtaaaaacgagggggcaaccctcttatttatccgt

SEQ ID NO: 38374 - DNA, 338 bp, Oryza sativa
  unsure (1)..(338): unsure at all n locations
gagagtttggtaattgaagaaatcgaactataaatacctagttgaaactcaaggaagaaaaaacaacaggtatctaaagaaccagattaaagttntaaagtccaaatagcagatcaaaaccattaatagagaagaacgttcgaagatatataaattcaaataaaaacataaagtttaaacgaggacgggaaatgaaacctcgagggacaaaaaaagccacaaggtccaatacaagcaaatattttctttttgaaaatagcataaccaaaaaaacataagactaagaggccttcttttttaaaaaagaacaccaatctctcaaaatccaatcataagta

SEQ ID NO: 38375 - DNA, 467 bp, Oryza sativa
  unsure (1)..(467): unsure at all n locations
tggtcatgttctggacgacaagctacagctagattatttctctatcgaagacctgaatcaccttcttttgccaatatttgaggttggtttgctctgctcaagtgactcgcctgaccagaggatgtcaatggccgatgtggtggtgacaccgaagaagattataaaggattatgaaaaaaattggcattatattagaggatgtcaaattgtcaatggccgatgttgtggtgacactgaagaagattataaaggattatgaataaagaaattgacattagattagctgccgtgcagagttgtangcaatcattggttggcgttgatggaccgcgttggtttgatacagccaatgaaggctgttaccagcagtcctgcacacggctggagtgttgatcatctcgctgacagtgacagcccttgcagcaggtgcctcttcttcttcatctncatncatcaacagcagcagc

SEQ ID NO: 38376 - DNA, 486 bp, Oryza sativa
  unsure (1)..(486): unsure at all n locations
agcttggaatcgtcagctatgctgagagtgtgtntgctacaatgccagagaggaatgttgtgtcgtggactgccatgattgggtgctatgccaagaacgagagaccaggtgatgccattttgctattccaggagatggtggcttctgatgaagaccttgtacccaattcagtcacaatagtatgcatcttgcatgcttttgctggagttaacgctctcgggcagggcaaattgttgcatgcgtatatcctncggaggggttntgactcacttgtttcagttctgaacgcattgatggcgatgtacatgaaatgtggatgtcttgaagctgggcggcatatctttgatttaataggacaccggaaggatgttgtgtcatggaatacactcatatctggatatgggatgcatggatttggccatgaagcggttcaggtgtttgaagacatgacccanatgggcnngttcacccatatcatcacattta

SEQ ID NO: 38377 - DNA, 291 bp, Oryza sativa
tttcggctgggtactgttttattctgttggggctccgtcagacgtttgagttgatcaactaaccagctggactgtaacccgtaaattatgttctgttttgaccttaatgatgcgagcaggtgacttgaccgtccccacgcaagataaactagtagtaatttggtctcgtttaaagaaatagtttataaataattttcgtgtttgaacagtttttaacaaattattttggataccctgatacattgagaccgtcgtggatgccgaccggcatataactataatacctatggc

SEQ ID NO: 38378 - DNA, 480 bp, Oryza sativa
  unsure (1)..(480): unsure at all n locations
aatatggccgtgatctgtcattacgtgcgtactatctccactatagaaagagaaataagaaaggatcaaattttctagtatttactagaaaagggggctttctacatagggatcgtcacaacaacgattttgccctatcagctgtaggaagaaaggacacttcacgagaatcaaaataggaagaaagaaagtatggcctatactactctatggatagagttctcaaattgatagagaaagcaccgtaaagatcaattagtgaccgactgggtcgatacaactaataaaaactgcttacttatcccatgatatggggcaaaatttaagaatccgcttatgtaatagagccgatccactaagggattaagcagcggtgtagtatcagatcccacagatagtaagttctttnttcttgcttatggggaagaagtctctttcaggattctatagacatccatatatgaaaccgagatagttacc

SEQ ID NO: 38379 - DNA, 497 bp, Oryza sativa
  unsure (1)..(497): unsure at all n locations
tgtggctggtgtaaaacatcgattnttcttttgagatagagttcgtttctcaactatttctcgcgatatcttcttacgaagttttgttagggcatctataacagcctctggtttatgtgggcaacccggcaagtagacgtccacaggaattaacttatcaactccccgaacagtactatatgaatccgtactgaacattccaccagtaatagtacaagctcccatagcaatgacgtattttggttcaggcatttgctcatataatctcactaaagagggagccattttcattgttactgtaccggctgttaaaattatgttcgcttgcctaggacttgatcttggtaccaatccataacgatcaaagtcgaatcgtgagcctattaatgaagcacattcaatgaaacaacaactggtaccatatataaagggccataaactagagagtcttgccaattcaaagatctttagtgagttgaataacgaatggacttgtt

SEQ ID NO: 38380 - DNA, 454 bp, Oryza sativa
  unsure (1)..(454): unsure at all n locations
agcttgagtgtgtgtgagaattgagctgccagtacctatttgttgataagagcgngtatattcttgggtatgtctcttggttgctgctaaccatggcacgattgcgcaaggggaaacaagatggtcatgctcaacgtcaacatctacaccttcgacgagatatgacgacttcttcacgtgatgcatatgaggtacatgactataattttgcacaagttgcatgtaagttaccactctatgatggaaagtatgattccgctgcatacattaattgggagctagcagtagaaaaacaatttgatgagtatgatttttctaatgctcaaatgattaaggctgctagtaataagtgtaccggttctgcatctttntggtggcatactgtgggaaataagcttgaaacttgggatgaatgccaaatactaatgagaaaaagatttgtgtttcatactat

SEQ ID NO: 38381 - DNA, 473 bp, Oryza sativa
tgatatataattcactatttaataaaacatatgtatatttattaattaattaagatcaaacgattagataattgttaacctaaatagtgtgccaataaataaaaatggatattgtacagtagcataattatctttaatatgtcttgtcactgtagcaaccacataaattagttataatcaatccttcaaattaatgggtgtataggaaaatattagtgccatttactagtctatgtccaaatataactaaatccatgacttataaattatttacaaaaagattagcctcatattttgtaactaaaatataaacacacatagatgaatatttaacttgtttaggagagtaatcacagagctagttgtatttggaccacttaaaaattagtcgatacaatgtcatgtgaagtagaatatatatatatagtcggttgaatccattagttaaccaacagagccatcttaaatcacat

SEQ ID NO: 38382 - DNA, 441 bp, Oryza sativa
  unsure (1)..(441): unsure at all n locations
agctngcatcanacacctatattcccgtgacttgctgagtactatagtactcacccttgctctatataaatatatatagttcctccgtcgcgaagtgaagtgaagtgaagattatgatttcgtcctggttcccagccatcgcctgtggtgttgggtgttagttcgttggttccgctgctgcttgtgttgttggagtttcctcgtccgtgtcgntggttgcattctcgggctgtctgagctgcaacctaagttaaggtaaataagtcctctatatattctaaggatttgcaatgattcatatttgtcaccgtgggtaccagcactatgtcctgngactggtactgagatcgcggtttcgtacgaagcggttcgcgtcgttattcctacgacacgctcctgtcangtgccgttgtaccgcggtgccggattggggtgtgacaa

SEQ ID NO: 38383 - DNA, 418 bp, Oryza sativa
  unsure (1)..(418): unsure at all n locations
cagggtatgattgctccaatcanggagaaattctcatctgaagattntgaaagcttgtcgcatcttacacagaaggtaaccttgcatgaacagaggtttgcagaggctangaagaattctagaaaggttaatcatgtctgtccttatatatatggatcggatgatgaggatgatgactctgagatagctgccgccgaatgggtacggagcaaaaaggttataccatgccaatgggtgaagaactcanggaaagaggagaggtatgactttaatatcaccaaggctgacaaaatttttgacttgctactccgagaaaagcagattcaacttcctaccggtcatacaattccatcggctgaagaaattgggcaagaaaaggtattgcaagtggcataattctgtgtctcatactactaat

SEQ ID NO: 38384 - DNA, 153 bp, Oryza sativa
aaacctgcggttattttgcgtgcgccggaagccccgaagtatttgcggtaatgcgaacgccagacgagcatctggcaccggatatgcgatgtgggcggggacactcttatatttgttttcttactaatatatactccatccgtttcacaatgt

SEQ ID NO: 38385 - DNA, 374 bp, Oryza sativa
ctaagctctggcctgcctggagtaagcagatctctcaggcctcgtgttttctcatcaacaggctcggaggaggagccgcggaccctgcgctcctacgacgagaaggaggagcccgccgcccacagcgcttgggcgctcgcccggtcgtgctccgccttcgacggcggccgctgtcgtctcacattaccgacggcacgctccttcaccacctacgacttcgtttacgcgccaacgttcacgctgtccgcgccgttctcgtcgatcacctcgtcccgcgccgttctcagcgaccggccgcgcccaacgtccgtggacccgttctcgacgtgcgcgctgtgcgaaagagagaatatagagaggggaagaaaggatga

SEQ ID NO: 38386 - DNA, 416 bp, Oryza sativa
gactattggcgacttgagtagtcacatcggctgattccgagatgctgcagccgataatgattttaagccgatgacgcctatgctgattaccaaatttcactggtgacaacatgttggtatgcattgaagagaatttatagtatttaccatccaatattcgtgcctcaacttatataccacctaatacgtatgccctctctaatatgacattaggactgctaattagtctttctggtaccactttctcagtttcttttatgtatgtttcattgcatagatcaatatgtatttctttttaggcattgtggactgttatgcccctaggcccgcttgtcagatcaaagggtgtgatatcctgtggggacacccaatttaggcttggtgccccgatatttactcgtgatcgtcaggatttc

SEQ ID NO: 38387 - DNA, 415 bp, Oryza sativa
cccgctgttcccagatgtcgttctactacgtacccggattgggaggatttaagtgatctcgagggctgtcaccacctctacacctacttcaaacgtactgtgggatacgcagcaattactggataataattacctaaacaccacgtctaagcagttagaatctactttagtgtttataactaaccaaagcaatcactatattttagttgattatagtgaacaataatcccgtatgctatttaggaactaaccaagagataattctcacaagataatattatattgaattcagagtaataaacagaggagaagattaccgataactccggaattcttccgacttcttctactatactctcttcctattctagtatacaatatagtacaatagagcctcttataattcagctcaatc

SEQ ID NO: 38388 - DNA, 483 bp, Oryza sativa
  unsure (1)..(483): unsure at all n locations
tgcgttttgctatggctcatggcggcgatcaaatacctgttttctgtaaacgctcgccagncagcttgctattggtgcatcatagtgntgaagtttgcaacctgtgcatcaacagactgttgccattcccgtgactgtaccacattatacttcaaggtgtgttgttcgttccctgtctacagctcaagtgtatccatcctccgggtgagttctcccagatcccctcgagaggagacagcgacacatccaagaggatgaaggtggaccacttgaataggaggagcgcgagtatccccagtgcagcttctacggatcatgccatctgccgtcgctggcactctgccaggacgaaccaccagcgtcccaatagtcctcatacatttacactggtggtgaagaggaagactcctcctgaggtgcttctctgtacattcagcatgttaccctgcgttggacatcacgatgcaactctcattggagtga

SEQ ID NO: 38389 - DNA, 375 bp, Oryza sativa
  unsure (1)..(375): unsure at all n locations
agcttgtacctctacgcggcattggatatatattttttaattacttagncgatcgagagctgaaattccgtggaggagaaaacgtacgaaaacgctctaaatcgggcgttcgatgccagcactctccactatcttctctccccacccactttccccctttctctgtcttcttctctccaccattcccctattctctctcacctagcaacgagaggaagcgagtgtatgcatagcgacgatgcggcgaccgtgcccgagcggatgagggcgactttgcggctgccgggggaggcggctgcggcaacggcagtgctggagcggatgagggcggcgtntccgcggtccgtgaggacgtggcagccgctgcggcggaca

SEQ ID NO: 38390 - DNA, 482 bp, Oryza sativa
  unsure (1)..(482): unsure at all n locations
tcatgggtggtctccgatcgcctctctcccatcggagcttgtttatcttgacggttcctggcgcgaccaatgcgtgcgcgagaagttagacgccatgaattcgtttctcttctctgctttagtatttttttggctcctgttttgcagctggtgtgttgcggaggtgtcagtttctgaatttgtataaaccaaatgccctcttcttattctttatgctgttcctgatgcaatctgcccgtcttccttacgtcttgatcaagtagaacggcgcctctntctcttctcgaattttaaggcgtttcggaatccgaaatatgctaagattttacctggccgcgatcattattttcctcctgttcttggcttcccttacccgtgttgatgttgcttgatgctttagaagatgggtgtgtgagtttcttggaggaggttgatgagcaccgaagcttcatggtgatctcgatcgcctctcctcggaacat

SEQ ID NO: 38391 - DNA, 332 bp, Oryza sativa
cctgcatactagcagtgcgcatgattggaaaatcaggtctcggatcctgaatgcattcaattgcttttcaataacatgtttagcgtcgtatggagtcagaattgctacatcatagactaaaatgtcattttgagagtataaatgtgagttatgatgccttattgtataccattcaaagattctgcagtgatatgaacaaatgcagaatgggttcacaactaaatgctatatttgtctacatagggatgggcatactacgctgcattatcttgtgtaaattttacattattctatctgaaatcaataccattcttgcatgcagatctataatt

SEQ ID NO: 38392 - DNA, 407 bp, Oryza sativa
  unsure (1)..(407): unsure at all n locations
cactatccacaacaaccttattggtaatatgaacggctctgaaaagttcagcgggttaaatatccacttttaaagtttaggatgctagctgcactttcctccaaagtttatggggggtatttggactttttcattcacaattattatattttagccaaaaaaatggtgaaaaatctaacggctttaaagataaaaaatgttagaatattgtgtttttttgttatggctaaaatataatgaatctgaagataagatttcacacgttggtgtaatactattagaagtatgtgtccaatttttttttaaaaaaattctatgatatatngttagtggtgtgtccggaaagcttgtgacatatgatatattcctatatatacacttacgttctccacactgtatanagtctg

SEQ ID NO: 38393 - DNA, 405 bp, Oryza sativa
  unsure (1)..(405): unsure at all n locations
agatactcagcttacgcttgtcatgagcccgaggaggatcccatggctatgattctctcacgtcactgctaccttgagctcctgcctccgccatcacgcctcttcttgttcagcttgggaaggtggcgagaaaggggatgaaatactccttcctccggtaatcatggtatagtgttgacatgacaagtgcttcatggtggatatctagtggcacttcaagctgagatggatctacaagaagtggnggagtggtcgaactagcattggcgtaacaaggaggctcattgctgccaatctcctctcatgccaccgctagtctcttctaggcttgtagctacctgatcttgngcgagcaccctagcanagtaaccgtcctaaccaaggagaagctatagagtgtctatg

SEQ ID NO: 38394 - DNA, 449 bp, Oryza sativa
  unsure (1)..(449): unsure at all n locations
agcttcactaagcacattgtaagtgtactactgcacatgcttatgagactagataccagttaagccactagctaggagggagatggaaattatctatgtgggacctgctagaaatatcagtgaaaaccatctctatgccagttgaaacaatcatggaaaagggttttaaggcattacttgtacagtttttgaagttcacggtaaaaataaactttttctttgttcagtgcataaaatataccccaagcagaattcataagatagaagtcgatgttttttctacctaaaattaaagcatcttcatagttacaggtgctcttgagtcttgaaaatatctcctctcctaaagttataagaaaataacaaaagagcatccaagctttaccttcgttcagcgcatcagcaaaagaatgagatgttaacatacatcttatntcttttcaaagtga

SEQ ID NO: 38395 - DNA, 401 bp, Oryza sativa
  unsure (1)..(401): unsure at all n locations
tatacccttattgtcccagtcaaaattgctatagtagtccagatacctatagagaacctgcagaaaacatagagtaatttatggcaacgtatgtagggtgtcagaaacaagaactttacaaatgctgcagaatagttggaagtcagaacttacagctagtggaccatccaatgttccatggaagagatggaaaatatataacaccaatatctccaatgcataggtagaaattaatccatggtgagcaccaagaatgcggctntcataataacaccaagcttttatcagcattatacttctcttgaaaaggtgggttttttcaaatttttgatcaacctgcaaaatgtaatggttatagatatattttcccctgagcagtctgaccttatagaaatcatcta

SEQ ID NO: 38396 - DNA, 449 bp, Oryza sativa
  unsure (1)..(449): unsure at all n locations
gatctcgagagatcgaattatcgatgtttatggttccgatctcgncggaagatgtacttggataggttggatctccccacagccgaagtcgtcgagtagcttgttgtcggagagtccatctcttaaacccaactcgtcgaaatcctgaagcaccaaaatccccctacctggcgcgccactgtcgacgtttgatgtctcgactacagtatttggacagtatggggatcattggtgctaggatatacgcgagactgaggtaaaagagatggagacgaggatttttatacaggttcgggccgctgagctgtcaggtaatagccctacatcctattggccgaagccggtattgctcttattcatgataatcacaccagtacaatatgtggggtagcctatataactgttgtcgacatggcggtctgacgatctgactcgtagtcgacaacagg

SEQ ID NO: 38397 - DNA, 492 bp, Oryza sativa
  unsure (1)..(492): unsure at all n locations
ntcgagaggtatagntattactattactcattaataaaccgtatatggtatgtatcatacattcagactgtaccgagtttaggtccaactctttcttcaaactttcaactnttccatcacatcaaaactttcctacacacacaaacttttaactcttatgtcacattgattcaatattaaccaaacttttaattttagcgtgaactaaacacagcctttctctcgtgaaacagatattttgttttgctgtaaatgaatcacataaactgagctcanacaaaatgttgtcgataggcgtcatctacttttgttgcctggatcaataaattgttttatgtatcattcaatgaatttacaagtccactgacaccatatgtcttccgttccaatctgcagtttggcgttggagtttactcttttcgttccgtaaaaaacacaatatantaatagatatgatacattattatagtataaatctagatgttctattta

SEQ ID NO: 38398 - DNA, 456 bp, Oryza sativa
  unsure (1)..(456): unsure at all n locations
agctcgcatctttaaaataatcatgaaactcatgttctctttgtgaccatgtanaaattgaactaggagaaagcacactataccatgtatatgcanagtatgacaaagaaagaggaaacaactttaacttaagcaaatcatggctaccgggcttaccgcattgatcaataaagcagccgatatgctccattgttgttctagcatcctcacctgtgaattttgtgaagttgggcacctcgaatccttgcggatatgggaccgaatctacatgttcaggatacgggctttgatatggatgcatagctactttggattctatatcaccactatgccggaagacattgtcattatcttttccaacattcacatgatcgcattgtgaattcggcttacgttatcatgctatttcacttttacttggaatgcaaaccgaaccggcattaattcgctatatct

SEQ ID NO: 38399 - DNA, 478 bp, Oryza sativa
  unsure (1)..(478): unsure at all n locations
ctaagcttcgtcctcgcttctacgggccataccgcgtcgtcgccgncatttattatgtggcgtatcgcctcgcattgccgccggggacacggcttcatgatgtgttccatgtcggactgctcaagccgatcgtgggtgtgtcgccatcggcaccactggctttgtcacccattcagcatggagcggcccaacctgttcctcgccaagtgttgcgcgcccgtttggctcgaagggtgcgccagcttctggttcaatgggaatgactgcctgcatccgccacatcttgggaggacttgacgacattcgcaccgatattcctcgttccagctcgcggacgagctactgatcgagggcgggagagatgttatgtggtgaatttccttccgcggcgcaagcagcaagctgggcttggtgctgacgagctatatggcccggcagcacggctgttaatgctgctgcttatcctttatctaacaca

SEQ ID NO: 38400 - DNA, 397 bp, Oryza sativa
agcttcacgaaccttcaagaaaacccgcgatcgactaatatctggtaaccgcaactatacgccaactatctaaaaccttaacaaaagacccaaagaaagatcctatttagactagataatagtaccattagatagatctcaatttcacggaattactggaagttgaacggagtccatcggacgagcggttgaagagatatggatttcctaagaatatttggaatttttgtctaaaggaaaaggatttattaaatccctttggaaaaggaaatggacgaaggatgtgaatcagacttgtctcgggtggcattggcgcggcccgagggacttgcgcagctctggcgagcctaatgggccggcacgggcgcgaggagggcggcccaatggtgcgtgggag

SEQ ID NO: 38401 - DNA, 358 bp, Oryza sativa
  unsure (1)..(358): unsure at all n locations
agccacaaccaccagcctcatgaggcccacaagtaatgcttccatcagtattggctcttcatgtanggaatcaacaactaatgtcaagagtntttatgtcccttcattgagggactgactatatcatctgcactttctggcagatggttccattcttgctcctttattcgaagtatcattacttctatctaccacacgagcttcaacataatctactcttgcaacactggtcctagatcgccgtatgtctctacaacagtcgagacataattcatacaaacaccttgcgcagagtcggggataatcaaatactggcactctgcacaagccactgcgaggataatatgatgcatcactc

SEQ ID NO: 38402 - DNA, 457 bp, Oryza sativa
  unsure (1)..(457): unsure at all n locations
agcttatccaanagtgaccgagttcaaggagtatgctgcatggtagtttatttattaattaggcagcatttgttagtttccttttatctttacgaaagtgtgtttggtgtcctataaggactntatgttttccttttatcttttagcaaagtttctttcttgtcctataaggactagtatctccccatgggtataaatatgtacacccggngtcattttaaactatctctagatcgatacaactactctctgcgcatcgncaccctctttaccgaggtttttacttatcatccggcggaatttgtcacctgacactgggctgcatccgtacagtttgatctccggcgaaggggtaagttctacgttccgccggccctggtgaatctatcggctatgttggtgttgtttaaggctgcatcgcttcaatctcttggatcgatctaaagttggtgatata

SEQ ID NO: 38403 - DNA, 460 bp, Oryza sativa
  unsure (1)..(460): unsure at all n locations
actaagctgatggacnagaccgttgatctttatggcacttgtatactaattcggntacatctatgcctaagaccggaattgttagtgatcctcttcctgttagtcctattgatgttgacaaaaagaaagggaaaagtgttattattggggatcctcggcccgagacaattaggatcaataatgcaaaggccgaagatcataaagttgcaaaggatcagccatctagttcccataagactaaaaagccgaagctcacttttgagatgcttatggctaagtataagaaaggattagccagtcaacgatttgataatcaaactagtgattcaaaaagaccaagatcatctcgtaggaagagagttggtcaaacaataaagcaatcggagccatcaactataccaacttcatacaaagccttcggttgtgatgccatcgtgtccatatncaatgtcactatatg

SEQ ID NO: 38404 - DNA, 451 bp, Oryza sativa
caacgatactgagcggaagcaacgctcgtgttgtcgcgagtcttttgacctagcctaagcgccgccgtcgcttcgactttcccacgcgggtcgccggcgcccccagccttaccggtgttgcatcctcttcacgcgctcgccaccaccgtcgattcacgagttccgtgcgcgccgctgtcgacaccggagcttggccacctcggcaaggccggtgacctccaccacctccagagtttcgtctctagtccattcatggattcgaccctaacaagcggcttgacttcgccatcttcaaggagactgacctcatcgttcatcgacatctcttcaaggaggccccgctcccctagcccctagccgaagatcctgagggacacagagaaggtgcccaggaggttctcttaccatcaatcactatgtattcgtcgatttcacggtcaatcactactcc

SEQ ID NO: 38405 - DNA, 464 bp, Oryza sativa
  unsure (1)..(464): unsure at all n locations
nagcttgttgatgcaaagctgacactggacattatgtattctcagctaagcaagcttcagtctgaccttgagtctttcctcagtttccaccaaggcaacggtgtgaacaaagaagcattaagagatggagaaaggctcatggaagcaatttgctccatgaagtctcatgacatcaaagagttctcttacaaaccaccacctccttcagaggacatttttgctgtgttgaggaactcagagagatggatgatgctaatgagaaggagattgcgcagtgtaatggaggtacccccaagaggcatgcaacgaagatccatacagttagtccggaaacagacatcttcttggaaaaaccattgaacatatattccaatcaactgtgtgatagaaatgatgaggaagatgatagtggatgggagactgtcagccatgttgatgagcanggctctagcaattcaccggat

SEQ ID NO: 38406 - DNA, 455 bp, Oryza sativa
  unsure (1)..(455): unsure at all n locations
agctntgctagcattgtcaggcgcctcggtgagaatccttgaacctctagcactcacatgcatgcacgcatttagcgagtacatggccgtagacacacatgcaccgtcacccaaagataccttccgctcggactcgccgctagcgcaactccggtcaccaacgaccgagaaaagtagaggaatggaatcgcagtaacattctcttcattttgtcttttggtcgcacccccaaccaaatcaccgtttgtcgccggcgccggcgagcaaaggtgccgctcatggcggctctactgctggatcgatagagaaggaatcacgacttcactttgaaaatttaacaaattatagggtctgtaatgcaaagatacaatacacacaacactgtagcaggacctactcgtaattatataagaatatgaagtactcttaacgaaaactgaattaaacatgtgctg

SEQ ID NO: 38407 - DNA, 344 bp, Oryza sativa
  unsure (1)..(344): unsure at all n locations
tccagtgtctaaatggacattttaccgcacaaattgcataatgattcaactgactactggtaaatgtactctaacattncaattctacatagtaaatgcttgggctgataaaaggatttctgtaacaatcaacaaaattcacagataacttacataagcttgtggaccacgactactgatctggcctgttccaaaaggctcgtattgataaaggaccaccgtgtttgattgaagctactatattcaacggccaaaggcacagctgcagtgattatggtggatccctttcataaattgcatagcgatcttcacgtgtacaaatacatactacaagaattacacaa

SEQ ID NO: 38408 - DNA, 445 bp, Oryza sativa
accttaaaactcagttgacaatttgcatatatgctaagcccatattatctgttacggatgagccaaggcaataaagtgtgcatagcgagaaaacttatccacaaccaccaaaatgcagttgaatcccaatgagagaggtaatcctttgattaaatccaaagacaccacttgccatgcatgttctgggacaggtaatggctgaagaagtcccgggtatcgcacccggtctgccttagcttgtttacacatagaacaggaatccacaaagagctgcaccgacttcttgagaccaggccaagcaaacagactgcgcaatcgggtatatgttacctgcactccagaatggtcaccaacagcagcattgtgcaatgctccaagaaccttctgctgtagttccacattaatggccaaccacatgcgcccctttgtacgtaatactccatct

SEQ ID NO: 38409 - DNA, 479 bp, Oryza sativa
  unsure (1)..(479): unsure at all n locations
agcttgtgcatcagattgtgcttcacacatatatgtcttgtcactcaggccggcgagcgcacgcttgggcacaattctcttgctatgctgtgatgttactctacgatggcaacggcaggcgtatgatgcgatggcagcacgaacattactggaggcagagtcctggagtatctggcgaggaggcgtgtatatacgtaccgcggtggtctctgcgaccgaaagcggaagctgcgccgtctgctggtcatcaagatcgaaggcgaccatcggaacgtctattagaaccccatcccccgcgaccgagggaacacncggcagcatggacaacgtcgacagtggcggtggtaagtacgcacagctttctgtcaatctcaatctgtcatctagctcaagattatctttncttcacataattacaaggcgtcaattgataattaaggatcacattaatttaactagagaggagcccgcgcatatgc

SEQ ID NO: 38410 - DNA, 416 bp, Oryza sativa
  unsure (1)..(416): unsure at all n locations
taattggacggattagcaaaggatggatatgtagtgcatgttatgatctgctggagacaggggttttaatccgggtcgtaaccccctggagtcctggctatgcaaccgggattacgaatacatctttagtctcggttgagataactaggactgaaaattcattntacaccaaccgagactaaatatggagccaagtccagttggcagttttctttcatcatttttaattttgaatattgatttcactacatccccaaactatccccaaatcgatcatcacataacaaaagggatcatctccaaatacatcacaaattctcaaagaaattatatcacaaattcaaaaaaaacatcacatagtcacatcacatacaaattaaatacatcacaaattccaaagaaacagatcttcccca

SEQ ID NO: 38411 - DNA, 492 bp, Oryza sativa
  unsure (1)..(492): unsure at all n locations
gcaagcttggatgcatangagagataactaattaagcatatccatcgatccttgagagataaaccacatgtatatctagttagcttgtgttgtccatctggaccaccaagtcatcaagtttggttagccacaaaaccttgcgtaaatccatccgatcgggtcacatgccgaggcgtgagcctgaagctcgctgaatcattaatacttgcccctgaagaaacagcttcgatctaatcggcagatcataggctggatgcatgctcggattccttccctgtcttttaacacagacgaattagaacccagtatgttaacagactccgtgagagttaatgacagattagcactgaccttattcgatgaaaaggaaccttctttcttcagagaaaagcttgaactggctttagcctgtgcaaggtgtaggaccatttctggtacagcaacaatccaagaatgttgtgtnccagatggagcttgcaatggctcgagatg

SEQ ID NO: 38412 - DNA, 402 bp, Oryza sativa
  unsure (1)..(402): unsure at all n locations
aatgagaagaagagggatgatgtttatgggcgcacgcgcacggacttcgccgatctcaagaaatctctcgaagttcgtctttcagcagtggagaaaaaggtagagatcctcagctctgatctcgccactttgaatcataaagtccagcagttggagagtagcatccagcgacagccgagtggggatgagtttgcacgaaaggtgactacagcggttttgcccaaggaagagctgaactaccatagcaccccgttcatcaaggggcaacgcgatcctgagtttgcatcccctgaccaacagaatcaagatgggttgacctttcagtctggaaatagtggtctgggaggagggattgcangtagcattcctcccatgtgctgtcctcagttcaatggcgacaat

SEQ ID NO: 38413 - DNA, 100 bp, Oryza sativa
  unsure (1)..(100): unsure at all n locations
ccacgaaantagccgcagggcttatgatagtgacatcgccttcccatgatttattgccgagagngctactgcatgatatgaagactggacccatacgtga

SEQ ID NO: 38414 - DNA, 381 bp, Oryza sativa
  unsure (1)..(381): unsure at all n locations
ttctgtcttatcggctggcttcacacatgcttgttgtttatcccctngcgccttgaccgttggcttgtggcttcgccttacgtgctccttttggatttagacgatggttgatgaatttagatggtttcagcaggttagccgaagatcctcatgacatgtttccacactgtgaattgcggtcaggctcagagtcgtcttcgtcgtcgtcgtcgctcctgatagcacctcgtcgcgtacacgcaccgtccgcgacttccccaacggacagcagcaaagcccggcttcgaccagaatatagaaatgattcattaggattattatattgcaccgactgtgaacctactaggtgggagttttcaattcacgaaaagcttctcttga

SEQ ID NO: 38415 - DNA, 468 bp, Oryza sativa
gcttgacatgccgacggagccaaaggggcacaataatatactccttgctgtataatggtcaacttacttgctttcggcacttagaaattgaaagatcatttgggtcaagcaccaatcatccaagaaagcaaagactaatcgacgattagtcgggtcaggccactagttcgtcgttaacgtacacgtacggaccaaacctatcaggtatatatgacggttttattgcgccagtatcagtatgccacacgtaagttttgaagacattttttttcacacgaccgggagtatagtagactaccaataatatagaaacagtacttgcatctatattctacgttatcagaaatcacaaacagtggattatagccgaattaatgccgtaccatacgggcaacatatagaaagatacatcggccattcgatcgttgactttcccagcctcgcggccaattctggcattacaagaac

SEQ ID NO: 38416 - DNA, 386 bp, Oryza sativa
  unsure (1)..(386): unsure at all n locations
aagctangctttagacctttttccgtacgtgtactgaatgcttattatgtattaattgatttaagataaatccatgttagtgaccttanaaagaacacgaaaaattaaccctaccagattctcctatgatatgacaaataaaaatatatcccggccacaaattatcttttgaaataaatagaaggataaatccgcatggcttgttcaggttatttactgcatgtctatagaatgaaaggtataactgatgttgctttctatgagccccatggaccgaggctatattataccaattgactgaattagtgacttggtgtaaaagaatggggagacaagcaaggtgatcatgagctgaacttgttggtttgttaaattctgaacaatta

SEQ ID NO: 38417 - DNA, 337 bp, Oryza sativa
  unsure (1)..(337): unsure at all n locations
tataacacgcactcaaatacttgctgcctaacacacggcttgtcatctttaaacttgaccaaactcgacgtgttaactggcctcaaggaagtaaagctgggaattgcatattgtactgaagatggtaaagacaatgaatcattccctgcagaccttgatcttctggagagaattaaggtgaggaagagcagttgatcctgttccatttactcatattccatgccataattntacaggcagcatatgagagcactatatcactcgatgtgactcttggtaattgatgaaaatacttatcgtctctctagtggtataaggcacatatgagggtctacct

SEQ ID NO: 38418 - DNA, 426 bp, Oryza sativa
  unsure (1)..(426): unsure at all n locations
tctacaacgacctgcngcatgcatgcttaactctggtatcatcatgaatcatctgtcttattatatgattttcattcttgcaggcacataagaactatatgattatggatntctcaataccaacatccatcattaaattaaggtctacttctatgcaaacatctaccaagatagtgttcttctaaggcaaaatgctgtgtgaaataacggtatgatcagatttgttttatttcatacaaacttcaatacacatcacgatatagatgagattatcacatcaatgagataatcaaatggaatacaagtccatagctactccaccaaattgagaatatctttttcacacaatgcttgccggctgccgctggtatatgctgtctgctggatatacgtacgtctacaatgtgcgtgctttctgccgaactt

SEQ ID NO: 38419 - DNA, 393 bp, Oryza sativa
agagcaaacacttatagtacgaccaccgacagcgccaacgactgccgccgccaataaggactgaacctatgctgacgctccactgagctgacaaccagcgcagaacactgctaagaacaaccctccacgcaggaccttgccgaaaacaccagcaaaacagcacggaggagccacccgcgccgacatacgagagaacgccatcaaactaggcgcgagccgaagccgacaagacgcatgaccgcctcccaaccgccgagcgacccgagtgctacgattagccgcctccccgaccaacgcaactcagcgaaaggccaacgccaccccgcccagaggggtggaatccaccgaacgagaacgccgatcgccaacagcctgaaccaaccccgagcatca

SEQ ID NO: 38420 - DNA, 404 bp, Oryza sativa
  unsure (1)..(404): unsure at all n locations
cacaacaagcaaggccttacagttcagctgaattttttaaaaacttaccttcaataaacaaataggccgaattttttgaattgtggatgcatctttacatttcggaatcaaggtaatgataccatagtttaaccttgcaatatcaaatctaccatcatggaagtcatcaattaattatttcaaatcagatctaatgattttccacacaattttatagaattcaatggggggaaatcccaattcgntntgcttttaccaacaagatgggataatccttaggatttcctttcttccaattcatggatattggagctcgttcactgctgttctatgcttctagacgtangagaanacaacctataaaaactgaccttacaagacgttacttcgatgacacgttacac

SEQ ID NO: 38421 - DNA, 363 bp, Oryza sativa
acactaatgtgtatgtagccagctacccatctaaccacacggatggtgattaaacactgaccccaacccacaaagattcaatcttttcatatcatagcacagtcgtgcacgtacacacacttcgtgtgcaacatgcctgcttaagacacgctaattgcctaatcgatcacctgataagcattttggtgaccctaattaggcatagggctaactatcctgtcaagcacggcgagacggcaccattatttcacgagaaaatcgagaagaatattatatgggaccccatctaacataatgccacgcgtacggataggatatcactattatgaacagtaaaagtacaagcttgacttctcctgtgac

SEQ ID NO: 38422 - DNA, 496 bp, Oryza sativa
  unsure (1)..(496): unsure at all n locations
gaacattatattatcacattgccatcaaaaacagttatttagtatcacactcataaacactggtgtaatatatgttaatgtgacaatctcgccacatttatcacacgcatcacactcatatacattttagcaccacttacattggcgctaagatattgtccgatgtggcaagattgtgacaatgtgatatcggtgagataatataatgtgcttcagcgaacatttgcaggtatgggtgtatatatgggcccagaaagccaggcaaggaccaacaaagggtggttattggttacccacatgaatgctatggattcattcgaaaatttcaaaatgtatatctcanactcaaatgtggattttgttttttcatccgataactagcaggctaccggtaataaaaaaatcatcaattactatcatcttaatatgatttcaccaaaggccgtaattntggaaatagtagaattacggtcatgggaagcttcaacttcagtat

SEQ ID NO: 38423 - DNA, 480 bp, Oryza sativa
agcttaagcctagacaaagagggtgcgaatttatctcctcgttttattctctatcttcacttctctcttctttatgttgatgtagaatttatagagtctgctgactaaacttattttacccgctctaacaaatccttctcatttaacagttcgggaaacgtgcgcatgaaaaatgaggtagtagaagataaaaaaaagggaagttccaaacacacagtaaagcatgatgtaatattcagcattcagcaattgttaagtcttccgacattttttagatgaaccgttgtgagaacacacagtggaacactaagcataaaagtggacatcaactatgaaattttagcttagtcacaactagctgcatcttatctctcctggctctggacaagcacatgtcgctatggcattcccagaatcaattatgttatagtgttcggcgctctgcatggttagctctactgaacataggcgaacgtatcc

SEQ ID NO: 38424 - DNA, 419 bp, Oryza sativa
  unsure (1)..(419): unsure at all n locations
gagcttctgacatatacagattctttcacaactaaagctccccaacaatccatctttttatcctgattctaagtatttgtagcagtagaattcacaaaataaagtataagctaaaatctataaacctagctttttagattttaagaagctggctaccaataagttactttttagaatcttatggccggctcagagaacttaagattatgaggaacaaagctagctttcgagaatctgaaaaaactgggtttctcagnttcctacttatagttcattatcccgcccaacaacaagccctaccaaacatccatgatatcttactccctccattccatattataaattcgctcgactntttttagtcaaatttctttaactttaatcaagtctatagagcacacatattataaagaatatat

SEQ ID NO: 38425 - DNA, 466 bp, Oryza sativa
  unsure (1)..(466): unsure at all n locations
tggaggtctcccgacgtggctgatccccacgggctgggtgatctctgttagtaatgacgngtgggtaaagtgtaccccctctgcagaggttaacaaactgttcgaacagccgtgcccacggtcatgggcggatgtgaggtgattcctagcgtagttttgtctgactactgcttgtgaaattgctgttgtgaaactgggttcgatgtttgaaaaatcagcagctgacgggatcagctatgcccgggtggccgtttgaaaagatgttggcccgggtggccgtttgaaaagctgttggccgggtgccaaccctttttcaagatctaaagactgatacattgcacatactccgaccggacgagacgcactgtctcatccgtgtcgtttgagaagcactcatttatactttntagaaaagagttcatacataatcaattacggaaacaacagcctttccttgaagcctgca

SEQ ID NO: 38426 - DNA, 376 bp, Oryza sativa
  unsure (1)..(376): unsure at all n locations
tcatcctcttcgccaagaccctggatgatatgcagattnctcgctccgagctaaaaccaagcaatgcgccttttcacggagtgatttcaggattatccgcaactccactcgggcagatcaccctcccgggcactttctgcactcgggaaaactttcgcacacagaatatcagcttcgaagtcgctgattatgagacagcctaccatgccatactcggacgcccggcgttagccaagttcatggccgtcccgcactacacttacatgatgatgaagatgcctggctccgaggagtgctatcgctacggagtgacgtcaagcaagccgtcacatgcgacaaggagagttgcgacatggcttatacccgcgagatggcg

SEQ ID NO: 38427 - DNA, 428 bp, Oryza sativa
ctatgaaactaagcttgcattatgaccactggtctagaccagggtgtctttttttgtggaccactctgcatgatgatctagcggcaaactgattgaattactgccatctaaatactgggcgtgcacgctgaacagcttgatcttccgtcagtcacttctgttcgttagactgatagccaggggccgcgaagatatgtgagctcttgcgtgatcttagaacctgccgggtgtcgcgttttcttcttctcgagtgctttgtcttcgcagtgtcttcgtgcagcttgggattgatccgcaattgttgtgacgaacaatctttggccgtggtgagtaggaggtgggcattggagtatgatcttgcaactgttacctcaacgcttctaaagtgatggcgtgcacagtcccagcttacctgagcctatattgtc

SEQ ID NO: 38428 - DNA, 456 bp, Oryza sativa
  unsure (1)..(456): unsure at all n locations
agcttgaataattttctcgaacgcactgtatatctacttataaaaaagaattcanaagaacttacaccagcccattaaaatatggtttaagtataaaatggattggcacagatatacaaaaggattacgaccatatatgatcaaaaactagtagacctctggctcccgttgattatacaccataatttagtctcatctataatatcttgcatgatgatattgtaattaggtgaagtcacttaaaggaacaacatataaatggatgtcgctaagcttgattattagtgatgttggttcaggttgggttacttatctcccaccaaaaaaagagagagctaatttgtgtggatgtcacttcttttgtgttgtcaaatgggaattgattgtgattaagatgtcggtactattgtggaaagtactgacatgatgatttgctgttanggctggattatgata

SEQ ID NO: 38429 - DNA, 458 bp, Oryza sativa
  unsure (1)..(458): unsure at all n locations
ctcagcttgcggagtcaagggccctaatatgccgttctgtttttttggtgatcacaatgngaaaggaagaatcacttctgtgcttatctcggagctggaacagattatgacaggatcaggatggggtgaaaaaaagaattaaaaaaagattangactgaagtgcacgttgccatcgattccgctggcatttgcagcatgtttgtgcagtataattaggaagaataatctgatatctaatctgggcatgttccaaacagcttatggatatatggatcattcgagctaaattggtttattttacaaacgtataacttctcaaagaaattctgtatcacataacttttctatgatatttgttagctggtatgtaatttttaagtcatccatatgaagcaatttcctttgaccataatttatccaatcattccattagactggcgttgactaaatatatatc

SEQ ID NO: 38430 - DNA, 450 bp, Oryza sativa
tgatgcatgcacgctctcgcgatagatgatattgcacgaccggtctatctgctgcttattgccccattcgtatgagattagccttctatttctttattagactgctacaacatctttgatttagcaagatagctctatgtttttttttaaaaaaaataagtattcgtcgccggatccatgttttgacacaaaaagagtattcgacggaccgaatctatgttttggagaaaaaaaagtagtcaccggatagttcacgggtcatctcttatgtcaaagcctatattttcaaacgagaatatctcttattaataacacacttgctctcttgctagtcataaaagcggccgctctagactattttgtaagtcaacaagcttgaccacctacaattctttacaaaaatccaaaataagtaatatatccctattctaacacatcacattattattt

SEQ ID NO: 38431 - DNA, 466 bp, Oryza sativa
  unsure (1)..(466): unsure at all n locations
actcagctacacaactgcaggcgcttcggtctcccaggctcacccgttgaatctacatctgctgcggctttcagctgaaagctatagatgaactgatcagtgtgcaatcgggcttgaatattcgggtccactctccgaagagggtatgctggatgaccctgccgatgtcacgttgctgtgtgaaccattccttgcggattttggttggagttccatctctctttgcctctctggggctgcaggtctctgcccctcattagctaatctcttcaagatgttcattatcgtgggaacgaatattctcgaaagtgataggactgctggaagctgcaacattgcacgcataaaaacaagtatcaggagagaaactctntaggaagcttgaaatatatactaatggcaatgtggcttcaatacttacaaatgcatnttggaactcgctggcaatgtctagctgtacccacat

SEQ ID NO: 38432 - DNA, 484 bp, Oryza sativa
  unsure (1)..(484): unsure at all n locations
agctggtagaaggcagagatggaggtgatacgacatatggtggcatggcagagccggcnggggcgctctctcctccttctnctcctcaccgccagctctcttctcctcaaccgctccgccttgaggccgcatcgtcgcttgtcggggcatgctagcacctagatcttggcccaccaaaaccgtctacctgtgtcccctcggcccttgctcgagctcattgccgccatcgccgtgtgcccgtgtggggaaaaggagaggacagatccgcgagatattcttttaaaataattaataaatctatctaagttataatagttaatacttactcatattnttccgcggcaaaataacctgaatttgtcagccgagcctaacataccctatactgtatgtgccaatggtttaatcataacagacgtgatacaagtatgttgggaataacggattgcgtgtcctatgatactggaacactacaataccttat

SEQ ID NO: 38433 - DNA, 470 bp, Oryza sativa
  unsure (1)..(470): unsure at all n locations
taagctngatgtgatgaggatcccgatccatcggaanatgcacatcgttttgtgtgntattctcctacagccgaagtcaacaagtagtttgntgtcggagaatctatctcttaaacccatcttgttgaaaccttgaagcaccaaaatcccctacgactacggtatttgcatggtatgaagattgttggtaccacggtttatgcgagattgaagtaaaagagacagagacaatgattcttatacaccgttgggcccctacttcatcataatcatgtaatagccctactcctattggccgaagccggtgttgctcttaattcatcagaatacacaagtacaatatctgggataacctatctagctatcgtcgacatggcggcatgaataccaacacgtagccgacgatagggtagtcttcctcctcgaatatgaactccgcgagatcagagatggcgctagatccctcttgg

SEQ ID NO: 38434 - DNA, 467 bp, Oryza sativa
  unsure (1)..(467): unsure at all n locations
agcttcagccatganattctgcaagagatgctgctgtttatacgatgatttttttctaaaaaaatataaataacaatcagtgcaggactgtagatagccttctttgtctgagctgggtatcggtaagtttttaagttcaatgattttgattaaccagtgaccatcattaaaatgaggatagcctgattatcaatatgaagatatgaacagaggatttccccccaccacttcggtataataccgagtagatctctccatacacattttgtaacaattgatgaaaaaagagctgcgtatgtagtggtttatcctactaataatacaatccaatgagttaccgagtttcttctatgcagcacttctatctaattaatgcaagaggtagactcaggaacatcagactcgcaaatagatcatcagcatattataatatatagccaagatgcaggtcatagacagtgtgataa

SEQ ID NO: 38435 - DNA, 422 bp, Oryza sativa
  unsure (1)..(422): unsure at all n locations
ctaagcttgacgtcctgtcagcggacacaagatgctggctacacttagtttatactctgtaaacaatcatagaaggacttggtgacaaaagagcctatctggactaactaanatcatgtatatgtttgagctcatacccagatctgcccataaagaaggttagtccatgtacttgggtttttgaacatgaaaatcctagttaagatgctgcagagaaaagaaactattagcagcaactgagatgtgaaaacacatgctgaagctctaaaacaaagatcatgtgaagatagcacacctcanatcccaatctcgctttatatcccagtaaaaggaatacagcgaatttataacactggacataagccagaggggtcgatnaaagctaacccacttgtcacggaatacatgatacttgagagctg

SEQ ID NO: 38436 - DNA, 381 bp, Oryza sativa
acacaccatgagtatgatgtgatttctctatctagcacacgaatcttaaagagaatcctacagatcaaacaatcaagatgatttctttttgcttatttttcttccatcccgattagaacagcagatccgtttttagatgaacagatggccaccttttacccgctttaaggattgagattctctgcattgtaaaaaaaaatgcagaggcggtactggatcttgcattggctcatgttctatgcgatggatcttcatccaacgcgacaaatcactacctacagtaactagaacactgctgctatagtaaccgtgctactgtgataatgcacaccactgtagtgacagacttcaatgactgtacaaagtacaaacgtgttctct

SEQ ID NO: 38437 - DNA, 493 bp, Oryza sativa
gaacgaatccatggcggagacggtgctgagtatgtttatgtcgctggtgggcagtgccatcagcaaggccgcctctgccgctgccaatgagacgagcctcctgctcggcgtctagaaggacatctggtacgtactgcactgctctcgtttatcctagcaagttcttatgctcttaatctcgaaattgaggaacaccatgaaacactataagagagctcgaagactatgaaagaaaactagaagactaagctctgaaagtcttctaaatccaagcatctcgacattgatcatccttgtgcaacatcatcccttcctattgcttcaccagaatcggtgtcccttgtggagatctctgtcgtaacgtctaagggagaatcccagaagcagaactatgtcgcgctgccttcgctacgccatctccgccatagaggatctcattcacgaaacattcaacatctcaacgtggatactgttttatacactctggttgatg

SEQ ID NO: 38438 - DNA, 344 bp, Oryza sativa
tcatgacaaggcatttacattgtcgtcactatgttaccatatgccgacgagaggggtcccagaccaacaacagggtaggtcccagaccatactgtgccaggaagcccaagggttctccccgacaccaccccggcgaaaccacatgtctctcggcatctaggctcctctggtaaactaattccttagccagtggtgtcccattccacccatgtggcccgacttgtcttatgtttggatgaaactccaaggaaacggcccttaagtgcaagagcgggaaaccgcacacccggtacgttcccccggcccgggctctggaatatttatttagttcacaagcaccgacc

SEQ ID NO: 38439 - DNA, 397 bp, Oryza sativa
tcacaggtatacttcattgtaggaattgcagcaacagcctatgtttccaacccactgcgggaatgctctatctgaacaataaagaaaaatcttgcatttactttcaagtccaaaatgaatttatagggcgtgttgactattgattcagttgatctattcactaactaatttcatatgagctcaaacgctcaacatagtactatagattcaatgcactgttttatatgtagtagtactagctaagaggaactactacaagaccactaactctgaaagaaagatgctttgtgcagttggcgctatacgaacttcacgtgagatacattatactattattattgaactgatggtactcagcttattttgtatatataggaaatgatccaaaagactaaca

SEQ ID NO: 38440 - DNA, 480 bp, Oryza sativa
  unsure (1)..(480): unsure at all n locations
tcattttcatntnctcgtntacagtgcacaacgatcgttttattattatggcaagaactagngccatcacaagagattgcccttttcctgttcacacgaatctgactcgaaccatgccgccacgacaaatgcaggcacggaagaatctcgctctagatccaatcttttccttcccaccaagaagtactcgatctccaagtcgccatcggtcaatccacgagatccctaaaacccccactagaatttcgcaccagcaactaaactagacgacgacaacgacgacgaatgccatacttgccaagaacgaagcaacaaagcaatgcggcggcggccatcaagaaccgacacgaacggtgcacaaacccacattcaataccaccaagacttcacccgggatcgagtaggtcaccgacgtacctcggaagtagcggcaatgggcggctccctctcccacaccggagcccttctcgcttctctccc

SEQ ID NO: 38441 - DNA, 386 bp, Oryza sativa
  unsure (1)..(386): unsure at all n locations
aactaagcttccaacagccttaactgtacgctgccgcatgccgatgttttaacttgactatgacgcntaatgactccatccatgaaatgagcagagaaagcatgaaagcacccgccaatataaacagaaacacgtgtcccctacattgggggagagagccaatgccatagctatcttgcatgaaccacaatgtcgaattgacaatcgttaaaattcaagtgaacgtgcgcccgaccacattacgcacaacaggaaccacaagagaatctctaacaaaaacgagctcacatgatatatactgcatcactctggaaaatattagccgagaagctgatcatctcccacacattcagtccatgagcatctgatgaagttctgacccattt

SEQ ID NO: 38442 - DNA, 451 bp, Oryza sativa
  unsure (1)..(451): unsure at all n locations
atccttaagtcatctgaggcatgcaagcttgtgccgttcaacacggagtacgaggtactctttttgctgtggacagagagcaaggacgcctgcaatggcttccgctgaattcgcatggtcaacaacacccgactcagcttggactccttccacagcgacaatgaccatggtggagcacgggacagcatcaccgtcatgctatgcgagtggtgcaatggcaacaaccagagctggaagatcctcccctggtgccccgaggatcactcctgcttccccggagccgccaccgnctgcaccatcggaggagtcccctgtcacaccgtccgcgtcttctacgccgcaagcgaggactactgtctcaccgttcgcaacggcaccgcctgcctttcccncaagaaccccagggacgactaccacgtacgtattctcctcttaattatatactactatt

SEQ ID NO: 38443 - DNA, 257 bp, Oryza sativa
aaaacccccctgtgcaaacacgtgttttttgaaacgctgcgccttcccttagaggaacctgttctgactcggtaaatcaggacatgagccattcggctttgcgacctggaagtacagctgctcttaccgaatgggcattgtcagcccgtttagaacaactgtaatgttatcgcttcaagcagtgcactgcgactttgaatttggatgcaacatagtgagacttgaccaacctttttagatgactcattacaaagggt

SEQ ID NO: 38444 - DNA, 394 bp, Oryza sativa
  unsure (1)..(394): unsure at all n locations
actgatcgaagttcgcagcttgattgttatatccaangacatattttctaaggcctactttgcgatctgcccatttgcttcacgattatgaagtatgtccccgagtggaaactatgtgaccaccgtgaccgagtgaccttagaagtaccgagatagtttcctgacggtaattaaaacaccatataatagcttttgaacctgaggatatcttgtcttggaatcagccaaaacctcgctaacgaaatagattggtcgttggactttttcaacatggccttcttcttcacgctcaacaactaggactgtgcttacaacctgtgaagtcgccggcacatataacaacagacgctcttgcggatgtggtgaagctcttgtggagtagtgagaaagtttt

SEQ ID NO: 38445 - DNA, 478 bp, Oryza sativa
cctcaccaagcacaagtttttactggatcttttcgattggcgacactagaaggtgacgagttcgaatgtcttcatcttttcgattgtcttcatcttttcgattcatggaacgccgcctctctcaagcgcttctatgtctagaatgggtggcacccacatcgccaacttgtaaaaatgtatatatcgtcatgtaagcccttcagcactatgtaagcccttcggcactatgtaagcctttcggcagaaaaaaaataaaaaaaagagacacataaaagggaaaaaaactggatgtacggctattatccaccacggaggcccgaaccagtataaaacctctgtgtcctctgccttctttttattctttgtgtgattgataatatgtggaaaaaccccaatgccaacgcctgatcagtcgaaaatgccagtggggcgaaacgaatcggccgaagtatcgctcgccgaacgtggaaaccacaac

SEQ ID NO: 38446 - DNA, 481 bp, Oryza sativa
  unsure (1)..(481): unsure at all n locations
agcttgctgctganaaagagtatgtgaactatctctccattgcttcactcgctagtgagaatgtacctttcggcatattgctagggcaatgtaattaccactcgctgcatactatcatagatgatagagcttgtagtgctctcatagtacaataatgtgtatgagccccatcggttggcctaataagccaaagcaaaagcatatatttgaattttcaaacttgaatttgaagttgattntaagatattntcaacgtaatttctttttagcattggtttttaagttgctaggaacaaatatataacaagtttacctataaattaactnttattccctaataagggaatatgggcaaccaatgaggctctcatgacctctatcggcagcatgctatagcaccgttgnttatggctaccatgtacgaagtagtaattactctctccgttcacaatataagtcattttagcatatcccatattca

SEQ ID NO: 38447 - DNA, 379 bp, Oryza sativa
catacatgttctctggtctacatatagtatgagcactaggttatgttaatttgcgcacataatgatagaccagctgcagttactgtcatatgctattgatgcgctctattaaaaaaaaaggaaacttacatcaatacaaaggagctcaactgatggcgcagcttcaaggaggcttatcgtccataacaggtcacattctacatgaatgcacagaatagataacttctctagattgttgaatgcagggcgagagctgttctcgttcaggttgcattcataactgaaaaaacaaaaggcagaaatgaagcacgtgagtgattgccaaatatatatgaatacattgcacaaacaatattactcctacataataaaatccttg

SEQ ID NO: 38448 - DNA, 350 bp, Oryza sativa
  unsure (1)..(350): unsure at all n locations
acttaagcactgagctgcactttatatttggctcgactatttgtctttgacctcncctacagcatcgtcaccgcagtagagtttaaccaccaaattcgggatggattggtgtggttcctctacgcctacgacacccgaatatctaaccatgaacgaggaaaggcatgagagaaatattggctattaattgtgaagccccaattcttgactggaagggacaccaaaggcctctgccctncctctctatctatccaagagatggaatggcacagctcttttttggctttttcatctcttcatcacagagctgaacaatgaagatagatggcaagtgcctgatcgatttgatc

SEQ ID NO: 38449 - DNA, 476 bp, Oryza sativa
  unsure (1)..(476): unsure at all n locations
taacacctcttatttgactntntcactactttgaaatacgaatattatccaaatccaaaatgcaaaggtcgtcttattcaaaacctcaatcatcacattccctctctcccacttcacacctcggaacgcactgttcttatagagagaaaggggcttttccatcttcttaacccgaaatgaaatggctgaggagagggaggttccttttggggggtacccccgggaagagatccagtggagacggtgtgggcctgtagctcaaatgattagagcacgtggctacgaaccactgtgtcggtggttcgaatccctcctcgcccacagcctttcataggggaagggcctntacttatctcctgagggtaggaaaaccatgatcgggatagcggacgtaaagctattgaacttgcgtatgctctttccttccgtcgaagtggaatcgtagaacagaatgtgataccatgagactaaatgca

SEQ ID NO: 38450 - DNA, 430 bp, Oryza sativa
  unsure (1)..(430): unsure at all n locations
atctctaagncacctgaggcatgcaagctngcacaaagagtgcattggtccattagtgcatattaattcggaaatctgatatatttcttgagtaagatttactttggttatctttattaacccaaagttcacaatagaccaagagcagacctaactgtccaggacacttaacaccacatagcattaccctttntgcaccactttggactacggttcataatttgggccttcatccctgcttcaaccaagcatgtgcgagtttttcttttgaaaccgagcatcatgcgagttaaaagatctgtagggtagcaaacaaaaacacacaagtgcaatgatttgttgttgcgattgggtatttcacaaagggtcaagttaanaacacagagaacaatttactattttggtattcacactgacaaagggctttggg

SEQ ID NO: 38451 - DNA, 401 bp, Oryza sativa
  unsure (1)..(401): unsure at all n locations
tgagcgatcactcatggttgttgaaaaagaccaagctctttgtgtgcttcttggtcgcgaggtctgggtgaactcatacctcaagagctgctgtagtgccatggctgatgtctgtcgtcacgtgaaggtcaaccgcccgaagcccgaggagagtacggcatgctacttgttttatatgacggcggcgtgtgcccaactcgaggacataggacagcgcatcgacatcagcctcaaggaggagtgtcgttgtgcgaggcgctgcgctatgggccacgtccttgcttgcgtccaagatcatcgtccgcanatggatctcgggttcctgcgtggnggttttcgacgttctcggttgtcggcgcatgaggtcgaccggtctgcgcgatcgcttgcgcccctagccg

SEQ ID NO: 38452 - DNA, 441 bp, Oryza sativa
  unsure (1)..(441): unsure at all n locations
cgagcatgcaagcttatgggacgcagtgataatcttggcttttgtttgctcggtatccagccatattattcaaacagcaactaactgcgtgtgttgaaaagatttttgggcaacttaaggataatctgaaaaaggaaatatcaccacttcttagtgtctgcattcaggtacttgaccacttaaaaatctggatgactaatagatatgttggatgcctagatatgcccatacaccctctcccatctgaaaattttcatgtaggctccaaaatcatcacgtgcacagcctggaaaagcaaccaaatcacctgagattggtgctcaaccaccatcaaactcccattgggacaatattgtcaaatttcttgacctgcttatggacactttacatgaaaattatgtgagcattttcttaaactttntttctttatcaatggattta

SEQ ID NO: 38453 - DNA, 382 bp, Oryza sativa
  unsure (1)..(382): unsure at all n locations
cagctacattggtttccctttcggatacccgaagctaggttctttctagctgttcttaccttacacagcgttataacacaactccttgcttcaatatactatgcaaggtaggctaaagtcacaactactaagaacggtggaatggagggtgagagcgcgcctgcgaagcttgctctgaatggtgtcttcgttgttgtcaattgtgtgaactatttcaggacatcttatgaaatatttgtcatgaataatattctttgtacacccggtgtctactagtgctaatattntataagatactttggatgtcaattntattctaacaaggattcttatacctaatatttctttgaaaggcaatcttactatatatttatttccaaaa

SEQ ID NO: 38454 - DNA, 437 bp, Oryza sativa
agcatgaagctggtttctttatttacttaccttttattttgtttttctaactttactcaaattaatccaaaaacttgtgctattaattggataaatgtcttaactccctcctttcacttgtctttagatgccgcgctacaagcctgagtacttgtttggtgttgagggatttgtccaggagttgcgtacgatgtcctttgtcataagatttgggactgcccctttttatgcccagattcctcatgatcgtcacgaagagaagtgccgagtcaaagtcaccttgaacagtaatagtgaagatatcccctcagtgatgttcgaagctggaggaagaaactacatccatacatgtcaagaggtgcaaggatcgccataagagagctccgtgatcgctacagtgatcagtttgccgacactgagtatcgctaccatcctcg

SEQ ID NO: 38455 - DNA, 424 bp, Oryza sativa
agcttgtgttagggcgcagcctttagcctctcttccgagcacaacgaagagagcatattttggtgctgaccgacaattacctttcacctgtagtattactgatcgacaatgttatcttagttaagttgtaacttttagccttccatacatatggcgttcaaattattaagaaaaagaattacttcctccgtcccagaaaatatgtcgttttaaggaattacacacaaattagtgttcagcacaaatgactaaattaccctcaattattagattcagctcctatttgaatacagcccagaatgtttcacacaattacaactattgcagtaaaaaaatgaatcaaccacatactgaatgccacgtgggatttacagaggtaaaatgacgccaaggccacaatgaccatacaagagacagcaatcat

SEQ ID NO: 38456 - DNA, 407 bp, Oryza sativa
  unsure (1)..(407): unsure at all n locations
taagacatcgcaggtgtgcagntctcagcgtatctgtcatttattactgtacatacaaagcttctcgctagttaagtcttgtatggcgtttgtgcaatctttaactactttgccgatttgccgagcacaaatccctttgtgagaaaatctaagactgacaatgaacggtaatactagttaattgctgatcctttccgtcctttccaatttattcatgatcatctggtgaatgtgtaagcttgtattattcgagcatgaccagtgtctatttccccctgttgttatcggtttatatgtcacttgatttgaccaatatgcatgtcctcagatgttctaaatattcaacctgctacttgaatctatgtatgtaataataatgcatgctgcgaatagagcatgcatgactg

SEQ ID NO: 38457 - DNA, 426 bp, Oryza sativa
  unsure (1)..(426): unsure at all n locations
agcttgcattatggcgaggttccgatctgttttaattgttacaactaagcgatctaaaaaaggctttttattcgatccatttgcccggagactttagcaatgttcttgtggatctagaggacggttggatgactaaagtaaaagaaatgcacacctggaacaacatttgccttccatttgttgattctttntacatgttctacgacctcaaaatgtacgatatcaggattaaagaatgttgctcttaattgtcggcatcattctatattgtttaggtgtgacgactgacatttatatatctgatgatttgcaggtaagttctggcccgttaccatgatcagtttagcatgactgaccagacaatttaaccagtatgatcaaatcaacaaataaaatcttcctaaaaaaatcaacaaataaaggagc

SEQ ID NO: 38458 - DNA, 466 bp, Oryza sativa
  unsure (1)..(466): unsure at all n locations
tatagctaagagttgctgcggttntctgtgtcgctttgctgtgtctagatatacacatgcataggctctgtatagttcctatacaaaaattttacaccctgtcacatggaacatttgaacacatgcattaactattaaatataggctaaaaaataactaattgcacagattgtgactaatttacgagacgaatcttttaagcctaattgctccatgatttgacaatgtggttctacagtaaacatttgcgaatgacggattaattatgcttaataaattcgtctcgctatttattgacggattatgtaattagtttttttattagtgcttgaacaccccatacgacaccctatataatattcaatgtgacatgacaaaactttacaccctaaatctaaacaccctcatagtataattattcagaagagagatacagttacactactagctagtatacaggtagcat

SEQ ID NO: 38459 - DNA, 428 bp, Oryza sativa
agctttgtcaatgtgtatatttatagaacatgtgcaaatacaaggtgcaaacaatatttacagggtgtgctgaaaaaaggaaaaaaaaacctatggaatcttctccaaaggaggtaactctataaagccggtggccccagcttttgtccaggctcttccctcgtctttgatcttcactaaaaaaataaatttcttaaccactcgtcatcaatattacattcttacttgtatcttttgaaactctgcctactaggcttttgtctaggctcttcccttgtctttgatcttcactaaagaaataaatttcttaacccctcatcatcaatcttatattcttaattacttgtatcttttgaaactctgtctactagttgtatatgtctttttagacgcactccgtccagtcttttgtatggcattgatttaag

SEQ ID NO: 38460 - DNA, 384 bp, Oryza sativa
  unsure (1)..(384): unsure at all n locations
tgtgctcaatcacaactggtatcaccaggcagacgaacactattgcatctgcaaccctgaaatggcttcatatagcggagtggcttcaagtacttgatctgcgtaatatagttgaagagccctggtcctttctcactgctaacatcattgataagacacactgggagattatcagcacctgatgatagatcacggtgcaaaactttgcctctagcagctggaatttctacccatctctggcacatctatcagattgcaactgcatcacgctgtcctggctctcgctgcaacttgtactagaaacaaatgatcccagtctttgttcttctttcaggactcatgaatcttataaagacatcatagatatatactgntccagtcaag

SEQ ID NO: 38461 - DNA, 427 bp, Oryza sativa
agcttcccggtttagctcgcttttatcttttcttctgcattagtaatcttttctatttttgtaagacgtggatctgtatgtcaacaattgtcgtttgtgtaccctggctggtcttggacagggatttaatgcacattcagcttagaaattctggtttgagaatttctgggcgtgacacttactttattaattaagagggctaaaaatgctggttcattgaatggggtagtccctcacctagtggatgatggtttatctattttacagtatgcagatgataccatcatttttttggaacatgacttacaacaagcgaagaatcttaaattgattttatatgtgtttgaaaagttgtctgacttgaaaataaatcttcataagagtgaattattttgttttggtcaggcaaaagaatattatgatgagt

SEQ ID NO: 38462 - DNA, 480 bp, Oryza sativa
  unsure (1)..(480): unsure at all n locations
aaaaccagctgccttgcaggcagcgccgccggggacggngattgctattcttggtggcaacccggcgatcgcgcgcgcatacaacaaagcggcgctgtcacgatggtgagatggccaccaccaccaccaccacgacacccccccatgcatgcaacgcagaatccactcgagaaaacttgtgcgattcatccgatgatgagttctgtttcttctttttgtggtggctacggagtcaacatcatgctgagccggcggcgtgtgtgtcattagctgccggatcagcggcggaatctggacgccggcggngactgcgacaggatgaatccagcagctgttccgttcccaacctgtccgttctcgtgagcctctctctctatgcttgcgttcatgtgccctcatttactcggctcgtattgcacacgtacgctcttgtgatcatgcgttcatactttatttcgctgcgtttgacagttaattata

SEQ ID NO: 38463 - DNA, 343 bp, Oryza sativa
  unsure (1)..(343): unsure at all n locations
cctgangcatgcaagctgattaacatatataacttttcattcttatatcctgaagaaaacattcttacggtgtataaagttgtcaatcaaaccaccactagttatatgatgatggctacatacgcacttatatattggcatttaattaattatatgcaataatatgcagtagtactgtaagtgtacagttaatgtttaatttggttgtatggagatcatctagctaccataataagtacctatcatgaaaactagtatggtacaaattagttagttagcctattcttccacaaataaatggtgcaagaaaccttgtaattttgtaacaagctagaaaaaaaaa

SEQ ID NO: 38464 - DNA, 397 bp, Oryza sativa
  unsure (1)..(397): unsure at all n locations
cattaaggatattcatgcgaatcacatcaatccataaaaagaactcctgcaagcacaacaaaaataagatatctctttttaagcctagtaatgtaggtcttgccctctaatgcgaatcagatgttcaacaaaaaatattagccatagaactgattcagcaacaagtcactgacttgccaaaacagtacctgatgtgcattgtgtattcttgcttcattggaacaaattaattataatattgatgtacgagtaatatttntttgtttctgaanaagttactacccaatacaagacgacagcagtcatgtcaacaggngaaaaagaatataggaaagcgtatacctatcttctagtaataccgtcatgctaacttattgaccattatgtatacctatta

SEQ ID NO: 38465 - DNA, 413 bp, Oryza sativa
  unsure (1)..(413): unsure at all n locations
acctctgagtcacctgaggcatgcaagcttggatgctagtttgctacttatcaattcttttattctcagtaataattatcaggccgtgcggttagtcagttaccaccgttggtaaaaaatagatgaaggaaagttactacctttggtacaaaatagatggatacatgcatgccgtatgagggagaatttactagtatttgccactctaccaaaatactactagtgctcaaataccactctcctaaattttcattcccaaatagtaacttctcccgggaagtttacatctatggacggaatacataacatcgcgtagtcttacattggtgacacgcccacagtacagcaatcctttataaagaanaaaaaaacaaactagtaattcgaagccatctgcacaagatgttacaagc

SEQ ID NO: 38466 - DNA, 474 bp, Oryza sativa
tcaatctgtatacaagcagacagctagacctgctctcactctgtgtcaccacgcgcgggcggcacaggaggcgaaacctagccctgctgccacccctttccccccttcccccacctcaccgatggaaagcagggcggcgatccaacatggtggtggtggggcctaattgcggcgggagcagacgtggcgccgagtagcattggcactacaaggggacagccggcgcggtgcgaagatgctcaactggcggcggctgttcgcgagaggccacgtggaagcatgcggatgctggtcgggggtctcggtgcagcagtgtccacgcactgacggaggataaccgaacgtggagcaatggagcattagctgtggatcgactatggggcgggaggcgggatgcgggtgtaaacctatcttaatcttgccagactagcaacaactgcgtttcaagacgcgtttttctctttggagcattat

SEQ ID NO: 38467 - DNA, 424 bp, Oryza sativa
  unsure (1)..(424): unsure at all n locations
agctttttcaaacttttccattctttgacgtcatttacattngctttcgngtgtatcacgattcacagtgactggaaacggtgcatctgcagaaagatttaagagaggattgggggattaggggatgggttagagatggcaagaatggattgacaacaactttcggtctggggagaaagaacagggaagcaacatatgcaaaggtgaaagctaagtcaaaatgtatagtgaaaaattcagtggtgtgatactgtgattagcttaagcatctagctgggagtgcttgattttgactttttgttttggggggtagagatggaggagagaggtgaatgactaattataaaaacctacctttttcagattgaagcaatgttaaactgtgggtttaaacaactgaactagaggtgaggctggtcttttt

SEQ ID NO: 38468 - DNA, 468 bp, Oryza sativa
  unsure (1)..(468): unsure at all n locations
ttcttacgacgagaacgatctctgacttgagcttcatcctttatgttctcgatcctgcgtgactggcgacgacccttagtatcaactaataaatctgagtcatgaacccaattggcttgccctgtaggaggacgagtgaaatcacacacgggacgcctaccacgcaattgaccacgccaagatgcctcccacgattcctttctaaagtaaggagaaacaaaaatgtttccatcaacacccccttttgcggaagcagcaagaacatgggaacatggccgatgtaacaggtaatgcttgttgcaattgcatttgcaagcgtgatactctggccacaacgtgcattccaatgtgatgtcagtagtgccaatgccgacaccactcttgtcacgaagtcgtatctcatattacaactcttctattcccagcaggccacactctgtggattacctccttntactttctcatcat

SEQ ID NO: 38469 - DNA, 349 bp, Oryza sativa
agcttggccactcctagcagctcctttgtttctgacgtcaacagcgaccatcatggctgctgtgttagcacccctgccagcaacgttgcccaagaggtaaacaacatcatcatcgatgcaactcaaggccgggtaacacaaacgcaagcgacctatggacaaggaataggttgccccttgaccttgagcctccttcctgtgttcatcaccgctgttgctgagcatgaggctatgaagcaactcgtaatggtgacttgggttggtgtcaagatggacttcacgcgattcacaatgcaatcacggcgccagttcgtccatgaagtgaccgggataggcatgcttcatgtag

SEQ ID NO: 38470 - DNA, 341 bp, Oryza sativa
atttcttccgtcttaacaaccctgccagcagcggtgcccaagaggtaaacaacatcatcatctatgcaactcaaagccgggtaacacaaacgcaagcgacctatggacaaagaagaggttggcccttgaccttgatcctcctccctgtgttcatcactgctgttgctgagcatgaggctatgaagcaactcgtaatggtgacttgggttggtgtcaagatggacttcacgcgattcatcagtgcagtcacggcgccagtcggtccatgaagtgaccgggataggcatgctccatgtagtgattcttcacgaaccagagtggaacacggagcgtcgccgtgt

SEQ ID NO: 38471 - DNA, 399 bp, Oryza sativa
  unsure (1)..(399): unsure at all n locations
agcttacaacatctgaatatattactcaaccaactntactagcacaaaatgcaagacgcgaacactagaaccaaacttagacagaccacaccaagtgtcatttgaggcatacaacaaaggcctccagaatctagcgtaagatctctcaatgcatagcttggttttgctacaaaatggtattcaacgccgccgggagccatcctcattccccagtccaagggatttctgtgcattggcaattccctcttcatctgcaagagatgcaccaaaagatttaacaagaaacgaanaacaaattgatgatctacacaaagtggtgggttttgtagaagtgggctagatgcangtatccctgatttctacacatattatgctgctatagtatactactccttccgt

SEQ ID NO: 38472 - DNA, 419 bp, Oryza sativa
agcttcaagaagagaagggttctatgtcttttctttagtactgcttatcatccgcagacagacggacaaaccgaaagggtgaatcatattttggaagacatgttgagagcttgtgctttagatctcggtggaagttgggataagaatctaccttatgcagaattttcgtacaacaacagttatcaagctagtcttcagatggctccttacgaagcactgtatggtcggaagtgtcgcactccgcttttatgggatcaaacgggagaacgtcaggttttcgggacggatatcctgagggaagcagaagaaaaggtgaaaatcattcaagaaagattgcgtgtggcccaatctcatcataagagttatgccgacaatccgcgcagagatttgagttttgacgaacgagaatatgtgtacct

SEQ ID NO: 38473 - DNA, 458 bp, Oryza sativa
  unsure (1)..(458): unsure at all n locations
ntgatagtntccatcagattcaaatacttagttgcgtctatacaagtcggttggtgaaactaaccaacgggtgaaatatcttgctattctaacccccgccgagttagtccgctcttactccattgtgcagaatgaggaggcgattgtctcgtctgttcaagggatccggctcttcatcaagtcatcaagacgagtctagtgctcgttcatcagccgatgttttgatggaggatgccaacgctccgcgatgtatcctgaacgacgccgacctcgaccttgtcgacgatcgggaaaggcaagcctactacatgctgagtgatgaggacacaactagctcggatataaccatgactaccttatgtattaatcaaccaaaggtgcatatgttctacattagaattacatncgtatatattgaacaaacgttgctacacaatgagtttcctgtgtttttgctg

SEQ ID NO: 38474 - DNA, 430 bp, Oryza sativa
agctgcaagcttcttgacttcagctggagcctcattctttctgtgagcctaatcgctggcaatggaaccacccccttaccgattgacactggttcgttccgaggctggagttgtacatccttaatctgaacagggatcgcaggtgacagcgcttccttcggtggctgggattgtacatcctttatctgaacagggatcacaggtgaaagggatcccttaagaagctggttttgtgcatccttcacctgaacaggcatcacaggtgaccgggtttcctttatttgttggtgttgcacatcctttatctgaacaggcatcataggtttcggcccttggactgctgaaggagtaaaaagaggaggagctggcctgatgcgaaccggggaagccattcgaattggcggcgggtggctcatgagaggaggaagct

SEQ ID NO: 38475 - DNA, 486 bp, Oryza sativa
  unsure (1)..(486): unsure at all n locations
ngagcacagctcaaacttagtagcagaaactggctttgtcattatatcatctgggttatcatgagtacttatcttgcataccttgacatcaccttcaacaatcacacctcgaataatgtgatatctcacatcaatgtgctttgttctctcatggaacatctgatcttttgtaaggcatattgcactttgactatcacaaaatatattaatgcaagacgtaactccacaaagctcagtgtacaaacctctaagccaaatagcttctttacaagcttcagaaatagccatatactctgcttcagtagtagataaggcaaccgttgcttgcaaacttgccttccaactaacatcacatcctcctatagtgaaaacataacctgtgagcgatcttcgcctatccaaatctccagcaaaatctgaatccacataaccaacaaatccatctctagatcttccaaactgcanacaagcactagatgtaccacg

SEQ ID NO: 38476 - DNA, 427 bp, Oryza sativa
agctaaactgacagctacgattcgattgttgtgttttatagacatatctagaataggacgcaccatgtgattgcatgatgtgcacttattagagcaacaaagatctggttgctgctgcatttagttggtttgttcttcctagctagacatgcaaagcctgcatgagccatgagtttgtgtcgcagagatctagtacagagtacagacagagatgcagaattgcagatcaaccttgaaatgaataatcttttcagtgcactgcttcagttcagactatgtatcccccacatattgtcacagccatatgctttgtcgagtaattcatgttactatagcagatgagctgacaaaaaaaccacagtgtaactgtggaaagactgtaagtacagaatcagctcatagtgatcaagagcccgtgaatggcctt

SEQ ID NO: 38477 - DNA, 443 bp, Oryza sativa
  unsure (1)..(443): unsure at all n locations
agcttctaagctagaaccaccgctaaatgatagacgctcattcttattctactgaccaaaatatcatagcctcgtcggatcccacatttcctaataagccaaaacgatttattataaaataaaattaatttgtaggtaaaatttttatatattcgttcgtagcggtttaaagcaactttaaaaaaaatcatgttgaaaatatctcacaatcaactttaaaattaatattgaaaatttaaattttagtttttttttaacttattaggctaaccgacgcgacgaggctctcacccactctagctgactgaactctgcccgtctgccgtcctcacctcccgtcgntgcatgcgctagcagcaccactgccagtgccaaggcaacagacgcagcaaggccggcagtgatgaagaaaacgactactgctgctgatgctgctgcagtat

SEQ ID NO: 38478 - DNA, 424 bp, Oryza sativa
agcttggcacgagcatctaaattgaagcttttcttttatctgaaacagcccttctcttccccctactcacactctctgttggtagtgggatgtccttaagcaaattccttgcagagattgcttcagctctagtcatttcatcttgaagttgcccaagtatatctactgtcacctttttgcatgtagccacaccaattgctccaattttcaagagatgtgctttaactcttgagtaactcccatggataacttggttacaaaacctgcatctgaaccttgcattccctccttcacctttccctgtcttttccagcagctcaacatacctccacaagggcttcttttcatcatcattgggtggaatcacacgagcagcattcaaaatgctccttgcatgcccttccattgttgaaccactcccact

SEQ ID NO: 38479 - DNA, 449 bp, Oryza sativa
  unsure (1)..(449): unsure at all n locations
tgggagagggctacgagaagacaaagatggtgagaagactctttcatctagccgaacggttcatcccaagggaggaagctggacaatctcaggaaggctnttcaacaagtttgtgctgccttcgagccactaagtgatgtagatggcgaaagtggagatgatgataagggaaacaacatctccgatgtttgcttcatggcgcgtggtgaatctgacacagagtatgaagataatgaggtaagtgcttttgaggaagctattaatattttgagtgaaaaaaataataagtgtgagaagatgtatagaaaacaggaatttatcattgaatctcttaaatctgaaattgctagattaaaatctcttattcctaatgatgatgattgctcaaattgtgagggtttaatgaatgagatttctaaattagagatgttaatgctgcacatgatttg

SEQ ID NO: 38480 - DNA, 383 bp, Oryza sativa
agcttaaagataactcattatcatgaacatgtcttatatctccactaggaaacaaagtcatggaaatccatttatgcatgagcctaagagttggattatggatgtcattggttctaggtttcttacaaatcggtgcaccaaaaatatcttcccaaaatctgtttttctcaaaaccggaagttgccttctgaaaatcgactctgttttctggagcaatcccgaaacgtacgctcgggtgtgagctaacactcggtccatcagcgtctcgtaggcttgaggttcccgtccactaacaagatcaagatcggcgtcggttaggagtagcggttcagcacccgtatcctccatcggcacatcggcggatgaccgatcacttgactcgt

SEQ ID NO: 38481 - DNA, 471 bp, Oryza sativa
  unsure (1)..(471): unsure at all n locations
ctaagctntcatcatggaaccgcatacagtgagtgggttagcccattctatgttgtgccaaagaaaggagggatgttggtcgttgcaaatgctcaaaatgaacttatcccgcaacgaaccgtaaccggatggaggatgtgcatagattataggaagcttaacaaggctacaaacaaagatcattttccgttacccttcattgacgaaatgttggaacagctagcaaatcattcctttttttgtttccttgatgtgtattccgggtaccatcaaattcccatccatccggaggaccaaagtaagaccacgttcacatgtccatatggcacctatgcatcttttcaaaggtgtatgatgtccattntttcggatatgatcgaagaaattatggaagtcttcatggacgatttctcttgttttagaaagaccttcggtcattgtttgcagaatttgatnaggtctacaatgatg

SEQ ID NO: 38482 - DNA, 428 bp, Oryza sativa
agcttcgaccaggtctccagatgcagtctttttgtataagatgaaaacgatgaaagctgggtttggggtgtttgtgatttgtgaaggttgaaatggaagtgcaaaggtttcagctaaagccgtactgggtgcttgtgtagagaggactcagttgcatgggaaactgaaacgctcctttcttagcccttccaaattttttcttcaaacttccaattttttccatcacatcgaaactttcctacacacacaaacttctaacttttccgtcacatcgttccaatttcaactaaaatttcaattttaacgtgaactaaacatgcccttattcagtattaattgagtattaatatattggattgttccccttcccaagggctccacaaatttctggattattccattttttatttaattctttacatgcatgt

SEQ ID NO: 38483 - DNA, 456 bp, Oryza sativa
  unsure (1)..(456): unsure at all n locations
acatagaaactcaagctttgttggtatatatacttgggttgatatctttatgtttagtattatcggagtattagccgatacatgctagatctatctgatcggctatgctataaacatatataatcatgttattaatatatatttcgatctaagtgatttatactgtctcggcatggtgaccgatctatcccaatcacttgatttaagtatatattaatataagaactatatatncgtaatatctacagccgatcgaatagatttagttccttactgtctatttataaccgccgatcgattcatatatgacatcggctcacagataaatgatatgtcatcggcacctagccgatcggctattatttatagaattaaccacgaattctttgtctctatttcttgttgttacaggatcanatcaactggcacgctcatacattcnaaggtgagctttgg

SEQ ID NO: 38484 - DNA, 423 bp, Oryza sativa
  unsure (1)..(423): unsure at all n locations
agctntgtcaatgggtatatntatatatatatggtcaaatacaaggtgcaaacaatatttacagggtgtgctgaaaaaaggaaaaaaaaacctatggaatcttctccaaaggaggtaactctataaggccggtggccccagcttttgtccaggctcttccctcgtctttgatcttcactaaaaaaataaatttcttaaccactcgtcatcaatattacattcttacttgtatcttttgaaactctgcctactaagcttttgtctaggctcttcccttgtctttgatcttcactaaagaaataaatttcttaacccctcatcatcaatcttatattcttaattacttgtatcttttgaaactctgtctactagttgtatatgtctttttagacgcactccgtccagtctttngtatggcattga

SEQ ID NO: 38485 - DNA, 477 bp, Oryza sativa
  unsure (1)..(477): unsure at all n locations
tgcgacatacaagcaatccggatgaactgtacggtaagtttcctccattatgctgngcacaatcacaactggtatcaccaggcagacaaacactagtgcatctgcaaccctgaaatggcttcatagagcggagtggcttcaagtacttgacctgagtaatatagttgaagtgccctggtcctttctcactgttaacatcattgataagacacactgngagattttcagcacctgatgatagatcagggtgcaaaactttgcctctagcagctggattttctacccatctctggcacatcttccagattgcaactgcatcaggctgtcctggctctcgctgcaacttgtacttgaaacaattgatcccagtctttgttctttctttccaggactcatgaatcttataaagaccatcatagatataaactnntccagtcaagcaagctggatccttgtaccacgtcaacccggatcacg

SEQ ID NO: 38486 - DNA, 424 bp, Oryza sativa
  unsure (1)..(424): unsure at all n locations
agcttaaatcaaagatggctatatttgtggttcattttcagcataaagagaactgtgattcgcaatagtaaataataatagattgaaacggaatttttaaatcagtgagtaaaccataataatagtagcataaatatcatctagtatcatccttgtgtcgtccatggcagcaagcaagcattttatccttagcccacactgggcaaaaacatgatcgttacccaccatacccatttcacaaaccatgcattttagtatcaccaacactatacttgtatcctttcaccaagtcgctcatgaccgtgagtatggctaatcgattagttttagactctgcagagtttgtacaactttacccacatgatgtgatagaagccaaaaggctacactctagttgttntgatacccgtcggtaccctacact

SEQ ID NO: 38487 - DNA, 463 bp, Oryza sativa
  unsure (1)..(463): unsure at all n locations
tgtggcatcccatttgcgaccagtgacacagcagcgttcttgccaggtagaaccgtaggagccctgcttccttacagagggcagcctcatcggccgccacctttgcaacctcaatccaggatcattgttgttggttgaacacccggttattcctttccttccagatagatcatgctaccaggatgattaccatgtcgaacccacgctgccgaggccggggaactcttcctcgagcaaccagccaccaattgatgaaggaggtctcagccaccgggagacaatccaggcaaccaatggcattaaggataagccacganaattgaagggactctggacatgcaactaggatgtggtcgatggactagtagtgctggtcacagagaacacagcgggctaggtgggggagtcctcttgcagtcaaccgatccgtcatccagcatttgtgatgagctaccagtcatcc

SEQ ID NO: 38488 - DNA, 398 bp, Oryza sativa
  unsure (1)..(398): unsure at all n locations
agctntgtatacgtatacgcgtattcttactttttatatgtgatattttttctgggttttttttccaattttttaatatgtagatatacaaagtttgtatgtgtagatatacaaagtttgtatacgtatgtatacaaagtttatatacatgtatatatttttatacgttaaaaatgtatacatattaaagaaaaaatatattttatatatacgtttgtacatactttatatatatacatataaactttaaatgaaactgattagtttggcaatgatattatacaaatgttttattggcacaatagctataagagataaacttaacacaattaccttacacggaacaattattatatatatgcatgttgtgttacattttgcaaatgagctatagatac

SEQ ID NO: 38489 - DNA, 408 bp, Oryza sativa
  unsure (1)..(408): unsure at all n locations
tgctgtcctccgctgcacccgctgtcctccttacacccgccgccgcagagacgtcgcggccgacccgctgtgacaccgcctcccgacccctccgctgccgcatgccaatctcgggttcagccactgctgctgtccaacgcttgcgcctccatccctcccaacaacctccgctggcacgcgcggccttgaccaccactgcccatggcccctccgcctcccacgtcgctagatttgggggctggaacccgcagacccgacactcccctccgccgcaccgaggtctcctctggaaaaccccgtcgccgctttcctcacagctgcactgctcaggtggtggcaaggccatgggaagaaatgagataccagatatggngaaaaagccgaatcaggccagtagtatgaccatat

SEQ ID NO: 38490 - DNA, 422 bp, Oryza sativa
agcttcatatcacactgcgttcgttttatttaattgaattcagacacaaagttgagcacaacccctactctccatgcattgccacaccagaagttgaaccctcagtgaacttcagctccatcctgtctccttgtagagatacatggtgtgctttcctctttcttatactctgattccacttaactccaacacctccatacaattccttgtctgatctctcacctgaatctcccatgtccataccagaattctcaatgacctgatgatcatacaatctcctgtccctcgaagaaaacgccgatggtgaccggctccaacagatcatggcaagaacaaggatgataacgtagactcagagagacacccacacacataatgtccatttcaatgcgcgaaccagctcttatctccatggaagcgtc

SEQ ID NO: 38491 - DNA, 168 bp, Oryza sativa
  unsure (1)..(168): unsure at all n locations
aaaaactcaagctcangatgcctggaacgggagagagatgttcttttgcatgcgagatgccagcagagcaatgtagcgcccaggctaccctcccaatatattgtgatgttatgtctatgggaaagaatgcacaccgaccaatattactcgggagtggaaactggacaa

SEQ ID NO: 38492 - DNA, 421 bp, Oryza sativa
  unsure (1)..(421): unsure at all n locations
agcttccagcaacagntaatatatatttattttctctctgnangacaaaataaagaatgaacatttaatgacacatttttttgaacggtacatttaatgacatattgcatcctggatgtagaggctggggatgtaatttaccttccttatctaaaaaacttatcaatttttttttgaacactcaaaatctttgcacgtcaatatattagaaatctataagaatgaccatatattacagtatctcaaaatctttgcacgtcaatatattataaatctaaaagaatgaccatatattacagtatcttaatatactgacctgaaaaccaatggacagtagtccttccaccggaaatcacatgactggtgaggaggagtatgctctgatccttcaagaggaaatcttgtccacaccttctctttc

SEQ ID NO: 38493 - DNA, 449 bp, Oryza sativa
  unsure (1)..(449): unsure at all n locations
tcgaacggtgccatctgtagactggcttggtagctgntgttgtacgagaattccgcatatggcaaacatctgtcccaagctccaccaaagtcaagagcgcaagctctcaacatgtcttccaaaatttgattgactcgctcggtctgaccatctgtctacggatggtaggcggtactgaaatttaaacgggtccccaattcttcttgcagtttctgccaaaattttgaggtgaactgactacctcggtcagatactatcttcttgggtaccccatgcaaacacatgatccttgcgaggtacaattctgccaatctctttcccgtataggtggtatgtacctggataaagtgagccaccttggtgagtcgatccacgactacccagattgaatcgtgacccgatgatgtccggngcagtcctggtataaagtccattccaatttccttcca

SEQ ID NO: 38494 - DNA, 387 bp, Oryza sativa
agcttaccagtatgaacgatttctctctcttgttgacccgggttgctcagggcatgtataaaggtagtcacaagtaattgtggtctcgagacgccacgtaggatagaatcacagaaaggtcacactacccacagtggaaaccactctaaaactttttttatgtcagcccttgtattatcaaacctattgaaactttatattttgaaccctatagtaaaaaaaagtatatgtacacccctaaataacttgggacccactgtcagcctcttcccatccattctcttatttattcccctctctctctcttcgatttcttctccaacgaggcaccaacagcgtcgctcggttctcttctcctctcacctccctcctcgtcggcttctcccc

SEQ ID NO: 38495 - DNA, 347 bp, Oryza sativa
  unsure (1)..(347): unsure at all n locations
gcttcttcttgacactctcttgagagtagatgatgctgattgttganaanacgcctactggatatccaatgtccttcatcttattgaagacttcgtctgcttttttcacattggctatagccacacagttagccgaaagagtcctgtatacaatctcacccctatgagatgcaggaacattctcaatgtacttttcagctgtgtaaatactgcgggttttagctaccaaatccacgcgtgaagcataatcacgttctccacgatcaattagtttgtattcttcaacatactccagaagctgcagaacatgaagtaaatatcttctggagtagaaaacacatagaccg

SEQ ID NO: 38496 - DNA, 425 bp, Oryza sativa
agcttaatgctattaacattatcatgtatattattagatggcatatgagttgaatgggctgcttgctggaaatgttagtattgtgacgggtgaaaatatcaggccatcttatggtggggatgaagaagctttcttgaagaaagtagtcacacctatctatcgtgtcataaaaaaggtatttgatccatcagaaatcatgcaaaatggaaaaaaaaaaggtttcttcaatactaatgattgtggcggtttgcaggaatcaggaaaaagcaaacacggaaaaacaccacactcagcgtggtgcaattacgatgatctaaacgagtacttctggtctgtttacaatcttatcttttgtacacattgccaacatttttcattttctataattcctaacctatttcattcaagaacaactgatgtttctc

SEQ ID NO: 38497 - DNA, 447 bp, Oryza sativa
  unsure (1)..(447): unsure at all n locations
aattgtttgattgctataagtcttctcactntgtcacatctgtagttagataaatttgaccatgtttaacgtgtgtttggttggttgtatcaaatatggcaagatttcatttttcacaatgtaggtctcacgtattaatgaccataaaatgtatggtatagcttcattntgtgggttaaaatgtggtttttgaccatctcacctttaacaagctagacaaagaaagtagggattaccttagagcatgaatcaaactgctcattagtaaattagagcaagtttaatagtatagttaactactggctctaaatcatctatagtcaatttaatagccaattcatataatatataattacttataacatatagtacacaattaatatctggtcccacttatcatacacacatgcatcttgtagtccatgctgcagctggctacaaatctat

SEQ ID NO: 38498 - DNA, 427 bp, Oryza sativa
agcttcccaagttatgggattgccttactgtttttcttaaacccgtcaagactggagatgatcttatgaaagaagatccaagtattgcgcagttaggaagatcttgtgaggacaaggaaccgcagtcccttataaataatatccaggtttgttttataaattaatttgaattcaattggttcccttttgttttggcataaaactgctacatgatgttggattagaccatcatgtcatatcaatatgaatcaatatatctttggttacttgctactatttagtataaactggtttggttccattttcatctcttgccatatttctaatgccatttctgctcctcctcacaggttgttcgttcggttacacctcatttggctgagcccttgaggcctcaattgctaagtctccttccctgtattcttgg

SEQ ID NO: 38499 - DNA, 433 bp, Oryza sativa
  unsure (1)..(433): unsure at all n locations
catggctntatgtaacatataaggtcttcttacacatatagttacgggcaccatntaactaccgtttaaacatataatattaattaattgcttcatataaggtttctcttaccaggggcaccatggcaagtcctcgccatgtggagaataagatggcatctaacatctcaagaattcatcaacacgtctctgttatcaaatccatgatcagaagaggtatcaagcttgaacgggagaacatgacgttgaacacttcgggaaagagcgttctagtggagtctttgggactggttcccgggttacaagaagttgcggtgacattcaaggtaattgaccatatcaactatccanctggatggtcagagtttcgttcgcacggagagtgtcttctatagcaagagtcacatggtcatgaagtgccgcatatcctact

SEQ ID NO: 38500 - DNA, 414 bp, Oryza sativa
agcttcagaagtgcaatcatgaattctgaatttctcagaaggttctcttaaagtcatcactgaaggtgctgcagagactcacaagaattgaaggggaaattggcataacgctgcggtacaagatatcaaaacatcccttcttattcaaaaaccttgcggagatcttgggagacagcagcagcaatcaggaattaaggaagctcgtggcaggaatcctcagaaaccttgccattgacagagacacaaggcaggagattggacaaatgcaaatgctcattaccatgctgatgaaggcattcctcgattctagcagatcatttagttcaaatgttgattgcttagtgccaaaggtcgccgggcaagcactggtaatgctgtcatcagaaaatccacataactgcttcgttatgttga

SEQ ID NO: 38501 - DNA, 325 bp, Oryza sativa
  unsure (1)..(325): unsure at all n locations
gctgcatttacacactgattaaataccggcgctcggcagcatgctagagaccaataaacttctcttgtccattattacctggagaagatcaacataagtcttcccaccatcttcagacttcaagtcgcgagaccatatttccacagctntgtcgatatttccagcacaaatataacagagagtcgcagctagtgtatctccaactcccaacagtctagatgcaagggtatcgcatagaacattccattcctctntcctggcaaactgttgcaatattacaatntatgttagctttacaatagagtacaagctctttactattata

SEQ ID NO: 38502 - DNA, 428 bp, Oryza sativa
agcttgatctatacatagagcgaaaagattgttccatggaataagatggctcatgaggccaattacctatgttacctagatacggggatatagatacagatacgtgatacggggatacgaggatatggcactttttagaaaacaaggatacggagatacatctatatatatagaaatttaataaaatatagaaatttgatgaatttggaaatttaataaaaatacaaaaaaatgttgaacttctttaagaaaattagtccatgcatatttgtagctaaatcatgcttgcaaatgtataccagatcggtgagtactaagctagcacatgacctccaatatcccttctagtttgtagtcttgtatactatcaccgacgtccacacagcaaagaacaaagatagtataaattagtgtaagacaacaagaag

SEQ ID NO: 38503 - DNA, 413 bp, Oryza sativa
  unsure (1)..(413): unsure at all n locations
tacggaccttaaaactcagcttattanataaattatgtttgtactaaatcgtgaactgtgcattgtataaggaanaaaccatatcttatacctggcgtacgatagaaaaaaccatatcagttgttgacaaatttgccacattatacttgtaataagttgagaaaactgataaccgcaaaatccactgccacttagttattttaatttgcgacaaataaagggaatatgaaatattaattagaagaatactgcaaaagtctcgagacaattaagtaactatgcttcatggcctatccaaaagcaagaaactgaacctgngaaccttgtttagtgcacaaattaatactcccaccattctaaagtataaatattnttaggaatcaagaatggtgccacgtatttctgtggcactg

SEQ ID NO: 38504 - DNA, 427 bp, Oryza sativa
  unsure (1)..(427): unsure at all n locations
agcttaagcctgacggtactattgaaaagttcaatgctcggcttgttgctaaaggctatactcagaaagaaggcgaagatttctttgacacttactcacctgttgctagattgaccacaattcgtgtgctactttccctagcagcctcacatggtcttctcgttcatcaaatggacgttaagacagcttttcttaatggagagctggatgaggagatctatatggatcaacctgatgggtttgtagttgaaggtcaagaaggaaaagtgtgcaaattgttgaagtctttgtatggtctgaaacaagctcctaagcaatggcatgagaaatttgacaaaacattgacatctacaggctttgcagtcaatgaggcagataaatgtgtgtactatcgccatggtgggggtgagggagttantttgtgctt

SEQ ID NO: 38505 - DNA, 407 bp, Oryza sativa
  unsure (1)..(407): unsure at all n locations
ccgactncattcttgccaacatgacgatgtcctcggcttgttgtcttctatcccatggtgtcattcattagtctcatcgtagtgggacctattccttttcacacctcaaaggagaacattagtctcaacaaatcgggtgtcattcttaacttgatgaccaaccggntgcatatgaaagatatggatatgtgtgttgagtattcattaacatcacaagtgtcatatactcgtatgcaagctcaagtgcatagatccgatataaataatacgtgaacaacatggatctagaacatgcacaatcaatgtataggatttgctctccctaatatatgcntacccactaatatacacgatacaaatatatatacacgagatgccagtggttgcatatttacagaataaccaat

SEQ ID NO: 38506 - DNA, 323 bp, Oryza sativa
cgccagatgacggcacggggcgctcctgaccaggtgaccgcgcaggcgccccttgtcactttgacgaggactcagggagatttaactcttgatgtgaaggccccctgacggaagccacaacacgcgtgctgaggttacaggtttccgcccgctgagaagcgtaataccctacttcagggtttcgggagatctgcgtatgaacgagctacgaagtaggagccagtctcccctctctgctctgggttccccatctggaaaagaccatgctcccctgccagcgggcaaggtcctccttttatatcttaaggggataccgcctgcac

SEQ ID NO: 38507 - DNA, 417 bp, Oryza sativa
  unsure (1)..(417): unsure at all n locations
agatacaacaaagatccaatcatacgtctatactctnnttgatcaacagcttcaccatcttcatcaggatccaacacagctgtagaaccaattggtgttgaaattggcttgcaattctccatcttgaaccgtctcaaaagatcttttgtatacttcgtttgatgcacaaaagtaccttgaggtgtttgcttaatttgcaatcctaaaaagtacgataactcacctatcatgctcatctcanattccctgcgcatagtctcagcanaatctacaaccaaagcatgagttgaacaaccaaagatgatatcatcaacatatatctgaacaaanagttaattatcaccatgcttaagaacaaatagcgttctgcaacctttccattataaacctttcgaagcaaaagtcttaacctatata

SEQ ID NO: 38508 - DNA, 471 bp, Oryza sativa
  unsure (1)..(471): unsure at all n locations
ttngcatctactgattgagttcagcgagtgtagttgcactttacttaccatgagaacagcttgacctatacatatggtatctaaattactggaagttgtatggcagtttcatgataaagatggtcaagcctggcgggccagaagaacaatcactgattacgatgcttcaacaacccatgacccaaaatatctagcccgtcaatgatgaataggcattacagggatacaacaaccacaaattgagtatgagactttacgcaatccatttgaaaaaggaaaacaattcatccacatagctgcttctccagcttcaacagaagctntctctagcaaccagcaattctccacgccgccatggctacttctgctgcagtggtgtttgctgggaaatcggtggcagctcctgtcatcaaggagattatcaccagggccttaaactaccttgatggctacctcagcgctaaaagcatg

SEQ ID NO: 38509 - DNA, 416 bp, Oryza sativa
agcttcctatagatgctctcaagtttttttgtgagactcctaacggcatgtataatgtaaatgctctaaaaacgctccaaattaagttgtcacatggctttataataaattagaaaaaatctataattttctattaaattggttaatccattaattttaaccattagattttttttgcggagataaccattagatctctctgacactcaaaaatccggtagcctcaccctccactatacatccgcgagtacgtactctctccctctggccaccctccaactcttcattttaagctaacttcttctattatttagttaacatagatctatcttaagattttgaaattacgttcatctggaaaaagaatctatctcttcatggatgtgcacgtacatatgtacgtaccctctttgtta

SEQ ID NO: 38510 - DNA, 467 bp, Oryza sativa
  unsure (1)..(467): unsure at all n locations
nttcatctcaataaaacgcaaccttaccagtaaataattattctgtacgtcgaacatgcaattcatgtgcattgcgttntcattcatgcatgttcctgcagctaattttgccctggcaggctagctagggcctatattaattccggccagttgaagctagttagctaaccctatcgttcccctatacaagcatgtggggacacacacatatgcatgcatgtgagagtggattttaaacatgatggtccctcgttatttgcatttagctcaaatatttataaaaaattaaaaagaagtattaatatgtgatatatcactctataaatatacaagttaaaatttaaatttacaagttaaaaaaaaagtaaactataacttattaacatatattcctaatcaagttttttttgcaacatatataaatcagnaattacattatatgtttctcgatgatcattacatattat

SEQ ID NO: 38511 - DNA, 423 bp, Oryza sativa
  unsure (1)..(423): unsure at all n locations
agctntgcgagannaaagannattttgcttctggtatatacattgctcagngaggtcattcaatgattcaatcatagatcgaactgatactctgacagaagtaatgtacgctttgactgaagaagtgttatcatcatctacgccttgctctgaccaccaactggcacagccatactactagtcgctttgattttttcttgtaaggtttgttcattcatcttatttaaaaagttaatgtagatataaaaacaaagaagtcatacttacaatattttttgataataaagcaaatcaaaaaaaataataattccataattttttgaataagacgaaagctcaaaagttgaaaaaaaaactcaaaacgataagtattctagaacggagggattattantattaatattattaatattattaataata

SEQ ID NO: 38512 - DNA, 460 bp, Oryza sativa
tttagccaaacagaagggttgcatcatgcgtacttgttcttatttatcttgcagactctctggtcgatttctgaattaattaattaccagaagttagctagaacacctgttcgatctttcagaaattcagacttgagatgagagacaggaaaggaaactgaaggttaagctgtacaaatcaaactagaccgttctaacgaactgtcagaatttgaatgttcgaggagtactactgatggcagtagggtcgtcttcttggagaagaacggtagctgctgctagctaggacaatgacattcttgatggatacatgatcagatgaaaatccaaaatcaattaatcagatggtagtatcatcatggtaggagtacaccaatacaccaagaattgaagactcgatcgatcgacatcatcgatcatggatccgtatcacgcatcatccatcggcatgcatgttatt

SEQ ID NO: 38513 - DNA, 421 bp, Oryza sativa
agcttgaaataaaaaagagcatattattttctatgaagttgggaaaaagagcatgtttaagagaatgaaatttaactaaaatccaaaaagaaaaggtcacctagatagaaatttaacttaaatccaaaaaaaaaaaatcggctcaaaagaagtagaaagaagatagtgttagaaaacaggggaaaaaaaaactctactgattattgggagatatgagaactagtgctttgctctgaactctgggtctgcctgagttttcttggtatcctgttgaatatcctattcgagtcatgccacaattcttagtgttttgagccaggatgttttagtagctgtgtaactcaacttgtttcttctttctttcaatcatttgaagtattttagtaggtggtaaagagagtcacaagaaacagaaccatga

SEQ ID NO: 38514 - DNA, 358 bp, Oryza sativa
tggaagaatcggaagtcgaagctcttcaccgagtttgtttatccgcccggcaatcatacgccgttcgatgaataccctcaaataaccgagacggtgtgggaggaattctgctctctcaagaacacccaagagtttatggaatcaagcgaggcacatcgcctactgcaacagcggaatgagcacccacatcggctgggcaccgtacggtacatcggcaaggaggcaatatgggcccaagaagatgcagccgctgcagcagcgaatgtccctgctccgttttcagacatccctaaacaaagagctcgcaactgggcgcgggcaaggggtaaggtcaacccggacggctctgtcacatttg

SEQ ID NO: 38515 - DNA, 422 bp, Oryza sativa
agcttgacacagaatacttttacgcatatgtcggctatgggaacagacagatccatttcttatgaagaaaaaaatatgagcatagaagcagtatcctcgcagcctagcaagccagtaagaagaaaatgtggacacagaaacgccaaaccagcataagcttggacaggctaacagtgaggacagggtttctctttttgggtacaaatagtgaatgcataatatatacagtagtatgttctcttctccctttcccctgccgagtcatctggaagcaccaatatattactcacacattcatgcatgccatggactcatcgaccagatgccatgattcatgcatgccatggactcgtcgaccagatgcatggcagtgcatgaaccccagccgtcagaaaatatattatgcatatatgctcggcagg

SEQ ID NO: 38516 - DNA, 456 bp, Oryza sativa
tgtgcgcaagcccatcgatcgtgcataggggttataattgtgatagaaattcccgatcgaccgtttcttttttatttttaccggccgagtaatgtgaaaatggttaaatataataacgaaaatataactgataaaaaaagtaaaaaatagagacaaacaattttgctgtataccgacagtttctgaacactataaaaaaacatatttttgcatacggctaaaagtgattttcgtatgcaggcgtaaccgctttgacgctttcccatgaagtctataaaaatcaatattttttggtatggatgcacaaccgcatgtaaaaagtgaattccgcacatagtcagttaagccgtccgcttgctaaaataaaaataacaaatataagttcaaaaaagtcgaaacgctaactcaaatccatcctagccaccatcataggcgatgcagtctgccaccaccatc

SEQ ID NO: 38517 - DNA, 385 bp, Oryza sativa
  unsure (1)..(385): unsure at all n locations
agcttagccccagcatccacgcaccangnataattgccatatgtnnnatacccnnnnaatggaagcttataagccaacttataagtcaaaaaatataagcctaaacaaacaatcagctttttcgtttggcttttttgaagccataagccactctaacactattaagccaaaatctaagttggagaagtttttttggcttatgtgagatagatgcatgactccaccattaaacttagaacattaaatccaccggcttataaatcatataagccaataagctgacttaaaagtctaagccaataagcccaagcccaaacaaagagggcattangccccgtttgattcaaagggaaattcataggaatttagaggaatttattcctat

SEQ ID NO: 38518 - DNA, 476 bp, Oryza sativa
  unsure (1)..(476): unsure at all n locations
actcagcttattaattcttcttcacggtcaaaaagtaatatttcatgcatcactttcatatttacatccggcacatctcgtgaacaagagatacagaatgtctgcaaataaagaatataaaagaaagtacacantttatcagtgaacacctcactgtcagcagcacgactcaaccagactaataaattcagaatggtactgattaatatatatcattaccagcagtactagcaaaagcatcagccattcagccccagcacatcatttctaatacctgtgtgctccaccgtccaaatgagcttccaaatatctatctaaattattcttctatntaacaggacagaaagcatattacaaggctacaattgccactgaagcaaaaactaataagagatgacagcaaataaaaagaacaaaatgtgtgataagtagctctcattggatcgcatctaaggtctctctcctcttaatcctcc

SEQ ID NO: 38519 - DNA, 359 bp, Oryza sativa
  unsure (1)..(359): unsure at all n locations
agcttggaagtcacggtctgagcggggagttttatttttttttgaggcgngccggcgacgagagacataatctgttctggtagtagcaggtgcgatctgggttcatgcaggacttgacttggtagaggtcgggggataggagtcgggcacgattctatgtcaatacacatggcacagataatatcaagaaagagaccatgtcgggaactggatgcgattggacgatgactgtgttcgttttcgaatcggattcaagttgtacccagaatataagcagtatggattccacgggattgcagagattgcagtcgaatcgtaccagcctaagcagatgaacagatcggacccgatttcttggg

SEQ ID NO: 38520 - DNA, 218 bp, Oryza sativa
tctctgaccacctgatcactctcatcggctcatcttcggactcataagactgcgctgagtctacatccatgattactccaagcgttaccaatatcactgttatcacatgctcgcctagttatgcgagatgagaacacatgcttcataatctcttgatttgagaactctaagactaatcttcctgcgattctttgcatcggctttcatgagccgatact

SEQ ID NO: 38521 - DNA, 187 bp, Oryza sativa
agcttgctgggtcgggaagatagctgcgaagtgaatcgaaaccctgaaatggagggggggaaccctatcaaatcaattgaaggacgccgatgcaagatgctgtccttggcttgaggggtgggaatacaggattaattaggaggagtctgcacagattggcaatggataggggcaacactaatgctac

SEQ ID NO: 38522 - DNA, 465 bp, Oryza sativa
  unsure (1)..(465): unsure at all n locations
ngcagcattgcagtatcgatgaatggctcctgctttactctttatacttcctctttaggttgcagaattgcagcatcgatggatggttcctgcttaccacttatagcttcctcattaggttgcaccactgaaatatctctggatggctcctgttctactctagcttcatcatcaggttgcaccaatgcagcgtcactgtgttggttctccttatcaggctgtaccatttcaatatctctaggtggctcagcttctactcttttagcttcctcacaaggttgcaggaacagagtgccacaagatgcctcctgtgttattactgttggctgcattaggacatcagaatcgtgagcatctccagccactctagcttcatccttttccacatcaacagcttgaccatccttcttcatgaatttcctcttgttccatttcttcttgaaaccacctttctttactttaagt

SEQ ID NO: 38523 - DNA, 426 bp, Oryza sativa
  unsure (1)..(426): unsure at all n locations
agcttcccaaggaagcaaanctcatttaggaactccaaanttagtatatccatttgattacgagaacaagggaactcaaaacatcttttaacagctacctcaagcccatcgtgcagttgaccctgactgcaaacaaaaagtgcagttgacctaaagaagaaaccaattatataataatgaagtttctaaagttacaacacattccattgtcgtttgatagctatgatttttgcaatatcctcaaagattaattaggatgaattggaatcacagtaaacacatgaataacagtaggaaaagcaaatgatctgtttcttatgatatcaaagtatggaaactgaattttgtgaagcaagcatattcattactcctccggacaagataaggtggttctctttttactttgcaaagtcaataagaagtcac

SEQ ID NO: 38524 - DNA, 491 bp, Oryza sativa
  unsure (1)..(491): unsure at all n locations
gacctataaaactcagcttgaagcaaaacagtggtggcatgaaacgtcgtctcagtgtttctatctctctaattggtgaccctaaggtacaattcatatatgtcaaattcacggaaattttgaacattcttgcatgtataaatcatgcattntttaacattctgcaggtagtttatatggatgaaccaagctcacggttggacccagcatcaaggaaagacttgtggaatgctgtcaagtctgccaagcaggacagggccataattctcacaagtactgcactttgctttcaactctgatacaacagtataaccttagtccagttaatcaccatggaaatcttttgcaccacatcatattatcacatcatactttcacctatttccagcgcattcgatggaagaagctgaatttctatgcgatcggataggaattatcgcanacggcagctngcaatgcatcgggaactctaaagaggtacatctacacat

SEQ ID NO: 38525 - DNA, 428 bp, Oryza sativa
  unsure (1)..(428): unsure at all n locations
agctntntatcaagtattttgataattctttctcttttgatccatggatgagaatggtattgttcgctcgcagtgacaaagctctgtctataatctttgcctccttatgaactgtataggagttgatcagtgactactttcttaatgggcatgattctttacactatgaaagcatgaagtgactattttggcattggaggtatgcaactaatcttggcattttgctttttccccataagatcagggcatatccctataaagctttttatatatatataattttagctacattattatgcagctgctctcctacaatatctactccctctgttttatattataggtcactttgactttcttatattcaatttttttaagtttgaccatgtttataagtaaataaagcaatattttcagcacaacaaaca

SEQ ID NO: 38526 - DNA, 432 bp, Oryza sativa
  unsure (1)..(432): unsure at all n locations
aagcttaggaagagatgggttctaagctgaactctagtactgcttattatctgcagacagacggacaaaccgaaagggtaaatcagattntggaagacatgttgagagcttgtgctttagacttcggtggaagttgggataagaatctaccttatgcagaattntcgtacaacaacagttatcaagctagtcttcagatggcttcttacgaagcactgtatggtcggaagtgccgcactccgcttttgtgggatcaaacgggagaacgtcaagttttcgggacggatatcctaagggaagcagaagaaaaggtaaagatcattcaagaaagattgcgagtggctcagtctcgtcataagaattatgccgacaatcgccgcagagatntgagttttgaagaaaaagagattnagttccggtcgtcgtcgtcgc

SEQ ID NO: 38527 - DNA, 378 bp, Oryza sativa
cagatgacgtgaccgagagaattggcattttccaaacgcattcgtgatacaccccggaccatggatggccggtgatcagcacgacatacatcgatgattagtacactatttttgatccacccgcatgtgtatacagtatcacaagaggcactgaatggcctgactatcagttattctcagcaacagactaacgggcctgcagcttctgcgttacatgctctcttctggggtactaacctggacttcaactaatagtatgcctacaaagcttctcttactgaggaggagagagaatgagcttgaatgatttcttgcacgatactcagcttgcacaccggatatgcttatctatgctgagcggtacgaggggatactggt

SEQ ID NO: 38528 - DNA, 445 bp, Oryza sativa
  unsure (1)..(445): unsure at all n locations
ccgatcgacatgatttcttgatcagacggtgtattcgaacttatatatatatatatatatggatatatatatatgcatatccaaaaagaccgcatattaatactgttcaaatacaattagccctactataggcacccaaatcagtgctggttctgaaggccctaccagtaccggatttccaaccgtacgtgcattacccggtcagcagcactggataaccgtatctgtgcaggttgtagtaccaacatagacaggactntgatgagacagtaaaaacagcatcaaacggtgctcaattatgctgtgacggtcgttaaggacctattcaaccataactatctaatagatatagcactaagattctacacgtatactattataaatattttaaaaacattataaatatgtattcactaaagaaaaacatatcgtgtatatatcggtt

SEQ ID NO: 38529 - DNA, 436 bp, Oryza sativa
  unsure (1)..(436): unsure at all n locations
acctgcngcatgcaagcttgcatttaattactgctaaatactnatgatgtccttagntggagagaacaactaaatgaagatttcaacaactacaagacagcacattgtgagctacacacaagctaaaccactcccaattttagaattatagctaaaccactaccaattttgcaattatagcatcaaaaaggataagggtgagcaggaaagatggcgcaatttactagtccttaaagctcctggattagtttaggataaaattggcaggtaaaaaagaaagagcaggaattcctaaatgtggaggagccgacacgcgtcggtcacgcggtggccaagccagacagagggggttctcgcatctcaccgtgaaggacgctgtagacggcgtcagcgacgtcgcggaaagccggggcggcggcgacagcgtctcgggtga

SEQ ID NO: 38530 - DNA, 434 bp, Oryza sativa
  unsure (1)..(434): unsure at all n locations
tgagatattcattcagattaatgcaaagtaattaagtgaaagaaaaacaagggttaagagagcttagatcaatcatgattgccttttggaatttatgttctatatatgggtttggacttttcttctggtataaaattaattaaacgtgcggttttattaataagaattgactgccacagtactatgtacggtgcagaatgtaccatagaaattagtaacagttatgcgtactaattatacgattaatgcgccgcgttagcaaattaagtcacctttaatttatctaatataatattctgcagcccactaaattgcgtacatgggcacctgcaaatgtgggcattgcangtgaagacgtgaagtacagctcgtacaatacatatatattagcattattaaattaaacagtggttggcgtacagtgcacgtacata

SEQ ID NO: 38531 - DNA, 422 bp, Oryza sativa
catgcaagcttgagctctaaacaagcctgatcatatatgattttcattgctgcttaataaactactagtaaattgtacatatccacatgaaaattttgcatgtattcgtatcatacatttatcttaattcttttcatccttccttcattaacgtgattaattggaaattattatttttaggtaagggattatcctttaatatatgtgtacttacaagccaaactcggtagtcgggcttaatcgagcttgagccgagcctgcttgaatgctcgtaggttacacaggctcgacacacgtttcacaagctcgagtctataaagtctgagctcgctcgagcttggctcattgacagctgccacaagcctcgctctagcagcaactgcgtagtgcaaatatgcaatggtcgatgccacgctccggtc

SEQ ID NO: 38532 - DNA, 412 bp, Oryza sativa
  unsure (1)..(412): unsure at all n locations
gcttgtactactagaacgatgatgttaactatgagtattatctcttgtttggtcgntgtctcagctatggctgcaactcatatttacccttgctgtagtataggctactaaaaaatgtttatgggttataaaaccacttcataacatagataatagagttcctcataaaaagagataatagagttaaaaaaacaactcgctatactttaagttgcaataacatggttgtgtaaaagtggcaatgagcttttggtaggtgttgttcaaggttntaggatttatccccgttcattcgaatacgtagttagatggttatatatgcttacaatgtttacttccgacggtgtgcacataagcattcatacttctactagcttgtaatagagtgatcatgtattcaatgagtagatgt

SEQ ID NO: 38533 - DNA, 420 bp, Oryza sativa
  unsure (1)..(420): unsure at all n locations
agctttacatgagaggggttaactctcccctgcattntagccaccaaatttatagaatggtaaatcaaaacaatactttcactattcacaggttgcatttgtccttttctaatctttctttgcctatcaagtttcagtctgatttttaaaaaaaaacacaatataaacacatatgctaatggtagaatttctaatcttctatcttcttaagtgcttagcctaaatatgatcaccccaatacaaaatattatagtaattgactgttatttgaagctatcaatgcaatagttgttcttttgatactgatggccagagtggatgtagagattgtaaaagcccctcgaagcacctcttgagttgtcgttgtcggtgttggtgtagtagttgtagtagtgttatgggtgatgttgttggcttgat

SEQ ID NO: 38534 - DNA, 464 bp, Oryza sativa
  unsure (1)..(464): unsure at all n locations
tataagacttctagcaaaagatactataaggactcttgttatgttnaananaaaagngtcagaaccgctccgataaaagaaacatacagatacctgccttgtgttaaataaaacaaacagcatgtaggggacaaactctcgctttcatattctatgttttgcagggttctacttctcagaagaactatatgaaactccgtacggtgctgcaggagtttattatgatattagaagaaataatagttacacttgtataacttttaactctaatcaactatttaaaaaaagctataaataattaagatggtgaggcttaaagcaatttaaatcatatagtattggtcgctgaaaagtaaacaaaagtggattgatattgctcgggacatgagatactgtcagtacgtagtattctaagattaatctttacatatatgataatgatggaagtgtctattaaattgata

SEQ ID NO: 38535 - DNA, 420 bp, Oryza sativa
agcttgagagtgagttgccaatcttctatattggttgcattgtcataaaatttagtactgtctatatatacttcatgtcaacttcttaaattttcagtagtattttttattatattgatatagtttcaattctttgcagtcgaaacatgcatgaattgtttaggtatgccggccacattagtttcatgggacaaacgaagattgcgaggtataacaatccggatatttatacggatatcagatagtacaaacaagtatgactgatatttgcaattggactacctgatacaattgccatgagatgaatcttcaaaagcaaacatatgtcttgaatgtccggctgggtactgtgtggatatgtaaatatatagaagcatgatcagttgattacatgcataatgatcagagagagatgaagct

SEQ ID NO: 38536 - DNA, 407 bp, Oryza sativa
  unsure (1)..(407): unsure at all n locations
ttactagcacatatacatgtgtactgatgtgcatgtgtactaacttcatacatcgtatcgatcgccgcattgctaattaagcttctagtagttctagattgaaagaagctaatatgggagcgagaggaagaagagatcgaatgggcagctccggcggcggcggtgggtcgccgtcggtcgtcgtccggcggtacaaccggagcgaggcgccgcggatgctgtggccggatgatctgcaccgccgcttagtacacgccgtccgccgtctcggcagatgccacggtcagttaatttagatgttaatttgatctncctcaactatagagcctataccaatcactcgttcagattgattcatttcaaccatcttttctaatcgaagtgtaaatatatgatatatttagctc

SEQ ID NO: 38537 - DNA, 281 bp, Oryza sativa
tttctgggccaattcctgatgatttatcaaaccacgttgatcttgaaatatcttgtcttaacaactataatctacgaacaccaccgcgcaatcagatcgtagatcggagctttcttgtccgaagaagattttatgtgaaacattagggattacgaatatatctctctagcggtctcgcgtgatcactagtactactagttaattctgcaagctatgtcccttcacactttccttcaaaaatcctcccgcacaaatacattctcctgatactggaagcacca

SEQ ID NO: 38538 - DNA, 398 bp, Oryza sativa
  unsure (1)..(398): unsure at all n locations
ctgatctgataactgnactgtcagagaaacactttattagactaatcaacgaccgtctccgctccagcctcagctttaatttcctccataatttccccgggcaacaatgggagagaacagggtgtttggatccaacgactaaacttcagtttctgccatactagataaatttagagtattcaacataagctacttattacactaattacataaatgagagctaattcgctgactaatctttttatgcctaattaatccactattagtacatgtttactgtagcattacatagactaatcatggattaattcagctccattgattcatttcgtgaattaaacagagtatttgatacgttgctccatcccctatatttaatgttataaattatccaaaca

SEQ ID NO: 38539 - DNA, 421 bp, Oryza sativa
  unsure (1)..(421): unsure at all n locations
agctntttccaagatatttttgtatttactattataccgngaggtgtgtacccatgatatttttcagtaagaggttttagtagtagtagtagtagcagtaggttgcgtaagactctaagactgaactttagttagtggttgctgttccaaattccaagacatgtagtttatgcagtcatgttctacttgaactgcaggactggagcatattggttttgtttagctagattgtcctggtcaaagggggtgtgagaaagaaaagaaatattggctgcacttggcacgttatccttcaaagtcgtcgtccctagaactcaatattctattgccatgaacatattccttctctagaagttgattagatgaccaattcaagatactaataaaaaaaattctcagaaatcttatcacctaacactgg

SEQ ID NO: 38540 - DNA, 401 bp, Oryza sativa
  unsure (1)..(401): unsure at all n locations
tcattaacaagcccttatagatcttacttnttttgaatcattgatgagaagatactgatagtttgatatactttacgatgaagttntatggaactttcacatttacacacaacataacgtcaatttctttttggtttgctgcactatgcctgcatacctgcatcattgagaatactggatatatattgaactggcaccgtactgacactttataatgcagctcgggacatctgtattatcgttctgagcaccatagttgaagagtttcttttgttgcactttctttactagcccagttgttnttctgcagggaaaagtttctgaacaacatcaagagttccgtatctcgcgtcttggggcagtaatttgaggcgaaaatggagcacaagcagccttaactc

SEQ ID NO: 38541 - DNA, 416 bp, Oryza sativa
agcttcctttaatagattattttccttaactgaatatagcaggaatccgactattggcgacttgataattctcatcggccgattccaggactctgaagccgatactgactttaggccgatgataacttcgggcttaccaaatttggtcattaacagttatacattggtcatttttctaatccttattgaactaacattcctttccttttggcatgtttatataaggccagagctaattccttgagtgcttgtccgcccatccaattcgatttctagaagctcgctttgcgtccatatcttattgacaccttagttgctaaagcaaacaattttttatccatctcatcgcaaaggaggtggtgtccctgcccaaggcttatctgggctctcccacctaaccatagtcatcacattct

SEQ ID NO: 38542 - DNA, 157 bp, Oryza sativa
tatcatgtcagctaaaaccagacgtaaatactgtctatgtctctcatatgatccggttttgtaaattgtgagggactcgttatatctggtattttggtatagggacgaatttcagactcgacaataatttgagggacgactcgacaataatttgagg

SEQ ID NO: 38543 - DNA, 430 bp, Oryza sativa
  unsure (1)..(430): unsure at all n locations
agctnttgagctattctccctgcaatatctatatagctcctcgcttctgagctgctctctcattcctgctccagaaaatgcatggtatttgaagagtgccaggaactcagtgtccttcatgttctgcaaaggaaaaacttgtttacaacaaaggggagctgggagtctccctgatctagaagtaaccaaaacttggcttccccgttgctgagaaactagaggagctagcagttttgcccattcctcctcgtcctggaaaccataaaaccaaacatcatccaacacaagtaggaacctctgtgactcttgtaagacgcctctcagcgcgcactggagattgttaaggttagtaaaatgcacaactcgattattgtttgtggcagactccatgatctcggctgtatggcgatgcacgtcgagtttacgagaa

SEQ ID NO: 38544 - DNA, 479 bp, Oryza sativa
  unsure (1)..(479): unsure at all n locations
ggagccgagatcaacactggggaccatccgggtgaaccttgtttatgtttaggnctagnccatcctttgtcaagactttattctcatcacaagcttgacttcattcttgccaacatgacgatgtccttggcttggcgaccactaacccatggtgtcattcattagcctcatcgcagtgggacctatcccttttcacacctcataggagaacattagtctcaacaaatcggttgtcatccttcacttgatgaccaaccggttgcttatgaaagatatggatatgtttgttgagtattcattaacatcacaagtgtcatatactcgtatgcaagctcaagtgcacagatccgatatatataatatgtgaacaacatggatctagaacatgcacaatacatgtataggatttgctgcccctacatatatgcatacaaataaatatacatgagatgcacgagatgcatgcgtatgcataatta

SEQ ID NO: 38545 - DNA, 417 bp, Oryza sativa
  unsure (1)..(417): unsure at all n locations
agcttggctagctaaagaanaagcccnctttttgtcttaacaagtaaagaaaatatacacaaatatatgcaaatatctattcaaaagttagccattgaggaagtgggacaagtcgttgcttgcggatgaggagtggagtatgtggtatccttgtaccaagtgaggacacgtacgccatacgccgaaccagaggggggcgacggcatcggcaacgtgatgctcgccgtgactagtactacgaattcaccaccgacgagctctgctttctggcattgtgatcagtgtccatcagacgaccatgtctctgtttacctctggtttttggtttcatggccagggcactttgctctcatagatgggatgatttcggttgaattagtacttgcatgaaaagaagaacatgtagggctcattcgg

SEQ ID NO: 38546 - DNA, 449 bp, Oryza sativa
  unsure (1)..(449): unsure at all n locations
ctaaatctcaagaataatttaatgatgcggttgtatctgatttgaaacgtaatgctctattatgaaacagacaatagctagagtttcggccatgaacaccaaccttctgcaattgcactgcaattgactctttgcccgtccttgcagcagttgcaaagtagcaaacaattacctaaagccagtcattgtcagcagctaacagcaaagaaaaacagatcaaattcagagagattgttagttcattctcagaatgcacacaccagagttcttgaggctccagtacacagccataattcagagactgttagtttagttctttttttcagaatgtatattagtacataacttgttattgctgtaacaaataaacgtgcggctggaacatagctccacacaaagactgggaagaaaataaggcctnctatgtgtacaagactatacttatgata

SEQ ID NO: 38547 - DNA, 413 bp, Oryza sativa
ctcagcttggggggtttgtgatggtcgtatcgatcagttccatcgtcttattaccaaaatagaggagaactagtgatgcttgcgatgcataaatatgttacaataataatattccactagtattaagtatactaaccttttgcagagattgacaataaagtgaaggagaatcgacatcaacagaaacgataaatcaatcggacgatgtctagaaccacacttatgtatgaataggccaagaactaaaaattgatacgatgaattgggccaaaattcacaagtctgcggagaagaacaacagacgaggccaccatccaaaattgggctggattgggccagccccatgttcggcaccttccctagcgccgttggatccaggttttggctggacggcgtggatcactcgccaatga

SEQ ID NO: 38548 - DNA, 379 bp, Oryza sativa
  unsure (1)..(379): unsure at all n locations
acaaaaaggcaaggaacaaacccagaagcccagangaaagnggaaggcaagcggaaaccctcnctaaggaggccnccaagcngnnagcnccannnncgggcagncccanaacaccagggaggaaggagaaggcangcnccatgccgnanacnnncagcaaaagaanaacagcacacggncaancncgnacaagaaccgcnacgngcaancggaaacanngaggaaagagaaagaacggcagaaaccangcccccnccctaagaccgaagggaacccncccgccatgcncancgnctctgttcttaacacagtatgggtgcctgctgctattactacatcgcattttctctgtaatattttggggattgccgcaaacatt

SEQ ID NO: 38549 - DNA, 468 bp, Oryza sativa
  unsure (1)..(468): unsure at all n locations
gggagagtagcctcaacgngtcgagatcctcaagaatattacttttgtttgttgtgataactacaagatataagccttcaataggttggtaaacgtaacggacattttcagtctcaatgtaagtgtgctgctttccatttccaacaagtttagggaatgctgcaagtaatccttcaatccttatgcgagtcatgtcaacatactgtctagaaacaagtgctgcaattgagaaggaacaaccaaaacatcattcagcctatgaacctcaaaagttaccctcaaggatcatgaaacaaatagtaattgacagctataaaatccttacagttgttacttgttaaacacaaaacagttttggtattaagtcaaccaattgactgtagaatttagaagtcttaacgaacaggcagtacggtaacagcagcaaagctctccgatgctntntcagcaattagtagcagaatgcta

SEQ ID NO: 38550 - DNA, 424 bp, Oryza sativa
agcttgttgggccaatattgccagcctttgttcgtctagtgaagcttcatgtgctggacttgagctttaacaatttttctgggccaattcctgatgagttatcaaatatgtcgagcttggaaatattggatttagcccacaatgatctcagtgggagcataccatcatctctaacgaagctgaactttctgtccaagtttgatgtttcgtacaacaatttgtctggagatatcccggcaggaggccaattctccacgttcactagtgaggattttgcaggcaatcacgcactacactttcctcggaattcctccagcacaaagaattctcctgatacggaagcaccacatcgtaagaagaacaaagcaacccttgtggccctaggacttggtactgcagtgggggttatttttgtctagtgtat

SEQ ID NO: 38551 - DNA, 367 bp, Oryza sativa
  unsure (1)..(367): unsure at all n locations
cccatgcgcagtagtgatcacatgacagcgcagcgagaccaagcgacctgcagctagagcttagctctctcatacactgtgccggtgatgatctgcgtccacgacgaacccaacacccgagatgaaaaaacgcagcatcagcaacagcaccagcagcagcagccacactaaccatttcgatcatttacaccacacacctgccatgctctccactaattgcacgaagagaataaacaacacataaatcacaggacacacgagagaaagaatanatcaacaatcggatgggttgtgcatgcatgcaccgactccaatactccagatacgcgatgggangcacactcaagaaaaatataagatactctct

SEQ ID NO: 38552 - DNA, 272 bp, Oryza sativa
tgcaggcaggccgtggtgagcctgctccacaatacgaaagacccctcctaaggcggtcccaacctacgagtgcttcatgtactgcacaagaaaaacctgttctacaacaaaaccaaggcgggagtcaccctcatcaatgatccccccgctcgtccctataaggccatggagaaaaaaattggcttgaccatgtcgcccactcctcctcgccctgggaaccatataagcctccatacgcccacccaagtatgaacccttgcgactttcgttag

SEQ ID NO: 38553 - DNA, 385 bp, Oryza sativa
tcatccaccatgagcgctgtcatgtcaaatgagatttcttcgacctagaaggtgcccttgcggcaagtgacgaattcaaggatcttcgggagtggaacactgctatgccataatgtaactagatgacgttatttgaagtgacaatgtaaaacaatattgtaatatatatattctggcaacacttttgatttatgcaatataagtagatttctcagtaccaaatgcttgataatattccaatatatgtacctgcaagaatttctaatacataatttaaaagtaatctacggccatattatatttagaattcaatagtttctacctatcttcgcacgtgagagttttcttatttgcaagcggacgattcctattttcgcaagcggac

SEQ ID NO: 38554 - DNA, 369 bp, Oryza sativa
  unsure (1)..(369): unsure at all n locations
agcttgaaaggacgatcagatgagtctggttttcactgnangcagccggcgggaccaaagctagccgttacgaaagagccagcacagggggtcccgggcttcgacggcacccggagctcaactgcaagagccctcccaggagtaaaccaaggcgggtggcaggttcatgagtgatccccgcgcttggccctagagggccatggggaagaaatttgccttgacccggtcatcaccccacgccgcctctatgatcgtcgtgtggttctaaagggactcggaggtgttgacgctaccgtggtacctttctgtgaggctgggccgaaacttttgggggtcattggacattccgaagactcgccataaagacct

SEQ ID NO: 38555 - DNA, 419 bp, Oryza sativa
  unsure (1)..(419): unsure at all n locations
attacggacctatgaaactcagctaacatcctaactagttgggatattgctaacctgtgtataataataaagggtgaaatataaatactgtgcatgccattcatagtctaaacaaatatgtagttcaaagtatctaaaataccagaaaatccaatatgcgctgaagctcatccgagggttctccttcacaagcattgatatcgactaaagtaggatatacaattgaacaaggagaaagattccctagcttcaccaatatgctttccaactgtttcctaactatcttctctgggtggaagctcaagcgggcaaaaagttgcggtataatctcctgcatatatccaaagcatatgattacacaccaattntatcataatatagaattaatgtcactatcgtgatgtacctgccacggcaac

SEQ ID NO: 38556 - DNA, 411 bp, Oryza sativa
tattacggacactatgaaactcagcttatgtattgttcgcgttgttggcattgatggccggatgttctattgtggcaatagccgatgtaactatagatgcctgtgttgctgaaaacagtatagtgcaccctcatcttgctgctgacatgataagcttaaacggattctgtgcatctgtgggagggcttattggattctcaataagtggtttccttgtccatgcaataggctctcaagtgagtatcgttggttttacttgtttgttagtactttgtacttctaaatgagaatcacaatggttataccactttactatagtcctggcaatcaatttaaatttaaattattctccactgaaagatcctgtttctgcataaatataagtgaagtggtggtggtggtgcttctctc

SEQ ID NO: 38557 - DNA, 403 bp, Oryza sativa
agctttgattagcatgatctctctctctctctctctccagataggctaacacaccaacctggcagtacttaattaagcaaatgatgcaccaatcagtgacctccctatcaccctatgctaatttcttattgaataccatagatttgtcagtacacaaccacaccaatccctttctaacaaactgcaaaaaaaaatgagttgatgccaaatggcaccagctcttgatgattcatacccaacaattcaacaaaagcatatatctatgggtcttaagacctttatcataacagagaacattgtttgggaaatgtgctggccacactactaaatcaacttgcctgtattggcatgctgacaaagcgataattgtgattagtgagcttaacacatagatgatgaaggg

SEQ ID NO: 38558 - DNA, 343 bp, Oryza sativa
cacaaaaactagcttgctcttatctgcttaaagtgtacgatctttctattttaatttcgtcgaacaccttgcgtggaagaacgggaagaacaagggaagcagatacgaaaaagacagagatacaaatgagcaggaagaggatttgtattagattgagggatagttctgtgtacagatttctcattcgttacctcttcccactcacgcctgggtatttatagacacatacccaagacccactttcagacccactccggcccagttacacgagtgttgggccgtctctctctatctgagcgtctgatagtcttgatagggttatcatcaactgtaacatgccccc

SEQ ID NO: 38559 - DNA, 422 bp, Oryza sativa
  unsure (1)..(422): unsure at all n locations
agcttcctcaattattnttattcttagttttctccttgattntggggaaaaaaaataagaagatcgagtggatcaaaaaccctaaaccaattatacaagatcaagaaaaattcggtcggatttgattgggagaattagctccggcatcatcggcaccatcttctggaggttgaacacgtgtgagctagtcccatggctccacctgtaggttgggccaaagagagataggccgagcggagggaggcagcacattgggctagggctgaaaaagaagaaagggataggctttcggcccaaaactaagaaaggagtataacatatacattcaaaaaatatcttacccattataacgcatagatattnttttctagtaaacttaaaaagaacaactcagaagtttgtatttntatataggatggaga

SEQ ID NO: 38560 - DNA, 366 bp, Oryza sativa
  unsure (1)..(366): unsure at all n locations
attgacaggacagtccataaaagactgtttgtttttttgacacaacctgtaacatcattttgttgcgtgtttaatccgtgttgtatcagtgtgaccaaaattgcacaacgaagcanggaaatttctgagattacgactggtatatctttgagagaatagaaatcatactgtgtgtttccgccgctcaagcccaggtattctctcccaagcgtatgtgggaattatacaaagctgaatctgcatccacttctgtggattgtgtctctagtttgccaatctcttttttgaatgaaatagtttgcccaaacttttcaacacgtattggacacatcctttggttgatgcagcacaattttcccttaaccg

SEQ ID NO: 38561 - DNA, 278 bp, Oryza sativa
  unsure (1)..(278): unsure at all n locations
agcttgatcatgatccttattctgtgtatctttcatcaccgngccgatgagagaggcttgattcggccggagcaagccgaatctattaaaggaaaaggagtggtcattggagagcctatgccaaagatgatgcatggtgcttgtcacgcccggaaattcactattcatttccgaactaatttgtgcataaaatcctcatccaggaatcagccgaggtacacaaactgacaatttaatatacaaattcatcttaataataacgttacatacttacaaaa

SEQ ID NO: 38562 - DNA, 449 bp, Oryza sativa
tgtaagtatattctcatggcggcatggatctcttgattgttgataatatcaaggcttgtaaccgatttctggaaaacacgaatgagcagacggattggagatattgtagatgggaattcttcgctggcttttatcgggaatatgacatctttgagcgaactgtatgtgatgcttttagctaaaaagcttaattacaattttgacaaagttgcaagctaattaccaatgtttgatttctttcttacagattattaatgaactgtaagatatctggtgatctcagagcaatagatttttctaagtttgaacagataatcttgctgtaagacttgtgggtatggtactaattaatgatgttattgctcatttcctcatgctgcgaaccatatatatgtttgagtaatgctgtagtcttgtcacacagtgacctgacgtttaacacaatcact

SEQ ID NO: 38563 - DNA, 376 bp, Oryza sativa
agctaggctggctcccaaggctgcttaatttgtatcagttagaactgctgcaattatttttttgcttatgatttcctgcataagccataccctaaatcgatcttgctattgaagtcctattataccagtctcttatagcattatcttgatgttcctttcaggctgattttgacccaataagatggcttgatcgagcattaattagtatgtgctcaaaatttggagactatcagaaggaaacaccctcatctttcagtttatctccacgtctatcaatatttccacaatttatgtttaatttaaagcgttctcagtttgttcaagtaatctgtttctcatgttcattcagtcatgctgaacatatactctcagtttg

SEQ ID NO: 38564 - DNA, 461 bp, Oryza sativa
  unsure (1)..(461): unsure at all n locations
tgctgaattaccgatcgaggtgggtggagtttgtttggttgtcgcctaanatggcctatgtttatgtgaggatttgatccttctatgtggcatgaggtatccctaggtcggcttgggaaaggctttgtcgcgaacctctgacaccggccagtgtctggagtaagttcgggtcttgtgggtaaagtgtacccctctgcagaggttaactaactgttcgaatagccgtgcccacggtcatgggcggatgtgaggtggttcccgttgcgtagatttgtttgcctgtgctctgcgaaaagttgttgtggtgtgggaatcgtaaccagaatcagcctatgtggcagatggatgacctgagtggtcagaaacgaatctgtgtgattcgggatgtctgtgggcatcatagactatgcttcctgagtggaagcggattgctttgtgctgggcagctggactctgggagt

SEQ ID NO: 38565 - DNA, 407 bp, Oryza sativa
  unsure (1)..(407): unsure at all n locations
agcatgcaagctttcctgtgaangatagcaatatgcatttcatcacttcatcaccgaaccaatctaggatgctgtcactataacaaagcctgctatctctctccagaatcaaaaagaccatccatgttagcggttttcagtccgatacttatcatggtgcaatcgaaagttcgcagcaatcatgacattcataaatatcatcatgtctgtaaacagtgagctcgctatgtctagagatgattcatgttgacgatacaaatgaccgatgttaatcaccggccctattcgtttaaggcaggagcctcgtattcatgtaatgacggataaatgtgtaatacacacaagttccatgacgattcattgaaagatgcggatacgcgatcatgtgtatacttagctactgacat

SEQ ID NO: 38566 - DNA, 477 bp, Oryza sativa
  unsure (1)..(477): unsure at all n locations
ctttggacctgcactggagttaagcagatctcccaggcctcttttttttacatcaacactatctcaatgaataaagagagaaataatatttcttacacttatattagtattaaataatgtagttccacttgtcattagagaaatactatagattcagggttatgagacaaattaatgagaaaatgcactgacatgcgaagaaatacacttccggtgaatcatgtgagagcacacggattgatgggccacaagtctagtccaaaccgacttaaagtggggccaaccaaccatgcaccgaccaaggagtccacatgtcagcctcatgacaaggtcggtcaagaatggtggtttccctggttcggccgaaccaggggtggcgccccttggtcctagcttccatgtgtcactctcttagccactctcaatgataagtatgccttattcccggaccanaaccgacttaagcaactgtcattg

SEQ ID NO: 38567 - DNA, 417 bp, Oryza sativa
agcatgcaagcttatctctatgcttaggaatgcattattatattcaccaccgtcagtcgccttcgccgccgccgactgatgtcctcaccttcacggctggcctattatgccgccgctaatgggtgtattcgccttcaccaccggcttgcctttgccttcacctccacggctgtgcgattatgccaccgctgatggtcgtcttcgtcttcaccgccagcttgccttcatcaccgtcgactggtgccttcgcccccacggttgtgagattatgccactgctgatgggcatctttgtcttcaccgcagccggctagtgcctttgcctttaccgctggcctattatgctgtcattgatgggtgaccatgttttcaccaccagcttgtttacgccgccaccgactggtgctctcacttccac

SEQ ID NO: 38568 - DNA, 444 bp, Oryza sativa
  unsure (1)..(444): unsure at all n locations
tgggaccagcacagcgttaagggagatggcgaggacggtgcgtctactgcaaggacagtggctccacgaaggaggaggtgcatggcggcggcggccagatccaagtngaatttttgctgcctcccgctntcactcacccttgcttctgttactccatctgtaagcgatgtctttgccttagcagccagatttgatgtcgtcctttggaaatttgtggccttctttatggggatctttggtgcttgcccgatttgctctccatgggtgttttggagatgcttgngctgattctgtcaccactggatttgccgcatcgtgactcgtgagctgctgcatcttaaggcgaaagattggtttctttacggagttgagatttgtttgtgtgtatctgcttccacctttantaattttgtagcgtcaatcttcatcgtattcaattatgtg

SEQ ID NO: 38569 - DNA, 425 bp, Oryza sativa
  unsure (1)..(425): unsure at all n locations
agcttagagcgtgatgagggaatatgtaagtctgtacaacgtacgtggagaaaaaatatgtaattttctttttcttcgagagagtatgtcaaaatttgatggtcaaattatttgtgttaaagaaaatgagcaaacttctactaaaatattaaaactttaaactcaaaagtgaaaacaaaattaaccaaagcccatatttgaaaacttttcaatctaaattttaaagctttcaagttaagatttgaagactttatttttaaccttgatttgaaacttacaacttagatttaaggacttttgaatcaaaatttgagaactttntaattcggatttgaaaactatcaaatcaagatttaaaaatttcaacttaaatttaaaaaaaattcaaattaaatttcaaaactttcaacacaacatttaaaatc

SEQ ID NO: 38570 - DNA, 446 bp, Oryza sativa
  unsure (1)..(446): unsure at all n locations
ntcctttntcgtcggagatcgaacttgatgcagcccaacttatttgatataactcgcgaaacaatgaaaatagaaaaatggtggcgatgcgccaaagtattattgaattgtcgtcacttgtttacaaggtgtcgggccatatttatacccgtagtagataacatgttcttgctggacacgactctatctctattacaatttaaaatacgaacaagtcccttaggcgaactcttaccaaaaatatctctaaggaaactaaaaatatcctaattaattgatataattgcccttttctggactccaatccttgcgtggcaatgcctatgaggtgctttgattgatcccgatgatagttacggngtcgtcttttcgggactggttgcatcggcttgtcttcattggatttggtgtcaatcgatacatacggcagccgatgccgctcgtag

SEQ ID NO: 38571 - DNA, 428 bp, Oryza sativa
  unsure (1)..(428): unsure at all n locations
agcttggtacagcgtcacatgcgtgctttgttgtctgtaccagcgtctcctaaatgctggttagttcgatcctgtttttgtgcatgattagatcgaccctatgatgcttggagtagtttcctactagctttttctcttcaccgaacatgctaactagaccattcgttttcactccttcctgatttcctagaccaagagatgtggatgcacgatgaaatcgttctatatataactgggtccgaaatgacacatcgatcatccgatagactctcttatcgcaaatatttaatgttcgatccgaaatggcattagattttctggtgactattctgttatattcatcacacaaataaacagggtcgtggaaataacttgaggctcacgagcactntgatctcggcccgatctccaaatgagccgaaatggag

SEQ ID NO: 38572 - DNA, 427 bp, Oryza sativa
agcttagagatctagagcaaagcgaggccgttctttagtgctcaaccgccgcagcttagcgcgccaaaaatattgctatcttctcaaatttccctccaattcccctactcccccttccgtctctctcctccctcgtcggccccgcgccggcgccacaatctctgcctccgcagccgcgcccgccgcctccggagatgtactccccgccccacgccgccgactcggactccgagggatccctcctctccgacgtctccgcctccccgccacgccgccgctcgcctcctcgcccggcgccgcctcctcctcctcctcctcctccgcccaagcaccgtactaggcccgccgcccccaccaaacccaagctcaagcccacgccgcccgctgcctccgcgcccgcgcccgccccgccgcctccagctacgct

SEQ ID NO: 38573 - DNA, 370 bp, Oryza sativa
  unsure (1)..(370): unsure at all n locations
tcanaatttctagatgagggaggaatataagctagtcaatttctgacagggcatgctcttgacatttctaagcctgtgcaaatttgcaatcagctgagctgtgctgtactccgcaagggaaaccaaatgatttggttcgcttacatatcaaacataaaaatgggtcgcttacatatcaaacataaaaatggataagttcacttgaggtcccttaacttgacattaagttcgattttcgtccttaaaccgcaataccagatacaacggatctctcaactatcaaaactggttcaatatactctcccctcctataaaaaccaatttaatatcagatgtgacacatctactatgaatctagacatgcatatgt

SEQ ID NO: 38574 - DNA, 419 bp, Oryza sativa
  unsure (1)..(419): unsure at all n locations
agcttggacaaaggtttacatcgtttctattattggaggaagtggacatagatgatggaactaaaccaaggccgacttttgtaaacaaaaacatgagagccgattataaggttaagataatcgagctacttaaagagtatgttgattgctttgcatgggaataccatgagatgcctggtcttagccgtgagctcgttgagcatcggcttccaattaaaccgggttttaggccttataagcaaccgcctcgtcgttttaatcctttgctatatgtccgagtcaaagaggagattgatcggttgttgaaggcggngtttattaagccatgtcgttatgcagagtgggtttctagcatagtcccggtggagaagaaagggagtggtaagattatagtttgcatagattttagagatttaaat

SEQ ID NO: 38575 - DNA, 462 bp, Oryza sativa
  unsure (1)..(462): unsure at all n locations
tactcaagcttagttgaattntaagagaggagtggtgctctntgctcttgtttacataattataagcagtaagtttgatctatttttaagagttcttcgatttatgtttttcttggttttgatggtcacaacggtgggagcacggtgttagatcggcggctacccagcgattagaccggtggtgcttatacggttggaccggcagcggcgaccggtgacggcggcttggagagtggttagaccggccgatctacactgatcagaccgacggtaagggtacggtcaaactggtgtacaatctatggtcagaccaggcttcaactggaactttgttgagtttgtgggtaacatttaattctgctaaaaggttttgattnttggtgatttcaaccgttcaccctttggagctttntttatatgaattcgacttacagccgtgttctgctctcatttttggaaaac

SEQ ID NO: 38576 - DNA, 423 bp, Oryza sativa
agcttcaagagttcggaatcttggtatataccacttaaccatcaccttttgcgggcttagttcttttttagactagccctgtacataattctatcgctctgtattttctccatctctatcaatatacgaggcaaagcttttgccctcctttcaaaaaaaaaaaaacatagcatcgcccctaattagacgcgagatttggggattcaaaccggtgccaagctaaaaggataaatcaattggtttcaccttaagagctccaatttgaaatccagcacagaagagaatcctctacagatgcgcacacccacaaactgataataccgtcgatccgaggaaggctccagtaatctcacctcgaggaactcctgcgcgtaggcctgcgcgagctgggccttgatctgttccatgagatgctccgtggac

SEQ ID NO: 38577 - DNA, 453 bp, Oryza sativa
  unsure (1)..(453): unsure at all n locations
cgccgacgacgcgagctcgtcagagtcgtcatcgtctgttgcgggccacttcgagatgtcctcgctcatgacggagctcccgctcaagtgcgtgtgcctgcacccaccctccccctttcatctggatcttgctgctgctgctcgagaggtttcaacttttgggctttggtgatctgatcggcgtgcgtgcttgctccgtttgtgttgcaggagggggctctccaagttcttcgacggcaagtcgcagtcgttcgcgtcgctggcggcggtgggcggcctggaggacatggcgaagccgatgaggaagcgcctcaagacgtcgcgcagctgcggcgtcnggctcgggctgcaggacgcgcaccgncgtggccgcctctcgccgcggccgctctgcggcaatgccagcgccgcgtccttcaagaaggtgtccaanggaggacagctgtccgtgct

SEQ ID NO: 38578 - DNA, 417 bp, Oryza sativa
agcttgactaggtgtgaagaagctgttttatcgatgtctgccctgctaaaccaaaggaaggggcttctttggcatatacccagggacaattcatggcatagtgtccttgttctctacaatcatgacaaaaggggacatgctcctctggcattggaagctcattgacctgtgtggcaaatgctcgatcaaacacatactgattttggtcttgacttccaaccaatggtagctgtgaactaagcagtatgcttggaatggaccaagggtgtgcccttattaactctcttgaggctagtggcggattgagttgaaaacttgagttactggaggcatacccgctgacattctttcctttttctctgttaaacatctgttacaaggattgaggtgagagaggaaacaagccatgaaagaata

SEQ ID NO: 38579 - DNA, 422 bp, Oryza sativa
catgcaagcttattgcattagcgtgcatgtttttgtgtactatcgccaatgggggactgcattgggtctgtctcaactcaatcatatgtatgtccctcctatagttgtgttaactggctaactgctcgatgcccttcatgaaagaaagagaagatagatgtgaagaaaataattctttccataaaaatattctttttacgttttgagtacagacaatttgtttgtattgttaatcagtgctgcttaagtttttatggcatagagaaaatattctcttttgaaatgagtgaggttgattattaagaaatgtatcgctaaatatacatacgaccgtgacaatcttttaaagaagcccgcgcggttgcgcgggcatcttatttattgttctatgaaatagtgctaaaagaagccatatctcacat

SEQ ID NO: 38580 - DNA, 477 bp, Oryza sativa
  unsure (1)..(477): unsure at all n locations
tacggacctataaatctcagcttctcatcatatcgcttcttgctggtgcagttgcacacgctgttgtttgctgcacgacggcgtccctctctgactntccgataggcgagcggcgtatggcgtatggagatgggagggaaaaaaaaatctctgaatgttgcaccaaaagacaaattgggtaaagtcatggatgaaataaattctgtatgtacgaacacctagatgaactgatcatgatgtggattaaactgaaagagctgacggggagtgacacgggaattattgaaggttttttgttgccgagaattgaaattcttatctgcacgttnttttaaaagaaaaagaaagaaaattttggaagagacaagatagggaatggaatggagcacgacttttatccgagcatacggcaccggatgtcaagaattcagtttgagttttggtttggagccttgatgctagtactancgtttatat

SEQ ID NO: 38581 - DNA, 418 bp, Oryza sativa
agcttgaggtgtttagtgggcattatctttataaaaagaagagatcagatgttgcatctacttatttattgcttgggactagagttcttagagtccctgtacatctataagcctaataggaggtggagagtatatttgttttgtttttaatattctgatatatttttttaatgaatttggtcaaatctcaaagaattttgacttagcacacacccaaatatgtaattaagactcatagtttgccctatgacttataagacaataccaattttgaattttaaaactcgattttaaagttaattttgatgcttttttgatgtagtttctttttcagttttggcttttaaggcgctaagaacacatagacaaaaattttactcacaaatcaatttttgatcactaataagccgtcacaact

SEQ ID NO: 38582 - DNA, 386 bp, Oryza sativa
  unsure (1)..(386): unsure at all n locations
tctgcttgattagcattatgcacatactgcaaattcccatcagccatcatgagaggacatccatctgtatctctggccactacaccccaaccaccttctcctgtatgttggaaaaaagatccatcaatatttagctttatcattccagctctaagtggtgtccatgagttcgcacagttcataagacatttaatttgttcatattgtaaaaaatgtacaaattctgaaataattcagttatgtagataaggcacttcatgcataactgaataaccttccccttcaaccaattcgttcgagcagaccaccaccaccaanacatagttaagaatttaatttgtttgctacatccattgtccagatctcctctagcacatgcagtggtg

SEQ ID NO: 38583 - DNA, 406 bp, Oryza sativa
agctgttattctacaagtgtttcattttttaacagaaatgtacagcatcgtataacaaccaagatcacacctaaatggtaacgttaacaagaacacaactcttcaagaatcaattacattacaatgctgaattacacaagaaaagatgaggcataaagtatatgagcaggacatcaattcataggatgaattttttcaagaagcaagcaagcatatcataacatcatctcatcattcaactgaaagagtacataaaaattggtagaggcatcccacaaacatacatcaaccacgtatccagataaacattcacgcaaaatcatcttagttaggagaacattgcacaaaatcatctagataggagaacagagtaactatctggtttagcaacaggcagtagtgatgc

SEQ ID NO: 38584 - DNA, 322 bp, Oryza sativa
  unsure (1)..(322): unsure at all n locations
gactctagatcttctctcatacatcagatctatatcataggatatgctcatcgtacaacggaatatccanttagttaagacctaaagagatgttcttatctcctgagtcaaacatatcactatgaccttatgagtgccttctaaatcgtgaatcctgtggatgtgcagctggattcaatcgcatcttagaattggacattgaattgcatctcgagcgtgagtgatgtgatggggccacatgacatggcaaaggtgctacatcattgtatgccacataacttactggaaatgcttggtcatcaattgacattgcaccttgcta

SEQ ID NO: 38585 - DNA, 417 bp, Oryza sativa
agcttgagttgtacagagtgtatcttgttatacataagccatctattgttttcaattctttttcagtttttaaggggatgtattggttcaatcaggggtgtacggcgccacggcggttagacactttagaccatctgaagaaatcccctgctgttcacatttttctttttcctatgtgtaaattgtttaacgtaaacatcttatatctgcttgagaaaaatattgtttcagcaaacttctaaatgtaatgggtacccatattgctgacaacaaaatatgcatgaattacttgcctatggtctatgacagggcaagggcagatgctccactacttatattggaattgggatccagaagaactccatgatgaacagtatcaacagcggattgcttggatccataggcatacctacagac

SEQ ID NO: 38586 - DNA, 432 bp, Oryza sativa
  unsure (1)..(432): unsure at all n locations
ctcagctatggattgtggagaaattgcacatnttattattatctggtcagattcccccatctctctctcactccgcacacacatgcatagttgatatggatgttacttagcagatgcatgtgaatggcaaggctgatttatcaattttataaactcaataatttccaatatgggtattactacgctgtaccctggttacaaaagcatttatgccaactgttgcagcaataatgttgtagtgcatatcaattgattacagtagatgcagcattgcgtatcatagagcaacagatgtttacatgcatgtagtactaatggaagcaacaacatggctcaattatagaagaagcacatagattattagatatcagcctctcattcaattgctgcanatttcatatgttctccatanagaaatgtgggtgacagcat

SEQ ID NO: 38587 - DNA, 427 bp, Oryza sativa
agcttattaggtcaagtccaggctgagcctttcactagttaattgcaaattcagaacaggaatataagtagccactagaacatagacagtctcgaattcacatgtttgatcgttaccttttctactcagttctacaaaaatattaaaaatctaactgcatgaaagcatttttcacgacaaatctactaatgtcattttcagatattaaatcttaatgttgcatgtactaatgttttaaaataaggtttggttgtgcatattccaatatgtcatactattagatattccagaaataccaacatgtaacaaattataatgtattcaatgctctgtggctgtcataaccagaactggctgttctgcatggttgataaaacgatgtaatactaaattatgaatggggatggcatttatatttggtagctta

SEQ ID NO: 38588 - DNA, 459 bp, Oryza sativa
  unsure (1)..(459): unsure at all n locations
ctatcactgacctataaaactaagctgcctgcggtacaccgaacacgcacttatcggngttcatttttatgcgggcggagcggagactctcataagtttccgctagatccgagagtaaggtctcttggttgcgcgtctttacaaccaagtcatcgacataagcctcaacattacgtcctatttggctacccaaagaaattcgagtagtacgttgaaaagtaggacctgcattctttaacccgaagggcattgtcgtataacaataagttcctatgggggtaatgaacgtagttttttccttatcctccctagccatgcgaatctgatggtaaccagagtatgcatctagaaaacacaaaaggtcgcaccccgctgtggagtcgacaatctgatctatgcgaggcanggggtaagggtccttatgacatgccttgntaaggtcggtgtagtcgatgcaca

SEQ ID NO: 38589 - DNA, 432 bp, Oryza sativa
  unsure (1)..(432): unsure at all n locations
catgcaagctngtatgtcaaattatagtggntcaattttttattcttaaaatagaaataaaatgattcattctaatgttaccaacgaaatcagaaaatcaaatccataaatttgtggagctaggaataccaatcttcaagaaatcttatatctgtagcagtgccaaataagaccttagtatgcgttgctcttgctatattgatttcataaatctttatgacagctaaaatatcaaatcctttagtagtatttaaaagtttaataataaatatttgccatttaactaaatcttctaaaacgtcattgtttggcaataaaacaatatctacgatgtaaactttaccaatttagaacacaagctttacccattttcgatcaatgttattgaaaaaaatcacatcaaacactgtgacaaatatcagcggaaaaaaa

SEQ ID NO: 38590 - DNA, 443 bp, Oryza sativa
actaagcttaaccatatgttcagacttcagtggctactcgagctaattattttctcgcttataaattctttggtccctttcctgtcattgctcaagttgggaaggttgcatatgagttacagctaccagctcatagcagtattcaccatgtttttcatgtctcttagctgcgcaaagcccatggttttcaaccagatgtgctctcacagatacctcctttcctgaagcaccttcaagtccctgaaacatttctagatcatcgtatcgttcgcaaaggtaacgctactgttgttcaacttcttactcagtggactggatgtgcagctgttaatgccacatgggaagatatggaagatcttcaacaccgcttcccgaaggctctggcttggtgtcaagccacctttcaatactgggggcttgtcagccatcatttggaaaggctg

SEQ ID NO: 38591 - DNA, 421 bp, Oryza sativa
agctaggaaccggcgttaggcataatgggttgtggtatctagatagaagagggacggacaaagcactatgtagtgctttgttagctagcacaagtgaagaggaggctaaattgattctaaaacattgtcaattgggacatatgtcctttgatactatgtctaaggtatttcctgatgagatgagtaaggtggacaaaatcaaattaatgtgtgatgcatgcgagtatggaaaacatacacgaaccacatacataagcagaggacttcgaagcattttgccatttgtgttggttcactctgatgtatggacttctcctattgcttcggtaagtggagcaaagtactttgtcacctttattgattgccactcacgaatgacttggatatatctcatgagacacaagagtgaagtattgaaatg

SEQ ID NO: 38592 - DNA, 418 bp, Oryza sativa
  unsure (1)..(418): unsure at all n locations
tactaagcttatatgctatgtacacaacttggaacttcaatgttgtttctttaaggattgaaggattggtccactctcacatttgactatctacatttgattaagaggctatgccatatctttgtgcttttcataccgataatcactaaatttgtttctccgtagatcctcccatatacttataggtgaacatttttcttgaaattactagagtcatgcacccaataattgntntttttaagatcatataccaacatatgcatgcagctttatacatattttctctttgatgtctcgcaaaaagaaatattatattagttgttgaaaatatctgaatgagatgctaagtcaatgtactacataataaaaatagcgacctctttgcgtaccggtcatggattttctaatgngagtatat

SEQ ID NO: 38593 - DNA, 428 bp, Oryza sativa
agcttctagagtcatactcgaattctcctatatactccagtagtaaggaaactattctaattcctattccactagcaccagaatactactaaacttgagagagagctatttgatcttcttcttgagtgtgtcgacaatggagtgagaggaggggtatttataggccaaagaggtgccttgggagtgtggagatgctcaaagtgccatattccctcttgcttcacctccttctgccaagtgtccagtgacggtttcttcaggtagaaccggccataagcgccttgggacactcgtaactaccagctggtgaaaaactcggctgattgggccagctactcgtttgaccgaacgagggtccagccgaaccatggcttggcccaatcagcccataactcggcaggtgcactcctcattgactccagcgacgg

SEQ ID NO: 38594 - DNA, 416 bp, Oryza sativa
  unsure (1)..(416): unsure at all n locations
tccctcaaatctgctagtgcacctaggttcccttttatatgaagtcccattggattgtgctttggctttccaattccaattcgatttgaattgcatattaaggctgtgttcgagaggaggggttgtcttccggcacgcaaaacgaagcatatattattgcatgattaattaagtattgttttttttgaaaattggattaatatgattttttaaaacaactttcgtattgaaattntttgtaaaaaacacaatgtttagcgtgttgaaaagcatgcgtgcaaaaaacgagagaagtgagttaggaaaagtgggggaagaacacagcctaaacccctcttccacttgtttcgctactagtacaccacctaaaaggaattgacactatccccgtggattggcatgctctttactcacaa

SEQ ID NO: 38595 - DNA, 409 bp, Oryza sativa
  unsure (1)..(409): unsure at all n locations
aactngaagcttanctcgcatacgacaagtattgttattttaaagcacgtaactatacgtagattaagtacatacgtacttatgtactgatacatatcccgcaaaaaaaataattgacaccattagaaaatggttaaatggatttgcctgctttgaaaaataccactactatttgcttaattgaaacaatgtcattgtattcattaactcaaatatatattgtacatatattttatgaaatatcctcatccgatccttaacattcttgtctttctcggttgatcaacaagagcacactctctctctcttactctctacgaggaagggctcttcctgtggtatagctcattgttcctctcaccagtgtcaagcgttgctccacagctttggaagtgcttctcttacatgt

SEQ ID NO: 38596 - DNA, 387 bp, Oryza sativa
tcctttgcttgctctactcaaatctagagcctatcttgttttattgagagattagatgagagtgtacgagtgtcttggagatggcttgaagattacttttgattgagcactttggataccttgtgggctgtcacttgggcttattactcttggagatcttctcctagacggttaggtgtcgcctgtgagcttccaaagatcttgtggatgtcccgggaaagtttgcgaaggttttcctcacctccgcaaggaaacgaggtaagtgagtaaagattcttgtgctgagttttcagaggttgtcctaggtagagcaacttgaacttgtggtcttttctagaacgaattgagagttggatctctgtgggcactcaattctatgaaaccacc

SEQ ID NO: 38597 - DNA, 195 bp, Oryza sativa
ccttcggcagaaaggggagacactcaaaaaaaagcgtgtgctaaaagtctactttgtcattgttatggaaggtcttagtactttatgaggaaggaagatggaagtttatagactggaattgagacctctattgaagaagcagtaagctaaagaagctttagttttaggtaaactttaaatactttataagtagat

SEQ ID NO: 38598 - DNA, 400 bp, Oryza sativa
  unsure (1)..(400): unsure at all n locations
agctngcaaaggtttttgagtcttatgattatgtttaggcatcaactcacacagcgatcagcagcttgccattcatgcaggggaacccggctgccctaacacgctcggtgaccttccaagagggatcttgacttgaacaacgccttggaaatttttatgctgccttctgctgctataaagacatagcgtgatacagctgaaattttgtacattagaggattgtaaagtatgtatgggagatggagtgtcagggtgtataacttaacatagctacaagcaagcccagtagctgtattagataacttgtacatagctatgtgggtttgagaaagatagggagagcaagttccccttataatatgtagataaataatataatgatttgaatatttagatcaaa

SEQ ID NO: 38599 - DNA, 462 bp, Oryza sativa
  unsure (1)..(462): unsure at all n locations
tatctgcaccaacacatataatttaaaacttcttataatttaagagggtttttctttcgtttttactcagactcagaaggatgtcactcaagttactgcgaatntgctaaggcaaaaggtagattataggatggttgcctctgattatttggaagaaaaccaggatcttttggatgttctaatgtctgggtaagtagtcagttagttcttccttaaccatgcatttctatgatatgtttttttccctatgacataaatgttatggacttcattcttcacattcaacccataaaacagttatatgatcttcattctttacatttacacaacctgtgtacaggtatgacaacatggacattgcaatacattatagtgcaattctaagggactgcatacggcaccaagtcgctgcaggtaacaagaccatgattacattactattttaattattatgaaaaaata

SEQ ID NO: 38600 - DNA, 412 bp, Oryza sativa
agcttggtctgcactccttgcgctatttgctctggtatggtttcctttcctcttaaaagtttatggcctgctcacacagggctttttagattgatcagcaatagtgtgtatttatatgctttcagcatactatgtgctgctcgcataatggtgctcctgtattctacttaagtactaaatccttgtcctaaaccaagtaaaaccattcatgcattagcaaattgtgaaccaagtaatagcattcagtgtgcattatccaactgtgttgacaatacccaatattagtgttttaaagttaaactttctatgcaatctgaattattcgtcttatgttctcataggtacatccagagcacatgtgctacctctggtgaggggttgtatgaggagctagactggctttccaacaaca

SEQ ID NO: 38601 - DNA, 455 bp, Oryza sativa
  unsure (1)..(455): unsure at all n locations
tcgtcgcatagatctcctggaattcttgatatgtgtttttactagtcgataattataatttgcgtgtcgatgcgttcttgcaggaatcgtgcacttgagcagccaacaacaacacccgtcatctcgaaacatctatgcagatgtagttaatctttctcatgtccttcaatttctgaattcccgtaagatttaaattaatttgttggcatgttactacaaaatctcgtagacagttcatagccacctttacaaaccaattctaaaatgaatatgtactttctgaaggctaaattctgaaacaattagtaatgttggtgatagtgatnctgaacatggctttgtgtatgtccatgcanggatatggtggcagcggcgacggacgtggatgtgaatgactatccagcgcttagagccaatcctcgccataaccctatacgtncactgtggagagaaat

SEQ ID NO: 38602 - DNA, 421 bp, Oryza sativa
  unsure (1)..(421): unsure at all n locations
agctntcacctgccgcctagccactttcgttgcccaccaacatcaagcccgccacgagtgtgtagactggtgcctatccactaacctccgcatgcaagcatggcaaccaagtagctcttcgcacgttaccatcatggatatgggcccgccattatctccacgagaccatatcaccgcaagggcgagcaccctgccctcccctacactggtggagaaaccatctttcgtcggtcggcataattccacaatagtctcggatgcaataaaaaccggggctaaagatgatctttagtcccggttaaaaagggtaacgggcatatttgatctttagtcccggttcaaatgctgtcagggcctgtcaagccccccagaatctttagtcccggttggtaaactntagtcccggtttgtaataccaacc

SEQ ID NO: 38603 - DNA, 456 bp, Oryza sativa
  unsure (1)..(456): unsure at all n locations
actcagctgagcatgattctntnttggttttgaagaacagagttgtttatggtcgganggagaataaaaaggaatagtcggatccttaaccatccaagctcaagctcgctaggctctcgagatttagtagtccagtcttgacctcggtttgtctggagagctcaagccaagctcgattttagccaaagtaaactgaggtaagtagcttgtttttttggcagccttattntggaatcactctacaatctacatgaagccatgaagacatgaagctcccataccatgcgaccctgagaagccatcatactcacccagtcacccacaaaaccacacatctgtgggaaagtatnntactagttgtaattctatcatagtatcatgcgactgtgatctgatcgtatccaaccacaattgtttattggccatttggcaccattctctgactataatacagta

SEQ ID NO: 38604 - DNA, 418 bp, Oryza sativa
agctttactgaaattacttttatatgtcttataagtaatttagtgaaatctaaaagcaatttagatataatataaaagtaatttgtattttttcaaccaaatataatcatgtgagatcttgttataaaaatttaattcttacgaacacaaccgtgcaatcagatcgtagatcggatgagtagtttaagagaaatttttatttgaaacataggtgataggaatatattttctacttacttgatgatgactagtactacagttaagttatctagatagggtctctcgttagcactgaaacgagatgcctcttgatttagattttgccttataaaaatgatatatgtatatgtttaaataatgtgaaaatgatgtaaagataatatttgacatttcttacatattaagttctaaaaataca

SEQ ID NO: 38605 - DNA, 396 bp, Oryza sativa
  unsure (1)..(396): unsure at all n locations
aagctnggggatatatcattatgtgcattcgatcttgtgatacatatcttgctatgcccaagtcactgacgtgtgcaaccatgtcactatccaacagaatattgcttggccttcaatcacaatgtactaatggcaattcacactgggtatgaagataatccaaagcaaatgctacatccaaagcgatattaattctctgtcttaaagtcagaacctttgtttgactactatgttcatgggaatttggatgtaaccacatatctacaatcccatttggtaaatatgggaacactatagccctagaatcttgcccagttgaatccccagaagaacatagagtaataattttcacgagatttctgtggccgacattttgtatgggttatcactccgcaa

SEQ ID NO: 38606 - DNA, 416 bp, Oryza sativa
agcttctcaaacgctcctgtgtgtttacctggacggaggaggctgagcgggccttcactcagttgaaagcgtacctcagttctcctccagtcctggtcgccccggagccagatgagccgttgctactctacctagcggcaaccccgcaggtggtcagcgcggcgttggtcgtggagcgcgacgaggacaaccctcgctccacgcatccctaccctgtgtcgactcgacccgggagagagcatggaggagaggcccccgagccgaacggcggcccgaggcccccgacggccggagctggccctccgcctgcttgtccgacggtgccaggcgcccccgacccccatgatggccccggggccactgcgggaaggccgcgcctgtcgccctctgaccccgaggtcgtcggcacagaagcc

SEQ ID NO: 38607 - DNA, 441 bp, Oryza sativa
  unsure (1)..(441): unsure at all n locations
cacactaataagtctaaaatacaaccaagcagtcataatatgctcgatcgtcgatcggtcttctgtctttcctctaagcctatcaagtctgataccataatatatatattttggagggcccctaattttagaggtctagtgcggtcgcaccgtctgcactggctcanggccggccctgaccgctgcacactctcgagctcgtttagcttgactcggctntgaatgccaaatgagtcaatcccaagtctctttttcagctcgtttctgaaacaagccgagcccgagctggctcgcaagccgttttatttggctcgtgagcctagaccatcatgcatttatatggatgaaatttatttattagtggagttattacttgtcaatatngtaattatcatctatatntgatgaattgaatatatanaagttatttaatcttacatg

SEQ ID NO: 38608 - DNA, 416 bp, Oryza sativa
agcttagccaacatgagtttaattccaaaattcactttagtcaaaggctctaagtgccatacttgtgttcaatcgaaacaacctcgcaagcctcacaaggcatttgaagcgaggaatttggcaccactagaacttgttcattccgatctatgcgaaatgaacggcgtgttgactaaagggggaaagaaatatttcatgacactgatagatgattgtactagattctgctatgtgtacctattgaaaacaaaggatgaagcattacattactttaagatctataaggctgaggtagaaaaccaactggaaaggaaaatcaaacggttaagatctgataggggtggagagtatttttccaacgagtttacttctttctgcgaagagtatggaattattcatgagaggacgcctcccta

SEQ ID NO: 38609 - DNA, 390 bp, Oryza sativa
  unsure (1)..(390): unsure at all n locations
agcttctccaggtttcatctcanattttatgttctttttgaaaagatctcgacgaagttttttaatatttgaagttccttgatgaaagtttttcaaagcgttccaaatctcatgagcggtttgaaaatgtgaaacacgatcaaaatccgaacgacaaatcccactcaataaaatattgtgagctttacaattttgttcaaattcagttttcaaagcagcagtattaatttgatcaggaatcacataaggattagaaacttttctccaaatatcaagatcctcagcctggatataagattgcatcttactacaccaataaggaaaatccgttccattgaaaacatggggcttagttgtaaacttattagctatggcaaanacctcagatcg

SEQ ID NO: 38610 - DNA, 402 bp, Oryza sativa
aacataaattaccaagtcctccgatgggcagtgggaatgcttcaatcaaaaacgctgcatcatttagtagcgtcaagttttttgatgcaggcggcaacagccatcaaatcaattctgctctcggatatatatcaaattgctaccgtgtctctgattttgaacatgatggtttcttttatgggggacctggcaatttttgctagctgtttgtaattaattgagctccattttaatgtagtgatcgagattcaataaagtttattataattgacgatgtgtgtcactcttagttcataagtattggttagtcataattggctgtagctatataatgagcaaagaccaggatgtttattccattattaacaataagtattatttagtccagaacatcgattcata

SEQ ID NO: 38611 - DNA, 421 bp, Oryza sativa
ctgcagctgcagctgataagcttattggctaaagtttgtccttatacttggactctggctagcaagaagtatatgatatgggattccaaggtccaggctgatacttctttgttcttttataacaaaggagatttgattatatttgtactcatttatgtagatgatattattgtcaccagttctagacaggaagctgttccagccttgcttcaggatttacaaaaggagtttgctctgaaggatcttggagatcttcattactttcttggtattgaggtaactaaagtgtctggtggtatagttcttactcaagataaatatgtcaatgatttgttgagaagagtaaatatgtttgactgcaaaccggttagtacacccctgtctacaagtgagaaaatgtctataaatgaaagagatcctt

SEQ ID NO: 38612 - DNA, 442 bp, Oryza sativa
atggagagtttatgaggaccaagccacccacattcgccatagttgtttaacctatggatgcggaagattggttaatgatcattgagaagaagctaattcttgttcgagtacgtgaggccgataaagtgatctttgcggcaaaccaattggaatgaccagccggagactggtgggacacgtacaaagaagcccgagaagaagatgctggagaaccaaactgggaggaatttaccacagccttccgtgacaacttcgtgcctgccgcggtgatgaggatgaagaagaatgagttcaggagattacggcaagggaataccacagtgcaagagtacttgaaccgtttcactcagctggcgcgctacgcaactggagatcttgccgacgaagaggaaaagattgacaaattcattgaaggcttgaatgacgagttacgcgggcccat

SEQ ID NO: 38613 - DNA, 425 bp, Oryza sativa
agcttgcttcctcgccgtggggctccacctttttttgcgcagctatatatatacgacactgataatgaaacaaagaataggcttaatatgtttgagagagaacgatcagatgatagtggtcctgacaaagacattatagataacctaggtgcaatgcttgatgataataacgagctggtcaaagctttttgatatgcaaaagagagattagatgaacatggtgatgaggagatcactcttaggctcatgggctgtaatgcgaaggatgaagtgcattacaatctgccttcaagtggtgagatagctgcgattgttgttggggattgctaaaaaaaacatatatatacgatgtattagtgaaatctactgacaatcgattgcgtcaggtctcagctctacatccctcatatatggcgctgcaatat

SEQ ID NO: 38614 - DNA, 443 bp, Oryza sativa
ctttacgtatagatacacatgtgtcatcttagaacggttgttttaatttgttgttaattatgagttttaactgttttttaagcgtccaagtaagaaaatattattttatgacacgactgtgcaatatttgaagaacttaactccagttatcaatagtaaaatggtatatttttaaatacattctcggactttcggtataatttggtttaacgtaaagaaaatattcttccaaacgcatcaaattaagtagtttcactcaatacgtcttcatttacaaatatcactgtgaatgccgaaattcaaccgggctctaataattaaccttataatgtgaaaatccagactctaaaggcgtgttctgatgggactaaaactttatattccctgtcgcattggatgtttggacgctaattcgaaatattaagcatagactaattacaaaa

SEQ ID NO: 38615 - DNA, 422 bp, Oryza sativa
agcttatagcaaggtagtaccatagtaatattctatttatatgtaagatgtcgtgaccgagaaaattgccttttcccgaacgctagtgtattaatccccgtcccaggaaaagccggggtacaccacacaaacatgatataaaagacacatctttattatatcgatagtatatacattattacaaaggcacttaaggcctgacaatcaaaaataaacagcagcggactagcgggcctacggctccatcttcacaggcgctcaactggggtataagccaggactccacctaagacttcttctccaaagcttctcttactgaagaggggaaagattgagcaagaatgagtacaaccacagtactcagcaagtcacaccggagatgcataattaatgcaaggtggtacaaggtgataataatatcg

SEQ ID NO: 38616 - DNA, 444 bp, Oryza sativa
  unsure (1)..(444): unsure at all n locations
tagagngacctgcngcatgcaagcttagaccggaggcaagcggcttatatttataaaggaaccgtacgggcgaaagtcccatggcgaaggccattggctcggacactcggacttcgccagacaaggacttcatcagaaggcgatgcgggtgagggcgataaggcaaaagccctggcaggagggcctgggcttcgccaggtgccgaacctcaccgaaaagtggcccagcgggctactgtgcccaggaaggtttcactaagtagataggccgagccatttagcccaattaaggcccatacatgtaaatgacacagtgtgcccttaataacatccctatcgtaagggtaactatgtaaattcccctgtaaaacctaaaccctaaagggggaacctgtaatagagctataaatagccccctagggtcttgtaatggggggatccaaaa

SEQ ID NO: 38617 - DNA, 468 bp, Oryza sativa
  unsure (1)..(468): unsure at all n locations
tgggattgcaactagattggagagatgctagcaatctattcttccgagaagaggagagcaatatatggcgaaaganaaccgatatgacgcaaagaaagagatctagccaacgagaacttacctcagcgtactcggctgatggcgcggtaggcaagctggcggaggaagacatcgccgtatgcggagatctggccggagatgaagtcacctggggatcgccttgtgcgtcggagaaatcgccggggagagaaaagctgagttggcttcggcgatgaagacgagagaagatggtgtgagaattctcgagggtaacggttagtatttaaaacgctggaataacgttcgggaaacgacaagagcggatttctctcagaatcgacgtatagcaattccgaaacattatccaatattccggacttggngagcatgtgttaacgaccaaatttggtaatccagcaatcggagatg

SEQ ID NO: 38618 - DNA, 424 bp, Oryza sativa
  unsure (1)..(424): unsure at all n locations
agcttatatatttgtcaccatcactcttattatatgagtggcattctgtgcaactatgtttagagtatgtgttgaaccttaaactaagcaagaatcttctaataacaatttattgaacgatcattgagcttataattataccacgcctaccaagaaaaatctgtcgcgttttgaggactaaaatttcctatatgtggaattcaccttcgtcgattgcttcaagagatatcaacagtttatttttgaaaacaaaagcagaactttgtctcatttcattgataagagttaccaagaaagggatcacacggaaaacaccatcctacaaacttctcaagatcattcctcanagctacacttaacacctaanaacaccaatgcaaccaaaaacttaaggatacatcggtttctaatttactctcagaga

SEQ ID NO: 38619 - DNA, 472 bp, Oryza sativa
  unsure (1)..(472): unsure at all n locations
tcgcattgatgtttagcgagaaatcgcgttctggatgcctatggatcggttcgcatggataacaggaggtctcgcatacacctgatttcgtgtccggcgtcgggcaagccattaagaccagttccagtgtctggcgacgggctcgtgttggagttgccccaaccatatgaatgaggcatccacctgtgagcagcttgacagtgtgcattatccttagttggtaggaaaaccggaagtaatactgcatttgttatctcttaccctatctgtctcaaagaaagaccattcctagcaatgaatctgacacactatgattgtgttttctttgggatggagtagtatgcttttaagtaaagctgggcgtgatgcgttttctctaaaagaaaaatactgcacttgttattaaaaagagaatgttaaaacacaagtaagggtgcaagcctcctncatgcgtatctcttaacgaatgctt

SEQ ID NO: 38620 - DNA, 422 bp, Oryza sativa
agcttaaagtgacttaaacgatatttatatttcaacaaagtaaataagtagatgtttatgaagtataattaatgatgaaaaacaaattctcattttattaggagctccaaaaattaaaattataaattgcatatagagattccatcaaaatcttgtatcttcattcttcagttttcatggtataatagtctagtttctttttttgaaattttttactgttctatgaaaatattataataaagtgcctaactaaatataggtataatttgatctatatagcaacatcgatcccaacgaaaactattgtacctctggtgaccttaggaggaggtccttttctgaaatgccttgacaccataccatgggaatggggtgaagctctagggaattggcccatggagcatgagaagctcagcaacatc

SEQ ID NO: 38621 - DNA, 444 bp, Oryza sativa
ttccaatggtatataattcactatttaataaaatatatttattattattaataattaatatcaagatgatgtataatagttaacttaaaaatatgctaataaataaaattagtattgtacagtagagtggatgtaataatatttgtctctaacatgtcttgccactgtaacaaccacacaaactaattttatgtgatgtctcaaatgaatggatgtataggaaaatactagtacttatttaatatttgatggccatataattaaatccatggcttataaattatttagataagtttagcctcatactttgtaactaaaatataaacacacttagatgaaccttcaacttgtctaaggagaataataactgagcttattgtaaatggaccaactaaaggtagttggaataatgtcatgtgaagtggaatatatattagtcgggtg

SEQ ID NO: 38622 - DNA, 425 bp, Oryza sativa
  unsure (1)..(425): unsure at all n locations
acctgccgcctgaagctttgagaagaatcttatgttttntttgttttataccccacntgagcgccagagatagattgatccgtaagcccgctagtccgctgctgtttattatagattgtcaggccttaagtgccttcgtaataatgtaaatataatcgatataataaagatgtgccttttgtatcatgtttggttggtgtaccccggcatttcctgggacggggattaatacactagcgttcgggaaaaggcaattttctcggtcgcgacacctcgttattatgccgaagaacatgggtgagctcaagtccgtcgaatttgtcttacaacttgcgaacctcctgccggtaagcggtcatattatcatcaaggcaggaccattctttcatgacttgatttcgacctactgagaattacacagacta

SEQ ID NO: 38623 - DNA, 467 bp, Oryza sativa
  unsure (1)..(467): unsure at all n locations
ttcttgaaaacccatttgcatcctacaggctngcacttatatggacgctcaacgacttcccaagtaccattagacataatcgagtccatctcactgcgtactgcttccttccagtagtcagcgtcaggagatgaatatgcctcttctatggttcttggggtgtcatccacgacgtatacaatgtaatcatctccaaaggattttgcaaccctttgtctcttactcttacgagtatctacaatgttgtcctcctcaggattttcctcaggcgtttgatcattgtgttctatcggtgcaaagtgctcatggngcatgacagtttcttgactagaagtgctaggtgtatgtntcatgnggaaatcattctcaaagaatgtagcatctctggactcaataattgtaccaacattgcatgtcggtactccagaagttactattaagaatctattactcacactgcgaatcac

SEQ ID NO: 38624 - DNA, 333 bp, Oryza sativa
ccagctcaccgctagttctattcttctgctcgtatgggcttagctaacacacatgttcgcctcatgtttttttgtaaccgcgaatggacgaatcaatcccaagtgtattctactactccactcgatgatgaattcttgatactcagagaactcatcactcatcctctgtgtatactagctcatctcatccgtgtcaaataaaagtacaaaaataaaatccattcgagaaagcaatttcatgctgtgaatggcatctgcaattcaagaaaagaatttctcattatgcataagatgatgattttcctgagcatattccctgcactatgatttgag

SEQ ID NO: 38625 - DNA, 396 bp, Oryza sativa
  unsure (1)..(396): unsure at all n locations
agcttatcggatcttataaacttattctaatataaaagcgancgatggaatttataagtctgactgaaccttgtcctgagtgtcaaatatttacgaccggaaggagttagtgattttaagagagaaaatatgatctcacaaagatggaccgagcttgttgactgactaacctgcagcacattaacagcgtatctctgagctgctgcatcctgctcagcacagatgcgtgcttactctgcaattatcaggtcttgttccactcgcaacagtaccttcaatataatttctggcgagtggacatgccatggtagaaagatacatctataaaaactaatgggtcaactgtacctgacacattgcttgctcttggtcctgcttatccaatagggtttgtct

SEQ ID NO: 38626 - DNA, 449 bp, Oryza sativa
tggatcacatactggacgaggtcaatgccaacatgtttcttatctggagaactcacaatggcatgaagctgttctagcatatgccacaacatgagcttgctattcatgcaggcgctcatgatctatctgataagagcatagcgaaactgaacacatgcgctcttgaatgtagctgtgccacggttcttttttgcccatttatttgtggccacgtcaaagaaggagtcaccccataatctggctatcatcttagatacctcaactctgaaattggaggaatacatcttagcataattagaaattgcaactgcccatacgtgcataccacatgagaacacagcatgttccttagtgggatacacctgagcatcattgtgtgaagacatcgtagcattgacgctatcaaatagactggagaaggtctgatagctctctcaccatcacattct

SEQ ID NO: 38627 - DNA, 412 bp, Oryza sativa
  unsure (1)..(412): unsure at all n locations
agctntaagttttctcctcttatcctcatatgatcgcctttcttcttttgcggcttcacttttattgtaggatttctggacgccagtggcagacctccattggcgtgggagcagtgaaagatctctatgtggcacaacgaacctccaaaccaatgcccaatcatttttgaatgccttgagtccctggcatcaacagtgataagcacgtgctaaagaaagtaggctggagtaaaaaatataatcacctcctggatacgctgttgttcttcatttgtcaatggagaggtcttcatacggcgaacgtcctgtgttaatatgggaaaatatgacaagttcagaaggcaagtatgttgacattactgaagaccatagaccttcaaaaataagaaagggcgactgaccccactacgta

SEQ ID NO: 38628 - DNA, 412 bp, Oryza sativa
  unsure (1)..(412): unsure at all n locations
agcttgaattcgtgttggacttgtacaactcataagaaaaataacaaattaaacttcatttatatcatacgtatgttcatatatagttaaaattgtttttttttacgttttctagaaatcaaatataaacttgcatgttgtagagtgattatatagtggtatatatgttattagctactactctatcacaaagatataagaacctaattatgaatctgaatagggacacactgttatgaaaatagatgcacaacggagacacgaattttacgtggaaaatccttgcgggaaaaaaccacgggcgccgactggcaatgatcactatggagggaatggatacaaacgcaggggatacattgngctgtcgcactctccccgtgcngnnntacagggatatatatagcagaaatct

SEQ ID NO: 38629 - DNA, 414 bp, Oryza sativa
  unsure (1)..(414): unsure at all n locations
cactgcacgatatcagtggcgttgctggtcgaacacttttgtgaaaggggatataattggaatgcacatcaagtagttntccgccgatgatcaagcttgcaattgtgagctatagaaattttatccataaaaaagtaaattttgatacatgacgctnttacggctgtacacccaaatacatgatatggttgtaggaaacctaanaaaacaggtaaatattagagaggataagtttcccccaggccaagtggccaacaccttgtaatagccgttgccatggatatcgtcgtcgcctccaattttcatgcatgggattggagaagggaatatgtggtctgggtctggttcgaaggagcaaacttatctctctcacaaggtttctctctgcattctgcttgaaaatgaataaatatt

SEQ ID NO: 38630 - DNA, 411 bp, Oryza sativa
  unsure (1)..(411): unsure at all n locations
agcttcccttttttttatttgggcattaagaaatgcaccatggtaaggacttgaatctctagggataccaaaagggaatcacattctcttggaaatctgggtttgagggaaaattatcttcatcaggacagtttcccaattggtccagggttgctttgtcctataaaagactaaccatcatgttgtaggtttatacagttgggccaagatatgcacatgctgaagcccgcaaatctccagttgtagatggggttgttatgaggaattctgatggaaaagaggtaacctttngtgcctatttgccatangattcaccagtgctatcaatatgcctcagtatttgacactttgatggatatttaacccgtttatgttctttagttaccattctgtgtagatatatagtaacac

SEQ ID NO: 38631 - DNA, 495 bp, Oryza sativa
  unsure (1)..(495): unsure at all n locations
cctatgatactcaagctttttttttttggtgccctccgctcgctctcatctttcgtgattcccggcgttcacgatggaaaactaaagttggcacccgtgttgtccttttctgattatatgaggatttcgagaattctcttcccattgtattgtcactttcttgtctgctttccttcatcttttgggttgaatcgatcagttgatgtcgtgaaatggacggcatgaaaaacatcaatattttgtagaaaccagcatcaggcatcaggcatagcatcaagtgcacattctaagaaatttttgagaattctcctcccatggtcttgtcacttgctctgctttccttttatctttggttgaatggaacagtcgatatggtgaaatggacgccatataacacaccaatagtttgtagagaccaagcatcaggcatagtgataagtgcactgcagattgttcaaactgacgnatctctgcctaacatacataatagctcaa

SEQ ID NO: 38632 - DNA, 406 bp, Oryza sativa
  unsure (1)..(406): unsure at all n locations
agcttcaagcattttgtactgaaattcacatgtttatgatttcttggcgttagacaatggtgaagtaattttatattcttattagcctgaattttaagaaattatgtttgaagactaagagtgtcgaacaagaaccattctgacacatggtatgatcatatggatataagtcacttgtgatggaccaacaaacataattacatgatgtctgattgtgattgcagtcaaaattataggtaatcacaattttagtaccaccaatgaaaggttagttcaagagtaaccaaatattacagattacttcatggatgcattntttggaattatttgtataagtagcaaagagggcanaccaagagttagtacttactatacctaatagcactttaaaataaataaacatgat

SEQ ID NO: 38633 - DNA, 482 bp, Oryza sativa
  unsure (1)..(482): unsure at all n locations
ctaagcttgcagatttgaactggccactttcaaatgggctgaacatttccttactaattttagaacttctcttaactaagaaccaccggtagaaacatntgctcgaaagccaacgtaatagcttgatggactgctaaacgttgtaagttgtaactacttcattccaaaagtaaacaccccactaaagtccgatggaagtctatctagcatcctaaactttaaaatcagacatctagccccctaaactgtatagtaccgtttatattaccttctaaggtggttttgatcggcggntttgcatatttgaaagcttacacaagtggttttgaataactaatatttaagatatctaatatacatattcaaatatgattaattgtaggccatcaatttatacttccttcatcccaaaattgtactacataacagtggatgagacacatcgtaatactatgaatccggacatatccatattattggga

SEQ ID NO: 38634 - DNA, 377 bp, Oryza sativa
agcttggtgaaacaaagaagcatgatccttatgatttggtgtatttgcttcttaaattggtggtgatcctaccggtggtgaccgcaagtgtgaaaagggtattttctgccatgaatttagtgaagactaaagtgagaaataatatgaatgaccagttattgaataattggttggtcaccttgattgagcgtgatatcttcttcaatgtacgtgaagaagacataattcactctttcatgactatgaagaagcgtaaagcaaaagctcttgagtcttgattagtattggaatatcctatgtatctaaagaccttatattatgtttgaacaatttacattttgatttaggtaagaattaaacttatttgtattttctac

SEQ ID NO: 38635 - DNA, 464 bp, Oryza sativa
  unsure (1)..(464): unsure at all n locations
ggacattatgttctgccccanaatggaagtattggagaatgtgccataactcagaatcctcacacttaaggactatagtattgaaacactccctggttatttgcagcaagtaagcatgaggaatntgttcgtggactgcagctttgagcttcttagttccatagccatgggagatacaggtcctgagtggaacaagatcagccatatccagcaagtgaaggctaattcagatgatggatacgatgaaacgatgtggtatgtctcctacacaagagatccctacagcttcgagacaaacatcatcccttcgtccaatcccagtggtatattttttttcttgggcttctgctcctttagtttctttcacatattttcctcatgttgattccatctttcatgtgcatatcatagtgcanactaatgtccttctggttgttaagcttgctgcatagaacaaatgatga

SEQ ID NO: 38636 - DNA, 279 bp, Oryza sativa
gcttacacaatttgacctaagaaataatactaggttttttcttcaagcacactgaatacttacttgtggcgcggaatgagatgacaaggcaaggccctggaactttctgcatgtgccaacatggagaaagccaaccagcagaataacgatcgaatcatgcctctggccactaaaggatctggataataaacgattcgagcctttaacaacctaacctggcgttatagaataaaagaaccatggacgatggaattcagaccatttattcattcacaaaaa

SEQ ID NO: 38637 - DNA, 459 bp, Oryza sativa
ggcacttgaatcagaatgcgaggtgagcatcaagtgatcatttatgagcagttcagtttctttcattgatcatcatattataataagtgtgcttttccacagcctctggatcgtatgagagatgagctaaaggcttatgttgtccggcatggccttgcaacagagttggaggaaccagtgaaggatattcttcaggtttacaatatcgtggaggatcttgagaagctaaagatcactgtgaactcttcagaacagccgaaaaagtctgacaaggctgctcatagtgccaccaatgtgtcaccaaagggtaatctgaagccaagatcgctgaattctgatgcagctcaaagtaaggaagcagctaataaagacaacattcagaagaagcctgatgcataggttagaggctcctacaaccggaatcctgctaaagaagccatcaccaagaatactggtaag

SEQ ID NO: 38638 - DNA, 400 bp, Oryza sativa
  unsure (1)..(400): unsure at all n locations
tcaaccttgtgctaaatgcttgcatgttctgcacaataaaggatatgatggatccttgtcagatatctggtcttgcggagtaatcctttatgtaatgcttataggatatcttccgttcgatgaccgaaatattgttgttctgtatcaaaaggtactgatttatatcaaaccgaagtaatattattctgttattggattctctgatcattnttagttactatgtttattcggtttgattagattntcaagggtgacactcagatcccaaagtggctttcacacagtgcacaaaatcttcttcggaggattcttgaacccaatccgatgaagaggatcgacatggcagggatcatatcacacgaatggtttcagaaggactatattcctgttcttcatatga

SEQ ID NO: 38639 - DNA, 379 bp, Oryza sativa
  unsure (1)..(379): unsure at all n locations
ccaactactcaatcatgcatgctctggaaaataacaaaattgatttgatttcctgaccagatactcatcaggccattntggttgtcttccatcagaccaaacatctataagcttcctgaatttgtggctgaacaacaagaagaaaggggcccccaaaaaaatccagaatacatatatgctgcatttctctccctctttttcttacaatccacaaactagctggagtgtgattagtgccactgccacctggctatttttttcagttcttgcaaaggtgaccttaaaatgaatggtagtgatggtgatgatgaggccccaaataacaagaagacagtcttgcttgccaattttctcaaccaactacagacaagaaagggag

SEQ ID NO: 38640 - DNA, 399 bp, Oryza sativa
  unsure (1)..(399): unsure at all n locations
agctttgtacttttattagaatactcttctaaatacatttatggtattgaaatattttccgagtatatgagtacctactttacattatgttcttgttatactgaatatacggctagcttatctgggagatgctttggtgcgggtataatgtttgcttatgcaattactctatgtcatgacgatgatattagagtagtatctggtagtttagacgtggtgtctagattacgagatatcattatttggggttatatattacggatgagaggtgggccgctgatggtgacagctcagtacgatatataatcctaagttaattccctgaggagggtattccttcgtatttagccncggctgtatagtcatgatggactgtcgtaagaaactcgacagtcaggg

SEQ ID NO: 38641 - DNA, 440 bp, Oryza sativa
ttggaatcttagatttgatgtactgtgcgaaatgccttatctttgattcattctgggattattaatatgattttggcttcacagaccaattattctgacggttccaacactgtgatggttttccctaatgtgtccacgtcagatattgaatttatacaaacccgttgtacttatttctgttgtgccgtcagtacttatttttctttgcacaaacccacatgaaaatgaattcttcgatggaccttcttctgacggcagtatctgtcggttcaccacaggaatatttctgtaacggtaaaatttatttttctaatggtccacccaaacatgctagctcgagcaagtggtctatgtctcctactctctagaattaatatatgctactggattatgttgggcgttccgaccactattaactccctatcctataaatatttcta

SEQ ID NO: 38642 - DNA, 397 bp, Oryza sativa
agctttgacactagaatggtgttgcagcagtgatgaaatggaagatgaaagtgacaaagaaattgctaatcaggtccttcaaaatcttcagccaaacactagcattcaagagctagctattcaaaattatcctggcaattcgttccctaattggattaaggattcagggctttgcatgcttgtttcaattacaattgacaactcgcaagactgtaatgagatcccgtaccttggtgacctgccatgtcttaaatttctcttcatacagaaaatgtatgctgtagaaaactttggacaaagaagtaactctttgactactgatggtaaacatgcccctggattcccatcactggagatactgaatctgtgggagatgtattctttgcaattctggaat

SEQ ID NO: 38643 - DNA, 452 bp, Oryza sativa
  unsure (1)..(452): unsure at all n locations
tcctcattcttatccgatactgagtcattgttggcaggctctgcttaatcttgngcacaagtaacttgggccaaaattcctacacaatgaatgaaagagtgaaagacaagctatgagactaagtaaagttgacatccagatggggaatgacaaaatatgtacgctcgaagtgcatacaagatgcctgttgatgacttcaattgctttctcataattccttggtagtttgaccctctcccataatttatttggatgatgagctctttcagctggtttcatgtataggtagaaaatacctgcaaggccagaaaaaaaaaaggataaatacaaaatacaaacagaataatgtaacanaaaagatcagatgataggcataatttctatatgggaaagaattgggagcatatatcacaagtatgcatgaatcaattgaagattagactgcaatatat

SEQ ID NO: 38644 - DNA, 301 bp, Oryza sativa
gagctttgggatgatactctgaattggggatttggttgacgatttaaggatatgcatggcactatcttcggggaaaaatattgagaataagtcctggcaaaagaaaaaaatagcgctactctctctttagacccgggtggagtgaccagaccctgactagagagttctcttcatttgaccggtgggtaacacctactcggactacagaatgaacgtttatcccaggtttttgaaacggggctaaagatagagatctgtagttccgtattctgactcccagtgtgaaaaccgatgactatag

SEQ ID NO: 38645 - DNA, 440 bp, Oryza sativa
taattagcagccacacattagagtcacaaagtgagagtattgttgagcttcacaagctcgatcgagagagcatacttagcaagcagcccatggctgctccctcctcctctcgaccgtggaccatgtggccaagctctcggcttcgtactaagagcattgcatatatatctcttctcttaaagtcgacacattaatcttctctgtggtagtatcttctttttcttcttcttcttctaccttattaagctaattaacgtgtgcgtggttaattaatgggagatgggtgcaatatgtgttgtacggtgcggtggtgtggaacgtggcggaagagtggacgaacaaggggcggcgccggtggtgtcgtggtggctacacctgctgctgcttgtcgccgcccgcaggctcacctaccaattcttgttctactacagcaacatgct

SEQ ID NO: 38646 - DNA, 379 bp, Oryza sativa
  unsure (1)..(379): unsure at all n locations
agctttaccaaccaatgtgcgcgaggcggagtgggctccgcattctccttcatggatatcggcaagaagcacaacgccttgttcccgaagaatgcacttcacgaggattccatgtaccgcgcgccgattgatggtcccttctaccagcacgtagcgtttggagatgcgatggacgcgttcactcccttcgaggtcctcgggtagagtcttatctgtgacgtatgcttggatcttggcgattcaagcaatcaatctaagggagttgggagcactcccatctggtcccgaggcctgcactccgacggacctcgggggccggtcatgctcattcgtctcccctatggggtcgggtcgcgccaacggctggganagcctttct

SEQ ID NO: 38647 - DNA, 390 bp, Oryza sativa
  unsure (1)..(390): unsure at all n locations
agcttggaagaggcaagattgaagataatggtggagagaagaccaatgacaacaagccgaagagcacattctaagggaagaagaagaaggagactctcaagaaggcttttgatcaagtctatgctgcttttgagccactaagtgatgtagatggtgaaagtgaagatgaagataagggaaagaacatttccggtgtttgcttcatggcacgtggtgaatcggattcggagtgtgaagacaatgaggtacgttcttttgagaaagctattcttattttaagtgcaaaaaataagaagtgtgagaagatgtatagaaaacaggagtttattattgaatctcttaattctgaagttgctagaataaaatatcttattcccannatgatgtgat

SEQ ID NO: 38648 - DNA, 389 bp, Oryza sativa
  unsure (1)..(389): unsure at all n locations
taaccacagcaaggagcttaggagcagaccaaatgctgtacaaacacttgcaacaacctctatagccaacacaccaacagctaacgctaaccaactaacccacacctaatctcggatgccgtaggcctgtcatcacctttatttcttctgtcatagcttctagcttgatctcatcgttaggtntgaagagcctcctccactgcaaaagattatagataatttgaaagggcaaagttagtgtcacgcccagaaatttactagtaatttccgaactagtttgatgtcacgctcagaaattcactagtaatttcccaacttacttgtgcataaaatcctcgttcaggaatcagccgaggtacacaaactgaccatttaatatacagaatcat

SEQ ID NO: 38649 - DNA, 396 bp, Oryza sativa
agcttagggaccatcttggcatagttttttgacgattcagattaattcctcacaagttaccaattgctaacacttcaattgttttcattgacactgtctttgttcaaaatcagcaatcatgcatcacattaactgatgaattacagaaggggcttaatccatttgcgagctgtcttgctcaagtacaatataaaacgtccccatttagtcatttccaaatatttaggaggctttcacactaaaaataacatcatatatataattacgagagtccctaaaatagtggttggcaaatatgtttctccttatgtactacaataatgttacaggttaagaatcctgcagtaaaggtaaaaggacaaaaagataaactaacaggagataaaaaaaacacac

SEQ ID NO: 38650 - DNA, 473 bp, Oryza sativa
  unsure (1)..(473): unsure at all n locations
ngatcatgatccttttccggtgaatacaattaatttcaatgataagaaggggntgattcggccggagcaagccgaatctactaagggaaaaggagtaatcattggtgaaccaatgccaaagatgatagtgccaaagaagccggatgttggtgttaggaaggaaaataaaagtgaagcttcaacttgtaaagctcctatgaagaccaaagtgacccttgatatgcttttggagaaatatgaaaagcaaggtggtgagagagctcacaacaaggggaaaagaccaagatcacctcttatggagcgatttggtcactcgccaagacagtcgcattcacctccatatcatcattcacaatacataccatggngtccctatccaatgccgccgccgggttatcattatccttattacatgcaatggtggggcagtaccaccaatgttcaatcatatgcctncaatgcaattcaaccaa

SEQ ID NO: 38651 - DNA, 331 bp, Oryza sativa
agcttcgagtttgcagagctcgccatcgaacacatgacggcgccggagaagacgatggcctttcgggatgggtcggggaaggatcgagacgaatcttccccgataaataccacaacatttccttcttcatcttccctctctccccattccctcttaaacaaccaagaaatcgcccgcataatcatcttcttcctccaccttctcgcccagaattccccaaatcacgccccctcgtcgccgccaagaactcgccgtcaaatcatcttctccctcaccaccatctcgccagaactcccgcaattccgctctcttcttgccaccaaaaactcgc

SEQ ID NO: 38652 - DNA, 473 bp, Oryza sativa
  unsure (1)..(473): unsure at all n locations
taaatcacagggaanaaaatgtgtgcttgctcaaggctaggaaaatgtcaagacccttgnttgaatgccaccttagtttntaacagcattgaatgacaagcaggatatgagtctaggacggaaggaaatggtaaatacataagtggagctaaccagtaacaacccagcggtcagaacactgcaaatgtatcaaggtgcaattatgaatttttactgacatgaatgaatttctaatgtggacttcaagctttaaactaattgggtatgacttccccctgaataactntaggagcagttaaatcaactaactttggtcaatagcaggttgctgactattattcatggtcggnggcctgtagttcattgatggnggaacttcatcaagtccaatntctcgttcaagagtgctcctgaactcccttgtacatcctatatgcngaaaaaggacacgttcatatgtataaggaatacat

SEQ ID NO: 38653 - DNA, 377 bp, Oryza sativa
ctttgtacaaaagatgcagatttgtggcttacacaagctccactaataaattttcctatagtcgagatgtatttgcctgagcgagtgatgcggcaatttgggcttcgccaatccattccaccaccttttcgacctaccctacaggcgctggatcgtattagtcgacgtggcagaaaacgtgagaactgggaagaaacacatcatgagtacattcaggaatgggaagcccgccggcagcgcatatttccagagtcagagcaggatgacccatcgtcttatgaggagtacctgcattggtactcaggagttacacggcggtatcttgtaccatcaatcagtgatgatgtggaagcaggaccttcattacagcctgatga

SEQ ID NO: 38654 - DNA, 399 bp, Oryza sativa
  unsure (1)..(399): unsure at all n locations
tcacaaagctcggcaactcgacttccatttgttctaatcaatccgaaaatcactggagatagtatcaacactgcacgatcacgccgtggcacagtntatacaaggaacaaccttctgtttgtggcactaaacaaggaacaacttggtactactagaagtctataacgctaggtcatcccttcctctccataatatgatcagcacactttgagtaaaacaaaagtcataataatatacacttggcaaacagtaacagtgaaatagataagtactctcctgtgattcgggctttcaagttgcaaccaggatgataaactggttaccgtgattatactacaccatgttgaaacttgaaccagtaaatttacttctccatcactaaattacacaatattctca

SEQ ID NO: 38655 - DNA, 326 bp, Oryza sativa
cctcagctccggcggttgaacttttttggttgaagttggcgaaatgcttggggtatactggcgcatgggcgttgacttttacccccctcaaaaattggagcgacacctggcgcccctcttctgccccagagaacatcacccttggtgagttaacctctaacctcgctggggtcattagctcatcgccacaaaaaagcataaacgggttagacttgtgttgtcttgagggggtcgtccgaacaggccacagaacagatagcactttctctggacatttgccctttgctgcacccgtcaaccttttctttagtgcttctaagatcttg

SEQ ID NO: 38656 - DNA, 370 bp, Oryza sativa
atctacatgttatcttggcccggcaaaggcacgggtatgcctttcaacccgtggcttgatgaattattaaatcgacgattgcttacgtctattgagcccatgcaaggatgcgagctaactaaattgtcccgtgggcaaatggacccttccgaatgcatagcatgtgccatgtcatcataacagcaagtacgcgacgagttaagagtcttgacaaacacttacgagtatattattcgctaactaagaaaagcacgagagagtaccataagcccggatggaagagctccttgcggacgcaaatcggtgcctcacttctatgcctcttcactcatcggtggctacaagaacggcgagagtgctctgaatggtc

SEQ ID NO: 38657 - DNA, 393 bp, Oryza sativa
  unsure (1)..(393): unsure at all n locations
tcgaaaaggggctagtcacgtaagagcaattgtatatgccatgtgagggcacgtactaaggacccaattttacgtggaaacagaagttgttagacacctggagagtggagacatctggcgtgtacctgctggtgacaacttatggctttgtgttcatcattgatagaacattgatggggtggtccaagtcgaaatggttatcctgtcattttataaaaaaaaatggtggtgtttatcagtcacactctcattacaatgcatatcgatatctggatgccacttttgattctttttcagaagtaccctttgcctaatttgatcatggggtgctgatgaatgattcatggtgcattatggtatatttctgaggcttcttgatntggcgaaaaaaag

SEQ ID NO: 38658 - DNA, 471 bp, Oryza sativa
  unsure (1)..(471): unsure at all n locations
ctaagcttctcatctnctgcatccaagccctggtagctccgatcactatgtactccaagactgggctccacacgctcttcatcttcaacaagaactacctgcttgacctctccggacagctactgtggtcaccgtgctcaccctcccaccccaaccgtccgtgctcctccggcgagtgcgccgccgcgtcgggggcgcacaagtcctgcaacaacggaggacgcgcgtgcaccgcccgcccgacgaatccggtgacgggcgaacgcgccgtcggcgacctcacgctcgctgacatcgtcgccaacgccaccgacggcaagacgctgacctccgaggtcaccgtccggtgcgtcgtctcgtcatgcgcgccgggcagcctcctcaggtcgttaccggccatggcggccggcgacgcgggcctcggtcgtggcggggtgagcctgccgacccagctctactcgaagctgtcgc

SEQ ID NO: 38659 - DNA, 415 bp, Oryza sativa
agcttgtgtgcaagggagagatcaaaaactccatgatacaagagctcagtcacatcagaaagagatcagaacttgctgagtttaagcatgccccatcaacaaaatatagataattaaagtttcccttattaccttcaagtcaacagggcaagtcaaaacaaagaacttgagcggccgatgagggagggctgcatgctcataaacatatcagcgttacttctgatttcagaatctgtagtctcggagagctatatagatctatggatgtgtgatgaaggccagcagtttctatcgtaggtttcgttccatgttagtacgccccccactacttgcttcaatattataattcaaaatgacacaaactgaacacatttatgccttctattatagtgtaatataggagcatgttctatgc

SEQ ID NO: 38660 - DNA, 480 bp, Oryza sativa
  unsure (1)..(480): unsure at all n locations
tcataagcacttctttctcctttttttgtatgaggaaacttctttctcctgttgtactcccatttactgccagtttgcatatagccaaaagaaatggtagttgaacactctgatttagacatgtctatgaattgtggttcaatggaccaaatgaaattgaacactctgatttagacatgtgacaaataaaactgtactgtgagagttggtgggatagaacattgagtatcaacgctcttgcaagttgcaaccaagtttccatgaatattcatggttcaatgtcatagactgatagacagcatcatgcaatagcttccatatggtttaagaggacattagctntatcatgtaatagtattgtaagatggaaagcaaattcttaggaaccattgatccaagaaatcatatntacgatattgaaattagactctacttgtggtcctgacatagataataggtttttcttattattctctgatg

SEQ ID NO: 38661 - DNA, 403 bp, Oryza sativa
agcttgtgcacacctacaaccattattccggttctgtctcgcccccagcacaaattcttcaaggtaatagcaatctgcatcttcagacttgatcccatctatacatcaattgattacacatgctgaaatcttcatgttctacgactacgaattctgactgaaagatcaatatatgttcattgtaatgcaggggccaaactacttcgagatcgatctcgatgtccaccgtttcagcttcatttcaaggaaagggcttgaggccttcagggaacgattgaaacatggagttcttgatcttggcctgaccattcaggtacttttcttttgctcttggcctgaaagaaaaacttgttcttgactgaaattctgactcaagcatgttctgatcttgatgcacgcacag

SEQ ID NO: 38662 - DNA, 447 bp, Oryza sativa
  unsure (1)..(447): unsure at all n locations
tgctggaagagaggcaagggtgtnctgcaaagtctttatttgttgacatcttgaaatcactaagtgatgtatttctttctaagtgtgggccgaaaagagacttgcatctcgattcgactntaagagatgtttttcaacagctcatttagtaatgtaccgacctcccgggtcagatcattacttctcggctcccagagccattccacttgattaatcggctcccagagcctttntcattttctcggactcccagagtccagctgcccagcagcaaagcaatccgcctccactcgggaagcctagtctatgatgcccacagacatcccgaatcacacagattctgttctgaccactcaggtcatccatctgccacataggctgattctggttacgatatccaccccacaacaacttttcacaaagcacaagccaacatatcttcgcaac

SEQ ID NO: 38663 - DNA, 406 bp, Oryza sativa
agcttaaataatcggtatagaggagggagagatgatgctgtattgagctgattacaagctatataaatcagctgtttgttgtgaccttttcagcaacgtcaggtttgttcagacatcatagcccatttcagcaaatgagatctgcaaatgatgtggaatgtgtatgattctagctgaccccagttgctttgtaataagttagtaaacctggaagtcgccgaccacaacaggttatctgtttttgctgttttaacatagttattttctgtttaagttcttgtgtggaaaacatgcctgaatagcaaggaagattacattgcaaccaaaattagcagttattttctctcaagttcttgtgtggaaaacatgcctgaatagcaagggagattacatttcaaccaaaatt

SEQ ID NO: 38664 - DNA, 474 bp, Oryza sativa
  unsure (1)..(474): unsure at all n locations
ggcctattcattgaatatagatggcaaatntacaggttatgaataagtaatattagattcttataagttacttcctccgtcccataatataagggattttgagtttttatttacactgtttgaccactcgtcttattcaaaaaaattatacaaatataaaaaacgaaaagttgtgcttaaagtactttagagtaagtaaaaaaaaaaataaataataattccaaaattttttgaataagacgggtggtcaaacagtacaagtaaaatctcaaaatctcttatattatgagacagagggagtagctaccaactagctatttatcataattttaaactatttcaaacatgatcgaagaanagtcctttatgatncgatgagctacgaatgataaaccatagaaacataagcaaagcaaccaaaaaaaatagtttataagtgaaagattttacatttatattcttaatggtttaaaa

SEQ ID NO: 38665 - DNA, 394 bp, Oryza sativa
agctttcattaatcattagtacagatgaataattcaagacacaagttgcacttatcaaacaggtcctaacgaacacaaatgttttagaaaattcaaatcaacaaaaatttcacctgctgagtacacaacataaatttaaaacataccagtaatccgtcagtcgcacttgctttgtccatgactgtgatgtaaaatggaatttgaggtttaattctcttctcaagagcatctacttcagccttttgtgcactggtcatattgcacatccttggtaacgaatagaaagacttggttgccttctggacgttggccaaatccacgggttcatcaagttcttcagaagatgggaccctttcagctatatttgtaattccaacaatgtgaattttagtac

SEQ ID NO: 38666 - DNA, 475 bp, Oryza sativa
  unsure (1)..(475): unsure at all n locations
actcagcttctccataacanattctgcaaatgtctaatgccatcttctagttcaagtgctaggtcatttgcttcaagcaggcttgccgcaaatttcttttccattacctcataagtttggtctttcacgtccagcagcatcttcaaactacttatctcagttagtaatctctccttttcagaaaggaacaaagcttcattttctttgaaattttgtatttgaagttctgctttttcatttgcttcaactagtgcattgacagtagtgtcagcatcacttatagttgcctgtgcctcttcaaacttggatataagagtagaagcctcgaatgatttttgaatcgcaagactttttgcctctgaaacctcaagttcaagtgcctgaaagattaatgatgttataattctagcatccagagtttgtagctaatcatcatgaattaggtggtaaatcaagatcaaccaatcaacaacat

SEQ ID NO: 38667 - DNA, 400 bp, Oryza sativa
agcttgctctcaaaacaatgagcatgaaaatggataatgtatattagaaaggataattatttctttattccatcattccataaaatatttttgcttttccattttccaccacaaataaagacccttgatctaagagtatgactgatgatcttcttgagtccatatttttggctttgcaatatatatgatgcaagtatgtcacaattttatccctgccgagctccacatatcagccttagaataggaaaaagttcagacacaatttgccttggtgaggacccacaaagacagaatacttgagtgacaagagagaaagtcaatatgagaaaaagagctagtttgcgaaaattcataaaatcccatgagtttgacaagtggaacaagaagggctggaatcgag

SEQ ID NO: 38668 - DNA, 498 bp, Oryza sativa
  unsure (1)..(498): unsure at all n locations
ttacggacactataaaactaagcttaacgttgcggccgatctgagttgaaaaacatctctggatcatgcgttgataggttgctcctgcgttctttaatccaaaaggcatggtgatgtagcagtaggccccngaaggtgtgatgaatgaagtctttaagcagttagattcctttagtccgatctgatgatatcctgagtagcaatccaaaaagctgagtagctcgcagccggcggttgagtcaactacctagtcaatgcgaggcaacccaaagggatctttggggcatgacttgttgaggtcggtgtaatcaacacacatgcgccattgtcccgtcttcttctgaactaggactgggttggccagccagtcgggatgaaggacttccttgatgaagcctgctgctaacagcttggccagttcctccttgatcgcatccttcctatcctgcgcanaacggcngagttgttgcttgattgggtttagcgtcttcttaacat

SEQ ID NO: 38669 - DNA, 398 bp, Oryza sativa
  unsure (1)..(398): unsure at all n locations
gagctttacaagcatactttgaaacgttctgaactgagagatgaactctttgcacagatttcaaaacaaacaccttacaatccccacaggtatgaagcagaattctcatggatagccattcgatgggataccaccatcttatgaatggtattatttggacttaccaggcttggttaataaaaacttgggaacctatgtatttatgtgccgtattcattccaccaagcaaaaatattggagcatacttggctgaatatgttcactacattgctcatggcgctacaactgantctgatgttcgagttctagcacttaacacactaaatgcactgaaacgctcaggtaaggcaggccctannggtacaattcctgcacgggaggagatagaggctctttta

SEQ ID NO: 38670 - DNA, 173 bp, Oryza sativa
gaatgcatttgggcgtttgtattttgcatgcatcggcaaccacacacaaccacaggcgaacaagtcccactatgcagtgcaagcgtgaaacctcttttcgtaccaatcccagtgtacaatacacgtacttttctctggatactggaatacttcgatgtgcgtacgggccggca

SEQ ID NO: 38671 - DNA, 397 bp, Oryza sativa
agcttcttccaaagcatacgggtttctagatgtatatgacgatctctagacagatggatcttatatgaatcgtatgatgaagtaccacatgagtggatatataggaaaggaatccaaatctgccgaatcgctcatgttatgatcttctacattctaggtctccgcgttccgtcatctggcttatgttcttcatgtagcattcagatcgaatgactctatgaaattacgtcgatacttctacatattatgggtaacgtaggagacatccctattttcccccgggggtcttaattaccactgcttagctttcaattcgcctctgaccatcaaattaaatgtgaataacccgtcctcctctctttgaaacaaggggcgcttccggttctgtgcgtgcttc

SEQ ID NO: 38672 - DNA, 393 bp, Oryza sativa
ctcagcttgtacagttgggaagggggtttttgagagaaaagaagaatctacttcaaccgatatgcccttaggcacggccatacataacatagaaatcacacgtggaaggggtgggcaattagctagagcagcaggtgctgtagcgaaactgattgcaaaagaaggtaaatcggccactttaagattaccatctggggaggtccgtttggtatcccaaaactgcttagcaacagtcggacaagtgggtaatgttggggtgaaccaaaaaagtttgggtagagccgggtctaagtgttggctaggtaaacgccccgtagtaagaggggtagttatgaaccctgtggaccacccccatgggggcggtgaagggaaagcccccattggtgagaaaaa

SEQ ID NO: 38673 - DNA, 394 bp, Oryza sativa
  unsure (1)..(394): unsure at all n locations
agcttgctagctagctgctgagcagcattcctgtctgctccagctagctcagctctctctgctctgctctttgctcgataacgaccatcatcttcttcttcttcttcttcttcttcttcttcttcttcttgtacattctatttgctcgatagatagatagatagatagataggtagatagagatggagacgaaggcggcggcgatggcgatgaggaagccgggggactggagctgcaggtcgtgccagtacgtgaacttctgcaagagggaggcgtgccancggtgcggggaggcgaagctcggggtggagcggacggactacgccgccatgggcggcgggtgggaggtgaagcccggcgactggtgctgncgctgctgcgccgtcaacaacta

SEQ ID NO: 38674 - DNA, 446 bp, Oryza sativa
  unsure (1)..(446): unsure at all n locations
tcactgagagagaatgagacacggcaacacaatatttactttgtataactaatgtttgtgcttttgttattttgagtgcaggttccaagggtgccgcagtatgacgaagggagcaatgtggaagtcatgttggatacaggaaagcaccgtgcagcctgggtaactgctactgtcattaagatggttagcagtaaaaactatgttgttaggcttaaaaataaggaaggctcagttaacatcgtagattactgctatattcgaccacaacctacctttgacagaaagaagtttgagtatgaactggagccctctgcagaggttgaagtgaatctgggtggtgcctggtcgctaggcgtcatctcagatgttggaagctgtggatatggngtaaggctaanaggacatgatagctcaaaggaagaggactacatgcttgtgttgcgtgc

SEQ ID NO: 38675 - DNA, 412 bp, Oryza sativa
  unsure (1)..(412): unsure at all n locations
agctttgcgtctttatgcttcccaaatatttgaagcttgtttacattggagntcaaggcacaagtagaggacctttcacaagctggaggatcccagtgtacaccatcatatggagcttcaaatttaaaggcatcaaaagttgcataacgaatccatgcgggaatacgatcaacccatgctccacccccatgcctaaagcgaaatttaaccttggaattgtgagggatggcaggcttcccattgacatgtgaaatcttgattgaccaaatgccaaatttatccttctccatcttgtgttttgcaccattccagttattgaactcaccaatgagctgtgcttctctatatgcatgaagaanaacctncaagttaaatgcattgaatatttccccgcaaaaaaatgcattaaata

SEQ ID NO: 38676 - DNA, 480 bp, Oryza sativa
  unsure (1)..(480): unsure at all n locations
ntagctaccactgctactactagtcagcagatcaaagagtcttccaaatataaaaaagggtcagcaaatcaaagggaaacacaaacgccaagtcctacacgtcttgagttgctgcacgctgtttttcctcgccttctttgctccaccacacaatgctgctactgctagtcctgtttctggtgcacccagccacccctgcccacacctatagaaaaccatgcatgtcttacatgatcatgataactgtaaacgatgtattttttataaaaaaaattctatctacaaaaattttctataggaaagttgctntgaaaaatcatattaatctatttttaaaatttaaaatagttaatactcaattaatcatgcactaatggctcacttcgttttgtgtatctttctaatcttctcaatccccttctccccaaagtcagtcttacatgattgagagaaagagtgacattatgcaacacactaatc

SEQ ID NO: 38677 - DNA, 407 bp, Oryza sativa
agcttctgataaactgagattttcggctaacccatcacttactcttcgatatatttcttgctggaagtatccctgatcccactgataacgagtaggcccaaacaattcaattggggtagttgctgacccataccacatagttccggcaactacgaaagctgcaaaaaaaacagcagcgatactactggaaagtacagtttcaatattgcccatacgtaatcctttgtatagacgttgaggtggacggacactaagatggaataggcccgctaatatgcccaatgtacccgcagcaatatgatgagaagctattccccccggaacaaaaggatcaaaaccttctgcaccccacgccggaattacagcttgtacttttccagttagtccataaggatcagacacccata

SEQ ID NO: 38678 - DNA, 395 bp, Oryza sativa
  unsure (1)..(395): unsure at all n locations
ctagatgtatatgacgatctctatacatatggatcctatatgaatcgcatgatgaagtaccacatgagtggatatataagaaaggaatccaaatctgccgaatcgctcatgttatgatcttctacatactaagtctccgcgttccgtcatctggcttatgttcttcatgtagcattcagatcgaatgactctatgaaattacgtcgatacttctacatattatgggtaacgtacgagacatccctattntcccccgggggtcttaattaccactgcttagctttcaattcgcctctgaccatcaaattaaatgtgaataacccgtcctcctctctttgagacaaggggcgcgttccttctgtgcgtgcttcaaacaaatttgtcttcttcatatt

SEQ ID NO: 38679 - DNA, 395 bp, Oryza sativa
agcttgaaagatttgtccctgcctgatgcttctttgaacattatcttgctcaccgaaagatcggtcacgatgtcgtctccgccgtgtaagaccaaaaacgggagtgtcacctggcaactgaaaatgttaagccgaatatcagtgtccagggagttactgcacatttgcattagttgcatgtcgtgtgcagctcgaatcgagaaaataaacatggcatatattgaaatacgctggtctaatgatgatacatgctttttttgcttccaattaggaatagagagaaaataaaaccattttcacctcatgcagggtcttctcaatgtctaggctgaccatcaagagtttatgacaggtcttcagtgggagctttcctctgtatatgtacggatttgagc

SEQ ID NO: 38680 - DNA, 475 bp, Oryza sativa
  unsure (1)..(475): unsure at all n locations
tgtcttatntctatctttggcatactcactaataagagatttcttgtctttattgtggcatagtattaggagacaacctttaatagaatctccatttgacatgtgatattgtaatgattttgtatcacctaacttttattgtttgatgaaaaatcttggatgacaaaaatgttgctgtgttaggatatatttgttgataaatgactaatttggaatataaatagtcaaatagaaaaatatcaaatgacaaattgacatatatgctacggatgtgcaccaacaaaagcaaataatacttcctccatctcatatagtgcgttattagtttatggaaagtttgacatttgtaaaacctatgattntattaaatggggctgtctattgcaaaatttgacagagaactttagaatttcctcgagttgcatcaagattcatacataaaaagtaacattatcctttctcattatcttcttct

SEQ ID NO: 38681 - DNA, 401 bp, Oryza sativa
  unsure (1)..(401): unsure at all n locations
gcttaccgaagaaactatcctggcccatcaagcctaatggctaattgggctgacaatcgcctaacggcccgttaggggcccacgaacctcaattacactatatacccatgtaaatgtccctttcataagggcaaccatgtaaattcccctgtataaccaaaaccctaacctgtaataaggctatgaataaccccataaggccatataataaggggatctgaaaaaaaattctcaatttaatacactttacttcttttccaactactggtgaatgaccacgtctttcgatgtatgccggtgtccgttcgacaacagcttcaaattttttcttcgaacttncaacttttctatcacaataaaacttttctacacacataaactttcaactttttcatcacatc

SEQ ID NO: 38682 - DNA, 478 bp, Oryza sativa
  unsure (1)..(478): unsure at all n locations
tgctcctcaacgaattgtcatccatgcatcccgaagcagtcctatatcccgcgttgcaacagctccaactccaatgagtgcactaccacaaggtgtcaatgctcaatttcagccccagccaccagctgacaagacagaggtcagtatctgcgttgtacctttggaagttccaatacagcagctgagaaatcaagtacaagatgaagaacccgagtgtaagaaagttattgtttgttacaactgcagtgaagaagggcattactccaaaaactgtccccaaccaaggcaaaatcggcctccacattttcgccaatttacaggaagcaaccatgccaatcaccaagtagtcagtggagcaaatgcagtacctgttaagcctagtgctagtcagaagcaaccataatactctngtatcggtgttcaagtaccttttgtttatagctgttccccgtcaaatcatgtataacagagaaacatg

SEQ ID NO: 38683 - DNA, 418 bp, Oryza sativa
  unsure (1)..(418): unsure at all n locations
agcttgttcgatttggagggaactgaagggagattgatgaatataattccacaccacaatagttatggaataaaatcctctctaatccctctccttggggattaactgaacatggcttaaatagaaaagataatgacataccaagcaatgggattgaagaatggcacccacaactgagtttgagatatccaattatttatccaccattagttcctacagtagcattntgatggcgcctactagcagggggaaaatctggcctattccagccaaaatcaactggaatattgcttatcaagtactccaagcttntagcagagggaagtccaccttggtatattntaacatatatttggttattgaacatttagaacatgcacaatatttgtgcaaaaagaatataagaaacttttggact

SEQ ID NO: 38684 - DNA, 484 bp, Oryza sativa
  unsure (1)..(484): unsure at all n locations
agctagntatgcccncgccaccaacaccggcccgctgccctcctccatccccgtgtctctcgccaccaacaccggcccgctgccctcctccatccccatggcttcggagctaccactggcgcctagccgtctacccgttccgccgcccaccgctgggccgctgactcccacgaccatccctataaccccggcgaactcccccttcttcccccgcccatcctaaccccacccccaccccgagaccctgattcgtcggtgcttcgccggagtttgggttatcgccggtgtctgaaaagaagatgtcgccgaagttcgagaagaagcacctagagcatgaatcgcgaatcacattcagtgaaccaaatattgcagatttggagatggattatctgtcaatagatacgtagccattccgatcgtttaaacacccgcgtcactaacggggaatgctggctgtgttgcacaccagggtccaacccttttc

SEQ ID NO: 38685 - DNA, 395 bp, Oryza sativa
agcttgggcaaaagtctgccgcatagacttattgtatcttagagtttgttagagataagagtcgtgtccgacatggacatattttgtaatctcgggtataaatagaccccgagcctcatgtaaaacaacaacacatgttcaataacaatcttggcgcatcgccacccttttactttcgttttgtttcgacgagttctttctttcgggttgagttgcatcggtttcgatcttcaactagaggtaaaacttgttatggcggcttgcgttctcgagattagtgcttccatctttatgatactctaatcttgtttatgtaattcgtcgagttatcatatatcttatataatctttgacaatattgctatttaacctccaaccggctaacatctatcatt

SEQ ID NO: 38686 - DNA, 409 bp, Oryza sativa
  unsure (1)..(409): unsure at all n locations
agctntacgccaaggtgcatcactgtgtgtcctgtgcaatccatgctcacatcgtccgtgtccgctcccgtgagaaccggagggaccgcaagcctccggaacgctttcgccgcagggtacctgatccccgcctcttaactattatatctagtgcttaattgatagtgtaattagtatatcatgatcggaacgatttcctttatctgttactgcagatttaagaaacaaagtctgatatactaatagacgtaatgattttgcacagtatttgtagatatctcttatctgcacatatggtctaatatctttcaagcacgctgaaaaattaaaattctttagtgtgctgattctatgaagtttaccatttagcttttagtcaaatgtaccggcatacttaaggaagtatact

SEQ ID NO: 38687 - DNA, 466 bp, Oryza sativa
  unsure (1)..(466): unsure at all n locations
tggcatacaattgatgttcccgcaactttcccaacacctgactgagatggtgctgatggtcttcttctgattgtgagtatatcagaatgtcatcgataaaaaccacaacaaactngtccaagtattccatgaacactttattcattaagttcatgaagaaggcaggagcattggtcaaaccgaacgacatcaccgtgaattcatacagtccatatcgcgtagtgaatgcggtcttcggaatatcttcttcacgaatacgtagttggtgatatccggaacgaagatcaatcttggagaatacggtggcacctttaagctgatcgaacagatcatcgatccggggaagagggtacttgnntttgatggtgacttcattgagagctctgtagtcaacgcacattcttttcgtttgtctttttctctacaanatacaggagcacccatgggaagactcggacgtatatac

SEQ ID NO: 38688 - DNA, 400 bp, Oryza sativa
agctttatgtcaaagatggagcaatcaatttatcatccaacgagtcaactccaggagtcattatcttcatctttgcttcggagcagatattctacttcaacaacttcaaatatttcggtttagacgagttgggcaacaacatcaactctcctccaattatttgtcttcacggttggcctactacgcaactgccgatagaggatctcatcgttatcatcggctgctacatcgttattgactggatcactgacatcgtcatcttcatcaacatcttgtcaagcctcatcaacatagcctactctgctgccgttgatgggaaacttcgtcatcatagtcggctatctctgttgccgctaatcatcattaccgtcggatgcgtttgtcgccgccgattattttc

SEQ ID NO: 38689 - DNA, 415 bp, Oryza sativa
  unsure (1)..(415): unsure at all n locations
nggaaccccgcgtatcagaatttggccttgcaaggctgcttgtatataatgatgcccacgttaccactgttgtcgcgggtacttttggatacctagcaccaagtacttattctctattccacactgtgatgctttcaatcaaaacaaaagatcatgctgtcctgcataattactgctcccccttttgtattgtacagagtacagactaacagtagaagcttatgactgttaagcactntctccgtcctaaaatatagtaacctaatattcgattagacaccacctagtactaaatccagattcgtagtagtttgtactactttgtagtcaagctactggagataaatcgagacaaatcatgcttntttaagacaacaccaatgctgcctgttaaatctgtgtgagcaccttcatc

SEQ ID NO: 38690 - DNA, 402 bp, Oryza sativa
agcttgtgccactcggggtaaaacattcgactattcaagcaaccattaaccatataacagccggctaacatgttgaaaataccaagtaaactgtcgataaattatcatcaacttgtcacattatacaagcaagcaagcacccaacatcgactttattctgttaagtttcttaattataactatagaatctagaaaggcgcagccaatgctccaactctatcgcggtgaatgaagcgcaactctgagccatgctttagaaacacattgcctgaacgaaagatagcagctcacatcagcgagtagaaaagagaatgtgtaaaacttaagtttaaaaaattcatggtactgcatatgcttaagatagatctttcttatgttactgaaacctaatttgagaaataa

SEQ ID NO: 38691 - DNA, 414 bp, Oryza sativa
agcttcttccttctctctactttgtcattctcatatataataacttttctcacaaaattatgatctatagtaataagaataagaatatcattagaaatgtggaatgcaagccaaaatcacccatctacattaatgatcatgttcgaacagtataacttaatagaagatcaacaccattcatccatcatttgagaggtgtttcacgtcttcaaaacctgtttccataaacatatttaatgtaagaatccatttaagaatcgtattaaaaaataaacggttggtttaatataataattgaaataatctcaaattatgctacccacatattggtaaataagatagcaatatttgcttctccccaagatctcatcaccgaaaattttttgggcattcatacccagagtgagatattta

SEQ ID NO: 38692 - DNA, 455 bp, Oryza sativa
  unsure (1)..(455): unsure at all n locations
cgcattaaacacctaagttcccgtgacttgttgagtacgaaagtactcacccttgctctatataaatatatatatatagttccttcgccctgaagagaagataaagtaaagtgaagattatggtttcgtcctggttcccagccgtcgcctgtggtgttgggtgttagaccgttggttccgctgctgctgctgctgttggtgtttcctcgtccgcgtcgtcggttgtattctcgggctgtctgagcttgtcacgcccggaatttctatccaaaattccaaacgcttacatgtgtgtgaaccctcgtccaggagtcagccgaggcacacaacaacaaattgataatagagtacaattattactctaattaataagcgaataaaatgtcattacagaggtagatagttcctcttcaatcaaaaagatctaagcagcgganaataaaataaacggcgca

SEQ ID NO: 38693 - DNA, 349 bp, Oryza sativa
agcttggaggctatcactcttttgattagctacgagaactttctaacatgagattatttcaggcaggataatgtaatttatctgactgaatacacggttgcagccgcgcgcaccagtaattaaccggagaggcattatcgctgctgcggggaaattgtgccccttacttgcgacagctcgttcgatcgatctctctttggtggctactgttgccgtacagcaaataaaagacagcgactccggcgccggcctgtgatcgctagcacacaccacagctactcggcggtcacttcccgtggctgattccatcgaccgtgggcgataacgactatattgttagtcctctcca

SEQ ID NO: 38694 - DNA, 285 bp, Oryza sativa
  unsure (1)..(285): unsure at all n locations
tgacattacggaccactgtggctaggaccacggggtaccttcccaggtggaccactcggtcacggtgatccgagcggtctaacttgattgcaatctctgaccatcgaagatactggggcgtgtcaggctgaacagcactgatctnccgttcaatcaacttctgcttacgtatggactcataagccagctgggccgcgaagatatgcgtgagctccttgcagtggacgtgacatgctgccagggtgtcaccgacgagcttcttactcgacgtgctttgctcttcgt

SEQ ID NO: 38695 - DNA, 362 bp, Oryza sativa
agctgaaacaatagcgatttagccggtatatatgtcttttgtaattgaatggctgtggttccctctctctttttttttaaaaaaaaaaacaaaattcaagtggcgcagcccaacaaaggaaggccacaaacacagaacctcctccgatgggcccgccgctcccgccaatgcaacgccgcatctgctccccagttacccgcccaatgccaccgccgtcgcggtctcacggatgcggccgcatatcgtgcgtccccccaccaccgccgcgtcgctgtcttcacgtcgctacgtcgatcagtcagcgacggcacacgggcgcctcggcgcgactccgaagaagcgggcggcgatcatcacgggga

SEQ ID NO: 38696 - DNA, 480 bp, Oryza sativa
  unsure (1)..(480): unsure at all n locations
catacggaccttaaatctcagcttttcgtaaggagctggtctcttacctcccagttatattgtttggcatttatatgagctggatttacctgcggtacttccaaaggagattagagacaggcttgaaaggagacccaagcgaagagttctctttctcaagtttcttccctgaatttctaaggtaatccaaatctccctctttatataactttgattgattcgtagtttggaagaatatcctgaccaattaattgaacatgcagacctgtgctggatccgatagcttcaatattccacaggcttctttgtggaagatctgaaagggctgatgctagaggtcagacattggataccacacctttgcctggttcagattctattgaggcgaacagaagaaggttggntttctttctcactctctctctgcctcgattagagcataatttcatccacacttgtgccatctaatgaatatcaata

SEQ ID NO: 38697 - DNA, 378 bp, Oryza sativa
  unsure (1)..(378): unsure at all n locations
cagctttcgtcgaaatcgtcgagggcgcagctgttttatctttattctaattccncgnactccacgaactctgttggtcgtgaatcgacgccgggggagctgagggagccttccagttgatccgtcgaaatcgtgccgagtggctggagtatgatgccgactttcctggagctaggcatgatcggtgttggagccaacttccgcctatgcctacggggagaagacgcccttgtagtgaagactgcagccaaatcgtcggggagtttcatcatgattggcgggtaggccccatcatcttgatctggtggtgtcggagtagatgggatctcctccaagtggttcgaacccgactcgagcgagataagcttggagtagatc

SEQ ID NO: 38698 - DNA, 402 bp, Oryza sativa
  unsure (1)..(402): unsure at all n locations
ngacaacaactatactcccaggattactcctcaacaattccaattgatagtcaaaaattctggagtattcatcccttctagactcatatatcttcttcaggacatatgcttttgctctcttgcactaagatgcactgacatttgcaaacatttgctcagagacagttgactgcatgctctgaatactccaagttgggttatctatgatcgtcttctcatatttctgagcaattctcttgtatgtgaccaggttgttatccttccttggaggacaattgtgctcatcaacaagacttgctatttgccagctatttgtcctgctgttccttgatagcaaaaaactccatggacaagttgcccagtcacactttgcccttgtcctgtaaccttcatcttttggga

SEQ ID NO: 38699 - DNA, 409 bp, Oryza sativa
  unsure (1)..(409): unsure at all n locations
agcttctagatctataagagaaagataaggtattggcatattataaaatgtgaaggtagtaatggatgagaaagaaagaggatgtgcttcggcacgggtactcaccggaggcggaagcaacatggcgacggcaccgctgctcgcgcgatgtataaaaggtcgacgcatgccgccgacgaactcgcgaggagacgggagtcgaggctgatgtgacgtggagactggcttgcgcgcaaggagtcagaggcgagaatatgcggcggaagccggaagcagcacgacgccggcgccgctactcgcggtgatggagatcggcgcgacggcgtangcggcgggcgaatgagacggaacgggtgctggatgaggggaagccatgggacaaggggctgggtcgcaacgcaaggaggca

SEQ ID NO: 38700 - DNA, 479 bp, Oryza sativa
tcataggatggacgattcacagggagtgtttaaagagatcatcgacatggacgttgttgcttacacttcgatgatcactggttattcagaaattgtggattcagttgcatggaatgcatctgatattgccattgatatgctgcagggcaacttggaagtaaaccgtgtgactatgataagcttactgcaaatagctgggaatttgggagcacttaaagagggcaaatcactccattgctattccataaggagagcacttgttgtctcagattatattctagagacctgcattgtgaacttgtatactcgatgtggagcttatcaatcagcagttgctactttacagaattcaaagggaactgcagcttcatggaatgctatgctatctggtcttactagagctggacagagttttgatgcaatccactattagtctgtgatgctgcatgagcataatataacttcagaatctggcacct

SEQ ID NO: 38701 - DNA, 398 bp, Oryza sativa
ctgcaagcttctcgctaaatttgaccacagattcaatgtgttttttctcaacggttaactagaaattggaaaggggcttcctcaaactttgcattggattggtatgttgtgtcacgctatgtctctattttaaatcggtgtagaaaaatgaatctatagtccttgtaggttttttagatcatagtaacttttaagaaaaaatatgccatatattgattgagtggtggatccaagataaaattgttaatgtgtcatagccagagtgtgaccaataacacatggcacaattcaaaaaccacattgcaacaattatgcatataagatgctacgcaaaacttgcatgaaaagtcctacatttattagcatgtcataattataaaataacatttacatcttat

SEQ ID NO: 38702 - DNA, 86 bp, Oryza sativa
tgtttaaccaaagctacagagctcaatgtgacccaccgtgctttatctgcaattattgtaagtttatcatgtactccctccgtttc

SEQ ID NO: 38703 - DNA, 403 bp, Oryza sativa
  unsure (1)..(403): unsure at all n locations
cagcttatgatacccgcaactttggcataccgacctgaaccatcagggtgcttctcagggaataacgaaagaaaaaaaaaagttatccaaccagtaatcttaatttaattctagaaatttgagaccagattaagtttcatgtatttaacgatgtttcagtgctatctgtctggctcccttattagcattcgcttgaaaaaatataccaatttaccgaagatttacttatttaacaggaaactgtaatattcccggcaacaccacacttctatacgacatcttccttggtggattttacaagtgagcctatgatgaaaaggaatatgcatgacttgaacagactaggtgcaaacaaggtatggtggtgggattctgaacctgtctgatnttttttcatctgaaa

SEQ ID NO: 38704 - DNA, 433 bp, Oryza sativa
  unsure (1)..(433): unsure at all n locations
tgtgctccttcccacctgcatctcctactactcctcttcaatggatgcggctagtttgtgctccttcccacctgccaccttcttcatctcctacctcgtcctactcctatcacatcataccacacagcaatggggaggtctccttgctgcgacgagaacggcctcaagaagggcccctggaccacggaggaagatgagaagctcatggagtacatccagaagaacggccatggcagctggagagcgctgcctaagcttgcaggtatgtgtacatgcacaacggatggcgtacgtagctttgatcttgtagctagcatcgatccanatgcagctatagctcgatggccatggcgtttgagtntcctttnttttacatgttgcanggctgaacatgtgtggcaagagctgcangctaagatggacgaactacctg

SEQ ID NO: 38705 - DNA, 412 bp, Oryza sativa
  unsure (1)..(412): unsure at all n locations
agcttcacttgttttgatggatctgtcaccatttcctgaaataaggaaaaagaccatcaaggggggctccaggagaacacagaaagaaatctaagatattgctttctagagttatggtttatgcctgctgcaataaaggactctccagagaagaatcgccagattgatctgctgacatttccctctgttgttctgttgcacttcgttgagctgaatagaaaaattcaccagcctgaaagcaaatatcaagagtcaaaaacacagtactaagtggtccaagaattggtaaagtatggttaactatgtatattgtgctataaaacagttaggaggaatttatagtaatgttgaaaaatatccttcaccatgaacatgtgcaagtacaaaaagcagcacanaagggagcatcaag

SEQ ID NO: 38706 - DNA, 484 bp, Oryza sativa
  unsure (1)..(484): unsure at all n locations
tacggaatacagatatggtcaagcagaaaaggaacacagataatatccncttcagtattattgacgaaattatactatacacccttcatcaatagttgaatcttgctggattacttcttttctcgttcagaccaggtcgttaacaaccattattaccctctagattcaagaaaatttagagcataatcctaccaagaaaatagttgctgaaacttaaacatcgaaacagcacatcattggtagagtgaagaaactgaatctttaaaatagagagcagaaattaccatatccatggttgagcgagaggggattgcggctgggggaagagacattggaccgatttggagagaggaactgaaaagccccaaattgacttcgttctggagctgggctacagtcgtcgactttcaagcatcagtacaggaaggataanaagtgccgaacatggagacagatnagcagtagtggtggggctacgaacata

SEQ ID NO: 38707 - DNA, 407 bp, Oryza sativa
agcttattcacattaaaattctgtatgtttgtttttatgagcctaagatcctggaagggtgtcatgcggggcacagtggttactgatgatgtgagtgtcagtttcttttctttttcccccctctaatatataggtgtacataaccagttcaagcttacaaatattacataagacatgccacaaccgatctaaaaccatgaccaagaagaaacctgatctcctaacgcaagccaacagcctaagctccttagctccggctgtgctccacagggcagcctcctctgatatagccctaataatagtactgacactaggggactctccatcagaaacacacccattgcggttcttcctgatcagttagaggcccttcgtttgttgcttgtcaaccaacttcaatgaatgtc

SEQ ID NO: 38708 - DNA, 444 bp, Oryza sativa
  unsure (1)..(444): unsure at all n locations
tcagttgcacactagagccacatgtgtgtgcaaccaccattcctagttaaagctgatcagatatggtgaagcatatcacaccatctggttttcagatctcaggccagtatactttgatgataatctgaatgaaatcaactacctatgacatatatcatgaaacataacagtaaaaatattatacagccacaaaaaaaaatgcaagttacattttagcattacaatggctgcacgtccgcaacaatagtacactccttaaccaatacaaccaggtctaaactagtcattcaacaacccaaccggaacaatagttcacttatgaactaggcacttattttgttttttttatagaaaccaacatantaaataggntttaactgccaactacagcctcagatcaatggaatngatgcctccaacatgccgacatagcaatggtacttc

SEQ ID NO: 38709 - DNA, 411 bp, Oryza sativa
agcttgcacgcggctcccacgttctacagtttctgtgttaccaccggttgcatcgcatgtcacgaatgtacaccaatgctccgctgatcacattactattactatccgaatgcataccgagtttgaaaggagcaaactatgacgtggggcgactactaaacaagaattgccatacatatatttgagtatactccaagggacccatcgaacgcaagaatcatctacaaactggaatcgactcatcttatatgagctctacaatgatgtactagtacataaattcagcttagcgtacaaagtatacctttggcttatattaactttctcaaagaatcatagagaaggtagtgtatgcttatattaactctctcacataatcatagctacactatgtgtatattcagcttgccc

SEQ ID NO: 38710 - DNA, 260 bp, Oryza sativa
tggtgaacagaatcatccttaaggctgacatgcgagaatagagcaggatgcactcgtgcaaagaccttggcattgcacagatcatgcccaagactgactgcagatccactgttgatgattgggctgctacaacccctatacacaatgtgaaactacattatataccttcactcacatgatccacgaacattggcagactgaggccatctgtcagcgtagtatgagctccacaccagattaaccgcatgaatatgtatgtg

SEQ ID NO: 38711 - DNA, 403 bp, Oryza sativa
agcttcattttaggaaactgggttaatttcttgtttcctctaatatttctttctcatcatcacagtcttgccccttaaaaatggcagcagatggcactgcttcttggtatggttcctggttcatttgtcccaaaaaattttcccttctaatactctactctctgtgattcctgtttctgcggtttttctgatcagcatcagttcataaaaaaaaaagagctgcgatttgggagcaggtgtggatttcttgcttcattttacttttttttttgtgggtgatttgaggcattgagggttagttggctgagtctttattgtgtttgttgggttttcttttcactggctctccgttaatctaccatttttccatggaagaatactccatttttaaggaattttcttt

SEQ ID NO: 38712 - DNA, 488 bp, Oryza sativa
  unsure (1)..(488): unsure at all n locations
gacctataaaactcagcttttatatgactttagtaagatcagaaatgtatcactggtttntgtctttttaaacgtatgttactgagcatattcataagaaaaaattcatggacaagataacgaacaaaagtagtcatagttcttttcgtgcagggcttagcaggatgagaatcctaataataataatgatcacaatttcaatcgcaaaattgtgcgagagcaccgtagttgtccttcctagcccctcatttattttgtgctgatcaatcttttttcatccctcagtacgtcttcaagttgaccaagcttgcaagtttgtgggggctaatacactacacatgcatttatataatccaacaacaatcaagatatacatatatattctttacttccaatgatcatacttgtctccggtgatcgtatgatngatatatcgagttcgagacacananatcatgaaacattaatctaacatggaatcaagttga

SEQ ID NO: 38713 - DNA, 402 bp, Oryza sativa
  unsure (1)..(402): unsure at all n locations
agcttgctcttggaccagtgggcaaaccttaacattgctttggaggaaaccattcaggaagaactgcacattttttgaaatcacgctggctgcagcagatttatctaggtgcatctgaagcatttaagattgaagaactgacgatccagctaagaacatgaaaactgccacattgtaacatgcaacccgagtgcataaaatgccagaacccagcgaggaaatagagagaaaatcaggataggagcagaatcagtaattcaagaggttttggattgacaacaagctaaatattttttgattattagaaaggaaggacgagatccagagagtggaagggttaaattgttcgataggatggatggngcgactgaagagttgaaccaaatgagggcctggtcatgg

SEQ ID NO: 38714 - DNA, 463 bp, Oryza sativa
  unsure (1)..(463): unsure at all n locations
ntacgctctgcactntgcattcagtacaatgagaatttcataaagccacaaattaatcaaaggaatgatccattccaagtgcaaaatgcatcagaaagcagcttaagaaatagtattagacaaagtgttaaggatataagaactgaatgacattgaaatctatccagtgagacattgaaatctatccagtgagagagatgatgaactgaccaatctggcacacctgcagagatgcaacactgcatctgcatatgctctcatgtacaacaacctgaatctagtcaggaatcaaacaactgaatgctagtatcagtaaggctgacaaccatgagcagagatggtcaagaactactacattgccgttntctctcatcatcatagcagcttcttctacatagtaaaaggttntgcttctccctaatgatacactcgtgcanaagcatttgtagagaagatgatgaag

SEQ ID NO: 38715 - DNA, 410 bp, Oryza sativa
agcttcggatgtgcatcgactacaccgaccttatcaaggcatgtcctaaggacccttaccccctgcctcgcatagatcagattgtcgactccactgcggggtgcgaccttttgtgttttctagatgcatactctggttatcatcagattcgcatggctagggaggatgaggaaaaaactgcgttcattacccccgtaggaacctattgttatacatcaatgcccttcgggttaaagaatgcaggtcctacttttcagcgtactactcgaatttctttgggtagccaaataagacgtaatgttgaggcgtatgtcgatgacttggttgtaaaaacgcgcaaccaagaaaccttactctcagatctagcggaaacttttgaaaacctccgctccgcccgcataaaactgaac

SEQ ID NO: 38716 - DNA, 253 bp, Oryza sativa
  unsure (1)..(253): unsure at all n locations
gtgtaacttggaattctaagtggatgttcaaccctaaatggtctccatcgaaccgctggtatataaacagtacattggaaaaggcaaatctcagtgggattttgagatttggtgggggattggtggaattaatgaatgggccttagcccactcgaagattaattctttggaaaatcacaaaagcccacctcatgggatggcatgcatgtggagtttattaccaccttacttattctatgagaggnggacctta

SEQ ID NO: 38717 - DNA, 403 bp, Oryza sativa
  unsure (1)..(403): unsure at all n locations
agcttgggagcttttagagtcctagattcagagtcatggcaggatttacaactggcgttaccttttgttgacctgttgaccagcagtgatctggggaagatgcaaaaatgaaagctgttgaaacaacaatattcagttaggaaccaaacccaagaccccaagacaccggggccgtcgatctccccaagaccccaagacccctatagtgtgcattgatctaatatctgccattattgctctaatttcagaggtgtatctaacattgatggtgagcttctcgaattaatttctacacattgtatttactgtgtctaacattgtatttactgtgtgttataaaacaaccatgccatttaacgacgccaaaacaacatattgaatntatttgacagttctatttgat

SEQ ID NO: 38718 - DNA, 209 bp, Oryza sativa
gtggtggcttggagcgaatgatccgtatcagccggacgatgtttattttgacgtgcgacgcaacaccagccgtcttgctggcgttgccgccggccgtcggcgattttccccgtgagccgggtaatttccacgcgcccgaacagccggccgagggccgaccaactgctcgtgtgtacgttctatcctacgcgcgtgtgtgcatgcgtgtc

SEQ ID NO: 38719 - DNA, 355 bp, Oryza sativa
tatcaactattatcacatgggaatagtgcttctttaaattctacaatataattgggtagtccacaggactacttccttatacccttttggggcctggtgggaaaccccccctatgtggccggttttccaacccgcccttagggaggcacacttttggtttccaatgaatggtaaccggtttcaaaccggcacctttgaagcgcttgggaacccaaaaaaaaaaaaacttgatggattgaacgcctccaccccccacgtgtgccccattatctccaattcaccacattcatgaatccacccacattatcaccacgaataaacccacatcatcctagaaattaccgactattaactt

SEQ ID NO: 38720 - DNA, 307 bp, Oryza sativa
tctttctcgatggatacatcaacgggagccaccacatgttctatcctaatgagagaaaatcaagtccaatagatactgcaaataaccatagcatgttctggcaatatctaagtggatccaaacacaagttggcttaccaccaaggtgcttgacataatcggaactcgaccgcgccaaattctttagtgggagtgcaataccaccaggtacaaaagaggaaaacaatgatatgacatacgatacataagaagagatagtacagttgctcgacaaacatgcacgagagaagaaaaatcctgtcctacag

SEQ ID NO: 38721 - DNA, 387 bp, Oryza sativa
agcttaactttaatcctaacgcaatacaccatgcactgtcaacccactgttcccaaatgtcgctctactacgtaccgggacaaaagataagagaggattaccgacaactctgggattcctctgacttcttctaccttactctctccctattctaatatacaataaagtacaatagagcctcttgtaattcagctcatgctttggtgtgtgtgaatgagggagaggagaggggtatttatagtgtggagcttgcttgggagagtggagatgctaataatattctacatagaatccaaagagcatcttccttctcctcttgccatgtgtcctcttgatgacggtttctaccggtattaacgcccgtaaccgtcatagtatgaggagcac

SEQ ID NO: 38722 - DNA, 432 bp, Oryza sativa
  unsure (1)..(432): unsure at all n locations
ttccaaacttattcacgaattgctcaataatggaataggttcttagcctcaaaggaatacccaaaatgatgacccatccttctctattgtatggtctgtttcttctgttagcaagttgatcatgtgggataaaattggcttgcgcgaggttttgttgcatgatcggaccctcatcaaccatagcatctctgtgaaagacagactgaaattgaactatacaaagggccagggggtagcgttgcgccctaatgaccgaatgtgacagaaatgagtgacaaagtgaatgatctcattgatagtctggttcactaagtgctcangaggttggggctctatcagaacaacagcatactcttctccaaggctctgatggattgactgaacagtgaaatctgaccttggtattctgggcattcatgggggcttcacatt

SEQ ID NO: 38723 - DNA, 395 bp, Oryza sativa
agcttcgccgtctcctcgtgctaattaatcaaacccacactacactaatcaacgcgatcccccacatccgctaatcacaacagaacacctgtaacatattaattaactaactaatctccccgcaaaaaaaaaaactaactaatctacatccatctcgttgctcgtgcctaatccacatgactaattattggctaccatcacggccggtcgatgtcagagcagcgagatgaattgtttgtactcgtacttgaccagattaataacaaagataatttagctacaatcatggatagagaatcttggttaacaaaatatgataggcgaccagtagatgtacactgcagcccatagcaattcaaaaatctccgtttaattgacaagcgtgcgagcgtggg

SEQ ID NO: 38724 - DNA, 465 bp, Oryza sativa
tgggagtccttttcagccagctcttccagataggaagcatatgtattgccgggagcagatggttctggaattgtgtgaccctgttccttgaaccattccagatccttcttcagttgttctgatctctccaacccagtattcctgaactcagcatctgaaatacatacagataaataggaagtcaataagcagcctcttgcaaatattgatggaagaaatcttctagctgttttatagtagtttcaattttccatctaaaaagaatattacagattttatgtggacgttcaagtaattatgactcattgttccatacttccatacagcataaacaaaactacaaaagttctctatcctgctaagatttcacgtgcaaacaaattgcacacggtattatgtaggagtagaataaaggtactcattatttgcttctcaattatttactaatccctccatatcatatta

SEQ ID NO: 38725 - DNA, 399 bp, Oryza sativa
  unsure (1)..(399): unsure at all n locations
gcttattctgtccacgtacccatcaactagctttacatattataaaaaaatccagctaggaatgttgatgtgtcaacttcttttgaaacttcttgcaggtaccttgcttcttgtgacgacttgggaggcttggcacatgcacacaacaactacttgtgaagcttatccaactctacttaactgggtattaacatcgacttgccttganctgttcaccaaaggtaacttttggtttagcaacggcacgtctattcctctattatgttctgttatttactcatcttggcacttatctttctcaaatcaatagttttgatggaaactgatgcagtatacagtttgcctttggcagatggaatggcctatnaatcgcaactaactgcagcagcagcaacaact

SEQ ID NO: 38726 - DNA, 334 bp, Oryza sativa
acctgcagcatgcagcttgctccacttcactgaaattctgcaaatatggctttttttaaatgttagaaaaaatggcgcataccatatgagccggtttgttcacaaccagaagatggtcattctcattaacaatgtccagtgggatgtcctctggctttgctctcaatggctggagcttcaacaccgggcaactgacaatgtctccaccttttaccatatgtgaaacctacatttcgcaatgaatagaaaatccgcttaagaatactatcaatgagaaccaaacagataggtattgacatggtagtacaactgctactacttcatggtctgatat

SEQ ID NO: 38727 - DNA, 466 bp, Oryza sativa
  unsure (1)..(466): unsure at all n locations
tgggtgtgtcttgntgtctgcgtgcatgctgtggtggctcttctgcgggcgatcaaaagggcagtgacagcatgtattgacgaacgcaatgtgcttgctggccgaatagacatgaacacatatcactgagagggagtgaaacagtgttgacgagtagcctgcttttgggttagttcttgatcaagctaaaatgcacttctttttcttgatcggtataaagggcaccctttttttttcttgcagcattttcatatgcacccaatattgcccacacggtcacaccaccatcatctataggcaagtagtatgttcatgtgcaaattttgcagggatcaaataaatgtcatttccctgatccattatttggctatctcgtgtacttgatgccgattnttaatttcttatagctgcatgaactatttcttttggacggtcagagtctcaatccttgccatcattaaccgag

SEQ ID NO: 38728 - DNA, 417 bp, Oryza sativa
agctttctctatgaccaacctagtcataaaaaacagaagactacataccaatcatagaacaaaacaacaaccaccaccatctcaacaacgatgacaggacgaaattaaagagaaagtacctctacaagagacatctaaacgaacaccaggtacctcagcatctcaagtccaccgacattggagacgagcaaaggaaagaaaacgcaatctcagtaccatctccccatcagatttcggttaagaggcaaccaacagaagaaaaagctggtgattatttctctcttgagtgccaactaagtgaccaagaaacgcatcaaccagcagcacatatgatttagaagcgtttggtggcggatggatggatggatccaggcgtcttcaacacgcaaaaatgtggaagaaatgcgagtacgaatc

SEQ ID NO: 38729 - DNA, 481 bp, Oryza sativa
  unsure (1)..(481): unsure at all n locations
tcttctgtcatgcgcagntcatttctctctacattggtataatccatatgtcttccataatcatattcccatttccccatggtacttaatccataaatgtttaaaccacgatgaacatctgatacaccgtaaggagggatatttcctgtatggaagaagttaaaaccttgattgaatggatcgaatgcattcattgggtgtacaggaggaaaacccataaacttgttgcctatgtaacccctaacatgtgatggatgcagaaaatggctgtgcagggtataaggttctctcataaaaggtcctatcctctgtgtctcctgtacactgtaagggttgtaactagcatttgacatgccggtaaaaccatcaccgactgtgctntgacaaactctctcttcagttgtggagtgtangccgtcgatcctgacatttgcatcaaacctagaatcttgaagtggcatggaagatgtatcatgatctg

SEQ ID NO: 38730 - DNA, 407 bp, Oryza sativa
  unsure (1)..(407): unsure at all n locations
agcttagacccatgcaaggagctggccacaatatttagtattgaattatcgacatgcaaccttagttcattttattttggcgacgaatcattaacttgggtcattttctaaatatgaaacaatttaccttttatatttgagtacaatcaaaatataaaaggtttgaatccaaccaacaaaattttgccaagaacaatgctntttgggcgatctgggcctgtggtagggctagatccttgtccattatagccagagccgaaccaaacactaatagatcctcggttttttaaaagtgaagtgcgtggatctgctccaaaaaaagaggtagaaaaggtggagctaccttttttcagatccacaactccagctccatgtnaaaattggagctctaccaaacagatctatct

SEQ ID NO: 38731 - DNA, 452 bp, Oryza sativa
  unsure (1)..(452): unsure at all n locations
tagagtgagtcagatacaaggacccatagccaaacatatttaaatgactatctgattgctnttgctagatggcatgtgttctatcttcagaattacacacttctctaaagttacagagagcgaggcaatacccttaataattcgtaggtattgttaagggtattgtcacctcttaattaacacccaattggaccgattctaggatacttaattttattntaatgaaatttaatgatttattaaccaaaatattatgccaccgtggcgtagcacgggcatattattatatgtactaaatttttactaaggctcccatcagatggctntatcagccaaagaanaagctaaatattaaattttcgaacttaagtttaagattgattttgagatattttaaacgtagtttctttttaacattggtgtttaagtcacacaaacacatatataaaaat

SEQ ID NO: 38732 - DNA, 329 bp, Oryza sativa
agcttcctcaccaactggcctctagagaggggtctatcagagggattcaaataggatttcctatcttgagctctttaaaaggaaggcggccggaaggtgctttccctgcctctcaaaggaccaccgcatcgctgactgcagaaagccactaaggtgcatcctttgcgccgcgtcgggccaccgcgcccgctggtgtcctgaaagccagcccaagcaaagaggggtttagctactgcgcccggcccctcctctggcaagcaggttgaatttcccccagctgccaacaatgtcacgccgtggggaccccgcgaacaggcaagacatcatct

SEQ ID NO: 38733 - DNA, 373 bp, Oryza sativa
gaccttaaaactcagcttactatgggtgagcattccaattaatgatataactatttcctccaggggaataaattgcttatgtctatgttgctaccttgaatttttgtgtagtcttgcagaaaaggactgctaatgcctgatcataagtattaataagagattaagcatatttttgggtgatcattatgagacatgcaaattatgcttatttcggcacattttagggaaaatatgctattaagcgaacacttacctaaaattctgacttatattactaatatattcataataaataaggatcagttttgaaatagaatatgctcttaataaaatacacagggagctattagacttataaaaaatattactattt

SEQ ID NO: 38734 - DNA, 402 bp, Oryza sativa
agcttggaacaatgacgatgaataccgatcgttgtgctacatgcgccctcttgcaatatgggccatacagtgggcactatcaaacccaaaactccacaagcagactgcagatatcccacaggactctttcccaaagaaccagttctcgtatgctcggattgcgaagttgctgcatttacctgaagacgaatcgccgaagagtttccttcgagtgatttatgagattgttcgtaacaggtataggtcctgatggaagggcaaatatgctccttattgttgggtgtccattggccgtattttcattgttggttgagaacatttgttgctgttgatcagcacacttgagtatatagtttatgataataaaactttattaatcgtggatatatgttgatcatgatg

SEQ ID NO: 38735 - DNA, 463 bp, Oryza sativa
  unsure (1)..(463): unsure at all n locations
ngagtacttctggcactggcagcaggttgtgtgctgacacctgactagctctcaatcgatctccaaattaagctaaccctaaccgtgctctattattattaattaaagtgggttgaacgaacccacttcattcattgcaccaaatcttagccgtcagttgggacatatcaaaccattgagattcctcagtaccgtgaggacgtgccttaccattntagcccatatggtgtgtcacatctacaaatttagcctcaatttccagaatattttgtgtataaaatcccaattcaggaatcagccagggtacacaaaacgacaagtaaatatatagatatagacgtaaataaagcgtaaaatacttacaaaagaggcacttagtcctcatcctgaanagaaagcagcaacagcggataaagacgatcctagcagagcttcatctccacttcacagggtaaactcaact

SEQ ID NO: 38736 - DNA, 400 bp, Oryza sativa
agcttagccaactcgcttttgtagagattgcatatcaacatcaacttgctgttttgttaagcatactaatccatccatcagattctgattttgcagttacaccccccttcacatggtacgaaattccttttttttttttgctcgtgttgggtgcagatcagggtggactagcatgttaaactagtgttagtaacactaatcaactaattatctatagtaattaagtaattattaagtgtgcaaatggtggttgaccagtgactctctctgagagttctgattgggcctgataatcagaagacagcaggctggcattatttcattaactgaatgaaacagggtgaatttatttaacctttttatcttgttttcgcctaatctgacgccgatggatctgagt

SEQ ID NO: 38737 - DNA, 475 bp, Oryza sativa
  unsure (1)..(475): unsure at all n locations
tgttctggcctttgtgcaacaatgttaacaaacatactcttccgatccgttcagtgttttgtgctggagtggagcttcagtatgaattacgagtccaagatgacccttgtaaaaccagacaaaactcgatggctcgtttgccaacccagctgctgcaaaagtgatactggacgttgacctgcagtgataaaaacgaaattaaaaagaacgtcatatgttgagatatactgctccctccatcccaaaatanttgacgtcgttgactttntaaaaaatgtttgaccgttcgtcttattcaaaaaatttaagtaattattcaattttttcctattatttgatttattgttaaatatacttttacgtctacaaatggttgtacatatttcacataagtttttgaataagacgagcggtcaaatatgtttaagaaaatcaacggcgttaaacatttagggaagaggggagtagtataatg

SEQ ID NO: 38738 - DNA, 399 bp, Oryza sativa
agcttaacttttcgggcaattaaattagtagtcggcatcaacgtgcgtcataccatagtcatatgttaggtaactactctctcggttcttgacctaaaaatgtagctacatcttagaatggacgagacatatattgaattgaatcgtgaggatgctaaaaataattcggagtagctagctagctagatcgaacttctgtttgtgtttgtaactacttcgttttagcatgtcattataggtcgaagtgtcgaacaaaagaaaagtttatctctataacatgtagaccacaggtgtatggcatactaccaaacattattgagctaataagctgatcaaatcattgatctgacacgaaatcgtagcacaacgtggctaccaaacatatatactatccccttt

SEQ ID NO: 38739 - DNA, 424 bp, Oryza sativa
  unsure (1)..(424): unsure at all n locations
tcacaatgttgcaagagctataggtgatgaggactctgatggtacttattcaaaggagagtatcaagatagaaaagagagatattntgagctctgaaaaaggaataatccttggtcatggacttagaatcctaaagcaagcatctaggactgaccaaacagcgtcaactgttgttgaaaacaatgcagagcacaaaggatctactagcagatacctgngtcctgtatccactaagccatcaacatatttatcaaatttcataatatatattgcaaccattggtgacatagtggatggaactgatacgactcatgatttcaactacttctccttagtctatgaaaggcccaaagatgtaagccatntacaattttacatatcatgttctgaagtcagatcaaatctatacattntcacttttaat

SEQ ID NO: 38740 - DNA, 240 bp, Oryza sativa
agcttcaacaaacacatcacatattcagagaatctgaaattcaaagttcaaaatggatgggcattacagggatgtagaaattcagcaatttcagaagcatcaaagtgaagagaacgggtataggagccaataaactgttctgtagttcacataatgttcacagcaacattttcaggaacatagcaacatagaataatctggctgcaataatactacctctttccctgaatgtttgacgcc

SEQ ID NO: 38741 - DNA, 340 bp, Oryza sativa
cgacggctgacatgccgtctattatgtctctcagtcctggcctggtggagaaagaccctttctggacaaacgaagcactgatactgtctcagacctgaaatttatctttggttggtgggaccccttgaaccggctctggagatgcgctccatgatgatatcatgagatgattcgagcagacttggagcttctctactatgaaacgggcacactagctgttgatcttcttattatatagcgaaccgtgcggacaaatttcatgctacatgaccagctccttcacataaaagcctgctcgagactggtcgtacacatccatgatatgcatcgtgtgctcata

SEQ ID NO: 38742 - DNA, 260 bp, Oryza sativa
agcttatactaccagacagccagatgccgatgtgccttgctcgctcctaaccttcggcgtgctctccatggataggtcgtccttgtcggcatttgggcgtgtgataaattacgactctttatgacgaacaatacggctcgctaccaggggacccatttccaacattcctttttcgctgtatcggcgtacgtctatcaaactactaaatgacgctgctttctatacaaaattgctataagaccgttgcgcataaaacatat

SEQ ID NO: 38743 - DNA, 408 bp, Oryza sativa
agcttatcggccatgtctccctcttcgccggccaccagccggtcatgccgctcgacgccccccgcgccggcaagaggcaacgatcgtcctcggcgtccgtcgccgggaacattgacgacaccaccggcattggcatgggcgccgcctgacgaccttactaactaactgtgattgtattgttgccatcacctgctgcatatatatgtccatgaaagattcaatccagtactgcatggctagttaaattagcatgacaatgctaattggaacacacatgttaatttggaaatcgatcagggcagcaatttcaggcagtttatcagttagttctatacattagcttatgagatgtgtgatgaatatatactgtattagctaactagctaggggctttagctttacaatata

SEQ ID NO: 38744 - DNA, 426 bp, Oryza sativa
  unsure (1)..(426): unsure at all n locations
cttgtgagnttgggcctttatttggtggaggcccattgattcctacgtgggctgngccgaacacggtccaggtagttggtccacattccaggttgaacgattccagcggcggcggcgagtggtggcgcgcgatcatctcccactcccaccgttgttcctcctcaacacgcgccactcctcacattcatttccacctgctcatctatatctatctatcatcaagctgatcatccatacttgttgatcgaccaccggagaagaaggatctatctatagcagcaagcaagcagagaagaatatcatcagaaatcggagattaatcgatcgggcggagatcagagagatatattagattgttttgtttgatcgatcgatcgatcgggatggctgctgcttcatctgctgacatggagaggatctttaagc

SEQ ID NO: 38745 - DNA, 410 bp, Oryza sativa
agctttgttcaactggtatgaacagaacccttttaacacacactacagctggcctaagggctcggtcaccggtcgccatatttttttaatgaaaaagcaaagtgtaaaacaacgggccggaggtcaacccggtcaagcatctggttcaccggtctaaccgctaaatcatcgatcgaactaccggttcaaactttattaataatttattcatttaccattatttctaatgcagaaaagtgtaattatgctacatatacgacaggaattcttatccagtactcctgccgtccaaaaaaaaaatctacttctgggtttcccaactgtaaataaataaatcaaagagcatgcccaacgataaagggaaaaaaaagggagaaagcatgtggatatactccagtgcaagtcacaca

SEQ ID NO: 38746 - DNA, 458 bp, Oryza sativa
  unsure (1)..(458): unsure at all n locations
ttntattaccatnggatgtgctagcccaaacattgtacttaatgctcttgtgaacatcatcctcactgtatgatttgatgatgaagaattaacatctgagtatgtttccacaaaatcagcccggttatactgatccttcatgacagaaagcgagctatcgctggctgaaagctcttgtcccttcacaggtgcaacagtagctcctactccctgttggttattgaaaagaccacttcttggccctcttcttagctcattaaacccatcctgatttccatggatataaccataggatccattacctcttcctctgggattgtatttgccatccgacagtgcattccatcccccgtacaatccagaaccatacatgtgtgatccataccatangccggacccatatgaactcccattgtatccatacattccactagccgagtaaattgatggttgtccca

SEQ ID NO: 38747 - DNA, 275 bp, Oryza sativa
ctctgactgtgtcaatccattgtaccaaagtgtggtggcgtgagcataaagtgttctagcaccctatgaatgaaaagaactatgtagacgagacaaacacaagtagtactgcagtagtaataacaaaagtagtactgctttacaagtttgtaagccaaaagaaacggtcacataaggactgaagaggtagaacactactgacgaggcctcttacccctgttccttctaccctgcgccctaatgtgcccctgggagtacgtgagtcggtccggggg

SEQ ID NO: 38748 - DNA, 480 bp, Oryza sativa
  unsure (1)..(480): unsure at all n locations
ttgttctcactgattntgctttcatcgctccatgatgatntatagaccaatgcagacgggttatgcaatccaccattctctaacgccaccaatttccggttgtctctaaatgcaggtacattaaattcttttgcaccatcttccatctcccgaagctaacagaacagatagaagtgtagataaaaaagatattaatgcaactacttggttgtgaaaacttcaaataacattttgatagtacttttgaatcgttgaaaaaatcagcatcgaagtacttcatggaagccttcaatgcaatcacaccagtaattggttcttttctggaaacatcttttgcagaaacagcctcctttgtatcctgaaaatgaacagacaaattggctaaaaaaaaattgtcgcaatgaaaataaactgaatattaaaaggagagcaatcttgccttccagatcttgtgggtattggaaacaagagtatatgaat

SEQ ID NO: 38749 - DNA, 420 bp, Oryza sativa
  unsure (1)..(420): unsure at all n locations
cacctgagctgcagcttttgtntatatttggcgttcaaatatttgattatatactgattacattttttcaagttccaccccttgtttatggcccctttgatctggaggaaaatcatangaattttgaaggatttcaatcctataggaaaatcttctatgaagccctttgaaacaaaagattgaatttaatccaatcctttgaaattcatatgaaatgcacaatcctatagagattttggaggaaatttagcaagagcttcaacctcttggtaactttcctttgagtctatctctctcatccaattcctgcgtttttcctacggntcaatcaaacgttcattcctgtgtttttcctgcgttttgcaatcctctggtttacacttacattcctatcanaatcatatatttttcctattccta

SEQ ID NO: 38750 - DNA, 468 bp, Oryza sativa
tcgccgatcagtgcaatgggtcccatcttcggcatcgacgatctcgtctttccttccgggcagacgtttcgggtcgggaggctcgacttcatcaccgacaactttcggaagatttctcttcttgactcggaatcggaccagtcgggagagaaccggatctcaatcccgtttggattcccaaacgcggctgaaacctacttcaagaacatctcaatcgagtcggcttcaaaccactcggctgagatcgcatcttcttcaacggcaccagatcaagatgatggggcttacccatcggtcctgatgaagctccccgacgatttagcaagcgtcttcaccacgacagcgtcttcatcccgtatgcctatgctgaagtcggcctcaacaccgatttcgcctagcttcaaggaagtcggcgtcatcctccaaccactctgcacgggttcgacggatcagcttgatgactacaac

SEQ ID NO: 38751 - DNA, 402 bp, Oryza sativa
  unsure (1)..(402): unsure at all n locations
agcttgcacgcaatttccatgtactccagtttcttattaaccaccagntgcatcgcatgtcacgaatgtcagcaaatgctcagctgatcacattactattactatccgaatgcataccgagtttgaaaggagcaaattatgacatggtgcgataactaaacaagaattgccatacatatatttgagtatactccaagggacccagggaacgcaagaatcatctacaaactggaatcgtttcatcttatatgagttctacaatgatgtactagtacataaattcagcttcgcgtagaaagtatagttttggcttatattaactttctcaaagaatcaaagaaagtatagttttggcttatattaactttctcaaagaatcaaaactacacgatgtgtttattc

SEQ ID NO: 38752 - DNA, 342 bp, Oryza sativa
cctgacaaaagagaagagagtaggatacacttgtgcaaagaccttgccattgcacagatcatgccaaagactaactgttgatccactgataatgattggtctgctaaaacccctaaacagaagttcaaactaaattatatccctccaccaaaaggatccacaaacattggcagactgaagcaatttgtcagcgtagtatgagctccacaccagattaacccaaggaatatgtatgtgcttgttaaaaaattttcccacatgcttaaggagcataaccctaatttgcactttcagatcaatgacacccaatcctcctttcttttatggctaccaccttccccc

SEQ ID NO: 38753 - DNA, 365 bp, Oryza sativa
aaccgacaagagatttagatcgcttctggattcgaggtctgcctgaatggaggcgctgtgagtttgatgtgaccatggcttctatggataccaccattgctcacattatgaatcaaccagaagacatcgagatcaagtccttcatgggctgcaatctaattcggccacgtgttacaatgctgatttcaaacggccgccaaatctacatacgtgctccgttttgggcccgtgagtacttgatggaaagctctcgaagtcctccttccaacggatccagcctcatctcggaattctatctcgtttggccgcaatcacagaagcaaggtgctgcgtcacctgtattgggccaatgggcttgtaacttt

SEQ ID NO: 38754 - DNA, 446 bp, Oryza sativa
  unsure (1)..(446): unsure at all n locations
gtacaaccaacggttcgacgttggggtctgtagaccgctcgaacgtccccatggaatgcgtaaagttccaaccgacggctntttagtggctaaaggatattttgaaataaaaggagatatttgaaaagcaaatgacatttaaataacttcaggaaatccaaataaaatattaaaatagcaaatttggtatcaaaatgtagattttgaatttagatgaatttatgtccaagtttcatcggaatcggatcttcgatttaagagatactagaagatctgcacgcctgttggcgtgccacctaatttagcctgtaatatggctcatctgtaatatatatagaaaatttgcctacctcttattgtatattatctctaactctagccaaattcacatcatacaaggagatgtgcanattacactgctatgcttattaactacattataatca

SEQ ID NO: 38755 - DNA, 399 bp, Oryza sativa
  unsure (1)..(399): unsure at all n locations
agcttnttcgtacgcgttaaaaaaagttacattatattagtgaaatactatgttttttcttatatacttggtgctcgggatatcgacatggtaacatgtcgaatatagcagcatgaaagaattttcttttccacggtgaatctacagatatcattcttatatatgtattgaaccttttaagttttcttatatattgatggattaagatatcaagatttgattgcgaatttttagtatctatggtaacgctgtcattcggatgtttgattgcggatggtatgtagtgcaaccatgagaaaactgttagatatatagataatgagcaaggttgtttgatttagtgggtaaggtgagagccttgtagaactagatcttattnttaagagatgaaaaactatg

SEQ ID NO: 38756 - DNA, 468 bp, Oryza sativa
  unsure (1)..(468): unsure at all n locations
tgccatggctngcaagttctccttctcaagagatgcatcatgcaagaatgatgntgtttcttgacaactgtcgagaacaacatcttaatggccagagggacaagggtcaggctcgataggaggttgtgatggtggttctttggagagaaattcaagagtctcgccagaatcttttttaatgaattgaagatcatcctgttctagaatagactcaggggaatcatgaagcagaaccgccattacttcctctatcagcatattattagggaggatgcctgtcaaggttntctcataatcagtatgaggatcatccctgaatttaggagcgcaaccctgagcttgaatttctttggaatccggcgatggctccacggaggactctttagtcagacccgaagatgttgaatgctcgtgttcaggctcagcaaaagaaggttcctcccttcctgacacagatgcttctggatg

SEQ ID NO: 38757 - DNA, 404 bp, Oryza sativa
  unsure (1)..(404): unsure at all n locations
agctntgcaatgtgatcatcatatgactttggtatgaatttaccattattgagaaacttatatattttcattcttttggaaaaaaaaaactatgaatgtcaagtataacttgaagaaagattaaagcaactctacttcactatctcatatctcactacaacttagaattagatcatggatatgcaaccataagtttcaatttcaaggcaaggatttttatccaacaaactcaaaacttatgtgaacactaagctgtaaactaggaactagagggaaataaagtagagcaattgttcatcatttcaaccttgagaactaaaaaacattcttacctcgcagggaaagtaaatattnntggtattctatttatcttttccaaacatttatcacatttctttgtttag

SEQ ID NO: 38758 - DNA, 447 bp, Oryza sativa
  unsure (1)..(447): unsure at all n locations
ttcatggccttagccatggtactgtcaagtaagtggtgggcatattgagcagaatcagagccatccaatgtaatctgatagcttgatttgatcgctacagcacctgtgcagtattaactgtacagtagacgatccgttttctggaggttgcgtacaaccgggattagtatagtcgcccgctcaagatatctctccttaagctctttgtttcaatatggtacttgctctaagaggcgtaataattttaaggatacctaaatagttgcaatatctatacttagtgaaattagtaactttcaatatataataataatatagatataatcattgttatgcattaattcatggcacattaagttctaacacctaaganacaaggaggaatatatactcctatgtaataaaataatatagttatcatagtcgagtgtatccatagcatagcga

SEQ ID NO: 38759 - DNA, 388 bp, Oryza sativa
agcttcaccctaaagcagaagccctgtggtcttatgaaaacgatcaacacctctaccaaaatgagagcaacatatttcttgaaggacaattttatgcaacaaacgtgctgacatgctaaaaagctccactgctctgcccacagaatctcactactcccatctcaaaagctacaagctagattcttaacgataaatctaatacaggaataatatcagacatttatagccataattttctccttcccatttgaatcatttgtagaaatataagtgttatatgatcatggtgaaatggtgacacaggccccatgttcactaagcacattatagtatatgccaaattgcatgcacttgaagggagcatcacgagaatatgtataccttgggc

SEQ ID NO: 38760 - DNA, 458 bp, Oryza sativa
  unsure (1)..(458): unsure at all n locations
tacgtgagaggtttgcagntatacgagagtgcgagatccttgtatgaatagcatgagcttgagttgaaattaagcacttattattgtcttttgctcaaatataataacactgccatttagaacttggaaaaccaccatatcaacaagcaaccagccggtacagaaaagtcagagattgcttaccggaaatcgtgcaatntcaacactggatcaagcaaattcaaccgagaagataaatgtatccacccaattctcaccaccaatcaatgtacacacgacgtattttagatttgaagggtggctggtgcctggtggagcagctgaccttgtgaaagttggttgctttgctccgctagagcatgcatggtgaagtatgggtttgtctcgagttatcgacaattcgtcactggtttgtgtgcacttggaggcgtatgaaattcagcagctccattcacatg

SEQ ID NO: 38761 - DNA, 391 bp, Oryza sativa
tcaacttcctggtatcaacatgccatcactcagagttatatatgaagatcatcgtacttatgcatcagatgcagatgtaagtactttccactgctgtaggactatatctagtttatttaccattcagttttccagagtaatcagacattttatttaccattgagttttccggagtaatcagacattgaatttatgatatttcctctaatactcccttcgtcccaaaatatatcaagtttttagtctttggcacgggtattaaagcgagggggaataagacttggttgtctccttgggattggtgagggataggtccggacaagttggactataataaagccaaggggtactgtgggtagtttagcggttaaaattacattttacaagtact

SEQ ID NO: 38762 - DNA, 361 bp, Oryza sativa
agcttcagctagatggggttggataccgtgcatcggtggagggtaaagatcttgtgatgaacctgggattttcgcacccggttcggatggctgttccacaaggcctgaaagttaaggtggaagagaacaccaggatcattgtgagtggctacgacaagagcgagatcggtcaattcgctgcttccataaagaagtggaggccgcctgaaccatacaaggggaagggcatccggtatgccgatgaaatcgtcagaagaaaggagggcaaggctgggaagaagaaatagaaaccgagtctttgttgtactttgggtttcatacttcattcaattttttttccgatgtaatccctctcttattt

SEQ ID NO: 38763 - DNA, 406 bp, Oryza sativa
tagcaagtgtgagttctggttgtccgaagtcaaattcttggtgcacgtgatatctgctaaaggagttgctgtggaccccgaaacagtgaccgccgtcaccgattggaagcaacccaagacagttactcaagtccgcagtttcttaagtttggcagggtactaccggagattcatcgagaacttctccaaaatcgctcgacccatgacacagttgttgaagaaagaagagaaatttgtgtggagcccgcaatgcgagaaggcgtttcaaactctcaaggaatagctggtttcctcgccagtgttaatcttgccggatactcgcaaggatttcatggtgtactgtgatgcttcgcgccaaggattggggtgcgtgctcatgcacgatggtcatgtggtagcctatgcc

SEQ ID NO: 38764 - DNA, 263 bp, Oryza sativa
  unsure (1)..(263): unsure at all n locations
tcgcacctaactctcgacatgctctcgattgataggtcgtccctgtacgcatttcggcatgtgtccaaatacgactctttatgacgaacaataagggctcgttcccagggtcccatttccaacttccctttnttcgtttttcggcgtaccgctttcaaactactaaatgactgtgctttcttcgcatagtttctataagaaagttgctccaaaaacatattcagtcatgttatcttgaaagaactgatacttaattaatcgca

SEQ ID NO: 38765 - DNA, 391 bp, Oryza sativa
agcttgtcaaaaccctctggtggcagagaactgctgacgtttgatcctgatagcaatccatcaaattgtcagcataaagaatctagaagaaagaaaaaaaatacccattttagtattttattcaaccaccatttgcatggagatgtgataaagcgtcaaaagaaggtatgggatttctttacttgtggtacatttaaaatattaaaactttattcattagttatttgaaattaagtatactcatgggaattttctatgctgtaaatcttggcgcgcttgggagtgtccgaagcactttccattctggatgcaacacacttttgggcagataagtttttccgcacaaagaaaatgctggaagcaatagctcttgcaaactattagtacgtcg

SEQ ID NO: 38766 - DNA, 369 bp, Oryza sativa
  unsure (1)..(369): unsure at all n locations
actcaaacttagcaacaggaacatgctttattattatatcagcangattatcatgagtgcttatcttgtatacctttagcttaccttgcgcgactacattgcgaacataatggtacttgatatcaatgtgctctgtcctctcatgatctttagtgaggtatatggcactttgactgtcacaaaacaagttaatgcaagaatcatcttcacaaagctcagcaaacaatccttttagccaaactggttctttacatgtttcagcaatatccatgtattctgattcagtggtagactgggcaacaacacgcttcaatgttgtctttcaactcacagcacaactaccaatagtaaattcataacctgtgagtg

SEQ ID NO: 38767 - DNA, 410 bp, Oryza sativa
agcttttgcttggataaaatagtaaaaaaatctatcccaaattttgaactcaaatgaccatgtttctatctggttgtactccaaaagcagtactatattcagcacaaagtcagtcatataagaatttggtctttttagctctaacataaccatgtgcaaaggcctctagggaacttgtgcatgtgatgcagttttggttcaaaggtgtgagattagaaagttctagatgttatatagtcatgacaacatgaatcaattaatattgataagaaccagaggcaaactaagtaagatccaaatcataagtacctagccagtagtaaaatctctgatctcacacccccaaaattttagcactataccaaaatagaacactaaaaatatgatgtccatcggtgcttcttgttctc

SEQ ID NO: 38768 - DNA, 403 bp, Oryza sativa
  unsure (1)..(403): unsure at all n locations
tttcgatgacctcgcattggcagtacccgctccataaacttaattttttatgcactctangcgtccatgtttctagcagtgagaggagttctggcgctcccgggaaagagaagtctcacacatatattaaattatggttcaagttaagttctctctctcacacactcatggcagtcctaccaatggcgacaccgatgtagggcacgcctctcggccctacctcaacggctgttccaccgtagcgcacctgcctcactcaggggtgaaccatctatgcagggatactgcctccgctcggctatctaatccgctaggtctatacccatatgagaagtgcggttgtacggnggtcgtttcatgcctaacttcatggctcggtccttaattgaccggcgacggtact

SEQ ID NO: 38769 - DNA, 413 bp, Oryza sativa
agcgtggagagaatgtcaccaccattccaacaatagggttatacctatacgatatttcatatggtctgactggatgtgtctgttaagtacattcaaatactcctactttgttgtcgggaagttgggttcaaactatagtgtagtccaaaagaaaaacagatcacatagaagtaaggtcccttgtatgaaaaagggctggattccttccattggtggctctggggatgtcttagattacaattgtatttagtggctcacttgcattattttgtatccattttcatattgcaacctgataatgttggaaatatgaacaaacatggttgcacgcttgtatggctctatgtgcaagtgcaaaatattactggtagacagatgagagatagtttttcatttttgaaaaatgcttgaaa

SEQ ID NO: 38770 - DNA, 437 bp, Oryza sativa
  unsure (1)..(437): unsure at all n locations
tgactgagattntcttaagtcaaaggatattatgatccatcttcaataaagttaggtatgtgaacaggatggattcactcgattttgctggtgctttcttattgctctttcacagtattcttgttataaagatcgggttacgtgtgcttgttgctattcatgatagttttactttgtgatgaaccatcaatcattgcttacacaagtctcctggtaagttccaattatttttattgaacttcaagtttcaagttccactatttcttcataagtgttggcctagccaactgaaagtaaagatctagttcttaaactgtagcctaataaatatcttgtatccattgctgttacgaaggcaattggaagagtctggagttctaaatggagcccttatagccagaggcaattcatggggcttgcacatgccactttgttgt

SEQ ID NO: 38771 - DNA, 399 bp, Oryza sativa
  unsure (1)..(399): unsure at all n locations
cacttcngntgattggcagaatttgttactatctgttattacgccgttattacgttgaatctgagatgaactattgtctgaattctgttgtattatgaatgtatctgctattagttgaatctgagatggcatctgttattaggtttgaatctgaaatggtatgtgaaactggattgaatttggtgggctcaaatttaatgggcctgtttagtgggctttgatctgatagttggttgacaaaataggccagttttgaaatgggcctattttaaaatgggccagttctaaaaaaataatgggccgctgttaaataattaatggaccattgtaaaacattaatggactgttaaaaaattaatggcccgtcaaaaaaataatgggccgtttaaaaatatttgc

SEQ ID NO: 38772 - DNA, 461 bp, Oryza sativa
  unsure (1)..(461): unsure at all n locations
cgagctgaattataagaggctctattgtactatgttgtatactataatatgaagagagtatagttgaagaagtctgaggaattgcggagttatcgtaatccgctccctgtttctttctgctcttgtaattactttgattataatagaattatcttttgagtaatttagtttttttcgcgtagaattatctcttggntagttcctattcagagtacgggatcatcatacactataatcaactaaaatacagtgatttactttagtgtgtagctagcattaaagtaagtaatttccggtgttttcatacgactattttgtgatacagatcaacaatactcttagtatcaggtattactcttatactatatattgaacacatcagtaaacatattactacatggtggctatgagatcatggctatatcgagaggaaggtggtaattggtttacttgcagaccac

SEQ ID NO: 38773 - DNA, 404 bp, Oryza sativa
  unsure (1)..(404): unsure at all n locations
agcttaaggccgaaacaaaagcttccacatctactagagaagctaaggtcaagtgcaaagagaaatggcgcgggtggagagaaatgaagaagaggacgtgagctcaccggcgggatgcagcaggacgccggccgccgctactgctcgccggggtggagatcggcggtgctcggcgcangcggcgggcgggcgagctcgcgaggaggagacggngagacgaggcgaaggggagatcgactagggtagggaggagcaacgaggagacgagtcagaggcagctgccggtattggctttttctatagccaggtgactgagcttagcagtggtggttaaggaagctaatcaactttcctactaatgaaaatggtattaattaagctaatctaatcacttgctgatggag

SEQ ID NO: 38774 - DNA, 448 bp, Oryza sativa
  unsure (1)..(448): unsure at all n locations
ctgaatcttcattgctatngaagaagtagcttctaggtctattgctatttgggactgcaatgttcatatcaaatggagttatcacaccagctatggcaggttatttcctttctccctttcctttttatgatcttcatgttcaagtatttgttactgggtagatcataaagaatacacaagacatcaaatggatactttacactcgtgtttatattaaaatctcctctcctaggagtgctattagttaatatttaactctttattcttgaatgcagtgctgtctgctgtcagtggcttgaaagctgggataccaaatgcctcacaaggtgatcctttagatccctgtatctgatagcacctaagcaaactatttatttaactccactaaatgttatttgcaggccttgtggtgatgatttcagttgacttcttgaatcttgatagtgac

SEQ ID NO: 38775 - DNA, 403 bp, Oryza sativa
agcttattaactgcagtcctgcccatcactgatcctgtgcgttggtggcgtggagctgctgtgcatggtcgccagcgctatgtgcgctataccgaacaggagcggagcggcgcggcgacgaaaccagtcggccgcctgagcctctggtcattgtttgcccttgagttttcgtggctgcacgcggcgcgaatgtttgcgtttgacctgctcggttgttcgatcggctagtatagtcggctaccaagtttctgaacgagattggggcgtatcttcgttaagtccgttcgtcgtggtcgtgtcggttttggtatagatcacttaggaagttgatccatcaaatcctagcctcctataagcagggtttcccaaactgccggggccggtgttacagcgccccggcggt

SEQ ID NO: 38776 - DNA, 437 bp, Oryza sativa
  unsure (1)..(437): unsure at all n locations
tggcagcgcagcagccactgtattgtcgcgacgccaaatgtcgttctcacatgtcacatggcaattggcaagagtgaaacggagacgaaagcgagcgagcagcactgcacaagcctgcaggctgcagctcgatcggcgtaacgggggagggccatgtgcgtgagatgccggcacgctcgcacctgagctaaagggacgcgaggccgctagctgcatgcagattntaccacgatgattgattagctagctaaaccggcaagcaccccctgtgcaatcgtgccccctgacacgcgagcaacgacatgcagcaatagacactttggtcatttggatgagctggtcccgggcgggtgcgtgcttacctttgcctatcccatttctccccttgcgctttggcctgttcggctgcgcactgggcttcatctttgggttacacc

SEQ ID NO: 38777 - DNA, 401 bp, Oryza sativa
agcttgttacgtaatctatgcatgcatgcttattctgagctcatggaatcagacctaaagggactatctcacatcttgccagcggtaagccctgataatactggtgtatagcattattaaaggtgtttagcatgctgtatcatttgtacatttggcatctgttaattattgccaaaatatatcttttctttttttttcttttggaaaagatgacatctatttactacttcctccgtttcatattataagactttctagttaatgaatcatctatataaatatgggcaatgctagaaagtcttataacctgaaacggagatagtactaaactatataagtataactacagtttgtccaactatgtttatcatgctacatgacattgttgattccactacagg

SEQ ID NO: 38778 - DNA, 473 bp, Oryza sativa
  unsure (1)..(473): unsure at all n locations
ctcaagcttgttaataattagccagtgggtgagaagctatctaaatgattacttaacatcactagcaattattacactattattacagaactgaatgtgttatgttactcctatattaaacacactagtttaatcaattcaataacattgacaaaaaccctgatctcataaggtatcatgctttatngataatgcaatattcatgctgatatgccagcaggcaaagccaactcggcagataagatatccacataaaatagaagtacactgacctttgtagcagccgtctattaggctcatgaaatgtctcaaatattgccgcacgcatatgaattatccgagattccttgctctccacacctggaaaagtatgaatgatatgaaaagaatgccgacgaacgaaatatggaatcaaataactgaaaatatacaaattacaaacacctaagctatagtatatggtaacacttact

SEQ ID NO: 38779 - DNA, 403 bp, Oryza sativa
agcttgtgattctgactcagtatcatccagttggcctacaaaattgattcgaagtaatcaaatgagaaacttttatacaaataaaacaggattgaactaatggtctttggtgtagacaacatggtctaatgatataggcatctaaaagtttaaatattagtaagcagatacagggaaccttcaactgaacttttgctactacaggattaaattgcatgcctgtccctctgccagctaatagttactctgtacacctggagtcactacttgctgatggcattagataccataatacattgctgttaattgcaaacatgcaggctactgcctgttgccagctgctactggcctatgaaatcgcagcccactgtcagtgactagtctgctatggataatgtgcaag

SEQ ID NO: 38780 - DNA, 401 bp, Oryza sativa
  unsure (1)..(401): unsure at all n locations
tgaagaacatgaacatgaatctttccacctgcgcatacaattctctcttactccttgcaggatgccaaatgtgtgggcctcgtggtagaaactaagtttcttgggtggagttgaattaataatgccgagcaaaaattgtggagaatctctatggagactcgtatacaatgctagaccaaacttgactctgatgcaccgctaagtgtggatgttgttgctttgccaagattcttgcgtgtangttggtatggatgtgttattactattggttgatggaaacaagagatggggtgaaaattgttaacatggctgtgtgactgaatacatctatcttctgtggatattgcatgagacatacatggtgcatggacatgtatataggagtataattgtatctgcta

SEQ ID NO: 38781 - DNA, 394 bp, Oryza sativa
agcttcttactctgagcttcttttacctttgaaatttgcatatatccttcatcctctggtctgtattaatttattaatgctctatatattttaacaatacctctgacttttacatatccaggcttttcgcgcacagaacattgaaagggcaaagtcaaggctcaatatgtgtgcagaagacatcagggaagagttgaaatctaaagaagacaaccaagaactgtgttctcaacttggagctgtgttaagaatgcttggggactgctggtacggcaattttctcttggggacttgaggatatgtgaacctgctattgatacgtttattgcctactccctccgtgtctaaataattgacacgtttgactttcccatttaaactttgaccattattt

SEQ ID NO: 38782 - DNA, 363 bp, Oryza sativa
tgccagccatggtggagtgcactggcacatacacatatgttggtagtggtttcaaggccactgctgctcagcagtacgacagctcttctttcctcagtgggttgaaagtcatttcttctaagccctttcatcaagtctgctctcatatcatccgaacagaatccgggttccaggtaagcattgtgaataatctgagtcacttgagtcatggtaccatcctctatattctttcatatacataactatcaaaattcttgggttataactcatttgatctcctacagttatgttatgccgcgaagacatggattggtgggtttgtgggcatgatgatctttggcgcaagcgatgtcagacggaatg

SEQ ID NO: 38783 - DNA, 399 bp, Oryza sativa
  unsure (1)..(399): unsure at all n locations
agcttgctgccgcacagcgctgcatcaagcagccgaacacggcatatgcatattaaaactcatctcattcgctgcctttgatgtattctcgcttttccttcttggaaaaggtctccctataaaatttgtagtgtgtacagaagttgtctgaaagaagtgttattcactatactcaccttttgttcttgtctccatttcccctgtccattttaatttagaatttcatactgtgcctacacggttacggctggattgtgcatgacttgcttataactaatcaaggatggcataagttactcttcttggtcttctagcaatttccttacgataaactccctcgcatgtgtttcaggaggagcaacatcagaaacgacttanagaggtaagctntgtaagatg

SEQ ID NO: 38784 - DNA, 440 bp, Oryza sativa
  unsure (1)..(440): unsure at all n locations
tgccaaccgctactgggttagccttcttccttatgacgagatgaccaggcatcagctcgtcggttgaacttatctgttgtaagttgccgaagtgcttgtggcatacttgcgcatgtgctcgagtgcgtcgactctgatcccctccaagagttcgagcgacacttcgcgccctttttcgcccctagagaacatcacccttggtgagttagccccttgctctgctggggtcattacctcatcgccataaagaagtatgaacgggctaaacttggttggtcttgtgggggtcgtccgaagggcccagagaaccgacagcatttcctctggccattntcccttcgctgcccccttgagccttttctttagtgcttctaggatcttgccatttgtacgttcggcccgccccattgactgcgggtgcgcgaccgacgagaacctga

SEQ ID NO: 38785 - DNA, 377 bp, Oryza sativa
agcttggaggtctcccgacgtggctgatccccacgggctgggtgacccgggttagtaatgacgtgtgggtaaagtgtaccccctctgcagaggttaacaaactgttcgaacagccgtgcccacggtcatgggcggatgtgaggtgattcctagcgtagttttgtttgactactgcttgtgaaattgcttgtgtgaaatcgggttcgatgtttgaaaagaatccgcagctgacgggatcagctaagcccgggtggccgtttaaaaagttgttggcccgggtggccgtttgaaaaggtgttggcccgggtggcccgttaaaaggcctttggccgggtgccaatcttgttcaaatctaaagactgatacattgcacatac

SEQ ID NO: 38786 - DNA, 485 bp, Oryza sativa
  unsure (1)..(485): unsure at all n locations
tactaagcttaaggagaatntagatctaacatagactgaattgattaatagaactgagaacacatcaaaacaatttaagctaagataggtaaaaactagtgataagccttggttattcttgcagaggaatattcttaattcctgttactaactattgccttcaaggtacatgcataatctgcttagtttgctgaatatataaagacacttcataagtcgtaactgttcctaataaaccaggatccttcatagcgtttttatctccattttagcaataccagacccaaagtacagatgtacacaagggaaatgttgccatccataagagataaggtgctaatttatcaatcttcattcacctgttagttcgggacttatcacttatggtagtgtaaaactcgctgatttcctaatcctaacaccatatgttctttccaacaacaatttcgatccatgattcctaatcctaatcccatatgttcttt

SEQ ID NO: 38787 - DNA, 412 bp, Oryza sativa
  unsure (1)..(412): unsure at all n locations
tgcaagctttaatcttgtcacatgcatcatccagtgaagaataattcagaatgtcatcaaactttgattgagcaaaatcaaggtccaactgctccagtgtgcagtcatatgcatggattgcaaacaggcacttcgccccaagcctggcaattgctgcaatatttaaaaacaaaaaaaatatatttcttttagcacacacaaaaagtgcaacctcatgttggactgaatatctagctttgccaattattaatcacatggtcttacaactcatcaagtggtacttggggacaaaagttaaaactaaaggcgaacatatgcttttgttacgccaattcacactcttgaaatgaactaaatgaacatgctcgataaaacagatcgattggatgtgaaaacaagtcanagcagtaaa

SEQ ID NO: 38788 - DNA, 360 bp, Oryza sativa
  unsure (1)..(360): unsure at all n locations
caacacaccatttaatgngccgcataaaccatagccaagctgatgtgttctcctttaacaaatgcaaagccacaggatcgaacttggttatccgcgtctactccgatcgcaggtagaatagttctctgtacttgcctatcatgaaagtgccgtcaacacatagcataggaatgcaatttttaaaggcctctatcatgcacccaaatgaccaaaaagcccgaccataaacattctccccatattcattcacctcatcgagaatagccatgtgtgtgtctgggtttcttgcctgcatcacctccaatagttggggaagattgtgataagaatcctcataagttccaaacctcatctccaatg

SEQ ID NO: 38789 - DNA, 389 bp, Oryza sativa
  unsure (1)..(389): unsure at all n locations
agcttataaaagtatttagaaaaaaaaatcaaaacaccttgtaccttataatacgatacattntttttggtagtaatggtctggtagctaaatcacaattgtttattcaaccaagttgaacctggccaggaattaattaagcacacgtcggtctggattgggcgtactagtaaagcaataattaagcttatatctagatatatgctacctccgttctaaaaataaacatatgatatgatattacataaaagtaaaaaaaaaatctggatagaatgtactatattattatagcatctccagtaaaaaccctatacatagatcctaaacaactttaagagattaaggcaaaaaaataaactctagcagagccgctacttaaaccccataat

SEQ ID NO: 38790 - DNA, 473 bp, Oryza sativa
  unsure (1)..(473): unsure at all n locations
ctaccattcgagtanggatttcctactagaagtagtacttccttttctcgattaggagtgtcctactcaagtagtactttcccacttgagtagtgttttatcactcaagtagttcttcccactcaagtagtgtttttcatcttaagtaacgttttcccactcaagtagcgtttgtccacacaagtagtgtttatccactcgagtagtctttttgtactcaagtagtgtctttggactcaagtgatagctgataaattactaaagccttttccaagataaacacacacttataggtgagagctattcgagccaacttgtactatgactctcagaacatcttttccttttgcgccttgaccgaatgagaacgatggcatttaccctctcgaggggatgtccactcgatactcgcatgtcatctaaatgattattagaaaattaacacatagattaatatgaaatatatcactcca

SEQ ID NO: 38791 - DNA, 385 bp, Oryza sativa
  unsure (1)..(385): unsure at all n locations
agcttgatgtgctagagaagttggagaaacaaatagtcattgtactgtgcaaactagaaatgattcttccacctgcattctttgatgtcatcgtgcacttggctgtccatctacctgaacaagcaaggcttggaggtcctgtacaatatagatggatgttctttgttgaaaggtatattattctgtattaacttctcccatttgtacgcataacaatctaagttttatactatagtgtactaagactaaaatatggcttgtttaggttccttggttctttgaaaggaatgatgagcaatagggctcgtccagagggttctattgcagaatcatatataatgaaagagtgttcaactttnttctcgatgtatctccatggaattga

SEQ ID NO: 38792 - DNA, 446 bp, Oryza sativa
tgcagacctgagccatcagcaacgtgtgctcctcatcaccaccagcctgctgtggatctgcaacaaagagattaactgggccagctattcgcgatcccgctttgccttgcggcaatctttggcccacgggcctatcttgccgtaatagcgacactagtctttggagacgttgcggcttcccacttgtgatggcgtggacttggtgtcgacaccatagcccgcgtgcccttgctggcgggatcccggcgtggcgcccccgaatactagtgtcacgagacaactgcccggtctgcttggtgttgcgagcaggtgtctccagttccacgagcatagcctggcccgcgtcttcccgtcgaatccggaggtcgttgatgggaggagccggcagcaagtctcgatggaaaatcgtagacaatcatgttcaattgacaggcatctgacatact

SEQ ID NO: 38793 - DNA, 417 bp, Oryza sativa
  unsure (1)..(417): unsure at all n locations
cttaagtgactgcagcatcaagcttttaacactatggattttgacctttttgcctgttngntagtggttgagattaatctgtgaaggctattactttgtgagctccattgggaactaactttactatttattttcagccaaaagatttctggtttagtgcaccaaagaaagggatcatggtttttgcgttgcctggagagcctggattaacagaggtagctggtgacttcaagattcagtttcatgatcgacagggggatttctactggtgagctccagttctttatgatagtataatttccttgaacgaagtatatgtttttctcgtgtttaatggtttcattttcttgttactggaacaatgttttcgttgcatatatgtatgtttagatctaacttagattggatagtatcaaa

SEQ ID NO: 38794 - DNA, 348 bp, Oryza sativa
caatataaataatttatggtaaaaacttttatattctgtgatttggttctgtgactaaagcgcctatgttggaaaaaataaaacctcaattcaacttcataattcaaaaatcaaaaagctcgcaatgcatatcttggaaatcatcagtttttttattcttacatgggtcggacttacactataacccttagacatattgaaaacacaacatcaacatgtaaatcatacaggctattaactctagccccttatattgttcaaagtgtatcaatattaatataatcctattaaaaaccgctccataatgagagaaaatacctctataatttgggattatgagccttatac

SEQ ID NO: 38795 - DNA, 394 bp, Oryza sativa
  unsure (1)..(394): unsure at all n locations
agcttgatagcaagataaaaatgttagttctactaatataatatggatagagatcaattgcatttaagacattgtcagttccagcatcactttgaaattttgggaaaatccatgtcgctgaacaatgacaatatagacacatatccaccgttcaggatatagtaagaagcgttccggccacacttctctagctccttcactacggccgtcagcatgaattcttggttgcatcatgtgcatgccaatctggtggagcccggtgccaccgaagcagcatcatgtgtatgtcaggttcgcccatggtcgtcatacatgagtaacttagcaaagttcagatctacattntgaaattcagaanagcaattcacactaactgctctacatcattctcaca

SEQ ID NO: 38796 - DNA, 470 bp, Oryza sativa
  unsure (1)..(470): unsure at all n locations
ntcagggcataagttcacctgggcaaactctttaccaaacccaatctatgagaagttcgatagcgtgttagttagtgcggagtgggaggagaaaaatccattggtgtctgttcatgcccttacccgagatccctcggatcacacccccctgctgctagacacagggaaagggtctcttaagaacaaccaacccctgtttaaattcgaacttgggtggttgctgagagagaactttcatcaattggtggtcaatagttggtccaaacaagttagagggaggacattgagagatggcaaaataaaattcagagactgcgtgttgatgaaaaacacgaggcctgtgagatctgcttaactctagtgcaggtccaaaactcgcctttgtgatgcaagtggccagtngatatatcctacaataacaagaaacgaagataaagaaaccgcggntaacctataaatgatagccgatc

SEQ ID NO: 38797 - DNA, 407 bp, Oryza sativa
  unsure (1)..(407): unsure at all n locations
agctntggagaagaagtcttatgtggagtcctggcttataccccagntgagcgcctgtgaagatggagccgtangcccgctaatccgctgctggttatttttgtttgtcaggcctgaagtgccttttgaataatggtaatattatcgatataataaagatgtgccttttgtatcatgtttgtttggtgtaccccggcttttcctgggacggngattaatacactagcgttcgggaaaaggcaattttctcggtcgcgacaagctggtatcagagccatctcgactgtaggataagccaagtggataaaacctaaggacatattttataaatgaaactatttgcgaaagttcctttntcctcctttcccctgtgctannttgcaaatgtttactctttcttccttctt

SEQ ID NO: 38798 - DNA, 402 bp, Oryza sativa
agcttcttttcggagatctgttaaaccaaattacttatctgactgttggtgcatctttgctaaggctgacaagggaacacgcttaagcaatagaaaacatataatgagtaatattccgtacctttaaaaattcttctgactccttctcaacagtactcaggtggtgatcctttttctccagctcatctttcattagtctagcatcagccttacatcttgaaacatgattcccaatttcaacatccagtgaatccaatcgagcaaccatctggggaaaaatgaaatgtaatcagcaaaatgtagaacagcaccactcgtaggcaactatttctagaagggcataagatagaaagttattatgattatcctacaggctacaggaaagtccaacattgatgagtt

SEQ ID NO: 38799 - DNA, 420 bp, Oryza sativa
tctaagtgtgaatcgaacttaagacagcaaatattcttctcctctgagtggcggctctcctctcgcggcgattgaggaaggggaagagaaataataacgaaaataaaagggaaaccgtacaaaacaaagaacgtggcttatgtattctagtggattttgctcatcgcctacatgtaagttagacttcgcgggtaaacgggcaaagcgggcatgggtagtgattacccatacccatacccatttacccatcgggtataactcttgacccaataagatacccatcgtgataaaatagagaacaaacccaaccctaaaggctcctttggatgcagggggaggaaacccccgggatatagttccatacagggatcttcaccggcaccaactgatccccctccacctctaggggaatcactcctg

SEQ ID NO: 38800 - DNA, 408 bp, Oryza sativa
  unsure (1)..(408): unsure at all n locations
agcttgactttgaaaaggcttttgacactatttagcattctgtgattttggatgtcatgaggcataaggggtttgattcaaaatggctaggctggattgagaaaatctttacttctgcttcttcttcagttctcttaaatggtgttcctagaaagtctttttactgcaagagaggggttaggcaaggagatcccttgtctcctcttctttntgttttaggggctgatctcttacagtctattattaatagtgcctatcaacacaatgtaatatctatgcctatcccaactcctgacaatgattttccaattgtgcaatatgctgatgatacgctactcttcttatctgcatcatcaaatgagctnttcagcttanaggcaattttgaatacttttgcctcctcgacac

SEQ ID NO: 38801 - DNA, 119 bp, Oryza sativa
agcttaaatatcttaattaatttaccgaaccatccaaattaaacaccccctaatacattcttttgttatcttaagtaactgctactaccttcgtttcaggttataagactttctagcat

SEQ ID NO: 38802 - DNA, 309 bp, Oryza sativa
cgaaccagtgtgttcttgtatttatgaaactcttatagcaaccaagcaagccacctgactcttgtattcttaatgtaccctaacggaagccacgtcgcagtagcatctcatggaatgtagaaaaacatgcttaaatatttatatgccaactatgaaactaatctactgtgagcaggttgactgatgataaatcttatgccatggtgctgataacacagtggcaagttaatgtaggttgctaatctaaagttaacttgttggctcacaaagaccagataatctgtcaaacaagcttgtagtccaaatcac

SEQ ID NO: 38803 - DNA, 396 bp, Oryza sativa
agcttacgtggcatcagaagtgaagagacttatttagcctcgaaggccaaagaagaagattgctgtagacccgagtgtcaagaacttcttcaggggtatgtctgcacctgcccaggaggccataaagccatcggactatgagcgaacgctcaagaaagcatgttctggatagtccaaaccagtccctcagcttggagagcaaccaaaccagtagatcgagccggggtgaccggtaagattttggaatacaagaatttattaatgacaccgggctaactacggatcaattgctaggagacgcaccaatcgaaaaggcggaagtgatatacatgtacgaactcggtaaaccgcttgtcaagcctgagctgctgcagaccctacccacaccaatataca

SEQ ID NO: 38804 - DNA, 417 bp, Oryza sativa
tatgggctaaaggtgcctagcatgttatattgtcctgatggctctatatggactactagcataatatatgagatatacagtgctactatgtggtttagtctatctataaggttatgggagggttatatgactacacatgcatctattcaagtaaaatggtcatatattataggttctgtcgttggatggattaatttaattatgatcaacatgcaatcacaaggaatcattcatattattattttaccaatgcggcattatcttaagtatgatcatatcttacttggcattatatattatataagggttaataatcatccatgctctatatgttagatctgcgaggttataggtacagattatttgactgtgtggtcttgacacgagcgcaagaattataattagtgcttatctaac

SEQ ID NO: 38805 - DNA, 461 bp, Oryza sativa
  unsure (1)..(461): unsure at all n locations
tacaaacttcattagagagtcagagatgacaatcaggatattttcagctgagtgtttaacataactgctacagaaaccaaagaagccaacctgaaaaggatgatgtcatatactaacaaagtaagctgttgaagaaaaaaagcatgagggtacgaaatgtaataaaacagtatacagtcaccacaattgtcaataatatctaattctgaagcagtatacgtagtttaaaatttttgtggagccacagtttcaacaacttcctctggttaattttgttgttattttttcatgcctcccttttctattggtaagagtggatgacacattaacactacttacggatcaaatgacatgattcanagttgttgatagagacccacaggtgatcgggataacgcctatgccctacttatatatcctgatgccaatatgcctgaacaaatgtaaaagataagggtaat

SEQ ID NO: 38806 - DNA, 479 bp, Oryza sativa
  unsure (1)..(479): unsure at all n locations
cctataaaactaagcttgcaagatgagggcctctcgtgttaaccccggtgatgttgctgttaaccggcaacggcatgatagatatagtgtggagattatgggtactatatacccacacggctgggctatctgactgtgaataggggataaatcatgtatatagaataatatagaaaaaagtctaaatacccccgtaaactctacatgaaagttcgttcatttagctagaatcctgaactttaaaactagagttctaaccctacccctgaattttgtaaaatcgttcatattaccccgtaaggtgatttttcttattntgaaagtttaaacgaacaactttaaataactaatataatatatntgcatatcatcagtggtaagtcatcaatttatatttatacaatgatattatactattattatgttgatactttgttgaatatatattatacttactatatatatatatatatatatat

SEQ ID NO: 38807 - DNA, 435 bp, Oryza sativa
  unsure (1)..(435): unsure at all n locations
cactataaaactaagcttgaagaaataaagacttggctagaactatcaagcacagtattaatacaccagtatagtacaaattatgcctccatgtgttacaatcatgctcagtcagaatcagtcctttcatcatcagagttattgttactcggctgaaggtcattgttgcggaattgatctaccacatcgcttgcaatcttgtcagccgcattttgagcattgttgataagatcaagagcagcttcttcgcttgtcccatctgcaaatccatcaatggtgtcgatttcaattcttgggtacaaggatttggtcatcgctaatgccatgctagctcccatgcttncagctntcttgatgttcttgaagtatacatcccgtgcaactcttaacttgtcaaagatttcngntgcgtcaagtgcactctgaccactgtta

SEQ ID NO: 38808 - DNA, 430 bp, Oryza sativa
  unsure (1)..(430): unsure at all n locations
ctcagcttggtatagagggagacgttgagcacagcgatttgatttatattaaacatgacacacngccatggagcagatgcacggtaccagtgtagaggaagtacgtggngactggtgagaaaagagacagcagcagtgtgaagaaaaggaagccggatttgtggaccaatttacctcccggacggtcacgctccactgttgctcttctttgctgattgtcatcgacgtatggaaaaactggattgggatatcccacgcaatttgaacagggactgcaagtntagcagtcttaggtcttcacaaccatcagaacaaagattntaacggctaggatttagtagcagcactggttggtagcacttgctacagtatgcgctacaagattcggctgctgcaataatatgatgaacagtacttttgtgtgatctga

SEQ ID NO: 38809 - DNA, 381 bp, Oryza sativa
  unsure (1)..(381): unsure at all n locations
gaatctttttcttcagatcatcaaaacttgatttgatagaattgcctctaactggtaaactgtgaacaacatctatagattcttttgattcggtggtgtttgaatctcctaaagatgaagatgaagataaagataaagtgtttcacgtaaaacgaggtggtaataacgcatgattaattgacttttaattattacaaacttgaaaatggattaatctgatattttagaacaactttcatatagaaagttttcgcacaaaacgtaccgtttggcagtttgaaaagcgtgccacgaatatccaaaactttatccactctttctagtggaaacgaacggatgtctcanacaaaaatgtcacaagagtttacatcctacttgatg

SEQ ID NO: 38810 - DNA, 417 bp, Oryza sativa
  unsure (1)..(417): unsure at all n locations
tatccctacaataaaaggacttccttgacaaactctatgttgacatgatatnttgatctggttctataatttgaatcttaagttgaaagaggattttcttgagtgactctaaattatacggttagaacaaaattgcaccaactccggtatatagcattatacataatatatataaaaaacatttcaaagaataatacggttttgcatttattttagataatggaaatggattgcactcccagcccctgctgttaggcacccagccaacaatgcagttttacataacagtactgctttgagatttgtacattttggtattcanaagagcgtcaaagctattcatgattcaaccagtacaactaaagagtaaagaccctatatcaatgggaaatatcaactaccatcctntgttattta

SEQ ID NO: 38811 - DNA, 440 bp, Oryza sativa
  unsure (1)..(440): unsure at all n locations
tcttcttgaacacncacttgcaccccacatgtttactctttatggtcgctctgtcacctcccaagtcccgttagcgataatggaatccatatcactacggacagcctccttccagtatgtctgcatcaggagatgcatatgcttctgaaattgacttaagagtgtcatccacgaggtacacagtgaaatcatcaccaaaggacttagtcgtcctttgtctcttactccttcgaggagcttcactgacatcctccttagtgacatgttcatgtgtatgttcagtttgttctggtggtgtgaatgaactgtgaattattccagagggttggctcgaactactatgtgtatccttcattgggaaaaaactctcaaagaaggtagcatcacgaggctccataattataccaacatgcatgtcacgtacctcagattttactatt

SEQ ID NO: 38812 - DNA, 375 bp, Oryza sativa
tgataaattaaagttacaacatagaatgcatgtatgatctacagagataaatgcatgcagccaattttctcatgtttataaataagctgtacagtcacatgctttttttttctttatggctttggtcttgacgggaacataatctaaaatcttgaagcatgcgtgttcacaaaacaaaacgttgtatattctaacagcctatacacatgtaagcaaccatcacaaggtatgctcaagagcccagctattctttaacttaatgaattcacaatatggaaaagtttaagctatttgatgcaccatagattgaacactaccatcagattaaataacacttcaatgccgattcgattaattcatacaattggacaatta

SEQ ID NO: 38813 - DNA, 411 bp, Oryza sativa
  unsure (1)..(411): unsure at all n locations
tataaaactcagctgcccttgttttttaacctcgcttgatgaatctgataaatcatcagaggagtcaccatcttcagctatgaaaaaggaaaaagatatattgtcagtcatcatcaaattcaggaggaaaatgcaacataccacaaatacatatggattatggcaaacaatccgtagtactcagaatttttgtttttcttagggaaccagtcctcacaaatattttaggtcgataactgttaggcatgcatattaaggctgaggggttgtttggttgcatgccacaagttgccacgtctaaagttagtcatgccacagttttttagctattgtttggttcatgacacaactgtggctagccacacattntctctatatggccccacatgtcatacactagtatttttttgc

SEQ ID NO: 38814 - DNA, 418 bp, Oryza sativa
  unsure (1)..(418): unsure at all n locations
tcttccaaaaatttgaagtaaactgactgcctcgatcagacactatnnacntagggactccatgcaaacacacaatccttgccatatacaattctgccaaccgactaccagaatatgttgtctttactgtgatgaaatgagccactttggtaagtctgtcgactattacccaaatagagacatgacctgatgacgttctgggtaaaccactgatgaaatacataccgatatcctcccatatccattctggaatcttcaaaggctgcaacaaaccggcgggtttctgatgttctgccttgactcgctgacaaacatcacatactgctacgtattctgcgatttacgcttcatacttgcccaccaaaatctttccttgagatcctagtacattntggtactaccacggtgaatggagtat

SEQ ID NO: 38815 - DNA, 353 bp, Oryza sativa
tatcaacccaatcaacaggaatccataacagctgcatatatatatgaaaataaatgtagcttgatgatgaactagaacatatgtctctggtaaaaaagtggaagaaatctctgtgttgacaaatcatacttgacaacaataagtgatactatatcactatcaccaacaaatatgaatgttttcagtgaacaaaacgtatatacaatatgaaagcatatatttcagtgaatctccacatctgctggaccgcctcgtgtaaactatatttgttgctactaattttattaatgttgctttgcaacacaaaatcccacataaagctgaaaattttgtgatattatgttcaggtgtct

SEQ ID NO: 38816 - DNA, 397 bp, Oryza sativa
  unsure (1)..(397): unsure at all n locations
ttctctcggggccctccctactctccagcatccttcaccttctccatctgaagatcccgtgatggcagtggtggagaagaacgatggggataaggtggcggccgacaccgaggctggcacggcgaggtggcaatggcggctgtgatgggaaaggaagctcgcgaggtggaggccatggccttttggatcacaccggccccctagcgcggagtatggtggcggccggcgcancgaggtggcggcgcggtcaccgaatcggctccatcggtgatntttatttattttcttaaatactatagttgctggctgtgggtgtagaaccggcacctacattctctctaggtgcccattcagaacccggcaccaacgtgtatgagcactagtgccgactaatatg

SEQ ID NO: 38817 - DNA, 427 bp, Oryza sativa
  unsure (1)..(427): unsure at all n locations
tgttgctgcttggatnggatccctcttttagtgcagaacattctttcactacttgttagagacgaactctaaaagagcatgtagatgcaagtatcaaccaaaggttgaacaaaaagaactcacatagtttcgagtacgactagtgccatggacaaccaaattggtcatgttaccgatcaaataagcggtcaaaccaaggttaaagagcatgtataaaatgttgaagaatcatctccttgtattttctgcatgtagatccccatagcccacggnggtaagagtggtgattgaccaatagactgatgttacgtagcgaatccataagctccgttcatggaaatctgccatgtaattgccaatccacgtagaagttgcgacggtgtacctatcagcaagaagatagtataagcatgccgcacagtgcaca

SEQ ID NO: 38818 - DNA, 478 bp, Oryza sativa
  unsure (1)..(478): unsure at all n locations
taaccaggttactcataagatatcagcgattattatgaggtttaacaatatatataatagaacacaccagcctgtatgccacagtaactaagctcctaactatgacaatgcaggatagatagtacacatggtcacaaactcgcaatacaaaatcaggttggcacttggcaggtgacgatgtaatgtttgcatcagccaaatgaacaatatctcacatcattctcaatactacttatcactagaattggctatcaattagctgaattaacaagaatgttccaagaccctaatctgtcataatcatcagcaaagcccctaaatgtgcatatcaatagttaatgaatagtacagttaanaacatacaaaaaatagatgatctcaatatatgaacaagtaatggaattgcatctaagggtcacatggttntggtngatnggcaagcaattgaggaagggcaacttatcatcaacagctaatg

SEQ ID NO: 38819 - DNA, 421 bp, Oryza sativa
  unsure (1)..(421): unsure at all n locations
taaccagtttactcataagatatcagcgataattatgatgttaaacaatatatataatagaacacaccagcctgtatgccacagtaactaagctcctaactatgacaatgcaggatagatagtacacatggtcacaaactcgcaatacaaaatcaagttggcacttggcaggtgacgatgtaatgtntgcatcagccaaatgaacaatatctcacatcattctcaatactacttatcactagaattggctatcaattagctgaattaacaagaatgttccaagaccctaatctgtcataatcatcagcaaagcccctaaatgtgcatatcaatagttaatgaatagtacagttaanaacatacaaaaaatagatgatctcaatatatgaacaagtaatggaatggcatctaagggtcacat

SEQ ID NO: 38820 - DNA, 336 bp, Oryza sativa
  unsure (1)..(336): unsure at all n locations
taaaactaagcttccgacaggcattncaagacgcacangtttttatgccgcgagggggtccaaaccactactggttggtgccgaccatactgtgccagagcccagggtctccccgcaccaccccgggaatcacatgtctctggatcaggctccctgatagctagtactcaccatggtgaccattccaccatgtggcgacttgcttatgtcggatatattacaggaaacggccttcgtgcaagagcggaaaccgtcacccatacgtttcccgccgcggtctggaatcatttattccaacaccgaccagttcgggttttcagctttgtaaaacaagtt

SEQ ID NO: 38821 - DNA, 445 bp, Oryza sativa
  unsure (1)..(445): unsure at all n locations
tgaggcttctcgtanaaagagggaaaagagggagacttattatataacgataactaatggatcattgaaagagggccatatgactttntttttctgactaagtcactgtgttatgtatgacaaaaccatcgtccaaccaactatgttaccttgctcgactatagtgatataatcgagggatgcttgtatgatgtatctagctttgtgtatgagggacagatgtcagacttggtctatagttgggggagaaaatagacagctttctttgaactctttgaagtagaactagcaggctggatcttttgtagcagtaaaaggaataagttcaactgccatccctcaacttacaccgagtttggttgacatcccttatctgcaataccagacatcttcacccctaaacaatgtacaaccatgtattntaggtcccatagcagtatatatg

SEQ ID NO: 38822 - DNA, 454 bp, Oryza sativa
  unsure (1)..(454): unsure at all n locations
taattgattcgtctcatcacataatttgccacgaataatgtggatgaagatgctaaggctgtgttcgggcatccttattcccaaccggaacagttagtgggttataacattataataagagaggatacctctccatcctaaaaaagaccaatcctcattcattgctaggattaattctttntacggagtagtacggtactatctctgtattttaatgtatgacgacattgactttntatcaacgtttatccattcgtcttattcagtttattttgcaaatataaaaatattaaatagaatatttgatgataaatcaagttataataaaataaataataattacattnttttaagtaagacgaatggtcaatcgtatcttaaaaaatcaatgacgtcttacattaaaatactgaggaagtataacatcaagcgacctctcacttgtcatgcgtga

SEQ ID NO: 38823 - DNA, 463 bp, Oryza sativa
  unsure (1)..(463): unsure at all n locations
tgtgaccataaacaaagcactgccaggatattccccagattatcatgggnaggttccttaataacacggtagctacatcaactgtacacattggtgatccttggtattggaacacactctataggagaatctgacatcacacacttggttttgatgtcttgcgacacaaaagtccaagtgtggggggaaggtcgacgagcttttcatgacgagttccatcaaccaaggccatcttggtttgaagttggtgttagtcctagcttgctaaaacatacaacgacaaaaaaagaagataaaagagaggagaagagagagaaagaataaaagaagaataaaaatgtggatgaagaaaagagcatgagagctgacgagctacatttggaacagagaccgcattatgtgcatgtctttgaaatatggctatacacctggctagtagcaatcatgctacctggctacacct

SEQ ID NO: 38824 - DNA, 412 bp, Oryza sativa
  unsure (1)..(412): unsure at all n locations
tggctcatggactangggatcccatgtggcttcttaatatgaaggccatataacatcggatggaaatcaaatgaaatttctccttttcttatttggccactagcttatgagtatatttcgcatcacagacatccttttttttcatatgtttgcaactttgcatcgtggctatcacttttcacaatggcaaggggtacataaagatatcagagttactgtagtacttgttttaaaatcttacttgtgtggtgccctgttttaataccgtaaagcataggagtaacttgagctgtgctagttcctgaaattggggagaagtttggggaaagttggtagtttgggaaaaaagttaggagtttatgtgagtacgatagtttggatgtgatgtgatgtgatggaaagttgggagctt

SEQ ID NO: 38825 - DNA, 410 bp, Oryza sativa
tacaatactcaagcttgcacaagggctctatagcgaagacacggagatgacctatctcttcaaggtcaactactctatgggagattgcattgaagagataacacagatttgtgacaaccatctttacgtgtactagtttgattactttgattgcaatagcaatgaatattatgagcattacatgacaggcatgagaaatgtagcccaaaagctataaatccttcatcgacactagccgctctatgtatgaggagaaaccggtagggactctcacctcgtgtagggatttgtacaatgccatcttctcataatttgtcaaggtgtaataagtcagcgaaaggtgcactcttgtacattctggcctagggcttaataggattaatagaatactcataccatcacgttgcaac

SEQ ID NO: 38826 - DNA, 369 bp, Oryza sativa
tttatcttaactgtgggtttgctattgtaaattcattgttaaagatgacagtgtgaatctaatgcacatcctggaactaaattagcatcagtatgagttaaagaatattttgagatgttgtagatctttagccatttttgtcaagcctcctaaatgtgtaacatatctggtcgctgccttcgagtgatttgatgagcacatctcacgctaaagttgactggcaggctaaaggcccagcaatgtcttcaatattcctctctcgaggcgtcggatgtttcattatgcttgtatgtgacttgactattcacttcatctctcattataatggaatataatggacggccggagagctacgcacctaaaccgccg

SEQ ID NO: 38827 - DNA, 467 bp, Oryza sativa
  unsure (1)..(467): unsure at all n locations
tagactggaggaacaatccattanggttacataaatggtccgagcgtncaaagtgtgggtgcagagatcgctggcaggtggctacatcctttgctgaacanacatttcgaaggagatnatttgtctgccccaatgtagacaacgaattcgttgtatgtctaaccatttacaaaatccgctatgatttgcacaaaattactacccaaactgaataacattactatttttacagggcaatccaaggatgggtggatttactcgatggatcgacaatgtcactccatcatatcatggccagaagataacagagtcagaaacacaagtagagtatcaacgattgaaggaccacgagaatgcaatgcattctgaccgacctagaaggggccgataggttaccgcatgcttgattcgtcgggatcgacaaatttgtaccgtgtatcgatggcacttcttatctatcttatcat

SEQ ID NO: 38828 - DNA, 391 bp, Oryza sativa
tgatccaattccttgatcgctacttatgggcgtgcgctcaaaggatactaacacggattcgccaaccaaaaggggaattcgtagtcactttttcctgtcgcgtaaaaaaaaggctttacccgagagcaatacaggttgggatacatctatctcttctgagcaacctcttttggattcttaagaccacccttgcagtatgataccgtctgctttgggttctttattatattatctccttcgagggattattaggatcgttcaggctatatttagtctatattggcttttactgtctccttttctcagggaagtggttaacgacctcagaagatagaggagagcgccaggcgcagatttccggaatacttctacagcgaatgctcattgaatg

SEQ ID NO: 38829 - DNA, 457 bp, Oryza sativa
  unsure (1)..(457): unsure at all n locations
tatcatattctataatatgatacactcataaggcagaagcactagtgataatactgatgcagcagtaatggattctgctctagaaaatcaacataaacacaagtgatgcagtcagttgtttctagttgttgaaaaagcaagtgacagatgaaacaaaatggcctagtaaccccccctgtagagatagtggaatagatgcctcacacccaatgtggggaggtgatctctcatatatagctgagttacaatcaatgctagtgagatacacaagaccaaaggtctaggagataaacagcctatagactaataaataattctaatacccncaaatcagaagaaaacttgaggaacaaccatgtagtagtagcctagtaggaggaaagtatgaaaagtatgaatggagagatagacagcacaacagctggtaattaacgcaagcttanactatcttacacac

SEQ ID NO: 38830 - DNA, 405 bp, Oryza sativa
tccacgctagttaatggatgtcacgtaagttttctagcctatgcaagtgcacaggttgatgactaataatatatacatagaattattgtattcatattgaaaaacacgttgaaatgatgctaattctctatcaaatatctttgtaaattaaaactaattcttggtcaaagataaatcttaaaatacatgcgtgccatatttattggaatggatggggttatgttggtgctaatgaatcttattgttatcgaactaccgctcgatgcccttgtacatactgtacagtgcaagaagcgtgtagcatgagagcctttaatgtgttgtcaagtcccgatcctgcatgatgtctatttgggaggagcaatttgtacatatgcatgcatcacacgttcccatttgtgtctt

SEQ ID NO: 38831 - DNA, 433 bp, Oryza sativa
  unsure (1)..(433): unsure at all n locations
tatcggctgatgactatatgtgacacaactaccataggtgttgcttgccaccaagaggtggccaacaaatatttcgccacaatagtggcataattttgcaccacactgtgagatcgagctgttaaactagctaataacgngtggcatgtcacataagttatcggacaagatctatgctattaaacaggcctcccactattgttggaatggatgactctgtgtacgagatcatgaatcctattgttatctaactagcattgaatgccattgtaccttctggacattgcgataagcgtagtacctgatatccactactgtgtcgcagatgccagacttgatgagactatctggagacttgatctataataaaatacactgtagagcacttccattttctgagagttgtcatcaagacttagtgtgttaagcaatt

SEQ ID NO: 38832 - DNA, 455 bp, Oryza sativa
  unsure (1)..(455): unsure at all n locations
ggctcgggcagttggaggaggaagaagacatatatatatggctgggacttggtgttaccaaccgggactaaagatcaaatatgcccgttaccctttttaaccgggactaaagatcatcttatctttaaccccggtttttattgcatctgggactattgtggaatttggccgatcgacgaaagatggtttctccaccagtgaattgcccgtgtaaaatgtanggcatgtttagtttcttgccgctntcagccttacttagaatttagtaagataacaaactaaacgcatttcaaccattattaccttaccaaacttcatctcttanaactctatcnaaaattaacaaagacatcaacacgaacaaagccaacactaccttgggtataccaagtattaccacaattngctatgggttaataggacaataaagtcaacaacccttgagtttttacaaa

SEQ ID NO: 38833 - DNA, 291 bp, Oryza sativa
  unsure (1)..(291): unsure at all n locations
tcaaccatcanaactcgccggaaaagcgcacatccaagattacccaaatcaagagcgcgtcaccaagaatcacccaacgaaaatccagcttccaaacaagaaagcagcaaacagcagctcgaacccccttccactccgatccagcacccctacaaccgacagcccacagatccgccgccatacaggcaacaaagggaaggaagaaagcgagatctaaggctaccgcagaagcgggacgacggcaagtacctcataaacacaacgatctggcgcggagggggaggggggttg

SEQ ID NO: 38834 - DNA, 451 bp, Oryza sativa
  unsure (1)..(451): unsure at all n locations
ttccacgaagtccaagatcactccaaattgatattggcatttatgcgttatgtccgccagaagtcacgactgtcttcagaggtcacactggatttctaaactcattagactttaatatcttgtacattcttcaattatccgatgtattctttggcaatgatttatatttctcatgccttcgtgtatgtatatacttgatggtcacatcatattagccatgtgtttgattcatagccacacttgggggacattttcttcttcatcaaattggtcttacatgtcaatagcacaaaaagtatagcaagggtttctcttgctatttaaatcgtggcttcaagtttattaggcacaccttaaacagntagattaaaactatggcaacttttggtagttcagcttcgaacatatttctagcatgatacacacttcaaattgtcctttatcaatgtct

SEQ ID NO: 38835 - DNA, 301 bp, Oryza sativa
cgacgatggcttccgaatgaacgatgttcttgtgcctctatggcacataatgggcctctggccactaacgtacagcatgctgcttctcctactggcagatagtaaatgaatctgcatatttctactcaatggcaacctcctcttatatgccactggtattgcaaccaagaaccatagaatgttacatattgtatttgaaagtatattttttctatgccttaactgaagaatctaattcacaatttaaaaaaacttcttgttaatttctgaaccgatgctccattgattaaaaaatatctat

SEQ ID NO: 38836 - DNA, 479 bp, Oryza sativa
  unsure (1)..(479): unsure at all n locations
actaagctggcttgtcatatattcctacatgcatgcatatggtggatccgtattgaaaatgacgagatgtgccaccgcatattcgagagaatatattggagcactcgatattacgttgaggggtgctggcaattgcaaaggacgcatctcatctcttttctacaatgaaataagataaatggcactgatatatatgccagtgtctcttataaaagacaagaatccgtaattttcttgacggtcaaaaactatcaagtagcatcaaaaccgtcaaggttcattattctgttggctgaccgtcaagtctataaagccaaggatattcaggtttcttggctgctaaccgtaagggaatgttttcttagccgtcggacagccactcgcaagaaaattaagaagaatgcgaaacttttaatgcaccaagaaatgtaaccttgtcngtctgaaccgacnagaatatatcttttccttagctgcaa

SEQ ID NO: 38837 - DNA, 470 bp, Oryza sativa
  unsure (1)..(470): unsure at all n locations
ctttactggttgacaccttttaagatgcattgtaccaactcctaaaaagttgagtaactgcggtataaaaggattttaaggtattgggcacttgatcacgcgcactttggcctaagcaaaaagtgcctaagtccctaaaagaacgtgacaggccacacctgataatatgggctgcagacatattaggcctaggccaaaaaatatgccttcgacaccctntaaaggatgacgcatgtaacatgctcccgagtaataaatcttccgggtaatatagaccaagtgtagctcatatgaatagcttctgatctgaatgattatcccttatgggatactccanaataaatataataattgaatcccgactggcgcaagtattcggttgatagcccttacggggaataataattggtccagtctttgagcatagaaaatagactcatgactatgaatccatgtggaatgtatccgga

SEQ ID NO: 38838 - DNA, 481 bp, Oryza sativa
  unsure (1)..(481): unsure at all n locations
gacctatgaatctaagctttaaaggggctcggagacgacggcggaggcccacgacgactgttactgcgaaggaaacctcggcttggagagagggaacccgatccgaatcaaactcgattccacaagcttccaaaacgatttagccgatgattccaaagaggaaaaggtagaggagatcccggagattgtttcccctcaaccaattcggccggagaaggaaaggaacggccggattggaaggaaacagcggcggcggctgtcacgcccggaatttctatccaaaattccaaacgcttacatgtgtgttaaaccctcgtccaggaatcaaccgaggcacacaatgacaatattgataatagagtacaaatgactaactattgaatactcgcanatattanaatattacagaggtggatagttcctctcaaagataaacattctacgcagcggaaaccaaactataacaactactgaacactat

SEQ ID NO: 38839 - DNA, 473 bp, Oryza sativa
  unsure (1)..(473): unsure at all n locations
tgcgccttatcactaatctgtatgtctgatacaatatgtgatgacttgcacagcgcttaaatggtgtggatagccatcagtgaatgcaccaacatctgcttgctgatcattaaaatgatgggggcatgcataccagaacagcacaaatgcatactaaggcattccttttacatttttatcttcaagctatcctctgcaatggtaattgcaagctgacaaanatacatctacagtatgtagtgagacttccatctatagcgatgtccagatgctaagccatacgtatatacaagcatgtaatcaacaaataagcatcaacagtacaagagatatgctgatctgtataattcagtcctaggctcacaatgtcttaatctggctatgttgacatnttaccattactcatgaaacgttgtccttagagctctttagctctcaacgccgtttacgacttccttggacctatgaagaaa

SEQ ID NO: 38840 - DNA, 310 bp, Oryza sativa
cattagcctcatcgtagtgggacctattccttttcacacctcaaaagagaacattagtctcaacaaatccgttgtcatccttcacttgatgaccaaccgggtgcatatgaaatatattgatatgtttgttgagtattcattaacatcacaagtgtcatatactcgtatgcaagctcaagtgcaaagatccgatataaataataggtgaacaacatggatctagaacatgcacaataaatgtataggaattgctccccctaaatatatgcataccaataaatatacaagagatgcaagtgtatgcataatt

SEQ ID NO: 38841 - DNA, 426 bp, Oryza sativa
  unsure (1)..(426): unsure at all n locations
tgcgatgttctctgtgttagcgaccatctattcattgcatgttggttcgaaaatagaaaatattgtcactccatgcgattcttcctccacattactctgaaataagtgcaatatgtgcccttggcgatccagattcgcanaatctgttgtaattgttattgtaattgatagctattcttattcatttcctgtaacatatgtaagatcgcacagattatcgatgcagctaacaaactgcacgatattaggtgggatttcatgcatcgctgcttaagttttggaagtcatacagcccttgttgcttcataatatgtactactctttttaaggattgttgagttgntaggctgtccaagctttttaaacaaatcaacagcaatgtgttgaggcatttcttcgctgtgtgctcaggtctcgtnggagcac

SEQ ID NO: 38842 - DNA, 436 bp, Oryza sativa
actaagcttaacccgacacacggcctaagtcactttttttctttgcttccgcggcagccagctcggtgcccgtactgaccttcttcttcgcagtcctactaatgtgatcacgatctcatcgatgcatacttaattagttgctgttctttgacaaagagaggggatcttatcctctcctagaaatgatagcataaacagattccagaatttacagaaaagaaagactctacttttgtgaatacgctagctgtttatttagaaagagatgggatcctctcccagttctatcatggcatgaatagcattgctagcctttctccacattcatgataagctaacacatgctagtgatatggtactactcctaagtagtgtcttttaacgggggtaaaaatactttctctatgcttgtaaacagagtgacgattaatgcata

SEQ ID NO: 38843 - DNA, 375 bp, Oryza sativa
actcagctctcgattccacagaaacatggtgggagaatctcttgtcctgcagctgaagcagcctacattggctcgtgcctccggacattttagtaccgcactgtgctacctatttgtggacacctgatgacttacaaccagggattaaaaactgttatttctgtcgaaagaagttcaaaaaattctacctctcttcagtttgtataaacattgggcgtagatgacaaaagaaccccaaagtcttcaagttttggccaacaattagtcagattttattcctcgatagtctatacaattatattaatagattcgtatttgagagtgctttacacgatattggtttgtggccattgaaatattttgtagagaaattat

SEQ ID NO: 38844 - DNA, 376 bp, Oryza sativa
  unsure (1)..(376): unsure at all n locations
gtgtgagcttggtggtgctttgctcgttttggcaatgcctacaataatgtcgcgaatgccgtagagttggagctgctgggtcgctaggtggcaagctcggcaacgatgacacgtgccttgtgatgtcaacgttgtgtgccgcttcttcagcatcttgacgtcgatgttcgccgttggattccgccattttttcttttnttttttagcttgtctagatatttactcccgcttaatgaaatataattggcagttctcctgccggtttagtttcaaaaaataatatgatggaatgattcagtctcagtgagttctattcttnttttcaaggcatangcatagtgtgtaactaagttttatcacaactaaacttattcct

SEQ ID NO: 38845 - DNA, 421 bp, Oryza sativa
gcttctgtacaatctgtcgacgaaggacaacgtctcagatctctgtgcttgaaccaaccatggcttcttgccaaagcccgactgcagcgatcctactgcgccggcgaagatgttattgatctccatcgtgtggtatggcctacttggtttgttccgcactgtcgagttgatttgcctcctctcttatacatgagtaacgcgccggagccgagtcggagtaataagcgatgatgagtcggattgagtcaaaataaacaaaatttcggtatttggctcgaccgtgtggctccccctatccgtgtccgtctcaattccgatcgctttcatagaaatgaacaggatcgccggatatccaaatcggtgatcgatcgcctggggactgtggtagcgatcaatctccctactcctccctcccttcacc

SEQ ID NO: 38846 - DNA, 401 bp, Oryza sativa
  unsure (1)..(401): unsure at all n locations
gatgcattgcattaatctnttgtagcactttgaaaggaccatcagctctaggtagcaacttagaatttctcaaattanggaacctattctttctcaaatgcaaccaaaccaaatcaccaggttcaaaagcaacatgtttctttcctttgctcccagcaagtttatacttaatattcatgcgctctatgttctccttagtggtctcatgcagttttaacatcaattcagcgcgatatttttgcatcaaagttcactctctctgaagttgggaggggcaaaagatcaattggagcacggtgtagaaggccataaacaatctcaaaagggcacttcttagtagtagaatgttgtgaacgattataagcaaactcaacatgttctggtgtttttaaacttttgca

SEQ ID NO: 38847 - DNA, 401 bp, Oryza sativa
  unsure (1)..(401): unsure at all n locations
tctacacgggatgttccaacataacctaattcaacatggtattcttagtattaatgagatgataatcattagacattgcatgtaggagcaactatctagtgtaatacaaaatgctcctcattgggaggttaacatgattccaactcacaaatctgatatgccacttgatatgatacgaccgtcaagtattagtgtgtagctgatgaaacttctatcagactgtccagcanagcacacacgagaacttcctcttcattagcaccagtacggataaatctggaatctggattgcttcagattccgtaacaggtaaatatatggagtggaccatcgagcaggatctttatcctgagggaatgacnactcatgcctagctgtgggatcatgtcaatattcctgat

SEQ ID NO: 38848 - DNA, 396 bp, Oryza sativa
tagatccttgttgaattccctatctcgcttctagcttattggattggcatcctagcactgtcatgaagaataatctaagatctgatgatgaatcactgcatttcaaactactaatgggcatagaacaattagaatacaactatattacaggacaaaataaaaggtaccttatacatcttgttcatgttctttccaccagctctaacctcgattatccagccttttggaagccattcatgtgtcatctgcatatatgtcatggtgggactcacatataccgaattattctatagacaaccaaaatcatgaatagcatattcatatatatatatatatatatatatatatatagaatcactcacaataagctggttatctgcagcacagttctttgat

SEQ ID NO: 38849 - DNA, 442 bp, Oryza sativa
  unsure (1)..(442): unsure at all n locations
tcaccgacgacgctntccnnctcggttccgtcgacggactatgaaatgaaggcgctgttgctgcctacgccgacgacctcttcacatcaagtcgcggcggaaggcggaagcaattgggcccatggccacggcgctcaacaaaattttcggaggagggcatctggagtggtaaccactctgatcccaactccggacaagggtacgtntgaatctccttcagttcctttgcattcgttggagaatttcaaatctgattcagaggttggggagtttggttttgaacaaggcggtagacagtataatcatagagttcctaaactagatttcccaaaattcgatggtacggaccctcaggattggaggatgagatgcgagcactnatttgatgtgaacaatacttatccagggttgtgggttcgtgtagccaccatctatctctatg

SEQ ID NO: 38850 - DNA, 388 bp, Oryza sativa
  unsure (1)..(388): unsure at all n locations
tcttgcttgaggcgtatcttgatatggagagagcgagggccttttatagcttaagtatgacggttggaaaggtcggtaataccctccaaccatcatagggagtctatctgagccatctagccaaaacctgngtcaaactgcgccacggttggttcggccgaacccagggttcagccgaaccctatgctggctcaaccggcccacaatttggtcggcagcctcctcttctgttgctcacttcagacttctaaattttggcccagctggtcatgtcatttctgagtatttggcccatctatccataagtggccttgcgacgaggttgggaagcggcggcggcgcttcaatcctccctcccttccagaattgtccatcggctgaagaggaa

SEQ ID NO: 38851 - DNA, 452 bp, Oryza sativa
  unsure (1)..(452): unsure at all n locations
ngaaacaggggtcaaaaagaggtagggcactcgtccacatctatccaatgactntntcctatcatgatagagaggcttcaagcaattcttggtttctcattgcagaattctagtggtaaattagttgatcttattgggataactcaaactaatacagtaaccatacaacgtttctatcaaacccctagcaatntgtttacttaatccaatatggtccttctggatcaaaaagagaaatctagtatgcaatcaaatttatgttctgacataatcaagaaaaaattgcaattcatgcagccatcagttttcaccagagcagcccccacttcatatatacccaaagtaaatactttatttaaagattgattatggcatgttagtgtcaataaattttcgattgcccactagtttggaaaggtatgtngctttntagagagcactgatgcatttac

SEQ ID NO: 38852 - DNA, 446 bp, Oryza sativa
  unsure (1)..(446): unsure at all n locations
agcgacgactcgatacgcagcctcggtgacgctgaccctcagtggtgatggtggctaaggttgccgctcagtgacaatggtggcaacgactacctctactgcgagcacacgtccacatccggcggtggtgggcatgcaagacgacgccagattggcaactaccagtcggccatgctattcctcacgagcatggatctaaagatgacgacctacgctctctctcgccaactacaacgatgaccacagtgcaaggactgtatgtgatgggggattttgagaatttgtgattctgtactggctgttttggatcctgatttntcaattcttttttttttgctttgaaaaatattttcgatggcaggtctctttacgcagttgtcagctaaaatcgtattttgtcggtgaccatcttagncttggtatctatgaaagtcgatttcactagt

SEQ ID NO: 38853 - DNA, 467 bp, Oryza sativa
  unsure (1)..(467): unsure at all n locations
tgccggtgctngnnggtcgacgtgatgaggacgttatggcttttactgatggagctcaaatgcggagaagcgagcttgctgacactcgaggtcgatgtgactacagcgaccgcgacggtcgtcgcttggggtggaggaagcggcctctggcgctcggggcccgagaggacatgggggccactcagggagtgctcatctggggagggagagctatggttgattggttgctgagataaaaagaagggagagagatgtgtggataaggacttagtggtgtcttctatttctttcgatgggagagagagaaagagctatgatgggtaaaagaatatacccatatacgaggagtgtgctcacttgtgacggtttatatttttttgtaccttcacaggtaataggggcatctatgatgggtctataggtgagcatgtcaaacgtgctatgtgtcaggtgcacatactggcctg

SEQ ID NO: 38854 - DNA, 465 bp, Oryza sativa
tatctctgtttcacacacagatcactgcgcgtgtgtgatttcatgatattcaaatattgaagaaacattatgcgctactacagtatgaccaagtcaataaagcaataacaccacccagaacggaatcagcttactttgagtcaagatgttcaatgttcttcataacagaaaaaaggtgctcagccaaagcatcatatacctcctccattgacctacaggtttttttaaaaaaaaaaacagagttaaactgtaaatagaaagctcaattgtaccactcaacgcatgtcctaaaaaaattatacagctcaactagtacagtgatcaactctgaagaaactacaccatagtcaaaactactgtagatatagttcagtttatacattatatgaatgcagcaaacacagagccaattacagtagattctttatattgctaacctcctgttagtactccttgtaatccaat

SEQ ID NO: 38855 - DNA, 419 bp, Oryza sativa
  unsure (1)..(419): unsure at all n locations
ggagacatatccatacaatactgccgatcgaaagatagtcttgtctctttaaagattcttgccgagcagtggccgtggtatatctacacacgtgggaggatttgcgcggaataatgctccgtcgcaaagtactgatatgtacttatgaaccgactgtttacatcaattctgctagtagtataatactctggaatatccgtgactatctctaaaaacatgacgaaanattcgtcacagattatatagtttattgagtgtttgaaagatatgggagatcctaatctacaagcagcctgaacgatacgcagagagtgacatgagtgacagcaggcggcgggctaggtgatcacatgctgcaatgatgtacacagtagcggtagagacggacagcatcaaccgcaatggcgtgagacttacgt

SEQ ID NO: 38856 - DNA, 431 bp, Oryza sativa
  unsure (1)..(431): unsure at all n locations
ggagacttattcatacaatactgcagatccaatgatagtcgtgtatcanaaaagatttttgccgagcagtagccgtagtagatcgacacaggtgggaggatttgcgcggaataatgctccgtcgtaaagtactgatatgtacttatgaaccgactgtttacatcaattctgctagtagtataatactctcgaatatccgtgacgatctctaaaaacatcacgaaaatttcgtcacagattaaatagtttcttgtagtgttagtaggatatgggacgatcccaatcagacaagcaagccggcgacgagaaggcagaggagtgacatgagtggacgggcaagcgggcgggcagaggaggagcacatgcaggcgaaggagtgtgacgacagtcatgctggtggaggagcggcgcgagcatgctagcaggcaaat

SEQ ID NO: 38857 - DNA, 469 bp, Oryza sativa
  unsure (1)..(469): unsure at all n locations
tagatccctcanacaaaagtgcttcagaaccaaaatcctcaatgacaaaacttcaattcattccctcaagtcattccccaataccaagtaatttgcactcaacccaatcaaacaatacaagaacaacaaaaccaaacattctaacaataccaattccaacagcaaatgccctaccaaaatacttcacaatattttggccaattccaaaatcagataagcaattttccatcaacccaacacctccaattccatccaactcgtgctacagataccaaaaaccctctaagccaaagtttacaaatggcaccatggccagcaaatttcaagttatccaacatcagcaaatacaaaggcgacgctgatccaaacgattatntgagggtgtatgaagacagcagtgtaagccaataccttcttgaatataaatatcacattagttgcctatattttttgaatctctcataaacta

SEQ ID NO: 38858 - DNA, 462 bp, Oryza sativa
tagcttactattctcaagctagcggaatatgaatagaatataaatctgggtccggaagtcctctgaagagttctggtatggatctagtagctctcctttcttcttctgtaagacttgtactttttttagaatattcttctttatataattctggtattgaaatattttccgagtatatgaatgccaactttacttcatatttaagatatatcgattatactgctagcttatctgggagatgcatatgtacgggtataatgtttgcttatacaattactctatgtcatgacgatgatattagaataggaactggtagtttaggcttggcgtctacattactgggaatcattatttgtggctatatgctatggaagagaagtgcgccgctgatggtgacagctcagtaccggtattcctccgtccgtgatatagtcctaatttacttcctggcgagagtctctc

SEQ ID NO: 38859 - DNA, 454 bp, Oryza sativa
  unsure (1)..(454): unsure at all n locations
ntagtcagtatcggctagattcctacaccatcatgcctgttttctggttgatatgtttatatggatcaatctggttatttaagtttgtactagagtattagctagtacattatctttccagctataaacactgtcacatctgctactttcagaatattgtcttaaaccaatctattaaacttgatagacaatattacaaccgattacgcatgtttagggtttattattctttgatatatctagtccatagccgatttggtctaactccatcggctgagaccaccaacgatacactatcagcctatcggccgatcggctatcggtcgactaattctactttcattctttctttgctgatgcacgatcaaatcagctggcacgcccttaacacacttcaccctagcctttgacccgcacttgaagtaagcagatcttccaagccgcatgtttcaca

SEQ ID NO: 38860 - DNA, 296 bp, Oryza sativa
tgagatcacgaagctcggcgaagataggcctagcccttcttttcaggactgaagactcgacacttctgattatcaacgctaacactgtgtgacagagactgcaatgcaagactgtatcgtgatctgaactatgaaacacctctctgcgaatggagcgatgtggctgagccttctatgttaccttaagcgcataccgttcgacagttcgtatctgggaacggcttggaccactagacgatttgaacatagaatcttgtgatgtgctgtgtgtactgctcacaagaatagttcatatg

SEQ ID NO: 38861 - DNA, 355 bp, Oryza sativa
  unsure (1)..(355): unsure at all n locations
aattactattcaaaatggcaatattttggtatggcaagtttggcttcaaacccaaccagcattgtgttccttttttttttttgcctcctaccgagaaaaggattacaaattaaaaagttaattgtattcttagataaaacgagcttaatcgttctacaggagattatcgtttaaagatatgtaatgcttgttttgaatggtacaggctacaattactattgcatgcaacatcctgcaaaacactgcagtggtatgtatcagaatcaataggacatttctttnttacttcaatgcatnntcctcgtgtcataatcatgttngtatgcctctttntcttaacttgtggaacatgcaa

SEQ ID NO: 38862 - DNA, 414 bp, Oryza sativa
  unsure (1)..(414): unsure at all n locations
tactcaagcttcggatgtgcatcgactacaccgacgataacaaaggcatgtcctaatgattcttacccactgcctctcctagatcagattgtcgactccactgcggggtgcgacctttagtgtatctagatgcatactctggttaccatcaaattcgcatggctaaggaagatgatgaaaaaactgcgttcattacccccataggaacctattgttatacgacaatgcccttcgggttaaagaatgcacgtcctacttttcaaggtactactcgaatatctttgggtagccaattatgacgtaatgttgaggcttatgtcaatgactcggttgtaaagacgcgcaaccaggagacgttactctcagatctagcggaaactctngatagtctccgctccgcccgatataactaaa

SEQ ID NO: 38863 - DNA, 462 bp, Oryza sativa
tgaaagttcaacatggctactccgagaagtcgatgattatatgatttctgaaatcaaagggccttgtgttacaatgaattcgttgcaaatccaggacccatctccgccgtgaagaaatgcggttctttatggtgttgcactctcctctcaagtgtaaactctattttctcaaagtgcaatacatttcattccgacaccctcccaagcctaaaacaaattaacctgcatttcatgtgcaagccggaagatcataatgcatgcactcaccaagacactatgaggactggcatagaagcaccgatgcatgcattgatttctaggtacaagatagcttaccttcaatgtatagtgcttgtatctctacacactacttaaaagacgagttttcatagcgtcaccttatcattttcactggtggccattcgtgataaccgctagcaataacgtaacgagcagtggggg

SEQ ID NO: 38864 - DNA, 452 bp, Oryza sativa
  unsure (1)..(452): unsure at all n locations
tattacggacacttaaatactaagcttctcggttctggnctctgcccaggcattgagcctacccctagaagaacgggctatagagcggatgcgctctcccagcaaacttaaggatgtgcaatgcgtcaccggttgcatggccgccctaagtcggttcatatcgaggctgggagagaaggcgttacccttatntaagcttctcaaacgctccggaccgtttacctggacggaggaagctgaaaatgccctcacccagttgaaggcgtatctaagctctcccccagttctggtcgccccggagccagacgagcccttgctactctacttagcggcgaccccgcaagtagttagtgcggcattggttgtggagcgcgatgaggacaattctcatttcgcgccttcccaccctgtgccgacttggcccgggagagagcagggaggagaggccctcg

SEQ ID NO: 38865 - DNA, 454 bp, Oryza sativa
  unsure (1)..(454): unsure at all n locations
tattggtggctatatatacatgcacaaaatcactctcctcacatcaaatcagcaagatcgtagcacactttgccaaacgatgaattttttttttataatatgaaacggagaaacggaggaagtatgatcttatgaaaacactttgctaaacgatgnaattttttcaacggtttttgctagaaattcggctacacaatttgtgttggatttcctcgtcactggtcattctggggagtagtttataaatggcaagaaagtctgttctacaaggaacagatctggaattgcctgggtgtactacttctctaagctcattgcgagattattgccaggaaggcctgacgtgcaagtatatatatgcagtttttacctttctttagggcttagatgatactaaacttctataatatataacgcaatcgatttaattacagctatcaatctgtttgccgtc

SEQ ID NO: 38866 - DNA, 461 bp, Oryza sativa
  unsure (1)..(461): unsure at all n locations
nnttatcagtaatttggtcaaatgtgatgccatggattgtataaatgaatgtccattgaagcatatagagacttgcatgataacttttcacgatttaacataacactgtcaagactaaagaggattgttatcgatctgacaagatgccgtaattctaacttaaaaagtaggtnttacacttgaaacttagttgaaactcagagaagactatgttgaaacttgcttgaaacactatgaaacttgttttgatacttgagtgtaactctttgatactttgtttgatggaaccattggttatctcctcccaagtcccaaactaccaactttctatggnttgtcaacgagtattcgtgactccaatctagaacttccccaaagaatcaaaactattgctttaactggttgaactgtgaatcttcgttgtattatatccacaataagggcagcaacatactatatga

SEQ ID NO: 38867 - DNA, 425 bp, Oryza sativa
  unsure (1)..(425): unsure at all n locations
taatctcagaagatcagcattgagctttgttacataactccagtactaggtaccttgcagtatgaaccatatttttataaggaaagatcatcatcacaactatattcacaggatatatctttgattgcaattacaattaagaggactaacaattacattcacgggctgagaggattaccaatatatcacccgacaattntttttcattaaaatcacacggatgtaactacaatactaatgtactgtaattacaatgtaactagcatgtaagtcacatcccatataataaacacctaccactgagtgagaaaggtatgtgtgcgcgatcgtgatggtcgtaagatccccgcagcgacacaattaatgttngtagtttcttcaatctcttaacctagccgcatcgacgcgtaatgcgtgtactcatc

SEQ ID NO: 38868 - DNA, 452 bp, Oryza sativa
  unsure (1)..(452): unsure at all n locations
tcggatattgaagctagttgaagaanaggcagagctattcttattaattctgagggctagattttcttcattatcaaagctaacactgtctgtcagtgacggaaatgcangactggagcttgatcagaattatgaagcacctctttcggaaatggagttatgtggctgcgccttcttcttccccttaggcccatcccgtccaacagttgggatatggaaatggtttggacaacttgtggatttgaaaattgaatcttgtgatgtgcttgtgtactggccagaggaagagttcatatgcttggtttccttgaagaaattggccattgaaaaatgtaataacctaataggccacagacatgtgagtggngagtcaactcgagttccaagcgatcagttgttaccgtatctaacgtcactatcaataaggcaatgtaaaagcttggaagagatct

SEQ ID NO: 38869 - DNA, 321 bp, Oryza sativa
aactcttctaaaccataatacaagtacttcctatcttttcatgttataagatgttcttaggtaacatcaatctgctttatgttagaatagataagtataaaaaaataatatctttatccacgataacctcattataataatatattcaattactaatttaataaaactcatttgtaaagtaaatatactatgtctgtctgtaactaagttaacttaaaatacgttaacttataccaaggaaaacatcttataacctacaatatcaaaaagttcggactcaccataccattttccacatttcctctccctctctcctttaca

SEQ ID NO: 38870 - DNA, 377 bp, Oryza sativa
  unsure (1)..(377): unsure at all n locations
aaaaaacttaaaaattntctactagttntctcttggtgtggtcattagatctcagagataacctaatntaaggaatacatgtttgtaatcctgctctggaaatgttaagtggttgggtgtaaggaagcatcttgtttgcatcgagtntatggccaaaaacaatcattgatgcttcctctaaggcggtgtatgttttcctctgttctccatttgatgtgttcttgatccattatcgtctcttggtttcttctgttcttttagatggcctccgattccttttgataagcacatgggtacatgttcttgtttccaacagtccatgccggtcgtggtagacctgaaaaataatccatancaatatatcctttttctgaaat

SEQ ID NO: 38871 - DNA, 434 bp, Oryza sativa
actcaagcctatctcttacgctccaggaatggatcagtcagaacatcaccaccggcttgtctcgaccgccgccgactggtgtttccgcctgcacggctggcctattatgccgccgttgttgggcgtctacgtcttcaccgaccggcttgccttcgccgccgccgactggtggttccgcctgcacggctggcctattatgccgccgttgttgggcgtctacgtcttcaccgaccggcttgccttcgccagcgccgactggtgtttccgcctgcacggctggcctttatgccgccgttgttgggcgtctacgtcttcaccgaccggcttgccttcgccgctgccgactggtgtttccgcctgcacggctggcctatatgccgccgttgttgggcgtctacgtcttcaccgaccggccgcctcgtccgccgtcgact

SEQ ID NO: 38872 - DNA, 470 bp, Oryza sativa
  unsure (1)..(470): unsure at all n locations
tncaccttgccacanatcaaatcatatatggagatgattaattttgttataacaggaacagaacattaaatgtgtgatgcagtgagagaataattaagtaccatggattgtgcttntctcaacactaattagctctatttaaattgaaaccgagagttgattacataataattataatgtatctgtgttatgtcgcatttggattttgtactatttgttcgtataggtgaaaggaatcattatgttataaatatgagcgcaatattgacgaatattaatagaactcttactacgacaagggtgataaagggagtttaaggccctctctatntttcccgattccatatgttggaattttgtttgatgctttctaagtttctaaatagtgcccgctttaaattaacaacattctaactttttagaagtcaattcattcatttataccctcangaataatatcacataaatta

SEQ ID NO: 38873 - DNA, 453 bp, Oryza sativa
  unsure (1)..(453): unsure at all n locations
tgaaggtatgaatgtcccagcaaatttagatgccggtgaaatgcggcgtccaanatgaatgtgaaagggactaactcgagctagtagcttcactttgcttgcaacggagaagccgtggtggagcaagtcgccagttcatacagtgaaaccgacctactgtatgctgcacgaatgattgaacggcgaagctgcaaatctttgcagcctgatctgaggcagcggcgagatgcancggccatgcgcgtatggagagcgcgcgacacggacgaagatgaatctcacgattcctggcaccggtgccaaagccggcgacgaggaacggagactgcgcatattttatactaaacccagacgaggcaagctaaacgaagagaagaaaaccgaattctgggtaagagagacacgcattcatgcctgaacgttacaaaccccgaatcgccggcaatccgggac

SEQ ID NO: 38874 - DNA, 373 bp, Oryza sativa
acggacctataaatctcagcttcggacaacgctacctgaagcttgatggtacaatatattttttgtgtttctcagagaatgtagcggacatctgtattgcttcaaagttcataatgggacactcattttactaattctgcatgtagatgacgttctactggctagcagtgatgtcgctctactgtcggaaataaagaaatctttgtctctctactctgacatgaaacacctccgagaggcttcatatgttctgggcctagagattcaccgttatagaacccagtatgccttgggatattctccaaaggcatatatatagataaggagctgacgaagttcaatatgtacagatgcactgtaacacctgctccta

SEQ ID NO: 38875 - DNA, 426 bp, Oryza sativa
  unsure (1)..(426): unsure at all n locations
tctgccttgctcattacatgagcgagagatgccttttctttgactatgctgggctgtcgacgctgtatagtcccacatctttcttgattagccttgctatttggcgatgcgcaagattcttcttgccatacattgcccttccttctttgatttacattatgcacatcattatttgttccgtcatgccaatgcatgtgtgaaggcccaacttcaatgatttctccttctggccatatatgaggatcagattgcatccatgtggtcttactatagcttgctctgtcttttctaagccttctaccgacattctcacctgcataagagagtggactatgtttagtgaaggacctccttaatgtcgtgttggaagactcgntctctccgtgagataatacagctggagcatgactggccctcacatcattc

SEQ ID NO: 38876 - DNA, 412 bp, Oryza sativa
  unsure (1)..(412): unsure at all n locations
taattcacacgctatgccggatgctgcaaagcattttgttggaacacatgactttacatctttcgctaatgcagtacacaatgatcgagttcgcagtcccataaagaagataatgcgctttgatgttattgaaatggcaattgaagctcgcagttcttaattctgccttttcaccctgacaatgcagcattaaggccctctttgcttaggcttatcagccaacttataagccgaaaagtgtaagactaaacaaacaagcggctttttgctttggctnttttgaagccataagccactctaacactattaagccataagctaggttggagaagctactttggcttatgtgacgtagatgtgtgactccaccattatacttacgacattagatccaccggcttataaatcatat

SEQ ID NO: 38877 - DNA, 434 bp, Oryza sativa
  unsure (1)..(434): unsure at all n locations
tggtagctatgtactctcctctatgccaacatactatatgtgctcacttaaactacccgaaaaggttattgaacatatcgatagaggcgtgagacataatttatgaaggtaatcctttaatttaaatgtgggacctcagtccttagcagcatgggacatggtatgcaaacccaataacaaaggaggtttaggcatcatcaatttggaataccaaaatattgctcttctaatgaagcattgtgacaaatattacgataagaaggacctttccttagttgagactgatctggaacaagtattatcatagtggtgaaccccaccaggcaagccaaaaggagatcttctgtccgaaagggatcttacgatcttntgcccaatcaacatgtcttanaataaactatcacaaatcttgcatgatacacaatcaatgtcct

SEQ ID NO: 38878 - DNA, 394 bp, Oryza sativa
  unsure (1)..(394): unsure at all n locations
tcagcaagaaaaggaatgttgtatggatcatcatgggaatctactagcaagcatcagtgtttcttaccttcttcagattcgtagtgctctttccaaagtgcactgttggctgttgcgaagtgtgctgttaccgaagctgaattggtgcagtgagaaggtgacagtcccagcaaccaagcccaacatcacatttcatggccagggattcgatctgacggcaatttcttggaacgacactgccaactcatcgcatggaacgttctacagcggttcagtgtccgttttcgcacaggctttgttgcaaaaacatcagcttcattgtaacacagagacacagcatntcagcttaatcacagactgcccttagtagcaatcttgctactctgattatttg

SEQ ID NO: 38879 - DNA, 489 bp, Oryza sativa
  unsure (1)..(489): unsure at all n locations
cacannaaactcaagcanagagctatctctgccaagtccatatcagctccaccaagattttgtgtactgacaatgccggtccacggtgagcctcaattgatagcttagacttgggaggtgtaagctccgtcggtcgacttggacgaggagtcatcttcacaactatgtcttctttgggccactgtatgaacgtcttgcgcgcatcgaccatagtcatgatttcatcattgggggcacgggcagcggatagcctgaccaggtgtctattactgtatcgatggacaccttggcatacccagctagcaggtctgcgccatggaccttgtctgtaaccgagggcttgaaagccatgccctcagcgacttctggagcgaaagttgggtggaccctcgccagtatgacacactgtgctacgccctgcatatgtgaaagtctgaatctaatattggaacgtgtcaaggttttttaatagatatggattgtatacat

SEQ ID NO: 38880 - DNA, 294 bp, Oryza sativa
  unsure (1)..(294): unsure at all n locations
tgcggccgtggcctgcattgccgcacgcacacgcagttgataggtcgttgctcgttgagaccgccactcgtctaggtcctcattgccctcaccggtctccgcttgccaaggccgtcgttgtctagccccctctgacctctgcttgtcgtggccatcaccgtcgtctagccacctccagcctccgctcaccaaggccgccaccactatcgtctagcccccattggcctctgctcgacgacaccgccactcctgaggtcgntgctcgccacggtggccgctgtangcgtagaggct

SEQ ID NO: 38881 - DNA, 365 bp, Oryza sativa
  unsure (1)..(365): unsure at all n locations
gaccagctancatcgagatgcacatatcatcactaataattgtatattaaccatcagggaagcatgctatattatctataattcaataatctattaaatcttagagatntaaaatgtaagcaggttaaatcatcatcccacataattcacataatagttaaatatatctctccatcatttcttttataatatcctatatacctatataattcatcctcacttagttcatattatttttctctctcattaagtcatatcacatcaattggttttaatccttagatgcttaatctatggttcanattatctctcttttcttctctcattaaaccatatcatcttactccctccgtttcacaatgtaa

SEQ ID NO: 38882 - DNA, 495 bp, Oryza sativa
  unsure (1)..(495): unsure at all n locations
ctgatacgtcgacattaatctcagctttggctatatctgccaagtccatatcagctccacctttatttgatgtactgacaatgccggtccacggngagcctcaattgatagcttagacttgggaggtgtaagctccgtcggtcgacttggacgaggagtcatcttcacaactatgtcttctttaggccattgtatgaacgtcttgtgcgcatcgcccacagtcatgatttcatcattggggggcacgagcagcggatagcctgaccaggtgtcctttactgtatcgatggacaccttggcatacccagctagcaggtctgcaccgtggaccttgtctgtaaccgaaggcttgaaagccatgccctcagcgacttcgggagcgaaagttgggtggaccctcgccagtaggacacactgtgctacgccctacatatgtganagtttgaatttaatattgcaacgtgtaaaggcttttttattagatatggatcagat

SEQ ID NO: 38883 - DNA, 372 bp, Oryza sativa
actatggacactcaagactgtggtacgcaccaccgacgctttcttttgctggctgcttttatttctttcagaaaacaccggcgttgttacaggttaaaagtgatttctttctaatatgatcctttaaattcacggacaatcttctatctaccattcaacgatgaacagcagcaactttcatatgctcgtcgatgggaaaacgtaacggaacgacatgatcattgccaaaacaacgcatcagtcaacacattatatctacgaatatttctgcacctattaaaatataaataaatcctgaatgagtgacgcagaccaatgccaatatgccattgacacagatgcgacgagttgtcactggcatcggtcaacatc

SEQ ID NO: 38884 - DNA, 232 bp, Oryza sativa
  unsure (1)..(232): unsure at all n locations
ggacctaagacactaagctatcacctaagctatagacccaagtttatagtatttgtttacatacccgattcaaatttgaatttgaattcaaattntttatatatagaatttctagacatacaattttctaacttttggttttaaaaaacaattgtgtggtctactgtagtacaaagaggagaaggggaggagaaagaggggagaggatggatgtcttatctttcatcctcta

SEQ ID NO: 38885 - DNA, 370 bp, Oryza sativa
  unsure (1)..(370): unsure at all n locations
atagcacaatcatgcatcttatacttctcccgtacacaaatacaacaaattaaacgaagggtttaaattttttccataattaccaagaatcccatggagtactacttccacccaactattcctcatttaggtgttgtttgaatcttctgaagatgaagatgaagattaactgtttcacgcaaaacgaggtggtaatagcgtgtgctcaattgagttttaattattataaacttgaaaaacggattaatctgatattttagaacaatttttatatagaaaattntcgcacgacgaaacgcacagtttaacagtttgaaaagtgtgccatgaaaatccanaacttcatccagtgtttgcagtggaaacaaac

SEQ ID NO: 38886 - DNA, 465 bp, Oryza sativa
  unsure (1)..(465): unsure at all n locations
tcgttcaccagggtcaacaaatctacagagtaatatatatcgaaggcggtatcaagatccaattatactgtacttgaatagcctgcanaaccaaatcattcatcttatatccagctggagatactgttcgactcaggctatcaaaggcacctgacattgtccgggctgagaaataatgctagggcatagtaagtagaaagattgaaagcctcccctgtctctccattgcttcaattacatgtggctgggtagtcaggcactcttcagaaatngagagtggtgagcaatgtgatcatcaatgaatgtagcaatanaaaagtangagtggtcgtatccaggttgcatgcggagagtcanaggagctcccacagccttgcacgcctcctcanagntgcgaggtagaagctgctttgccagaaatttgcatcctctccctgctcaagtcacaaaccagtgtaganaata

SEQ ID NO: 38887 - DNA, 411 bp, Oryza sativa
gtcacctagcgcgggcgtgtcctgagaggaaggcggtctctgggggcaatccggggcggcagtgcgtctgggcgcagagaggtggccgtctgggagaagagaacaacaagggaatgtgaagcaggtggtggtaacggaggtgccgcctgctaagtcgaagatcgtctagccggccccacaggcgacagaaaagggcgcggtgatagccatggcgggtgctaacctgagcgagtaccacatctgtgcggccacgccgccgcagttcgtgtaaaagtaccggatcggcgagcccgactcgtggctagaaaggatggcggtggtgctgtccttgacctccgggatggagcgccatgagaggtacctccaggaactctccctgatggcgtcggtgctcaagggacggccgcccgt

SEQ ID NO: 38888 - DNA, 273 bp, Oryza sativa
cccttgcgaacttgatatctgactatgggaactgcttactggtgtcacgcatgcatagtttgaagcgtaccatatctgacatcatgatgtgtgagcatagcaatatgacacggatgttggatggcttgtgagagtacatttgctcagctgactcattgaggatggcatcacggtgcatcttgcacgtaactgagtgccagcactctcaggaaacgcagcccgatgacacattcttgatagacatgtgtcttacaaagaatatggatctgacgc

SEQ ID NO: 38889 - DNA, 256 bp, Oryza sativa
ccacttccctttccacgcgcgcctgctggatccaatacggatccctctccacgttccattcctcgatcaagaactggataggatcctcgttcccctcttctgcattccagcactgaatgcttccctccacgattgtatcagacaatatctgttactcatcgcgatcagccatctgttgatacaagaaacatctgctaagtcatgagacataaatatttgaacaatctaagtcacgcatgcgaagcgcaagcgtcga

SEQ ID NO: 38890 - DNA, 435 bp, Oryza sativa
  unsure (1)..(435): unsure at all n locations
tttttcgttttttttcggacaaaccctttgggtggcgccaggaatacttttccctccaaatctccatttagaaatgccgttttacatccatctgatgtaattccaaatcataatgtgccactagtgccattataatcctgaaggaatctttacaagagactggagaaaatgtctcattgtaatcaatcccttctcgttgcgtgaagccttttgccacaagtcgcgctntanacttttctatattccctctggagtcatatttggttttgtagacccatttacagcctactggtttggctcctttangaatttcttctaaatcccaaacatcgnttagtttcattggattcattttcatcttcatggcttccaaccattcagatgagcgagcgcttctcatggcctcttcatatgaggtgggatcatcctccatat

SEQ ID NO: 38891 - DNA, 446 bp, Oryza sativa
  unsure (1)..(446): unsure at all n locations
taaaactcaccttactgttgacacctttaagagcatggtaccaacttattatgttgagtaactgcggtataaaaggattttaaggtattgggcacttgatcacgcgcactttggcccaagcaaaaagtgcctaagtccctaaaagaacgtgacaagccacacctgaaaatatgggctgcagacatattangcctaggccaaaaaatatgccttcggcaccctttaaaggatgacgcatgtaacatgctcccgagtaataaatcttccgggtgatatagaccaagtgtagctcatatgaatagcttctgatttgagtgattatcccttatgggatactccanaatagatataaaaattgaatcctgactggcgcaagtanttcggtgatagcccttacggngaataatgaatagtccagtcgttgagcataagaaatcgactcatga

SEQ ID NO: 38892 - DNA, 382 bp, Oryza sativa
  unsure (1)..(382): unsure at all n locations
ggaggacttgggggcaactntgcanaagcacgagggaagtcgaagaaatcttcaactgcgggccaggttgctaaaacaagcggtaaatgaagtctacaactctaagctcggctggagaggaggtgttcgaaggattaggtcataactcatgagaggaaatgtttactgagtattttgtgtggatggaatgagcaaagatagctctgtaatagacaatctagctatggtctttgcttttttcttttgcataagggtcggatgtcctccctcagatgtcttagctattatctttctgctttctgtttagtactctggaagtctgacttgatctcattcctagtaaaagacatgagggcttcatgccctagctcaacacaaaaaa

SEQ ID NO: 38893 - DNA, 406 bp, Oryza sativa
tatgacggctgggagaaggcgaaatattcattctaccctccaaccgccattagggagtcatctggaccatccctgccaagccccagatcagactgctgtgggagtggttcgacctaacccaggcctggcccaacagtcccactttttggcctgttgctcctcctcatgcttgttgctcctcctcatgctcccttatctatttattcgagtggaaggcccatttgttgaagttttgtgtagtttttggcccactcgttgtatgataggatttcacctccacttaagtctgattttcatcccaacttcggtggtttattacctgcatgcgcatatacaccaacactcgtggaatatattagaattaaacctaatcaatatgttggatgctttattctttatgtttatg

SEQ ID NO: 38894 - DNA, 432 bp, Oryza sativa
  unsure (1)..(432): unsure at all n locations
ctatgatactctgcttcctttaagaggggaaatatatccaaaccatattccttcacagcatatgnccttctccctctctctcaacaccatgctggaacgcctcctagctataaaacgctcaaccactaatagtcttcggtacctctcagaatttcttncctcacgccgtgtaacacttaatggtgtgacaattgtgatgccacaagacggactcgccaagcaagccgtagactctcgctgttgttttaccggtgaattcatgattcatgaagaattgcagtatttgcaccggaattccttgccttccagctcacgtggctagaaaagaaaaaaanactacactcggaaaacaccctgtagccgtgcgtgtgcatcttctccgcacctcccgccattcgtacacatgtaaacgtctcatttntctcatctgtc

SEQ ID NO: 38895 - DNA, 406 bp, Oryza sativa
  unsure (1)..(406): unsure at all n locations
caataattntgattcatatattttccgatgttccaatgatactgatattgntattgcatcccttgttattgttaacgctttcatgctttactgttccgattccttttgatggaaaaatggtaaagaagaatgatttgagcatctattatctatctatctattatatactaaaagtccattaaactttctataaacgctctcaaaccgccatatggcgttcctacaaacgctcctagatcaccacgtggcacagtctaatctcaccgttgattttcatttaagttggtggacttattattttataccgttagattagatctatagctaccatcctttntaattaaattggtgtacctaaattcttgccccanaaatccgatcgtgctttctgttgcctacttcagtg

SEQ ID NO: 38896 - DNA, 472 bp, Oryza sativa
acacttgaaactaagctccctttgtctgaacctgtgcacacctcttttgtcgttacccaagatcacaaagtcatccactgcatattccagatcacggcgacggctatcggcataactattctgccgagactgtgccacctataagttatcccgaatgattctgactttagcttcagcttctctcaggatatcagtcccgaacacttggctttccccaacttggtcccacaatagcggtgttcggcatttgcgcccgtacaacgcattataaggtgccatttgtatgctggcttgatagctgttattgtaagagaactcagcataggggagactcttatcccaagtcttcccgacatctagtacacatgcgcgaagcatatcttctaggatctgatttagacgctcggtctgaccatctgtctgcgggtgataggcggcgctgaaattcaatcgagtacccatttcttcttgg

SEQ ID NO: 38897 - DNA, 457 bp, Oryza sativa
  unsure (1)..(457): unsure at all n locations
cactatgaaacactcacgcctatggtgaaaanaagagatatacgaaagtaagaagtggatgctttttacaatagctagttatacacatgctccaatatatttacattaaatttatagtgagataaagagagaagagagaaaaaaatagagccaacattatagtgttaacctattatacatgttaattgtaatatgggccaatagccaatactccctccatctacttttgatagtcgtatttcatcttggcacacagaccaaggataagtaattctacttatcatccatttaaacatgctactagttattactcataaacaagcgattcattatcgatgccaatgtagccaatcttgtgtgttagagagttatgcattaaatccgagaaagtcattaagagaaataggctgtaaattgaaatatgcctatcaaaaatattntttcatatttggaaata

SEQ ID NO: 38898 - DNA, 304 bp, Oryza sativa
tttaacccaaagtcactgagacgggcacccatggcattgtctagaagcacattgctaggcttcaaatcgcagtggactatagggggcatgcaggcggtatgtaaataatccaatgctgcagctatgtccactgctatttgtactctggagtctaaactcaacggttctctcatttcggaataaatccagctctctagggtgccattagccatatattcaataataagaagcttgaaatcattccctttattgtcccatgtcgagcatgcggaaatcaccctcacaagattacgatgacgagtgt

SEQ ID NO: 38899 - DNA, 411 bp, Oryza sativa
taaacttctatgcacgtgtgacattgatctatttgaacaggtccaaaccctcttaatgcatcacagacagctgcagagtccatctttggcccaacatcatacatgtattatgaaggacatggaatgttgcatgctatctaccttagcaagagcaatttaggagaatggaggatttcgtacaagaacaaatatgtggacacagacacttttgaattagagagaaagaagaacaaaatagctttccttccatctgctgaaggcgagccatgtgcaacactggttgcttttcttcttaataccgtaagtcttccttaatttaaataagttagtattagatcaagtgtacacactaggtggataggataattgagctctaatatgatgtgcagatgcacggcgaaaatatgatgt

SEQ ID NO: 38900 - DNA, 423 bp, Oryza sativa
  unsure (1)..(423): unsure at all n locations
aagagctctctggtgacgagcggcgcggcggcgttccacgtgctctggctagtccggtcggcggcggcggcggcggccgggaagaactggcagtggctgggcagcacgttgccgccggcgacggcgacggcggcggcggcggtggaggaggaggagatggtggtgttagatttgggatggcattgttggtggttaggctggtgcggcgcgccggcggtggcgacgcggcggcaggaggggcacatggtgagcgtggcggcggcggaggaggagggctgcatcgcggacgcggacgccggcgagggcgcggccttgagcgccctgaggtcggcgagctccttctcgaggcgcttggtctcgtcngcgaggcgctcgcaccaccgctttaggtactcgcagtccacctccgtctgcttcagcttc

SEQ ID NO: 38901 - DNA, 344 bp, Oryza sativa
  unsure (1)..(344): unsure at all n locations
gacacttgaaactaagcntgggcacacgaaagagtgcatgagctcagaagatcacncgtagattcccctacctggcgcgccagatgacggagcgtggggcatctcaccgggagaccgcgctggcccccctttgccggttcggccggngaccctgngtgaaactctaagctcccaatctgtatgtggaaggttcgcgagacaggaagcacagaagacaccggcgatgtatacaggttcgggccgctgagaagcgtaataccctactcctgtgttttgggagatctgtgtatgaatgagcttcaacatntgagccagcctcttccttgattacggagctaacttag

SEQ ID NO: 38902 - DNA, 454 bp, Oryza sativa
  unsure (1)..(454): unsure at all n locations
tatcatgtcatgttggctgctgaatgcacatctatctttatgcgcatcatgctgatgcggctgtggtgctggtagttgccttgcgcgttctttgtctctgtctctctctcccgagctatagctacagctatagccttttcctgagtggccggngcgacctaaaaccgcacctctggtagcagcagcagctcgcacgcagctcatcgtgtcgtctgcatgcatggcggcaccggtgcccggaggctgtgcgaggatgagacgggtggttctcggcgtcgtgctgctgctctcggtgtgcgtccgagcaagccatgccgtgacggatagccaggacagtgagtaccatatgacccaaccatttaatcagctagtgttaagatcgtttggtttctcagtcttgaacgattggattaattgattttgaggagggaaagaacaaatgttctgtatattc

SEQ ID NO: 38903 - DNA, 374 bp, Oryza sativa
  unsure (1)..(374): unsure at all n locations
tgcccgcngtacaccgaacacgcacttatcgttgttcagttttatgcgggcggagcggagactctcaaaagtttccgctagatccgagagtaaggtctcttggttgcgcgtctttacaaccaagtcatcgacatgagcctcaacattacgtcctatttggctacccaaagaaattcgagtagtacgttgaaaagtaggacctgcattctttaacccaaagggcattgtcgtataacaataagttcctatgggggtaatgaatgcagttntttcctcatcctccctagccatgcgaatctgatggtaaccagagtatgcatctagaaaacacaaaaggtcgcaccccgctgtggagtcgacaatctgatctatgc

SEQ ID NO: 38904 - DNA, 467 bp, Oryza sativa
  unsure (1)..(467): unsure at all n locations
attgagaggggtatcgaaccggtcaccgctaaatggttttatctatcgaagttctggtactatgctcacggtggaacgcttaaccccgttgttgtctccctggtgttcaccgatcagatacgtgaggctgccagtcgactaacggacgcagtggaagcgtcttctcagggaacgttccgacccgacagagagaaggacgagctgtcactcgccctgcagattcccgagcatccaggacgaacacgagggaaaggcgtggttccttgaaatattggattcaagaaggacatccacatgtacaggagtcggatgaggagcaagagagataccgaggcaaagattgcagatcttgattatagggtatcgagctacgagctcagcatgcaagaggaggtggcatggaaagtggatgaacgcatggccgcacatcngtgccacgatccncagccgtacatttcctcatgtat

SEQ ID NO: 38905 - DNA, 354 bp, Oryza sativa
  unsure (1)..(354): unsure at all n locations
tatcatanagggcttcgacaaggggttgtattcgntctnttagctatttacacagaggaatggaaaaaatcgcggaaaaccgaactatnatacaatacttaccttatgtaacacgttgggattatntagctactatgtttacagaagcaataacggtaaatgcaccagaattcttggagaatattcaaatcccccatagagccagctatattagggtaattatgttagaattgagccgtatagcttctcacttgttatggcttggnacctttatggcagatctcggtgcgcagactcctnntattttatatttcagagagagagatataatctatgatctatttgcagctgcta

SEQ ID NO: 38906 - DNA, 468 bp, Oryza sativa
  unsure (1)..(468): unsure at all n locations
tactcngctcagttgtttcatagcatacgcttgagggtccaatattctattctgtcaacgccacctgaatgttcttacttggcctgagatattacgacaatttgctntatctgctggttntgggcctcagttaaagaacaggaacgctgaagatgtttattatcgagatgataatgaggtattacactatctcatactatatacatctattcgctctataagataattccatattgaaaattntcatgatatctggtttatctcagtgatccaaaaatatcatgtgagtactctgcatctaatactctgtatgatgctcggttntctgagattcaaaagggccaccgggatatagtcagcagtactaaggttgcgtcctattgtatagtgtgattcttgaaattagtgtactgatgtacggcgatgagtgatatcggcaaatatcggtgagtctcattttctcaaata

SEQ ID NO: 38907 - DNA, 208 bp, Oryza sativa
gaaactgatatcaccgaattatacgacgatgggtgtacctaccacgctcagtgctgacactgacaactcagattatacatgccagcgcatagatgccgacggagactcatgctgaccggtgggaagacgcattttggaccttggactctatctacaatccacatatcatcaccaactctaatatgaaccgcttgtcccctataactta

SEQ ID NO: 38908 - DNA, 266 bp, Oryza sativa
  unsure (1)..(266): unsure at all n locations
acggatgtccatatgtttgattgtgcggacgaaagtancntttttgagaagcncaagaaggcatatgcaaggtctctcaatccaatgacatcgaacgatagatgggcacatgttgatctaggctactaaatcaagaagcctagtgttggatcgagatgttcactatagggggtgctctttatcttggtcttttcctttcaccttgtttatccctcttttctttgtgcttcttcctccattttgtctttctctcttcttcctactgt

SEQ ID NO: 38909 - DNA, 472 bp, Oryza sativa
  unsure (1)..(472): unsure at all n locations
taacatgcaaagatgccacatcatcatacactgacatgttgttcacatcatcattcactaattaacaagatgccacatcatcatccactaacaatcatcacatttaaacatcatgcaaacatgctatatcttcatagtttttataatttaaaagcttttcaaatataaacatattaaattatcatccaacataattcacataatgttttaatgtatatctttattatattttatgatatcctatatacttatataagtcatcctcacttagttagtgcttaaatgattaatctatggtccaaattatctctctcctttttttctctaattaagtcatatcacatcaattatttttagcctttagatgattaatctgcggtccaaactatctccctacttttcttcttccatanagtcataccaccttactttttacgaatgaattaccattctatatactatntaaatttaa

SEQ ID NO: 38910 - DNA, 322 bp, Oryza sativa
  unsure (1)..(322): unsure at all n locations
taggcctgatggctgntatcgtgaggagagagtcaacttttcattcttttgttattgagggagtcaaggtggactgtgtccatatagggaaaggcccaagggcttctctacccactgcctatatactctcttccgtttcattttaattgacgttttggacaatgacacggtttacaagatacatcttttacctttattttctattataatatatataataaataaatacatatttatttttattatagtactttaaaagacanatctatatatgttgctctaggtcctttaaactaaatatttttaaagttattaatagtct

SEQ ID NO: 38911 - DNA, 446 bp, Oryza sativa
  unsure (1)..(446): unsure at all n locations
tctcagntctgataatgtggtctctgtactgctttaattattgccttaatattatggcagagatacacatgaattttgtcatgccagaataagaaggaacgacttgttttattgagttaatatgtatggctcactgatcaatcttgcatgttctattagcaaaaaacagaaagtgattacgctgttactaccttccagcaaactcaactaatctaccctattaatgctggtcccagctgagaaatcatcatgcatgtgtcattgtttagagtatgaattcgatgcacataggtcataggtcatagcatctcaatgttacaaaatgggcttgaattcttcatgtagatctcaaatgcatgactgtgtgcttgcttttttattaaatgaagtgtcattaaagtctctatcatgaattctgtggcacatattactgacaccttactgtt

SEQ ID NO: 38912 - DNA, 464 bp, Oryza sativa
  unsure (1)..(464): unsure at all n locations
tcgccgctgcctccattggattcgcagctgttaagtgaatcccggccacccctccgttgtcgccgcacattgccgganagtcgtcgccgccgtggacagtacctcgtcgctgtcccgatctcgtcgccggccatcttccgtcgccatccgtcgtcgcgtaagtgttggtaaggaccgtcgcctcacactctttctcccggtgccctctgtttgcatatttatgtcgtggttcgccggcaactaccgctcctatgtcattcaccggtgtaagtttttccctagggccttaattcaatctaatccgttgtttgtctagcatcgtcgtcgtctccgtgtgttgccgccgggtcgccgtcgtcatctctccctctccaatcgttttggttcggtgagatttctattcgtgttccctcggtttaaggtttaatctcttggttgtggtcgtgagtagccgccgctgtgcc

SEQ ID NO: 38913 - DNA, 448 bp, Oryza sativa
  unsure (1)..(448): unsure at all n locations
gcgaganangtataattatgagtagtgtacattgttattataagatggttgttccactaaaatgctacatgagacaattttcactgtgcgcgtgatcgacagtttagcaccgttgttatgagaagacagttccactaaaatgagacgtggcatttttcactgtgctcgcgatcgacagtttagcaccgtcacgtacccctatttgaggggtggctcggctctttctcctccatatagctaattcagccttagacacatggtctgaccgcagtgtattgtcctgtctgaccggccacacaatggcggtcagactggcctttgcggtaaatgtcctcccaacggtgacacaccttctcagacaaacagagatggcttgttttccttcaactatctgccatgcatgtatgtctctaggatcatagaaatcaaaaggatgctcaccggagag

SEQ ID NO: 38914 - DNA, 376 bp, Oryza sativa
  unsure (1)..(376): unsure at all n locations
cactatgatactcaagctgaccttgatatagaaaaggtagcgaaacgaataacacatantttgtcctcaccatcccattaccatttggaggattccagttccaatataggatgaaatggcgcactcgtgcaaagcgtgggtgaaccctaaccatcaaccattacccccattaccaaacctaaggagacccctcaatatgccgggagaagaacctcaatataccaaggtacaccttcgggacaggctacatgataaaccttccacagtnaacaaccagcttatatcctttaagtactcaataatggaaacatacccttcgcccctcaaccaaggcataatgcgcataatgagggccttcggccttccacaaacctta

SEQ ID NO: 38915 - DNA, 459 bp, Oryza sativa
  unsure (1)..(459): unsure at all n locations
cgccaaccgcctattgggctcagaataagcttcggagcggagactttcgaaagtttccgctagatccgagagtaaggtctcttggttgcgcgtcttcacaaccaagtcatcaacataggcctcaacattgcgtcctatctggctacccaaagaaattcgagtagtacgttgaaaagtaggacctgcattctttaacccgaaaggcattgtcgtataacaataagttcctatgggggtaatgaatgcagttttttcctcatcctccctagccatgcgaatctgatgataaccagagtatgcatctagaanacacanaaggtcgcaccccgcggtggagtcgacaatctgatctatgcgtggcagggggtaagggtccttaggacatatcttgttaaggtcggtgtagtcgatgcacatccgaagctggccgttcgccttgggaacgacgaccgggttcgc

SEQ ID NO: 38916 - DNA, 474 bp, Oryza sativa
  unsure (1)..(474): unsure at all n locations
cgtgtaacagtcaaggcagtgaaagggtgagatagatgtttgaacttgtcaaatttggtgaacttgtcaaccacaaccataatagtatcataacccccagactttggcaatcactcaataaaatcaagactgactgttgtccaagcttgtaatggcacagaaagaggttggagtaatcccggactcttacagtgctcagtcttagcttgttgacagatttcacaaccctgcacataatcatgcacatccttcttcagtttgggccaggagaacaagttcttgatcctgtgataagtggccgtgacccctgaatggcccccactccactgctgtgcaaggctagtaggacagcctccttagcttcagtgtggttggcctaaccatatttccctttatgtctgatgattccttggaccaatntgaaatccccttgcccatctggcaataaactcagttcagccaacaatttatggg

SEQ ID NO: 38917 - DNA, 301 bp, Oryza sativa
  unsure (1)..(301): unsure at all n locations
tgtggcataccccaagtcatattcaagacactgaaaaannttttctttccctgcacaatggtgcatacatccaaggactgactgtaacctgttcaacgtgaaagcttgatggttccgtaaaattgtccatcggaaattagcaaattgtcatcaagtatatgctctatatgtaacggaaatagatcaagacctctgataatggcaaatactgcatttggaaccgagtatgtcttactggcagaatgcatcagcgatttagccatgccatttactgtacctgcacaaattaccagaccaagcc

SEQ ID NO: 38918 - DNA, 418 bp, Oryza sativa
  unsure (1)..(418): unsure at all n locations
acaatccccatgttagtgaaagcaagtgtgctacgtcttgttaacagtttcttttcgttaaaccaaagcaaaggttgacatgaaagttgctgtcccagcctgcctgccattcaggcagcagagattactagttaagcatcaaagccatgctgctctgcaactcctaggtggtctcgtttatcgagttgtacagtgacaaaatatcctaactatctatctacctgtgcaatgaaagtaaaatntacacgagctcatccagagatagtctgaacattcagtcatactggagtatgcagcgacgcagaatacttacaaatgttatgctggtaaaaatgcttcttcctgacctcctcgcctcacagcaactagaatcaacatccttgatagctgcgcataatctgaatatgaacacttcttt

SEQ ID NO: 38919 - DNA, 270 bp, Oryza sativa
ccggggcctcgatgcgcaggagagatcacaggacagcgccaacagagccagcgaccggcaaccagagcgaaacgcaaccaaccacagcgccggaaacgatcgccgggcaggacgaacccaacacccgagaaggaaacacgcagatacagcaacggcaccaaccgccgcagacgcactgaccatatcgagcactcacaccacacacgccgccagtctcaccacgaactgcgcgaccacaggaaacggcgaaagcatcacacgacgcaggac

SEQ ID NO: 38920 - DNA, 441 bp, Oryza sativa
tgtactagtattcaatattgtcatgctgtgttctttgatcgttttggagtggttgagatgaacagcattgaaaaaagtagttgactcaacgatttaattagtccaaaatttgggttaattcgatccatgtcattgcaaatatgttgttacaaataaatgttattgtcgtcacgttttccatccgtctcttcttcttttttttttcttccttctatctctcgtcttcttcccacaccgacgagcggcgagtggcggcgggaccggtgagcgatggcgggatcctcggtagctcagcacgcacaccgtccatacaccggcggcctcgaccacgtgctcgttgacacagtcacccaccacgagaagatcaacagagaaaggtgatacggagaggagggtgtagaggaagcatggcatgcggtaggaggaggtgaggtaggcggt

SEQ ID NO: 38921 - DNA, 459 bp, Oryza sativa
  unsure (1)..(459): unsure at all n locations
tgtgacgaaactcctgagcattacatacatcttggcaaatgagctggcgccaggaaactcttagaaggcaaatagaatttttttataaaaanaatttcaacgataaaattagacttatagtaacaggttataaacttaatgcaaatgtccatgagctcatctgtgtcagacgccttaactgaaaatttctctcaagaaatattttaccttttcttcagcagtaagcctccgagcagtcttcttttcagtggaagagggtagatcagtgaactcaacggtgactgtctctccaagctcatgggaataacactcatcgtgttccgccgcgaaaacaatcccttcttcccagtccatatcagctgcatctggatcttcttcctccaaacttgtcttttcagaccatccctaccgaaacctcgtcatcccgcatcgtcataaccctctgcatggaccttaacg

SEQ ID NO: 38922 - DNA, 462 bp, Oryza sativa
  unsure (1)..(462): unsure at all n locations
actactcttacatttgctaagtgatctgaggtgtgcactgattattctaattgnataaaacaaccttttttatatttgcataaatcttgaggtatttttgaggcacatatccaagagaatgtataccaaacaaccaacttggaaaaaaaaaagaatgtgaaatagccattgaggagcagcaagtgcaggggagcaccatttctacgcccacacgtggggtgtccggcgcactctcggcgtttggaattggaagtttcacacgttcgtcgatggaacttatattttaagtgcaaattgaaacataactaatttgtgccttttgtattcatcccattccctgctattttccacactttcattatttgttctttaacaaattacggagtgatctataaaaaatgaatgctatttgtgctctggcaaatgaatatgctctatagtggtggtccacagggacaggga

SEQ ID NO: 38923 - DNA, 107 bp, Oryza sativa
  unsure (1)..(107): unsure at all n locations
cttntgagaagaaatttaagtatatcagagcacgcntctgattgattttacacaaggcactattcaattgttattggccagtaaaaaagggaggggattggtatttg

SEQ ID NO: 38924 - DNA, 470 bp, Oryza sativa
  unsure (1)..(470): unsure at all n locations
atgtgtaactagctgccctgacatagntnncgtcattgnntatatcttacttagctatataattacgtgtaagtttttccctcatattatcatgtctatttataaaatattaaatatcaaagttttgcatctttatgcangttttgcagaggaagactgaagaagctgcgatggctaccaaaaggctgaaagagttactagaggctcggaaatcatcaggacgtgacaactcangtatctctctccgcattgcgaccattnttcgcattataattaatactcccaatctaacagctcttccttctttntctttttttttttttttgctttcttccaaacacatcaggcatgaatggtacttctcctggctctcatgtaagttattntccatacttaaagaanaagatcagttgcttatttggaaatatccttgagaatactttnttttgtaatgcagatgactgagaaat

SEQ ID NO: 38925 - DNA, 467 bp, Oryza sativa
  unsure (1)..(467): unsure at all n locations
gcttaaaccggaaccccaagaagagtcacaccttttgttctaagaagaggaagaggagaaagagactgagatttgggatgactcacaggcgtcctagtgcaaatacatcagaagactgcgcagatgcagacgagaagtttggctttcaatctggctcagatttcacactagatgagtttcagaaatatgcagatgagtttaagcagcagtattttggaataaagggaagtgacgaaatccctctttctgaaattaaaaagaagaaaaaaaattggcaaccatcggtcgatgaaatagagggagaatattggcggatagttgtatgccccactgacgaagntgaggtatttagtttgctatctgtgcatcatcttcctatttaactattaatacatactgataagcatcggactctctttgactaggtggattatggtgctgatntggacacttcaatgttcagtagt

SEQ ID NO: 38926 - DNA, 275 bp, Oryza sativa
tgtatagccaaaaagagcatggaaaactgtgatgctgcaagtaatatatcatccaaagcagatgacaaccaacaaagctcaggagccacttctagagggcatcaaagtttctgccaacatcaagacagctcaagacattgctacatcttctcaccatcctgttgcccctgttgttaaagcaaaccatgcttccatccaaggactgtttcatgagaatattgagacagcatgaaatttgtttggaaacatttataacgtagagctgcctactatta

SEQ ID NO: 38927 - DNA, 483 bp, Oryza sativa
  unsure (1)..(483): unsure at all n locations
ctcaagcttagntgctatgctaaantacagagaagtactagntnntattatgtatcagnagcataactctttctattattcttcaaaggaaagagctaatactaacatagacaaagctaaataccaagttcatacatctttcatgcaaaatgtaccgatctaaaagtctaaacactgctccttttgggattagggcacggtataattccccagttcctcctcacttcctccaaatcttcatgaaaatgcttctcatagtacacagacataagatctgtgcacttaagaccagcttttgaagcccatgggaaataatgctggaaaaacagtgtcctttgtttctcattgaaccttgcagagctcccaacgactgatagcatgcacataggaaggaacatctgttcaaactcaatgaccttaagggcagtctctccaatcatgttcgtaggatggccgaacagcacatgccaaaagtcatggact

SEQ ID NO: 38928 - DNA, 475 bp, Oryza sativa
  unsure (1)..(475): unsure at all n locations
aatactcaagcttagatgcatcgcagtacacttggaaaccctgctttggaataatgttaatcagaangggtgctgatattaagcgacttttcaactcttgaaaactctgctcacattcttttgaccacttgtacttcacatctttttgaagcagtcgtgtcatgggcttagcaatcttggaaaaattctctataaacctccggtaatagcctgcatgacccagaaaactgcgaatctctgagactgtcttctgttgtttccaattggttacagaccacattactaggatcaacggcaactcctccggcttagatgacgtgaccaaggaactttacttcagacaaccaanattcacacttgctaaacttggcatacaattgatgctctcgtagctnttccaatgcaaggcgaaggtgttcttcatgctcttctttggttcgggagtagataagaatgtcatcaataaagactacca

SEQ ID NO: 38929 - DNA, 416 bp, Oryza sativa
ctaagctgtctatgactctgtagcagatgcgctgtagagtgtaacggttcagtagcatctccttatagattgctcgaattaagtaattctagagtcattgacatgttgcgggtaccttatgtttatgatagctagtttgagtttctggtgttggtgtacactcgtacaccactcctaacatcatttatactcgccacatacgaccatttctggcatacctatccataacactcatctatacttaattctttattcctctcatttctttattcgcactcatccctattgattactctcttttcacacctatccttatccctttctcatctttcgtattctttccacataatttcctaattcatacaccccttcacactttctcactccctttaccattttctaactttgtcttaccc

SEQ ID NO: 38930 - DNA, 448 bp, Oryza sativa
  unsure (1)..(448): unsure at all n locations
tacgctattatgttatgtacccattacatatctttttttttatgatnnatactgactaatctattatataaaaaagtccattaaacctcatacagatctatacctatactaatcgggcatttcctacgagctttcacgttaactagagaattctgaccgctggttaaataagtgatttaatctaacccgtagatcttcacgtgatatgcctttattagttttaattctgtaggcttggtttaatctctgcgattagttagttttgtgggctgggtttaatcaaaacccacgtaactatataagcccatttacatggatatgacggtccttatcttcaaccgtataggagcgaggcaggagaagcattggttggctgggtacgccgcatccagctttccttctctccgtccgcgggatagtcgcgagtcatcgctaccaacgagcgcga

SEQ ID NO: 38931 - DNA, 465 bp, Oryza sativa
  unsure (1)..(465): unsure at all n locations
tctacattcacaaaattacatagatcgatttattttttgcactataaatttattattactccgaatccgatattcgcgtgcacgtgttcacgcgtgaggattctcggacagttcgggacccacacaggcacactccaaaccgcacaggcccagtttgggcccaaaagaacaatcccttccttgagacgtcaccgaactttgggctctatgggcctaacgagctccactgggcccaaatcacaaatgggcccatttcctcccactccataatttttttcatttttaaatttttattttttaatatttacataaatattataacatctaaaatatttacagaaatgacccctgccgcctatgtggagttttgccgccctctgcaagggctgtaatgtggcaaatgcaattatcgtcctgccaaanatacannttttatagttttcttttcatcttgttcgtccctca

SEQ ID NO: 38932 - DNA, 490 bp, Oryza sativa
  unsure (1)..(490): unsure at all n locations
cgcacacttatactctgctgcttacatttatgtaacttagtgtagagatagaagtggtacttanctttgtatgcattcccgttaatttctatatacaaactcttattaatagttcgcgtgtaggggtgataatagttctaactttttggcatacaaaatttaaaagctgggtaaaaaaagattgagctaaaatttattatatctttgtgctaaaaatatttaagagttgaggtggattttgaaagggcccatggggcctgactctttacatctgtattcgtacttactccggatcccccgttccagcaagataagcatggtttgagaaggaaagcccataacgctccttattnttatttgaatganaataggaggatggttagggcagtatggagataaatttaagagcctcgaatcgcatgaataacacaaacgaatgaataggaaaaacacatgattctaaacggaatggaagtgtnaaatagaggat

SEQ ID NO: 38933 - DNA, 408 bp, Oryza sativa
  unsure (1)..(408): unsure at all n locations
tcagaagcttgagtggcccacnttctgctacgctctacattggatatgctttcgttgtctctcttgcaattatgctggctactgggactgttgggttcctgacatcattctctttcgtccactaccttttctcatcagttaagattgattgaagaccataccttacaaatctccaaggatgactgtacactgaatcactctaaagcggcaatgatttgatcatggcatgaaggccctttacacaattgtgatgtcttccttatgtagctaattaccgggactattgtaccacgatgaatatggtgatagtaatgtaccagcatatatngctttaagcttgcattcatcatcttttatttggtaaaattttgttgattgtgcanatgctttctganagaccatgaattt

SEQ ID NO: 38934 - DNA, 460 bp, Oryza sativa
  unsure (1)..(460): unsure at all n locations
tgcttaacatacctggtacataaggtccaccagttaaatgttattgttcatgaatacactcaggcaaagttaatattcatgggtctcagaacttggtaatgttcaaaccagaaaacattggtaagaacatacctttttgaaccatatttgtggtatgttcgaacaaaaacaagagtaaaaatcatgtgagatgaaaatatcagatcaccgcagccaaaaagtactccacgaggaactgaaaaagaaaaatgaacttgtgtgatcaggaaaaattccttgcgcagctgtcaaaccacaatagaaacttacagttaatcaggagcacttcaaatacattgttgggtggtggaagagtagccaactntgagccctataaaggtaaaagcttcggatgagtgctaaaatgagtaattgacaggtntacanagtttcacatgtccataagcagagcaagagtgca

SEQ ID NO: 38935 - DNA, 454 bp, Oryza sativa
  unsure (1)..(454): unsure at all n locations
agaaatgccaccatgcacggcgtctttctctcattgttatatatgtgagncnnnnaccacacaatagagcatgtttactctgattaaggttggatgatgtgcttgtacatgcttttgcttactctgtctctcttaagaatattgttttgctttgagtgtgttttactatttaaatactaacccatccctcttggactagaaaaaaatgatttgcataaaaaacgaagaagacttgttgccattgtctacactcgtgctaatcacttgtacaaaatgagcagttatgatgaattggtttattcactgttcacattttataagttattcatattggttcttagtttttattatgtttctcatcatataatgatcttatcaagtgtgagcatagctagttgacatatgttntaagcagttaagcacatgtgtatctagagtctgcgataccaattat

SEQ ID NO: 38936 - DNA, 277 bp, Oryza sativa
cgggttcatcttctttttattgcaacacatgacatgatatgctatatatatgctaagctcttgaacataaatgaacatatttccatggctaatggaaacaatggtcaaaaggggaagaggtatggtgaaaattttggatatttggaagaacaagggtgaatttttgcagagtaatttttgaagacccaaagtgaattttggagaagttgtcagagagcattgttttggtcaaatggaaattcgaatttcttctttaaaagaaggaaagtttctttag

SEQ ID NO: 38937 - DNA, 375 bp, Oryza sativa
  unsure (1)..(375): unsure at all n locations
gttgaatcctatcatcaaggcatggctgttccgagattggtctttggatttcataggtcaaattcatcattcatcaccaaatgggcatcggttcgtgctagttccaacagattacttcaccaagtgggccaaagccgtgcaactcaagaatatgactcacacggaggtaattgactttattttgaagaataataagcatattattcataggtttggcattcctcaaactttaactacggatcaaagagattcttttatgtctaagggaactgaaagctttgcagaatcttatgatatntaaatgttaagttcttctccttactatgctcangctaatggacaagttgagtcaacgtataagattttgttgaaata

SEQ ID NO: 38938 - DNA, 466 bp, Oryza sativa
  unsure (1)..(466): unsure at all n locations
ngcgtccatggtctgtactctatagagtgttgagcatattcatggctcactgtattgtgctcagtgcggcctatgggatgcgttaaacaatcgatgaatcagctgtaccacaccgcataatcccaattgcgaagaccttaataactagtcaattgatgctttggatcggtactgatttgatttgtgactaattctaacactttgatgactaatgcatactttgcagaatgcgtaagaataacaagtgccatcgcaaacacaaaatcgtcgaaggtgacacttgtcgggataccctccgaggaggatgacagtggcccaaatgaacgccagcgtgccgagggcgttgccccgccctttcaaccgagaatggngatgctggtcgtctgcaatactgctcactaacatgtgggccccacagcccctcaggaccacatgtcagtgagcagtactgcactgcacgggatct

SEQ ID NO: 38939 - DNA, 308 bp, Oryza sativa
ctggcttctcgcaacaagtgctgcatctctagtgagcgtgttatttagagagacagcctcggccttggcgtgttgtggtgtagctccagcctccaagcatccatacatgcttacataagtcagacatggagggaggaccggaaggaggaggataaaaaaagcgaatcttttagtctttctttgcaccaccggttgcctccgttgatctccttgtccatacgctgaagcaaaccgatgtttgctattgtcatccgctgctgaagctgcttctttaactagacttattagcagatcatattgttcaaagt

SEQ ID NO: 38940 - DNA, 453 bp, Oryza sativa
  unsure (1)..(453): unsure at all n locations
tccctggatctgggaagtgtctctctcacggtattgggatcgtttgatcgatttccttgatcgctacttatgggcgtgcgctcaaaggatacaaacagggattcgcaaacaaaaaggggaattcgtagtcactttttcctgtcgcgtaaaaaaaaggctttacgcgagagcaatagaggttgggatacatctatctcttctgagcaacctctnttggattcttaagaccacccttgcagtaggataccgtctgctttgggttctttattatattatctccttcgagggatttttaggatcgttcangctatatttagtctatttttggctttactgtctccttttctcagggaagtggttaaggacctcagaagatagaggagagcgccaggcgcagatttccggaatacttctacngngaatgctcattgaatgcgccattctcgtattatg

SEQ ID NO: 38941 - DNA, 407 bp, Oryza sativa
  unsure (1)..(407): unsure at all n locations
tatgncatgatcaagtagaaacctgagtgaaacttcttaagctgactttgttaatgtggaagtgaggtttattatttacaaaggcaagttgttgccattgatttatggtggtagatttatggactacctatacttgttttatacactcatgcctattgtttaacaccttgggctgaaaatttaaaaacaaaaacactagaatagtgataggagcaacatttggtgtagcattcctagcttggaatcattgtagtctccaattccagtgcanatatagctcanacttttgtctcttgtattcaattccagcctcctttcaactctccctcgtgtgttgattccaatcaatggtgcctactagtgcagagacgagagagataccgtggagaaagatgaacacacagcat

SEQ ID NO: 38942 - DNA, 414 bp, Oryza sativa
  unsure (1)..(414): unsure at all n locations
agctctctggggccacacaggtcgatctcattctgattgggccaggatgtcacacctaaagagccaataagatttgtggcactgaactcttgtctctcgtgttttatagaagtggcaaaatttgaccaagaaggtgacaatttggcagtaatgcaacccgccacgaacttgtccagcaactcgtcgcaaccattattctcaagtccattattctcaagttcctttgccagtgcctgaatctgatgagcttgttcaactaaagaacggtcatcgtccatcttttagtcatagaactgctccatgacatatagcccactgctagcatcagatanctccgaattggcctcaagtgcatccttcgtgctatctgccattccgtagatagattccagaaattgccagtgactatacaat

SEQ ID NO: 38943 - DNA, 478 bp, Oryza sativa
  unsure (1)..(478): unsure at all n locations
tgtcagtggatataaattagagtgtgtgtagttccacgttttaattngacgtttgactaanattaatagtttgaagaaaaaagttagaagtttatgtgtgtagaaaagttttgatgtgatggaaaaagtttgaagtttgaagaataggttgagaactaaacaagggcttgctccatccgtcgtattttaagtgtaaccataagtttccgcgccccactttgatcgttcggcttatttgaaaatnntttataatcagtatttttgttgttatgagataataaaacatgaatagtactttactcgtgacttatgaaaagtaattttttttactcgggactttatgagataataagatggacagttgaaattaggcacggaaaagtatggttgtacttaaaatgggacgaagtangggtgaaaactgagcggatattattcgatccgatccgcttcgaatccgttcaatgtgaggatatgg

SEQ ID NO: 38944 - DNA, 464 bp, Oryza sativa
  unsure (1)..(464): unsure at all n locations
gagctctattattcttgcgatccggatctgttatttattcaatggaacctcttgttggatattcaccagataaaagtcacaatatggctcttatgggtggtttaagaaaatacattccaattacaagaacttgttttttatggggtaccctttctctttgtggtattccacctcttgcttgcttctggtccaaagatgaaatccttagtaatagctggttatattcacccttttttggaataatagcttcttttactgcaggattaactgcgttttatatgtttcggatatatttaacttactttgatgggtatttgcgtgttcattttcaaaattacagtagtactaaagaggattcgttgtattcaatatcgttatggggaaaaaggatatctaaaggagtcaatagagaattcgtttatcaacagcgaagagtggagtttcttttttttcacanaatctat

SEQ ID NO: 38945 - DNA, 446 bp, Oryza sativa
  unsure (1)..(446): unsure at all n locations
agctnttatgtgttttcaaaaagcggcgcatgaactaaccatgcctgngcgatgcatgcatgactacagtttgggctattgtggcaggctcagttctctcaaaacttgatttctaaaggaatctttgttattcccgaaacctatatttacctcaattgaccatagatggcaacaaaagttggagcaactgngtcatatatgtatgaaataaaatcagaaggtcaaattctatcaagtcatatgcatgatctcactgagaatctgacaactacctgtgggtcttcttaagttctatttacgcgatcagtcactatgtatgaattccattatctaaaaaaagacacaatgtatgaatatgatgccttgggactgatctcttggttgttggtgctgtattaagtaaatgcgtacttgatatttcatcaaagacttaaaatgcttgataa

SEQ ID NO: 38946 - DNA, 389 bp, Oryza sativa
  unsure (1)..(389): unsure at all n locations
ntcatgagtcgagccaagccaggctcggctcggctagtttccatccctatctcctgccggcttcgacttcgtaggctgcggcggttgtgttggtgatgagattcgatgtcttatgtcctccccgggggtgccttttataccgcgggttagtcgatctccaaggagaactcgcatatatcgtgaccccacacaatatagtaacgacctagttctgtccgagtaggactccttccatacgtggactccgcttctattacgtgatggatttccttaatgtgtacaggaaacatacgtatacgcgcaggtataccggatggacataccacatatatacaacggtcgagggtatgccttatccgtaaccctgacaccttatacagctacagaat

SEQ ID NO: 38947 - DNA, 464 bp, Oryza sativa
  unsure (1)..(464): unsure at all n locations
agcttatctggggcaacttgtgactngtaaatgacacaacatatagtttaaactctgatgtcttacattttatgaactgggacaaaacaaaagggaatatgaacttaagaaatggcacactaaaacccaagttttatatgccacctaacacacagacataaacaatggaattgcttgaccatgatttgaagtacagaaagntgcttgcttgcatatgttgattctacattttgttcatgtctccaaagtgtgttccacaatcaaacgcgaaactgcatacttgcagaacaaaaaaaaaagaactagggcaaaatgatgattgacagacaaattcgtaatgaatagcaaatcttatgaataacatgtcatgtttatcagaactgtctttattagaaatctggagtcatgagcgcacaccatgatgaccaattcacttcctactntgatgtattggatctgacgca

SEQ ID NO: 38948 - DNA, 454 bp, Oryza sativa
  unsure (1)..(454): unsure at all n locations
tcacggagatggatgccttgaaagggaggtaaacatttactttgttgctgtccaccgaaatgcatgcgcgctgcttttcttgtttgctcttcgattgcattcaatcggttgtctcacatttggagctaagatgatggattctgctcctgttttgtttgtttggttgttgtcaggagccagactaccaagggaatttggattgccaaggctgtacgcattgagccgtttactgttgtaatggatttggagggcacggactgcatggaaagaagagaggttgagtgttatgtgcttttattataataatgtttatacgaataaaaaaccttccataccatgtttccttttgtaagattctgagtacaactctttcatgccatttctaactgcgtaaaatatttgatgttntatcttgtggttaattagtagcagtagtcctgtgtacctgagtatt

SEQ ID NO: 38949 - DNA, 446 bp, Oryza sativa
  unsure (1)..(446): unsure at all n locations
agctggcctaggacgacggctgcgtcgccatcgccattttttttttctctctctttctcgcgtgcgccgcgcgtgcgttttttagcgtccgtgggatttttacttttttttcctctctctcaacccctattttcgggggcaacgtgaattcggtgtcaattgcgagacgagcttgcggtgtagctcttgaaagaaagaanaagagttttttttcctttctcccttnttttttctttttttttctctagctttcacatcaatgttgttcatggttttaacgttgaatgtgtgtgctgatatacgataataatagaatcatagttggaaaaaaaaagaagctatatattagtcgagaaagatataagattgttactatataatattatatagtgctgtattttagttaactttaattatttggtggtgcatgcatgaggaaacatgga

SEQ ID NO: 38950 - DNA, 476 bp, Oryza sativa
  unsure (1)..(476): unsure at all n locations
gtgaccttcaaactcaagcttgcggtatttgtgatgtccagttatgtatccataactttattgttttctaaaaagtattctggctgctatggatgtttgaaccagttctagattacctgttctttccttcacacctagtgtttccatgaacatattccatatgattaattataaatcaaaaccaaacaaagtatttactgaaatcttcacaaaagatatactgagttgtggaacacagtaactgcatcctcgctgtttcctttgctgtgcaatttctgcctatcagtgttcatcctgaaagattatattacgttctcctttaattaattaattttgatttatttctgtatttttttccttcagaactaattcttgatttcttagcattaactcctatnttatatttattggctagcttctccttgtcaatattgaaactgttgtactcactatatgtntctgtttcagtgtcctaa

SEQ ID NO: 38951 - DNA, 466 bp, Oryza sativa
  unsure (1)..(466): unsure at all n locations
agcttgttcatcttataagacattatatatatattcattcatccaaatggctttcgaaccatgtaagaataaattgagattgatgaacaaaataaagaatttagtagaagtttctaaatgagtcaaaatagtgggccatttaagtggcttaataaaattaagcccgactctaatggaaatttcaaacaattcaagtgaggtggataactgcatgaaaattaaaggtaggaatttcattcaccagtactctatactaatgacattttattgtcaagcaatgcatattgctgttagaaactaaagataatttttcatgaaattntggtctgaaggagtactgggcttatataagtaagtcatcccttgatatanattaaagaaataatctaagataattcagttaaagttagtcaagctgannataaattataaagataatcatttatgattcagctgacagaagctt

SEQ ID NO: 38952 - DNA, 460 bp, Oryza sativa
  unsure (1)..(460): unsure at all n locations
tggatgactatctatctcggtgtaataaaaattttatttatcttagatctgntgattcttcttatgatgctaattatccacaatctgagatttctcgccactttttgaatggtcttgacatgtctatctgggagatgaaagttacatctattcaggagtctgttaacatgtctactttgactttggattcgctttacacacaattgaagactcatgagatgaatattcttgctcgtaaagttaattctaagtccagtgctttggtttcttccttgacttctttggatgttggtgcttcttcatcaaagtcttctgttcttgctttatttaatgccatgtccgatgatcaactcgaacagttcgaggaggaggacttggttntgttatctaaccaaatttctcgagctatgaaaaatgttaggaacagganaagaggagaaccgacatcgtgctttgagtg

SEQ ID NO: 38953 - DNA, 453 bp, Oryza sativa
atggacttgtccatattggaggggattaaatgcttgacgagcactgcgatactgatccagtgtggtttccagaaatgtttaaggattggtagtggccaaatttcttgtaaatttatttcaaccctaaattcgggttttatgcaatttaatggaaatacttcataatgatcaatcattcaggttaagatcgatctaaaccaatccattttttctatatacatacgacatgccaacggttaaacaacttattagaaacgcaagacagccaatacgaaatgctagaaaatcggccgcgcttaagggatgtcctcagcgtcgaggaacatgtgctagggtgtatgtgcgactcgttcggatcatgggttcaaacaaataagacaatttttgaagtatccatgatcggtaccaatgaataggatagagcttctctatcctagatttctacggtatatg

SEQ ID NO: 38954 - DNA, 456 bp, Oryza sativa
  unsure (1)..(456): unsure at all n locations
agcttgtgaaatgaatcgtaagaaacatgacataaataagtgccattnttatcaagggatacctgatatattcttggacttcatcgcaattccgcagaatataaatatgagcttgttctgattcaagcatatcaagatctcgagttttacgagaaccaatgggccttccagcacaggagaagattgataaattaaatttgttaccaatagatgtgtcatgtattcttcctggacgattgtgttttgtctcgacatcatccaagtacctagagcttaatgtcataaactcatctgcaatgtatccctcagcaattgaaccctctgggcgagccatattctgaactagtgattntaggcagtgaatttgtctctcaaataaatacatccatcgatagatgggtggtccaccaattagagcttctctagccaaatgaacaggcaaatgcatcatgacat

SEQ ID NO: 38955 - DNA, 450 bp, Oryza sativa
  unsure (1)..(450): unsure at all n locations
tcacaatttcaccggttggccctgcacaaccatattcttatgattntagttngntacacatccagcagtaaaagaacaagatgctgaaattacctgctatgaatgaattcccgaagaatgttatagtgctttcaccatgctcagtctcaacggtttcccttcctatcctgttagaagcaacaaggggaacctgcatgattggtatggatccagaatgatcagaaactaccgaaggatcgtaaataaaaataggtatatatttgatttctcaataaagctgagtagctgataaaacataaggtataacaaaacaaatagcagtaccaggttagcaccagcatgtccttgcatgacgcgctttcagtgttctcgggaatctaggttattatcctggggctcagaaccaattgcagttggatagaacaaaatttcagccccctgaagcaccat

SEQ ID NO: 38956 - DNA, 460 bp, Oryza sativa
agcttgccacactgctatgctcgagcatacctacgatccttcgccaagccgcaataggcttgtcttgcaaggtgctataatgcttttgcaagagaagaaagaagataaaagagcatgctgataataaagtaactacagttttaacgaaatgctaatataagtaacggagataactttcggttgtactgatactaaaaacgaagacatttgatgctttgaaaccaagagctacatgagagtaggtctaggtgatatcaagccagcgggatttcctaccttacccttcttcacccatatctagtggctcacgctgtcatgttggccatatcctcttcacatttctaacctctgcggtgtcatcttcaacttcagggcctctttgtttgtcttctccaccatctctgttgctgaatccaacatcgacctcgcgtttctgtcttattctcatgaccccgaattc

SEQ ID NO: 38957 - DNA, 443 bp, Oryza sativa
  unsure (1)..(443): unsure at all n locations
tcagtattctggtatatactccaagtccaacccttatattcttcttttcctttnncatttttttgtatgtacggatcagctgatttagtgttttattgttaacttacaagccaacttaagtttaaagttttgcatggggccacggaattttcggggatggtcctggtccccttgacaccgtttgtccccgtcatcatcaccgcaggtcatcgccgntgttgatccctgcttcgatgatgctctattgcattgccactgactttacgcggngtgcagctgctagcactttcctctggcatgccaaaggccatgtctcgccggctgtgttctattctaacatggagagatgtgctcaaggatggatctagatctatggcagctatggctcaagccatatgtctntaaaagttctagactccatatacatttctaanatctgtatg

SEQ ID NO: 38958 - DNA, 464 bp, Oryza sativa
  unsure (1)..(464): unsure at all n locations
agcttcttcttgaacactcacttgcaccccacaggtttacacccatagggtcgctctgtcacctcccaagtcccgttagcgataatggaatccatttcactacggacagcctccttccagtagtctacatcaggagatgcatatgcttctgaaattgacttaggagtgtcatccacgaggtacacagtgaaatcatcaccaaaagacttagccgtcctttgtctcttactccttcgaggagcttcactgacatcctcctcagagacaagttcatgtgtatgttcagtttgttctggtggtgtgattgaactgggaattatttcagatggttggttcgaaccactatgtgtatccttcattgggaaaaagctctcaaagaagatagcatcacgagactccataattgtaccaacatgcatgtccggtacctcggatttaactattaanaatctataggcaatgct

SEQ ID NO: 38959 - DNA, 422 bp, Oryza sativa
tgagctgaattataagaggctctattgtactatattgtatactataataggaagagagtagagtagaagaagtcggaagaattccggagttgtcggtaatcttctcctattttttttattctgtttattactctgaattcaatataatattcttcttgagtaatttagatttatcttgtgagaattatctcttggttagttcctaaatatgcatacgggattattgttcactataatcaactaaaatatagtgattgctttggtgagttataaacactaaagtagatattaattgcttagacgtggtgtttaggtaattgttatccagtaattgctgcgtatcccacagtacgtttgaggtaggtgtagaggtggtaacagcccttgcaatcgcttaagtcctccctgtccgggtacgtagt

SEQ ID NO: 38960 - DNA, 461 bp, Oryza sativa
  unsure (1)..(461): unsure at all n locations
agcttgagcctccacggcctccttgtgtgttaacaatggcctgcagcaattgggtttgtgcagccataaccccagccaaggtggtcatatcggcctctggtgggttctcatttgcacggcgccgcccagccatctgttgaagcatgctatgtaagtaaatatttaactatctctaccctttttattatattcgttaatgtgatctttgtatagcaagcatggtgaaacaaactcatgaacaacataacatatcattactaatatcataacatgccacatagttccacaatcattacacagacaaatgatgcactggactgcacatatacgcagttcaacaggatacaacacgcaagctaacatcgaaccaatgacatactactcttcaactgatagccatctatgaggagaggngggtgtctcgctgtccaaaagccaaccaaagcgagatcgaagtcaca

SEQ ID NO: 38961 - DNA, 254 bp, Oryza sativa
gccgtaccagcgccaccgaccttcaagactatgcctaacaagacactctgcgaggtcgctgctccctctactgacaatgtggccattgggccgcaggtcaacatatgagatgtggatttcgacttgaagtccaacctcatcacgatggcgcaagctatcccgctctgtggcaagcctaatgaggatgccaatgctcatctgccacagttcctggagatctgtagcacgtacaccatatatggcgtcagtcccga

SEQ ID NO: 38962 - DNA, 224 bp, Oryza sativa
  unsure (1)..(224): unsure at all n locations
agcttcgcgcgctcagccctatggtccaactggcatngtctcacagcctctgtccgaacgctagcggtgactattgggagcataaccaccnccatgggcttgcataccagcgtgtctctctagtcgaattcttgggcggggggaagcgctcatggaggtttgaggactcgcgacttctctgatccctggtcactggggatgatagtcatgtagggcgcgtcgct

SEQ ID NO: 38963 - DNA, 447 bp, Oryza sativa
  unsure (1)..(447): unsure at all n locations
ntnttatattaaagaaaatctgcccggtttattatatgtattttaattatactatatagtatggggtggcagctaggacgcgtataaaatacgagtagctaggtttcgcatgaaggctttttcattcgatcatatccaagagtattgggttcgtttagtactagtataggctgtgtttgatacttggggttgggaacccaactccaccgcacggaaaacggagcggtccattagcgtgtgattaattaagtattagttaattttttttaaaaatggattaatttgttcttttaaagtaactctcgtatagaaactttttgcaaaaaaacacaccatttaacagtttgaaaagcgtgcacgcggaaaacgatggaaaggggttgggaaacttgtggaaagaacgcaaccgttttggcccccatttggagcactgtacgtacgtaattg

SEQ ID NO: 38964 - DNA, 219 bp, Oryza sativa
agcttcatagcatgatgcgctgtgctgtatgatgttctgagactaacagccctaaaccatgcatctattcgatcacgtttagctgatgctcctctcataacgctactggtgtgcttatcagcgagcgacagcacttgcgtacttttcaccctgcctgagagagataacatcttgctgtcactacgtcggtgttatgctgctcacagtgagtcacagaac

SEQ ID NO: 38965 - DNA, 428 bp, Oryza sativa
tccgatagaactacgagaccacttgcaaggcgagctgtgtgttatcacagaatgcctcgtagctgacactagcgggcatctgctatcacgcagaactgaaagggcttatctatatacgaccgctctattaacctgcggaaattaaacaagattatcaccgctccttcactggtcaaccgagtgcacgtctagaccctgcatatcatatctggctctattaatccacactctacatataatgctggatcctgtacggacgctcttggctctagttgtctcgcctgtcgactgtggagaaagactgcaaagactgtaacttgtaatctatccaacggcgtgatatacttcagatcgtgttcgttctagtcggactctgagtatctgattgcgagagtgatcgatgtattactgaggctgattctgataga

SEQ ID NO: 38966 - DNA, 379 bp, Oryza sativa
  unsure (1)..(379): unsure at all n locations
agcttataaaaaatcatcagtgcaaagatcgtgcataaccgagcaaaaatgctgtacagtacagaacatatattntgatcattctacgggcaacacgtgtgacctgaccagtgtatatcttactagctatcttccattcttcctcaatactgtataatggaagagaagaacatgacagttcatgtgtgtagtcaattagcgctccaggccaccaactagagcgacagccggcgtccaagaacggcgtcgtcatccaaaaagtggtcgagatcatcgtcgaaggggccaaagaaatcgttcatatccatctccaccggcgcccagaggtcgttctcgtcgtccgccatggagcacgtagtgtcggcgctgtcctccgtct

SEQ ID NO: 38967 - DNA, 495 bp, Oryza sativa
  unsure (1)..(495): unsure at all n locations
cgtgaccttagaaactcaagctgatcctanagacaccgttgccacgaggaggcatgccatacagtggcggagccaggattttaaagttgggtattcccgtctaagcgttaagctgttgcccgcccctgcccctcgcggtcgacggccacccaaccgacctgaccgccttagcttggcggagtgtcgggcgccgcccgccgtggcaatggcctccccctgcacggtagcacggtccagctcccgccgccgattgccgtctcgctgcgccgccacctaaggtttgcaaatggggagtggcgcgagggagccgagccatggtgggatgggtcatggagggagagcgagagggggctgtctggaagagtggtggctaagtgggtcaactgatgtctgatgggtcatgacggagtgggtcgggttggttggaggcatcgcaagagaccaattangctgtgtttggataaaagagttgaggatttacgtgtacaaatatga

SEQ ID NO: 38968 - DNA, 461 bp, Oryza sativa
  unsure (1)..(461): unsure at all n locations
agcttggagaagatgtcttaggtggagtcctggcttataccccagttgagcgcctgtgaagatggagccgtangcccgctagtccgctgctgtttatttttgattgtcaagcctgaagcgcctttgtaataatgtaaatattatcgatataataaagatgtgtcttttatatcatgtttgtgtggggtaccccggcttttcctgggacggngattaatacactagcgttcgggaaaaggcaattttcccggtcgcgacaagctggtatcagagccatctcgactgtaggataagccaagtggataaaacctaaggacatattttataaatgaaactatttgcgaaagctcctctntntctccttcccctaatgctatttgcaaaaggtgtactcttttcttccttcaaatntcaactagtactagatggtcagctttgcgaagaagaagatgtcgtcagtt

SEQ ID NO: 38969 - DNA, 458 bp, Oryza sativa
  unsure (1)..(458): unsure at all n locations
ntactgtttgacaccttntaagatgcattgtaccaactcctatatagtttagtaactgcggtataaaaggattttaaggtattgggcacttgatcacgcgcactttggcctaagcaaaaagtgcctaagtccctaaaagaacgtgacaggccacacctgaaaatatgggctgcagacatattaggcctaggccaaaaaatatgccttcgacaccctttaaaggatgacgcatgtaacatgctcccgagtnataaatcttctgggtaatatagaccaagtgtagctcatatgaatagcttctgatctgaatgattatccttatgggatactccaaaataaatataataattgaatcccgactggcgcaagtattcagttgatagcccttacggggaataataatnggtccagtcttcgagcatagaaaatagactcatgactatgaatccatgtggaat

SEQ ID NO: 38970 - DNA, 464 bp, Oryza sativa
  unsure (1)..(464): unsure at all n locations
agctntgttgagcctaanacccaaagaagctattaaaaactttcagtcctcgcaaactaagtagaagaaccaaacaaggcaatgataaaccaagtaagcaaactgaattgataaaaaatcacactccattattatgatgatagcccccgactgacaacttcaaggagaaaacttgatgtttgacagtcaaaatagggaaatacaatgataaagttaagcgtagaaacgacgaagatgttcaatgttccaagaattgtcgacgagagtgccgtcttcgcgcttaagtcgatatgaacctggccgggtaacttcagagataataaatggcccttcccatagaggagataacttgtgccgatctcgtgtggtttgaattntccgtaaaaccaggtcgccgactagaaaggcacgagatcgaacattgcgaatatgataacgtcgcaacccttgtaagtaccgagctg

SEQ ID NO: 38971 - DNA, 455 bp, Oryza sativa
  unsure (1)..(455): unsure at all n locations
ngcatgacttgagaacaattgatgtctntgtggtattctttgcaatcaaagcttcaagttttttgacaatgccctgtaacgtcctgttttctttcaacgctaattgttcctcacaggaatctacagctgtcaagttctgaggatggttgcatatcttttggagcagctgtttaaatgtaaacatgaaatatctcaatattatgaaaaaagatacaatccatctctaaggaaattactcgactagtgctacagaccatcaaggaccataagatcatgagagagcaccatacataacttaaaaaaggacgattaaagagaaatttcagaagtaccattgttgcaacaaatgttgatcccttcactgtcttatcaatcaaattgctcttcataaatgtttcatataattatatctgcgtacacaagaaaagaggaataaataatgctaataactgaat

SEQ ID NO: 38972 - DNA, 423 bp, Oryza sativa
  unsure (1)..(423): unsure at all n locations
agctntgcagcgtgaagaggagctacgtgcttcataacgacagcaacagaggctcaactttctcctatgccatactgagctctatagacactttatgccaaacaaggctggtgaatcagcaccatcagaggacgcatctgtccctgaagaggaagacgcagaacctagagaacctgaatgaaagagagaggccttgagagctgcgcaacacgctgtctcccaacagaataggatgacaaatgcgctcgatagagaaactgggaggcttcatcaatcatctgactctggcattccaactgatgattcagctcgtatggaccctaacaagatagatctattacacccgtacgttccgctccactggattggacgtccttgttcagaagtgagcatggtatatagaatgatcggactactgacact

SEQ ID NO: 38973 - DNA, 370 bp, Oryza sativa
ttgcttaccgcttccttcctatagagagtgtgaggagatgaatatgcctattcaatggatcttgcagcatcatccagaagagatactatgtagtcatctacggcagactgtgcattgctttgtctcttactctttcgagttgctacagtggtatacttcttaggatttttctcaggcgactgatcaatatgttcttcggcacaacgagctcaggggattaactaagcccttgactataagagctctgcgcctttttcattagacgatcatacgcagacaatgaggcatttctggactcagtaattgtgccatcacgcatgtccggtcatccacaacctactatgtagaagctatatcccacactgtggat

SEQ ID NO: 38974 - DNA, 467 bp, Oryza sativa
  unsure (1)..(467): unsure at all n locations
agcttcttccattctgtctgatgaaatgattgggtgccatcataaacctcgaccttgctgctattcacttcaatgtcctaaacaaaagcaaaaaaaactaatttacacttgccaaacaatttaccaaaacaatattgtacatatcgatcgagtgcaaacggtttaaaatgtatcaaatcagtcaatattgcaacattctgttcggtactaacaaaaagaagtaaacagtacatgcccccaataacctaccatacaagcatcccagaactggcatttgcaggtaaccaggtaatgatgccaaaaaaaatcgggacagcacanagtagcaagaacgcaccatcaacacaatgtggaaccaagcatagacacaaaaatgaatgcaaagttattgcggttataaacatccatttgagatcacaatcaataggtcgcctatgaaaataaagaaagtaacatgtatgtacagt

SEQ ID NO: 38975 - DNA, 467 bp, Oryza sativa
  unsure (1)..(467): unsure at all n locations
tggaggtttgtatggagtaacattacatgagaatatgatattcangtacaaaattntcatcagaaatattgcttccctaaaacaaatgctactacatgaaatgtgataaatccatggaatcgtgacactgtcatcgagaaatgtgttgatgttcatcatgattgagctgcaccacatcttgggtcagcatactgcctcatttaagttccatgagaatctcacacaaatagcctttggcatcttcaaattcatgtcaggtagggcaatgcatcacactagcttcctaaatccatcctctatagaagaaccgtgggaacattaggatcattcccactgccttcagcagatttcttcttgcctcgcttcttgagcttctttctaaatctgaattgttctttcatattcttctcccatactttcttatngcttgtgtaatgaacattgctgcacgagcatcctcaatctat

SEQ ID NO: 38976 - DNA, 442 bp, Oryza sativa
agcttgttcatagcacctggttgaataacaaaatgacactacatcctctggcttgatcctttcatgtcttagacaggaaatggcatggttacaaggaatcccagtgagctgccacctcctacaatcacatctctttacattaagttcaacaatgtattgagatcctctatcgctaacctgaaatactcccatcccagtaggcaaaacatagcatgtattagccatctctgtatttttctcgaccttctgttttatttttgggcagatgccacatggccaattcctttctagttctttttgcttggtgtacatcctgttcataatctgatttctaattctctcgagcatagacaaaataggcatctccctggcatcaagaatgtacttgttaaacacttctgagttattgttgagaaggatatcacacttcggaaagtcaccg

SEQ ID NO: 38977 - DNA, 442 bp, Oryza sativa
tgtcacgtggcctgaagattctccttctcaagagatgcatcgcgcaagaactaggttgtttcttgatgataaacaagatcaacattctgaggaccagagggacaaagcttgatcaagggcgaagagagtcgttcagtttcatgaagatacaataggttcagaagaaacgaacgaagatacaaacatcacctcctcaaacagctcatgcttgggatgaggctttcttttgctcgaatttagggtgtttccataattttcataaggatcatccctgaattggaagggaatttccggaggatgaatttcttcttcctccggctccagtgcctagaatgaggattcggcagttgagtcggattccgaccccatgtgcagaggttcctcatggataatcttgacctccgggacggcttcgcttcggtagaaaggaggggatgataac

SEQ ID NO: 38978 - DNA, 458 bp, Oryza sativa
  unsure (1)..(458): unsure at all n locations
agcttccttgacttcagctggagcctcaaccttaaccggaggcctaatcgctggcaatggaaccacccccttaccgattgacactggttcgttccgaggctggagttgtacatccttaatctgaacagggatcgcaggtgacagcgcttccttcggtggctgggattgtacatcctttatctgaacagggatcacaggtgaaagggatcccttaagaagctggttttgtgcatccttcacctgaacaggcatcacaggtgaccgggtttcctttatttgttggtgttgcacatcctttatctgaacaggcatcataggtttcggcccttggactgctgaaggagtaaaaagaggaggagctggcctgatgcgaaccggggaagccattcgaattggcggcgggtggctcatgagaggaggaagctgttgtgtccgcgcacctgngggtgggagaggtg

SEQ ID NO: 38979 - DNA, 454 bp, Oryza sativa
  unsure (1)..(454): unsure at all n locations
ngagcaaagctcanacttagtagcagaaactggctttgttatcatatcagctgggttatcatgagtacttatcttgcataccttgacatcaccttcaacaatcacacctcgaataatgtgatatctcacatcaatgtgctttgttctctcatggaacatctgatcttttgtaaggcatattgcactttgactatcacaaaatatattaatgcaagacgtaactccacaaagctcagtgtacaaacctctaagccaaatagcttctttacaagcttcagaaatagccatatactctgcttcagtagtagataaggcaaccgttgcttgcaaacttgccttccaactaacatcacattctcctatagtgaanacataacctgtgagcgatcttcgcctatccaaatctccagcaaaatctgaatccacataaccaacaaatccatctctagatctc

SEQ ID NO: 38980 - DNA, 442 bp, Oryza sativa
  unsure (1)..(442): unsure at all n locations
agctnggataatgcagaatgttgtctggtggcctgatataaacatctgtacagatgggagtttgtttgtttgatcgtttatcaatggcgaggcttgcatttatatctcatatatagaaatactgtgtagtttcaaaatattctattataataaaacttatgtactaattggaactaacctttagctctaatatatcactttataaaatcattttgttgcatctgacctagtaacaaaaaaacaaaaaaaaaatcgaagtgagcgcaactagccgctaggttctttgtggtagaatttgcccacccaagctaagtcatagacttggcatgtatgctagtatttacggctaattattacagtatttcagtggtagacaacatacatgtgtggatagtatggcgctcgtaatgacttcattaattntaagatatgtcggtctggt

SEQ ID NO: 38981 - DNA, 424 bp, Oryza sativa
  unsure (1)..(424): unsure at all n locations
ggtccgacaagttatgctagtcatgttgtattgatgatcatcattctgtaagcgccattgtaacacgctggttaaactctctgggtgctagatgccagcggtatgttatgatttattgtatcattgattcttgcaggcatttgagaggctgatagagaaaataaagggatggaagcgcatgcaggagcacccaatatcaataatcaggctttgaaatgtttggttttctgcaattcctgaagagtgttgtttctaaatgtactatcccatctcactgactgaacatgcgccttttttcatctcatgacagggggaagattcttgagttcttcagcagntatgatacaacggatgacagtgagaaaacaccttgagccttcattccttccatctgatccactttccttgatctgacatgctttct

SEQ ID NO: 38982 - DNA, 461 bp, Oryza sativa
  unsure (1)..(461): unsure at all n locations
agcntttgcttgcttggaggagaaaagagattttctctaaggaaatgcctaactacacagacgaatcaaacccaaaaagtagcaaacttacgctactttctgacgaacacatccattctcccaaggtggatcaacaactataaggttgtaaccttgattgtaattatctggagaaaatgagcaccatcataaaaattaaggaaccaagtacattggctaataaaattagtaaattaccagaagaacaggtatatgcaaatacatactaggttgttttttgtgatatgttactgcataccaggaattagaccacggacatgtttgaggtcagtctttaacgtatcatcaagatcatgcaaaaaacatttcgagatcaaggacaaatattatacttctatgaaaaaactgtaccgcggaagaataatagttactaaccatcaagaaacaacatcgtcttggta

SEQ ID NO: 38983 - DNA, 435 bp, Oryza sativa
tgcctgcggcctcattgctacataaggtgtcacgagttattgttaggagatccgaactgccagtgaactatcagatatagacgtctcctataaggtactcactgagtcaacatctatagatatatagagtctgtcttctctctgcaaaccctgctgttgataccaacagcatcacctctatgatcacaggtagagacatgttactagtcgaaaagcttctacctcttccaagatcaatagtggagcgcactaatgaatcacgactcttctaatccctgacaaatgcaacgttctctgtgatctctgaacacagaactgcgccactttcatgatgctgccgacttctaatcttccgactccatacaattgggtctgaatagcgaatacctattcgtacactggctgaacaatgtactaagactgtgagacttactg

SEQ ID NO: 38984 - DNA, 253 bp, Oryza sativa
agcttctctggtgcatcaaagttatggtttccataacaatatgatctcctgacatccatataccattttctagagtaagacataaactattgtgaataacataactattgtttgccatgagatgctatgctaagcttcataagtgacataacagtgtactattagatgtaaatatgcaatggtaaaaaagtgaaaacactgtaaagtgttggttcatgcagtaaaataaatattccctccatccctaaatatt

SEQ ID NO: 38985 - DNA, 419 bp, Oryza sativa
  unsure (1)..(419): unsure at all n locations
agcttgctgtagagtctgttctcatttgtctgtcatacantttgatctatcaagggtgaagttaaaaggactgtcccgagggaggaaatgtcgtcgaaagatggtcctaaaacgagaaaaatctttgttggtggtattccaccatctcttactgaaggtagccagcagaactaagttgtttcctttntacaagcaaaaatatatttgtattctagaaaacaatggcttgaatactctaaataatgttatgtcttgataaatatgattgtcatgaaacttccagataaattgaaggagcatttctcttcatatgggaaggtagttgagcatcagataatgcttgaccatggcactgggcggtcacgaggctttggctttgtcacatttgaaaatgaggacgctgttgaaagggttatgtc

SEQ ID NO: 38986 - DNA, 432 bp, Oryza sativa
  unsure (1)..(432): unsure at all n locations
tctcgggttcttggtctctgcccgaggtatcttgccatccccgagaagattcgagctattgagcggatgcgcccccccagcaaacttatggatgtgcaatgcgtcgccggttgcatggccgccctaagtcgtttcatatcaaggctgggagagaaggcgctacccttgtttaagctcctcaagcgctcggggccgtttacttggacggaggaagctgaaaatgcccttgcccagttgaaggcgtatctcagctctcctccagttctagtcgccccggagccaaatgagtccctgctactttacttagcggcgaccccccaagtagttagtgcagcgttagttgtggagcgcgatgaggataatcctcattctgcgcacccncactctgtgccgacttggcccgggagcacgcatggatgagaggcccccgag

SEQ ID NO: 38987 - DNA, 434 bp, Oryza sativa
agcttggaggtctcccgacgtggctgatccccacgggctgggtgatccgggttagtaatgtcgtgtgggtaaagtgtaccccctctgcagaggttaacaatctgttcgaacagccgagcccacggtcatgggcggatgtgaggtgattcctagcgtagttttggttgacaaccgcttgtgaaattgctgttgtggaaaggggttcgatgtttgaaaaatctgcagctgaagggatcagctaggcccgggtggccgtttgaaaagttgttggcccgggtggctgtttgaaaggttgttggcccgggtggccgtttgaaaagctattggccgggtgccaaccttgtttcatttctaaagactgatacattgcacatactccgaccggacgagacgcactgtctcatccgtgtcgtttgagaagcactcacttagtc

SEQ ID NO: 38988 - DNA, 475 bp, Oryza sativa
  unsure (1)..(475): unsure at all n locations
gggcctagatggttggtcgcacaagtgaggtagaggggaatgggtgacacggcttancactgggagaagataggcacggagccacataggatggccagcaatgtgcagagagtcctggcgagcagcatctcggactggatagttgatgcctagagatagaagaggcaacgacaaggaagttcaacgggtcggatttggtcggcggtgatgaaggatggacggcgacggtggccaatctcatcggcttgccattgtggctgcacgagaaggaggaagtgatattttgagtatttcagttgggatttgaatttaaatggcatatttgaactcaaaaaatagggaggtgtcaaggaagtgcatcaaattangaattttatatggatttgtattcggtacttgatggattatttgagagggattcaaaatagagggaacaaaatatgaatcttggaagttggagttcanagtgggaaat

SEQ ID NO: 38989 - DNA, 463 bp, Oryza sativa
  unsure (1)..(463): unsure at all n locations
agcttgaaagagaaagtcttcctaggatatgatatataaatcaagggaattgttgctcactgtgcccaaaatcttaatacaatgatacacaaagcttatgtgtattcgcgaaaaatgtgcccaaaatctaaccaaccaactgctaaccttgctaggcaaggtaggctaaggaaccaaacatggttgctaattgctattgctttctgatcaaacattctgttcgatgattttctcctgtagactttattacaagatccttttagttacacttttgtgatgcatcatgcatgcttacagttacttatatctgcaattntttagtatgtctactaatggctgatttcttcaattatgaattccctgctctgctgctggtacataaaactgatgctagcatcttatgtcggatgacntattttcagaacaagtttagacattgaacttannnagtaaactatagcag

SEQ ID NO: 38990 - DNA, 468 bp, Oryza sativa
tcagtgcctacccgcaggcatatgtgaccagtgttggtgagtatctcctaactttaccccagcagttggagccacttgcagaaggtatctcaagcggtgaggctggcaacgaggaggctcagttctttgctactgaatggatatttaaggtaatatattcaaagcattttttttcatcatgctgtgtacattcgcaacataccatcgacaaaaccattcatacttcacactgcgactttcgcaaattccgtacagaagagttgaccatttagaactacatgcattgcaactgaatacaacattacataaaaccccaataatctgaccacaacataaacaccgaacccaaatcttttgatgaattaatctagaactgtctctgatctctgtttccatgatgaaccaggtcgcggaaggcgccaccgcgctgttcatggagcagctgcgagggatccattacatcaccga

SEQ ID NO: 38991 - DNA, 436 bp, Oryza sativa
  unsure (1)..(436): unsure at all n locations
agcttcttaaacttgtgagggtatttaaggtgtgttctccatgaggggttccaaccggaacaggttacacggtaaacggagcgggccattaacgcgtgattaataaagattagctantttcttctaagatggattaatttgatatttttttcaagcaactttcgtataaaaactttttacaagaaaacgcaccatttagcaatttaaaaagcgtgcgcgcggaacacgagaggtggatgtgaaagggtgtgccgaacacagccttaatctaatgatcagacaaatcatattctaatttggagaaagcatgccaatcaattatactgattattcaatacatagcaatatttccgtttgaaatctaatgacaagttgaacatgatatgcacgtgatatttatgtcacgtgtcatatgccatactaaggtaaacctcta

SEQ ID NO: 38992 - DNA, 470 bp, Oryza sativa
  unsure (1)..(470): unsure at all n locations
gaccttgaaactcagcttaggacaatgtttggtctccgtactaatattgtcatgttctatatatcgtgtcacatatagcacgttatcaacaaatacacttttgcaagcaacctcatcatacgtgtctatccgattatttgttgctaccttcttatttaccgctaagaagtgggcttggaattagcaaatttcttatttaccgttaacacactcgctaaagtactggagtagatattatgttacatgcagaaactttatatataaaatctttttaagaaatataatcaaatcgatccagttattcgtatgctaataatccgtcccgttttcttttgctagaaaaaggctctgtctcatcatctttttcaaacgcagccgaaatctgtctcctctggatcctagccaaaacagtgaacacagagtgagctccatgcctncactggccattcttttccatgattaccaactac

SEQ ID NO: 38993 - DNA, 428 bp, Oryza sativa
  unsure (1)..(428): unsure at all n locations
agcttggacctgcacaggagttaagcagatctcccaggcctcgtgtttttgcattaacaaatacccaatgaagatcatagcgtggaactgccgggggttggggaacggcccgacggttcgtggccttctgaatcttcagaaggaggatgaccccgatattctatttttgtctaacacaaagatggatacgaataaactccaatgttttcggtggaaattgggaatgccgaatctggtggtgaaggattgccaggggaagagtggtggtttggcagtcttttggaaaaaggaaataaatttgcggctacgaacagtgtctcgactgttcatggatgtggatgtgatggaagatgatggtttctggtggaggttacggnggtgtatggtgaaccgaggtcagacaaaaaggatctcacgtggaaaagctc

SEQ ID NO: 38994 - DNA, 459 bp, Oryza sativa
  unsure (1)..(459): unsure at all n locations
ntnttgtatgttcaatcatctgtcgacctgtttgataaatacatcagttttatgcaatacaacatttctcttgttagctaactgtacaatgaatttattgattccagaattgatgctcaccatagctggtcacacttgaagaaatttctaaacaaggtaattgaccaacagtcgctccagtaaaaccatagacagagtttgcgcttatctgaaacataaaccatccaacaatatcatgattcaatgagtgcacatttgtgtatcactgagttgagggaattggagataaaaaagctatgtaaatacttttagggcaagctgacgaccatcaagaacggccctttcaaatggatcctttgcttcctgaacaagtaattggtgaatttagcataggatgtaaatgtagcctaaagtgcagaggatntttatgtgcaattggctcactacaacagcagggga

SEQ ID NO: 38995 - DNA, 459 bp, Oryza sativa
agcttctggaggcctgcctcagagatgacattgtacaagtaatcgccatctggtcacaacaaaatgtatcaggtgatctatatgcatatgggttccaaaataaattgacagaaagttgcaagaaagaccttacgataattcatgcagcaaagatagcattcaaccaacatctcactgaccaacaagcaaaagatggtgtctaaaaaaccaaccatcgaatcactaacaagtaaccaggacgttgtgctatcaatacagatctaatcatacctatatttcatatagagctccattgacattgtaagcagaggtgaagtgcaatggtacttacacacacaaattcacatgaggcgtcatttttacctgaacaaatcatgagaacaagaatgaaacccatcaaccctacaagctacgaattgaaatccccaacccagcaacatcggcaccgaatctagctac

SEQ ID NO: 38996 - DNA, 461 bp, Oryza sativa
  unsure (1)..(461): unsure at all n locations
ngagctntctgaagttccatcgactaactgcagaggccatcttgttcaatcttgtatcatcatttagaatatggcttgatagtttagaattataccattttccttttttacatgagatcgatatgctcctcctctgccatcttggtaaaaattcttcttgtacgtgtacaaagattttaccatcttggtcagcggttcgttttaagcttatgccagagtcatcttgtttgttttggtttctgtgataccaatacatgtgggcgcaagatatactgaacttttctgatcagaattcagagctaacagctacgcagacagaattcagacttcagggtgacacttaaaaaaaagaggacttttacggtacattatactgcaagtatatactagcagtatatttatgggtataataggaatntgtcaaatacctaaaaagtgcttattagtcatttgaagttgag

SEQ ID NO: 38997 - DNA, 381 bp, Oryza sativa
agcttgtagaacaattcatatatgatataatgtggcctaaatagcctattcagatagcttaactgctaatatgcaaaatcatttgattgatgatgcccagtagattcatagcatcattcagacttagagaactcacatcatccttgtgctttcgcttgctcttctccttctccttggaatgcttctcctttgaatccctctctgtcaaaatcacacacacacacacactgaattactgacatacatcaaagctaatatagcaggtacgagtgtatcctcagcataatttgcacacttccagaatagttgagcatgatttcaagtaagaacaatataactgttttagaacaagaaatcaacaagtgccactgccaagccgtg

SEQ ID NO: 38998 - DNA, 460 bp, Oryza sativa
  unsure (1)..(460): unsure at all n locations
taatttctcttttggtgtgcttattccaggattttgtttcagatagaacttataccagaacttctgcggcttaattatgtccactcaagccttctctagtgccatccccatcggtggcagatcactcatgttaggagagcaaggccaaggctgctgcagctgcaacttggcctccatggctgaaacaagatgaactgacttgaatcgattntggtagtatgaatgctggggttttggcttgcatggaaataggttttacatttcttgctaccttgcagatttgcatatcttgtttttggatgctagggagttagaaagatatatgtgcatatttttgttgtgatattttaaaatgaattgtatatctctgttactctaatttatatttatgggagtcttggcatntatgactntagacacattgcatcaccatgcataagacatagatatngccatcttg

SEQ ID NO: 38999 - DNA, 424 bp, Oryza sativa
agcttgctcctgaaagttacaagcaagttatcggtaacacaagcaacagctcggagactgttgctgcagggtccattgatgaagttttacagagtatggatcagaaccttttccgcactcttcccaagctttgccccaaaccacggatgcttgtatgtgctccatcaaacgccgccacagatgagctgcttgctcgcgttcttgatcgtggttttatagatggtgaaatgaaggtctatcgtcctgatgttgcccgtgttggagttgattcacaatctcgtgctgctcaagctgtttcagttgagcgaaggactgaccagcttttaatgaagggccgtgatgaagtgattgggtggctgcaacagctaaaatgccgtgagcagcaattatcacaggagatagcccttctacaaagggaacttac

SEQ ID NO: 39000 - DNA, 461 bp, Oryza sativa
  unsure (1)..(461): unsure at all n locations
taacatgcaaagatgctacaccatcatccactaacaagatgttccatcatcatacactaattaacaagatgccacatcatcatccactaacaatcatcacatttaaatatcatgcaaacatgctatatctttatagtttttataatttaagagcttttcaaatacaaacatgttaaattatcatccagcataattcatataatgtttcaatgcatatatttattatgttttatgatattctatggtccaaattatatttctcattttttcctctaattcagttggttttagcctttagatgattaatctacggtccaaactatctccctacttttcttcttccataaagtcataccaccttactttntacgtttgaatcatcattntacatactatntaaatntatattatcataaaccacattaatttacttaatctgatgttatctaactatcttacac

SEQ ID NO: 39001 - DNA, 462 bp, Oryza sativa
agcttaccggcctttcgaaacaacttctataaactacagctatttttctcgagggaagccttgaaagaccaaccgtgtgtaactgccagcatctctactatatagcgggtatgaatgaaaaaaaaagaaggctcaccggccaaagatataaaaaaattgtactaggattgttaatccggagaatgctctcacccctaaccggtcttcttgaatccaaggcgccaggttcgcgtaatccaggagacagccccgcaccattttgcccagttgatcgtttgtttaagccccactcccttacctatgttcagttgttcacacacaacacaccatacacccccaacacaatgtacaacagtctaacacacccataccagcataccgccgtttgaccagcacaagtggtactccaggacaccggtgctcccactcgtcggacgcaacgcatgcgaaacagggcagtaa

SEQ ID NO: 39002 - DNA, 448 bp, Oryza sativa
  unsure (1)..(448): unsure at all n locations
actcagcttactttgctaaagaggaaaaaagctttttttcttattaagttngagnaaaagactgagtcttcatggcttgaagatttacaaagatgtgcacatgctnttcagacaacactacagtcgataagctcagcccaggaaaattagctatttgttcatcaggatctaaagtagcggcctcaataataacatacccccatgaggtatttttgttggtcctatgtttttcgtaataccttttcttttgagtactaaatggttttctgttgaatacatgtgtctcctgctacagatacctgaatagacacattgatctcttctgaagttgacactntatttctttcaatttggtcacatgttttggtatctatattttggattggtgaaatgttggttaaaatgggaaagtgagttgggttgttgctaaaatacgaaagcaaggaat

SEQ ID NO: 39003 - DNA, 456 bp, Oryza sativa
taacgatgatgatcacacacacataagtacaagaatagctgggactatgtaagttttctttttgatttccataccccctttccccccaaatttaatttcgatcgtgtcccaagtctcattgatctacaataggaagtctttaaatgacatgacagttagaacttagataaaaatgaacattgcgacctttatgtatggcttatggaaactctgagggtagctaatatagtaaaaaaccgaaataaaatgtaggatcctacaaggcacgtagttgcacaaaaacagtaacaaatagatgccaccatatgtagactaacaattcaaaggaattaatgttcttactactgaaatcaatttccatatgaacaactattgatggagattacttcttctcttcatgccccttccaaataatgtcattcaactacagagcagatatttgactcaatcattttg

SEQ ID NO: 39004 - DNA, 459 bp, Oryza sativa
  unsure (1)..(459): unsure at all n locations
agcttcttcttgaacacccacttgcaccccacaggtttacatccatagggtcgctctgtcacctcccaagtccagttagcgataatggaatccatttcactacggacagcctccttccagtagtctgcatcaggagatgcctatgcttctgaaattgacttaggagtgtcatccacgaggtacacagtgaaatcatcaccaaaggatttagccgtcctttgtctcttactccttcgaagagcttcactgacatcctcctcagtgacatgttcatgtgtatgttcagtttgttatggtggtgtgattgaactgggaattatttcagagggttggctcgaaccactatgtgtatcttcattgngaaaaagctctcgaaaaaggtagcatcacgagactccataattgtaccaacatgcatgtcaggtacctcgaantaactattaaaatctatggcaatgt

SEQ ID NO: 39005 - DNA, 435 bp, Oryza sativa
tgttggcttatgcttccaacaaaatttagacttttaaacttgttttatagttgattatctatttttcttgtctattttctatatcagaatgatatacatataaaattttacaacaaattgtttttgcttcacttttttcttctacggcttatcgattgtgtagctcaatcaatcagagctgattttaagtttatagtcatggacagagtatttcgttcccatttatgtgctgcatgtttgcgtggcacatacctaggctgtgtgtttagttggatccaaagtttggattttggttgaaattggagatgatgtgactgaaaagttatgtgtgtatgacaggttgatgtgatggaaaaggactgaagtttggatccaaattttggatctaaacacagccctagttagcgtgctttggcgctatttgagaaagacaat

SEQ ID NO: 39006 - DNA, 320 bp, Oryza sativa
  unsure (1)..(320): unsure at all n locations
agcttctagcaacggcaacttctacaaaaatctccagctaccatatgctcctcaaacaggctcataatctactccaatacaacgagattattgcggggatctggggttcgatgacgtctccttgttccaacagcgagctgtgcttaaccattaaaaaaggtttaatcatttgtgcctcgagatcggaggtgtcggggaggacgcgaggtctcccgcanaattctgctgtcgttgcctcgttcgttgggtgggggaggcgcccccgaatcaagcagaggatctatctacacgtcgatcgcgtgccattttgccaacggatg

SEQ ID NO: 39007 - DNA, 407 bp, Oryza sativa
agctgtcttgcatagctataacttaagctcaaacttgttttttgtctttcggagaacagaagaaattatatcacactgactcagtgctaccgctctattcatctgaacttctaccctattggcgggctcatcatctgtgagtaaacagactacttaaatatcagcaaatatgtatcatttatcatttatgacaaattctgtacgatccaatcatgctccacatgcacaagcaaaaccacaaaattcgcaagcaaaccgaaccatcatacttgaatcggtcgagatctgtcagaactgaccacatgccaacttccacaagccacagcacccaattttactgaaacaaccacaaattcacacacacgcatgcacatcgcatattcacaatgcaaaacaactagatctac

SEQ ID NO: 39008 - DNA, 413 bp, Oryza sativa
  unsure (1)..(413): unsure at all n locations
agcttcggacgacaaggccaatccgagtgatcagccgccgactggaaaccagtcggcagcaactgaaactgcaacaacccgagagcccccgactggaaaccagtcggatgtagatctaaatcaagagattcctgaagctgaagcgcagacaacttctcaaggaccaaaagttggtaatgactcagtgattgggtctccagataaagagcaaggatcccctcacgctcagccaggcacatcctcaggtaactcaacttctcaagtgatgccactctgaataactccagcttgttcgtctaatatcttgggaatacatcangtccactaggcggcgacgaagaagaaattctccgcataaaggcagctaatgactctcgtcctcctatcttactcaaatggtgggacgagaactc

SEQ ID NO: 39009 - DNA, 381 bp, Oryza sativa
  unsure (1)..(381): unsure at all n locations
ngcatctatgtaaagtcgatatttgtggtgaggagttatttcagttcctttccaattcattctctttggagcgattggtaatttctgaatgcagtgatatagtccaatttaaggtaccttgcctgatgcaacagctcaagtacctcgaggttacaaaatgtcaaatgctacaagtgatagagatagatgctcccaaactcttcacttttatctatggggatgttggagttaaaatctctcttggagatccactgcatgtcaaggacatacgtctgatgggttacaatgaaaccgacaccgtctgttatgctcgtaccaagcttncatccattttgtcaaatattgaatcacttgtcgtgtcatcttctaatgaggtatgca

SEQ ID NO: 39010 - DNA, 456 bp, Oryza sativa
  unsure (1)..(456): unsure at all n locations
agcttagtaagactaaattaaatctattcatttctattgcgagatcgaggcgaggagagagagctaggtcgttcatggcgacagcgatggtggtggtggccatggcgatggagatcgagagaggggtcatggagtttgagcccactacgacgacgaggacgagctctcgcgcgtgtcagtgactgagtaaggtactgctaagatgggtgagcttttgagagagcgggagcatgctggctcggtggagctgcatgaaaaggcatgcactactgcatctaanaggaatcattccctttcccttttgcctcagatacccctttttcgaaaagggataatttttttaaaanaacacgccttctctctccctctctggtgatcctcggggttcgtgtggaaatgtgctcgatgagatgctgtcatcgcctttgaatatctcggtgagatttgtatttgacg

SEQ ID NO: 39011 - DNA, 342 bp, Oryza sativa
gtggacgatgcccttcttatagagcacggcgacatgttgcttatgcgagatgagctctgccatgaacatgacgtaggtgtagaagagccggtgctcgcgcggtcaccacccatacatctacatgaacactaagttggcgagcagccgggcgtactatagccggctcgtccaagccggcatgtctagcttcccgatcttgaactttacttgtgcaaccggttgtctccgcctgatctagcctaccgaactctgcgagtctttcagggcgggactcctttccgagtagcagtccaagtttggacaggacgcgagacgtcgcttacagatgcgtactgacttacc

SEQ ID NO: 39012 - DNA, 455 bp, Oryza sativa
  unsure (1)..(455): unsure at all n locations
agcttccttccatgctcggactccacgaccagtcttaccttcgcctncacctcctcggcggtcacccacccttccagccatccctccatctccacgccgacgcccatgtcgtccaccatgagcaccttgttgatcctctgctccgcgtacattggccagcagagcatcggcacgcccgcggtgatcccctccagcaccgagttccacccgcagtgcgtcacgaacgcggcggtggcgcggtggcggaggacgctcggctggagcacccatgtgttgacgacgaggccgcggccgctggttcttgccaagaacccctccggtaggagcgcgtcgaggtgttcggtgctgggtgcccgacgaaccacccacaggaagcggtggccggacttgtccaggccggcggcgatctcccgcagctggtgctccgcgtggttcccgccgatgctcccgaagca

SEQ ID NO: 39013 - DNA, 442 bp, Oryza sativa
ggtcggtcgctggtggctagccttttctgtgtattagccaagagggaaaacaaaagagcggcaagacggctggggtcggtgacggactgacggctgcaaggcgacgcgacggcgacggcgactcagcaaaagttcctccatgatcctctcaagaaaagggagaaaagcttgttgatgttgcctgctcggcctcccctttttaaccgtgtggctggatcgtcttctgacttgtaatcaccggcccgtgaacgatcagtggccgagtgtgagtgacactgtttgcgattgctcatatttctctaataagtcaaaataacttattaaaaaatataatttataggtaaaacttttacatatttattcatagcgacttaaaaaattaagaaaacattaaaaatatcttacaattaactttataatcaagttggaaaattcaaatttg

SEQ ID NO: 39014 - DNA, 462 bp, Oryza sativa
  unsure (1)..(462): unsure at all n locations
agcttgacgctacccctacctggcgcgccatctgtcgaaactagatttcggcaataataaaagggggtggctatcaagctaggaaagtgtatgggtttggaaacaaaggaattatacaggttcaggccttcttataaaagaagtaataccctactcctgtccggggatgaatccgccgagtgtattattgattgtatgattcgggaaaaaatcagcatatgcccctagaggcgcccggaccccccttatatatgggaaggagtccggattacaaaagataatctatattcctaacggaatatgaagatacagataaaatacagtcgtaaccgactaagtctctgggtgtttccttgatacacaagttaagaaacaaacccgagatacagataagatattctatctacattangtatcctgtacccagttcgaataccatcgccgtgtagatatgggataccc

SEQ ID NO: 39015 - DNA, 461 bp, Oryza sativa
  unsure (1)..(461): unsure at all n locations
tcacacctcanaagttcaggatatttttctcaagatcaatatgcttccattctcaattcaacatgcaatgcaacacatttcaacagctaaacggagttaggtacactagtgagtgatgtttttattgtatgttcaactctggataaaacgtcttagttgaacacaatgtgttggcagatgcgcattgtatttgagttctatgatctaagatacataggtgcttttgtaattacatccatggtgtgatatttctgaattctgcctctggatgcattcagatggtggcttctgatgcagcgaaaccgatgctgaacccgaacgagatgcagctcagctcctcatcgttatcacccagcatcttcatggtgatggtgtaagagccctgaagaagaagcaagtgtcatcaagcatgaaccgaagtaagatgatcacaaaacacaatttggtattagcagtggtat

SEQ ID NO: 39016 - DNA, 452 bp, Oryza sativa
  unsure (1)..(452): unsure at all n locations
agcttaacatgttctacacctgtctttaaatattacaagctagaattgaccgatggaatatatcttagtataataaatagtaagatatatctaatccaattctagatttaccatattttgaaacgaaggaagggagtagcttgagctatgctggagtaaaatcccaacacgaaactctcactacacgacgccactacgggttcaagccgatcttaagtcagaaacaaagtgaccttgttccaagccgcagtagcgagcatttctttatatttagaatctgtttggattgctacctaaaattttggtagggtaacaaaccaaacacctctattaaaatactacgtatgctacaaatttggttttgcccataaatttgtctcttataggtatanttttggcttcaatccaaataaacattntcaactctattcctaccaaaatttagtagtacc

SEQ ID NO: 39017 - DNA, 485 bp, Oryza sativa
  unsure (1)..(485): unsure at all n locations
tacggacctataaatctaagctttggattagtgngctctaactttatagtaagaggatatgtgtttatgattataaaaattctgattaattgaaaaaaagtaagtaggtgaagaaattaaatggagaatgcttgtaattagttgaaatgatggggcaagggagaaatacacataaatgtgttaggtgtcggttgggaagcccacatagatgtttggatttctcaacctacgcagcccaagaggcattgatatggaggaatcaactgtggcagtttacgaactgacacctttgaaactccacaaatgaaaagacagctcgatgtatcggctcaaaacgagccgatgcatcgagcccctccccattacccaaatcacacatcagaaatccacataccaccatcaatccatcctacaacatccccaaatcacatatgacaaatcaccatggatccatccaacaacaacatccccgcacaaatcataca

SEQ ID NO: 39018 - DNA, 468 bp, Oryza sativa
  unsure (1)..(468): unsure at all n locations
actcaagcnttggagaagatgtcttaggtggagtcctagcttataccccagttgagcgctctgtgaagatggagccgtaggcccgctagtccgctgctgtttatttttgattgtcaggccttaagtgcctttgtaataatgtaaatattatcgatataataaagatgtgtcttttatatcatgtttgtgtggtgtaccccggcttttcctgggacggngattaatacactagcgttcgggaaaaggcaattttcccggtcgcgacaagctggtatcagagccatctcgactgtaggataagccaagtggataaaacctaaggacatattttataaataaaactatttgcgaaagttcctttttctccttcccctaatgctattngcagaatgtttactcccttcttccttcttcggatttcaactagtactagatggtcagctntgcgaagaagaagatgtcgtcaat

SEQ ID NO: 39019 - DNA, 460 bp, Oryza sativa
  unsure (1)..(460): unsure at all n locations
agctntcctggtgtttatctcctgccgagctagttactcttatcttctaataattttaccattgaatgtgaattcacctagatcttataattccctaatgatgatggttgaacaattgctgcagttggaatttgtgtatttccaatatcattattcatgaaaatgtcatctgcgatgcctgtcattatggtgtcactgcgtgcttatcgaaacttggttgcataattcaggcaccctgtgtcacagacaaagatatgttcaatgatgggagcgtatatggagacttctgtgtggatgatgctgacctaacatttgagaattatgaagaattattcggtacctctcacgttcaaacagaacaactctntgatgatgctggaattgacagttattntgaaatgaaggatgtgccagcagatgaatctaatgaggtccgtacctttctgcatatagtcttttt

SEQ ID NO: 39020 - DNA, 440 bp, Oryza sativa
  unsure (1)..(440): unsure at all n locations
tgctgaactctcaagaagtgtggaaagaagctattatgtgtttgtagtgtcgaccacgaacaacaaaagattatatttgttttttttcgccgggcaagattatatttgtcggagcaaacgttttcaaattcaccagaccagaccaccacaacattagtaagaaatactccacttcaacaattttagcagatacggcgtactccttacatcttgaaccagcgccatctgaaagcaccacctcaggggcaatgcacgccatgactccaacctcaaaaaccaatgctagctgaataaaattgcggaagagcgcttacttacgttcatcgttgggaagggggggggcgggttcatattcatactcaagcatgcacattgcaaattcacattgcataactcgtagatctaactctatcttaagganggtactggcaagctgatgt

SEQ ID NO: 39021 - DNA, 367 bp, Oryza sativa
  unsure (1)..(367): unsure at all n locations
agcttccaaaccgatgcagatgaatttagatcgtagactagattngcgttctgcctgaatggaggcgctgtgagttggaagagttctaagcacgatacagtggctgattctacaacagaagccgaatagattgtcgcttctgaagcaacaaaggaggctgtttggataaaaaaaatcgtttctcaactaggtgtgatgactagtgcttcaagccctatggacctctatcgcgataattgtggtgccattgcgcaaaccaaggagcctatatcgcatcaaaagtccatacacattntacggcggtatcacctcattcacgagatactgggtacaggagatgtgaagatatgcaaaatacatacagatt

SEQ ID NO: 39022 - DNA, 473 bp, Oryza sativa
ggacctataaaactcagcttgactatagcgtccgtttcctgtgctggcctctcatcttatgccactgattgcatattcggtgcgcaatttcggaccccactggcggatcaatatctcgaccgaatttttcaggttttctcacatctttggcgaagttagtcaccagctattcataaactgttaagatctgtcaaaacttctacaaactgtgctccgacatgtgccgaagatcaccaaatttcgtaaatttcagtcctaccgacatcgccgaaatcgaaagggtaacccctgtctcatgcagaggccgcgtaaatctatagatttacagtcaaagatccaagtctgacatggcactcatatatgtatttgtttaacgatctatgaagagacgatactggcattcctggagataaaacataatattcaggcatagagcttataatccgatcctacacactttagctctgtgtcat

SEQ ID NO: 39023 - DNA, 446 bp, Oryza sativa
agctttggtggctaaatctaaagcctatgtattgcacgagcatttgaaacgagttgtcgagggtttgctgagctggcaaactgatacaaagaattccttcaaagcgaaggtactggctatttgcttttgatactataaagcaatggcatttctggtggtatttatataaacgctcacaaacaatgatatggttgtttttgtcctgtggaacttttactattctaataactagatatattcatatcaactcatatagacaatatatgacatgggagaaactaaaagagtgaaatatgcatgatatatcacattacatgtaaactgctgctgttttcttggagcttgctattcatctcttatcttattgccagataaagtcactgatggaaattctagtgaaaaaatgtggcttggatgctgtgaaggctgtgatgcctgaagaacat

SEQ ID NO: 39024 - DNA, 461 bp, Oryza sativa
actaagcttgtctacaactctgttgctgtacaggatctttattaggagtgtctgcacagaagctggcatgtatgcgattcgcgcccgacggaaaacagtgactgagaaggacttccttgatgctgtaaacaaggtcatcaaagggtatcagaagttcagcgcgactccaaaatacatggtgtataactaaaccgttgttgctcccatttactatggcccatgagattgtctctggctgtctgcaaagattgttgttgtttcttctcggaattgtgcatctttgtggcgaccatgtcatcttgtacaagttctattaaattttataagtagggttccttttgacggttaatgtgtcaacgacaacaatgtgcaaagatttccacgacggttgtggtcgggtggaacggtggagatgaagaattgaaggtgactccacgaacacccttgcctggttccgattg

SEQ ID NO: 39025 - DNA, 437 bp, Oryza sativa
  unsure (1)..(437): unsure at all n locations
agtacaaggcattgcttgtggccaanggtcatacccaaaaggaaggcggngattttttcgacacatactcaccagttgctcgcttgaccacgattcgattactacttgctctggcaacctctcatggtcttctcgtccataagatggacgttaaaacagctttcctaaacggagagctggaggaggagatctatatggatcaaccagacgggtatgtactataaggtcacgagggaatggtgtgtaaactgttgaaatccttgtatggccttaagaaagcacctaagcaatggcatgagaagtttgacaccacacttacatctgctggctttggtgtgagcgaagctgacaaatgtgtgtactatcgctatggtgggggagaggcagtgatcttgtgcttatatgtcgatgacatattgatctttggaaaagcctca

SEQ ID NO: 39026 - DNA, 312 bp, Oryza sativa
tcactaatccaaaggtattgaggtcttttaatctttccatgctataaaaaccctaaattatttcttccattggatgggggcttagataacaaaattaccccaacccattctactttaataacattatattggtagtattggttcacttgagtacaacatgcatatgaaccgattaaatgaaaagggaacatagcattgctgctggggaagttcgaaatccaaaagcaataaaaatcaatggagtacctagtacagcacagaatattacattacgaatttacgattacgggagaagaaaaatcccatcaatcg

SEQ ID NO: 39027 - DNA, 410 bp, Oryza sativa
  unsure (1)..(410): unsure at all n locations
ntaccaaccaaggtgcgcgaggcggagtgggctccgcattcgccttcatggatatcggcaagaagcacaacaccttgttcccgagaaatgcacttcaggaggattccattagccgcgcgccgatagagggtcccttctaccagcacgtagcgtttggaaatgcgatggacgcgttcactcccttcgcggtcctcgggtagagtcttatctgtgaggtatgcttggatctcggcgatccaagcaatcaatctaagggaattgggagcactcccctcgggtcccgaggcctggactccgacgggcctcgggggccggtcaggcgcatccgtctcccctaaggggtcgggtcgcgccgacggctgggcaagcctttcttcaaaggcgcccggtggggtctgggctcgcnagga

SEQ ID NO: 39028 - DNA, 446 bp, Oryza sativa
  unsure (1)..(446): unsure at all n locations
tactcagcttagctgcccaatcgagccttcacaagattattctngcttgtgacagtaattaattaacaagaagagttctcggaatgtttgattatggtgggtatagacgagttgattgagcagcagtctaactgtggcgttcctttgacaggaagacatcgttctaaaatataaatacttttaagatggacataagtattaattaagaaaataggtacaaaggaattaaaataatagtgttattgattaagaatataaaatatatgtagaaattaaataaagaatattgctttgatttcttgataccagaatgaagaacctgttatcgtgctataaataaaattatcttataacagatgtggttagtaggaagaacggtgtgaacgtcaagtcatcgtctcgtgtgcacgtgcgtattaactatgaccgtgtggacgtcatgacgt

SEQ ID NO: 39029 - DNA, 456 bp, Oryza sativa
  unsure (1)..(456): unsure at all n locations
ntccccagccccttntcatcaatggactcctgacgtctacgaaggagtgtggttcgttcgacaaattcctacctctatatctatctctgaggtgtttgggttttgcaaaactccatagatatgcagaagagaaatgctatccccactccgaccaagacagaacttttaccaaaagtttattgtgatctttttgttcaaataacaattaaggtgaagcagggtcaggaacaacgaatctctttatgataaacagatccattttgcaagctcgttattacgggtagttcctacaaagaatcggactaatgacgtatacaatgcttgaattatcgacgtagatgctacatagtgggttctcatccttcagagactacgagtgtaataggagcatccgttgacaaaaggatcaccctaagatgatcatctcatggctattgcgaacgaatcacatcagat

SEQ ID NO: 39030 - DNA, 466 bp, Oryza sativa
  unsure (1)..(466): unsure at all n locations
agcttaactggtagtgtaagttatagatatcaaacataatcttaaatagaagcgttcatgcaatatttagacaccttgcatctttcaaaaaatacattgtcagttagctaaatgtaaaaaatggtttgctgatgcaaacagcaaagacattctgctcaaggcctcaaaatatagtaaaattaaccatacagacacgctcaaactgtcatacaatatgtctataacacagaaaagtgctagaaagatatatatttgcagacagttaattagcattggtaaatggtaattaaaaatgaccataatttctgaattgagaagcccccataaaatttgtatggataacatcatgcaggattgaacgaggaactcatgatcatttaatgtacagaanacctgatgaagttacaacatttcctaaagcagaaggattaagaacctgtatcacagtcaaaactggaattcttgt

SEQ ID NO: 39031 - DNA, 470 bp, Oryza sativa
  unsure (1)..(470): unsure at all n locations
ntgttgggtgcattaactctcttccacctcagctggagtctaatgtggctgaggccatgagtcagctgagctggagaattgtagatgcccttacgaaccaatctacttcagctctttcccagggtttaatatgagggtctaaaacttggaccagaactgacaaatgtgaatacaaaatgacctttcaataaaaaatggtatgtaatatctaagtcacttttctgcaatggaactgacaagactataaagctaaccattttaaagttatattcgcctatgaaaagccaaaaggccatcttgacaacacatttatattggaggacctatgagatgttagaataatatacgttgtataaagtgaaaacagacggtctagatatttagatctctattcacttgatgcataaataagcacatagtatagagagctaccacagtcttatggccaacaatctttcacatacattcct

SEQ ID NO: 39032 - DNA, 439 bp, Oryza sativa
  unsure (1)..(439): unsure at all n locations
agctntanattctcacataataagagtttaactgataaaaggaaaagaaaaatctcacgcgtcaatctatggttgtatctaacgtctgcgattatatacagccgaatgcaaggtaacaccagcgtagattcatatccaattgattgttgcaattttttgaagtattatccaaaaaaaagtaaccatacggagggtatgcaaatagaatgctcaattccctcaaaaaaaaaaaagatggtcatcaaatgttnttgttgaccattctcaagttatttgataatattaacaaacaatttctatgaaatttaacatatatcccatcgcanaacacggagcaccattttttttttatgaaaaatgcattanaccaaacaaagcaagacctccacgtaaacaaatcgaataaatagcaggatttgcgactaagtacgcacctgct

SEQ ID NO: 39033 - DNA, 464 bp, Oryza sativa
taatataatggtaatttgattattgagctagttataataagtttacataaaataagttgttagctgtttgtttctctagaatattagctgtttgttagttattagaatattagctgtttgttagttattagccacccaataatctaaaaaggacacatttagagtggccatagacaaaaaaaaccacatgcatgcaacggcccattttcatgtatcaaacacgaaattaaaatcaaatcattccatttccacatatcaaatatgaaattcaaatgaaatcgtctaaatcaccactgcatcaaatggaagaacagacaaaataaattcatccatgcaaccctcccaagcgtgtccctcaatctatactcaacatgcaaccatgccacatcatcacccactagcaataattacatatttaatctcatgcaatcaagcaatatcatctacaatctatttaattctac

SEQ ID NO: 39034 - DNA, 463 bp, Oryza sativa
  unsure (1)..(463): unsure at all n locations
agctnttctaatatctgtgtggtgttagatatgatacttgctggtatatcatcatgttcgaagcaagatcatgtgtaatacgtataactattcattattagatgtttgcttcacaatactctatatggctaaataaggttagtacttcctccaacttcttattatttgtggactaaggtgagattgtctttatagacaccgtgcaatataaaaattgaccacccacaaatgataataggaattaaacttaagtcttccggtccaaaagcaacactccaagccaacggaatatagtactatgtcaatgtaacacatcaatttatttaacatagatataatagaaaaatagacacatatatcctccattctataaaaaatcaatatgggacggagagagtaattaataacctattggtaggtaagattacgtctaaagcggtactagtaaatatggaaacaaaat

SEQ ID NO: 39035 - DNA, 458 bp, Oryza sativa
  unsure (1)..(458): unsure at all n locations
ngagctacatatggccatgtagtgttatagtggattagtactgatatcctaaataaaacgggccttcaggctctgaaaggattagtgcctctgtctgtggtggttttcatatgcttctagtatcaagcattgttcttaccgttgtctagttcatggataatgccttgcttgatccaagtttgtgctttgaatattccaacaaaataatataacctgtgttttgcatatgatggttttctttcaggtgagatatcagaatgttggatccttgagagttgtttagctttcatcatgattagtgaagaaagttgcacatcaccattgtagtaatgtggcaaaccttgttaacttgtgaaaaanaatganaagagtaattcatttggagtctcatttaaattgtttcggtaacaagagtagctcatgtcatcctcaaccatctcaagccactaaaccagtac

SEQ ID NO: 39036 - DNA, 462 bp, Oryza sativa
  unsure (1)..(462): unsure at all n locations
agcttattgctatgctgggacctactccctgtattttagataaatatcaattggataacgaaaggtagaatgctcaaaaagatgggagagaatggcagtgtcgaacattcttaccagcaaagtggcaccaaggcccttgtaaagccccttgacaccctcgtctctgcagatggcgtaaagagcatgagatatgcccctgtagtaagcagtgttcgtctgcaaacatttgatgaaaaggcttcattattagtgaagattacatattaaaaatgcaaagcttcaatggaaaaaggcctacagttcaataatgcccaaagcagagagcataaatgcaatatgccttctaccctgaacgtgaaactgataaagaagggaatcaacaggggaatttgagttatctatgtccttcacatggaaatagaatgttgttggtctaattgcagggaaactntttcaaatagt

SEQ ID NO: 39037 - DNA, 465 bp, Oryza sativa
  unsure (1)..(465): unsure at all n locations
ntaaggaatngaagtatccccacacgggattcaccattgtagattctataatgagttgcttgacatattgnggcattagaagcaaactgtttactataactttagataatgtcagtaataacaattctacatgtcaagagttgataaagaatcacaagaatgcattgatgtttgagggtcagcatttgcatgttagatgttgtgcccatatcctaaatattttggttcaggatggtatgaaaataattaaacctacaatacacaagctacgtgagttgttgaagcatttagattcttcagtatcaagaatgcaagatttcaattctatggcaaactcgaaaaatcttccttcgaagttgagtttttcttttgatacaccgactagatggaattccacctataaaatgattgtagaaggattaatgtacagatctgtcctggatagctatgcaaatcaacatggtg

SEQ ID NO: 39038 - DNA, 463 bp, Oryza sativa
  unsure (1)..(463): unsure at all n locations
agctcggatactttccttattggtacgttgttactcacttatttgtggncgtataatacaaacattcttgaggatattcatggttaatgacaattaactttgtttcacattaatcttggaagatgctaaaagaaaatcagttctcgattggacgacccggttcatgataatcaaaggtataacgagagggcttctttatttgcaccaagattcaaggttaacgataattcacagggatctcaaagcaagcaacatcttgttggacacaaatatgagtcccaaaatatcagattttgggatggcaaggatctttgaaggaaataagcaacaagaaaatactaccagagtagttgggacatagtaagtaacctgtagaccacctaatgatatatgtnntcattataactaattcanactgcacattacatntgtcttggaatgatctaaacagcggntacatgtc

SEQ ID NO: 39039 - DNA, 487 bp, Oryza sativa
  unsure (1)..(487): unsure at all n locations
acggacctatgatactaagcttgcntaatcctaaatggatctctntagacgacatcccatattttcgtttcctttcatgacaaaacctttcggttgtgccatgtatactttttcctccaaatctccatttagaaatgccgtttttacatccatctgatgtaattccaaatcataatgtgccactagtgccattataatcctgaaggaatctttacaagagactggagaaaatgtctcattgtaatcaatcccttctcgttgcgtgaagccttttgccacaagtcgcgctttaaacttttctatattccctctggagtcatatttggttntgtagacccatttacagcctactgttttggctcctttaggaatatcttctaaatcccaaacatcgtttagtttcattgattccatttcatctttcatggcttccaaccattcagatgagcgagcgcttctcatggcctcttcatatgaggtgggatca

SEQ ID NO: 39040 - DNA, 436 bp, Oryza sativa
agcttatgaaagaggcgcagaaagctcttgttcaatgtacgcatggtctaaatctgagtggaaacatattgcaacaaggtgctatactggctaatgaactcatcaagaaagaggaccaaaaatgtcgttgggagatcctatctgatgtgtgggttcacttgcttgtgcacattgctcccagttctgacgcagcagctcttgccgaggacctcaaatccggtgtcgagttcgtaaccgtcatctgggctttgttttgccactgtggcatcgagaagagcaaattatggcaacagcagaagagtgcaaatttcaggaacagcactcctggaccatctaatcagagcagtgatgtgtctacccatgttcaggacacagtcagctctagtccacctgctgctcgatcttcagaaattcatgtagaggctagtcctacttc

SEQ ID NO: 39041 - DNA, 454 bp, Oryza sativa
  unsure (1)..(454): unsure at all n locations
gttagtaaataacctntgctctctcaagagattgttatttgtttcaactcatcgnttccttgagtttcccattctgccatcttctctggagtctttcattattagaagatgtaatccagagttgttggcacgctggaaaaggaaagatagttctgaatgggacaggatttcactcatccgccatatgagaataggtatgccttgcttttgcatctatccttgtcatcatctcctgcaatctaatggtcacttggtcagtcctagagatgttattcgtatgttactttgtttttccttctagcaaaattataagtttgtttttcacatgttaaccaaaacgatcccctgttagaatctgatttgggctgtatctcctgccaagctgactgtcagttaatctacaggagatgcatactacaatgtcgggacacagcggcaacatatatatctgtga

SEQ ID NO: 39042 - DNA, 458 bp, Oryza sativa
  unsure (1)..(458): unsure at all n locations
agcttgcaccaacatggccatctcgtatcctcgacgtctgcaacctngcaaccaatccttccatgattgacttcgggttacttctttcagttgccattggatgtccgtggccgaacgactccataacagactgacattaacactatagacttgtgggtccaatgagaatgagcatgtcaaccagtaccacacttcgggcattctaagattgtccggatttgggtgatacagtgtgcactaactaaagttgctcaagtcaacacccatttcgttcgacataatttccccgttgccataatatactctaaagtttgccattcctaaacaaataaacaattgcattacgtacgactaananaactaaaaanaactttcagatatcatacacaccaactaaaaaactttcgaaatatatacatttctccccacggtctaacacactaaaaanaaaattcatg

SEQ ID NO: 39043 - DNA, 463 bp, Oryza sativa
  unsure (1)..(463): unsure at all n locations
ngagtggtgtgtgattttgagcttccactacctagtagttaatatgaacgcgcatattttttgtgtatgtttcttcttttatactaaccatggcaggattgcgcaaggagaaacaagatggtcatgctcaacatcgacttcttcatcatcaacgagatatagcgacttcttcaagcattgcatctaaggtacatgataatgatcttgcaagggtagaatctaatttgccagtttttgatggtaaatatgattccgccgcttatgttaattgggagctagcagtagacaaacaatttgatgaatatgatttctctaatgctcaaatgattaaggctgctagtaataagtgtaccggttctgcatccttttggtggtatactgttggcaataagcttgaaacttgngatgaatgcaaaacaatgatgaggaaaaactntgtgtnttcatattataaacgtactct

SEQ ID NO: 39044 - DNA, 462 bp, Oryza sativa
agcttcacatggccgcgatctgcactgtgtatgtgcatgaatgtaccctttgactccatgtaactatatgttttttttaagataatagaataaaatatctcagcatttactcaaacgagttataaccaattattacatagttcacacaatagcaaactcacacaacgagtctagaaccacagaatgaaaattttaaacaagcacgaactaatagacaccaacacaagataaagatcccacaactattgaattctatttgagaacctccagctgcataatcgttggctcaagtttacgacatgcatcattaattaggttaatatcttcttcataccttttgtaattgagcccaacactagagccaatacgttgccctgaaaagtaccttcaataagattttgatggtgatttaccaaaaaccatgttattcctactaagtcaaagagcctaacataaagcgga

SEQ ID NO: 39045 - DNA, 456 bp, Oryza sativa
  unsure (1)..(456): unsure at all n locations
ntccttatagctatttgctatgtgaattntcaatgatgtatccaactttaggttacactcatcatattttacaaagcagtcggtatatcacttggatcatattattcagggattcacaccgcatatgctacatattaatattaagtcgcttggttgactacaattatcgaaaccgctcggtgcatctagtcgatgcacctgactttattttttcagccctccacagtcttctgatttagaaaaagtactcgggagatcatggcgaagatgattgaagcactcggctttggagtaatctagttcgagagaagattatctttctgactgtgaaggtctcangggctactgtggagattatgggtaccccatacccacacggcatggttatccgactagttataggggataacttatatatatgaaatatgtaacagatcatgacttgngtattacgtt

SEQ ID NO: 39046 - DNA, 462 bp, Oryza sativa
tgacgctctacggactaactatacgcacatgctatgttcttcatattatggcctacgctgagcaatactaagtttacattcatattctctgcgcgtaaacgttgacaacagtaagcaaagaaaactatgtattcatagggaaagaaataattagatggcactctagttctctgaatctcatcaaataaattatacaatgaacaaacagaactgcgtaaagggttgcaggaatatcatattgcgaagaacatacgagcgcactgacattatttcattgctcaaaaaagataaagcaaacatgtgtgttatcgccacataaaatgagctgaccttagaaagatcatgatcaaagcctgcgcactccagaatatcattcatacatgggatatccggatgactgctctgtgctaattatatgataagcactaacatgtgttcttgacagtgagacatcatatgata

SEQ ID NO: 39047 - DNA, 451 bp, Oryza sativa
  unsure (1)..(451): unsure at all n locations
agcttgtctacttgatctacgtagcaaatacgctgagattcttggacaactagtgtatgattcctatgacaaagctgtgaatttgcctgtgacaagaagccaagaaattaaccaagaagctcatcaataagcaagatcaatcaaccaccaaatcataacaaaactaattaattatatttcagaatcaaacaagagagatctagctgctacaattgaaccatggaaattaggaaataatatatgtagtatattattagtgaattgaggagagtgtcaagagtgggctaaaattggagccatgtatgcacaccttttccctttntgtgagagagatgtatatatgctatatgtaggagagggaaccatgcaagaactcaagtcatgcatgagaggaanananaagagaaagagaaagatagagatgtaggagaagcatctctagctagcacat

SEQ ID NO: 39048 - DNA, 458 bp, Oryza sativa
  unsure (1)..(458): unsure at all n locations
tgacaatctacggactaaatatacgcagatgctacgtgcttctttatatgtactaaaatgagcaatattaagttagcatccatatcctctgtacgtaaaagttgacaacattaagtaaaaaaaactatgtattcatagggaaataaataattagatggcactctatttctctgaatctcatcaaataaattatacaatgaacaaacagaactgcataaagggttgaaggaatataagaattcaaagaacatacaagccactgacattatttcattgctcaaaaaagataaagcaaaaatgtctgttatcgtcacacaaaataagctgacttcagaggatcatgataaaagtaggcgcattctagaatatcanttattcatgggatttctggatgactgctttgctctaattatatgataagcactagcatgtttctttgaagtgagaataatatgtac

SEQ ID NO: 39049 - DNA, 375 bp, Oryza sativa
agcttcctgcctctccgctctccatgtgcgtgccaccaaatttccctggagaccgatctcagccgtccatcccatgatcggacgccctccatcccatgcccaccatccttatattattctccgctcctctccaccaccccttctcttcccttccctccccccccaaatccatccgcttccaccccccagcccccgaattccatcgcagatcagatcaggtgagctctcccgcccctcccttctccggcgatccatccgccgcccgatgattctactggatccgccgtttctccgcgttcgatttcgttggttgatgcgtgggggcgaagatccggcgccatttgtttcgagatttgatcctggtttctaggcgtt

SEQ ID NO: 39050 - DNA, 471 bp, Oryza sativa
cctgcattcggaccttcaaactagcttacacttggatcttaaacttattattttttctcccagcgatggaaatattaagctcttgtggtcgagccattaaaattatgcacaagtgctagcggacaaattcaaactaatagcctgatttctgagattgcattcaaagtaaattaaaacacacgagtagtcggagagtcggtacaagcatatctacgtgttttggtggcacttatttttctgattttgtagatttatatcagcatgtgaaccaagaaattatctaactcaaattcacacatggaggtgtgcaattcaagtgccaaatttcttagttggttaacagagaatagcattcgtgaatcatgataggctgaagccttgaagggatggaacacatggagcaacgcaagaaacaagactcaagtattaatatcacttctgtaataactcgttagtccacagaattaatct

SEQ ID NO: 39051 - DNA, 455 bp, Oryza sativa
  unsure (1)..(455): unsure at all n locations
agcttctgttgcgacggtgaacaccagtcttgatggtattgtgtggcgtcttgatgagatggcccgagcatcccaccatggtagtgagatggatgaccatgactacgttggtgattctgaggatgatgcggaccagcgacgacatcgcttcaatcgccgtggtgtggctcatcgtcggccacgccgtgaggtacgaaataatgatgattcatttggtaagattaaattcactattcctgcttttgatggtaagtatgaccctgatgcctatctttcatgggagttagtagtagatcaaaagtttgcttgccatgatgttcctgaggataagagggttagggctgccaccagtgaatttactgattntgcttctgtttggtggtgtgaataccgtcgtactcatataaatgctntgccacctacttgngatgatttgaaacanattatgcgtgcta

SEQ ID NO: 39052 - DNA, 447 bp, Oryza sativa
  unsure (1)..(447): unsure at all n locations
tctggttangagacaatggtaggtggtgttgtatctgtttgtaaggaggcacaggagtccgtgaaggaggtatggtgggaggacctctccaccgttagcttggagaaaggggaggtggatgatgatgatgaagctatcaagggaccaatctgtggtggtgaataatgtggggcggatttctggtcatctaacttgtgccctctcgtgtgatactcgatgattgcatgattatagtaatgtgttagatttgggagtaacgctaattcaacagtcttatatttgcctaaaatttgcctaattctcaggagttgtttctatctaatgtcaaataaacagtcctcgttatttaactaacacgttataaatggtcacaatacgatattaatccatttttatatattgatcattaccataaatttgatacaattgataacttgatttactgtt

SEQ ID NO: 39053 - DNA, 339 bp, Oryza sativa
  unsure (1)..(339): unsure at all n locations
ctgcagctgaccaaagaactgcatgctgcgctttcattattttttcgacgccggtcactacgctgttgtcgagcgacgcccacgggaccagaccttcctttcccctagcttncagcaacacaacaaccatagatgttcatttggctaagttgtcatgacagaagaacagagagggagggagagagtgagagagatgggatgaaactagtggataggaatgaatagattaccgttcatcgactaaaacatatctgagccatcggattgaatcggaggcctggatgaccaggatgtgtgtgggtgtgggcatctgattattgcctacataagatgcccggg

SEQ ID NO: 39054 - DNA, 470 bp, Oryza sativa
  unsure (1)..(470): unsure at all n locations
cttcatattttctactacatggctcgagatcacgagaaatattactgcatgcacaagcacatggtcacaacctgcttgagctacgccgtacaaattattcaaagttatatggaggtccctctgttctctatgtctatgtctctgtctttgtcattgtccccgagttattgatgttcttttttgttgatagtttcttcttcctctttggtttcatcacgtggtagatctcaaacatgaggtgggagagccctgttcttcgatgaatcccgagcatctcccgctcatggctttcccgatcatcgttgctgaaattcttggtaggaaggggcacgacctgagccgtagatagtgaggcgttcatggaggagcccaaggatgcgaaaacgacggagtggacactatgggaggatggcgtgctgctcccactgagcangaggaggacaagccacttggccgtggtgaggttattg

SEQ ID NO: 39055 - DNA, 464 bp, Oryza sativa
  unsure (1)..(464): unsure at all n locations
agctnggagcccttgccatggtggtggtgatggccgtcatggtggtcggacgacgcctgcctcacccacttctccgcatcctcccacttggaaggcaccgacctcctcgcggagacgagctggtgatgtgcagggctcgaggaattgaagaacagcaatggccgccctggagtagctggcacctgctgctgctgctgctcggctcgcctcctctgagctgaggccgaggaggaagaggatgaagaggccgtggaggtctcgcggtggtagccatggccgccattgccggtggcgccgttgctgctggtgctcctcgccatggtagccatggggaaggatgacctcacgaactctgaggtctccttgaggttgaggctgcagagtgggtcactgaatgtgggtccgaatgggttcatgcctcctactcctcctccagcttcagctaccactccttggaatgagtc

SEQ ID NO: 39056 - DNA, 467 bp, Oryza sativa
  unsure (1)..(467): unsure at all n locations
tgcccatgggctcanacgcatgttcaacgcaggtccgcccaatgtacatttcgcagccagtggaagcacaacatgcattcacagctctgtcttgttaggaacatttcttaacggcccagggacttactcctccgcgcaacaactcagagctagacacgaaggctgagctcggtgttacacgcatgcattctagaggctgctttctcgcccaaaaaaccctccacaaagaaaaaccctagcttccctccaccgccgcaccacgatgttcaagcgttgattcattccgctgccttggccgcgatcatgtggctagggaatgccgtgacccccttgttcacgccgcctgccactgctccggccatcgccagaactcttgacgctcctctgcagcctctaacactccactacccaccccaccaaccgttgccgctgctactcgtcccaccttcaccacccgctgggtcaag

SEQ ID NO: 39057 - DNA, 461 bp, Oryza sativa
agcttgacgtgtatcatgtcaacacctatgtatgccaactgtatatctcattctcctctacttatcacaaaacatgaaatcttgctagtaggtttcctccccccgtacattcataggaatatatgttttcacacataataatttccattaagtaaggttgcagttgttaatgatcttatccgttctttgagttgtggaaagatgtgctgacagatctaatgatatgcagcaactcccacatcatccggtccggccgatcccatctcaactttggtgcaaaaactgtggcaagagagagtattgaaggatgtctgaacttgcaaggaggacttctgttttatcttgttatgcataatatgtttcagcgatcaatgcttgaagaagtatgctcctacgagtatgcacttgatgcttcatgtaactcctgctacttatataatgtcatacaaagagttcgcctg

SEQ ID NO: 39058 - DNA, 467 bp, Oryza sativa
  unsure (1)..(467): unsure at all n locations
tcttcgcctaacatgttgatctcagccgtttaacgactgatccattggttggtcggngagacatcacgtttaccggagtatccgatactatcatgtaaattaaagagcaagtgatccctctgttccatatttttccctatttaaattttattaagcttgatcgagttttaaaaaaaatttagcaatatctaaaatatcaaattaattntattaaacctaacattaaatgtgtttgtttttttattaaaaacactattatatttttctataaacttgataaaatgaaagaaatttagttagaaaaaagtcaaacgacttataatataaaatagatgaagtaaaaaaaataagggagacgaagatacaacaattcatcaattcaaaacacgaagatcgattgttgaacagatatatgcgtaggcaagaaactgcaatccaatcgtccagcattcacgattgtatgtatt

SEQ ID NO: 39059 - DNA, 464 bp, Oryza sativa
  unsure (1)..(464): unsure at all n locations
agcttctgccaggcactntgtcaggtattgactattataatatatggctatgtacgtaactgaaaaacttccagacaggataagtgctgatcttactgtgaatgcagttagggatggtccatcctgatcgcctaaactctgaagaaattaaagatctgtggagtgaagctgaccatgacggngatgatattgttgactacaaagaatttcaggtaattccttgtgtaatattttgctggagattctgccttgaactgaacaataatatggtgcccataattagataagaaaggaggtcaacaagatctaaggacaggtggaacataggaaatgtaaatcaattaataactcataggagtatatgctgcgcaactaanacaggaagtcaaccattaataataagatcgataaaggccagatgaagatagtcatggttatatccgagctagttgtgtcctcatcag

SEQ ID NO: 39060 - DNA, 458 bp, Oryza sativa
tcgttgcgctccatgcccgccgtccaagacagaacgcagtgccctatcgccggacgcagctccggctcgcccgtccagaactcctccatgtactcatggggcctggctgtgcagatctgaaagccggccatctccttgacgctcgctgaagcctggtcggatttgggacgacgagacgcgccgggttcagctgtcgaggtttcctcctgccgccgagcctgaggcaccgcacggcggggttcttgtcggcgcgccggcagacgcctgccctccacctgcgctctcccctgaacgctctctttcggtgcgccccgcacctcgccttcctccctctcaccacgctcacccttctcagcacaggagctagcaagatggcccgtgtaccagcagcgaaagcaacggatttgacccgtgcagtgagccttctggtgccccaagccgagacacttgaagcagcg

SEQ ID NO: 39061 - DNA, 466 bp, Oryza sativa
  unsure (1)..(466): unsure at all n locations
agcttagccggtgcttctcagagctaagccaaatcgcgtgccaaatccaagaaaggcacgggaggaagaggaagaagaaggaggggaagaagagcagtcagggcagggggatcagtggcaggctgacacgccaatgggggcagcttcttgttcttcttcttcggcgaagcatctgttcctgctctgcctcctcctcggcttctgcttcgcgttcgcggcgagccagcaggagcagcagcagtcggactcgtgcagtagcgccggcgtcgcggtcgctcatctcgtccccttcaactcctccgccttccgctgcctgaccgtctggaagcaggaggacttcgtcctgcgggtatgtantgctgctgaatttgcagtcctatcaattcttggagttntactgcatactgtaccaattntcatctcggtgaattgtttagttagatgccattgccaatgcacgcgtgca

SEQ ID NO: 39062 - DNA, 465 bp, Oryza sativa
  unsure (1)..(465): unsure at all n locations
nntaaacatttatatgggattgaggctgcaactacaaaccttntgctctatatatttttctcttaaactttatcctgttgcctgtcatattcatatgtttacatgggattaaagtagccagtgttgatatagatatatgcaaactagactcaaggatgctgaacatgttttttttaacagtaagttaataaatatttaacttacaaataggagtacataggctgctaggactgcctacaaatctgttttcagaataacaaagctaaatttcttttgatgtataagtagatagcatttcctgtgtagcctgcattttgtagaaagctttataaggttccctgaatttagttaacgttagactatcagaaattggggttttctgtacgaaaccctccatctgtttactcatattccatggctnttaattgcactgcttatgctacatcaacagatcgatgtcatttg

SEQ ID NO: 39063 - DNA, 439 bp, Oryza sativa
  unsure (1)..(439): unsure at all n locations
agctcgtagagaacacgcttctgatatcgtctctagaagatgtntctcgtcacgctagctgcagtctggaggagcaactgcaggcgatggagacgctgatatcaatatgcatgaacaaatcacttccaagttaattccaagtgtgccaatgccacttggtgatttaagtggtttgaccatttctaacagcatcacaaatgatgccatgctaccctaagaacataggataacaaacatttctaagagaacaaggtactaacttctaacttctttcaagagttctactaatattctgaagaaacaaagcgcacagtggggcaatgtaccgagcacctggcgagcagggactacgacacctgaagccggagcgcgcttgctcctccttcgtaactcgctcacctggtcggcgaggacaccacattcttttgttcttccaaca

SEQ ID NO: 39064 - DNA, 462 bp, Oryza sativa
tgcactacgttggctgccccacgaacttgaagattttgtttatctactcaagaaagatcagatgcacgtctttgaactgaacaaatggcataaccacaagagaggtgtcgagatgcattctgtctcctagagctagcaattttaccaccacctgctattttcagaagagcacctttaccgtatacatcaggagccacaactgatggaagtggaaagcaatccaaagaaacaaatgtatcgggaacagcaagtatcaagtactgcagtaactcaactaaagcagaggtaatggatgacctttttgggttattcttaacacttaagctgccaggagaagcatcactgagacgttgaatcagtatttccaccagcatgtggatatatgtctgtgagagggttatggtatcaaccaaagaaagtacaatatgcaagagtaattctaaaacctcagttgagtctctc

SEQ ID NO: 39065 - DNA, 184 bp, Oryza sativa
  unsure (1)..(184): unsure at all n locations
agctntcacacgagatgtaccttgttgtaaaatcaaaggtgcttttgattattattctgtgataaacaatgggcattagagattattggttttgatattcggaatttatttgcgaggtggttttggagatgattggatttacaggtgatatacaggtactgctggattgggttcggtcataccc

SEQ ID NO: 39066 - DNA, 352 bp, Oryza sativa
ctccatatgctccatccacactggtaatgctccatggtaattgctgtgatggaaattgtttaatgccagatcaaggaaagtcaatgaccgtattacggggaggcgtaatgggaactctcctgaaaacctgctgtgacttaattgtatgaaatataagtttggcatcctaaaacagttggtaagatctccctcgagaaaattgtatgctaaatcaaatattcttatgtttttgaacttgcaaacagatccaggaacttgaccagtaatgtgattgtggcacataattagtactttaagatctggagcgccaaattttgagggtaaattctgtaaaaactcttgggaaaagggg

SEQ ID NO: 39067 - DNA, 438 bp, Oryza sativa
  unsure (1)..(438): unsure at all n locations
tttgtggagagtgacgtatggatcccgctggaatctgttccacgactattggcaatccaaacattaaatccattgtctgccaaaataaatccaagtgattgctctggagtactcattacccaagtagcaccatcctgtccaaacaacacacttgattcatgtatgatgagagcacagatggcacacgaatggtacaacaatgtccttaccaccataagtccatggaaaagcagtaccggcggcctcatctctatcgaggtgttagagtcatgaggaccatggggaatcctctntaaactaagaatgtagccatcttctgttgtgacctgcaagtcatgcctgatactttatagagatgagttntttcttacagaatctgaccattcaggactaagatgtagtcgtaccttgaattcttcacatggatagccaaaagct

SEQ ID NO: 39068 - DNA, 460 bp, Oryza sativa
  unsure (1)..(460): unsure at all n locations
tattgctgaaattagtctggatctttattgatggaatgtttaaacttgttggcatggtctactacgaatttgtaatgaagactatttagttgcattgttcatatatatatggcttacttaaaagtttaagctaaaacatgactatatcacgcagcaagtcacctgcggccaccaacctctcggggcacgcttccacgacgcagcccggtgcatcttcacgtctgtgcagctgtatgagcgccgtggatgctgcttccggtggcaacagacacactctgaggttagagctagcagagttctgcatgattttctgtcagttcatcagttttagaaatggttttgggtagggttgtgaatagtgtatgtatatggcggtgatgcactgaggtttctcattgattttacttgcaatttgcagacacggacggcgaatntctacatctctgacaggaacactgga

SEQ ID NO: 39069 - DNA, 436 bp, Oryza sativa
agcttctaagtgatctataatgatggccgtctttttctcatgcttgaatatccaaatatgccccacgcggagccgttgaataaatttttttctccttcgcgcattccttttaaggcggaaatattccgagtttgcatcgacttctttgagattggtgatccttgaagcctgccttttgcgagcttcttcaattatagacagccccatgactctgtccttgaggccccgtcttatgttgagctcagcttgactgagttgtcttgactcttgtgctatatctaactgaaggatgacctcgagggccatgtggaggtgcatctttccttgggagatgagatctctgcttcaagctttcactctaccagctgttgcgcccagcttgtggtagagtctgtgatgaacttcatgatatggacggctgacagcccatgcttga

SEQ ID NO: 39070 - DNA, 443 bp, Oryza sativa
  unsure (1)..(443): unsure at all n locations
tgcttacatccacaacccaaacatattcgaagagtgcactatgactctgacagtaatgagcttaatttgctggcagttacctcatattgaatgattacggtatatagttggagcgacactgcagctaaatatatctgggacatttttttacaactttaattagcatgtggttgtaagtggacattgtgtcaaaatttgttggctaaatgggaactgcattgtgtttatctccagattacagaggatatgagtcatccaatttttgtgtactatcaacttgataatttctacccgaatcataggaggtatgacatgattctattcaacgttttcaatcaagaatttgattacttagcctttctaaccaatctggcaacaatgatacctatgactttattgccttatgataacaataacatgcatntgatacctagcatgataac

SEQ ID NO: 39071 - DNA, 363 bp, Oryza sativa
cagcttcaaatcaaaattatgaaagtccacggacttggctctacttgatgtttgcactatgacatgatagagatcaattcctaacttatcacaggacaagatgaataccgcaagaactagagggttataaggagagaatactcacttcatcattctagaattgctgaattggaggaggaggtgaggccatacccgcaaaatgaaaataaaccgtgcaaggaaattcaaaatgagatgaattacctggcacgataaactataccatataaaatcttccaaataaagtactaaacatctcagatcagtagtgccatttgatataagccgatgcgactctaaagaagaattagtctcctccaacct

SEQ ID NO: 39072 - DNA, 452 bp, Oryza sativa
  unsure (1)..(452): unsure at all n locations
tgtgtacatgggatatgttgcccacttgtttagtataaacactatcgtattatacctatctaggattggtaaactctcaaggttgcctgtcaaacacaagagcacatcaggattttatatagcttcaggtcctctcctcgggtcgggagtagtatcctgtctagtcaattgcattgatatatactagaaaatcacgcgcctgttggcgcgcccactaattagcatgtatatgtgtctataaatataatgcattttaacaatattttagattttaggttttgagtgtgtaccaaatagtacatgtagtgtctataagtattttgtttctaaagttttataaaatctcacatctatacgtattccgcaaatattcacttaatatttaaaatataaattgtatataaaagtcttaattgttgatttcttggctaaggtgaatttcanatattact

SEQ ID NO: 39073 - DNA, 146 bp, Oryza sativa
ggagccctcacttacaaggagattttgaagccccaaccatagataaaatgtcaccctaactactcaaccgtcaccggacgccctcggagattttcacagattactgacaaaatcctatcagcaacaaaatataaagctgtggaccc

SEQ ID NO: 39074 - DNA, 452 bp, Oryza sativa
agcttctgtggctctgaggacgttatgttctgcaacaacgactgtggggctgcaggagcttgctcgcattgcactgcgatgagtaccatattatgtgacgatgatggcttagttatgactacttttggccgagataagctgcatcaacttggtggatgtggtgctctatggcaggcacaacatgacgcgatggactcatctaagctacatgattgtgggttgtttgggtggtaaggtgggctagctccgcgcatctctacgaagtttgaagccttgatgcgaagagaagcttgaaactagacttttagtcttttcttttcacctgttgattttctcgcatctcaggtttgagatttggaatgtatacacttgttatactatcattcgactatgtaattctattttggatatagaggacggagttatatccattatttaacagaagaaactca

SEQ ID NO: 39075 - DNA, 434 bp, Oryza sativa
cgaaaacgatcgaaaatattgcttgagtgcatattatgtgcattttataaaactaatgagactaaataattagagcagaaaattttgacataaaatttaaaaataaaacaaatataataaattaaaatatatatttgaaaattttaataggataatggatttattgatcgggagcattcataaaaaaattattgtgagaattggtagtcctatctttgtatgaatgaacgtcattttgttatgacttttttttaaaaaaataaatacatattttttatttcattatctaaaactaaattctgtgacaaataatacatcgctcaacaaacttataactataatagtctcatgcgacaaacttttatatttttaataatgtaattcataaatttctatattcattcaaagagtaaaatggtcatttttatagaaat

SEQ ID NO: 39076 - DNA, 459 bp, Oryza sativa
  unsure (1)..(459): unsure at all n locations
agctnggattacagccgatcatgccagccaccttgagtatcttctatgcataggcgctctggcacaccgtgatcccttcttcagtttgattcacctccaggccgagataatacttcaacagcccgaggtcgctcatctgaaaagtgttcttcatttcctccttgaactgcttgagttcgccggtgttgccacccgtgatgatgagatcgtcaacgtacacgccgaccaccagtcggtccatgcccgtgccccgcatgtacacagcatgttcagaactgctgcggtggaaaccgagcgtcagcaaggacgcgtcgagcttggagtaccaagcccgcggcgcttgtcgaagaccgtagagcgccttgtcgaggcgcaacaccttgtgctcctggccgtcgatgacgaatctccgcggctgcacgacatacacctcctcgaggagcttaccattcaagaacg

SEQ ID NO: 39077 - DNA, 465 bp, Oryza sativa
agacgccgaccgttcattcatagacagaattaacatagattattatggcttgttaacttctatagtactgtcaatacacaaacatttaaccaagattctagtataaaaaattggtggtagatcacacatgttagtattttacatctgaaaaactctgattcatatatcatctgatcctacctatcccgttatgggccaaaagcccataaatgttgaggttaaataaaagcccaactttttcttgaaattaacaagttacggaagtccactgataaaaaacgtaatcaaaatttctgtaaaataatatgttacactaatatcccgttttgacaagtagtggaataacctatattgtcggagatcagatgaaaaactgtaggaactataaaatggccaacgacttttctatatggtcggtgattagcaacactgtccgtaacttgataatcaccaacggtgtttttg

SEQ ID NO: 39078 - DNA, 461 bp, Oryza sativa
agcttctcctaatgtcaggagaattctcccttctctatgtgtctcgaaagctaccacggtggtcctgcctatagccatgggcctatccttgacaccaacatgatggcttggatatcctctttctcctgtaaccacaaaaaccgaaccctctcatcaaggaacacatgatgctccctcgttcttgtgtattcgctcaccacagtcatcaattccatgctcgaggttactccagttctaaatctagaattgacgttctgacaagcgttgtcattctctatgaaaactaatggcaccattgtgttcataactctcgggaactttctccctgcagttcgacatccatctcatttacccttctggccttctccctgttttgacgagtataatcagagacgacgaacacggatgagatggcggttcgggcgatacggtgggagttatcctccgtgctattcggtctg

SEQ ID NO: 39079 - DNA, 434 bp, Oryza sativa
  unsure (1)..(434): unsure at all n locations
ntgttgagcctcaaacccaaagaagccattgtgaactgtctgttctctctaactaagtagaaaaaccaaacaaggcaatgatgaaccaagtaagcaaactgaattgataaaaaatcacactccattattatgatgatagcccccgactgacaacggccagaagagaacttgatgttgacagtcaaaatacggaaatacaatgataaagataatcgtagaaacgacgaagatgttcaatgtgccaagagttgtcaacgagagtgccgtcttcgcgcttgagtcgatatgaacctggccgggtgacttcagagataataaatggccctttccatagaggagataacttgtgccgatctcgtgtggattgaattctacgtaaaaccaggtcgccgactagaaaggcacgagatcgaacattgcgattatgataacgt

SEQ ID NO: 39080 - DNA, 464 bp, Oryza sativa
  unsure (1)..(464): unsure at all n locations
agcttatctnctacgcttcaggaatggatcagctctaacattaccaccggctcgccggcggcgccgncgactggtgtcctcgcctatacggttgggtggtcacaccaccgttgttgggcatcattgtcttcaccgaccggccgcctcgttcgccgccgactggtgtccttgcctatacggttgggtggtcacaccaccgttgttgggcgttattgtcttcactgaccggccgcctcgtccgccgccagctagtgtcttcgcctatacggttggttggttacaccgccgatgttgggcatctacgtcttcaccgaccggccgccttgtccgccgccgactggtgtttccgtctggacggctggcctattatgccgccgatgttgggcgtctacgtcttcaccgaccggccgccttgtccgcccccgactggtgtttccgcctgcacggcangcctattatgccgc

SEQ ID NO: 39081 - DNA, 465 bp, Oryza sativa
  unsure (1)..(465): unsure at all n locations
tattaactntctgtgagtttacagaagaataattaatatctatattaaaaataaatagaataaaacacattataacataacaacctatcagtgccacctctatagtgtctaactgtctattggataaaacatagcgccactacatgtcctctcaaaccatgtgcgctctgcagacaagaactagcactgatggcaccaaaccagtgccaaattctagtgaacaatcgatacttattatggagggataatcggtattggtttgtgtaactagccagcactattatctcactcattagtgctactacattgttattataaccacactaataagtttttggttgtgaaattttaaaacagttgatcccccgagcatttttgcaagactttatggttataaacatcttcagaacttgaaataaaaataccaaacatagacatgcaaaaantaattggattgtgctactc

SEQ ID NO: 39082 - DNA, 495 bp, Oryza sativa
  unsure (1)..(495): unsure at all n locations
tcgtacccgagatcctaagagtcacctgangcatgcaagcttaacattcatactctacaacaatcctgaacaaaaaaaaaactacccatctcaaaataacacagctggtattggcagccacaaagccccatatacaggaaaatagggtctccagcatcacccaagtcagcaccatcatcagcatctgaagtttcctgagctatatcagcaacatgagaatagctaccacaagactgtaaaattgtggatcatctaaccgctgcatttgtgccagaaggttgtgaactaaacttctgggcaatagcattaatgcaagacctgttcctaagttactctccattgacaaagcttttactgtcgtagtacttcttctcactggcttctttcttctcgttccgtttctgcanaagcaacgccacagactanaaatgaacaaaaccacagcacatcaatggaccagaataaataaatgcaaactacaccaagtccccacac

SEQ ID NO: 39083 - DNA, 466 bp, Oryza sativa
  unsure (1)..(466): unsure at all n locations
ttganagtctagtgacacactacacgcgtgacttggtcgatactaataataactgaggtacgcaatcatgcatatatatatatttcttggtttggaactaaaaacaagtggagtactagagacaagcctttagtggcctcatcatctatcgtttagtgattgaagtggtctctttatcactgtacataatggcagcaagcttaagcatatatatactctcgtaaccatggtgcccatgaaagaaaatggcttaaagaaagaatggaagaaaaatggctcctagatggctagccatttcaagcgaacaattgaacatacacaaagccagcacaacaaactttntaaatttcaagttttgtatgcatgacttccatattgtgttggacttatgagtgatcagtgcaacctgctcgtgtggaagcatctntattgaatgttgatccttaatgaagttatgttcaattta

SEQ ID NO: 39084 - DNA, 486 bp, Oryza sativa
ctatatagtcacctgaggcatgcaagcttaacccctatattaataccccttgtaccccctttgcattaatcatgcatctggcggtgtggctcgctgaggactgaggatgaactcatctcttgtcaagatgtttcctcttgagctagagaagctttggagaagaagtcttacgtggtgttctggcttataccccagttgagcgcctgtgaagatggaagccgatgcccgctagtccgctgctgtttatatttgattgtcaagccttaagtgcctttgtaataatgtaaatattatcgatataataaagatgtgccttttgtatcatgtctgttcggtgtaccccggcttttcctgagacggtgattaatacactagcgttcgggaaaaggtaattttctcggtcgcgacaatgtggataccccaagacaacgcacatgccccgcagcttcaaagcgaagccagtctagttcagtccacgacgggtga

SEQ ID NO: 39085 - DNA, 468 bp, Oryza sativa
  unsure (1)..(468): unsure at all n locations
tatactcgctccgtagccaaatgatcatcatataagttttgtatctagactaaggataatttaaatcacatcaatgaagtaaccatatacatattctcccacaatgcatgcatcgattaaaacaccatgtcaattatacattttagcatgcacatgttctctcatgctgcattaattgtattatgatgaaatccgtgtctatgcggttacatgatgatcaatttaagaaattntaaatttcattatatgatgatcaatttgggaacgagggagtagttagcctatactccctctacttttgatagtcatattttcatcttggcacacagaccaaggataagttattctacttatcatccatttaaacatgctactaatcattcctcgtaaacaagcgattcattaatatntacatttcttaatgaccatgtagccaatcttatatggaagaatggagagtcatacatt

SEQ ID NO: 39086 - DNA, 468 bp, Oryza sativa
  unsure (1)..(468): unsure at all n locations
atccttaagtcacctgcggctgcaagcttgacgattttcttgagcttttttctcacanaagcatgcattgggtagttcaggtgtgcacccacacggtgggagagaagagatggttgtagagttagcaagctgtgagttttacgcaaggcagaaacatttgactccctgaggaggtggaagattacattcataggccggttgtccaccactccctggcccagaccacgaccatcgtcctgagttagtctacgatccaacataatctccagccatccattttttaagcttgctgcccctagtgactgcttggagtgtactgaaaaccgattgcccagcgaatcctgtaaaaatgcaagtgatggcattgngtagtaattgccctgcaaagggatcttatcatatgtctgcctcctactcatctganagccatntagatcagaatagaagactccttggttgtcaatatct

SEQ ID NO: 39087 - DNA, 453 bp, Oryza sativa
  unsure (1)..(453): unsure at all n locations
actcagcttacccnacctactcccccttggagcctctttatatatatgtttccgccattacagacttgttcttttaaatgcaatggtctatgatatctaaacgtctatcttgattccttatcattgatttcatttggatgttggagttccacctccaaaggcttgtctcatggacataggttaagcgtagaatttttttagcagagaatttcggtgagacatgcatgatatacaaactaaaaacagagtagatctaaaacaagggatgaaatatatgtgaaaaataaaaaccggtaggaaaaagatgttcacccagacgtactttactttattaaattatatagtgaaaacataatatgaggaacaggatgtccactcaaacttcgctttgtttntattcaggtatcctctccagtcattttttaccacaaagtatagctactctagttggag

SEQ ID NO: 39088 - DNA, 459 bp, Oryza sativa
  unsure (1)..(459): unsure at all n locations
agctngcaagatcaactgtgctgaataagttcaaggatggtgaattcagagttctagttacaaatgagttgtctgccagaggactggacgtgccanaatgtgatcttgtgattaatctggatcttccaacagactctacacactatgcccacagagctggccgaacgggccgtctagggcggaaaggaactgtggtcacaatatgcgaagaaactgaaacatttgttgtaagaaaaatgcgcaagcaattagctgtacccatcaagccatgcgaattcacggaaggcaagttgcttgttcataatgaggaagatgtagaataagctctgcattgtcgaaatgacatttaatgtcttgaagtgttatntgtgtatgggcatttctcatagattgtattatcttaaaatgttatcaaccgatgtttctttgctcgatcaaatattcagataaatgggaata

SEQ ID NO: 39089 - DNA, 454 bp, Oryza sativa
  unsure (1)..(454): unsure at all n locations
ancgcttctgtacttccacatccttgaattgtcttttcatcttttacatttttccccctttctccctgtttgttgcgtcgccttccctcgcgagacaccgcttcgcgcctccgccgccgtcatccgcctcctcctctacccatctccgccgctaccgctgccgccttgcaatctctactcgcctagccgtggccctcccagatatagtcaacacagcaacgagaacatatgcatgggtttttgccgtccatggtaaagaaaggttgtgtttagatccaaagtttggatccaaacttcattcattttccatcacatcaacctgtcatacacacccaacttttcagtcacatcatattcaatttcaaccaaaattcaaactttgcgctgaactaaacacagcctttgtctgcaatgtgcagcagaggaatactcagtgcatggctcctctntttct

SEQ ID NO: 39090 - DNA, 459 bp, Oryza sativa
  unsure (1)..(459): unsure at all n locations
agcttcngtggctcggtggaggtgatgttctgcagcaacgacggtggggctgcaggagcttgttcgcattgcagtgcgatgagtaccatattatgtgacgatgatggcttagtagtgacgacttttggccgagataagctgcagcaacttggtggaggtggtgctctatggcagccacaacatgacgcgatggactcatctaagctacatgattgtgggttgtttgggtggtagggtgggctagctccgcgcatctctacgaagtttgaagccttgatgcgaagagaagcttgaaatttgtcttttagtcttttcttttcagttgttgttttccttgtatctcagttntgagatttggaatgtatacacttgttatactagcatttggctatgtatatctatctttggatatagaggacggatntatatccatctattaaaagaagacattaaccatga

SEQ ID NO: 39091 - DNA, 465 bp, Oryza sativa
  unsure (1)..(465): unsure at all n locations
tcatgcaacacatgatcaacatcaagaaatatttggcctttcaacctctctntaatagaatcaagcaatccatcatatgcaatgttggccaaatctttgtctattattttcaaactaaaacatcggcttttaatatctctaaacctttcaatataatcaacgacagatttattgtatttttgcctaaccgatgttaaatcagacaacctaagctcagttttaccagtgcaaaaatgatcatgaaatttttgttctaattaagcccaagtactaatagaatttgccggacaaagataaagaaaacaagcgtaatttaaaaatatcactattaaccctaccacattgcgctaagaattgatctacatgctctcatgtagtcctactatcctcaccactaaacttggtaaattcaggaattntataatcacgaggatatgggagaatgtcataataatcacgatacgg

SEQ ID NO: 39092 - DNA, 462 bp, Oryza sativa
  unsure (1)..(462): unsure at all n locations
agcttgcagaaggtaatctagtgagcccacacatgatcaaaatgattggttacaccaagagtctggataaacttggctttccccttagccgagagttggctactgatttgattctccagttgctccctcccagctntgagccgttcataatgaatttcaacatgaacaatctgaacaggaccttggcagaattgcatgggatgctaaagactgcggaggaaagcattaagaaaaattccaaccatgtgatggttatgcataagcgcaagcccaacaacaagaagagtggtcaaaagagaaagctaaactctgatgagatcacgagtactagcaactctaagaccaaggttcaaaagacatggcccgctaaggatgcagagtgcttcttttgcaaagagacaggtcattggaaaagatactgtaagaaatacctagagcagctcaagcagaagcagcaggatg

SEQ ID NO: 39093 - DNA, 462 bp, Oryza sativa
  unsure (1)..(462): unsure at all n locations
tgctntcaagcgcaaattagaccatttaaatagcacaatttatatatgctttctacatgaaagttgtaggtattgctctgtagattttcaaaatttatacattttccgtcatagccttttcatatttcgagatataaaggtttgaagcagcagtcttgtgtataatccaagtggtgttccttgttattgagttttgatgggatggggcagtaggttcacctttttattgttttatacgcatgtttgaatgtgtttgctaaggttttgtttgtgattaggtggtggtccatcagctcgtgcatgataccaatccttcgttgaaggcaagtgtatgacgaactaattgtgtgattcatggattgtttactctatctatttatttctgatatatttcaacgtgataagtaactgcttgtattcatattattgttcatgccatttagatttcaagttgatcttatg

SEQ ID NO: 39094 - DNA, 414 bp, Oryza sativa
  unsure (1)..(414): unsure at all n locations
agctttcggaatatgatatttggtgctttcagtgtcttcattgctgttctcaggttagaatatggatctttattttgtaatcacaacttcataagcggtgctttactatcgtatagttggaaaaagggtcaagtctgcttttagcccttgaactctttcttgaagtccatttttcacactgaattcgaaaaccagatgntgtaaactctcacctttcaaaaccaggcaaatagcaccctgggccacattctatagtggtattcattgctatggcagcggcttccagtagtatagacttgtattatgcctgttttggtgacatgacgccacccagttgggtctacctaataggaatttatattagtgaaagccatgtcaatgaaaagcattgtgggggaagttggggagtggtaa

SEQ ID NO: 39095 - DNA, 464 bp, Oryza sativa
  unsure (1)..(464): unsure at all n locations
ctcagcttatataactaggatgtgtctaattagatactatgttgctatatcttgngatgaaggcctttttttcctttctagttaacatgcagatccaaccttgattttcgttagcacatttttaagctgttaaatgatgtgttttgtgtgagaactttttatataaaagttgctctaaaaatatgaaataaatccatttcttaactttaaaataaataaaaccttgttaagcatgtgcttaatagctttctcgttttatacgctcatatttactcaattagattcaaacgcttgaatggagagaaagtatgttgatcggatgataattataaaatcttggggttttaaaagcgctgaatcgtattgggtggggaagagtctagcaagctagcaactgtgcttgtgggaatatatactgaaacaaacactttatatgaaactggattagtattattttcaataca

SEQ ID NO: 39096 - DNA, 425 bp, Oryza sativa
  unsure (1)..(425): unsure at all n locations
agctttaacaatttatggactagttgtggcactggcgcttttatttgcgaacccttntgtttaatcctaaaaaagaaaacgagtcctttagattagatactttcttctttntttagtaaattggtatttgcttctgcaattccaattatatcaatactttactcctaatttattactcctagagttttctatttatggngacagacaataccccaccccaggaatagctgatttgaggatgatcaatttagaggatatgttcgccgtcttgcttcccgccctttgtttagggcagtggaaagtatttttccttttattttaggaattntgggaacatttcaacaaaggaggtctttcacaggtcaaacgagatctaagacttaatctaaaagaaattactaaattgaatctatttctattaaaaa

SEQ ID NO: 39097 - DNA, 446 bp, Oryza sativa
  unsure (1)..(446): unsure at all n locations
tncatanaagctagactaagcaataaagtatcttttattttaccttctgcttctggctggctcgcaataccttctacagcttgtcctgcagcagtaccttgaccaactccaggcccaatttaagcaagacctacggccaatccagcagcaataacggaagcagcagcaattagtggattcatgatgagttcctcgtgtcaaaaaaaagaaatggttaaggatacaatcaaccaagaaattcatatttctaagctctattggacagaagtaactaataagtacaaattgaaacgataatctgaattctccgaactgcttcgagatctcctttttagtttctaatcattagaggtttgggtactcattattctatttctctttctttccaaccaactgatctttcattccatccttctttctttcctcttcgatatacttgagtttct

SEQ ID NO: 39098 - DNA, 433 bp, Oryza sativa
  unsure (1)..(433): unsure at all n locations
agctttgtacctgttccattcctcagaaatggaacgctnttgctagaagatgcatggtcaaatgtgcttgctctggttaattgacctgatggatcaggggaccttttgttagctgatgagctgttggatggggtcttcactggacatctaataaggccttgtctgttcagtatcataacacacgctntagaccttgatggcatcctgaaaagaatcgtttctccagtttctaacttcagattatctccatcctgtcgtcatgtacagtgtgctagctacttccttgattttgatctttatcttcaagccatgggaagtttttaacttcagattatctccatgctgcatcttatatgctgtcgcaagtgtgattggcacaggctgtagaaagaaaatatcatatccgcactggtgctaacagcatattgtccat

SEQ ID NO: 39099 - DNA, 451 bp, Oryza sativa
  unsure (1)..(451): unsure at all n locations
tgggttggttagtggatacttctaaaacagtgatggaatgaaattaatgaccgcacgctttccgtgctccaaaatggtgtgattntcgtaaaacttttccatatataaatttattacaattattttaaattcatttttaaactttataatatttaattgatttgtgtcctcgaataattatcatacaacatttaactattcagtcattcagaaaaaagaccaaaaaataaaattaggtagctgttcacccttctaccaaaagagtactactatacagtgatgaagggaaaatgagaaacaatattggatagtaaatctaacattttatttgtcatccaaggccgtgctacaactctatgttctctacaattatgacctttcggtattttttgagattctctcaacaaaagattgcatccaaaaagctgatcgaaatcaaagaggaaatact

SEQ ID NO: 39100 - DNA, 455 bp, Oryza sativa
  unsure (1)..(455): unsure at all n locations
agcttcctcaacttcatcaaatcggcttgtttagctccaaattctgcaggtaacgtgaaaaccatgttgaccgatgcagtcacaacacttttccccttagccaatctttntgcttaatcggcttcgggttcatcggttacagcagctgggttcttaacacgccactcctgccttggctttgccttttttagccagtggttgatttcttgctcaacctcctgaaagcgttccctgttcctcaacctttgaacccttctcttctgattctttgtgaaaataccagaagaacaccattgagttttcctaccctcatcgtcctctaggtcacggtcttggtttactgggcccaacctttaatgaacaggaacccttgtttgctcagccgattggctctgttgtaatatcggcttgaactttctgcaacattactgcatccaagacaatctttgatcgat

SEQ ID NO: 39101 - DNA, 446 bp, Oryza sativa
  unsure (1)..(446): unsure at all n locations
tcagagctggactatcgcaaaatanactaagaaacttcatatctggagggtgaggttgctgccatgcaaagctgaaatttcatttttgaatatgtcctactgtactattctgttttataatcgtcgcgcttttgtttgtagagtatgcttaattagtcatagaaccagatttacagtataaattcgggaaagcagctgtaagctttgtcatactattgcttattttcaaaaagggtaagtttgtgctttagtgctttagctaaaccacagacttggtagaaaattaaatctcaatttacaattgcatctatggcgtttaactccatcttgagtggactgcttttatgctattatcaacataaaaaatggatccatgaaaggccaaatttctatgtaaactattgagctatctatcctgtctttntttntttcgcattattcatcct

SEQ ID NO: 39102 - DNA, 438 bp, Oryza sativa
  unsure (1)..(438): unsure at all n locations
agcttgccgcanaagccagcttgtgggagaagcaagcttacggtgtaagccaactcacagtggaagccggaagccagcttgtgggatacgcaagcttacagtgtaagccaacttacaacttacagtggaagccatcaacctcctctgcctataaataggatcctaaaggtccaaggtgatattgactgctcttcgacactttctgccttccatcctatagcttgtactcaaattcagaagaaataaagtttctactcactcgtactttcgatattctacagcttctgtgtttgtctgctcgtgtgtttttcggcagaatagaccggtttctcaacgatacttaagccccgtttgttctctccaactggagagagtattccagcacacgcanaacgagaanactcactagcacatgattaattaagtattaactattat

SEQ ID NO: 39103 - DNA, 342 bp, Oryza sativa
ctctatgaaggtgaccaccgaggcaccacggctattagatttgtaaaagagaacctcacgtgcacatgtctgctgcctgagctgcacttagagcctatacaatggatgtgcgagagatagtgctctggcagttcatcgagaggaaagcatgtgatcatcgcctgccgcgtttgcgaaacagcgcatggtagctgctgaggagaatttgctccatgactgaagactctgtctataaatagtagctcttgagcccttttacgtaccgggcacgggcagtggatggctgtttagatgagcggtcgaacttgtgatcacattcctgtttcccaactggccagagat

SEQ ID NO: 39104 - DNA, 443 bp, Oryza sativa
  unsure (1)..(443): unsure at all n locations
agcttgggcagacaaaggcagaaagaaagagtcttctaaaggctttgaacacacgatcttgattgaatccttctttgggtagcaataattttataaaattaatactcatgtgattcatcttattcataatagaatgaatatcatgtacgctatatatctcaatctctcttttgcaagctctacatgcccanttggcataggatgagataaggtggtgacggngtttaaactctagacagaaatccattttacatctctcaactcttaattttgtctataatacatcctcaaacttcaaaaccaagtatttaacatcctctaattactgaaaccgttcaaattaccactagctggttnttacctggttctgggatgccatgttgaacaccacatgtaccttcaaggaggatacgttcaaattacgcataananaagatacgctg

SEQ ID NO: 39105 - DNA, 443 bp, Oryza sativa
  unsure (1)..(443): unsure at all n locations
tcgcattgctgtgaatattaagtctagttctttagttttttcgctgcatatgagttttattttgttatttttgtaagacgtggaactgtataaattgtcatctgtgtactctggttgatgcctggacagaggttaatgcacagatggccggtgatttgggttgtcgaatccctaggcgcgacatcaaagcagttttcattgcatgagaagaacgtattggtggcaaggagatgaagcgggagatacctttggtagcaggatggattttctacctcatcgccgccaatgtccacagctcttggcgccggaattagaaaaggtggtcggtaagccaccttctccgctgttgtccctacctgcatcagatccgcgggcgccgccacctccttgtgcatcacatccaccgccttgcatacctctaatgcctntgccacacccgaacc

SEQ ID NO: 39106 - DNA, 436 bp, Oryza sativa
  unsure (1)..(436): unsure at all n locations
cgacgtggctgatccccactagctgggtgatccgggttagtaatgtcgtgtgggtaaagtgtaccccctctgcagaggttaacaaactgttccaacagccgtgcccacggtcatgggtggatgtgaggtgattcctaacgtagttttggttgactactgcttgtgaaattgctgttgtggaaaggggttcgatgattgaaaaatctgcagctgatgggatcagctaggcccaggtggccgtttgaaagttgttggcccgggtggcccgttgaaaagctgttggccgggtgccaaccttgaatcatttcaaaagactgatacattgcacaaactccgaccggacgagacacactgtctcatccgtgtcgtttgagaagcactcacttagnttgttttagagaagagtttatataagatcaatcgcaaaaacaacagt

SEQ ID NO: 39107 - DNA, 461 bp, Oryza sativa
tccttctgattgctagttgaagcggataatggtcttctgttttgtatcgccctcctgaggttgattgccctttgctcggcctaaagtaggtcggggagagacacaacttcttccatcaacgacaattctttgctgaggctgtcggtgcagagaatggttggtgctgaaggtattattgctatgatttattgcagagtcaggtgcagcacgaggagcattggtgttgtggatgatatcgtcgatgttgctgttggagctgactagctgatgagacaaccgtagagttgttcgttggatttctgcggtcttggtcaacaacacactaagttggcaatccttgggcacatggtttgtaccttcgcacagaaaacatgtgaccttgcgggtgggacactcccctggtggatggtcttcttcacaatgagggcagagtgtgagacacatgctagcaatgtgtccaa

SEQ ID NO: 39108 - DNA, 340 bp, Oryza sativa
  unsure (1)..(340): unsure at all n locations
agcttggctttcgctcaatgtccttgataaggattgaacccctgaaagcggaagtacgcttgaaggtcatcgtgctggtgctgcatcatggtgttgaagtggcgaactgagcatcagcagattgttgccattcttgcgtttgtgctatgtgttccgagaggttgtactggatcntccccatctgcatatcaagggtgtccattctccaagtgatttcacccaagtcccaacgagaggaacttgagcgccattcacttggagatggaggcacatcacttgatctggaaggatggttgtccccccattggatgtcatgaggcgcacgccaccggtcctcact

SEQ ID NO: 39109 - DNA, 477 bp, Oryza sativa
  unsure (1)..(477): unsure at all n locations
actataaaactaagctaacctctgcctacctttactaccagcaattctatacttttagtcatcttttcaatgttgaacttggttgactcatgcattgacaaaataaattcagcgtgtgccttatcatcattatgaaccctctcactagtaggtaaaggcaaaatatcaattgaagcacaagggttgaaaccatacactacctgaaaaggacttaccttggtagtagaatgtattgtccgattgtatgcaaactccacatgaggcaaacattcttcccacatcttcaaatttttctttaaaatagccctcaacatggtacccaaagtngcagtgactacctccgtttgtccatctgtttgtggttgacatgttgtagaaaacaatagctttgtacccaacttgttccatagcgtgcgccagaaatgacttaagaaatttgcatcacgatctgaaacaatagtaaaaggcataccatgc

SEQ ID NO: 39110 - DNA, 457 bp, Oryza sativa
  unsure (1)..(457): unsure at all n locations
agcctgttaaatcatgagtctcacatatctctcttaatanttcaatggctcttgatgagttgtataatatcatatacttatatagtccatcctaactcctaacttagctaaaatgtgctctctctttctcattaaatcatatcacctcaattgtttctagcccttagatgattaatctatgatccaaactatcttcctcaatttcttctctcgtaaagccacatcaacttagggtctgttcagctgcatcaacactgcagcatgtaggaacagtgaagcaagcacaaaaaaaatagcagcggccggccacgactggctacaggcagctgttgtacctgcaagccaaacatgcccttacttttcatttgaatcatcattctacatactatttgaatttgaagtatcataaaccatatcaatttacgtaagtttatagtatctagctatcttacacatt

SEQ ID NO: 39111 - DNA, 442 bp, Oryza sativa
  unsure (1)..(442): unsure at all n locations
aagtactctagctcaggtattctctttctctctcgagaacgagaggaaacctcaaggctgggtgggcatgttcgtcgtctccaaactgatccggacgatccacctgctccgtcgtccggccccagaagctcccgaaccataagagcccctcttgctcgatcagaggcttccacacgccgccgtcgtcgtcgtcgacggcgaagcacctctctttccaccacccctcctcgtcggcgccgccgcctccgttgatcccgccgccgaatgcgcctcggaatagatcgtcgtcgccaaatagctcctccagctgtttcttcacgcctgcagccgggtcgaccgtgctgcagcctctcttggccgccgccgccgccgtcgatgatgatgatcttctcccgtgccatctncggaggatgatcctcttggacttgacgaccaccttctt

SEQ ID NO: 39112 - DNA, 442 bp, Oryza sativa
  unsure (1)..(442): unsure at all n locations
agcttagcaagagtgctgaaatggagaagaagatataacaccttgagcagaaattgcaggtagcttatgccaaatccgaaaaagaaatgatatggaatatctgaatcaacactcgctatctagtcatctagtactatgaaataaaataatcaatcataccatctttttgcaggcaaaagattctgtggaatcgacatcccgcgacttcagccttgactcatcaacgctgccaagcaaacaacgcgacagatcgctggctcctgaaacgacacctccaaacccaacacaacagcaagaactgcgagagccttctggtatcatggcctttaagttcatcctgngagtcgcgctgctgtccgtgctcatcggtgtatntcttgggaagagatacctagcgttatgcctttcagaatgtctactgggaaaccccattgtcaatact

SEQ ID NO: 39113 - DNA, 454 bp, Oryza sativa
  unsure (1)..(454): unsure at all n locations
tacaagaatgcaaatattgtacgactacaaaaaaatgtcttcttgttggcattaatgttccatgccattaaaaattgtttcttatatgtccttttatttgttcaggtgggcatcagataacaattttactggacaaataccagattatattgggagctggaatttgacagacctgtaagattcctattagcccctggtcattcagcagtaatatttttttaacaaatatttaaacaatagggatgatgttacatttttcaattgtttcaaataatatggttatgtgtatacaattttcaataactaccttcaagttaggcactcaggctttaaattgaagagagctgtagatgtgaacatgagatgcattntgaggaataattaactatttgccactcttacaagtgtcaattaaggatttgccactggacccacatgtcatagactgcgagtg

SEQ ID NO: 39114 - DNA, 460 bp, Oryza sativa
  unsure (1)..(460): unsure at all n locations
agcttcaatatgcaatacgaattagctccttgtctttgtcagggttatgcataacatatacccaatagtagttcactaagctcagcggacccagcatatactaagtcttatatgaacttatactctacttgtagtttccgttggactattatgaggttntagtccaacggaaataagaaatactctcncaaacaaatttgcaatatgataatcaaagaaaagatattcaatagtctcatttctaaaaagaacatcttttatttccattccaatttctctgtgctaaattatccttagaattaggagacctttttggagttcaagttcaattaattcaattcttttttggagtttgacagctcanacatattccaggagtcagaatacagcttctatcagcacctatctccggtgtaggtgcttagagaggaatacttatcataagtcactttatcttatt

SEQ ID NO: 39115 - DNA, 461 bp, Oryza sativa
  unsure (1)..(461): unsure at all n locations
agcttaaggtctatcagtaattataaatactaaattggtgaaaaggaaaacattgactatcatgcagcaatcacccttgcacgtgctcctatagagacacaaattaatacataagtgagagaataagagattaggttaaagttagttatttaaaataccaatcttataggtatataatctattgtaattctacctccattcttttttacttgtgttgtacaatgacaaggtcttcaatgcaaatgttttatcacaactatttctaaaagctattaaagtatatataaaagtgcttttcaagacaaatctaccaatagattcgtgcagatcgagagagaanaaagtgtgcagatcggatttgctttattattttgtgtggttcttttccacaaactttcggattcggtcacatcaagtttcgtgcagattgtgaggaagcctatggagctaaccaactggtc

SEQ ID NO: 39116 - DNA, 458 bp, Oryza sativa
tgacaacggtcaaccaacaagaatattctattcaattgatatacaagagcatatacagtagcatgcacgcatatttgttcttgttttctaatcaaactgatttgcttgttcgcatgtattcacatatccaacgaggacacaactaaagctgggctcaatttgaccgatgtgcagcgccggctgcttgccatcttcctttgccgaagatgatcttctactttcattgccggtcgtctccgtcatcgttaattagtgccctagccttcgtggctgacctattccatcgccaatatattgatgggtgtccacgtcttcaccattggcccgctttcgacgtcgccgactggtgtttttgcctatacagtcggtggactccgccgccgctgatgggcgtcatcgtcatcttcaccgaccggccgccacgtctgccgccgactggtgctttcgccttcacagct

SEQ ID NO: 39117 - DNA, 443 bp, Oryza sativa
  unsure (1)..(443): unsure at all n locations
agctgccagattaccgatcgatgtggttggagtttgatttgggaaaactgaaatggcctatatttatgtgaaggattttattcttctatgtggcatgaggtaaccctgggtcggcttgggaaaggctttgttgcgaacctccgataccgacgggtgttcggaataagttcgtatcttgtgggtaaaagtgtgggtaaagtgtacccctctgcagaggttaactaactgttcgaacagccgtgcccacggtcatgggcggatgtgaggtggttcccgttgcgtagatttgtttgcctgtgctttgtgaaaagttattgtggatngggaatcgtaaacagaatcagcctatgtggcagatggatgactcgagtggtcggaaacgaatctgtgtgattcgggatgtctactggcatcatagactangcctcccgagtggaagcgga

SEQ ID NO: 39118 - DNA, 436 bp, Oryza sativa
  unsure (1)..(436): unsure at all n locations
ctttgttcatctaatgtcgctgagtaaactggagagtttttcttaacatacatgtgcgctttgcttctgttactggtcgccttctcctcaagaaacagagaccaactacaacatttattgctgctattgtaggcagtagaattataagaaccaatccagggacgctgtactttctccctgaattaaattttttgagaataaaatgtcaggcaaagtaagtgtcacaaaattatatttaatatacatttttcaagacaattaaatcaattataatatactccctccatttcattttataaattactttgattttttttctagtgatttttttttagagttggattaagtttacacgataaagataacagcatttttaacataaaccaaacatactatcaaaatatatttaatgctagatnttttttataaacttaat

SEQ ID NO: 39119 - DNA, 388 bp, Oryza sativa
agcttctccacttcatcaagatcttcaacggtttcaccaatatcgttgtttgtagaccggtgttattgcaccctcttttgttaccattctaaattagccttcttactcattatacaaatttatatggcttagccgttctacactagccggctttacagagataggtacaaatttgccatcagagatactaataaaatcatagctagaaagatccctccccgataagcattggatattcccataacgccactcaaaagtagcattggccattgcaacctcggccgatgtatccgcttgaacaatttcaacatcatcgccgtcccattgaattaatcattgatgcaaggtaaaggcacccacaattggatgaatccacaacgacccaaat

SEQ ID NO: 39120 - DNA, 453 bp, Oryza sativa
tcagctatctcactaggccttcataaatattttatttcttatatatcataagtctttggagaattctactgctaaaaaaaatgaacttactccccttgtcttctattactgtacacttgtgggtcttgacaatgtatttgttgttgcttgcaggctatcttttctgatgattcacatgatgatatggctgaacctcttgctaatcaaccagtggatccagtaaagaccagtgaagatgccaatatggttctcaatcgtcttgttgctgaggatttcctagaatcattgggtaaagaactggggttggatgttccaccagaaaagcccacaccacccaatgtcttatttagatcagaaacaccttcaacagctaatgcaattggcatatctataaacagaaaggcaattacttgtcatgaaataaaggagaacgagagtgctcttgacaaggag

SEQ ID NO: 39121 - DNA, 434 bp, Oryza sativa
  unsure (1)..(434): unsure at all n locations
agcttatctagaagagtctaagttcaaggaggatttgacatgctagtttatctattaatgagccagggtttagttttcttttatctttagaaaagtgtgtttagtgtccgataaggactttatattttccttttatgtttaggaaagtttctttcttgtcctacaaggactagtatctaccaataggtataaatatgtacacctgnggtcattgtaatttatctctcgatcaatactactcttggtgcatcaccaccctcttttctgaggttttacttatcaaccggcggaatttggcacctgacgcggngctgcatcagttcagttctatcttcggcgaaggggtaagtcctacgttccgtcaacactggtgaatctatcagctacattggtgttgntcaaggctgcatcgcttcgatctcttggattgctct

SEQ ID NO: 39122 - DNA, 433 bp, Oryza sativa
  unsure (1)..(433): unsure at all n locations
gttgagtccgttctgattatcagacgccgaacgcctagttctttcgcctttctcaggcccattaatactgcttcgtattcggctgtgttattggttgtactaaactacaatcttgcagcgtaatgtatcggcactcctcctggcgaggttaggatcatggcaacacccgcccccttgtgagaccacgacccatcggaatgcgtgacccatggttgttcgactggttcgggctttggggcggacgctggtgtccattcggccacgcaatcagcgaggatttgggacttgattgcggtgcgagcgacaaagtgtangtcgaaaggttatagttcggcagcccatttgcttagccgccttgtgatttcttttccttgaagcatttcgcccaaagggtactgcgagggtactatgcttttgtgggctcggaagtagt

SEQ ID NO: 39123 - DNA, 365 bp, Oryza sativa
agcttgactatccttgcatcaaggtatgcccttgatcttgaggtttccttcatggaaggggcctaccggccattattcaatgctcgtcaaactgttccacatgatgcttatgacttctttatagatcttcttgctgaaactatcaggtgagcacattgcacattcacgttccagggtttatatgtgtgggttctggtttgaagcccctaccatgttctatcgagtcttttgtacagataaaaagctgattgcagtgctcaggcatatgactacttgtcaatatcttatgcaaggaaatgctattgtttcttgtgacaacagcttcttagttcatatctgaagcagtttaatttcctaccctcctt

SEQ ID NO: 39124 - DNA, 450 bp, Oryza sativa
atctcaagcttatatcttctactgcatgggtgccggcgtgagctggattttattctaattgttctagatttgcatgcattgtctaaatatgtgtgcgttcctttgtgcgacaaatagaaaacggtttgttggaaccatgccaccctaattttgcaaaattttagatatgccacccgtatctcaaagacatgtatgacccacatgattcaatgacatgtgggtcggagtggcatatcacaaattatgcaaaatatgtgtggcatggatcaaattttctcaatagaaaattcgtaagacacaaggaagaatgaatggaattgacctaagcgaacattcatattcgtgacatgtggaaaatatattgtcttgtactttatattacattcgtgacatctgaatctatttattaaacaaaaataacaagtgatactgtcatttattacctaagta

SEQ ID NO: 39125 - DNA, 388 bp, Oryza sativa
ttcataaacatcacaaaatcaggcacattcacatgcacaattcatatcacaaatttacagatccaaagacattacaagccaacgaattcacagataaatcaacaactaaatcaaccggctccttgcgccacctctctccaccgccggtcgctgcgtggggccgccgctgccacccccgcgccaagcaccgccccctgctaaggccgcggtgccttgctcctcgacgttgctgcaaggaacagaaacgagtagagagaatagctagaatgagaatatattaaaggagaggattagagaggaggaaatggatgatgaagatataatatgacgagaaagagtttgctatcgagaaagagaggatacgtgtgaggactcgatactatgcaat

SEQ ID NO: 39126 - DNA, 203 bp, Oryza sativa
tgatactgtcacagcagctatgccttttatgcatgcactaacggagcaaacaacatgctataacccttttgccgcttacgccaaggatctcacactgtattctcgctagccaacttgccgtatcttttctcacccaaccatccataatgtctccattccgtcgcacagaaagaaactcgaaaacaatgcgcggcatgcctgcc

SEQ ID NO: 39127 - DNA, 445 bp, Oryza sativa
  unsure (1)..(445): unsure at all n locations
gatccttaagncacctgcggcatgcaagcttacttcatcaagagctgaccggattatttcgtctgcatcagataccatcaaaggatcatcatcagctctagacacgatgtcaacttctgctaatggctattcatactctaagactgcaaacaagggacttgagaattcctgtaaaaaagcataactcaccgctcttgggaagaaagtaggacactattgctgatatacttattcttatgctangcatctggtgcttacatttcaaaaaggtatcctctgtctagcaagtttgcggtgcatacttaccactgaaaagacaatctataccacagtctagacattgcgatgaacgaaagtggtagaagctggaacataactgagaactcaacgtcataataagctaaatggatatggcgactgcgatatatcagactacctcactgat

SEQ ID NO: 39128 - DNA, 428 bp, Oryza sativa
  unsure (1)..(428): unsure at all n locations
agcttncttcatcaaaagcttgccggaacacttattctgcatcagataccatcaaaggatcatcatcagctctagacacgatgtcaacttctgctaatggctatccatcctcgaagactgcaaacaaggtacttgtgaattcctgtaaaaaagcataactcagtgctcttgggatgaaagtaggaaactattgctgatagacttattcttatgctaggcatctggtgcttccatttcaaaagggtatcctctgtctagcaagtttgcggtgcatactaaccaaggaaaagacaatctttaccaaagtaaagacattggtatgaaggaaagtggtagaagctggaacagtactgagaagctcaaggccagaagtaagctaaatggatatggtgactgtgatatatcagaatacctcactgataactcca

SEQ ID NO: 39129 - DNA, 452 bp, Oryza sativa
  unsure (1)..(452): unsure at all n locations
aaggatcagttttcagaaattctaccaattgtggatgctacctcgtctgattcaagtaagagctaattgtttcatgcagtgaaacatcaagtacacttagaaaatgggattttccttatttttagagatttgttaattagatagaatcatttcaattctaggtgctttcgatggtgttcttgaacttcttatccgtggtggaagaagcctgccagaagctgtgatgatgatgatacctgaggcatggcagaacgatgtgaacatggaacctgagaagaaagctctctatgagttcttgtctgcccttatggagccctgngatggacctgctctaatatcttgtaagaagatacggaagaccttttccttcctgatcacacatttcccatgtactatttgtggttactttgctttcatctgcagttactgatggccgttaccttggagccacc

SEQ ID NO: 39130 - DNA, 477 bp, Oryza sativa
acactatagatactcagcttaccttgaacttagctaagctgactggcagtactctgtgattgctagaaggcatctctgatcttatgatattctcctcaggtgtccttgttgcaatcagacctgctggtctccattcggtaaagattatcaatgaaataattcagtttggaattagctagctcaggagcaaactatctcttccttgagttaaggaaaaaatgttaatgtgttcatggtgatgacaatctccatcattttgaggtacaagatatatcagtggtcaattgctttgaatgaaggaaatcgcctttaaggagagtagctattcaactttgctttataaatgtttagatttgcataatatagtaaaactcatgctcgcatgttattaaagcgtattcaagaaaaatagtaacctatatatgacatgttgagttgagtgaactaatcttggatgacatcatctcatttcattta

SEQ ID NO: 39131 - DNA, 343 bp, Oryza sativa
gcatcttatttatcgcttgaaaaataatggaagacctatctccatatatacatataagaaatagaattatttgccacataataacaaaagtccatggtgcgaaatagaccatatactttaatataaatgataaaaaaatctcttatattcaaacacaaatcacttttatccgcaaacatgtaaactgcttctattatcaccactttcttaatatcattattcttattaaaaataatatgttttaataaatggaaaaaacctaatacatcaatccctaatactaaaacgttcatttcacaaatgtcctaaacgttttgccagccttatatctaaactaccaata

SEQ ID NO: 39132 - DNA, 252 bp, Oryza sativa
ctatgtacgtcgcagcggttgggttgtgcgggataacgggcctgtcactactgtgtactggtgaagaacaagggcacgccgatatcatgatagcttcgttccaaattcggagaaagagatgctgtggaccacaatgctcgacacatacacccttcctgcgggtacagacgacatagtgaaaacgtggactctgaacaaaatggctgaacagtatcatagcttcaagggagagtctgtccataagtatatact

SEQ ID NO: 39133 - DNA, 326 bp, Oryza sativa
  unsure (1)..(326): unsure at all n locations
actcaacttcatgttatctncttgtagatagtactgtgccattctctttatcatgtggagactttatcttctgtacttgcagatggcatgatgctggcacatatgatgcataaacaaaaactatgggtgcaaatggatcatttatgcatgaggaagagtacactcatggttcaaatgctggactaaaaattgccattgatctccttggagtgtactttgcaatatcatagaccttgtagctacataattatctactcgtatgtccttgtgtaggcaatactcacttgttgccgatcattntaagaagattaaatgatgtgttactg

SEQ ID NO: 39134 - DNA, 382 bp, Oryza sativa
agcttgctatgcattcgggcacctaaatttaattgttcatgcacatagaccaatattagtggtcactagaatgcctctttggttttaccaaaaacttaatgccttaattcactataaaataataattaaatttaattttttaacctaaattgccatctagatggctggaacagaacagctgttctaaaaagtcatacccctttctgagcttgcctcacagcggtggcccaagaagaacaagtctcgtcgatgctctagcagccgcctcaacttttatctctgcacacttcagatgtctggcaggttaattttcactaattcatgtctcattccatccaaaaacgtacgcagaaccaggttctaaccgagcaaaactattttg

SEQ ID NO: 39135 - DNA, 428 bp, Oryza sativa
acatgctcatcaaactttgttgagaaaattctattgttaaaactcacaaatggaaaaagagtacaatgtgatgtgtttaacaacgtacatcattcacagagtcttcccctgaagcttgcaagtctctgagtagtctcataacaattcccttaacacacctctcgaacgaagaagtaggtatggacttagtgaagagatccgccagattatcgcaagactttgtctgtaagatgtttatctctccactttgctgaagctcatgcggatgaaacaacatacgagcaatatcgatggtgataatgctctagatgtagcctgtatgcatctgtgtactatagcagcattgccttcatagataatacgatgtgattctgatgaaccgatgccaacagactgctcaatgtggtatatcatcctgcggagccaca

SEQ ID NO: 39136 - DNA, 170 bp, Oryza sativa
agaaagccttcttattgagaatgaatgctgcaagttatgcactgaccatagtcatgcctaacagtaggcatctctattcatatggcctgactacccattattcattactttctgccttgcagtctatggctggataaccaaaaaaaacctctctatgtatccgattacag

SEQ ID NO: 39137 - DNA, 441 bp, Oryza sativa
  unsure (1)..(441): unsure at all n locations
gtacgctttcttattggagacacgtataaatagagcttggcgcagcggagcacgacccgtttgtttggacgtgggccgtgggccgttatccggatgggccaaatatatctagcacgttgcacgtatagcctggtatgttaattatgcctgacaatccagaaaaatggtgcaaanatgtccaaaagtttgtgtacaaacctttagagttagagatggtcatatggatccataaatttgatcgatcgatcgatcgtgtgagtacacacacgttcaggatcgaatgattaaaccatagttgctcgcaaaaagataaggacagaattgctaattattttgtgactcggaaaattcactgctaaatcttgcactctttntaccattgaggatgtttgttgagattggcctcgagattcttggcgacaggtgaacaacaataacata

SEQ ID NO: 39138 - DNA, 269 bp, Oryza sativa
gctgaaccattgaaaccaatattctgtgaagaaacttataggccgatgcaaaaatccccttgaaagaagtggcaagggaccaatacccctattggggctaggagtcggaatgcaaccccacatgcatgtctgcaactcatgatctacgttgcccgagaaacaccgatctccaccaattaactcggggacttcaccaactcatacgatggcgaccactgactcgtaaagaccgctctatgtattccatcatggctacgatatgcatgaag

SEQ ID NO: 39139 - DNA, 285 bp, Oryza sativa
ggggggaggaacaaggaaagggggggcctttttcggccaccaacaaaggaccgggaggggcgccataaaaaacacaccccccacaaacaaaaaaaaacaaggacccaataacccgcccccagaaccaccaaacaggcggcgaaaaaaccaaagccccgaacggccagcggaccacaggcgccaagacaaaacggcgccccaaaaaacacgcaacacccacccgccccgcccaacaacaacaaaagaaaaaacgcaagacgaccggccaacaccccaacccaaaac

SEQ ID NO: 39140 - DNA, 393 bp, Oryza sativa
  unsure (1)..(393): unsure at all n locations
actcagctgttacggatcggaatgttaattagcgcctccgctgtgtttgattctacattagactatggctgttccgaggtttggctttggattacattggtcaaatttattccttctcatcaaaaaggcattggttcgtgctagttgccatggattacttcactaagtgggccanagccgtgccgctcaagaatattacttgtaccgaggtaaattgatttattttgaagcatattgttcatangttcgataattctcaaatgttaaaggagtttcttttatgtccaacgatgtgagaagattgccgaatcttatgatattaagtcgttgagttcttctctttactacgctcangctaatgggatagccgagtcgagtaataaaacattgttg

SEQ ID NO: 39141 - DNA, 267 bp, Oryza sativa
gttttttttagccggaactcgctcgggtgagactaaacagcgacccgactcccttcaaggttgttgcaaatcgagccgagcccgagctagctcgcaagccgctcggtagggtcgtcgagcctatgaaaaacatgacctgacctggcccattaacaaattgtcttcgtctgggccataaaaaacagagaaccctaccttaactgcttcgtccgacccttcccaatttccataccacgcaagcgcatgcacgccggcgcacgcgcgcac

SEQ ID NO: 39142 - DNA, 393 bp, Oryza sativa
  unsure (1)..(393): unsure at all n locations
cacataatactagcttgaaaaaaagttgaagcgatatgacaaatcgttttgtttggtctgcactgngcgtaaaatccatgagctgcaatcaggaaattcttggtctttgtttccattaaaaaagaatacagtgataattgaaacttcgnttccattcaaagatagtaatggttgagacattggatatgtgggcagccggataatgtgatcttctttctttcgccattagttacatcatcatacacatgtacaccacctcgtttacacatgaatgcatatgcatggttttggggagaatatggaggggtctgtacggcctgtatgagcctaatctcttatcaagaaaagaaaactgaatgctcatattcagttattctttctctctctctctat

SEQ ID NO: 39143 - DNA, 352 bp, Oryza sativa
  unsure (1)..(352): unsure at all n locations
agctntatatagctgccccgctgactnttttatattgtcaaggngctgcntgggtttatcaagcaattgattggatacaatatcattgctttttgccacgtaagtgtgcatttttattgaccaatattatggcttaggctgattatatattatggtcatttttcaggcgggtggtaaatcctttatgagtgtacttactcggatgntataccatatatgccatatatttccaggagtggtgaaaccatgtgtcttttagggacttaagcacatctgttaaagcagtgtgcgcatggcgtatgcccaatactttggaaatttctttattcacagcattcaagcttctttatag

SEQ ID NO: 39144 - DNA, 419 bp, Oryza sativa
acttcggcagttgcgacgctatatttcgtcttgacccaagtgatgatggtacttcttcttgtgcggcattatctttgtatctttccatcatcgcctacccttgtggacctgtcttatatgcaacgtactcattccagggatcccttagctttgggaatgtggcgaagatccgtgtctgcccctacaggatatatatttggtacagatctcccttgaagctctgaaactattctgccattttctttacagtccaccttttcactttgtcctctgtacccgcgagaagggtgaatgtcttgaacattgtggtccataaccatcttttctccgaatctgggacacagctcttatgatctccgcgtgctattgttctgcgccagtacaccgtactgactcgcacgttattccgctcaacccaa

SEQ ID NO: 39145 - DNA, 458 bp, Oryza sativa
  unsure (1)..(458): unsure at all n locations
taggtaagcaacacgcaganaccccgcgcagcgagaattctttaacttattatgtaccacagggtctggttctatgtcagattttcttaaacacactctcttttttaacagggaagctgaactgctaatggaaaaatccgctgcacaacttcccttttaagcagcctttgttaagcagtattcatatggtgcaatgatgcatttcttttactgacttcgttgaacgatgcgacatcttgccaaaataagctttaaacctctaaagcttagacaagaagcaaaaccttattacgctttgctttgagagtttgaatgttgtaatcttgtactctggtttgactataactcctctaagtggattgcggtgaccttccgtattatcaaaagcaatatgaagtcttaatacgggtgatatgcacatgtatgggcgactgatcattgctaaattactggaccat

SEQ ID NO: 39146 - DNA, 288 bp, Oryza sativa
agctttgtctcgaagggactctattggtttttttgttttatggacgaacataaaggcccaacaaagcaatggtttatccaaatttcaaccaataataatacaatatatttcttaatccatttgtgagaaatcatgaaaatagtccatagacatgaattttgggcttcaatggattgggttaaatactgccaagaaaatagttaggcgacatcggcttaatttgttgggatgaagaggaaaaatgtacctgtttaataaaaagaaaaaaccttgatattttccatttca

SEQ ID NO: 39147 - DNA, 415 bp, Oryza sativa
  unsure (1)..(415): unsure at all n locations
tacttgggagctcgagattctgattagctgctaatgagaaatcaaatttaaggtcttgtttaagagagctttaaaatttaagaaaaaaaagttggttggtagccagcttatgagaatattaaaaagatatatttcctacctttttagcgtttaattcattttctaatttgagtgacaatctaaactggttgggtagctggagattcttggataatctataactactaaaagctcttccgaataggatntaaaaggttaggcttcgtgaaatagcttattttctagatntcacgaagcctagcctttaaagtcaaggctagggcttgngtgttctatcttctatctattagatcttctaaattgggttacaatctaaaccattcaaggaagcttgataatccttgtgatttgaaca

SEQ ID NO: 39148 - DNA, 479 bp, Oryza sativa
  unsure (1)..(479): unsure at all n locations
ntagctccagccaccggaacgagagagcgatcagctcttcagctagccgcattcgccctcgccgccgccgacgatgtctagccggaggtcgtcgcgctcctccgtgtcggaggaggagatcaacgagctcatctccaagctccagtccctcctccccagctcccgccgccgcggcgccaaccaggtactacatttcaccgttctcatcaccacaagttcacataaccaccatgcacactagcggcatgaacaagctagctacatgagtgatcgacgatgtgtagatttgacggcgttctaaatcttcggctacagctggttgagaagggtctagctatttaaccactatagagggtctgccgttaaatgtggtagcccgctatctaaaactctctaattaattattggtggtaatggcggatgccaaataaaatgcaggcgtcgacgacgaagctgctgaaggagacgtgcagctacat

SEQ ID NO: 39149 - DNA, 386 bp, Oryza sativa
tgcaagctgtgaagcttgctgaaatttatgttttatcttgctgaaatttatgttgaagattttttggttggtgatcttatgctactacggactcaacttaaaaattttattatcaatgttaggagaactaaagaatttcttggatgtaaagatcttgcaaagggtgctgaattaatggttcagattggaaagaacagaacttatcacttggtgtataggctcattgagttatcattgatacttccggtggcaatggcttcagttgagagggtcttttaactatgtgtcttacaaaaagatttgccaaacctaatgggggatgaatgactaaatgactagatgatttgtacactgagaacagattttagaagtatagtgatgaaaaa

SEQ ID NO: 39150 - DNA, 145 bp, Oryza sativa
  unsure (1)..(145): unsure at all n locations
agctttccccagccccttttcatcattggtctcctgacgtctacgaaggagtgtggttcgttcgacaaattcctacctctatatctatctctgaggtgtttgggttttgcaaactccctanatatgcagaaaaaaatgctatccc

SEQ ID NO: 39151 - DNA, 194 bp, Oryza sativa
ctccctggattaattccacccgtattaacctcagcccaaaaacatttctttggtacactggatgtttgtatgtagccaatttgatcaaaaattactttgctgatttcctattgtcctcggtaagaacacacgcatacactaacagattgatattgcctgctgcctgtcggtcatcccggtcggactggtattat

SEQ ID NO: 39152 - DNA, 394 bp, Oryza sativa
ctactaccgacgtggacgaatctctcttactggtatgaacactggaaagataaggtacacatatgtggaagcatataagcagtggagggaaacatggaaaggaaagcactataaacaggatgacaaccggtaatccacacgctatgtttgggaactaggcttgaaaccccgagaaatcgtactcgacttgctcctgaaagtaggcctcgacagaagggtcaaggtatacttcctctaactctattaatataaatataagtaatggtgagtactcagtgtactcagcaagccatgaaacaaatatgacatgcatggctaaaaacaaagagtggtagggttcatttgaaaacccacacctttaataatagctgaaaccttatgtatcagtttagtc

SEQ ID NO: 39153 - DNA, 455 bp, Oryza sativa
  unsure (1)..(455): unsure at all n locations
actaagcttctcctcgtgcttcacatcgtcaagcggtcaagcgaataatgatgtatttgaatcatacatgtcacgtccagataaattcatcccgaaataaaaatcattttctaaaaggaataatagaattaattaaaattcgaaaagaaattggcaaacactaaaatacgtacaagaaaagaaaaatttgaatgtggcccggagaatatttgttaaattctccttggtctaaaatgagccctcaaattttacttgaattntcagagcaccggaaatattattaagcaacaaaaacagttaacaaagtttattaaaaagaaaaagctaaaaataatccccctcctcactttgggccaagtctggcccaaagtcctccctctctatctctcggcccgaggccaaagtcctctcttcctccccctctttatctccctctcctgctctnccttcttctc

SEQ ID NO: 39154 - DNA, 438 bp, Oryza sativa
  unsure (1)..(438): unsure at all n locations
gtggaccagcattccagtctctgggcctatgatgcttcttgcagtggtggtcaacttcaaagtactactagtatctttgacaattggcatgttaaaaccgacacggttggcccgagtggtcttgacctcgttaaaacagtcgaacagtctaacactagagcaggaatcttgcttaaaataacttagatatcactagactntattgcatcaagggaagaaatactagtatggtcagttacagcgagtacaataatctatctggattctataaacctaccctattttatttcataaacagtactaatagattccatgacacacataataaacacgttgatatcagtagcacaaaaatgcgtggcctacagctacagacaaagaccatntataatatgctgccccgtgcacgctttgctcctaccaaactgtcagtttatg

SEQ ID NO: 39155 - DNA, 370 bp, Oryza sativa
tctttctagcccttattttctttggcgaaattaataaatagtgacatattttttggtgaaattattttttaatataaaatttaaaatacaaatatattatggataccacataccaaaaagtggttgactaacctcggtaaggcacaccattgtccaagtgttatacggaatcatacctcgtatatagaaagaattccggattaggaatgacaaataaaagtctatatgtaaactattaagactacttggattgtatccatattgatctctctagattacatggacaatggacacctaatgtataaatatattccatatgaggagggaaaaaaagatctattcacgacacaacaaccgatctacacacgcc

SEQ ID NO: 39156 - DNA, 261 bp, Oryza sativa
gaggagccgaagccgctaaccaccgtggctattttgcttgcagggcttaaagcccttgaaaaacggaaaaatatcgacgtaaaaagagggcccaaatatatgtttggcgggggaccccgctttcctgcgacggaaaaaacacaacgtcgggaaaggaattccccggaacacacctggctaaaaacagatgactgaggaaagccaacggaaaacccagggaaatttaaaaaaaaaattggcaaagaccctgtttcctcccca

SEQ ID NO: 39157 - DNA, 372 bp, Oryza sativa
tgcccgcaggtacaccaaacacacacttatcgcggttcagttttattcgggcggagcggaggttctcaaagtttccgctagatctgatagtaaagttccttggttgcgcgtttttacaaccaagtcatcgacataagcctcaacattacgtcctatttggctacccaaagaaattcgagttgttcgttgaaaagtatgacctgcattctttaacccgaagggcattgatgtataacaataggatcctaccggggtaataaacgcagattttttctcatccttcctagccatgcgaatctgatggtaaccagagtatgcatctagatacacaaaacgtcgcaccccgcagtggagtcgacgatctgatctatg

SEQ ID NO: 39158 - DNA, 318 bp, Oryza sativa
cttctatatgatactcatgctacagatgggatgacctgacttccacctttctgacctctaaataaactaaatgaagtaaaaatgccttatgctcataaacccgtcacagtatgaatgactcaaacatttgtgttcaccaaatgaaaaaacaagtgccaacaacatttttgacaagctcaagagagaaatggactaccttggattggacatacatatgttcttcaaccttgggaaatcaaattcacaccatcatttttatgaaagctgacccaatatatttttttccaaacattctttatttaccacatatatttaaaa

SEQ ID NO: 39159 - DNA, 467 bp, Oryza sativa
  unsure (1)..(467): unsure at all n locations
tctncatgatggccttcacttgctgatctcaggaatgatcttatgagcaatggcgccgcaatcgatctggttcttgccgctccgcatcctctccaggtacctcttaagccctgtggtcttggttctctgagggaatgtccccgctctcgccatcgacttcctcctcctgagtatcaatccactgatcacgttcctccactgcgtattgtgattcgactccgctggctgctcaacggaggagctctcatcggagtcgacactaccggataccgagatgtctagcaccgcgcgaggagagctctgatcggtgcactcgctgctgtcatcgttaccggccttcgaatacatcttaagcgcctctttgctaccttcatcagaatcagcagattggctgctactgtcaccaccactactactggcactgngttcttaatactgctctgtcactgggtcttaatgctgatctg

SEQ ID NO: 39160 - DNA, 390 bp, Oryza sativa
  unsure (1)..(390): unsure at all n locations
agtcaaaaaagagaaaggcgaatcttagcttttatggtatntatttattcaggcaataggaatcatacgaggtcacacgtaccagcgcctctccaagtgtaacaagagacacgccccgttcctgtcttgtaccgactctgcttcggacggccgatcaccagatctgctcctgcattcttttgccatcatcaggtaaacacgcccagctctttgggttaggggagctattccanaactgaccaactcgagcgatagcttgcaacagccagtggcggacttatgatttgaacccagggtagacctatccaaaaaaaattcgaatacaatacaatacaatatgattcgatataaaatgtggtaaacgatacggtgtgcaactctaaatgattt

SEQ ID NO: 39161 - DNA, 258 bp, Oryza sativa
  unsure (1)..(258): unsure at all n locations
agctttctgttgccaaggggtatgcaaccattgttcagacaaatgcattaggctgtggtggtttgtcagaataacaaattccccttgttggatgtatggcctccaattttccatagctagcagaatggctaagtattccttttcataagtggagagtcccttggtttatggacccaaagctntgctaagaaaagcaatgggatgcttgtcttgagatagaactgccccaattacctgatcactagcatctgtctcaat

SEQ ID NO: 39162 - DNA, 286 bp, Oryza sativa
taagaaaatctacttcaaccgatgtgcccttaggcaccgtcattcataatataaaaatgacacgtggaacgggtgggcaattacctatagcaacaggtgctgtatccaaactgattgcaaaagaaggtgaatcggccactttaagaataccatctggggaggtcctattggtatcccaaaactgcttatcactaatttgacaagttggtaatgttggggtgaaacaaaaagtttggtatagtcgggtctaatgttagcttcgaaacgccccggaatagaagggttt

SEQ ID NO: 39163 - DNA, 333 bp, Oryza sativa
agcttaacacgagttcttcataccaccctcttatctatggtctaactgagacgctcaatcaatgcttggaagcattttttagatgtactgtccattcctctccacacatatggtgtaagtgggtgtctcaagcacagcattgggacaacaccctccttcatattggtcttggaaaatccccatatataagcctttatggcaagaaaccacttactttggaatggcggatggggaaaataaacaattcctgagtgcaggttggctgcagaaaaggccaaatgatgagatttgcaccacaactccccgaccacatacccatgaaagtaggctgac

SEQ ID NO: 39164 - DNA, 481 bp, Oryza sativa
  unsure (1)..(481): unsure at all n locations
tgtccgcctctagttgcacgctattgatcgcatcgctgttatccttgctgtgacatcaatatagccaagttgacatctattatcggcttctgcaaggatgaatctccgtccccctcaacagccagaattgaaagtccagcaactctatctggacttgcttcctctagactctgagaaactgatgaacgtccaacaggaatagggagaggacctgngatagacgtgagattaaatgccgcatctgatccttgaacagactcaattacctgctttagttttgagagagaccggatgaccttgttaattattcgagacggccaacgagatatctcatgttgcctgcagacgcgtcacatggttgtgggacatactgtcaaaacgaaaaataaaattagctgatgctaactgtctccaatagtcgaactaccaacaatgctgatatacttgcacgaatcaatattctacgcatctaatcactctc

SEQ ID NO: 39165 - DNA, 284 bp, Oryza sativa
cacatctaaacacagcatcagccatcatgaccatgcacagcactagtgaagtgtaaccataccgctacacgtttaactacacatctcgcggttactccctggcgacgacgaccacctgcttgccgacgttgcggccggaaaaaagcccgatgagcgcggccggcgcgttcttcaacccttcggcgacgtcctccacgtacgcgatctttccctccttcacataccgcgcggccttctcctcgtactccctgtacctggcgtagtggtcggacacgatgaaccct

SEQ ID NO: 39166 - DNA, 485 bp, Oryza sativa
tactcagctttgtaggtaacatcagctcctagttcagatatgacaacatctatgcacatatattcatcctaatgggtaaaacctcatttgcgttgcataggtatatttgttcatatctagtcagaggatagtgggatgccttgttgcggaaccaatcaaaacagcacataaagtgattccaggctccacagaggaaaacggcactgatctgcctgttgataaaattgaaccagtcaaaacaaaccatacattagagttcgggaaaatcagttttaagagggaagtcctgaaacggcatgatcattcagacaagaacaaagaagagtaccgagatcctggtgctataatatgtgaaaaggaagatgttcctgcacattgtggatttcgagcaatttgggttgtaccgtcacgcagaagaaagcgaatagggtcacaactgatggatgctgctaggtaagttctaagtttgatgcgcattctcacct

SEQ ID NO: 39167 - DNA, 445 bp, Oryza sativa
actgctcggcgaggacatgtcccggagcggcaaggcggtctcctctctcgtcgccatctccaatgccatcaccaacctctattgtcggtacgcgttatctccgtttcagagatgaaatcttcagctgcagctatgaacagagtagaacaccagcgtgctcaatgtcaatcttgtgcttcctctgttcgcaacgaccgtgttccgcggctgccaccggcttgagcccctgctggcggataaaacgtccatgtggcggctggagatggactgcctactctttgtgtgccactacatcgtcgagcttttcccttccaaggagatcatgcccgacgggaccgtgcgggatgtgagaatttgcatgtgttcgttcatgttcttcaaggcaaaagctctcttgcgcgtcactaatccatggacgcattccgcctctatcgtctcacgtgat

SEQ ID NO: 39168 - DNA, 175 bp, Oryza sativa
catctcagttcgtccagtgaaaagaggcgtcagtggatgtcaccgagaaagagagctttaggccagctggcacggtcatatgcctgccaagaaagagcaaaaccgtgaaagctgaagatcatcacattaatcttctaagcacttcacatgaaaggaaaaattgataaagatgttt

SEQ ID NO: 39169 - DNA, 319 bp, Oryza sativa
  unsure (1)..(319): unsure at all n locations
atgtgcaaaacgctgattattgacataatccagtgatgaacctgttacccatccaaccagaatgcccgcattggtctgaacatgctggccttgccaactaaatggaatcattctgtcgcttttgaggggcattggtaaatcctggaggacggccaacatgtcttccaggacggctgacaggatttttctttgataccccatcagaagatactactgaccgcagaactgaataaaaggcagaacggatggaacttcagtatggttatactgaccaatcattggatntgtactattcatagaaccttgagcaaatacctga

SEQ ID NO: 39170 - DNA, 371 bp, Oryza sativa
tggtacagcacttgagagaagaggagaggaggaagaatgtcatgaataggaagattacatgctcatatatatgggtcccaccattcttagttttatccgttgattatgatggattctgtgttatccaagaaccacctacggttaatggtacttgtagattaactgggaggaggggtggggatgactttataaccctcttttacactgaagtccttctgaatatttatcagtacagggcagcaaacacacaccacactcacaccacctcatgggcacagatgtgtgtatcctctacacactagtgttatcgggacacatgtgtctaaagcttatctagcatgtcgagttatcgactcatgcttatgcatgga

SEQ ID NO: 39171 - DNA, 107 bp, Oryza sativa
tcgcataccgctcgatgtcaccgaccgacgcgtgattttttttctgcggcggattcccgacgtcttagtggagtccgtcggtccagagcactaacacacctggttac

SEQ ID NO: 39172 - DNA, 341 bp, Oryza sativa
gggccgcaccgtccctcggcagagacgcgtgtctgctctacaagggacgcggctctacgagctcctcggctaggggaccaggcgaggagctacgctgggtcggccatggccgggtaaagagcctgtggacaccgctctcccctccccccgttttttcagttccaccctcatctccactgctgctccctcctacttggtgtcatcgcgctcgtcttctctccgtctcccctgctcatcaacgatggtgcgaggcaacgaggtggtggaagaaccgttggcagccccgcaaagaccgattcgcgacgactacgacctatggacagcacggccgaccggatctg

SEQ ID NO: 39173 - DNA, 168 bp, Oryza sativa
catattgaggggagaggggtttttttttgcacaataccaaacaattcgatacctgaagcactgacagagaaaaaaagtgaaccactcctacgaatttcagatatgagagaactgctatctttcccaccacagcataacctggccaaccacggaaataaaacagtcaac

SEQ ID NO: 39174 - DNA, 337 bp, Oryza sativa
agcttcctttgtattgccaatggctctggttttacatgctcttgtcttcctgtggaagtggtgctggcatctgtgagttctgtacttgattttactgataaacagtgtggatcatgcactttattgataggggcaatgcttgccggttgaaaaaaatgagatgggatttgttaattgtgatcggtcgggattacaacttaaacagataatatgctttcagagaggagatcgggtaggttacatcaaaaggaattattctcttgtcatgaaaattggaattaaaatgtgcgtagaatcgtgtgttcagctggttaaaaatgctaccagataactgatg

SEQ ID NO: 39175 - DNA, 431 bp, Oryza sativa
  unsure (1)..(431): unsure at all n locations
tggacangttcacaagagctctgagattgcgatggttgttgtacgaatggagagatccaagcatgccttgggtgggtttggaaacgccttgtgatggtgtggatagggacctcttcgccgcctcaacaaagataactgtgggcgatgggaatacaacgcgcttctgggactccgcatggattaacggccaaagaccacaagacctaatgccgttggtctatgagatcttcaaacatatgaagacatccctacggcaagggagataagacgaactctacgtgcatgacctgacccttgatgccggttcatctatcacaatcaaccttctcgatcagctagtccgcctgtgggaggcggtacagaatgtgcacttagacagcgaggagccggatcagatttgttggatattcacaagcagcggccactataca

SEQ ID NO: 39176 - DNA, 316 bp, Oryza sativa
tttctacgtcctctgcaacaacaagcacaggcctttgcttatgttgtaacgagaaaatattggccatcacattgcctagaatattagattgcgaaatgaggtcataactacaaaatatcatctacactaatcaaaaatacctttagagctaactccaacactttgaccacagcatgaaggttggacactctcttgtcatgtatcaagatcagtggatcgtctaattcctgttacagatcaaatatattaccaccaagataatatttggtagagaagtatattaacatcagcagaaatacttacacatttctggttc

SEQ ID NO: 39177 - DNA, 387 bp, Oryza sativa
actcaagcctttaaaatcatttctaataattccttataaacaacaatttattatttaatgatttttcaacaagaaaagctcttaacaattataattagatcattactaaactgttctttgtatcatttaggaaatgagctctgaaaaaattcgtgaaaatttcatagagtgtatattaccatggagaatttaataaaaattaaacccatccatgccttatatctaggaaatattatttcccacacttaactttactttgtaattaaagatcattttatatacattaatttattaattcattaattaatttataaatgctgaaacaaaaacatgatgtgacagatcttcattcggtactccgtgcactttacaatatcaggccactgt

SEQ ID NO: 39178 - DNA, 88 bp, Oryza sativa
atcaccataaggagatctcttatgtgctaattcctgtagcatgctggtcaacttgtcttcttcatcctctagcttcctaatattaacg

SEQ ID NO: 39179 - DNA, 412 bp, Oryza sativa
tggaattgtgcctggagagccgaagcggcctccaccaaagcttgatgtgttggagcctgaattggcctcatcggcgggatcggggcgaccgtcggacgtacatgcaacattgttgctttagggatatgtcgcacttgtacggtcgaagcaactgcaccacgtgagtcgaagcttgaatcgcttgcacggtcgcagtcggctgcaccacatgagacgaagctcggatcgattgaacagtcgaacttggttgcgttgcttgagtcgaagcttgaatcgctagagtggttgccgcgggtatcgaagatggagtgggtcttgctaaagaggttgaccaggtttgcagggctgcttcgtatacttgatgctgctcttgcatttggcgaagcgtgtcctgcaacctcatcatgtcttg

SEQ ID NO: 39180 - DNA, 451 bp, Oryza sativa
  unsure (1)..(451): unsure at all n locations
tcttgctccataatgtaacgcgcagggcttccgacacatatcatttgcattntcttcacttgtaataatgcttctccaagtgagatttgtattgcggggccagcatagatgaaagtagagagctttggagcactactgtcaatcacctccaattttctaaaatgcaacacttccaggtaattaagctccatcagatgggggatcttcaggacaacaatattatggcagtctgaaagtaacaatcgctgcaaagcacaggatttggatagaaagccgcataattcctcctcagtagattttactgatcttanacgcanacttgtcaaggtactcatctgaccaatatgtatgccagggtggaaagaacagccaccaagtaacaaagactgaattgagcttgctaccctcgatagaagtgagcatgggagatcataatccatcttgctaactc

SEQ ID NO: 39181 - DNA, 215 bp, Oryza sativa
  unsure (1)..(215): unsure at all n locations
agcttcagtnttcacacacagtgtacacacacattgattggttanactagcaatgcatataagaaaaataattacttcctcgaatatgcggatatcttaaggtggatatagtagaatacttgaatagataaacctctcattttacccagataagtgcttttggcacagaagtgcgagataacaaccacattctgacgggacattttaaaattaga

SEQ ID NO: 39182 - DNA, 356 bp, Oryza sativa
  unsure (1)..(356): unsure at all n locations
aaacggaaacccactcattgacctcatcatcttgaactcttgattgaggataatggcaccaccgaaagacacccatctaccaatactgccacgatgactctcaaaccgaggggaaatgggtgttgaaggggatatctcttatgctatgaaagggcacttaccacgtcaaggctgtaaatgcgcgtnaatctcttggataaaaaagagtaaaccttataaaccccaccaatatggatcaagttgacaaaacctagaaatattgcatgtgaacactattcagaaaatgtgaaccattttaatgggcctatatcagatctaaaagtgacaaacattattgagaataaattctcaaacta

SEQ ID NO: 39183 - DNA, 345 bp, Oryza sativa
acatgatagacatgtgtgcttaatgaagtatagccacctttggcaacataagtatgcttaccaaataaccccgaagtgtggaaatgaccgtccatgaagcctggcatcggtttaagagagcgcacggcttgcgtcccccaactatatgcgggtcgatgtaacaaacatcttaacaacagaatgctggctcgtgctcatcacttagaatcccttctttctataaaattaagacccaaagctgcctcctcaatttgccacttcatcaatattatattaactgttcgatcaatatgtatatcaaacatatgcccatggatccctcgtcctcttgcccaacatgcatgg

SEQ ID NO: 39184 - DNA, 396 bp, Oryza sativa
  unsure (1)..(396): unsure at all n locations
accgagctgcagctatntggcttggaggggctttttttttttgctgtcaactcctacctgaacatatcctcaggatgtattgcccctcgacatctgaaaaaatatcactcgtgggttacgaaaaatgatcttttgggtgcttttgtgtggaacttgggttaaaaaatgttgctagatgcaaactcctgtgatagaattaaagctggtatgatcctatagattttacgctgggcttgtaataacctctgaatggacgtctaggctttctttcaagccggatcgtgatgaactttatctaaaaacaccataatatatcgtatggaaatttgaaatgccaccgagttggtgtctcctcccgcaaatttgtcttaaccaatggtcaaaacaaaattgttc

SEQ ID NO: 39185 - DNA, 298 bp, Oryza sativa
ccatccgctcgaggccccgaccgccgcgacatctcctttctgcggcggatacccgccgccttcgtggagtacgtcgggccggagcacaaacacccctggatacgcctctcgggctccgacgacggcctcctgcaagaggagcgggaggtcttcaccgagcggtgcgcggacataacctcccgcctcggacgacttcatcttatgggaccgcgccgccgtcttccgctccgcgcctggcaaggcatgctctggcaccttggactcccggaggactacttcatatgccgggactatgaca

SEQ ID NO: 39186 - DNA, 271 bp, Oryza sativa
  unsure (1)..(271): unsure at all n locations
gcttgtattcngtattgttgcgctccttttggttcaagaaaatctgaaaacacatcaatacacatgggtcaatactaacctaacaaacagaaatgtcatgctgctggattagttacaggcttacagcaagcccattgtacatgaggtaaaaaaaacatcttggtttatgatttcagtgtatgcaaattataaaggagaagccgatgtagctagtagacacagtacatgcagtgacagatgaacacaatataaacttttaaaatgaccattt

SEQ ID NO: 39187 - DNA, 290 bp, Oryza sativa
  unsure (1)..(290): unsure at all n locations
agcttctagacaaagtgaatctaaggaatcagattttttttgctatttcgncctcatggggatccaggggctattatttttgttgattatgtggctcattctaattgattcttgggattcaccattcacttatataaatacggtggacagcgctatacagtaatatattatattataatcaatggatgcttggatatatacaacatacacattactcattacatggatctaacctgcttacggctaaatttctgacacgggaaaacctgattttaaaccaccgatctata

SEQ ID NO: 39188 - DNA, 473 bp, Oryza sativa
  unsure (1)..(473): unsure at all n locations
tgtttatactaataagaagccctcacattaatcttaaaaattctaaaataaataaattcacacaataataaaaaaatggctaaacatgagcacattaatctttaaaaaaggaaaccatgaccgtcaaatttgatttaatgttttcatctacaccctacatgcaatagataataagtatcagagtagtagtagtttttaaagtaatagtcaaaactcagaagcatgcgttccatgcattgcacacaatatgaagataagaaccagaaggcatccatgaatctgtttcctgtgcgcacatggcctggaaaaacaaatcaaagttcagttcatagtaactctatgtatacaaggtctgaacatataaatatacacagaataattagatttattttcgattcccatgttctaatcaagttgatntacactatctgcccaatcagtatgaattaaggcatacaactaaagcataccta

SEQ ID NO: 39189 - DNA, 177 bp, Oryza sativa
agcttcagtactagggaggtcgatattccttcatatcctttgggagtccctggttatgagtacaagcccaaggaaggtagacgactaaggcaaaaaacctgtgatgcaagctcggctcaattcttcggacagccatgaaaggaatcacactacgactattggatggacccccccccc

SEQ ID NO: 39190 - DNA, 411 bp, Oryza sativa
gctgggtacttgtgatacataccaaacaagattcttacaagttgctaaggaaaacaactttatatctccttcagaattagataggtgtgaattaagcccaaacaccagatcatattctgttgaacttttttttttatttgaaaagaatatattcctgtgaaaatttaactatggtttggtcatcacctactgtgggtctgtggcataaccttgatccgaagcctacttgataaagatattaaaggacctctattgtaaaaagtacatcggcatcttcttgtttgcttgtggttaaaatagcattgatatcttcagacactaacttatagaactgtactagttaaaattaaatctggatatagtctatcttgctcacagcaccgacaatagttctgttatacggttagtcca

SEQ ID NO: 39191 - DNA, 331 bp, Oryza sativa
agcttcttagacttgagaggttatttatggttgtgttcgccatgacgcgttcccaaccggaacaagtaacaccgaaaaccgagcggtccattatcgcgtgaataattaagtaatagctttttttttctaagatggattaatttgaattttttttcaagcaactttcgtataaaactttttacataaaaacgcaccatttagcaatttaaaaagcgtgcgcgcggaaaacgagagggggatgtgaaaggggtgccgaacacagccttaatctaatgatcagtccaaacattagtctaatttggagaaagcatgccaatcaattatctggatt

SEQ ID NO: 39192 - DNA, 367 bp, Oryza sativa
  unsure (1)..(367): unsure at all n locations
tttgtttacaaacaaatattcatactcggcttggaaaagaacaaggagaatagtgacagcgcattctgcgaattggagtagaaaggttatgagctggcctccggtgccggccatgcaacactaatctatcattgcaatgaacctcctgccaaaagaaaaaatgtacatgtactgcaacatgtataaaaaaaccttgcatggagaagatgactattgcancaagaacttccaaaaggccaaaataaaatcatgttcattgcgttaaccaaggcactcgggcatgcacctattngataacgttaacagaatagaaagttaccaagaattgtttggttatcttcctaatctctctttaacgttagagact

SEQ ID NO: 39193 - DNA, 332 bp, Oryza sativa
  unsure (1)..(332): unsure at all n locations
agcttgaaccgggtgatttagttgggttgttcttactanaggatagatttccggaattgagaaagtctaagttgatgcctcgtgctgatggtccttttaaaattggtgagaagattaatgataatgcatattaacttgagttgccttccaagtttggggttagtcccacgtttaacatttcagacttgaagccatacttgggagaaaaggatgagcttgagtcgaggacgactttcattcaagaaggggaggatgatgcggacatcactgtctcggatacacacaacaatcctccaacggtcattcaaggaccgataacaagagctcgtgcg

SEQ ID NO: 39194 - DNA, 362 bp, Oryza sativa
attactggcaataatggcatttgtgggtgcgaatgttttcaccggaattgagaagttcaacaagcaccaaaacatgaattttggacatattggagtgtgttgggttgccttcctggcaaaaaatcacttcgtgattcgcgccgcaaattttgtcattactgcccatatggcatatgtggggcgaggttttcaccggaatgaaaagttcaaaagcccaaaactgatttttgacatttggagtgtgtgggtgcttcgggcaaaaaatacttctgattcccgggacttttgcaataatgccatattgcctatatggacacgggtgcgagttttcacgaatgaaaattcaaagcccaacatatttt

SEQ ID NO: 39195 - DNA, 253 bp, Oryza sativa
tctcttcacctattactacgttatcaggtcgccgtctttgttacgcgatgcttactcactatttgcgggcggctctttggccagctggatcttgggcatagggcctcaggtgagcacactagcgcttccttttaactagcgcgcaacaggtttgaaaaatctttgtacgctccacccggtgctacccctcgcttacgaccactaggtgaggctttttttcatcagcgctatgctgtgctagtcagaagctggc

SEQ ID NO: 39196 - DNA, 223 bp, Oryza sativa
agcctgattttctgctcagccgcgaacccttctagcttcatcatccattctcttcttcacaatttcaaactcatattgcaaagcagctatcttatcagaatttccagcaacgctggcaagaccatagctgttgttatttggaaaaaacataaggtcctcttggcatgcatcatgtgctttcacaaaatcttccaaagattcactttcatgtcccatggcgaca

SEQ ID NO: 39197 - DNA, 456 bp, Oryza sativa
  unsure (1)..(456): unsure at all n locations
gagtgcanttttcatttaactagccatgcatataataaaaccatcccccgcacaaaaaaaagataattaaaccatgaatatttaatctgcagttcaacatcaaacgtgggggccagcgagtagcaacaatgttgatgtatttgactgatggtgttgaaaggggtgaaacccattttcctcaggttagctgaattatactgacatagcttcttacaatatcaaaagctctgtacatatatcttctggttcagctttacttatgtttgctcatttatgccatagttctttccttggatcttatcagcacaaaatgtggtcaagtgccactctttgttgtgcagcacattcacgctatctttattatttccatggttctcttgaatatgtagaaattattgaaacaatttatgaacatgtatctcgtgtctatacaaaccatgtgatactagtatacta

SEQ ID NO: 39198 - DNA, 300 bp, Oryza sativa
  unsure (1)..(300): unsure at all n locations
ctctaaataaaactgcaggatggcagctatcgataacctcgcagtggcagaacccgttttatgaacttgtcatcctcatgcactctaggcgtacaccggttctaacaangagaggaattttggcgcaccctggaagggaatactcacacatgcattaaaggaatattatgctttagaatctcacatgtgcagcctaccgatggcgacaccactgtagacacccgcctcgcggtcctaccaatggctgccccaccgtagagcccctgctcacacatcaagaaaccactatgcatggaaact

SEQ ID NO: 39199 - DNA, 358 bp, Oryza sativa
tgaacacatgttaatctacattacagatctacagacatggatggcttgatattacgaagaaatacctgtttcattgactttccaatcaagaaaagcaggaatgcgtacacaatcaataagcacctcaaccatttcaggcatgtaagttttcagggctgcataactgtagctcatcatctcacggttagcagatgctttcacattgccacctactgcctcgatttcacgcacaacacgcaaatggctcctggttgtagtggttgtatacgccatcttcttcaacagctgagtggcacctagtgtttcatgtgcttcatgtacagaactcacaatgacatatacttcaactgaacaagat

SEQ ID NO: 39200 - DNA, 325 bp, Oryza sativa
cttcattctcttggggtggtgctttctttggcttacttgcagatgatgccttcgcaccatcatcagtagtggcaggaccatcattttctttatcattggcatcttggacatcctctgttcctaggactgaacttgagtcctttgcatacttttctgtagccatggtgctaccaaatattgtaagcatctcaccatagtgtgcaagaggtttgttaaaataatccgcatcaaccttgtgatccttcatgaaacaaaaagtaatgtataagcaattgcataaaaaggtataaaataaagcatagaacccacaaataagaatatacct

SEQ ID NO: 39201 - DNA, 289 bp, Oryza sativa
cgcgctggcgtttacacgcgccgcctaccatggcgccattgtcgcgcgcgccgctacgccgcagatggtgatcaactacgcctcgttcctcgaggagcgcgggtacttcgaggactcgttcgcggtgtacgagacgggcgccaatttgttcggccacccgcacagctagcccatctgggacacctacctctagaggttcgcggcgaggcactgcgggagcaacgcccgacgcgcgctggaactcttctctgaggccacccgccgcgctccttcacatacagggcgcgcc

SEQ ID NO: 39202 - DNA, 227 bp, Oryza sativa
tattgtcgaatattgaattactgcaaatgtatggaggaaggccattcttctatccctttaagatatctgattcatcacaaattcaccaaggaactcatgcctatttgacctgcagatactccattttctggccttgaacaatccactcgtattcgcatgaagtgatttctgcacatacatcttggtcatgtaatctttcatatgtgacgaatagcacggatcatacc

SEQ ID NO: 39203 - DNA, 337 bp, Oryza sativa
  unsure (1)..(337): unsure at all n locations
ataacttcggccagagtggntaagtccggtgtctaagtatcgtcattgctggttgttgcccgacgtcggctcgccatttgtgtatgttgatggagtaagtatcctaattttctaactagctcctatggctttatcccattaaaggagttgtgttgatatgaactatgttttgcagcatggtggaataaactcatctataacacaacaccacttgatatcataaataacatcatataggttcacaaatgggacataaatcatgatgcaatcgactgcatacatacgcagtccacataagttcattctaaagatcatctaactaatcattagactactc

SEQ ID NO: 39204 - DNA, 306 bp, Oryza sativa
agcttctaactattggtaacagatagtgaatagtcaactttggcaattattaaacttagatttcctttatcacctatatgacatgctaccttcgaggctctattctatcttttgttcaaattatataaaaatggcatagctttgatttaagatgaaccctaggagatgttcaactaagcagcatcaatgtactttaagtacctttggagttcttgcagttgtattccaaagatgcacaaaacccttatctccttgctgcaccaatatatgcctactattacgtgaataagtcaggactctcaaacc

SEQ ID NO: 39205 - DNA, 335 bp, Oryza sativa
ggatgctcagcatatatgcttatacagtttaatgaatttctgaagaaatcatcatgcatggatccatgccaatgatgatcagagtcagtaatcagagccttcagagggagagagagagagagaaatcaccttgataaggaagctctcatacatgcagctatctgagagtttagcaatctttctccagatgatcgattcaaggttcttggaaactcttcctttgtccagatagatagatagagagagagagagagagagagagagagagagagagagagagagagagagtggtaagaaagaggttgttgttgttgaagaagaatgagaggagggtt

SEQ ID NO: 39206 - DNA, 147 bp, Oryza sativa
agcttgggcatatcaggcaaagtttaaaatttatatttctgatgattgcttattactacgggttaattgttcgtctcaatttcaattatttgtattatcaatccttaagcagtcaagaacatgtactacataacattgctgcacaaa

SEQ ID NO: 39207 - DNA, 343 bp, Oryza sativa
agcttagcatttttattaagaggcaactagccttcgctttattagtgtaccaagagaatcctatgccgttgagcaatgtgagggcaccattcaacatctgcaaagctgtttcactaaaactactagtagattatgtagtatccagaaacacattgcatcttgcaaaatagtatactagtaatacactaatactacaatctataaactgtcactttaatttcagctaattattctgaagtaacacatgccattctctattactaatgcagacatgtcattctctgaaattatgcagacgaaatagaggatcccttccagaccatcaaactgagacttgaaaata

SEQ ID NO: 39208 - DNA, 450 bp, Oryza sativa
ccatttcacagacaacacacaaagcttccatcgccagcactacaaaccatccctctcacttggccattctcgtgctaggggctcgacatactccgtccattctcacgaggacagggcggctacagatttctgttcgtggcgatcgacaaattcaccaaatggatcgaggcaacacccacaggagaaatcaaggccgacaacgccatcaagttcattaaagggatattttgccgatatggattgcctcaccgtatcataacggataacggctcccaattcatcagcgccgattttcaagattattgcatcggactacgagtcaagaaatgcttcgcctcggtttctcaccctcagagtaacggacaggtcgaatgggcaaacagcatagtactatcagggatcaagacccgtgtctatgacaggctcatgtcacatgataagaagtgggtc

SEQ ID NO: 39209 - DNA, 408 bp, Oryza sativa
  unsure (1)..(408): unsure at all n locations
cacacgcttagccctctacctggcgcgccagatgacggagcgcggggctcctcaccgggagaccgcgcaggcccccctttgccggatcggccgggggccctgggtgagattataagctcctaatctgtgtgtggaaggttcgcgagaatggaaacacacaatacacgggcgatgtatacaggttccggccgctgagaagcgtaataccctactcctgtgtttttgtggatctatgtatgaagaagctacaaaagagctggagaaccagagagctcttactctctccctctctgatcgttctggatccgaaatcaatccccttctaagtgggcaaggtctccttnttacctcaggggatacccatgcccatctctctctttttgtgggacttatctatctttcataaca

SEQ ID NO: 39210 - DNA, 428 bp, Oryza sativa
cggggggcgattaaaagatagacacctgtgatatggtggtgaaagcgatgtttgttaccatggcccgtcactgtaatgagagaggccgagttatcattcatgtgacatcataaccagcagaacccgttgtcaacctctacatgccggactagggtatcgctgtttactgttaaccacagacaatgggaaagaacggataagacgtttaaaacaaaaggctcaacattaccaataaacacgattgcgagcatacatgtttcttaaatactagctacctttagaggtcagactctctttgttctttagatcacacaagctctcttgtttcatacacatataacgagtaaatacacttgcaccgggtaagcataactagtcactctgatcagagtaaccatatttccagtaactattaatttaaccagaca

SEQ ID NO: 39211 - DNA, 99 bp, Oryza sativa
taccgatgggcacacccctggagacacccccctcgcgggcctaccaatgggtgccccaccgtagaacccctgacctacacattttaaaaccactcagca

SEQ ID NO: 39212 - DNA, 400 bp, Oryza sativa
  unsure (1)..(400): unsure at all n locations
tgtcctacatgtcatgcacataattgggaatatctcctcagccggttcaacatacccaagctttaccaaagccgctattgcagacatgcactcatctagacgagcattggcctcacaaacctttcagatcctttcaacatcatcatttttgccaagaaaagcatacacgggtaaaacaaatttgcaagcagaacggttttcattgatatcatcccncaccattggctccaagattgcctcagatttctcacgataaccaccaaatatgtagtgcctcgcaattgtggcttgaaacagacgatctggttcaaatccatccgcttgcattgcctgaatgagcttttccatatcttccatatctctagcngcacccttggtatctacaacgagcttataaatg

SEQ ID NO: 39213 - DNA, 92 bp, Oryza sativa
gtacccgcgatcctctaagcacctgatgcttgcgagctcgtaagagttcatctctagaagcgcggattgtggactgatcttcttcctgaaca

SEQ ID NO: 39214 - DNA, 424 bp, Oryza sativa
  unsure (1)..(424): unsure at all n locations
atgtacggcaggtgggcacattgatcactactggttttatgcttactcacacttaaattttcctgatgtaacttcagaatagcttcaagcgaagttcagtagtccattaatgaatagaatggcgttatattactgtacgaatcaagccggcatacggaaacacttgatgccatcacatcttacctggatcttggtgtttatagtgagtgggatgaacaaaagaaactggatatcttgactagagagctgaaagggaagcgccctcttgtccccccatacatacaggtcagttgttgaatgtagacatcaaattttctatcctagtggctaatgataacttatattttagttgtgataaatgtttcgttacatggaaaccacaagtgtcaattgagntttatcgtgttggacagtacaatataaa

SEQ ID NO: 39215 - DNA, 231 bp, Oryza sativa
gcacatgccacatatttcgtacggttgagtttattatttacatgattggttcatgcgaggtcctaagcgtgaaaaagatatcaaatagataatatataataaaaaagttgcacatactctttctctgcacttcttcttaaagagacgagaggagaggaaaagtcttcatgttacatattacggccatttgagatcaaatttttctatgatggagcctgtgggtctcttagc

SEQ ID NO: 39216 - DNA, 318 bp, Oryza sativa
  unsure (1)..(318): unsure at all n locations
tatncgcgtcgacaccaacattcgtccgaaaagctttttgttttctttcagaaattagagaaagcgagggaaaagagtttcagcttaaaattatccatctttaaaactgcattaaagcatgcagagacaggaaattctgctttttcaaacattgtaaagctgtgattatttgaccggatcttttaatactccctatcggccgaagactacccgttactgatttttgctatttaatctgcttggttaccgcctcttaactaaaaattagacatgcactggagtaaaagcaaatcttcaggccatgtgtttccatcaacc

SEQ ID NO: 39217 - DNA, 471 bp, Oryza sativa
  unsure (1)..(471): unsure at all n locations
cgcttgagaggggtatcgaaccggccaccactaattggctggatcgatcgaagntctggtactatgctcacggtggaacgctcaacccaattgatggctccctggtcttcagcgatcagatacgcgaggctgcgcgtcgactaacggacacagtggaagcctcttctcatggcacgtttcgacccgacagagagaaggacgagctgtcactcgccctgcagactctagagcatccaggaccaacacaacggaaagtggtgattccttataagattgggttcaaggaggacatccacatgtacaggagtcggatgacgagtaagagagataccgacgcgaagattatagatcttgagtacagggtatcgagctacgagctcagcatgcaagaggacgtggcaaggaaggatgatgaacgcatggccgcacatcgggtccatgatccccaaccggacattcctcctgcaatgg

SEQ ID NO: 39218 - DNA, 133 bp, Oryza sativa
  unsure (1)..(133): unsure at all n locations
ngcctgtaattattggtgaggaaggcttgtttttcctttaactgctaaacattacccacagctgcttcctgtggtcgaagacgagctccccctattgctccataatttccttcacacaacaaaatgtactggt

SEQ ID NO: 39219 - DNA, 394 bp, Oryza sativa
ctcagctgatgcatgccagaatggtgaatgagagagtggaaatgtctgggagtatatcccgcatagacctatccctacgcaagacgaaatgcactgtcattatcttccaagatagaacggtatacagaaagacatcatgatggagctcagcccttgacccctttattatgaaaatactcaacctagtgtcaaatcatttgagcttagtgaccgaaaatctgcatgatcacatggtaacctgagtaaattcttttctactttcagctcggagatttaattgttcacacacctccaattaagaaccaagatgcatttgttcattctgaaagactgaaaaatggaacaacatgaaatgatggagaatatagaagagagctcgtgccatgtggatctg

SEQ ID NO: 39220 - DNA, 145 bp, Oryza sativa
  unsure (1)..(145): unsure at all n locations
ccttggagatggcaatctcttgcatcatgagagacacaatgtctaactgacagncctgaatggttgcatccatgacataccaaaccaccccctaatatcatcattggtaccaaagcgagggacgatagaagctcttacaatccta

SEQ ID NO: 39221 - DNA, 402 bp, Oryza sativa
  unsure (1)..(402): unsure at all n locations
tctgttacttgactcatcaattgtatgggtataatcaatatatattcctattgcccttctctttagtgccagattggtcttgacgctgatggttaccaaccatacctgatatcacctgaaaaaggtttaagatctcttataaaagtcttctagaattagcaaaggaaccatccatactccttgtggatgaggtaacatagttgaggatctgtttccttattctgaactagatagcttcctgttgtagtatattgcagcattatttcttattactcttcaaactctcttctacatgaaccttttgaagacccttgacttacagtctattagtactcttgtctggcactctgatctttgaacaaatntgagttgcatgcttcatatctatatattccactgata

SEQ ID NO: 39222 - DNA, 330 bp, Oryza sativa
  unsure (1)..(330): unsure at all n locations
agcttggagctgtcgagttctgctgatgttgtacatacagacagctatgaacgtgagcaccagcgtgtcatctcatcagtcgcttcagaagatgatgtgcccagtgctgttactactatcaaaatgccatgaacatggatccgtgtattcctgcaacacagtgccttgcgctatggtctttttttctgagagctcgtacttgtacctgtagaatgtagtgtatgcatcaagctgctgctactgaatanaagaaaaaagaaaaatatatgttgtgggttgggctgaatgcctgtaccccatgagcacaggatgctctcgatcattgagcgt

SEQ ID NO: 39223 - DNA, 463 bp, Oryza sativa
  unsure (1)..(463): unsure at all n locations
tcggataaaatntcacccgactaacagctttttttttcacaggactgattattcagagatattgtactgcacgtcgcgacgacagctagaacccacttccacaatcttcatccgtaaaaaatgatagaaactcgtccatgctcaatgcacatatataattcaattactttaagaaagaaaggtttatttcatcttccttttttgcatggactaataactagcttgtctatatatacaaaaggaaaacaacttgcatgatgaaaccagctagttgaaataattaaaagaaaatcagtggacaggattggactgaatttaaaacgtgccatttgagacaaggaatagttacgatatacagtccagtaaaaaacatacgacattgttaattatgtactccctccgtttcaaaatggttgacacacgtgactttntattacgtgttcgaccattcgtcttatttaaa

SEQ ID NO: 39224 - DNA, 323 bp, Oryza sativa
agctttaattcgttcccagcatgctcccacctaattattgaccacttatccgctctctcgctcctacgaccaacaatgatcacttgctcaccaccttttatcaccttttatctctactatgaatgtttattcatggtttcttttgaactgtataaaactagtcacaattaattaagtattagtttaaaaaaattgaacaatagatcaatataattcttaaatcaactctcctataaaaaagtttcacaaaaatacacatcatttaacagttcgggaagcgtgcccatagaaaacaaggagtataagttgggaattaaagggga

SEQ ID NO: 39225 - DNA, 373 bp, Oryza sativa
agctgattgtggatcaacaaatctcttgtgttgtgtcatgtacacatcctcatcgagatttccattgaggaaagttgttttgacatccatttgccatatctcataattgaaataggcagcaatcgctaaaacaatcctaatagattttagcatggcgaatggtgagaaagtttcatcataatcaacaccttgaatttgtctgaaacctttccccaccaatcgtgccttgtaaatgtgaacatttccatctacatctgtctttttcttaaagacccatttgcactcaatggcttttacaccatcaggtggatcaaccaagttccaaacttgattgacatgcatagattctatttcggattcatggttccaacca

SEQ ID NO: 39226 - DNA, 337 bp, Oryza sativa
ttgaatggtactgagtcaagcaattctattatacttaatatggtggtactgaatgtcacaacaggcagtattttacacccttctttttgggcccaaaccaagccttcaaagaggccctaaatgttactagttggttctagaaaatccataaagcacgggttcatcatatcagttgagtctaagaatagccaactatcctcgacatattaattctatgacaatagacttcggttgtgaatctatgagcatgtgtgttcatcctgcatattgtcttagagggaaatgaagtaatgacagtgattagactatctaagaacatactccgtagttacaactg

SEQ ID NO: 39227 - DNA, 398 bp, Oryza sativa
  unsure (1)..(398): unsure at all n locations
aaaaaaagaagtatgagaaacgttgttcagctggctagtcaaccaaacctaccacctggtatgctttaaaacaatactaacttgacaattaaaggatctaatatttttnctaatatttgttttcggaaataataatggaatatattattttggcggctaaaaatacttctccgggtcaacgtgttgaaattgcataaaaaaacacagtttaagaaataacatacattttctaacccgttagatttcctcgctggtttaattgactcacatanaaaacaaacagaataaaagtagtgcaaaaaccatttgggtagaaaagtgatttatattccaaaatcccaaaacaatcggtatatgtatcttccaaaatctattaagagtaattaatcagattgtac

SEQ ID NO: 39228 - DNA, 177 bp, Oryza sativa
  unsure (1)..(177): unsure at all n locations
ctctttggtttccggattttcaggcccaagttcatgaacattatattacatgtntaatgaagtatttaatttatagaaaaggtctcaatacaccaaacttaaagttgtcccgnttgcgatgctattaacatgcatacaattaaaataaaatataagttcacaaaacaactcttttat

SEQ ID NO: 39229 - DNA, 413 bp, Oryza sativa
aagctgttgtgtaaactaggaatgacttgtttttattatactcatatccttggcgtgtgatatgcctggtttcatggtaaatagtcatggcctaagctattccactaatttattaccataatccttataatacttgatgggtaaactttacagtatttatattcggatgcctgtcgagggtggtcattcgtgaaccctttagaagtgtaaccactccgatctcttttattggggctaaaaagcagtcggctagcatgcctatttatgcgccgcgtatgcttttgtcatataatgcacaattgtgttattaattttgctttcaactatatgtttagattgctaactaatcacataagtgggggctacacctaaatatgtgcatctattcgatgcaccatattctttatactttc

SEQ ID NO: 39230 - DNA, 191 bp, Oryza sativa
agcttgcgttaaactgccaaggtaccgtgatttgctctaatacgaaacaaccactccatgggccctcacaccaccgccgggcactgccccgccagccccggatccaccgccgccacacgaccactgatcctcgctcgaagctgctcgcgcacgctcgacgtcagcatgccttacaggttgtcccgttactc

SEQ ID NO: 39231 - DNA, 358 bp, Oryza sativa
  unsure (1)..(358): unsure at all n locations
gcgcttgttctacaaacagaatttatgggaatgtcatgcacctatttcattaaagttccaggttaccaatctggcttccttcatagagaaaccacagagaaatagttgtgtgatatcaattaactcaccagtggaaactaatccagaattttggtgcatcatttactgatccatacaaaagtgaaaggtctgtangcattgatctttgngacatggcagcatcacctttcatgttctttgaaaatggtggacagagagtaagaagtgagaggcggtacataaaccaatggagtttgagaagaatgaagggtaatacacgttgcttgattcttgagtggatctgctgtagagctgacat

SEQ ID NO: 39232 - DNA, 258 bp, Oryza sativa
  unsure (1)..(258): unsure at all n locations
ctgcagctcggaggaggactgcgttacttttgtttacttttatactgcaangaaatgggacggtgaatgtatggccgtctgggcccacccactagggctcgtgtgggcccatattgccgataattcaaaaaacaaagaccatttttcatctcaaatcagattacaacgattatacatttgctcgattcctataactaatccaataataattcaagaaacatatggctcattcgaaatttagaacaatctacgtttatg

SEQ ID NO: 39233 - DNA, 441 bp, Oryza sativa
tcttcagcaagactcatgtgacgcgctagctctggtgctgattatgtcactcgtagcttcagccacacactgtaagactgtctattttatcttacattatacttaacgccatgcacgaatgctatttggacatttgaaatctgttgttcatgatatgccctttttttcttgggaggctctgacaacaatggcaccgtatgtattatagtataatataatcagcttcacaataaagctcgattctttttttgccatcgtgcctattaatgagcacacacttgcattgctgaatcaacagttctcttatttgtactgtgtttagtatatcactcatgttcatgtgctttatttggatgatatggcaaccacacaatgcttgtatttcattccacaagcatagacacatgacaactaaatgtatcactgatgcaacacatatat

SEQ ID NO: 39234 - DNA, 290 bp, Oryza sativa
  unsure (1)..(290): unsure at all n locations
agcttcatctaccctcagttctcaggtattatctgggattatcactaactattntctcatgtaaatgaccaaaaataaaatgtccctgtaaaggaatgtccctgtgcagataaatcaagttcaggagatctataaatggtttctatgtctgtcaatatatagtaatgttggaactgagttttcaaatgcacaaaaataaaatgggtatgggaatggtggagaatcatcttagctaatgtggaaaactacagaatcttaaatttatataatgataaaaggaaaaaaatcta

SEQ ID NO: 39235 - DNA, 470 bp, Oryza sativa
  unsure (1)..(470): unsure at all n locations
cataaaactcagctttttatagctggtntgctatgtgaattttcaatgatgtattcaactttatggtgctcgcatctatgtttaaaagcagtcggtatatcacttggatcatggtatttggtggattcacaccatatatgctatatattgatatcaagtcacttggttgactataattatcgagaaccactcacgtggttcgattatttattccttgactatatgcttgggttggttaactaaccacataatccgaggctacacctattaagtgcatctagtcaatgcacctaagtttacatttcattattttcagccctccacagtcttcaaattttgataaagtactcggaagaccatggcaaagatgattgagcactcggcttagagaatctgttcgaagaagatatctttcgactgtgaagtctcagcgctactgggagatatggtacccataccacactgatggt

SEQ ID NO: 39236 - DNA, 125 bp, Oryza sativa
gcgcgcgtgcaaccttgcattaaacacctaagttcccgtgtcttgctaagtacgaaagtactcattcttgctctatataaatatatataattcctccgccttgaagtgaagatgaagtgaagtga

SEQ ID NO: 39237 - DNA, 446 bp, Oryza sativa
  unsure (1)..(446): unsure at all n locations
ctggacgacaatgtgagatcacacctgctcagcacatattccttccagttccttgccaagttgcaactgatgaatcaagcaacagcgttggagcgagaacggaacagcgacagaagcgccaccatcggaggaatcagctcgtcagaactcggaagtgttccaaggacaacaggtcggcaaggtaggggagaagcgattgccctcacgagtccgtgatcgagaccgcgtaatctatctatctatctatctaatatctttctttttcgttcgcgcgtgtcaacgaagccgaaccaatctaagcacccgaataatggaggaggtcgcgatcgtccagtataaaccaattcagcaacatgcagtttccagaaagaaaaaatatatatattcatggataatngggtacaaagcgtacaacttcataacaataatacagatatggatgtcag

SEQ ID NO: 39238 - DNA, 332 bp, Oryza sativa
agcttccaatgcaattctctccgccttgagttctgatgagttcaacaaggttgatggactagaggaggccaacgagatatgggatactttgcaattggctcatgagggatcacccgccatttgtgatgccaagattgaactattggaaggaaggctacgaagatatgtgatggatgacaaggagacaccacaagagatgtatgataagatgatgatccttgtcaacaagattaaaggacttgggagtgaggacatgacaaatcactttgttgtcaaaagacttctccgtacttttggtccaagaaatcccactcttgtatcaatgataccgg

SEQ ID NO: 39239 - DNA, 427 bp, Oryza sativa
  unsure (1)..(427): unsure at all n locations
tncctcgntaccaactgccgcctcgatccaacctataaacttccccacgaagaaaggagaggagctccaagaagggcaagggtgcccatcatcaaccatgaagatgacccaccaccgccagctccctttgcactaccatcattacctgctccaagcacatttgcgccggtggcaacaccaaccttctcggctttctggtcgacgcgccgacgcctgcgccaccttacgagcacacggacgttgcgccaacgccggcaccactaccgacgtaaccagccgttatttaatatacgacgctgttgaattntttaagatatgtttgaccattagtcttcttaaacatatttaattaagtattatttattctattgtgactcgatttatcatcaatggttttaagcatgacttacatatatttatatttaca

SEQ ID NO: 39240 - DNA, 377 bp, Oryza sativa
  unsure (1)..(377): unsure at all n locations
ntactatcaagtgactattggaagcacttctctttctagtgtcattggactggatctaaccacttcatataggaactgatgtaacttgaggaggcaaaggcgttttaaccatgttgctgacttgatgagactgacgctttggcgctgaacaaccttttgagagatgataggtcttccaacagttgggaacaatggtggactatctttcttggtctcgagagtagacaattactgacgtgatgtcccggctcaagacaattgagacacgtctcacttgatggatctttgatgtgcactcttcccgctgtgcatgctcccaactgaaactggagcaaagagggggtcataacccttgtgacaatgttattactatcacc

SEQ ID NO: 39241 - DNA, 344 bp, Oryza sativa
  unsure (1)..(344): unsure at all n locations
agcttgtacagtaacttgtcgcataacctactatcaatatcggtgctgattgcagcagcgtcttttgctgcgttttttactgtgncctggggctatattgcagaaagagaggatgcacgcgtcccggtattatcagaggtgccggcattcatgtcattcatggaattcaatgctctagcatttgggttctccatatcaacaacaatgctgcttctgttaactagtctacccgacagctctcagaggtatcgcaagtataacattcgctatttcatcccactcggggaaacggggattttggtatggttagcaccggtggttacgtggtaaggctgacacccctt

SEQ ID NO: 39242 - DNA, 401 bp, Oryza sativa
tgtgtcactagatgcttcaacataaccgcacctgactgcttttgatatcgcaccactaataatatcatgagtaagctactgaattatagctttaaagaagttctaacaatcttaaactacacaacaaaatgtataacatctgttttatacaattaagcaggtgggcgtatcaaaaacattatagaatgcttgatgacgatacactacggttgttccatatggcaaacgacaaaaacctgcatccatatttgaaagatctgcacttttttactgcaactataattttataagatctgcgtcttactgcaactaaattatgcgtggcctgcctgaacccttagacccacaaaaatattcgtgtgtagccctgaccagaatttttaatgtttatataaaaattg

SEQ ID NO: 39243 - DNA, 439 bp, Oryza sativa
  unsure (1)..(439): unsure at all n locations
agcttagaaattgatgcatcagcaaacatctctttgttgaactgttgctttcatatgggatagtggccaaccagggttatcaacaatgaacttgccatatttttctgctatcctaacagatgaaacatgtctactgtccctccttggtgggcatgcatgcatactgtcataagtggcaatctgccaactatcacttcttgtagtcttggacagcaaacacacccaaggacagctagcccaatcacactttgccctcaccctcttgtgatcatctttaataaaattaatcactttcctttcagccagggcatnatttataatggtcttcttgaactgatgcttagagctgaacttcattcctagctcaaaaacatgaacccctggctgcttctgaaaccttggaaacttgccctttttctaacaagctcaccatcactgg

SEQ ID NO: 39244 - DNA, 346 bp, Oryza sativa
agcttaaggaagctcatgacactctccttacttctattcaacatggagctcacatagatgttggcatatctcgccatttgcttgaagacactgctacttgtcatagctatatattctgcatcatctagcatatctacttcatgtgatgatcttatggatatgcctagctctagctctgcgcttctatttgcgatgtatcacttgcggttgtgaacaatgagctcaatgagcaagtggccatgctcaaccagagttaggaaaggtgcttcaagggtaagaccactcttgaccaaaatcttgagtgagcaacagtgaattcttaacaacgagggacatggatttattc

SEQ ID NO: 39245 - DNA, 216 bp, Oryza sativa
  unsure (1)..(216): unsure at all n locations
gatgtatggagtatgccctgcgtcccctctggtgatgacgatggcgccctccagcttcttgcggaggagctcgacgaggagcatccatatgaggatcacccgcgccagcagcgacagctcgtcggcggcgaccttgttggccggcttcttgcagttgttgctgccggcggtggcgccaccgttcatctnggcctcggagaagatgtacgacatgac

SEQ ID NO: 39246 - DNA, 375 bp, Oryza sativa
agctttgagtatcatctatatttatcactgatgctatgtagttgtgatactatacagaactttgcttgttcgaattctgaaaatgctccaacataaatatttccattctaaggaagaaatgaatgagcgtatggttggattggaaactgtaacctgaactctacatatatacaacacagcttattttgtagtactcaaaaaagctagcaatatgctaaagcgggtgagaatacttgttgtttctatactggctttacctcaatgcaaaatataatgtagtggtcgaagaagctttctgggatggatcagcatagtagagaagtgtcacttttatcctgccatcactccttggtggactattgaaagtcacctatg

SEQ ID NO: 39247 - DNA, 465 bp, Oryza sativa
  unsure (1)..(465): unsure at all n locations
tctgcggatcattatatatatatttgttcggtcagcctatgttattacatccggtagtaatttgagttctaatttgtgtttatgccctatttctgcttatcattgcttagatgaaaatgtgaaactagtgcttgttgtaggaactagttacacatgagtatgagtttagagcatttgagatgttgtagagctccaacaatttgtcaagtctcccgagttgtgtaaaacatctagtcaacaccttcgtgtggtttgacgggcatgtctcaggctaaagttaactagcatgtggagtcccagtaatatttcctatgctctctacgcgattctttgggttacataatatgtntgctattagacttgatagggcagcgatgatgttggacgaatactggtntatctgagtcttattgagaccccatccaactaagctatcgattcgaatagttacataatatttaatct

SEQ ID NO: 39248 - DNA, 396 bp, Oryza sativa
  unsure (1)..(396): unsure at all n locations
ttagagagtgctaacatggattctattatgtaactcaatctgagtttgaaggtattgnnccccccccacnntccactcacctccttatcccccccttttccccttcctccctcttattacccttctccttcctaactcttcccactcttccttctctcattctttcacccctccctcttctatctctcccctctccactctttccttctatctctttcagactaccccgccttttctttctcccaccttttcccctccttcctttctctcctccttccctctcttccctcttattcctttctctcccctcccacccctcctgctcttctatatttcctcctttcctctattccccttctaatctcctcacttttctcttctctactcctcttttct

SEQ ID NO: 39249 - DNA, 462 bp, Oryza sativa
  unsure (1)..(462): unsure at all n locations
tccaggagaagcctgatgctaacctctgttctttttctaacagctggcacgaaaaagtaaggcgcggtgggggtggatggcatgcatacgtcaccggactccagactcgatggcccacatgcagtgaaacaggggtaggattgttgggtgtaaaggttctaaatcgaactgtgcgtggccgttttgatccgacggtcacaatcaactggaagctaatcggacggcccatacgatcgtgtggcacagcgctcgaggatacaaatcacgccttcaggtctcacggaccacgcctctcctcttctctcctcgcaaactcctctgcactactgctttaccctctcccagtctcccctcccccaactccggcgatggccatggcggcaccggcgcgcgacgacgatgagccccaggacggctactactncatcgtctacgagttgcatgcctcgggggacgacgagt

SEQ ID NO: 39250 - DNA, 440 bp, Oryza sativa
  unsure (1)..(440): unsure at all n locations
agcttgtcgagcatccaatgcttgggcgcattgagcctcttcagatgcttcttcaaaccccttgcctggtattacggtaagggaaaaggaaatgatcagcacaaataacaacataactgcagagtagcacgacatgaatacaatgacacaatgaaatcacaaggttatgaacagccctaacatcgctcatggcaatggtgcggcatggtttctaagtaatctttgttaattcttaacaaaaaaggaatctagacaccagaacctataatccttgaagccaggcagatatacaagttgaaccttggcacgtaacagaaatgtagaggaacaataacgcagcaaacagcacgagctaaaccctcaaactagcattgacagtacaattatacaaagcatactgaanataacgagctgtctaagatcccacaaatgggcgacag

SEQ ID NO: 39251 - DNA, 457 bp, Oryza sativa
  unsure (1)..(457): unsure at all n locations
tcactcgagccctcttctgaagtgcaaccctcttgattgcaagcaactgattggtagagctatcaccaattaccagccaccagccttcttccttgggctttgggtacctgggggcatgaactggccccacctcagaaggcaagttcgtcatgtcacgctccatggtcacctgtacagttacattgtcaccagccctgatatcatcaccctcgcgaacttcgtaagccatatcgacattggggaaacgcttgaagaattcaatgatatcctgcagctgagggtttgattgctgcaacagatcccgcatctcatcgatgctcatctcagccagatcaaagatgctctcaatgnggcctccttcattctcctgacatctncgtgccaactccttggtgaaatgtggaaagtgtaaaagacagaatcacgatcccacatgccttgtgtcaccatttgactc

SEQ ID NO: 39252 - DNA, 367 bp, Oryza sativa
gcttgctcctctgctgcacttattttttgacgcttagccgcctgacccaaggggatggtcttcttcttggcagcacttgtatgttctatccatatccttactttaggaagtgttaagatcggtgtctaccccttcagatgtatttctggaagacatttcccttgaacttcgaaactgttctccattttctttaagtcacctttccacttgctctctgacccgcggaaggggaatgtctacgcattgggtccacacattcttctctgatctggacatactctatatctcccgtgccttgtttgcccaaactccgatgctggacgtaatcctaaaccaaccgttgtcgacgaatctggtgtttgcgggc

SEQ ID NO: 39253 - DNA, 445 bp, Oryza sativa
  unsure (1)..(445): unsure at all n locations
tagcacatgattatgttaatattaactattataaaggtggaattttgatttatttagtttttacaagaatttttaaatgaaaagcgtttttaaaaattatatgaattagcagttcagaaagtgagcttacagaaaagaatacaatagtcaaattaagaagttgtcacccgtttggaagagctctggctctagcttcttctctcctttgggcttgagcccaaccaagtagttntatctccacccaaaggatcggcgagctggagtgctctcacacaatgaactggagatgtggaccanggtttaaactgctccataactctactccaaactcggttcttagaagttaaattgttggagccttagcaactaaacccttggccttaatgtccatactatcaactntaatggtgggcttattcttttttctcatatagaatgggatatg

SEQ ID NO: 39254 - DNA, 338 bp, Oryza sativa
  unsure (1)..(338): unsure at all n locations
gaaccacatgtgtttttttttctagacggctaggaatagaagtgcaaaattcttaccttaccattattcttcatcgcttcggttataagtgtatcttcgagttattacatccggtcataacgaggcttctttgctttntaaaccacaacttagggtgtgtttagttcatgttaaaattgaaagtttgggtaaaattgaaacgatgtgacggaaaagttggaaatttgtgtgtgtagaaaagtttcgatgtgatgaanaagttgaaagtttaaagaaaaactttgaactaaacagggcctatcacagttaccacgtcaagatagcggctatcgtcaaat

SEQ ID NO: 39255 - DNA, 482 bp, Oryza sativa
  unsure (1)..(482): unsure at all n locations
tatgaaactaagcttgtctaacttctattgcttggtaggtccgatctgctggagttatagcttgtttaatagatttagctataacttgatattcttatgtaaagctgtatcggattctagccgatacgttatctgtaataacttaagtcacttcatcggctatgatatgaatccatataattattaattcactttttcttgattataagcatttgatattgtctcggtttggtccgatctattctgattgcttgttttttaagggaaagatcaaattagtaattgcatgacatttacctctatgaccgattgcaagtaatttaggtctaatgcatcanagactgttcataagctaattatntaagttggataattgtacaatgactgactttaacttcatcaatcttatactgcatcattgaagttcgacatgtaagattggntnntgtagganaagtgttattattatattcaagatctag

SEQ ID NO: 39256 - DNA, 415 bp, Oryza sativa
agcttaaagaaagcatttaataatcagatcttcgcacttcatcagcatggttaattaaccctataggataagttcatctgggatatgttgaaaaatgagcaaagaaaccccacttaagccttactagattatgataaaccatgctcctgctagacaatgcaaattgattaaatttgaaattcatagaagccatacactttggtggcttgaccactggaactgtcttctgagatcttgtagagctttccatgcatgacatagtcaaacttgtcagcaagtgtttttctggcaggctgaaagatataaatgatatataatgttagcaccatgcacagaagttttggtattaaatatgtgcctaaatgaatataagcccaagcgaaacaacacatgagtctaggcaactaacacacat

SEQ ID NO: 39257 - DNA, 367 bp, Oryza sativa
  unsure (1)..(367): unsure at all n locations
ctgacattacggaccactgggtctagtaccatggggtacctgtcccggtggaccactcggtcaggatgatccgagcggtcaaacttaattgcgatttctgaccatcgaagatactgtggcgtgtcgggttgaacagcattgatctctcgttcagtcaacttctgcttgcgcttagactcataagctaaggggccgccgaagatatggttgagctccttgcggcggtcttgaaatcctgccggggcgtcgacgtcgtctttcttcctcgacgtgctntgttcttcgtcagagttcttccgtgcagtcttggtgtattgatccgcgaattgctcgtatacgaaacaatctttggccacgtggttggagt

SEQ ID NO: 39258 - DNA, 256 bp, Oryza sativa
gtatggtttgaaacaagctcctattgcatggtatgataagcctaataactttttgcttgcgaaaggttttacaatgggaaagggtgacaaaacgctttttgttcttaagcatggtgataatcaactttttgttcagaattatgtggatgatattatctttggttgttcgactcacgctttggttgtagattttgctgagactattctcacggaatttgagatgaacatgatgggggagttatccgactttttggga

SEQ ID NO: 39259 - DNA, 453 bp, Oryza sativa
gtgcatctttctctctgatctttgtgcgtctcagtacgttgttccctttggcatggcatcgatcgccggcgtctccgataccgagaggcctcgtcctttctctcttatgcgatggcatgtacgtacacgctcggttgtgacttgtgaagatcccgtaaatggacgactgtttgtagacgtcgatcgagggcgtacgtttggtggccctcctcgtattgtacgtggatacggcgttcaattcgtggggcagaagacagaaacatctttggttcagctgtgcccactgctcttctttccacaaacgtgcgagagaaaaaaaatcacgcgttagtatattataagaaaacatggtctttgctgcacattgcaaccggccagacggttatttgctggggataagtaaaaagaaagaacaaatagttgagaagtgaaataatctgatatcattagatg

SEQ ID NO: 39260 - DNA, 439 bp, Oryza sativa
  unsure (1)..(439): unsure at all n locations
agcttctcttatacttgaaatataagctattatattggccaaagagatgaactatccgttgggccaaattcggaggagagaacaccaagttttttcatgctatggccactgaatcttttaaaaagaatactatatcttctttactggatgtggatggtacatttctaactagccatgatgacaaagctgtggttgcttggagggcttataaatcaagaatgggggtttccatgtttgaagatatgccttttgatttaaattcacttattgatgcccatgaaggtttggatattctgcataccccattcctcaaaaaagagattgatcagctcatcaaggatttacctactgacagggctcctggtcctgatgggtttagtggtctttntattaagaaatgttggcccataatctgtcatgactattataagctatgtgg

SEQ ID NO: 39261 - DNA, 236 bp, Oryza sativa
gaattgaacctggcccggaacgactggatggttaccctgggaaagctaagagacctgtccttattaacaactatttgattgaacccaaaccgtaccaccggggaacttgtggctggagataatctccacgctgaaaagagagtagtaggtgaatgcaatcctagtaccataaaaagggtatatgcatctcaaaccatcgggtaaatcaaaaatgctaatgcccctttgattaataa

SEQ ID NO: 39262 - DNA, 371 bp, Oryza sativa
ttccctgctcgactatccccaaatggctgcatgctgacagtatggcaacgaatgtggctggtgttggactcaatttaacctttgtcatctcttcgtagaggttgagagcttcgtggatcaaaccatggttggcataagctgtcagcatggtgttgtacaggatggcatcgtcggttcctgatgaaacaacggtgaaagcgctctctgcaaaggtaatctcaccacatttcgcgtaggcatcaacaacagcgctagctacgcagaagtgcttggaatgacctgtcttgagaacaagcgaatggatgcatctgcagtgcctgatcaatgcaacatttgcacaggcatttatgactggtgccaggatgaactca

SEQ ID NO: 39263 - DNA, 414 bp, Oryza sativa
  unsure (1)..(414): unsure at all n locations
agcttngcgctcaatagttgcattaatacatgatctgagcctacgcacaagactacttgcttgtttgtgcttgattgcgcttagccatgcttctccctgtcactttcaagacagacaaattaaaaccaagttgatcctggtcttacttgagctcatcgaggaacctggtcatgtaagagatgatgctccattggcattgacaaccttgatcaaagacagtgtggaactgcagaagcaagcactctcaacaaacgcagttcagaagttaaacaaccatcttatagcaaattcgttggagtcaaggcgtgcagngaccatattgcttgctatatctgaactttgctcaaaattggaagaataatatctttacttatgtcagttatgtacgtgcacgactttgaatggatattgaca

SEQ ID NO: 39264 - DNA, 480 bp, Oryza sativa
  unsure (1)..(480): unsure at all n locations
actaagcttgacagtgtcaacttgtttctaccagagcatgcatttagattcatcaaattntattcccggctatgattgtggatcaaattatgtcatcatcagacacactggaaactcaaatgaaaatacacgtgctagactgctagtgtatggtacaattaatacgtattgcagtctatctatgaacataaatatcgcacaactattgcttgctatttaatttgcacggtatatggcacgggatatttttgttgcagtgtgctgaattactgggtgaattgcatgacaggtaaaattcaagaccctcatttgtactagactgcctctgtaaattttttttttttggttttgaccctgatatatagtccttctacagaaatacagagtataataaagctgtaccaatgctgtaatttgtgttttttacactacatatatagagcaaatttatgatccttaaggangtaccatgaaatacta

SEQ ID NO: 39265 - DNA, 395 bp, Oryza sativa
agctcgggcttaatcaccatcctgagaactctcttgtttgtctaacggatgccaagcgaacacgtctacattgtcgcagacgaagatgaagaacgcgagttcctatttcgtgccagcgctgccccaatcttgatggttttgtcgggcgttggaactggtcagcgagatgatcttgattgcgccgcctggttatggcatcttgtagggctagctcacttacatggacagactagtcgcggtggatgggttgggagtatgctcgaccattcgaggatgcgttgccgactggacgccaactagaagcctcctgggcaggaatgccattctgacccgcatctcgagacttgatagcgaaatggatcgctcctgaactcaccaccacattctaccaagat

SEQ ID NO: 39266 - DNA, 459 bp, Oryza sativa
  unsure (1)..(459): unsure at all n locations
tactaagcttaacaaaattatgaaactcatatagaagtttcaccgatcatttataaattaaaactatatttaacttgaatttaaatataaataagaatgttttatgaaatttgatctaaatttttaaaattttaaatttaacttttcaaactttgaggtcaaataaacacattctttttgttgtttactaataaaatatttttcaactcgaaaattatgttggtgaaaaagctagcgcataggtactctaagtaggggtaatatagtcattttgaaaataacttaatagttaactgatggtcaactaacggtatgggcttggaggggatcaaaatgaaaactcgggtgcatataagagatacgtcaaaactcaagggcacagaagggatggagcgaaatttcaggggcatacaanggaatttctctaagaagtatgctgagtctataagaattaccttg

SEQ ID NO: 39267 - DNA, 370 bp, Oryza sativa
agcttggtaaaatcctctttcttcatgacaattgtgctttcaagcacatgagctgcacggaaagccgtatcaaactcatcccaagcaatgttagtgggttcaaggtgtgcattgcaataattctcccaccaatctgcagcaggttctcttatctggtgagaggcgtaaagcgttttctcaacaagagtacactgtactaagttgagttttctatcaatatctttcaaccaatcgtcaacctctacgggctcgaccgtctgagagaactctggcggacgagacctaaaaagtctgtcagcttggatctattgttgccatgtgagggtggccatttcatgcgactatgctgaaaccggtatgctgcgctaat

SEQ ID NO: 39268 - DNA, 460 bp, Oryza sativa
  unsure (1)..(460): unsure at all n locations
tcagcttgactggcattgcgcattctaatgatcactcggggattctatatttgcatcattggccaccaacccaagctaacataatcaatggaaaagtgaaaaaggagaggaaaatagagcataatttaagatgtcgaatagatttattcccatagtgtcctgcttattctataccgtcttctcaagtggagacgatggagactgaatttttgcataaaattaacaagtcagaatgcacacagaaaaaaaaagccggaaaaaatgattctccaaggcatataatcaacagagaattgaccactcatgctctcccgtcttcgtcctaatcctctcttcagcatctggatcaataattcgttcgttcctgaccgaatcaattagtgtcctctacaactgctacccaatcaacaccttttctattngngcaacgctccngtgccctctactcgtagattatact

SEQ ID NO: 39269 - DNA, 441 bp, Oryza sativa
  unsure (1)..(441): unsure at all n locations
agcttcgtaaacctgcaaatgcttcaactactattcattttcagtaataatcttcatgtcagcataccaaaagagatatttagtattccatcaataattgcaattgatttatctttcaacaacctagatgggcaacttcctactgagattggaaatgctaaacaactcgtatctttgggactttcatccaacaagttgtttggagatattcctaacagtttggtaagttgtgaaagtttggaatacatcgcgtttgactctaatattctcagcggaggcatcaccacttcattaggaagcatgaaagagaggattaggctttcgacccaaaacgaggaagaattntcattaaaattttttaattataatgtattgcgatcccaatatttcattatatttctcatcctccaatagctattgtattactttaaaaaaacatca

SEQ ID NO: 39270 - DNA, 464 bp, Oryza sativa
tggtatgcttccttgcagtgtgttgccactcaagtaaagattcttgaagcgacgcaaatgtccaagggaaggatggatttcttcagagagtgcatttttgagcagtgcaagatacttcaggaatgttaaggtcccaagtgaaggagagatgtgccctactagagctcggtttgtaagatttagggaggtgacacgacctggattcttcagactgcatgagacaccttcccagctgcagtagttggtgctatcattccaggagatcaaggattgctgcggatcaagactgattgccttcttgaattcaagaagtgacagctgatctgttccatttccaaaagttgagcagatgactgcatgtgagctgcaagccatcagaaccaagatcaactgtccaactgcagtaatcttcatggcaatcaagttctggcgaatattgatcaatcctgctcgtatgcatggac

SEQ ID NO: 39271 - DNA, 434 bp, Oryza sativa
  unsure (1)..(434): unsure at all n locations
agctntatctgtttctgggatataacattgttgaagtattagtgcgcaatagagcctgtacaaatagagttaacttattctccttgagttttatggctcatgacttcatgccctctggtgtaaaatgtttgtgattttggagccaactgccaacatataggttatcctcctattctgtccatgatgatggctacttaggaacagtacaagtatagttccttaagtacttgcaactgccttatatgctagtaaagtaataataatcaattttcacttcaataaagtaacactcattctggtaagctacttatgatgagttatgtgaatggaacatgtgtgaactcaacctgatctttggtgtgactggattttgttcttggttaggcgtcctttttggatgcctattatagttcattctattgtcatatttcctg

SEQ ID NO: 39272 - DNA, 491 bp, Oryza sativa
  unsure (1)..(491): unsure at all n locations
tataaaactcagctcgaacactngaaattgatgaccatcagttacttgctattatcccaataagaaatctgtgccttacgaaaaaacttatcatattagagagagaaaaaatggctgagttgcctttagaatggctgttacagaatagatctcacctagagcatatagaaataagcaacgcggaactgttgaagtctttgcctaatatgcatgaatggcacactctacgaagcatgcttctgcataacactccacttcttcagtcgctcccactgatgcccccaaacctgtgggtccttgacatcaacggctgttgcaatgagttgcatggggaatgccagtctggtggttctgagtggtcaaagatttgtcggatccatagttgtaacattacccccanaatatgatagatatgcaatatgttcatgccaacttttgtattcttggatagtttntcctttctactcttttaccatagaatctcttaatca

SEQ ID NO: 39273 - DNA, 274 bp, Oryza sativa
tgcaagctttcattgctcttcttcttagctggtggtctgttactgtaaggaagattcttctccacaacagggacaatattcgagaatatcacacagagaagtgctgttgcctgtttatcgggacacttcaaaaaataaaagtctatattagaaccatcaagttaaaccatctaataaaagtctatactaaaacatgtatgagggtagtgattataccagccctttcttaatgtgcttaataaatatccgcgcatattcaagccattgaaaaact

SEQ ID NO: 39274 - DNA, 303 bp, Oryza sativa
agctctgcgtgtgccctcacactcacgttgttctcataaagagagacatgggcctatagcttgcatctggggttaaacctagatttttttttctctctctctgattgggaggatggattatctgattttgtgataacatttaagggtgttcacacgaatgagttaccattaccaagttgaaatgttgattaaaagaagtcttctaatgaacatatatatataaagcttcagccaaaatcatactatcttcttccctatatgtttgaagttgggtagttcattttttagtccattacctcttaa

SEQ ID NO: 39275 - DNA, 370 bp, Oryza sativa
  unsure (1)..(370): unsure at all n locations
tctatccaaagttgaactgaaagccgtcaggaaagccggcccccgggaatactnctcctccatggaatccaccatcgtaatggaatgtgtattgctggccacctcccccaaaaggattgaaaccaccacctcctcctcctaccatattcatctcatcaagatcctctcctcggtcgtatcttacacgtttatcttcgtccccaagaacctgcaaattgccgattgcgcattgctaaaagacacgcgtggcatctgcagcatgtcgatctgattcgaaacaagcatgcctatagctaaatatgggtgaccagaatntatgttattgggacacttcttgtctcngacacatgcagtgtctagcatgatatat

SEQ ID NO: 39276 - DNA, 359 bp, Oryza sativa
ccctgttttccgctgtaccaaaaaaaattaacggcgaactggacaaaatctttgtgaaaatgactgttctgaaaaacatgtggactactcttctctcccaagtcagcctgtgaacgaactgaataattggcacagtgtaataacttttagcttccttatgccacgggtgatgtaaatacacaaagaaatcattctttactaatggacacagaggcggctgctctcctccataaccaagatatgaaagcacatcatttccatttaaagaaaatcccgaggcctctttgtatgtcactgatctcacatccctgatgttcagatcagctgacatccataacccgaaacactaactgtaaagt

SEQ ID NO: 39277 - DNA, 220 bp, Oryza sativa
  unsure (1)..(220): unsure at all n locations
agcttgnggtagaagatatgatcctatacatataaccatgtgaaacttcatatattgaatgcttgccataaattttgagctttgaactctaaattttaaagaaaaactccatgttcatggccaagcaaaattctagctaacaatttagatggaaacttgaaaataacacttggaatctcatgctcttattgtaaaaagcccattccgaggtaatcgagag

SEQ ID NO: 39278 - DNA, 444 bp, Oryza sativa
  unsure (1)..(444): unsure at all n locations
ntgngtccaaagaaatgaaggatagaacatgacacttactttcatcactaggctctcctgacctttcggacaaccagtgcaaagcggtttcttgcctgaaatgagttcaagaatgacgacaccaaaagcgtatacatcaattttgtcattcaccttgccatgcatgaaatattctggagccaagtatctgcaaaagatatgcatacactggtaagggaaggctgccacaacccaacaaaaaataaggtgaaatagcaaacaatcaattagcttacaaacccgaaagttccagcaacatcgttgcatgtgatctgcgatgttgcatcagtgtcccagagcgcgaggccaatatctgataactgcataacaagacgttgaaattgaagctcacttaatttgatacagcacaggaactgaaaattttcatgatgttgaatgggcaaa

SEQ ID NO: 39279 - DNA, 359 bp, Oryza sativa
agcttctcaaacaaagtggttttgatttgatcagaaaggtggatgtgcaagatcttctccacttttaccatgattaaagtgagtttaatcactgtgggtttcttttggttggtgcgtttatatttaactgccactaagattaagcttacgtgccctattaccacagctacaaaatctagcaggcggtggaaaagaatgtggttaattaaattttgggaaagtagatttgattaaaagggttgtgtgagctttcagtggaagtgtggttaatttcacccttttgagatctgataaaaaggtgagtgatacatcctcttttcttttcttctaaatttttgcttacccgttgactatatgtg

SEQ ID NO: 39280 - DNA, 470 bp, Oryza sativa
  unsure (1)..(470): unsure at all n locations
tattggtgaagtattggaggagaaagtaaaatgacatatttgcaaatganaaataatttatgaataaaacttttatatacaatgttcttaacgatctgaaagcaaaggctaaaaataaggataaaaatttcaaaattaacttcagatttaagcttaaaaatttaaattttgatcaataataagtataaatataggtgaaaaaatgaggatactatgggcctgtttgggggagcttaagattttaagaagcaactggttggtagtcagcttcttagaatctggaaaagccgggtttcccagtttctggcttctagttcattttctaaattctacaactacagcttctcagaatctggactaaaagctagactgtttgtgggagcttctgattataggagaaactgcaacagctagaaactcctncaaacagaccatatagttggctagagatgttgtagcctttctctcat

SEQ ID NO: 39281 - DNA, 332 bp, Oryza sativa
  unsure (1)..(332): unsure at all n locations
cagcaattccaaattccatgtgagatatctgaaagatctgaagtatgaaaaatactgtgtagcactaactccgaattttcagtatatgagtgaactgcttatgctttccccatgcaagctataacctggccaaaccacgtgaaaaataaacaagtctaaggaggctggtataaatattgtcaggcaaatggggatcatctgggattagctgctacgataaattctggaaagtgcccaacgtgtgatccatgattggtgttaatactccatgattggtgtaatactcaataggaacgattctacctcagttgctgcaaaantttgatttctga

SEQ ID NO: 39282 - DNA, 430 bp, Oryza sativa
  unsure (1)..(430): unsure at all n locations
agcttcactatatcctntactttcttttctgagctgagcatcgctttctgcattgaaaggaaaatgatattatggttagctgatgaagaaacttattaatcatgaatagtagattagatagtggtcaatttctattaacatggcagataattaacagtactttacttctgaacaatcattggttaacaaaatacttgctgagctggcatacgccagccaaagtttttattaagcttagaaagtgttcaaagggatttctttgttttagtccacgagtccaaattcttgtatttttcaaccttgtctcatggaataaaaaactaacgtgtatacgatataattatatgaatttaactgggataaaatacaacttgctttcagattatgttagcttgggatagttctgcaaagatgacttgatacacacaat

SEQ ID NO: 39283 - DNA, 413 bp, Oryza sativa
  unsure (1)..(413): unsure at all n locations
agctngatcccncatacaagagcctcaccacaactaattgcatctaacaatgcagcaagcgaacaatctcctacaacagagaagagactctgcaccaaaaaacccttacaatgcagcataaccatcagccctcacctagagcacccaacccgaccatctaaaattcagaaatcctgaaacccaaacaccacagtagccaaaattgcaagctcgatcgcgcacaacacaactcgttgcatccaccactagcagcagcaatcggaaatgcagcagagcagaaacagtgttaaggcgaggaggtcgagagatatataaccttgacgtagaggacgccgtcgatctggatggagacgttgtccttggtgatggcggactggtcggngatggggatggccttcttcttgagcgagtgg

SEQ ID NO: 39284 - DNA, 458 bp, Oryza sativa
  unsure (1)..(458): unsure at all n locations
tatataatatgtatagagtaatccagcagaacctctgttactttatctacagaaggatggttggcattaccatttttgctgcatcggtgctaagtggcgaaatatattgtgttttgaccaagccagacatacccttgtcggtgggcctctcttttttccttataccatcttttttaacaggggtgagaacctcatcatcacgcaatagctcttcatcttctggagccatgggtggctgaacaggaggagtactaaaaatagtttgtgcataagttaggtatgctaaaaagaatcttcttataaggatagcagctaagaatacatatatctggctcaattcatacttatatacgctcatatcaagtaggtcaagaggtattccgagatcctcggggacaatcattntgggtatgtagttcttctccaatgaagtgattctgtatttggtatatctgcaa

SEQ ID NO: 39285 - DNA, 409 bp, Oryza sativa
  unsure (1)..(409): unsure at all n locations
agcttgtaatctgaaaatgttgttgaatgttttcgaagaattatctggcttaaagattaatttccataagagcgagctttactgctttggtgaagcccaaacaactcaggatcaatattctaacctttttcaatgtgaggttggttcttttccattccgttaccttggcattcctatacatcataagagacttcgtaattcggagtggaaggaagtgattgaacggcttgaaaaacggttggcaagttggaaaggcaaacttttatcacttggaggacgactaacactaatcaattcagtgcttaccagcctaccaatgtatatgatgtccttttttgaaaatacctaaggagtgatcaagaagattgattattttcgatcaagggtctttnngcangggatggacaca

SEQ ID NO: 39286 - DNA, 410 bp, Oryza sativa
ctcaagcttgctactaccactcgatagaaaaatcataattaggtattctgctgaattaagacatgaatatcaaataaaattgttgtgtaatatagtactgaatcaggacttgaataaaagataacatgctctctgttcaatttcttaagtagaaatggctagatggactatcatagttttccatttacttgtttatgttctcattttttgtataccgctcattctattcaaacatatcctaatgcttcctgtttgattcagatttcttaaaaaccaactgaagaggtgttttaacgaatgaggaagctgatggatggtagctgttgaagtcccgtttctgaaacccaatggaagttccaagttgttcgacctcacagtttatctacatatttttggataacaggaaccct

SEQ ID NO: 39287 - DNA, 339 bp, Oryza sativa
  unsure (1)..(339): unsure at all n locations
agcttgaacattgtaatcgtcccacagagggttctctactattttatcatcgaggacaagtcggacacatttgcggatgcctttcatctacatgaaataaatatgtgataattaatattctacaaacttggttgcactgataatgctaacactttatggggaaaaagtaccagaaacttaagttctttcaagtcatcttcagtcgtgtccattgagtcaaggacacacacctttctggtacaagccagaaccgctacgtaccaatggtctattgaagttcttattggtaggaaaatctgtatgtcaaatcaatacaatntacaaaatagttaaataata

SEQ ID NO: 39288 - DNA, 461 bp, Oryza sativa
  unsure (1)..(461): unsure at all n locations
tcctgaagnttggatcaagggctacaaccctaaaccttatcctcttattctatcccccaacaacgcctcctgctatggtccagacaagtcctctccagatcttgcaagaagctgtttgcccagtatccaacatcatgtgtgctcacatatttgtggtgcttctcatgtctcagcaccttctccccttcaggcatctctaaagcagagtccattgcatcagccacagcatcgatgttccaagggtttacccgaatcgcaccacttagggaatgtgaacagccgatgaactctgacacaacaagcatgctcttcttccgtgccgatgggccaagacctaagatcccgtctagttgttcattgccctgcctagcaattacatactcatacgggataagattcatgccatctctcactgctgtcaccatgcagcactcagcgacaacatattaagccattctctc

SEQ ID NO: 39289 - DNA, 440 bp, Oryza sativa
  unsure (1)..(440): unsure at all n locations
agctttatgacaggcattgtgaaagcctttatttgtttttcatatgccaacgagagggggcccaaaccaacaacaggttaagtcccagaccatactgtgctcagaagcccaagggtacttcccgacaccaccccggcgaatccacatgtctctcggcatcaaggctcccctgataagctagttacttagccaagggtggcccattccacccatgtggtccgacttgtcttatgttcggatgaaattccaaggaaacggtccttangtgcaagagcgggaaatcgtacacccggtacgttccccggtccgcggttttggaaattcatttagttcgcaagcaccgacccatgggtccggtatatcaagtcttctgtaaaacccaaggtttactcaagttgttactctacaatttacgtttgaacgcgtccgtcgatactcgc

SEQ ID NO: 39290 - DNA, 360 bp, Oryza sativa
tcccggcacttgctccgtctccggccggcacgcagccgttcattctccaccagcgtcgccacagctctagctcctccccttccactgccaaccccgcacgccgcacggtcagaaacatgctaaccctctcgtctcggtgtgtggtggtgtacgtacgcgatcggttgcacgcgcgcgcgcgcgctgaggcggacgcggtgcatccaacccaacgacgagatcggcggtctcgcgcgcgcgcggtgcaccacgccacgctcacgcaacgcactctgcattattcgacccggcccgtaatcaatcatgcagaagcgatggcggcaaccgcgcgggagtgggcggtgcacgtcaaaaccacct

SEQ ID NO: 39291 - DNA, 235 bp, Oryza sativa
  unsure (1)..(235): unsure at all n locations
tgccagcttggttcattaattcactcaccattttttgtctttactcatcattgggtcactagatcgatcacttttgtgcgtgcggctaccttcaaggtggaagcaattataaatgtgctcgcaactngcggctgcttctaagccagatgcaactcatctatttcgtttctccacttcgcttagcggccgaaacagtagctccacttttcgcggcatgcatttggtggatggggag

SEQ ID NO: 39292 - DNA, 434 bp, Oryza sativa
gcttatccacctgcggggcaaatgctcgaacgaacacattcttgttttttgtcttgactttcaaccaatggtagctgcgtactaaacggcatgattggaatggaccaaaggtgtgccctggataactctcttgacgaccagggtggattgatttggaaacttaatttactggaggcatacccggtgacattctttcctgtttctctgataaacatctgtgatagggactgatgcgagagaggaaacacgcctcgaaagaatagaccagaactagggacaggacctttaacgaactaactcttctagttgatgtgatgttagtatcacttattctgcacagtgattaagcaaacaacctatcatggctacatcacaccccactgatgataaccacgcgctacacacacatgctacgaatcacacgactaacgact

SEQ ID NO: 39293 - DNA, 405 bp, Oryza sativa
agcagcttcttgtgcgtgcacaggaactgatatatgtcctcgaaccacctgaagctagggtcgatctcagaaattaatttgaaatttgggcaaactagtgccacgacttgtctagttgctataattttgatcgtaattgagaggtactatgcaagcaatatttgcacaccaaccatgctttcaattgagattcggccactgattggttaaactatgctttggatggatgttattgaatcaactaagggaatatgaggctctttttattattatcattttaaagtcaaaataatgctcactaaatggttcttggaaagaatatggttcaattttaaaaaaacctgtatagttagtgatggatggggccatacaatgcttcttcacttaaagatttaattatttttc

SEQ ID NO: 39294 - DNA, 451 bp, Oryza sativa
  unsure (1)..(451): unsure at all n locations
tgccgagttcctccgcatccgcccgcctaccttctctatctctataaccccattgatgctttggactggttgcatgccgtggggaaaaagttggacaccgtacagtgcaatgatgaagaaaaagtcatcttcgccgctcaccaactgcaggggcccgcatctctatggtgggaccacttccaggctacgcagccagagggacagcctatcacctgggcccgtttcactgccgccttccggaggacccatgtgcccgccggagtcatggcccttaagaagagggaatttcgggagttgaaacaaggcaaccgctccgtgatggagtatttgcacgagttcaataatttggccctgtacgccccagaggatgttcgtgaagatgatgagaagcangagaaattccttgcagggatgaaccctgagctgtctgtgcgtctggtctccgggacta

SEQ ID NO: 39295 - DNA, 371 bp, Oryza sativa
  unsure (1)..(371): unsure at all n locations
agcttatggtgatatgatggtggcattcgttttactgtgaaggngaccaattatcaagtgtacatggtagccggctcgcactgtctatatcataactcctcttcttcccttctaaaattttggaaggatgccataatatggttttgaagtttctaggccgccaagctgaagccaccaccacactgagctgtcgatccgcgtgtaattgcagtccggggtaataacacccacggtgcattctgagccagtgagccgctttatctacacatcacgtgcatcggattatcggaagcacaccgtcaatgcaagacaagtattttgtaatcgcgattaatctacaacaattagggcattcacatgtgctaaaaagt

SEQ ID NO: 39296 - DNA, 452 bp, Oryza sativa
gaactgatcgaatcatatttctcagaaaacacatggagtattattattgctaactgcgtacattggaagaatggagtagatgctagctagtggaactcgttgtgtgctaacaaagccatatgaaaggtagcttaaattttgcaacaacagccttttgtaaaagaaataaagaacaattgcacaactatttaattaactttctagtcaagtggcgtgcatgctttttgtcatctctatatacgtaccataagccaccttcacgtacatgatgaacagtaaaattgcactggaattcaatcacataagatagaaaaaacgagtgattacaaactcaaaggacatagccatgcaatccatgcaatggtgaccggcacattaaaattcatttaagcactattcttttatacaatgaggtgcaaaattttacatattcgtgaaaatatatatatgtg

SEQ ID NO: 39297 - DNA, 382 bp, Oryza sativa
cccgctagcaactctcgatgagcgtcgggaccttgttttctcttctgtccaacggagaggatggcttgccacatagcctagctccgtgctgactccactacacatacctttacacatgcccctgatggttcccctcacaataccattccacgttcccttccttcgacaaaactgggttggatcctcgatcccctcttcttcattccagtactggctgctttactccgcgattgtatcagacaatatttgtacctcatcgcggtcagtcatctgttgatacaagaaacatattgtcagtcacgaaacattcatgtccaacaatctagatatgttgctaagcgaaatgcgatctttgaaccctacacaaattccagcaactcaa

SEQ ID NO: 39298 - DNA, 433 bp, Oryza sativa
  unsure (1)..(433): unsure at all n locations
tagccgaattagtccggtcattatattcttactgatgtattctgtccgtgtacatacggacattactcttgtaacattgtaacattggcttgtttttgaaggcgacgatcgaaacggatgccatggctgagaaagagcattgccacgacaaaaggaagaattaattaagtttgtcaatagctggacgcgcattcacactttgcgatgtatatattgactgtgtggctcgtggatctatacaatggatacacacgttaaacgacaccttgaagaatactcttgtgaaattaaactgaagctttcggatcagaatctgtactcgacaaacgccgtgtttagttcccaaaattttntaaaacttttaactttttcatcacatcaacacttttctacacacagaaacttccaacttttccgtcacatcgttccaatt

SEQ ID NO: 39299 - DNA, 235 bp, Oryza sativa
agcttggtctcaccccttccgaggcaaatattcgcgctagctcggtcgggatcgcacccccgcacagcgccgtgacccccagcagagggccccgtagtttcgttagcttttggtcgaagagttgcgttgaggagatgcctcaccccaagccgttgccccgcaccagggaaaaagatggagagggagtggactggagagaaaggacacatcgattcccaccgcacggcttcgatct

SEQ ID NO: 39300 - DNA, 352 bp, Oryza sativa
gaacgaccaccgggttcttcatcctcttcggatggatgacttcacggatgaatccggcctccagaagtctcgccacctcctcgcggatgaaagcttgacgttccggggcctgccgccgcactttctgccggaccggccttgcgcccggccgcacggcgagacagtgctcaatcacctccctggggaccccgggcatatccgccggtctccatgcgaagacgtcagcgtttgcccgcatgaaggagacgagcgcgtcttcctatttgccatccagaagaccaccgatccgtgtggtcttggatgagccgtcgcccatggcaacccccttgaccgggacctcggcgcatgtgac

SEQ ID NO: 39301 - DNA, 222 bp, Oryza sativa
cttccatggaacattggaaccaatgccccttgttcggccatggagttcttcgttttccaacgctttcgtgacaatatcatcctcctgtctttgtgagccgaactcttgggagggctgtcttttaacattcaatatcacctggggtacagttaggatgcggtagacgaagaattccattccacataatgaaacttattctatatggtccacttacgattttct

SEQ ID NO: 39302 - DNA, 376 bp, Oryza sativa
taagatacatgcctatgaatgatgcctatgaatgaggattctgggtcacgacccatctagtccttactacacatttttaactaaaaaccctatgaattatttttcctatgtgtccatttggaaccaagaaatacatttaaaaatcatataaaaaatccttttgcatacgccctttttgctttggagcggtgggggaggggcactgtccaagaggagcagccaccaccatcaatgccttgggataggggtgaaatcgggtcgggttcggtcggatctcatccttcccatatcctaacccatattttataatcggaatcgggtcgggcacggatattatcggatacgaatagaagcacggatcatatcgggcataaat

SEQ ID NO: 39303 - DNA, 351 bp, Oryza sativa
  unsure (1)..(351): unsure at all n locations
agcttgacggtagacggtacggttcatctttctgtggtgtgaggaanatgagtggaaagggtgctgctatttatacggatcatcaaagtgacctactatatgggtacataattaatggcaacgtttcagatttactcacatggccgattagcatgtatcttttactgatgaccaagatggacatactaccattcctgctacgcgtgtattctctatcaaaaatgtactgcaaacggtatatcagatatcacgtaattcgatctattctttcccctccatgtatgactgtatgatgagcggatgaatggaggatgtataacaacatggattctattccttatagagggataa

SEQ ID NO: 39304 - DNA, 397 bp, Oryza sativa
  unsure (1)..(397): unsure at all n locations
gctgggcttggctgcgactgagattngggttcattcctactattattttcatangattgnatttggaaataaggattgcaaaaggaacatgatataaaatgtttcaatatgatagtccataaggttgatgcattggctgttagtcttggaaattagatgaaagttaaggtgtctacttgattagtatagtatggactggtggcgaatataagattctaagtgtaatttggggtgtgtttgttcacgtcaaaattagaagtttgattgaaattggaacgatgtgatggaaaagttgaaagtttgtgtgcgtacaaaagttctgatgtgatggaaaagctggaagtttgaacaaaaagttaagaattaaaccaggccttgatttgaatgagtataataa

SEQ ID NO: 39305 - DNA, 386 bp, Oryza sativa
  unsure (1)..(386): unsure at all n locations
ccagaagcgtgaacgcggcaaggggaaggtcggggagttggcgcctgagccaaaaaggggcaaggctgcgacgtcgatgccggtgagcaaatcggggaaggtcgtgagggcgccagcccaatttgagctaggcatgccattggtggaggacaatgtgttagctgtgatgggtattgcttgccgagagctacataagcaatacatggagctaagcaatgccaagcggaaaatgagggagtcatccatagttggacatcacgaccaccagccgttcctatcgtcgcctgcctatataactataggctgtgatgacctcttcgaccttatcaggatccggaagttggacactggtcttctaanatgctactcacttgtagtgcatacct

SEQ ID NO: 39306 - DNA, 429 bp, Oryza sativa
tcacccttagactcgagaatcaacactcccacagcatacataatcgactagattatgttgtgcaccactatctagcatggttccggagatcgatgggatgactggtgttcgctttgaagaagccttgatgcaggagaagacgatccatgcaacaatcgcaaggaaacttggagtaaaccttcatctgtcaagaaggtgattcctacataataccgtatagcacttagaagatattatttccatttggttaggtctatctcactaatgaaagatatgttgcccatgtgccataccatccactgtgcatgactccgatccgagagaacactcacgacttgattgaagcacaggtttcgtgttcaatctcacaacccaatacttgagagtctcactagggagtatgagcacctacaacaccatatcaagctc

SEQ ID NO: 39307 - DNA, 414 bp, Oryza sativa
agcttcgccggctagcgccatcatcgctaggtggcgggagggtggggaacggatgggagctgccactgtgttggcgccgtcgcgccgttgcgttggagctgccacactgctgcgccgctgcgttggtgcctccgcgccgccgcgccgatgcgtatgaatacgacggcgctggttggacttgggacaagtcgactgggggattgggcagccaggagcagccaagcagctctagttagggatttagggtttttgttgggctgagaaaatgggccaaagaaaaataacttgggccagccggccagtgatgtttgaaaaatggtaataccgggaaataccgaaccacacaaacagtcggaaataccaaacctttcgaatcatttcgtattttttaccggtcgtttcacattaccgttc

SEQ ID NO: 39308 - DNA, 471 bp, Oryza sativa
  unsure (1)..(471): unsure at all n locations
nggttaaaacttctgctgcatatgcccggatatactcacacatatcatacttcaggcacatgtcagggtcatcttcactcaacaagtaagatagtttcctagcctcctttgcgatccccttcagaacatagttttgaaattagcagcacaaggtttgtcagcaaaaaaaagaataagtaccaaaaaataatacactgagtggcagcttgttcaggtaggggaagtcacatacaaccaaagcagcagcggcaatggcagcatccgattcattcactttacagagcataagatttaaggcagactgccggagacctcattgctgaagctgatcgtctcggtgggatccaactcatgttccaatgaaatgcatatcaactcagcctccatcgtgatacacttganaccaccatttgcaataatngatgccagaaaaaanatgggtagtaacatcatanaatgataattactggt

SEQ ID NO: 39309 - DNA, 433 bp, Oryza sativa
  unsure (1)..(433): unsure at all n locations
agcttccatcacgcgaccatgatcaatgtatattttgaagagatgagttactatacgttgattagatagcaggccaagtttaacgagatgggaatggatttccatgatagcatagatatttgaacattttgcacaagccttgagaaggagcacatatgttctgtaatcagggcagaaagcagtgaaacgaagcatactgttgtaatctgtcagtgacttttccggagatcctttctccaaagaagctcggaggatggcattagtgtatggaaagatggctctaactggatatctcctcaaacagtttgtgtaagacattgtgcaaataagcttctcanatgcgatcactacaatgcagacacaaaataggcaatttcaccaggcaggtaagtgtataaacattntctgcaacctaatgtaattcacagaatac

SEQ ID NO: 39310 - DNA, 439 bp, Oryza sativa
  unsure (1)..(439): unsure at all n locations
tagcggacactntatgcacttccaaaattntattttattgttgaaaaaacttcagacggaagtccccacaacaacatacatcttcatcaccaaagaaagtgttgtgtacctaacgtaacataaggcatttgaggatgtctaagatgaagtcaaatgtggtgaaaggaccttaagaaaatcacaaagtataaaaaaaaacgttgggctctcaagttcatagacataggtggagcatcatggaagtgtgagaaactatggtgtaattacctatcttcaagaacaaagaaattaaatgtctccgtagctggctcacaattggtggatcaaccaatgtgtcatgcgtgtcgaatagacatagacttcttgagataattaatgtattcttctattggaaaggagcttatgagtacctncttatatttcaagaatgaacaggagt

SEQ ID NO: 39311 - DNA, 202 bp, Oryza sativa
cttgacggacttacacggctcacttgaggggtgcaagttgttaagataagattcgtataacacccttgagatttgacaattcggggaggtgctcgatcttgacacaacacctgataacattgctccggtagtaaatccaggatcacgtatctggggtcacgcagcttgcaagcttcacgaacgctgaatcccaaagcaagaa

SEQ ID NO: 39312 - DNA, 428 bp, Oryza sativa
  unsure (1)..(428): unsure at all n locations
tactcngctgtttcttcatggaatactgctctgctactattttgttttttatgactgaatcttacttcatatactgtctcttgaaccagcttaactattagaatatttgtaaacacttctgtaatattgaatgctgaatctgggatgggttggcaaatatgaactgcacgcgatgtctatagctatggagtcattctgctacaaatgctcacatgaaaacatccaactgatgacatgttcaaggatgggctatacattcacaaattattggactgtgcatatccacataatgttgttgacatcttacaggccagtatcattccacggtatacacatgatggaatgagccatgatttacataatgacgctgatgaaatgagcatagtggagagatgtatcacacagacgctgaagttggtctacaatgc

SEQ ID NO: 39313 - DNA, 399 bp, Oryza sativa
tatctcttacgctctatgaatggatcagtcagaacatctctcccggccgcctcgtacgccgccgactggtgttctcgcctgcacggttggcctattatgccgccgttgttgggcgtctacgtcttcaccgaccggcttgccttcgccgccgccgactggtgtttccgcctgcacggctggccttttatgccgccgttgttgggcgtctacgtcttcaccgaccgacttgccttcgccgccgccgactggtgtttccgcctgcacggctggcctttatgccgctgatgttgggcgtacacgtcttcaccgaccggcttgccttcgacgccgccgactggtgtttccgccagcacggctggcctattatgccgccgttgttgggcatctacgtcttcaccg

SEQ ID NO: 39314 - DNA, 360 bp, Oryza sativa
agcttatcataagggcttcgacaaggggttttattcgttctttgagccaaaagataaagatcggatagattcgaaccgcaattgcaaaggtaatcactactatgccagcccaaatcatgatcttcaccaacttggatttggttctctcgcgaaaatcgcgagttgcagagatgagaaccatgaaaagcaagatcccgaataagaaaacagaaaccgaggaaaccacaagaatgaagactagtagaggctcgtcttttggcattctttgcttctttttcactcaatgattcattcgaatttcccgaccaaaaattctatatgtctattcataaggccctcgtgctaaatgctacaagaact

SEQ ID NO: 39315 - DNA, 456 bp, Oryza sativa
  unsure (1)..(456): unsure at all n locations
tctccggaccttaagcgcctgcagctgcagcttgagatgatgagtgccatattttttttggatanagtgatatcgataccaactttgagcgtgagatggggataaataaataaaattaaaatgaatctaacaaaagtttggatatgcaatgataaatagagtaatagagttaactttcgatggtatcaaggttgttaaaatcacgatcctggatcggattggaaaattcgatatgggatcgcaatcatagaattgtataaattaaaatgtaaagtaatatattctgcctatacagaattgtagaatcagacatcttagacgttcaaaagagtcgttcaactctgctacttagtggcacagataccgaaatatgtgattggcatgtgaatatttaattattaattattataaacttaaaaaatagaattatttgattttttaaaaaaacttatatgt

SEQ ID NO: 39316 - DNA, 438 bp, Oryza sativa
  unsure (1)..(438): unsure at all n locations
tgcccggcaattgtacaaaattattctaaatgtaaatttaaaattaaacttaatttaagttagtatctttgtgtggtaaccgccagtttagagcgtgattgaccattcatgtcaagagaagagaatgtgcggtggttgactggtccatatgtggccagttgaatcggatgcccacaaaagaagcccacttatgccttctctgtataggccgaaattttggcccatatacatttgagggccgaaccaaatgaggcctcaattgcaaatttacttttacaatgtgcggcccaagcctactactggtagacatacgctccgcttgttgaataagtacggtgtacggccacctcgccgtcgcggacacgggccctctccttcgcgagcacgccgccgcccgcggcggcgggatatccnctgtagatgaccacacggtgatcg

SEQ ID NO: 39317 - DNA, 284 bp, Oryza sativa
agctgaattacactatgatattactatgtgttgttacagaacatatttactaatgatggattaattaggcttaataaattcgtctcgcagtttatatgcggaatctgtaatttgttttattattaatttacgtttaatgctttaaatgggtgtccgtatacgccaaactttttttttttgccaaaacatctagacacggcctatgtgaacttgggttgcttataaaacagtgacccccagttagcccgcagcatctactagcctgtaaaaagggcataactata

SEQ ID NO: 39318 - DNA, 298 bp, Oryza sativa
  unsure (1)..(298): unsure at all n locations
gagcttatgcactcatgaggtgctgctttatctttggactgcgcaatatggagcccactctatttggagaatgagcttgggccaccttattagagaacttttagggtataatatattaccagtatatactggcaggatataaaagggcatattataaatttgatagaaaattaaacaacagatttttggttcaaattgcatctaaatgagaatacccggatctggatcttattgtgcactaagggaggagcatnctgagcgctatttgatgaccaaacacgtgaccattgcaccattt

SEQ ID NO: 39319 - DNA, 354 bp, Oryza sativa
aattttgcactctagaacacagggttcacacaaagcagagggactaaatcacatgcttatattacttcattgcagacagattgaattacaccaagttgtggaacgcttcgctggtaaatgggccatgactacagtgatatatgtacagcactgataacacacgaatgataaataagagttaaatgacaacaattaaaggaattatgaactgcatgtgccattacttcggtttaattaacagagaaagggaggagaacagttctactcttacaaattttttagggcttgatgggtaccattcgcataacctatggtcaggaggctctgatccaacttgcacgcccgtgatttcta

SEQ ID NO: 39320 - DNA, 442 bp, Oryza sativa
  unsure (1)..(442): unsure at all n locations
agcttagcatacaaagataccatatcatcatccactaataagatgccacatcatcatccactaatccactaattaacaagatgacacatcatcatccactaacaattatcacatttaaacatcatgcaaacatgttatatctttatagtttttataatttaacagcttttcaaatacaaacatgttaaattatgatccaacataattcacataatgtttcaatgtatatctttattatgttntatgatatcctatatacatatatagtttatcctcacttagttagtggttaaatgattaatctatggtctaaattatctttcttctttttntttctctaattaagtcatatcacatcaattgtttttagcctttagatgattaatctacggtccaaactatctcccttcttttcttcttccataaagtcataccatcttac

SEQ ID NO: 39321 - DNA, 147 bp, Oryza sativa
tagctcgaagagaacacacggccagagcatcatttctaatctttcagtttttcaaactttcatcagctcatctatctaaaatcaatctttgataacatccatgcattttaaacatgctactgcttttcggcccgaggctgcggacta

SEQ ID NO: 39322 - DNA, 438 bp, Oryza sativa
  unsure (1)..(438): unsure at all n locations
tatctttcttgcgccgtcccagtttgaagtccgcactgctagtgtgatcaatggaagaatgcactgacgtctataatcaccaaaaatggtactctgagtgggctcttgatgatccaggttgttcaagcaacaagccagtgaagtaaatcgcgacgcctgtgggtggtttctggttatgagggctcgacgcangaaccctggcactgccctgtgcatagacaagggacgcccaatcccctccttacattgacaggatatgagcaggaagaagatcctacacagaaattacacttcatggaccaggcctccgagaaagaattcgcccaggtttacaaatttgaatcaaatctcctgcaaagagaacaaaaacacaaaatcatatcgctataacaataccagtcaagctctcacttgaagcanagaaataatttnaaaaaa

SEQ ID NO: 39323 - DNA, 425 bp, Oryza sativa
  unsure (1)..(425): unsure at all n locations
agctntaggtgctacgatcgtgcttgtgaacttgtcacaaaaagttgccaacacaatttttggcgactccgctggggaaatttgctcaatgtcatctcaacttcgacgccgccatgacaaagccgccatcaaccaagtcggaggtggaaccatccaatatcatgccaatctcattggaagatcttgatggggaagcatgcaaggccatggaggagtacattaaggcgatcacgcgggaggcactgatgagatcatgcaccaggacctgtcaaggtgtggttctcaagcctggaccattgcttaaacctaattttaatgtggtaagtactgaagaggtatcaatccctatccaacaacacgtagcaagtacaatagattcatccattgctgctttanatagtaagatagatgcatctttcgaatct

SEQ ID NO: 39324 - DNA, 427 bp, Oryza sativa
tgcattatgttgataacgtccccctgcttccataaccttgctggtcgacgaataatatcaaagcatgattgcagcacaccaaatgcgcactcgacatctttcctcgccccttcttgctttaatgcaaataatttgtcttccgccaactgatgggccgtcactgtcttcacgaatactgcccattctggatatattctatcggcaagatagtaacccatgtcatattgtgttccatttacgttgtagtgtaccgttggagcttccccttttattgcttgaataaatagtggcgacttgtttagaacgtttatgtcattctgagacccggcggtaccaaaaaaaagcatgccatatacgaagatctttagttgccactgcttcaagaatcatagtatgatacgcctttgtaccactagtgaacatgcct

SEQ ID NO: 39325 - DNA, 435 bp, Oryza sativa
  unsure (1)..(435): unsure at all n locations
ngcttcaatataatgttgatttatatccctcatattcaaatgtggttattataaatggatttgtcatcaatcaccaaaaagggggagatagtaagttcaagtgccttaatttggttttggtgattaatgacaaatctagttatatgagactaacatttttatgagttttttttgactagtctcatttggatatgaaagtaaaaatgattagaggtatgtattaaacttcacatattctaacttggtctctcttgtggatccaaaatatagtgtgagctccctcattgatcttgattgattatgtgcatatgtgttcctttatatccatatgtatgcacatcttgaggggggaggttattctatattttcgttattataagacttctatcttgatttgacatcatctcttaactcattattctatattgcctatat

SEQ ID NO: 39326 - DNA, 457 bp, Oryza sativa
tgtgcatgacgcgattatcagtgcatgcacatgcgtgatctctgtgtaatgatattcattagatgatttcaaacattaaattcttctatactctttcgatgtgtatttttttcataattgaagacaaatcttttcacccaatatctcagaccatatgaaaattggctcttctctgagcatagcgctgattcttcctatcatcaaggcttactctaaatgctcttgttgattcttagtcaccaagccatcggatccaaccacctagcgcaggtaagccacgagacgactaacaaggcatggtgagcggctcaccgaagtggtatgagaagctagcctagacgatgctacgttgtccgatgcttactgattctttatattctatactctggattgactatcttatcatggagaaatacattcatgagaattctcgtgacgataagagatctataacgta

SEQ ID NO: 39327 - DNA, 432 bp, Oryza sativa
agcttcgacctgcaagctcggacggacgacttgtcttcttgccgtcgcaaaagggtgccctaaaaactgatcctcggtcctttccatgtcacccacgacgaagaacaacattgctcgcacagcgtaggagtagctaccattccttgtcctgtcatggaacatcaccgaggaaaaaacgagtaatttatgtctactacagaatcttggctggctgatttctatagctacctggacagcgcattttcgagtactagtataggagtatagtactctatgattttgtggatagtagctttttgcatgtttgggtgtgtttagttcacgttaaaattgaaaatttgggtgaaattaaaatgatgtgatggaaaatttaaaagtttatgtatgtacgaaagttttgatgtggctaaaaaaatgaaagtttgaaaaaaa

SEQ ID NO: 39328 - DNA, 435 bp, Oryza sativa
  unsure (1)..(435): unsure at all n locations
tgactaagtttgtagacaaaataataacatttttaacccaagacaaatttattataaaaatatattcaattattgatttaatgaaactaatttgggattataaatattactatatttatttataaacttaagcaaatttaaagtagtttgactttgaccaaagttaatacgtcttataacctaaaaacagagggggtaccgtgttttttgagtaaaagattttcatatgtaactctagtataattgaaatgtaatactacacttttactgtattggaactatactatatctacgatataactacgatatagaacctgtattcaagtatagtttggttagctagcaccggaatcttacacgtgatatgggtggatnnttttttccttcatgcacaaatctcgaggtgatccgatggtcacagatctatgaaatttg

SEQ ID NO: 39329 - DNA, 436 bp, Oryza sativa
  unsure (1)..(436): unsure at all n locations
agcttatacggtggtgggtagcagaatggttcttagangagagaggtggaaacacaatgtgaggaagtgtgcagaagaagttctcaaggaattggttcacaggaatatgttgcagcttattgaaatgaatggatttggcaggataaaatcattcagaatgcatgatattgtacgtgagttggcaattgatttgtgccgcaaagagcacttcgggtgttcatacaaatgtgagaataaacatggtaaatttcttgaggggaaggacgaacgccgcgtggtaatacataaattagacaagcctattaatcaagccattntgaatgaatgtcatagcctccggtgtgtgatcacattggacgaagcgacaccaccatcaccatgtctgcttcatttgggagcaaaccaatgtatgtatatgtcagtacttgagttaact

SEQ ID NO: 39330 - DNA, 406 bp, Oryza sativa
tgcacactggcattaccaatgtgcttgagcccctaagagacacatgatatcaccgtacatgaaaatatatggcatatgtggtgcacaatctgattaaattaaactcactaaggattgaccaaccgcctggaaaatgaccacaatacataatcagccgaaaccataatattggtcaatacaaatgctcacttacgtggcagacagcatcgatattatatccaatcaactgctatataataccaaacaatgcctcgactatatagaatagacagcggcgcagctatataaagcttcactacgtggcagcctttaaaatgcattgcaccatctcctaaaaaggtgagtaccaacggtataaaaagattatacagaattggcactagatcacgcgctatttagcctagca

SEQ ID NO: 39331 - DNA, 287 bp, Oryza sativa
agcttgtatattacgttgtggtttagatgattgccaataagctaaagaattgaggcttttatttgggcttaacaaaaaaattcatgacatgcttgattgtcaaagatatacatctctttctcatttgttacagcttgcttgcaatgctgaaagtaaaatagaggaggacatgaagaagcaacatgctatgtttttgtcttctattactaaccatttgcaggaagtgcataatcatgaaaaggaggagagagacatgaaagagccgcttgttccattgatcacactca

SEQ ID NO: 39332 - DNA, 412 bp, Oryza sativa
  unsure (1)..(412): unsure at all n locations
tgaaccgggtgatttantttggttgcacttgcgaaatgatagatttccggaattgagaaagtctaagttgatgcctcgtgctcatggtccttttaaaattgttgagaagattaatgataatgcatataaacttgagttgcctcccaagtttggggttagtcccacgtttaacatttaaaatttgaagccatacttgggagaagaggatgagcttgagtcgaggacgacttcaattcaagagggggaggatgatgcgaacatcactaactcggatacacacaacaatcctccaacgttcattcaaggaccgataacaagagctcgtgcgcgacaattaaatttagaggtgagctcgttcctatgttcttctttgtatgaattcgagaatagattgctacctaatgattatatt

SEQ ID NO: 39333 - DNA, 346 bp, Oryza sativa
  unsure (1)..(346): unsure at all n locations
agcttcattggtattcacactttgaatctctttcaccacgcggcatgaagcaaatactggagatgttctttcccttatcttcatcttcactctctccatctacatcgcttagtggcttaaaaccggcatagactttttcaaacatcttcttgagattctccttaatcttcttccccttaaatgtgctcttgggcttgttctccttgggcttctctccaccattgtcttcctttttcctcttccaagcttaagacaatgcaatcgaatgtgatcaagagcaccacattctaaacaacgggttggaccacctcttctnctctacttgacattgttcatagctcgagca

SEQ ID NO: 39334 - DNA, 449 bp, Oryza sativa
  unsure (1)..(449): unsure at all n locations
tgntagaccaagcctaaacaagtatagtactgcttctaatgttagtctaattgtttcaagttcaaaatgctatttctatttattgaacactacacaacaactaaaatagcacacacatcatgttggtttttactgtaaattctctctattttttcaaaaacggcaatgcaacacaatggactttntaactgacaattcaacagtggtaaaccttgctaatattttagtctaaatagtttaataaaatctggtcttaatgtccttttattttccactgtgatagaaagtgtatggtgacggtcccttgcaagaaatttgtcatgttgagcaggaaaacattgtgatggtaatatacataaatttcatttgtttatacatgggaatagttgcactatcttgtaactgggaatatatgctctctttacaacagaattcacanagccatgtca

SEQ ID NO: 39335 - DNA, 423 bp, Oryza sativa
agctttactttaacttatacatgcatttctatatctacttaattatgttgggggtaattagccccgaaatggtcgtatgattataagattatatttaattgatgcctgatgctattagtatgttctcttttctcatggcgtttgcaacgttgtcatgattttttttttttttggaaacgtctgaatgtatcatcggatcaaagaagcagaaggggttggcccattgttcacccagagcaagtttttaagctctcttcaaccctcggctctgctacctgtatatatcgtccaccaaacggtgtttacctaatacctactgcctccgctccatattacttggctttttaaggttttgcttggcaatgtttgatcattcgccttattcaacaaatttggaaatataattattttgttatcaattgc

SEQ ID NO: 39336 - DNA, 465 bp, Oryza sativa
  unsure (1)..(465): unsure at all n locations
ctgatggggcacgatcaaagaagacatcatgttagtaattcactccttcgaacaattgcgaagcaaccaccttcagaatctgaactcggcttatggggtgcctggcccaaaaaaggaaggaactgaaggcatatgcgacttcaagccaatcagcctcattcatggcatcggaaaactaatctcaaaagttcttgctcttcgcctccaaccccacatgggctccttgataagccaggctcagagtgctttcattaaaaaaaggagcattcacgataactntatgtacgttcggaatctggcaagaaaattccaccaaacaagaacaccagcgttgctgctcatattagacatctccaaggcttttgattcggttagatgggactacctcattgaccttcttcaacgaagaggattcacaaccagatggacaaactggatcacaaatctgctaatctcctcaacgtc

SEQ ID NO: 39337 - DNA, 287 bp, Oryza sativa
  unsure (1)..(287): unsure at all n locations
agcnttgggggtnttgttgacggtcgttatcgataagtttcgatcgtcaatattaccaaaatagaggagaactagttatgcttgcaatgcatatttatgttagaataataatagtccactagtattaggtttactaaccttttgcagagaatgaccataaagtgaaagagaatcaacatcaaatcagacgataaatcaatcggacgatgtcaagaatcagacttatgcatgaatgggccaagaactcaaaattgacacaatgaattgggccaaaattcacaagtcta

SEQ ID NO: 39338 - DNA, 455 bp, Oryza sativa
gtgcaaccataaagacaggaaggctgcactgttgacatgtggaccccacatgtcaacctaaagggccacggtagaccaagtacatagagacggtccacgggtcgacggaagcggaccccatgtgtcaaccgaggcaagtggcccacaaacggaccccactagacacctgttgatcagaaaaacacacactggcctggaagatctgcttaactcctgtgcaggtccaaaatctcgctttatgttcgtgagcgtgcaagttgatttgatcttgtaatcaacaagaaaggaagacaagaaaaactgcggttaaattcataaacgatagccgatcggctagttgccgatgacatatcatttatctcggagccgacgtcataattgaatcgatcgacaatgatgaataaataagaataaactaaatctagtcgatcagctggagatattaacatcatata

SEQ ID NO: 39339 - DNA, 343 bp, Oryza sativa
agcttataattaccagtgtgactaatacaatgtcgtaggtcgtgtatatgcagagaattatattgcagattccataacacgtagaggggccaatcgattagcttctacaagtgcatgtccctattgatggacaaaaagatccagccaagaatcttacatgagacctgatcttgacttgcctcctctagaaaggaaagggaaagtgaaaagccgcttagagagaaagaaaagaaaagaaagcacaggaaagaagcatgcatcatgctggctcctctttgaagttatgcaaacccaaagctagctagcttaactaaacacaaaaggaaattttatattaaaaaac

SEQ ID NO: 39340 - DNA, 432 bp, Oryza sativa
  unsure (1)..(432): unsure at all n locations
tgctaccttgagaacaccaccactgagcactgacctaagctgctgctgcagcagcattcttcaattctattcctgtgtgctaatggcagtatgcccctccatctctttgtctgtgaagaaggctgaaccttttctttcttttaaaccaaccgcaccggacgagacaaatacgaggttttatatattgctatagtagaaaaaatataaaattataatcctaataggctaaatcataaaagaaaaaataacacaacgccacgaactgatgtcttctatacgtcagcttgagaaaagaatcgacaccaaaccaaccatcgctatgtgtgaccgatcaccaacatctctacaaccgtgtataggtgcactttgaagtctgaactntgaaatgtatgaagacgtatatggttcatgcttctctctatctatctctga

SEQ ID NO: 39341 - DNA, 449 bp, Oryza sativa
tggatttcttggctgccccgtgcgacttgcgttgcatccatgatcctgttaatttcatcgttaaatttctctgggcattattcctcccattattccacctgtagctgaagctactagttagtactacccttgtaaaccttgtttggttagactaatagtattaggaactcacctcatatatttcttttcttctcctgaatagcattgctgttacgttcagaagttcagtctgccagccctttctgctcgaaaatccatttttgcccagtactccgtacctttttttttggttcagatagcctctatccaaaaagggaaaaagagaaaagaaaagaaatccatgggcttgtaaggcgcggcccatatatgcccatgtgagaggcccattatggttactcgtattgcgtgcgccaccgcatgcgtctctcttggctagtattcttcttttt

SEQ ID NO: 39342 - DNA, 296 bp, Oryza sativa
agcttcacttctactgaaatcattgacagaatatgtatcgccctaacaaccaggttgcctgaggccaatacttggtgtacaccccaagcaggccagcaatactttttgtcctcctggatatacatatggttcaagtcttcgaagtataagggatatacttcctctatttcaggttataagaatttctaacattacccacattcatataggcgtgtttatgatggttcaagtcatcgaagtctaaggtatgtacttcctctatttcaagttataagaatttctagcattttccctcc

SEQ ID NO: 39343 - DNA, 472 bp, Oryza sativa
  unsure (1)..(472): unsure at all n locations
ggcatacggttcacgggaatgaaanataccaacacacgtacttgtcttatataataagacaaaaataatatgtatgtagaaccattgcaaaaaaatcatctttaaaatatgattttatacaatttagagataaaatatattacgctacaaatttatgcgaatttatgcaaatatatccaatcaatgctctatgaatgttctatcttttaaattattctaaaattatatatccaatttgtgatgctgttgtattcttttaattaaataaattattaataattatgatattaaatacatcacagcatgtgaggccggcatataataactaatgttatgatattttttaaataatttcacatcatatttagggtgtcaaatatcacttgacgaatatacaacgttaatttaaatctacatatgtaaaaaaacaacacaacttagttttggttttcaagtagatctaattttaatt

SEQ ID NO: 39344 - DNA, 425 bp, Oryza sativa
agcttatttcgagtactattaaaccctacataaaacatggtccaaaacctttaatagatgttgaaaaacttgcaaagaaatcacgtatatgtgttgtgacatgtgaaacaaccaagagttggaattttagtttaggtttttcaactcatagaaagataaatcattttgagcacttgagacaaaactaaccaaacacgcttacatccgtcttagtagtcgtcattcaaactcagtctggtctttataaaaatactgggacaggtaaaaggtaagaaaagggatgtttagcttcattatacattttccttgtacttcttctctcgggcttaactagacaatggacatcactatctttaatattcacttgacttgatattcatcaacgcatgatgtaccatcacttttatttcttcaagccacttgat

SEQ ID NO: 39345 - DNA, 445 bp, Oryza sativa
  unsure (1)..(445): unsure at all n locations
tactaagctaatctgttggaaagganattaactagatatatacactgtgtttgatcatatcactggatatctttttatcctacgtctaaatttctttaaaaactaatttgttgaaaatgcatgcccaccatccacccggacccctccacaagttagtcaagtcagaccatttccattaattgtcgagtacccgttgttctgcaacataactcgattgcagtcaattgctgctagtgattaccacgccctcagcccttgcgctggtccaggtcgttttcgtgctttgaaccacaccgagggtcgagcttgaattggatgcacctaataccaagaggtgccagctaatttgggcttctgcaggtacaagtcggtggaaacaggctgactcggctattcacttacgtgaaagagttatggtgggtggactgtggactgtggacatttc

SEQ ID NO: 39346 - DNA, 357 bp, Oryza sativa
  unsure (1)..(357): unsure at all n locations
agctngagggtccgctcattataacggatgttgtataagatggacgtcctaatgccccggacgaagccgccaagaactatgtacgtcacagcggttgggttgtgcgggataacgcgcctgtcaatacggagtactggcgaagaacaagggcacgccgagatcgtgatagctttgtcccagattctgagaaagagatgctgtggaccacaatgctcgagacattcacccttcctgcgggtacacatgacaaagggaaaaggtggactctgaagaaaatggcaaaacagtttcagagcttcgacggagatctgtaccagaagtatatactgaaggggcagacaccgaacttcgcacatt

SEQ ID NO: 39347 - DNA, 435 bp, Oryza sativa
  unsure (1)..(435): unsure at all n locations
tgacagcctgaagcaatnttttatgagtatatgcagcctatataatagcatggtaagtggccaattgggttggaaactaatctctctactttaatgtgtctgacgttgggagaactaaatgactggagggagtaacagaacagtttgtgtcacccggtgaggagcatattccactgagctcaatgtcaaatttgaatggctagacgttataaattctgtgctttccagccctatgtccattatatagattagtaatagccaaaggggaaaaaaactaaattcctaatttcttttttgcaatacaccaaacattggacatgtctacagtgcaggtaggagtataaggcagtatgcaagtcccatcagtgtttcaatcaaggcctaaattgatgcttccanagtcatttcctactcatatncaagaaaatatatgtc

SEQ ID NO: 39348 - DNA, 434 bp, Oryza sativa
agctttcttctaccaggaccgccatctccgatgattaactcgaagcctggtatgataatacttggatatttgcttttagggttttccgatggcaacgaagccatcgacatgacaggttacgtgactttgtacttgagtttaaggaacggcgttcgaacaatacttttgctagtaaagccttttggcgaaactttcaaccgtccgaacgccaacgtagaatatggaaaaggcgttattcaatagttccatatacagtaatgccttctcctctcaacattggttatcccaactcttttctttcttctttgtagaagttgtgtgtaacttggtataccttcttaacatcaaataaacccttcctttcttcttttctttataaacgctctttatttcaattgttcaagcacccttaggtaaactacgtccttcttatc

SEQ ID NO: 39349 - DNA, 388 bp, Oryza sativa
  unsure (1)..(388): unsure at all n locations
tgataagtaaatgtccatgtaatgtaatgtaatgtagactttttttttaacgcgagaaagcataagcggatcaattcatggtgattaaaaagtcccaccgaagtgcgacattgatgcctaaggaataaatgactctttgttgcattttattttcacgaatgaacatatgtaataacctggtagtggnttccataggtagcacgcactatcaccggctaaataacatgcaactatgcaagtgcttgacacaggggcacttgctcttatcttatgttccaatcagcttagcaatatagctttgggaattgngaaagtaagtaaacctttatagttctaacatagaaaagtttctggcttaatgtagtcaaacaccatgtttttggtctta

SEQ ID NO: 39350 - DNA, 351 bp, Oryza sativa
  unsure (1)..(351): unsure at all n locations
tccttagagcacctgangcatgccagcttgtgcattatattagctaagcttttgcattcacgagtacgtggactatgactgacctatgagactctcgcttatgggtgatttatatgcatgtgtctcatgagatattatcaaaactgtcatggcagaataaaggatgtttatttatgcttctggctaatatgttatggctgcttgagaggcacaggtgtagaaaaacctaccacaatcttcccatcttgtgatttttgacgcttctcgtaagccaattagggatgcaaggaatccgggacttaatttcatttataatgaaatgacaggacagtcgtagacccttggctatcc

SEQ ID NO: 39351 - DNA, 443 bp, Oryza sativa
  unsure (1)..(443): unsure at all n locations
tgtactatacataactgaagcaagcgaagctaatccttctgctaccatgtaaatacctgaatcaagatcgcaggagcggctagcgattgtgtatctgccattggcggtgtgcctaagcgtgatgagcgaccttgttgttgctccacccagcggcagcgagaggcggcgccttcgccgacccgtcggtggacggtgcggcggcgggcttccgttgctgctggtaagcatacctcgtttcggtggcgtcaccaccttggtagctgttgccgctgggcgtggttgagaggggatggtagtcggtgtccctgctggtttcgccgaagtccagctcgttcttgccgccaaagcangacgagaacgtgaagcacatgctctcgtatagcagctagcctacaatgagagacgatcgatcgatcgatctagctagctactgctatgttagc

SEQ ID NO: 39352 - DNA, 359 bp, Oryza sativa
agcttaccaaccgctactgggttcaccttctttcttatgacaagataaccaggcatcagcttcgtgggtcgaacttttttgttgtaagttgccgaaatgcttgtggcgtacttgtgcatgtgctcgagcacttcgacccttaccccttccaagagttcgagcgatacttcgcgccccttttcggccccagagaatataacgcttggtgaggtagcccctagctctgctggggtcattgcctcatcgccataaaaaacaaaaccggcttaacttggtgatcttggggggtcgccaaagggcccaaaaaccataacattcctctgcctttgccttcgctgccctctagttattcttatgct

SEQ ID NO: 39353 - DNA, 385 bp, Oryza sativa
tgctagcgcaatcactggtttgttgccgcgcgcgacgagcccgccttagctgttgccgctctcagagtagttggtcctcagacggcgacgatgactattcgatgttgcacccgcatccgctggtctatccgctattggggcctcttcttgccggtgtcgtctcgccataagtagtgtggcggtggtacggcgagccggtgtatggggcggtggcgcgtctcttggtccgtgcttgtggtgggatgaaggatgcctccgggttcccgatggggtcgttgtggtgcagcagcgacggcgatgacgactgctcgacgctgtacctgccaccactagtccgtctgctgttggggtctcttcttgccagctccatctcgctactagcggt

SEQ ID NO: 39354 - DNA, 461 bp, Oryza sativa
  unsure (1)..(461): unsure at all n locations
tgagctgngattgaacttcaaatgagccaagctcgagcttatcttctgactcactccatcaaaccacatggtcacacgtgtcttcatttgttgtttcacactagctagcctactgcaattaacaatccagcacaagcacaatatcgaataaatatttggtgttcttttcttattaagatataaaattttcatcgatttctgttagcacgctttttaatttactaaacggtatgtttcgtgcgaaaactttttatatacaagttattctaaaataccaaataaacccatttttcaaattttcaataattaaaaataaattaatcaagttaatagctttctcgttgtacgtaccctttcttcatcttcattagatcccaactaaatgttttataagcaaatcttcattagcaaagtagactttgcccaatggcaatcactttttccctgaacgagtcaggagt

SEQ ID NO: 39355 - DNA, 285 bp, Oryza sativa
tcaatctacagaaagttgcccccacgttccttaagctacatggcatcccgaggtggtagaaagagcccatacgagttatgaatgccgtataggctttggcttctggaatcaagagaaatccgcgatacctagagtatgccaccagaaaacccataagatcaacagtgggtaaagaatcaaccaagtgggcgatccttgggagcggaaaatcattctcgggcatgcgttgttcaagtcaatgaaaacaattcgccatttgacattcgacatactgaccagcacaag

SEQ ID NO: 39356 - DNA, 437 bp, Oryza sativa
agagctggatctgaacttcacatgagccaagctcgatcttatcttctgactcactccatcataccacatggacacacgtgtcttcatttgttgtttcacactagctaacctactgcaatcaacaatccagcacaagcacaatatcgaataaatatttagggttcttttcttattaagatataaaattttcatcgatgtctgttagcacgctttttaatttactaaacggtatgtttcgtgcgaaaactttttatatacaagttattctaacataccaaataaacccatttttcaaatattcaataattaaaaataaattaatcaagttaatagctgtctcgttttacgtaccctttcttcatcttcattagatcccaactaaatgttttataagcaaatcttcattaacctattatactttgcccaatggcaatcac

SEQ ID NO: 39357 - DNA, 416 bp, Oryza sativa
agcttgctggggggcgcattcgctctatttctttatcttctcgggggtggcctcgatgccttgggcagagaccaagaacccgagaagcttgcccgcaggcacactgaacacgcacttgtcggggttcagttttatgcgggcggagcggagacttttgaaagtttccgctagatccgagagtaaggtctcttggttgcgcgtcttcacaaccaagtcatcaacataagcctcaacattacgtcctatgtggctacccaaagaaattcgagtagtacgcataataagtggacctgcattttctaacccgaaaggcattgtcgtataacaataagttcctatggcggtaatgaaagcaagtttttcctcatccttcctagccatgcgaatctgatgataaccagagtatgcatctagaa

SEQ ID NO: 39358 - DNA, 430 bp, Oryza sativa
  unsure (1)..(430): unsure at all n locations
catcatatatcccgttatcgcattcctccaaaagctttcgggctggttagcttctcccaagaaatccggtgaactttcctctctcctttatcatgtccccactagaaattccggaccagttgtgaatattcctcgcaaaacttatcagacatgttaaacatacccattgtatatgtgggcagagcttgagctacgctnttaattaacacatccttagctcctgccgacatatatttctcattccaattcgtcattctttnttataatctttggccgagtggttgaaactgtgtagctntcattcgtccatctggggttgggagtcccacatatttctcctcaaagcttgccctttgcacctgagaacacccttgatctcctctgtgagcaacatggcanataccgctaataacaagagcactttgatggg

SEQ ID NO: 39359 - DNA, 261 bp, Oryza sativa
tgcgtgagaaaagaagtcacggaccttgtttcgagaatttaaaccactataagggttaatgtgccacttttcaattcactgacatatgagcctaaggctgcgggttgattcttaaaaacctcaaggatctttttgtatattgatctctcactgacagtggaccccttggaaacaaaatctggaattataaaagaacagttactaaaaccttgaaaatccatattaaattaaatatagctcaatttaagatgattcaaattc

SEQ ID NO: 39360 - DNA, 320 bp, Oryza sativa
actcacggccgaagatctggattttcttttcttgcctgcatcggctggttccctggttaagctgtgaaagagaagtgaagtcctggaggcatggtagccgataacagggggagataatccacatccattcggaattaaacctaaagcatattcgatgttcttgccattgttactttgatgaggaggggaggactctgttggctgcaaaacacgagccaaagattaatccagttatgaatcggctaattgattatgcaatttagtaatgacaaaagttacctggggtatgacgtcagggaatatatctggcatatacattg

SEQ ID NO: 39361 - DNA, 300 bp, Oryza sativa
  unsure (1)..(300): unsure at all n locations
tgcgctgcagcttgactggatgcatcttttttatcanaaggtatgaaatgtttcctgaatatagacttacttaatcatgtctgttaactggattcgacaccttattgggagatgcttggggggtatatgcagctatgcaatactcttgcatgacatgatttagagagatctggagttagacgtgggctaattatgggaatcatattggggtattattgggataaaagtggccgtaatgggacagccatacggattctcgcccggatatacctaataattcctgggaggattcttctatta

SEQ ID NO: 39362 - DNA, 426 bp, Oryza sativa
  unsure (1)..(426): unsure at all n locations
tgtccttcttcagcatttcaaccagacaatgaatagtccctatccaaccatgtcgctgcatctgcaggtgttcggagcgccatagcaatcttgatagacaaatggggaggttgtgcctcatttcgtgactctgatggaagaacattccttcacattgctggcgagaagcagaggaatgatattgttaggtttgcttgcaaaacagtagttctttcatctgtgttgaacatgcatgacaaagaagggaacactgcactgcacctagctgtccagcttgggaacctgagtttagtctgctctttgctaggtaacaagcgggtactcttatatctgacaaataatgttgggcaaactncactggatgtagcaagatgaaaaattcctacagggactttctatggatggggtatctacttccctatatgc

SEQ ID NO: 39363 - DNA, 226 bp, Oryza sativa
  unsure (1)..(226): unsure at all n locations
tatgcaagttgtagatccgcagatagaacacgatcaatctgatccatgccattgcgaatatgctgattcagacaacgctcgagtctcgccaaactgtgatagataacctaccagcaatctcgccgcgactactctggccaataattgggcctttgcaaaattctggataataaatagagataaatanaggctattctactcttccgaataatttcagtggagcatt

SEQ ID NO: 39364 - DNA, 220 bp, Oryza sativa
gcactacaatgaagggggagttttttttatagaaccgtcagctctcggaaatatcctacgtagcaaaagaataaaatctaccactttaattttactcacggcacgtctctctatacctatttgaagaaatttactaccaaacacagcgatgaatatctaacctctgatttaagctccctgcccctgtatctcgaaccctctagtacgcactaagcatcgt

SEQ ID NO: 39365 - DNA, 448 bp, Oryza sativa
  unsure (1)..(448): unsure at all n locations
ctataaatactcaagctgcccgctggcgcaccgncaccggccggcggagcgcgccttcttttgtgaaccccgcgcacctgacggccgacgctcgagccggataatgtgggcgacctgccttgcctaggcccatgcccggatggccatcccaaccttcatggaaggccggttttatgtccgaaactgatggaaattaactttgatcaaaatgttacacttcgatcatggttcttaaaggaaatttttataaaactccatctaagccacacaaaaacatatggatcttggaacatgacacatcctcgcgtttatggtcataaaatttcacanaaatcacaccatgaaccattttgacatattcctatatcacaattntaaaaagtggactaacgtttacatgatggatgaaatgcttataaatttaagatgctatcgcaaaatttaaaat

SEQ ID NO: 39366 - DNA, 348 bp, Oryza sativa
cagcttgaaaaatatttacatctgggagtgccctgcgcttaatgtgctggaagaattgccattactgaatagcatatactggtgggatttgaaaacacaaaaactcccacaatgctttggagtaccaatgtttaagaagctatttgtacattgcaacagagaattgttccgactgatattcttacaagataccacctctgagaggggaaagatacagcatgtcttccaactaaaggcatatggatgcactttaccgatagaattatctggatacactctaccaacacgggtatctggatattattttctaagagaaagtataaatttattccgatattgtctctacac

SEQ ID NO: 39367 - DNA, 431 bp, Oryza sativa
acacaactgctggcgatttgacgactcccatcggccgattctaagactctgaagccgatactgactctaggccgatgatgaatttgggcttatccaaatttggcgttaactgatagattatacttaaacaaatatgcatgcaagcgttgctacttcttatttctggatatattgacggtcgaaattggtctataacgaccgtcaacagtcaactatcgatgttctagatcggcaataagaaaaggattaattggatccatgccattgtaaatatgctgattcagagaaatgccactacaattacgctattcctaccagtccattgaaatgtacaatattaagaccgcgccactatcatcacatatttcatgcatgtccatgttcgtccttatcttcacgtgggacccacctatgagaatcatatctctttc

SEQ ID NO: 39368 - DNA, 338 bp, Oryza sativa
tgcagcatgcaagctagggggtttgatgcggacgaatctgtcttttcgaccgacaatattaccctatggatgacgaccagctacgcttgccatgccttattccaaatcaaacacctactatgctaataacatgcctgtacgggaagcacatgtacctctatgggaatcttttgaaaattcacccacgatcaatcataggctggtgacgatcatacttaccgatgatggagtgccaacccagaacctacctcatccattcaggcctatattccatgttttggattgaggcagaaaccaggagtccgtccttcaaaacttgggccatttgggccagatca

SEQ ID NO: 39369 - DNA, 351 bp, Oryza sativa
  unsure (1)..(351): unsure at all n locations
ctaagcttgctccactctagatcggnctcaaccatcttgtagtcatattattgttccatgacatacaactcgctggcaggatcggagagtcaaaagttagcctcaagagcatcccacatgtcgttccctgaatgcatgtgtatgtacacgtccactatgttgtcagctagtatactgatcaattttccacggaacaggctacccacagactcgaacttagcctccttctcaagagagaaaggtgggttgctcggttagccctatgaaacagagaagctccggataaggcgtgaccacaatagtgcacgtgctttccatcttttatagtttgaaccatactcggagaacact

SEQ ID NO: 39370 - DNA, 360 bp, Oryza sativa
aaataaaatacaccgagtcttgaagacactttctagttaagaacattggatcatccaggagaaaccaatttttagttttggagataagagccagagtctgcagccaagggagaccgtaccaaaaacggtcatagctcaaataatgcagcagtattatccagaaccttaaaaattatagaaagttaaagagtcaaacctgggggcagcctggcaccaaatactgttagaattccttcaaatattatattgtcaacatgtaaccttaaaaatacttaggtaatattaattctgttagtatgtaaccatatattataaacataaaaaagaaatgccacataacaagggagtattgaatatcgc

SEQ ID NO: 39371 - DNA, 450 bp, Oryza sativa
  unsure (1)..(450): unsure at all n locations
atctgaaggcccaatcaagtctaacattgatcgtctctgtgctcgcaagattgaactcttagcacgacttgaagaatgtaacgctgagcttgatatggaacacaagaaactagccgatctccccaaattcattgaagaacagaaagtaagactcaaatcggctatcaagcatgttgttgagctgactaagtccctaaaagttatccctggaaccgatgctcaagatgcccaagccatagaagaagtagagtagattaggcaaaaggctatatcggctatccagcgatacttatctcaataatctttgtgtaataggacttagaattgaaatttgctaaaanaatttgcactgtatntaccgcattntgatatatatnatgcccccctagttntacaatgtgaagagtattgataaaattataaacaactaagggcgatataacaatatcg

SEQ ID NO: 39372 - DNA, 120 bp, Oryza sativa
aagaagcctttcaacaaccctaatggtaatatacccgcctccccggtcagatcaatactttatggcttccacaagccatttcacctgaataagcagctcgctacacttttttaaattgaa

SEQ ID NO: 39373 - DNA, 232 bp, Oryza sativa
agacttttcagctatattgaatacgcgatatattcattatacgtgctacttctaacggtaggattgctaaaaggaaaatttgggaaaaggaacccattgtatgggaaatactttaagaagatatgaggggacatcctgtactgttgaatataacacctaccctgcatagattaagcatacaggcttttcaacccactttagtagaggggcgtactatttggttacacccatt

SEQ ID NO: 39374 - DNA, 438 bp, Oryza sativa
tatggctatctctagaggtaacccacattgatgtaatgatagtgaatgacccacaacaatgacagaacgccccgagttatcgacccgtttcccaagcagagtttcgcgaaacctcccctctttaccttcaattacatctgaaagtgatttgtatactttattgtgaccatccctcgttggttgcccgcgggacccactatcaagaagtgtatccacggcttcttgtaccaatttttcctggcacattactaaatctgctggcgctaattcacttctttttaatagataggcaagattgttgttccgacggataactctcttataaagttcattaatatccgaagtcactactttatccccagacctataaacaatgggtcttaattcgggaggaagaactggtaataagcacaaaaccatccattcttggtctacatt

SEQ ID NO: 39375 - DNA, 414 bp, Oryza sativa
  unsure (1)..(414): unsure at all n locations
ngcgttactttacttacctttatactgtgaatatctaaactttattcaaattaatccanaaacttgtgctattaattggataaaggtcttaactctctcctttcacttgtctttatatgccgcgctacaagcctgagtacttgtttggtgttgagggttttgtccaggagttgcgtacgatgtcctttgtcattggatttgggactgcccctttttatgcccagattcctcatgatcgtcatgaagagaagtgccgaatcaaagtcaccttgaacagcaatagtgaagatatcccctcagtgatgttcgaagctggaggaagaaactacatccatgcatgtcaggaagtggcaaggatcgccatangagggctccgtgatcgctacagtgatcagttggccgacactgagtatc

SEQ ID NO: 39376 - DNA, 146 bp, Oryza sativa
tatcataatatcatattactaggctagccgagttgtgtgcaacaccagaacaagttcgaatattatgtaatgtgggacagtggtagaaaagttggtatatctgcctaatactccctccgttttttaataaaatgggcacttatata

SEQ ID NO: 39377 - DNA, 399 bp, Oryza sativa
  unsure (1)..(399): unsure at all n locations
cgcaatgttgatggtccctctaacaattgtgtagatgagtttattacattnttatgtgtaatactagctgaatgccggtacttcgctatggacagaagaaaacatatcataatattgtctgaaataaataaaattatattttccgtgagatgtgttgcccatcctctttttgcagcacaaggtacaactatccttgcatagttgcatgtgcaaaagcaaaattagaacctcatactggatcagaatcaaaattatttggcaagccccttgttgccagtggctgatgcaaaggtacctgaaacctccttgctgagttgctggtacacggctacaccacctctgaagagagagaactgcagattggtgcgtatcccaaaacgaacggcagaagtaaaaaaa

SEQ ID NO: 39378 - DNA, 337 bp, Oryza sativa
  unsure (1)..(337): unsure at all n locations
agcttgtttaaccgactcatgggataagatggctgttgacacacgaaagttgtgtgatgcacaattaacaggtgtcgatttaaatttaaatttatgttctgcaaactggggcttaattcctaaattttgttgtctcacagatgcctaggaggactatattgaggttgttgctgagtatggctggctgagttggacggcttaattcctaaattttggtgtctcatagatgcctaggaggactatattgaggttgttgctgagtatgtgtggctgagttggacattgattnttttgctgagttatttgtgggtggacctagtgtggatttagttaatct

SEQ ID NO: 39379 - DNA, 461 bp, Oryza sativa
cgctcctcaacgaattgtcatccatgcatcccgaagcagtcctatagcccgcgttgcaacagctccaattccaatgaatgcactaccacaaggtgtcaatgctcaatttcagccccagccaccagctgacaagacaggggccagtatctgcgttgtacctttggaagttccaatacagcagctgagaaatcaagtacaagatgaagaacccgagtgtaagaaagctattgtttgttacaactgcagtgaagaagggcattactccaaaaactgtccccaaccaatgcaaaatcgacctccacattaccgccaatttacacgaagcagacattccaatcgtattgtggtcactggagcaaacgccgtacccgtaatgcctcgtgttaatcagaacccatagcagaaacaatgcaccaatgctcctcctgctgacctgactcgcaataaatatagaaccactc

SEQ ID NO: 39380 - DNA, 238 bp, Oryza sativa
  unsure (1)..(238): unsure at all n locations
agccngtattcgcgtcgccatataatctcataatgtattttacgaatccccaaacttattattctgaatattatacagggtcaaacaagccccaactcgctttgtgcgtggacgtagcgtaccatggtggcacctactatgtattgtaataagtgtaaaatgccatgacacaccgtacaactttagagactgtgtacttcaccttttttttaagaaagtaaaaatgtgcattcattta

SEQ ID NO: 39381 - DNA, 226 bp, Oryza sativa
gcatgggcgagatactaatactcttacatagggcgaaccaccgttctttctgaaatacttcagccctatcacatataggatcccatgcgttacttttgcgtgatgtgttctcacctgcacgtaattattagcacgaccacaggtgttcatacattactacgtatatgtactataatactggattccaccttaactgatagcttcatgctcattgtctatacttcat

SEQ ID NO: 39382 - DNA, 320 bp, Oryza sativa
  unsure (1)..(320): unsure at all n locations
agcttgggtgttacagaatttatccaatccttgtggnttgtcttgaattcatatctgaaaagttaattgacatataagtttcagtgttcagtactcagggtctttactacaagcaagtgggcgaaagttgtactaccgaatgaaacaaataattccatgaaatcattgatcgtaagtcatgcaatcataaaaaaaccagaaggcnaaaccagcatcatggaagtggccaattgtgctgtcagctgtctgtgggaaaggtaacaaataattcactcaacaatggaagctttgatgtcagacatcaaatcaatcatctatgt

SEQ ID NO: 39383 - DNA, 384 bp, Oryza sativa
tcggagcctcgacatgcccatggagctcgaagacgtgtgcaccattgcaggggatggagtggctccaggccggttgcacgtggctcgcgccatggtagaagctggatacgttgagaacattaagcaagcttttagcaagtacttgtatgacggtggacctgcttatgccacgtgagtatcctcctaatttgtccatgatcaatgtatgtctttgcaactatacttatcaggtgagtagtttgatttactcgtggtgtggacgtgtgttttttcttctgttcatttgcagtggcaatgaaccagcaggggagtctgtggtgcaattagtttgtagaaatggaggtgtggcaagtttagctcatccatgggcactgaaaaatcctg

SEQ ID NO: 39384 - DNA, 340 bp, Oryza sativa
agcttgatactcttggagagacagcttgtatatctattagtgtcacccgcgagtatcttcaagattgtggacgtcctgcgcaactttgtgaaggtattactcacctccgcaaggaaacagagtcagcaattaatgaaatcgtgctgacgtttctgaggtaatcctaatacagcaatccttacttgtggttctctctagaagaaagctgagtttgatcttggtggtaacttaaatcctacagaaagacctatgggtgataaattgaagacggtggacttctttaggatctttgcccagtgaagcaaagtgttaatcaaacccactctttggagttcctaag

SEQ ID NO: 39385 - DNA, 431 bp, Oryza sativa
  unsure (1)..(431): unsure at all n locations
tcagcacanactgaatatggagncggggattctagaatgctgttaatgttcttgaaatggagaaattcgagaacaaactttgtttgctacacatgtgcatctgatttcagtaaattccattgggcaatgagcagataaagttcatgtgcttactatattatggcaatgtaaactatccctttatgtctgaaacttcgcaggtgtatagcatcggctacaggcttctgcgtttcgattaacttgtatagtagacggatttgtttttagcaatttcatttcaaaaatttcccctttgttggaaaattcttgaattggttaggacttgtggtattcacatggtggtcaacctttcaggatcttcctganaggcagatngtgaaatactcctacattatgcatatcatcagcttcagtgcagactaactggaact

SEQ ID NO: 39386 - DNA, 309 bp, Oryza sativa
caatgctaggattggccttgctgaggatccaaagcacccttaaactctttacatatcttcttttatgtataacatgtcggagcaccctatttccactagtcatttttttaaaaaaaataaaacaatccctccctttctttccaaagagtacaataaataagagcatagaacgtgacaatacaatatgcaactgaagtatagtgatacattatcacatcacacaaggtagaaccgtatataatccacgtgtgtaactgtagtatattactactactatatactactatattagaggcagcttctttttct

SEQ ID NO: 39387 - DNA, 383 bp, Oryza sativa
tgacactttattagttgctgaactatgtaagtagttactgttcttgtatatccattattttttcctgttcatatgctaacattttgttgatgttaggatttctgatggaaactggcatttgtggtataacaggagctgggagtactgcaattctcgtcttatactaagctactagcactcctctgatctgatggccaacattaacatggcagatactgctccttcctgtgatacttacctgttgaattattgttaatatcttggtaatcctcttagagacttagaccagaggagaaaagaggaatctggaggtcaccgccaggaaaacgctacggacaacatgggcggcagatggggtgggagctacccagatctgcgccgac

SEQ ID NO: 39388 - DNA, 410 bp, Oryza sativa
  unsure (1)..(410): unsure at all n locations
agcttcggaaagaaggacattgaccattgaatctgctcaacaatcttaggagaagatggttattttccagttattcaatgggtagatgatactattattataacaaaagtatattaaaaataagcttttttttcttcttaaatcccttcttcatactcatgtccagtcaacaggccttaaaattaatttcaataaatcatatagcaggaattctgggttgcacaacaaagtccagagttgttgactgtggtccacttatagatagaactgacaggaggctatcttccatagaaatttatttatcacatggtcaaagntaacagtggtaattctatttttttcatcattaccaacctaccacatgtgtacattgaagggtccanacaaatcatgtaacataaagacagagc

SEQ ID NO: 39389 - DNA, 449 bp, Oryza sativa
tactaagcttgatgttgtgaataagaaatttcaaagtattgggcatacgccatgcgcacactgctttaacagatgtgcttaagtccctagaagacacatggttccaccacacctggaaatatatggcatatgtggtataaaatccgagtaaataaactcataaaggatttaccaaccgcctgaaaaatgatcacaatatataatcagcctaagccataatattggtcaataaaaatgcacacttacgtggcaaaaagcaatgatattgtatccaatcaattgcttaaaaacccaaacagcaccatgactatataaaaaagtcagcgggccagctatataaagctttactgtttgacaccttttaagatgcattgtaccaactcctaaaaagttgagtaactggcggataaaaggaatttaaggtatggggcacttgatcacgcgcactt

SEQ ID NO: 39390 - DNA, 435 bp, Oryza sativa
  unsure (1)..(435): unsure at all n locations
cntttanttgagagctaacatggaggttgtggctatgtattttagttntgctggtataatgcattcactcatattggtcagtacagtatttttatcattgcactcctcttttgatacaattggcatcacatattgatttcattttttaatatttgatgggaggcgcaattatttagtataatatatcacttgaaaattctatatggttcgatgggtatgaacacatgattgagtggtgcacccccccttcaattctctctagctccgccactgccaacgggtcggcgctgaggtggtaaggagaacgcgcctatgtggctgccccccaggcattttttcctctctagtgtagaggagaaatatnatgcatccttattattaataataataactataataatattactattattaatataatataatttttcacac

SEQ ID NO: 39391 - DNA, 400 bp, Oryza sativa
tggaattgctattacaaggtagcatattcttcggatgtgctcatgatccattgaaaatccttactgcagacaactttcagattcgggaatgggataacagcgagatttgccccttttatggcatagaaccagagactacccaccacctcctcatagattattcattcacaagacaagtatggagctccatatggaggaaattgggcctccacacgccttcaccatccctcttcactggagacatgctaggttcgtgggaagcttgcaggaaagaaatggtacgcaacttcgatggccttttcatccacacggctcggagtatttggttacaaacgaatggaataatctttaatgggatatacaattccgtgcttcaggtagttgattccatcatagatat

SEQ ID NO: 39392 - DNA, 415 bp, Oryza sativa
agcttatgcctgagatgatgaaatatttttttcgtttatccttgggcaacaaaagcgcagggatgtcactgatatgatggctcaaaggctgggtgctgttttcatgcctcatggtcttggacacttgcttggtattgacacccatgatcctgggggctatcctgaggctattttaatacatactttatgccatgaattatttttgagcatagctttatagttctaaaatgctcccttctttaaactgagaagaatgtccttttttcttggcttttaactgagatggacgttctttctcattgtttcacggcttaaagaggccaaagaaccaggactgagctccttggggccatagagaactaaagaaggatggtagacctgcttttctgataattctgagattaccataaaaaat

SEQ ID NO: 39393 - DNA, 411 bp, Oryza sativa
  unsure (1)..(411): unsure at all n locations
nnctgtggaacctgngagatacctatagtacgttccattcaagcagatcacacatcctattttacctttaatttgacctgaaactgaaaacattgctggataattgttaatggtcacgaagatgatggccttcactatgaagtattcccttaagtactcgtcccacactttgtaggatcgagatgtcgactagaggggggtggggtgaataggcgatttaaaactaaatgacacctaatcaaaactaacctaagttgctaggcttggtgagtgtcaactctaactaagcaactaagttatgttttgcaaacctatggtgattgtggctcaactatatctctaggaaagtaaatctcactcctatgtcaatgtttagcaatcctatggtgatatgatctctaatttggttct

SEQ ID NO: 39394 - DNA, 378 bp, Oryza sativa
  unsure (1)..(378): unsure at all n locations
tggaaaatatttacatctgggagtgcccagcgctaaatgtgctggaagaattgccattactgaatagcatatactggtgggatttgaaagcagaaaaactcccagaatgctttggagtaccaatgttaaagaagctatttgtacattgcaacagaagattgttcggactgatatccttacaagataccacctctgagtggggaaagatacagcatgtctcgcaactaaaggcatatggatgcactttacggatagatttatctggatacactctaccaacagggttatctnggatataatttctaagagaagtaatagacttattcggatatgtctcctacactaaggaaccctactnctttgagacaaggacctatg

SEQ ID NO: 39395 - DNA, 415 bp, Oryza sativa
  unsure (1)..(415): unsure at all n locations
agctttatggtagcacgggaaggtggttatctgttgttgacgacctgaactgaagatgaggagaattaaaccaagtctgcttgcaccaattctttcacctattaaaaaaagtaaatcaatcatcaaagatcacaacatttagtatgtgtcaaattgaccagcacactatcgcacagcctagttaaagaattcaaccaaccattaagtctgaaacacctagagtttgtctaagataaaatgcacaagccacaatatgcatgcatgcttggctacttttgctatgagacgtttgaaaacacanaaaccaaaatttgggaagacaaacctctttaatacattggctatgttaaatatactgctgcattgacagagacaactgtataattattagttggctacatacattgtaaaaaaa

SEQ ID NO: 39396 - DNA, 425 bp, Oryza sativa
  unsure (1)..(425): unsure at all n locations
tatcttctgtgtttntgtgtagttgaaggagaagaattggtgagcatacacaacatgcttttgtgcaagtctattttagatctctagaaaggagacgatccatttggcagaaaatcaaaagaaatccaagaagacatggcttctactcttaaaactgaaaggggcacttaaggtttaaatggcatatatcatgtttcgaagagcttgacgttttatttctgggagttcagacttatgacttatgagagcattcttagctctgatcaagtatattctttgcatcatntttatttgcttactaactntactcttctagccttgaactctctcanaacagaatgagcggagtaaccttgaattntaatcttgcaagacatttcaatgtctggaaattgacctaagtatacatgttcagaggggaaaaa

SEQ ID NO: 39397 - DNA, 359 bp, Oryza sativa
ccctaagcccccaacagatcatcacaagtggcatatcctatatacctatacattcgatcccactaactagaatttcctgccctctcatgtcaaaaataaaaaatttcctgccctcttagtgatccatgtcaccttgtttagtggcagccatcggaatacagaacactgggtcctaaagcaccttctagagcacccacaatggtaaaggaaggtgctatctataaaacatggacatttcagcaatagactaaattaatagtaaaccacttccatggtatgtctacatggggatctatagctctcaatccattgcctcggtattttcatagactatttcagataggagatagcttgctctc

SEQ ID NO: 39398 - DNA, 437 bp, Oryza sativa
  unsure (1)..(437): unsure at all n locations
ngaatntatgtatatatataacatacttatgtatagttaaatatatatttntatagnttaatgtttccgtatttgttaccagtttccgatctgtaccgacatgtttccgtccgtattgttccgtttctggttttccgatatttccgatatcgttttcgtttccgactttaccgttttcgattttatttccgagaaaaatatggttacggaaatggttgaggctgttttccgatcgtttccgaccgttttcatccctaattacagcccattatgggtccacaaaacctatggtttgctcccacctcctctcctggtcattcctccacctatataaactcctagcagccaccattttgcactttgggttttggtttgatgtaaagttaactgcagctacttccttgtactcgcgtgtgtccgctagaccacccggatac

SEQ ID NO: 39399 - DNA, 429 bp, Oryza sativa
agctctgttatggacatgaagcagttttattatgggaagttagaatcggctcaagaagaacatatttgcaggatgaattgaccaccgatgaatattacaatctcatggctgatgaaagagaagatatggtccagtcaaagttgcgagctcttgctaaagttaccaaagataacgaaagagttgctcggcattataataagaaagtggtgcctaaatctttttctgaaggagagcttgttcggaagttgatcttgccgatcggaactcgtgataataaattcggtaagtggtcaccaaattgtgaaggaccgtttcagatccacaaagttgtgtccaaaggagcttatattgttgaaggacttgttggaaagggttatggacgggcactcaatggaaaatatttgaagaaatattacccaaatgtgtggg

SEQ ID NO: 39400 - DNA, 319 bp, Oryza sativa
cgggagccaagtagaaatttttctgtctcctgcgacatacctatgacctgcctgatactgagatcttgctggattatcgttgggtgcacaaagatgatggacatctctatgaagtattcccaccaatactgggccacccgttgcctgaacgatatgtctactaaacatgagcggagggtatacgcgattctatgctcaatgacacgtacccacaactgacccattttgcttagcatgaagagtggggactctgactaagcatctatactacgagttgataagccatggtgacagccgacctacgctatctctatgatag

SEQ ID NO: 39401 - DNA, 428 bp, Oryza sativa
gaccttaagtcagctgagcagcaactggatgagaggaattatttgttatataccagttgaaggaagccatcagaagagatgccaatgctacaccaccacacaatgtggttagaaggtgataagtattcacccaatctgtgtgccactgccatgccattcaattttttgaagaaaacccacgtcggtctctcagatatacataatatattgcggcatccacattatataggacactacaagttacctcgccaatgaaaattgcagtgaggagaacagataaaaaaggttccatagctttgatggtatgtgtgaatgacacagcaacctatcccaggctcatggtaatgaaaagattgcccatagtatggaccacatctagaggaatgatggtcaatagctgaaaaggaaacacatgactacagatactc

SEQ ID NO: 39402 - DNA, 457 bp, Oryza sativa
  unsure (1)..(457): unsure at all n locations
ctatattcanacgtcaatcatcgagagcatttataacatgtctaccaaacataacagaaatgaaggaaaatgtgacggccaaagtatagaatggatgacatttctgagatataaaagggatcagctaaatttttcgatcgtcacctccaactntcgtgcatcatccgcatcaaacctttcgtcctacagcgcgtgcatcaaccatcgctagcgagtccgtgtcgatttggtccgtcgtcctgcctcatccgtttcggcgccatcctattttttttttttttgcctaaccatcatccgcgagacatgacagattataatctgtgcgtgacatgaccaatcggacgtgatcggtcggacgtggccatgcggcgttaggctacccctttgaagttggaccccatggacgtctgtctgtcggaggatgctacgcgtcggacgttcgatatcttgaaatatc

SEQ ID NO: 39403 - DNA, 406 bp, Oryza sativa
  unsure (1)..(406): unsure at all n locations
gcgcatacgctctatatctgtatcttctcggggttggcctcgatgcctggggcaaagaccaaaaacccgagaagctttcccgcatgtacaccgaacacgcacttatcggggttcagttttatgcgggcggagcggagactctcaaaagtttccgctagatccgagagtaaggtctcttggttgcgcgtctttacaaccaagtcatcgacataagcctcaacattacgtcctatttggctacccaaagaaattcgagtagtacgttgaaaagtaggacctgcattctttaacccgaagggcattgtcgtataacaataagttcctatggnggtaatgaatgcagnnttttcctcatcctccctagccatgcgaatctgatggaaccagagatgcatctagaaacaca

SEQ ID NO: 39404 - DNA, 309 bp, Oryza sativa
ttgtcccactatgcatctttgttctgaggaacacacgcatggacatgaatgcaatgatgatcaactgggtgaccttgaaatgtagatgaaggagttgcgcttcatcaataaccactctcttgacatcactgccctgagtgactcccaactggatagcccatacttggtagttgtcaatgcagcacgatgtgtgctggacttgtcataaagaatttgcatctgcttctgcattttctgacctacatggaatgacttgaaacgttgtgcatactcttgaactgacacataccgataccgttctttgtcatg

SEQ ID NO: 39405 - DNA, 315 bp, Oryza sativa
gtgcattatatctcctatgtcacttgggagctcatcaatacgtgtgtatctcaatcctatgtacctcaactgaatcagttttctgaaatgcttgaggcaaccttccatgacaacacaattttcttaagctatcacacgtagaacgtgggaattcacaaggtgggaagtcatgttaatatggcactcgatggcattgaacaatctcagctgctccatgcctatggcaaagttatcttggttccgactcttatgaagtgctagcctgcggatggttttgctgtgcaaagatgggctctgctgctcatgccctctatg

SEQ ID NO: 39406 - DNA, 369 bp, Oryza sativa
  unsure (1)..(369): unsure at all n locations
aatgctgcatcgcattgtccggtagtaagacaagaataacttctggagtactggacttggatgtatgctcatcattgctagtgcgtctcttttggtttgaaggaagccgtaatcatttgatacactaccagggcatgtcctttcaagaatcgcttctgaatactcggtgaaaaaagttgcacctactatacacttgacactactaccactagtactagtagtaccttggtaggcaaacatgaacagttgcacagtacaatctgtttcaaatgaaattgcacggtagtagtacagggttttggctcacattcaaagctaaacgtacagctatgcatcatctctctacaggtntgcacaaattcagctatt

SEQ ID NO: 39407 - DNA, 312 bp, Oryza sativa
  unsure (1)..(312): unsure at all n locations
tactaagcttttggcctgttactgacatatgctattagaaccttgttcttagattgntggaggtgtgctgtgtttgttgtgtgatgctgctgctgatgaatgggcctataccttgtcttggcatgtgttcacctaacacctggtccctcgtatgatgtggtctgagtccacctattgagctgtggattgaccatgccttgactatgtgcagggtgatctaacccctaagcaactaagtctgggtgttatgggtcgggcgtgacactgaccttgccttgatggcacatggtggaggttcatatctcctatggg

SEQ ID NO: 39408 - DNA, 441 bp, Oryza sativa
  unsure (1)..(441): unsure at all n locations
tcttacttatagccattgagccttatataccttattctattatggatcttctacgggtctatttctttcattcttgctcgagccggatgatgaaaaattctcatgtccgggtcctttgggggctggatcttaaagaattcacctatcccaataacaaagaaacctgacttaaacgatcctgtattaagaacaaaattagctaaagggatgggacataattattacggtgaacccgcgtggcccaacgatcttttatatattattccagtagtaattctaggtactattgcatgtaatgtaagtttagcggttctcgagccgtcaatgattggngaaccggcggatccgtttgcactcctctggaaaatnacccgagtggtacttcttcccgtgttcaatactcgacagacctataagtattggcgtctttatggttctggc

SEQ ID NO: 39409 - DNA, 382 bp, Oryza sativa
  unsure (1)..(382): unsure at all n locations
gcttgcttgagaggagtatcgaaccgaccaccgcttaatggccggatcgatcganattctggtactatgctcacggtggaacgcttatacccattgatggctccctattcttcagcgatcagaggctgccagtcgactaacggatgcagtggaagcctcttctcatggcacgttccgacctgacagtgagaatgacgagctatcactcgccctgcagactcccgatcatctatgacgaacacgagggaaaggggtgatccttggaagattggattcaaggaggacatccacacgtacaggagtcggatgaggagcaagagagataccgaggcgaagattgcagatcttgagtacagggtatcgagctacgagctcatcattc

SEQ ID NO: 39410 - DNA, 437 bp, Oryza sativa
gcttcctgtttgtctgagaaacatcattccataccgttcacaagagatgttttgcctactctccctgtgccaagagaaaagtaaaagttattggttgtgttaataaatatgaaacgtattcaatcacatgtcttttcaatgaaattgaaaaaatggagcatataattatgatcaattcatcctaagttaaacttaggtttatcagttttcacattgataggctgggccaacagatgactggttactagacatcctaaacacctcttccattaaaaatctgaaatcaatgacagaaagttataacaataagcaaaccctaatgacccaacctataagatacatgcccacaagactatcaacaattgctttatgcatggaaaccatatatatcttcattcaaataatgtaaagccaagtactaaggcatggttaaagag

SEQ ID NO: 39411 - DNA, 309 bp, Oryza sativa
  unsure (1)..(309): unsure at all n locations
tatattgcttctttttgtcctttcgatccatagtaacctgagtactacgtggagcattaactttttcataactacataatcaaataagcgattggtatgctggtgtatttttctttagaaatcctggtgctgaacaaaaggtcaaggatattaacaatgcttatgaggttagtccagctcaccataaccaaatcccattggttcttatgactatgatggtgganggctacaggtgcttgccaactaacatanataggattgcaggtttttgctgatgatgagaagcgatcaatctatgataaatatgga

SEQ ID NO: 39412 - DNA, 329 bp, Oryza sativa
caccaacacgtttacttcatcggtcctgacgtctccgacgttgctaatgggtgactacgtcctcaccgtctgttacttttgtcatcaccgactttcatctgcgacttggtatttcgtcttcacggttggcctactatgcaactggcgatagatgatctcatcgttatcatggactgctacactactattgactagatcaacgacatggttatcttcatcaaacatactgtcaagtctcttcaacatatcctactctgcttgtcgtgatgggcaacttcgtcatcatagccggctatctctgttgccgtaatcatcattaccgtctgatg

SEQ ID NO: 39413 - DNA, 364 bp, Oryza sativa
  unsure (1)..(364): unsure at all n locations
ctactctatcgatttccacacagttattttgaccacagctagcatgcttgtcaataatcaacatgccaagtgcaggaagatgatcatagtatgtcaatgaatgctctttgggaactttccagtactctgaaatctgctgccatcttcggctgagtatgcagntcttgtcatggatgtgggctgaacaagtttgtgtctccggcaggttatcagtgccttcaactggctcttgtctntgctttgggtcatcatctggattcctaattgcatccggtctttcctcttggctatttngctgtgtgagaatggggtcttgcctctcctcttgttcatcatctacctgcagaagtggatnttccttttt

SEQ ID NO: 39414 - DNA, 392 bp, Oryza sativa
tacttctacacatgttcctatatagcagctggattattaactggactcctctaatattaaagctggctatctcatgcacctagtataagaatggaatatgctcgcattctttttttttgaaaaacacagaaaagatgctcgcattttttaccttgatgcagtctgaatcatcaagataatccaacaaacacatggtaaatgatctgaggaaagatggtttatgcatcttggtgattataatgctagtggaggtacaagctaattatcatggatgttcttatatgcttcatgaacactaaattacaaaaactacgcctttcatgattctctagtgggagtacacaagcacactgctgctagatgtatagcaatgctagaatacatgttgaaac

SEQ ID NO: 39415 - DNA, 336 bp, Oryza sativa
  unsure (1)..(336): unsure at all n locations
atatcataaatttggaatttgaaaaccggttccaaagaaatgaaagaaaattatataatccacatcggtaatttattttattgcagcaagattaaataaaacaatattgtaaaacttttgctgataatgagccattagtacagtaatagatgtacagcactaattaacactggaataaatttctaatgagaaccaaaaaaaaattatgaagtgcatgtgccattagtttggtttatttaaagagaaagggaggagaacaagtctacttttccaatatttntagagggcttctatgggtaaccatttggcataacctcaggtcaaagatgctctgat

SEQ ID NO: 39416 - DNA, 341 bp, Oryza sativa
gaagggctttagaatctttttatacatgccaaatgactccctcatatcttttaatgatgtcaaatctctgtatttttcacacttcttttgatttttcttttttttcatcacctttcattacaaattccttcttttcgaagattaagaaagagccgaaatagcttgaaacaaataataattgttccgatggaaccttctacatggtataagcataacctttatgaattaactaaacttctttttaaataaaataaaaatagaaaatctaacctcttatcgttctaaggtcagaaatctagtttaaagtaaaaaatctgcttatgtatccttaaatcatataa

SEQ ID NO: 39417 - DNA, 384 bp, Oryza sativa
acgtgacacttataatactcagctgtctagttgtgaatcgggtatggaacccatggttggggcttggtacaattccgaatacgctattacatgtttgcgctagtttatgttgttttgatgtggaaacggtctatctctacccttgtgcaatgagtgtcgacgtattgggtatatccagttttatcgaagctttcattttcgtgcttatcctagttgatggttgagtttatgcatggcgaatagtgagcctggaatggtcttaactggatattcagacaaaaaaaaaaaagaaggatatgattccattaagacaggtatgagtttgattgaatttaccctacttgaccaacaagtctcattacggttttcacttcactaaagatc

SEQ ID NO: 39418 - DNA, 442 bp, Oryza sativa
  unsure (1)..(442): unsure at all n locations
tcccgtgacttgctgagtacgattgttctcaccctcgctctatataaatatatatatagntcctccgccttgaagtgaagacggagtgaagcgaagattangatttcgtcctggttcctatccatcgcctgtggtggtgggtgttagtccgttggttccgctgctgctgctgttgttggtgttttcctcgtccgcgtcgtcggttgcattctcgggctgttctgagctgcaaacctaagttaaggtaaataagtcctctatttattttaaggattgcaatgatttcatattgtcaccgtgggtaccaccgctatgtcctgggactggtactgagatcgcggtttcgtaagaagcggttcgcgccgtttttcctactacacgctcctatcaagtgccgttgtacgacagtgccanatcggtgtgtgacatgcacgccgtcgtc

SEQ ID NO: 39419 - DNA, 374 bp, Oryza sativa
taagctttctaccgatgggggcgaaaaataaacaagaatgagtcatccttttactcagcaagccacaccggagatgcattatttatgcaagggggtacaatgggataataatatacgggttaagttttgcaattaacagcatttaaaagtcacttaattgcccaaagctattttgttaagacgatcctatagcttcaaagttttattaatcaaggccgtgaacccacacgaacctgccttaacccaaggtctacgatgattcataccgaactggcaacccgaccctgggtccatctcgtccaagcaaccatgccaacattccaattttatttgtaagcaggtttaagaataatacataacttggtacattgctc

SEQ ID NO: 39420 - DNA, 355 bp, Oryza sativa
tcacactatcacacacaaaatataaacccacagctttttcttgcctatatcctcgcctcacacctcttctctaattataccatctcatcctccatatataaccctctccttcctcaatccacgcacgttagcaatagggttctttcattttccccaaaaaaaatccaaccctattaagttttttttttatttaaacaatcaagaaaagaaaaaaagagaaacaaagtttcatgacaaatagtatatagttatagacaaagagaataatatataggaagatatatatccatggatgaccagaggctccagtggaggaagcccggctccttcctcctcgtcgccggcgtgttcctgg

SEQ ID NO: 39421 - DNA, 361 bp, Oryza sativa
cacttttcctctcaaggtgacacaatgtgcaccatccatatgcaaaggaggaagaaaataaatatatgttctcctgatatatatttccctcctgccaacctgtttatgccgttggaattatgcctgcgccaaagattctcccatcacaaaaacaaagagcattcgctgactgaaacatctctctccatctctctgttaatatttttaaaaaataatattcaatccagatgctatacctgagaatgaaatgcaggtgtgccagaatttacaaaatggattgaccaatagcctaattaattgtactacgtcgacatgttttcttcttcgcggcacccttgatcgggccgtcaatcttgttctc

SEQ ID NO: 39422 - DNA, 341 bp, Oryza sativa
  unsure (1)..(341): unsure at all n locations
tgttcgtggcttgcgcaccgatggtggcatcttgaattcttcggtgggaagattgcattctanggtgggtgtgctggattctcgaatccaaactttgaatagtacccaagcatttgtgtatcatcgtcggcgtgatgctcatcatacttccacttctgcgcgtgctccttctccaccacatgaatgaagacctttttggtacttgatgccaaaaggggggaaaaagtgtgttcctatgtctcgtgggttgcgactagtagtagtgaggttagtcacactatatctaataagttgaagaggtttgggctatattatgtatgggtatgggctattactctata

SEQ ID NO: 39423 - DNA, 191 bp, Oryza sativa
  unsure (1)..(191): unsure at all n locations
ctaataagcactgatgagttacgcatcagtgctttgtcttgctatttggagtaagatgactacactnttgtcaggacaagacatctatgccagatgttttgaatgccggggtacactgccactcatattggtgacggatattcttatgatctatcaccgatgaccttaatcttattagtgcttatttcgga

SEQ ID NO: 39424 - DNA, 193 bp, Oryza sativa
ctctatcttatgtctaacctaacgattgcatggaaatgctggcccctctggttgtgtggatcatcttggcgctcacggatcatctgaatatcttgcaatgaagaattgcaaagaatagggcggtatcacttgctaaaggtcagctaagatggacgaagcttcagaaatctgagtatgataacgagcactgctt

SEQ ID NO: 39425 - DNA, 289 bp, Oryza sativa
gggatacagcgctacgactcggtaagacgtggaccgggaagcttgaacggcaactcacccatctggctaactccggcgacagaggtccctgaagaagatgaagacagttgcgacagcgatgccttccgcagccaccacatcaagtgcttgcctcatgatgatcgcttcttcggcgcactggaggtgccctaactgtgcaaactccgggtaagtttcttgagctaattcttccggaactacacatcgatctatgtgctctgatttgctggaacactggagagagctcatg

SEQ ID NO: 39426 - DNA, 357 bp, Oryza sativa
atattacacaaactctaaacaatcttctatacattctattacatttcagcaacacttcactattcaatgtatctgttacaatattttcacatatgatttcttctccataggtggatattattaccggaaactcatatctccacctgattacccttttaagcctacaaacatcaggtaatggaactgtaatttgtaatattgaattactgaaattgaaggaatgcttacgatgtgatagaagagttatacgtatttgagattaatgaacattctgaaaacttggttctcatatctgacttgcttatacggataggaacactttgaactttggtttgcatatctgattggttattgtca

SEQ ID NO: 39427 - DNA, 416 bp, Oryza sativa
  unsure (1)..(416): unsure at all n locations
tactattatacatacgcgtttattcagacttcagagcatcagagcaggtcacaatatatgcatgctttccttctgcacatgcaaactatctaaacgttactattggatggattcgatgttcaatgaatgccacttggtgacccgacgcgtgtaaaatgacaatggacagttggacacgtnttttggccacagacataaaaaccgctacagcatatatattgttgtgttctgttagatcgctggtaacagaacgagtttctcgtggcgcatgcagtatcaacgggccaaatgcggtctataccgccctacgtacacattactatatttcacgttacaagactttctaacattgcccatattcatatagatgttaataaatctagacacacatatatgtttagattcattaacatatt

SEQ ID NO: 39428 - DNA, 381 bp, Oryza sativa
tacggacacttgaatctaagctgatatgagaagttatatttgggtgtgatgtttcagaaccatcaaaggatgagaaatcgagggagacatatgatccgacagaatgtgatattatagccatgtccactcataagccaaagcatgtttctgatttgacacaaaataaagcatcatatgttttacgttcggttctcaaatgtggagatgatgaagatttcccaactgattgctgcattgttcagctgtcatcttctattcctgttgaggcagatcctgataccaaaatgcctaaaggagcaatatttgctgtgtttctcataaatatgaagacatacaatcgtatatggaaatgccttcgattgggagcaaatgatggtaatc

SEQ ID NO: 39429 - DNA, 321 bp, Oryza sativa
ctatgatgcggcggcgaatgcccactgctttcttcgacgagatggaaacttcggtgttcggaggaaagaagccgatccgaatcgaactcgattccacgaacttccaaaacgaattagccgatgtttccaaaagagaaaaggtagaggagatcccgaggatcatttcccctctatcaattcggccggaaacggataggggcggccggatttggaaaggaacgtctgtggcgcgaaactatggtttctggcggcggcggtcggatgtatacgacgagcctgacatgtgggacccaccttgtatcgacagcgcgctcgcgcggg

SEQ ID NO: 39430 - DNA, 311 bp, Oryza sativa
atctttggtctgcacatatactttgaccttgttgccctgtattgtaagcaaagaacatgtcccaatgatcccttatctttgggaatgtgttgaagttcaccgcctggccctataagatgtatatctggcatagatctcccttgaagctctgaaactgctccgtcattttctttatagtccacatttccactatgtcttctggacccacaggataggtgaaccgtctcagcattgttggccacagcatctgtttttacgaataaaggacatatctgtcatgatctccgagtgccctttttctgcgccaattc

SEQ ID NO: 39431 - DNA, 344 bp, Oryza sativa
atatggcatgcttttgtcccaagctccaccaaaatcaagagcgcaagctctcaacatatcttccaagatttgattgactcgctcggtctgaccatcagtttgcgggtgataggccgtgctgaaatttaaactggtccccaattctttctgcagcttctgccagaactttgaggtgaactgactccctcggtcagatacaatcttcttgggtactccatgtatgcacatgattctcgaaaggtagagctccgccaaccttttgcccgtatacgtggtatgtactggtatgaagtgagcaaccttaatgagtcgatccacgactacccatccgaatcgtgacccga

SEQ ID NO: 39432 - DNA, 348 bp, Oryza sativa
  unsure (1)..(348): unsure at all n locations
acttagttcttgtggagggcaacacgctcttcggctggttctactgatgaagtccgagctgctcgctgatggggtgcggcgatgctcgacaacgatgacatgctgcagtctcttctatggagttggtgctagccgtgtgaaagaagtggctccttggtggcttggctgatgtccatcgttagatatcggagctgnntttcgctttggcgactttcgtggcttattgtcacttgcggtgtgaagtcggcgctgctagattgcttgcgcgattatctcggcaacgataacacctcttctgcgatgtcgaagccgttgagtcgcttttgtgattatcttggcagcgatgtc

SEQ ID NO: 39433 - DNA, 387 bp, Oryza sativa
  unsure (1)..(387): unsure at all n locations
aatcaagcattcgcccacccagatagcttataaagatctatatactatgtgagcctgcaacaaccaacattttggtgcttaacacaacactagtcactcaaacaacaaccttcgctgtctaaggactgggaagaaagtcacagctgcctatctacatggtgtgctttattcattattgcagtgaaaaaccgcacatgataaaaccctaggtttggtttttcactgaagccaacacaagggtactatagaaccctcagcttggtaaggaaggctgcacacaagctcaggaaaaggagctgaggccccgtaactctcttgatatccagcagatacttctcgnctctggttttgaaagctgaagaaagaaacggatcaacaatctacacc

SEQ ID NO: 39434 - DNA, 361 bp, Oryza sativa
  unsure (1)..(361): unsure at all n locations
acagctaattttttttaagtatacagacacacatttaaaatattaaacgtatactaataacaaaacaaaaattccgcccgtaaacttcgagacgaatttattaagtctaattaatccatcattagcaaatgtttactgtagcaccacattgtcaaatcatgacgtaattagacttaaaagattcgtctcgcaatttacatgcaaactgtgtaattganttttttcgtccacatctaatactccatgtatgtgtataaacatttgatgtgacggaattnttagaaatttaaagggaactaaacacaacctctatcgtctttgcgcccacagagaaacatcttctactcgtcaatataacact

SEQ ID NO: 39435 - DNA, 137 bp, Oryza sativa
actcagcttctcggttcttggtctctgtccacgcatcgaaccaatcccgagaagataccagctatatagcggatgcgcccccccaacaagtatatagcggttcatatcgatgtgggggagaaggcgctacccttatt

SEQ ID NO: 39436 - DNA, 390 bp, Oryza sativa
  unsure (1)..(390): unsure at all n locations
gctggacggatagaaggtgtgcgtcgccgtcatgcgcttggtggataggtgcaagatatagtttgcttttatattttnttgtgtgacttacatgtgggcctcacatattttttttattctctcgttactgactaggatgacacgtcagtgaaaccactcatgcatactgccatgggaccttctttgcacggttttgaacacataaagggtagaaatttctgatatcggggattagggatgtcatacagattcgacgtaaaattgagggacagcaagtggacttattccgtatactagtagaagcccttggccgaacgagaatatcacagtttgggccattaaagatgcccactactgctggatacaaagccagccatcaatataactact

SEQ ID NO: 39437 - DNA, 246 bp, Oryza sativa
cgcgccagatgaccgagcgtgtggcccctcaacggaagaacgcgcaagcccccctttgtcggttctgccgacggcgctatgtgaggttcttcgccctcgatcagaggaatgtcagcgagaatgatcgcacaagacgcgggcgacgtatacatgttcgggcttgtgagaagcgtaataccctactcctgtgttctggtggatctgtatgtgaaggaatacagagagctcgagagccagagagagttc

SEQ ID NO: 39438 - DNA, 384 bp, Oryza sativa
ccatgttggcaagtactatacactgcacacatcattcgactgaaccagttactcatgggacagccaacgtacgggtcccctgccgttgacagggcaggaaaaacaaaaggcgctctgtatgactgtaagcttcaccctgacctgatccagctttacgccccacaatcttcattataaaattaagctcgagctgatgactgtggatgagtaaaagcaagctacagtctatacatgcctgcatgtgagcatgtcaagcacggaacggttaacgtcacaagtcaataagagaattgccacgagacgtaattaatctttcttgttatagcaactcttgtccgtcagctgatcccctgtcagtccaacacgaagcagtccgtcaatgac

SEQ ID NO: 39439 - DNA, 296 bp, Oryza sativa
ttctttcttttttgcagttctgcagatatatgcaaagtgctgctacagtgtataatatcacgtacgagcttgcctatatgccaacggcaggtaattaatgcttagtaccaagctggcaagctgccctaacggaaaattactgtattggttaattctccatcacgtcaatgagtacagtaaccgcatgctaccggccatgcatagatatgctcctgcagagtcctaatctactcctcccgatgatatctccccgcatattaatcatctccaatgtccatctgatcgtgcaacgcaac

SEQ ID NO: 39440 - DNA, 432 bp, Oryza sativa
aatcctaacacaatacttcatgctctggcaacccgctgttcccagatgtcgctctactacgtacccggacaggaaggacttaagtgatctcgagggctgtcaccacctctacacctacctcaacgtactgtgggacacgcatcaattactggataataattacctatacaccacgtctaagcaattaatatctactctagtgtttataactcaccaaagcaatcactatgttttagttgattatagtgaacaataatcctgtatgctatttagaaactaaccaagagataattctcacaagataaatctaaattactcaagaagaatattatattgaattcagagtaataaacagaatatatgatatatgagatgattaccgacaactcccgaattcttccaacttcttctactctactctcttgctattct

SEQ ID NO: 39441 - DNA, 417 bp, Oryza sativa
atttgttgcttcaatgttcttgcgctcccgatgctcggctagtcttaacttggcattctccagcttgaattgatattgctcgaggtaaacggccggagtatgggcattgactagttcatctgggataagagcttgaactttatgtagccgagttctgatcgacccatagtctactaccaagctatctagtgatgatgcctctagccgacgagaaatgtcttcaagtattttcttcacatcatcggtcaagggagctagagctttggtggtggtatcatcttctgtctcttcatcaaaataatctttgatatcaaaggagaacagatcgactaaaacctgcaaaagatgtaattggaagacagttagatatgaaacagatatagccgatctaaatccttgtgttaagagagatttact

SEQ ID NO: 39442 - DNA, 237 bp, Oryza sativa
acttattattgcttatctttacgcaggttcttcttgccgacaggacttgttcaacccatggtataatatgacagccagggtctatgaatctatcgctcaatcaatcaattcggagcataccactactccatacagccggtgggtggatatacgccattcctgtacattcatatcaatattgcgatctatgcaggacgtgtgacgaaaaaccaaccgctgcctagagatttcttattc

SEQ ID NO: 39443 - DNA, 412 bp, Oryza sativa
  unsure (1)..(412): unsure at all n locations
gtgcgccgtgcgatgtaacatgatatgatatcgcaattatctgtggttagatctggggtggaggttcacttgccccgcgtggcgatatatataagacgataaagttttgatccgggaattctaaaataatcgtgtatggcatgtgatgctnatcatgctcttttgcatgcaccgcgcggatatctgggtctgcttttttattttctttctacgatacctttttgcaattattattccaattaaaccgtctatatgcatcacgtgtgatcttcccggcctaacatgctctgtcaactttgcgtttacaaccctaacatgttggcagntttcgatcaattacgatgggataccagaaagccggttacctataatagtactctctccatcccataatacaagaagtttttacttt

SEQ ID NO: 39444 - DNA, 347 bp, Oryza sativa
  unsure (1)..(347): unsure at all n locations
cgcattctacatctcgcatttactacatgttattttaattcattactgcgtgtagaaaaaataaggtgtggtaaattaatttggcgaatgctatatgctttgtgtgttacttcttccatacagttccgcagtttgaagntgaacactgaaatcataattatggccatatttgatgcaattctgatcctatgtattacgatttacgatcggaatggtttaccaaacacttctgatgaaatatttcggatatgagtcgattcctattgggtgttgctgggtctcaaatctcaagaatgtagatggatcggtactatcagtgttgttcatagaanaaaaacccttaaatc

SEQ ID NO: 39445 - DNA, 208 bp, Oryza sativa
aaaatattatgatattacaaccctgttatgtcgtaaccatgaaaatggaaaaaaatataccaccacccacacaccgatatcgtcaacacaccatcccataatatagctgcatcggaccggctgtcactaatcatgactgaccgccactataccaatatagggacacagatgatatcgccccctatgggatgccaaaatgacgtcttca

SEQ ID NO: 39446 - DNA, 427 bp, Oryza sativa
  unsure (1)..(427): unsure at all n locations
tgtgtatctatatatactantatacatacgtgtttattcagacttcagagcatcagagcacgtcacaatatatgcatgctttctttctgcacatgcaagctatctaaacgntactattggttggattcgatgttcaatgaaggccatttggtgacccgtcgcgtgttaaagtgacaatggacagttggacacgtcttttggccacagacataaaaaccgctacagcatatatnttgttgtgttntgntagatcgctggtaacagtcgtagtttctcgtggcgcatgcagtatcaacgggccaaatgcggcctataccgccctacgtacacattactatatttcatgttacaagactttctaacattgcccatattcatatagatgttaataaatctagacacacatatatgtttagattcattaaca

SEQ ID NO: 39447 - DNA, 225 bp, Oryza sativa
  unsure (1)..(225): unsure at all n locations
gacacaaaataaagcatcatatgttttaggttcgggtctcaaatgtggagatgatgaagatttcccaacttgatgctgcattgttcagctgtcatcttctattcctgttgatgcagatccttgaaccaatatgcctaaaggagcaatatttgctgtgtttctcatanatatgaagacatacaatcgtatatggaaatgccttcgattggagcaaatgatggtatc

SEQ ID NO: 39448 - DNA, 404 bp, Oryza sativa
tggcatttttcatgtgtgtagtgcaagactcaccatacactgattgatgaatgaggacttatttatggacttataccggtgtgatgtaacataaccacatgggctcaatagaatatgcaaactatgatgttgtgggtattttcgtgtaatgatcatgtttaaaggagagcatgtatatccctacggcccatcacagatcaatttgactgtcaaatagaaaagaaatgaatacaatatctctaacatggcacatattcatttgcggattgttcgatgtatattcattacaaatgcagttatactgacagaacattgtggtatcacatcatgtatctcagattctcagtaatatgtgaggacagcacacatggcatgaatatgatcaaaactttgatctcctcatg

SEQ ID NO: 39449 - DNA, 451 bp, Oryza sativa
  unsure (1)..(451): unsure at all n locations
ntgacctgctgctgctgccgccgctgctattgttctttgtatggttccatccatcatcgatctcactcacttcactgnggaattatttatgcaaacaatcaattcatgctcagctccttgtatgcaccatcgtccatggttttatatgtaagtaactgtagattgattaattgttgatgcaaataaatactagtccattccatttggtgaataacaacatataatcatcacaacatcatcctaagtcctatcctatagtgtgcaccatttgctctcacctctagttgctttgcaattaatataccatcattttgatccctgatggaaggtaaaacattccaaatttcagtatgctgtcctctgacagaaacccatacacatctcgatgacaaatcgtacaacaagctctgcttggactctgtacctatacacatcttacatgaatgacata

SEQ ID NO: 39450 - DNA, 250 bp, Oryza sativa
aaccttatactgataatgggttacctgcccatctatcttattaggattggtttatttaaatatctggcattgacgaatactcatcgaactctttattgtaaatcggcactcataattagtcatcagggcgcggtcttaaaataaaccggtactaatccagtaaatgttttataggcgatctgtgttgagcactcttcactctgctgccttcaccttacctccaagccttatatctcttgccggtcacaca

SEQ ID NO: 39451 - DNA, 369 bp, Oryza sativa
ccctgtcgattatatatggacatttacttttgtttttgttcacttctattaagacgtcgatctcatgtgagagctccatactgttaagcttacaaagactagattatgtcatttcaaatattatactcgtgagatattgatatataaaagcaacactggctgatgtgtactatggttcccaatcttctgaaaggttctgattaccaacgatttgagcggagtcgcgacacaaattgatccggcttcttgaacaaacatgctcttgagccccgcaatcgcatcaccacgtctcctctggttatcacccgtgtcgaaacgcgtgtgacctcaccgagaagactatccctatttccaatcgtagacacatac

SEQ ID NO: 39452 - DNA, 388 bp, Oryza sativa
tgccgttcgccttgtgaacgaccaccgggttctccatcctctccggatggatgacttcacagatgaatccggcctccagaagtctcgccacctcctcgcggatgaatgcttgacgttccggggcctgccgacgcactttctgcctgacaggccttgcgcccggccgcacggcgagacggtgctcaatcacctacctggggaccccgggcatgtccgctggtctccatgcgaagacgtcagcgtttgcccgcatgaatgagacgagcgcgtcttcctatttgccatccagaataccaccgatccgtgtggtcttggatgggccgtcgcccaatgcaacctccttgaccggtgcctcgtcgcatgtggcgatccgctgcctcggggcggt

SEQ ID NO: 39453 - DNA, 163 bp, Oryza sativa
  unsure (1)..(163): unsure at all n locations
gcatcgatcgatgatgacgtcataacaacaaggaaccttttgacgagaatattggcaaataatgatctaatatatctgatagntgaatcatgacagtacagttgactatangatcaacgcatcattagatcttcacatgttgactacacacgaaaatatgaac

SEQ ID NO: 39454 - DNA, 379 bp, Oryza sativa
  unsure (1)..(379): unsure at all n locations
tctctattntcttgatgacaattntattatgttcccaaagtaaatatgaaactcacattttggaagcctttgttttttctggaataatctattacaggaagaaacttggaaggagattgctgtttgataagaatacaaatgacgaacatgagagaatcctactctccaagctgaagcaattcttcgggggacagtttacatcaaaaatggaggggatgctcaaagatattacattggcaaaagaacatcagtcaagttttgaggagtacgtaagcaacaatccagagtcaaatcctctgatagacttgaatgtgactgtcttgacaacaggatactggccaacatacaagaactcagatataaatcttccattggagat

SEQ ID NO: 39455 - DNA, 307 bp, Oryza sativa
  unsure (1)..(307): unsure at all n locations
tggtttactttatttacttacctttntactttgaatttctaactttattcaaattaatccaaaaacttgtgctattaattggataaatgtcttaactccctcctttcacttgtctttatatgccgcgctacaagcctgagtacttgtttggtgttgagggatttgtccaggaattgcgtacgatgtcctttgtgatatgatttgggactacccctttgtatgcccagattcctcatgatcgtcatgaagagaagtgccgagtcaaagtcaccttgtacagttataatgaagatatcccctcagtgat

SEQ ID NO: 39456 - DNA, 355 bp, Oryza sativa
  unsure (1)..(355): unsure at all n locations
tcacggagaagggatggatgaagatgctgacgttgagtgcttttgaatggatattgtggataatgaagacaatactgatgatgaggacaacgaacgggatatgtatgattgacattgcatgatgattctcacttgctgaatttcgntgttctgaaatgttaacgactcctggatgtcagcaatatggttcaagttgttgcctccaaaggagaggtttcaactcatgaatattcataagagagtcttatctggctcatgaaggagatgtttcagaaggctatcactgtgagtagctagctccatcgaaattttgatgtacttgtatattagttgcttgagatgtagaaagctattc

SEQ ID NO: 39457 - DNA, 333 bp, Oryza sativa
  unsure (1)..(333): unsure at all n locations
tggatgacatgcagatccctcacaccgaattgaaaaccagttaagcgtccctccacagagtcatcccaaggttatgcgccacgccactcggccagatcactcttccggtcacacttggtactcgggagaacttctgcacagagaatgtctgcatcgaaattgctgacttcgagacagcggatcatgccatactcgggcgcacggcgtntgccaaattaatggctgtcccgcactatacctacatgatgatgaagatgcctgggcctcaatgagtcatatccctgcggagcaacatcataaaagccgtcacatgctacaaggaaagctgcgaga

SEQ ID NO: 39458 - DNA, 367 bp, Oryza sativa
  unsure (1)..(367): unsure at all n locations
agaaccctcatcgacggtggcagtgcactcaatatcctcttcgttctgancttggatgatatgcagattcctcgctccgagcttaaaccaagcaatgcgccttttcacggcgtaattccaggattatccgcaacttcactcgggcagatcactcttccggtcacctttggcacccgggaaaacttccgcacagagaatatcaactttgaagtcgccgatttcgagacagcataccatgccatactcggacgcccggcgttagccaagtttatggccgttccgcactacacttacatgatgatgaagatgcctggtccccgaggagtcctatccctacggagcgacatcaaacaagccgtcacatgcg

SEQ ID NO: 39459 - DNA, 328 bp, Oryza sativa
  unsure (1)..(328): unsure at all n locations
gcaacattgcccgctcttcagatgactggcaatacatggctgttgattgatcaacttggttggtgcacgattcacatacatgtcataaagtatgacattcttatatacatcacatgcatcacttatagggactctacagcacgaccaattntgttttttgccttgtattaataacttggggtctactcaggtaattttttccaaaccatagctattttataattatgggtgcttaagatctacgccagtcaaaaatgctaaaactatatggaacatatactctgatgttaaattttattttgtgtcaatggactaatggaagcacaca

SEQ ID NO: 39460 - DNA, 424 bp, Oryza sativa
cgatcccttacctatatttcccatttcagcagacgagatgcactgatgcatgcccggttcataccatcagaaattcagaataggttctgttactatatgttataaaagcttgtgtgtgtgtagcggcacgacgactaaccttctcgatcgcttcagacatttatcatcctagacacgcctgatgacgacacatgaattcacgatatttggtaacgagattcaatcaaaacctacatccccgatgctctgattatatgcactcctccctaacaaatatatctcctaacagctacgagttcatggcctcgccgtcatcatcttcctatgtgtctacgctacttgtagtcgttatgcatggttatattatagttacagagcaccttctaccacctattataactctgagtctaactatgaataaata

SEQ ID NO: 39461 - DNA, 298 bp, Oryza sativa
cgactgactttgcattcttacaaacttacaccaaggtccgaacaagaccaccgcataaagctagggaaattgcgtcatatgcttgccaccactcttatgcgttattaagagcaaagactcctgtgagggtcttgccttccaacagttacaagctcgcgccacctcccgttgaaatgtggattatcttgtgcgccaacccggccttctcgacagcagcaacagaatcgccacctccaatgatcgatgtaacaaccttggcggtgatatcagccaatttctttgcaattgcctgaattga

SEQ ID NO: 39462 - DNA, 347 bp, Oryza sativa
gggtttctaaataatctagatagggtacaaaagaaattacattccacattccctccacaatggcctatgacctgagggtgatatagatattttcctacggtaaatattattaaggttaccaataacctgttgactacgtgtataactttctggtccctaacttatgtgctcgatgcatatgaaggaccattaaggccttatggtgtcttcaacaaattccttttactcgaatagcattttgactgttgagtattcaattaacttgaggcttgcctatctctccaaatagtaatcttcatgaatgagttgttatgctcacaccttcatcagataatctgctatcaatc

SEQ ID NO: 39463 - DNA, 146 bp, Oryza sativa
tgggcaaattacttgggtgaaaatggggtggccggtagatttatcaaatgcgcgctttggttatgggccggggtggatgggatatgtcaatcccttatctattcgatataacgaacaaattttctgtgtgattttaatggatggga

SEQ ID NO: 39464 - DNA, 444 bp, Oryza sativa
  unsure (1)..(444): unsure at all n locations
agcttggagtcacagcttcgcatgtggntgtttgtggggntntggtggttcttacagntatcatgagaatgcctccaataaaagctgtgaatctgcacttaacaataggctgatattgaatttatttaacgaaaatatctaaacaatgtccccctatgaacttaacctttggtaaccagcccactctaagagagttatatttcatattgtattatgtgcagcatgtaaaccacatactgtccccataaaccaaatctgtttctgtattgcgacactacgtatcacaggatgctctccaatttgttctttactttcattaacctgttttagctgctcttataaccattcacagcttcacaaatttgtgaatgatgacttgngtgcattctttgagagatatcgagtattaagtaagcanagacttggtcgtgctattcttatctt

SEQ ID NO: 39465 - DNA, 373 bp, Oryza sativa
  unsure (1)..(373): unsure at all n locations
gctattacgtgcacttataatactaagcttctttctactcggctcacctgaccggagtccgtgacgtgtcttgctcgtgcgcanggggaggtcggcgactgagaacatctacgggtcggcggcgatcgcggcggatgcgttcatgcataatatgactatgccggatgacgtggtggatcataatcgcgcctatgctgccgccggcggttacaatggaacagccgccgcgacggcgacggcgactaacaccggcggtgacgcggcggcggatgacgtgatgatgcgggtgaatgcggcggaccatatgacggtgcatgcgttcaacgacgtgggcaagatggcggaggagggcaccggcatggcgtgcggatat

SEQ ID NO: 39466 - DNA, 119 bp, Oryza sativa
ttccctcaacaatgttgcaacaggggcgcgttgccatcaaaaataggctgcaaacactgcgactaagcaacaatgcgtgaaaaacacagcaaaaatgacgagaaattgactgcacgaaa

SEQ ID NO: 39467 - DNA, 321 bp, Oryza sativa
ggagagagatcggcgcataatgtgtgtgtggaatgcattgctgaaattgcaaccggagatgggtaggtgtgttatggatacggaagagatcttcctggcattggaatcagacaaggcgcaaccaagcattccttacatgtcgcatcaccggacagctcgagaaatcaaagaaactgtgcatcaatttgacaccataaagatctagcttttgcatgtgccgggagacgacatgcagggtttctagctcgagctcggatcccctgctcacacggatatccagccgtatcacccgggcctggcacatcactgcatgccggaacc

SEQ ID NO: 39468 - DNA, 376 bp, Oryza sativa
  unsure (1)..(376): unsure at all n locations
tgctgcatgacagcccaactctggatgcatataacggcagctctgttaactcanactgaacgaatgtgcactcataaacatcatggtcgccagcaagtgcacgcagagatgactctacgaatctggcagcaacgtaagccatggagatggtagcggagccatcaccagctttcttctacaccacctctgttgcaacattctggatcctctttgtcagctgttcaagtccttcatctgtgaaggtgacagatagcatggtcttctacagcagtggtagaattgtgatcccagcatgaccaccgacaactggaacatcaacatcgatgagcttgaggttcttcttctgagctacaaatgtgttaactctaacaacatc

SEQ ID NO: 39469 - DNA, 388 bp, Oryza sativa
  unsure (1)..(388): unsure at all n locations
caggcacacatagcgatggtttgcaatgtacactttggatataatcagtataagaaatacctgcatgataatgcacacagatgcttcgaaaaccatcattaattattccttaacataatcacatatttctggactttacacataagctcgcagataattattctatcagtgataggctaggcaatgcatacgtcgacagcgagatgtctgcgatgacttagttaatcttaatatatgctccgctagtctttcaaaaatgctcacaatgatggtgtgtacgtgtgtgcgtttataagggtgagtatgcacaagttatgagagcttacagtttttntttataaaaacgagttcacaaaatggaaaagatgatggntattttgacggaaat

SEQ ID NO: 39470 - DNA, 452 bp, Oryza sativa
  unsure (1)..(452): unsure at all n locations
agctcgaagaaatntgaccttgggcaaaccctttacgttttattatatgcaacgaatgggaagcaaatagtatggcttgtcgtgaataaaaaccaatttaaagaattttgctatcatgattttagctacaacttgcagtacctatttattatatataatcatgaatttgaaagaatctacatataattnttggacgaaattaaactaaatcaaatttagccaccatgtgaaagcaaataatagctttgagaaagtggtttacctgaatttcatggtctttgaacagcgggtgtttaaaggttggcttgtgattgacgtcaacacaatcgtatatatcaccatcttctggctaattttatgttacctatgcttggtagacatcaaacgatgcagaatacaccctccaaaaaagatcaatagtcttgcacatacctgaacagtcttataacttg

SEQ ID NO: 39471 - DNA, 277 bp, Oryza sativa
tgctctatatagatatatatatatataggtcctccgccctgtatagaatataatttgagtgaagattaatgttttcgtcctggataccaaccgtcacctggggtgttgggtgttagaccccttgttaccttctgctgttgttgtagtggtccctcttccgtgtcgtcagttgtattctctggctgtctgatctgcaacctaagttaatgcaaataagtcatctatttatgttaaagattgccgtgattcatatttgtcaccgtgggtaccaacacta

SEQ ID NO: 39472 - DNA, 70 bp, Oryza sativa
cgacaaggcccatgctacaaaagtactatttcacgtacagccctacactgtccgactaatattcttggag

SEQ ID NO: 39473 - DNA, 325 bp, Oryza sativa
  unsure (1)..(325): unsure at all n locations
gtagaaattgaattaggagcangtaaactataccatgttgatgcaaaggttgacaaagaaagaggaaacaattttaacttaagcaaatcattactaccggccttaccacattgatcaataaattggccgatatgctccattgtagtcatagcattctcacctgtaaatttcgtgaagttagacacctcaaatccttgcgggtatgggaccgaatctacatgttcaggatacggcatttgatatgtatgtatagctactttggattctatttcactactatcccgcaagacattgtcatcattttttccagcatccacgtaaccga

SEQ ID NO: 39474 - DNA, 432 bp, Oryza sativa
  unsure (1)..(432): unsure at all n locations
ctgtctcttctgacagggcaatttatgacagatgctctnttcttgtgaacaatctacaagtgaatatttgtgaaaaatgagactctttatactagcacctataccttcaacaagtacaaacaaagttcaagaggaaatatactgatccaagacgggcttttcctttcacaatgcagtaagggacctccatcttcctgcacagggctggaagccacacaaccagctcaatcggatcgacatcatgagcaatgacgaccagttgggccttgctctgcaagaaaaccattcacttatctcaacaattttgtttgattgtttgttcccataaagataccgcctgattggtaactaacaaagatatgcataggtcacttanggtctgtacctgctcaatgaggtatgtgacatggntaagaccatacttcacaacaa

SEQ ID NO: 39475 - DNA, 393 bp, Oryza sativa
  unsure (1)..(393): unsure at all n locations
cgctcggtctgaccatcaatttgcgggtgatangccgtgctgatatttaaacgggtccccaattcttcctgcagcttcttgcaaaattttgaggtgaactgactccctcggtcagatacaatctttttgggtactccatgtangcacatgattctcgaaaggtaaagctccgccaaccttttgcccgtatatgtggtatgtactggtatgaagtgagcaaccttagtgagtcgatccacgactacccagatcgaatcatgacccgacgatgtccggtgcagtcccgttataaagtccattccaatctcctcccatttccattccgggcctanagaggttggagtaaacctgctggtctttggtgctctgccttcactcgttggcatacatcgc

SEQ ID NO: 39476 - DNA, 435 bp, Oryza sativa
  unsure (1)..(435): unsure at all n locations
acttcatcggtcacttgttttacgatttcngttacatctatgcctaagaccggaattgttagtaatcctctccttattagtcctattgatgttgacaaaaagaaagggaaaagtgttattattggggatcctcggcccgagataattaggatcaataatgcaaaggctgaagatcataaagttgcaaatgatgagtcatctagtttccaaaggaccaaaaagccgaaactcacttttgagatgcttatggctaagtacgagaaaggattatccggtcaacgatttgataatcaaaatagtgattcaaaaagaccaagatcatctcgtaggaagagatttggtcaaacaccaaagcaatcggagccattaactataccaacttcatacaaacctncggntgtgatgccatggtatccatatncaatgtcactatat

SEQ ID NO: 39477 - DNA, 455 bp, Oryza sativa
ttacgtgtgtgagcgtgccagttgatctgatcctgctttcatcttgaaatgaagaccaagaaaccatggctgaatccataaataatatccgatcggctagttgccgatgacgtatcatttatctctgggccgatgtcatatgtgaattgatcggcaatcacgaacgaataagaaagaaatgaatctactcgatcgactgtagatattaataatatataatccttgttaacaataacatcctaattaatagatacaattgccttattcagagctttatctctatcgtggcaatccctgtgaagcacgtcaatcgattctagaaacagccccgaagccatcttcgttagaatcggctataccaactccatcggctgtatcggctgtcccgatccgattcatctcagccgatgcagactccagccgatgcatactctgttcttcgaatcctaactctt

SEQ ID NO: 39478 - DNA, 426 bp, Oryza sativa
  unsure (1)..(426): unsure at all n locations
ttggaatgccttccgcttgatcctatccttttcttcagctggaaatgtgaaccatttctccattgccgtccaagctcgctctttctcggcttctgtgaccttcccgatatctttatggaggatcccgaagttctcacgtgccgctagcccgcagcaattaaaccatctttcaatgacagtcctgtgcgccgtgggcctaccactagcgtcaacctctcttataacttgcactgtggtcggtcatatattttgtgaccgcggattttactatacctacttgcacttgtcccgcccgacatcgacgtatgttggtcctgcggcaattctgcagcacaaacagaaggcaatatntgctaaggggtgctagctaaaatttatgtggtcatgtggtgaanatttatcctataaattaccatgaatttcggg

SEQ ID NO: 39479 - DNA, 349 bp, Oryza sativa
agctatgatctgaaaatgggcggtggcatcgcacgacgacgacaacagcagcatgggctctcccggatgggcataacggtgacgaccacggccgcggtggccgggatccacgccagccatctttgtgcgacagtgggagcttccatacggcggtgacttttgtgtagctgcaagagattacattgtaaaccacgaacggtgctacgcctggagctcatgcgaccaattttggtcacctgactcatgctaattgcgtgcgtcaagccatgcgagatggagacggtcttatggtatcaaccaaacaagaagtaaaataagtcatgctactctcggccaggcaaattctcct

SEQ ID NO: 39480 - DNA, 171 bp, Oryza sativa
ctgtacatagagtccagaacttgttcttgtcgtcgagtactcattgcttgagtgaagataaatattgtagattggaacaccactcgttgttataatataacacggcatcatatttggtgacgtatgccaggttgtcaaactcttgtagtcgtcgggggtggtgaagtagca

SEQ ID NO: 39481 - DNA, 450 bp, Oryza sativa
  unsure (1)..(450): unsure at all n locations
tatcacatgaagcataccactcacttatggtagtacgatctcttccgcttactatgaacacacagttctttggatcattgcacaagcttgtaaggatagaaatgacttctgcacttggaactttgttgactgatgactggtggacaaaggtgccatcataatccataaatatcaaccttctattaatcttcttataagaagaagcaaagtgttccaaagatagccttctaaatccatgagaaagagcaatgactctaaaattcaaaccaaacccagtggtccaacaccttcggctatagtgatccttgcacgctctatctagatcttgggaaaaactgcgcgcccagtaagcaacgtcatgagttntgacgtatcgataatgcttatcatgaccaatttcctctccgattgagtcanatccattgctttatataatgcatcagctacatc

SEQ ID NO: 39482 - DNA, 185 bp, Oryza sativa
aactacctacaactgactaaacctcgcgaaaacgacaggcatttatatccattttcagtggttgagcaatctcggaatctcctgtcctgtgctagtagatagtacctgcatgcagatcgactgatcgagcgccatacggagctgtcaaagctgttagtgatgtcctgagccacgcaccctgaatc

SEQ ID NO: 39483 - DNA, 336 bp, Oryza sativa
  unsure (1)..(336): unsure at all n locations
tttatggctgaagaagacatccattatactggctttcaggtgttctggtgccatcggcctgtatgagtgggttgttgttgatggctattaaataccaaattcacacagtcaatacctgcataaatctgaaagtataaaacatccaacatagtggtatggtttatttctaacaataaattctcaaccatcanagttgagaagaaatatacataaaggagaggaagaattacattcatatccaagcctatggagtcttgggcccataagtccaacgaaatacatgtgggcccaatcactatgccactagattaagggccttcctgccatgatcctgga

SEQ ID NO: 39484 - DNA, 436 bp, Oryza sativa
atgcttgctcaaatgtagctttttcattctaagggtcaacagaaccatgagttccttcagcgtgatgatgcatcaatctacaattgccatatgtgatgttatgctctcaaatttttgcaaaagaatataaaaacctgaatcggtgccacccgttatgacatttgtgcaccaagtatttcacttgtagtttactgcaatatttaaggtttgcattctagaaattgagggtttttccgtggggggagggggcgaaagaaccaatatgactgaatctatttgaaaaattgacgaactttgaatgattcagaataaaccttgaccaaattcacaaaaacatgaaaaaaggagaaatttctggtgagatatatgcttgcccgggtgtgggaggcaaaatttgaatatttgtttcgaaattgcatcacggcaagatttcctt

SEQ ID NO: 39485 - DNA, 288 bp, Oryza sativa
  unsure (1)..(288): unsure at all n locations
aaaatactccactctcccctccttaacccatttncaaacacccaaagaataccgcgatgcacacgcctttcgtggacaagatcccccaccgccgcctcgacagcttgggcgccggtggctggctgaagcaaaggctggctcagatcctagtgcgatctacttgcaccaccaacaccaccaccacgacaacgaccacctcgtccacggtcttcgtcagcctcgacaagaccaatgccgacacgcaccaagaaccgccgccgccgccctcgccgtacttctgcaccccct

SEQ ID NO: 39486 - DNA, 454 bp, Oryza sativa
cacatgtgggctattgtgtcttctctatgacaaacttggcagatgccttgtgtctgttccgtcgtggtagcttaagttagattagctgttggtgaggcgttgtaattatggtttgctcattcttaccaaattaactgtgcactgtaaagtttggtctcgtttactccttataataggacaccttattcttaatataaatcgtcggtaatggcctgtccgctaaaaagaagaagcttgaggtccaaaattgagatgcacttgatagtgtagtggcaaaagatgtgtggtttcaaccctaatgtctcgtgttcaatatctaaattgctcacaatagttttataaaaaatagtcagaaggatgtctcgtcctaagctaagaatgatattataacgtcgtaagacaaaatgacaaaattaattctcttattataatatattcacatagctacacatcc

SEQ ID NO: 39487 - DNA, 433 bp, Oryza sativa
  unsure (1)..(433): unsure at all n locations
ctgcagcttggggtccgttttttgaattgatttgtgcaattaacatttgaccacgccgtatacactgatggtaaggcatagctgtacttgacaactggattgtcatcctgttaaatttgagattaaacaaaaaaggtgaagtacttttaccgatggatcaactggaatccccataagaaattgctaatgggcatcttagtactaatgccttctttagagttttccacttgaatacttgataagatggccaaaactttgttgacttttatctgctgtatctctttagattagacaagtctcccagaatcagtgctgacgggtcagctttctcccctaggatccaactgacaaactatcttctttgtgacatgtcanctcgttgcacaaaccatttcagaagtttattactgtttataccgatacgctttaaaac

SEQ ID NO: 39488 - DNA, 288 bp, Oryza sativa
acacgatctctactttattctgaagttatactacaccacggtctacttaaatcctctgggagatatggtctcctatgctctgcattcacgatcataatattactgcatatgcttatttttcccttgatagacacataatgacgactagatgatgatgatgattatgatgatgaggttgaagaacatggaatggcgtatgatcgagttggccatatgctgtagtcaccaatgtggacatccgaggggtactatattagatccagttattaagcgttggcattggatctg

SEQ ID NO: 39489 - DNA, 451 bp, Oryza sativa
agcttggacagagccgatccgtccgtgctgtgttctgtgcaaccaccgcttcctccgttaattccgccacatcccgagctccgtttgcaaaattagttgaggggaaatattcctcttatcctcctctatctttacccccaaaaatcggagctaatcgttgagtatcttatccgaatcgaactcgttttcgagtttaatcttcaaaccgagtttttgatttcccggatcgatttcttgcgggaggagtccgatctcttcaatccaaggctataaataggaccccctagtcctcctctttcgtttgccccctctcccgtggtctctcgtgctccgtagctccgtcgcctccgccgtcgccgccgcttgccgtcgtctcctcgtcgccggccgtcgtcggtcgtcgtttggcacgaaggtgagtaccgttgggttcgtctcgtcgttctctatg

SEQ ID NO: 39490 - DNA, 297 bp, Oryza sativa
attgacatgcctattgccaggaggagatcattgtctgtcaatggctgctcctttgggatcaaccaacacaccgggataccctaccacagtctaagtatgtatctttggtcgttgatgtgcattgatcggcgtggtgtttccatcatgctattgatgtttctctataaaaggggtaaataattactattatcttgaactatatatgtgtaaagaagccagtgtatttcttaactaccttaaaagacaatcattttccctgtttcggtcaaaacccgctcctcctcataaaaaacatca

SEQ ID NO: 39491 - DNA, 445 bp, Oryza sativa
  unsure (1)..(445): unsure at all n locations
tgcagctgcatcttattatntctctcatttctatcacaataagaaggactctacccacgatgagaatggatcagctattaaatcttggatggaaatttcttttacctatttccctgggcaatctcttattaacaacttcttcccaacttgtttcactattaaataagataatacaataacagtaagaatattttcaacacaaaagtcctctcaaacaagagaaagaaacataccttcttcatagatatttcgaatatgttccctatggtaactgggttcatgagttatggtcaacaaacaatacgcgcagcaaggtacattggtcaaagttcataattaccttatcccacacaaatcgtttacctataacgattcactacccctatgaaaaatcaattacatcggagcgtttccgggggcgaatccactcttgaattgataaatg

SEQ ID NO: 39492 - DNA, 151 bp, Oryza sativa
tcatgtattcattctgaaaaaattccgaaaatggattaaagccgagaagtcttatattatgaaccttcgattctaagaatcagattcttctacattgaatgtatagctgcagcaataaatttggatcagactttctactccctgcatctac

SEQ ID NO: 39493 - DNA, 389 bp, Oryza sativa
aacattatcttgaagttggaaatgcatatcaagaaacaattcagcaatataaaggaaaactgagcagtaaattaggggaagaaatctgaacttacatcactccaactaagtaatttgacagcacgtggtggtgctggactcataaacctgctgtttaagctaacatctaagccaacaggacgaacacctgatgcggttgtgcagatttcatcgccttgttgctgtgtattgttggactgtgacctgaggaaatctcgagagttgagcatcaaactgagctcagtcaaacatgacacaacattgctttgtgcaacatcaatccttttccatgaggtttcctcaagcatgtaacaacatggtagaaatgctgcacaaacacaaacacatga

SEQ ID NO: 39494 - DNA, 331 bp, Oryza sativa
tcgactcgagctttgtcgagttgtgttcctagactccacctatataaggaagctcgctcgagctcgggtcgttgacatccctaattgtatctctcgtatataacatgctatcgtatattatctttggccgctacttcctaataccacccgggtgtggttctataaactgggagagctggatatggaccggaaagttctgcgcctacttgtactcctgctatgcatcaatggaatacacgttgagtctatcaatccaacatgggatcagatttcttccgctttcgctaaaccctaacacctgcagcgtcggcgttgtgtgctcgacgccatg

SEQ ID NO: 39495 - DNA, 411 bp, Oryza sativa
  unsure (1)..(411): unsure at all n locations
tgaattcgctgctagttntttatttgctatgcctggttctaatttaccgtgcagttgcaattacggagccctcaccaagaacagcaacaacagcaggcttagcccaacagatttgggtttggcgctgcaagctggaagaagtatgcgcatcaacagcataatcctttcagttntgggatacaagatgcgagtgctcagtcacgaaatgctcttggccaatcaaaggttcgtcatctcgaatcacaaaacaacttttgattacacaacattttcctatataggggtatttttgtgtatatgactaacaaantggtgtattagcttttccaaatatgtgaggtaaggacagatggacatggaagaattggaggtaaccaatattggtatgcatatattctcctatctgaattc

SEQ ID NO: 39496 - DNA, 307 bp, Oryza sativa
atatgagatcgagagaacatgcttccactgatatcttgacataagaaataaattacctttaccaaagatcaggatgtaccagtgaacggttccttcagaacaagtggcaatgattaggtacccatccgctcaatctttgcataatgaagtcgcttatgataactcacaaggtgtgggtgagatgactggaacatacagtagattgtgggcgacatcaaaggaagcttgtgactgacaaacatctggatgaactgacagggtcggctcagtaatgtacaacttcgaaccacaagctgcgggatataca

SEQ ID NO: 39497 - DNA, 456 bp, Oryza sativa
tcctctgcatgaaatgactgacaagtagtacttgcattatacacataacataatttgaacataattccgttccacagccaagatgtggaggctgcatcaggctctccttcgccgcatctcgccgcttaagcatacagcgggctggcctgctatggggatcagatgctactacgccaccgatccgataggcatgaagccaaagacggctcctttgcaagtaatctatcatggcaaatccctcccttttgagtaatgaatgcaggtcattgccgaaatacgtgtctcttaccttgagagttttggcgacgagttgtatatttgtacgatatatttccgtcatgatatagacagtgagaacaacggactgaacacattgataccactgcagctcaacagcataataagaatttctcataagcaagctatcgttttgtctgaattactacgtgtctatac

SEQ ID NO: 39498 - DNA, 265 bp, Oryza sativa
atagtggtgtcacaatcgatttcctcacaccccacccagttctcatccatggacataaaaaagcatctagctagttgcatgatgaacacgagaattaagaattatatagatactgctgctctaccaccctctttggtgcacgttattattcagagctgaaacgaccacttgagatcaatcccttttggggttttttttggctccatgataaagaaaaaaatcagaaagcacttgcaaagtgccattcatttcgtgctcggtgatc

SEQ ID NO: 39499 - DNA, 278 bp, Oryza sativa
tcggagtttgaaagacttatatttctaatggaaaaaggtataggacgaatcaaattaccttcttctttcgacttttccaaacactattatacctacctgtattcgcactctcaaatgagagtggaataaattcgactgtcatataatagggataatagaatgacatgtcatgatcaacgccattcctggattctataaactcgcatgctgcaatgctaccatgataacacccacatgttatgaactgactacgatgacaatgtgaatggctatactgt

SEQ ID NO: 39500 - DNA, 450 bp, Oryza sativa
tactcagctttagaacagctctccactcttgactgctgactatttgtctggaaagaagcctccgcttgaaatatgcctgctagctcaggctagtctgtgttgccacatcttttctcgaaatttcaagtttactgctggtggtcaaagtctgatgtgatctccaatctgttcatctgtgcaagctgcaaaatgaaaaaagtttctgaataataattactagcttctagcttccaaattttgagcgttatctgcatatggtgaaagatctatctatgagtgtattctaattaataattataatcatgttgtgtaccaacatgcttattgacaaaatactctgcataatttttttttaccgagaatactgtgtatagttaactggaactctttatattaactctgttgtagcagacaaagatcacaatcaagaaacaatgttctctactattc

SEQ ID NO: 39501 - DNA, 296 bp, Oryza sativa
ttctgttgctggaagtcagctacaagactgagcatcagtgtacgtgacaggacctgaccatcttcccacctaacgaatgcgagaattctcagattaaaaatctgcgatctaagagatgatgactttatacacgataccgagagcaacctgttaaattcatccgaatcattggcaaggttgaataacaagtcactctctgtcatatcagaatcaagaccaacaggagcactgtatcccctcaacaaggaaggcactgggttctcaggtatgttgttaaatatgaattcttcctcctt

SEQ ID NO: 39502 - DNA, 284 bp, Oryza sativa
  unsure (1)..(284): unsure at all n locations
cgacgtgccaagtgaatgacgtactgatgaaactggtgaccacttcacctttgtgtgcatgtcgggccttagacaccattgatatctttacacaggtctttactgtattgatcggaaggcgatgatagaagctagctgttattttgactgcaaccaccaccacctgcgagatgatgtatcagaacacgagtnttggaatagaatccttgaacatgatgttgagatagcgtaaaacattattcctggtgatgaggatgggcaccatggcgaagttgttgtgcatg

SEQ ID NO: 39503 - DNA, 290 bp, Oryza sativa
accactggatctcttcttgcgtgggtatcaatcgaacgtgttcacaagtgaccgtcccgacaatgctgtatcctactagcgaatccaggacacatgcaggatagtgtaagatgcacactgaatatattgcgaatatgagatgaatctcacacaactgggatctactaatcgaactatcgacaaaactgctattgcataataatgtgtgcaatgcataaccctatttcattgacgattaccgaattataggttctagggaaccaagatcctggtgtgtcctgagacttatc

SEQ ID NO: 39504 - DNA, 411 bp, Oryza sativa
  unsure (1)..(411): unsure at all n locations
tccccacatttaaaacactcaccccttgcccttcttgctgcctataaagagacaaatcttttctcccattttggtttcccttccaccttcttgttatcctcaggagctgctcccaaaatccctttcccttgaaatggcatcttattaactggcttgaaaatttccttgaatgagagccgttgataagtcttcttgtggatttccccaagcagttcctccttgcgtttagccaaggacaacgcaacatcacatttactggtataactctctacactagatacttgactcaaattttctaactcttccaaatactcctgatacttatccttcccanatttactatgcactggcatgattaactctgcccaactctctatacaatgcaactcttcatatgtttgttaccacaag

SEQ ID NO: 39505 - DNA, 387 bp, Oryza sativa
tccacggttcttggtctctgcccgatgcatcgttgccaaccccgagaagatacgagctatagagcggatgcgcccccctagcaagcttatggatgtgcagtgcgtcaccggctgcatggccgccctaagtcggttcatatcgaggctatgagagaaggcactacccctatttaagctcctcatacgctccgggccgtttacctggacggatgatgctgagcgggccttcactcagttgaaggcgtacctcagttctcccccagtcctggtcgccccggagccagatgagccgttgctactctacctggcggcaaccccgcatgtggtcatcgcggcgttggtcgtggagcgcgacgatgacaaccctcactccgcgcatccccacct

SEQ ID NO: 39506 - DNA, 308 bp, Oryza sativa
  unsure (1)..(308): unsure at all n locations
ctgccggaaacgccaccgccgccacctctgccggatctgcccgcatgagcgccaatttaatgccaccgtcattgtcgcgggagaaccttggacacggagggtgagtgggaaggggtatatgaccaccanatccgcccgctggaaatgccttcgccgctgccatcactgtattcacccaccggatccgcccacagaaccaccaacgcctattataaatttaaggtacccttttttaaataaaaactggaccaacgcctattatatattctaagtgccttttaaaaaaaataaacgacatctatacatat

SEQ ID NO: 39507 - DNA, 371 bp, Oryza sativa
  unsure (1)..(371): unsure at all n locations
tctcgccgtttcttcctcaccaccggcaacaccgtcgatctctcgccgccgcgtctgctcggtgagaaccgtcgcctcctcccctttccgttttacctcttcccgtactccgttgcaccgtcgtcgctctgttggccgtcgccggcgtgccgcttggcttgggtgcattcccttcccggcgagtagtccttcgtattccgctgtgttttcggtcgccctgaagttgaggtggattgcgtgcttgaattgatctccggagggagacgtcaagataaatcctgcccctgctccttggcttgtgagtgcgccatcgaacgccattgtccatgtttcgttgtcgacntgggtgtatgatttgtatctggcataat

SEQ ID NO: 39508 - DNA, 388 bp, Oryza sativa
tactaacgcttacagacatctcgtctatgaagcaactgctactgtggcctttcctgccctcatcttccatgaatcacatctgacagacgttcacatggcgacatgatacccccaatgtcattgatctataagaacggcatcatcaacgagggaagggcgggtcgcaaacacattcccgcggacgtcgcatcactaccaccaccgacgcggagctagagaatgtgtgaatcatattccgtatgcactcgcccatcatcatgatcccttgtggtcatcgattaccgatgaggacggcgacatacatggggagggtgcgcgtcatgcattgcaactagtcactacgacactgtaagggtggataccgagctggctatgctcagatcgctat

SEQ ID NO: 39509 - DNA, 367 bp, Oryza sativa
agcgatggcatgactctctcatggcccgacaaagcaagagcaagttaactgctgctatgtagcactcctctcgctatcgcatccaacaactacgaggaagggtgcaagctcctctcgctatcgcatccaacaactacgagtaagggtgcaagtttatcgatccgtcaacctacttatggatcaaacaagtggataactttattgttttataaatatgggtaaagaagatttggttaaaaaaattcaaaacaacttataatataaaattgaggaaataaaagaaaccgagcaagtatgatcccaaattatgtcgataaatgtacagtcaaaaggaacagagagaagagagtttgatgtactactaaca

SEQ ID NO: 39510 - DNA, 204 bp, Oryza sativa
ggccggattctaagtttttatgttcctttaaaaaaaatggatgtaggagggattatggatcaatggactaccgatccggaaaaaacgcattccataccatgctgatgaggtagtgtgtttattcctcacaatgggctttctaagtcgagtgaaaaagcttcgcttgagacctgtgtaatggaatctccagtgcatactttcact

SEQ ID NO: 39511 - DNA, 282 bp, Oryza sativa
gcatgatcataaggggctgggcgccacaaattatgatcctgtggcaccatgccattttagggatcatgacgcactgtgggtggaactccacactatatggcttctccgcgggggtgccgatgatcacatggccacactgttcaaagcagtttgtgaatgataaattggtggtggatcacccgataatcgaggttgatgttggagtgaaaggaatgacacagtgtggaactgaacaaaaagaagttaaggtgacaatgactgttgtggagacagcggtatcca

SEQ ID NO: 39512 - DNA, 345 bp, Oryza sativa
  unsure (1)..(345): unsure at all n locations
ttcgaggtggagggatctatactttctaacattacaccccttcgagttcatgtatttagtatttcaaaggtcctgcttttctatttcgcccatttaaaaatacaatataaacgcagacgcttatgacacacgtacactcatccttatgcgcacacacgtatagatcgatgaagtcagcatgaatgcctcattatcgatggctaggtagcctatacaacttatatgtgtttctttcttgggcacatggagatataggaagagaaaatgatgcgacattctntatgttttgacgattccatttggtgaaacataggtgaacctactttcaataacataattgtaaat

SEQ ID NO: 39513 - DNA, 436 bp, Oryza sativa
  unsure (1)..(436): unsure at all n locations
atctgctcctatcagcggcccaacagatggtcttggatgttgtttcctggccttggtggtacatgaactgctggtaccaagccatctggtctttttgggtctggatttccagaattggatcaatatgcagcagcagttaagccaaaaccccaacttaatgagggaaataatgaatatgccaatgatgcagaatctcatgaataaccctgatttaattcgtaacatgatcatgaacaatcctcaaatgcgtgatatcatcgaccggaatccagatcttgctcatgttctcaatgatccaagtgttctccgccatacccttgatgcagccagaaaccctgaaatcatgagggagatgatgcggaacacagacagagcaatgagcaacattgagtctctcctgaanggtttaatatgctccgacgcatgtatgaaactg

SEQ ID NO: 39514 - DNA, 305 bp, Oryza sativa
  unsure (1)..(305): unsure at all n locations
actctcatatgtctaatatatgtattaagtgttttctaaaagtaattcagacatatcataaaaggaatttgtgagttttcatcaaaatataatcatgtgagatctcgntgtaaagatttaattgttacgaacacaacggtgtaatcggattataaatcaaatgagttatttaagagaaacttctctaagaagaanaaaaatacatagatattgagtgtactagtaggtttttttggaaagaagggtgtctctctttatcactatccagctagcactttctgggtagttgtgtccacactagtaca

SEQ ID NO: 39515 - DNA, 362 bp, Oryza sativa
cacctcaatctatcttatgtcttttcaagatgggctttgataaactaaactggctaccggagccgatctacatataacgatagataactacccgtctcgtgggcaatacggaaggttttcaagataaacctacaaagatgtgtctcactctcgcagcgacggcggatgatttacagcgcacatcaacaaagatggacaaactatactagaattagaagcagaagtaaaagaacgattcgattgattgatggctgattgtctctttacaatgaaccggacttgtctcttatataggggctggtcttgccctctacaggctctccttcacgtacaactcgggctataaaccaatggatacccaa

SEQ ID NO: 39516 - DNA, 332 bp, Oryza sativa
  unsure (1)..(332): unsure at all n locations
atctggtatggtcccaccagatacaagtgctttcctctcctctcgatgcataaggaggggtaactgggctattgtcctgatcaccatatggctcaatcgttatccactaaggctaagagggggtcacccttttactggagcggcatgggcacgtgacgagaagtacgccccgtcacatccccacgtttcctccataacatcattctgccattaacgcataatgccacggtgagggagcacacatggccaggtcaaatccctgtaattgtgacggtgtgcccaagataggcctccgccctcgaaaccaaccttacggncctatcccactaaca

SEQ ID NO: 39517 - DNA, 454 bp, Oryza sativa
  unsure (1)..(454): unsure at all n locations
tactaagcttaataggacgatcaacctctacaaccactgcatactcctggtggtataatgactgaacacatgactcccgataagcttctctccagcgatcgggaccctccgaaatgagatgcaaccgatatttggaattaaatgatctccaaattgggatctacaaatgaactagcggcaaaactgcaatggcagaataatgtaagcataacataaccctaattcattgacgattaccgaattaataggttctaagggaaaccaaggatccctggatgtgtccctgatggacttcaacaagatacacggcccatcgggtctaaagacggtgatgtagcacatcagacagatcatggacgctctcttacttaacaattctcattgaatcaaaatgaattgtgacatgagaccaggcccattggaaaggtgatctttgtagctntccatatatatg

SEQ ID NO: 39518 - DNA, 385 bp, Oryza sativa
  unsure (1)..(385): unsure at all n locations
ttgcgcctggttgatggggacaggagtatctatattggtccatntcttcactgtactattactactactactactactgctccagtacaaatactgatgatgtgtgtacgcatcacattattctggctaagctttcttcctcctctttcttgggacgaggacagcggcggcagcgtacgcagcgggccatattctacacgaattctgcacgctatttgcatgcaaaagccgccttgcgagttgcgagttccgacgtacggttacctctgggcaccatactggaaaccggccaagccgttgctgtgtttcgagttacgacgacgacgccgctgcggcagcggtgcactcacactcacgatagctgtggcaattcagctcgattata

SEQ ID NO: 39519 - DNA, 344 bp, Oryza sativa
  unsure (1)..(344): unsure at all n locations
atgattgagagaggtgtgaggaacaagcanggagtgatcatgaatgccctgctggacaggtgtttgtccaagcacaagaatggtggccggccggagccgccggaggggagcttctcggtgtacatctgcggcggcggcggctgcggatgggcggcgatggatatgttcgtggtgaggacggagtgcgtgaaccacccgctgttcatggcgctgctggaggaggccgatgaggagtaccggtacgtggcggacgggccgctcgagctcccctgcgacgccggcgagttcgtcgccgtccttgcgaggatcgagcgtgagatggccgatgagaggacggtcgggtg

SEQ ID NO: 39520 - DNA, 311 bp, Oryza sativa
  unsure (1)..(311): unsure at all n locations
ccccgagtatgagcggtgacgactgngagccaaacccacgccgtctagctcgtactccaccgccccctccacgccaaagtcctatgcgggagaatgcgctcgagatggccgaatgatccgcgacttcgacacccactggaggtggagaatggcggcgagatggggagcgtcgcctcctcgtctacggcgacggcagcacgccccatggcgcgctccaagctgcgggcgcgctcctacgtcacccgcccgtcgcccatgacccggagtctccagcccaacgttggctggacgatgtggccaaattggtcatg

SEQ ID NO: 39521 - DNA, 443 bp, Oryza sativa
agcttctctatgcgtttctcatttatatgacccaagcaacaatgccaaataaaagtgggattcaaattattatgacgctgcctctctgcattaatgttatagactgaacatccatcaagattcacaatgtataagccattcatcatgggtgcatggaaatagaaaatgtcattataatagactgaacaaccatttgccacagatctaaaaccataaccctctgcttgcaaacaagaagtagagataacgttgttacacaaagctgaaatgcaataacaattatttaactccaaaactaatcctgacggtaaagataatggcatagtgccgaccgcaacagcagcaactcttgcttcattgcccacgcgaatgtccacttcgcctcttgctaagctcctacttcttttcagcccctgcaacgatttgcatatgtgagcaactga

SEQ ID NO: 39522 - DNA, 429 bp, Oryza sativa
  unsure (1)..(429): unsure at all n locations
taccaagaagattatcaatgacttgaccatctgtattatttggatctgcaactacattctcaacgtccattgaatctgagacaagcacatttccagaagatagatgagcatctccaccagaagctagaatagcggagtaacggagaagcccatcagcgccatttctcttgtacacaacaccagcatcgatccattcaagcaaccttgttggagcatctttcctatttgaaccatgagaagatgaatgcaaagccttatggagatcaatagcaaatccaatccatgatttaagtgatgaagcagttgaatctgcaaccagaacttcaagaatttccgcagtcgaatggaagatggcatggcccataggagaccctcctgataccggctangcaacatggagatgtagctatattcaacttcaaaatgaat

SEQ ID NO: 39523 - DNA, 403 bp, Oryza sativa
tagagatgggaggcggcggatttgaggcccaccaagactagtcggcgagggacaagacgacggcgtcaccgcggctgcaacaccaccaccacctcgatgttcgtcgctgtgcattggcggtgcatgctccaactcctttttgtagctagtacatcacgcccggtggtgtaccccctcttcctcagtctccactgtccggggcaacaacctcgtcatctacttcctcatggtgtccggacagcagtggcgtcgacgacaccccatgcactcgcgcgctccgcgttctcctgccaaaacttgtgaactctacaccatctctcctatcgtggaggtggcgcatttctttgccgcgaccactacttcgccttcaaccgtcggttcactacttgccccactatattct

SEQ ID NO: 39524 - DNA, 402 bp, Oryza sativa
  unsure (1)..(402): unsure at all n locations
gagcatagatctctgaggcggttcatcttatttagagaaaatataaacagagcctnttgatgtagtacaagaacaatcgctctggtccaagatcaagcacggatacatatatgctcacgatatgtatcgccgtactgagccggttgcctcatgggagaaaagaaaacggggattaatgtgcagccgtatctgttacacttgcatgggagaccgggatctcgcttggtaatcgttaaactagctgttctgttgcgtgtagattttgtacaggtgcatgcagatgcatactctgcagacacatgaaagtttaatatgaggctctggtttttgaaaacagagaatgttgaggtgaaactgttacgattatgataatgcccgatgtttctgggagcgcactacaca

SEQ ID NO: 39525 - DNA, 381 bp, Oryza sativa
catttagttctaaactgaacatttaatctagtatgtttcattatgtaactgtgatttcaatgcatgcatgtcctcccgctagatcatgtttaatagtatagccaactactagctccatattatttatagacaatctaatagctcattcatacaataattacatactacactattaatatctgatcccacctgtcatacacatactgcattgtggagtccgtgctatagctgactacaaatctatagtccgctgctcttctctctctttatttatctccttaaaatatgtttgcagctggcttatagcctgctattgtacctgctctgaaaatagtgcagagactgttcaaatagtcatttgacaataactattcacatgga

SEQ ID NO: 39526 - DNA, 261 bp, Oryza sativa
attcatagtctgtttggtacacccacccgcgacttcttaatcaccaacaaaggagacaaagtaactgatcgatgacagatctttattgtcttttacatgattgtgcagatccaaacattcttagctggtttcttcttgttgatggtacccatgtgcccatctctgacctccaatgcaaatatgtcggcttgtgctctgtggagaatggctatggtccaattgttcaattcacctcattgcttgccaaaatatatgaaaaac

SEQ ID NO: 39527 - DNA, 405 bp, Oryza sativa
atatacacttcacactgaataattatactagttaaaactacctctagctctgatccactaccactgaatcagtaactgtgcttctgaagacagatactcaaaagtaattcactaatttgtgttgcttatgttgactgggtcagtaatttgtaagatgcccgcctacgattgaacatcgttatcttcgttaagttccatatgactcaatttggtgcaaagattaatagttccctgaatctttgttacaatcggctgagactataaatgcagtcatgaacctaaaatagagtgggatggatgggattggttttattgtgtttgcttccatcttaaagatgatacttattggtgcctggagtgatcatagcaattggtatggctcggatctgtaatctcataaatcat

SEQ ID NO: 39528 - DNA, 351 bp, Oryza sativa
caactggttgctgtggaagtggaaataccgattggctggatttggatgctaccctctagtcaccatattttagatctattttgaacccctgagtatctgttaaatgtatggttggttcaggttatgactttgtctattgtctaaaattacactgtaagacgccctccctgccgggacgtgcaaattgtggccggtggccttgtttgggcgatgcatggttagtgtgtagttcatttgcacgcgctgggcggagaagcatgagattcactctaattgtgagaaatctcggttcacaggatgagaaaattcctgctgagctcattttgctttgtatgagcaagagatggctga

SEQ ID NO: 39529 - DNA, 215 bp, Oryza sativa
taacatgcactatatatccgttcactcgacatatatatagtacactactccgctttataatgtgaggcattttagcatttcacacatttatattgatgccaatgaatccagacatatatatctatcttgattcattagaatcaatattaatgtgaaaaatactagaatgaattacattgtgaaacggatgaagtacgtatttttttttaaaaaaa

SEQ ID NO: 39530 - DNA, 396 bp, Oryza sativa
acttatagaatggataatctatacacaacaatttcagatattcagaatatcaggttcttgtgtttttgtactcaaattctttactgctggtttttgttcttcacgaagtgcactcacatgactcaatttcttgttgagttaacacatgactgttcttaattgataagtgtactcaaatattgcctattttgcttatagcagtcactctgcgatatgggccacatgtacctactttatcaactacctgatgttgcaccattgctcattgtaaggccctttctgcagtaactgacaagacaacataatgttcatttcagcctatgcataaagattggactaattgttgcaacaatgtttgcaaaaataattgggataatctatggctacttcgactac

SEQ ID NO: 39531 - DNA, 315 bp, Oryza sativa
gctttgatatattggagttaacttatgacacgctcgatctgcgttgttctcctatagtataggaggaatcactgcatcccgtgtgatataagtggatgatagtactgagggttgtcctacacagaaagctactgttgctctattaaccagctctgaaaatcgactttgatctcaacgatttgggagatctgcattatactctgggtgccgacgtcaacataatgactgatggcatattgctgacacaatataagtatgcttgagatctactcgatacatgatgaatggaatagatgtaggcttctactacttctc

SEQ ID NO: 39532 - DNA, 216 bp, Oryza sativa
taaacaagcataattccacaacttagccgcatgtaatctcaacctctagccccatggttataataagaattatatctaaagaacctaatatttaaacgggacactttaatcgatggcggcactgcctctggtgcctcgaccatatcttttctcttttgctttagaaatctaacttaaacataattcaaaaaattgagacactctttttagataaaa

SEQ ID NO: 39533 - DNA, 282 bp, Oryza sativa
cctaacacccctaccgcaagtcggtctattctaacctgtttgcaaatcaccatcttggagtcagtcccatagtctgtgaatatcccgacgtattttccggaagaattaacaagaatgccaccagatagagagattgagttcgccatataactggcaccaggcacagctccaattgcaaaaagaccctaccgaatggccgctaatgaattagcagaagttaaaagacaaatcgaagaactgtgaagtaaaggttatgtgcgacctatctcatccccttgggga

SEQ ID NO: 39534 - DNA, 368 bp, Oryza sativa
  unsure (1)..(368): unsure at all n locations
gagcatttccctgctggaggagagtttatctgttgatcctgccgtggaagttcaagaaacatgtgagctggctatttgacggatagaagagcacaagaatactagtggagttgaaagtgcaactgtttcaccttttctctcagttgatccagcactgcctgcaaagcaaggacttccagtataacaactaaggcatgtcgttcaacacagtcctacatgtcttcattgtgctttgtggtattatcatgctactaatagcatggttattaattntcanggagcttcttctcaacgagcaagatagcatgtatgaacgttatgcaactctctctgcactaaagaatgacagnggagatgctgctgtttct

SEQ ID NO: 39535 - DNA, 445 bp, Oryza sativa
  unsure (1)..(445): unsure at all n locations
tacttcctgctcactcatgcacaccgcgtgttatcttgtatatgagaccaagctcgatagcgagatttagtcatggctcgcgtttgctgcccaaaatgtggctgatgtgaatgcccttgctaattgcatggctggacagaaagatgatgtatggtactctctttcaccctttatttattctctcacctcttattaagagatcaagcttagttctcaatattattcagagaaacttctgctgctgctcaagcttacttttgtacatttgtaaacaatattgtacaggcttactgtgcagcatacgctgctgctcatgcctccaagatgtcatcacctcgtgtgacaaacgatgaagtccaaaatgctgtaagtaccttgcgtcttggacatcattngctgatttcatatcaacataacttcacatgtatttcttaaacacatgata

SEQ ID NO: 39536 - DNA, 370 bp, Oryza sativa
  unsure (1)..(370): unsure at all n locations
tagacagatggggacggaagactggacaataattgattcagcacagttcagtattgctcacagatgtttcgtcggaccgctcgtgacgcagatgtactagcccgtttggttactgaagaaccttgggtctgtactgcacggcaacctttaatgatagcacaccaagcgtgcaatttggaactgatgtgaaggctatatattaatttgacagttgtaacagttcttccggtcacatttattttagataatggattagattanacccggcctctacaatctttcggtcacatataaacgaagacaagtacagactgataancataccaggtgtagcttttagcctttaatgttatgccggtgaattatacat

SEQ ID NO: 39537 - DNA, 395 bp, Oryza sativa
  unsure (1)..(395): unsure at all n locations
catcacggacactataaaactaagcttaggatggaataatggccacagntaattaaataattagtggtcttaaacatcgctgttcttccctggaatggctcgccgatcagtatgaaaaatcgcttaagcaactgacgctgtcttggatgccatctttttctttcaaagcgcaacgtgtgtagtaacaagcatctttntttcacctttgaaaactactacgaccagccttttgtaaacgcggatctttcgtcgcgttttcatatgcactgcttcctcgagggattcctgctgctagcctgctattctgaaatctgcagcatgggggactgcgtagatgcaaagatctgttcctctgaaatggtgccaaaatatactactgatgaaatnggtaattc

SEQ ID NO: 39538 - DNA, 262 bp, Oryza sativa
gaatcggatgtattttctgtagatgtgcgcggatatattatttacctgattccaagttcgtatgagaaagttagtcctattttaagaaaaatgacaccgaatgtgatataaaaaacctaactctttttatagaaagtaaaagatgtaaaaaaaatacaaaccctaacttttatgtgactattgcgaaataaagtttttaaaaggatcatatcgtgaaaaatccagtgctgaaaatcagcaatcatgacaccaagtgatgaca

SEQ ID NO: 39539 - DNA, 332 bp, Oryza sativa
  unsure (1)..(332): unsure at all n locations
cagctgtgaacgccttccaaataatacacgcacttgataatatattgcacatatatgaatagtccaatcagtactataatatggtgatctgatgtactaagtaacattttattatcactattaattatcgtcagtagaactgatcctaacttgtaaatactgtgagttatattggccagtacaattttttttctactatcagtaattaaagggataggataaaggaaaatgcctaaatatttttttgaccaaacaaaattgttggaatactaaggagaaacttagcatctattattgatagagaagaanatagtgagataacatgcgtttga

SEQ ID NO: 39540 - DNA, 295 bp, Oryza sativa
aactaattcctcatgcacactaaattgatgaaatagcatcctatcaggttatgaatttgggatttcggggttcaaaataccttcctcaaaatcatggaatgaggctggagcatgtactatagatgacgagcatgttaccatatggcatctatgggcataaccctgattgaattagtcaaatacaccatctctaacatgcatatttgtatacatgaagatgctcatttccatttcactgttgaaacctcatcttctgcccagacgtatgatgtgcagacggctacaatactccaca

SEQ ID NO: 39541 - DNA, 372 bp, Oryza sativa
atacccgtgtagtgattactatgaaactgaagagaataattatggtggagccaatcaccagaatgaacagttaatcaaaagtaacacttgcaacctgtgaattaataattcgaagaatgtatgagaatatttcaatgtgttcatatcttgcataagtccatttaaaatgaattctttgttgctgttaagcaattcataacagaatacatgagcagaatattataatactccctctgtctcaatatatagctacatctagcattcaaatttctcataatgtacttctcgacctaattccccatcttaaccaatcacaactatccctgatttaattcttcacctactttctcatcttaaccaatcacaaccatt

SEQ ID NO: 39542 - DNA, 441 bp, Oryza sativa
  unsure (1)..(441): unsure at all n locations
tcttagcaggtaataattcattttccatctcctacttctgctttcctttccatattataattgccatcttacttaccaccaatagttacttaatcttttcaacagctcactctactcttgtctgaggttggactgaatattcgtgaagcccatgtttactccacaactgatggcttctgtttggacgtctttgttgttgatggctgggacacagatgtcactctataaccatgcctgtttctacatccatctataaactctctgtgattaccagctcacatttcacgcacacagataatatcgtttactctttcattatgtgctcttgtatatgcaagtgttgcttgctcattttgcaacttcacatgcangagacagatgattcgtcatcaagaataaggaggcattgtcgcacaaaaatgtatgatgccctttacactc

SEQ ID NO: 39543 - DNA, 399 bp, Oryza sativa
  unsure (1)..(399): unsure at all n locations
ttgtgcagcaaatcacgtgcatgatatgaaagaacaaatctagctcgcatgactcttttcattgcatcctaagtttggggagtgttatttggattggaacgaacaaattcactccaccaaatggatgcaaaatcagtgaactcactattagcagccctaacacgtttattctcaagaaaatcatggcaagcaaatttctgatcaatggctaactcccaagtaagatatgcatcagggtcatattttccatcaaagcaaggaatggtaaacttgatcttgcctaaagaatcatcattatcacgtacctcccgccgtggtggagcgcccatgccatggcgctgccggcgctgttgtctttgtggacgaccaagtacctnctcatcatgctcagtgtcagca

SEQ ID NO: 39544 - DNA, 369 bp, Oryza sativa
  unsure (1)..(369): unsure at all n locations
cctgtgcagaanatcagattnctgaatggccttggtgagcatctttgattatgtagtaaatttgacttctagcaccagttttggcatgttcctacctgcatgtctctacgttattcagtttcgatttttaccacatcagttgacccttacattacgctcggaaaacagcagcaatttggtgctgcaacaaagcgaacacaaattttggctgtgctgaagtggtcttccaacaaacgtttgaattcagaaaacactatctgtgtgatcactgattacgtacacgagacctttccatgacaagaataatttttcatagacccaacataattaatactagtatatgtatacatcacaatagataaaaatgac

SEQ ID NO: 39545 - DNA, 334 bp, Oryza sativa
  unsure (1)..(334): unsure at all n locations
agccactccggatggatgacctcgcggatgaatccggcctccaaaagtcgcgccacctcctcgcggatgaatgcttgacgttccggggcctgccgccgtactttctgccggaccggccttgcgcccgaccgcactgcgagacggngctcaatcacctccctggggaccccgggcatatccgccggtctccatgcgaagacgtcagcgtntgcccacaggaaagagacgagcgcgtcttcctatttgccgtccagaagaccaccgatccgtgtggtcttggacgggccgtcgcccatggcaaccttcttgaccgggacctcgacgcatgtgacta

SEQ ID NO: 39546 - DNA, 373 bp, Oryza sativa
acgccgcaagttctttatcaccctctgtgatattatacccgtcttctttactaactgtgctgatatgattttatgccgattatgctcgtaagcaaacttaacttttattcttttaatatacaacaaatacttcattcctccttctcgaagtttacctcgaaaaaaaataagttgattagcagtcagaaagttgtctgcttttaactgattaacctcttgatgcacgctgtttctttcaagctacacagtgtttaagcatcattaggggcaactaatccttctgctcggtattcagaagcagtaagcttctctaatgcatagccaccatatggcatgatatagaatcacgagatcatcatctgtagttcttttg

SEQ ID NO: 39547 - DNA, 285 bp, Oryza sativa
atgtaccattaattcaacttattgaatatccatatgcattactgaatcgaacaactctgtcctcatgcaagttgttacctgcttgcaaaggaaccagacggaagaaacatcctttggtgtgaaattgagatgataacgggtaactaatgccgatgtgacgtgttctaaaaatggatgcttttgcttttcaacatcaagctcctttcttttcctgtagtcctgaaaatagtattgtagttaccatcctttgtcaaagtaacaattcaatatcaattgtatgaacag

SEQ ID NO: 39548 - DNA, 413 bp, Oryza sativa
atcgcgtttctcactgcccgatgcttaacagctaattgagcgtgacacgtggcagtccactgtgcgttttcccttcaccaagaaattccagcagtcataagaaaacgctactacacctctgtcctaaaatataagggggtgtttagattcagggtgtaaagtttttacgtgtcatatcagatattatatatgatgtcgtatagagtgttcgagtactaataaaaaactaattactaaatctgttacagaatccgctagtaaactgcgagacgaatttattaagcctaattaatccgtcactagcaaatgtttactacaacaccacattgttaaatcatagagtaattatgcttataagatttgtctcgcatattagtcgcaatctatgtaattatgtattttgtaacctatat

SEQ ID NO: 39549 - DNA, 247 bp, Oryza sativa
  unsure (1)..(247): unsure at all n locations
gcatgccctatctagtattctttatttcacaacacctgcccttatatgaaggtatatttcctgactgtaaataagaacagtagatgggagaattggctcaagttggtttaaagatctttacaagtgcattgaagctttctctacacgacattatatatattatgcgcctatatatatgcaagccttgaattcntcatgtcacaatctaaactggacgcatcaaacagtaatggaatggctgtattca

SEQ ID NO: 39550 - DNA, 341 bp, Oryza sativa
  unsure (1)..(341): unsure at all n locations
gcggcaatgaatgttaacatgaataccttcaaacgttacagcgtagcctgtgattacctgtgcagatattgcgcggtctaaagtaaacactttaatttaattgcatgtggcaaagaattcttgtttatacatatggaagcacaaatacctttcttcattgacttgtatataactgcattgctcgtctattataccccacccaatgtgattgtcttataatctactcccttcggtcataattagttgacgtttgagacaanggaattacaaagaaaataagccaaaacttttgtctgaaacgacaaataaaagtgaccggatgtagtacagctttagctact

SEQ ID NO: 39551 - DNA, 400 bp, Oryza sativa
  unsure (1)..(400): unsure at all n locations
agttgcacagatccaaatgatccagtacccctgaaatgataatacttacaggagacctgtgctcgatctggtgcatcaagatcatcatccttgtcgaagacccgtgtaattcggttcacaagtgcgctcttgccatcatctctagggcccaccaatagaaacgtngttatatcaggcaacacatagtctccagactttgtgccacacactccttcaaccaagtacccaggtctatacctgatcatagaatgactaacattataataaaaactcgtggacataaagatcagatcttgacttatggtttatggccgaacttctgctagttactgattatgatagcggatcagcaatcacatataagatcgcttactaataaatattgtctggttggacggag

SEQ ID NO: 39552 - DNA, 491 bp, Oryza sativa
  unsure (1)..(491): unsure at all n locations
atactaagcctcccgaacagatgggttccaagctgaactgtactaccgcttatcatttcgcagacagacagacanactggaagggtaaatcagattttgaagacatgttgagagctcgtgctttagacttcggtggaagttgggataagaatctgccttacgcggaattctcatacaacaacagttgtcaagctaggctccaaatggctccttatgaagcactgtatggtcggaagtgccgcactccgctttcgtgggatcaaacgggagaacgtcaggttttcgggaccgatattctaagggaagctgaagagaaggtaaagatcattcaagaaagaatgcgtatagctcagtctcatcataagagttatgccgacaatcaccgcagggattgaagttttgacgaagaagatcatgtgtacgctctcggtcacgcctcttcgaagggttcatcgntttcacaccaataggaaatgggcaccgcgtttcgt

SEQ ID NO: 39553 - DNA, 380 bp, Oryza sativa
ttttgatagaaaaaaaaatctacttcaaacgatatgccttaagcaccgccatacataacatagaaatcacacgtggaaggggtgggcaattagctatagcagcacgtgctgtagcgaaactgattgcaaaagaaggtaaatccgccactttaagattaccatcttgggaggtccgtttggtatcccaaaactgcttagcaacagtctgacaagtgggtaatgttggggtgaaccaaaaaagtttgggtaaagccgggtctaagtgttggctatgtaaacgccccgtagtaaaaggggtagttatgaaccctgtggaccacccccatgggggcggtgaaaagaaaaaagccccccccccccccccccccccaaattttttt

SEQ ID NO: 39554 - DNA, 409 bp, Oryza sativa
  unsure (1)..(409): unsure at all n locations
gcttgagatgagtttattagagcactattctgtagttatgctatgggaacctaattgattatatatgaattgcacatcanattgccatagtactgtagtttctattaattgctctgtctgaattgaattatgcagtgggtgaacaaatctttactcaccaacgtaattaatgttctaggtggccggatgtatgtacttaccaaggagggttggacacaacatacttttaggtgccaattacttggtggcaaattataaatagtcaccaagcaaccttggttattagatatttntagttaccaagtaccacttggttctaaaaaatatatagttaccaacattttcttggtgactgttgctttttaacaattaaatttttgggggggggtgttttataaaccaccccccc

SEQ ID NO: 39555 - DNA, 428 bp, Oryza sativa
  unsure (1)..(428): unsure at all n locations
ctacatacaanagaaaaaacacctcttctgcaccctgaaatacaggaactgaacgtacggatctctaattcagcaagcaagagactaccgatccaatccagcacaagatagatatatacctggtgtgatgccgccgcaacagctaataggcatgaagcgaaaaggacgatgtatgcggcggagcgagagcgaccaccctcccgcctcggcatcctccaagcttctacaaccttctggagaataatcggaggggacctcaggtacttgttctcactgtgattcgaactgaaaaatcatgcaggagaggacttccttaccagaacaaaggggaaatcactcactccgagctatcttggatggatctcccgctccaccccaccccaagtccagtgcagcagaggggagtatgggactgtctggagaggaag

SEQ ID NO: 39556 - DNA, 287 bp, Oryza sativa
  unsure (1)..(287): unsure at all n locations
tgcacgctcatattntacaaagcaatccgtatatcactcgatcatggtattcacggattcacaccgcctatgctatatattaatattaagtcacttgggtgactaccattattaaaaccattcagttggtgcatctattagggacatctattcgaagcacctgactttatttttcaaccctccacaagcttcatatttggtaaaaagactctggaaaatatggcgaaaatgattgaagcactcggctttggagtaatctagttcgagagaaaaatattcttctgact

SEQ ID NO: 39557 - DNA, 442 bp, Oryza sativa
  unsure (1)..(442): unsure at all n locations
ctggctggttctctcaagatctgctacgcacaagctggtagctgggaggaaccatccagcatggcaatnttaagatttaggtaccctgctttatttatggcgaacaggttctatctttggtaccaaaggaacaagatggcgagaatttcaatgatgccctttgtcgtgtgtgttgctgtgttggtggtggaactgagacgggtaatgccgacagtgacagtgatattgaagttgtagctgattctgtctctgtaaatctccgattccctgtaagtactgtgactatntttgagaatgctttagatccttaatgatatttctcttgttcattggagtggttggttatgcagtctgaagttattttctatgttgcatccctgacatcatangtctaaatttactccttgcttgaatatcatctatacatgttcattactaattt

SEQ ID NO: 39558 - DNA, 369 bp, Oryza sativa
actctagatcttgtgcggcccaaagcttgcatcttttcagatcggcttgcgactatgattttgctaccacttgcgacaagacttttagaagctgagtacaatcttctccatgcaccctcattgatatctctggttagttcaataatgattagtatcctttttccaccagtggcatggggtagatgcttgattacaccagaatctctaagagtcaatatgtttgcatcttcaagatcgccgtcattgaaaagcacaatatgagagaattggttacgcaccctttcgtcgccacaggcatgttcaatcagggtgctcttcccaacttttgctggacctatgtaattcccggggccccaaaggggggggggg

SEQ ID NO: 39559 - DNA, 451 bp, Oryza sativa
atcttacacagctagtcctcttattatcttttaatatggcgagctgcagtaagaagagagtactatgtgaacgtgctagattagatgtttgatttcagcttgagatgcaaccgagaaatgatggctcacacactgaacatcttgttcttctcatttaactgcttatgatcgttaccatgcatatatatctctgaagtttacatctcttcttatctgaggtaatactcaatccatgatttggaagccccactttgaaccgatatattgaatcctctgttattggctccttgctctgatgagtactgacaatggttgagtggctgaccctactaccctatagtacttcagactgtgaaaataccgaagttactgacttagtgtgcttttatttttgcgagcacatggcttagtaataagtaaactgaataataacttgaagaaatcgtgaata

SEQ ID NO: 39560 - DNA, 290 bp, Oryza sativa
agaggggccccgctctcctgccagagacatcgggtggggccacgtgggggagaattttcacccccgaacacacgagattgaggacttttctcatttctttatggcggcttcgctctttcgacctcgaaatttttccccgggatattaaacttctatggaatcagcttgcatcacctaaaccccaattccatattgcacattgccaatttcatccatgtctgtgaagcctttttgggaattaagccccactttgctctgtttcgccggatcttttttctcaaggcccaact

SEQ ID NO: 39561 - DNA, 482 bp, Oryza sativa
  unsure (1)..(482): unsure at all n locations
tgcaccttngctcgtnccgagtgaagaacaaaaggaaacatagacttggttgttgatcaggagttgctactatgctgcatatccaaagatacaggtgcaaggtatatgtactctctcagattaaataatctttggcacggtggcttacccttacccctgattcccatgagacactgcttctccttgtcttgggccggtgaaagacaacaacaatntagagcaccaatcacccaatctttattcaattcttattccggaagttttcaaatgattttgcaaaagatagccaagttcctcagatgattcactcagtctctccaagtgtatcaatatgaattcctcaccagttntgcctttttgattcctactctaaggtttgatatgtggagctcggtagggatcaaacatggcatacttgcattcacatttattattaagtcaaaagcttagactaaagcagataactaaacattctcaagatc

SEQ ID NO: 39562 - DNA, 416 bp, Oryza sativa
cacctgcagcatgcagctttacactagaagaggtcttccaaaaaaaattccattcaaataaaccctacattagactatgctttcttctcttggaaaaattcttgctcaaataaaaaaaaaggggaaggaaaggcatggctattaaaaaaatagaaaagagaacgaaataaagcttgctcccaaaacattgagcaaagttggaaagaacatatagtaatgccccttctatattcatgccgagaaaacccaaggggagagaaagtataagaaaaagggagattcatttctttattccatcattccacaaaatattttactttttcattttccaccacaaataaagacccttgatctagaagtataacttgatggaaattccttttccccttttttttttggggaaaaaaaaccctttt

SEQ ID NO: 39563 - DNA, 141 bp, Oryza sativa
ttaataagaaggggcggccaattctgtgccggaacacgtctatttcgcccgatactggatgaagttgtggaagaaagacagaggggggaaaagagcaaatccccccccggttgcgggcgcgcgaactatcgggaggagaac

SEQ ID NO: 39564 - DNA, 439 bp, Oryza sativa
  unsure (1)..(439): unsure at all n locations
tatccaanacgtcaattattatagaaccggagaaccggatgtttatctcacacggttaggttccttatagtgaaacctgttgcccatattcaagttgtagctagacttggtataagtttctggtcggaatcggcacggcgaccgcgggtggctagcgcaagtggtgtatagacgtccgtgtacgtgaccgtaaggaagccagcccgactaatggcgcgagaggatgacgcagtgacaacagagaggccggtgacaatgggtatgccatagaggcatgcggaagctggccgacgaaaggcgtcggtatagtggtgtccacccgctgacgaaggatggccggtgatggagtaatgaagcgatagttgtggatcggcaaggtgcggacaatacgtgtacaacctatcccgaccttgctgggatgaaaacaacacccgtttaa

SEQ ID NO: 39565 - DNA, 317 bp, Oryza sativa
  unsure (1)..(317): unsure at all n locations
atttgagccatgtttttntcggcgcgcggccaaacactaacgtggccgtcacgttgatctacctccggatgtagttccttctgcaattgactgccaaaaatcaatttcccactactgcctcaccattttactcatgattttcccttttaactccgctgtaattcattgaatttaatctccttttaaaaattattgtttttaccccgagttgtgtctctctgattttaataaaaatgaaaaggggaacaagtgtataaaaaccctcaaccaattttaaagattgttactcccttcaaaaaaatgtggannaatttttt

SEQ ID NO: 39566 - DNA, 433 bp, Oryza sativa
  unsure (1)..(433): unsure at all n locations
tgacctgctcgtcaagctggtcggaaggcatgtttccgactcttgcagaggcggccggcatgctctccatctctctccgagaacctcgacgttcctcttgccgncggcgtgctgcgccgcatccgaagaagagcacgcagccgctgcgccatgcctcgccagagctggagaagagcacacggctgccgagtcgagccacgccgccgctgcatcatgccgcttcgcaggcgcgggagccaccggcggcgagagtggagaccgaggcgatgagcaaagttctttccttgatagtttctcttccccaaactgagttcaccaggctcaagccaacgtggtggcccaaagtctaaaccaggtccaaactggcaaacaaggtaactatacctggtgttaagtgaacaggcagatgctaagtgaaaaggtacagttagac

SEQ ID NO: 39567 - DNA, 375 bp, Oryza sativa
tttacaacaataattccttgtggaggagaacatctcataacctaagaattagtacaggcttatcataagatttgcattaataacactcgccgataggaatctctacttgcatatctactaccttttggtatctgattgccttcatatcaaagcttgtaaaattttcacctgctgataaaatctactagcaccaatatctctcaaagaacaggcgctacaataactgtatttagcttattttggattctaagtactacttcagtgatatccagaaccaagaagtaaaatacttgtttctcctaactaactagaataacatcttggggtttaatgcaaaaagaccattttgtttaaaatgggtgggaaaaaaaattt

SEQ ID NO: 39568 - DNA, 482 bp, Oryza sativa
  unsure (1)..(482): unsure at all n locations
ngagcaaagctcaaacttagcaacaggaacagggtttgtctttatatcagcaggattatcatgagtacttatcttgcaacctttagcttaccttgcgcgactacatcgtgaacataatggtacttgatatcaatgtgctttgtcctctaatgaaacatctgatctttggtgaggcatatagcactttgactgtcacaaaacaagttaatgcaagaatcaactccacaaagctcagcaaacaatcctttcagccaaactgattatttacatgctggcctttattaagtacaaatgaatttggatcacaactcaacagattcgatatcgtttatttacttggaccaagctggacagaagcacagagcangtccatggggtggtcctggtggggatccctacatggttagtgaacttccaatacgatctgtatttgatactccctccgtttcacaatgtaagtcattctagcatntnccatattc

SEQ ID NO: 39569 - DNA, 408 bp, Oryza sativa
  unsure (1)..(408): unsure at all n locations
tccaaattattaaagaaactattgagtctaaaatgtcgaagaaagtgttatgcgaaaaacacgaggcctggaagatctgcttcgctttggtgcaggtccaaaaaaatcttgcctttatgttcgtgagcatgccagttgatttgatccttgcatccacaagaaataaagacagaaaaatagcggttaaatctataaacgatagccgatcggccagtcgccgatgacgtgtcatttatttttgagctgatgtcatatttaagtcgatcgacagtcatgaataagtaagaaagaactaaatctattcgatcggctgtaggtattaatggtatataatccttatgtcgatatatacttanaattcaaaagttgggggaaaaatttttttttggtgggggggggggggggggg

SEQ ID NO: 39570 - DNA, 491 bp, Oryza sativa
  unsure (1)..(491): unsure at all n locations
taagctntcgtacatcttgcanataatttctgcactccttttcaccaaattgaagattctcatagcctccagcttgcataactagagactaaaattcttggttatacgaattcttgcttggtcattcaactctagccttctcttagcttgcaaatcaagtttcttgtgacatctgagatgtcttgctttgctaagacttacaacatgattatggtcaagagtaagcgtactaatgcagaatttctcatcatgaagataaaagttaactttagctgggcactgctgccttgtggaggggttaggcttgaatttatttgttgatgtgtactgtgccttaccttgtctgctacaagcaagtgtgaaatatctcaccttgccatcctcagttttcttagatcctctntttatcacaccgaatcctaactttcgagcataacttaatgtanaagcaagtggcactatcctcactatcaaatagcatacctttggtt

SEQ ID NO: 39571 - DNA, 373 bp, Oryza sativa
acttctgtgcataaagcataacctcatctgtctggctcccaggatctttgctatctgtttgttcttcttgagccataaaagcccagagcaagacagcggggggtgttatcatacctaagagtatcaatggatcctcatataatttaccgtgtccataccacagcaaaaagtatgttctattcatctaaacaaacctagaataacatacctacgcatgtatgattaaccatatctatctttacctcctaatcctcatatatataattaagactttattatgtttgtacctagctacatacgatcattccatcgattcctctatgactcttttcactcttgctagcagatactactagcctactgactaatacac

SEQ ID NO: 39572 - DNA, 347 bp, Oryza sativa
  unsure (1)..(347): unsure at all n locations
tcaattttactggacaggtggagtaaccgtgaactcttgctattacaatgcctctcggtaattcccaagggaagttaaccttcaagaaggtcttttccccttttttgttggatgttattcaatctgtcttggtattcgncgtttctagtttatagcacgtcatctaaaaaacctgaagtattcggctcaaaatcttgttaatttttttttctttttttaaaacaattcttgttagttctgtactggtcaaaaaacaaagcacggtgatgttacgttcgtttttgcctgacgatatgtttctttggcccaaaggcccccccaaaaaaaacccccccaaattttttttt

SEQ ID NO: 39573 - DNA, 474 bp, Oryza sativa
  unsure (1)..(474): unsure at all n locations
agatgtgctctttctacatacccattcttcgatgacgacaatgaccatgacacctggtacccgaagagggaccctacaagtatggagtacacgtcgatcatggcgagtgtacagcttcaggggatcaccaagcccattattgtaactaggaagctaccaagtttacaacaaattcagcataagtaactagaggacatgaagagtttcaagggatggagcctgcagcagtagcattgagcagagtgggttgaatttggttgtgctgccaatttgattgcagaggtatgtaaggagttaaggacaaatttgcatcataaaaccagatggctgatcagctaaacatgtctagtgatcactggggatatggcttanacctctagaactatggccatgcagtccatgtctgaacaaaagtaggagaaatccaaacggtggcacgctcangcgagcacttaccagaaggcagtatagctg

SEQ ID NO: 39574 - DNA, 353 bp, Oryza sativa
actctagtcatctcatcttgcgcttggccaaaatgaaattttgtcccaggcaacaatatatatgatgtctagaggagcacaccacaatatgctttggctaactttcatcattccaaggggaaaatgattgaacattgcattgtaatatgacaagcttcaaaaaaggcactgagataactacagaataattgataattacaattcaaagaaatacaaagtgaataggatatcaaaattaaaacttctgcagcgattctggttcctagagctaaacttttttaaaaaataaatgaatgtggtaaaacggagtaatgcaagaactttgagaaccaaaatcaatgaacctagtcaat

SEQ ID NO: 39575 - DNA, 487 bp, Oryza sativa
  unsure (1)..(487): unsure at all n locations
taccattattatccatcttgttttccaaagatataattcattcatgtctttaaagatggatgtgatgaaatcattaaaatataattggtacatggataataggtgcgtcagggttaagaatgctagataatttaatgcattagtattggaaagtaattctttggatgaatcttttttcattcaatttgttgacaatagtgtgaatcatttggtaatgaagcttaatgattttattctcctattgcttcctgagaaactatgtgagcaccgcaacatttataccgtgcacccttcttcaggtagggcttcaaatgccacatccattggataagacaacttgtcccacaccttaagagacacgccagcgtataaggcccatccncgtataacctactgcacacctgtctcttgcttcattgcaattcatacgttggtgcatgggtctatcatccgcatgattcgccgctgtaaactctatgtggtcgtc

SEQ ID NO: 39576 - DNA, 319 bp, Oryza sativa
actacctgaattgcttggtgaggaaatagtggcttgccgggtggccattttatagggggtggatgcatatatgcatggttgaattgaaccgttccaactttgaaaaactagatggcaatttttgcagtgtactttctaaccaggaaagtttggcgcacagtacaacgaagacttgaaaccatgcattgacttgtctatttcaattgtgcttgcagaaaccatgcattaattattcgaagtggactctaatttcctttagtctttatatactttgtactacctctctctctgtctttggttctaaaacacggccgggtgg

SEQ ID NO: 39577 - DNA, 482 bp, Oryza sativa
  unsure (1)..(482): unsure at all n locations
tattaagccaattaaggacatatttagttcaagtagtacttttatgattntccttattggacaagtaggtattttcgaaatttgagaaagccaacagtgaaagtatggtggagggtggtgtaatagtatagattgtgagagccaacgatgaagtanggtggagggtggtgtaatagtatagattgtgagagacaacagaggtgatgtggcagaacagacaccaccactagtagtatagatagatatagataaatcaatttaagcctcacacttttaacaggccacttttaacaggccagaaacatctttattggatgatgatgatgaagaagaagaagtacaaaaaccaattaatgtatatgggtgttctgataaacagccaattagtttggcacagaggctaaattgagtgaatagcgttcgctggagtgtcctaacaatgtcggtcaacagaacttataaataatgaaatgtttggacac

SEQ ID NO: 39578 - DNA, 357 bp, Oryza sativa
gctttacaatgtctgagatattatgatatactgctagcttatctgggagatcattggtacgggtataatgtttgcatatgaaattactctatgtcatgacgatgatactagagtagtatctggtagtttaagcatggtatctagattactcggtatcattatttggggttatatgctgcggatgagaggtgggccgctgatggcgacagctcagtatgggtattcctccgcgcgtgtatatagtcctaagttaattccctgaggagggtactcctccgtatttagccctggttgaatggttatgacgggctgtcgtaaggaactcagctgtcaggggtggcttctcaaagtaccagg

SEQ ID NO: 39579 - DNA, 488 bp, Oryza sativa
  unsure (1)..(488): unsure at all n locations
ntgaacaagcgctcatcacagctccagtccttgctatgccagatttccaaactccttttgtggttgagactgatgcatctgacagggcattggtgcagtgttaatgcaaaataatcatcccctcgctttcttaagccgagctcttggactgcgacatcagggactctctacttatgaaaaggagagtttggccataatgcttgcggtagatcactggcggccatatttacagcatgatgaatttttcattcgaactgatcaccgcagtttggcatttcttactgaacagcgtctcaccactccctggcagcacaaggctcttaccaaactcttggggcttcgttataagattaattttaagaagggggttgacaacaacgcagcagatgcattatctcattatccaggctctgatcaggtggaactctcagctntatcagntgcagttccagagtggatcaatgaaattgtggccggtattcctctga

SEQ ID NO: 39580 - DNA, 343 bp, Oryza sativa
ttggctaatggaacatggaaatgattttccacccaccaaaagacatttttaaattctaaccattcattctccctctttcatttaatcataacatttcaatcatttaccaatcccaatcccaccctcatttcccattacccaaacacacccaaagggtgtaagtggttaaattgtgaactcatttgttaggtgacttattttgatcttgctggttagctacttattatatccttgcccgtggcttcacccgcacgtgagctgagcgctcgcacaattgtgacatgcaagtgggcttttttctcgacaccgcccggccccaaatttttcccccccttttaaaaaa

SEQ ID NO: 39581 - DNA, 446 bp, Oryza sativa
  unsure (1)..(446): unsure at all n locations
accataccatatatattatgtgacaagagatgcacattctagcgaactatatctactatacatgtcataatcatttatgtgaattcaccatagaaatggatgggtaaggcatgggcaactcatattttctttgttttccaaaaaaaagaactaatggtntttaagacatgatggcgtgtatcaatgaaactaccacttcaataaagtttgatacatacctataacatggctcttatatcttagttgcggtagaggcttagcttttacatcttagttgttatagagccgaaagttatatttgcactatcttattgtatgtatatgagcctataacttactgcctccgtanaaataaaaagccaacctatgactgactgcctgtcaaatcatgcccatcaagtcctatgtgtgcttttaagacggatgggatatactagagatactaa

SEQ ID NO: 39582 - DNA, 357 bp, Oryza sativa
  unsure (1)..(357): unsure at all n locations
ttcaatctccttttgactaatttcaacaatgttttattactcgacttagcttatccattaacctgagcgtagtaaggagaagaactccacaacttaatatcataagattcggcgaaacttctcactttcttggacataaaagaagctcctttatccgtagtcaatgtttgaggaataccgaatctatgaacaatatgcttcaaaataaagtcaattacctccgtgtaagtaatattcttgaacgacacggtttcggcccacttaatgaagtaattcgatgccactagcacaaaccgatgcccttttaatgatgaagggattananattttttttttggggggaaaaccccccccccc

SEQ ID NO: 39583 - DNA, 468 bp, Oryza sativa
  unsure (1)..(468): unsure at all n locations
gatgctgcgtctaagggcgatggtgggctgttcattgccaatgttgtgcacaaggcccataacaagagcaaaggaaatacaaagctcaatagaccaccaacttcaagaaggagaagaagaacaacaacaatcctaatcaggatgagaggacttgctttgtgtgtggccaacctggtcatctggccaggaagtatccacaacgcaaggggatgaaggcacctgcagggcagactaagtctgctaatgtgaccattggcaatactggagatggaagcaggtatggtaatttacctactgtnttttcagttaatcagtctattaattggtgggttgatactggngccaatgtatatgtttgtgctgacatctcattgttttcttcttatcaggtcgcacggggttccaccgtcctaatgaggaatgggtcacatgcttctgttcatggtgttggcatggtagatctgaagt

SEQ ID NO: 39584 - DNA, 356 bp, Oryza sativa
gaagaaatcttaataaggatagattacatggaatgatggaaacaggaaacgtggttgaactaacttggccatatactattgactgtatgccaaaatgattttaggaagacctgtatgttgaaaatagcttccaatctttcataaacaaagggcgatagttaactgatatactgtgacccgctaatattccttatggtgaaaactggcttatttgaaataatgcacacatggtttactgaaataaacaccaaatgtaatactaaaagttccactttttactaagactgtctttgtcatatgtacggcacaaaggccattttggggaaaaggggggttttttaaatttttttaaaaaa

SEQ ID NO: 39585 - DNA, 467 bp, Oryza sativa
  unsure (1)..(467): unsure at all n locations
tatgcataaaggaaataaagacgagttacttggataactgtgaatggcgttgacaataggcactagcattattggctttaataaatntatattgacatagccaatgagtctctgaaatatttgtagatatctctgatgccttatagttcttgtgaacctgattaaggttttatttgttgggccttctatcattattcattgatcaactttgcactgtgattcatatagtataatgtgatttcatacggtcatgaaagtctttgtacgttgttatttgcagacaaacaaatggacaaacttatatgatgctactgtcagactattggaagatacacgttatgtccttagtcatgaggaagtttctaaatatgttgcttatgagaggcctgatttaacaaggtcatggattaagctcctgtcacttgtacaanggatggatcctcagaagagagtgacangtattcatg

SEQ ID NO: 39586 - DNA, 354 bp, Oryza sativa
gattgattttaatacatcttatgtcacaagagcgcgcgttcaccatcttcttcagctcgtggcacacatcatcgatcacggtccttgtcaccttctcgaaaagcacgagctaaatcccatctccccaaatcatcagcacacaaacaaaaggcatgttatcttcactagatggtttacacttgtttctgaatgagaaaatgtcatatgttccttgaatgttaagctttcaaaaaacataagtctaaactattttaattccttctgctgtgcagaaacaagagcaggttcaccaataccgaaattccaaatcccccctcttttgtgggggggccccccccaccccccaaaaaaaaa

SEQ ID NO: 39587 - DNA, 474 bp, Oryza sativa
aggaatagcaatttgtatcttcatttacctagcaagaaacagtatcatgatagatgttactagatgtaaaaagaccaaaacatagtttaggcttgcactatttgtaaggaaagcttgacaggtaagctccagaactatagcatacagttcaaataattcattcgacagtcagcaccatatacaggaaacaaataaatcttacggcagtgaagttcataggctccctagggttccagcatattgagttgcaccttgtctgcataagcaaaagttgcattagcttcttgatggttctgcagctactcaaatagcaagctagcacccgcagaatatattaaagggaaaacagtactccctccgtctcaaaatctagcaacttctccacctacattctcttctcaaccaatcacaaccttcccgcatttaatgtctccacatacgttctcttctcaaccaatcatatatctttcccca

SEQ ID NO: 39588 - DNA, 417 bp, Oryza sativa
cttttgagcatagaaaaaatagacacggttttcatttaacagtacgattctcgggatcattattaccattagctcatctgtctttttgactcttctcacaatctaacacctcttctagatcccaaaccactactcaactgatcaccaaccgaaaagaggaaggaggggaatgtatggtttatcccgaagtcaagttaatttagactcttgtcattctagctacgacatgtgagacatgatataaataaataaatattaaaaataatttatacataaaattttagcacatgtatcattagatgtccaaaaaccagttaaaaatagactgggatgaaaatcaaatccaaaatcaagttttaaattttaatttttttttggggtgttttttggggggggttttaaaaacggccccccccc

SEQ ID NO: 39589 - DNA, 485 bp, Oryza sativa
  unsure (1)..(485): unsure at all n locations
tgttatttctggaactaacaacaattatctggcatgggcttgtatagtcgaatctcatctagctaggaatggtctcagtgacacgatgttcctggctccaactgcaccgacgcagaaaaggcaacgactgtgctctttctaatgcgccatctatgcgaaactntgaaaaacgagttcatgttcgaaatggatccatctgttctttggcaatccctcaaggatcggttcgatgaacagaagcccatcattctgatccaagcacgatatgactgggagcacttgcgattccaggacttcgactctgtggccgagtacgattcaactctccgcgacatcgtctctaagctcaaactgtgtgggcgagatgtttcagaggatgagatgatagagaagacattngttacattccacccaagccagcttgtactccagatgatgtacatggacagacattatcagaagtattcagagcttatctctgcact

SEQ ID NO: 39590 - DNA, 366 bp, Oryza sativa
ccaatgaccaagaaatggtaccatataacatggactgcactggtgaatccactctttcaatatctgaacataatactgagaatagtactggtggtcctgtccatcagctggcttccaatacccgtgaaatgaacacacatagatcaggcgactactcttcttatgcaacgatgcctacgagtgctggtaattctggtcaagaaaatcccaagagaaaaaggtattctaagtatatatgtctaattaaatgattactctgccaatcataaaatcatgtcgaatgttgcaagcagaaatgtcaaaatgacaatgtgggacgttttgttggtccccaaaaaaaaaaaaaacccgcggcgtttttttttt

SEQ ID NO: 39591 - DNA, 355 bp, Oryza sativa
  unsure (1)..(355): unsure at all n locations
taatctagctaataatctacttggttggttcaacttactcctaataatctaaaatataataatcctaagctggatcaaacagggtctaaatagatgaattcataaatatggaaatttttcgacccgttccgttcgttttccaaaaataataaaataatgataccgtttccgaccgttttcatctctagtatacacatctgacttggatagagatgctttatttttaaactaaccctggaggcatctttactccgggttggtaacaccaaatggagctaaaaatatctttagtctgggttggtttatgaacccggggngaccttttataaaaaaattttgggggggaaaaattttt

SEQ ID NO: 39592 - DNA, 490 bp, Oryza sativa
  unsure (1)..(490): unsure at all n locations
taccgctgtctcagaanagccattggttggaaatcccttttgctctcactagaaattagaaaatacaccattttagtgcttatgttcgttgttaatgacttggttcaagtgtatctaatggtttagtgtggaattttttctccgtctttatggctcttggtgatatttgttcattggtttgtcgaaccaggtttttaacatggacgctagaaggtttatcagttcaatatactcaagccaacatgtgcatccagtcacacaagtagtaatgaatntgcccaatgatgctgcagaatttttaggtgggttttcattatttgtgttacttaattgaactgttatcttgagttcttatgattatattagagaacaaatttcattctagtatggtattggcttaattcactcattcgcccgttgtgaaacatccactannaattctgtgannatttgggatgtatattacaaaggatatgcacggnttcatgtc

SEQ ID NO: 39593 - DNA, 480 bp, Oryza sativa
  unsure (1)..(480): unsure at all n locations
agcctcgtcgacgtcacagtgatccttccatctgtgttaccgctgcacccagtgaaactcattgtcagctcaattaaacgccatgcatctattgctgtgtacacgttgttcaaacatgctgaagtatactacaaggatggttttttcacctgaaaacccagaccctgatgccgccggcgacgagcttacggatgatggggagagtcgagactggagcatctctccacttgccgatcacgtcgctgcaacaaacacaccgtcacaaaacgattctgtcaactcaaagcttgaaagactcaaaagagaacagaggttgcaaacgcttattgtttgcacctgcagtgcgtncagttgtagccgatattggtcacgttggcgtgcagcgcctgctgcactgtaataccggtgaagtacacctcggcgtgatccgacgtgcacggatcgtaccccgccggcctcatgtaccacccatgcttgtac

SEQ ID NO: 39594 - DNA, 336 bp, Oryza sativa
caccgcgaatcaatatctttgcatgatacgcccagaaaaaggttggagagaaaccagtaaacaaaaagcgcgatgcatcgctgaaaaacttattcagacacattctgagattcagaagggacgcatgacatccactctatcctctatccttttggctgcagttattaaattacggcatgcatcgacatggcgtatacgtgttctcgatctgctttctgtttttttcttttcccctgatcttttcttttttaactttcctgggttctttttttttcttttcctgatttctggattgccttttcttttggggggggggaaaaaaaaaatttttccccc

SEQ ID NO: 39595 - DNA, 489 bp, Oryza sativa
  unsure (1)..(489): unsure at all n locations
tcattacattacatggaaaaaactgaactcatacatacattgatagtgaccctcttataatttctctcctcacatacataaaatagtcttattcaaggtcattaattaacagactagtgtttcaaatgctaggatcaaaaagggaaatatgctcgtccttgatgcatgagcatttcctgtggtgtagtgctgaaacaagtccagacatgacatcccaattgattgagtgatccatctgagtctgaaatctgaacaaccattttatgtagtaacagaaggccacaagtgagccaaacatgtcagtgtattttggagtgtcttcatgctctaaatttaactcacttcattggtacatgaacatgtcagttaacaatagcagatactcatactacttggactgtgactgcagcttgtcttctttgtgaanaggaangaaaggattagttgcatgatagcangtgatcaacaattaacttaagctctaccttt

SEQ ID NO: 39596 - DNA, 302 bp, Oryza sativa
ctgatttaaactcctcttattcctcctcttttttgacttcaattccttttgaaaccagtcccaacttcctcttgccggtttggccttgcgccatgttgactatgttcctttctccccgcagacatgatggtggccttctgcattcattcaaccttggagcttcccgcctgcgaccggaaactctcttgtactttagcacacaccgaaatactcgaagtcccatctaatccatctgaactcgaataaagaaatcccgttgacaaaagtatggttaccgcgtaccggacgacgcgcgggctcct

SEQ ID NO: 39597 - DNA, 457 bp, Oryza sativa
  unsure (1)..(457): unsure at all n locations
cagaccaaatattcatagtatgttttnttttcagngtatgcaggacttcgcaagaactaaatctaaaaactccagaactaatgctaggatgcatccagtgtcatgtgtgcctctatgggctatcctgagattacaatattttgaatctttgagcgcaacttttgaaaatggaatgtagataccttgatctaccaccacacaaatccaatgtattttatcagccttgtagcttatacaaatgaattattaagagagggcgatgaataatcctgaaaattcctganaatcaaataaaacccactgtttttgcaacccatccctctcacaaaaccttggtccaataactcctgaacccacttggaacgactctatgctctcccggcctctgtccgaaatcgctaatgagcccacgcgagagagagcgcncaggccgactcacaacgcagccaacgcgtgt

SEQ ID NO: 39598 - DNA, 387 bp, Oryza sativa
ctgcaagcttggaagtctcctgacatggctgaccttccggctgggagaaccgggtagaaatgtcgtgtgggtaaaaggtaccccctctgcagaggttaacaaactgttcgaacagccgtgcccacagtcatgggcggatgtgaggtgattcctagcgtagttttgtttgactactgcttgtgaaattgctgttgcggaaaggggttcgatgtttgaaaaatctacagctgatgggatcaactaagcccgggtggccgtttgaaagttgttggcccgggtggccgtttgaaaagttgttggccgggtgccaaccttgattcaatcctaaagactgatacattgcacatactccgaccggaacggaagaaacaggggccccccaaaacc

SEQ ID NO: 39599 - DNA, 486 bp, Oryza sativa
  unsure (1)..(486): unsure at all n locations
tataagtaccttgaagaaattcctccaaaccaatggtgtttagcctttttcagtgactttccgaagtgtgatatccttcttacaataactcagaagtgtttaacaagtacattcttgatgccagagagatgcctattttgtctatgcttgagaggattagaaatcagatcatgaacaggttgtacaccaagcaaaaagaactagaaaggaattggccatgtggcatctgcccaaaaataaaacggaaggtcgagaaaaatacagagatggctaatacatgctatgtttttcctgctgggatgggagcatttcaggttagcgacataggatctcaatacattgttgaacttaatgtaaagagatgtgactgtaggaggtggcagctcactgggattccttgtaaccatgccatttcctgtctaagacatgaaaggatcaagccagaggatgtagtgtcantttgctattcaaccaggtgctatgaac

SEQ ID NO: 39600 - DNA, 354 bp, Oryza sativa
ctgcagcttgcatggatgaaacgccgtatttattgttcttgaaattttttagggcgtctgatgttgattccaaggtcgctgattggctggaacaaatgccaaatcttccaaagtttggtggggttggatggagcgataatcagcccagtcgtgatgctgatcttcacatgctccaaaatgaacctcaaaaccatccctaatcaacgctccatgatttctccccccataattttgtttttaaaaaatcgtcacttagccgacacgaggaatcaaattctgtgattttagtgagtgtttgaggggtttggtttggtctcataatcaaagaagtcaccatcacacgcacatgcatgc

SEQ ID NO: 39601 - DNA, 458 bp, Oryza sativa
  unsure (1)..(458): unsure at all n locations
tatctaatccaatgtcagaagtcaccacacctttccatccatctgcgccatctgatcttcggttcaatcgtcttcgaccctcattgaggaaagtgattgcaaatacaaaagattttttggctgctatgttgctcgggaggctataattgatgaggaatactgggtatatntcttgtcacctgtagaaaacattagattgttaactctgggaaatacactactacaattttcgctgacatagcctgtacaggtattttggagtattctgatgtttactgttatatgctaataccgttgtcgtcaacacgcctttcgttttgcatgctaatattgctcctaagatgagaccactagctaacacttatgttcctagtcttttaagctcaccttttagtttgtattatgaaattgtaatattcactttaacataaatgtgtaactttccttgtaccatcatc

SEQ ID NO: 39602 - DNA, 355 bp, Oryza sativa
ccatgctgcttggcttgaaaacatgaccgggtgtatattggtcactggacccctttccaagctctttcaggggattggattagatgccaagaaacaacccaatctaatgcaaatctgtcaacaagcccgccctacactactaacaacgtacttcctcaattaataaaaaaacaacctatgcgacatattctaatactacaaatctaaacagacacatattccaatatattatattaggatgtattatatctgatactaagttggtttttataagatctaaacatatatctatctagatttataatactagaaatgggtgtttccaaacccccaaaaatatttttccccttttttc

SEQ ID NO: 39603 - DNA, 480 bp, Oryza sativa
  unsure (1)..(480): unsure at all n locations
gcgcatcgatgctgaaatataaattgaactgcagtatgaatatgattttgttgcctctgttttggctgcctcattctggcactacagtgcaatatcttaacatttttttcagctaaattgcctcttatgtagtctgtaataaatgacaacaacaaataggctcatatttttcaattacatctaagtcctggaataagaccattttctttctaagctctgggtagtttaggctaattaaaaaactcaaacatgtgaataaatggaaattctctgttcattaccaaattttcttttgaatttacttgatattatgttgtattagacttcacatatctacttattatataagccgacaagtgtgcgtttttcgaatctgaagatatcaaatgttgtgtccacatatgatagcccttttatgatgataacacanatgcagatcccncaagtttgttgaatgcttcaaacatactgtaaatggat

SEQ ID NO: 39604 - DNA, 354 bp, Oryza sativa
  unsure (1)..(354): unsure at all n locations
gtgtgcctggcaacagttattaagcatggactcaaacaaaatatacattggcaccttcatggcttctctgtccccttgagtcctttcacctccgctgccattatgtatgcttaacaacaacaactacaagctcaagtgcatgctttacatctcgtctgcctgcagtctcgttgctgtgaagatgacaagcatcatcagatcacatccaaaatttcaggcaacaactccagggcgaaaaggcatcctagaaatcagctcttcagcctcttcgatgcgacctgcctttgtgagcagatcgaccatgcaaggcaaanaagttttggggtaaaaaatattttcccccccccttttttt

SEQ ID NO: 39605 - DNA, 429 bp, Oryza sativa
ctcttctgctggcgtagatctgcaagcagacaaagggattacttaagtcagactggtctagtatgctacagtatattgctagaactgtcctcctattatgttatattgctagagtattactaactcattgatagattcagtaatgtggtctcttaactgtctcttcatcttacgcgggagcgttgcaacctatgctctattgaattggagaatgtcaaaaataagcttccatttctttccaggtatgggatgcaatacatatgatactctactgaagatgcactctctacctgaatgaattatgtaagtgcctatgagttatctggcttgaacagcacctgctattactgcttgagaatcaaagttgagtgccagctgctgagttaatataaccacgcaaaacaatgcacaacccacagatcagatctc

SEQ ID NO: 39606 - DNA, 256 bp, Oryza sativa
caccaaagcccttctgaactcaacatttaacggcactttatctataacatccgcaacaatagcattcttattccttacaagattgtataaattaaggtacaacttttcaaaaggtaaatcaccaatccagcaattctcccagaatcttatctgataaccatcccccaccttaaaggcaccgcctttaaaaaagacatccctcaccctcattagcccagcctagaaatgtgaatctccagggtgtttctcgatttgt

SEQ ID NO: 39607 - DNA, 437 bp, Oryza sativa
  unsure (1)..(437): unsure at all n locations
tcaccgctgcctccattggattcgcagctgctaagtgaatcccggccacccctccattgtcgccgcatatcgccggaagtcgtcgcctccgtggacagtacctcgccgcccttcgaagctcgtcgccggccatctttcgttgccgttcgtcgtcgcgtaagtggtggtaagggtcactttgatcccctctcgctcccggtgccctccgtttgcgttattgtgccgtggttcgctggcaatcgccgctcccatgccgttcacctgtgagtttttccctagggtcttaattcaatctaatccgttgtctatctagcgttgccgtggtctccatgtgttgccgccggttcaccgtcgtcatctatctctctccgaccgctttggtttggtgagtcttctatccgtgacccctcgggttaggtntcaatccctcggtcatg

SEQ ID NO: 39608 - DNA, 380 bp, Oryza sativa
  unsure (1)..(380): unsure at all n locations
cacaaaactatagcttatctaactattaagctttaaanaaggagaagaataggtgaaaagtggataaatgaattgaaggaagaggaggcgtacatacatacgttcgtttttgtaaaaaaaaaaagtaacttatacatacattcttaggtgggcccacgtttaagagaagaattttttcttgaaaattaatctaatggttgtaaataatgggtccaccaaatgtaatgaaaatatgctttgttattttagaattcttaataatttcactaatttattagagcaatacatggccacttaagagcgctttgaggatgtcctatggctaattactgagcattttttttgatgtttcaaggggggaactcttttttttttttttt

SEQ ID NO: 39609 - DNA, 475 bp, Oryza sativa
  unsure (1)..(475): unsure at all n locations
ctcagctgacaccttatattacttgctgaacctttagctgtgattgaatgcttgtgccagcatgtgctgctccatgttagaatgtctgcatcatttatttttcttgcaaaattaacttgtactttaaatattttntcatgtaaatnttttcagtttcttcatatatgtaagttttgtactgttactgcagtcaagaagctgttaatattgatggagttcactacaaattctcatcttttggttcttcattcaaacaaggtggagaattatcaaattttgtaatgtctgtgttctgtcgatatatgtttaaatcgattcatcctttcaaaatcaaaagacactatttcttctcttcaatngnggtaagtgtttgtaatttttaaattttttaataaatacaactctgttacttgcaaattgagtatgtattcttttatctcagaatgatcttatgaaacacccttcataactaatt

SEQ ID NO: 39610 - DNA, 416 bp, Oryza sativa
  unsure (1)..(416): unsure at all n locations
gccagctttaactggattccttgctgagaggaccgagtgccattttacatgcccgaggaaaagatgaatattggactatgcattttgatgggtcgaaaaggctcacangcactggagctagggtcgtcttgatttccccgactagaaaaagattgagctacatatttgggatacatttttctgcatcccataacgtggcggaatacgaggcgctactccatggattaaggattgcaatctctttaggcattcaccgactaatcgtccatggagactctcagttggttgttaatcaagtcatgaaagagtggtcatgtctagatgataatatgaccgcttaccgacaagaggtacgcaagctggaagataanattttccggaaaatttgggggggggggaaaaaacccctttttttt

SEQ ID NO: 39611 - DNA, 348 bp, Oryza sativa
gccaaagcgtgaacgccacaaggagaaagtcggggagtttgcgcccgtgccaaaaagggacaaggctgccacttccgaggccgtgagcaaagcggggaaagtcctgagggcccccgccccaattgaactaggcatgccattggtggaggacaatgtgttagctgtgatgggtattgcttgccgagagctacatatgccatacatgcaggtaagcaatgtcaagcggaaaatgagggagtcatccataattggacatcacgaccatcagtcgttcctatcgtcgcctgcctatataactataagctttgggaatgggggacccccccctttttcccttttttttttttc

SEQ ID NO: 39612 - DNA, 454 bp, Oryza sativa
  unsure (1)..(454): unsure at all n locations
ntacctgaccacgcgtccgcttccgcgaaggactacttcgttatcggtcttgtggggaatcgcccggggaggcaattcgccattgaaacccggntcgctcgaccagctgcccgccgtgtcagcaactggctgaactcgacaagcgatacatcgccgatcatcttgcgggcttcggcttcagcttggtcgagggttagcactggtaaggcaagggggagtcatgtcaaaagtcaaataaagcaaaatagcaaaagcacggaagcttgtagcgaatagagcagtcttactgttcattccctcaaggaggaccagcctcggcaagccatcaacctcttcgctcggatcaactgtaacctgccatgactgggagaggggaaagacgcgaagcatgcagaattcctccaccatgtcgcggcagctgaggcgagaacaaacctttcgcagcaggcgaact

SEQ ID NO: 39613 - DNA, 341 bp, Oryza sativa
tacatacaaatcggaggtgcctaaaaaggttgcaacttcattctccaatgttttttttgtcatactacatttgcacctatggtttgcacacttttttttgtcttcaaaatttaattgtaagttgatgagaaaaaaaatgtgtgtggggaaaaaagaatatataaaaatttagttcatttgctaaacaaggttttataaaatagttgataaagaaaactctagtgaaagttaatcttaaataatagaaaacaaacttaaatgaaaatttaaagaaagtaaacacattataaaattaggttaaaaaaaaccttttttttttaaaaatttttaaaacccccccc

SEQ ID NO: 39614 - DNA, 411 bp, Oryza sativa
  unsure (1)..(411): unsure at all n locations
aatcaagaaacaatcctgagaagccacctctagcaaaacaagaggagcattacctgcacaaccaacaaatgcttgtaggaaatcacaaggtaattagcttgtgattagcaggttgaaaaaaggacatgaacaataagctagaagcatgttgccgaaaattttaatttcaggcatgctactgcaagtacagatcgtgctcatggcctttcagacatgggacataattaacagcattcccatcaagatttcctggaaaaccaactcgctgcaataaaccacctagttcagatatcagcattcaggtccttanaagtcctgacatgaacagagccgganaatactcctatatagatatcaactacgaggagctagatcgagcttgctattgagtgattataatttacccgtcaa

SEQ ID NO: 39615 - DNA, 384 bp, Oryza sativa
  unsure (1)..(384): unsure at all n locations
attantattcctttacttataactgaaactaccaggaagcactacttctattttttttaaagaaaaaatggtactcaacattcattgcaatctaattatcagtgacaactaacagtgattgatctgtccccattccctaatctcaccagcaagttcctgttcaaccttgataactgctgcacccagtccatcactacttccaattgaacactcaacctcaaaactctgatcatgcttgtccccatcagctagatccccaaaagcaacttatgccaaccccaatgcagctcaaaaccagctcagcctactatatcaagaagtctaatttcccaaagcatgtagtataaggattttttaaaaaaaaaaaaaaaaaatttttttttt

SEQ ID NO: 39616 - DNA, 476 bp, Oryza sativa
  unsure (1)..(476): unsure at all n locations
gcttccctccatgaatctgcaggtttcatgtgtacagttatattggtgggtatcgagtgcctaatatgatttgcaatgaanaataaaggtttgaaaccgtcgtccttgatagttctccagagatttgattgtttcctataccaagaacatcttgttgaataatttcagtctatccgcacttgtgcatnaggtgaaaaaaatgcttaaggatcaaaatttcagcttatacaaaacggatgaagcatgaacatcatcaagtgttcattnttcccttctataattagtcgaccgaaaatattgtgggcgacattattagacaatcgaaaataatccataatccgtgttccatcattcgtctccagtaaagctaagaaaaggaaaataaaagctttttttntccatcatacaatcaccttgctcgaaatatatacacaaaatcaacctatcaccaaaccaccaaatctggtaacataaca

SEQ ID NO: 39617 - DNA, 337 bp, Oryza sativa
ttattgctgaaactaccgaacactgacttctattttgtagagaaaaatgtactcacattatttgcatctatttcagtgcaactaacagtgatgatctgtcccataccctaatctcaccacagttcctgttaaccttgaaactgctgacccagtccacactacttgaattgaacactaacctaaaactctgatcatgcttgccccatcagctagaccccagaagcacttatgccaaccccaatgcgctcaaaccagctcacctactatataagaagctaattttccaaagcatgtagttggtaaagtaaattttttttttttttaaaaaaaaaaaaaa

SEQ ID NO: 39618 - DNA, 420 bp, Oryza sativa
  unsure (1)..(420): unsure at all n locations
taatatgatttgccatgaaaacatagggtttgaaaccgtcgtgcttgataggtcttcagagatttgattggttcctataccaagaacatcttggtgaataatttcaggctatccgcacttgtgcataggtgaaaaanaatgcttaaggatcagaatttcagcttaaacaaaacggatgaagcatgaacatcatcaagtgttcatttttcccttctataattagtcgaccgaaaatattgtgggcgacattattagacaatcgacaataatccataatccgcgttccatcattcgtctncagtaaagctaagaaaaggaanataaaagctntctttttccatcatacaatcaccttgctcgaatatatacacaatatcaacctatcaccaaaccacctaatctggtaacataacatacacc

SEQ ID NO: 39619 - DNA, 398 bp, Oryza sativa
gcttgagtaataagactagaatgagctatctttccattttaagagatcattacaacacttgttataatgaacgaatgcctgaaaacaaatatgaattatcaaagaatatacctagctcctgaagattaacattcggggaaaggaaagagctttctttcatcttattcgtatgaatttgaagaatctgcaaacggccattttcatcaagcaggtttatctcaatatgaacttccaatcgtccaggcctgtaacagatgtgtcaaatgtcaatggatacgtgcaaatagtaaaacaaaaatacaaaaagaagattccccaatggtttaggcctgcaatatctaaaataatcaagggcaaagaccatttaaaaaatttttttttttttttttttttccccc

SEQ ID NO: 39620 - DNA, 480 bp, Oryza sativa
  unsure (1)..(480): unsure at all n locations
tcgctttggtcgccctttggacctagagtttggagtttgtcgattctgatagcaaatcaggtctganaaaattataatcgcactgttttaacaaaatcactgccgctgtttcttttttttcgaacacactgccgctgtttctgtaattactgtaacttgttcagatgagaacggtggcgatatcgaacttataaagagtagcacggaaataacgagttgtcgccgggcaaagtccatatgtatatcgctggagcactgaagatcccttgaagaccagtgactactgaacacttgtgcaaaagagctaagcagataaactgaagaactgaagccttggtaaaaaaaanaacttatgcaaaagagctaagcagaaatactgaagaactgaaccattggtaaaaaaaagaaaacacacaaaaacacttatgcaaaagagctaagcagatnaactgaagaactgaagcctttgtaaaaaaaaaa

SEQ ID NO: 39621 - DNA, 354 bp, Oryza sativa
tggaatatccatttacgacaagggcaccttccatttagatcgatacatacgcgtaaagcaaactcttttttgacaattcaagcataaattagtgactgaagaatcaataatcatttcagtggggaaaaattaaccaccagttagaatgttctcactatgagtgacaacaaaagtagtttcttctttcgggaaaaagtgccttctctttttgaaaaatgacataagtagttgtattttgatatggagggagtatgtcataatgcatctagtcacgagccatctgttaattttttactagcatgttatttgggtgcctttaaattttttccccaaaattttttaaaaaaaaatttt

SEQ ID NO: 39622 - DNA, 361 bp, Oryza sativa
tcatcgtgatggctaataaatgtaacaatgttgcaacaatgttcaaataggatagtactaagtagacaatctctaaatttagaatagctttgttaattcaacattgggatataagctgccctgaagggctcgcatcgggacaagaactgtgaactggtgatatggaaaattcattgttcacctataaagtgtgggttttaactttacatttgctgccgttttgatgttggcttagtggatagtttattattattcacttcacaaaatgcgatggtggcaccagcaaaatatgttagtgttagtggacagcaaattatagggtgcaacaagctcaaatatgtatacacaatcagtagtcact

SEQ ID NO: 39623 - DNA, 314 bp, Oryza sativa
actcttcgtcaacaccaacaccttccaaatatgcaccaaggtctagctcataaacagtactcttcccccaaccaacatttagattggtcttctcacatccacacgccctaatgtacgaaataatatgaagcttcatcaatgaaatgctgatgaatgaatggtccatgtttccatgaattgtctcgttttgctacttcgggttacccatacagccataccctaaaccggattagcctcaatcaacctccgtcctcgctcatgatcaatctaacttttgtcccccctttttttcccaaaaaaaaaaaccccccccc

SEQ ID NO: 39624 - DNA, 362 bp, Oryza sativa
  unsure (1)..(362): unsure at all n locations
atgctgttggcttcatccgctcaagttcaaaatcacaagtatcaatcgctgctaagtggttgtcgagcaagacatcaccagcaggatcaccaaaaccaacgaacatgaccgcatgggaccaggttactccatccctgacaatngggcgtgcataatcgtagtggtacacctctccttcagcgagctcgaaataattacaagaaactttgaaagaacccacaagcattcttccttgaagcaaacgctcaaatatttgttcaaagccctctgcctcaatgtctatgcgcctgaacgatgatatccttatctgctccatctttatataggaatttggtggggcccccccccaaaagggggggggg

SEQ ID NO: 39625 - DNA, 432 bp, Oryza sativa
  unsure (1)..(432): unsure at all n locations
ggtctcctccggcgacgacgcgcgcggcgccgtcgacacatgttctccgcgacattcgtcgtcagcttcctcctcgccggccgggacacggtgtcctccgcgctcaccactctgttcatgatcctgtccaagaaccccgacgtggcggccgccatgcgcgcggaggccggcgccgccgccggcgagagcgccgncgtcagctacgagcacctgaagcggctgaactacacccacgccgtgctgtacgagaacatgcggctgttcccgccggtgcagttcgactccaagttctgcgccgccgccgacgtgctccccgacggcacctacgtcgacggcggcgcgcgcgtcatgtaccacccctacgccatgggccgcatgccgcgcatctggggcgccgactgcgacgcgttccggccggagcggtggctcacc

SEQ ID NO: 39626 - DNA, 308 bp, Oryza sativa
aactgccaaggggtcttgagctaacacccatcatctcaggtcatgaaatctctcgcattggatctgccgcaaaacaaccgatggggttggccattccagtatctagtgactcattggatgataaattataaaagctggatgttcttcttgataatgccacaggaggacacatggctgatgcaccgaaagatttcctggatgattggatacttatggtgatgcttcaatctgaaatcactgggtgctcagttgtgcagagtcttttccatttaaataaaaaaggggggggggaaaaaaaacacccccct

SEQ ID NO: 39627 - DNA, 360 bp, Oryza sativa
  unsure (1)..(360): unsure at all n locations
gacccatcaacgatgatgcagtcactataacatgccagctatatctcctcataatcaaaatgaatagccctgtttgagattttcacttcgctacctatcactggattcggaatctgcaacaatcatgttataaatgaatatattcatggttatcaacagcgaggttgctatgcttatggatgatttatgttgaggatgcaatgtaccgatgttaagcaccttcactttntcgttaatgtaaggccttgtattcatgtaataagggagaaatgtgtaataaaaacaagttctatgacgattccttttggaagatgctgatatggcattatgtgtataattggttactgtcaaacgagacct

SEQ ID NO: 39628 - DNA, 251 bp, Oryza sativa
atcatttttcttttcaataccaacacaaggccgttaaacaattcatgaaagtaaaagcaccacagatatgttgcacttgcacatgtgacacaaaaaaaaaaggttaatcacatacttgtacatcccaaacagggtagttgtgtcctttgtagcaaacaagattagcattcaacttggtactccatagtcgaactgtgagggaatataaaaaaaaatttaaatttttaaacatttttaaatttttgggggga

SEQ ID NO: 39629 - DNA, 365 bp, Oryza sativa
  unsure (1)..(365): unsure at all n locations
gaattacacatcaaattcccctaattccctctttaaaaataatttgggaaatcaacaagctcgcactggattgcctttgcacaggccggcgtgttgtgtggacatcctcgtcaacagtcaccctcctagctgctaaatgaattgcttccaataatgatttcttttatcatcctggcctacctaatcagcaatcaatccggatcccatctgatgtgctccatcgaggcatcgactcaccgcgcgcaaaaagcgaagcgcatgacaccatcgacctatcccctgtcactctttcagtactgacgatctctcatcncgaattttcgggccccaaaaaaaaaagagggacccccaaaaaaccccccccc

SEQ ID NO: 39630 - DNA, 491 bp, Oryza sativa
  unsure (1)..(491): unsure at all n locations
tcttggtagcctgctcatcacaatttcgtcgacaatcttgttatgccttgatatgttcctgtggaccatcccagcatacctatcaactgctcctggttcttactgtataatgcaggtattgtgaccaaagcaatggttcctgacacgatacattgcaaaattagcatgaacttcagatagatatgtgagcagctgatgctgtatgcttgtaaagtgagttcaaaatacattatgcatacagaacataccaaagtaagcaagagtaatagacgagcagaaatttccaataacagataacagccataggagcaacacaacctgtcaagaattttccttctcaaaatccacatgaatntcatataatcaacagagagaaatactgcaaatgaattagctaacctggaaaaagagtcgaaagtccttgccaagagtaatgtcatgtgcgatcatcagcatgtngttgactttaacacggaatgaagctgcagcat

SEQ ID NO: 39631 - DNA, 333 bp, Oryza sativa
gaataaacccctaacacatattattttgctcacatcggatacgttcttggcgtcaagactggtttcaaagattccggattctaattgtttataccttttaatctccttttcacaatgagcaattaaaggtatttgagggataaccagtccatagaacatatttatagagcatttataaattcaaccatatgctagcatcaacattgcatattttcttaattcaagtatagaatttaagtggaatgcatcatctcccttaaaagcaaaatcttaatctcatgaaaaggacttgaaaatttccccacttttttttatgaccccccccacaaaaaa

SEQ ID NO: 39632 - DNA, 467 bp, Oryza sativa
  unsure (1)..(467): unsure at all n locations
gaagctattagaaactttcagtcctcgcagactaagtagaaataaccaaacaaggcaatgataaacgagcaagcaaattgaattgataaaaaatcacactccattattatgatgatagcccccgactgacaacggcaagaagaanacttgatgttgtcagtcaagatagggaagtacaatgataaacttaagcgtaaaaacgacgaagatgctcaatgttccaagagttgtcgacgagagtaccgtcttcgcgcttgagtcgataagaacctggtcgagtaacttcagagatgataaatggcccctcccataaaggagataacttgtgccgatctcgtgtagtttgaattttcctcataaccaggtcgccgactagaaaggcacgggatcgaacattgcgattatgataacgccgcaacccttgtaagtatcgagccgaccgaatcatagctgcttcgcggacttct

SEQ ID NO: 39633 - DNA, 383 bp, Oryza sativa
  unsure (1)..(383): unsure at all n locations
gcttgctgctataaagaatggacaggttgatttatatattcccatgttcgntgagctgccacatagtaaatttggtgggttatgatgggctgcaaccaattcaacctttgataaacaatcttatgaacactgtgaagtactttaagaggtctccagcccgtatgtacaaatttgtgggagtgtgccacactttctctattaaagttggaagaaggttgtgtctttgatgttaaaacaagggggagttcaaccaatcgaatgctagagtcaggcattgagtatagaaatgcatttgattattatgctgaagtagacaactactatgagtggcaaccactataatttgaatgggatttgttttgaaagaaanaaaaatttttttt

SEQ ID NO: 39634 - DNA, 490 bp, Oryza sativa
  unsure (1)..(490): unsure at all n locations
tttgtacttcatgtacacttgacggaggcttcatttgctgtatggcatcgattgtctcggcgttcgtatctatgcctctttcggaactangaaacccagcaatttgcccgcgcgaacgccgaagacacttctcaggattcagttttatgcccgctgcgcgcaagttgtcgaaggcctcctgcangtcggacacatgatcaaaagccctacggcttttcacgacaatatcgtcgacataagcttctacatttcgccccagctggttgcaaaggaccttgtataccagtctggcgaatgttgctccggcattccttatgccgaaaggcatcctgaggtgacaganagtgccgaacggggtgatgaaggctgtcttcgggatgtcaagcggattcatatggatctggtgatagccggaatatgcgtccaggaaactcatgagttcgcacatccctttctttcttcgcatncggtctcgatctggaagagtttg

SEQ ID NO: 39635 - DNA, 405 bp, Oryza sativa
  unsure (1)..(405): unsure at all n locations
cacctcttatttgactctttcactattttgaattctttataataaccaaatcccaatgcaaaggtcgtcttattcaaaaccttaatcatcacattccctcttttccacttcacacctcggaacgcactgttcttataaaaaaaaaagggcttttccatcttcttaacccgaaatgaaatggcttaagagagggagagtccttttggggggtacccccgggaagagatccaatggagacggngtgggcctgtagctcacaagattagagcacgtggctaccaaccacggtgtcgggggttcgaatcccctctcgcccacagccttccaaaagggaagggcctttactttcccccttgaggggttatgggggaaaaaaaaaaaaaaaaaaaaacccccccccccccc

SEQ ID NO: 39636 - DNA, 487 bp, Oryza sativa
  unsure (1)..(487): unsure at all n locations
tatgccattntcaatccaatcgtggattgtatgcctgtcatacctgtactctgtcttctattagcccttgcttggcaagctgctgtagttttcgatgaaatctttactactctgtctgccaaattgaatcatgtattcattctaaaaaaattcgaaaaatggataagagccgagaagtcttatattatgaaccttcgattctaaaattcaaattcttctacattgaatgtatagctgcagcaataaatttggatcagcctttctactccctgcatctacgttgagcaggtatctttaggtaaccgcacaatacctaacctaatttattgataagagtgcttattataaatcaattcttgcaattnttttcaaaaattgattnttgcattnttaggtgtcaaaataaacaaaacccatcctagttggattgtgtggtaaggaanaacgggtaatctattccttancananaatcttggagaatatgta

SEQ ID NO: 39637 - DNA, 397 bp, Oryza sativa
gatcttttatatgaccttctttttataataaactatgacgcctgctcaaccatgtattggtctataatcttggaaagatctaattcaccaaaatcatctggatacatggtggagacaacgggtgcaaggaatgggaaagaagtgttgaaaggaatgacagacggatggatagttagcaccattagaccaatatatatatatatatatatatatactgttgggaatgcatactagctagtagcatgtttatttgaattacccttaattagattattgggaatgcatacacagagcatgttcatttggattactattaactagactattgagaattcaagactgcagtgttttaattctttggtgcctaaaaaccccacaaatttttttttttgggggg

SEQ ID NO: 39638 - DNA, 418 bp, Oryza sativa
  unsure (1)..(418): unsure at all n locations
acctcagaaagcagatcaccctaatgcattaatctcctgcacatgaatatctgtgtggtcagagcgacgagtatcagactgtccagatgagctcgctatctcagaattgcacaatgggcaaagtgcattaatcttcagccatttatcatcaccattcttgtggaaacaatgcgtgcagggaagttcacgaagctcatcattgtgtgcatactntgcaagacagatgcaacatacctgcaaaatcacagggtacaggcacaatatataactacgatatgaaatagctggcttgctgccaacagatgaacaanaangagtgagaggagggtggcatacagcatcctcagcagatagtgacacgtccttgtcagtcctgcactactatccaccatcttgccttcagctcatttctgactat

SEQ ID NO: 39639 - DNA, 397 bp, Oryza sativa
  unsure (1)..(397): unsure at all n locations
cagctttggatgaactcacactgagtttgttctttattattagacgaagagtcttctagttcatatataaacacacgaccagcacctgtggaacaactggattaccggtgtcattaattgctatgaatctgccaacatatcaaatctgcatcttagtaaagcagtgaaaatccctttaatgtaattgctataagtatgatgacagtatttttctcaagtccagaaagcattgtacgctccaatatcatcatacttatcttgctagcatttatacgctccaacctcagcattacagtaatcttgctggcatttatacgctcctgtgatttgagcatttacaaaaacgaaatcantttcaaccccaattttttttttttttttgggggggggtttaaaa

SEQ ID NO: 39640 - DNA, 370 bp, Oryza sativa
caccattattttctactggcaagatgctagtatactactgcatgaggtatttgtttagaaagtataacaatactttggatttcagcattgttatcttatttgataccatgcattgaccattgcacctacctaacttctttctagcaaattatatcaatttgtttgcttattttgatgatgactcattgcatgtcgcataagtgtgatgaccatgtcgtaaaattaacgtaggacagtaattgagcttcacaagaatctggaaaggtactattttgatgtcgtgttgtttcaacattagtgcaagaagcattgggacctcctaggattagtcatcttgcacttcatgttgtactccctccatccctaaatg

SEQ ID NO: 39641 - DNA, 342 bp, Oryza sativa
ttcattctaatgggaaaggacatcgtcctggaccaaataacattattgacttcgaacttcttgcacaataagtttaccttcatatgagcttgattattttcccatttgcttttgggttcttatgttcgctgcacaaaatgttttgctaaccattgctttttatgattagttgctaatgcaataatattttggttattttcaagtaataaaagttcaaggtactaaagtctcaatggatagatatggtgtgaagtctcagggtactaaagttcaagctgcatatgctatattgtaggagtttggccccccaattttggggggggggggggggaaaaaaaaaaa

SEQ ID NO: 39642 - DNA, 485 bp, Oryza sativa
  unsure (1)..(485): unsure at all n locations
tgagctacctggccgatttgggttagccccatgtttaatattgcagatttaaagccatatttgggagaagaagatgagttaagtcgaggacgactcanatgcaagaaggggaggatgatgaggacatcccttccaacgatacaaccacgcctattgcacagcaaggaccaatgactagagctcgagctcgtgaacttaattatcaggtaaagtcattcctagctaatcatacaagttcttctcagaattgggtgctactaaatggttgttatgatctacttgttgttaggaatatgggagaggaaccaaatcgcaagcagcactagtagcgctgatttgatgaagtcaatgctcttcactccggagggcaaacggngcaaatgagtacttgttggaaagatctcgtcgtctactttcagctatgtgtggcctcaccatcaagttngacccaggctgctcagaatgancgaaatagttctttacat

SEQ ID NO: 39643 - DNA, 383 bp, Oryza sativa
caaccgaccggtcagttccataacttccgctgtcctcaatgaccaaagcattcagtgctaagtactaacattggatccttcaactgattctacaccaaaccatcatttatccgctatcggctgacacacactttgggcccacttgagattatcatgatccgcgcccgggtctcctagtctccaacaaccgatcgttcaatctatcagctaattgctgctacttgacatctcttgtcagttgcagaattaaactgactggcatgcccgtacctcattgtcacatcctgattttcgttttaagatttataaattatttaataaattattattagaatttatattaaatggtttccatttttaaaaaattttttttttttttttaa

SEQ ID NO: 39644 - DNA, 488 bp, Oryza sativa
  unsure (1)..(488): unsure at all n locations
ttacaagttagtggacattaaatttacagtaacatatgattcgatgtcnatcctaaagtaacaccttgaaaatttcataaataaaatattataaaaaattaaatatgtttttaggttcgttcaattttaaaagtacaggagtcgcataagaaatttcttttttaaaaaactcgcatgctaacttgagacgactagtctcctaactgcagctcatgattntctaaaaaatatatatccaagtgaattcgcacagtgaatttcaccttaactaaaccatataacaataataaaattaaaatagccttcatccgttgcaacacacagatatttttctagtaaataaaaatttcataatccaaatttattgctcagaaaattcttacaaaaatttgcatcatgcctggctcttccaaatttggtctgttatttgccggtggccaaaataacgtaaaattaaaccctaagggtttgataaataaanattatct

SEQ ID NO: 39645 - DNA, 282 bp, Oryza sativa
agttctttcaaaaatgctctgcaggacaacatcttcgcttattaaagccaacagaactcattaaggcgtaacccacctgccttgcagctcacgagagtacatgcatcttcacttggagagggtatatatattgatactctcctctagtttactaatgggttgttctttccaggatctaattcacgggatctccgatcacatagactgggttaccaccatagtataattcacatgggtctcaaacccatctccttcgatgcattagttatcacatttcgtgat

SEQ ID NO: 39646 - DNA, 459 bp, Oryza sativa
  unsure (1)..(459): unsure at all n locations
cttcctgtttggtgaagaaattagataaaaaggtagtagtattagtataagtaatatcatgtgattgtttgatttgtacagaacgacaacgtctgcatcctgctcatctcgatcatggcaatgtagcttggatgtaccaatcttgaggctgcagcatgtcggcaaaatttgcgtgagagatgactaacaataacccttggatggatagaatgcatcattgcatcaaagtcacttgcaataaaatgaagcagtacaaattcttcagaaattagctaggaaaaaaaaacaaattcccaaaatatttgctgttaaaggaaaagagcaaagcatgtgatttttcattgtaactatatctgaaaatgtatcagcattctgatcatttcacatctgccaagggttcattcagcaagtgggaaagaggctcagaactgaagattcatacgagaagtncgttcatct

SEQ ID NO: 39647 - DNA, 358 bp, Oryza sativa
  unsure (1)..(358): unsure at all n locations
aaaaacgaaagcttagccatctatgcgtgtcgacgaacagcaaaagaatacaccagagagagagaagccgctgctacagcatgcacacaatntatactccatccattgtaaaaagtttaacaccattgatttttaagtacgtatttgaccattcgtcttattcaaaaaatttaaggaattatttattcttttcatatcatttgattcattgttaaagatatttttatgtacacacatagttttacatatttcacaaatttttttaataagacgaacggtcaaatatgtgctaaaaagttaacgggtgataaaataatttgttttaaaaaaaaaaaaaaaaaaaccccccggggggggg

SEQ ID NO: 39648 - DNA, 237 bp, Oryza sativa
  unsure (1)..(237): unsure at all n locations
aagaaaaaaagaacctacagaagagagtattcaataagcttccacttatccactatcaccttcagatgcatgctgtccnaatgataagattgctccccatcagaatagattcagctctcacctggagatcagatcagctttagcacacgttccagctggtccacgaacaatctataggggcctgatgcagcagggacggtggcatactggcatggcacgagttcatccacagaaact

SEQ ID NO: 39649 - DNA, 319 bp, Oryza sativa
tgatgaaatgaacactagtcaacggctacagaaagctaaccggtagtgaagacgctcaattgtgaagataaaagcaccagtcggcggcggcataaccagtcggcgccggaagacgatgatgtccatcaatagtggtagcagtcggcagcagacgtaagcagcttgtgttgaagatgctgacgcctattagtggtggcggcgacgtggccagtcgtgaagacgatagcaccagttggcgtcataccaagtggccggtcggagaatatggttaaacggttttccttttattatccccccaaaaaaatttttgggggggggg

SEQ ID NO: 39650 - DNA, 480 bp, Oryza sativa
  unsure (1)..(480): unsure at all n locations
tgtggcactggcagttggagtagcatcgcccttctagtttccacggcaatggccgaccatcgtcatggtacaatggcagtcgtctgatcactgcagtaaacacttagtattgagtagttttaggggatgttaggggcgtagcctagcctggaaacgatgagatgcgttccaggagtggggtggccctcttgtatatgcgccgacaatcggngccggactcaaatgatgttgagccacctccgatcgtaacggcttgactcgggagtgagccgatggttgccacaaagaagccgtcagtgtataggcgctgtggagtgacagagacaccggtagggatgccgagctcgtgatcactagacggtgaggtgaggattcatatgatgatgacgccgntggcggcgacgagttggaggacttcgccatcagcaaacaagcagtatatggcgggtcatatatataaatataacggtttcgtcatcg

SEQ ID NO: 39651 - DNA, 412 bp, Oryza sativa
gctttggagaagatgttttaaggggagtactggctttaccctagttttgcgcctatgaagaggagccgtaggcccgctagtccggtgccgtttatttttgattgtcaagccctaagtgcctttgtaataatgtaaatattatcgatataataaagatgtgtcttttatatcatgtttgtatggtgtaccccggcttttcctgagacggggattaatacactagcgttcgggaaaaggcaattttcccggtcgcgacagtccccctttcgcgtggccggcccggagggcgccccatgtgcatagcaaaacggttgctgccgtcgccctccgccttgggcccccgagccgattcaggctcgggcttttaatgggcttttctcaaaaaaaaaaggggggccccccctcccccccc

SEQ ID NO: 39652 - DNA, 211 bp, Oryza sativa
tcctcttctacactgccatttttggatcatactcattgggcctttttgcgcctcttagggggaaaaaccctactgatcgattggttgatggcgattctacagagttaacaattcaccatgaataagtgtgattttggggaacacctctgaaaatgaattgcacaaagtggtttttcttacaagtataaaagcccgggttttaatttaaatg

SEQ ID NO: 39653 - DNA, 485 bp, Oryza sativa
  unsure (1)..(485): unsure at all n locations
tgaggctggaataccacatgcaagccataagttacaaaacatgtcataataatattgaaagacatctcttcttcagattgttttctcaacaaccacatctttcagaaagcttataagctaatattttctccagccacatctttcagaaagcttataagctaatatgccctctatacatacccatccaaaagaattcagaagaaaacattgcatcacagatgtgaacttcagataagaaaaaaaggttaaaagcctaaattttcagttaggggctattgtttatcgttggaacatataagaatgatatttatatgccatctgaaaggagcacgatacctgttatctgaactttgtcgcctggtttagagtcgcataggatattactgcagatacctttctttgtggggtcttcttttccagtttcaggatcataataaacagcacgacgaacacacaaactggcagtctttccatcanaagaatca

SEQ ID NO: 39654 - DNA, 400 bp, Oryza sativa
  unsure (1)..(400): unsure at all n locations
gccagctttaaagaattgaagtatccccacacgggattcacattgaataagctataatgagttgttgacatattggggcattaaaagcaaactgtttactataactttagataatgtcagttataacaattctacatgtcaagagttgattaagaatcacaagaatgcattgatgtttgagggtcagcatttgcatgttagatgttgtgcccatatcctaaatattttggttcaggatggtatgaaaataattaaacctacaatacacaagctacgtgagttgttgaagcatttaaattcttcagtatcaagaatgcaagatttctattctatggcaaactcgaaaaatctttcttcgaagttgaagtttttttttnccccttttttttttttttttttg

SEQ ID NO: 39655 - DNA, 487 bp, Oryza sativa
  unsure (1)..(487): unsure at all n locations
ctaagctgcccatggccaacaagcggccggtctgtaaggatcgaacgatatctaacgtctgttttatgttggagtaaaagaagaaacaaggaaagcaactcaatctaaagagaanagggaagcaaaggatcgatgctaagcaagcaggatgacacaagttaatctactacgttttggtttccggtgtacgtgttgtgttttttcatcacgtttagtcacgtatcaccgataaaagttaaagtcgtccatttggaacgaaagaattccatagtattttcatatatacgaatcctaaaattcattatcaataaatacagttaaagttatctctctattatctaattaagccataccaccttaattggttttagctattagatgattaatctatggtctaaattatttccctcttttccttcacctacggaatcatatattacttaaantnngctttggataattaatctatattatcttttcatttctc

SEQ ID NO: 39656 - DNA, 211 bp, Oryza sativa
  unsure (1)..(211): unsure at all n locations
tctaagcttcggcatgctctcggcctgagagcagagcgtttttttttananttgacacaggcgtgatcgacatagtacacctctgcccctgccactctgcaagggaggaatatggatgaccaatctgatgctgaagatgacctgcttatgttgctgcacacatttactataccattaatggtaaatgcatattgtaaagacctgcaggcaa

SEQ ID NO: 39657 - DNA, 360 bp, Oryza sativa
ccatcttcttctaagccccagccaaacaaaagctaaccatgtgtagttgggggagcccgatttcaactgagggggaccttgagccaaaaatacttcttcatgccattcaaaacctctaacaaaggttggcacgcaaactggttctatgtgcaaaaccctgaaccagcacttctcggatactcctgtcttcccccaatatatcgcgacaccctgaactcaatgcctatgggagaagaagccggccaagcactcaacttgttggatcgcatgctaaagctaaaagaacagggtctgtagggggcgcaaatcacccgagcaatttttttaaattttttctcccaaaaaaaaaggtggaaaaaa

SEQ ID NO: 39658 - DNA, 338 bp, Oryza sativa
cctagttgctgcataaaaagacacaaattgcctaaacctcgagaaagacactctgatgaaaaaaaagaaaggcatcatagccagctagtactacatataatggatgccggtcgcatgtggacttttttgagcctgctatccaaaaactataaccacaccaatgaactaaagggcagatcgctaaagttatgcatacgagcctttacaaaactactgcgactttacacggatcgaaagtcgaatgcacgtctgatgatacgtatgcacagatcaacttactactgaatggaacttcctgaacgccgcactgtgcctgagtacatcgcatctgttcatca

SEQ ID NO: 39659 - DNA, 314 bp, Oryza sativa
acatcgtgacacattcttggtgcacgacgatggccctgaccccaccgatccacacatgctcctgcgcctccggaagaagttaggcaagctgttcaagaagagcaaggctcgccgtaagatctctaacctgatccaagacattaacaagaagttcgagcaggtgaaagcaaggcatgtcaagtacacagtcgacagcgttgtcctcaagtctctagcggcaacgaccatcgatcctcgtctccagaatctgtacaaaagggcaacagagcttgttggcattgacgggccaagggacgatctcataaacaagctat

SEQ ID NO: 39660 - DNA, 482 bp, Oryza sativa
  unsure (1)..(482): unsure at all n locations
taaatatttntggtggaaatagagccatcagggctgttctgtctcaactatcagaataaagataacagaactgaaataaaattatgtaaagaatgagctaataatctctataagtgaatggtgaatgccaaaacactacctgatcagcaaaaaaaacatatataccatcagatggaggaaaaaaagcaaggaggaagccgtatgatcagatcggtaaaaggacagcaaaactgttttttttttcctttntgggtcttctgcagttgtacatccagctcctccctcgtaccgtcatacgtgggagagagacagagcaaatgaaaagaaaaatagaaagaagaaaaactgcaactctagggctgtcgttgatttgaatctgcatatatntcaatatacgaaaacagtgganagaataaaagcaatatctgacaacagcttatattatatagntatgggtatgatccgtagtttataacaaatgt

SEQ ID NO: 39661 - DNA, 342 bp, Oryza sativa
  unsure (1)..(342): unsure at all n locations
tttttccacctctanccataatatgccctcttttaccaagatgccatgctctgcaaacactcgtcgttacaagttttcaatggaacccgccaaactttnttctcccattttggacctgagagcgcacacgccctgagcactatcacaagattagtacagctaattaatgttcatttaatatcggataaagacacataaccacactcactcaagaccagctcttcacatgctgcagtttgcaggcgataaaccctcccttgtaccgaagtgaacgagcactagtgcacgagtacttagcctgtgtctatcgctttcggccgtttcgaaacgctcccgttcaag

SEQ ID NO: 39662 - DNA, 485 bp, Oryza sativa
  unsure (1)..(485): unsure at all n locations
tcgtcgtcgtcgtcaatggcggaggctactatactacactctcgctagctagctatactgtgctacctttactctctcgatctactcgtgtctgcgatttgtgttgtattaatgtactacctccggttttaatccaagtgtagtttaattaattaatccacgagaaaagatccgacttatgatcaagtctctgtgcgaattgaggaatctctcggtgaattatactggaagcatatcaatctgaactagttttcgatttttttgtgtgaataatcgtccaaattacatcggttttccgtaggtaaccaaatggtaatgacaaagctgctcatcagtacttcagctttgcagttaagaatgagaaggcccaacaggcaacagcccattagatgctagctagtgcagtacttagatgggggttagatccagggaattaactttagtccctgtctttagacactaanttagagtattaaatatagact

SEQ ID NO: 39663 - DNA, 317 bp, Oryza sativa
aagaacaactatcatgggaaggccgctaggctgcagtccaccaaagagatgcaaatctttgtttcctctggagaagggtatttcctagtctattcttttgcagacttttaacgtagttgcttgttatgttccttccaaaaatacttaccagtactagctattatctaatcccctttctatacaaccatatggttggagtgcacttgcatttgattagatgtcacaaattattccagcctacagagatttttctaaactgaagctcattatgacgtgttgaaattacttggtagtgtacattagctaaatatcgtttt

SEQ ID NO: 39664 - DNA, 495 bp, Oryza sativa
  unsure (1)..(495): unsure at all n locations
gaccttagatactcacgctacaggggagggagaggagcggagatggttaccggctgcnattctctcaccgtgagacgatggcgaaaaacgcacgcgatgcaaatctaccttccttttccatttcccctccatttcctatattcttcctctttccttcacatcttcctcctctgtttcttctaaacgagacccatcccgtccttttgcattgtgtggctataggagaccaaattgccccctatctatcaatgttaaggcttcgtcacagccatcagctcgaccagtccagtccataccatcacctgccctgtgtgtgaagaacccgcactgcaccaacgcaccacaaacagccgctgcaaaatctagccaccaccgtgcaacaatctcgtcgtggaatctagccatcttcaggtcgttctttgtcatagcggcgcgaggaagtgagagatcccgtcccaaacacgaggaatggattcctcgacctagcattccata

SEQ ID NO: 39665 - DNA, 365 bp, Oryza sativa
  unsure (1)..(365): unsure at all n locations
tgtcgagactacgctggcggcggcggcgcccacggaactgctagttccattgacgctggcggccggcgccagcaccagcgagagagacatggattaattggttgttcacggcgcatgagcgcaatggcgtatcggactcgacgtcctcgatgtgctgctcgtatagtggcacgatgcgcacctcttctgccgcagtgtgatactacgagagaagcgccaacgcgatcgagatatagctcgcgactcgtgcatgtacgtagtgtgggaggaagtcggaatatgaagtcgtgatatcccgttttgacggaatcccgggcttgtaagnncaaggnccttttttctccctttttttcccaaaaaatttt

SEQ ID NO: 39666 - DNA, 488 bp, Oryza sativa
  unsure (1)..(488): unsure at all n locations
tctaagaaggccaattgagttactagtttgatatttcaattggttcaggtaagtttttcatgcggttgttgctgattctcaagtgatatcaacttatggtaaaaagatgtatactgaagccatgtcagtatgtacacgttagtactaccgcaaaacaagctgaacagagacctaaaatttggaatagcatgtcatatgcaggacagttcatctaggcatcaagcagttaaaaggaacaatgattttcaccgagcaaatagaaggcattcacaaataaccagctatagaaaacaacatgattntgctatcgtacagtgtaaaatggcatgggaagaaattacctttagtataaaagctagagaaaggataatacaggcctcctttcaggattnggggaatattcttgaattgcattgactgcatattgaccatgaagaaaccaacatgcgtgctcaaaaataccacatcatgttcctctgcanagcaca

SEQ ID NO: 39667 - DNA, 497 bp, Oryza sativa
  unsure (1)..(497): unsure at all n locations
tgaggcatttcanggctgcagatgatactcaatgtgcttatcgtgtccatgccatacctttatctcttatggttnttgcccacgcttcactngaaagcaacaaaaaaatatgatggctcatggacaggcaccttccatccacanactttagttcctgccacagctgtggcttatatttcaagtgttcactgatagcatcttcacagctgaagacccttgtcagaaggtgttcacgcttcttttcttcaacacatgtgtgtatctcacccaaaccatgatactctgcgcctctttctggcgagctctatatgctgattccgatcgtctcgaatagcatgaatttcccttcaaataatataggaagccatacttctgcacgctcctcaatcaattaattgatgtttcccatcatcggctgatcggaatattggcattgcggcttcatactgaaactcattggtcctcattctttcctgtgaagcttatggatcacaatt

SEQ ID NO: 39668 - DNA, 360 bp, Oryza sativa
ggcatcgccatgcgcacactgctttaatagatgtgcttaagtccctaaaagacacatggtttcaccacacctggaaatatatggcatatgtggtgtaaaatccgagtaaataaactcataaaggatttaccaaccgcctagaaaatgaccacaatatataatcagcctaagccataatattggtcaataaaaatgcacacttacgtggcgaaaagcaatgatattgtatccaatcaattgcttaaaaacccaaacagcaccttgacttatatataaaaaagtcagcgggacagctatataaagctttactggtttttgggaaacctaaaaaccccccccccttttttttttttttttttt

SEQ ID NO: 39669 - DNA, 483 bp, Oryza sativa
  unsure (1)..(483): unsure at all n locations
tacaccacttatgtaactgttaattgatgctcgctgctaaattggttgtgaattttgctttataatccatatcaactgtacgaattttcctgaactatccatatcttaattagatgtaattcaagactccgtacatgccaaaactaccttttgtttttcgccgttctattgcaagaatccactgatgcanatcttgatacagatctgaccttcataatccanaagaagaggttttagttcaagcgggcgataatggggatatccaaggtgattggcatcgctggaacatctcttctggtcacgtctggtggtctgtggaagattggcttaagaattgtcgcggttcctttcctagccaccagtacaattgcctatatcatcgctgttgcatcccacaattccatcaacataccttggatgttgggaaagaattcanaggggaggggttccaattggtcaagtgtactntntggtcctttcttg

SEQ ID NO: 39670 - DNA, 260 bp, Oryza sativa
ccagcttgacctggccatttgggcattaagaatccaaggtgtgccaaattttaatctttggtataagatggacccatgtgaaacctgagacctttagcatggaaagagcggcctcttcctctattggcgagcttgggccattataaaactccttggtaagtatcatgtgaggccctggtctgtgaaatggcgtaaactgacgagaacgaataaattgatattattaagctggaggggttatttatatttttaaacttttt

SEQ ID NO: 39671 - DNA, 353 bp, Oryza sativa
  unsure (1)..(353): unsure at all n locations
ggacctataaaactcagctgcgtcgttggtctgagccaacggacgtggtgcctatgcatcacatcagcccactcgcgttagaggaacgaccccttgacggtcgtgacataggctcaaactgacctgcctgtaacacataccgacgctgactctgtgccactcgctcagatggggccagcgatcacaagagcttgtattgtatactcacgcagcccgactgtgacatgagacagctaagatggatgtaacnggccaaaggctatgacacggcaagacgctatactgcaccatacgcctgtgcatgatganacgctcgtaccaggacaagctgatgcaatgcatcggacagacga

SEQ ID NO: 39672 - DNA, 387 bp, Oryza sativa
  unsure (1)..(387): unsure at all n locations
caagctcgactgtacgaatatatattttatataagcttatatgccactgattgctaagtaaaagagataagaactaatgcaacaaaccggaaccaactaaacaaactcgagataagatcctattgccaagccgtactgtagcgcgtccgaatcaccccattcatgctgccgttgcgcgatctgattgatcgccctcatcacgcgccgccgttcccgtgcatcccgcattcatacgcctacgatgatatccaattctgaccatgataccttaaccttaaactctgctaaaaaaaacctagcatacttatatattttcgaactgaaggagtatttgttaagtttatttctcaaaataatntaaaaatttttttgtaaaaaacccccccc

SEQ ID NO: 39673 - DNA, 453 bp, Oryza sativa
tctgtctcttctcacgaggcataatgaccactgcaacatgaataacaagggtggagtgcactggttaaatgaaacagtagcaaatcaaggttactggctggctggacagagaccggaaagttctggcccagaacaccgtaacttccggcctgcaaaactgaagaacagaggaattaaccaggccattgcatttgacataatcctattagatcggcaatctacaaggtagcaagaacaattccatccaaaacgttttcttcctacgttcacatatttagagatcggcgctaaaatatgatgaaccaaaggagaagatctaaagtgctaccttgatagggaaaatctcaaatctatcgcgggatgaaccatctatccacctatgtcgttgattccacggagaggaatcaatattccaccgctgcaatatataatcgccgagaggagcactgcttc

SEQ ID NO: 39674 - DNA, 353 bp, Oryza sativa
gacggagatcgtgtgagggctttctctgattgggagtatttcaaaatggcgtcaatgaaaaccacaacaaacttatccaagtattccatgaacactttgttcattaagttcatgaaaaaggcaggtgcattggttaaaccgaacgacattcccgtgaatttatacagtccgtatcgcgtggagaatgcgggctttggaatatcttcttcacgaatacgtaattggtgatatccggaacgaagatcgatcttggagaatacagtggcacctttaagctgatcgaacagatcatcgatccggggaagagggtacttttgtttttttttttgggggggaaaaatttgggggggggg

SEQ ID NO: 39675 - DNA, 485 bp, Oryza sativa
  unsure (1)..(485): unsure at all n locations
ttggcgggtagcggctgggccatggatgacggcaaaagttggcatggccagtttggtggtgagcagctacacggagatcgccgngcaggcgaggtgacgcatgcgcgtgcttacggtcggccacgacgcgcagcgcgtggaaacgaaggtggtggcgggatttaaaggcggcggcgaatatcgaatcgcggcgacggcacatatcgcgggcgagaggagagagagagagagagatatagacgcgttctctctctcggcagcacacgcggctcacgtgagaaggaacgtgctgagggaaaaagttggccgagcaagggagaaacaaccaaatcgaccaagagggaggcaaaatagacttttaccgagtgaactaattcggagggttttggagtttggaattggatttcgagtttgaattangcatttgcacccataggttcaaggagggagtcaggaagggattcataggggaatntgatactttc

SEQ ID NO: 39676 - DNA, 488 bp, Oryza sativa
  unsure (1)..(488): unsure at all n locations
ntgtgcgcgccgtgccggccgcgcgcccgcgcccatcgttctctctgaaccgggcagcttagccagcgagccatccttggaaccgacgtgattgccaaccggcaaccgcgcctgcggccgcaatcggccgcgggggtagcgcgcggtgcggggagacgacaccacggctcacgacaaggcgaggctttttttccgcgcaggttttcgccgggcgcgcaccgcgaaatgtcaggccatatgcagcgatacaggcgggggctgatggcccagcggcagcgagcgaggcgtggaccatggaccacgccgcgggagcaatctcggtcgacttgagccgagcttagttctaaatttttttttaaaactttcaactntntcatcacatcaaaattnttctacacacataaacttttaactnttccgtcacatcatttcaattctaaccaaactntcannattttttctttctcgagtactagctacttagctag

SEQ ID NO: 39677 - DNA, 313 bp, Oryza sativa
ttttatgatgacgaaccggtctggactctcggtaccacggaatccccaataaaaacgatatatatcgaaccggagaacccacagtgtggttcaggggaccggcttctgtggttccagcgaacgtgggggcccaccgcctgtctcccctagatcatgagttggactggcccggcggcctatgcagggggaagcatggctccttttcatgggccgaataagagatacagtcctggtggggtgaactgcggcacattggccgcgctcgctgctgtggtggccctgttgaagagctttgggttatgtaaaaaatttt

SEQ ID NO: 39678 - DNA, 503 bp, Oryza sativa
  unsure (1)..(503): unsure at all n locations
cggacctataaaactcagctgaatgacatagggaccatgtagccaaagactaatgattccactcatcctgtccggctaaaatgatgtacgtggaccgtctttgccgcaagcacgaagaanacattattcttatttttctggagccaacgtgaacccttgttcccaggcacatatttcctcgactgaaaagttttgctattttttttcaaattaagacgaaataactatcaaccatgtacaatattccagatcagtccaaaaagcaatcacccctaaagtaataacccaaaacactacggctccggctggttcagctgcgtatcgatcataatcgaaagtgatattttctttcanagttngattatttcttttaacaaaaagataacttgctccgaacacccctgaatccctgataatagaagagtcagaagcagcgagatgcgaggaatgctgtcgtgggaacctatgacgatgtanacgatcgagagaaaatatacagtgca

SEQ ID NO: 39679 - DNA, 298 bp, Oryza sativa
agggttgactaccactagcctcctcctcctggttccccttcacatccctttacacgtgcccctagtagttcccctacacatcccttttcacgttcccttcctcgttcaagaactggataggatcctcgatcccctttttttcattccagtactggctgcttccctccgcgaatgtatcggacaatatttggtcctcatcgcggtcaaccatctgttgatacaagaaacatctgctaagtcacgagacatttatgttttaacaatctaagtcaagtatgctaagtggtaatgttgaaca

SEQ ID NO: 39680 - DNA, 459 bp, Oryza sativa
  unsure (1)..(459): unsure at all n locations
ctattacggaacttaaaactcagctactgttgaccctttaagatgcattgtccaactcctataaagttgagtaattgcggtataaaaggatcntaaggattgggcacttaatcacgcgcactttggactaagcaaaaagtgcctaagtccctaaaagaacgtgacaggccacacctganaatatgggctgcagacatattatgcctaggccaaaaaatatgccttcgacaccctttaaaggatgacgcatataacatgctcccgagtaatacatcttacgggtgatatagaccaagtgtagctcatatcaatagcttctgatctgaatgattatcccttatgggatactccaaaatagatataataattgaatcccgactggcgcaagtattcgggtgataacccttactgagaataataaatagtccagtcttcgagcatagaacataatctcagaac

SEQ ID NO: 39681 - DNA, 323 bp, Oryza sativa
cactccaccttatatccattatgaaatgtatatgggttcctgaaaaaaggctgcagtggatacagacgatattttcttcggcacattcttcaatactacgtaatggggtacctggaaacttttttaaatgcaaaaggggggttaggcaaagagatccactctcaccactgctttctgttcttggtgttgaattgctgcaaagaatagataacaaagcttgctccttaggtctgttgaccaagccaattaatgaacttgatgagaagggtttcccaatcatacaatatgttgatgacactttaattcttattaaagtctttttt

SEQ ID NO: 39682 - DNA, 469 bp, Oryza sativa
  unsure (1)..(469): unsure at all n locations
ntatggtagcacgacatgttggttacctattggtgaccacctgaaatgatgatgagcagaaacaaaccaactctgcttcaccaattcctacacctataaaaaaagtaaattacttatgaaaagatcacatcatttagtatgtgtccaaattgtccagcacactatcgcacagcctatagcttaacaatatgtcacttacttaaaaagcaagctgccctgctgaaagctcagaatgagaaatggcactcagcagcagcaccaatagaatgttaaaaagagttaatatataagcaaaggcctaatcaaagtgcataattagcccatttggaaatgggctgaacaaataacttgtactatataaaataaatatgtagtttgttcgaaaggggaaaaaattgtcttgcaagcaactgtgccactgtcctagccatcatataaactacatcatactatgttntcaacttaattt

SEQ ID NO: 39683 - DNA, 360 bp, Oryza sativa
ttgacagcttcattgacatctcaccttatgaaaggtctcctgagcagtttcttccccccccccctcaccccccaaatatccacatttagcatatttattttctttccaatctattctaatataaaaaaggaggagttgcccccctccatcctacgtgctaaatcatccgaattaatttataccgtccatccacgcgcaagatttctccacagcacaatttcaccgccaaggatttcacgcgcgaagacttcgctccttctcctccacccgcggatgcaaaaacattgctttttctatttagcttattcttccttccccgccggttgggtgtaaatatttttttttggggggcaaaaaaaa

SEQ ID NO: 39684 - DNA, 449 bp, Oryza sativa
  unsure (1)..(449): unsure at all n locations
tgttnttgacctcatgttctataaccgaatatgtgaaaattaatataaacaaatataaaatgtatgtcaaaatattnttgtcattatgaaatattgacactattaatacttctgtgatactgcaacaaaaaaaaatttgcaagcaaaactaatgcaatacatgaaatagcgataataattattttgttaattgttttcactaaatattattttccattacatatgtgtttctaaaacagaagataatgcattacaattatttaaagtacaaagattaattacaattatttcaaaaaattattgttttctataataaattaagtggataaaacgtaataagcaaatatatgatntacaattaataaaaattctaataatcatatatacttagcatatgaatgatattattaaattggtaaaaactctaattaatatatgtatatacatat

SEQ ID NO: 39685 - DNA, 404 bp, Oryza sativa
  unsure (1)..(404): unsure at all n locations
ctgcagcttgggcaccccttgcctctctttgtttacggtttgctaatttatattcgcaagtttttgctctcaaaactttcatatttggtaatcatcagaatgtatcgagatttgtgcatgagtgaaaaaactgatagaaagaaattttcatgcatgtcatacgtaagatcttcgtactaactaaccaaaccatagttgaatgcaagttttatataagttatatcgtaggtacagtataattacagtgcagttatataatgtaattatattttaatcataatatagatatatgggaaagttttttactgaaataacttgtggcagttcccaataaaatactgatgtggcttgggggctatattaatttccttatttttaaaagnggggggggaaaaatttttttt

SEQ ID NO: 39686 - DNA, 387 bp, Oryza sativa
attagaagttttgtggtttcatgttcgagaaagtgggttgatatttgtgcgataaaacaaatggataaacatatcattgtttcatcgtttatctcactcatttttatccctagctactgcaatcaaatgaatagggagtaaaaatcttcctaagaaaagaggtgcaactgggaagctctgctcccgccaaaaaaaatactgggaagctactgcaatcagaatgaactgtggagttaaagatctcccaaaaaaagagaggcaacttggaagttgaatgcatgctatataggaagaattgctgtcttgacaatcgaaccatatattgagcagaatacaacgcccgctatctttcatttatgattattatattgaattatcgacgtaata

SEQ ID NO: 39687 - DNA, 416 bp, Oryza sativa
  unsure (1)..(416): unsure at all n locations
gcaagctngaaagacctggatgtaagaaaacagagcccagggcatatgtgcaacgaaaataacgacaaaataccgaacgcccaaggacctggccagaattcgcaaaaaaaattggaccatttctcgaattgtggcgtgcatccttgcgcaggggccatgctaatcttctctggatcgctccaattttatcggatgtctccgaagagacaagctgactacagcgcgcgggtttataagctggttccatcggctttcggtttccgatgtggtactaaacatcccccgcaacgccaccgcgcaaaccatcggatccccatncaacggactatagtgggtagcagcgccacccgcgcggtacggggccgcgtagggggcctttggggcccacaaaacaccccccccccttcttttttttt

SEQ ID NO: 39688 - DNA, 469 bp, Oryza sativa
cttgttatctatctgggtattaaatcagtatatgtctgtgttgtttcaacttccaagggacatacagatcttgtttatttgtcgactgagaaggtatacgaagccaagcataataagttacagactcttcaactgtgagctgtggggaatgtatgtctgctagctcacagtaacctaagattctaacaaatggttctagcaccttgggatatccacctattcttatgtccccttcaatatatcctcctgttttccttcctgctaatacatctagcagaggtgtcttcccggctccactgacacccattagtgcagaaagaacaccgagacgcaatgcaccagttatgttagtaagtaattgaagtctttttgctcatagccttgttcagcattccctaaagagagtacattcttacatcctttatcttcaatatgaccacacgagaacacataactgtaaaatacatac

SEQ ID NO: 39689 - DNA, 482 bp, Oryza sativa
  unsure (1)..(482): unsure at all n locations
ngagagactggttcaggagagatttcaggagacccgatatgtatggcctggcttccttnggnttgtgatgatgggagctttggactgaagttgaaggctctcaatgacaatcatcggggtatgatttatccattctctaatactgttgttttttcagatgcataaaacaaatacctagttgacaaagggtgttctgaaatcatttgatacactgaatctactgatggatatattgaccatttgaatcctatagaatgttggatgccggtcggttccgtatttcctttgctgtacctgttattcggcatattgctcctagactccaccgacaatgtatttatgtcggcatttcttttgtcatttacggtggaaaataaaccagggattctagttcttacacttctgtcatgaaaaataacttatgcacatgcctaacagtatttctttggtgggtagtactagatatatgagtaaaatgcatg

SEQ ID NO: 39690 - DNA, 356 bp, Oryza sativa
tggaaaacttcagttccttacaagaatcgacattctgataacagtcttaatggtagctgccaaaggagatcttcaagattccgacgatagcagaggttgggttctcattcaacaatctcagtggagaacttcctacagaagtagggtatgccaagcaactccgcaagttgcatctctcatctaataatctgtcgggagatattcctaatactttgggtaactgtgaaaatttgcaagaagtggtgctagaccagaataattttggtggaagtattcctgcttcgcttggcaaattaattagcctgaaatctctcaacctgtcacacaatatattaaatggttcaataccagtgtca

SEQ ID NO: 39691 - DNA, 495 bp, Oryza sativa
  unsure (1)..(495): unsure at all n locations
tactaagctggacagagcgatgcctgcagttcaaggtggatcgttatcggaacagaaacactgaaactttagttgcagattttggtgagatgcaattgggagggtggctccagtggactctggattntggtggattattctactccgggcatatacaaagtatacggcagatactagtttggcagaatcaccagagtgtcagaactgcatgaggctgatactgaacctatgcttatctgagggatttgataccttcccaactctgctctgcacagatggctgctcaatgatagatcgtcgaatggtatgagctttcaccttgatttgatttatttcttgacatgtatcattaanaacagtacagttcagttgatgtggcaacaaagaagctgaatgtttctgctntttcttcttagaaccaagcaagttcttgtttttcaaaacatttttttaataaaacgggcagaaatctgatattcaaagcacaatgtccgg

SEQ ID NO: 39692 - DNA, 383 bp, Oryza sativa
  unsure (1)..(383): unsure at all n locations
agctgcacttgccagtttcattctctttttaagttgtgggactgcgagaactcattcattcacctaagacaacctatctctggctcataatctttcttcttatcactctcaaattgcatgaggtatgttggaatacatccaattgggagggtaccacgaacaactagtgtcttggctccaagtccgatcaattcctgcgaactcaactntattgcattacaagctatataatattatattgcttcgtgaaacaggagctcaaggtatataaaaagatgcacgcacattactcacggtgattgtaaaagaaattttggcaataacactaggagtagaagctgcgaatctttntttttccaaaaaaaaaattttggggggggggg

SEQ ID NO: 39693 - DNA, 438 bp, Oryza sativa
  unsure (1)..(438): unsure at all n locations
tgacctaagaagaacccctcaatcgaattaatacaagaattaatgggatgaatttcatggaaaaatagttgttggggccttcttttcatatttatcatgtcacatagcaacaatggtgccaaatgtcctccttcaaacaattgataccaaaggtcatcctcttaatttactctatgttcttacatcaattnttttttaattctagatgacacctcatttagtcccattgacactagttgcctaccttggggcttgccgaacaccccatagcatcgaagcacccccaacagaattgaggccagccagacgaccgagcaaagcttcctcaccgttcaatcgctgttggtttgcatcatgccggtcggnctgtccagctgcacgctcacgtacgggcacttgttcccattggtccaacgtacgatggtcgatgatggtaca

SEQ ID NO: 39694 - DNA, 384 bp, Oryza sativa
atttaacattcttgttgaacaaataaagctaatccgctacatttcatgattactgactgccaccacgaaagcccaatatatgcatctacacaggcaaagcccacaaaagcacactgtgagcagcataaaaagcccaaagatcaaagcccagctcacaaagcccataaaccctgcaatgcacacaaagcctatcccatatacaagggcaatacaaaaagcccaatcgtggtacttgtatattctggccttgacacatgcttaacgagcctgctaacagatccattaatacacccagttggttttgcgggtttttagcatccaccctttattatgcgatttaccaaaaaaccggggggaggggttcccctaaaaaagaaaaaaaaa

SEQ ID NO: 39695 - DNA, 415 bp, Oryza sativa
  unsure (1)..(415): unsure at all n locations
tctnctagtgcttcacatctactatcgtccaagcctatattgttgtatttcgctcatacgctcgagtttgaaacatgggattcacttcatcttatatatgcttaactggatatacacatgctgactattgtggttgcctaactgattggataagcacatatggaacatgttatttacttggtacatcattcgttgcatggacttctacgaaacaatctactgctgctgaatcagatgctgaatcagaatatgctgctgctgctagttagcgttcacagactcttcgactgttatctgactgtgatgcacatggacttacttgtgagagagtacctctctttcttgatgatacgagtgctatcattattgctgataatactgttcgctactcacgcacacagcatattgatattcg

SEQ ID NO: 39696 - DNA, 402 bp, Oryza sativa
agcttggtctacatttaagaagaaagggataataccctattttcggagttccaccaaacaagtatgtgagctggaacccacgacgcagcgagtatccattatcagaagaggttgatccaatcagaagaacggagaggtctaacctaatgttgtggacaagtccgaaatttaccttggtaatggcgattgtcatcgtctcgacattgctaatctatacaatagttgttccacccaagtaactgaagaagtgacaggcatgagttgaactgtaagagaaacattctacttgcatgtttgtactgtacatttgtttgtactagtattagacaactatagcgtttctattggcctgttgcttttttaaaattttggggggccccccaaaattttggggggcccccc

SEQ ID NO: 39697 - DNA, 477 bp, Oryza sativa
agcttccttaacctaactaattcatcttattgccacacaatgattgtgttggtttgttaaagatgaacagatcatgatgtcccaggcaacgtgatcttggagaagagaataaaaaaggacgtccattgaacggatcggacctaactgacgtaccctatagccgtagattagatcgtcctttgtcagaatttccacaagatagtgaattaaaaaattaggaacatatcattggggttgaaacacctttgaataattattggaaatttgaaacattaaggtgtgcaagctgacttctggatacaatgtgccatttcttctacttgtgtagattttatcacttgacgcgtgcatgttttagacaaagggagcttaggatgaacataagtccacataaaacaaggagttggtttgaataaatgacagctgttaccggtatttattttccaacatgagttgtgggctccaatcaagtcaatc

SEQ ID NO: 39698 - DNA, 339 bp, Oryza sativa
cgtgggcatttaaaggattaaggcatttgtgggtacagcgacacacctctgcagagtgtacgaattgtgatatgtcactccctgtttctgataaaaaccgtgaacgctgcaggaaaggaacctatcggaggttctaatacctgtggtgctttatatgcagtagattttataattacttaatatgagcttttactacactgttttatgaacatgcataaaattccttgttggattatgggattcggagatatatgtattatgcaagtggattatgggcatgtatttgttggattggctattaagttttgggggaggggaaaaaacccctctttttttttg

SEQ ID NO: 39699 - DNA, 488 bp, Oryza sativa
  unsure (1)..(488): unsure at all n locations
tgtcacanatgactaanatcatggaactcagattccaaccttttgaccaaaaccatagaatgcagacagaatactatactttttattggcagccagagaatgtctctcgtcaaataggaactactttttttttttgcttttggggcaaagaactattttttctttccgaacaaactaaagatatgcacatcatttcattactaagaagaagatacacataggaggagaatccagaaactccccaccctaaacacttaaaaacagaaaaacaagaccacttgagccgcaagggccatagacctagctctgtgaagctccggctaagctccaaagtatgccttcatttgttactgtttgcagcaccactgacaccctcagaattgagctattgaaagctcattcatgtgtttcacaatntcttggttacataactaaagaactattgcgtggttacataaccatganatagcagcagaacacctagcaac

SEQ ID NO: 39700 - DNA, 325 bp, Oryza sativa
tctctctcggcccctcccgggcccgtagcaccgccgtcacgtgcatttagccggcgccgccgccggccatctttcggccgtgtcgcgccggcgcgtccgccgtctacgacgcttgccagtgtcgccgttaggtgcgcacggaggtgaagaagctcggccgcccgtactccttcgccgccgaccaccggagctccggcaccgccttcctcctcgtcgccggccatcaccgttcgtcgatagacgttgtggtgaggaccattaggttcgtctcgatgttcactacaacaaaaccattgttttaagacgttccacttaagtcattctt

SEQ ID NO: 39701 - DNA, 454 bp, Oryza sativa
cctataaaactcaagctcacttgtctcctctaccgtggccgcgtatctttatctcttctgtgcctcctagagccggcgccgcgagcattatgtttgcgccgtcgccggccatcttctgtcgcgtcgcgccgccgactacgtcagaaccgccgctcgccgttgacgtctagatgagcgccgtcgtgtgaggaagctcggtcggaccttcttttgcgtcgtcgaccaccggagccccctcgacaccgtggacccgaaccgccgcgccgccttctctcgtcgacggccgtcgtcgtgcatccttcgactacgaggagagcaccaacgggttcgcctcgatgtcctctacgcgtagatggcctacagttgccgcgtcgactaccctagcgccggcgagctcgcaaacccgagccggtcgccgttgggtgacgtcagcgtgacctcatcgaaagggctg

SEQ ID NO: 39702 - DNA, 367 bp, Oryza sativa
  unsure (1)..(367): unsure at all n locations
ttttttgaacactctctcctccaggtcactgctttcaattactctattattgaccaanaatgccaaacttcaagaaaaagagggagaatttacgtgtaaaaagggagagtaatatgtttgggtgatctggttgtgattaatttaatcatctttcaaagtgatattagaagaaataatgtgttgatcgacctactaaacgttttatttacagcagggaaatatactgtatgagacaaacgtacataggagtaaaaagaaaaatatactaacacgtactacctccatctcatattacttgtctttttgagtttttgtttgtcaaattgtttttttggggaaaaaattatttcccacaacaatttttttt

SEQ ID NO: 39703 - DNA, 474 bp, Oryza sativa
  unsure (1)..(474): unsure at all n locations
nggacttctcttcatgcacaagatgtcagatggcttggatattggcttcaatgnccttacgttctcgccgttcggctatcttaacttggctttctccagtttgaattggtgttgctcaaggtaaacagctggagtaaggatatcggctaattcatctggaattaacgcttgaatctcatgcagccgagccctgattgagccacagtcaactaccaaactatctagtgatgatgcctctagccgatccaaaatacttcctagagctttcttcacatcatcagataaaggagccaatgctntgcttgtagtatcttcttctccttcatcaagatagtctctgatatcgaaagagaaaagatcagctaagacctgcagtgtcacgcccggaaattcactataatatccgaacttatttgtgcatataatcctcgtccaggaatcagccgaggtacacacactgactatttaatatac

SEQ ID NO: 39704 - DNA, 344 bp, Oryza sativa
ctcaattacctcgttcttcttatactcccagggtacatgatcaccctctgatataacaagtccagagaagtcctcatttgcccaatcagtggccattacatcaccttccttatcggatgatgcggcgtccttcgcttgctcattatccgaatcttccctttctatttcatcaacaattataccgactctctccctctcatccgccatgcccatggcctgctcctcccttggatgattctcctcattttgcatcgatggtccaacaacatcctctgcattgctaggaccctccacatcttcgggttttgggcaaattttttgggtgggaaaaaaaaaaaaaaaac

SEQ ID NO: 39705 - DNA, 457 bp, Oryza sativa
  unsure (1)..(457): unsure at all n locations
tctanagcacgatcacatccttggactaacaaatattcaatttgagaaagatagggtgtgtagcacatgtcaagccggaaacaaattggagcacatcaccccgtcaagaatgtgatgaccactacaagactattggagcttctccacatggacctcttcggaccaattgcttatctaagcattggaggtaacaaatatggtcttgttattgttgatgacttttcacgcttcacgtgggtgttctttttgcatgacaagagtgagacacaagctatcttcaagaagtttgcaagaagagcacaaaacgagttcgacctcaagatcaataaggctagatcctctaagttcgctcctaaagtggatgagggattcttgcttgggtatgggtcanatgaatacgcataccgcgttttcaacaaaacctccggtattggtgagatcgcgcgtgatgtgacat

SEQ ID NO: 39706 - DNA, 433 bp, Oryza sativa
  unsure (1)..(433): unsure at all n locations
agcttcgcaaacagagccttaccaccttacacggagtgcatcaagattcgttcacagggacgaagggcacaagcacaaacccctcgtccccgtctccaccgcgacagagagatcctcgcctcccgccgctaactctcggtctcgccatcgccaaaactcagattaggtcgggggccgcgccgctgctcaccggcggatggatcttgtgtcatctcgattcgcagccgacggcgtgttcgtcccggcccaggggaatagtttccagtcgtgcatcgtgcttggattttttttctttnttggggggagttgggagtttgatttagcggcggcctttcctggcattcgaatagagagatgcttgggccatnggcgttggagtttccagcctgggtgatctgaatgaacccaatctgcagaatgttctctccctttc

SEQ ID NO: 39707 - DNA, 432 bp, Oryza sativa
  unsure (1)..(432): unsure at all n locations
cagaaaacataagtctaaactattntaattccttctgctgngcagaaacaagagcaagttcaccaataccgaattccaatccccttgcacgatctgtcacggttgcaagaaggccacctgttcatccaaagcattttgtatgtttactatagtaccaaattatatatttacattaaggagataacattatcctactagatcctaagaaagcctacatcatttgttttcctggagttcaatcatattcagaagaaatttttatttattgcttctgatgtagtatttcttgcagagacaaacttcaatgcagttacactctgactggagcaatcacaaagagcaggagaaaagctcaagcaagggcagggggttcctcatatcattgctcacaaagcgtcggtggaggaacgatgagtcattgtacagctactt

SEQ ID NO: 39708 - DNA, 65 bp, Oryza sativa
tcccctatttaaaatgtaacgacctaccgctatgattagacgtaattagtactatacaaatctat

SEQ ID NO: 39709 - DNA, 416 bp, Oryza sativa
ttaagtcacctgcggcatgccagcttgagttcaaatacactactcgacgtatatgttatttgtttcatcccaatatcgttcgatataggaatggtaagcatcagaaatccagctgttagcccagctagaaaacagtggaaaacccctcttcgtatggcacccgtaatggttttatgtctcgcttaacgagggccctaagcagagtgttacgagggactggaatagcatcggtcgcagggtgtgactataatcgatcgaattgctgatcctcctgcatcgaggacaaggtgacaatagtggaccgtcctccaacgccttgatttcatttggggcctggggggctctccgctcaagatgatcataaccggcgcatacgtttgtctagtagagcaggcacaaaaataccacgtctgatt

SEQ ID NO: 39710 - DNA, 135 bp, Oryza sativa
attaaacatgtggattggcaactgtgtcgcggtctatgcgagggggtatgcctttacagtatggtagaagactactttcaatgaatacaactcataatgaaactcagaatgataactactctaggttcttatatt

SEQ ID NO: 39711 - DNA, 436 bp, Oryza sativa
  unsure (1)..(436): unsure at all n locations
agctntgctgatacacagaanatgatgcacaatggcttattcatgtttgcacacatgtactaattaatgctatgttgacagagaactcacgtacggaaagtacaaataaaaaacaaaatttgagaatgaagagcataaaaggaaaaatccaattttaccatgataaaatgagagaatcgatcaactntagaaacaaataaagaattttttcccaaggatcagtcatatagctatgtgagacaggacatgtcaattttcattaacacgtttctcanattgctaaacgatatattttgcgcaaaaacttgctttaaaaatatataatgaatctattttttaagtttataataattaanattcaattaattatacaacatatcatatttagtaaagcctaaaccaattaattatgcaccacatcaattccacatcatat

SEQ ID NO: 39712 - DNA, 137 bp, Oryza sativa
catccaacaatagtgatcgttcggttgagtctaacccggtgatgttgcaccgctccccacctgcacccaccataaaatctcgaattatcaatggctctgatggcaagaactacaatctctttgcacatatccatgtt

SEQ ID NO: 39713 - DNA, 432 bp, Oryza sativa
  unsure (1)..(432): unsure at all n locations
agcttggagctggcactgaattagctgacgaaccaaccatatgtttgtgcatgtgtactgaaacgaatattttttttacagtgtcactccttttacaggggtatttacatgtatgggagtacataacaaacttgtgatctttttcagctcctgtgaacttgtgttttatttcaacaaaagaaaggaagtcctatcagaaacactgcaaatataggcacaaatttgagcacatccaaagggacaggcaagcaaaataacagcctagtttgcttcgcgtagtttgttaatagtaaactgaacgctcgataaatacttttaaccttaccaaatttttggagaactagtacataaacatgattctgacatcaaactaaaattcaaaccaaanatcggtggcactgactagttcaacccaacaccactggacatcat

SEQ ID NO: 39714 - DNA, 435 bp, Oryza sativa
  unsure (1)..(435): unsure at all n locations
agcttgcacaatcatctcttcattttatgtggtaggtgcactggtaatggcgattcatcggcaacaactcttttacataacgttatatggtagaatgtaagaacatcttttggggacacaacggcaaccatgctccatgcattcagtagtcatccatcaggcaaatccgcttcctcgtgtgtggtttgcaagtgcccttcttatggagctatggtggtaaagaaaaaggaaggaagaagaatcttaccatatagggttatatgttactttttctttttcgacaaagaaagcataactagggttctatgttaccattgccttgaaaactaggttntctttatctgagctttacttttaaaatatgtttgtaagctttggtcaaatactactttgcaaatagactntcattttagatagtcagataagtatatatgg

SEQ ID NO: 39715 - DNA, 389 bp, Oryza sativa
agcttgcatgcatcaactttccaaatgaatatttgtcacgtcccgataaatttatcccgaaataaaattcattctctaaaacgaaaaatagaattaattaaaattcgaatgtggcccggagaatttttgttaaattctccttggtctaaaatgagcccttaaattttacttgaattttcagagcaccagaaataattattaagctacaaaaaccattatcagagtttattaaaaagaaaaactaaaaataaaccctctcctccctttgggccaagcgtgcctctctctccctcggcccgcggccgaagtccttctcaactccctctatattttcttctctctctctctcttgggccgccctccttccccttggcccagctaccttcccc

SEQ ID NO: 39716 - DNA, 415 bp, Oryza sativa
agcttttagtagcgaaagttcaaagatgcgcattctgtcggctgtggctgattccttgaaacatggaagtgtttttcacatttgttacaacccaaggtctgctgaataaaacatatagtgtttctttttgtgtggtccaactcaatacaatgtcattttctctggggcagttggactatatatccattcacatattgtaatcattggactttgtagggctactgcttctgagtacgttgttccatattggaagttcgtgaaaagcttcaaccatccagtttgtattggaatgaggttcaagtttcattttgagagtgaagatgttaatgagaggtttgcatttttcagttgaactaatcttttttgtttttgcataatacattcttgggtcttactatctgtgtcgaagcgttct

SEQ ID NO: 39717 - DNA, 92 bp, Oryza sativa
ccttttgacaggattcctttgcatatttatgataccacatttactaactctgatttttattttcccatcctattgtgagattccttggtatt

SEQ ID NO: 39718 - DNA, 424 bp, Oryza sativa
  unsure (1)..(424): unsure at all n locations
ctgcagcatgccagcttgagaagagtttgtcctcccaactggtcatattttccatctgggcgtttcaaatcaatatacattggttacatcctcaaccgcttatggctcaaagtacaaaccgtcactggtattatagtcagttgaaactgtctctgggttggaattcatcattataatttcatattccacctgataaatcattgcaaataaacaattaacccatcaggattaaataacaaatataggaacttttaacaaaacatacggtatttgatgatatagctttgataggcagacttgtttatttgaatcacaaaaatgttaataatttgtaaaaccaataagtggagacaaatgaagcagaaacaaaccttcttaanggccaattgaacatggcaacaaccataatcaaactcattaccct

SEQ ID NO: 39719 - DNA, 411 bp, Oryza sativa
  unsure (1)..(411): unsure at all n locations
agcttctcgagacggggacgatgatgtctgttgtatccgtggccggcgccggttgcctcgccggcgttgggccgaagtaaagatgcagtgtgatgttggcatggtacacgccggtgtactggtcgtcgatgaggttgccgaggtaaacggcgaaggtggagttgccggcggcgaagagggacacgtacctggtgacgtctttggagacggaccacacaatgccattgggcctcggctccgccgtgcagctgcggaggagctcgacgccgccgagccaaactccaaagatgcggtcgaactggacgccgcggcaggtggcgcgccactcgagaacagcaagcgagatggccggcgcgccgccgtccgccgcggcgaggcaatcnggcggngagtacgcggcggtgaccggtg

SEQ ID NO: 39720 - DNA, 418 bp, Oryza sativa
agcttctcaaagtcctcataatctctatagatcaactgggtggtcaattcatcatcaagacccgacagaaacttctcctgcctctcagcatcggtacgcacgtcctcaggggcgtagcgcgcgaggcggttgaactcatgcaaatactctataactgttctggttccttgttgcagggaacggaactctctcttcttttgtgccacaattccctcgggaacctgtgctttattgaaactatgacgaaactctgtccaagtaacctctgccccagctggacgggtcaccatgtagttgtcccaccaaatagaagcgggaccttgtagctggtgtgtagcaaaagcaaccttctcctgctcgttgcattgcaaaagaatcagcttcttcttaatggcatgaagccagtcgtgggcctcga

SEQ ID NO: 39721 - DNA, 423 bp, Oryza sativa
agcttataccgtgacagaactctgagatgagatgagtcaatactgaaaattaaaaagaataaatcatctacaagacctatagctaattggctaatcactaaacacctgctcttccttgcagcttgtctggctgcccacatgcagccacaacgcctgccgccgttcgccgcacttgcactccggcgccggatgtaacacccctccgagcggcccttgttgtttgccttcacgtcgccactcgattgccggaggtcagatgctaggaagggaatgagcagaggagatagtgttagacccttatctgacgtcaaccaggaagatgttggtgagaagactgaagctgctgaggaggaggcgccaacagagctgagtgctgaagctgagcaagaagcagagcaaagaggagaggaggacttcaagctc

SEQ ID NO: 39722 - DNA, 68 bp, Oryza sativa
acgcagcagcagtggccggcaggagagagacttttaatcacataccaaaaagcgcgcacacaaccccc

SEQ ID NO: 39723 - DNA, 425 bp, Oryza sativa
  unsure (1)..(425): unsure at all n locations
agcttaacccatcctnctctnctctactgccactcgctctctctcccgcagcgtcagccgctttgccgcactaacagcagtagctactactaccaagcaagcgtagacgacagcagcagcagcagcagcctgcgccgcgatcccacccacccggacgaggaggaggaggattttttccccctctctccccttcgctttcctggagcttgaaggatagggatcgaggaggaagaagacgaatcaagaagcaagcaaggttggttttgctaacctctcgctgtgcttggggtttgttttcttgattggcttcttcgatctgggtgacggngggtttcgtcgatcttgttggtggtggtggtgagggtttcttggtctcttctccggcggcggcggcggccatggcgatggctgggctggcttcgtgg

SEQ ID NO: 39724 - DNA, 74 bp, Oryza sativa
ttcttatgggtctcatacagcagggaactaaagagtgcagccttgagatggcctgattcatacaggatatttga

SEQ ID NO: 39725 - DNA, 80 bp, Oryza sativa
taaaggctatggaatgagggcacacgaacataggacgcatatgcacaagagtattttaacctccatgcgatgctgttttt

SEQ ID NO: 39726 - DNA, 174 bp, Oryza sativa
aaaattgttttcttaaacaatcatatacacaaacgttttttacacaaattatcacacttataagtctgacaaatgagtgtatctaattggccaataattttgttaacaaaaaagacacaccccattcactccatgctatgcttatgcctatcaaagtcttgtattgacaacaac

SEQ ID NO: 39727 - DNA, 426 bp, Oryza sativa
  unsure (1)..(426): unsure at all n locations
agcttagctagcttggaacccttataattcattatagttcanaattcagagattatacaggcgggcagacgctgtagaatttgaattcgaatgcagtgtaatatgcgtttcggatcagatatgctttggatattactgcaagttgcatgcatgctatgttattattccctaaattatcggattaatcttatcatgttcagtgaacgcgagattagaagcagcagcagcagcacaagtggaattagctactaggacgacttcggtatggagatcagacaagtgagtgatatgtgccggggcatgttgcaatcttttttttatcttttttcttttgccgggtcagccagcatgttgcaatctgaatttctgacggtgcatgtggagaggttggccattgatggcaggtcaaccttgcaagagattgac

SEQ ID NO: 39728 - DNA, 412 bp, Oryza sativa
  unsure (1)..(412): unsure at all n locations
agctngcaacagtagcaacaattatagcctgttgttctttctggaaatagatcaatatagtcagcggggaagcaaacaacaggtaagacatattatatagcctgctctctatgcgtcaagtagaaacaaaatgaaagtgaagtgcgtacatcaggataaccaatttggcatcatttacaccaagaggcctgataactaatatctaaaggagatatggacataaccacggcatggctaacatgctcctgtattaaactgaagcactatcacnagtttctttttgggctaggaactgaagaattatctattgagcatagactgaaaatacctttacccaactcttttgcctgcttagcattgcaccatcaagcaaagccatatcggtgcaggcctcttgtgcaagtattcgagc

SEQ ID NO: 39729 - DNA, 77 bp, Oryza sativa
catccccagttgcaatgctcacctactgcttatagaattaatagaaattacttgaaaccacctctgtatatgaatga

SEQ ID NO: 39730 - DNA, 335 bp, Oryza sativa
agcttattaaattgggactcaatattaccgaagtttggtactccaagcaacaacaacccaaaggcaaccgcttttaatccctctggatacactccttctgactcactttgaactctcgggttttatggcctaaactatgcaaactacacggatgtgtatccctatatatgctattcggcacgtataggccacaccacccatagtgaagggcacactttggtgttttttgcgctccagcttttgattatttgtgtatcagtacataaaaatggttcttgtctgagacatgggagcaaacaataaaacattaacataggttaaaaggggccacatac

SEQ ID NO: 39731 - DNA, 429 bp, Oryza sativa
agcttggaggtctcccaacgtggctgatcccctatgtctgggtgatccgggttagtaatgtcgtgtgggtaaagtgtaccccctctgcagaggttaacaaactgttcgataagccgtgcccactgtcatgggcggatgtgaggtgattcctagcgtagttttatttgactactgcttgtgaaaatgctgttgtggaaaggggttccgatgttggaaaatctgcagctgatgggatcagctacgcccgggtggccgtttggaagttgttggccctggtggccgtttgaaaagctgttggccgggtgccaaccttgtttcacaatctaaagactaatacattgcacatactccgaccggacgagacgcactgtctcatccgtgtcgtttaagaatcactcacttatgttgttcagaaaagagttcatataa

SEQ ID NO: 39732 - DNA, 302 bp, Oryza sativa
  unsure (1)..(302): unsure at all n locations
agcttcggattcggatacgccctgggtcttcttatttccacagncacgaggaggagaagacgacgcgccgccgccacaactcgcgttgcgtctgcgctctcctagcgccgtgcggaggtttagctaagggtttccgcttgcggcggcggcggccatggaaggggaggagaatggcctcttcctcgcccgcgcctacgacctccgctccaggatctccgcctgcgttgccgcggccggagccaaggagccgccggagggcgaaggcgaaggcggtgaggcggtgaagcggctgtgccatgggg

SEQ ID NO: 39733 - DNA, 422 bp, Oryza sativa
  unsure (1)..(422): unsure at all n locations
agcttatttcaaaataatgatcacaacatgacttgtctagattttnttttcttttggggaataaacttgtctagattttttctttagcaaacagtaaatgaaatgaataatttacctttactaattctctttgcttccctttaatcatctggagagctttagtaacggcaagatcccaggatgcctttgtggggacatgattaagatttantatggttgtttgcagggtggaattgttcactttaattggactggatgatatctgcagaaagcacaacaaggttactatcttccacagttccacatgactgacagaattggaagaaagagaaatgcataccttctgcaaagttgattggagctccttcacagcattntgccatgtccaagaaagtgaatcatcccatgcaatcgtcgttgcg

SEQ ID NO: 39734 - DNA, 82 bp, Oryza sativa
  unsure (1)..(82): unsure at all n locations
tatcttgcttgaagttgctgatggatcatcnaatggtctggaggtttggaaattatcgttcaaataaactagaattctgctt

SEQ ID NO: 39735 - DNA, 442 bp, Oryza sativa
agcttaatacaattcaagcgatatattatttatgttctaaaaaacaagaatattcttcagggatctgataagatatacctcacttatttggatttgtaacacgctgaaaacacatcgtaactatgtgtttttacggcaatgtgtacctttcactcgacaacggatgacaaaattcgattctcccgttatagagacaaatgattcgactccagatctttctgatctgctcgcacctcacttacagactgcaagagttacttgactggtcatctgcatgtaaaaatactatatatgtagtggaaattacgaaggaaaggtattgaattatgggttaatatatattgcacaccactgatatagtgaacacttagaaattactgttggatcttaaaaatatacgtctgagattcgtccatatcaccaagagtaaaaggtatattct

SEQ ID NO: 39736 - DNA, 437 bp, Oryza sativa
agcttctgctaagatccaactcgcgtgaatcatgacttttatttgctacagcctccactgcactgtcctcgagctgaggtttgatttgccgtaaagaaagaacttgcagcttcgtaaatttctgagcaagtgacatcactaagtcattcatgtgagcctggcacctgaaaacaacactctccatggttaaccaacagccttattgtccacagatgcaatcaaaattttgttcagaatgacgaggttttgcagtcactaaacaatatgtctgaataaagcatactcctaaaccatattgccaatacaaagttatctgatcatgcttcttaaactctcgtatgactgtcttagtatcaaaagtttcaatcaaacaagcatgtgcaccaccttgcaaaaaactagtaacacaacatatgatgtttatgactcaatgtgac

SEQ ID NO: 39737 - DNA, 429 bp, Oryza sativa
  unsure (1)..(429): unsure at all n locations
agcttgtaactcgaatgatggcaaacttgaaattgttgtatctcttgactacactaaaaaggtcttgcgcgctacgccgcgcgggtgtaatagacgtgtctaaaagagcctaagacgcatgttattggagcttactgaaagtgttatatttagctggcaatttagcctgtgtgggacaacagaacaagtagctcatttcaagctgtaatgagcttgattggttntatgtttaaatttaggctcttatagacgtactgctatgatttaaggatgtacacctcctgttagattcaggcactcagtaagtaagcatgttctcatgcttagattacatacagtctgttggaggtgcattatatccttacagagtgatgtgccatgctgggatatatagcatggaagaatcaatacatgtagtaactatatcgc

SEQ ID NO: 39738 - DNA, 433 bp, Oryza sativa
  unsure (1)..(433): unsure at all n locations
agctttgtcatgaatctgaggggcttatattacatgtatgattcttgnggcctggttgtacctttcaaaactagaaaaactattacaaagaagttatcccttcaacttttttcctgattctgatgggtttatatcataagtatggttgtcatatgtcttgtttgccactttgcactctaactgtgatgattttgcattcttctagtttctcttatgcaacattggaactactgccatgttgccttgtacaatcaactagatatttagtgatgtttatgccctctgttcttaaatctagtgtgttgatcctgccacaaatgcgtgttttggaaactgacagtccacaaaacataacttataccatgtttatctatttttatatatttgtaaatccttattcaattntatggtaaaatacttttgattggagagt

SEQ ID NO: 39739 - DNA, 106 bp, Oryza sativa
tctggtttggagttgccatatatcttttcctattcagttctgaactagtggtacagcgaatcagcaaccttatacatcttctttctttgctttgaatgactgtggg

SEQ ID NO: 39740 - DNA, 428 bp, Oryza sativa
  unsure (1)..(428): unsure at all n locations
gcttgaaacttgggatgaatgcaaaatactaatgattaaaagattcgtgttttcatactatagacgtgctctccttgagaaatgggaacatctaaaacaaggtgacaaaactgttagggagtactttcatgattntaaaatttgtatcacttatagtggtttacaagaatctaatgagaacacaatgactagatttttcagagggcttaatttcaatattcaggctgggcttgttaatgtgacatataatcatataagccaattgttcatgcttgcttgcattgttgagcgcaaaattttggagaatccaatggagcaacaagatatgcttgtgcctcctatcactgatgttttgcaggaagttcagaanagtctccaaaatgagaagaacgatatgtttgagatgtcacttccatcactcgcgaatg

SEQ ID NO: 39741 - DNA, 79 bp, Oryza sativa
agaatatacacgctcctatcaactactaggtactggcagctcaaatctacacacactctagcttttaacaagctcttac

SEQ ID NO: 39742 - DNA, 408 bp, Oryza sativa
agcttaccggcataaacaacctttcttctctccggttattccactccaccgtctgctgcgggaaaaattattcataatttaacgctacagaaaaaaacatcaagccaattgtatctaatcactccaagaatcccacctcggaggtcaccatggagatggagatcgacaagcctactgcagccatttcaattttatggatgctaccaaaacttaaggtaccaacatcaacacgacagtcgctactcgctacttcaataaatttgatgactgcttcccttattcagcctgctttttcttcaccgcccttaatttctttggcaactcaaacatgttgtcgatctacaccatgacacggcgtagacgccaaattacttcttcaacatgcatctcgtggaagaagccatcttc

SEQ ID NO: 39743 - DNA, 431 bp, Oryza sativa
agcttaccccagcaatggagatgagcattgtttttctctgtgcaaggacgcccggccaaaactgcagccgttgcggacgacagcggcggcttgccgccgatggctatgacaagtcccgtgacctgaataacggtggggacgagcggcgtggataagcgacgcgacgggcgtggcatctaaagtggatggtggagaagcgggcacggcgccgcgacggacggcggctgcgaccggcgaacgggaacgcggtgacggcgatgagccgcgcgcgggcttgctgctatgagacgaagatgacgactgactgctgctgctggatgaagacgccgagcgatggtggacgaggatgaatgacgacaacgatggctcgccggcgatttggcagctagggtttggggagaggctctgatatcatgtgaattctagaatga

SEQ ID NO: 39744 - DNA, 54 bp, Oryza sativa
agcaccatcagcgacgaaagattatgttctcaaaagaacaacactgcaaagacc

SEQ ID NO: 39745 - DNA, 433 bp, Oryza sativa
  unsure (1)..(433): unsure at all n locations
agcttcaccaaaattatagggatttctttcttcatttgaaccagcacatccttgttaagagttctgctgcacaatttcctaaaaaacatccccaactcagctattgcttcataaatatcactgtccagaaatcctctcatggcagcgggcaaaattctttgcaaaagaatgtgacaatcatgtgttttcagcccctgtaccgttgttccctcagcatttaaacatcttgagatgttggaagcaaatccatctggaaacttgacctcttgtaaaaaagcacaaaaagccttcttctgttcagtagacaaggtatatctagcatgaggcatctctccatcctctctaaattgcagctcctttttaatacccaaatctttcaaatcaagcctagctntagctgtgtcttttgtcttgccctttatattgagaattg

SEQ ID NO: 39746 - DNA, 151 bp, Oryza sativa
attcagattattgagataactatggtgaaaccccgcgcattgctgcgggaatttagtattattacaattaaaaagaatacgtgtaagatatgctatgatagctgaatacaccagatttagtgaattaatgtggttcatggataattaaatt

SEQ ID NO: 39747 - DNA, 427 bp, Oryza sativa
  unsure (1)..(427): unsure at all n locations
agctttcctaatgttacggtctttaaataatgattttctacaatataaagataaaatatatttacttcataaatataaatatattttgttaaattaagatatataataaatatccaatcaatgttctgtaaaacatcttataaatatatctattatctatcaactatatatactaaaattacgttaaacttactacgaactctcttacgccgctatgtgtctatcgaataaattagagaaatcctagaaatttattatatactaaaagtatattaaacatcctacaaatactcttacgtcgtcacgccatgctataataaattagagaaatcctagaaattcagagaaaaaagaanagcatctacttaaattggtggacccgttattntaaatattagtttagaactattaaaaatcccatgctgct

SEQ ID NO: 39748 - DNA, 98 bp, Oryza sativa
ttacatctcctgttgggggtgccgacccaaagcgactatctgctttatgactgcgacagaccggtgctagctagcaaatatgaagataatatgctggc

SEQ ID NO: 39749 - DNA, 430 bp, Oryza sativa
  unsure (1)..(430): unsure at all n locations
agcttaagntcattgattatttattactagctcatgtatttnatacaggtgaagaagtagagaagctaggagaaacactgccggccgcaaagtagttttttaatatagtattttatcgtttcatattataagtcattttaactttttctaaattatattttttactaaatttataaaaagtatagcaatatttttaacacaaaacaaataaactatcaaaatatattcgatgttgggtgtaatgaaactaatttgatgctatataagtattgctatattttttttaaacttgattaaatttttaagaagtttgacttaaaaaaaagttaacatgacttataataaaaaacgaatggagtgttagaatctctatctccagctatactgatgtgatctaacatatcgagaaagctaaaatagtcgccatcac

SEQ ID NO: 39750 - DNA, 424 bp, Oryza sativa
agcttgtgtggattggtgatgcggagattggttttctttgcttggtcaagaagaagaaaaggttggagcttttgagcgagaggttatggggggatgaagaagaggggtggttatgccattgcgtgtggggcccacgcaacagtgggatgcattggctcggtctactgccggctctgaatttttctattgcaaaattagttttgttcagaggcccctgtgttaggggggaatttgtaactttgtctcaagctcttgtgaatctcttgtttttctttcagtgttaaattctttcatcaggagatctatgaagagatttctttcaccaggagattgatcaaatttggttagaagtttattgtcttgattggattcagatgatatcacgttccagcatgtcaccgtttgtcataagtttatacaataa

SEQ ID NO: 39751 - DNA, 427 bp, Oryza sativa
  unsure (1)..(427): unsure at all n locations
agcttaaaaaaaatatatactagtaaaaatgcatgtgcgttgnaacatgtgaagacaattatcatgattgataaaaactatgtcaatttgaactacaaaataaaataagacaaacaaaataaggtcagaaatcatatacataacattaaacccggcgccaagcgtccaagcaaaaaattctacagaccgccatgaagatttaagtggccgaccgtttgaaattttaatgagggtagttacaagaacattcggctatttagcatgtggccgacgggatatatcagtgagtgagagttataagataccactcggaaatggttataagtggtcgacggggtatattagtaacctagagggttaatttaactctcgcanattattattagtggccgacggcgtatattaataaccgaggggtttaatttaa

SEQ ID NO: 39752 - DNA, 138 bp, Oryza sativa
gtgcaaccgtgcaagaaacattttgcaacatcagacaaaattcctggatttcatgttaacaaaacaccgataccagaaaaatagtcactcgctatgccttcatgaattgccaggtgaacttgaactggcccctggttt

SEQ ID NO: 39753 - DNA, 416 bp, Oryza sativa
  unsure (1)..(416): unsure at all n locations
agcttcggagacattgantttgcgtgtttttatgattattcaaatgatatgaaaaatcacaacaccacgcaaaaacagatgaatccccacgacaacacgcaaaatagagaaaatttgatctatagcacaagaaacaccccgattactaagtaatagcaaaaaaaaaaaacaatcccactttcgatgtatagcacaatccactaatttttctagcacttccgtcacatcggtgatgcgggattgagccgtggttggggagggaaaataccgagaatgccctttatcacacggtaatgagatggtttggctgaatcatgcgctctgtcctttattttcttgctgctttcttcctcgttcctgtgagcaggaagctcgatcgggcagctccagcaatagtggaagcagaacaacgcgcg

SEQ ID NO: 39754 - DNA, 436 bp, Oryza sativa
agcttggcagttggtcagttgggaccgttttccatcgttggatatggcaatgaacggtccaaacagatactacagtagttttaaactgtaaatgctacatgaacacgctttgtttatgctgtgtttagttccttccaaagttgaaagtttgggttgaaattggtatgatgtgactgaaaagttatgtgtgtatgacatgttgatgtgatgtaaaaagttgaaagtttggatctaaacatagccttaggtaagatctaaggacatcaatttttgatccaatgatggctataggactgtttaagttacagtagctataactatgtaggtgatcccaatccaagcatacggtactccgacaaatacaaacacgagtcataagtcaaaaacctaccgaacgtgcaccgcgcattatcttggatcaagcccaaccactaca

SEQ ID NO: 39755 - DNA, 112 bp, Oryza sativa
ttaaattccaatataatcattaagaggatacgtggttggattgaaatatgcctatcaaaaataaatttttcagactttgaaatatacctatcaaaagtagatggagggagta

SEQ ID NO: 39756 - DNA, 435 bp, Oryza sativa
  unsure (1)..(435): unsure at all n locations
agcttagcacaaatagtcagcttgtaagcttatcataaatgaaaaggtnaagaaaagaaaattatggtaaggaagacaacaaaaatcaaagtatgtaatgagctttagtttcagtacctcttctgcaaacaagggcttgtcacgttgacaagatccaccttcattccagtcaccaccttcaaaatgcctaggagattgagtgcggaagagtttcaccccattgggtctcattgctttgttcacaaatattatctgatggacattgtatatccatagaatgaggaagataggttgagtggcataacgacagaaaacaggaagttagtaatgttcaccttggatacatacgaaggctactaaggcccaacaatcaaataaaattcacaaggtggaaatatatatattcaagtaaaacaaaggtggaaaaatattttc

SEQ ID NO: 39757 - DNA, 433 bp, Oryza sativa
agcttttgacttagtaataaatgtgaatacaactatgtttgtttgatacctaccaagctccacatattaaaccttagagcagaaatcaaaaaggccactttggtgaggaattcatatttttacacttgagtgatcgagagaatcatttgaggaacttgattttcttttgaaaaatcattttaaaacttccggaataaaagttgaataaagattgagtgcttagtgctcaatttactattctatcttttaaccgctcaagacaagataaagtagtgtttcgcaggaatcacgtgtaaaggtaagccacagtgataaaattattcgatctaagagagaatacacataccttgcactggtacatttgaggatatacaatatagtagtagcttctgatcaacaaccaggtctttgttcccttttgtcctttactctg

SEQ ID NO: 39758 - DNA, 154 bp, Oryza sativa
caatgtgggcttattagtatgctcaagcttttccctaagcagggtatttatttggctggatcacgttgaggggtggataaaaattctgacacaatcaatgcgtgctgtatggattctcaaatcctctcctgtttaggtggtatgatgctaggca

SEQ ID NO: 39759 - DNA, 399 bp, Oryza sativa
  unsure (1)..(399): unsure at all n locations
ctgcagcttatgccatttcatacaatcgtggattttatgcctggcatacctgtactctnttttctattaacctttgtttggcaagccgctgtatattttcaatgaaatcttactactctgtctgccaaattgaatcatggtttcattctaaaaaaattcgaaaaatggataagagccgagaagtcttatattatgaaccttcgattctaaaattcaaattcttctacattgaatgtatagctgcagcaataaatttggatcagcctttctactccctgcatctacgttgagcaggtatctttaagtaaccgcacaatacctaacctaatttattgataagagtgcttattataaatcaattcttgcaatatttttcaaaaatgatttttgcattnttag

SEQ ID NO: 39760 - DNA, 117 bp, Oryza sativa
ttttttgtaccctaaagctgttaatttcactcttattggagtccttatgagcctggttaaccagttcctttctgaggagatttcgcctaattctgctcaccttaaggtattttctaa

SEQ ID NO: 39761 - DNA, 415 bp, Oryza sativa
agtcttccggtgacataaaagaggctattgattatctttatctaccgcaagtggtgggttgccattgtaatgataacaagtgctctgcacctatattcaaatgatacattgcctaatttctcttctgtatatgattcttgttatttcctctctttctttttcaaaacatgaaggattgatagaaaacgctgtggccgcatgtagaaaaattcatcatttcctacgaaattcatatgctctgtactttcagagactggtggtgttcaagttccaacgatgttagatacttttgcgtcatgctgctatactcatagttcgagggtacggaatacgtgatgatgaactgaaaataactgagcaaaagaaaatgataacgatgtaatatctggagaaagaatctgtcaagcatagcagc

SEQ ID NO: 39762 - DNA, 126 bp, Oryza sativa
cccgacatgtggtgtcggtgtggttgaatactaaatgaattgtgaaaaactcgccgctgcggcgggtgtgcctatgtgcactggcccgtattccataataatgaccgattcctggtggaactcatc

SEQ ID NO: 39763 - DNA, 393 bp, Oryza sativa
tagctcgtcgagctcatagtgaatggctcgttgtctgtctggagccaaactacgcagcttatgttgtacacgcttggcatcatgtcccaccatcagtttgtgcctaatcaccttcctggggaccccctgcatgtcagacggatgccaagcaaatacatctgcattgacaagtcggaaggagacgagcgccatttcctatttctcatgcattgacgccccgatcttgacagtcttgtcaaggttggcgccggagaatagaacgatcttggttgcaccatctggcttcggcgtcttgtttgttctgctcactttatgggtcgctcacctgggcggggggttggggtgtgctaacatgtcgagctccgttgtcgactgaccgtagcaccattcctg

SEQ ID NO: 39764 - DNA, 406 bp, Oryza sativa
  unsure (1)..(406): unsure at all n locations
tagctngcaatggcatcacaagctatatgttctttctttctcgtgcgaacgcccaaacagtaatactattctcttcgaggacgctatacactgcagtgcacgtcatttatttcgcagattaaaacgatagatactactacacacatgacgacgtgttgccccggctgtcaattatataagcttattaatttagtgctggccgggcagcttctccttgatcttggccatgaatcccttcttctcgccggcgttgccgtactccgcaccgtgcacgccggtgccggcgccggtcatcccggcgtggccctgctgcccgtacgcgccgccagtgttccccatcatctgctgctgctgagggttgttgcccttgttgacgccgggcagcttctccttgatcttctccttg

SEQ ID NO: 39765 - DNA, 429 bp, Oryza sativa
agcttcacaaagcgagggtgagtccgcgccgaatatgcgcgaagatgacatcctcacaaaggcgctcggaaccaaagaacattctggccgaactcggggaattggtagcgatgtgccctggaagcatggacttcctcaatacagctcccaatacaggaaacggaaagtctccaaagaagagagggacgctcgtttgaaagccgaacttaaggttgaggtcattcaagaactagaagctatcatgaatgcaagggtggaagaaagggttaacaaggtgctcgccgacatgaatataccccgagtcacaacacctgctgtgcaaccaactcctcgtatacaacacgacgcgagtccgtcacagcataggagtagttgtgcatccacagaggtgccggcccctggtctcccgatcgcaccactagctgcagt

SEQ ID NO: 39766 - DNA, 96 bp, Oryza sativa
ggactgcttgcggagcggatgggcgctggaatagctctgctcaatcggatcctgctggtgaaaacgagggactgccttgctcaactcatatagctc

SEQ ID NO: 39767 - DNA, 429 bp, Oryza sativa
  unsure (1)..(429): unsure at all n locations
agcttnctttaattgatccgactccatcaagaacacaacttctggcgacttgacgactcccatcgggtgattccagtactctaaagtcgatactgactcttagccgatgatgacttcggacttaccaaattttggcgttaacaatgttctatccatgacgtgcatggagacccacccaggttcatgaaaaaggcccccaaatatccatcatctaactctctgccaccgtacacgagaaaaataacatatgtaatttggatttcctatcgcaacacacgagcatctttgctattcttaaaagaaagagaaatgagagagatgaaaggaaatggttcacttgaggtcccttgtcgtcgagtttcaaaattgtccctgaactgaaataccagatataacagagccgtaatcttataaaaccaggtcacatta

SEQ ID NO: 39768 - DNA, 314 bp, Oryza sativa
  unsure (1)..(314): unsure at all n locations
agctacctgcataggacaagagatgtggtttctttatgtganaccacgccacttaagatcatgttctaatattatacggttcctgcataattcaatagatttgtgttcttaatgtgatattagcatcttaacttcaagttcttaatatatacggttgattgtatatatgactaaatattcctttacagatatgcgacatatcttccatagcataatgtccttgacaactttgtatatatctagatatatcatttaatcttcccaacatgctcatatggatagaggcgtgtgaatgtgcacatgtgtgtacggct

SEQ ID NO: 39769 - DNA, 435 bp, Oryza sativa
agcttgttgataagagttggtgatggaagatggtgatgatgtgcattgtgctccacactacactgattttctgtggatgggtctttgcaggcaagggtgaacctttctagggttgtagaaaataattgcatcgtgtacacatgtgtatatatggatgaatagtccatatggttgtatttagtttacatttaaatataactatttgggcattttttgaatgagaatgcatgacatttatatgaaaaccagtgcaacgtatggtactacactagcaaaagcttaaaataagacgtaagataatattgaagaggaacaaacagaacttcaaaaataaaaggaacacttccttgacgccggcctagttgtctaaatgttgtataagaatcatcatgtacattccaagaaaaatgatacgacaaattataataaaaattt

SEQ ID NO: 39770 - DNA, 421 bp, Oryza sativa
  unsure (1)..(421): unsure at all n locations
atcttattctgaacatgatggtgtatttcttttactagcctgaaggaagtagttnttttttaggattcttggtgaattggctccacaaacgagacaaagtatgttaatatgattacaattaggggggagtacgtgtagtaaggattagtaaatggtgttagtgtaagcgctcgtggggtttgggagaccgagagagatcgaggagggatcggggaaatcaaagggtatgtatgttgtttgccttttatctatctaatcgagccatatactaagatcaaggttagcagcgatcgagtactaattaattaccttttgttttctccactaatcaatgatgtatacataggacatgatgcatgagttggcatgtttcattgtgtatantttattactactaacaattgcatcggtggccatgcat

SEQ ID NO: 39771 - DNA, 122 bp, Oryza sativa
aacttcggtcctttgaaaataacattaacattccactctttaagcttctctgtaagcttgaaaatttactttgggcaggaaaccaccttaatgggcacgctttaatgggaaagctctgtaac

SEQ ID NO: 39772 - DNA, 429 bp, Oryza sativa
  unsure (1)..(429): unsure at all n locations
agcttaanaataaattgaactggagatcaattttttttttgtttaaaattctttcggggttcactcgttntcgtcgataacggagatgtaatcatgtctatgcatcgacaaaaccactccaaagctgttttcaagtaccgaattgctttggtaaccgcgtcgttattaaatgatccacaagcattacaagatctgttctaactacaaataaagaatacactggaggtggagtcgtcgcaacttcttcaatgacactagcaatggtcgcagtagagctgtagaggataagatttgagagcaaagagcaaatccattgttgtcaacttggctgcgcctgcgatcgatcgctggacgcacgacgagaatcactcaaccttcagttgagccaggaagcttcagccgcgtcaacccttagtcagaaagtagagc

SEQ ID NO: 39773 - DNA, 433 bp, Oryza sativa
  unsure (1)..(433): unsure at all n locations
agctttgttctgatatatgtttataccactactttgtatcaatacatttgtttaatgaatgagagaaagaccttttatacaaagagaaaaaaatccctgcaaatacataagtggcattattggtaataactttattcaagccgaattgttcccatctttttattgcaaacatcttttagtgcaaattataatcatccttgtttccccctgtatttgtttgcttctatttctggcacgtggcttatgccttgatcacttatgcttctagagagttgctagtgcccatggaagttcatcaacatcagaatcctctgacactgctgagtctcctgaagatgggaaaaggccgctccaaaagggtacatgagctacctttctttntcatcttggtttttaactacttatcaaaaggagttggtgtgctctacgcccc

SEQ ID NO: 39774 - DNA, 429 bp, Oryza sativa
  unsure (1)..(429): unsure at all n locations
agcttgtcnntactcgtcagcaacaatgttagatctctttatataggaaactaaattatccacggcgagggaggagacaagcaaattcatatgagggtggttctactaatttgttggacacccatgtatatgggtgtgaaacaattaaaaatggaataatttgtacattattattataatcgatataattagtttcgactgaaatatgattttctttctaaaaattattattattaccgtcaatggtagcgagacaaatcaaaacttttctgcaaaatcataaggtcactatgaatagtagcgccacaattttcgctatcgatttagtgcgatatgagtgaacaagcagcatatgactattgaccataatttgatttcaatatcaacagtttttgtgtaaatggtgatataaagggttgttgctacata

SEQ ID NO: 39775 - DNA, 62 bp, Oryza sativa
cggtctgtgattgaaaattgcttcggctcaaacatataacggtccttctagcacaaatggtt

SEQ ID NO: 39776 - DNA, 429 bp, Oryza sativa
  unsure (1)..(429): unsure at all n locations
ggctntagttgaggaaaaatccacaagataaatctttcccttgagaacacccttaaagactaccaaggaatcatcccttctaaatacggtcacatcaacatcggtaaaaagacaattgaatcccatggaacataattgagaaacagacaatagattgtaatttagagattttaccaagaggacgttggaaatggaaaggtcatttgaaattgcaatcttacccaatccaattacctttccctttccatcgtccccgaagatgatgttctcttgagaagtgccatttggatcaagagatgaaaacattgattcttctccggtcatatgattagtgcaaccactatcaatcacccaacttcttccaccggagacatattcctacaagagatcaatttctagntttaggtacccatacttgcttgggtcctc

SEQ ID NO: 39777 - DNA, 424 bp, Oryza sativa
agctctatggataaatattgaataccgggatgttgttttttattactactgcagacatatattttaagttattataaggcaactattattattataatggagtagcaccattgatgtggtgtgggagccatgactcatgagtgaagcactttactaatgaagtgcccacaaatatagcgcatgtgtaattgtgctttcaacaagaatttattgagattaggaatgtccgttgattttcgtctctttgagtatctgttagggtgcatatacgtgggtgtgtgagtgtggtgatgcatgtatagtaatacgtatacgtgcacatctgccatgtgatcgcaaaagaaatgttttactacctctcgtccaaaataattgtaattctatgctgtttagcatatattaagagttgagaagaaagactatt

SEQ ID NO: 39778 - DNA, 430 bp, Oryza sativa
  unsure (1)..(430): unsure at all n locations
agcttgcaatattaaggtgatgaacttaatgtctattgnttaaaatggtaaaggactgagtgcagatgattgagaccttgaatgagacaaacacaagacataagagataagctatgaaatcgtgacgctgatgacaagtccacagaaatgctcaaaactaagctaaataaattgaggtcccaattcatctcgctattttatcatctgctcccagttgttaccacagttcctagttttttgttgaagcagaggtttgtcagtctagagaatcgatttcaaattctgtacctgttgaagcacccctggcggccatgtgctctatgaaatggatctcatcttcatggctgctcacgaacttgttctggtttgattagtggcaatatgatttgcatcagaaatacattcacgaaaaaatgcctaaagaaatgca

SEQ ID NO: 39779 - DNA, 121 bp, Oryza sativa
cacaaaactttttttttgatgtgaacatgatgcctgatgatgcttggaaggaacttcacttctctttcctacacctgttttacttgcaaccgttcattcctcacatggcgttagttgcaca

SEQ ID NO: 39780 - DNA, 364 bp, Oryza sativa
  unsure (1)..(364): unsure at all n locations
gtttattcttattaatgtgatatgggttaaataaaataaaattcaccgngggagttcgcttggatatatatatttttagaaaatcatgagctgcagttcggtgtccgatcctctcaagttaacatgcgagtttttataccgatttcttatatgattccttctgtattaccaaaagtgaacaatcttaaaaactgactcaaataatatgcatatgtatttccaaaagccaacgaacttaaaaaccgactcatacacggatgacgtaccaaaataccggcaaaaacatcttcaattnttataatagtagagatataccctcttcgtttatattacaaatcactttngagttatttcaaagtcaaat

SEQ ID NO: 39781 - DNA, 122 bp, Oryza sativa
ttggcccttaccatggcctgatccacggctaagtcaagggatctaaggcgtggtgatgaaccttctattggattgggcaccctctttctgagccaatttgcaaagtgattcgatggaccacc

SEQ ID NO: 39782 - DNA, 442 bp, Oryza sativa
  unsure (1)..(442): unsure at all n locations
tcatctcgacccggatcttaagcaccgcagctgcagcttattgctacttttaacgctccagtctatatccaaattcattccgagtcaacgggaatcgtcaaaacaaagcagcgttattgctgaaattgaactttggacttgggccttggtaattgtaataaattggcccatgtcggaagtgtctctctccacctncacgaattaacacttaaccctagatctattttgctctataaatatctatgtacaccctctataacaattgggttttgtttacttgaatttttccaagtgccattcaccctgtctatagtcctcgctcgattagtcggcgactattgattcagagcccctaatagttggtgtgttgatttaccgggtcgattagatctaccacttcaatcgcaactattcctttatgcttaattatatattcgcaata

SEQ ID NO: 39783 - DNA, 115 bp, Oryza sativa
tgattgacaatggaagcttcactttggagcaagagcaactcatccaccgcatgctcaacttcaatgcatttttcggttgaatcgagagtcacaaagttgatggctgagagccaga

SEQ ID NO: 39784 - DNA, 425 bp, Oryza sativa
  unsure (1)..(425): unsure at all n locations
agcttaatgggctgntgcttttgagcccttatttgntttctgtcaggccaaggccgggtcatcctgcctctgagaagagagaccacaagtggttgaatttggcccctaggagagggaaaaggcaaagatactgatacatacatgacccccggtcggcgaggcgactcctactattcagtccagccgcgcggcgcgtgacggcggtcatcggtcaaagacacgaaccggaaccagtgtggtgaggcggacgtacgtacgggaacgggacgaccaacccctggctgctacgcgatccgcaataataattctcggacatgccaacaccataggcccaccggcccgcatgtacttgtagcgattaccggcccggagaatccagcgcgaccatcggcccatcaatctgcgggcgcgttgcgcctccgcaa

SEQ ID NO: 39785 - DNA, 90 bp, Oryza sativa
cggatgcaaaaaattgtttcttcaacatgaattacagtaacgtatttgtacttccaatatgtgccatgatggctgcccatattgggtttg

SEQ ID NO: 39786 - DNA, 426 bp, Oryza sativa
  unsure (1)..(426): unsure at all n locations
agctnggtcgatctcgagagatcgaattgttgttgacgatggttccgatattgtcggaagacatactccggtcgtgttagatctccacagccgaagtcgtcgagtagcttgttgtcggagaatccatctcttaaacccatctcgtcgaaaccttgaagcaccaaaatgcccctacgtggcgcgttactgtctgacgttgatgtctcgactacggtatttgcatggcatggggatcgttggtactatggtatacgcgagactgaggtaaaagagatggagacagggatntttatacaggttcgggcccctgaattatcaggtgataaccctacattctggtggccgaagccggtattgctcttattcatgataatcacatcagtataatatttggggtagcctatctaactgtcgtcgacttggcgg

SEQ ID NO: 39787 - DNA, 145 bp, Oryza sativa
aatttccaaaaaaactaattactctttttaaatgatcggctaaatcaactaatatggaatacattgtttattcttcttagacttatggaattctttaagactaatgagagaccgttataaccaaccttccatccaataatcaaaa

SEQ ID NO: 39788 - DNA, 305 bp, Oryza sativa
  unsure (1)..(305): unsure at all n locations
agcttggaagtgtgtgttgaagagagtgagatgatgttcttatataggggtacgtatgacggttggcgaaggggaaatgtccgaagtgcccttcaaccgtcatcaaggatgcatctgggacgttcacgccaaaccccacatgcaacggtggaagtggtggtttnntatttataattatcttggcttaccaatcatttcattcgtatatatttacatgattttatatggaatttccttcctatatagaatcactctcacattgtggtcttaattccattactccagatttttttttcgttctaata

SEQ ID NO: 39789 - DNA, 148 bp, Oryza sativa
ccacaacaatgtatcattatttgtatatcagatatcagattccgctgcattctcaaccgcttaagcttcgctggctagccgtgacatggaaccagagatatcattatcatgtatcatgggtaattgggcccggctgtctctctaatat

SEQ ID NO: 39790 - DNA, 430 bp, Oryza sativa
  unsure (1)..(430): unsure at all n locations
gactgcggcatgaagcttgaanaccatttttggagaaagttgtttttttttcactggngctcttcatctgctgagaatcgaatgactgcatcagccattgctgcctgtatggctcccctcttgttgcctccacttctggctggggagtgtgaaatggaaaatgacttggacatgaatggtgacagttctgcccaactcattgctgcagcaaatgctgccaacagtgctcaaggcattgtcactactctcttggaggaatatgagggtatttnttatgtaagtttactcgataccatcccagagaatgttgccctgatgattctgttcttgcaatattaatctaatccttgattgattgcttttctatttattgtggaagttactaatttttaattattcatgtgtatcaattgtacaggatgagcacctg

SEQ ID NO: 39791 - DNA, 382 bp, Oryza sativa
atgcaaggctgccctcaggcgacacgggcccccgagctctatatggttgtttgggccggcacgcgacgcgtcctttaatcgataagcacctacacaaggcaacagggggaagcatcgcaagcaactgcgatagcaaacgccatttcctactctcatctcatacatttctcgggaaactattcttatcccgtgagaagatattgcctcgcttacttaaaaaccatctaaacggttatgaaaaattctgaaaaatttgacaacattcatacaataaatatatacaacatcacgaaatcttaaatccaaactcaactcacatgtcgagatataaaaaagacaatatcagcgtataaatagcagcggactggttatatctaaatct

SEQ ID NO: 39792 - DNA, 425 bp, Oryza sativa
  unsure (1)..(425): unsure at all n locations
agcttggaaccatgatgcatactctgggcctgatctcttctaaagcagagctacaagacattattagcgagctggacaccgacggcagcggcaacatcgacttacataagttcctggccctaaatagcacgctagatgattaggggaaaggcaagtactgagaggagcggcacagggaggcgttccacgtcttcgacaaggactagaaagagccccaccacatcantttcaatgcatcaagagaggctcactggtgaggaggttgacaatgatctgcgaggctgatggtgacaggcggatcactacaaggagttcataattaaattcagaacaaanagataaaacaagcaatttgttaaaatacacatacaaatttaaaaaataattaaactataaaaattaacaagattcatgtaaaagagaaa

SEQ ID NO: 39793 - DNA, 140 bp, Oryza sativa
tgacctgcacaaaaggggactaagcttgtatggcattattaaaaggaaatgtctatccaaaggttcaggataggcctttctacaagttatttaaaggagtttccatggtagagcataattgtctatgaaataaatgtttg

SEQ ID NO: 39794 - DNA, 426 bp, Oryza sativa
  unsure (1)..(426): unsure at all n locations
agcttgagcttncctgcagcggaagatttcttcttttttcttaatatggatcaccaacctctacggtgaactactggaagtttaaaaacgaacaaggaggtcatgtgaatcaacgtgaaacgcctaattaatccgtcgatttttctcggtggattatcgaaacggaaactcaatattgaacccacagtttaccgtcttttcagcagcttgcagaacgactaaaatatacgatgtgggctgcatgcggattaatctggtgcgataatcacgaggatctgacgactacgttgagatcggtggaacacgtacgtgtacgctgaggaaatggccggcgtacttctaaggatgctgccgtgtgcgcggtgactcagacagctggagctgtataagctggcatgcacgattgcacggtgcgagtggagccac

SEQ ID NO: 39795 - DNA, 62 bp, Oryza sativa
tgcgagcaaccacaactggcacggtacctataaagatggaaccatgcattaagcttttactg

SEQ ID NO: 39796 - DNA, 440 bp, Oryza sativa
  unsure (1)..(440): unsure at all n locations
tctcccaccccacttaatgactgagctgcaccaggaaaaagaggagggtttctttattgtccaaagcacgtcattgaggcgccatcatgagacaaccaaacctttccttttcttctcccaggtgatgaaacagcaaaattccgactactgtagtgctgctcatttcattttgttacatacaagaaaaagatatgcgggcacccacctgaagattcagtctggtatattgaatcatcacaatctatgagacaagtatggatctcaaaagtataaaaaactgagcattgcatgatgactgacgagcaaactggcacttgggggatatattgctacatggaaggtatcatctaagcaccgctcatcaacttttacctaaagagtaacatgacattgtcatacaagaattatcacttagnacataaatataaccaaatgaacca

SEQ ID NO: 39797 - DNA, 419 bp, Oryza sativa
  unsure (1)..(419): unsure at all n locations
agcttatgagcccatcctccacagcaagtatgctatggtcatcgaccttgaggccaacaacaggggaagaagctgcccgagcagaacgctatttttgggagcggcggcttgtggccaaatcatgccatgtggccgtgaactaaccaacgatgatgatggctaagggcgagccacttccatcttgccataaacaagacgacgactccctcacctcctttctttatgcccctctcccacccatatgtcctcctctcctctgttgctgaggcccccttcgtgctagccacccaccacgttgntagccttcccttcctatggatgggctggcgagctcaagctcatcaggacaaataggctcccacttgagcgccaccttcgtgatcgcacagactacgattgatttcagtctcgatacccct

SEQ ID NO: 39798 - DNA, 431 bp, Oryza sativa
ttagatcaccgcagctgcagctggaataacatagaaactataattttttttggacaacaacatatgcgggccttcagttcttaaaaagagggcctatccgggcctgccatttggcccataacccttgttatcatctccaactgggcccatgacatatttgcgacaacgaaaaatgtgggcctttagctcagaaaaggcgggctttcgctttctgcaagaggcccgtttgaaatgttgaaatctcttactaagtcatttttttattcaatgaaattataaatttcaatctttagttagacagctcctcaccgtatcttattcttaccctagtgcacccttaagcaaaccttacagaagctgaacctggagaatctaaacacattagacgccaatattgtgttgtgaaataattatatatcaaactctaatgc

SEQ ID NO: 39799 - DNA, 397 bp, Oryza sativa
  unsure (1)..(397): unsure at all n locations
agctagcactcaattaaatgctgggtccaaaacttctctgaanggaaattgggataaggaactcatatctctttctggtcagatgtttggactgggtcctgtcctttgaaaacaaatctgtaaccaacaagagattctggtgcctgatgctctggcctcttggcctgaggggatttctttcataaagtcttttggcccggtggaggtggagtgggaaaaccttgggcaacgaatggctgaaatctcttactgatgaggaagacatgatgctttggccttttgagaagaacaaatgcttttctacaaagtcttgctacaaaatgctaaactttcatggggtgaaagatatgagaggactagatatttggcaagagccaatgccccagaaggtaaagca

SEQ ID NO: 39800 - DNA, 429 bp, Oryza sativa
  unsure (1)..(429): unsure at all n locations
gcttatatatgttggatcggctgaggatgaaaatttgatcatctgcttgagagtgtgcttgctggccctgtgaatgttgggacataccgttttgttctccaggtaaataagtatattntagtggcaaaccgagtacaagatctgcatcatgaactcaaagactagtgttgaacttgaatctgatatggcatttcagtttctcagctgtgcagagaacctgtgctcatttgcactggacctgctgcatttttgctgctatcttggatgtatgtctgaatcatgagaatgatatgcacatttccgtgttcaggctgatcctcctgacccgtcaaagatccgtaaggaagacataattggtgtattgtgctgctattaacttgttcctacatgggtcaagagttcatcagagtaggttactatgtgaacaat

SEQ ID NO: 39801 - DNA, 135 bp, Oryza sativa
gctgcaagctcagagggcaacctcccattccggcattcatcaaaacgttgcccgtgggggccatatgatacacctgacgccatggcgatagcggtggtgcaaattctttctggttgcttccacataagggtccca

SEQ ID NO: 39802 - DNA, 430 bp, Oryza sativa
agctttcttcttgaagttgtcagtcggcggcttcctttattataatggagtgtgattttatatcaattcagtttgcttacttggtctatcattgccttgtttgatttttctacttagtttacgaggactgaaagtttttaatagcttttgcgggttttacgctcaacaaagcttgataaaggcttttaagaaatcaacagctaagcttgaaacaccaagcacagcataaatataccggtattgtacaaattgtgcctccatcattcggcattcgatacatttacatttaatcagtatcagtcttctcatcatcagagttattgttaccagtcggccgaaggtcggtatcctgaaaccgatctacgacgtcaccagcaatcttgtcggctggcttttgagcgtcgttgataagatcaagggcagcctcttc

SEQ ID NO: 39803 - DNA, 93 bp, Oryza sativa
tttcacaatttttggtgcttaaaaaatgtttccctaacgttgtttttatgtcacataatattccttgttggatattttgaggatatggatcta

SEQ ID NO: 39804 - DNA, 433 bp, Oryza sativa
agcttcatgagttccaacacgcatgacaacttgttgtgcttttacttgcatccatcatacaacggcatctggcaatcttccaccaacttactaaacttctcataatctctgtcgatgtcctctgcgtcttcaatgtcatgcaacattgtaaatagacattgagtgtccaaatctatggtctctccatctaaaggagaaggtacgaacatgccttctcgagctgcggcggtgttctctacatcctgatccaacacttcttcagctgcgacatcaggcgcctcttgctctccatgcttggtccaacaggtatatttcttcatgaatccattcattatcaaatgagcatgcacttcatccttgtcttcgatcatctgttcattcttacagtccctacatgggcacaacatgtgcatgctcatcctactttttctgt

SEQ ID NO: 39805 - DNA, 432 bp, Oryza sativa
  unsure (1)..(432): unsure at all n locations
cagcttcgacagcagcaagtgagctcacagagacatccttagctattctatagctgtaccaaagccacacgacaggatgaggatgatctcaccatgagtccgccacccgcgtggtctgcgccgcggcgaggatggcctgcaagcagtcgacgtggccgtagtacgccgcgtggtggaggcaggtcctcgcgtgcaccgagtcgaacatcaagatctggtgcgaaatcgtaactgttactgattttttcaaacagaattactacagtattatcagtatactgattntgcagttcttttctctcacatttgcgtcggcctggaggagcttgagcacgcagtcgatcttgccgtgcatggccgcgagcatcagcggcgtctgcagcataagcagaagaagagcatagcatggtgagaaaacataaggacaagacg

SEQ ID NO: 39806 - DNA, 377 bp, Oryza sativa
tttctcgctttcttttagcataggtttgttcatgctccatgtaaacaagccacaaagaaaggataagggggcttctcggagaaatttcgaacgacccacaaccttgaacaattcaatccttttttagagagattcagaatggcgttcagaatatttatacactagcccgagtgtattgtttaggagacagagattatattagaggagagatgggcatcgaggtgaagccggcgaagctttggcctccgtggacacctcaacgccggcttcttcgccggcttcctcctctgcctcctcatctacgtcatcgtctcgcagcagttctgcatggatactcccacaggtaacctaaccattatcacgtactcttccattgc

SEQ ID NO: 39807 - DNA, 414 bp, Oryza sativa
  unsure (1)..(414): unsure at all n locations
agcttcttgatcttaccaaccaggacatttattctattctgagatntgaattacggtctacaaaacacactttaaataagaattcgctgcattaaagagaggaatgttctaattgtcagcgggcagtaccttcaacctccttcaaggctgagttcctttgcacagctagttctactttgtctcttttcaatgcttcaatctggttctcatttgtgccatcctgagatctcgcgctgtttgaaatccaattatttgaggatacagttatgacagcataaatcaatggaatagatctggaatgttaccttctgatgaaccacctaactcgagattgaatcctggagctggcacatcggcccttaactcttcttgtcttttagcatactcttgcctcagcatatggccctaactgct

SEQ ID NO: 39808 - DNA, 92 bp, Oryza sativa
gaactaatatgaaaaaaaaaacggattaactaactaacatgcataggttttccctactatcaattatatgggatctacaaaagcggcataac

SEQ ID NO: 39809 - DNA, 429 bp, Oryza sativa
  unsure (1)..(429): unsure at all n locations
agcttgcanaagaggaaaggaaagctgctanatccatacccgaactcttccgaaggcttccggactcctgatttctactctattcctattccaccagctagatactactaaactaaagttgaaagaaatgataaagctattgattgaggtgtgtgagtgaagtgaggatgagagctccttttatagcctcccaatgaaagttgtgacagatggaatggtcggtactaccctcctaccgccattgggagccatctcagccgtctaggagaaccctggatcaaacaaagctgcgggaggttcggccgaacctcgggccggcccaatccagcccaaattcggctggcagccttctccgttattcttcttggcccattcatacataagtctggttctcgacatcgtccgattgatttatcgtttgagttgatg

SEQ ID NO: 39810 - DNA, 427 bp, Oryza sativa
  unsure (1)..(427): unsure at all n locations
agcttatctagaagagaccgagctcaatgatgtttcttcatggtanttatatattaaataagaagagtctatttgcttcttttttatctttaggaaagaatgtttattgtccgtgctgatggaaaaacacgaggcctgggagatctgcttaactccagtgcaagtacaaaagcttgcctttatattcgtgagcgtgctaattgatttaatcctgccatcaactagaaatatagacaacgaacatcgcggttaaatctgtaaacgatagccgatcggctaggtgccgatgacatatcatttatctctaagctgatgtcatatgcaaatcgatcggcaatcatgaacggataagaaagaactaaatctactcgatcagctgtagatatcaacaatatataatccttatatcgatatatacttagatcaa

SEQ ID NO: 39811 - DNA, 428 bp, Oryza sativa
  unsure (1)..(428): unsure at all n locations
cagcttctcttaagagtgtgacgacctacttgattattatntgtaaaatagatcaccattcaatgcagcatagttttactaaggttggcaatgcagacaatggcctatgaatactggattactgatatatatactacaaaaaggagcaaccacatcttgtagttgtgaagtactcatgtgctactaattactatgctaaatatgctcgaaagaatttacaacaggagttagcatgacaaataaacattatgaaagggagcaccttaaactaatgcctggccaaatgaaatagccaaactataaagaatattactatgaaaatgtacctcagcatctatccttgattgcatctcaacacttggccgttctttcacatgcacaggaccaatagcatcactcatcccacaatttgatacctacgcagcaac

SEQ ID NO: 39812 - DNA, 426 bp, Oryza sativa
  unsure (1)..(426): unsure at all n locations
agctntctctctctttcgccatggatgtggtctgtatgatgtgaattggttcaaaatgtggctgggaatggatgggagattgatgccgtggttgcgtgggataattttgtggagctttggtggatggattggagcgaaactgtgaaccgtaacttcgccggtgtggtctgacactgtagcacagaatggggaaagcggcgatagtttcggcggtgaagacgaaccgacgctttgctcttggtgttatttcattaagttatcgggagtactaatgggcctangcctaaatttggctatcgacgtggccaagttgtgatccttagggacttatgcattttgattcagcaacacttgctcacgacggtatagcccaatgctgttaatatcctttttgacgcagtatgataattctttggaattactacg

SEQ ID NO: 39813 - DNA, 415 bp, Oryza sativa
agctgtcaaattgatgctgcggctttctcctatgttgtcccttcgaccttcgccgcttgcctccgtcccatgcctttgcctatctcctcggttttggtaggcctggtcgaaggtcctcgtggtatacctccaacaagcccctcacggcaagggtgagtagggagcttctgccgatgctgtgcaaatcgtgtggtataccatgaggcgcctccttccggccgatgttcctgccgaaacctatattttgtacttgcgaaaaagtctggcgttttgcattagcagatctggtgatcaatgttctttcctttcctcgcttattattggtgaaatggttgaatatgttgggattctcgtgaacagtaatgggctagatgagccggtctgccgttactttcggcctttcactgttcggcct

SEQ ID NO: 39814 - DNA, 66 bp, Oryza sativa
agagcaatatttttaagaaacccaatggaaaataagctttgcttggcctctattactgacctttgc

SEQ ID NO: 39815 - DNA, 403 bp, Oryza sativa
agcttaaggaggtgcagtgcggcatcggctgtttgtcgccctaagtcgggtcatatcgaggctgggagagaaggcactacccctatttaagctcctcaaacgctccgggcccgttacctggacggaggaggctgagcgggccttcactcaactgaaggcgtacctcatgtctccctcagtcctggtcgcctcagagccagatgagccgttgctactctacctggcggcaaccccgcaggtggtcagcgcggcgttggtcgtggagcgcgacgaggacaaccctcactccgcgcatccccatcctgtgtcgactcgacccgggagagagcagggaggagaggtcctcgagccgaacggcggcctcaagacccccgacggccggagctggccctccgcctgcttg

SEQ ID NO: 39816 - DNA, 420 bp, Oryza sativa
agcttgctaatgggctggatgggaaagggctaaatggactggtttctaattggaaaaagtacaccaaaggtcccttaacttgtaatcgagttacaaaatcgtcccccgagcacaaaaccagatgttacttacaaaatcggttactttaggttattcgtgggtttgaccccggttttatccgacgtggcgggtgagtcagcgtggaacccacgtggaccccacatgtaaggatgccacgtcatctgggtctctctttcccctcctctcccttcctcctctatctcacttttctcctcttagagcgagggaaccgccgctcggcagtgatgacgcgggagaaggggcaacgacagagccaggcccgcgcgctcctgattcctgaaggcgacgccaggctgataccgacggctacggcaacgg

SEQ ID NO: 39817 - DNA, 433 bp, Oryza sativa
  unsure (1)..(433): unsure at all n locations
tgcaagcttgttgttgaatgatgcacgcatcaaatatttcttattgacaccagcangctctggttcaatccctgcttaccggcttgcacattattttttaatgtcaaatagtcacctgctgatttgctatacaatcttcaagctgaatttgatcgatgttctagttctaccaatcccgtagcggaaaatgagttgcttacgagtgaattttcagaagaagaggtgaaaaatgctatatttcaaatggaacatactaaagctccacggcctgaaggtattccggcggaagtttatcaaatgttctgggaggtaattaaagatgacctaatggctggctgtacagactctaataggggcactcctttgtccaataatatggaatctaggaatactactcttctaccaagaacaatgaggcaaggctgattcacaa

SEQ ID NO: 39818 - DNA, 424 bp, Oryza sativa
  unsure (1)..(424): unsure at all n locations
tttgtgggattcatggattaattaaactttattatgaagaagtgtccagtagttgaaaactatatatcccatgtatacaaaataatggtaaaagtgttcttcgatttcaattcaatcatcctattagtatgttcttggagttgactagtaatatatttggttgatttaaggtgcaagaccattgagattatcataaattatacggtactaccttcgtcccattatttcttacaggtacttgtccagatgcatagcctcaattaaaagaaatcattntgggacggcggggtagcaatttaacagtagatttaaaatctatatgaattcaacaagggaccaaatcagaaggaatcagtcagatcccatgtgaccagactaaaattgttggtcggttgaggacatgtagataaacaaccgcttaaaa

SEQ ID NO: 39819 - DNA, 122 bp, Oryza sativa
ccaaattggttatttgtgagcctctggtggtttcttgacaggattaacgccatgtagcgttggattttgatttaaattccggcggacaatcacgtcttgggtggcggttccataactcactt

SEQ ID NO: 39820 - DNA, 112 bp, Oryza sativa
ccttgccttcggaaccatgtgttcattgcctctgcttaacgcacacgtccgtcttcctcatgctgctcaccaaacaagagctcataagaatcatggcgtcttctgatgcgca

SEQ ID NO: 39821 - DNA, 129 bp, Oryza sativa
  unsure (1)..(129): unsure at all n locations
tccgacagacccgcaaagggtgtggtcatcgggccgaggtgaactacactgnctgcgtggactccggctcaccaccgacggcacccgtttataatgatggcgaacgccttcccttctttcttcaacccc

SEQ ID NO: 39822 - DNA, 213 bp, Oryza sativa
agcatgcagctgcgccaagagggaggcgtttttttttcggcacaccaccacgtctgccatgtcagaagcggctcatacggaactacaaacccgccgcgactgatcaggcacaattctgcccattctagcagacatcttccatcttacatctccgctatgggtgacactgtactgacagtgggctcgtcagattaaatagaaggcctaggtggt

SEQ ID NO: 39823 - DNA, 85 bp, Oryza sativa
attataaagctctgacgaatcacccgtaatcaagtgggccacctcattacttggatgaattcaggcctgtaatataattgggcca

SEQ ID NO: 39824 - DNA, 428 bp, Oryza sativa
agcttcggcttcatacaactgcaggtacatctctcattcgccttcaagacacattcctgcacggcttgcttgcgatagataccacgcctgctcctatcaacacacattatttcataccgatgcacttgtgtgccctgagcaacaactcgatgtctccgtgcctttttgattttatcttccatgtactttgtcactacgttgccaaacactatgttgttatcggccatggacggaccaattttcttgtatcgatccctaaagtacgcttgcgtgccgtgaaggatgaattcaacaatagcaaccaattgaagtacccgaactcctcgcattacccagttgtacacctctgccaaattggttgtcattatgccataccgagatccatcggtgtcgaacaatagagaccacttctccttaagctcattctc

SEQ ID NO: 39825 - DNA, 70 bp, Oryza sativa
gtttcccttctcgggaaagccgaagcaatggtttatgccaaccgagctacgatcaacacctgggacaaat

SEQ ID NO: 39826 - DNA, 423 bp, Oryza sativa
agcttggagaatcatctatttaggcgtatgcttttaactctaccacactattttctaaatatatacgggttcaatatcttaaatttggcagcacattaaatggaattttctgttattttaggtggtgcagatcctttatcctggggaataaggctcaaagttgctattggggctgctaggggtttatcatttttgcacgatgctgaaaatcaagttatatatcgtgatttcaaggcatcaaacattctccttgactcggtatacatgaaaatagctactcattcttgtccttcgaaagtttgaccttttgcaaatgttattactttaacttttgtttccttttttcaccattataggagttcaacgcacagctttcatactttggtctggcaaaagcaggcccaactggtgatagaacccatg

SEQ ID NO: 39827 - DNA, 424 bp, Oryza sativa
  unsure (1)..(424): unsure at all n locations
agcttcggaggatccctacgcttactaccagtatggtgttgaanaggatggcgctcagtacgtcttagttacggtcgttgcctctggcaatggcgttccgctgccttacctacttctgtttttggaatgaattcccgaccgctcggtctgatgatttaaaactatgtctgtgggcttatgatgtaataatttgtactagacactcgtgtatgtgcacttggtatttcagctatgaattcgtgtgtaccagactacttgatccagggaaatggtactgtttacacgattgattcctgttataaaaacaagggtctacagagctggtatcagagccatacgactgtaggaaaagaccaaaatgcaccccaacccttttctaagttggccaagggataaattcccatatagtaatactttcaaaaat

SEQ ID NO: 39828 - DNA, 427 bp, Oryza sativa
agcttatgactccctctggttcatattacttgtcgttctagcattcaaaatgtgtatcaaaaaacttgtcgttctcatgttccaaagcacttttagaggtgatcttccctctctacctgtttgatgaatttttgtgccaaaattcatagaaaaataataaaccattgggcattaatttgcaacccaattttacaaaatatacgagaagcgtgtctctatgacgtgtgggaccaaaaaattcaaatatcatacgatatccaaatataatcaacattggactcgttttgttgtatgttttgattggaaaataatggttccgacagaattcatatttgatatatgattagagagatataaacatttgaaggagaagatcaactagtgttaaccgtatatccttgattggtttgctgatcctcaccggttg

SEQ ID NO: 39829 - DNA, 422 bp, Oryza sativa
agcttaaatatattctttgcgggtctaattatctttctaataattaatggctcagaactttaatgcaattcattggagggagggcatggagagagagatatatatctgtgctgcaaaccattggcttcagtgagctctcttgcatgagctacatcatccagggagaacatgagcagggcagccatgaagacaccaaggacaagaaaattcttgagagccatttctgacgatgaccagtttgagccagctagcttgcctgtgatgagatgatcgtactccacattgtgctctatttataggctcagcaatggatgcatgcaatataaccccttgtgctatcaatggattaatggaatggaccaaaatttctactatattcaatatctattgcactaatacagttggacgttagaactaagatc

SEQ ID NO: 39830 - DNA, 463 bp, Oryza sativa
  unsure (1)..(463): unsure at all n locations
agcttagttggtatagtggtttagcctgatatgctatttggcgccgaaagtgtttttttgtctttgttgtgtttagggtgaaggattgattcatactacaagaaggaatttgtctcaaggtggagtttgttgagttttgatccaaattcatttgcacttaataaaggccagcttctgccgtagcctcccttttagggtccgtatggattgtcatcccttttagggttccactgtatatatacctcttgtaagccgccgtgcggcgatgtaacctcacctcagatatagtgaagatattttgctggctgccgcccgtggttttttctctcctatttttgggagggttttccacgttaaatctcgtgtcttctatgattgatctattgttctttatncgttgttcgtctatcgnnttctaacaccaagcatatattcgtgtcataatccagctcgatatcatttt

SEQ ID NO: 39831 - DNA, 452 bp, Oryza sativa
  unsure (1)..(452): unsure at all n locations
agctngacaacatggacaaccttcccacggtgttctattagtacaaccatcaactcacctttattggactcgaccaagtagctgtcttcacatttgaatccgaagccgttgggcttgttaagaatctcaaacccttcatcaggcctgcaaggattatacaccaccaatttcccgtcttgagcaagaaggtatagcaaaccgttatggaggacagggttggtgactggtgatgcccgaagccgtggacagtagagatgattctccgtcgacttccagccctcccactcatcactggtgtgtcgaatggagctagcaaccttgatggtgatagttgccttgacaccaaatagcctctcatcatcacggtcggagacgacaaaattaaacaacatataaggttcttgcggcaatacttcaacgagggcgccggtgacaaggtcgatatcatacac

SEQ ID NO: 39832 - DNA, 289 bp, Oryza sativa
  unsure (1)..(289): unsure at all n locations
atacttcattttccgtgatgaccaattcccttcttgatttgcgatgccttttacagccatatcattcagaggcagaaggagccagccaaggcacatcaaattaagctagaagtcgttgtaaaagctttgaaatggcttgaaattgacatggacgtggatgagggtctctttgacagtacacacatttcattntcgaactgaaacctacaacttctctgtgatatattaaccttgtcttctccttgctatcaggtggagtgcatcatggcgtgcctaatatacaagaatc

SEQ ID NO: 39833 - DNA, 406 bp, Oryza sativa
  unsure (1)..(406): unsure at all n locations
agctnntcatcatcttgttgcggtccataaacagaagtcatgcaccaagatctgtcacctgcgacccaatgtagtttaactgtgactgaccatctcccaatctgcagcacaaagccaagaaacatctcccctttccaagcaattatcacccctcctcttgtttcatcagcaggcactactgcaaaaccatcaaagtctgaaccgcataaatcaactataatagaggcatccactacactgagtttggattcttgaaagcaaacaaccgacacaccactagataacaccgcctctcttacaagggctcgtttgtcaaggttattgagcccgcgcacattccaccccaacaaactaatacttaaagaagacatcgacatagaaactacgatacatcgggactacgtgt

SEQ ID NO: 39834 - DNA, 335 bp, Oryza sativa
atccgtggtctttaatggatgactacccttctctttataaacaggatgattatatcttactatcaaagtttgtgtaatcgatgtaaattgtattttatgtcaccactaaatctgaatttgtaatgttggcaaagtatttagttacctaaattactaattcttcgactagcaaatatatggacatggatctgccatacatcggctacttcggtgctatctctttacctttactacatgacaatactccttgacgtattatgcagttcttttcagttgtggctaacttttatgggataagactacacttatttttaagtctataaatcatgaagtta

SEQ ID NO: 39835 - DNA, 464 bp, Oryza sativa
  unsure (1)..(464): unsure at all n locations
agctngcagcctgcactaccgtgtggataatagtgtactctcaccacccttaaaaaaacaacctagtattgcattagacatttcctagtacagcaaatttggacaagctcctatccagattcgttgtgctaacaaaaatcctattcaattctaaatttttttttggacgaagggagtagtttctaagcacctgataacacacaacttcattttagactatttagatcacgccaagattcgtgcaacgcaataatcttatcacatcaccacatcccttttctccttcccacacaccatcgcataggagctcacataagtccgtcttccctccctgtaccgtccgcgtcctccgtgtttggttgacgccaattctagcattcccccatcttcctacccttctcggtctgctactccctccgtcttcgtctcacaatatagtaatctagtcctaatatagtaatcta

SEQ ID NO: 39836 - DNA, 449 bp, Oryza sativa
gtgtcccgcactttccaacagcagatgttattgtccttagggcttcctctgactgtgaggtttatctaatgtcatcaatgaaaccaccacaaacttattcaagttttcatgaacactttggtcattaagttcatgaagaaagcatgtgcatttggtaaacctaatgacatcaccgcgaattcatacagcccgtatcgcgtgtgaatgccggcttttgaatatcttcttcaccaattcgttattggcgatttccgaactaagatcaatcttggagaatcaggggcacctttaagctgatccaacagatcattcatcctgggaacagggtacttggttttgatggtgacttcattgagagctctgatttcaaccgcattcctttgtcttggttcgttttccaaaatacaggatccccattgggagtttttgactttatctccttttttcat

SEQ ID NO: 39837 - DNA, 462 bp, Oryza sativa
  unsure (1)..(462): unsure at all n locations
ggatcttaagtcacctgaggcatgcaagctntggcaatgtgagtatgttaaccaaatctttctctatcttaccttctgggctctatattctactccctccatcctgaanaagacttaaatttgggaaatgaatataagggcccatctagttggtaaaaatttttgccccctgcacgttagatcgaatatacagacacatatntaaagttataaacatagtttaataataaaacaaattacatattccgccaggaaaccgcgagacgaatttattaagcctaattaattggtcattagcaaatatttactgtatcaccatattgtcaaatcatggtgcagttatgcttaaaaaattcgtctcgcaatatcatggtgaactgtataattgcattttttatattaatactctatgcatatatcaaacattcatgtgaattaagacaaattttgttgggactaaaa

SEQ ID NO: 39838 - DNA, 284 bp, Oryza sativa
tttatccactacggatggtgattctcatatagacttcaataattggtctctcgctgtgtgttggctttattatttctgctcttattattgggagagcatttgctctctttaagaagaatttgtaataagtggatgtagattctttgaagtaaaggccggaatttttattccaccatattaaaaaaaatatcagtgttggtttgtccatccagggctctcacgggttgggtgtgggagaaacccctcatttctttggctctttgaactgttccaaggaccacttt

SEQ ID NO: 39839 - DNA, 406 bp, Oryza sativa
  unsure (1)..(406): unsure at all n locations
agcttgacattacggaccactgtgtctattactatggggtaccgccccgggtggaccactcggtcatgatgatccgagcggtcaaacttgattgcaatttctgaccatcgaagatattggggcgtgtcgggctgaacagcattgatctcccgttcagtcaacttttgttttcttttagactcataagccaaggggccgccgaagatatggttgagctccttgcggtggtcttgaaatcctgccggggtgtcaccgtcgtccttcttcctcgacgtgctttgttcttcgacagagttctttcgtgtagtcttggtgtattgctccgcaaactgcttgtagacgatacaatctntggccacgtgtgtggagttaagatggtgcgggcattgtgagttcatgatcttgt

SEQ ID NO: 39840 - DNA, 353 bp, Oryza sativa
tgtgtacacctcgcaatggcgttactctgaggtacacaaaatcgtgcactgcgaatttcaggtcacggcgacagttatctgcataacttttctgccgagactgtgccacctttagattttcccgaatgattctgactttagcttcagcttctctcaggatatccgtcccgaacacttggctttctccgacttggtcccacaatagcggtgtccggcatttgcgcccatacaacgcttcataaggtgccatttgtatgctggctcgataactgttattgtaggagaactcagcatatgggagactcttattccaggtcttcccgaaatctaggacacatgcgcggagcatatct

SEQ ID NO: 39841 - DNA, 443 bp, Oryza sativa
  unsure (1)..(443): unsure at all n locations
agctnggccattgggccaaagactgtcgacagccacgacgtggccaggcccacgtcgcacgggtggaggaggaagagccggctctgctcctggctcatgcaagcatcgagctacctccagcggcaccggccgcagcggctttcctccaccttgatgagccgaaggtactcgtctccctctgcaacggctccagcaacgacaaggctgatgggtggtacctcgacaccggcgccacccatcacatgaccggctgacgggagttcttcaccgagttcgactccagcgtccaaggctccgtcaagttcggggacgcctccggcgtggagatcaagggtgttggctccgtcaccttcactgccaagtccggtgagcacaggctgctcaccggagtctactacatccccgcgttgaggaattctatcatcagcgtgggacagctggat

SEQ ID NO: 39842 - DNA, 424 bp, Oryza sativa
agcttctcctgtgaatgatagcattatgctttcctatcacatcatcacagaaccaatcgaggatgcagtcactggaacaatgccagctatatctctccagaatcaaaatgagcagccatgtttgtggttctcagtccgctacttatcatggtgtaatcgaaagtttgcagcaatcatgtaatacataaatatattcatgtctataaacagtgagctcgctatgcttatggatgattcatattgagaatacaatgtaccgatgttaagcaccgttcctttttgtttaaggcagtgcctcgtattcatgtaatgagggagaaatgtgtaatacagacaagttccatgaggattcgtttgaaagatgcggatatgtgatcatgtgtataattggttactgacacatgagacctatggtctcgtgtca

SEQ ID NO: 39843 - DNA, 280 bp, Oryza sativa
tcgaatttattggcggttgttattttatctccaactcgattaaaactgtcgatcgatattctggcattcattcattcctgttcatgtgaccgatcgatcgagtcaatgtaagtcaaatatcgaattgatcgagagcgacaagatgcccccaagatcttgtcgcttatgaactagtattacagtagtaaaacacatgtactatacaggagtaattaacagctcatattgaatgcttcacgggggagacaatgacaagctaaagttaaccacaaagctagtt

SEQ ID NO: 39844 - DNA, 334 bp, Oryza sativa
  unsure (1)..(334): unsure at all n locations
agcaccatattgcccaatcatgaagcaattatacttaaaagattcgnctcgtaaattagtcgcaatctatgcaattagttattttttagcctatattaaatacttcatgcaggtgttcaaacgttcgatgtgatagggtgtaaagttgggatctaagaggtggctgcaacctcgtttgagtgacggtagagggatacagaaagcagaagtgagaagaaatacttacttatttgttatatggttagttgtaagcttaaggtgcaccataagaaacttttcactgtaattaatgcagatcacgaaaatattagttacttcctccgtttcacaatgt

SEQ ID NO: 39845 - DNA, 309 bp, Oryza sativa
  unsure (1)..(309): unsure at all n locations
tgtgacngtcgttaaagagcagttatgactatcaatattagcaaaatagaggaggaactggtatgcttgcaatgcgtatacatgtcagaataataatattccactactatctagatcactaaccttttgcagagaataaacataaaatagaggagaattgacatcaaatcagatgataaatcaatcggacgatgttgagaacaagacttatgtatgaatgggccaagaactcaaaattaacacgatgaatgggcccaaaattcacaagtctacgaaaaagagcaacggaggaggccacctgccgatatt

SEQ ID NO: 39846 - DNA, 400 bp, Oryza sativa
agcttcagcacagatctgcatcgtcattattgtccaaagaaatactaattagctcgatatgttgacgttgagacggaacatccatacccgaccacaaagcatatcggtgccgccgaggacgccgcacgcccgcacgcgcatcacggtcgggatccggcctcttcatcgatagatctcggcgaacatgtcgcgaatcgatcgagacgccaccgtggcctcctcatcgaacgatagatcgatcgagatgccaccgtgcctgccggttgcacctccaccggtccacgtacgttcattccatcttcgatccgcgtgatgtgtatatgtgcatgggcagacaaaactacggccggcgaaggaactcggtcatggagatcgaggaggaagacgtgcacaacgtgga

SEQ ID NO: 39847 - DNA, 420 bp, Oryza sativa
  unsure (1)..(420): unsure at all n locations
tctattatatatagaaacaacaatntgactaatatgatttgccaaaatcagcaatcaaagataacgatgtagacacatggagacaaaacgataggacttttccctcttatgcctctgtcctgctatgcttcgagtaactctgttcacaacctaccaagcaacatacttgaatagttgctatataggttactttgaataaatgcacatttgtatggaaacaaaatggcagcttttgatcaggtggcaaatgaaaatccataagaaagagctctcatcacctcctgatattgccgcgtactatgagagtcagcaacatcggcagcatatgtttacacataaatgacaaaggaaaagaaataagtgccacatgatagtaactgacagctatgcaactaatgtaaaacttgctgatggatcaac

SEQ ID NO: 39848 - DNA, 418 bp, Oryza sativa
  unsure (1)..(418): unsure at all n locations
agcttcaacgtcacactcatgtcaggtcatcagagcacaaattggtagacaaaattaaataagaaaaacatcatttttagtcttcttttgtatacagtactcgcgtttgtttagtgagaagagtatatatagaataaggccaaattggaccatttgatagtagtcctgtgtcccaattcccagatggccccttagcatgtcggtttaatgactttattaatcacacacctagagactanagagagagagaggggtgggtgtggaggaagaaagtggcgctcacttgcatatgggtcccatctcgaggccgccgaccgcaatcctcaactgtgtttggatggtgggtcccatctcctgaccgcaatccgcaatcctcaacttggcagcccattttttnttgggtggttggttcctgagc

SEQ ID NO: 39849 - DNA, 356 bp, Oryza sativa
  unsure (1)..(356): unsure at all n locations
tcaatattgctatgatgcccatgcctaatngtcttcaaatattaccgggctaatcagacaaaagggaaaaacaattccggctttctgaacaatgcaatggtccatgtggaatgtagtaacatttcaattaacttgctatcgctaaagcctttctttgagccatatgcgcgactaccttcgatacatttgccaatgagaaatctgcacctcttagaacagcatcagagagatcaacacctgaatttattaacagaaaactcttaattatcaatgtcactagaacccaaacatcagttttgccatttcagaacctcacattggggaagaatcactaccactactgtgattaatggaca

SEQ ID NO: 39850 - DNA, 465 bp, Oryza sativa
  unsure (1)..(465): unsure at all n locations
agcttgactaaccggcacttgctccgatgagcttgcttcttgatgtaaggacataagagcaagttntgctgcagcggattcagcctccttaactgtgtgaaagtattccggactttcaaatgctttgccatctacagtcactactgacttgaaccgagatgcatgacctggaccttcccgaattgtttggtacgaaggcaacagtttgcccttcttctgagcataaatttgcaactgacttttgtaagaagattggttttctgcaataggaaaaatcattcaatatgagaaatatagagaatataaaagtgaaaaacaacaattttcttacaccatgccagtacacggtgctcttagaccccgcaactacaaatgttacctattatatactaaaagtccatcaaacatcgatgggaatccctaagaaaaaaatagataagtacgatagaaaaatccagagaaaga

SEQ ID NO: 39851 - DNA, 330 bp, Oryza sativa
gaactactaacaggcggaatgcctggcgtatatgtcttatgttcctggagtaaccgtgtaacgatgaataattgagtatgatcaaaaccggaaatgtgataattaactaagcatactaactaaaccggtcgaatcgccgagtccgccgccgcccgattgcaaaaccagcccaaatcggttcgtgaagagttatgcaccagcaaattagcaccaacacgcaacatccgaactagacaacgcctccgccgcagctcaggatcacgaaactagcttacaacaaactggagctaggagcgggcggatctgaggagcgctggcactacctagtcg

SEQ ID NO: 39852 - DNA, 482 bp, Oryza sativa
  unsure (1)..(482): unsure at all n locations
ttaagtcacctgcggcatgcaagctnttaaccaagctcttacaagttcttactaaatcaagcggaatggtgatgtacaccgacttaaccaagcaccccaatggaggttggatgtatcgatgccttggcaaacacttgctgtacggctgcaatcagatctgtggagctctgggtaggcttaaatatgtagcaaagggatagcaaatgctcaaatgagagaatgcaaagttgaataatggttcaaagtcaagtaccgtgctggtcctaggctagaacgtactagagacgcgagcctagacacaaacgataccacaaaatagcactaggaacaactcatgcacaactctgatatatgaagttcagctaactcataacagnattttctcttttctttctttcttctttcttctttttctttnttttctttccttttctttgtctctttttttgcgcggctttttttcttttttttatgcacctttc

SEQ ID NO: 39853 - DNA, 377 bp, Oryza sativa
ttgtggtagtgcgtggtggtgaaatttttttcttccctttcctggctactggcttccaagatactagccttgtactactattcaacgaatcatcgtgttgtctgggggtgctgatcgttaaaaaaaaaacttgtagtactactatagcagtagtctagtacaagctagtttctccataggaggatactttggaccatctcgcagcgattctcccaaatggcatatgccgagctccacgttaacatcataatgacctaaatactgatacaaacaggacacgtctaaacatgtacaagaaagccaccaaaatccatacaggtgcaaatgcagagaagaaaggaagcaaatatcaaaagaaagccacaccaccatgggct

SEQ ID NO: 39854 - DNA, 403 bp, Oryza sativa
  unsure (1)..(403): unsure at all n locations
agctngactntttgtaattggactctccatttgtttaatgctatactattacttggtactacatgtctgttgtacgttactacaatcgcatagcgatgttactgtaagagtgctagaaacactataagttcagtaacaatgcatcttactgcatttttggatagtgttactgcataaacatgtagtaacgtgtaactgtcatgcagtaacacttccacttttgtacagtaattcagttttcgttttgcaggaacggcgtagtaacatgatggtcaacgtgtagtaatacgactgctttccgcagtaatgacgtcaaaaaatagtcatgatggatctaatatcattaggcacttttttacgagcactatagtgtaaacggattagaaaaacaagatatgatctg

SEQ ID NO: 39855 - DNA, 442 bp, Oryza sativa
  unsure (1)..(442): unsure at all n locations
ctagatatcaacagagaattccaaaatggcttggtaatgttttgaacattcaccgtgaagctaacctatagtattgatatgctattgcaatagtatcctatagagatcaacaaatttcccggtactatctgattatgtgttgcatcatagattcatagtggagcatgtacaaggtcattatctattgaacactttntacganatttgtttcctatgaggctatgaatcgggaaggataaattgtttattgaacactagtatcctattgctagtgtataaatggtntcctatgctacttatttcatgaatatttagtgcaacctcaacttagaggatcttgtgaaaaatatatagtggcatagtttattctacagagaagagtttcttttgtaacatagcaatctgcttataaaccttaatttgctcttaatttgtgaaacat

SEQ ID NO: 39856 - DNA, 439 bp, Oryza sativa
  unsure (1)..(439): unsure at all n locations
agctttaaaccgtgaataataaaatataattgtcttactataaattaaattgttgtttgttaaatatacgtcgttttaaatagtgggcttagacatttagcggttaggcttctcaaacaattatagcgatagctatggcgttctaaatagaattataacaactaaattatatataaaagcaaatagttaaaatctttcttaaataggtataatcagaaatagtggcatatctatagccggagatttaaaatcatggtttacctgcgggccaaacaattaaacttgcatgacggcttagatataatgtttcatgagcgccgttataacgtgctgcgtgcttaaagttactattccgtacacanttctttgtgaggaaagaatcacacatgggcctaanatactattcccacagtcccatcttaaggctcctttgaatcac

SEQ ID NO: 39857 - DNA, 326 bp, Oryza sativa
  unsure (1)..(326): unsure at all n locations
tattagaatactcttctatatacatttatggtattgaaatactttctgagtatatgagtacctactttacattatgttcatgttatattgaatatatggctagcttatctgggagatgctttggtgcgggtataatatttgcttatgcaattactctatgtcatgacgatgatattagagtagtatctggtagtttagacatggtgtctagattacgggatatcattanttggggttatatgctacagatgagaggtgggccgctgatgatgacagctcagtacgggtattcctccgcgcctgttataatcctaagttaattcctg

SEQ ID NO: 39858 - DNA, 462 bp, Oryza sativa
  unsure (1)..(462): unsure at all n locations
agcttagctttgcaaccacaacgagtgatgtcctgctgatctcttttctggnttgtcttttcaaagagtttcaaatccatatagccttaagttgagcatacaaactgactccatatgaccatacaatccttccacttcacctagtttttaaaggtcttgctctacttaatccgatctacttctggtctataacgatggatattaagggttgagagaacaatgtatcttacctagcatttctgcgtgcacacctgcttttgggctcacaataaaacccttacccttagcatactcaatatagaattagtagtctttgtcctcgcttataaaaaccacattacccatcatttntgaaagatcaagtgccattaatattggtttggtgattaatgataaatccaattatgtgaaactaagtattttataagcatttcttttgctagtctcatgtggacatgaaag

SEQ ID NO: 39859 - DNA, 398 bp, Oryza sativa
  unsure (1)..(398): unsure at all n locations
tgctagcaaggatgncaaatttgattggccaaaaaacattagcactacttcacattggctataatggagctatagcttgcttgctgacttgttangactctgcatatcanagtatggaaatggaagtaggttatggcacttcgcaacatcgagacaccaattaaggacttgcagttatttctaagcatggagattaggaggcgcaacgtgtgaagatttgtgtgaatggaggagaaacatctatgatgttccgtgcgagacaacacacaaggaaatggagatctcacgtgaatggaaagggtggcgatagaagcgtgtgcactcaagcaagggatgtagagaacacatggaatgtanggagcccaaatcccaaatggtaagtaattcaactatatatc

SEQ ID NO: 39860 - DNA, 423 bp, Oryza sativa
  unsure (1)..(423): unsure at all n locations
ntatcagattctattttccgaagttgcacctactactattcattgaaaagaatcctactcttatgggtaaatgctcaatatccaagtgggcttacaaatttgatcatgatcaattgctttgtggattgtctcgcgtctcttgattagttggtatttatcccccccaatattgcaagtttcttacgtccaaacaaagtatttacttgttactaataaaaaatcaaaaagtttagcctacgttctttcttagatcccttcttttactccgatagtattgcagatcgcaatcgatgcanagaaaatgaatgcatttccatactataataaaaagtaagtgtaataaatagagaatnggatcatgtcacatgacttattccatttctactctatgggatcttacggagcctcttcatggatgacatg

SEQ ID NO: 39861 - DNA, 434 bp, Oryza sativa
  unsure (1)..(434): unsure at all n locations
agctntcatagaagctgcagaaccaatctttgagtagttctccgtatgatgtgcatctccgatgagtacgctcttctccatcatctcctacaatcggctctagtcttgggaactcagcttctgatacggatggtcgattgacaaccttcataactatcaggtttaaccaggtttgtagcagccaccagggtccacctgctccaactactgagccgatggctattttagccgatgcattgttcaacatctggtatagatagccgaggaggattttgcccaagggaaattgtctctttgtttctagagcttcagctagaaattgccagttggttgtggggccgcaacttgatccacataagaganaattttctagccacattaacaaaaaagccacatgttcccgangggtgaccgagcctttgaccatatatgct

SEQ ID NO: 39862 - DNA, 306 bp, Oryza sativa
aaccaactttgacaaaacagcttcaactttgaagatcttcatctctggtgtgggggaaaagagagcaagactgagtactacccactgtactcagcaagtcataccggaagaggaggtatgttgcacgatataacccaaggaggctagaggttctctagcataaagctagcatttaaaagcagtagttgaaagcagtaaaacagctgtagtaattaatcaatattaaccaaacactgtccaacgctacaccacgttgcaacaggcccaaccaacctcctgaactacaccagttcattaagctaaact

SEQ ID NO: 39863 - DNA, 469 bp, Oryza sativa
  unsure (1)..(469): unsure at all n locations
ggaccttaagtcaactgtagctgcagcttactggttgacacctntttatgcttcttccaactcctaaaaagtcgagttactgcggtataaaaggatattaaggtattgggcacttgatcacgcgcactttggcctaagcgaaaagtgcctaagtccctaaaagaacgtgacaggccacacctgaaaatatgggctgcagacatattaagcctatgccaaaaaatatgccttcgacaccctttaaaggatgacgcatgtgacatgctcccgagtaataaatcttccgggtaatatagaccaagtgtagctcatatgaatagcttctgatctgaatgattatcccttatgggatactccaaaataaatataataattgaatcccgactggcgcaagtattcngttgatagcccttacggggaataataattggtccagtctttgagcatagaanatagactcatgactatg

SEQ ID NO: 39864 - DNA, 344 bp, Oryza sativa
  unsure (1)..(344): unsure at all n locations
cacgcaaatgagctcccataatgttcagttatcttgataccattctttcttcttctgctgctgctatgcaattgcgactctgcaagcatggaagtgatcagatatcactaagcgctcgtggaaggtaggaaaggagattctattctagacattgcatacgcagcagaacaagcaactaaactgaattgaatgcactgtgttttggttgcccaaggttattatatgatcatatgatgtatatatgggtgttttattctacgatgacaaggcaaaaggagcgcacttgcggtnttccaatggtagaagggtgtgagaaagaaacagcactggtgttgtcctgatag

SEQ ID NO: 39865 - DNA, 466 bp, Oryza sativa
  unsure (1)..(466): unsure at all n locations
tctcgtacccgngatcctctgagccacctgcagctgcagctttgactctacaactgggatgttcgtctgatgttgtaactgccccataagtagtgtcgaagtgacagaaggcttgaacctgattgccgtcttaaatttaacaccgatacttatattcatagctaaatatttttaaatgataggcatgtgatgtaccttgtgactatcgacatcaaaacacctgcaatgacgaaacaatgaattcatcatagggtgtgcgtgtgtatattcatataatcatataaaaaatagcttgcgtaatctcaaaacatgttgggtgcaatctcaacaagatactcatgtggtaatgatgtgcatgtgtgcattcgtaaaaaaaaaatgactatcaatcttaaaatatggtggtccaaactcttcaaaatactattctttcaaaaaaaaactaatgggatagggttatatgtgt

SEQ ID NO: 39866 - DNA, 319 bp, Oryza sativa
acagaatgtgaagacagtgcgcatcagtggctctaactcttgagtgacagcaaccaaaatacggactctggatatggtatgagtctctgcttaaaataaataaataaattagtaaatgcattaaaatatggagcatattgtgaccatgaatagctttggaggttggatagccatgtggatgctgtagcggattagtttggcatagcaggcagattgcgaggtgtaaaaagaaggagtaatgtatctcttacaacaggctccctcgccgtcagcatcgtacctatatagagagagcgactaatcaacatatagttgtata

SEQ ID NO: 39867 - DNA, 434 bp, Oryza sativa
  unsure (1)..(434): unsure at all n locations
agcttgagtggcaaggttcacaatcttgtgtgcccaccattgcaccccacagagtatctaagaaatctaccgtgttcctgcactaagataggggggatgcaaatccataacactattagcacctaatatctgtcaattacgtgtgaatgatggaagatcatatagcaagggctatggtacacaacatcaacaataaaacatgcaaggcatttaagtcttcaatatttgaattcatagtaatccaaaatactataggagatgaataatactctctccgtttcatattataagtccgtttgtcttttttcctagtcaaacttctttacgtttgactaaggttatagaanaatatagatgtatttttacacaaaacaaatatgttatcaaaatatattcaatgctagaattaatggaactgattttagttgttaaat

SEQ ID NO: 39868 - DNA, 491 bp, Oryza sativa
  unsure (1)..(491): unsure at all n locations
tattacgtgaccttaaaactcagcttaaacacanaaaanaaacatcgaacacacataagttaactccaaattccgaanaaaaaaacaattgtaggttagaaactgaacatgtataatccatataaatgtatcgattacaaaatcgagaaatgttattaaaaataatcaagggatgttactcagagtttagaataccaaaagaagtttcgagaagagaggagaatgtttgttgccctttgtattttaaagcttctaaactagtacttgtagcaggttttccatttgtcttcctttctagaaaaaaaaaaacttatcttggtacccttgaataaactggtcctgttggctataagctgataatggaagattacagtaaagaaatttgcaaacatctgaatatatgtcatcaatgtactcttgtacttgagagaaataccatatacatgaacaatgcataaatttgcccttccggggtattgaaattccaaatc

SEQ ID NO: 39869 - DNA, 383 bp, Oryza sativa
  unsure (1)..(383): unsure at all n locations
agcttatctgcatcatatatgttattatgtgtaaagcagatctggcgtctactaaaactgcacatagtattatcagcatgtaacctatttgaaggagagtaagttcaagaactgaaaaggatccgattaaattaacgtttcaaattctatgtaaactatagagggtctaaatatagtgaaggaagaatggaatacagagaatgatgcatatggccatatgggttgtgttttactgtcttaccatttaattactcattggcaacttgtcttatgcctactcttacactactatatcaagtggatactgngataaaagtacaatccacttatcactaccctatttcaacaagtagccgacagcagaacattaattcttcttaact

SEQ ID NO: 39870 - DNA, 449 bp, Oryza sativa
agctttatatagctgccccgctgacttttttatatagtcaaggtgctgtttgggtttatcaagcaattgattggatataatatcattgctttttgccatgtaagtgtgcatttttattgaccaatattatggcttaggctgattatatattatggtcattttttaggcggttggtaaatcctttatgagtttacttactcggatgttataccacatgtgccatatattttcaggtgtggtgaaaccatgtgtcttttagggacttaagcacatctgttaaagcagtgtgcgcatggcgtatgcccaatactttggaaatttctttattcacagcattcaagcttctttataagttgtttgctatgtgaactttcaaagatgttgtcaactttagggtgtacgcatcatattatgccaagcagtcggtatatcacttggatcatattatt

SEQ ID NO: 39871 - DNA, 387 bp, Oryza sativa
  unsure (1)..(387): unsure at all n locations
taaccaaaacctgacaatccanaccctaacatactgcttcatattccgaccccaagaaaatctgagttccacaatccccaattcataaccctaaattaaaccacagttcgaagagtttatcaacaaaaagcgataaaaaagagtgttcttttcaccaccacactgcatccaaaaaagcaatctaccattacttaaaacccttgggccatagatcaaaaggttagaatagagataagatatgggataaactgggaactaaatcccacttacctgatagtgttcgatgttgcagcacctgctgattgagccaacgagctacattctcccttctcccaggatccccccttcatccacattattttgctcgttcccgcgtatcctctcttt

SEQ ID NO: 39872 - DNA, 447 bp, Oryza sativa
  unsure (1)..(447): unsure at all n locations
gcttgcaagagctangaggctggccctaatagatatatatggttgatgaaatacccaatacaactttgtgtgggattatggcaatgaactaaggaggtccaatcctgggagttctttctatcttaggttagatgagggcaaatttagtagcttgtacttctcactagatgtatgcaagagaggattcctcagtggttgcaggccaatcatttgtctggatggttgccacatcaagaccaaatttggaggtcaattgttgacagcagttggaattgatcccaatgactgcatataccccattgcaatggctgtggtagaagttgagtctttcagcacatggacatggtttcttgataccttgaagactgaacttgggatagtgaacacctctccatggaccattatgacagacaaacaaaaggtaacccatttgaaaattttaactgg

SEQ ID NO: 39873 - DNA, 441 bp, Oryza sativa
  unsure (1)..(441): unsure at all n locations
gccgntctccgcttttccattggtccctgaactattagtggtcttccttggtgagccgcaccatgagatgtgtcccgccatatcaccgttgctattgttccatcaccaaaactatcacccaaacagtgctcctctcctttgctcgcctcatttgagccgaggaagacaaacaatgttacttggggtgctacaaggctagtagattggcagccatggcctatattgctctgcggagatagaggacgttccaatccagatcatgtgactcaacagtgtggcggagggtccaagaggaagaaggcatcaacgaactgagcggttgtgcggtgcaacgcaacttgaggggggagcgcgcgatggcangtgggatgggaagcanagcgagggcatctagatatgttaataatctgataatttgtggtaagttatttgaaatcaata

SEQ ID NO: 39874 - DNA, 445 bp, Oryza sativa
  unsure (1)..(445): unsure at all n locations
agcttggcgcacacgaaagaggacgagggcttcgattgacacgcgcgccccctacctggcgcgccagatgacggagcgtggggctcctcaccgggagaccgcgtaggcccccctttgccggttcggccggnggcgctaagtgagattcttcgccctcgatctgaggaacgtcagcgagagaggaagcgcacaagacacgggcgacgtagacaggttcgggccgctgagaagcgtaacaccctactcctgtgttctggtggatctgtgtgtgaaggaatacagagagctcgagagcgagagagagttcaggctcttctctcccaaaaatcccaaatcccctctctcctaggcctgngcctcctttntatctggtcaggggtcaccacatgggcctctcgctgcctaagaaaggaaacatgctttttacaatgagggctagtctaca

SEQ ID NO: 39875 - DNA, 479 bp, Oryza sativa
  unsure (1)..(479): unsure at all n locations
gatgagaacagatgacagcacttggcaggagtcgaggcatacaacagctgcagcctncagggaagacagcaagctactgatggaagcggccgacggcagccacctctcagaacttcaaaagtcgattcaggcggtggcgtggtcttcctgaggtggtggacggcgacngcggactcccggcgtctaggtggacgacngcggcggcggtggcggcggccctctgccttagcgctgccgcgccatttgcctcgtgggtagtccctacgctcagtcggaaggaggaacagactccagagggtgaggcggacggcggcggcggcagactcccggcgtcaattnggaccgcggcagaggcaccctgccctagcgttgggggaattttcntttttcttttttcctaatcgcgatgattagcgccaggttatgaaccgcaccaacctgacgtcgatccaattggcgtccacatctgtaccgtaatg

SEQ ID NO: 39876 - DNA, 466 bp, Oryza sativa
  unsure (1)..(466): unsure at all n locations
agcttcattcgacaaacctgagtaagtcctgtcttatccgatgttcgcacaacaccccattgccttgtaagtgcattcagtagtgatgatttcccaacatttgatacccctaaaatttcaaagttaagttattagaaggcaggaaataactttgtggaaacactacgatagttgagaaaaagatcatgcagctttaaacactcatcaaccataatcccttccagagaaaaataaataccagcaaagtcacatacatcaaacctaaacggtgtgcacaggaagataatgtgattaaactaaatatcaaattcaaagattcaccgtgccaaacttcattcttctgatgttacctgcaaatgctatctctgggagcgtangaggaggaaatgatgacgaaatttttgctgcagcanagaactccaacttatttctgaacacctgttaatagttttctgtgagataacaa

SEQ ID NO: 39877 - DNA, 488 bp, Oryza sativa
  unsure (1)..(488): unsure at all n locations
tacaggacagattgtaacttanaatgtgttcatgattactgtacctactgcgaaatttaaaaatgtttctcaaaacattgctagagcagacacaaagagagcaacaggatccaaatttagaaatattttacatctattttttaattatataatgagttttccatcctaatagcttgctgaatagtctcattcacactgaatatgcttttggtttttctctttttgctagaactataatgccaccattgagttctactgggctccctttctagctgaatcaaattctgatgatgctgttgttcaccgtattgcggatagaattgtaagggggacagcccttgaaaagcatgccaggttttggaagggagctgacatctnggtattcaacagctacctttggtggatgactggacaaaagatgaaaattctgtaagtatcttctattgttacaagttattactcacatgaaggctaaagcttacattata

SEQ ID NO: 39878 - DNA, 461 bp, Oryza sativa
  unsure (1)..(461): unsure at all n locations
agcttgatccacatttggcctggatccagactcatcataatagactgggcactgatacatgcaacatgctactaattgggcagcaggcatgcccaatcaaaagcagcgaaacattctagaatcttatggacattcctcacgatgactaacaagctaacaactaacaaatccagagcagcaacaagccggattgagatcctaagccagagggcacacagtcactatctaccttcggtatctgctcgggctcaaatcgctaacaatgagtaaaaataaaaaaaaactactcggcaagatcccgatacaattagccaaagctaatcaatgagagcgaaaaaaaaatctcctgaataaatcccacgaacgatacaattcagatcaatcgaatccggcatcgatccaacgctccagacgagactaactgatccgactggtcgcgggacanacaaaatcaaccaccg

SEQ ID NO: 39879 - DNA, 485 bp, Oryza sativa
  unsure (1)..(485): unsure at all n locations
tncttacnngaaatatgcagtaacttacagcaatnntccgtgacaagagattcactcaccatgaatggatgagtcttaagtaaaatctaatataggatggtgctggccacatcttccaacccaccatagttcaactaaaactaaaataaactaaatctcacttttaagggtacccgcagatcagcctgcacccatctgtactcggtgctcatgaattgctaacaccgactacagccttcacaaagaattttgcactatattttctatgaatggttgctatactggattcaacaaccaaatgaaaaaagcttacatgttgcagcagccaaaattgatctacagaanaatggaaacaggggctccctcggttaggcaacataacttgcagaggtggtgaggcgagcaaccaacaggtcaatcggtaaagggaggaagaacacaaataagagtaacacggtttgtcgatcatctcactnttctttgtt

SEQ ID NO: 39880 - DNA, 333 bp, Oryza sativa
  unsure (1)..(333): unsure at all n locations
agctntgttaccactagaacgaatacccactgatttttgacttattaagcacatgatactgatccactcacgagtagggtgttactctacaaatcggtccgaacctggatcacacctcggttgtctcatggaggatgacgaggctcctcgacaagaacaccaaccacgctttgttcacacgcaaagttgaatctcacccactgctttctagacgaactcacgacaggggtgtttcactatctaccgcttgatacgatcactgctcgaccacgctaacatgcatgatgcaatcagtgatgcgtgaagcgtctgaactccgcggctggaaactct

SEQ ID NO: 39881 - DNA, 433 bp, Oryza sativa
  unsure (1)..(433): unsure at all n locations
agctttaaatgacagattacagcatattattttttaatactataaattaaacataaaactctgcgttgtcaaaaaaataccccaaaaaacattgttaaacatctagaacataacctgttactacaaatagtgattgtattagagccctttgtctctacaagcttccgttntgtttatacgattacataggataaactgaactgggttattcaagtccatctagaaatgaaaatgggaatcaaaattgaattgggttagtcgtacattgaaatggaaaccgaataaaatctattccgattgatgttttgtttgggcaacctacaaattattttcttgggaagagagatatagtacacatcaaaatacatcccagtgtgtgatgtgtctctgtgacacttgcctaacaactagaggacgtcttacaaaatttata

SEQ ID NO: 39882 - DNA, 177 bp, Oryza sativa
acctcctactgatagctactttcataaacatcagatacacatgcacgcagtggaaatgtcttacaaaagttgtcgacggtgtaatgcttactccacgcctcaatgtatactatgtgccgtcgtgagttgcagagcttctttgcttaccttctatacaactggatgaatactcgaaca

SEQ ID NO: 39883 - DNA, 425 bp, Oryza sativa
agcttgtctaaccctagcttgcataccattgtttcatggactttctaagcacagaagaatcatacacacaggagtagggtgttacgcttcatagcggcccgaacctgtataaacctcttttgtctcatcgtcttggaggagcctccgagatcaagatcacacacacagtttcgctcaccaaatcctcgaatctcacccgctgcccccggccgaactcacgaaaggggtgtctcacgatctcccgctagagaggatcactcctcgacaacgctcctatgcatcaagcaatcactgttggagaaaccgtcttaactcccggtatgtaacccctgtagtctcgggttgtaaccccctgtactacgaattcggtactaaagattagtctcggttagtgttaccaacctggagtaacaccaaccgggact

SEQ ID NO: 39884 - DNA, 437 bp, Oryza sativa
  unsure (1)..(437): unsure at all n locations
ctggcctgagaacggatagctgatataccagatttatcattattatttcttcagncaagctagtatgttacttcgtaccagttccaaacaaatgataaatataccgcctacctaaattcaccttaaagaattccacttagataatgcattggccagctacaattacctctaaatccaattcatataccccgcgcctaaatttgaaaaaggaacatggcactcaccatggccatctttcactaattattcaaggccaaaagtttgggcccaattgattggaagctgctttagccaccttcttgaagtgattttatcatgtgagaatgcttcgacttcacctgaggcactcaaattccgttgctatactacgaaagacttagtatgggaacatagtctcggatcatatgctgcatcaataaagattcacgcttctaaac

SEQ ID NO: 39885 - DNA, 424 bp, Oryza sativa
agcttgattgagaggggtatcgaaccggccaccgctaaatggccgaatcgatcgaagttctggcactatgctcacggtggaacgcttaaccccgttgatggctccctagtgttcagtgatcagatacgcgatgctgcaagtcgactaacggacgtagtggaaacctcttctcagggcacgtttcgacccgacaaagagaaggacgagctgtcactcgccctgcagactcccgagcatctaggacgaacgcgagggaaaggcgtggttccttggaagattggattcaaggaagacatccacacgtacaggagtcggatgaggagcaagagagataccgaggcgaagattgcagatcttgagtacagggtatcgagctacgatctcagcatgcaagaggagggtggcaggaaggtcgatgaatgca

SEQ ID NO: 39886 - DNA, 341 bp, Oryza sativa
tctgtatcgctgatagcaaaccggcgtgtcggtcatgcagaacacacacaattggtctgttatcaacaacacacattttaatgtgccgcataaaccatagccagcttgatgtattctcgctttcaacaaatgcaaaagcaacaggaacgacatggctatccgcgtcgactccgatcgcggttagaattgttcctctgtacttgcctatcatgaaagtgccatcaacacagagcaaaggaatgcaatttctaaaggcctctatcatgcacccaaatgactagaaagcccgacgaagaacattcttcccatattcattcacctcatcgagaatagccatgtgt

SEQ ID NO: 39887 - DNA, 347 bp, Oryza sativa
  unsure (1)..(347): unsure at all n locations
agcttaaccggnggtattatggatctcactgctgngaatagcccgccatattatatagtcaagataagagaacgtataggatacatgacgaatcaggcttatatgcaagcctgttctgcttcttaggaaatgaacatgcagtgaacaccctggagcctctgggcatgctgggctctttaccgagccaggaaataacctagcataccatttagaggattaccgcgcttgtggctattaaccgggaagcggacccatggagagatattactgactctgaatggcaatgatgatttattttttcttgcttggatgccgaagcggccatcaagaatgaccacatgcaacgc

SEQ ID NO: 39888 - DNA, 376 bp, Oryza sativa
catgtgtgcgcgagtgaaatatctttaaaagcatgacgcacaatataattttttctcaattagcatagacataaaacatggtgagtatacgtgctataatcttttggtaaaaatgtgcaccataaagttattttatagcagtagtttctaagatagcactctacgtaccatgaccgatatgtaaacatttatactaataatttttttctcgaatcaatggaaatatgttaatactgctaataaagacacaccaatcaaattttattcaacacaatgggaaatacatgtaatttgatgcttattgttgtgtgacacacaaaacccaaaatttattcatggttggtaggacaatcatttacccggagcactaaacaca

SEQ ID NO: 39889 - DNA, 365 bp, Oryza sativa
  unsure (1)..(365): unsure at all n locations
cttgagctggtcccgtatgagcggagagacccactgcattgaatgcctgctcagcacctcggccgcaatggagatgtcaagaatggtcgaaccaattacactcatttgagcttaagccacaatagaccttccacggcccatctcatcacacggtatagcctgttaagattattgcgggcgaataagttcatctgagggcccttaacttatcaagaatccgattntgatccttcaatcggaaaacaatacgtaacgggtccctcaactatcaaaactagtgcaaaataagttccaatgatggtttggacggcgggttcagctgacgtgatgtctatgtggctaatttgactccggcttcatctgac

SEQ ID NO: 39890 - DNA, 453 bp, Oryza sativa
  unsure (1)..(453): unsure at all n locations
agcttgtgttacatactgtgctaaaggggctcttaaacaaacatgtgcggtgtgcgcgtgtgcacatcctccgtgtaatagagagaagtttggtgccaccttttacagtcctaattttgtactgatgcttaattatgtccattgattcttctacaatttcacttaatttggcaataatgattgaccaagttgagctattccccatgttctatatattacaaaccaagtggtgtttgcatgcagggaaatttaacgtgaaagatttattaaatttactaatagtggaatggggcatatcttgtgcacatagcataagtgctccaaattatattttgttgtttagaagttttntaaagaanaaaaaatcctagatataggggtgaacatattctgtattcataaaaaatgtccatactaggtcaacttcaattgctagattcggaaatacttaat

SEQ ID NO: 39891 - DNA, 394 bp, Oryza sativa
  unsure (1)..(394): unsure at all n locations
tggcctngggccaaagactgtcgacagccacgacgcggccaggcccacgtcgcacgggtggaggaggaagagccggctctgctcctagctcacgcaagcatcgagctacctccagcggcaccggccgcagcggctttcctccaccttgatgagccgaaggtactcgtctccctctgtgacggctccagcaacgacaaggctgatgggtggtacctcgacaccggcgccacccatcacatgaccggccgacgggagttcttcaccgagttcgactccagcgtccgaggcaccgtcaagttcggggacgcctccggcgtggagatcaagggtgttggctccgtcaccttcaccgccaagtccggtgagcacaggctgctcaccggagtctactaca

SEQ ID NO: 39892 - DNA, 414 bp, Oryza sativa
agcttcatgagttccaacacgcatgacaacttgctgtgcttcgacttgcatccatcatacaacggcatctggcaatcttccaccaacttactaaacttctcataatctctgtcgttgtcctctgcgtcttcaatgtcatgcaacattgtagatagacattgagtgtccaaatctatggtctctccatctaaaggagaaggtacgaacatgccttctcgagctgcggcggtgttctctacatcctgatccaacacttcttcagctgcgacatcaggcgcctcttgctctccatgcttggtccagcaggtatatttcttcatgaatccattcattatcaaatgagcatgcacttcatccttgtcttcgatcatcttgtcattcttaccagccctacatgggcacaacatgtgcatg

SEQ ID NO: 39893 - DNA, 475 bp, Oryza sativa
  unsure (1)..(475): unsure at all n locations
ntaactatcggctagaagtaaaactttaactattattgcctcaggtaatatcagntaaaatttaactggcattcaaatctacaccacgactgtaacatacccaagcctataaacctgagaactaaatttaatttaaatgcatcatgtggttgtggagtgattttaattgtttttggatcttaatagtaatatgtccgtactaacgttacggtgtcataacattttttcttaataagttattaaaattcgactgcaatgaanataatttttctagaatctgtccatttaagctttcagtccaaggtcatatataaaaaagaaatattatgatataacttanaattatttattcaagatcatcaatgagtatatctaatcaatttaatatacactatatgaanggcatatatcaaacaaaaatattatgatataacttaaattttattattcagatcatcaatgattatatctaatc

SEQ ID NO: 39894 - DNA, 457 bp, Oryza sativa
agcttcggaggatccctatgcctactaccagtatggagatgaagacgatggcgctcagtaggtcttagttacggtcgttgcctgtggcaatggcgtgccgctgccttaactccgctgccttacctacttctgtttttgaaatgtattccggaccgctcggtccgatgatttaagactgtgcctgcgggcttatgatgtaataattcgtactagactctcgtgtatgtgcacttgatatttcagctatgagttcgtgtgtaccagactacttgatccagggaaatggtactgtttacacgattgattcctgttataaaaacggggttccacatggcagcggcagcaaaggggagatgtggatggtggtggaggagatggatatggtgccggtagtgattgggagcttatgatccaccagcagtggtgaaggaagtggatccgatgggggtgatgcatg

SEQ ID NO: 39895 - DNA, 482 bp, Oryza sativa
  unsure (1)..(482): unsure at all n locations
ntctttcttcgtgagattccaacgagctcattagttgctgaattgtgagagtcgacaagtctttcgactcctcaatagcagcaacaatgtactcgtatttttcaggcagactgattaaaattttctccacaaccttctggtcgtttatatcttcaccatagaggcgcatctgattaacgatctcaataactcttgggaaatagtcttttaccttctctgactccttcattagcaaattctgaaattgtcttctcaaggtttgaagcttcaccgcaagtaccttctgagatccttgaaactcctccttcaacttgtcccatgcttccttggatttcttggcgccaataatacgcggaaatagactttccgcaactccttgttggatcaagaacaaggccttggcgtccgacatccgatcctctgccaaagactntttctgttccgccgtaagagttctccagcggaatactcttgatagccat

SEQ ID NO: 39896 - DNA, 418 bp, Oryza sativa
  unsure (1)..(418): unsure at all n locations
agctngtgatatgaaagaatgggaagctctcgaatcatacagaactattgcgggtatggagttgacagagaacatacccatcacaacgtctggagcatcctgagcggtttcagcttgaatgtgattcacacggcctcgaccaaagtggttggaagcatgtgaaccttgtccacttgcctgagtgctangacgagactgagctgccgctggagtaggagttctggcagtgctgccattagcatgccctgagttggtgttggtagaattctgagggcactagcatagtgacccatctggttgcaccggaaacactgaactgctgatggtccctgtggtgacttgaaagaggtaacactgtttggcgcagtattgccactaggggcacgctgctgtggctggngtgccgggcggttcatct

SEQ ID NO: 39897 - DNA, 379 bp, Oryza sativa
  unsure (1)..(379): unsure at all n locations
tactaagctcggaggtctctcgacgtggctgatccccacgggctgggtgatccgggttagtaatgtcgggtgggtaaagtgtaccccctctgcagaggctaacaaactgttcgaacagccgtgcccacggtcatgggctgatgtgaggtgattcctagcgtagctttgtttgactactgccttgtgaaattgctgctgtggaaatgggatcgatgtttggaaaatctgcagctgatgggatcagctaggcccgggtggccgtttgaaagttgttggcccgggtggccagttgaaagatgatggccgggtgccaaccttgaatcaattcanaagactgatactttgcacatactccgaccggacgagacgcactgtctca

SEQ ID NO: 39898 - DNA, 67 bp, Oryza sativa
  unsure (1)..(67): unsure at all n locations
agcttgcggccgcacgggatccaacggacaacgctctctctctcgcgccgaccgagcggnggagggg

SEQ ID NO: 39899 - DNA, 491 bp, Oryza sativa
  unsure (1)..(491): unsure at all n locations
ctcagctagataggcacggggctcgggtaaaaggcgcatatggcgttgccctgcccaggttgcatatggcaaagtgcgaactagctaagctgtgggcggaaaaagtaggcgatccaaccggacaaaaactgcaaaagcgccatatcttcttcaccagcatcgcactatgagtcccctgatcccactcatccccatcgtacgggttccgtcatggctacattctactcgctggtctcgtacttgccagtagttggtggctacttagccaaagcatgatcatatcagtgaagtgacaanctttttcacgcagtgcaagttagaatacggagtacgctgtcatgcgattggatggacgatggatcatataattgctactcctatctagctggctntggatcgatcgattttctcgcagctgatgatggagagtagacgcaagatcgacgtgcggtgccctgtgcccacattcagctgtccagcagaaacgatga

SEQ ID NO: 39900 - DNA, 403 bp, Oryza sativa
agcttgaaaggacgatcagttgagctgggtctggcttcgtatccagccggcgggaccaaagccagccgctacagaagagccagcacagggggtcccgggtttcgacggcacctggagctcaaaactgcaagagtcctcccaggagtgaaccgaggcggtaacaggttcatgggccaaccctgcgcttggcccctgagggccatggggaagatgttcgtcatgacccggtcgccaccctccgccgcctctatgatcgccgtgcagatctggagggactcggaggggtcggcgccatcgtcgtacttcttggtgaggcagggctggagctttgggggccctcggacattccgaagactcgccacaaagacctggtagccaagcttacctggtggggatgtggggg

SEQ ID NO: 39901 - DNA, 489 bp, Oryza sativa
  unsure (1)..(489): unsure at all n locations
actaagcttacgggggcctcgtccatgatcagcacctgcgagaagaacgctgccccgatcgtcgactcctgaaaagcataaaatcttcagtccgaaactgaacttgatgagaatttaaacaacaattaagcaggtattgtttaattgcctggcaatcgtagtacaatcctttggcaaatcgaaccacgatgctcgtcttcccggctcccaagtcacccagaagtacctaccaaaatattggaaatgcccagataaactgacaaggatcaaagaaccaaacaatcagaaaattcagggtaagacatacccaccagcttggcctggataacatcgctccccatcgatcgatcgctcctagntcgcttttaccgcttgccgttggatcangataattcanaattganatgcgagcagaagtgaagtagcaatgcttntctttttttcagttgatgcanagacttgtagctgtccgcgcattggatggataaa

SEQ ID NO: 39902 - DNA, 466 bp, Oryza sativa
  unsure (1)..(466): unsure at all n locations
agctntagccgattatgtacttcgtgtcatacgatcagcaacttaaatggctatattgatgttttggatacaatatgcagtagcagttcttttagttatccataaataaatttttaaatgcttagtttaaaaatatttttaaaatagcacgtacagatttttcttgaaaaatatgaaacgtgctagccttttagcatgcacaaccatcaaagcataggccaaaaagcaaggcttgagaaaaccagaggcactacggtgcatcatccttccttgaaatggaattctatgctttggttccaaaaaataaaaatagtacttgaaagtacagaatataccggattttcaacatgcataactattaaaccaaagcctaagctataattggacaaaaccaaagatattatgatacgccatcctcctttgaaaacgaacttgaatgctaaagcacgatacattcataatttca

SEQ ID NO: 39903 - DNA, 388 bp, Oryza sativa
  unsure (1)..(388): unsure at all n locations
tagtagtagtagtagtactcactatactacactgtgaccagtgatgtgcgagtaccagtaccatggagggggaccaatggaatggaaaccagaacctgatttccaatcgggacatgtcctccacattggcaggcaaaagctgcagctagtgaaaagttctccctcacttcacttcctcaggaggattagcttgtagtcctagtactaatactactggacagtattaacaactggacaaacagagcaagttctgctttgcttacactgtgacggcgtggccgccgaaggtgtagaggatgttggtggcgccggtgaagtacagcaccagcttggttggaccggtgtgggtgatgccttcngcctgcgacgcaaacgatcatcagtcact

SEQ ID NO: 39904 - DNA, 438 bp, Oryza sativa
  unsure (1)..(438): unsure at all n locations
agcttcaaatgtccagagaagattcctcctttntccccttttactgagccgatagttcacctgaaacaacaagagaaaatgtgtgaattcgtagcggatatgacgtagctttcagcaagcaacttctcgagtcgccccctgatctcgatgggaatatatatgcacaaaaaagcatatcggggcatagccatagcccacaggtagtctgggcccaattcccatccctagcgggggggtgttcgcggcaacggtgaggcgacggaatttgaaaaaccgaagccccacgaagattccagcgacgagtcagatctgaattgcgagggaaccctagaacaaggacgaaccgcgcccaaaccctagacgcacagcacaaaaacctagccacccactcagaatctcccgcggctcgcgcgtctatacgtacagattccgagcctg

SEQ ID NO: 39905 - DNA, 411 bp, Oryza sativa
  unsure (1)..(411): unsure at all n locations
tatattgatatcttagtataaagtagcatcggagtagtagccgatacgcgttaaatctacaacatcggctatgctatgaacatatataatctttatattaaaggacttttagacataagtgagttatactgtctcggcaagctggtccgatctatccgaatcacttggtttaaacatatttcgatttatagattatatactgctaatatctacagtcgatcgactagatctaactttctttntgctttatatatcattgccgatctaattcacgttacatcggctagcttacaaacgatacgtcatcggcatgtggccgatcgactatctgttatggattaactatggttctttggttggttcttggtggacgcaggatcaaaccaactggcatgcccttaactcaagagc

SEQ ID NO: 39906 - DNA, 406 bp, Oryza sativa
agcttggagatttccacttcaccaagaagttcattgtattgcgagtcaaggaagacgttccccgaagagatgtccaggtgaatggtggcgacatgatggaggaatgccaacccttcggcgacatcgatggcaatcgacaacagccttggccagtcaggcttctggttgtcaccgtcagggttgtcgacattgtgcaacagctgaagcaagggtccattctgcatgtgatggtgcagcagcaacgcgacgtcctcgtagatgacatacccaatgggacgaacaaggtttgggtggttgatgtgcgaaagacactcgagctcccatatcatctttgtctggtgatggataaccgcacgatcaactgacttcagcttcttgacacagactaccataccggatggcatga

SEQ ID NO: 39907 - DNA, 452 bp, Oryza sativa
  unsure (1)..(452): unsure at all n locations
tcttccaagatcttcctgtgccttttcctctcagaatagataatgtgaaaaagattaaacttggtcacatccattcttgttcttggntaccaattcctactgcagtctagccaccgacggcattgcccatacatgaagccattagccatggatctgaatcaaaattctcactaatcttatcctacttgacccgatataaaagactaaaagacgaagctttgctgcgatgcttgccgatgtaagcacatggcatatcacccaaaaagcatttcttgagcttcttgtgctcgatctggtaccaaatacccatatataacatcgagaatcctcgtttgagataccaaatagcccgtatgtctaagaaatgccnaannaaaactaaaaagaaagaaaacaaaagccccagctataacaaatcccttctcatttccatttcttggtntatctgaatc

SEQ ID NO: 39908 - DNA, 424 bp, Oryza sativa
  unsure (1)..(424): unsure at all n locations
agctacagggcctattcctgcgatcatatgcaatctcaccggtctccaaatggtcgatttctcggagaacaagctgaatggaaccctgccagtggagctctctaaactcgcaaaccttcgagtcttcaatgtctcccacaatctactatcaggaaacctccccatcagtcacttttttgatactatccctgattctttcatcttggacaatgctggactttgcagctcacagagagataattcctgcagcggcgtcatgccaaagccaattgtatttaaccctaatgcctcatcagatcccctctcagaggcttccccaggtgcccccagcagccagcaccacaagaagatcatatngagcatctcaacactgattgccattgtgggtggaagcgtgattattggtggcgtggtaactatcaca

SEQ ID NO: 39909 - DNA, 403 bp, Oryza sativa
  unsure (1)..(403): unsure at all n locations
tctggaaggttccgggcgcggatccggctcggtgggttgctcgctcgtggctggaggtagcggcgcgctggtggtatcggcttttggtctaatgctttgcttcggtttggagtttggaggtgggggttttattgatgcttttggttgggtggatttgttgctgcagtttgagcggcgggagcaactctgaggtttggttttcctgagatggaggacctgctgggcgcggaggtcggcaagaacgactatgactggtgatcatcgatttcgttttcttcagtttctttcttttttttntgtttggttcaccttcgctgattttgattaatctccttttgttgcggtgtggtgatcttcgtagtgtatttggtacagcacaagtttatgtgaagttgtagctgta

SEQ ID NO: 39910 - DNA, 461 bp, Oryza sativa
agcttgaacagatgaactaacagctgttatatttttttcaggtaatatgaataataaatctccagcctgtattcgtagtgcatccagccaaaaaccagaaaaatagaagagttgttggacaaaccccaacatgcttgaactgaagcagaacagtagaaaaagtctagaataagactctaaactggactaacaggtatactaatgtatgtcactagtcactagtcagccaatgaactacgcagaaagtaattatgctatgctgtgtacttctgacagcttattagctagtaattcgcgttgaggggataaataaattgtcactataaaactatatccgcatcgtagtaaacctaaatagcccctccatgactctaccggttgtaccagtattatcaccaccagtagaaatgatctcaacaattgatttatgagttatatcagtagttgaggtggtagtataa

SEQ ID NO: 39911 - DNA, 435 bp, Oryza sativa
  unsure (1)..(435): unsure at all n locations
ggcgcacacgtaatatgttatatgtgctctatatatttaaactttntatatagcatacctaaaacaaaagaatgtgtctcttaaggaacgaaaatcgatctcattctttgctatccatggatgttagaatttcccggaaggcaccgaagctgcaggctatggagaactggaagacgcgaataatgttgacgtaaagattcttaagcacattntatttttctactgaacagcaggtctgctgcctggtcagtttgggtacaaagtttgttgtgcaagaaacacatgaaaagtttaaataaaccttggttggattttcaaccaatgataaggaaattctagctagaaaatgagtgttcacacttcataccagtacgagtntattgctactaaagatgttgacgtagcttcacgtgtgctcacgattagctagagtct

SEQ ID NO: 39912 - DNA, 458 bp, Oryza sativa
  unsure (1)..(458): unsure at all n locations
agcttatttgtagttactattgtatcaaaatttgtgaaagcaaaagatgaatgcatttgagtaggggtggaaacgggcgggtatttcctgcccgcccgcccggccacattatttcaagacaaattcggttacccggggcttttcatggatccgaatacgggtcttttttgcggatatgagatcgggttcgggaacgtagtatccgacgtatacggattatccggtaaaaaaatcggatattacccatattatgtttttgtgaggaaatttttggtactatgtattggttctattacgatgtattggttcctatttatttcctaaggtactaatggactaatataaccgtattatagataaatagaattggtaaatggttattgcccatgtgatatataagaatgtntcttcgacttgatatccaaataaaaaattgtaaccaatagtgtacatatcta

SEQ ID NO: 39913 - DNA, 405 bp, Oryza sativa
  unsure (1)..(405): unsure at all n locations
tccagagattggctggtgagtgggaaactcgcttggctgatcgtttattcgttaattatctaggatccatcttacatttctgatgctttggaagctgaaattatgctatataagggatatatgtgcctaagtattgaaattgcatggataattgataccttgtaaaacggtgaatgcacaaatatcttaagttgttattgtaactcataatgcttccattttgcgccttttttgcatttttttttcatatacacatatttcaactttgacagatgcatattgctctataaaaaaaagtgtaaatattaatcatgattnttatttgccagtcaatagacatttcattgtngagagaatgatgccatgctaaatngngntctaaactttgcagccaacaatcacagg

SEQ ID NO: 39914 - DNA, 390 bp, Oryza sativa
  unsure (1)..(390): unsure at all n locations
agctnttctttggagaacgattcaagagatagaccgttgtggacatggcctcaccccagaaccgcccaggaacacccttcgccttcatcatgctgcgggcagtggcgacgatggtttggtttcgacgctccactactccgttctgctgcggagagtagggcaccgtcaacttccggccaactccaagattggcgtagtattccccgaattcgattgaggtaaattcgccgccacgatccgtgcgcagcgcatggagtttgcgcccggtctccaccactgcacgggcctgaaagtgcttgatggcgttcgcggcctcatccttgctcctgatcaaggttagccacatatagcggctcatgtcatcaacaagcaacaaanaatagcgattac

SEQ ID NO: 39915 - DNA, 443 bp, Oryza sativa
  unsure (1)..(443): unsure at all n locations
tattaggacctatgaaactcagctcgatgaatttgagagcaagtntatggaggggagaatatgagttgaaatggggtggatttccctctcccggtcagctggcttatataaggcaaccacaacggtcaaaattgacatgtgagccccattagctgttgcactaccaaaagtggcatgtgaccgttgcctggccgcgtggttcggccgaacccctggtgagcccaaccgaccccacttttggccattggaatccaatggcagtatggttatggcacaacgaattttcgatgaaaattttattntattttgctcaaaatccacatctaaatgcaactttagaaatttgaacatgcattgatgcaacaaatatcanattgatagaaataaatatgaagatacataccaatttacctggttgcgaaggccacatgtttttgatctga

SEQ ID NO: 39916 - DNA, 379 bp, Oryza sativa
  unsure (1)..(379): unsure at all n locations
agcttgccgctcgtgtaaagcgtgtggggtggnctggatcgagtaacagcaacgacctgcatgcagattggaatattggatttggatatgataaaaatgcagatagcagcatttgacgaggtgcccacttggacactcgcaacgctttctctattggcggagaggaatattgtaataagcgctgcattggcattntgtttgtttattggattgatgatgcattggcatttggcagttttggtatggttctctgcagctgcgcttcgcctattggtgccaatcctatgcaagttggcacttggcacagtggaagtccagtgccttttttttttttttggagaactcagtccaatgcaagtagactgcaagaaccccccct

SEQ ID NO: 39917 - DNA, 440 bp, Oryza sativa
  unsure (1)..(440): unsure at all n locations
tcgatcatggcacaaggagtctcattgattgccttattaagaaaattctgacattttagaattgattgccttaataagaaaattntgatttttaaattttaattttgaagatgttcttaatatattttcaacgttgtttgctaaatctatatctatacctatatacctatttaaaaaataagtaaggcttctcgtaatatttttggtccatttttttcgctgttttctttttctatcccgctttgattttttttccggtgtttcccacaaccctttntttggatctcatccaatttttccacacgcgtgctacgcactatattattttgtcactttgtatattgcccgatccaccaccttgatacgtttnctgcttcaattgattaaaaaatcgattccctacctcttttgatttggctctaattttcccgggattaatc

SEQ ID NO: 39918 - DNA, 463 bp, Oryza sativa
  unsure (1)..(463): unsure at all n locations
agcttcatgagcaataagcataggacatgattatttgatagagataggatgatccaaagaataactatgagctaattagcacataatgagtctgatgagcatatagagctcctttggatagataaagtaaagaaaaaacacatacgattcaaaatcctgtaaactgcgtcactgtatcatcctttggttggaatatttggtcatggaaatagtagaggaaaaatntatatcctacaaatgcaatgcaataaacacatgaaaattcccatccagtcggagctcatatttccatttcgtttaggattgagacgatcaagccactaaccccacactggatgtgagagggacaatattaacgaatggttattgcttagttccaattatttaagcactggtagatgataattcggttatactccgtccgaacaatcagtccgacaaatttcctgtggctgttcaatcc

SEQ ID NO: 39919 - DNA, 56 bp, Oryza sativa
acatgacttgtaaatattaagagattatctgcaagttaccaatcacaaagtaagaa

SEQ ID NO: 39920 - DNA, 457 bp, Oryza sativa
  unsure (1)..(457): unsure at all n locations
agctntccttgcangaataataactagttgtctgtatagtcactcttatatttgnttggaagcaaaagcttttgattttattctgtttctctccaacaataacatcacaaagcttcaaattttggcaaccatgtcataaatcatcaggaaataatttattgcattttctgtgcatatctgagagattatctgataataatttcatatccacacaattatgcaaactttcatttggcaaacaattatgcataaaaaaatttagaaagggcattggttaaatagataaatcatgcacttgtggaactatcatatgacttgttaatggaaataattgactaggggaacactaatttactacaggtatagcatttgttaaactcacaaagactaaagaatggaatgatccgtcctaaattttttgccagcccatctttgaaatacaagatgagccatttct

SEQ ID NO: 39921 - DNA, 475 bp, Oryza sativa
  unsure (1)..(475): unsure at all n locations
tatggtagacttatagcccactattatccttgctctgagcattcctctcctatntggncaanattaaaccaagttgactagaaaaaagtccaacaacttataatatgaaacggagggagtagctctgaagctgctgctgatctccatcttcnaaataattcagaatggtcctcttgtgcctgtcatcatctccacaagatttganataccgggggtctatcaccatctgcacaagtcttgggcataagatggtcctggcttagttagcttacanaatgcanacgcacactttattntgagccagaaatttcatagacacagntgagctcatatgcatactttacagatgatgggcacaacaacgttttctactgactgtcagcctgaccactacgaaacggctgctccangtcttgcagcttcgagcagtgcctgatgtcacattcttatccctcaatcactctgatctccactg

SEQ ID NO: 39922 - DNA, 423 bp, Oryza sativa
agcttcatccttgcttgttaattaagatctatagttgatagttataatccatgtacataaatatgggttggtatccatgaaaaagattgggaaattctttgttgaaactaataaggaaaaatggcgcgtattgttcagcatgcatgcctttcaactttttttctaaaacaaacaacacagtgcgatgtttcactgaatagagcagaaaaaaattataaaactactatcctaaaacaataaccaagaaaataaaaataaaaaaccaccaccatacaccgacagcacctacacacaaccaaggaaagggctagcactgggaccagccaccactagacccagcaaattaaggagctatagtcaaatcgccaaaacaaatctctaacaaacaagcacctagctgacaacacgacagcgggatgaaaa

SEQ ID NO: 39923 - DNA, 447 bp, Oryza sativa
  unsure (1)..(447): unsure at all n locations
gcacaataatattattatcctaaaagatcatagtacaattatatgctccaagtttcaatcacattccaaacagaatttatgctctaatttgggacaataattatatatatttggttcattatagtacctctcaaaagaaaaacacagtgttcagttcagtagtgccatctgcatttgttggagaagattcccacagcttatatatattaacaaggctccatttgcaggggttagtgccttagtgaagtgaaggcagatgcccatggtgagattaanagggcgtttaaattatatccaaatcataattaatcaccaaggagaaattacaggagaaaaactggttaaaattcttggtctaatgggtgacgccaacacactcacatcgaagaggagcttgctgacgcttcagcgactatagngacacatgctctactacatgtgtggcca

SEQ ID NO: 39924 - DNA, 389 bp, Oryza sativa
  unsure (1)..(389): unsure at all n locations
gcacacaaacattggcttataaacaaattctaaatagtgtagatcatatttacacagcgaaaaacaatacgtacgaaaagcagcaaatgaccaaaaactcagaaatgcctgtatttactgcaaccgatgttgcaaaaaaaaatcattctatgaaatgaaaaatatttacactcggccagctggttacagcattgtatggtctacactctagcgcccatttcagaagaaacaaaccgtctacgcggcccgcattgacccgaataaataagaagannnnnngatcggccagccaacttctcctgatgcaaaagcacgccttcatttttattgccgaaacattttgtctcgccggtggcaaagaagaattgaaaatggtcactccattgcct

SEQ ID NO: 39925 - DNA, 418 bp, Oryza sativa
agcttctagctagcatgtttgcttcttcttgtgaattgtattctgagaacaataggtcatttgcaatttgcttcctcatgtttgggatatattctggtctgatcatatctttcaagtgcatccttgggttccaccattccatgcacttcatagcgtagattccgcaatcatgccttgatgagacaaaaacaaaaataaatcatttaagaaaaacaaaatcatggaaaaaaaaagggaggggttttggacaaaaaagaaaatgatatgtaatttgcggatgattgttgggttgataggtagttccccattgttttggcgagtaattggtttggtgggttgataggtagttccccattgttttggcgagtaattggtgggtattggatatcaaatttactaaagtctttctcacatctga

SEQ ID NO: 39926 - DNA, 489 bp, Oryza sativa
  unsure (1)..(489): unsure at all n locations
actcagctntcattaatctcttncagntattgtgttgntgcaacctatgctgattagtaatgtccctgtgcaccttgattcctttattacattggattattttattgcaatgtttacaacttaagggatccaatctgcattgtgccttgcacacatgtcacaaattagtaggttacatcttcctttaattttgatatgaatatagatgtcccttttcaaaagatgataaaaaactgtatggtcaaaattgatttaagcgatggatgtatttgttttaatttgctgtgagctaattaatactatgaatttcttatagctcaagttctggaagtttacaaaattaccagtcaatgtaaggttgtctcggtttagtgtctaacctttggccgtgcaatgtgtgtaaacaatatactactattaccattcaagggtatctgaacgtgaatatggaatgtacctgaagtcagtatgtggacattacctttgcat

SEQ ID NO: 39927 - DNA, 438 bp, Oryza sativa
  unsure (1)..(438): unsure at all n locations
agctntctttntcttctttaagcatattatttaatatcattattaattagcagttagcccatacatatcagcttaattatcatgctccaagtctgtatacaacgattaattatatataatctttatgaaatgaattaattaacggatgcatatatatgctgcaggttgtatggcgtgctggtgcccgtgcatccctgtcggccagatcgcagaaatcgtcgacaggggctcatcatgtaattgattaacctcatcgactcaaattctcttatcattaatatgattttactgtgcagatcgatgctgtttgaaattcccccaattttcataatttctcaaatagatcctgtacgttttgcacagcgtgcgcgttgaacgcggtgctgtactgcctggtgtccacgtgtcggcggggatgtgccagtgggtgtactcgtg

SEQ ID NO: 39928 - DNA, 464 bp, Oryza sativa
  unsure (1)..(464): unsure at all n locations
agaagagagaggagcgacgcacagacttgcttaanaaaaatagagccaaagacagcgcatggacttagtaccattgaagaaatataaaaaacagacagagccaaaaaagaatatacatacgtaataccattaaaaaaacgatgagctttagatataattttctattatttaaatataaaatatagcactatatagagttaagcaaatattaccgttggtttttcacttttccaattttagcatgaactaaacacacccgagaaagacataccagaatcttagcaagttgattgaaagggacgggaagtgggactgcctagacatccgtttacttctggcagaacatgcagttntacgggcaccaacacatacantaattgttcaagaaaaaagcatacataatcatacgcactggagtgacatgggagtacatttcttaatggaataccgcactattaacacat

SEQ ID NO: 39929 - DNA, 450 bp, Oryza sativa
  unsure (1)..(450): unsure at all n locations
agctntggcagcaacctatatacatagactctcacacacagatgtttcaatctcctctctctcactcactgcacaatacactggccaaacaaagtgacctagtagtaccgattaattaaaacaacaactactactactacttttttttccttatcatgtccataatgataattcataattgtgctcttgcattcttcctcttgccaggattcaatttgaattgcatgctcaacttactttcaaatatggacttgaaatagagtattgttggaaaactatcaatacaaaaacatggacttcaaatgtgtttgatttaaaaataatggtgtgtatctgcatgtaggatgtttgatctaaaaagaaagtgcttataccaagagnttgtttacgctgatgtagctgacaattgcaatatgttggttgatgtgcattgcaattttttctaagcta

SEQ ID NO: 39930 - DNA, 467 bp, Oryza sativa
atgatgaagtgggaagtggcgcgccgccttgaagcggtggctgaaagggggagttggatatggtcacatctttgcaagtttcccagactaatttgcagtagtcttgtgtggagtcctttgattgagcagaagaggatgaggtagagttgcacaggaaagggatagtccgaatgtttgggccggcgttgaacagctcagcagaatacggattgcatttctgaaaatggaagagagggaaatttgatacataaattaaagaaagtatctgtaattacatgaaggtggtatcttcaattacagatactctcttcaatttatttgatacataaattcaaataaattgaaagaattgctgcactcttatatgatacattacggaaggtggtatctttgtagtaacatggtagaaagatgagatattagtggtgaggcaatctgatatggcagtgaatcaacttgataacatg

SEQ ID NO: 39931 - DNA, 370 bp, Oryza sativa
  unsure (1)..(370): unsure at all n locations
agctngcatctntgaaataaccatgaaactcatgctccattngtgaccatgtagaaattgaattatgagcaagtaaactataccatgtagatgcaaaggttgataaagaaagaggaaacaactttaacttaagcaaatcatcattaccggccttaccacattgatcaataaattgaccgatatgctccattgttgttctagcatcctaacctgtgaattttgtgaagttgggcacctcaaatccttgcgggtatgggaccgaatctacatattcaggatacggcctttgatatgtatgcataactactttggattctattgcaccactatcccgcaagacattgtcatcatcttgttcaacatccacatg

SEQ ID NO: 39932 - DNA, 431 bp, Oryza sativa
gacctatgaaactcaagctttaaaaaccacctgtgtgtaaccaaatgagcttttggctttctcacaactacttttctaaagctacttttcaaaaagatataacccacatcttctttttcaaaagccaccctttattttcggccacaaagccacatgtgttattaattaatttgccaattaaaacctgattaatggcgggttgtgagcacatggttttgatggtcgtgctcatgacaattaatgaccgattcgcgagctactgttgcgaaatattaaccgtaccatccacaagctagcgtgggcaacggctttaccttttgtatagcatagctcattaattaataatcaatcacgattgaccatcgtgagctaccattaaagatataacaatatgtgatagtgagacatgattaaccccattaatgagctat

SEQ ID NO: 39933 - DNA, 432 bp, Oryza sativa
  unsure (1)..(432): unsure at all n locations
agcttgctgctccgganatacccagtgggagcccataccggcctttnggggcgtatgtcctgtgctctccggatggtgcggcgtgtgtcgacaatccaacagcagcggttcagatgctatatgcaacatttgctgcaaggcgtgctccagagacaggcgcggtgccacctgaggctgcacactcctgctacggtgacctcgtgctgagcatgccgcaccacttgctgctcaagaggcgccttggtgccacagtcaccgcacctgccgcgtccaactacgacgtcggcatctccattgcactggaggcatcaggtatcaccggtgaagctacagaggcagcaccggcacggcagtggctgaagacgtcnaagcgcgtgggccggagcccgagcctgaactgtgcgagcctcgcaacgcggttgggacggatca

SEQ ID NO: 39934 - DNA, 389 bp, Oryza sativa
  unsure (1)..(389): unsure at all n locations
ngaagctgcctcatagaaatctacacttttgatttctaatattagtaattntaaacatacataccagagtcttttacgaacacttacataaacaattcccaatgtggttntggtgtcttcgtttgtacgagtacttatataaaataaactatagcaagtatttatttgcgaacacgagcaataatttaataatttataaaaggatagtattttttacaacaagaacaacacatatagtagatctgagatgagaatgcaatgcctaatccaacataaactagaagagttagagcaagttttttttaatatttatgtaaaccgttctaaatacggatactacttgtctaacccaaaaaagaataagatttggtaataaagcgaatcctcga

SEQ ID NO: 39935 - DNA, 390 bp, Oryza sativa
  unsure (1)..(390): unsure at all n locations
agctntgcaactaatatggctggttttgacagacttctagtggcagcgtcgtgggtactaccgagctgcgactttgcaaggtagatgagtttcacgtcaaccgatagcatgctgactagtgtgaattaatagatgtaaaaccacatactaccctgaagtgaactagtcaaggatatcacggtttaagacatttacctaagaatatctaaggagcaggagctaacaaagataatcagtctcagtaccttaacaaacccatttggagtgtcctgcagcacacaaccagaaggcagccttcggcagttcatgtttgcagtcgaggatgcagaagtaatgccctgatccctcatcaattcatcagccgaaacgtccactacagcccatacacca

SEQ ID NO: 39936 - DNA, 402 bp, Oryza sativa
ctattacgtgacctataaaactaagctaataattcgctcgcagttacaggcgaaatctgtagatttatttgttattagactacgtttaatacttcaaatatatgtctgtatatctgatgtgacatgcaaaaacttttcactcctgacctaaacatggcctcgtttgtagcaatcggtgtattcccaatcttatctacctacctacatatttatttgcgaagcctacactaattaatacaacccctagaaaaaaaatcaagttaattggggaagaataaatacagccatcttatataggttgcatcaaataataatggttgaaattttgcaaaacacccgcagaattgctgtcatcctaaccatcaataaattccttagtagaaaaaagaacatcgactctac

SEQ ID NO: 39937 - DNA, 373 bp, Oryza sativa
  unsure (1)..(373): unsure at all n locations
agcttcttcagcgacactctagtggaggattatttgccgagatccatcgccgatcggagatcgccggagaaagggctgaggtcgacgaactatggtttcttgtgggagcggngaagacgaagaacgcttgcaggcgggaggttttcttcacaataggcgggcttcaaaatggatcccccaaaattcctttaaatagacgcactaccgacggtgcgaattccaaggaaaggagagagatagccgccggaaatttctgggtccgttacgcgcggcagtattttggacttcagtttaaattcactcgtgaccgttgggcttcacatggtgttctcgattacgtcctgtctccacggttctcgcaccgggaacaaca

SEQ ID NO: 39938 - DNA, 457 bp, Oryza sativa
  unsure (1)..(457): unsure at all n locations
tgtagaacaattcatatatgacttatgtgttttttgttgttttacacaaataatttcatgtattctatagaaagtgcacagtaagcagtactgaagtgaactagtgatgctggctttggttgctattctatatatttgtaagatatgaaatatacctttcgttgctgccaaaacctgatgattccctttctcttcagtgtagacacttcttttacaagcacagaaagttcatccaatggctatttcgaccggatcgttgcagttttgatggcagtttgtatggcaatcattaatttagttcggtcagtaaaagatcttgctgcaaagagaatgccagataaaaacgagtcacaacacaagtattcaacattatatccagactcaatgccanaagagtaattccgaccaccttccccaactcctggggtttgtgaagctggactatattcgtcagtct

SEQ ID NO: 39939 - DNA, 373 bp, Oryza sativa
agcttccacgtttcgctctaattgcttgttaaggaccttgtacaccagcctggcgaaggttgctccggcattcttcagaccgaaaggcatcctgaggtgacaaaaggtgccgaacggtgtgatgaatgctgtcttggggatgtcggccgggttcatgcgaatctgatgatagccggaatatgcatctaagaagctcatgagttcgcagccgactgtcgaatccacgagctggtcgatccgtggcaaggggaaatcatccttcggacatgctttgtttaagtctgtgaaatcgacacacatgcgccatttgccatttgacttacgcaccagcactggattcgccagccactcaggatgatcgatctcttgaatg

SEQ ID NO: 39940 - DNA, 433 bp, Oryza sativa
  unsure (1)..(433): unsure at all n locations
tctcggngccatgagacaatgccgtctaaatgggtgtgaactgtgaactgtggcaactatgatgagttgatgactcacgtgaactcacatgccttcctgagtccaaggactattccagatttctagtactatagccacttttatgttgttatcatcaggaagcatatccattgtagagctgcttcttttttttgaacagtgctactaaatccacttcacctaccacataaacaacttacataaagtccattcacttctcacctaaccaaatatcttccctatggacgcctaccaaacgacgtgaatcaagcaacttactacataaagcatctacgaactggccaaacaaagaagaacggcaaatggttactggaatagtgtaatttacatgcagggtagcataatacagtatgcagcagagaagaactcacat

SEQ ID NO: 39941 - DNA, 443 bp, Oryza sativa
  unsure (1)..(443): unsure at all n locations
agctngcaagtgcaaagccttgctgctctgttgctattgctgagctcgcatgcagagatgcactgtccaaaaggcagcagatcagcagagagagagaggagagaaaaaggagagggacagccaacgaccaacctgattgcaacagcggagccgcgcgtacggctttgattctctcatctcatctctctcacggctttgcaaattgcagtgcagcatcgatcgccaccaaccttgtggacaatcatcatccatgggacctcacattatgttaggatgatagcttttgacaacacacacacacacacaaaaaaaaaaagaagaaaggaacaaagtttacatgcttaattactttgttaggacaggatggctgtaacgagagagcttatctaacgccaaccactctggagcagcagagattcagaaaggcagggacatttgatgct

SEQ ID NO: 39942 - DNA, 484 bp, Oryza sativa
  unsure (1)..(484): unsure at all n locations
gcttaatatctaaatataaaattaggaaattcaatgcatgactacagctactgaacagcaataagtacattcataaattacatgagtattgctctcagaatacaccattgacacccccttgaaaacactcacagaagaataagatgaaaaagaaaagatcaaactaactctgattatatttttacattgttaacaaacttctagaatcgaaatctaatatgagtagaaacagcttcacacagttctgttcagtgaccacaatagaggaacaaaaggagaatgagagtctcccattgaatttttctaaagctaaaggcatcaacacaaacttaagagaaccatataaagttatctacagttagaatagaggattcagagtatccattgctcttccatatcagatatcaggggcaaaacgtgnttaagttcaatagacatacagcctcttgagcaatagttaatttatgattttgggctatgtaca

SEQ ID NO: 39943 - DNA, 468 bp, Oryza sativa
  unsure (1)..(468): unsure at all n locations
ctctgagtcacctgcggcatgcaagcttaaagccatgaatccctgttatgcatatctttatctggatcctgcagaacaaacatataggatgagtagtatctgatataaatataatactcgaaaaaaaatcaggtattttaaaatatttataaatatatatttctcctcttgtcaattttgatttccccgagcagatgactctgtacgtttaaacactctgtccgactagtcatagcccccaagcatcgggagtcggcctaggcatttcccaaacatgcatatgagtgacatgagttcgtcattaatggaacaaagtttcacggatcagaatttactactcaggtacttttgcaattattaagagcagaaaataaattatattatctctatgctnttgatttcttccgagtaatacttagcaccttgcgttactcggtccatccaacgagcccccgggtgctaggaatc

SEQ ID NO: 39944 - DNA, 465 bp, Oryza sativa
  unsure (1)..(465): unsure at all n locations
aaactcagcttatttgttagaaaatgagtgcccaaataagggataattacattcttcagtacttaaataaaggaaaaaatggtaattatatgccacaatcaaggtttacagtttagaaatatgccattcgcatgcctcatccttccctactgctgcaccttactcccatgatcttcacagatccaacagatgctatcttgatggtgcactgctgctaccaatgggttccaacattgctgcggaaagcaatgaaaagacaaatgatggggtggtgcattgtggattgcaacgttcagatgtgagaaggcagtgccaatgctcatcaatgtntacaatgctgacactagcactggtgaaccttgcggaggctatgtcaatgtcaagtgtgcttgtgggttgcgctagtgcctangaggcctgcgttggagaaactaatatagtangtcagtggaatgacaatgatgc

SEQ ID NO: 39945 - DNA, 425 bp, Oryza sativa
  unsure (1)..(425): unsure at all n locations
agcttaccagatttctattgaaacacaccttattttgcgagtaataganatgagcactggaatttacctatactgtcactccactaccacacatttaagttggttcttggatcttcaattctgccaaaaatgcattggcaatatttcctgcagaactataactagttacctccgatcctccttatgtcgtataaaactntccggagatattagaatctgatcactagcgtggctccccggcatagatgagctagaccatcatcacttgtggcctaccggctttcacatcacaacttgcgaaatcttgcttggtctgaaagccatcacggcgacaaaatcgacaatgacctctttgggctgcatctatggaaaaacacatgcaatattaaagggtgatcaggtanagcactataccacacccttaa

SEQ ID NO: 39946 - DNA, 460 bp, Oryza sativa
agcttcaggaaggcacagattcttgaggtgtttattgttataggaaaagagagttccgtgcattgtaacaaggaaccaggacagttacagagtacttgcacgagttcaaccgccttgcgcgctacgctcctgaggacgtgcgcaccgatgccgagaagcaggaaaagtttttgtttggtcttgatgatgagatgaccaaccagctaatctctggagtctatgaggactttgagaagcttgtggacaaggctatctgtctggaagagcaacgcaacaaaatggactgtaaaagaaaggcagctcagatcaggacttctcaagggaacaatcagaagcctcgcttcatgatgggacaactgggtgggcccttcaccctgatcgtccgcagcaccatccctataatccgggcaacttcaacaacgactacaacggtggcagtcacaacaacagtgaacagcac

SEQ ID NO: 39947 - DNA, 443 bp, Oryza sativa
  unsure (1)..(443): unsure at all n locations
cgccggaagaaaaaaatgatacctgtgtgataaagttaataanaaacgtacatactataatcgggagaaaaatataaaatagaattttctaccatataagataaaggaaaaaccttatgtagnaatatctatctattatatactaaaaggccattaaacatcctacaaacactcccaaaccgtcacatggcaccatataaatactcccaagtcgctacgtggcaatgtaataaaatagaaaaatctaaccatcgattttcattcaaatcggtggacccattgttctagatcgttagatctatcttagnaaaccaaaacctcccacgtccccataccgtgcaccatgcatagagtgaacaatntgtaggctccctattcatttctggtttttatccctatacaattaanattaanattatcttttatggaanataatctcaaaa

SEQ ID NO: 39948 - DNA, 452 bp, Oryza sativa
  unsure (1)..(452): unsure at all n locations
cttaagcaccgcagctgcagcttgatcacaagcaaatatatgatttcttactatttctaatgcaacatcttaacaagcacataggttgaaaaataaacactaaacacatatacctattgcatttatcactctttctcaaataacctttagcacaaaacaacaaagagaattttttttctttntcttttcttgagccttattgctcatatttttctctttattccgggtacgtccctgtcgtcaagactgtttccagggattcggcacccattgttttgctcacatcgaatacgtccttgtcgtcaagactgtgtccaacgattcnggattcatattttttttcatatttttttctttttcataatgagcaattaaagctatttgagaaataacaaatcaataaatcatatatataaagcatttatagatcaaaccatatgctagcatcaaca

SEQ ID NO: 39949 - DNA, 478 bp, Oryza sativa
  unsure (1)..(478): unsure at all n locations
tgagtccgtgccgattttgagctgccactacctagtagtttataggaacgcgcatanttttgagtatgtttcttgctgtctactaacaatggcagggatatgcaagataattggggatagctgtgctcaacatcgacatcttcgtcgagacatgaggagggatcaacatgaccattatgaggtaagtgatgatgttctaggtaagatcaaatctgcactgccttatttcgagggaaactatgatcctcgtgcttacattaatngggagctagcggttgatagtgaatctcataagcatgtcttgtcggagaaacaaaagggtatgtgtgcctctagtgtttaattaaacatgcttctaatgattggaaacatctttgtacgcataacaaaataccacaatcttgaaagacctgaaacgatattttaaatatgttatgttccatgtatatgctgacatttgtcacanactgcatgttaa

SEQ ID NO: 39950 - DNA, 458 bp, Oryza sativa
  unsure (1)..(458): unsure at all n locations
agcttcgataaaacggatatacctctttctttaaactcattgcccaagggtagagaaagaccgtttccacatcaaaaacaacaaaaactagcgcaaacatgtaatagcgtattcggaattgtaaccaagccccccccatgggttctatacccgattcataactagaaagcttctctggtccttcacgaaccggagctaaaagtgctgaaatccaaaatgctaaaataggaataaggcttgctattattagaaatgcccaaaaaatatcatattcgtgaagcagaaacataaatgtactcccattaatgtggaataggcggaactgaattagtcaattcaagtcagcattgtcaatttatacagaatttctctcttttcctcggtgaaacaaggatcggtttntctcaaaccaaagggcttaagttagcctttggtttctctttggcacgtcttcttta

SEQ ID NO: 39951 - DNA, 473 bp, Oryza sativa
  unsure (1)..(473): unsure at all n locations
ntcattntcgggcttatcctaggtggtggattagtttatgcatggcgaaaaggagccttggaatggtcttaactgaatattcagaccaaaagaaaaaagaaggaaaagattccattaagacagttatgagtttgattgagtttcccctacttgaccaaacaagttccaattccgttatttcaactacactaaaagatctttcgaattggtcaagactctctagtttatggccccttctatatggtaccagttgttgtttcattgaatttgcttcattaataggctcacgattcgactttgatcgttatggattggtaccaagatcaagtcctaggcaagcggacctaattttaacagtcggtacagtaacaatgaaaatggctccctctntagtgagaatatatgagcagatgcctgaacanaatacgtcattgtatgggagcttgactattactggtgaatgtcagtacgga

SEQ ID NO: 39952 - DNA, 449 bp, Oryza sativa
  unsure (1)..(449): unsure at all n locations
agcttctccttgtgcttcacatctgtcaagtgtgtcaatcgaataatgaggtatttgaatcatacacttgagtttggaatatggtattctacttcatcttctatatgcttaagtggatattccgatgctgattttggtggttatagaattgataggaaaagtactagtggaacatgtcattttcttggtacatcattgattgcatggtcttctangaaacaatctagtgttgctcaatcaaatgctgaatctgaatatgttgctgctgctagttgttgttcacaaattctttggcttttatctactttgaaagattatggtcttacttttgaganaagtcctctcttttgtgataatactagtgctattaacattgctaagaatcatattcaacactcacgcacaaagcacattgatattcgttntcacnttttgagggatcatgttga

SEQ ID NO: 39953 - DNA, 452 bp, Oryza sativa
tgcaagcacacattcagctttatcctttaacataacgttgcatccatctagtgagtgagaactcatatcatcgaaggggcaccattgcttcttggccttgcgagcgggctttgacatcaatgccctattctcgctgggagctgtagggtggatccacgacgtagctccaaagaccgggaacgggacggatccgacttggagaagagtgaacactgactgggtcgtatctcccaggtcaagctgatcatagaagtcgtcatcaaaaaatacgcctcttgaacccatattatctaaaccttttagcaccaagccccctatctggcatgtcatcgtagacgagctatataccctattacggtatatgtatagtatgggggacgctaccacgctggtaccaaggtatatacgagaatgtgataagtagatgtaagacaagggattaattatatact

SEQ ID NO: 39954 - DNA, 379 bp, Oryza sativa
agcttcaaatgaatcccatgcaatattctttttatgcccttctattttctattcaagtcttgacgaagttctgtaatttatttttggtattaattttacccagaaatcctcaagagacaataccatcacaatgtcacccctacttccccccaccaaacgttcccaccccttcccattgccatcgagactcgagagaggagatcgtggcggtacacctactcgacaacgaccactaccacccgcttcccttctcggctttggccaccatcttcaatcccttccattccatggctctggctaccactacccctttctcggcatcaccaagatctggcagcgtgagctcaatggtggctcggaattggcatcctcgaacgac

SEQ ID NO: 39955 - DNA, 404 bp, Oryza sativa
  unsure (1)..(404): unsure at all n locations
ggggttcgggtcctcacaccttatcaatccttggaaatccttatatgacacgtcctcttccaatggcagcgtaacctcaagtgacctctctaccttgagggtcgattcaccatcaaggctcattgtctcgacgtagcaaatgccatcctcataactcgaggacagcagtagttaatcagcagggaagaactggtccttctcaaccttgaccacatcaccaacagcaaggtcctcccagagccggtactcgaattcgccttcgcccttgtggacggcaaccttgcggntgttcactttcatgtcctgcatgaatcgccgccagtcctcgaccccttccttgatcatactaagcccaacaacacaagccagcggcgcgatcatgcttacggcggataaggggcaca

SEQ ID NO: 39956 - DNA, 426 bp, Oryza sativa
agcttgatatatttcagaagaatggtatcttgatattaggggcaaatttagacgttctagaaccaaaaaggaagtaaaacggctaaaacaggtaagatcggctgaaaccccgatactatctctattagcagcgaaaggagagattagacgaaacgcttcaggataataacctaaccgatgcagcattaagcatgaagagaagcataagatctagtcaaaccgatgaaagctcactcgagatggttgatataccgcataatatagctcaatatcaaggcctaaacctaacggctgtttttgatgatagaggctagccgatgaagctcagataacgagatcgatctagattatgcgatatatatgataactcggctacttgcgtagatagaaatagagtggcataaagatgtatgcactaatcctgag

SEQ ID NO: 39957 - DNA, 460 bp, Oryza sativa
tgacaagggttacatcggccgatccattggaagaagtatacatatgtgatggaattaaaccaacgccgacttttgttaacaaaaacatgagagccgattataaggttaagataatcgagctacttaaagagtatgttgattgctttgcatgggagtaccatgagatgccgggtcttagccgtgagctcgttgagcatcggctttcaattaaaccgggttttaggccttataaacaaccacctcgacgttttaatcctttactatatgaccgagtcaaagaagagattgatcgcgtgttgaatgcggaggttattaggccatgttgctatgtggagtgcgtttatagcatattcccggtggagatgaaagagagctggtagattatagtttgcatagcatttagagatttaaataaagctactctcatagatgagtatcctatgcctatagccgacatgat

SEQ ID NO: 39958 - DNA, 381 bp, Oryza sativa
  unsure (1)..(381): unsure at all n locations
agctntaatcttataagtggggcatttcaacacattgttgtgaattcacttcagattcacctatatctggcagcgctggcagtgacaccctagatgagcaattacgacataacatagtgacaacacactcaaacagatgtacatcaagcagccaactaccagttaatcttagcataactaataagggtagcttacctccacaacatcaggtctattgcatatctgtttcagttctgcaatcttcatccttcgttgtagctaaaaaacggaaagaaaaacttaagcttaaggtgaattaacatagaaggaagatggaggcactgaaacatgttatcaacaatagggagatgcgaagaacgaactttcttttgcttggtggac

SEQ ID NO: 39959 - DNA, 427 bp, Oryza sativa
ggacagcgctgagttcagaattctgaccgagtataagctacattattacactcttgatgggctccgcaacaatgggaaacagctcatgaccttttttggtgcttgtactgatgcatttgctggacttacaagactctacctacagaacttaaggctttctgaaactgacattctcaatatcattgccacatgcaaacggttagagtctctgcgtatgttcatgtgtcaaacagagggtactgtgttgcagctgcagctagaacaccagcggcttgctgagctcgatatctgccacggatgtttaacactagttaagctcaattctctaccaaaacttgaacggctggtcttttatagttggaaacatccccaagaacccttgtattttggcaatgttccgcagctgtcaagcctatgcctcactaat

SEQ ID NO: 39960 - DNA, 410 bp, Oryza sativa
  unsure (1)..(410): unsure at all n locations
ntataatcgtagtaactaaatgcaatacgtctcaacaatgttgctaanaacatacctaacctcgcctccctactggttataatgcaatgcagtctatcagactcatcagggtgccattttgtgcatatgcggacttttatgtttcatatctctaacctgtgggtcctctgcttaatccttagacaacaccagcaactcctgcgctttcatcttccatcgaattnttcatgttgccgctaatcagccataaaatcatttgcagatgcgctctgtcgaggtagtctcataaggttcgtttatagatcgacggcaatgtgagttaccttttccatactaattataaaaagacagtacaaacaggatcattatggactccacgctcatctncactcgtnccgatgaagggacgc

SEQ ID NO: 39961 - DNA, 317 bp, Oryza sativa
gaccaattcttcgtggcgaattcctgtggtgaatgccgcgatgataacgtcagctgtgtatgcggagattctgttactttgctcagaaaatcgccggatgttatccttataggaatctccggacttctgaataccttgtttaggttcgaatgtgtgccgggacgctcgaaggtgccttggaagctggcgaagaagtggtcacgttattcagcccaagatccaattgtacgtcggggccatccatggagcctagatcgggcgggatccgcttaagccactggttaacagttcgccatgggcttgctggctccttctgt

SEQ ID NO: 39962 - DNA, 382 bp, Oryza sativa
  unsure (1)..(382): unsure at all n locations
tncctttcgtctgagacctgtgtacacctcgcaatggcgtgactcggaggtacacaaaatcgtccactgcgaattccaggtcacggcgacggttatctgcataacttttctgccgagactgtgccacctttagattttcccgaatgattctgactatagcttcagcttctctcaggatatccgtcccgaacacttggctttctccgacttggtcccacaatagcggtgtccggcatttgcgcccatacaacgcttcataaggtgccatttgtatgctggcttgatagactgtattgtaggagaactcatcatangggagactcttatcccaggtcttcccgaaatctaggacacatgcgcggagcatatcttctaaaatctg

SEQ ID NO: 39963 - DNA, 464 bp, Oryza sativa
  unsure (1)..(464): unsure at all n locations
agctngattcgaagtgggaaggaccgtacctcatctagcacaaatccaagacgggatcctttcaactggcgacaccggaaggcgaagagttcgaccattcctggaatgctacctctcaagcgtttctatgtctagaacgggtgacacccaaatcgccaacttgtaaaaatgtatatattgttatgtaagcccttcggcaactatgtaagcctttcggcaagaaaaaaaagaagaaaaaaaagaggaaaatgaaaaaagacaaaaaactggatgtagggctattatccaccacggacgcccgaaccagtataaaatctttgtgtcctctgccttctttttatttggttgtgcgattgataattngcggaaaanaccccaaggcaaacgcctgatcagcgaataagaccagagggcgaaacgaatcggccgaagcatcgctcgccgaacgttgaaaccgcaacagc

SEQ ID NO: 39964 - DNA, 424 bp, Oryza sativa
  unsure (1)..(424): unsure at all n locations
actcagctaaanacctattgacgttcgagcatagctgcacagagaaatagacctcgtttgacagccaattttgctgctacagattacagcacgtttaaactactgcagccgcagctgctgccaaaaagatctctgtcaaacacacccatagatgaatatccatttatctttcccttttcggacgctaggacattgccatttgccctacataaacacaccactcgtacagtgtacttgattgagttgacagtcatactctactacaacggatgaacatgtggaaatgaagacacacatccactccctacttgctatcactgtcaagtgggccccgcacgacagtggcgagcgaaacgggagcgtgcttttccatcgtgattcttcaccgaacgggacatcggagtaatgcttaccggcagcaccg

SEQ ID NO: 39965 - DNA, 463 bp, Oryza sativa
  unsure (1)..(463): unsure at all n locations
agctngaacctttgctcgtcccgagtaaatgactcatattaaanaacttggtagctgatcaggagttgctactatgctgtatatctcaaaagtataggtgcaagaagatatgtgtactctctctcaaatcaaataaatttggcacggtggcttacccttacccctgattcccacgagacactgtccttccttgtcttgagcggttgagagacagaacacaaacaacaacttgaatatcttgtggtacctcctcaacctgcctacgcaactctttcaaaataaccatagctctttcatatgcgaccttcgacttgcatgctgccctcatcactccaaatgcttcaatcatcatcatgtttgttatgtaattttcatgcaccccatccggtcctgcagtctcacgatcacacttgtcactgtttgctttcatggtatacctctttaggaatagacaacagggatc

SEQ ID NO: 39966 - DNA, 343 bp, Oryza sativa
ccacaaccagagtgaaaacaaccaaggttagcctgcaaaggacagtgattatacagaggtaaatataaagtattagttttggtaatctctattataaatcttccctggaaacggcgctagaaatgcttgttggtatttcttaatgacattactagacatataatccccatcaatggccgagaaatactccttggatattatggaaacaaagttcatcctctagcacatggatacaccattatagcatttacctcgaaatattcatgatatcgtatttattaattccgtggaagatcatatatagagaaccaactaataattatatatacttgtataatcagtt

SEQ ID NO: 39967 - DNA, 411 bp, Oryza sativa
  unsure (1)..(411): unsure at all n locations
gcagcttgaacttggatgaagcaaaacttatataaaaattttgnggtttcatactatagacgtgctttccttgagaaatttgaacatctaaaacaaggtgacaaaactgttagggagtactttcatgattttaaaatttgtattacttatagtgatttacaagaatctaatgagaacacaatgactagatttttcagagggcttaattccaatatttaggctgggcttattaacgtgacatataatcatataggcaacttgttcatgcttgcttgcagtgttgagagcaatattntaataaacccaagggagaaacaatctatgcttgtgccttctattactgacattttgcanggagctcagaacatcaccatgaagagaagagctatatgctcgagatgtcatcttcat

SEQ ID NO: 39968 - DNA, 478 bp, Oryza sativa
  unsure (1)..(478): unsure at all n locations
gcttttataattttaataatggaattcatgaatttctttgttcatccaatggtaaaatggtcattnttatagaaaatacacggtcaactaatggtcaactgactggaggggtatgcaagggatcaaaatcaaattttgggggtatataaagaagtaagcaaaactcaagggtatagaagggattacgaaacaattcacgggtatataatggatcttctctctaaatatagagttgattttggcgattttcatcgaagtttattcttcggtgtttcttttcgatagctaagagcatctccaacaatagctactattttagagtccctacaggctaaatggtggcttgcccacnattctcaggactctaagaatggtctaactccagcaacaacatctatatcttagccctatttcttctctcctctatttatctataatccatctnttatgttaagttactatcacaatatgtaaatat

SEQ ID NO: 39969 - DNA, 403 bp, Oryza sativa
  unsure (1)..(403): unsure at all n locations
agcttgtacacctctcactataaggaaccatccatatcaaaatctttattngnctggtgtatgtactcacaccaaagtatgttaacgtagtgtcaataatagaggacataaatataattgtaaattttttcttgctactaactcattgtaggtggcctgttatttttaaacagataatggtctgcctataataggttgttgcattcctggtaatgtttcccaggtccaacttatttaaaaggtttaggcagggtaccttattcatgtatctgtggattttagtttgcgaaataccaaaattggtgtgaacagactaaaaaaaaaagaaagaaacaagttatgaaatattgctactgtgagctctataatctggtgtaatcacattttggatacgcaaatgtgc

SEQ ID NO: 39970 - DNA, 255 bp, Oryza sativa
ggaaaccaatgaactgagaatgaacatatggcttaaaatacatggcacggcatcatgaatcatgctaaactggctagctttctaaaataagctacggatatcatataagagacgtgcaagtgacctgcagttgacggatagagcagctctggctcgttgggtagaaaggccaagcatataagaagataaagttatggcatcatagggtcctttaatttcagaagcagcgtgagcagcacttgatatgatgagatt

SEQ ID NO: 39971 - DNA, 452 bp, Oryza sativa
agcttatcataaagggcttcgacaaggggttttattcgttctttgagcaaaaagataaagatcggatagattcgaaccgcaattgcaaaggtaatcactactatgccagcccaaatcatgatcttcaccaacttggatttggttctctcgcgaaaatcgcgagttgcagagatgagaaccatgaaaagcaagatcccgaataagaaaacagaaaccgaggaaaccacaagagtgaagactagtagagtctcgtcttttgtcattctttgctcctttttcactcaatgattcattcgaatttcccgaccaaaaattctatatgtctattcatagggcctcgttgctaagtgctacaagatctagtgcactggaactcgtggttatggacccgaatcctttagtatggaacattgtcttttccaagtaaaaacccccagtatatgaaagaatga

SEQ ID NO: 39972 - DNA, 417 bp, Oryza sativa
  unsure (1)..(417): unsure at all n locations
taacacctcttatntgactntntcactattgtgagatacgaataagatccaaatccaaaacgcaaaggtcgtcttattcaaaacctcaatcatcacatccnctctctcccacttcacacctcggaacgcactgttcttatagagagaaaggggctttcccatcttcttaacccgaaatgaaatggctgaggagagggaggttccttttggggggtacccccgggaagagatccagtggagacggtgtgggcctgtagctcagaggattagagcacgtggctacgaaccacggngtccggggttcgaatccctcctcgcccacagccttacaaaggggaagggcccttactttcccctgagggtagaagaacatgaccgggatagcggacttaagcctatgacttggcatgctcttct

SEQ ID NO: 39973 - DNA, 461 bp, Oryza sativa
agcttgaatgatgtgaataaagatatttttttattttaggcatacgccatgcacacactgctttaataaatgtgcttaagtccctaaaagacacatggtttcaccacacccggaaatatacggcatatgtggtgtaaaatccgagtaaataaacttataaaagaattaccaaccgtctgaaaaatgactaagatatataatcagcctaagccataatattggtcaataaaaatgcacacttacgtggcaaaaagcagtggtattgtatccaatcaattgctttataaacccaaatagcacattgactatataaaaaagtcagtatgacagctatgaaaaacttcactgctgggcaccttttataatgcattgaaccaactcctacaaagttgagtaactgccgtataaaaggatcttaatgtattgggcactttatcacacgcactatggcctaagcaaaa

SEQ ID NO: 39974 - DNA, 431 bp, Oryza sativa
  unsure (1)..(431): unsure at all n locations
gcttctgccctagctgggtanggtaatctatccaatctttgacaccagggagcttttacaagttttcaagccctagcatatggtgtacttactacggtgtttgatatgttgcatgaatcaatggtaatatcaaaatttcgtaaggtaaaagatatcgatgatacgatttggttctaagtcctaataaattttggtggagttaattagagtgtgaatttctaaagttaccaaaatttgatggagtaactatagcaaaaacatgtntggtctattacttaccaagattccatatgttnagaattgtaatttattcgaacaaagggacccctgttgtaacataaaccaatagttgttctcaagtgtaaacaaagaagaataatgtccgtattgattctcaaagcccttatattgtcccatagaggtctattgat

SEQ ID NO: 39975 - DNA, 448 bp, Oryza sativa
  unsure (1)..(448): unsure at all n locations
ctttctttttcttccatcggtagaatacaatctgtatctttttctttctcccatcacacccagagagagagagaggagagaagaggaggaaaaaaaaataaaatttaaatgtgcttaaaggaatctcttttcctttttctttttgctctccttttaatatttttactagcgttgtactcaagacattctccccctgagtcagggcgtgaattctcgatcccataaataattaggagatatttcccgtggatttgcgtgaattcgatctagtgctcctttgcacgaactgcctctggtttcgtccttataaaaacactgaagatctcctagcacaaactcacatttctccctaaatatntagcctgcaaatataactggtttctcttattcttttcattattactctntttgatttggggacaattctctttgtcattagggacaattc

SEQ ID NO: 39976 - DNA, 344 bp, Oryza sativa
agctttgcaactatagaacatgtgttatctctattctgtgaaagacacgaaggctgcgccgttgacatgcggaccccacatgtcaacctaaaggaccgcggtagacctggtacacagaggcggaccccgggtcaactgaagcagactccgtgtgttaaccgaggcgagtgggcgacaaacggactccattttacacacgccgtctgccacatttgaaccacgccgtttccgagcgggcacacttacactgacactacacggtcaccacccgcacgcgtgaacgactacctacaccggtacacgggtaccggggtcgaccaccgctcaactggtacagtgcgaca

SEQ ID NO: 39977 - DNA, 381 bp, Oryza sativa
tcttctgtgaatgatagcattatgcaggcctatctctttatctcagaaccaatcaaggatgcagtctctagaacaatgccagctatatctctccggaatcaaaatgagcagccatgtttgtggttttcagtgcgctacttatcatggtgtaatcgacagcttgcagcaataatgcaatacataaatatattcatgtctataaacagtgagcttgctatgcttatggatgattcatgttgaggatacaatgtaccgatgttaagcaccgtccctttatgtttaaggcagtgcctcgtattcatgtaatgagggagaaatgtgtaatacagacaagttccatgaggattctcttggaagatgcgaatatgtgactatgtgtat

SEQ ID NO: 39978 - DNA, 414 bp, Oryza sativa
  unsure (1)..(414): unsure at all n locations
agctnngggatgagttcttggtatcttatctgtagccctgatcactgntccattgcaacagttctaattgcaaaaaacaaaacctggtctaatttagttcaatatacaaaaaaaaaatctttgtctcatcgcagattaattacgggtgtgtttgaagtttggttgatttctgtttcaaggttctaactgaacatctgaagtgaagtgtagtcagtcttaatttgggactttctgatctctctatgacaaatgagctttttttttttgccataatatatacaacagctagcaagtagcaaaatgagcatttttggggttaatggtaactgaacatatatgtatggtggcaactgaataaagtgtgaacatatgtgagtacttggaggctagagccaggngttggnttccttttac

SEQ ID NO: 39979 - DNA, 448 bp, Oryza sativa
  unsure (1)..(448): unsure at all n locations
tccaccttgccacanatcanatcatatatggagatgattaattntgttataacatgaaaagaaaattaaatgtgtgatgcagtgagagaataattaagtaccatggattgtgtttttctcaacactaattagctctatttaaattgaaaccgagagttgattacataataattataatgtatctgtgttatgtcgcatttggattttgtactatttgttcgtataggtgaaaggaatcattatgttataaatatgagcgcaatattgacgaatattaatagaactcttactacgacaagggtgataaagggagtttaaggccctctctttttttcccgattccatatattggaattttgtttgcatgctttctaagtttctaaatagtgccttctctaattaacaacattctaactttttagaaggcaattcattcatttataccctc

SEQ ID NO: 39980 - DNA, 399 bp, Oryza sativa
  unsure (1)..(399): unsure at all n locations
agcttatgttgatgatgtattcgtcaagaccaagcagaaggatgacctgatcacagatttagaggaaacttttacaagcattcatgctttcaggatgaaactaaaccctgaaaagtgcatcttcagagtaccgtcagggaagttgctcgaatttatgatatctcaaagaggcatacaggccaacccggagaaaatcaacgccatccttaacatgaaaccgccaagctcccaaaaagacgtccaaaagctgactggttgcatggcggcactcagccggttcgtctcacgactcggcgagcggnggatgccctttttcaagctgctgaagaagactgacaattttcagtggggacccgaagcacaaaaagcctttaaagacttcaagagacttctcaccac

SEQ ID NO: 39981 - DNA, 361 bp, Oryza sativa
actcagcttgatcattcctcaaagtaaagggtctgattatatgctctctctctatctgacttagcctctctctatgcatccacatatctcgacttacgaaaaattttggggcaacttctacaccacacagaattttatacaactgatatatgtgagctttcagctctgcaggctactcaattatactaccatcttcttctaaagctcttatcaaactatttctctttctcccattaactatcccatggaagaaagatgtgttagcatcaccctctagaagccatatttctccactccttccctgccaatatttttcctcatcaaaatacatctgattcaatttgccttcaaaaagtatctt

SEQ ID NO: 39982 - DNA, 382 bp, Oryza sativa
  unsure (1)..(382): unsure at all n locations
agcttccncgatctaccactacttctatttattttccttgaaacatttaaaaattggatcttctagtttttagagtttatggtctcattggatttcgtttatataatttttacaagtcacgtcaaacactgtcaccatacttctctacctcatctctttattatcattggaatttaaaaaatcgaacataattattgtttgggttcatgtttactttctagaagtcctgccaaaccattagcgattttgccatttgtcggtgacatgggaccgggagtatcatgactagaggcttgggcagacgcgatcacccacgtggcctgaccccctcgggggggtcgggcccgagggtgatatggccgcccctctctttgtctccccg

SEQ ID NO: 39983 - DNA, 354 bp, Oryza sativa
  unsure (1)..(354): unsure at all n locations
ntggagaagatgtcttacgaggagttctggcttattccccatttgagcgcccgcgaagatagagccgtatgcccgctaatccgatgctgtttattcttgactgtcaggccttaagtgcctttcgtataatgtaaatattatcgatataataaaaatgtgtcttttatatcgtgattgtatggagtaccccggctttttctgcgacggtgattaatacactatcggtcgggaaaacgcaatattatcgggcgcgacaataatgcctcagcttggtgcaggagaaatataatcttaactcctacttttcctccggagatatccttgtctctgcatccaagagcctacgacttaaat

SEQ ID NO: 39984 - DNA, 349 bp, Oryza sativa
  unsure (1)..(349): unsure at all n locations
agctgggggggtgntgttgactgtcgttatctatcagcancgaccgtcaatattaccataatagaggagaactagcgatgcttgcaatgcataaatatgttagaataataatattccactagtagtaggtatactaacctttctgtagagaatgacaataaagcggaggagaatcgacatcaactcagacgataaatcaatcggacgatgtcgagaactagacttatgtatgaatgggccaagaactcagaattgacacgatgaatngggccacaattcacaagtgtgcaaattgaagcaatagaggaggccgtcagccgaagatgggccgagaacgcccagcccatgg

SEQ ID NO: 39985 - DNA, 359 bp, Oryza sativa
ggcgcgaagccatcactagagcgtaagcgagcttttccatttcaatgtaccttgtcttcgctccttgcagtgcttcggagacgaagtaaaccggtttctgtccggactctggttcttggacgagtgcagcactgactaccaccggcgaagctgctaagtataatagcagttcgcttcctgtgggtgggcttatcagagctgacgggctttgcaagtattgctttagctcgtcgaatgctgcttggcactctggtgtccaattaaactatcccgcgccccggacggtcttgaagaagggcatacctctttcggccgcctttgagaggaatcgactgagtgccgcaattcggcctgcgagc

SEQ ID NO: 39986 - DNA, 459 bp, Oryza sativa
agcttcgatagtggtagagctcaggagggaatcgaatctatagcatctttaaataggcgtgcgatgctcatgctatgaacaaaacaagtgtgagctgagctacatcataacgtgacatctgtagcctgagccacggacgcaataatgcaagcgcctctactgagtatgtgcaccgttggatcttgatcgagcggttggaaaggcagaacgggcaaccgcttgatcggcaattcagttgcttctcgggctagacatgtcctgttgcgacaagcaactgaacaggatcgacaaaagaggacagcatttccaatttccatgtacaaattaacacaaagcaaatcatgcaagtttttttttttttactatgcgtgcattgaattattggtcctatttatgtaaataaaatatcttcatcgaatgaatttcactggcaagcacgcaaacacacggcaagaagca

SEQ ID NO: 39987 - DNA, 410 bp, Oryza sativa
  unsure (1)..(410): unsure at all n locations
acctattaatactaagcttgataaacggtacactggtcacattagagacaattgatttgcatagcctgatacatgtcantctttccacttacaagtaccttcaacttcgttctttgatgtaacaatggactgaaccttgttaggcattctgtcctgctgcactctagagtacctcctcttgtatagtttcatgcgccgaataaatagttcatgtgctatctgcagcttcacaacaggctctgcaaggctatagaatacattgataaatggtaagtggaacctttaatttgcaaggtacttcgtattgatattaattttattgtgagggttcacttgcaaacctgcatccatggaattgttactccattggtttgcagtatgcggatcttagatacgtccattgacaattg

SEQ ID NO: 39988 - DNA, 464 bp, Oryza sativa
  unsure (1)..(464): unsure at all n locations
agctttctttcttattgccatcagctcagcagctcatgaatctattgatgggtttgaaatgcacggaatgggagaagagagcaagatgaagaggatcgtaccaaaaaggagtgcataaaaagaagttactccttagacatgttcatgcactntaaagatacagagatctgtcactgattcactgtgtgttgtgtacctttttttgcttcgcttgaaaaagaggaatggtgcaaagggctgtccaggatttgctggatcacaatcatagaagtcggtgactttagcagtctgcaccttgttactgtaacttcttcgtctgacaacattggatgcattgagtataacttcttacaggcaaagtacttaactgcattttcaaaacaagaagttaagaactactccaacgaanagtgtatcattaatgaagacacatgagaattatgatgaaaggaacacaaaacagt

SEQ ID NO: 39989 - DNA, 417 bp, Oryza sativa
cttgacaccaatgggaggacaacatgttgataaggcccattctaagaatcgaggtgatatgcaagaagaatctgtgaatgagagtaacaccatcaagacagtgagtatcttggcttctatcatggtgcctacgggtttcatggatgatacattagtagagtcatgtgatacctaggaggtatcacgatccttctcggtatcatgaaacctgaaggtttcacacatgatccctcgctaggtatatatcatcttgtgtgatacctgaaagtttcatacatgatactgcaaagtatcattatgtgtgatacctgtgaagtatcacatgatcctacttacatatcatgtatgctatcatggtttctgtgggttcacatatgatacttaaagatgatcatgtgatacctgggaaggatcatg

SEQ ID NO: 39990 - DNA, 413 bp, Oryza sativa
  unsure (1)..(413): unsure at all n locations
agcttgntaatttaattaattccgtacgatttttgtatttattctcctgctcactgtcattgtaacatcccgattntttctcccgtttaaaatcttattttaaatacaaaattattctcaaaatttggttcttatttgaattttggctgtgccattaaagatctcaaaatccaatggtctgaattcctatctaccaacaaattcctaaacctcttattagagtccaacgtccctttacaatctttgaacacaaatttcactccaattccacatacaaagtctccacaaaattatagtcccaaagtccatttacaattccatcaaatactctccaaaagtccatctctgaaattccccagaataattgagaaagatccctattcctttggaccacctttccttttccataaccc

SEQ ID NO: 39991 - DNA, 466 bp, Oryza sativa
  unsure (1)..(466): unsure at all n locations
ttgtgtcngctccgcatcatctcaggatcgtctcgagaatcctatatatcactaccatctaaaacatggtgatgatttgtggatgatttgtgcacataatcggcgaggagagaatcacactatggtgcagatgactacaagggtggatgctattgatgacctccacactaattacaagactcaagccataaatcattttagttattctgatgaatctgtatattaaattgtcagtttgtgttcctcggctgattcctggacgagggttttaatgcacaaattagttcagaaattacttgtgaatntctgggcgtgacactatgctagagacaaataaaccttcaacatactgctaacagagccctcttttctaatttttttctcattggcatattattgcttgataaaaccatgaggtacaaacatcccctcaaaccatgccaaaaggatgaatacgcccaattca

SEQ ID NO: 39992 - DNA, 423 bp, Oryza sativa
agcttgttgtgaacaagcagctgagggttcttgttattggatgcgctatgagcgggaggggagatgtggcttaccgatggcggcttgaagcaacattgaaagacaaagattacccaattggccgcatgctttctaccatagcgctctctggtgatgattggcatggggatcttgctgttggctgcaacatccagtctcagattcctgctggaagagctagcaatttgattggtcatgcgaatctaagcaacaagggaactggtcaagttggcattcgcctcaacagctcggagcatcttgagatcgcccttattgccctcgtgccaatataccaaaacattaagaagttattgcagagttaattcgtatcaaccagtatttatgttagcgagacaaggctgaagataaatcattagagttatg

SEQ ID NO: 39993 - DNA, 404 bp, Oryza sativa
agctttggctcagggatcctcactccgatttcacttcctcgctaggcatggtcctccttttatactctaaggggataccacatgtgatgcgagtgctacctatggagagaggaaaatattttctatattaattacatgtcttgtgccttatcccaaaagctatctgcacgtctgttgctgcgcggggcccatcaaatcatgcagggcgcccttgtcattcgccatttaatagatgaggacttccgggttctcattcacaccacgaaacgggaacccgggtcagttcagagtggttggaccagctctgaaccgggtaagaggctttgaagcccctcatcattatgatgagatgggacagagcacaccgctctgcggctgacacactgacagagcggtggtacaca

SEQ ID NO: 39994 - DNA, 446 bp, Oryza sativa
  unsure (1)..(446): unsure at all n locations
agcntttattgattgcctgaaacataaagttaacaaacagataagacaatgtgattatcaaataagaatattgtaaatttgtgatgaacacactcacctgagtttccttcaaacgatcacccgtggagccacttttagcaaggcgttcactgccagctaaatcaatcaagttaaggacaccttggacttgttgcccagtgttctgcattaagatcaaaagaaaattagtgacatacatttgctcaagtttcagtggttctgtttagttagcatgaaaatgaaaaaaaaaatattgtgaccagtttgtaaagtttcagcactgtgattaatattctaaaatatgggtgaagcgagtacctcatttgatccagatatcttcagtgtgaaaacaaaatggctccgggaagaatgttcattcatttgggtcctacccacagacctggttc

SEQ ID NO: 39995 - DNA, 435 bp, Oryza sativa
  unsure (1)..(435): unsure at all n locations
tgggcagaggcttactggctttcatccnccgcaaatctgcattgttcttcaaggaagatacagtcggaaagaggtgatatatggctcatgctggtatggtacggtatggaggatgcgcataaccaatgcgtgcttgccttgggtccatttcaatcgtgattagctttcggaaaatgatactctcttcgttttaaaatataagtatttttagctatgtaaaaattattatattttaagacggagatagcatattacagtattccattctaattcaaacggaattatacatcagagatagcagctgatattaggtatcaagctcttgtccagacagaatatcaaccgataattagtggatacactcatttcgtccgaacgggttaccattctgtagtatttccttataaccttactgtcttcagaaagatattactg

SEQ ID NO: 39996 - DNA, 452 bp, Oryza sativa
  unsure (1)..(452): unsure at all n locations
agctngcatgcactagcccgccctagctagctnagcgcgagccacacaaacacaacataacacaaggcaccgcacggcacggtcgagcctgcagccagcaaagcaagctcgaggagaagattagcgccagtgcgtcacctctcactaccgatcgagaactactgttctgcctgactggctggatgtaattgacgtgagaaagatctctccctgtctgtctctcatcacgtactagctaggcctttattccaagctcggctttccggcaatggtccccggatttcgcgacttttatcagggaggagcagcttaatctcgcgatggttttggacggttcgtaggggtggcacctgcggnggacattccgtcccgttccactccgggggcgggccgctcctacattcggattccgaatctgattccttcgatcgccctgcttctctctgcactct

SEQ ID NO: 39997 - DNA, 367 bp, Oryza sativa
  unsure (1)..(367): unsure at all n locations
agctngngtgacttcattactcgtttcaattctgacaaagctgtcatagtatcggtctctccacagtcaagagcatcgctagctgcattctttggtctttctcaatcacaggtgattaaatatttttttcagttatctgcttccctgtcaaatctgtccttataaaatgttttgtccgaaatgctagcttatttgaacataaccacgactagagatgcataaaggagtgcatttttatcatgaacgtggtaacaaaagcacgagcttaatacctttatgctcacgttttcagaaaactcactgcgctgttcaagtcgatgggcgtaaaagcagtttacgacacaagttccagtcgagatcttgtcct

SEQ ID NO: 39998 - DNA, 469 bp, Oryza sativa
  unsure (1)..(469): unsure at all n locations
ntggatcattggttctaagatgagcattatgcttaattctctatgattgcaacgcggaacatactttntcaggctaaagactgcgttcccttnttctgatccgggatcatggcttcctagttccttcacagcaaagtaggagtatctactaattaacaactggagtattgattaaacactttggctccaaaataacttgttcattaatgatgatctcagtcaaaagagaacgagctaatctatctgcttgcatcagtgacatggacactcgagctttacgtgatttgaaaaattcagaagcttccgagatgtcagatgatcgaagaagaacccacgaggatgtgatgtgctgacacttgcaacaacctacggngtcgctgatcgggccaaggagaaagggatatgatacattgtggatntaaaactgtgccgacatgtactggtccgtgccagtgctgcatgtgggccg

SEQ ID NO: 39999 - DNA, 383 bp, Oryza sativa
  unsure (1)..(383): unsure at all n locations
agcttgtaaccttcagagtagtgcttatttaactcttaagtgcttgaaccaaccttttacacagaatatggtcatactgtgattgttgggaaccccnccccccacccccaccaatagaagtgcttgttatccttatactggatgaactgtgaaggtcttaatgaatcccccatagaagtgcttgttgtgaaggttgaaaatagaatggttaacatcatgaaaaataatatttttcatgaaaaaaatttaagacggtcaatttgggttaaatgagcaaacctaaaagagtaggggtaatttggtagttaagctattaactaggctcanataagtaattggccctttaattcttaattaaatttgtcaatcttcggtctaataat

SEQ ID NO: 40000 - DNA, 370 bp, Oryza sativa
  unsure (1)..(370): unsure at all n locations
gtgacggaacagtaaccaaagactctgtgatctcctctggtgagntcatatataaacagcttattggattagaccatacagctggcaatgatgatgagatgttggccacactgccagttcttgttgcactgaaagatgaatgttaatcaagagcaggattcacacatttgccagctatgccctcgaatggaactctgaggattaaggatgggcaagacaagggactgactgaggatgaggatgcaaaattagcaagactgttgcacgaagaggaagaatggaaaatgatgaagcatagaggctagcgtggaacttcacacgaaaatatctacatcaagatttgtgaaactgaaattgcaacgactaccca

SEQ ID NO: 40001 - DNA, 425 bp, Oryza sativa
  unsure (1)..(425): unsure at all n locations
agcttctgcaatntctgaatcaccctgtataatggcctgttctccccggtcggaataggtagttccttcccctagaaccgtacttgagagtttcctacctcatacggctcagaaattgctatcttaatttcccttgtcttaactgaattcgatttctcaaaaatcgatccaatttcttcttgggttacgcagaagaagttaattacctaagtttcaaaccctaaattttgatcaataatcagtttgatcttttctcccacctgcagaaaaatgaagcatagatagacctatatccttcgtccgaattttctgaaaggtaactatctcggtttcatatatgaaatttctatagaatccttgaaaaagactttttccccataagccagaanaaagaacttactatctttgggatctgatactacacc

SEQ ID NO: 40002 - DNA, 438 bp, Oryza sativa
  unsure (1)..(438): unsure at all n locations
tcgcgcaatatggcgaagagaacactagtcggattaataactgaattaaaacaaatacacgttaaactaagtatattacgcataacaagcgtctcgttcttgtagagtagataattggatcttgattgagttatttttctaacggaaaaaggaaaaggaggattcaaaatccttttttcttcggactttcccaaacacaaaatacctccttgtattcgcactctcacatgagagtggaagaaattcgactttcatataatatcttaatagaattccatgtaatgatcaatgcactttctggattctatattattcgcatgtctagaatcctaccaagagaatacaccccattnttatgtaattgaagtacgattgacgaataagaaataaacataatactgcttattagtgtcgcataaaaccccaacatggggcgtg

SEQ ID NO: 40003 - DNA, 447 bp, Oryza sativa
agcttcatataagtaaggatcagccgtgtctaaacctgctgttggttgtgagtaaagatgggtgaaagggtgaagctcatcggtgctttcgccagtgcatacggccaccgcgcagaggtggcgcttcgcctgaaaggcgtgcgatacgagctcatcctggaagacctccgcaacaagagcgacctgctgctcaaccacaaccccgtccacaagctcgtccccgtcctcctccatggcgaccgctccttgagcgagtccctcgtcatcctcgagtacatcgacgagagcttccatggtccacccatcctcccaaccgatccgtacgatcgagccgtggcgcgtttctgggcgcagttcatcgatcagaaggtaaaaattcagcttaatttacatgtcaagaagatgatgatctccatcgatcctgtgaaatcttttcttgcacaatat

SEQ ID NO: 40004 - DNA, 446 bp, Oryza sativa
  unsure (1)..(446): unsure at all n locations
tataagacatgcttatgatagttcataatccgttaacggtccaacaagaacgcatccttaagattagagtaagttctcaggaagtcaaacttggccaaacataccatgaatgtcaacctttggttttcagtacgaccttgcattntcatcagaatttcagcatcaacattttacacctctaaatttttggacaagacaactctgaatgtactagtagcaagttggagttgattnttcctcaagaagagtagtacaaggctacaagttagaacctccagaacagttgcaataatttgtatagatgcaggtcaaacactgcacgttcggcgcagtttatactactctcagacttgaaggttctggtcaggtttgacttanactggataattntaggatntgaatagtcatcattgaacactatcagcttagagcaagttcaatagtat

SEQ ID NO: 40005 - DNA, 430 bp, Oryza sativa
ctgaggctgcagcgcatgaaagtataattaatctagggttgatgtctttataaaaggagcctttgggcttgtaagtcaagaaaggtgttttatttggtcgctacataaaaatggctatttttcggtcaaatccatgtataatgcgatcatcaattccaatgtaagaatccacaagaggatcttatgggaggtaaaggtaccactaaaaatcaaagtatctatgtggtttcttcacaaaaaagtaatcttgacaaaagataatctcataaagagtaaatggaggggaaacaagcaatgttgtttttgtaatacacaagagaccatccaacatcttttctttgactgtcatgttacacgttttgcttggcaatgtgtcttctttgccttcaacatccccctccccacaatgcaaaagatatttttggtgact

SEQ ID NO: 40006 - DNA, 441 bp, Oryza sativa
  unsure (1)..(441): unsure at all n locations
tgatatcagcacaacacaagagggaaggataaaaatcgactgatgttatataatatccaggatcagtggagctatgacagtagctgagaggagcaaggtgagaagtaattatggaacctaaatttacagcactaaattagagattaagaggccgccttgaataagttaatccagaaatgtagtttgcaaagagcacaacagaagggagactcaagccgcgagcataatattgtggctaggaaagggaaatagaaacgttggtggcttccttgtgtgcttgttaatccaaattctgttctctacgtgttgattaaagagtctagtccaatccaatgcaaatgcagntgttgcatatatattgatatgtaatactagaatccagtaagagcagttgatgaaaatccatgtacgtatgtggtaaggtgaagaacgaaggaagga

SEQ ID NO: 40007 - DNA, 461 bp, Oryza sativa
  unsure (1)..(461): unsure at all n locations
agcttgtaaattcaagttccactcctttntatccttgcatccatctcaacaaagagcattagtgaacctctaattgtgttgtcataaacaccaaaataaatgaggggtcctagatgcactttcaatctccccctttntggtgattgatgacaacacaattagaaataataaaagattaggatttaggtggagctccccctaaagataagctagaaaagaatatgagagctcccccttaatctatgcaaaagattagaaatcacaatataacctcatgcatatgcatatgacaagatacatcactcatttaagcatggataagagataatttcatataacatgcacataacatcatccaagtctgcgaggttcaacaagacataaacatgcataataaagactntaaacatgacacaaaagcccaatgttcaactagccaccacgaaaacgagatagaattt

SEQ ID NO: 40008 - DNA, 435 bp, Oryza sativa
  unsure (1)..(435): unsure at all n locations
agcttctgtctggccattnttagacaagttgatacatcaatgatataattctttctcaatattttgtggttcaggaatttgatattttgtgctanctcaattgtatggacatggatcacttaaatgtttgtccctttttagtgaccagaaacttttgcttgataatgtagaattcctttgcccacatgcatgctgttgccatcctaaggtgtatccaaaacaacactgccatgttctcggggtaatttttttccaagttgctgcctgttagagtctaccatgggaatcaacggatcattgtgttctcgtatctgatcatatctgtctgaaggcaatgtgaacagatatgtgaaacaaactgaatgctctggcatgtctgctttntacacttangagcttagacaacagtttatgctgcagttctgaagatatctg

SEQ ID NO: 40009 - DNA, 472 bp, Oryza sativa
  unsure (1)..(472): unsure at all n locations
tagtgagttactccctggtttaaaataaataaatatagaatgcgcactggctagctactactccctctatctcacaatataagaaattttaagtggatgtgacacatcataatacagtgaaacagaccgaatctcattgtactaggatatgtctctgtccagatttattgtagtaggatatgtcacaaccactaaaatttcttatattataggacggtggaagtactataataacacatcgtctacctacatggacagagacagtaatcatcagtaattgatatactgctttttaatatatgtgatcgtatcactgtttttttgttaacttttaagtaagtactactgcctccgtcctattataagtgcagccatagttttccgcgtccaactntaaccgtccgtcttatttgaannaattttaaaaaaatttaaaaatataagtcacgagtaaagtactatttcatgttta

SEQ ID NO: 40010 - DNA, 448 bp, Oryza sativa
  unsure (1)..(448): unsure at all n locations
agcttagttcctgagcatctggttttcttcttttcccccgtctgcttttccctccagatggtctacactangactggcacccgcacgacangcgaaggcagcaacggcgaagaacgcgctgatggtgtgcaccccagcagtgattccggcaatggtccgccaccacttcccgagaatccgacccttgcccaagttatggcacatcagactcagatgatggcagccatgatgcagcagatgcagcagcagcatcagcagatgcaccagaggatgatgcagcacgccgaacagcagcaccagcagtttggtccccctccccctcagtccaagttgcctgagttcctacgtgtcaggccacccaccttctccagcaccaccaaccctatggaggcaaatgactggctccatgcaatagagaagaagctgaatctnctgcagtgcaatgatc

SEQ ID NO: 40011 - DNA, 473 bp, Oryza sativa
  unsure (1)..(473): unsure at all n locations
ggctgaatcagacaggcatactcaagtttggtgccggtacccacaatcgggttgcagtaccactgtttcttgtaggagagcactgaattctgaaacatagcttttggatagccctgtaatatgatacattttctaaccaagatatttcaaaaaaattaacaaagatatttcaaaaaaattaacaaaggaatgctattcctttcgattatcattcatattcagctgtctgtccagtcaagttactatgctattcttctcttgtaatgcaaatttcttattctagttacaataatcaactaagaacaaaaccgttttaaaatgtctatccctttatattttatggctaattntatgtccaactctgagtaaatcccaggttttaaacaaacttatgcccccaaatttatanttgattgcattntaatatatatnttggattntggtttccatgcagatgaattagaagttaatac

SEQ ID NO: 40012 - DNA, 357 bp, Oryza sativa
  unsure (1)..(357): unsure at all n locations
ctctcacatngcatattattgtctagaaccgctttcatcattatgctttaaaacgatattacagcgagaaaaattagtccgggtcctcaccgtggatcgaacacaaatggattctttaacgttgttctggtggaaagaagtcgtgttactgcacaacattgattatcccgtaactatgccgttctaaagggatgagaactaaaacaaaaacgttattctcaatctttagagagcaatatctttcacattatatagaatttttctaattcgtctgcaccatgatgttcgtaaaaataggttaccaaacctatctctcctggctcctcttatgtgggtatacagagagatgtcatgtga

SEQ ID NO: 40013 - DNA, 430 bp, Oryza sativa
  unsure (1)..(430): unsure at all n locations
agcttatacanataaattctcctccttaccgagttcaacgcanagcagaaaaaaaaaaccctccaccgtcttttgaggtacttgtttatcagtcttttgaagttctacatatgaaattggtgtgactatataaatatccaagaaaaaggcacttatcatcgatgagtataccactccatgctttagttgttttttgctcaagagattacacgaattttttttggttacaacgattgtgtggacttaagcattttatcatccatgtactccactgagcatgtccacctcagcgtgtctgaggacacgacaaacaaaggagacctgaaatgactcagacaacatcaacctattgttggtgacgagggatgccggatgcgacagacaaagtgatngtagcattttctgtcctactcctaaatagtaaaagaaa

SEQ ID NO: 40014 - DNA, 457 bp, Oryza sativa
  unsure (1)..(457): unsure at all n locations
tcgccggagatcaaaacatggcgacgattcggccttcgctgtgacngcgacttccagcggggtttggcgcaaaggaacgggtggccggtgtagctctcacccttgcgaagccgatggaggtggcggcgcaagtcggcgatgaccagagaagtgacagacgacggctggagcgatggtctgcggcggagagagaagccgaacgtggggaggtggcttgggctatggaaaaattctggaaaaagggaaaaacggaagaggaggccgaggggctgctatttatagccggaagaggaagagatcgactcgggaacagtggcagagccagctgttaaaacctgtggggtcaaactggtaaaattgtttaagttttctaatattgcaacgcanatatcaataatttttgggctgttntgtaaaaacctgtggggtcagctgaccccccagattacacttacct

SEQ ID NO: 40015 - DNA, 417 bp, Oryza sativa
  unsure (1)..(417): unsure at all n locations
agctataatcctgngtgtcctatgtccttcatgctttctcctcaactttggcctcatcaatttgaaaccaggatctacaaatgtccacatattctttgatgtcattgggttccatatcccagcatatgtttgcctcaatctttgcactgaatagcactcatccacatagccattcatgtcaggaaaccttagagagcctatgaatgccaatgcatggttacaaggtttcccacttacttgccaggctctacaagagcatgtatgagcctttaggttcactgcatgcctccataccactcccttattggacaccacagaaacttcagctaaatcatcgcaattactccttaccacattgtaatcttttagattcttgctctgttcattcagtgtcttaataatagatggaattattct

SEQ ID NO: 40016 - DNA, 459 bp, Oryza sativa
  unsure (1)..(459): unsure at all n locations
tgtcaagctcttcctgaagatatccttcaataccatcatgctcccgtctccagcagtgtaatgcgaatgcagatatcaggctccagctcgtgattctctttcttgtaatgaggcttgtgatggttccattcacatataggtccatttggtgatagacaagtgctctgactgatctcaggcgtgcggcttcacaaaacatcactgctaagcgcgcaattgctttcctttggacatgaataagtgggtggtcgcgcggaagaccattgttgaagttcagtagtctgtagtatgaatcaagtacagacggtggccccactgtaacctcatccctgcaaaattgcaatgtttcaagtcattactaacttcttatagatcaganacaaagacattataacaattntcatgtacaaagtacaagtntttcttgtggcggtagccgcggtattcccaagtcattcg

SEQ ID NO: 40017 - DNA, 462 bp, Oryza sativa
  unsure (1)..(462): unsure at all n locations
tagagtgcctgcggcgtgcaagcttaggaatcancaccttcatagttccattattatctctaatattataaaagttgaagatgttntctctggcactctggtacgtcatccggtgtgcgagtcggctcttaagcttattcgcttttagaaatacagatccgtatttgagtcggatcttaagtttggtcgctttcggaaatacagaatgagtcgtataagaaatatttttttaaaaaaaactcgaatactaacttgagatgatcatactcctaattatagctcatgatttttaccttaacgaaaccatataacaataataaaatcagaatagtcttcacccgttgcaacacacaagcactttttcgcattttttctagtataaaaaaaagttggctcgattctgagctgatgcatcgagccactcgctatcacacctagaccattctacatccacttaccaca

SEQ ID NO: 40018 - DNA, 466 bp, Oryza sativa
  unsure (1)..(466): unsure at all n locations
ttcctgtggcaactcatgaggactagtatcctacaattgcttatatacctgagaacccattccaaagacaaagagataaccgatgctgatattctcatttgggcaaataataaggtcaaggaatcaggcaaaacatcctgtattgaaaacttcaaggttcatcaaccttccctgtttcacttaattttagcaattgtctcatcggctgaccttacagtaatacgcattgattctttaggataaaagcatagcaaatggagttttcttcctagagcttctccacgctgttaaccacaggcatgttgacttgagcatggtgaagaatggggaggatggtgtgtatcattggtctcctgcacactattcttgtttcaacttaagatctttcattggtttaacctgtcgcttcacgactacctattatttcattttatttntattggctacagatgaagagaagaaatca

SEQ ID NO: 40019 - DNA, 449 bp, Oryza sativa
  unsure (1)..(449): unsure at all n locations
agcttgtggctaactatacaacataagctatatgatgacccaactctaatgttttgctatagaactaaaccatctaactatgctagacttggaaactaagttgaagggaactaacttaattatgtgattgaactcttggcttcggcaagaacttcaaattgactctggaagggggttaaagcaaggcaagctattatattaagtcatgaatgcatgaaatagtaatatttgagtagggttaggtttacttgcagaaagcagagaatgtangagtagaaaacatgtattgtttacaatgcagaagcattgaataaaatctggaattatgtttctaaccaagatgccattgtaagtcccgatgctcaatatccgtgagcacaactattcgaatagtttcaagaatattcatactacagtagatgtacgctttacccgcattctatgacatg

SEQ ID NO: 40020 - DNA, 468 bp, Oryza sativa
cttgagctatatctgccaagtccatatcagctccaccatgttatatgaggtactgacaatgccggtccatggggagcctcaattgatagcttagacttgggaggtgtaagctccgtcggtcgacttggacgaggagtcatcttcacaactatgtcttctttggggccattgtatgaacgtcttgcgcgcatcgcccaaagtcatgatttcatcattggggggcacgggcagcggatagcctgaccatgtgtcctttactgtatcgatggacaccttggcatacccagctagcaggtctgcgctgtggaccttgtctgtaaccgagggcttgaaagccatgccctcagcgacttcaggagcaaaagttgggtggactctcgctagtaggacacactgtgctgcgccctgcataaggtgaaagtttgaaataatattgaaacgtgtaaagggttcttattacatatggat

SEQ ID NO: 40021 - DNA, 396 bp, Oryza sativa
  unsure (1)..(396): unsure at all n locations
cgactacgaaggagtgtggttctttcnacaaattcctacctctatatctatctctgaagggnttgggttttgcaaaactccatagatatgcagaaaagaaatgctatccccactccgaccaagacagaacttttaccaaaagtttattgtgatcttcttgttcaaataacaattaaggtgaagcaaggtcaggaacaacgaatctctttatgataaacagatccattttgcaagctcgttattacgggtagttcctacaaagaatcggactaatgacgtatacaatgcttgaattatcgacgtaaatgctacatagtgggttctcatgcttcagagactacgagtgtaataggagcatccgtnnncnnaaggatcaccctaagatgatcatctcat

SEQ ID NO: 40022 - DNA, 465 bp, Oryza sativa
tgaacccaagtcctacagtgatggatataagcgcaattgatattcctggggagttatacatttgtgtattgataagaccgctcacaatttcttgaagctcgatctcccccccagatgaaccatatagccaagagaaaccatgaaccagaatagaagagcttgccccacccatgagtaaatatttcatagtagcctcattagaccgtagatctctcttggtatatccagacaataggtaggaacataaactgaaacattctggagctacaaagatagttattaaatcgttagcaccacataaaaacattccccctagagtagctgttaatacgaataacagaaactctgttatagccatttctgtacattcaatgtactctacggatagaggaatacataaaggtgaacataatacaataagaaattgaaagatttcgctgaaaatgttcgcttggaaatttcccg

SEQ ID NO: 40023 - DNA, 331 bp, Oryza sativa
ctgcaactctttctgaacatcatctttttttgtcgcagtcatcctattgtttcatagttcctactggacattgtgctcattcaccaactgactcattggcaactacatacacttataataggaaaattttccaaattgatttcacaaatgacattccaatatataaacatacctaatatgaagccctcatatatattgatctatataatatcactatataaagctgcaaatttttctaagtcatagtatatgatggccacctgtacatgctatacaaatgaactacatagggagatagcatcaaacaaatggaagactaggctgctatatc

SEQ ID NO: 40024 - DNA, 456 bp, Oryza sativa
  unsure (1)..(456): unsure at all n locations
tgtagcatatattacaaataaaacatgaaatgggtttgataacatcacacgaaccacacgtgttgtccttttatttacggcaaagtgttgcctgaaattctgaaaccacaagcggtgccagcatagcacggtaaaaaaaccctaaccactaagtattgcacaagctttaaaatgtagcagcaccttctgcaagcagaaaacttgaaaaggctggaactttttacatgttaaactagtaagaaattatcctttacagcatttcaatggagggcgtggtctggaaagatgagatgccctcggataccgccctgacaaaaattactttggcagacgttggacctataaaattgttggtcattccttcagaacatgactgtaactctgtaagtaataagctcagctgctcangcaacaacatgcaaagggtcagtcctcgaacctggttatcttgaatca

SEQ ID NO: 40025 - DNA, 425 bp, Oryza sativa
  unsure (1)..(425): unsure at all n locations
cacgccgaacacacacttgtctgggttcaactttatgcgggcggagcggagactttcgaaagtttccgctaaatccgagagtaaggtctcttggttgcgcgttttcacaaccaagtcatcaacataagcctcaacattacgtcctatttggctacccaaagaaattcgagtagtacgttgaaaagtaggacctgcattctttaacccgaaaggcattgtcgtataacaataagttcctatgggggtaatgaatgcagttttttcctcatcctccctagccatgcgaatctgatgataaccagagtatgcatctagaaaacacaaaaggtcgcaccctgcggtggagtcgacaatctgatctatgcgtggcagggggtaagggtccttatgacatgccttngtaaggtcggtgtagtcgatgcaca

SEQ ID NO: 40026 - DNA, 464 bp, Oryza sativa
  unsure (1)..(464): unsure at all n locations
ggctcttgatgttcttggtgcctgtagtatttgtatcagattggagtattgcaaatagatatcagttagagaatataatgtattngctactcgacaaatagaagtaaatccactaaattagtaggtaccattctatagtggtaattttactgaaaggtaacacattttctagtgtaaaatttgatacctacaagtacatagtacctcaaggtaaaaaaaaaaaagtttaatgtaaaaatttagtacatatagttaccgtaaaatttctcattctctagactaagaaaccacaggtacctgaatgcacaaaccaagcaaaggagagatctctttcttcaaattgtcccggatcattccatatatcttttccacatacgccgtaagttgctgcttaaacaacaacgccggatactttgcttcgacttgtcgtagagactctactncactaaccatgctcncattta

SEQ ID NO: 40027 - DNA, 180 bp, Oryza sativa
gtacatcccacgggatgtaacccactgagaatcttaagacggcttctgatcgcttccatgccacattctctaccatataactgacgcatatggtgaacccggatataacccatgaggagagatcgtctcgccggtctgcttcatggcgcgacgcctgatcacatatacagtctgaggatc

SEQ ID NO: 40028 - DNA, 453 bp, Oryza sativa
  unsure (1)..(453): unsure at all n locations
agcttgaatcgagttcgattcgggttggttttcttcctctccaagccgcaagtttccttcgccgttgccgtcgccgtgggcctccgccgtcgcctccgagcccctttaaaaggatccccgtgttcttctctttccgccgccaccctcgccttcgcctctcgtcgccggagtagccctagcaccgtgtgccctagcttcgccgtcgccgccgccgcttcagccgtgcgccgccgtcgttccagccgtcgccgccactcgggaagaccgccgtcgtcatcgccaagtcgccgccgtcctcgtccgccccttcgctgccgtcggagaccgccgaagcatcgtcgccgtcgtcaagccgaagaccgccgccgtttcaacctcgtcgctgtcgccgtccgttggtcctccgccgtcgctntggtcgccggtgagttcgccgtgccgtccgctacccgt

SEQ ID NO: 40029 - DNA, 475 bp, Oryza sativa
  unsure (1)..(475): unsure at all n locations
ggtgtcatggtttaatggcaacagtgttgtcatttgtctatagtacattggtacaagtgaacattnttacaagttagagtatgtgcaatgcatgtaagactctcttaaatcaaagactgttgctaagactgaaaatagattactaagatgatctggtcttaaataccttaactctactaacaagttaaaaaaaggatcaatgaattntctgaactagattggtgtatgaaactggtattttctgtatcaggtttgcgcatgagtttttagataatggataaaacccgaccttcacttcaactaacaagttagtgttctgaatcacaaacaaaactagcttcaggccatattttagcatctatacacagattgaaaaaccacaagccaaactctgaatacctacttattnttcagacaagtttctgacaantaaaatttggatcaaagaanaaatgtttctctcaacaaaacatgt

SEQ ID NO: 40030 - DNA, 407 bp, Oryza sativa
  unsure (1)..(407): unsure at all n locations
aaaacatgcaagcttgntatgagaataaagtctcgacatggttgttcattacctctttataaacatggntcaaccggatggtcacaagtgttgatctccgctcaagcttgaccccaagatggatggcacaaggcatagcttaatgtggctaagaatgttttcttagtctcttcccggtcttggtgtttggtgtagaccggatttgctagatagacttcgtactatcaagaggggtctatgaagcgagcttgtggatgatcttgtgccatattagttcatatgcatgtaggtgcattttgtgggctcgtctaaccaagtttgatgagttgtctcaagtcctaaaccaagagagaagtgtgcatgtccaataagagtgagtgacatcttgcgggtatgtccggtggata

SEQ ID NO: 40031 - DNA, 455 bp, Oryza sativa
  unsure (1)..(455): unsure at all n locations
ttggctcatttgcccattagatatatgctacaaacctatctagtggatccctctacatattttttttctttccttatttgatgtaactgcttttagattccgaaaagaccttcttttttccttttgtgaaaatggccagttgcagagtgccatagcagaactacaagaatagcatccagaaatagataaatggtactctctctgttttttaatgtatgacgccgttgacttttgagatatgtttgacgatttgtcttattcaaaaaattcatgtaattatcatttattttcttgtgactggatttatcattaaaggttcttaaagcatgacttatattntnttatgtttgcacaaatatttcgaataagacgaagggtcaaacgtgtgtaaaagttaagggcatatatataaaaaaaacagaggggttttaataagatgatatttgagttaaaac

SEQ ID NO: 40032 - DNA, 409 bp, Oryza sativa
  unsure (1)..(409): unsure at all n locations
atctaaaaaaagacctgcaagggcaacatcatgcaagagaaggagaagcatgatccaaattattggtgacatgaacactgctgctgatgctgctgctcaaagacaaagccatggcagggcagcagattgttccttccttccttccttccacaaaagcatatggtaaagattaaaaaaattgagataagtagagtaaaggtaatctaatccactgtgcactaatcagttcttgcaattatcagttgtgcctgcccatccatatgccaaagccatatactactaggtttatagaatgaaagaaaagatctcctagctactcctatagtaaccacacgacatatactcctacataggcaaagatatctaaagcatgcagtanaacaggatatatgtttgatgaaataatact

SEQ ID NO: 40033 - DNA, 481 bp, Oryza sativa
  unsure (1)..(481): unsure at all n locations
acctataaaactcagcttacaattcaagctcgtgcatgggtggttagttatctctgaattattggtatggtgccagtcggcatgttcattattatgggcttcaatcacttttgcaattttcttgataagagttaattgactttttcattatttattatagagtatatatatagacgtatatctgtatccatatattttgaaaaatgctgtatcccggtatcttcgtatccagtaacatagcacgccagtactttcacacacataccgtactcatacgtacccacgcctacatggaagtatccctatcacacatataaagagaataaaggcctgtagtttgtacatgcactttctcacagtctcaaaacanattaaattacatgctgctactaaaaatcatatttagaaaggaagtcgctggtatcaatcatcatatgaagatgttattggaacaagtctagcaacgcttcttgtaaccgaa

SEQ ID NO: 40034 - DNA, 433 bp, Oryza sativa
agcttgtatcggcagtcttaccctgagtggtttgaaagagttcctcttcccaattggttcaaagtttctgacttctccaaattttcgggacaagatggtgtgtcgacttatgagcacattagccgattcctggctcagtgtggtgaagcatcggcggtagacgctctgatagttaagttattccggttatctctgtatggatcggcttttacttggttttcctctttgccatatggttcgatcaacagttgggccgatttggagaagcaatccacagctatttctacagtggggttcatgagataaaattatctgacttgacagcgattaagcagcggcatgatgaacctgtgcacgagtatattcagagattcagggagatgaagaacaaatgcttcagcttgagtttaactgattgcccagtagccgatct

SEQ ID NO: 40035 - DNA, 458 bp, Oryza sativa
  unsure (1)..(458): unsure at all n locations
taatatcccgcggannaaatttgaggttggaagagcgaagccgccatataagaaatgggaaaagactacaacctcgtgtgtatcgggggacggaaaagcctcaccgcacgctggccgccacccgatgatctccttggcagggagaacgccgtgcgccaccatctccttcaggttctcctccgtcacgtcggatggcgcccattggccttcaaagctttccttctcttccgccattaattttacccgaatgcgctgatttgattcgagggatggctggggaaaagtgaggaattgaggcggtggatcacgggaaggattttgatgaacttttcgaaggtggattcgagtggaatggtgaaccctagtttgccggcacagctctgtactgtagcagggagtggggaaaatggcgagagttccggcggngaagacgaagcggcgcttggatctcggaattt

SEQ ID NO: 40036 - DNA, 386 bp, Oryza sativa
  unsure (1)..(386): unsure at all n locations
tggacagaagcncgagctgccgtcctgtacctgtgcattctccgtttcctccaccaaatccggccttttctcttgtgtatctctaaaattagctgacgggaaatattcctcttatcctcctctatctttacccccaaaaatcggagttaatcgctgagtatcttatccggatcgaactcgttntcgagtttatctccaaaaccgagtttttgatttcccggatcgatttcttgcgggaggagtcctatctcttcaatccaaggctataaataggaccccctagtcctcctctttcgattgccctctatcccgtggtctcccgtgcctcgtagcgccagcgccacgtgcttcaccccgccgtcgttgccggccgagcttcatccgcg

SEQ ID NO: 40037 - DNA, 449 bp, Oryza sativa
  unsure (1)..(449): unsure at all n locations
agctggtttatggacatgaggttgttntaccatgggaagttcgaatcggctcgagaagaacggagttgcaaaatgaattgacagccgatgagtattataatcttatggccgatgaaagggaggacttggttcaatcaagattgcgagcccttgcaaaggttaccaaggataaggaacgtgttgctcgacattataacaagaaggtggtacccaagtctttttcggaaggagaacttgtatggaatttaattttgccgattgggactcgggataacaaatttggcaagtggtcgccgaattgggaaggaccgtatcaaatctacaaggttgtgtctaagggagcttacatgttgcaaggactcgatggagaagtttatggacgagcactcaatggaaaatatttgaaaagtattacccaagtgnttgggttaatgcatgatcggctagtg

SEQ ID NO: 40038 - DNA, 447 bp, Oryza sativa
  unsure (1)..(447): unsure at all n locations
tctatggagtgcttgtccgacttgtgtatagggcaccatattttcttcgtatcgtcgccttgtgagtctgggtacttgggtgggtccgcatattctgctgcgaggacttccatttgagctttccttttcccactcttgcaactcttcttcttgcttgactcaggtgtgtccttggctggttttttctctccccccgtctttggcttgtcgttattgcgtctcagtgcgtcgtccgcgtgagcgcatcgatcgacaatctcgaatagctttcgagcagttgtgatctgtcttgtcaccaactcctgngtggtgtagcgatctctgacaccagtcttaaaagcgcggatcatggaagcgttggtgatctcggggatcgtatttctgcactcattaaagcgccgaatgtagtccctcaatgattcgcccggattctgtgtcaacgcgtgt

SEQ ID NO: 40039 - DNA, 431 bp, Oryza sativa
  unsure (1)..(431): unsure at all n locations
agctnggcactggcgttctctgtgatgaggcatataantantaggaggtggaggaagaagacaaggtgggtggaagtggaagagatggagcgagaggacatgtacaagaagcatctctgagctccgagctgctctccgatggcgtcgcggcgcagtgtggcagcagggacaggtgggggcaggtggcagagagggagactggactgggtttgaatggtccggacttctattcttgggaaggcgacaaaaagcgttgcggcttgcagggttgctgaaatgaaaccgccagtcaaagcggagggtgggtttgttggttgggttgctgcagaatgttgcggcagctatggctgatcagtgtttgattctcttctctccttcacctctctaggagtactgcactataggacaaaggatacggatccttgtgtcag

SEQ ID NO: 40040 - DNA, 484 bp, Oryza sativa
acacttgaaactcagcttacataggaagccgaaacagccgcgaatccctgatctattttcccaaatggactgaaatattagggcgcgcctgtccaccagatccagatggaaaccatcaaatcaccaaatcctaccgtttcagcgcaccataaacccctcgacatgacggatcgaacacacgaaccctagccacatgactacgaggaagaaaaagcaagcagaaacgcgcgtattcgtgacccctgtcgcgtcaacaacctacaggacccagaaaaaaaatgggggaaagctgaatactataccaaatccccgccgattcgtgcgaaaccgcaagaacacacgaccaccctaaccccatccaacacgccaaatccctgcccaaaatcgcaagaatccaacacctcgccgattccaccgcacgaagatcctagaaaggtgaatgctgataggggactgcgacgccgtgagcggacgcataccttct

SEQ ID NO: 40041 - DNA, 408 bp, Oryza sativa
  unsure (1)..(408): unsure at all n locations
tcaagcatgctcatttcttcttggcaaatatgtgcttcgaccncaantcttctttatatccaggactttaatgcgatacaccctgcatataacttctggtagcttcaacccggggcccttgtataagcaacccaattctagatagcgaatattgacaaatgcttagatgttgcctatcaatgaatccaagtcaaaaagaccatctccagtttcaacacacggattgaccttacctcattgagttcttgccgaaacgtgtctgcaaaattcaagtcatgtggcccaaacagcatcaatgtgcttaagctctttgttgcactcacggaaggattagagactcttgcagaaaaatcttacgaacacaggccatcaatttggtttgtctccacttgtataaactgacatgac

SEQ ID NO: 40042 - DNA, 460 bp, Oryza sativa
  unsure (1)..(460): unsure at all n locations
caataaagaacacgttctagcatgcaatctggtttcattgtttcaaatgnattattatctaaaccaaccttaccaactgggacttgcactcattctaaactatcaactctgaggtattagcaaactggtttcagttgacacaccagtttgttatgattaattttagtatgctggactatgcctccaatcaaacaaccttctaatctaaattagctcttatcaactcgtatttcaacaattaattgtcatgataagatcagagcattgatcattgatcagactaatcgtatatatcaaagctaacaatatacatggtaatcctatatggataaatgtgacatccatactcccatgctggtcaatcctagatggataaatgtgacatccaactcccatgctggtcaaactacaatagtcagactgaagaaacaaaatatagcaacatttactcactcgtgcg

SEQ ID NO: 40043 - DNA, 453 bp, Oryza sativa
agcttgaatcaatgaataataacattggtattttatacatgaaagaatattatttataatcctacaaatagattacaggttaaatatctcagtattcagtactaaccattttatcgaatgcatcagactgcacagagttcccgagctgaagttcacgatattttggtccaggcttgagaccaagggcagcagccttagcagggtcaaactttcctttaagttctggcagttcacatgcataaatgatagcagtattgccaggcttcaagttggagtcattcaagcaactggcttctttattgtatcttggtttgacaaacattgcggatattcgaactacttcgtcatcaacaatgacagtagcatctttagattgtgaagaagaatacatttgttccacaccaaagctatgtgtgtgaagcattgctctatttgggataaaggatctcattg

SEQ ID NO: 40044 - DNA, 463 bp, Oryza sativa
  unsure (1)..(463): unsure at all n locations
tatatctcagttgaccataggctatagtggaaagttcatatatcaaatatgttaagggtaatggaatctatttgctctgctgtgcatttaattgaagcagagatttattaatctggttggctatttgatatcaggtgaaagcaaatatttgaatgatattatgtgaaacatacgacaggttttggcacttgacaaatgctttgttgacccacgttgtttattaaatcccacacaagtaatgaagagggcattataccattaacagatgctattcccaatattccaatcgtaagttntattttatgttagtgaaaatctagttttcattgttttctccataaatgccttgcatgtgtaattcttgtacatatactccctgaactgttattaatatagtatggctcatatgattctgtcccgtgtctgattaanaaatttaggatatcgcctacaagatgctatt

SEQ ID NO: 40045 - DNA, 403 bp, Oryza sativa
tttttttcacaaccaacctccaactttcctacgaaatagtactccttaattagctccccagccgccgactctcgttatccctactggcggcgtcgacctgctaacctgtcggggtaggggctgaactctgaattctgaattcaatcacagggttacaacgcaatctgaattttgaacgaatgagtagtagcgcgatgagtattccaagatcaagttacttccatgtactccaagatttctgaatagaattctgactgaactagagctactagtatatttcttttttcaccgagacaagactgaagtgtggactctttccgcaaagtagaaaatattttataacaaaggggaatagccagtgagtctcaactcttgcccaaggtgaactagacttgatgtttat

SEQ ID NO: 40046 - DNA, 407 bp, Oryza sativa
ctttctgatccgtactcttctttgctcatcaatacaacacattctatttttcttgataattaatgggcgatccctggagtgagcgattcaatgattagctgatgaaataatattctttctagaaccacaagaaatacctatgtttgctttttttgcataaccacctgaccatattatgcagaataataattctagttattcacggtccagattatgttacaccaacacttatgttactgcactatctagtgatgttaccgatactctaagcatgatgcgatcttcctattttattatcttttctgtaacagaacatgctttccttatattattgtgatttctttgatacacctgcgaaagtttttgattgatgtgtattacaatgacaaggatgttcctgccatttg

SEQ ID NO: 40047 - DNA, 425 bp, Oryza sativa
  unsure (1)..(425): unsure at all n locations
agcttatcgaaaacatatgaaaagactgcttataattattatttatgtacaaactagtaatgtcatctttacgacattaaattctagcgcttgtacatatctagtagtgatttaagattcatgattcgaatgtctgcatttcgaaacgtcttttatatgagaacggacgaagtaaaaatatggtcacgacattaacatgctaactgatgtgcgatataaaatacagtgctacctagtgcatactgacgctattgttcttttttaatgattagatttctattagtggagagtgcaaacggtgcacttgaaggttcttctattcagttgactctaggaaaagaaagttcttccattcagttctgccatatgaanaagaagctcatctccctatattcttactacttttctgctttaatatatattga

SEQ ID NO: 40048 - DNA, 473 bp, Oryza sativa
  unsure (1)..(473): unsure at all n locations
tactcagctagaatctaaactccttcaatgtccaaaaagatctaatctgtgtaatctatgattaagnntttntatgagacagaatgagtatgtgcctctaaaatctctttatgggaagaatntttttaaaaaataaaagaaccggaggactgccaataacattacaaagatagcttgcatgtactccttccgtatatgtgcatagctagaaataaggtcttttagggagttatgctttgagattatttggtgacctacgatttacaattttcatttgcatttgtagaggtcatgcacgcttatatacagtggtgtgaatgtggcatgtgtgttaagtatatgcatccaattatactctcnttgaaaaagaatcatttntaggaagagtacaacctatgccctacaacaattgaagcttgaatcaatatattttgtctcctacattcttannataatcgagcatgatcagggca

SEQ ID NO: 40049 - DNA, 450 bp, Oryza sativa
  unsure (1)..(450): unsure at all n locations
ttgctggtcgatacttttcgtgggatgcaactgcacctgtcatactgggcatgggttcttttcaggaagaacaatcctttgaaccccaaggtatgataaaggtagagcgagttgagccaaatgcaacaccaagtggctggagaatatggccattttctttcaaaaaggacaagggtctgttaacactgtccagccagtttctgaaagcactgaggaggcttcctcttccgctcctgttaaagaagtggagagagaaaacaacaaacccagggcaaagaggatggagagaaaagtgcgttcgctcactccaacatctgaggagctagcatctcttgatctcagagagggcaggaacgtggtaacatttaccttctcaactggaatgcttgganaacagcaggtaagtttccatttccacatttgttcacttaattgccatagagtttctaa

SEQ ID NO: 40050 - DNA, 467 bp, Oryza sativa
  unsure (1)..(467): unsure at all n locations
ggctcggtctcgatcggcttaacttcgtattgaggtacgtatactctctgatcagcctttatactcttatatatgtctatcgacatggattgctggtgcctcatctggagatgtaaaagatcttcgagtttatctcttatgaaacagctgagattaatcaaagtcttcagacttcagagaaccattaggccataaatttatcttctgcttgctctcgctcgatcgagaaatgtactatcctgccaagctctttcagaataccaagataaatcacatccncagttctctcacatcttaaatgttgacgttcgttcgttgactcctttatggaaggtgcatgtcatcagcgatttcttcttcaaggcgttctgtcgtcggctatttttttttaacgaatcacacaagacggtgcgatgttttattaaaattataagattacaaccaggaaggtcgtaaccagaataaaa

SEQ ID NO: 40051 - DNA, 451 bp, Oryza sativa
tcctacatcgatagcattgttaatggttgtgactgtgggaacgaacatattgttgctgccagtggtagcacggcggtggcggtggctcaggtcgaggcgaaaacgctcgttgtgcagcctaccgatgtcgcgggcaccagcgaggaggttgctgtagtccccaatgtcaaggaagggccgaaccggtgcgctacctgtaggaagagggttgggctgacgggattcaactgccggtgcggtaacatgtactgtgcgttgcaccgctactccgacaagcatgaatgccagttcgactaccggactgcggctagggatgccatcgccaaagccaacccagtggtgaaggctgagaagctcgacaagatctaaggcggctaggggcgtggaatggattgcaacctacaagatttcaacatccacctttgctgctctatcctcacacttcttcttg

SEQ ID NO: 40052 - DNA, 457 bp, Oryza sativa
  unsure (1)..(457): unsure at all n locations
tctatanaacacncaagcttngcctcctccattattcccaactcgagcatcaactctgtttctgcttcaaagctctagctatacctcctctgctgcttgagctcgagcttcaacagtccaactccaccacctttaactcgagctccgtcaatcccttatattctccatcagctcaaactccagccccgtctctttctccatgctcctgacatcaaaccatgagttcaaagtataggaagctcaaagcctatgtgctcacgctcgtcaagtacccgagtgcaccatgaggtggctagagattggggaagaggaccttgtctgtgtgaggacgaaataagctcactggagacacgcacggaatacagcctggaatactgctcacgaagaagatgatgtgatggttactgacatagggaccaagcgcctcaaatgcaatattgggcaacaaaatctagcc

SEQ ID NO: 40053 - DNA, 424 bp, Oryza sativa
  unsure (1)..(424): unsure at all n locations
agcttgtgatgagaagaaagtcttatcaaatgtatggtaatatcttcggataaacatggttgaatcaaatggtcacaagtgttgatctcgactcaagcttgaccccaagatggataagcgcaggcaaaggtataatgtagctaagaatgttttcttagtcttttcccggtcttggtgtttggtgtagaccggatatgctagataggcgccgtactatcaagaggggtctatgaagcgagcttgtggatgatcttgtgccatattagttcatatgcatgtgtgtgtatttggtgggcttgtctagccaagtgtggtgagttntctcaagtcctaaacaaagagagatgtgggcaaatcctatatgtttgggtagcctcatgtggttatgtccggtggagtatcctttggagtgtgagccctttct

SEQ ID NO: 40054 - DNA, 431 bp, Oryza sativa
  unsure (1)..(431): unsure at all n locations
tctctctactatgctacaggaagcctcacggagaaagatacttcctcatctctttgcttgtgtttatgcttatcagccaaaatttgaattttcaatcttaaatttaaagttgattttagggttttttttcatcaaagtttatttttcagcctttgcttttaaatcgttaagaacatgtatataaaagttntattcacaaactatttttcgtttgcaaatatgccgtttggcttattccctcgataaacgaaacaatgagggacctagatttgagtcaaccaaaataggcccaatttagcactgctatatcctctgctgtgggttctaacttttgccaggttggccgaagatgtggcggacgaccaatgtcattaagattgggaggaaaggaagtacaaaatgtgtgttacattgacaagagaatgtcgagt

SEQ ID NO: 40055 - DNA, 445 bp, Oryza sativa
tgcaagcttgtcgattgaaggatggataactaactttctcttaaaaccaaacccttcctccctctgaaatcgcccggaaaaagaagagatgatcaatccgtctcttgctagggattcgaacaaaaaaaatcaaagcagcagcagcagcagcagcagcaagtgcagagaatcacagagaaagcaaaacaccccaagtgtgctacaaagatttctcccacagcatcacaccgagatgctactaactcctcccatgaactgcaaattttctggatatattaaaaaagaagaaaaaaagaccagaaaagaatgctgctcctccaagaaaccctcagcaagagattgagagggccagtgagctgagcaagggaccctacccggccatccgcgacggcggcgagctccactggacggagaagccggcgccggcgagcgcgccgcggaagta

SEQ ID NO: 40056 - DNA, 489 bp, Oryza sativa
  unsure (1)..(489): unsure at all n locations
ctattacggacctataaaactaagcttacatacgggtttcccttttcggaaacccgaaggtaggtataagcaagctgntcttaccttacacagcgttataacacaactccttgcttcaatatactatgcaaggtaggctaaagtcactactactaagaacggtggaatggagggtgagagcgcgcttgtgaagcttgctctgaatggtgtcttcgttgttgttatgtgttttcgttcttgtgtgtcttcggagtgaaggccaacgtctccttttatagaggccagagatggcttcgcctgtgtctcctgcttatctcttcgctactgtggattcacgagagctagctaaagtcgaggcctttccaccgaaagttttattcttcacagggatatgtcattcaccgcaccctatattgttcctttatgctntatagggtggctttctggattccttcttctggattccttcttgagtagtcttctgaaatc

SEQ ID NO: 40057 - DNA, 448 bp, Oryza sativa
  unsure (1)..(448): unsure at all n locations
agctntgtgagcataggatatgtttccttcttatctataaactcatgtatattacaccattaatatctaggctcacctctcgtatacacagcgtcttggaatctgtgctacaattagctataagattatagcacacttctcttctggtatgattctcacacaagcaaccgaaaactggaagacacannttttatttgtgttgaaaccactttgctctcctctagtatgcttaaacctcactttataaaactgaatggatttgtttagtcattaagagcaacctttcatacacatttttctttgccaagacgcctctatacaaagagagtatgagtataccgccctgtgcanaccaaactntctttggtctggagtggatcaccatgtcgttggtaagcactgctagaaaaatacgaanaataaggcctaaatggtagatatgaacatg

SEQ ID NO: 40058 - DNA, 464 bp, Oryza sativa
  unsure (1)..(464): unsure at all n locations
tagctagtaaccttaatgatgcgagagagatgcattcatattctcttggaccgnanagcgtataanaaatgggagagctagcctttcctccatttggcttttgcaattgcaagcctgaaagcattgcaagcaaacggtgccatgtgcagatgtgctgcgaccctctcaaatctgggatttgtgatgagctgttttattgctgtttgcccgacaaaaacgtacgccttcaaattcctagtatggatatttaaaaataccatgcccgtactagcaatacctcgtgtggatcgggtccaatcatgctacacaaacgtagaagaattaattccaggattaaattctcatctgggttgtacagaaaaattcccgtgtgtggtccgaacagagcgtgaattgaacagcttcatgtgcaaaaccgtttcaaatccaggtctttgcctttctggcctcatcatatgagattc

SEQ ID NO: 40059 - DNA, 441 bp, Oryza sativa
  unsure (1)..(441): unsure at all n locations
agcttgcccgcangtacacctaacacgcacttatcgttgttcagnnttatgcgggcggagcggagactctcaaaagattccgctagatccgagagtaaggtctctaggttgcgcgtctttaccaccaagtcatcaacataagcctcaacattacgtcctatttggctacccaaagaaattcgagtagtacgttgaaaagtaggacctgcattctttaacccgaagggcattgtcgtataacaataagttcctatgggggtaatgaatgcagttttttcctcatgctccctagccatgcgaatctgatggtaaccagagtatgcatctagaaaacacaaaaggtcgcaccccgctgtggagtcgacaatctgatctatgcgaggcagggggtaagggtccttaagacatgccttgttaaggtcggtgtagtcgatgcacatc

SEQ ID NO: 40060 - DNA, 467 bp, Oryza sativa
  unsure (1)..(467): unsure at all n locations
cttgctctgaatgtcaggccgagactatgctttcaagcatttatgctgggtgcagatcgagctgcagaaaagatggctttcttttcttttcttttcttggttacatagctgcaacttgagagaagatagatagatagatctatctgagtgcgcatcaacatggctgaaagaaagcaatcgagaatggatgcaagcatgcgaagtctcaactaaagaaagattgtacatggaaccaactgcaacctgatggatgaacgatctgcatcagtaagtgcttttcaagatagtggttcctgcatctgctgaagatagtagacagtgaggaccgatttctatctctgtgccattgttaagttaatgccatctctttcgtaaagaggatgttgtctgttggaccatggtttctacttgtgagtaaacaggggcatcaagntcatcataccatgtcatctgcgtgcatacatcat

SEQ ID NO: 40061 - DNA, 429 bp, Oryza sativa
  unsure (1)..(429): unsure at all n locations
ctgcaactttgcaatattcnagttataaactttttgcgtgaaacctgcactcaaacactactcttgcatggctgatgcgctaagaagggatggccgtgttgttgctgcaattaaactcatagaggaaatgcctttcgagcctgatgaggccatgcttggaggtgtattatcagcctgccgagtgcatggngaaatggaagctgctgaacgaatttcaaagaagttgatgggcatgtcaccttcaaagagtggttacttcatgagcttggcaaacatatattcagatgctgggaggtatagtgatgcaaagagaataagaggcttcatgaaggaagtaaaagttgacaagcttcctggatatagttcagttgaaattgatgttaatgtctctgaaccaagatctggatgatncaattcatataatggatg

SEQ ID NO: 40062 - DNA, 449 bp, Oryza sativa
  unsure (1)..(449): unsure at all n locations
tgcattctgtcccctccttccgcctctcccttgctcacctctatgcagcgtggnggggatggagatcgaggcgcgatgacagattgagcggcggtggtcgacgaaactttctgggtaggctcttctcctcccccgtctacccctagccatcttcttccccgacgtgggagttagttacgcgcaacagcgtgggatgatgacacgggatgagacatctacccgacgcggntcctcgctctttccttacctacaaaagccaaaactacgcacgtctctggtggagnttttcctttctttttttcttagaactttggtggagttcgcatgctactagtgcgccgaagtgcagctctctcttagagcatctccaacagtctctccattccactcttcaagccaaatattagccattttagcccaaaaacgtgctccaacagcctctccaactg

SEQ ID NO: 40063 - DNA, 328 bp, Oryza sativa
taacatgatacatgcatattctggctatggcaacggtcacatcctacgctgttatactcattaattaccatgatttcctgtctgtacggtggatcatattaagaatttattgctcggattcctaccatatatatactattttgggccttctaagtgattgacactccgccctccttgtattatttttgcacttcatatattcaacttgaaatgctcgctgctgggtatgttactaaataccatgcgcgcttcgttttataaccactccgctcttgactatatatttagactttgaacctaatcacattatccagggctacacctaatt

SEQ ID NO: 40064 - DNA, 445 bp, Oryza sativa
  unsure (1)..(445): unsure at all n locations
agcttgcacgctcggctagcaattgacgcgtgtgccgcacacacggtgtcgtgactcgtgaccggcgtcgaggtgcacactaaaaagaaaaaaaaacaaaaccaaacttgccggccacccaaaccagcaccaacacgtaaagcctttctccgagcaaaacatccaaacggcaaaatataccccacaaaaactaaaaagtgaaaaagagcagagaaaattaggcaagctccacgtgtcgggcttcctccgcgccgccggtcacatccaacccaacccaaactgccagccacacctcggttgggaactggaatagtatgcacggaaaacagagcgatccattagcacataactaattaagtattagctaatattntttaaaaaaataattaatttgatttttaaatatactttatataaaagactttgttagaaaatatatttaata

SEQ ID NO: 40065 - DNA, 437 bp, Oryza sativa
  unsure (1)..(437): unsure at all n locations
ctcaagttcagattntaaaatattcaaatcaaaatttattaactttcaaactcaaaacatgctaaagataaaaaaaatcagaaaaaagtgggaaagaaaaggaaaaaaatggtaaaaaaaggaaaaaagagcaaggaggcgcgcgcgctggcacagcggcgctgggtcttctaggcccgaaacgcgcgcgcgtattagcgtttccgctttagacccgcaaccaaaatacccagcccactaagcctgacccgccccggcccggcctggaaggtccccgagcactgacgcgggcacggngcccactgccgacgtgccaatcctggatcccacacgctcacgcgagcagagcacgaccgatctcgtctcgtctcatacaaaccccgcccgcatccgcacccggatctgccaccgccgcggcttccctcccccccttcttc

SEQ ID NO: 40066 - DNA, 487 bp, Oryza sativa
  unsure (1)..(487): unsure at all n locations
taaaactcagcttagggtagagtgacatacagctaaggatttagctaactcctacatcttctaattatggctaagtggtagtagtttagatatattctattcctatacttctagtatacaacatcttaatatattctaactagtatacactatgagtataacccctttaacaatgcagcatagctaagcctcccgatgcatcgcaagactaccccgggttgccgagttctttacgacaacctgtcatagccattcaaccaaagcgggatacagaggagtatccaaccccagaaaattgtatgtagggatataaactgcggngagacgcccgtactgagctgtcactatcagcggcccacaaatcacccggagaatataccccanataatgataagtggtaacctaagctccatgcttaaattactacttactactctacagcctttgcatcggtgtagagcaactaagtctgaagccataactcttg

SEQ ID NO: 40067 - DNA, 466 bp, Oryza sativa
  unsure (1)..(466): unsure at all n locations
agcntttgtaaccgaaaagactatcaatagtcttcgatgcgttggaacttctccgaagcgacgcccccaaggaggacacgacgcgtagtgccgccgccgcttgtccgaattcggaactatgtttacacctggagattgcggggatatgaaagaacgccatgacaacgcctccaaaaagggaaacggcgcccgcgggcgccgtggtcgtcgaactggccaaaggcacggcaaggctttcactagcatcttcacatcacccacacaagcacccccacatcgatgaccatagattagtccaagacgtctcacaagcagccataccaactccacatccgcacatcgccgcacatgagcacgagactcgccaccggcagaagataccctctaccgagcaggaggctcaccgccagcaagcaaccccgccggagctcacgtatgcgacgtcgcgcagccgtcgagctcaccg

SEQ ID NO: 40068 - DNA, 473 bp, Oryza sativa
  unsure (1)..(473): unsure at all n locations
tggcgcacacganagagtgcgagagctcagaagatcactctcagagccccctacctggcgcgccaaatgacggagcgtggggctcctcaccgggagaccgcgcaggcccccctttgccggttcggccgggggccctgggtgaggttctaagctcctggtctgtgtgtggaaggttcgcgagaatggaaaaagcacaagacacgggcgatgtatacaggttcgggccgctgagaagcgtaataccctactcctgtgttttggtggatctgtgtatgaagaagctacaaagtgccagccagcccctgatcgttctcttctttatcttcctaaaaatcctccctctccttttctaagtgggcaaggtcctccttttatatctcaaggggataccacatgcaccatctctccctctctttcttttgtgtggngactcatcctttcttcccttcaacttgacttctcttcattaatgg

SEQ ID NO: 40069 - DNA, 453 bp, Oryza sativa
agcttgagctgaattataagaggctctattgtactttattgtatactagaattagggagaaagtagagtagaagaagtcggaggaatttcggagttgtcggtagtcctctcttatttcttatactttgttaattactatgctttaatagaattatcattctgagtaattaagatttactcggtgataattaattcctggttagttcctaattaacgtgcaggataattgatcactatagtccagcaaaatatagtggttgctttagtgtttagctagcgctaaagtagatattaattgcgtagacgtggttgtcgacgtttgagatcatgactacggtattttgcatagtatggggatcgttggtaccagggtatatgcgagattgaggaaaagagatggagaagggattttatacatgtctgggcccttattaacaggaataccctacatct

SEQ ID NO: 40070 - DNA, 483 bp, Oryza sativa
tataaaactcagcttggcacagagtgccctcaagaaaatagcagtgtacaaagtatgctatgcaacatataagaacagtgttgcatagttacttgtgttgctttggcaggcaagtactggtccgatcgaattctcatatatatggagtacacgtaattaagtcaactttggcatactatttacttcctcccccaaagacacaccagcatgaattttctctatttagaattatcgagaatatgcatcatatttatcattatcaactcaattaatcatgatacgatgtacatgtacacttagcctgatatcttagaattaaaatttctgagttctcaacatgcacaacaacgtcgggtcggtctctcgtagcggtatggcgtagcaattaggttggaaatcgggataaggaggtagtagtagtaggagtacaagggaagtgattttcactcgagggatcatctcattcgtgcacccatataatcg

SEQ ID NO: 40071 - DNA, 445 bp, Oryza sativa
  unsure (1)..(445): unsure at all n locations
gctttatggagtcttggcaatctctggttcaaagccaactgctcaaccttacataatcatgacagagcttcttgctgtgagggccacctttcttggttcaatgcgtatcattatatttttaccaaaacattttctctataagtattcaaacaaatattataccaaactagttggattctctaaaaccttccatgccttattcatcatgtgtttacagtttctgctatgaatattagatcactcgagacattggtacatataccctcggaacgaggaatctcacctgcctatttgcatatcaaactcagtagctaagagttctgctgaaccggtagtcataatatgccctgtactgtctagtaatgtctttgaaatatatatatagttcattagttaccatcacttgaataattataccacangaactngcattnatttcattctc

SEQ ID NO: 40072 - DNA, 467 bp, Oryza sativa
  unsure (1)..(467): unsure at all n locations
tgngtttctctcaaggtagcactatgataggtcactntgatcaccgagacatacacaaacacctcgacgttgcatccctattaatagtacggcattcctaaactcaaatgtaaataagaagagaactacaccattaggaatgcccttttttttcatctttctttcattgtcttgagggacgccaatgccgataccgtttcaccatatattcttcaaatgattgatgcggttacttgtagctntaaatggtctcgaacagtccatcatgacanaagccgcactcgcccttcaccaccggatttggttcttcggtgccaagccccttgcttgcccttcaccgctgcatggtccatcgcgaccgagcatcgcttgcccttcaccgtctcgccataatagccacttcgtatcacacatctacaatatattcactttgtcattcttggtattggtagatgtaatgatatcag

SEQ ID NO: 40073 - DNA, 445 bp, Oryza sativa
  unsure (1)..(445): unsure at all n locations
agcttatccagaagagaccgtgtttaaagataataccgcatggtaagttatctattaattaggaatagtttgttagtttccttttatctttaggaaagtgtgtttagtgtcctataaagactttatcttttccttttatctttaggaaagtttctttcttgtccgacaaggacttatatcaacccatggatataaatatgtacacctgnggtctatgtaatctgtcctcacgatcaatacaattcggcgcatcgccaccttttttacttctacttttgtttttacgttccggcggaacttggcacccgacgcggngctgcatcgtcttcgatctccggcgaagggataagtccaatgtttcaccggtccaggcaattgtatcgtttacgtcggcgtcaacagtagtcctcaccacctcgacgccacttgtcgccagtcctcgcgt

SEQ ID NO: 40074 - DNA, 459 bp, Oryza sativa
  unsure (1)..(459): unsure at all n locations
tagatgttccanaatctgagatcttggggataaacttatctgttaaaagtatgttggccggcttgacatcaccatgtcgtatggtacgacttgttgatgagtgcatgtaccttagaccttcagctgattcaattgcgatgtctaggcgtaagcccaacgggagagggatgttggcatcaccatggagaatgtcttgcagattccccttagcggcaaactcatacaccaacattggaacatccacttccaagcaacaacccaaaagcttgataatgttattatgcatcatttgcgattggatgatcacttcatttgtgaaatcatcctttcgagcttcatttacttcgattgacgtcttcactgcaaccggagtattgtcttcaagagtccctttgtacaccttaccaaagcttccttgnaccaagaacttctgaatattctttgtgattntctttagct

SEQ ID NO: 40075 - DNA, 448 bp, Oryza sativa
agcttgacaagcttgcatctatgtaaagtctttatttgtggtgaggagttaaggcagttcctttccaattcattctctttggagcgattggtaatttctgaatgcagtgatatagtccagtttaaggtaccttgcctgatgcaacagctcaagtacctcgaggttacaaaatgtcaaatgctacaagtgatagagatagatgctcccaaactctccacttttatctatggggatgttggaggtaaaatctctcttggagatccactgcaggtcaaggacatacgtctgatgggttacaatgaagccgacaccgtctgttatgctcgtaccaagcttccatccattatgccaaatattgaatcacttgtcgtgtcatctcctaatgaggtatgcattattcgtttctttgtgccatccagttgctttataactacaattaattacatgc

SEQ ID NO: 40076 - DNA, 314 bp, Oryza sativa
tcagctcctctcctccaatatttccgccaccattgttcagtatagaacgatgatgccactgtcgaggaagctgccgtcggccgagctcccgatctgtgtcacctgaggaggggactgacggcggcattgactggagactcaggaaggccgtcgccaccgcgtgggctcgggatagccgagggagaagtccggagaggaaggggagaggcgctcgctgtcatcaccctcgctgtcaacagatccgctagggagaggaaggggttctcttctctccttaactcattctaatgattaaaattccttcacattctcta

SEQ ID NO: 40077 - DNA, 454 bp, Oryza sativa
  unsure (1)..(454): unsure at all n locations
agcttataagtgggtgctcatattattatactctatgcaacaaactataattaactcttatgaaaatagatacttataatgatgacaagaccaaacacctttaaggcttttatacttagtgactnggttacctacttcatattttattggccaaatttggagtttgctttatgcaatgctgtttaaacaacagctataatctgcttttttatgcaaagtcaatactgaagagtaaaacatgactgataatttttagtgtactttaccctaggatgcaccttgtattagggatggatccaggagaaaatatcatctatgtcactaatcaaatttctttaaaaaataatcgtgccattgcagattataagaganatttcttaatctaaagaggacttatacagtgattggcaaagagtaaccggtgtcaaatgacagtgatgaatgtgtgctggat

SEQ ID NO: 40078 - DNA, 302 bp, Oryza sativa
tatgacacatgcgaagagatttaccaggcgggctacggcacgcaagcccgggacacatagaatcgccagcggaccggagtacacgtaactacgacaaccatggcatacgacttactccctcccccaaagacaccaccactaagaacttttctctacttaagaagtagccgagaatattgcacccatactctaacagttatcagactcaaaataatcaatgataccgatgcacactggacactctagccctgagatctgtagaattagaaacgtctcgagacctcaacacgcacaacaccgcc

SEQ ID NO: 40079 - DNA, 453 bp, Oryza sativa
  unsure (1)..(453): unsure at all n locations
agctngngattggcccagtgaactctaaccctctctatcagcaacctacacaggtcttggtcaatagaaggtaaatcccttggaaccaaaggaacaaggaacgggtgctcaagcaattgaggtattctccatcgatcatttcggtcccatgcaaggcatcgttgcattaaatcaataagccatggattatctaccggttcatacttgatcttgtggttcttatcagtaacaactttaaacttggcccagaaattcttgtaatcagcaaatggtgtcttaccatacaccatctggtaaagaatacaaccaagagaccaaatatcagatggacgtccacacttgataacattaccacccgagtcctgctcattgcacatgaatgcttcaggtgacatatagttcagtgttccaatctgcacaatacagtgagaaaccacgattagaaagcaagac

SEQ ID NO: 40080 - DNA, 455 bp, Oryza sativa
  unsure (1)..(455): unsure at all n locations
ntaagtttgtagtttgtctggtgctgacattnggttttttctgtaatatctaatggagtcatcttgctatgctggtgatgcaggtcgttgcaccagtcaagatgacattccaaatgtaagagcacttaactttgtcattcactgcgtggaatttgattcttagtcatttctttcacttaatgcagatatgccacatgtgtgattccaattagtgccttcttcgcgtcaagtctttggtaagctaaacatagacaagatatggaaccatctttcatttcatttttttcctcgatcacttctttattatctcctgtatgagaaagcatggctttgaaagcatatgcactcatgtatgtgatatatgtaggcctanaatgttaaatgcattgatctanagctgactatcaacattacacaaatggcatgatacttgcagttntgatattttatgatga

SEQ ID NO: 40081 - DNA, 422 bp, Oryza sativa
  unsure (1)..(422): unsure at all n locations
cttacctgcnatntnaacaatacaggtatttgctcttatcnacctacacatcgtaaatgacctgcctgatctatctgtccaaattgctcantgttctcacaaaataagctatcagaatgttaacatactgcgattggcagatttatatttgaacttcatgcagtgatgaattaaccatatggtaactaagatctgagtacagtttgcaaacttgggcatataaaccagacaagctctcactaaactatgcaggattcctatatgaacatcaggtcaaatataaacataaaaagatgctatttacagaatgaaccggttgaaatagtcccaggttagttacacgaatctggagggtcttntggcaggaataattcaaaataagcttgcccattagacttctaaaaagggcaatgaaataatca

SEQ ID NO: 40082 - DNA, 459 bp, Oryza sativa
  unsure (1)..(459): unsure at all n locations
tgccactgccacctgatcgtctggcaaagcgtggtcgacctangtccaccaggctgaagtccccagtagatggtggagtccgaaaaaagcgcatttgttcgaactgtcatctgaaggggcactatagaactggatgccccacaaatccggagaacacatcgaagaacaaagtgatcaacgtgtgcacgaaatgcaagttagctggtcactatgcatcaacgtgtggtggtggtgtatagaagcaagtctatcgttgctnttaaatacaatcttgtaaaaatattcccatatcttgcgtgttgcacttggacaagttttaattaaattcggatatgttttctatttcataattatgtcattcatcttgcgggatatacatgtatacgtgtgcgctctgtcactcatagacctatgtgtacatgtacacctataaaagtacagattatcgcattaatcttg

SEQ ID NO: 40083 - DNA, 410 bp, Oryza sativa
  unsure (1)..(410): unsure at all n locations
agcttatatgtcttatcacttggnttttccttcactatggnttntactaaatgataactgtagacaatatactattttgtatcatactatgagctttactcatagagatctaacaatagtcaataatatatcacggttctctccttatttatcccactgggttttcgaggagttttacgtgatgtatttaatataataactataattatttctaatattatctttacagatatctggaacaatgaaagagcaatgatcaaagatggattcgatcaaggggggtgttatgaaataacagtgtgatctcatccatataaaaggatggatcgcaaccggaggcaaccgcgcctcttccctatgggtttagggttcccaaccatcgcatctcccggtggcacccctttcccatc

SEQ ID NO: 40084 - DNA, 423 bp, Oryza sativa
  unsure (1)..(423): unsure at all n locations
tgcagcctagtgtgcaaggtagagagtcctatggagagaatcattgaatcccgagaattgcttttctcctatcctttcgtaccacgtggggtcacgtactaagcatgccataggcaagaagagtaagagtcataagagaaaagcgccgatgcgaactaaagaagaagtacgtaagatgactattaccagcgccgaatggcctccagcagggataactattcctagacgtctaagaggaaataccttccgaggtgcacgacggttgacccagcacctcctaagccatggtggcagagtatctgatcaagtcttctcggatgatgaagatgagtcttcccgacatctcggcgaggaagagatggaatcacaggcatgcacccgntgtggagaaattggacacgttgctagcatgtgtctcacact

SEQ ID NO: 40085 - DNA, 332 bp, Oryza sativa
  unsure (1)..(332): unsure at all n locations
agctngcanaggatactctccagctccttttttngcccnggagccgcgaagccacggctcgagaacttgcgttggaggagtcaaaaccccgcgcgtcgcctcgtctgatcggtccccccgtgcacctaccccaaatccccatctcatcgtggttgtcgtcgtccgctgctctccgccgccgccagatccggtgagctcatggccggatccaccaccgccagtggcccctcaccgtcgcgacatggggatggaggggagaggccagctgatgcgacgctcgtgaagaagggagggggagaggatcctacttctcctgatgatgcacttgctgt

SEQ ID NO: 40086 - DNA, 459 bp, Oryza sativa
  unsure (1)..(459): unsure at all n locations
tagtaccacggagtaacatataatatagtaggggtttaagtgctgntctatctaattattgccactctgttcaaaccgctttgtccctccgcgggtgctgcttggtacaggcgtacagcgctcatgacaagtagtacactactacttacttcctccgtttcacaatataagtcattctaacattttccattttatgataatgttaatgaatctaaactagctgggtggcccgcgcaattacgcggctagcacccatataaaattatatatttttaatatgattttacttcaaatttattaaatagttatctcattgtcttaagatttttaaagactacaccttattatcctcgtgtttctaattnttttagttnttaaaagtcacaacagttgctaccccttacttctttcatattattctttatttgcttacccgatctaccactattttctattcat

SEQ ID NO: 40087 - DNA, 456 bp, Oryza sativa
  unsure (1)..(456): unsure at all n locations
acaatgcnaacaaaaatgatcaatttatccacattctatgcaatgatttggaccacctctnttcctgttcctggcattattcatatctcgagcaattctgttagcaaccaaagccaaatcctcctcctcgatttgttcgagttgatcatcggatgtggcattaaaaacagctagaaaagaaggcttatatgaataagcatcaacatccgaagaagaagaagaagaaaccaaagcactcgacttagaatcaacttttcgagaaagaacattcatctcatgtgttttcaattttggttaaagcgaatccaaagtcaaagtagacatgttaacagactcctgaatagatgtaacttttattttccaaatagacatgtcaagaccattcagaaagtggcgagaaatcttagactgtagataattagcatcataagaagaatcaacagatctaagatcact

SEQ ID NO: 40088 - DNA, 458 bp, Oryza sativa
  unsure (1)..(458): unsure at all n locations
actaagcttaatattgtgtatgacttaacacattacaacatgtttgattactatagaatgaaatgcttgatcgctatcttgatgtggttctgaagggaaacaaagatggactgaaggtaatatttttttgtggttattttgtagctgacaacagttgaaaatttcataagcttattgaaatcaaacacaaggaaattcccaagttttttttccagtgcaacacattttcttattcaataatggatgttgtcttttcagtaaggaatgtgaccattttcacttctgtctatgtgcagaaattgcgtttgcggatagaggatccgccacggagaaaacacatggtttacctgtgtggtgcagtactcgctggaatcatgaaggtaatatanctttcccacagcgttatatatctatcggttattataagcaaagccttgggacaaagtagagaggtgaac

SEQ ID NO: 40089 - DNA, 415 bp, Oryza sativa
  unsure (1)..(415): unsure at all n locations
ctgcagctgacgtgcaaccactgggctagtaccgggggtactcgcccnggtggaccactcggtcatgatgatccgagcggtctaacttgattgttttctccgaccaccgaaaatactagggcgtatcgggctggacaggcgtgatctcccgttctgtcagcttttgctttcttttagactcgtaagctagagggccgccaaagatgtggttgagcttcttgcggtgatcctaaaaacctgtcggggcatcatcatcatcatcatgcttctttttcgacgtgctttgtcctccgtcagaggtcttctgtgcattcttggcatattgctctgcaaactacttgtagacgaagcaatccttagctgtgtggttggagttgggatgatgcggacattgggagatcatgatcttgtaaaa

SEQ ID NO: 40090 - DNA, 468 bp, Oryza sativa
  unsure (1)..(468): unsure at all n locations
tgagcccaacgttntatgaaatattntgtcctaaaacctattggtttatgaaacgaatagcaaaacctatggttttgtgttatgaaagccctggaatgtaatggtttctgaaatttattccttttaaattgcaaaaatgttttgcatgccttaactaaaatgcaaaacctgaattaattttatgcaaaaatgaaataatggcccaaaaaactggggtttcatgatcaacagctgttttttcattgttttgactaacgtagacgcatcgaaatgtaccgctgagctactttagttcaggaaattcatgaaccagtccctttcaaagttacctccttatcagcattgctaactatcaaaaagtgctgcagtgttaaatttgtttggtggttctgaattcaaagcccagcttcagcttggtttgtgagtcgtcaccatcagcaaatggaaaggtcttactcagaaatattt

SEQ ID NO: 40091 - DNA, 456 bp, Oryza sativa
  unsure (1)..(456): unsure at all n locations
gcttcccgagtgactccagcctgcaaaatcatctctataatattgttgtttccttcacgtgcggcagctgttgttgcataacctacaaataactnttgattaacatcagctccagcaacctgtattcaaatatcaagtcaattactccatgaacacaattttagagtatacataattcataatacaatatatttactaagatactgaataattcccggctgtcctgttaagcacaagcgtcttcttttcgtcttctagatcttatctacttatggctcactcgtgccggcctatacatcattcgatcagtttttcgtcataattttcgagagaaagcaattgtaatgttatcagatagttcgaacaaaccaactctagttagcactatgcaatattttcatcatgacacttctcataactggttagaactgactgactggctaggtctggtaacct

SEQ ID NO: 40092 - DNA, 472 bp, Oryza sativa
  unsure (1)..(472): unsure at all n locations
tcggatgtgcatcgactacaccgaccttaacaaggcatgttctaatgacccttaccccctaccacgcatagatcagattgtcgactccaccgcggggtgcgaccttttgtgttttctagatgcatactctggttatcatcagattcgcatggctagggaagatgaggaaaaaactgcattcattacccccatatgaacttattgttatacgacaatgcctttcgggttaaagaatgcaggtcctacttttcaacgtactactcgaatttctttgggtagccaaatagtacgtaatgttgaggcctatgttgatgacttggttgtgaaaacacgcaaccaagagaccttactctcggatctagcgaaaagcgaanactttcgaaagtctccgcaccgcccgcataaagctgaaccccgacaagtgcgtgttcggcgtgcctgcgggcatgcttctcgggttctaggtctctgc

SEQ ID NO: 40093 - DNA, 362 bp, Oryza sativa
attctggatgtggtggacgaaagcaatcatcatgttggcctgctgggcgaggatttgggtgaggatggggttggtgtcacgtggcggcggtggtggctggggatgacgcttgtgggaccccaactgcctctctcgaattttaattggctttaagtttgttttggcctatcctgttatacttcctgtcccttaagtctctctttaatatatcttttttgttatctcatcttgctcttgccttgtcccctttctggtgcgaaccaactttcctggtcacttaggtatttctccctcccttcttctttatctttttatattttccggttcgctctcgtcctcttcttctccttttccgtcatata

SEQ ID NO: 40094 - DNA, 470 bp, Oryza sativa
tcttcggttcttggtctctgcccgaggcatcgaggccaactctctattagatacgagctatagagcggatgcgccctcccagcaagcttagggacgtgcaatgcgtcaccggctgcctggccgccctaagtcggttcatatcgaggctgggagagaaggcactacccctatttaagctcctcaaacgctccgggccgtttacctggacggaggaggctgagcgggccttcactcagttgaaagcgtacctcagttcttccccagtcctggtcgccccggagccagatgagctgttgctactctacctggcggcaaccccgcaggtggtcagcgcggcgttggtcgtggagcgcgacgaggacaaccctcactccgcgcatccccaccctgtgtcgactcgacccgggagagagcatggaggagagcctccgagccgaacggctggccgaggtccccgactgcccgagctg

SEQ ID NO: 40095 - DNA, 463 bp, Oryza sativa
  unsure (1)..(463): unsure at all n locations
tgcgagcttcagaatgcggccttgttgcgttcctgtaatcaacattatctatatcatgtacatttagaatctctctgtgtaaacctgcaggaaagaaaaatggcaatcagattcgctaatacatggttgtctcgtcaccctagcttgatatgatcaacaaaattgctccctttgtcagattgggaatatgatcaaatatgattgtgcatttatgcatgcaatgggattgttcaagattggtttttgttctgaaagacgaattgttaagattagttgtctaaaaaagaactgtcgatgttttatttgcagactttggcttgatatctggtcatcaggccgtttttttttgtcagtaacctgtcaaagcctgaagaacagaggcactganaattcctcggatggtcagagatctcgtaaaaaggacagttgctttacacatgtgtcatgatctaatgctgaagca

SEQ ID NO: 40096 - DNA, 471 bp, Oryza sativa
  unsure (1)..(471): unsure at all n locations
ggttcagttcactnntttttntgttagtgtatttactcaaacattgtcaatttgtttctcatatcgtgtaaatttgtcatatgtggattgctagagtaagaactcatcaaattcggtagctatataactttactcgtacataaggtggaacaataaacgcataaggaagtcattcgtctatgcagatggagataacatgattaattagttttctagcgagaaattaataaattgcagaggggatcagatcagaaacatgtaaaaggagcttgcaatccgtaacagaaaagattagcacctacgtagacatttacctgatcgcttaaccaacttcttgccgtccggaagacatcatcacatgcctgatttgtagcagattagcgggttagctctgtcaatttgcaatgtttcaatgatatatgtatatagtgctcgctagaaaatacctcaatttatntagtttatccacac

SEQ ID NO: 40097 - DNA, 441 bp, Oryza sativa
  unsure (1)..(441): unsure at all n locations
ctgcaacttaatatttctataaacttcttttgagaaacctttataaggggttctcacttctcaataaaattatgacctctatatttattcgacagatatcatggttgtcgttacataactattacagcttaacagatatgatcatgttgcaaaactgcacgaaaatgttcaaacagggtagaatatttcttacatgattatggtaactttggttggaagaacgtagattcatgcaatgcaaatggtagtttgcgtcctagtagcccttggcttactttccactatctgacatgagcaacgaatcttgaaccaaagtttgaatagtggtttaatgtggggattttgcttccttaatttttttcagttactgaatggactggtgggctctatgtntcacctactattgctggaagtaggcctggtgggttgatagcgggagct

SEQ ID NO: 40098 - DNA, 445 bp, Oryza sativa
tagctcctttgatggtggaggctacagcatcaatttcaatttgcacagagcgcagtttgtgatgcagtttggcgagagcatcatcaggctgatgacctccattgatggttggtccagatgagtcggcaggatcagttgttgcctggaatggaggtatcgatcagattgtgcagcatgagttacactatacctgtgatgtgatatatggaatggatgggttgtgcttgtgggcgtgagagagagagagaagagtgcattgcattgcgtagcgtacctgtgatatgattctcctttcaatatcgtggatgtctgcggacgtgacaccaaggctgtgaagcaagcgttggtcatcgtcatcgtcctccatggagctagtcacctgaaaagagagaaaaaaactccatcgatccatgggttagcagcaacacaagaagaagaagaagag

SEQ ID NO: 40099 - DNA, 452 bp, Oryza sativa
  unsure (1)..(452): unsure at all n locations
agcttcaatcagaactgattttctcttgcatatacatctgcatgtatattaaatggccttgctgataaacaagtatttaaggttgactccttgccaagagccaagatacactttttgttattttttatgtgggatctcctgttatgttagtttggtatctctatgtgttgtgtcaagttactaaatctcttcctcaagtatactcttaatatgtactcttgacaccatgaggaaagctgcctactatgttccaatttgcaaatgaaccctattcaaattacatagaagttaatgttgacttattagtttgtttatgtcaaggtatgttgagaaacattttttntggtacaggctgttctggagactgtagctgtcattacacatgataaanagaagaatgattcatagcatgcanagtatggctgcgatatgaacagagcatgctgttaaca

SEQ ID NO: 40100 - DNA, 463 bp, Oryza sativa
  unsure (1)..(463): unsure at all n locations
ntcggtattcgttacaagncactactcttcttcattcaaattatataattaaaaaaatcatctatacacctgtaagcaaaataaaattatttttaagagcttgttcactttgtttgtcaatcaattttatcaaaatttattattgtttaatgctaccattttttggtaccgttggatatgttcaatttgatgtcttctaaaattttataatgttntttcgagataaaatttttgaaacttctcacatttgttaggatagtatcggcaagatcattttaaatttgttaccatactataaatttagtacattcaaagtgaacaatgtctaactccatagacatgtgggccatattctctctccccaagagtcagcttctatgcttaatgcccaatacttctattangactggctaaaagatgtctataatgtatnagaaattcacactgtggatgctcttataat

SEQ ID NO: 40101 - DNA, 460 bp, Oryza sativa
  unsure (1)..(460): unsure at all n locations
catgcaaacttacaaaaatannataacatctttctgtctgtgtacctttgnttgcatcgcgttaattccaaaaaattatcaaaccgcattaaaaaggattttaacagcattgggccacatcattgtgagcacaaattgccaaagcaaagagtgcctaagtctctaaggaccacaacgggccacgccggaaataaaattgggctgaagtactgtacaggcccaggcctgttagcactcccgataccctaatagcaccgaagtgaaataaaacgtctcttcgtcttccccgccgggactctcgccattttccccatttcctgctacagtacaaaacttcgccggccaaactagggttcatcaatccgctccaatccatccttaanaacttcatgaaatttctccccgcgtccaccgctccgattccncatccctttccagccatatctcgaaccaaattaaa

SEQ ID NO: 40102 - DNA, 463 bp, Oryza sativa
  unsure (1)..(463): unsure at all n locations
tcgtggtgcctactancaattggcatccactacattgatccatctgtggagcgcttacctgtaggtgtgtaacacactgtgaagcttcgtggtgcctactacaatttgacatccactacactgatccatctgtggagcgcttacctgtgcatctcccactttcatctgtggaacatccactacactgatccatctgtggagcgcttaatccatctgtggagcgcttacctgtgcatctcccactttcatctgtggaacatgatccatctgtggagcgcttaatccatctgtggagcagccactacactgatccatctgtggagcgcttaatccatctgtggagcgcttacctgtacatctcccactttcatctgtggagcagccaagcatgtgcgcacccgggaagaatttcccggtcggtcacccatcccanatatgctacaggccaagcacgcttaacctc

SEQ ID NO: 40103 - DNA, 438 bp, Oryza sativa
  unsure (1)..(438): unsure at all n locations
agctngcattntgaagacaaaatcactaatgtatctaanacaaaagctgcagtgccatcctgaatcagccagaaggtcatctgtttgccggaaatgtgcatacctcgtctttccagcccggtatctgtgaattgaagccctccaacttttgtcatcaaggaaaaattcaaatgagtacagatagttcctgagctggagatggagtacttcaggtatgtcatcacaccatctcaagaggttgatcgtatgcccacttggaatctcatcaacatcagacatgatcaacaggtcatcatctgtgatcccggcaattttaataagctggtcaagagcaaccctctgatatgactcctcgacaaatgggttctcccccttcacaaaccgaccacctatcataccataggtcaaccgtgattcagcataattcaaacgttgacg

SEQ ID NO: 40104 - DNA, 464 bp, Oryza sativa
  unsure (1)..(464): unsure at all n locations
gggtcacggatgccaaaacaataagggcacccncaagttgattgaacatttcctgacattgagctttaatccggtttcagttgcggctggcacttggcatgctgcagctctaggtgacgatgggcgtgtctgcacctgcggttggggccatactggttgtttgggacatggcgatgaggagtacagggttctccccactgtggttcaaggattgagcaatgtgaaggctgtgcatgtctccaccggtgaatacaccacctttgttgtctccgataacggcgatacatactcctttggatccgctgaatccctgaatataggtttccaggttagatcattattctatcacattcattcttgcaaaatatctaccatgatatgaaaaataaagaatttctacctgatatgcttcttgtcaggaggatgaggaagcagcagatgatgcagatntttctaccccaagc

SEQ ID NO: 40105 - DNA, 452 bp, Oryza sativa
  unsure (1)..(452): unsure at all n locations
agcttctatgcctaaagcaaaatataaagatactctatatgagcttaaccatgttcttcaaattgaacttaatctaaactataatgtaactcgtgtattgtaaaatactatctcaaaagaacgaatgcaagattactgtcattactattcgtctccccttgagttgaacatcaaattcaaatacaccaaattcctttccttccacaaattttgagttcttcatgaacatattaatagtacaagtcatatatgtgcgtgcaaatgcacatgttgacagtaatacaacttcttgtgtatcaattctaacaactaaacatgttgcatctaggccaaaattgcttcaaatacaaatgaccaatttactcaaaataatttgcatacatccataanaacaatacttcatttgtaaattcatttatacatagaagatggacataacattatcaatcaaa

SEQ ID NO: 40106 - DNA, 381 bp, Oryza sativa
  unsure (1)..(381): unsure at all n locations
gctattacggacactatgaaactcagcttantaagtgagctntntccagattattgggtgaanaattacctaccattccacccactccctttttaaacttgcaaacccaataatctaggctctaataatctatgaaagaaacaactaaccgcttattctactacagattataacaatccagcttatagtaatctgactcaataatctagattataataaagaaacatggcattacggcacatgacgttgaccattttcaccatacgaatgataagctttgctaatagtttaccatttcttgtccatttggtatgccagcaccccttgccaatgtgggaggggatgaaatgttttggagcaattttgatggcaatagcttga

SEQ ID NO: 40107 - DNA, 441 bp, Oryza sativa
  unsure (1)..(441): unsure at all n locations
agcttcataagcaactgaaagtcatgtcttattgaggcacatagcagtggtattcagttacatattcctccacaacgttaggccccttagattgaaccaaacttgggaaagcagcgtgcctttgtggatggggtcctccatatgtactccctttgtctcacaaagacttcaattttaagacgaagttgacaaattagtgatgagggtaaaagaccaaaatgcccctcattaataagaaaatagtgctgcggagtaataggtaagaggaaattaagagttattgaagagataaaacttttcgatttacggaactagagtagattaaaagataaaaataaagtcttttggggacaagagttggagcacttagaaatgaagtctttctgagatcgatggggtacattgtgtggacanagttgcacctagctaccacccaatcta

SEQ ID NO: 40108 - DNA, 463 bp, Oryza sativa
  unsure (1)..(463): unsure at all n locations
tncagcatgcttttacaattaagaagatgcgccaagatccttagttccagctacataaaaaaagaccttttatcaagtggaactgctaagtgaagtaaaaaaacttactattgagaaccactaagcatacttggccataatcagcaacaataagaatgttccctggagctgcgacaaaagcatggcgaatcttgtacctatccttttcaagagcaggttgattctgcaaggaagatatacttggttaaaaaaaaataaaatttacataatcgatatagcaccactctaacaataaaaactgaagcatttgtcagaagtaataacaaatttagcaagggtccaaatacccttgatgatgaagcatggtaataatcaaatatcccgaaatagcagacagcttattgactaaatgaataattcanatgtgtgtnctgatgcctgagggtggctacacaaaataagt

SEQ ID NO: 40109 - DNA, 452 bp, Oryza sativa
  unsure (1)..(452): unsure at all n locations
agcnttaaagaaagagtagtgtatcttcaattttgtctcctttccaccccctctacaaaatagcctatgaagaaatccaaaaataaaaaccgattaatcaattttgtaagatcaccagggataacattttttaagcaagaaacatttccaggtttcgcaataacccaacaaacaaatgcaatcccaacaattaaaaaagtttgtaggaaagctactcggccgttgaccaaacaaattaatgagaagtattctgtacaggatcaatgccaaatatacaaaccaatcatatccacacacacacatcttcctaaactacattttaatgacactgagaagtcaaaaacattgagtaaaaaattatcagtaaatactaaccgtgaagtacagtcaactgtgtgttgatacgtaccgcgccatctctctctctctctctgtaatccttgctctatata

SEQ ID NO: 40110 - DNA, 463 bp, Oryza sativa
  unsure (1)..(463): unsure at all n locations
nttcgccgatcagtgcaatgggttccgtcaccggcatcgacgacctcgtcttcccacccgggcagacgtttcggttcggcagcctcgatttcgtcaccaacaacttcggcaagatttctctccttgactcggaatcagaccagtcgggagagaatcgacttctagttccgtttggattcccaaacgcggcagaaagttgcttcaagaccatctcgatcgagtcagcttcaaaccactcggccgagatcgcatctactccaacaacgccagatcaagacgatgagccttacccatcaatcttgatgcagctccctgacgattcggcagccgtctccaccgccacgccgtctccatcccgtaggcctaggcggaagtcggtcttaacaccgatttcgcctagcttcagggaagtcggcgtcatcctccaaccactcggcacgggttcaacggaccaactggatgg

SEQ ID NO: 40111 - DNA, 450 bp, Oryza sativa
  unsure (1)..(450): unsure at all n locations
agcttatcataaagggcttacgacaggggttttattcgttcttagtgcaaaaagataaagatcggatatattcgaaccgcaattgcaaaggtaatcactactatgccagcccaaatcatgatcttcaccaacttggatttggttctctcgcgaaaatcgcgagttgctgagatgagaaccatgaaaagcaagatcccgaataagataacagaaaccgaggaaaccacaagagtgaagactagtagagtctcgtcttttgtcattctttgctcctttttcactcaatgattcattcgaatttgccgaccaaaaattctatatgtctattcatagggcctcgttgctaagtgctacaagatctagtgcactggaactcgtggttatggacccgaatctttagtatggaacattgtctnttccaagtaacaacccccagtatatgaaagaatg

SEQ ID NO: 40112 - DNA, 460 bp, Oryza sativa
  unsure (1)..(460): unsure at all n locations
tgcagctaacaatcacatgcatgctgtcattttaagttgttgtactngagagcaagaaggaaataccacgctatttttagcacttacaatgttccaattttacaattgtacaatatggttagcttacccaactaatcaagtaacattntataatttaagaaataaaatcagatgagatatagtaaaaaaaaccagttcttgtaaacaatttcttntttgcttggtaaaagaaaataataaataaatatgtacgtcttcttttgtttgtagtattttataattgtttttcttttattaaaaaaaataaaatatttcgatgcgtttctgtgtgccaaattgacatgtcaatgagtttgtcttgacaatcaaacatggaagcatangaggaatcttgcataacatctaatgtcaacaaggtcgctatggttgctttgaaaatggtgctaattagctatattag

SEQ ID NO: 40113 - DNA, 474 bp, Oryza sativa
tcctttagtagatcaatttccttaaccgaatatagcaagaatccgtctactaacggcttgacaactctcatcggctaatctcaagacttcgaagccgatgctgactctaagccgatgttggtcctccggtaaattctccactgtgaccatgatcttggcattgacttcttcttcagacatgtggatataaaactcgtgtcccactgggcgtgccaaattgtgttgacgaataaaatcgaacacaccggcctgcttagctcctgtgcaggtccaaatcttaatgagatgcgggcgtgcgagtcagtttgatcctgcaactgacaagatatgcaaatagtagatcaaaacagccgatcggctgacaagccgatggagtagttctagccgatagccgataatagccgttgccgataccagccgatagcgatagggtttaaagcaatcggtatatatccaatgtagataatgatatag

SEQ ID NO: 40114 - DNA, 398 bp, Oryza sativa
  unsure (1)..(398): unsure at all n locations
ctgcgctcttatacttatgctaggaatttctctatnttcctacntaagcccactctcatattgacagagcagtctgtaatcactaggaccatattattcagggattcacaccgcatatgctacatattaatataaagtcgcttggttgactacaattatcgaaaccactcagtgcatgtagtcgatgcacctgactctatttttcagccctccacagtcttctgatttagaaaaagtactcgtgagatcatggcgaagataattgaagcactcggctttggagtaatctagttcgagagaagattatctttctgactgtgaacgtctcaagggctactgtggagattatgggtaccccatacccacgtggcatggttacccaactagatatgggggat

SEQ ID NO: 40115 - DNA, 455 bp, Oryza sativa
  unsure (1)..(455): unsure at all n locations
agctngatgtggacagattcatttaactattctttatctctctatccctcacgggatcccgtgcgctagctgttctcattaaaaaaatgtaacacatgctagataaaaaaaaattaagaacggagagaagacatattctttttatgtctgattgcatcttgctctcttctctacattcatcgatgaacatgtgtatacaacaagccatgactttattggtcgacctctagctgtcattgcatcgcaaaaatacttagtgaaacatggaatccatccatctttaagaatggaggtggtagcatgatatggaaaatatggaagtaatcaaactaacatgttagtttgatgtaacaaaatgggattatgtgataaaacaagtatgaataatatagttctacaccattaaanaaacacatgtgcattgcacatgtatgtgcagtgctgatgaacataat

SEQ ID NO: 40116 - DNA, 415 bp, Oryza sativa
  unsure (1)..(415): unsure at all n locations
aacattattggcttatgagacagattaggagatccgtcgtgcaattagaccctagtttaccatgctccaaataaaatttgaagatatcaaatacttatgtttttgtgtatgactatgtacatgcaactcgtagtcacaattatttcggaagctgtattttcttgcctgaaatgtatctactactcccttcattgtacaatgcaagactttctaaccttgctagatgccaataaatctagacatatacatgtaatgtgtgaatgtgtggaatactanaaagtcttatgcctagattcattaacatctatatgaatgcgagcaatgctagaaaatcttacataaagttctgtaattntctttctagaagtctgcattatcattgagtattcacactgaaaatcttttgtatgattcc

SEQ ID NO: 40117 - DNA, 383 bp, Oryza sativa
  unsure (1)..(383): unsure at all n locations
ntagctntcccctccccgcgcttccaataacggctttaactatttctctctctcttcgtcttctccagctaatcgatcccccctcttaatccattatgttttttttttccaaatctccatctccatctcctcccttcacccccgatcgcattcgctgccgcccactccgtgctcgcctcgcctcccctcagagagattaaagcagcagcggctttctttcctctgcgtttcttggattgcagcaaaatcgatccccccccccccccctatacgatntatatatggaggaggaatgaccaatttgatccatctatcaggattgatactacacctactcgtggtaacgaaagcgatcttatatcatcgccaaatagtctaattct

SEQ ID NO: 40118 - DNA, 473 bp, Oryza sativa
  unsure (1)..(473): unsure at all n locations
anncttgcatcaaaccacctaaatttcccgtgattttgctgtattactnaaagtacatcaaccctctgctctatatnaaatatatatcagttcctctcgtcgcgaaagttgaaagatgaaagtgaagttgaagaaatannggtttcgtccttggtttccacgccgtctcgctgtgggtgttgggtgttaagaccgttggttccgctgctgctgttgttgttggtgtttcctcgtgcgcgtgcggagatgtattcttacgctattctgagctacgacctatgttaatgtacataagtcttctttttatctttaacgaatgcaatgattcatatttgtcaccgtgggtaccaacgctggactggtactgtgatcgcggtttcgtaggaagcggttcgcgccgttattcctacgacatgctcctatcatgtgccgttgtacggcggtgccagatttgggtgtgacatgatttgatc

SEQ ID NO: 40119 - DNA, 483 bp, Oryza sativa
  unsure (1)..(483): unsure at all n locations
ttacggacctatgaaactcagcttgctaaagaaattgatagcgagctcttctctaacttgataaccaaaacgcaatccggccaaatgctgcatgcaagaagtcacttgctttatttgcgactggcaggctcttgaacttgagcctgcaatagctgacaacctgtggaaaatcttgggatttgatgctctagaaagccagaaatagaaagcaccagcaaacttgttgaagcaactgaatgcttcctgaactgctccattccctgtagaacatatatgccttggatgctgaaaggaactctcgactaaggttccaaaatgtgatatcaatcctaatccaatatcatgagatattggagaatctattgngaatttatgcaggtaccctccattgtggtcaaacttggagaaaattgaccagtccggtttcatagtgagttcacttggaaaactatggcaacaccgaatgtctttagaacgagttta

SEQ ID NO: 40120 - DNA, 454 bp, Oryza sativa
  unsure (1)..(454): unsure at all n locations
agctatagtttgtggtaagtctgtgccctttattggtgatacatttctcttaattgtcacacggatgctgcctttattcttaatgttactactatactactatcctgatacttttacatgaagtgtcagctaagatacaagtcctaggtcaatatccaaattccaaattcaagatttgcatggttctaaatacatagtatcttattagaaggtatcctgtgtttgacagtaatgctcttccagattctgaaataccaaagatggatgttgtattggtgaacgacaaatatgtgcttcaggaatggtaggagctagtgatactacacaaatagattaagacaagactccaagcaggaaagaggaagaacgaggcggactaggtcacacttataaaatgctttnttctgctaagtgaatcaaaaccaacatatgctnttgcagttgaaatattcac

SEQ ID NO: 40121 - DNA, 458 bp, Oryza sativa
cttggagaagatgtcttaggcggagtcctggcttataccctatttgagcgcctgtgaagatggagccgtatgcccgctagtccgctgctgtttattctgtttgtcaggcctgaagtgcctttgtaataatgtaaatattatcgatataataaagatgtgtcttttatatcatgtttgtgtggtgtaccccggcttttcctgagacggtgattaatacactggcgttcgggaaaaggcaatttttccggtcgcgacaagctggtatcagagccatctcgactgtaggataagccaagtggataaaacctaacgacatattttataaataaaactatttgcgaaagttccttttttctccttcccttaatgctatttgcaaaaggtttactcccttcttccttcttcggatttaattagtactagttggtcagctttgtgaagaagagatgtcgcaattg

SEQ ID NO: 40122 - DNA, 454 bp, Oryza sativa
  unsure (1)..(454): unsure at all n locations
agcttcacaattaagaaaacattatgtattttatttataaaacaataacgcgaggatctctgcgtgcacaataagtttaggccattaagaatagaatgactgatctacatgatatataatagatttcaaggttctatcacaaagcagaattccatcaagtttatagtgacaaaacactaacttttgaaacattaacaaagttcaggagatcaaaactcaaccaaaaatagcaaaattagaagagacctttaggtgttctatctaaaagaatagcatgcaaagtatatttatctagcaagatattgattaggagattatgtactggtaaaaacaaataattagtttacattatgttaaataattagtttacttgcttgattctcaagntaattatctctctgaccagaaggtctgcatgactgtgtctgtctagctagaaggccatattggtgta

SEQ ID NO: 40123 - DNA, 482 bp, Oryza sativa
  unsure (1)..(482): unsure at all n locations
ctattcggaccttgaaactcagctgctggtcctctaaatctgctgcacctggtagtagaattgtagtgacgactaaaagtgctaaagttgctcgaatgatggcattcaagatacaccaactggggtacctcactgatactacctgctggtctgtgtgccgaaatgctgcctttgcagaacgtgatcctagtattattgatgacggcttgatttctataggtaaatctgttgcagccaagtgcaaaggcttgccattggctgcaaatgcaacaggaagtgttctatccattgcaattgataggaagcactgggagactgttgagcaaagtgacttgtgggctaacaatgaagtgattgatcatacncttcctgctcttctagtgagctacaatagcttacagaagcctctgaaacattgtttctcgtattgctcgctgtttccgaaagagtatgtgtttagaaaagacaagctggtcatgcta

SEQ ID NO: 40124 - DNA, 391 bp, Oryza sativa
  unsure (1)..(391): unsure at all n locations
tccttattctgactggctgacagtacagtataatctgggcagntgatcagcatacaaagccagaaattgactaaaatcagttccattttcttagataagatgcaccactggcatatattaccacgtgtgtccgtgttgacatgctcaggcagtcacgcctagttgcttcataagtacattttagtatactggaactactttgactttataagtatcaacaagattggatcgtaatctcaaaaaccaatatggcagccaaatgatgcaaaaagtgccaagcaactttaagctatcctagctgatgaaaagctcacattacaaatgaaagatccattcagaacatgggagttatatataaatattgcgcagagctgtctctaatgaaatgtat

SEQ ID NO: 40125 - DNA, 464 bp, Oryza sativa
  unsure (1)..(464): unsure at all n locations
tcgcctcgactgtttntagaataaaaaaaaccgttgtatgctctatatcatgacaggtttgttggttccagatgttctaaagagcgagtcactactgtacttaccagattgtacattgatcatatgaacagtaatacaggggactatatgtaaatgtaacttctcttttctgtagtctgtcaccaatgctatggtcgaaacaggcttggaagacttggtctcggttcctttgaagaaagagcaaaaccaaaaaaataatctgatctccaattgagccggaaagatcatttacaccatgtcattggagtggcagctatgcttgatcatttacaccatgtcatcctatctaagacatttgaattacatttgtgaatataaatggcgaccaagagaagattccacgaattatgtacacatgcactgtgatcagcaagaccagaataagaactgacctgtaaatgact

SEQ ID NO: 40126 - DNA, 417 bp, Oryza sativa
  unsure (1)..(417): unsure at all n locations
attcaaacttctcnngttctttgtctcttctcnatttatttatgccaaccccnaaaaaattctatctatctatctgatgcccccccccatcaaacttatggatgtgcaatgcgtcacctgttgcatggccgccctaaatcttttcatatcaaggctgggagagaatgctcttcccttgtttaagctcctcaaacgctcggggccgttcacttggacggaggaagctgaacatgcccttactgaggagaggcatgtctgagctctcccccggttctagtctccccggagccaaatgagtccctgctactttacttagcggcgacccctcaagtaggtagtgcatcgttggttgtggagcgcgatgaggataattctcattctgcgcacacccactctgtgccgactaggcccgggagc

SEQ ID NO: 40127 - DNA, 456 bp, Oryza sativa
  unsure (1)..(456): unsure at all n locations
tcaccatgacanatatcttgatggatttgcattctctatataaaaccctattaatactcgaaggaatcgcagaccacgtattgaaatacaaggcgtgcaaaacttacatatggttacaggggtaactgtatacagaaatccaatttagtcttctcaaaacaaaaggaacatagacacattacaacagggacattaatctgaagctgtcttggagaaactgacaactgaattgatgctacatggtcagactgcctgccacatgatcactgacgctctccatttgtaaacttgcaaccttttgtgtgcataatcaatgttgcatacgtgcactgactaaaaaaaacaaggtatttattggtagaaagaggatttgatgctacctaattctgtactagtgatttctactaattttctttcaagtaaacagaagagaaaatttggctcatgatgatgtca

SEQ ID NO: 40128 - DNA, 342 bp, Oryza sativa
  unsure (1)..(342): unsure at all n locations
tacaaggttattcatatctattacccttnatcagactcgcacaagcaatgtccttaaantcacccatgaccacaacaaaatgaccattgtgctcacaaggccaccatgtacagtacccttgatcgggattgccacatgttgccatcctcatcacagtttagctatgattgttacccatggtagccaccatagatctagctcgacgataatcacttcctcacctctgcaagggaacaatgtaagtgaataaagatccgtactgtggtctccgaggacgtcttggtagagaaatcgtcacttgagatcatttcttgaagattgagttggatcttgacggtcact

SEQ ID NO: 40129 - DNA, 452 bp, Oryza sativa
tctcgcgtttctggtgataaataggttcagatttcgctaatttatatagggtcagaaaacaatgctgattgtcacatattcacagaggacgacgatgcaatcatgttaacattccctccgtaccgaaatgtatgacgccgttgactttttatatagtatctgaccattcggcttatctaaaaattaagtattaatatgtaaaagtaataagttgagattatattttctttgatgatgaaacaaatcacaacaaagtatataatatttatattttttaataagacaaatggtgaaacgttatgcaagaaagttagcggttttatatattttgggacggacagggtactttgcttcagttatactacttcaagtgataaatatttgacgtttagtatgagaatggatcattttcatttataacaaactttgaccacaacatacttctgaaatgc

SEQ ID NO: 40130 - DNA, 390 bp, Oryza sativa
  unsure (1)..(390): unsure at all n locations
cgtggcgttcaacaggtccaaaactagtctaatacctctttagggggtgaaatatccggtattgatagttaacaggtgtagtataacccgttttgtacttaaggggtgtatattggacaatcataagagttcatgggggtaaaatggactattccctttttatgcaaaaccaccttagagggttatataaatggtattgaaaagtttatggggggttgaacgtctgcttctcaagttcaacgtgctagacggatttccatatctaaagcttagtgtgggtatttggactttctttcctataaataacaatatctaaacttacattgntggggtttgttgtagtaccttcattaactataagcatctcgcgcacataatattcacgtacta

SEQ ID NO: 40131 - DNA, 452 bp, Oryza sativa
  unsure (1)..(452): unsure at all n locations
tcaagatgaataatcaatattctctcactattcactctgggagnncatcaatttgtcttcgcttcagagcaataggtcaagattaaatttacatgtctgggagtttggagtcatcaaccaatcaactcgtatcaaattcaatgagttgaacaacagcatatactttcctctaagtgaagcatctgcaacagctatagcaccaagttctactgccatctttataaatcaagaggcgttgcatcaatcttcgtcacacacatgccaacattaagaaaatacttgagcttcaatatcttctcaacagtttgatggattattgtcactgacatcatcaccagcacatctgcttcatcgaccctaacatctccgctgttgctaatggatgattatgtcttcaccgacttattatttcaccttcaccggtgacctactatgcaaatgctgatgagcgt

SEQ ID NO: 40132 - DNA, 474 bp, Oryza sativa
  unsure (1)..(474): unsure at all n locations
aaaactcagcttgtcttggtggacgaggctggttagcgatgtctgccctgtttattcnatgtaagcgcttctttggcatatacccatggacaattcanggcataacgtccttgttctctacaatcgtgacaaaaggggacatcctcttctggcattggaagctcattgacctgtgtggcaaatgctcgatcaaacacatactgattttggtcttgacttccaaccaatggtagctgtgaactaagcggcatgcttggaatggaccaacggtgtgccctggatactctcttgaggccagtggtggattgagttgaaaacttgagttacttgaggcatacccgctgacattcttttctttttctctcgtaaacaatctgtacagggattgaggtgagagaggtaacatgccacgaaagattataccacaactagagacaggaccttaaaggaactaactcttcttgctgatgtgtt

SEQ ID NO: 40133 - DNA, 448 bp, Oryza sativa
  unsure (1)..(448): unsure at all n locations
tgcaagctttccgcaatgtcttatgtgaaaaaatttttgttattttgtgtatcacccgcatcagcgctgaataaaatatatttgcgtcatgtgtagttatatctgtgaccgaatcatataggatatagcagcagatgtttcagtgtaaagctcctttttattactctatccgtttcaaaatatagggatttttagagtcacccggatttaggaaagtatatgaaattaaatgagaaaaagatgaacctgcaatattttgagataaattttaaatattataagtggctatatcttctaaatttagggagtagccgctattctttatgatgtgcactagccgaattgtctgccataaggacttgatgactgcaattactagtactaggagtaaactcaaagctgactcgaatcatnttctatattgactctctctgcttaaactatgatc

SEQ ID NO: 40134 - DNA, 471 bp, Oryza sativa
  unsure (1)..(471): unsure at all n locations
ntggattgagtgngttgtaactttattgaaaagctttggagtgagtgggttgtaactttatgaaaagtatagatttatcttcttggtatttatggcagaatcagatcatattgttacaatcacaaatttaaaatatcaccaatttccaccttttggttttgatcgtgttgtgaacatgtagtttacagtcatgcacacgtctcctggagcatacaaatgtttgcattgtcactatatggagatgtagcattaagaaattccaacaattcatgtacaaattctgacgggcgaacacttcagacttcggagcgagacaaaagaaagactattaatcagagtttgaaggaatctcttatgagaaccccctaatccnttttccatagtagntattgcaacggatacggaaataaaagagtttatgttgtgttgttttgagatatcgacttanaaagaaacttatctcanactatc

SEQ ID NO: 40135 - DNA, 361 bp, Oryza sativa
ttttttccccacaacgcgaggaggctgtgcttactgtgctgtggctgagtatcaatggataaggccggatctgcttgtctatttacacgcctatggtgaagtccaagttgttgtgtcactagcgtgctaacttgtcaactaccacactttcttgtcaagtcggatcaaccctgtcgcttatacaacaagcttagcaacgatgcccgcattggttccgtcgatattatagttgtagcaagctattgtgggtgttgtggtggatttcgtggaatcatgggttcactcagcttcctaattaactggcatgtgaggtaggctcgttctcttaaaggacatttttttatataaactctcaacgtaa

SEQ ID NO: 40136 - DNA, 338 bp, Oryza sativa
  unsure (1)..(338): unsure at all n locations
tgatgcgaacaaacacactgcatcgtgtctcaataagcanaataagacatactaggtctcagagaggggttggataacgcacggaggcgttaaattcggcgcaagagccttcaaaggtgaaggtgaggggaactcatgttcttgccaaaggacattgctctaccatatgccttgctcacatcttatacactttcatctgattcatgcatttgatatggaatctccctatcgaatgccgcatcagttctcttcaatagccgatgtgaacacatgtgcaagtcgctttgagccatacctcgaccccacacagtgtgcatcgtacgatggtgaagaatttg

SEQ ID NO: 40137 - DNA, 456 bp, Oryza sativa
  unsure (1)..(456): unsure at all n locations
agcttgacgaatgggaagaatattttaatattgatatcttctgccaaacgatcatcttggaaaaggatggggatagaacagtgtcttcagctcttcctagccaatatgccgaagaacgaatctttattatcggccactacatatttctggtctaacaccatcaatgccatcatcttcggacatgggccgatgacacccacccttttggatattaaaatgttaacgggcttagacatcacctcattggctaatcccatcagcttgaataacaagagcgaatacaaaattaaaaccaaggctggaggtggttggtcaggatatatcaaaagatgtagagccattggaccaattacagatgaggaacatatctctttccttaacttantggtggagagattcattntctgtggcacaacttgtggccctacagcgcaatttcttcatcttgctcaagct

SEQ ID NO: 40138 - DNA, 476 bp, Oryza sativa
  unsure (1)..(476): unsure at all n locations
ttacggacctataaaactcagcttgtaacggattggcaatgttcagatggcgcatatctaactcatgaccgttccgaggtanggctntggatttcattggtcagatttatccttcgttatcaaaagggcattggttcatgctagttgcaatggattacttcactaagtgggccaaagccgtgccgctcgacaatattacttgtacgaaggtaattgactttattttgaagcatattattcatagattcggtattccttanactttgatcgaggagcttcttttatgtctaaggaggtgaaaggttttgccgaattttatgatattaagttgttgagttcttttctctactacgctcgggctaatggataagccgagtcaagtaataaaacattgttgaaattgccgttttgccagttgaggtaaatcttggctctcttcggtattttaagcaagacgacttgtctgttgaagatta

SEQ ID NO: 40139 - DNA, 417 bp, Oryza sativa
  unsure (1)..(417): unsure at all n locations
ancttctaaaagngcctttgcttctacatgttctttcactnntggatttataacaatttcctgcacaactaccatgtancgtgggactaaaaaatatttgtttggattcagtatgatggatcccaatcccaaatcagacaaccctgctgagaccattttttcttactcagtgttgcatcctgttttatccttagaagtgattggtaggaattgttatattgctaaatgatgatacattgctatgctgtctttgtaaaatatgtgcagcaaaggcacgaggtgcaagcgaattttagaagattgcttactgcaaaattaaggaggcttatagcagcgaanaagaatgaaaaggtgagatttactaatattccttcttgtaaacaacactattcttttgcttgagtgtggcttacatat

SEQ ID NO: 40140 - DNA, 484 bp, Oryza sativa
  unsure (1)..(484): unsure at all n locations
ctattacggacactataaaactcagctattttagaaggcatagacagacaattctatggtcaaacttttagaacataaatctcggacaaatgctgtaactttgcatgcactatatatgtcaactgataatattttcagttttagttgccatcttattagtttttaacccaaaaatacaatgatcatggacatcactgatcatttttgaccagtcgtattttttgttagcaattcattgttaagttattgcccttgaacaaagctcttgccacttttatattacatttaagctccaaagacaacccattcgttctattatatnttggtttctggattatggcttgctatgctgacaaattgttagctattctgttcatgttttgttttcaaaggtttgaagcaatatcatgctcctgccttcgcttcgaaaattcttctttccataacaagcggacatccacaagataacttgaatattgtactt

SEQ ID NO: 40141 - DNA, 454 bp, Oryza sativa
  unsure (1)..(454): unsure at all n locations
tgcaagctntgctcgagctagccgtgcactccactgtctcttttccggnggnataatttggtgcggcggtgagctgccggccatgtcaaccgtctcctccgcgctgtcgtcgttcctctactgctgcttctcccccaccggcggccaccggcacggccaccgcgccggcgcgtactactacagcagccacccgacgagcaccaacacctactactacgagggtggcctcgccggacgcaggatgggcaggagcaggccactgtcactgcaggtatttgttcttcttcagcttgctcgttcgttcttgctttgcttgctctgttcctcgcttcctctgtttagctatgctacgcatgcagaagacggacatattctttgttcagatgaatacgtatttgcaagctagctnggttatgcgatattgcgattgcgactagtcgtgttcagattattc

SEQ ID NO: 40142 - DNA, 457 bp, Oryza sativa
  unsure (1)..(457): unsure at all n locations
tgtaaagggtgctacgctagagcagacggagtatatggttctctattctctagcaaggcttacttggtgaaatggtatctccacttcgctaatgctcttcagtgtaacacacagtagcgagctgtaagaattcttaataatctgccgtaccgttcttttctctcccacaagagtaggatgaagattaaaatcttcgtggcacgcttttcaaactgctaaacagtgcgctctatgcgaaaactttttatatgaaagctgttctaaaatatcatattaatctatttttcaagattgtaataattaacactcaatcaatcatacgtctaatatcacatcgntatgtgctaaaaacataatcctcatctttaagagaaaaagaacacaccggatcatgtcatgttgattgtaaactctatgcttccaggatatccgctacagagccctttacaaatattag

SEQ ID NO: 40143 - DNA, 453 bp, Oryza sativa
  unsure (1)..(453): unsure at all n locations
ntctgacgtacaaaacaagtacatggtgtttatgaaatcatataagacaatatagatagaagactgctgtgaaacattaatgatgtcatactaattaaagcacatacaaaaaatctagaacatcaaacatacccagatatggtatttgtcatggatgagctgcatatctccccatcacatatctcccgtaaaaatatattggcattgtcatgaaccatcaccaattcactcccaacaacaagacattttcctttntttcctattcacatggaacaattctctgggcactttttaaaaaccttgagcctatacacagaaccaactcttatatactcacaaaatgaaaattttctccatagattacagatgaatactacatcttaaatcaaaggatagagactgaattgaaatgatcaaatacagtacattaaagacatgtatcaaacatctggt

SEQ ID NO: 40144 - DNA, 426 bp, Oryza sativa
  unsure (1)..(426): unsure at all n locations
agcttcccgaacactagattntccttatcttcttatattncatccgcgctggtatgttggcataaggtggtatcggagtactaaccggtacagttaagtctatcctatcggctatgctgtcagcatgcataatccctactttcataatccctactttggagcacgtttaaatacagagcgatttatactggcttgatgtcatcatcgatctatcctagtcgctcggtctaagcgtgtcccatcggatgaattacgtactattggcatctacagccgatcgagtatgccgaacaatctccaagtttttatttgcctccgccgatctgactcgagttgcattagcgtggccccgaacgatatgtcatcggcaatcttgccgatcggctgtcgntgatagattaactctctgctgcttctatctggtgg

SEQ ID NO: 40145 - DNA, 455 bp, Oryza sativa
  unsure (1)..(455): unsure at all n locations
ggaccgcagcttggattgttctgaacatcggtgacagtggataagacgacccggcagcgacggaaatcggcatggcgacggcgtcgacgttccttcggtcttcaagctgccaaggacaggagggaaacggcttatagggaacctagagatgctctatcagtgaggaatcgcgccgaagctcacccgagagtgaggaatgggcgacgatggccggcggccggacttaaggtagacgacgccgatctccctccacgttgcggcattggctgggagcctgggattcttgagggattttgaagaggaggtcgtggtgatgatgttggggcgatggcttggccggatttggtccacggaggccagcgcgacgatgatgatgcagcggtggcactcggtgcgtgctccagagcgtcggagtgcgcggtncgcgttccggttaaccgctgcatggaatggga

SEQ ID NO: 40146 - DNA, 447 bp, Oryza sativa
agcttgtgaaatgaatcgtaagaaacatgtcttttataagtgccatttttatcaagggatacctgatatattcttggacttcatcgcaattccgcagaatataaatatgagcttgttctgattcaagcatatcaagatctcgagttttacgagaaccaatgggccttccagcacaggagaagattgataaattaaatttgttaccaatagatgtgtcatgtattcttcctggacgattgtgttttgtctcgacatcatccaagtacctagagcttaatgtcataaactcatctgcaatgtatccctcagcaattgaaccctctgggcgagccatattctgaactagtgattttaggcagtgaatttgtctctcaaataaatacatccatcgatagatggttggtccaccaattagagcttctctagccaaatgaacaggcaaatgca

SEQ ID NO: 40147 - DNA, 412 bp, Oryza sativa
  unsure (1)..(412): unsure at all n locations
tgtcgagcttgtggcaaaaaatggcctggcccattaacagctgatttggcccatgaaaaaccctaacctcaccgttcctcttccactcccttgtcatttcctttcctagaccccttctcacgccgccagcccatcacaccgagtccaccgcctttcaacgcgcgtgcgcgacaggcgacactgctcgaggcctatggcgcgaccgcgcgaggctccctgcgccaccttcctcccctgtgctttcctccccagcactgctcgacgctccctgcgccgaccttccctgactcgatgttgttcatcacctcaccgagacaccaacccaccgacggcagttntcgctgcgacgagcccaggatgaagaggttttgggatgtgttttcttatttttcttatgcatgtagcaatagca

SEQ ID NO: 40148 - DNA, 434 bp, Oryza sativa
  unsure (1)..(434): unsure at all n locations
gcggcaaacgggggctcgtttgatggtgctacctatatacaaaatgaagatcatgctattgcgattccattcctcttcttttcttggtcagtggacatcggagtaacgccggcggcgagtcccagcggcggctgtgcttaagctgctactgcatgttgagttggtgctcaattctaagtgaatgaaatgcatgaatgcaatcctatgggctcaagggtgctcaccgaaccttgaacgaggcgccggaaagtctggacagcggcagcggataagaagatggtccggcgacggtgtaaagctccgggaagacggcaacggctcgatccactcatcgaattgacatgcatgtgttntcatggtgttagtgaggtcccagggatggtgtatacgcgaagaatcgacaatggctcaccggaggatgcggaatctacaat

SEQ ID NO: 40149 - DNA, 473 bp, Oryza sativa
  unsure (1)..(473): unsure at all n locations
tgatctcaatctactagggtcttcctaatagtagaccgactctcgtttaatatatttaatctataatgatatcttagtataaagatgtattggagcaatagccgatacacactagatttacctatcagctatgcaatgaacataaataatctttcctttgaagtacttttaaacttaagtgatttatactgtctcggcagccatccgatctatcccaatcgcttggtttaaacacatttcgaagtatagattatatattgttattatctaaagccgataaagtaaatttagccctttgtttactatatatatcactgctgatccgaaatataccgcatcggcttgctctcagacgatatgtcatcagcaatccagatgatcggttatcgttgatggaattaagtcntggttctttgtttcttggtgattgcaggatcaaaccaactggcacgctctgaacccataagcaaatt

SEQ ID NO: 40150 - DNA, 460 bp, Oryza sativa
  unsure (1)..(460): unsure at all n locations
agctttaagaggtttgattgattcaattgttcagcacagttttgctggnctgttgcttcacatcaataattgtcatccatggctacgagcatgctgcttgggcctctcatcgccttggtcaatcggcaggtctccaattacctgttgcaacagtaccaaaagctggatggtatggaggagcagctcacaattctggagcgcaaactgccggccatattggatgtcatcattgatgctgaggagcaaggaactcaccgtcctggggtaagtgcttggctcanagcactcaaggctggtgcttacaaagctaatgacatatttgatgagttcaagtatgaagcccttcgtcgtgaagctaagaggaggggaaatcatggaaatctcagcactagtatagtccttgctaacaatcctctagtgttcccgtacagggatgagcagaagctgcgtaaaattgtca

SEQ ID NO: 40151 - DNA, 456 bp, Oryza sativa
  unsure (1)..(456): unsure at all n locations
tgtctagatacatagctacaaatgcttatatttgtggattctcttatagctgtagaaactnttatcgccccgccatggcaagtcgagatgccatccccaatgaaagcccccacacaggtttcatgccctgctgcacaatattgagcaaccaaaaatataataatatttgtgtcagaatttgaatcaaccttacagatactgggtggccagaaaatctagtccaagtaatatcctgaaaaatagcaactggcaaatactaaaggcagtgaagagtttcctttagatcagatgataaaaaaaaatcatatgttcaatagcaataatcactcacattntttttgctgtttagaatttagataattagtagttaaacttctatagcttgcgtagctaagatcaatggtgattattagttgaanaaataatcaaatcatcaaactgaggagacttatacct

SEQ ID NO: 40152 - DNA, 432 bp, Oryza sativa
  unsure (1)..(432): unsure at all n locations
agcttttccacttcatcngaatcttaaacagtttcaccaatatcgttctttgtagaccgatattcttgcaccctcttttgtaaccactctaaattagcctccttactcattatacaaatttacatggcttagccgtgtgacactagccggctttacagagataggtacaaatttgccatcggagatactaataaaatcatagctagaaagatccctccccgataagcattggatattcccatgacgccactcaaaagtagcatcggccattgcaacctcagccgatgtatccgcttgaacaatttcaacatcatcgccgtcccattgaattaaacattgatgcaaggtagaaggcacacaacaattggcatgaatccaacaacgacccaaaataactttgtagttaccttgtacatcgacgatgaagaaagc

SEQ ID NO: 40153 - DNA, 468 bp, Oryza sativa
  unsure (1)..(468): unsure at all n locations
tataaagtctactntctctgtntaacattgtaaagatgttttggtctgttcatttcttgtccatatttagtattccctccgtcccaaaatataagtatgtttagcatagtgaaaagtcaaacaatttcaactttaactattaataacaagaaaataaaaaagatcaatcatgtaaaattgatgttagtagatttatcatcaaataatctatcataatatataactcttttcatttaaaacatcttatttatatatatattattggtcaaagtacatctcagagaccgtgtcctagtctaaaaatacatatattttgggacgaagggagtaatatttatgtgaatntagatacatatacgaagcacatacatggatgcatgcatgtatctatttaaaacctanaaactcttataatatgaaatggatgaagtaattaataactntatgaaactacgatgtacttttcaa

SEQ ID NO: 40154 - DNA, 461 bp, Oryza sativa
  unsure (1)..(461): unsure at all n locations
agctntaaagatatccgtgcaaacggtttccatatataaaccgagattgagcaagatgctgaatatctgctcataacaaaaatagatggatatcanaagcaagtggtggaaaggctcccttcatcaccatcaggtttgtactacacgtacataaagcccactgaggaatatgttgcgatgaaaaccatatttagaaacccagagtcatttagagtttggcatgacaggctgggtcatcttgggtttggtatgatgaggagaatcatcaacaattctgctagccacaatgttgaaactaatgacttccctaatcctgaagattntatttgccctgcttgtgcaaaagggaagtactangccatccctcctgaagattagggatgagtcacctgttttcctggcaaggatacagggtgacatatatggacctatccagcccttgtcgggcccgtttagatatt

SEQ ID NO: 40155 - DNA, 425 bp, Oryza sativa
  unsure (1)..(425): unsure at all n locations
ntagctgatttcctcgccgagtggaacgagtgccaagaagacatgccagagaanaagatggaatattggactatgcattttgatgggtcgaggaggcttacaggcactggagctggggttgttttaatttccccgactggagaaagattgagctacgtattgtggatacatttttctgcgtcccataacatggcggaatacgaggcgctgctccatggattaaggattgccatctctctaggcattcgccgattaatcgtccgtggagactctcagttggttgttaatcaagtcatgaaagagtggtcttgtctagatgataatatgaccgcttatcgacaagaggtacgcaagttggaagataaattcgatggactcgagctcaccaatgtcctctgacataataatgaggcagcagacagact

SEQ ID NO: 40156 - DNA, 374 bp, Oryza sativa
  unsure (1)..(374): unsure at all n locations
agcttgncacttgctggtagngaattggatgatatttgcttttcattcttggagcatggaattgtgtggtccctcaaaannttgatggacctataatagttactataactcaccaagatttagtccttgcgatgtttaagtaagaactattgcattttgtacgttctgtcttgtaccttgccagtaatatttcaccggctcggatcaatttaccttatcactgatggattatgattcctcaaagaaattgttggaactatcttaattnttatttcactaagattagttgcactacattattttattttctctgaacaagatagaagtaaatcgtagttaacaaaagagaggcgaggtttatgaatgagccaatg

SEQ ID NO: 40157 - DNA, 456 bp, Oryza sativa
  unsure (1)..(456): unsure at all n locations
ntgagtaatttgtagcttaattcagaaagatgacatattttaacataaatgtggggatcgagactatgattaaagatttctcaaagaaaaaaaaagagtaaaattaaaagaggagcacctgtatgatgaaatcgatggggaccaatagggcagcaacctgtgtgtatttctttctgcaaagtgatgcgaaagtgaagcaaaggatgcattcgatacgacactttggactattgggcacactgcactttgcagggctgatcaagttagctaccactagattagcaaaagcttcctccccttgtttagccctgtcaaagatttgtgtttgtttagctagttaaacctgattagtattatttagtagtactttttttttcactgctcangaggactactcctangacagtangacctccattttcagtgacatgcttatactacttctgtttaaaatat

SEQ ID NO: 40158 - DNA, 408 bp, Oryza sativa
  unsure (1)..(408): unsure at all n locations
catcaaccaatggtctctgcctcctcctcttactcttcagcttcatcttcatcttcggcttcggcttcatcggcatcgtcttcgtcttcgtcctcattgtcttgcgcttcatgttcgccgttgtaagagtcttcattctcgtcttcaaaaggggtttcataagaggcctcggcttcatcctcaatttcctcctcttcatcctggacagtttcatcttcttccaaaatctcgatttcctcaaaactaaaaactgcacaaaaacaaataagaagagcacagtaagtttcaagaggtctcacctgacacttcacttcataacaaaaactncaaatccattgacaaacttagtccattggaccaatcctctcaaatccaaatggacataaagagctcattacttctccatga

SEQ ID NO: 40159 - DNA, 469 bp, Oryza sativa
  unsure (1)..(469): unsure at all n locations
tgaagatgaacagtagctcagggagggaaaatagtctntttttggctgggctgagaggagaggaggcggctcacattgggccggcggaagagagaggaaggaaaggatggaatgggccgaaaatggcccaagctgaggaggaggatttttatttacttttccaaataaattaaccaatgagatgatctttcaattgttaaaaatacttccaatgctcaaataattccaagaaaaatcttgaacatacttggacactcaaagtatttaatataataatatccagatcatttaatgattaatttattatgtgggtaattactgaaatgctctttgtaagattaaaaattaggaattgagctccgaaatatccgagaataatccagagagtataattaaccatggagaagttataaaaattaaatccatccatgctntatatttagaggattttattttccacaattaactt

SEQ ID NO: 40160 - DNA, 474 bp, Oryza sativa
cggaccctaagcgactgcggctgcagctttatgcaagcaaaaatttctactttgtttttaatctccaataccatatatatcttagaccattattttttctttcaaaaatatgttatatcaacaactttaaaatttacataacatgaaagtgtttaaaaatatgaatttaatgatgtaacacacatggcattaaacacattataattattaataaaccattattaagaatgattttcatataagaacaaagccgtcttataattcgagacggagctgactgtactccctctgaaaaaaaaaatcttaggaatgaatctattgagttttttttagcacagagattatatataagtagactgcgagtcaagatctccggaccttggtctaactacacatgctggcaaagcaatccatatgataggtggccacgtctcgtttgttaagtttcgtagcgaccaagcagtaaaatgtctc

SEQ ID NO: 40161 - DNA, 471 bp, Oryza sativa
  unsure (1)..(471): unsure at all n locations
ntattcagaatcaatgaaggctgcaagagnatgagttcattgacataagttgaaagtcgaatatgtgcacacaaattctaaattccaatgaaccaaagtaatgaaagtacttatcttcattttatccctccacatgtctataatttattttgttagtaatttattttcagcaacaatcacaaaaaagcatcaatcacaaaaaggccccggatgcttttttgtgatacgaattttgtatgccttcagcatcctacagtcaaaaacactattgaaagcgttccaaatacaaacctagcaatgctacaatgaaagaaaagatgctctacactttcctctntgttgcagaactgacatttactgtttctgatacgaattttcaccttccaaccgataccggtatatttctttntcgacagtcccatctccaatatctaataggtctgttcagattatgtttccgagaaaaaagta

SEQ ID NO: 40162 - DNA, 452 bp, Oryza sativa
agcttcgggttcccgctcagcgcggcagcttatccaagccgagggagctcgactcatcgacgatcacggtgtccactactttggaagaatcagcctatcctgcccgcacccgccatctagtttctggaggatactattccgccggtgagcctcgaaagaacatcgacaattcttgtttcttggatgttttgctctgttcttggggttggtcttctcctttctgctgcatcagttcgggccgttctgcacctttagttctatagttcttggggttgatctcccatttcttcttcttgttttgctctggatcgcctgtgggcgttgtgccgcaagttcttggggacattgtgtcgcaagatcgtgttgttgatagagaataatccaactgttagctcaagaaatctctgaactagctgattctgatgaaaaaattaggacttggtttcgatttg

SEQ ID NO: 40163 - DNA, 453 bp, Oryza sativa
  unsure (1)..(453): unsure at all n locations
tctcttgctaatcaattcattaataaagccctcactttcaagcccaagctgatcatactcattgttcctaaggaaactgaaaggtactgtcccactctccatatatacttgtggctgtcattgattgttaacacagctccattttttaatgtctggtaggctggacaggaaatacccaccatatgagctaatatgggaggattctcatcagcttgcaggaaaggtacgatagtactctccttggtacagttgcatgttatccttgacatggtgttgcaaaattccgttctgactgtttctttggaaaactgtagtcgttctatttgcctgcgtcgcttgatgctgataacaagattatggaacaatggaatatgtcaccacctcctctttctctatggagccgtagtgattgngctcggaaacacaaggaaatagctaaaacaatggggcaca

SEQ ID NO: 40164 - DNA, 434 bp, Oryza sativa
  unsure (1)..(434): unsure at all n locations
agcttgactgatcctgcatgcataatggatatatttaaattnggatatcacccctctatggttacagaaaactaanatgtgtgcaacatacttaattctttgagggggaaccaaagacacctataaaacaactctagatcaacctaaaaatcatgccatacatgagaaatctgacaaaatgaaaaccatgccaaaaacgagaaacctcaccttcagatgccatccagtgtacagaaccaccaaaatcttagtgcaaagatattgccttcagctctccaccttaaaaatataccaggtaatgcaaaaaaaaaacttactctgattatagtacagattgtggagtaataaggactacaaaattctgcttactctgattataattctgcttaagctagaaacttgaaagggctttgataccatagagcactcagcga

SEQ ID NO: 40165 - DNA, 449 bp, Oryza sativa
tggtctctcttgattgggcttcaccgcctagagagaagatgtctaacgagatgaaccatgtagggaaggctcccatgttcaatggaacaaactactccaattggaaaattagaatgtctactcacctcaaagctatgagcttccatatttggagttttgcggatgtaggctttgctatcaccggcatgctcttgacggagattgatcaccgtaacctctaactcaatgcgttgttcaactctttgagccaagaggagttccatagagtgagcaaccttgagaccgcatatgagatttgaaacaagttggcggagatccatgagggcacaagtgagtacaacgatgccaagtttcatttcctcaagatccaatgtgagacattctccatgttgcctcatgagagtgtgaatgacatgtatgggaggctcaatgtcattgtgaacgatctc

SEQ ID NO: 40166 - DNA, 411 bp, Oryza sativa
agcttctaaagcacgatcacatccttggactatcttatattcaatttgagaaagatagggtgtgtatcacatgtcaagccggcaaacaaattggagcacatcaccccgtcaagaatgtgatgaccactacaagactattggagcttctccacatggacctcttcggaccaattgcttatctaagcattggaggtaacaaatatggtcttgttattgttgatgacttttcacgcttcacgtgggtgttctttttgcatgacaagagtgagacacaagctatcttcaagaagtttgcaagaagagcacaaaacgagttcgacctcaagatcaataaggctagatcctctaagttcgctcctaaagtggatgagggattcttgcttgggtatgggtcaaatgaatacgcatacc

SEQ ID NO: 40167 - DNA, 462 bp, Oryza sativa
  unsure (1)..(462): unsure at all n locations
tcaaatgtgccatacctcatctcaataatcttttgtttggctctccacgcctttgcatagcttatggtgtacttgaatttgttctcgatgtgcctaataattgattttggttcaaagccaatgttaccaacaacactgctgtacatctcacttgccacaaaagctgaagtgatgtttcggtgatacttctccaccccttgtaagtagcactggtgctcggtcacaatgctaactttccaataatcattccatttacccttatatgtatggacacgccacggacaatcttccttcatgcacctcacttcatacatataatttgttgacttgaccaccctaaactctctctgcaaggaaactgcccaagcttcaccgcctccttcatctcatcgntatgagcatacctagcaccctcaattacctcgttcttcttatactcncagggtacatgatcaccctctg

SEQ ID NO: 40168 - DNA, 447 bp, Oryza sativa
  unsure (1)..(447): unsure at all n locations
agctntacgtatggttgntaagacgatgttttctntttataaagcaattgattgatgttagtttatcattgctttcggccacttatgtgtgcatttttctaaaagaccaatattatgggtgtagtctaataatatatcttggtcattttcaggcagttggtaaatccattcgttagtgttattttacttggattttacactacaaatgccatatatttttggctgtggcgatgttgtgtgtcttatagggacataaacatatttgtcctggcaatatgcgcacaatgtgaacaaccatagaaaattcctttactcactgcataaaggctttttattaaatcatntactatgtgactnttaaagatgcagtttggctttggctatgcacattatactctntaataagtagtaggtatatcactcggatcatngtgttgaggatcatac

SEQ ID NO: 40169 - DNA, 438 bp, Oryza sativa
agcttctcagccattgttcattgataatcgtatggttgatgcaaataatttatgtcatgccgatccaaggcttcaaaggccattctgaccaataaagatgactcgagcattaagtatgtcgaattccatctcgttgatacatcaagcgatggtcgtctgttagtttttattcccacttgagcaatcatctcttcaaacctttgaccacgtgattgcgaactccgaacatatttaacactttctcttatactgttaatggcgttgctcatggtttttagcccatcttggacaattagattgaatatatgggcagcacagcggaaatgcaacaacactccatcacaaggcaacattgtcttaccaacaagattggttgtcagatgagtcatcattgtatcattcacactcgcattgtctaaaggaacactgaataactta

SEQ ID NO: 40170 - DNA, 439 bp, Oryza sativa
acacttgaaactcagcttgcttctctggttagactcttaacactatctattccggctaagataatttcctttcaggctcactttattaacttgtttggatatacctttccgctctcgtataacattatgtatatggtacttccacacaatacgaacctaagtatatgaaatatgacttatccgtaacactgacaataatgaataggcttgaaccatggtattttcttttcaatatatcaaaggtactgctccttccacttcattttgtaagacactttgactctctctttttttaatcaaactttttaaagtttaatcaaatttatagaaaaattagcaacatgtaaaatatcaaattagttctaataaatataacattgaatagaatttgatacctatgttgttcttgctaaaagtgctactctattttctctataaa

SEQ ID NO: 40171 - DNA, 400 bp, Oryza sativa
gcttcattgttgtctggatgacatcgaacagttataatctcagccagatccacataaagattggttctttttttcttcccctctcaaagacagttagacaggtaaggagatatatggtcatgtagatgaacattgaaaggaaattttgttcactgcataaaccattgtgcaatcaagatgttcatatgtacttaagatggagggttacacagttaccagctagagaatttcctgtgttcatggttgcatatatgattagccaaaggtttttcacaagttgcatcaacagtgaagcttctacagctactggtgcattgcatcaacatctgcatcagcatcagaggaaggggaggaacatgtggtggacatcatctgatggcaatgtctcctcctgtattct

SEQ ID NO: 40172 - DNA, 455 bp, Oryza sativa
  unsure (1)..(455): unsure at all n locations
gagtcattcacagccttttcggtggacagtcatcttaatcctcatatcttngcagaaaataacatgtcatttactgaagaaccactaaagcacattgctaggtttatagaatcttttgaatcagaattgaaggaactatggcttgtgtaccgtaatgaaggccgctcattatcgaaactgatatatacagctgaagaaacacagttagttaccgtgcacaataatgagaggatcaggcatattcaagttcttcaaccatcaaagtggtggtattgggtaaggacaacgaaagctgggcaaaagcaaatgcaaaatctcttatggcagctggtatgtttacaccattctttatagtactggaaattaaacaccatgcctccatagaccattctagatgcttctcaagtacatcaaagttgtcgctttattatattggtagcctgtgtatactaatt

SEQ ID NO: 40173 - DNA, 403 bp, Oryza sativa
  unsure (1)..(403): unsure at all n locations
agctngaggggnnggcacatcataacgcgatgtgttttattacttgtcgactctaatgccccggttagaagccgcctgagaactatgtgtcatcgcccggaaattcactaataaatttcctaacttatttgtgtataaaaccctcattcgagaatcagctgggttctacaactggcaattaatttaccaatccatcataattacgttacatacttactatagagaataaaacagcagcgggattacgggctagcgatggcttctgcttcactctcacaggcagctcaactggagtataagccaaaacgtttcttcttctggattctttctcttcaactgagggttgatgggtattgcaagaatgagcatatgacatactctaacacgccacacagctaatatg

SEQ ID NO: 40174 - DNA, 475 bp, Oryza sativa
  unsure (1)..(475): unsure at all n locations
tatgttcggcgcagtactaatactggaacttatgagcaagaattgctctatcaatcaccatctactttagacatatcttctgaaacttttttcaaatccaaaagtccagtatcttcctacaaattagtgaattatgaggagctctctgtgccgaaaaagaaagagcagggcaatatttcaaacttgcattcgaactgcgaaatatttatacaaaggaggagagatcaagataatgcagcagggttggttatctaattggctagtcaaacatgaggtggttcatagatcnttgggcttcgatcatcgaggaatagagactttgcaaataaaagcagaggattgngattccattgctgtcagtttatatgtatatnggtacaagttattacgttcccaatgtgcttatgaacgtgcacccggtggatctttactagcgtgtatcatttagagaatacagatggatagatacccagaa

SEQ ID NO: 40175 - DNA, 424 bp, Oryza sativa
  unsure (1)..(424): unsure at all n locations
agagaagacaaagatggtgagaagactctcaataacaagcccaacaacaacaagtcgaagggttcttaccaagggaggaagatggagaatcttangaaggctattcaacaagtttgcgccgcctttgagccactaagtgatgtaaatggtgaaagtggagatgatgataagggaaagaacgtctccgatgtttgcttcatggcgtgtggtgaatctgacacagagtatgaagacaatgaggtgagtgcttttgaggaagctattaacattttgagtgcaaaaaataagaagtgtgagaagatgtatagaaaataggagtttatcattgaatctcttaaatctgaaatggatagggtaaaatctcttatttctaatgatgatgaatgtgaaaattgtgagggtctaatgaatgagaattcaaaat

SEQ ID NO: 40176 - DNA, 419 bp, Oryza sativa
  unsure (1)..(419): unsure at all n locations
agctntgntgtgggtaataaatcgggtacttatgtatcgcgtgacatgctcttgcatgattattatttcgcatcatgtgggtaaagtgtacaaactctgcagagttaaaactaatcgattagccgtgctcgcggtcatgagcggcgtgtggatatgtattgagtatagacttgtgtttactctcctaaatgctgaaatttaccttcaaattgtgatgagatttgagaatgatctccttgctgccatggatggcaataaggtgaatatttatacatgattaatgcctaccttgatgcccaatacgtcaaatactagcttgctgaaatttatttgaaagtaaacctgatttagaaatgttttatgcaaataaaacttgctttatgctaaaaagaaccatattatgccttccttgattatat

SEQ ID NO: 40177 - DNA, 503 bp, Oryza sativa
  unsure (1)..(503): unsure at all n locations
ctttgtcatcgagttgcatttactgacatgatggcttatgcttcgttcgagcgcatgangaagagagaaagatagttttgttttccgggcgcacgtttcccgaactactaaacggtgtgttttttgcaaaaaatttctataggaaagttgctttaaaaaatcatattaatgcatttttgtaagttaaaataattaatactcaattaatcatgtgctaatggctcacctcgttntgtttatcttcccaatctcctcaatcccctccttgtcaaacacacccttagccttcatgtaaaagcagggcaagaatcaaaaagtggtgctgatgttctttcatggtgtaaatattnttnttcatgtatgcattangtggtgtttggttggagggactaaagtggggctaaactttagtccctctcacaaaaacataagtccctaccatanggacttgtactttcgtgagagggactaaatttagtctctagttcccaaatatagttccc

SEQ ID NO: 40178 - DNA, 464 bp, Oryza sativa
  unsure (1)..(464): unsure at all n locations
agcttctctctgctgaatcataaatgattatctttataatttaattntagcttgactaactataactaaattctctcaaattatttctttatgtcaatatatgacttattgatataagccagtactccttcagaccaaaataactcagggaaaaattttctcggtttctaacagcaatatgcattgcttgacaataaaatgtcattagtatagagtaccggtgaatgaaattcccacctttaattntcatgcacttgtccacctcacttgaattgttcgaaatttccattagagtcaggcttaattttattaacccacttaaatggcccagtatnttgactcattcagaaacttctacaaaattctttattttgttcatcaatctcaattattctttgatggttcaaaaaccatttagatgaacactntaatgtcttattttggtcatccatctcaatttattc

SEQ ID NO: 40179 - DNA, 496 bp, Oryza sativa
  unsure (1)..(496): unsure at all n locations
tctcagcttgttacttattacatcctttactttgagttctatactntattcaaattaatccaaaaacttgtgctgttaattggatagatgtcttaactctctcctttcacttgtatttagatgccgcgctacaagcctgagtacctgtttggtgtcgagggatttgtccaggagttgcgtacgatgtcctttgtcattggatttgggactgcccctttntatgcccagattcctcatgatcgtcatgaagagaagtgccgagtcaaagtcaccttgaacagtaatagtgaagatatcccctcagtgatgttcgaagctggaggaagaaactacatccatgcatgtcaggaggtggcaaggatcgccatangagagctccgtgatcgctacagtgatcagttggccgacactgagtatcgctaccaccctcgtcaaccacagggaagtgaccgtggcagctaccttgagactgaanggaatgagaatgatgctacca

SEQ ID NO: 40180 - DNA, 422 bp, Oryza sativa
  unsure (1)..(422): unsure at all n locations
agcttgagagaatatgagagaactttacttgatgtgtgtagagaanatgagaagaggagctccttaataaggctaccaatgacggttgtggcaattggaatggtcggaattgccctccaaccatcattggggagtgatccacaccgtacatccaaaccctgcattgaacggagccacggtgggttcggccgaaccatgggctgggccggcctagcccaaattcggcaggtggcctcctctattgctcctcttcgcaaacttgtgaattttggcccaattcgtcgcgtcaattctgagttcttggcccattcatgcataagtgtaacgccccgattttcgttcgggaataaaaatcaattaataatacatttcctagaaantaaataaaaagttaagcaatttattcgagtgaattaatggga

SEQ ID NO: 40181 - DNA, 465 bp, Oryza sativa
  unsure (1)..(465): unsure at all n locations
tgtattagagagaacatgtatctataacaacaaattgcactaaggtaacgtgtttgcatgattttttatctaaattaacaagtactctggtataaatatttaaagtgttaatatactctccgttccaaaatgtagttgtactggcccaaaatatatctataccgaataggaaatatcctagtactatgaatctcaaggcgctaggcactatacgtttggacggaggagaaacgtangagggagtataatctcaaggcgctaggcgctatttggacggaggagaaacgtangagggagtataatctcaacgcgctaggcgctataangttggacggaggagaaacgtatgagggagtataagatttgttataactttagaaacttgtggagggagtataagaattggttatacttttagaaacttgtctgccttaatatttcacatgtttagttcgaaatatgtat

SEQ ID NO: 40182 - DNA, 346 bp, Oryza sativa
  unsure (1)..(346): unsure at all n locations
agctntattataaaggaatttaaactgcaattgttctgatctgaattaaaacacttaaaaagcaagcaaaaatccttattaagacagccatatcataggcacatgatatcgaccgtcgactgaccccaagcaagcaacctaaacacacaaactaacaagcagaagctagcaagtcgataaactaatggaaaacgggcctaatgctcggaacggctcctgcggtcggtggagtcgaaggcgtcctcctgctcgtcaccaggtccctctgagcgactcctggagcctggcagataagtctcgccgctgcccgactctgagccactggagctactgctgctgagatcgc

SEQ ID NO: 40183 - DNA, 495 bp, Oryza sativa
  unsure (1)..(495): unsure at all n locations
ntctcttgagacacgttgtctgtcggaaaaaaataccctttaacgacatactataggataacactatagtgcttttgacggcagatgagctatcgcaacttttaggtcacggtgtagtgttattagcttctcgtaggtaccaaattaatttgtaatttcctgatcataggctatgaaatctagattacatctccttctaacgagcgattagatcgaataaaatatccacatttggtccacttgtcgaaagcatcaaaaggaacatagtgggaaaaagagaaaaaaattaaaagagaaaggacattttgcatacacatctgtttatgtctatgtgtccaaccttgagtgctattggtggttgtactctgcgaaaattctggctaactctcaagcaagtgcttaacactattgatgccctaagcatatattccaatgaccacaagttgatcacatccatatattctgttggccaccactgccatcatcacatcttga

SEQ ID NO: 40184 - DNA, 415 bp, Oryza sativa
  unsure (1)..(415): unsure at all n locations
agcttctcttctgtagtctactttcacttgttatcatgggaagtaggaacatgtcatgttattcttaagttaagcattcgcatcttttctaaatatccaaatgttgatggctgtatgaattatctacagctagttcattacaaaatataagccgtatatatatatatggttttaacgtggtcttcattattatattttgacaatttatttgtttcaaaggacatcattaacaaccagaatcatcatcgtataaaaatattttaaaanttgaatccaaaacactatcacttgtgtagttctacaagccatgcacctcatatgtatggttctacctcgatcaaaagctagtcaaaacgatcccatctcaaaccgtggtcatcagacgcatttagaatgcttagcacacgtatataaa

SEQ ID NO: 40185 - DNA, 465 bp, Oryza sativa
  unsure (1)..(465): unsure at all n locations
ggaaaagattgagcaagaatgagttctaccacagtactcagcaagccacaccggctgatgcatgattaatgcaaggcgggtacaaggggtaataatatatgggttaagttttgcataanacagcatttaagagtcacttagttgcccaaagccatatataaagacgatcctagagctacacaatattattaaccaaggccgtgaaccctcacgaacctgccttaacccaaagtctacgatgattcagaccgaactggctacccgaccctgggtcccagctcgtcccaagccaactcaggccaaccattccacattntagttgttaagcaaattttaagaattaaaacactaagttgggtacattgctcggcttcccataaccgatggtgcggtattcaatagatatactctgacagaagtgacattntacccacagacacatttctcactgtaacacgtgcaata

SEQ ID NO: 40186 - DNA, 462 bp, Oryza sativa
agcttctcttgtcaatgttgcgatctctccataacgctgccccaaattggttaagtagctgaatctcactgagcagggcctttctcctctcattgctgtcccgggctggagcatccccaatggacagagcctcatccacaatagagtagtagattgatttctttgtcctgacgccctctataactacactgactggtgccgatatcttctcttcagccaccagaagcagcattgccaacacagtaacacgaccttccatggcatatctgtaggccacctccccaacctctctggttttctctgccaggagcctcactgcattcagatcctacacatggaacaaggtgacatttttgtgtgagaagatctatggaccaattatgagacagtgaatgaacattagtagtactagtaaccatacaaaccttttcttgcagagatgacagaagatcttcaatggag

SEQ ID NO: 40187 - DNA, 487 bp, Oryza sativa
  unsure (1)..(487): unsure at all n locations
cggatctctgngtcaaagttccaaaatatctggctgcttcatactgcatatcccaagataagggcatgcctgcaacctcagtatgcgcctttccatctggagcggacatgtgttcacctgngatatcctgagcaggaaatggaaaaggttntagtaaaacaaaaggaggtggtttacttatttgcatagattgcatgcaaaatatttatattaaataaagtaatcccagaattcatatagttatttaatagattacccattatatgtattctatagctntacattgtggtagagatattgcaatggttgccatatgatgaaatggtgcgttgaataaatatcattgatcaagacagtnaaacatatcaagaagcataattactcttggtagaggtaagaaaaatannacattaagaaatantaaaaataatcatgaagcaatcttattgctgtaacttcacaaaaatatctggcanaaatataacat

SEQ ID NO: 40188 - DNA, 422 bp, Oryza sativa
  unsure (1)..(422): unsure at all n locations
agcttaattagtgatggttntgtttagcttataagaatgattagttcaaacgcgaaccctaaccaccatagtttggttcccttccgtacattccagatcaacaatgggtgctgctttattttatactatccatctttagttagccctttattccttgcttctccaaaaataaatacacaccacgcatcaccaaataaagatagatgatggtccatacatgcatacttgctgtcagaccaatcgattattattcagttggaaccaccaacaataagctaattaattaattagttactaataattaagactggttcgaaatatccaatgaaggcatataaaattactccatccggttgataatacttggtcgtttggacaagggcacgggtctccaaaaaccaacttaactattatnttctatt

SEQ ID NO: 40189 - DNA, 395 bp, Oryza sativa
tcatcatctgcaccagaaaaattacatcatgggtcaattaatttaactatgtcctctcgagaaatcatatatctctgaattataagagaaactgtgacagctgacctgatgagtagtactaaggcgctttctgaagggcccaactgagaagaggcccatgaagctgacaatgaagaggaatccgattattcagcccaagcctgtggtcatgatgttgtgctcgtccctgggctcgcctgactggacgctgatcctgtcgctcatcgcgaatatgtagctggcaaaacacgcctgtaccaacagtgcatagattcagcatctgataccatcaccactctgacaccaagcagagaacgttgtgcacagagctctctgtggattgtctactgataaca

SEQ ID NO: 40190 - DNA, 302 bp, Oryza sativa
  unsure (1)..(302): unsure at all n locations
agctntactggtgcctgagattggctttgtgcctttcctgcgcagcttatgtggaaggcgaatatagcccccttccgggggggcccgagccatcagtgagataccactctggaagagctcggattctaaccttgtgtcagacccgcgggccaagggacagtctcaggtagacagtttctatggggcgtaggcctcccaaaaggtaacggaggcgtgcaaaggtttcctcgggccagacggacattggtcctctagtgcaaaggcagaagggagcttgactgcaagactcacccgtcgagcag

SEQ ID NO: 40191 - DNA, 419 bp, Oryza sativa
  unsure (1)..(419): unsure at all n locations
atcagttattaaatcttggatggaaagttctcttacctattatcctgngcaatctcttattaacaacttcttcccaacttgtttcactataaaataagataatacaataacagtaagaatattttcaacacaaaagtcctctcaaacaagagaaagaaacatacctttttcatagatatctcgaatatgttccctatggtaactgggttcatgagttatggtcaacaaacaatacgcgcagcaaggtacattggtcaaagtttcataattaccttatcccacacacatcgtttacctataacgattcactacccctatgagagatcaattacatcggagcgtttccggcggcgaatccactttgaattngataaatgtattgcttgtgaagtatgtgttcgcgtatgccctatagatct

SEQ ID NO: 40192 - DNA, 486 bp, Oryza sativa
  unsure (1)..(486): unsure at all n locations
agcttaagagtagcatcaatcatataaagagtatgcgctatcaacctagattaaaagcagcgattctccacaactaaatccttaagatattcaaccatgaaaaatttgtagaggtgcagttattcatggacttagctcacttatgctataagtgaacaaaaagccctcaaaactcagtcaagagattacggaggcaaaagtccactgtaaaggagctctaactattaacaccttgaatcatgagacattaggggaaaaaacctgaagtagaaaagctggctgtgtctgacactccagctgtccgcagttcagtcacacttgctcttaatgggaaaaaataattcttgttaagtctttnntttggttntatcatataactcttacctttgttaacgctgatctncattattggaattnttctggtgctttggcttgcatcaccacctaatgctctcgcattaattactattgcaggacaatgttacg

SEQ ID NO: 40193 - DNA, 507 bp, Oryza sativa
  unsure (1)..(507): unsure at all n locations
gctacttgcctgtaccaaaatangtgtcatcatcataattcttggcatattctttcttgattcatattcagattgcaattccttctctctcntttcttcaacaacacgctctacacgattaaggaacctgccgatgtcaagatctgatntctaatgacctttcaagttactattcaaactttcacttaattgtgtgcttcgcatccctattgtgaaaacatctgacatgtagcactcaacccacttttcttttaaattgtatatgctatccaaccaagtcactttaccgcacctttgtctcatggcatcaaatacttcttcaaattcttctntttcctcatactcatacatacatgcactgaaatctgctangatacttgaaccnttctgttgttgaggactcaaatgctntactgcatnttgtgatatgtgccacgtacataaaccatgccatgcaccagtgaatacttcagacacangccttctcattgcaatgtcttggtctgt

SEQ ID NO: 40194 - DNA, 281 bp, Oryza sativa
  unsure (1)..(281): unsure at all n locations
gcttggggggtggagaagatgatgatgattgtggttggcattgggggcgtcgcaggagccttgcccttggtcctncgccgcactcgcacctgcacccctcccccgccgatggcgatgaccccactccaccacacctgctccttcttcttccgaccacaaccctctcctagtctctcccactccccatgcgccgccgccgccgacgacgacttcttcaccgtcgactacgacccagaggaggagaaagaagaagacgaggagggttctccgtgggagggcgc

SEQ ID NO: 40195 - DNA, 492 bp, Oryza sativa
  unsure (1)..(492): unsure at all n locations
tttctagcagtattgtacgccagtaccaactactgatgcacaattttgaacctcggatccctaacccactctacatgcatgtactacctncattccaaaatacacggtctcatcttttcgcttatgcttatgcttatcagccaaaatttaaattttcaaccttaaatntagaagtgattttaggggttttttttcatcgtagtttattttttagcctttacttttagatcgctaagaacacgtatataaaagttttattcacaaaatatttttcgtttacaaataggacgtttggcttaatcctagaatacggttgatagctatttctaacacaataccttatctcanaataaaaatatttctccacctacttcctctcaaccaatcacaaccattctctttcatctactntctcttctcaaccaatcacaccctttctctaatcatttccatcctacattnntgcacggagtaagtttattntacagtaat

SEQ ID NO: 40196 - DNA, 428 bp, Oryza sativa
  unsure (1)..(428): unsure at all n locations
cgctntctgtagtaatcagttagttaacccattgtctcacgatcagttgatctgcatgctccattcaaatgtgttcaaatgctaagggcgcgcgcggctgcttgaaaatggcagggatcctcctctataaatagagggagtggggcaagcagggagtagaagagttcgctggggagaggttccaggggagattagcgtataggctaggtgctgtgcgtatgctttgcagaagcgctgcttgttgctaggcaatatacgctgccgtgccgctctgctcctacgccatctcgtcagcctctgcttcctcgctctgctgtgccggaagaatcagaggtgtttcaaggtgggattcatgctcttccttcattcttaggctcggccattgtgtacaagtcgaaaaatctctcagttcatcttcctctactcat

SEQ ID NO: 40197 - DNA, 462 bp, Oryza sativa
  unsure (1)..(462): unsure at all n locations
tactccgtctactaccttcatggcgctgcagctgcctggtgggagacttacaagtctacactcccccagggcaccgccatcacctggaacgtgttcaagcagggcttccgcactgctcacgtcccagaagggcttatgaaggccaagaggaaggagttcctcaatctcacccagngggacttgcctttcatggagttccttagtcgcttcaactaccttgcacggtatgcgactgatgagctaggcactactgaggcgaggaaggtgcaactntgccttgatcgccttagccctgagttgaagcacggtctctctacccatgagatcgacagtatgaagacccttgttgacaaggccctncgctgggaggcaagtgagaaggaagtagctgtggaccgcatgcgcaagttcttggcgcgcannggctactgtcagccgtcgagtcgcccacgcacttggcag

SEQ ID NO: 40198 - DNA, 390 bp, Oryza sativa
gcttatgtcgatgacttggttgtaaagacgcgcaaccaagagaccttactctcagatctagcggaaacttttgagaatctccgctccgcccgcataaaactgaaccccgataagtgcgtgttcggtgtacctgcgggcaagcttctcgggttcttggtctctgcccgaggcatcgaggccaaccccgagaagatacgagctatagagcggatgcgccccccagcaaacttagggatgtgcaatgcgtcactggttgcatggccgccctaagtcggttcatatcgaggctgggagagaaggcgctacccttattcaagctcctcaaacgctccgggccgtttacttggacggaggaagctgaacgtgccctcactcagttgaaggcgtatc

SEQ ID NO: 40199 - DNA, 494 bp, Oryza sativa
  unsure (1)..(494): unsure at all n locations
atgctggaataagaaatnttaaagtattgggcatactccatgctcacactgctttaacagatgtgcttacgtccctaaaagacacatggtttcaccacacctggaaatatatggcatatatggtataacatccgagtaagtaaactcataaaggatttaccaaccgcctgaaaaatgaccataatatataatcagcctaaaccataatattggtcaataaaaatgcacacttacgtggcaaaaagcaatgatattgtatccaatcaattgcttaaaaactcaaacagcaccatgactatataaaaaagtcagcggngcagctatataaagctgtactgtttgacaccttntaagatgcatcgtaccaactcctaaaaagttgagtaactggcggataaaagggatttaaggtattgggcacttgatcacgcgcactttggcctagcanaaagtgctaagtcctaaaaaacgtacatgcacacctgaaatatggg

SEQ ID NO: 40200 - DNA, 467 bp, Oryza sativa
  unsure (1)..(467): unsure at all n locations
acgctttaatacgaaagatcttttgctcagttcacctaacaagctcgcgagctctcgcatttgacatttatttgtcaccacttccatcctaagttggcgtttactaagcatcctatggaacggaacggagtacgtaagatatacagcctggtcagtgtgcggcgttctgttgagcgccggccgttcgatcacgtncacgtctttggccctgttgcgaagctaaaaggggcgcctattcaacaaggaaaaagacatgtgtaattgggtggtcgtgggctagcttgccagctntttcatgccgcccgcggctggacgctgtccaccggacgggcgctgtcctctctgcaggatctgctcctggtcctggcctccggcgcgcatgccgttctggttctgcgaaagtaagtgtacgtgcccagagagatggcaacgtgctgcctctcatgaccatataacangttttatat

SEQ ID NO: 40201 - DNA, 397 bp, Oryza sativa
  unsure (1)..(397): unsure at all n locations
atggagcccccctgaagaactagtctgtagtgcactcgaaaccatttcaaaaatacaaggaggcatgggttatgtaaaactgtcatgggaggaaccagttaaaagaagacatggtgtcgaaagaactggctctgggtaggagtttgtggaaagtagctattcatatgctagaaccatgagctggaatgctttttgttaactagcttaatcttttgcctttttagctattccccccttttagctcatttgtttctacttaggtttcatccttagcctagtcccaacttacctttgaccaaaggctgatngtgttatctgctataaatatcacattcaataatccagtctattaaatgctgcagaagaatgaaaaacttatgtccttgntattactatt

SEQ ID NO: 40202 - DNA, 506 bp, Oryza sativa
  unsure (1)..(506): unsure at all n locations
actaagcttctcttttcaatgggtactcggattacactatatattgttctttataatttgnctagantttcattgacctctcactattgaacatggcacatacacctatctattcaactttccacttaaatgacaaaaaatgcccctatgtggnggcatgttttctttttcttgtttgaaagaacaatttatgagttctaactgcctttactaacaaagtttcatatgagtttcacatanggcaaaatgggaaatgcctcttggttaaccatgtcgtgatatattactaaattaaagaagccatcatagtgatattggccttgaaatttcctttcataatattataacctatcagtttttttaatatttagcanaatanattagcgtcgacaatcgcatcttanagccatatgatgtccaaaacacaatttattgtgaccaaagggagtatatacttatatatgtacaacctcatctcacacatcagtatcatagaatattataat

SEQ ID NO: 40203 - DNA, 449 bp, Oryza sativa
  unsure (1)..(449): unsure at all n locations
agctntgtgcgaaggcatatatgaggtatcattcaagataactagaacagtagagattgtacatgtgtctatccgatttctagtgtgtacaaaacctaataggatttaaacctaacgaaattagtgtacaatgaaccatacttattgtttctctcatcaaatatgatgtacatgattcacgactgtaattagcaggctattgcaacgctgacatatgaatcacgatgatgcatgtgagcccaaattggcgtcacttgtgtgattttagcgtttgttttggtttgttgctaaaacaaactctaccaaagccaatccaaatattgcccaaaacagcctctattaacaaaatttggttattctagaaacttcctcttgcacaaatggggcaaagaanaaaaaatcaaaaacacttattgagttaacaatacccaaatttggtagagtgatct

SEQ ID NO: 40204 - DNA, 500 bp, Oryza sativa
  unsure (1)..(500): unsure at all n locations
tgcctggntttgacctgagaatggctctgattacngctgattggtgtgtcanaatgtgcgtggggtttgacgtgatggtgacacgcgtgaattgtggccgagtggagagagaanttgagggcgggagatntgtggcatggtaaccgtgaaggataatttggagcaaatatgataagagcagggtggagcggtgcacatgtaagaaaggaagaaataatatctggttggaagatgatcagctgtcagcacaaggagggagtagaatttaggaagctcacacatgcagatacatctattatttcgtgaaactagatttggggaattctaaatggtttgatgtctagcatatgcatttcatgaatgtgcttaagctttctgcgtggcttcccattacattagtaaattgtaaataagcatgcatgtaaactcagatcagatgacatggtaaattgatcgactttcagtagtcagttccccaagccctaactcttgataaagct

SEQ ID NO: 40205 - DNA, 52 bp, Oryza sativa
agcttatgcatgtggtagtcttctgccaacctcgcacgcccgggggggtgcg

SEQ ID NO: 40206 - DNA, 491 bp, Oryza sativa
  unsure (1)..(491): unsure at all n locations
gctttcttctggacgcgtattaccaataaactgtcagaccggctcatcctcatttgtcacaaagttaataaagagcagggtactcaatttgcttgtaaatgggcatttcagatctctccagaacagaacctaaactacctgttccaattgttacttgtgagagtgctctttggagaggtgagagttgcgggatgtcttttgaccataatgaacctgtttcttgacatgcgtcatgcatgtggagtgtcagctaggttataagtttgccatattagttgtacacatgggagttctttcctgtttaaaaacttatccaaatgcttcatacgtgaagcttcattntgatgttgtaggctaattattcccagacctcatntttttcttggcttagataccatatccagtgccactatgngaattgacaaacttgtactccctccgtttcaggttntaagatngtttgactntggtcaaactgtntcaaagtttga

SEQ ID NO: 40207 - DNA, 405 bp, Oryza sativa
  unsure (1)..(405): unsure at all n locations
agcttcatcaaagcagcggactnttcgacgatggatacttcaactactttggacctgggaaatttgacccgaccagagtacattccctgataagatcggaaccatcgtcgttaacaatttgatctatcaagatcatccaagcctcaagatactcgacgtatcgaaagatgtcagattatatgatgtcaaacgagtatgtaacaaggtaattggtagattggttntttaatttaatctactaatttcatagatacatccggcatgtatccacataggtacgcaatactctatatgtgatttatcgtacctattcttcanatcaatacaatattgtcagatgtatgatttatttatgttacctagagcatattttatacaatatctacagtgtgagtgtttcagtgt

SEQ ID NO: 40208 - DNA, 476 bp, Oryza sativa
  unsure (1)..(476): unsure at all n locations
tggaggtctctcgacgtggctgatcctcacgggctgggttatcctggttagtaatggcgggggggtaaagtgtaccctctctgcagaggttaacaaactgctcgaacagccgtgcccacagtcatgggcggatgtgaggtgattcctatcgtagatttgtttgactactgcttgagaaatcgttgttgtgataaggggttcgatgtttgaaaaatctgcagctgatgggatcagctaggcccgggtggccgtttgaaaagttgttggcccgggtggccgtttgaaaagctgttggccgggtgccaaccttgttgcaatcctaaagactgacacattgcacatactccgaccggacgagacgcactgtctcatccgtgtcgtttgagaagcactcacttagactttntagaatagaagtcaaacgaaatcaagtacgaatacaacagcctttctttgagcctgcttaaacacttatt

SEQ ID NO: 40209 - DNA, 477 bp, Oryza sativa
  unsure (1)..(477): unsure at all n locations
agcttctacttgtcagagtataacacaatgtatgcaaagatggtaattttctatgatacacatcctgaaaatataccatgtgtatggtgatttctagatatcatttggcaaacaaaagctctgtcaaaattctgaacgatcattgaaaatacagtattgacatgccaaaagcccaaagcaatgtatagccaccagccttatttttgttaagcaagtgctactatgtttgaagatatttctgttacnttttagaacatttcaatatacaggattcctcaaggattaaaatgtgataattatccttgcaaagcatagtaaaatgtgtttccgagacagtgtctttttccatctgctagatttcattcattgatgcacgtgttagatgccagaatatatctgcacatcatgagtccaatttagccgttaattntctacttgcttgggatgtcaaatnagcttttcatgcaatcaccggat

SEQ ID NO: 40210 - DNA, 384 bp, Oryza sativa
  unsure (1)..(384): unsure at all n locations
tgcgctccatcagggttagcgcttgagctttttcatcttctattggaagcgagntccatgtggcttggtatgttggaggaatgcaacagtactcgggaagcgcctgttcacgattctgcacatagaaccagtttgtgtgccacgctttgttcgatgtttgaacggcatggagaaatatttctggctcatggtgacccttagcaaaaactggctctccaataacgcacggcttgcttctatttggctgaggcttcaagaagaagatgcaccagattatggcacaatgcggcctatttcctagaaaggcttcgcaagcatggataaagttggcgatatggactatggaaattggggtcagatgatgcaagctcagtccataaaact

SEQ ID NO: 40211 - DNA, 373 bp, Oryza sativa
agtcttccagagctcaatgggactgggtgctcctgatgagcctggttacactggtgggcctacaacaagaggagattacttgagctggagtgaacaaaataattctgtgcaggcaagttctcatgttttgtcaagagatgacagagaaaaccctgttcctcagggtactggcagaaatgattctcgatatgagaacaaaaaccggcattccaaagatgctggaagtagtcagtaccagatattccctcaggatgattttggttcagtagggcaaaacaaacctgaaatagctgcttcacaactgccacagttcataccttctgtccaaacaggcacagagagcataaacattgacaaggtatctgacatgggt

SEQ ID NO: 40212 - DNA, 465 bp, Oryza sativa
  unsure (1)..(465): unsure at all n locations
ctcagcctagtgcacattttatcagcttttttttcttttgcataaatctgatggagtttttttgacatatttaacgggctgtatatcattcatgcatataggtggagaatcagtaccacatataaccacctctctcttttcacaatattgaaaataagagatatgtacatacctataatatagaatcgcaacatgatgactatttcgcttgcgacttgtgacagatttttcgtccatagaattttgcatcaagattatgttcttacagggcacttacactaagttccagtacactacacttagctacaacttttttttctctagatgtaccattttgacatatttatcggtttattgtgttntatttaaaatagggtggatccattgatttaaagtctataagatttaaagttctaatctgatcgaatgatcagtaggtagttccattttaataacatgttgatg

SEQ ID NO: 40213 - DNA, 371 bp, Oryza sativa
  unsure (1)..(371): unsure at all n locations
agcttgtctaaagtttagttcggctaagtgtgacaggaaaccacattttcaagcccatgttccccgtttaagctcggtccacgcgacaggaatcgtggacgcaggccagtgatgggaaacagaaaatcatcctctgatagtaggcgctggatatgtttgctagctgatgaaatccagctaccatgctccatgtcttaggatatttgttgcaactgtacttactcattaaaatagggagattccatctaaacaacttccttctgtccctaatctcagtcttgatcctccaaatttttaataagaaaaatacggctacacaacanaatatagctgtatagagtgtacacagactgggccatatcttaattagt

SEQ ID NO: 40214 - DNA, 450 bp, Oryza sativa
  unsure (1)..(450): unsure at all n locations
caacttctgcgggcctgcctggtgtatgttaagatggaaaagaagagtgaaaagtacagctgaaattactgaacctccaaccataacttgtacaagctgtaagtaatcaagtctaagggtgtgtttgagaatgaggggattgaagagatacttaaaacgaggtgagccattaacacatgattaattgagtattaattattttaaacttcaaaaatggattaatatgattatttaaagcaactttcatatagaanatttttgcaaaaaaacacatcgtttagtagatctggaagcatgcacgcggaaaacaaaactatctttctctctttctcctgcgcttgaacgcagcctatgtgatgaaaaggaacaaaagggggactacattctcttgaaataaaacaacaacaatttattttgcgaagactatcaacttatttgtataacacactc

SEQ ID NO: 40215 - DNA, 444 bp, Oryza sativa
  unsure (1)..(444): unsure at all n locations
ctctattctagtttatacctgttattgcaaccattattcattccaagctgggattcgatcattcatttcttgggccgnacgaagggcagtcgcctgcctacccctccttcgcatgtggtcttggtaatcaggagatagatcgttagctaatccctgcttaaaataattctgcatgtacctagggaacgtgtcctccacaagctatttttttaaagagaatttagtccttcacgtcttggtattaccttgttaattcatccgtccatcttatttaaagtgtagatatggttttccatgttcaacgtttgaccgcttatattatttaaaatctttctgtgattagcattcttctctattagataataaaaataaaatattattttatacgtaagttatttntaaaatttttaataagacgaacagngtaaatttgacatgaatacc

SEQ ID NO: 40216 - DNA, 476 bp, Oryza sativa
  unsure (1)..(476): unsure at all n locations
gctgcttgtgcttacagcttggnttcaaatgatggaatctgtttctccataatgtgcaagctctccggatgtgaaaagcttgtgtagcatatttgcttcaagtgagccaaatggcgtcattgtctccttgagctctggaagtattaacattnttatcatcttatatttcattggctggttagtcgtagagaactattaaatccctgagtcaaagtcaaagaattgttgtggtgttgcgcaattccagcctgtattgttattagctgcgaaacagcgttctattnagtctattgaagtactttgccctttctaccataactttcaagttacaacactgttgtagttgtagaccttcctatgtcttttggtgggaggtgtctaactactatcatatacttactagttgtgcctttctatacatcgatcatcatcttgttgttatcaacatgtcagagtcttgactacaattaattaat

SEQ ID NO: 40217 - DNA, 488 bp, Oryza sativa
  unsure (1)..(488): unsure at all n locations
gcttcttccanagcatacggctttctagatgtatatgacgatctctagacagatggatcttatatgaatcgtatgatgaagtaccacatgagtggatatataggaaaggaatccaaatctgccgaatcgctcatgttatgatcttctacatcctaggtctccgcgttccgtcatctggcttatgttcttcatgtagcattcagatcgaatgactctatgaaattacgtcgatacttctacatattatgggtaacgtaggagacatccctattttcccccggnggtcttaattaccactgcttagctttcaattcgcctctgaccatcaaattaaatgtgaataacccgtcctcctctctttgaaacaaggggcgcttccggntctgtgcgtgcttcaaacaattttgtcttctccatattaccatatctctagagtcaataattttctatgaggaactactgaactcaatcacttgcttgccgtactc

SEQ ID NO: 40218 - DNA, 470 bp, Oryza sativa
  unsure (1)..(470): unsure at all n locations
attatgaagctacgcgactagaagatgatccctatgatcgaagttatatactctataacataggccttatacacacaagcaatggagagcatacaaaggctntggaatattatttccgggcactagaacgaaaccccttcttaccacaagcttttaataatatggccgtgatctgtcattacgtgcgactatctccactatagaaagaaaaataagaaaggatcaaattntctagtatttactagaaaagggggctntctacatagggatcgtcaaaacaacgattntgccctatcagctgtaggaagaaaggacacttcacgagaatcaaaataggaagaaagaaagtatggcctatactactctatggatagagttctcanatngatagagaaagcaccgtanagatcaattagtgaccgactgggtcgatacaactaannaaaactgcttacttatcccatgatatg

SEQ ID NO: 40219 - DNA, 492 bp, Oryza sativa
  unsure (1)..(492): unsure at all n locations
agctnttacaatgtcctgaacaagaaaaacattatccctccattctttccttgataaaatgaaatgaaaaaggtcttctgtagctgcaaccacagaatgcatgtcgaatgatctccacccaggtttgttggcagcattntcaccagatctatcttcagacttatttgaagattctgactgttcggatatagctgcaatctgaacatttcaaggatttttagtgaccattacagcaagacatgacggatatttgccaaataattgcatgatattgatgcaaaaacaaaattatcatgataagttctatctcttagtgccatgttcgcagttacaatactggtcccacatgaatgatggtcagcactagaaaattatgcttatgtaatacgttcatgcatatataagtgtttgatagttattccaagtgcacaagttacaagaggggtatgacagattcttaatcactccaatgaaatcacaggaataaattaa

SEQ ID NO: 40220 - DNA, 480 bp, Oryza sativa
  unsure (1)..(480): unsure at all n locations
gcctaaagccatgaaatcctctgatgcatatctggatctggtttctgttatacanatatatatgatgagtaggatctgatgtaaatacagtacttgagaaagattcaagtattaaaagtgtttataaatatgtatttctcctctcgtcaattgtgatttccccgagcagatgactcattacggttaaacactctgcctgactagtcatagccaccaagcaccgggagtcggcctaggcacttcccaaacatgcatatgagtgacatgagttcgtcattaatggaacaaagtttcacgaatcacaatctactactcgggtatttttgcaattgttaagagaagacaataataaattatcttatctctatgctttgatttattcgaaataaacttacatcttggtactcggccatcaacgagccccggtgctggaatggccaaagcactatcatcgacaactacggaagctacgaagaagac

SEQ ID NO: 40221 - DNA, 469 bp, Oryza sativa
agcttatctcttacgctccacgaatggatcagtcagaacatcttctctggctcgccgtcgtcgccgccgactggtgtcttcgcctatacagatgggtggtcacaacaccgttgttaggcgtctacatcttcaccgccggtttgctttcgccgccgccgactggtgtcaccgcctgcacagctggcctattatgccgctgttgttgggcgtctacatcttcacttactggccgcctcgtccgccgccgactggtgtttccgcctgcacggctggcctattatgccgctgttgttgggcgtctacctcttcaccgactggctgcctcgtccgccgccgactggtgtttccgcctgcacggctggcctattatgcagctattgttgggcgtctacctcttcaccgactggccgtctcgtacgccgccgactggtgtttccgctataccgtggcctatatgaagccgtgttgg

SEQ ID NO: 40222 - DNA, 481 bp, Oryza sativa
  unsure (1)..(481): unsure at all n locations
cttgtgacatgccgttccgctgtgtctgctgcttgtagccaagatacgctcccagataccgctgcgacgcctgcaactttgacatgcacacgttctgctccaacctctgccggccattctacagcaccctatgtacaaaggccgcatattcaggttttgtcccaagcctctgcctccctcgggccgcaaggtctgtgacgcctgccgcgatcccgtgcgcgggttcatctaccactgcttcggcgccaacctcgacctccacccgtgctgcgccagcctgcacgggccgatcatcctcgacgggcttgccttcgacatcggggcaccaaggaagtgctgcctttgcatgcagganaagggcccagaacgcgatctgtggtgctatcactccaacatcaatggcgagggtgtgtatctccacgtagcttgcatcaagcacttcgccggaaggagatggcangcaggccgtgaaaagaaatat

SEQ ID NO: 40223 - DNA, 478 bp, Oryza sativa
  unsure (1)..(478): unsure at all n locations
agcttgcagacagtagatctgctgggctacatctgaggatagaatagttgacaaagcagatagagcaagaagatgagcatgcaggaaaggagcgagggagtgctcacagaagaacaagatacgcttgctggcctttgcgacgacttcgggtcatatcagcatcctctagtgccaggaaatggtttgttgatcagaatggcaggttgccacctgngacagaagcactactgcaaataaggatctaacaaatattcagagtttccttgtgctagagatataatgttgtccattatgttttgaatgtttgcacatgcatatctaaggtgttttgaaacatgtttatatggtcttgccactggatatggctggttcaactatagtcgtccaactttaagttattntgcatatatggatatttacagaaatattngtcaccttataaaatggctaanagaaaatanaatattcaagggaatac

SEQ ID NO: 40224 - DNA, 463 bp, Oryza sativa
  unsure (1)..(463): unsure at all n locations
tgaccgcacctgcctttacccaggctgaggcttcttctnttgattttgctagtanggtcattggggtggttgcaacatgacggataactcttgcgttttgcaggttgtccaatatgcccccaaatattntagcatgcatatttgtagtggaaccaagttgttccatcctctctgtatgttgtgcagctattcagtaaagtanggtcantttggtttgaaatcctaccaaaatatttgtagtgccaattcttgggcaagttttggcactacaatttttttggtagggtagatntatctcaactccatagatttagcaaaagttggttccaatccaaatggctaccaagtactactattcaaggctaccaaatacttggtagggcaggaatttggcctcaaccaaaggccctaaattacattatattgactttatatcttatttatgaatagcctaaataaaaat

SEQ ID NO: 40225 - DNA, 469 bp, Oryza sativa
  unsure (1)..(469): unsure at all n locations
agctggggaattcaacctcataatcattttctttgagcaccttctatctgctggaatgaactagcggctcacttttaagacatttctccacagattctgtgcttgaattctctcttctcttattacaggatgatactgaaccctcagaactctggaatagggaacattcattagatattgaaagttcaacagaaaccaaactgtcattctttgcatacttgaaatcctcatctgatatattgggctgacaggattctagntctcaattttcacagcttccagaggcctcaacagaactcacagcttcatatgtatgctctgaacaagtcctagtattgttctcatttctcagctcttcctcggcaggtgcatgagttgtagctggtgtctgtatctcaccagtcgcttctgaaagagttgaaatgggttaagatttggattcaaaccacgtgatatcatccctacatgt

SEQ ID NO: 40226 - DNA, 451 bp, Oryza sativa
  unsure (1)..(451): unsure at all n locations
tcttctggttatgggatctcacctcgacacgccattgtcttataaggagctngtgagaggaggtagccaataaggaggaggacgagatggggttcgtgctggtgatctcgctgcccttcatcttcttctccatcctgctcggcttcggctgctacttcctcggcaagcacaagggccgcgaggagatgcgcaccggcgtcggcgcccaggtctacggcacgccgctgccgccgcccggcgtcggagcgccgccgccggagccgttcacggcgaagaatgacggccccgagaatctcgtctgatcagcctcggctgctgctgctgctgaatcggctcatttctttntcttgctatactggactgttcgtgccgcggtggtgtacatgaagtggttaattggcgtgttcttcatgttgagttcagtgtgataatttgtaatcacaatctatgt

SEQ ID NO: 40227 - DNA, 310 bp, Oryza sativa
  unsure (1)..(310): unsure at all n locations
agcttagctcanaaacaatatcatcaagcatatgctcatttgtaatttaattcagnggacgacgcatctatctngttttaagcttaattgttcacatgatttgcttgtaatttctctaattcagtgctcgaaatgttgtttgattaagcaagaaatcactgatcaagatgaactcaattgtgatcaatatattaccaagagcacaggctgcgacgttcaccataagcaaccggtgcggctacacggtgtggtcgggcatcctctccaacgccggcgtcgcgccgccgtccaccaccggcttcgccctctc

SEQ ID NO: 40228 - DNA, 481 bp, Oryza sativa
  unsure (1)..(481): unsure at all n locations
taacgtcctaaacgaagntcactaagatactgtgttctaatctttagttggttgacgtatatatcattcataccatgctaaacaaagattgagctatggcaatttactgcccatatgcacatgatgctgaatttgtcagggatctgcaaataccatttcttggatgcatgtatatcctctataggttagtaaattgtcaagaaaaanaaacatttccatacatttaagccgttttacaaaactgaaagttatggattgtggtctattttatactgcaaattagcagccttcctattctctggataaacaaccgacattatattnttttaaagaaattaaaaaaataaccaatagctgcattaaattactgcaactgttcaattnttntggtgttgctttgcactatcatgatcatcaagagttaaatcacagtgcagcactgcagctaataaaaacccctatgatcccaccttactataac

SEQ ID NO: 40229 - DNA, 235 bp, Oryza sativa
  unsure (1)..(235): unsure at all n locations
agcttaaccttcaagccttcaagctagtacttctacagtcctactacatttatccaaaaatttaaggaattttagggatgaatttagacaaataattattcatacatatttntaaaatcccttatatgctaggacgaagatggtattaatttaacttgtttcaggaaaaaaaaacccataatccaatgcatatatccattaatatgttactccctctgtccttaaatatttgacg

SEQ ID NO: 40230 - DNA, 427 bp, Oryza sativa
  unsure (1)..(427): unsure at all n locations
tgagctcattcacatatctacctactccctccatcccataatataagagaatttgggtggatgtgacacatcctagtacaacgaatctggacagaccctagaatcccttatattatgggatggagggagtatatctatattcctagagaggtacggcctaagctgccatagctatccacacagctacttctactgttgcactgttcatggttagtagtagtacatgctttactttaccgtttgcttggccctcttcatagatgcaaactctntggcttttgcatggctccatagcctgtacaaggggtccatcataggttggaccaatcatcagtgatacaagaggcaagctgttatgttgaaagcaaaattcagttggtttgtagtttgggccatttgtcagtgagatataaataccacaatgcat

SEQ ID NO: 40231 - DNA, 399 bp, Oryza sativa
  unsure (1)..(399): unsure at all n locations
agctngatgatggtctcctcctcctcggctgtgaagttgccgcgcttgaggtccggccggaggtagttgatccaccggagtcggcagctcttcccgcaccggagcatacctgcacacgacaaaaaaaaacacccacgattcatcagaacctgctctttcttccacctctgcaacgacaacaacaagctgctctctctgcggcggcgatgcgttacctgcttgcttgggcagggcgcgccagttggcgtggccgtacttctgaatgtaggcgacgagcctcatgtcctcctccggcgtccacgaccccttgttcagccccaccttggcgcagcacggtgcccggcccttccccatcgtacgtcgtccgtccccgggcgctncgcgcgctgccagaacaac

SEQ ID NO: 40232 - DNA, 462 bp, Oryza sativa
tatcgatcgactctgctctaattatatgttatgagcctaattcgttcgtcagaccagtcctgtacctctgaacaggcgacaggataaaatatatatctgatgactcatgatagaaacatattaattcagacttttttgttttgttctctctctactagtacaccagtagcattgattagtgatctaatcccaactaaaccaaagtgttatagtgtccatagatccttattaatccatggaatagtgagaacttgacgtagggaagaaagaacagagtatagtagtagatcagtataacaaattgattaataactaacgtgtgcatgaatagacaacagttgtaaagaaataattaactgagaaaagttttcacgcatgcatgtccgatccatccatatatagcgtgatagtcaaaccatattcaacccacgtcgttctcctttttaccttggcctgcacaat

SEQ ID NO: 40233 - DNA, 426 bp, Oryza sativa
agcttgattgagaggggtatctaaccggctttctctaaatggccgaatcgatcgaagttctggcactatgctcacggtggaacgcttaaccccgttgatggctccctagtgttcagtgatcagatacgcgatgctgcaagtcgactaacggacgtagtggaaacctcttctcagggcacgtttcgacccgacaaagagaaggacgagctgtcactcgccctgcagactcccgagcatctaggacgaacgcgagggaaaggcgtggttccttggaagattggattcaaggaagacatccacacgtacaggagtcggatgaggagcaagagagataccgaggcgaagattgcagatcttgagtacagggtatcgagctacgatctcagcatgcaagaggaggtggcaaggaaggtcgatgaatgcatg

SEQ ID NO: 40234 - DNA, 438 bp, Oryza sativa
  unsure (1)..(438): unsure at all n locations
taactaaccttctacacgagacanctgtacttagcttattcattcgttcttgatcctgcgtgactggcgacgacccttantatcaactaatacaattgaggcaggaacccaattggcttgccctggaggaggacgagtgaaatcacacacggcacgccaaccacgcaattcaccacgcccagttgctttctacgatttctttctaaagtagggagaaacaaaaatgtttccatcaacacccccttttgcggaagcagcaagaacatgggaacatggccgatgtaacaggtaaggctttgtgcaattgcatatgcaagcgtgatactctggccacaacgtgcattccaatgtgatgtcagtagtcccaatgccgacaccactctttgtacgaagtcgtatcttatataacaactctctattgccagcaggccacactct

SEQ ID NO: 40235 - DNA, 393 bp, Oryza sativa
  unsure (1)..(393): unsure at all n locations
agcttgctttcataatggtctcaaatacatctgattggattaaaaanaacattgtgagaaagatatttataatttactctattttatattacatccattttcgagcaattgtcatttttactgcacaatcaaatcttaagaatacgttttgtcattaacatacaaaaaaagtcgagagttgtccagtgaaaatgatataagtagatttctcatgaaaaataatttgatatcaatgtactttcattatatcttcacggataaatgaataagaaaagtaaccattaaaggtgcatgttatagatcatatcgatgttctaaattataacaaaacggaggtacagttgacagctagctagccttcaactgcaacgtgattttacatgtttaatacta

SEQ ID NO: 40236 - DNA, 397 bp, Oryza sativa
  unsure (1)..(397): unsure at all n locations
cacctncacctcttgacaccgacaaagccctaaaggagccctgcttggacatatgcacgaacgcacgacgatggagagtgctcggaacgggtagtagcacagataggtngcaatgtcctcaagtttgatgagatgttcttgaaagtttggatagtataactgaagataggaatgacatgtggaccacacttgccaagggcccacacgtcagcgacttctactgctgcagaggagttgagccattgtgccccttcttcagttgctattactagctagacataataactgctgtcgtctgatgatcaatactaccacttctgtctcaaatgtaacacaattagtcaagataaagattgaggaccaaccacagagatggcatgaggcgctctcagagata

SEQ ID NO: 40237 - DNA, 453 bp, Oryza sativa
  unsure (1)..(453): unsure at all n locations
tgctngtcaaaagaattgtggctcaataatctgaacaccacatgtatccttggctctcatctgattctcatcagtttatcagctgtcaccccttcgtgacatgaaactgatccccaattcaggttcagagaggcctggtccggcgccccgaggcccgaccgcagaggagcgcgttctttgggatcgggttctcgtcccgccatgagttcgccggagagtagacccggaggtagaattgttggccgaggtactgtctagcccagctctctgacctgatgttccacatccccacattatccaaaggcatgtaaatngcagtccatgattgaggatacacctgaaaaaagtagatcatgtgcaagcaggtcatatgaattgcgcaatcatggagcatttccatatatggtctattgtgcttcttggaatgacatgatcagaatatactggtagatg

SEQ ID NO: 40238 - DNA, 311 bp, Oryza sativa
ctatttctcatcgcgcttcaatttgctaaaagaaaggagcgatgctgttaaggaagtattatatatcttgtatactatttttctgagaattaaacgtatggaaaatattaatttacccctggtaaggtaaggcagagagaaaactaatttgaatctaatttgcacacatatgatgcatccgatagatacataacctctgctcaggtgtcaatctgcaactctgcagcttagtaattttctgcacctaatctcgccagtggagtacgaccgatttcaatattgccagaatcttttcttgcgtgatgtacaaa

SEQ ID NO: 40239 - DNA, 97 bp, Oryza sativa
tcgttctaaatacggaacattatacgtgcacagatgtataaatacattctatcccatgtctaagatgtccttgctctacaggaacaaatgtggatat

SEQ ID NO: 40240 - DNA, 480 bp, Oryza sativa
acatgacactgaatctgtctgatttctttgccctctcacctccgctccccactaacaagggtcagcgtgactccccttgacaccacatgccgccatcgtctctgagcatccgcgaggaataagatggaacggaactgacagagaggaagagagaagacgcatggtgagaaagaacagggactgacgggaccggtgtgttccacatatagattggatattatgtcccacgcatgactgatgcgtataacatggcacgaatactatttagttgtataggaaaatgacatggtgagacataggcgaataacaataatattgtaaacaccataaagtttgaatagcaatgatcaaatagacccagacaaatacaagcttcccttgcacgagagaacatcttcatcgctttatacacgagagagcaaaaggacagcggccgagtttgcatcacaagctaagtccatgtgttagcacagttgacta

SEQ ID NO: 40241 - DNA, 436 bp, Oryza sativa
  unsure (1)..(436): unsure at all n locations
cttaagcacctgaggctgcaagcttgagctgctgtcaaaanananatgttatgatatcttttattaagaaagaaaaanaatcagaagtgaagagaaggaataaaaaaaaggaagggaagagatggaagttgtgttgttgctgttgtgtttgtgttattttcgtgctattttgagtggctacgcttgtgactaggctcgcgtctctaaagggttttgcctaggaccagcacaataccatcgttgaatgattattcaacttgctttgattaatgtggttctagctgtaccttgatattacttgcagccacctatagctccacaaatttttatctactatatcacaggatcgtgtttgttgtcggctccagtactactaaccgttgttgctgttcttgctgtttgccaacgccttttacataacanagtaagaacatgt

SEQ ID NO: 40242 - DNA, 247 bp, Oryza sativa
tgatgagtctggacatcttctcaatgagtgatcctgtgatccgacagcttacccgttgtacttattcgatacacttcttgcacgcgtgagtttccccttcttcattctgtaaaattcgggtaaataaatcgtccggagaaatggttcacatttacctagagcccaatccgctaataagcacatgcaattaatcattggaattggcattgtgggatttttcttgcgttccacatgtcgcaatgcattt

SEQ ID NO: 40243 - DNA, 485 bp, Oryza sativa
  unsure (1)..(485): unsure at all n locations
agctnctttagtagattgattgccttaactgtatatgcagatttccgactatgggcgacttgataagtcacatcggctgattccgagatgctgcagccgataatgagtttaagccgatgacgtctttgctgattaccaaatttcactgttgacaacatgttggtatgcattgaagagaatttagagtatttaccatccaattctcgtgcctcaacttttttaccacctaatccgtatgccctctctaatatgacattaggactgctaattagtctttttggtaccactttctcagttttttttatgtatttctcatttcatagatcaatttgtatttcttttcaggcattgtggactgttntgcccctatgcccgctggtcagatcaaagggtgtgatatcctgtgcggacacccaatttatgcttggtgcctcgaanattcactcgtgatcgtcaggatntcgacacncacagatggtatacaa

SEQ ID NO: 40244 - DNA, 471 bp, Oryza sativa
  unsure (1)..(471): unsure at all n locations
ggctcgatgtccgntcaggtgtttatatctttatttatatgggcagcctatgcacatgtatattaacaattattatcgcaaatggattttttaatatggaatagattaacaaacttcatgagattgcacctctgttgcacccgtaggatggccaagattgcatttttcaacatgtcggttacgcagctgaaacaaaaaaaaatccaaaagtctgaactttctgcattcgggaattgtcaatatgaatatactacttgtaggagacttgattttaccttcatctntccatacgcagggaaaggtttccggttcttgagaattacatccctgtcaatgaattctgctatcatggagtcattgtacacgccaatccttgaaatgttttcatgcccaggagtgtccgtcccataattcagatggtgcagataaaaaagctgagcagtataaattatagcatgtgaaaagttgatg

SEQ ID NO: 40245 - DNA, 498 bp, Oryza sativa
  unsure (1)..(498): unsure at all n locations
aagctntcatgtattctaagagttacaataatatgtaggtttgatttcatagcaaccnctgaatgatagcacttgttctttttttcggagaaatgatagtacttgttgttcggtgatggtgacacatctttgatgatgcattccatagctcttgacgtttcagataggttaagataaaacaattaaaacctagactatcaacaagttaatatttagtttaaaaacactagaaaacgatagatatatcttcttaaaactaattgaacataattaaatgtttacttacttttttcaatatgtaatgaaaaatatagtcgaagatatattttgaagaccgcaacatcattcataatataaaaaattatgaaaccgcatagagtatactccgtataacaatatggcattgtagaagtccacagatataatactatatggcacaatataatttagtgtaccccctgcccactcatagcactaagttaaactctcgttgaatca

SEQ ID NO: 40246 - DNA, 375 bp, Oryza sativa
agcttcacacccttctaaagagaaacatgtctctaatgtgcttagtcaaacatgttaagttgtgcatacaacatctgcgtaagaaggaggctcagttggatgctaagtgtaccaattcgctccctttttgtagaatagacgccgacccattggagaaagacgctgcccgtatattcacagcagtcgtgttcaagaatgtccgtgcacagatacggctaattgctggacttgaagtcataagtgggactaatcaagatggttcgtcactgtatgtttgtggtttgaaggacgataatgaggtgtgagatgaagtgagaagtactttctaaggctatgcgttggaaggtgtggaatgtcactgccggaagatggagt

SEQ ID NO: 40247 - DNA, 494 bp, Oryza sativa
  unsure (1)..(494): unsure at all n locations
actcagcctacttgtcccgcatccgctgtcgcgaaggccctgcctcgtcgtcgaccttttggggattcgcccggagaggcagttcgccattgtaaacccgagtcgcccgcccagtcgcttgacgtgttaacagctgactatactcgacgaccgaaacatcgccgatcatcctgcgggcttcgtcttcggcctggtcgagggtcaacacatgtaaagtagcgcgtgaagctacgtcaaaagacagataacgcgaaataacgaagcacagcagtatatagcacaagaagtcttactgttcgccccctcatggagtatcaagttcggcataccgtcgacttccttcgcttgctcaaccgcgacctgccatgactgggagaggggaaanatgcgaagcatacaaaagttctgcaccaagtcacggtagctaatgcaggagcagaccttccgcagtgaacgaaccgcgcctcatggcgccgtcacagcatcttggatct

SEQ ID NO: 40248 - DNA, 454 bp, Oryza sativa
  unsure (1)..(454): unsure at all n locations
ctcggttcttgnctctgcccaggcattgatgttcttcttcataagattcgagctatcgagcggatgcgctcccccagcaaacttatggatgtgcaatgcgtcactggttgcatggctgccctaagtcgttttatatcaaggctgggagagaaggcgctacccttatttaagctcctcaagcgctcggggccgtttacttggacggaggaagctgaaaatgccctcgcccagttgaaggcgtatctcagctctcctccggttctagtcgccccggagccaaatgagtccctgctactttacttagcagcgaccccncaagtagttagtgcagcgttggttgtggagcgcgatgaggacaatcctcattctgcgcacccccactctgtgccgacttggccctggagcatgcatggaggagaggctcccgagtcaaacggtggcctaagggccctga

SEQ ID NO: 40249 - DNA, 376 bp, Oryza sativa
  unsure (1)..(376): unsure at all n locations
agctnttctccatgcagattgagatnggaatctatgattctntntatgacacaggcatcgaattctcttctgagaaggtaaattcgctctctttgattatatgagtagtcagttatgataatgcatctgtttactgcagttatacacgatttgtttctgagaagaactgctcatcatttcagatcttaaagctgaccaaggagacaagggaaatgcttccagatataacactgtccgtaacagttccacatacactgagcctcctagatcaggtataccacttgtcatctcttcaacaatactctgaaatggtaaataaccaattgtttaatctggagacgttatgcataattacaggtaagacttgcagagctac

SEQ ID NO: 40250 - DNA, 417 bp, Oryza sativa
tgattaataatgagctgtgcaaaaaacatatttctgatataaaccgagatcttaacaccaaatctaataatgcagaggtccaatatcattttaacatgacatatgattgggcattgaaaccccaaccgtagactatttggatgcacgacatagcagcatgtggaggacaagggatttatacacctaggtgtgacggcacctatcatttgcatacgacttaaatagttataaaaaaattagtcaaggcgattgtgatgatataagtctatacacaaacatacaggactaaacttaatctacaattagagaaacataccatgtaaaatcagacattggataatactcatacaacgcagatcaaattttgtattgttggttcttcatatatcgatcgaatatacacttgacattttgata

SEQ ID NO: 40251 - DNA, 427 bp, Oryza sativa
agcttgagggtcggcacattatatcggaagtttaataagatggacgtcctagtgccccggccgaagccgccaagaactatgtacgtcacagcggttgggttgtgcgggataacgtgcctgtcagtacggtgtactggcgaagaacaagggcacgcggagatcatgagagttttgtcccagattcggagaaagagatgctgtggaccacaatgctcgagacattcacccttcctgcgggtacagaggacaaagtgaaaaggtggactctgaagaaaatggcagaacagtttcagagcttcaagggagatctgtaccagaagtatatactgaagaggcagacaccgaacttcgacacatttccaaagctaagggatcactgggacgagttcgttgcatataagacaggtgaacaagggaaggcgatgat

SEQ ID NO: 40252 - DNA, 496 bp, Oryza sativa
  unsure (1)..(496): unsure at all n locations
tcaagctntcatgacaaggcatttncaaagccgacacaggtttatcttatgccgacgagagggggcccagaccaactacatgttatgtcccagaccatactgtgccatgaagcccaggggtcctccccgacaccaccccggcgaatccacatgtctctcggcatcaaggctcccctgataagctaagtactcagtcaggggtgttccattccacccatgtggtcgtacttgtcttatgttatgatgaaattccaaggaaacggtccttaagtgcaagagcgcaaaaccgtacacccggtacgttccccggtccgcggtttcggaaattcatttagttcgcaagcaccgacccaagtgtccggttttccaagtctctagtaaaacccaagtcttacccaagttgtactcagattttatgttcgaaggcagaccgcgatactcgcacagagtgcacgaatatttatgccccccccctgttattatgggacttgtatac

SEQ ID NO: 40253 - DNA, 445 bp, Oryza sativa
  unsure (1)..(445): unsure at all n locations
agctnggtttagatgtatgatttgatatgctagtgataattnttcattctaggaacccaatgaactattggttatatactagcgaaatctgtgcacccatgaacatcaacttaaattgattgtttcggtcctggtgttgcgaaaatctgtgtgtaaaaatttcaagaaaaatgatatcgctgttggtgtatgtcagtacagcgttcgcatgccaagaggctcaaactgaaagtgattgtaggtgctggttttaacttggtgtatgctgttgttgcagagggagtgctgtatgccaagaaggactacaacctgtcgaagcacccgcagatcgatgtgccgaacctgcaggtgatcaagctcatgcagagcttcaagtccaaggagtacgtcagggagaccttctcctggcagtactactactggtacctcaccaacgatggcattg

SEQ ID NO: 40254 - DNA, 413 bp, Oryza sativa
aactcacctccagattcgactgacttgcgcggactcttttcttgtaatgccctgatcgcaacatacgcttatcatggtcttgctgatgatacttcgaaagcttttgacatgatgacataagctggatttataccagatcatgcgaccttccttaacatatagtctgcttgcgcacataatgggtacctatatgaatgctgctaccattatcgcagcatgcaagaagactggaactcggtctcaagatctgatcactactcctgcatggttgatctcttgggaagatcaagctttatacaccaggcttatgattctaccatgagaatcccatctgaccatcgaacgaccgcgtgggagacgctcgttatcgtgcgcaactctcatggagaaatccatcctggagagatcattgc

SEQ ID NO: 40255 - DNA, 449 bp, Oryza sativa
agcttagcttgttccttgttcgcaaacattctcttcatgcgctccgcatttgggagataccacaccacctttgctgggcctcccctctttgacttacttccttcaccttcactctttgctcgtttgtatcttgatgccccacagatagggcagacatccaagtcagcgtattccttgtaatacaaaatgcagtcgttcggacatgcatgaattcttctgacctccaggcccaacggacataatacttgcttcgcttcatatgtcgtctgaggtaaattgttcccctctggcaacagatcctttaacagctcaaggagttctgtaaaactcttgtccgaccagccattactagccttaagcttcatgagttccaacacgcatgacaacttgctgtgcttcgacttgcatccatcatacaacgacatctggcaatcttccaccaacttact

SEQ ID NO: 40256 - DNA, 377 bp, Oryza sativa
  unsure (1)..(377): unsure at all n locations
ttataccccagttgagcgcctgtgaagatggagccgtangcccgctagtccgctgctgattatttnntgttctcaggcctaaagtgtctttgtaataatgtaaatattatcgatataataaatatgtgccttttgtatcatgtttgtatggtgtacctggcttttcctgngatggggattaatacactagcgttcgggaaaaggtaattttctcggtcgcgacagtagttttactataatataaatagaaatgcatggntntgcagagaaatcaaatgtacttgacttctgcaagctgngatgtacttcttcagtgtgcagcaagataaacacttgtaagctggataaacatgaaactgaatcaccatttagtttca

SEQ ID NO: 40257 - DNA, 405 bp, Oryza sativa
  unsure (1)..(405): unsure at all n locations
ttgatgtgagtatatcacaaagtcatcgatgaaaaccacaacgaacttatccaagtattccatgaacactgtgttcatcaagttcatgaataaggcaggagcattggttaagcccgacgacatcaccgtgaattcatacagtccatatcgcgtaatgaatgcggtctttggaatatcttcttcacgaatacgttattggtgatatccggaacgaagatcaatctttgagaatacagtggcacctttaagctgatcgaacagatcatcgatccgcggaagagggtaccttgttttgatggtgacctcattgagagctctgtattcaacgcacatccttcttcgatatgtacttcttctcccanaaatcacatgagcaccccaatgggaagtactcggacgtatata

SEQ ID NO: 40258 - DNA, 254 bp, Oryza sativa
  unsure (1)..(254): unsure at all n locations
agcttgctcgggcagctggaggaggaagaatacatatatataggggtgggactntagtcccggntggtagcaccaaccggngctaaagatcaccgggatctttagtcccggttggtattaccaaccgggactaaagttaagatctttagtcccggttggtgatcccggngggggnctgacacgccctgacatcattccaaccggtacttaagatgatctttattcctgatcctatcctgtcattattttacgac

SEQ ID NO: 40259 - DNA, 232 bp, Oryza sativa
accccacttcgctctgtttctgccgaatctctttttaaaccccaccgaacaagagttagccatgggtagcggagggccggaattcaactgaaggggactttgagcccaaagtacttttcaatggctttccagacttacaacaagagtggcatgcgaactggtttatgttcaaatcctgacctgctcttccgatactcttgacttcatccgtggaccaagatacttggaactc

SEQ ID NO: 40260 - DNA, 240 bp, Oryza sativa
  unsure (1)..(240): unsure at all n locations
atgtagtagtagaagaaggaaaaaaggaagtatatgaaagcgtgtgtaaagagtataatagtaagtactgacatgaggatccagttgccggcgaggaggtgggtggcctggaccggctcgggcgtgggattggtggcctcgagctgggtgacgagctctagcacctcccccctcacctcngaggacgcccggaagcccaggtcggagccgtacacagtgtccaccaagcagcgcttgagc

SEQ ID NO: 40261 - DNA, 174 bp, Oryza sativa
ctaagagaggatgccactaattgtagagttatctctctcgcggcctgatatgatacatgagtctatgagaaaaatgctttcctgaaagaggaaacacaatatatatatatatatctatacttatatatatatatatatatatatatatatacatatatttgtctatatctatat

SEQ ID NO: 40262 - DNA, 432 bp, Oryza sativa
  unsure (1)..(432): unsure at all n locations
atcggatcattgcgcttgcagtttgtgaatattgacactaaaacaaaggatntcatgaatttttttattttaggctatagtgttgtgagttatatcctttggccaaaacaagtgagtattaaccttaggaaaaaagaacatttcgaatttttcctcaggttcaaaattttactagtattagcatcatgtgaaggttgtgaatattaagacaaaaaaatcatgattttttgtctttaggctataattctgtgagttatagccttcggccaaaacacatcagtattaacctttggaaaaaacacatcacttttcctcaggaccaanacatcgggattggtgtgttgaattttgtgatattaaattacgacaaatatncatgttattttcctcatgaaaaattcggagtatatcttaatcaaaccttgagataac

SEQ ID NO: 40263 - DNA, 441 bp, Oryza sativa
  unsure (1)..(441): unsure at all n locations
agcttttcatccgtcatcgatctcttgcgtaatcaaattcgctaattggctttcaatagagccttcgcccgccgcttgtgccatcatgcacagcataaggcagtccaaatcgatcatgtatttcataatgtaacacagcctaatctctgtccccacggaatgccccagtctttcctcagaccaactttgtcacgtattaatccatccacagccagcataagccgccgcctacgataactgatcttcataggtggctggtttaagatgggactggataaaaactcgtggcttgttagctcgctcggctcgtgtctatctcgactcgacttggctcgccgaaccagagttttagctcgttagctataacgagccagctcgagatggctcgcgagccgctcacgagccatganaacatcagaccgagcagccccgatgacacta

SEQ ID NO: 40264 - DNA, 475 bp, Oryza sativa
  unsure (1)..(475): unsure at all n locations
gctggagaaattaaagctgctggtgatatgatcgatcgatcgttcctctgcaataattctgcgtctgtactgcaggtgaagatatgttcaaactaactgtgttgaaatgatactggtgaatttgtatgctgttgatgactntgtgttagtcgatcacttcatatatgtaatatgtaagtaagtgttgtatccgattcacgtacgctcgtagttaatagctagtttgagcgttagatacaattaatatccggcctatacgattcattgttgttcgatgaattactgggacgaagaaactgattaatcgatgaataaaacaaaggtttgcatctgcatagaagttacacggtggatgatcctcaaaagcaatgtatcctgacatagggttaaaactggtacgaatagtttccgtccatccggaccacttntcggattnggataggctcggttggaactatttggagatactagattg

SEQ ID NO: 40265 - DNA, 439 bp, Oryza sativa
  unsure (1)..(439): unsure at all n locations
agcttaagggacattcnaaaaagatcactgtgttggcattntcttagtcaatgaatatgcttgtatcttcaggtgctgatgctcaggtatgaattntcctatatattgtgcagaattaaatgtcactttgtgtgcatacttcatcctccatgctcttgttagtcccatgtctagccatcctttagcctgttttgttaaaaaaaaaagattctgatcgcggtggcaagtggactatatatttgtttctgaatcaatggtcattggaatggaattttgcagctatgtgcttggagcattgatggttgggaaaagaagaaatcaagatatatccaatctccagcaaatcgttctggtgctttagttggtgatacaagggtgcagtttcacaatgaccaaacacatatttnggtggntcatgagagccagttggcgatctatg

SEQ ID NO: 40266 - DNA, 476 bp, Oryza sativa
gtgctgctacaacggtgaataatcactgaacttaaactgaaagtaacacaatggcatgcagctgaaatgtaccagtacatgattctgaattccaactgaatcttctgagttctgacttctgaatcacagaaccgatcgatcgaacatccatggctagccactcaaattctgtaaacagagtcgttttgtttgctgcagagatgagaacaagttcagaactctcttcttttgaagtatgaatcttgcagagtccactcaaacccaatcctgattaacctgcgccgcttcatttgagaaaatcctgtaccatgaaatctgccgcactccctgttctcgggcccacccgtcattgagtaccggtgacgacagttgactgtgggacacacgtgtcagagagtgatttgcgtcttctcgcgacgccttcaaatgccactgggcgctccgcagaatccaggaggagaggaggaatggagcat

SEQ ID NO: 40267 - DNA, 250 bp, Oryza sativa
agctggccggccacgctccgccgcaggatcctaccgccggtgaataggagcggcgctgccgatgacgaaaaaggagcggcagccggagtaggaggaggggaggcagcgttggctggaggaggaggggaggtggcgaccgccggaggaagaggaggggacgcgcgcctggcaaagaaggggggagacgcacggtttctcgtgagggagaggataacggatagaggagagagggggagggggccccttctct

SEQ ID NO: 40268 - DNA, 344 bp, Oryza sativa
  unsure (1)..(344): unsure at all n locations
tctgatagaattctttcaatgtatttcaatggatttaaacagattcatcagacatgcaccatggtgcaatttcacaccaatggcgtaagggtctaagccaaatcaattttctccaacgggaagtaacttaaacgcgaccatgggggtgcacncatgtgtaattgtgcataatagtaattaactgaccagagggctgtagctccatggaacactctggcttgaggtcagtcatcccgaattggtcagaggaaaaataccaaacaaatggtgatctgatctctgctagactactaccactgctagntctgatggcatgcatctctctcttgaatttctttcatcaa

SEQ ID NO: 40269 - DNA, 476 bp, Oryza sativa
  unsure (1)..(476): unsure at all n locations
ggatcttaagcactgggctgcagctgaagactngggtcttttatgctctttgtgattcgggctcccagtgcttctcgttcaattctggtgacctcttattctccggcgccagctgaacaactcanactctagcagaagatctatgaattacggttctataatattctntgcttttatattatatgttcagcctttcaatgtcttagcacatatatgagggacatacatatcatactttacctcagaaattaggactttgagcatataaatttgtcattgttatcttgaactcctcccttctcaagagctgtcacttttgaaacctttataagattgaactctgctacatgcaataaataaacgactacccataaatcacgtcttcctgtggtaagaatagataaggatgctaaacaaaaagaaggtagcatatttacaccgcctcttttatcacctattcatgaaattaataatca

SEQ ID NO: 40270 - DNA, 436 bp, Oryza sativa
acacagtctaagctagagctagatagagccatcttttattattgtcatgacacactagccactaacagctacttcctccgtttcacaatgtaagtcattctagcatttttcattgtaaaaccatgtgaggttatagctcttttgtgatgggaaaatgacaagtaccggaagtgcaagaagtgtgtacgtggactaacattggtcacgctgcgacatctgtgccaagacaacggttgttggctcatgtgtgtgcatgagatcggagtcaatctcggtcaacggcggatcgggactatattcatagaggagtcgaggtccacaacgatcaatgatgccggatgacaatattggacacaacgttgcacatggcgcgcggacaccgtgtgagaaggtctatgcacgggctcacaaggtcacgtgtgcagcatcagattcc

SEQ ID NO: 40271 - DNA, 390 bp, Oryza sativa
  unsure (1)..(390): unsure at all n locations
agctngcgcgcggaatactgtggatatgggttgggaaccctggattccaaacacagcccaagtctatccaaaatgtttagacaagaaaatacgtaacaagttggtttacagaaatacgaattagatcaatcctgcactacaagtagagtaaagtggtgatttctcttaaatctctcgaatggtgatttaagaattcagtgcaaaccaaatccttgctataatcaaatgttcggtaccgcatcaacggaacaataaaaagcgcctggcgtaccataattntgtcattcttggttgaaattgtaatttaagatgcatgaggccacacgaccttaatgttcaacgtgtcatgcattagtgaaataatagctcacacaacgcaacaaatatagc

SEQ ID NO: 40272 - DNA, 499 bp, Oryza sativa
  unsure (1)..(499): unsure at all n locations
ttactggttgacaccttntaagatgcattgtaccaactcctataaagttaagtaactgcggtataaaaggattntaaggtattgggcacttgatcacgcgcactttggcctaagcaaaaagtgcctaagtccctaaaagaacgtgacaggccacacctganaatatgggctgcagacatattaggcctaggccaaaaaatatgccttcgataccctttanaggatgacgcatgtaacatgctcccgggtaacaaatcttctgggtaatatagaccaagtgtagctcatatgaatagcttctgatctgaatgattatcccttatgggatactccaaaataaatataataattgaatcccgactggcgcaagtattcggttgatagcctttacggggaataataattggtccagtctttgagcatagaagatagactcatgactatgaatccatgtggaatggtatccggaacaagtccaaatggagatataatcctcacg

SEQ ID NO: 40273 - DNA, 475 bp, Oryza sativa
  unsure (1)..(475): unsure at all n locations
ttgatatttcgataattattcgttaccttattcgtttcgattcgtattcactccgtatctatattcgataatattcgattctgttttcgtatccgggtttctgattccaattccgtgaaaagaaatatgaaaacggatatggtagagctagtttccgaccattattgattcgttntcacccctaaatgtgacaccttcttttcaacagcattagaaccaattttaatagaactttttattcttcanaattttggatatattttcgagttctgtctcaaaatttattttgcatcaatagtttgtgtaatttatctcttagaaacaactactactataaatcacccatatttttccaacggtactataccttactggcctagctntcacacacctagctagaagcctggaatananggctacacaacttatacaggatcgatcganaacattcacactcagctcacatacgtataac

SEQ ID NO: 40274 - DNA, 456 bp, Oryza sativa
  unsure (1)..(456): unsure at all n locations
ggcagcaagcttataatgtgaattataaaaacatatttccaagatcttccttccgnttacacaacattttacatcgttcttgctaccggaaactgaagattttttttttctcaaaatggaaagaaccagtggagctcaaatgatcacagcaaaaaaggagcccccaagcaagaacgatgggagagtttgaagcccggcgaggtagccgccggcgagatcactggaaagcacaacacacacgcacgcgaggaagatacagttgcacacagagattgtgctgcataatacggcgcagcttttctgtttcttttacttctccttttatttgcgaaatacaagagaacgtgatcgacgtgatccgcattgcccgccacacgacccagtgcgtcgggcgccatcgcacacgatctgatcgtgcagctggcgactcgctacattactggcacgccgtgacat

SEQ ID NO: 40275 - DNA, 477 bp, Oryza sativa
  unsure (1)..(477): unsure at all n locations
accttgcgagtgctgaggtacgctctctcatttcattatatcgctcaaacctacatacaattaagctagatatctgatgaccacttttaccaagggcttctttaacattcgtattgtatgattaataaatctccctacctataacagatccaggtgccatttgtggtgtcaaatgatcccatgagtatgttatgagaagacgtactgtatgcaaagaagctgaagttatatgcaaagaacgccaatttcattatttatactggtaaaacctatgacttaataatgaccatgatgtttctaaagagctaaaagaccaggactaacagagatataactctggatctatctctggtatgaatgatacggcagcagaccttcttaattgccatccatgcttgctcccatacgtttggtcaccttcatctncaggccagggcattccagagcctagcatcttctccttcagctccttgatct

SEQ ID NO: 40276 - DNA, 414 bp, Oryza sativa
  unsure (1)..(414): unsure at all n locations
agcttacgcagggcactccaatgcanaaactaaaacagtcatgtggccatgttttttcacgggctttttttcgctccatgtgacttcctattagttccattcatttcatattgatccaatgcttgatatcccacatctcaaaaaaggaaacaagaatattatcttcagtttctgtttattatcatgcgtcatggatatggttgtttttaaggcaataacgtaacagaactaatctttcttatcatatttgaaattcaaattacaataatatttccctttctacaatcatatttgtattaacatcaaagcatatcttgaattatacggtgaacggcatcagcaaattntaactnttgtacgtgatatatttgtttatttggaggataatanttaaatatcaaagttcatacttaa

SEQ ID NO: 40277 - DNA, 467 bp, Oryza sativa
  unsure (1)..(467): unsure at all n locations
ngcatacttcaagaaattcctttatgataatatagatgctgatgatgttgacagaagttggattgagtataaagacaagtatagattcactgaacatgacttatgagctgcatgacatacgaattaaggaagaagtagtccgtagcatatatgaaaaggaaacacttccttggaatgcggagcaaccaacaaagcgagtctttaaactcaaggctgcatangcatcttgatcgaaagatgtcgctagtccatttggttgagaaactatgaatttgcttatcacgtatccgtangaatgaagccaagctggatgcgagagcctcacagtctgtcccattcactagtctacaatatgtgctaacccattagagaaaagtgtggtacacatttacacaccgaccatgttcaagaagggttgggctgagataaggaagctatataagtgggaaattgcaatgtgacatgac

SEQ ID NO: 40278 - DNA, 422 bp, Oryza sativa
  unsure (1)..(422): unsure at all n locations
agcttgtagcccggccggcagatttgntgcataattcctgtgcatgcatgtttcgttntgttgaataattccttttttttagttcatgtatacagcattagctagtgccgagcgtagcgcatggtgtgtcattgtgggcaacgcgtgtgtgcatcgtggtgtacttgtcaaaggtccactgaggccatgtcttgcatgtaatttcttttatcagtatggagagtaaacagaaaagcagcgtttcattggctgcaccanaattcctcggtgttcactttgtcccaaagctctgtgcatttcgtcgaacacctctggttcatcttctccacagattcttcacggcgaacttgggctcatcgtcaacaagaatatccctgtctatatatggtgaattgctcacgctttaataaattcatctccac

SEQ ID NO: 40279 - DNA, 434 bp, Oryza sativa
  unsure (1)..(434): unsure at all n locations
accttgttaccaatgctaagaacctgctattagttgctgttgtatacatgccctaattcaaacctatctcaaatcaaccagaggatagtaatctaatttaatatgtttcaaggatagccatgactactcaaaataacccaaggtacagaagctcctgcaacatgctaaggtcacatccctaacaatagagggctccagcttctcaaagcagcggaggctcttacgtcataactcataagcttcattagacagcttactcttgtgatggttttaacacaatgttgaagatagataaaactggactgaccgttcactttatgctggatatgctaccctatagtacaagtaacggaaagtnggcacgganatcaacaaatcactagcattcttngtaggatcagggcatggagccatggaattacctattaaaatat

SEQ ID NO: 40280 - DNA, 413 bp, Oryza sativa
  unsure (1)..(413): unsure at all n locations
atccactttgttaacaacactaaatctcgtaggggttatcaactttttgccaaatatcatcactctgagataataaaagattcattcttttgcaccaataaggaaaatcaactccatataataaataaggcttggtcgaaaacttttcagtcatgacaaacactctaagatcgataaagatccaaatagcaaacagagttgtgataccactttgtaatatcgaatactatcagaggagggaatggtaggaccacaaaaaccaaatcattntatggaactaaaaggacccttaaatctaatggagtgcaccggtcacaccactagattaacattggtcaaataactgcttttcaccgatcagaccactggcttaccgattagtcagaccttcagtcgctctcctcgtctacttg

SEQ ID NO: 40281 - DNA, 450 bp, Oryza sativa
  unsure (1)..(450): unsure at all n locations
ctgcagcttcataccgaaatggggtgtccgtatcaccagaagtcgtgagccggcgccagcgtcgtcggagcatagagttgaagactgaatacagatttcagcttcggaatttcaggttgagctaagaatttgccacaaaaattttcaggcttgtctgttcttgcctgcatgtagagcagcttgaccttccatttagcacaacactaatgagttaaatcagaacatgaacaaccagacaactaccctacccctgcatcagaaacatgaagctgcacagataagtttttatctcagtcgtcataaagcagtgaagaaaatcaagcaaaaaatgtaattgcaccaacgagtgagatggacagattgttgcacctcattaaaaataanaagccccatacctnctctaagtcaatgaaaattatagggaatgcaataagccacgaaataattgca

SEQ ID NO: 40282 - DNA, 494 bp, Oryza sativa
  unsure (1)..(494): unsure at all n locations
tactcagctgggactaattcgcgagacgaatcttttgagtctaattacgctatgattntgacaatgtgatgctacagtaaacttttgataattatggattaattaggcttaaaaaattcgtctcgcggattagctctcatttatgaaattagttcttatattagtccatggttaatactctaaattagcgtccaaacatccgatgtgacatgggttaaaaagttttagccccatctaaacacccgcgtctataggtaccccatacaacaacgttcattaaatccaggaatgcatctttcaaatagtacaaagctacagcaatctaacattcatcagggctaacaggaacagcacgttttccagcttggaattcatgtatctaatgcaacaagagccaagggagcaaccttacctgtcatagccaccaccaccggcttggcgtccatagcctctctcatgcatnctgtagggagaatacggcaatgatctagatc

SEQ ID NO: 40283 - DNA, 447 bp, Oryza sativa
  unsure (1)..(447): unsure at all n locations
tgcagctataagttaataagatgggtagtatttcttaacacattattatgcgcacatnttctattaaaactacgccatttgagaaagtactaattatcaaagtttcaaattttaaatcaaatcttaatcatctaatgtttatgactagctaataacatgagttctttcacacagtacctacaagtcccaacaattggcaccatcgagtactagtacccaaggtttaataaaccgttttagatggggataccaccaccccgcggtttggcggttatcattggcaccatcaagaactataacacagggcttaataaaccgttttggatagggttaccgtcacctcacgggttgacgcgtatcacggtaaccgcgaaaccacaccgttatcgtgaagataccgtggctttaaaactgtaaagatatcacatataataaccacagtgaccg

SEQ ID NO: 40284 - DNA, 351 bp, Oryza sativa
  unsure (1)..(351): unsure at all n locations
gaccattggtgtgctcaccgtctcgcggtctcaacatganggccgctagggtcacctatgctacggtggcactggcatcgggaagagggaatcaatgctgactttgctgagggaactgtggacttcaataattaacgatcggatcggntcatcagtcacggtggcgttcacgttcatgcagatgcagagaggctcgtgaacgatctctgcataatcccgctgattcggcacatagaatagcatagccgcacagatcgatcatgagcggtcgccgccggctcgcggctgacattcgtgccacacgtaaccttngataatctaatcctgcctttttcgcggcgatcaacggtg

SEQ ID NO: 40285 - DNA, 463 bp, Oryza sativa
  unsure (1)..(463): unsure at all n locations
tgcatgcaagcttgctgttgcttcttctaagaatcttttttcagcgcttttgatcgagcatcattgtcatgtcttgccagctgatataaataagtcaatgggcacgaaatatgtcaaccaacttgaattgcacaatgaatcaactgagtgatatgagcacatatggatgcacaatggccaggtttccatagattaacatatgactggcatgatcacatgggaaaaaacaaaaacaactgttccaaaaagtatgctaaaataatcaactggtgaatatatatgatactaaattaagatgctcaacaatgtaaaacatgaaaaataatagcattctagttcataatccatggccacacgtgcattntcagcctaaaatgtgtgaggtgtcatagaatacttatgccttataacccaaacctgaacagactcaagtaatgctttatactccatccgttccaaatat

SEQ ID NO: 40286 - DNA, 485 bp, Oryza sativa
  unsure (1)..(485): unsure at all n locations
ctaagcttctgtgtaacgcaaactggccacagcacaggctatatgatctggaatcttcctgccagttcgtctgagaattacacgcgcacatacagaacaacgcggccaagattacatggaaaaaggttgcacatagggccggtttagttgtcacaataaatattgcctttacatgtcacattgaatatacgaacacatatttaaaatattaaacgttatttaataacaaaatagattacagattctactagaaaattacgagacaaatttattaagcctaattaatctatcattagcaaatatttactgtagcaccacattatcaaatcatggcgcaattagacttagaaaattcgtctcgcaatttacacgcagactgtgtaattggtttttattnttggctatatntaatactccatgtatgtgtaaatattcgatgtgatggacgaaaatttttgttntganactaaacagtccaatagtac

SEQ ID NO: 40287 - DNA, 457 bp, Oryza sativa
  unsure (1)..(457): unsure at all n locations
gctntagattaacaganatatcaggaacaatcatgagggattatctcacagaccagagcccatctgttttcattcatattgatattatcaagtggtggttcttagatggatttattccacagttttcactaaggataaccatatgggaagatgaaattatagtaatttctttaaaacatagatcttctcactgtgtgatgcaacattaaaaagaatacaacatactgaaatgataacataaaatacatccatgtggtacaatagcaacaaatataaaattataaactatgataaattggctttcgttaactaacctgggcacaaactgggcaggtatcacttcgctccatccattcaagtatgcaacaaagatggaaatgatgctcacatttagttaaagagcgagggatttctgcatcatattctggtgaaggacaaacagaagtcatgactggag

SEQ ID NO: 40288 - DNA, 493 bp, Oryza sativa
  unsure (1)..(493): unsure at all n locations
gaactaaactagctactatgcctgttccatttgccctgcctngatatttaatgaagcttacatattacctgaaactattctgccttaataagtttgcagaaataatccactgtacataccctaataaatgatcaaccatcaagattatccgaataatagcacaaacacttgataccaaacttcagctacacatgcttgctggtttccacgataccaggaagaattagagatacatacgagaaattagcatccatgttctgtgaatatttcagtgcgcatgtagtataaaacatgacaacacaaatgttatgtgaatatttcaaaatacatgtataacataataaagtgaacggtaattaacacatcgcaaataatccaaaatgccctacaacatggctctttttacaagtataacttcactaaagtcgattgtatcttacacaaaacgactcatgacatcacacttctattaccaaagtatgcaaatcacatt

SEQ ID NO: 40289 - DNA, 465 bp, Oryza sativa
  unsure (1)..(465): unsure at all n locations
agctngctnttctcgcccgcgccgtgctccaatgccgncctttgttccgtggcgcggctacaggtacgacgccggtattgttgcgccatcactgggccgccataaatcgggcgcggtttcttggcctaaaaggatgggcgcgtgcgcacgcagctattgcataggcgcggaggcaacctcgcggtgagcccgcagctggggaaggaagagacgagactaaaccacgaggggaaataggagcaaaatcaacagctagctgcagactgcatgcatctgcagttggttggttggtcggcgcgcacgtggagggagagttgagcggcggcaccgcagcacagggcgttctgggcgactctccgcgtgggttgttgcttgctcgacgcccaccgccgcatcggccggacccgcctctggcgactcgtcgaccgctatcgtgtcgccccgacgaccctctcnctaccaatg

SEQ ID NO: 40290 - DNA, 293 bp, Oryza sativa
tgaacattttcattacggtctaaaacatcgcacccacctatggcaatattggcattaattcacaaaacgttcccgcgcgaatcacgaagtgattttttccacgaacgcacccaacacactccaatacgtccaaaaatcatgctttggtgcttttagaactttttcattccggggaaaaacatcgcacccacgtgtgccaatatatggcaatattggcaataattgacaaaacgtcgccgcgcgaatcacgaaagtgagttttaccaccaatgcactcaacacactccaatatg

SEQ ID NO: 40291 - DNA, 483 bp, Oryza sativa
  unsure (1)..(483): unsure at all n locations
agctataggaggctactctcgtctaatgatacttgacatacttagagaaaagtctactaacttagtttaatactgctcacccaaagaaggcagaaaggctaacaaaacaggctgaaagataaatcctagcaggtcttattctacagcgacaaattgaagcttcagctactttagtacatttggtaggatcacctcactttttggccataacatcagctattttttctctgccagctaagcccatttcgtcatcacagtacaaggattaatctaagcatataacaaatggcacacaactttactgccttgggaaggtattgtcaatctctctatagcccgcaaggtgtcaaatatttgacagcatacctggatctacatgaagggaagatcaatcgttttttacccttcgaacaaatntgatcaaactgatcatcaagccatggctcccagtgattgacttatataccatcctcacatcatact

SEQ ID NO: 40292 - DNA, 397 bp, Oryza sativa
agcttaagatgggccatgttcaaccactccttgttaaatgacgcacgctgctagctccttggcaaggcaaactgatgtcggcggcaggcataacgaccctgaccaagttagtccttacggtgcaatccatctacctcttgaggaggtaccactttttctattgtaaatttggtacctcttggtacctaggtactataaggtatcatgaggtaccaaattctatactgaatttttggtacctcatagtacctcctcaaggaccgtagatttgctccttcacggcaataaagaactcggacggggtcctgcactccctcgaaagacgagacgcaaatttctttgggtaggaggtgaggaaatttcatggggaaaaaaatgcaaagctagctgggacaag

SEQ ID NO: 40293 - DNA, 491 bp, Oryza sativa
  unsure (1)..(491): unsure at all n locations
acctataatactcagctggattcttcattttggattacttgctgctgtaccgtaccgcanataaaagaattggttcactaactctaactgcgaaatgtatattctttgttatatctatgttgaattgatttgcagatgaaacaagaagagctttgatagattggcataaacgcctagcgataatagatgggatagcacaaggacttctgtatttgcataagcattctcggttgcgtgtcatacacagagatctcanagcaggcaatattctcttggaccgtgaaatgaaccctanaattgcagattttgggcttgcaaaaatatttagcgtgaatgataatgaagggaatacaaaaaggatcgttggaacatagtaagattntattataanattcattagcttgacacaaaactgccaatactgttacctcacttcaatggtttgtatgtgcatcttttcagtnggtatatnggctctgagtatgcttctg

SEQ ID NO: 40294 - DNA, 470 bp, Oryza sativa
  unsure (1)..(470): unsure at all n locations
agcttaatcttcatttaattatgggacagtgttgttaganaaaaggcacttaaaggatgggatccaacattcataaagagaaattttttcccctactggagatcagtattaggggcccagctgtctgtatccaatggagcagcagatgagaagtcaatgcttcatcgtccacagttccgtaattcagtagtgagtaacgagtcttcgagtctgaaccataatattagtttcttgggaagaattcagcaactgagtggtactcatgaatcgagaaggtacagtactgctgcattcagaatgctcacgaaggtgctaaagacatgagcaaaaaggtatgtcgtgagttttgtttcagtctacagttactgaacatgtggaaacattgctgtgcgcctatatattaattgacaatatatcgtaatgtcaagtgttagggccctcaatagaattcacttgttaaattacagaat

SEQ ID NO: 40295 - DNA, 466 bp, Oryza sativa
  unsure (1)..(466): unsure at all n locations
ntctacaccactntccaccggagatacggcagcggcctgtgagggatcctctgcttgngagtcgtcgctgtcgccgtcttcctctgcggcctcgcctgcatcactagcaactcgaggtcagatcgatcgatcagctgacgtgttcaggaatttagcttagcttaattagctacgtacatgttgataatntcctaggttaattagccactgcatgcaggatggcgtatgcgttctccagggacggagcaatgccgttctcgaaagtctggcaccgagtgaacaagcaagaggtgcctataaacgccgtatggctctctgtggtggtggcgttcatcatggctctgacagtgagttaattcgtaccactgctgattaattntcatgcttgattctcagttcagaataaccagaattatgctttattctcatgaacagcgttgggaagccatgtggcattccaagcaat

SEQ ID NO: 40296 - DNA, 481 bp, Oryza sativa
agcttctgagatcaaacaccaagtagttgatatagtacaggaacacataaagcgctactgctccagaggcaaagaaagctttccaccaccaacgccaatcttccgcacaaagatgcatgtaggtaagaacaacagatacctcagcacagaccacaaccagcaagaggaggacaacaaggaggaacccaaacacatagtagaaccttccgagccaaatacttgaaagaataaagaacaactcaatgaatagtgttccaaaaggcagagtcccagcaccaagcacaaggagccaagagtaattttttgcagggatttctcttggtatttgattggttcgaactgagaattctattggctcagcccttgtgccaaagaaaccaccgaggagggtaagtggcacagagatgcataacctacaggacagaagtgtgaaaagagtgagatgggaagagctcctgtactattccttgaccacagcatg

SEQ ID NO: 40297 - DNA, 436 bp, Oryza sativa
tagtgagaagtgaaggggagagagagcgagggtagttctgccacagattacggtaaagtgcctccaactcacgatatggtaaaaaaactaaacaacacaaactctggatggtattaaagtgcaccactaattatcagcgatatactatctctgaagtcaagttcttctgatgccgcgaaaccaattcgttccttatatgccactgtagaattgctatgaaattacccatgttcccactcctttccttcttcaacctcatgggagttgattgcatggtggggtcatccatcagcgagatgttgcgaaggatagcgtcaatttcctgtggctgctacagctgtccagcgagatgtagtcatgtcagagcttgctgatattacaagtgactgcgtggttggatcttaatcaatctactccctccgttctacaatgtaag

SEQ ID NO: 40298 - DNA, 374 bp, Oryza sativa
  unsure (1)..(374): unsure at all n locations
agcttaacactagcaacgggcagaacagtttgtaaaggagatcattggcactatggcgcatgtatgttgagttcttgaagcattgccgatatcgatatatatttctttgcatgggacagtagccttttctgcggcggatcgtttccttttctccaatcataaataacctgatctctntctttgtctttcatcaaataagtacaagaattgcatagatgaggattcggtattgatcgctaaaatgcgagaaaaagacccacgtttctctgttcgtccgctatcagatcaaaacgggtagaagcagcttgttctttcgcgctagtgcgctcaatccgttgcttgttctttcccttggattattatcataatagcgt

SEQ ID NO: 40299 - DNA, 501 bp, Oryza sativa
  unsure (1)..(501): unsure at all n locations
ctaagccctaccaaagatggctaagatatctgttgccgcccgaatctcccataaagccggccggatgaaggcgaccacgtcgtcagcatatagggaaatctgaaatggaatccctaacggtctcaacaattcttcactggggctcagcatatccatcgcgatgatgaagatcattggngaaatagggtcaccttggcgaacacctctcctgtgcacaattgggccgccgggctccccattgattagcacacgcgaggaagcagtacggaaaagcattgcaatccaagaacgccatcgatgtccgaagcctttgtgctctagcacctccaagataaacggccaagagatggtgtcgaatgctttggctatatcaagtttgagcaagaccgaaggaaccttgcgatcgtggaggcgtttagccgattgcctgacaagccatgaagtgtcatgaatgcaacgcttcttcacanaagtgctctgattcttggcgacaacaatcta

SEQ ID NO: 40300 - DNA, 460 bp, Oryza sativa
  unsure (1)..(460): unsure at all n locations
agctttgctctgaatggtgtcttcngtgttgtgttntgtatgtccttattctctggtaatgccttaatatcgcaattattntttaggttctctaattctacttctagtttatttagtctattttctaacactcgtactctactagataaagtcttttcatctgattctaattctatntattttctccatttttgtttatttgtttttatacattcagcacaagccttgtttagacatatactacaagtcactctattttcttgactagggtaatatatgcaaaaagcacatttgatattatagtcaccctttcctctaatccaatcatgttcacaatttaattgatccatcatttcaacccttagaactgctaattcgtcaattaaatctaactcttcatcggatgattcatattcctcggtgataggttcaactttcgctcgttctatgatagaatata

SEQ ID NO: 40301 - DNA, 478 bp, Oryza sativa
  unsure (1)..(478): unsure at all n locations
tcagctttatattaacacatgctgccatctactgtcagttataaagcgttatttctacccagaacaaagacnagcagcctcataattaaaacgtnggttatttattttgtatattattcaccagattattgaaatgtattatttgttccatgcattaaacaaatattttttcaaaaataacaattattatattaattgtatattggttagaacactggtattaagtattgctaattttgtttatcaaaatatttaatatatctctactattatgtagataatccgtagcaataatccactcaataatctctttcaaattgagccgagtcatgtaatatgatcaatatctatggcatattntgtttgatgtcaaacataaccaaaatttgagatggtagaggtacacgatagtgtttttatatgaattttatagaaactaggaaggtagcccgcgcatatgcgcgggtacttatttaat

SEQ ID NO: 40302 - DNA, 445 bp, Oryza sativa
  unsure (1)..(445): unsure at all n locations
tgcttgttgaaacaaagaagcanaagctctttagttntgactagtattgtaatatccttgcgtcaaaaaaagtactgtaatatccaatttatctgaagactttatgtatgtttgaacaatttacatcttcatttaggtaagatttatacttatttgttattttctactacttgtattgaaccatttagagttatataccatattgtttaccacattttatatcgaatcatattgtattgcattcggattnttttttttggctaggcctaccctgngttcaaatcctgcgtccgccactgatcctgtgttcatatgtgcatataattttgtatacgatagatacatattagttgaatnggatttctttataagataatagttcaattggaattaagggcatcaccaatgtatattgtaaaagtgatccatatagatgggacccaca

SEQ ID NO: 40303 - DNA, 451 bp, Oryza sativa
ctgctatcatcccaagccacctctatgggttaccccataagtcaagcctaaaaagcagcatacccatcactaaactaatctaaaacctgaagcaataggttattcaatagcaagagtcagtacattattagaaataatgtactgggcagcacccagacaagcctaagaccctacttgcaacgcatataatcaatgaaggcataatatggttctttttagcataaagcaagttttatttgcataaaacatttctaaatcacggttactttctaataaaatttcagcaagctagtatgtgacatattgcgcatcaaggtaggcattaatcatgtataaatatgcacctcattgccttccatggcagcaaggagatcattctcaaatctcatcacaatctgaatgtagatctcagcatttataagagtaaacacaagtctatactcaatacata

SEQ ID NO: 40304 - DNA, 425 bp, Oryza sativa
gctttgcctttcatatttaacacatgtttgtgcattctcttgctgcctctcctaattatcacatccatatgatccactccaacctcccaacctttctacacagcattattgctacttttgcctgtagtggtacctttacagcatcatccatttaacacatcacatcccccacaacagtatcgaagaagacactgctattaaaaaagaaactcctaactcaaaattatagtaatacatatatatgtcccaaaaatatatatataataacctcgatatagattagactcttcatattactatgaattcgaataaggctctgtctaaatttattgtactagaatgtctacgtataagagatcttagttgggtgaaacctatactaaatacattaatctcgatagggagcatattcatattcataatat

SEQ ID NO: 40305 - DNA, 419 bp, Oryza sativa
  unsure (1)..(419): unsure at all n locations
tcgcgtactcagacctgacaggtacttaatgttactgactacggacacttggatgtacgcttctctcacgcctcgtcgntagccggcggcaggacatccggtagcggcgtggttgtaggcggtctcggagcagcctgaagcggtcgagggcgccagcggtgacgagactggatggtctcgcagatgcagatctcgatcatgaagccgtctgggtcctctaagaaaagctggtcgatgggcgagcactccttctcgttgatggtccgcttcatgtactcgatccccatctcgttcagcctctttgcatcatcccatgtcctcgcactgatgcaaaataggttttggcataattaatcgtagtgatgcacacacaccaccgatcgatcgactccagctgtacataatcgtgcagctggaca

SEQ ID NO: 40306 - DNA, 414 bp, Oryza sativa
  unsure (1)..(414): unsure at all n locations
tttttgcgaagataaaaaatcatatccatttggccacgtgcaaactatacttaaccttactntgccgatctttacgaggagtcggcattaaatagagcaaacaaaagcttatttttgttaggtcatgatcactccgcaacatacatatcatgatcaccctcatcatcactatcactagcttcaggataatcaatcaaattaacattaggctctaaccaaatttttgctatccttaacccggctttcctgagccagagccttttgcatgagttgactaacataaaaaaattgttggcaatctaatctttctttaataggagcaatttaacccattaaagcaagatcagccaaatctctatcangtatattcaagctataacatcgcgttctaacatcgctaaatctcttaacata

SEQ ID NO: 40307 - DNA, 445 bp, Oryza sativa
gcttgttccttggtcgcaaacattctatgcatgcgctctgtatttgttagataccacaccacctttgctgggcctcctctctttgacttacttccttcaccttcactctctgctcgtatgtatcttgatgccccacagataaggcagacatccaagtcagcgtattcctttgaatacaaaatgcaatcgttcggacatgcatgaattcttctgacctccaagcccaacggacataatacttgcttcgcttcatatgacgtctaggtaaattgtcccctctgcaacagatcctttacagctaaggagtctgtaaactcttgtcgacaccattactaccttaagcttatgagttcacacgctgacactgctggctcgactgctcatatacacggcattgcaatctcacacttacaactctataacttgtcgtgctctggtttcatgc

SEQ ID NO: 40308 - DNA, 357 bp, Oryza sativa
  unsure (1)..(357): unsure at all n locations
agcttacgctattatgattcggacccataataatatcaattttttatgnagcataccgactaatctattatatagaacaggccattaagcctcatacaaatgtatacctatactaatcgggcatttcctacgagctgttacgataactagagaattctgaccgctggttaaataagtgatgtaatctaacccgtagagcttgacgtgatatgcctttattagacttaattctgtaggcttggattaatctctgcgatgagttaggtttgtgggctgggttgaatcacaacccacgtaactatataagcacagttacatggatgtgacgggccttatgttcaaccggatatgaacgag

SEQ ID NO: 40309 - DNA, 312 bp, Oryza sativa
  unsure (1)..(312): unsure at all n locations
cgtagtcgtctcgacgcgtgcacgaantacgacgccgccgtcggccatcttctgtcgcgtcgcgccgccgtatacgacgtcgtctttgggcgccgccaccgctattaggtgcgccgaggtgtggagaagctcggccgctccttcgtttactgcgccgaccaccggagcaccctcgacgtcgtcgacccgagccgacgccgtcttcttcttcgtcgtcggcctgcagcgtgcatctttcggtgtagtggtgatgaaccaacgggtccgcctcgttgtcctttacgcgttgatgcccttcaaccccggcgtcga

SEQ ID NO: 40310 - DNA, 450 bp, Oryza sativa
  unsure (1)..(450): unsure at all n locations
atccctagnngaccgaggtagagaggatgcggcatggtcttttatatattaattaggaatagctcgctagattccttttatctttatgaaagagtgtctaatgtccgacaggacttatatatcctttatcttagagaattctttttgtcgacaggacttgtatcaacccatggttataaatatgtacacccggggtctatgtaatctatctctacgatcaatacaattcggctcatcgccacccttattacttctacttttgtgttttacagttcggcggaacttggcacccgacgcggngctgcatcgtcttcgatctccggcgaagggataagtccaatgatccgtcggcccatgcaattgtctcatctacgtcggcgccggtcaacgctgcatcagtatattcgacctctaggattgctctggatcgaatgatataattgtctacct

SEQ ID NO: 40311 - DNA, 278 bp, Oryza sativa
  unsure (1)..(278): unsure at all n locations
aggagacgtcatattcacagatgatgtgagcttccaggtcttcatggaccatctcatgcggctagcagtccaataggatatgaataattttgtacgatcagtaatttcttctgctgtgcagtaaggaacatcttccactttctaaacctgtttttactacnttttagccactaaattgcctcatggtagtgctacacgtttgtgctttttttcttcttgcatatatgagaatttcatttaaaaaaggtctttaattagaaataataaatacaggtaaa

SEQ ID NO: 40312 - DNA, 458 bp, Oryza sativa
  unsure (1)..(458): unsure at all n locations
agctgtgctcggcttccttgcattgcgcatggatgttctttatgccgtgtatcgtccactgcttgtgaatttccaggtaatctggtccggttctccagtgtctaagtgaatattccggaccgctttccatanggcgactagttgttcgacgaggtgtactgtaatatgagagtgggattccaagccagatcttgaacccaggcgtcgtcctcctttccatttcgatcattttgcaatgttaaaactgaactttttcaaacattttgtcatggttagcagtttagcactaagtatgcctctacttgttcaggttggcaacccttgccttgacgagttcaagaacctgaaggggcaaattgactacttgtggagtcatggggtgatatcagatgaggtgctggcaacatcaccaaaactgcgggtcatccgtcgacggaaagctgctctgatgctatgac
